United States Patent Application Publication US 2025/0222082 A1 - sequence listing, part 5

SEQ ID NO: 18047 - DNA, 201 bp, unidentified
  source 1..201: mol_type = unassigned DNA; note = methanogen bacteria
gtttcaaactcaaccagttttgaagttcctaaagtttcagattatccaattgacataactgaaaaagacggtaaattagttatcactgttcctgatgatgctactggtagtgtgactgtatccattgacggtaagcctcaaactgttccggtttcaggtggtaaggctgttgtggatatttccggtttggaacctggtaaa

SEQ ID NO: 18048 - DNA, 123 bp, unidentified
  source 1..123: mol_type = unassigned DNA; note = methanogen bacteria
tgcgtcggctctcccacttcgcttggcccgggggaggccatttcggcgctcttctccgcaatagggaagggcggaaagcacctcacctacgaggagatgctggtctataacagccgcctgccg

SEQ ID NO: 18049 - DNA, 51 bp, unidentified
  source 1..51: mol_type = unassigned DNA; note = methanogen bacteria
atcctcacagacttcacgttcttcgggctgtttgcggccgacagcatctac

SEQ ID NO: 18050 - DNA, 87 bp, unidentified
  source 1..87: mol_type = unassigned DNA; note = methanogen bacteria
tccctgatgatgatcgatgcggggactaaggcctccagcgccctctcctggctctacgggtcattcgcatcgatcacctgggacaag

SEQ ID NO: 18051 - DNA, 33 bp, unidentified
  source 1..33: mol_type = unassigned DNA; note = methanogen bacteria
ttcagcgacatcctcgatacgccggtcatttgg

SEQ ID NO: 18052 - DNA, 186 bp, unidentified
  source 1..186: mol_type = unassigned DNA; note = methanogen bacteria
cagaagctcgatgcgctcaaggccgagatcaagcccctcagggacgatgctaggatcggaagacttgacgaagagggacaggccctcctctcccagaaggagaaggagctcagcgaggcgaagagggagttcaaggcctactggaagggacgccgcgaagagcgttacaagatgctcggcatccag

SEQ ID NO: 18053 - DNA, 168 bp, unidentified
  source 1..168: mol_type = unassigned DNA; note = methanogen bacteria
gatgcttctggtaatgtaaacggtacttttattaataacgtcgcaaatcagggcggtgccatcgctgttggtgatgagggtaagatttctggtaatgtaaatggtatctttattaataacactggatatcattctggaggtgctatctctattgacgatacagtgcgt

SEQ ID NO: 18054 - DNA, 102 bp, unidentified
  source 1..102: mol_type = unassigned DNA; note = methanogen bacteria
gtggctgataattctggtgttgtcagtgtggatgaagatggtactgtcaaagcattaaaagaaggtaaagccaatattaccgttaaagttggcgatgctaag

SEQ ID NO: 18055 - DNA, 33 bp, unidentified
  source 1..33: mol_type = unassigned DNA; note = methanogen bacteria
gccgtcctgctcgacacgcctgtcatctggctg

SEQ ID NO: 18056 - DNA, 189 bp, unidentified
  source 1..189: mol_type = unassigned DNA; note = methanogen bacteria
gagcagaagctcgatgccctcaaggccgagatcaagcccctcagggacgacaacaggatcggaaggctcgacgaggcgggacaggccctcctcgcccagaaggagaaggagctcagcgaggcgaagagggagttcaaggcctactggaagggacgccgcgaagagcgttacaagatgcttggcatccag

SEQ ID NO: 18057 - DNA, 39 bp, unidentified
  source 1..39: mol_type = unassigned DNA; note = methanogen bacteria
ataaatgcttcaagtcaacttcaatactttggacaaaga

SEQ ID NO: 18058 - DNA, 51 bp, unidentified
  source 1..51: mol_type = unassigned DNA; note = methanogen bacteria
attgctcaattttctaagtcattagaaacattacaaacacaatttaaaaaa

SEQ ID NO: 18059 - DNA, 111 bp, unidentified
  source 1..111: mol_type = unassigned DNA; note = methanogen bacteria
ggtaaagctttcggatggtgggataatgttggtgaaatgctaggtgcaatatgggctggaataaataggttatggtctgcttttattaatcatcctgacgttcaagctgcg

SEQ ID NO: 18060 - DNA, 30 bp, unidentified; identical to SEQ ID NO: 18044
  source 1..30: mol_type = unassigned DNA; note = methanogen bacteria

SEQ ID NO: 18061 - DNA, 54 bp, unidentified
  source 1..54: mol_type = unassigned DNA; note = methanogen bacteria
actggtcagatggatctacaaactgcattgataaccatatggagcttgattaaa

SEQ ID NO: 18062 - DNA, 33 bp, unidentified
  source 1..33: mol_type = unassigned DNA; note = methanogen bacteria
ttcgacggcatcctcgacacgccggtcatctgg

SEQ ID NO: 18063 - DNA, 195 bp, unidentified
  source 1..195: mol_type = unassigned DNA; note = methanogen bacteria
gagagggagcagaagctcgatgccctcaaggccgagatcaagcccctcaaggatgacgcgaggatcggaaggctcgatgaggagggcaaggccctcctcgcccagaaggagcaggagctccgcgaggcccagaaggagttcaaggcctactggaagggacgccgcgaagagcgctacaagatgctcggcatccag

SEQ ID NO: 18064 - DNA, 72 bp, unidentified
  source 1..72: mol_type = unassigned DNA; note = methanogen bacteria
gcagtatatatgtatcattctattactgtttcaaattcaaaatttaagaagaattctgtcgagcggtctggt

SEQ ID NO: 18065 - DNA, 51 bp, unidentified
  source 1..51: mol_type = unassigned DNA; note = methanogen bacteria
gatgaagctcatattcatggctgtttatttgagtcaaataaggctgatggg

SEQ ID NO: 18066 - DNA, 33 bp, unidentified
  source 1..33: mol_type = unassigned DNA; note = methanogen bacteria
aaagctgatgattattctggcggtgcaatacgg

SEQ ID NO: 18067 - DNA, 57 bp, unidentified
  source 1..57: mol_type = unassigned DNA; note = methanogen bacteria
atctatgcagatgacaatgtatatgttactcactgtctgtttgaagataataaagcg

SEQ ID NO: 18068 - DNA, 66 bp, unidentified
  source 1..66: mol_type = unassigned DNA; note = methanogen bacteria
tgtacatttagaaataattatgctgaaaatgagggtggtgcgatttattcagatactttaatttta

SEQ ID NO: 18069 - DNA, 117 bp, unidentified
  source 1..117: mol_type = unassigned DNA; note = methanogen bacteria
ggaaattatgatatagaaatcaatgtttacggcataaatacaacttttatggaaatagttcccagtataatatcacatttaaggataaaaacggtaaaaatttacaaagtggtgttt

SEQ ID NO: 18070 - DNA, 156 bp, unidentified
  source 1..156: mol_type = unassigned DNA; note = methanogen bacteria
gataattatacattctttagatacaattttgagactggtgaagtaactgaaacccttcctagctattataatctagttgattatggttttgtaagtacagttaaatctcaaagcaatggtggaaattgctgggcatttgctacagttggaagtctt

SEQ ID NO: 18071 - DNA, 33 bp, unidentified
  source 1..33: mol_type = unassigned DNA; note = methanogen bacteria
atttatggatgcaatatgatgacggaaggtgga

SEQ ID NO: 18072 - DNA, 240 bp, unidentified
  source 1..240: mol_type = unassigned DNA; note = methanogen bacteria
atggagaacccatatgaagaatccactgtatggctcttcataaatggaactgctgaccctgaacaaatctctattttaagcacttcaaaaataagattcaagttatatgcttataatgaggacacaggagaaataactgaattcgatgatcaaatgcatccggtcaatctaagattgatttcaatcaatgaaatcctcagcaacaatactgtaggcttaggagacaatatcacatattct

SEQ ID NO: 18073 - DNA, 63 bp, unidentified
  source 1..63: mol_type = unassigned DNA; note = methanogen bacteria
cttactaatttctttaatactatatctcaaaacaaaaatgcaatggataatctaagaaacctt

SEQ ID NO: 18074 - DNA, 60 bp, unidentified
  source 1..60: mol_type = unassigned DNA; note = methanogen bacteria
actactatcgaagatgtctgcaaaacatgtaaagaaaaactaggtgacttgggaaaagaa

SEQ ID NO: 18075 - DNA, 78 bp, unidentified
  source 1..78: mol_type = unassigned DNA; note = methanogen bacteria
ggtgatgctttaaaatgggttagcgatcaaggtgaaaaaataatgaagtggttaaatgataaccctgatgtattatat

SEQ ID NO: 18076 - DNA, 81 bp, unidentified
  source 1..81: mol_type = unassigned DNA; note = methanogen bacteria
tctgattctttaaaaggtgaaagtgtttctaaatcttttgaaattaaagaaattgaggatttaataagtgatgatcaatct

SEQ ID NO: 18077 - DNA, 249 bp, unidentified
  source 1..249: mol_type = unassigned DNA; note = methanogen bacteria
ttcgcgtacggggtctccgccggcgacaattatgccctgtccggcggatccagtgcatccagtcaccttcgcatcgtaaccgagatacttgcaggaacctacgaccctgccaaccaggcaaccatcaacttcccgtacggttccggaagcatctccggccccctgttcgactacctcatggcagccatcgcctacgtcgtgaccctctgcggggtcagccaggccacggcggccgcaggtaccctcgcc

SEQ ID NO: 18078 - DNA, 33 bp, unidentified; identical to SEQ ID NO: 17867
  source 1..33: mol_type = unassigned DNA; note = methanogen bacteria

SEQ ID NO: 18079 - DNA, 36 bp, unidentified; identical to SEQ ID NO: 17868
  source 1..36: mol_type = unassigned DNA; note = methanogen bacteria

SEQ ID NO: 18080 - DNA, 108 bp, unidentified; identical to SEQ ID NO: 17869
  source 1..108: mol_type = unassigned DNA; note = methanogen bacteria

SEQ ID NO: 18081 - DNA, 96 bp, unidentified
  source 1..96: mol_type = unassigned DNA; note = methanogen bacteria
tcagtagaaaccatgaaaaatgttgtcagtgacttatctgaaaccaccggaagagccggtagtcaaatcagagaatcatttatcaaagcaacagca

SEQ ID NO: 18082 - DNA, 132 bp, unidentified
  source 1..132: mol_type = unassigned DNA; note = methanogen bacteria
gatagtttccaaaaaatgatggaaggtgccggcgctcaagcaacattattcggtaccgatattcaaagcatgggtgataaattcagtggactagctatgaaagatactttaatgcaaaaaacattagccgaa

SEQ ID NO: 18083 - DNA, 297 bp, unidentified
  source 1..297: mol_type = unassigned DNA; note = methanogen bacteria
actgctgacgaagtcaaagcaaaatggaaagaattagatacgaatcaaagagctgcaatattaggtactgctgcaagtatgaatgaaggtaaaaatgcaaatgataattataaaacatcatgggcaggattacaagagcaaatgaatgttgctaaaggaagacttgaaagaatagctggtgaggtattattaccagtattagttccagcaatgcaaatagctactgacatattgcaaggtttaggtgatgtgatttcaggtgtaatgagtggaccattagggggttttgtttccata

SEQ ID NO: 18084 - DNA, 150 bp, unidentified
  source 1..150: mol_type = unassigned DNA; note = methanogen bacteria
ggtaaggccttcggttggtggacagatgtaggttccatgattgatgcaattggagcaggtttgcaaagaatgtgggatgcattcattaaccatcctgacgttcaagcagctataagcatggtttcaaatgcattatctactctttggagt

SEQ ID NO: 18085 - DNA, 66 bp, unidentified
  source 1..66: mol_type = unassigned DNA; note = methanogen bacteria
ggtgtactgactgggcagatggatattcaaactgcaatattaagtatttggactagtttatctgcg

SEQ ID NO: 18086 - DNA, 147 bp, unidentified
  source 1..147: mol_type = unassigned DNA; note = methanogen bacteria
gaagaaaaccacatattatttatgaatgtgactgacggacaatcaataatcacagacgtattaacccctggtgactacacagtcgatataacatacctaggagatgtcaactacaacaaaaacgcaaccaccgaaacattcactata

SEQ ID NO: 18087 - DNA, 75 bp, unidentified
  source 1..75: mol_type = unassigned DNA; note = methanogen bacteria
atcaaaaaggatactgcaatctcatcaacagcaacagtcaaaaacggtacagtaacaatcacaacaaatgtcgat

SEQ ID NO: 18088 - DNA, 57 bp, unidentified
  source 1..57: mol_type = unassigned DNA; note = methanogen bacteria
caaacattcatcgtgcctgtagataacggaagagctgttttcacatatgacttcaac

SEQ ID NO: 18089 - DNA, 222 bp, unidentified
  source 1..222: mol_type = unassigned DNA; note = methanogen bacteria
ataattatgatttcatcatctgactgtactgcaatttctgcagattatttgagtgattctaaattgaaatcaaacaatattaatattatatccaacggaacttcattaggatttgatttatctaactcattggatggtgttgaactgtccggcaatgaaataataattcatgcggataaaaacgcatatttaatcaaattatccaacgttaataattcaaca

SEQ ID NO: 18090 - DNA, 231 bp, unidentified
  source 1..231: mol_type = unassigned DNA; note = methanogen bacteria
ggagatgtagattccgccagttttactatattaaaaaccaccccaactataaatgtcaataccgtcaatgtcaattatcccaatgacattacagttaatattatttccaatatagacggcacatatattgttaaaatcgcaaataaaacacaaaatgttaatttaaaaacaaatactcccaaacaagtcagattcacagatttaaatgctggcaattataatgtaagtgta

SEQ ID NO: 18091 - DNA, 252 bp, unidentified
  source 1..252: mol_type = unassigned DNA; note = methanogen bacteria
aatgccgttttaaaaaatacaccagtaaatattctaaaagcatcatctaaagtttcaattaatactattggcaatcatgaatatggcaagggctttgatgttaatttccatgtcgttaatcatactagtgtgagttatattattaaatcaaaaaacggtaacgttgtagttaatgccactgcagatagtttaaataaaatcagcattcctgttttagatgccggcgaatatattgtcacagttttcaattgt

SEQ ID NO: 18092 - DNA, 240 bp, unidentified
  source 1..240: mol_type = unassigned DNA; note = methanogen bacteria
actggtgatgaggcatctgttaatttcacaattttaaaagttactccaaatattactgttagtgtatccgatgttggttatccaggtaacgtcattatcaatgttaaatctgatgttacaggatcttacactgtaagagttggtaaagtgtctaaaactgttgatttagttgaaaataaacaatctaaggttgtctttaatggtttaaatcctggcagttatgatgtttttgttggttat

SEQ ID NO: 18093 - DNA, 261 bp, unidentified
  source 1..261: mol_type = unassigned DNA; note = methanogen bacteria
attaattacaattctgttttaaaaaatactattgttaaagtgtttaaagctgattcttccgttgttattaatcctatttctaatgtaacctataataatccaacatccattgaatttaatattattaatagaactaaggtcacatatattgttaaaagcatttctggagagattgttgttaaaaatacaacagtttccggtaacagtgcagatatttccaatttggccgttggaaattatattattacaatagccaatgct

SEQ ID NO: 18094 - DNA, 243 bp, unidentified
  source 1..243: mol_type = unassigned DNA; note = methanogen bacteria
aatggatatgagcaatcaaaggaatttacaattagtaaggccactaataatgttgaagttaatgttgttaatactctactgccggacagtgttgctgttaatattaaagctgatgttgatggtgtttataatgtaagttttggtgaattttccgtctgtgttaatgttgagtccggtgagggctttgctaaaattgatttgccaatgggcattgattatataacaactacctcatttgcagat

SEQ ID NO: 18095 - DNA, 30 bp, unidentified
  source 1..30: mol_type = unassigned DNA; note = methanogen bacteria
gaattaattcatagtggtgcgaaagagata

SEQ ID NO: 18096 - DNA, 42 bp, unidentified
  source 1..42: mol_type = unassigned DNA; note = methanogen bacteria
ggaataaatcctctctttgctacaatcggaagcttccagctg

SEQ ID NO: 18097 - DNA, 291 bp, unidentified
  source 1..291: mol_type = unassigned DNA; note = methanogen bacteria
cctgctgctaatattaatggaattccttcagaattaaaaggagattatgttgattccagtggtcttccttatttttctgaaatggattcatattataacttaaggatgacacaggattattttgaccatggttactatggagatgctttggttaataatacgcaaattgataatcatagatattctcctttcggtgctaatactacgaatgatttaggtattgcagtgactactacatggctacatagtttggcccaatttttcggtgattttgatattaaaaccgtggca

SEQ ID NO: 18098 - DNA, 171 bp, unidentified
  source 1..171: mol_type = unassigned DNA; note = methanogen bacteria
gattctttcggtattgttggaattattggtaatgttttaagcggttttgccctacaagctaaaactactttatcaggtttccctaacgtatccatatctattggtgagcttcaaattcctaatttaatttctggcggggtcactggcgctttcttagcagattctggatct

SEQ ID NO: 18099 - DNA, 300 bp, unidentified
  source 1..300: mol_type = unassigned DNA; note = methanogen bacteria
cctgcagctgatctcaatttacttcctaatgaaataaaaggaagttatgttgattctacaggtcttccttattttagtgaaatggattcatattataacttaaggttaactgagaattatgtagatcatggttttgtaggagatataaaatacgataataatggtacgcagatggatatgcataggtatgcccccgacggtaatgtaataaattatgagctgggtattgtatacgtgacgtcgttccttcatgatatggtaaataaatttatcggatctcatggtattagggaagttgca

SEQ ID NO: 18100 - DNA, 171 bp, unidentified
  source 1..171: mol_type = unassigned DNA; note = methanogen bacteria
ggttttgatactacagtaggaatatttggtagtttacttaacttgctttcattgcagtctgctgctagggtagttggtggtttccctaacgtacttatttctgtagcagagatgcagatgccaagtatgcttggttcaggtatggcttccccattcttggcaagtacaaat

SEQ ID NO: 18101 - DNA, 297 bp, unidentified
  source 1..297: mol_type = unassigned DNA; note = methanogen bacteria
cctgcggccgatctcaatatcctccctaatgaaataaaaggggattatgttgattcttcaggtcttccttattttagtgaaatggattcatattataacttaaggttaaccgaggattatgtagatcatggtttcgttggagatatagataatggtgatggtacatatagggatatgcataggtatgctcctgatggtaatataattaattatgaactgggtattgtatatttaacgtcgttcctgcatgatatggccaataaattcttcggatcttataatattcgggaagttgca

SEQ ID NO: 18102 - DNA, 174 bp, unidentified
  source 1..174: mol_type = unassigned DNA; note = methanogen bacteria
ggcgttgacagcgtattaggaatatttaacagtttgcttagtttactttccctgcaatccgctgcaagggttgctggtggttttcctaacgtacttatttctgttgcagagatgcaaatgcctaacttgctcggcgcaggtatgggttcagcatttttagctaatacaaacggt

SEQ ID NO: 18103 - DNA, 45 bp, unidentified
  source 1..45: mol_type = unassigned DNA; note = methanogen bacteria
actccatatgagggaagtttatctattggaatttatggtgatgat

SEQ ID NO: 18104 - DNA, 81 bp, unidentified
  source 1..81: mol_type = unassigned DNA; note = methanogen bacteria
tctagtgatgtgggtgttgttaaagtcgttgatggtaagcttgttgctgttggtgtgggcagtgcggttgttaatgtttct

SEQ ID NO: 18105 - DNA, 135 bp, unidentified
  source 1..135: mol_type = unassigned DNA; note = methanogen bacteria
agtgcagatgacttgaaaatatatgttgatggtgttgctgcgattaatccggttacttcacctggtggtttggatcttctttatagtattgcagataaaaatattgccgatgttgatgctagcggtaaggttata

SEQ ID NO: 18106 - DNA, 33 bp, unidentified
  source 1..33: mol_type = unassigned DNA; note = methanogen bacteria
attaaggaaggcactacatccattaccattaca

SEQ ID NO: 18107 - DNA, 300 bp, unidentified
  source 1..300: mol_type = unassigned DNA; note = methanogen bacteria
gcacctgcccatgatttaaatgcatttaacgatgccgaatcaaaagctctatatactgatccgagcggtcttccctatttcagtgaaatggattcatactatcatttgaggctgacggaatcatatgtagacaccggcattcttggtgatgaagttataaacggtacgcagatggatatgcacaggaacgcccctgatggacgtccatgggattatacgccgggtataatctatctgacatcatatctctatgacctggccaaccagtacctcggacattactccgtcaaggaagtggca

SEQ ID NO: 18108 - DNA, 174 bp, unidentified
  source 1..174: mol_type = unassigned DNA; note = methanogen bacteria
aagggtgtggattccgtaattggaatattcagccaggtgttcaacctgcttagcctgcaatccgcttctcaagtggttggtggattccctaacgtacttatttccgttgcagaaatgcagatgccagcaatgctcggtgccggaatgacctcaatgtttttagcaagcactgac

SEQ ID NO: 18109 - DNA, 33 bp, unidentified
  source 1..33: mol_type = unassigned DNA; note = methanogen bacteria
aatactgcaaaagaagatgggggtgcaatattt

SEQ ID NO: 18110 - DNA, 54 bp, unidentified
  source 1..54: mol_type = unassigned DNA; note = methanogen bacteria
agttctaataaaactacttttaatatatttataaaatctattttggaagttagt

SEQ ID NO: 18111 - DNA, 282 bp, unidentified
  source 1..282: mol_type = unassigned DNA; note = methanogen bacteria
cctgcagccgatttacctggaatctccgatgaattaaaaggagattacatagattcttcaggtcttccttatttcagtgaaatggattcatattataactacaggttgaccaatgactatgtcgaacacggttatgtaggtgatcaaataataaatggtagtgagtgggatatgcataggtacgctcctacgggtaatcagattaattacgaactgggtattgtatatgttacttcgtttttccatgacatgttctcagatcattctgtaaaagaagtggca

SEQ ID NO: 18112 - DNA, 30 bp, unidentified
  source 1..30: mol_type = unassigned DNA; note = methanogen bacteria
tctcacacatatccaggatttttcgataca

SEQ ID NO: 18113 - DNA, 171 bp, unidentified
  source 1..171: mol_type = unassigned DNA; note = methanogen bacteria
ggaattgaaggtgtaaccggaatattcggaagtttaacaggattactttccctgcaatccgcttcaagggttgttggaggattccctaacgtacttgtttccgttgcagagatgcagcttccaagtttacttggtgcaggaatgccttccgcatttttagcaaataccaat

SEQ ID NO: 18114 - DNA, 282 bp, unidentified
  source 1..282: mol_type = unassigned DNA; note = methanogen bacteria
cctgcagccgatttaaatattctatccgatgatatgaagggtgaatatatagattcttcaggtcttccttattttagtgaaatggattcatattataactataggttgaccaacgactatgtagaacacggttttgtaggagatgaaatggtaaatggtagtgagtgggatatgcataggtacgctcctacgggtaacaagattaattacgaactgggtattgtatatattacgtcatttttccatagcctgttcccagatcacactgtaaaagaagttgca

SEQ ID NO: 18115 - DNA, 30 bp, unidentified
  source 1..30: mol_type = unassigned DNA; note = methanogen bacteria
gcgcacacattcccaggatttttcgataca

SEQ ID NO: 18116 - DNA, 174 bp, unidentified
  source 1..174: mol_type = unassigned DNA; note = methanogen bacteria
agaggtatagatggagtaaccggtttattcggtaacttactgggattactttccctgcaatccgcttcaagggctattaacggattcccgaacgttcttgtttctgttgcagagatgcaattaccaagtctgcttggtagcggaatgacttcagcatttttagctagtaccgat

SEQ ID NO: 18117 - DNA, 297 bp, unidentified
  source 1..297: mol_type = unassigned DNA; note = methanogen bacteria
cctgcggccgacctcaatattcttcctaatgaaataaaaggggattatgttgattcctccggtcttccttattttagtgaaatggattcatattataacttaaggttgacggaaaattatgtaaataatggccatgttggagatatagattatggtaatggtacacagatggatatgcataggtatgcgcctgatggtaatgtaatcgattatgagtttggtattgtatatataacgtcatttttacatgatattgctaatcagtactttgggtctcatggcattagggaagttgca

SEQ ID NO: 18118 - DNA, 177 bp, unidentified
  source 1..177: mol_type = unassigned DNA; note = methanogen bacteria
agaggtattgatggcgtattaggaattttcggtaccttgtttggattactttcattgcaatctgccggtacagttgttggtggtttccctaacgtacttatttctgttgcagagatgcaaatgccaaacctgcttggtgctggaatgggttcagcattcttagctaattccaatggt

SEQ ID NO: 18119 - DNA, 291 bp, unidentified
  source 1..291: mol_type = unassigned DNA; note = methanogen bacteria
cctgctgctgatttgactattcttccttcagatgttaaaggggattatgtcgattccacaggtcttccttattttagtgaaatggattcatattataacttaaggttgactgagaattatattgatcacggttatgcaggagatacaataataaataatactgaagttgatatgcacaggctggctccggagggtgttaatgtatcttacgagctgggtatttcgtatgtgacggcacttttacatagtcttgccggtaacttcggtgattacagtgttaaagaagtggca

SEQ ID NO: 18120 - DNA, 174 bp, unidentified
  source 1..174: mol_type = unassigned DNA; note = methanogen bacteria
ggttttgactttttaaccggtattttctccacattgatttccatgttttcactgcaatctgcatcttcagctgttggcggtttccctaacgtaatgatttccgttgcagagatgcaggctccaagtttacttggttcaggaatgggttctgcattcttggctaattcaaatggt

SEQ ID NO: 18121 - DNA, 297 bp, unidentified
  source 1..297: mol_type = unassigned DNA; note = methanogen bacteria
cctgcagccgatcttaacattcttcctaatgaaataaaaggggattatgttgattcttcaggtcttccttattttagtgaaatggattcatattataacttaaggttaactgagaattatgtagatcatggctatgttggagatataaaatatgataatggtacacagatggatatgcatagatatgctcctgatggtaatgtaattaattatgagttgggtattgtatatgtgacgtcgttcatccatgatattgtaaaccaattcttcggacatcatggtattcgggaagttgca

SEQ ID NO: 18122 - DNA, 174 bp, unidentified
  source 1..174: mol_type = unassigned DNA; note = methanogen bacteria
ggtgttgacactgtaataggaatatttggtagtttacttaatttactttcattacaatccactgctagggttgttggtggattccctaacgtacttatttctgttgcagagatgcaaatgccaaacttacttggtgcaggtatgggttcagcatttttagctaattcaaatggt

SEQ ID NO: 18123 - DNA, 282 bp, unidentified
  source 1..282: mol_type = unassigned DNA; note = methanogen bacteria
cctgcagctgatttaaatgcaatccctgatagtgcaagaggggactacgttgattcatctggtcttccttatttcagtgaaatggattcatattataacttaaggctgacagaggattatgtagatcatggctttgtaggagatgaaaagataaatggtagcgagtgggatatgcataggtacgctcctaccggtaatgagattaattacgaattaggaattgtatatgttacttcatttttacacagtatctttggcgatcactctgtaagagaaatagca

SEQ ID NO: 18124 - DNA, 30 bp, unidentified; identical to SEQ ID NO: 18115
  source 1..30: mol_type = unassigned DNA; note = methanogen bacteria

SEQ ID NO: 18125 - DNA, 174 bp, unidentified
  source 1..174: mol_type = unassigned DNA; note = methanogen bacteria
ggtattggcggagtaaccggaatatttggaagtttaactggattgctttcactgcaatctgcttcaagaactattggtggtttccctaacgtacttatttccgttgcagagatgcaaatgccaaacttacttggcggaggaatggctgctccattcttggcaaacaccaatggt

SEQ ID NO: 18126 - DNA, 33 bp, unidentified
  source 1..33: mol_type = unassigned DNA; note = methanogen bacteria
tacttcaacaccgagaccgagctcgccgacgac

SEQ ID NO: 18127 - DNA, 108 bp, unidentified
  source 1..108: mol_type = unassigned DNA; note = methanogen bacteria
cccgccgtcggcatctcgcccgacggctacgacttcacgaacgcctccgaggccgtcctctccggcaagccgctagattccatagacagcctgctgccggtcgccgtg

SEQ ID NO: 18128 - DNA, 54 bp, unidentified
  source 1..54: mol_type = unassigned DNA; note = methanogen bacteria
ataaccccgctgtgggaggctatctccggatgcaccgacctgctgtcgatcccg

SEQ ID NO: 18129 - DNA, 294 bp, unidentified
  source 1..294: mol_type = unassigned DNA; note = methanogen bacteria
caggctgctgatattggtggagttcctaatcagttaaaagcaaattatatagatgctgatggtcttccttatttcagtgaaatggactcatactttaactataggatgacacaggattatatggatcatggatatcttggtgatactttagtaaatggttctgagtgggatatgcattcttactatccgacagggcgggacgtaagttcgtatcagccgatgattgcttatgtcacttctttcttacacggaatagtaaatatgttccagaatatgcctcttaaggaagttgca

SEQ ID NO: 18130 - DNA, 33 bp, unidentified
  source 1..33: mol_type = unassigned DNA; note = methanogen bacteria
tcacacacattcgcaggatttttcgatacagat

SEQ ID NO: 18131 - DNA, 168 bp, unidentified
  source 1..168: mol_type = unassigned DNA; note = methanogen bacteria
ggcttcgatggtattttaaatgctataggcggtcttaccggtgggttctcccttcaatctgcagcaaatgatgtatggcctaacgtatttatatctgttgcagagatgcaaattcctaaacttttatatggtggacttccaggtgcgttcttagctaacactaatggt

SEQ ID NO: 18132 - DNA, 282 bp, unidentified
  source 1..282: mol_type = unassigned DNA; note = methanogen bacteria
cctgcagctgatttaaatgcaatccctgatagcgcaagaggggattacgttgattcatctggtcttccttatttcagtgaaatggattcatattataacttaaggctgacagaggattatgtagatcatggctttgtaggagatgaaaagataaatggtagcgagtgggatatgcataggtacgctcctaccggtaatgagattaattacgaattaggaattgtatatgttacttcatttttacacagtatctttggagatcactctgtaagagaaatagca

SEQ ID NO: 18133 - DNA, 30 bp, unidentified; identical to SEQ ID NO: 18115
  source 1..30: mol_type = unassigned DNA; note = methanogen bacteria

SEQ ID NO: 18134 - DNA, 174 bp, unidentified
  source 1..174: mol_type = unassigned DNA; note = methanogen bacteria
ggtattgagggagtaactggaatctttggaagcttaaccggattgctttccctgcaatctgcttcaagaactattggaggattccctaacgtacttatttccgttgcagagatgcaaatgccaagcttacttggtagtggaatgacttctgcattcttagcaaatactaacggt

SEQ ID NO: 18135 - DNA, 297 bp, unidentified
  source 1..297: mol_type = unassigned DNA; note = methanogen bacteria
actcctgcagcggatcttaatttcttagatggcgatatgaaaggtgatttcgtcgattcttctggtcttccttatttcagtgaaatggattcatattataacttaaggttaacagaagattatctggatcatggttttgtaggagatatacaggaaaatggtcataacgttgatatgcataggtatgcccctgatggaaataatatttcttacgagctgggtattgtttatgtgacttcgtttttccatgacatggcgaataaatacataggagagttctctgtaagggaagtagca

SEQ ID NO: 18136 - DNA, 171 bp, unidentified
  source 1..171: mol_type = unassigned DNA; note = methanogen bacteria
ggtattgacggtatattaggaatatttaattcattactttcattactttcattgcaatcagcttcaagaagtattggtggattccctaacgtacttatttctgttggggagatgcaaatgccaaatttacttggttcaggaatgggttcagcatttttagctagtactgat

SEQ ID NO: 18137 - DNA, 30 bp, unidentified
  source 1..30: mol_type = unassigned DNA; note = methanogen bacteria
tcacacacattcgcaggatttttcgataca

SEQ ID NO: 18138 - DNA, 174 bp, unidentified
  source 1..174: mol_type = unassigned DNA; note = methanogen bacteria
aaaggagtcgatggagtattaggaatatttggaaatttaactggattattaagcttgcaatctgcatctagggttgtaggtggattccctaacgtacttgtttctgttgcagagatgcaacaaccatccatgcttggtgctggaatgaattcaatgttcttagctagtaccaat

SEQ ID NO: 18139 - DNA, 297 bp, unidentified
  source 1..297: mol_type = unassigned DNA; note = methanogen bacteria
cctgcggctgatttgccaatgcttggtgatgatatcaaagcgaattatgttgattcatctggtatgccttatttcagtgaaatggattcatattataacttaaggctgacagagaattatattgatcatggccatgtgggggatgaaatagtaaataatagtgcatgggatatgcacaggtatgcgccagacggcaataaaattaattatgaactgggtatcgtgtatcttacggattggatgcataacatggcgaacagtttcttcggcggagaccattcagtcagagaagtagca

SEQ ID NO: 18140 - DNA, 30 bp, unidentified
  source 1..30: mol_type = unassigned DNA; note = methanogen bacteria
gcgcacacattccctgggttcttcgataca

SEQ ID NO: 18141 - DNA, 171 bp, unidentified
  source 1..171: mol_type = unassigned DNA; note = methanogen bacteria
ggtgttgatggagtagttggaatatttggaagtttaactggattattaagcttgcaatctgcatctacagttgtaggtggtttccctaacgttcttatttctgttgcagagatgcaaatacctaacatggtgggtgccggaatgaatgcaatgttcttggccaatactaac

SEQ ID NO: 18142 - DNA, 51 bp, unidentified
  source 1..51: mol_type = unassigned DNA; note = methanogen bacteria
gaggtttcttttgatgaagcgggtaattatagtgttgttgttttgtttgat

SEQ ID NO: 18143 - DNA, 162 bp, unidentified
  source 1..162: mol_type = unassigned DNA; note = methanogen bacteria
tattattcttctagtaaaacggttaatgttgaggttgttgataaggttcttaatactactgttgtagtggatgatgtggtttgtgttgtggatgagtttgttgttttgaatgctagtgtttttgatgagaatggtgatttggtaagtaatggtaatgttact

SEQ ID NO: 18144 - DNA, 30 bp, unidentified
  source 1..30: mol_type = unassigned DNA; note = methanogen bacteria
gctggtaattataatgttgttgcttcattt

SEQ ID NO: 18145 - DNA, 51 bp, unidentified
  source 1..51: mol_type = unassigned DNA; note = methanogen bacteria
agaactgcctatatagtaattaataaattaaaattaagctctaatattaca

SEQ ID NO: 18146 - DNA, 174 bp, unidentified
  source 1..174: mol_type = unassigned DNA; note = methanogen bacteria
gatgaaataaatattatttcaaatgtcatttctgataatttaacagttaatgacggtgttgctgtattcttaataaataaaacaaaaagatatgtagttaatatttctgataatcaggctattttggatgttattttcaatcaatccggaaattatattgttgatgttagtttt

SEQ ID NO: 18147 - DNA, 69 bp, unidentified
  source 1..69: mol_type = unassigned DNA; note = methanogen bacteria
tgttctgttatagtaaatgttttcgataaattttctagaattagcatatctgatttgaaagcttatgtt

SEQ ID NO: 18148 - DNA, 111 bp, unidentified
  source 1..111: mol_type = unassigned DNA; note = methanogen bacteria
atttctgtgcttgtatttgatgcaaagggcaatatgatagacacgggtattttaaatattattataaatgataaaatttacagtattgatttatctaaagattatcctctt

SEQ ID NO: 18149 - DNA, 123 bp, unidentified
  source 1..123: mol_type = unassigned DNA; note = methanogen bacteria
agttcagtcatagaagtttgtaaaaaggatttggaagtcaatttcaaaattgatgatatttattacggtgaggatttaacaattaatgtccagtcaaatgatgatgctgatgttgaaataata

SEQ ID NO: 18150 - DNA, 36 bp, unidentified
  source 1..36: mol_type = unassigned DNA; note = methanogen bacteria
aatgcaggaaaatatgaatccatattgtatttcaat

SEQ ID NO: 18151 - DNA, 213 bp, unidentified
  source 1..213: mol_type = unassigned DNA; note = methanogen bacteria
aaaaccgctaatttcaatgttaataaaagacaattaagcgctgaatttaaagttgaaaataagacatttttcatatatttatcacaatcaattaatgatacactgcttgttaaaataaacaatcaagattatgttatttatttaacaaatggtgaagctaagttaactctggataattttgatgttggaagttatttggctgttgttaattat

SEQ ID NO: 18152 - DNA, 69 bp, unidentified
  source 1..69: mol_type = unassigned DNA; note = methanogen bacteria
gaaaattattcatttgaaatacctaaaataaagactaaaattttagtaaataatttggttaaatattat

SEQ ID NO: 18153 - DNA, 177 bp, unidentified
  source 1..177: mol_type = unassigned DNA; note = methanogen bacteria
gaattaaccctgattgatgaaaacggtaattatttagcaaataaatctgtgataatttcaatatctggtgttaattatactagaattactgatgaaaaaggtaaagcatcaattggaatcaatttaaattcaggtacatatgctccagtggtgtattttgaaggtgatggggaattt

SEQ ID NO: 18154 - DNA, 216 bp, unidentified
  source 1..216: mol_type = unassigned DNA; note = methanogen bacteria
tccagtaaaaattccagtatggtaattgtaaaatcaactatagaagcaaataatttagttaaatgttatagaaatgcttcacaattttatgcaacaatactggattataatggaaatattgttaaaaatcaggttatatcttttaatattaatggagtattttataatagaacaactaatgaaaatggtgtagttaaattaaacattaatttatct

SEQ ID NO: 18155 - DNA, 114 bp, unidentified
  source 1..114: mol_type = unassigned DNA; note = methanogen bacteria
ggtgagtatattatcacaactctaaatttagttactggtgagagtgcatctaataatattacggttctttcattaattgttgaaaataaaaatcttgtgaaatattatagaaat

SEQ ID NO: 18156 - DNA, 117 bp, unidentified
  source 1..117: mol_type = unassigned DNA; note = methanogen bacteria
caatattgcgttaaaatattggatgatcagggcaatcccgttggtgcgggtgtaactgtcagattcaatattaatggggtattttatgaaagacaaaccaatgaatcaggaattgtt

SEQ ID NO: 18157 - DNA, 174 bp, unidentified
  source 1..174: mol_type = unassigned DNA; note = methanogen bacteria
gaatatatcataactgctgaatataaaggatgctgtgtttcaaatgagattacaataaaacctatattgactgcaaatgatttaacaaaaagatatggtgattctgatcagttcgttgcaacattggttgatggacagggaaaagcttatgctggtcaatatgtggaatttaac

SEQ ID NO: 18158 - DNA, 60 bp, unidentified
  source 1..60: mol_type = unassigned DNA; note = methanogen bacteria
aatggagtgttttataaaagattaactgatgataatggtcaggctaaattaaatattaga

SEQ ID NO: 18159 - DNA, 48 bp, unidentified
  source 1..48: mol_type = unassigned DNA; note = methanogen bacteria
acatcttcatttggtggattttctacatctaacgcggttaaaatagta

SEQ ID NO: 18160 - DNA, 93 bp, unidentified
  source 1..93: mol_type = unassigned DNA; note = methanogen bacteria
gatcttttttctgatataggtaacacttccgaaagcgtaacagaggatgatattcaacaaatgcagagcgtagtaaaaagtgcaatgaataaa

SEQ ID NO: 18161 - DNA, 54 bp, unidentified
  source 1..54: mol_type = unassigned DNA; note = methanogen bacteria
actttaataagaaaagacttaaatagcaataccggaaaagatttcacaggggct

SEQ ID NO: 18162 - DNA, 48 bp, unidentified
  source 1..48: mol_type = unassigned DNA; note = methanogen bacteria
atgaatgctttgaattcaaaatatgaaacaattaggtatgatgatggt

SEQ ID NO: 18163 - DNA, 294 bp, unidentified
  source 1..294: mol_type = unassigned DNA; note = methanogen bacteria
caagccgctgatattggtggagttccaaatgaaattaaagcaaattatatggatgctgatggtcttccttatttcagtgaaatggactcatactttaacttaaggatgactcaagattatatggatcatggatattttggtgatactttagtaaatggttctggttgggatatgcattcctactatccatcaggaagggacgttgggtcctatcagccgatgattgcatatgtcacatcattcttatatggaatagtgaacatgttccatgacatgtcccttaaggaagttgca

SEQ ID NO: 18164 - DNA, 30 bp, unidentified
  source 1..30: mol_type = unassigned DNA; note = methanogen bacteria
tcacacacatttgcaggatttttcgataca

SEQ ID NO: 18165 - DNA, 168 bp, unidentified
  source 1..168: mol_type = unassigned DNA; note = methanogen bacteria
ggaataggtggtatattagatgctatcaacggtcttactggcggtttctcacttttatctgcatcacgtgatgtatggcctaacgtatttgtttctgttgcagagatgcaaaagccaaatattttagctggtggtcttcctggagcatttttagctaacaccaatggt

SEQ ID NO: 18166 - DNA, 36 bp, unidentified
  source 1..36: mol_type = unassigned DNA; note = methanogen bacteria
ttaaaaaatggcggtgcaaatgtaaagaccaaggca

SEQ ID NO: 18167 - DNA, 33 bp, unidentified
  source 1..33: mol_type = unassigned DNA; note = methanogen bacteria
ctgcagacaatattcaagacatgttcaattgga

SEQ ID NO: 18168 - DNA, 297 bp, unidentified
  source 1..297: mol_type = unassigned DNA; note = methanogen bacteria
cctgctgctgatttgcctagtatgggcgatgatattaaagcaagctatgttgattcatccggtcttccttatttcagtgaaatggattcatattataacttaaggttgacagagaattttgcaaatcatggtcatgtgggagataaaataataaatggtagtgcatgggatatgcacaggtatgctcctgatggagatgagattaattatgagttgggtatcgtatatattacgaactggttgcacgatgtaggaaacagcttctttggtgctaatcattcacttagggaagttgca

SEQ ID NO: 18169 - DNA, 33 bp, unidentified
  source 1..33: mol_type = unassigned DNA; note = methanogen bacteria
tcacacacattccctggatttttcgatacagat

SEQ ID NO: 18170 - DNA, 171 bp, unidentified
  source 1..171: mol_type = unassigned DNA; note = methanogen bacteria
ggatttaatggcgtattcggaatattcggaagtttaacaggtttattaagcttgcaatccgcatctagggttgttggtggtttccctaatgtacttatttctgttgcagagatgcaaataccttccatgctcggtggcggaatgaattcaatgtttttagctaataccaat

SEQ ID NO: 18171 - DNA, 294 bp, unidentified
  source 1..294: mol_type = unassigned DNA; note = methanogen bacteria
caagctgcagatattcatggaattcctaatgaaatcaaagcagattatgtagatgccaacggtcttccttacttcagtgaaatggactcatatttcaacttgaggatgactcaggattatatggatcatggttatttcggtgatactcttgtaaatggttccggttgggacatgcactcttattatccaacgggaagggaagtaggtaactaccagcctatgattgcatatgtgacttcagcattatacggctttataaacatgttcaaggaaatgtcccttactgaagtggca

SEQ ID NO: 18172 - DNA, 30 bp, unidentified
  source 1..30: mol_type = unassigned DNA; note = methanogen bacteria
tcacacacatatgcaggatttttcgataca

SEQ ID NO: 18173 - DNA, 171 bp, unidentified
  source 1..171: mol_type = unassigned DNA; note = methanogen bacteria
ggagtaggtggaataatgaatgctatcggtggacttaccggaggtctttcccttcaatctgcctctactgttaatgtatggcctaatgtacttgtttccgttgcagagatgcagattccaactgttttatcaggaggattggcaggagcatttttagccagtacaaatggt

SEQ ID NO: 18174 - DNA, 117 bp, unidentified
  source 1..117: mol_type = unassigned DNA; note = methanogen bacteria
gtcggctctcccacttcgcttggcccgggggaggccatttcggcgctcttctccgcaatagggaagggcggaaagcacctcacctacgaggagatgctggtctataacagccgcctg

SEQ ID NO: 18175 - DNA, 42 bp, unidentified
  source 1..42: mol_type = unassigned DNA; note = methanogen bacteria
ggaataaatcctctctttgcaacaatcggaagcttccagctg

SEQ ID NO: 18176 - DNA, 183 bp, unidentified
  source 1..183: mol_type = unassigned DNA; note = methanogen bacteria
attattgataataatctggttgttgatgcaaaagttttcaatcaatacggatatcttgtacctggtggaaatgtattattccatgttgatggtgtggattataatgttgtagttaaaaatggaatagctaaattatctttacctattaataaaaataattttgaaatttctgcagaatatacc

SEQ ID NO: 18177 - DNA, 42 bp, unidentified
  source 1..42: mol_type = unassigned DNA; note = methanogen bacteria
aatttatcaactgttcaaactacatttgatcttccattttct

SEQ ID NO: 18178 - DNA, 162 bp, unidentified
  source 1..162: mol_type = unassigned DNA; note = methanogen bacteria
cttacattgatttatgatactaatttaaatccggttaatttcaccgcattagtaattaatcagtatggatatggagtttctgttggtaatgttacatttactattcaaaataaaaattatacagttaacattaaagatggtaaagcttcaattttacaccag

SEQ ID NO: 18179 - DNA, 177 bp, unidentified
  source 1..177: mol_type = unassigned DNA; note = methanogen bacteria
ggtcagcttttaaaaaagtcaatggttaaatttaaattcatgaaaaaaacatataaggttaaaaccaataaaaaaggaaaagcagttttaaaaataaaaaataaatttaaatctggtaaatatccaatttatactaaatcaggtagtttaaaagttaaaaacattattaaaattaaa

SEQ ID NO: 18180 - DNA, 294 bp, unidentified
  source 1..294: mol_type = unassigned DNA; note = methanogen bacteria
gctgaaacttataatataagtgcagttccaaatgatatgcaagatttttacagagatgcctcaggactcccatatttcagtgaaatggactcttattataactacagattgacaaataattacgtagaaaaaggaattttgggagattctgttgtaaatggaacaaactgggatgaacattcttattatccaaatggaagagttgtagattatcctccattaataacatacgtaacaaccatattctatcaaatagcaaatatgtttaaagatatacctcttaaaaatgttgct

SEQ ID NO: 18181 - DNA, 174 bp, unidentified
  source 1..174: mol_type = unassigned DNA; note = methanogen bacteria
ggtgttggatctatttcagaaaccattattaattttattggtgtaaatgatgtgcaatcattagctcaaactgcgggttcattccctaatgtatatatttcagtttcagagatgcaaatacctgatttcatcacaagcggagtgtctgcattaatagccaatcaaggatcactt

SEQ ID NO: 18182 - DNA, 300 bp, unidentified
  source 1..300: mol_type = unassigned DNA; note = methanogen bacteria
actcctgcagctgatttaaatagcttagatgctgacggtaaagcattatataccgacgcatcaggtcttccttatttcagtgaaatggattcatactataactacaggttgaccaacgattatgtagatcacggctatgtgggagatgaaatggtaaacggcagcgaatgggatatgcacaggtatgccccggacggtaataagattaattacgagctgggtatcgtatacctgacgtcatggatgcatgacatggctaacaatttccttggatggcacatgtcagttaaggaagtagca

SEQ ID NO: 18183 - DNA, 171 bp, unidentified
  source 1..171: mol_type = unassigned DNA; note = methanogen bacteria
ggcgttgatggggtacttggaatatttagtcaagtattcggactgctcaacttgcaatccgcatccgttgttgtaggtggattcccgaacgtacttatttccgttgcagagatgcaaatgccaagcatgcttggtgcaggaatgacatcaatgtttttagcaagtacagac

SEQ ID NO: 18184 - DNA, 297 bp, unidentified
  source 1..297: mol_type = unassigned DNA; note = methanogen bacteria
cctgcagctgatttgaatatgctcgatgacagcatcaagtcagagtatgttgactcatctggtcttccttatttcagtgaaatggattcatactataactataggctgaccaatgattatgtcgaacatggatttgtgggagatgaaatggtaaatggtagtgaatgggatatgcataggctagctccgacaggaaaccagattaattatgagctaggtattgtatggctgacttcctggttgcatgacgttgcaaacagtttccttggaggaaattattcagttaaggaagttgca

SEQ ID NO: 18185 - DNA, 180 bp, unidentified
  source 1..180: mol_type = unassigned DNA; note = methanogen bacteria
caaggtgttgacggtgtgctcggaatctttggccgtgtactcaacttattgaacttgcaatctgcttcagtagttgttggcggattccctaacgtacttatttccgttgcagagatgcaaacaccatcaatgcttggtgcaggaatgacttcattgttcttggctaacaccaatggtgct

SEQ ID NO: 18186 - DNA, 297 bp, unidentified
  source 1..297: mol_type = unassigned DNA; note = methanogen bacteria
cctgcagctgatttaaatggattagatgctgacggtaaggcattatataccgacgcatcaggtcttccttacttcagtgaaatggattcatattataactacaggttgaccaatgattatatagatcacggctttgtgggagacgaaatggtaaacggcagtgaatgggatatgcacaggtatgctccggacggtaataaaatcaattacgagctgggtatcgtatatctgacatcatggatgcatgacatggcaaacaacttccttggatggcacatgtcagttaaagaagtcgca

SEQ ID NO: 18187 - DNA, 174 bp, unidentified
  source 1..174: mol_type = unassigned DNA; note = methanogen bacteria
agaggcgttgatggggtaattggaatattcagccaagtattcggactgctcaacttgcaatccgcatcagttgttgtgggaggattcccgaacgtacttatttccgttgcagagatgcagatgccaagcatgcttggtgcaggaatgacatcaatgtttttagcaaacaccaac

SEQ ID NO: 18188 - DNA, 297 bp, unidentified
  source 1..297: mol_type = unassigned DNA; note = methanogen bacteria
cctgcagctgatttaaattattttgatgaagagggtaaagcattatacactgactcatcaggtcttccttatttcagtgaaatggattcatattataactacaggctgaccaatgattatgtagatcacggctatgcgggagatgaaatgagagatggtgttgcatgggatatgcacaggtattctcctgacggtgaaacggttaattacgaactaggtattacatatgtaacctcctggttgcacgatatggcaaacaaatactttggaggaaacttctcagttaaagaagttgca

SEQ ID NO: 18189 - DNA, 171 bp, unidentified
  source 1..171: mol_type = unassigned DNA; note = methanogen bacteria
ggagttaatggtgtagttggaatattcagtaatgtattcaacctgctcaacctgcaatccgcttcagttgttgttggaggattcccgaatgtacttatttccgtagcagagatgcagatgccttcaatgctcggtagcggtatgacttcaatgtttacagcaagtaccgac

SEQ ID NO: 18190 - DNA, 297 bp, unidentified
  source 1..297: mol_type = unassigned DNA; note = methanogen bacteria
cctgcagctgatttaaattacttcgatgatcagggtaaagcattatacactgattcattaggtcttccttatttcagtgaaatggattcatattataactacaggttgaccgatgattatgtagatcacggctatgcaggagatgaaatgagagatggtgttgtatgggatatgcataggaattctccagatggttttgaacttaattatgagttaggtattgcatatgtaactgcttggttgcacgatgtggcaaacaattacttcggaggcagtttttcagttaaagaaattgca

SEQ ID NO: 18191 - DNA, 174 bp, unidentified
  source 1..174: mol_type = unassigned DNA; note = methanogen bacteria
agaggagttgacggagtaaccggaatctttggaagagtattcggcctgctcaacctgcaatccgcttcagttgttgtaggtggattcccgaatgtacttatttccgttgcagagatgcagatgccttcaatgctcggtagcggtatgacttcaatgtttacagcaagtaccgac

SEQ ID NO: 18192 - DNA, 36 bp, unidentified
  source 1..36: mol_type = unassigned DNA; note = methanogen bacteria
ttgaataatggagtgggagatgttaagaccaaagca

SEQ ID NO: 18193 - DNA, 33 bp, unidentified
  source 1..33: mol_type = unassigned DNA; note = methanogen bacteria
ctgcaaacaatcttcaagacctgtgcaattgga

SEQ ID NO: 18194 - DNA, 294 bp, unidentified
  source 1..294: mol_type = unassigned DNA; note = methanogen bacteria
caagctgctgatattggcggagttcctaatgaacttaaagcaaattatatggatgctaatggtcttccttatttcagtgaaatggactcatactttaacttaaggatgacccaagattatatggatcatggatattttggtgatactttagtaaatggttccggttgggatatgcattcatactacccatcagggcgggacgtaggttcctatcagccgatgattgcgtatgtgacttccttcatgtatggattaataaacatgttccaagacatgtcacttacagaagttgca

SEQ ID NO: 18195 - DNA, 168 bp, unidentified
  source 1..168: mol_type = unassigned DNA; note = methanogen bacteria
ggaattggcggtatttttgatgctatctccggtcttaccggtggtttctcacttttaactgcatcacatgatgtatggcctaacgtatttgtatccgttgcagagatgcagaaaccaaacctcttattcggtggacttccaggttcattcttggctaataccaatggt

SEQ ID NO: 18196 - DNA, 252 bp, unidentified
  source 1..252: mol_type = unassigned DNA; note = methanogen bacteria
accaacattacttctgaagatttcactatcgtaggccatattaagaaggacactcctatttctgcccgtgctgatgtgagcggaaacagggttacattgactgtgaacattgatgaaaacgctacaggatttgtacgattagctgttggcggtactgttgctaatattgaagtagttgatggtgtcgcaaaattaacaactaatttacttccaaatagttactttgttgaggtaacttatcttggtgatgac

SEQ ID NO: 18197 - DNA, 102 bp, unidentified
  source 1..102: mol_type = unassigned DNA; note = methanogen bacteria
aaatttggtgataatgtatttaacattgcattaactgatggtgttggaacattgacaacttcactgccttatggaaactacagtctggatattacttattta

SEQ ID NO: 18198 - DNA, 294 bp, unidentified
  source 1..294: mol_type = unassigned DNA; note = methanogen bacteria
caatctgctgatatcggtggagttcctaatgatcttaaagcatattactctgatgctaacggtcttccttatttcagtgaaatggactcatacttcaactataggatgactgaggattatatggaccatggatactttggtgatactttagtaaatggttccggttgggatatgcactcatactacccgtctggtagggatgtagggtcatatcagccgatgattgcttatgtgacttctgcactgtatggactgttcaacatgttccaaagcatgtcccttttggaagttgca

SEQ ID NO: 18199 - DNA, 30 bp, unidentified
  source 1..30: mol_type = unassigned DNA; note = methanogen bacteria
tcacacacctttgcaggatttttcgataca

SEQ ID NO: 18200 - DNA, 168 bp, unidentified
  source 1..168: mol_type = unassigned DNA; note = methanogen bacteria
gggttcaatggagttctcacaggtattggcggtcttactggaggtttctcccttcaatctgccgctaataatgtatggcctaacgtacttatttctgttgcagagatgcaaattccaagccttgtaactggtggacttgtaggttcattcttggctaacacaggtgga

SEQ ID NO: 18201 - DNA, 48 bp, unidentified
  source 1..48: mol_type = unassigned DNA; note = methanogen bacteria
tcacaatacacgaacacacaaaatacaaatacacagaccacagtagaa

SEQ ID NO: 18202 - DNA, 159 bp, unidentified
  source 1..159: mol_type = unassigned DNA; note = methanogen bacteria
ggtaacacagcaatttatctaagttcagaaaataaaacatccactattaaaacaggaatattcctaaaaaacactggtataaatggtggagcaatatataacgttggaaaattgaatttaaataaaacctactttaacagtaatagtgtaaccaaagat

SEQ ID NO: 18203 - DNA, 30 bp, unidentified
  source 1..30: mol_type = unassigned DNA; note = methanogen bacteria
aatgctgatagcaaaggtggagcaatatat

SEQ ID NO: 18204 - DNA, 60 bp, unidentified
  source 1..60: mol_type = unassigned DNA; note = methanogen bacteria
aaaggaacactgtatttaagtcagaacagcttcaaaacaaacaaagcaaatattactggt

SEQ ID NO: 18205 - DNA, 54 bp, unidentified
  source 1..54: mol_type = unassigned DNA; note = methanogen bacteria
acattaacagtcaaatactcacaatttactaacaataacgttaacacatatggt

SEQ ID NO: 18206 - DNA, 33 bp, unidentified
  source 1..33: mol_type = unassigned DNA; note = methanogen bacteria
acaaggactaactatgtatacaattcaacattt

SEQ ID NO: 18207 - DNA, 72 bp, unidentified
  source 1..72: mol_type = unassigned DNA; note = methanogen bacteria
aactatgcatcaactggtggagctatctatgttaatggagcaggtgcagtaatcaacaaagtattctttaaa

SEQ ID NO: 18208 - DNA, 33 bp, unidentified
  source 1..33: mol_type = unassigned DNA; note = methanogen bacteria
ttccagaacatcctggatatccccgtctgctgg

SEQ ID NO: 18209 - DNA, 30 bp, unidentified
  source 1..30: mol_type = unassigned DNA; note = methanogen bacteria
ttcgcctccaccaccagcgtgttctacctg

SEQ ID NO: 18210 - DNA, 36 bp, unidentified
  source 1..36: mol_type = unassigned DNA; note = methanogen bacteria
cctcatcctcggaagctacgtgacccccgtccgtgc

SEQ ID NO: 18211 - DNA, 60 bp, unidentified
  source 1..60: mol_type = unassigned DNA; note = methanogen bacteria
cctcaccttcgtggtattccaggagatcctctccctgccggtagtgtggatcctgcccat

SEQ ID NO: 18212 - DNA, 108 bp, unidentified
  source 1..108: mol_type = unassigned DNA; note = methanogen bacteria
cggtctcgactacgagatcttcataaccaccagggtcagggagaaccgcgtccgcggaatgtccaacgacgatgccatcgatgccgcgatcacaagtgccagcggtac

SEQ ID NO: 18213 - DNA, 51 bp, unidentified
  source 1..51: mol_type = unassigned DNA; note = methanogen bacteria
caccctgctggtcggaagctcctcgatgatccaggaattcggtttcgccct

SEQ ID NO: 18214 - DNA, 36 bp, unidentified
  source 1..36: mol_type = unassigned DNA; note = methanogen bacteria
ggtcacctatgtcggccccgccctcatgcacctcct

SEQ ID NO: 18215 - DNA, 54 bp, unidentified
  source 1..54: mol_type = unassigned DNA; note = methanogen bacteria
tccccgccgggcgggacagcacccccaagctcggggacgccgacagcctgtggc

SEQ ID NO: 18216 - DNA, 249 bp, unidentified
  source 1..249: mol_type = unassigned DNA; note = methanogen bacteria
agcattgtttccaagttgattaatattaatccggttaagacggctttgtctttatctttgagtaaggacgtgctgtttgttggtgattctttatctgtaaaagctagtgttaatgctactcagggtaaagtgatgttttatcttaatgatgttttaaaaggtactgttaatgttgacagtaaaggtatggcatctattgttttaaaagatctttcttatggtacctataatttaaatgctaaattcagc

SEQ ID NO: 18217 - DNA, 42 bp, unidentified
  source 1..42: mol_type = unassigned DNA; note = methanogen bacteria
tcaaaggagaacgaaggccttgcggtacccgatgagcagaat

SEQ ID NO: 18218 - DNA, 225 bp, unidentified
  source 1..225: mol_type = unassigned DNA; note = methanogen bacteria
atcgcaggactcctgcaggaactcgataaacagggatacaccgtggagaacgtgcccgagaacggcaggcagatgattgaggaaatcctcgacggcgtcaccaacgaccttgacagcatgtcggtcgccaccatgagagagaaggcggtggacctcgtaccgtcgggcacatacaggaaacagttcgaatcgataccctcatgggaccaggaacagatgataaag

SEQ ID NO: 18219 - DNA, 51 bp, unidentified
  source 1..51: mol_type = unassigned DNA; note = methanogen bacteria
atgccgccttcgatggcacgtgccggtgagtacgaagaactctcggaaatg

SEQ ID NO: 18220 - DNA, 141 bp, unidentified
  source 1..141: mol_type = unassigned DNA; note = methanogen bacteria
gttcccctgcaggattacttcaccctgaaaggcaacgcctctcccgaacgcaaaaaggaactgatcaaccagatctatctgagtgcgaaagagcatgacatgttcaacgacctgaacatagccaaagacccgggtgcggaa

SEQ ID NO: 18221 - DNA, 42 bp, unidentified
  source 1..42: mol_type = unassigned DNA; note = methanogen bacteria
ggggtcgatatgcaggatgccctcgatgaccccacaggaaaa

SEQ ID NO: 18222 - DNA, 63 bp, unidentified
  source 1..63: mol_type = unassigned DNA; note = methanogen bacteria
aatacccagacaggtatagatgagcttgaaaagagatacggcaaagtctcctccgacctgaag

SEQ ID NO: 18223 - DNA, 42 bp, unidentified
  source 1..42: mol_type = unassigned DNA; note = methanogen bacteria
gaccagatgatcgagaagtacgtctccgagaagggagagttc

SEQ ID NO: 18224 - DNA, 36 bp, unidentified
  source 1..36: mol_type = unassigned DNA; note = methanogen bacteria
aatcttgtgataggactcgacgaatcagatgaggac

SEQ ID NO: 18225 - DNA, 45 bp, unidentified
  source 1..45: mol_type = unassigned DNA; note = methanogen bacteria
aaggatatcgtcgacggaatagcggaaggtctgaccccggacgaa

SEQ ID NO: 18226 - DNA, 48 bp, unidentified
  source 1..48: mol_type = unassigned DNA; note = methanogen bacteria
gcctggaagaccgtggaggatctcgccgacgtgtacatagactggtgc

SEQ ID NO: 18227 - DNA, 90 bp, unidentified
  source 1..90: mol_type = unassigned DNA; note = methanogen bacteria
ttattcaaaggatggggtaataatcctagtgttttcttcacaactactctattacatagtacctctaatccatatggtttaacttatctt

SEQ ID NO: 18228 - DNA, 69 bp, unidentified
  source 1..69: mol_type = unassigned DNA; note = methanogen bacteria
cagttgccaggatccagaacaggtcttatggcactcttcaatccaaattgggaatatctccttgacttt

SEQ ID NO: 18229 - DNA, 111 bp, unidentified
  source 1..111: mol_type = unassigned DNA; note = methanogen bacteria
ggacatatggcacttgggaaaaacattcctatcacaagccttgtaagcgatggcttctcattgatattcgttgttttccctaatgtgtttaatgtgattggctcatggtcc

SEQ ID NO: 18230 - DNA, 42 bp, unidentified; identical to SEQ ID NO: 18096
  source 1..42: mol_type = unassigned DNA; note = methanogen bacteria

SEQ ID NO: 18231 - DNA, 36 bp, unidentified
  source 1..36: mol_type = unassigned DNA; note = methanogen bacteria
cttgcaagcggcacagccaatgcaggtgcaaaagca

SEQ ID NO: 18232 - DNA, 33 bp, unidentified
  source 1..33: mol_type = unassigned DNA; note = methanogen bacteria
ctacaggatatttttaaaacatgccctattgga

SEQ ID NO: 18233 - DNA, 33 bp, unidentified
  source 1..33: mol_type = unassigned DNA; note = methanogen bacteria
tacttcaacaccgagaccgagctcaccgacgac

SEQ ID NO: 18234 - DNA, 108 bp, unidentified; identical to SEQ ID NO: 18127
  source 1..108: mol_type = unassigned DNA; note = methanogen bacteria

SEQ ID NO: 18235 - DNA, 54 bp, unidentified; identical to SEQ ID NO: 18128
  source 1..54: mol_type = unassigned DNA; note = methanogen bacteria

SEQ ID NO: 18236 - DNA, 36 bp, unidentified
  source 1..36: mol_type = unassigned DNA; note = methanogen bacteria
aacatttctattatatttgacctaagtaaattacca

SEQ ID NO: 18237 - DNA, 228 bp, unidentified
  source 1..228: mol_type = unassigned DNA; note = methanogen bacteria
atgatagttgacaacttgaaaagaccaatgaccaatatttctgtatcttataaaatagatggcaatgtaacagaaaccactactgatgaaaaaggtcagatttttatacctgttgataatatgaaaccggacacttataaaatagacgtccaatataaaggtgagggcaactaccatgcaatggacaaagatataactcttttaatcaataagggcatcaccaaactg

SEQ ID NO: 18238 - DNA, 99 bp, unidentified
  source 1..99: mol_type = unassigned DNA; note = methanogen bacteria
ttggtgattactttaacagataatatcggcagagcactaaaaggcttcaatgtatctgctgaattgaacggtacagaaaattatacaacagataaacat

SEQ ID NO: 18239 - DNA, 72 bp, unidentified
  source 1..72: mol_type = unassigned DNA; note = methanogen bacteria
accgccaaaatcgttgttaataaaattaaaactaaactgacagccaattcagtagcaacattctacaatatt

SEQ ID NO: 18240 - DNA, 51 bp, unidentified
  source 1..51: mol_type = unassigned DNA; note = methanogen bacteria
ttaattgatgcttttggaaatcctatgagtaacgctaccgtgtctgttaat

SEQ ID NO: 18241 - DNA, 168 bp, unidentified
  source 1..168: mol_type = unassigned DNA; note = methanogen bacteria
actgcagaagtcgttgtaaatgcttcaaattctaaattaattgtaacttcactaacaacagattacaatagcggagaagaatttgttgttaagttaatcgataatctgggaaatcctgttgttggagagacactttactttactttacacgccaccaacaatatcacc

SEQ ID NO: 18242 - DNA, 42 bp, unidentified
  source 1..42: mol_type = unassigned DNA; note = methanogen bacteria
gacaatgaggaaaatccgctaagtggcatttcagtatctgtt

SEQ ID NO: 18243 - DNA, 54 bp, unidentified
  source 1..54: mol_type = unassigned DNA; note = methanogen bacteria
gcaaccagtaaaataattgtaaataagcaatccgccacattaactgcaaataca

SEQ ID NO: 18244 - DNA, 54 bp, unidentified
  source 1..54: mol_type = unassigned DNA; note = methanogen bacteria
attactctaaaaaatgatcaaggctcccctataagtggtgttcgagtatttgtt

SEQ ID NO: 18245 - DNA, 51 bp, unidentified
  source 1..51: mol_type = unassigned DNA; note = methanogen bacteria
actaaattaactgtggattcaatgacaaacagcacaaatttaattgttagt

SEQ ID NO: 18246 - DNA, 45 bp, unidentified
  source 1..45: mol_type = unassigned DNA; note = methanogen bacteria
acattaaaagatggtgaaggcaaacctataaaaaatgcttcagtt

SEQ ID NO: 18247 - DNA, 108 bp, unidentified
  source 1..108: mol_type = unassigned DNA; note = methanogen bacteria
gttggatctgattcttatggagtggttgttgttaaaaaaataacctcaaaattaacagcaaatgctaaagctttcaaggtaaaaacaaaaaccaaaaaatacaacgta

SEQ ID NO: 18248 - DNA, 168 bp, unidentified
  source 1..168: mol_type = unassigned DNA; note = methanogen bacteria
accatggagcactggatggacggtgccttcgaactcgcaccctcgtatcaggagatctgcgaaagacttaacatgaccatggagcaggtttacagcaagctcagcatcgagggctcgcctgaccatttggttcctgtggacctccagcataccgccgagatcaacgcc

SEQ ID NO: 18249 - DNA, 42 bp, unidentified
  source 1..42: mol_type = unassigned DNA; note = methanogen bacteria
cccgaagtatacgtcacagtggcggagaccctgcctgtaggg

SEQ ID NO: 18250 - DNA, 96 bp, unidentified
  source 1..96: mol_type = unassigned DNA; note = methanogen bacteria
attataaatggaacatcctctatagacggagctttatttgaagaaaactttgcaaattatggtggagactcaattcactcaatttctactgccctc

SEQ ID NO: 18251 - DNA, 195 bp, unidentified
  source 1..195: mol_type = unassigned DNA; note = methanogen bacteria
acatttaatgtaactgttcttgatggtcagggaaagccattagcaaatgttgcagttagattcaacatcaacggagtattctacacaaaacacaccgattctaaaggaatagctaaactgaacattaatttaatgtccggcaaatacatcattacctcagaatacgatggattaaaaatttcaaacaccattaca

SEQ ID NO: 18252 - DNA, 138 bp, unidentified
  source 1..138: mol_type = unassigned DNA; note = methanogen bacteria
tggtgcgggttcgtcggcagctccgggttcgagaacgccgtcaccggcatgatggactcagtggacctcaccagggatgccctccttgacaagctggagataaagcaggacgacagcagctgggagcacgcggtgtcc

SEQ ID NO: 18253 - DNA, 33 bp, unidentified
  source 1..33: mol_type = unassigned DNA; note = methanogen bacteria
tgcatcagggtgacctcgctcttcatgttcccg

SEQ ID NO: 18254 - DNA, 39 bp, unidentified
  source 1..39: mol_type = unassigned DNA; note = methanogen bacteria
aacagcttctttaacaacaacaaaggcagtgcagtatac

SEQ ID NO: 18255 - DNA, 150 bp, unidentified
  source 1..150: mol_type = unassigned DNA; note = methanogen bacteria
gcacagaacaacctaatttacagcagcagattcactaaaaactccggaacatacggaggagcagtaagaaattattattcaacactgataatgaacaggaactatatatcagcaaacagtgcaacatacggaggagccatattcagttca

SEQ ID NO: 18256 - DNA, 126 bp, unidentified
  source 1..126: mol_type = unassigned DNA; note = methanogen bacteria
gagatcttcgacatcgaaggaatgatggatatgtacgaggacctggcggagagactcggatacagcaattacagtgatatggcagcatccctcgacctcggtaccgaatacagggaggtcgtggcc

SEQ ID NO: 18257 - DNA, 45 bp, unidentified
  source 1..45: mol_type = unassigned DNA; note = methanogen bacteria
ccggaagtgagcgtgaagataggtcttaccctgcctctcaccgtg

SEQ ID NO: 18258 - DNA, 42 bp, unidentified; identical to SEQ ID NO: 18096
  source 1..42: mol_type = unassigned DNA; note = methanogen bacteria

SEQ ID NO: 18259 - DNA, 132 bp, unidentified
  source 1..132: mol_type = unassigned DNA; note = methanogen bacteria
tacaatccaggactaatgacttttgattcattcaatcaggtccaccagattgccagcggaagatataccaactggcacccatttttccatactttcattgaaatgttgctgtataaaatctattctagcccg

SEQ ID NO: 18260 - DNA, 33 bp, unidentified
  source 1..33: mol_type = unassigned DNA; note = methanogen bacteria
tttacaacaggatttaacttcgtaatattacca

SEQ ID NO: 18261 - DNA, 243 bp, unidentified
  source 1..243: mol_type = unassigned DNA; note = methanogen bacteria
gattcttccggtcttccttatttcagtgaaatggattcatattataacttaaggttgactgaagattacatagatcatggctttgtgggtgatgaacagataaatggaagtaactgggatatgcacaggcttgctccagatggaaatgcgattaactacgaactgggtatcgttcatgtgacctcgttcctacatgatttggcaaataaatactttggaaatcattctgtaaaagaagtggca

SEQ ID NO: 18262 - DNA, 171 bp, unidentified
  source 1..171: mol_type = unassigned DNA; note = methanogen bacteria
attgaaggggttaccgggttattcggaagcttgttttccttgctttccttgcaatccgcttccagggttgttggaggattccctaacgtacttgtttccgttgcagagatgcaaattccatcaatgcttggtggcggtatgaattcaatgtttttagctaacaccaacggt

SEQ ID NO: 18263 - DNA, 126 bp, unidentified
  source 1..126: mol_type = unassigned DNA; note = methanogen bacteria
tgtatcggatcccacaccaccttgggcgtcggcgaggcgctgtccgccacggcatccgctataggcaagggcggccacggactcacctacgaggagatgctcatctacaaccagaggctcccgcgt

SEQ ID NO: 18264 - DNA, 45 bp, unidentified
  source 1..45: mol_type = unassigned DNA; note = methanogen bacteria
gccgatttcacgttcttcggacttttcccttcccagagcatctac

SEQ ID NO: 18265 - DNA, 66 bp, unidentified
  source 1..66: mol_type = unassigned DNA; note = methanogen bacteria
ctctacaaccgctatcatacggtgaaactgccggaatatctgggctttttcggcggacgtcgtttt

SEQ ID NO: 18266 - DNA, 42 bp, unidentified; identical to SEQ ID NO: 18096
  source 1..42: mol_type = unassigned DNA; note = methanogen bacteria

SEQ ID NO: 18267 - DNA, 93 bp, unidentified
  source 1..93: mol_type = unassigned DNA; note = methanogen bacteria
acttttgaaaataatgttaaaaatgcaatttattcatatgattcaaatttatctgttgaaaatacaaattttagtgagaatacacaggccatt

SEQ ID NO: 18268 - DNA, 237 bp, unidentified
  source 1..237: mol_type = unassigned DNA; note = methanogen bacteria
caattctatatttatttgattgatggtgaaggtaattctgtagtgggcgttaacattacaatgaatattaatggagtattctacaaccgtacaactaatgaaaacggtagtgcccgattaaacattaatttaatccctggtgagtatatattgacagccactgatcctttaacctgccttaagatgtcatataatatcacagtacttcctgttttaacagccgatgatattcatatg

SEQ ID NO: 18269 - DNA, 135 bp, unidentified
  source 1..135: mol_type = unassigned DNA; note = methanogen bacteria
actgcatttaaagcaaaattagttgatggtatgggtaatgcactagctaatattggaataatattcaatattaatggtgtattctacactaaatacactaattcatctggagtggcttgtttaaacattaatttg

SEQ ID NO: 18270 - DNA, 63 bp, unidentified
  source 1..63: mol_type = unassigned DNA; note = methanogen bacteria
gaatatataattacttcacagtatgaaagtgcccaaatttcaaataaaataactatttcaagt

SEQ ID NO: 18271 - DNA, 36 bp, unidentified
  source 1..36: mol_type = unassigned DNA; note = methanogen bacteria
tacaccgatctgctcaacgagggagtcctttggttg

SEQ ID NO: 18272 - DNA, 162 bp, unidentified
  source 1..162: mol_type = unassigned DNA; note = methanogen bacteria
ccagaattcgataccattgattttgtcctaatcaataagaataatttgacaataaatggaaatggccatacaatcaatggattgaaccaatcaagaatatttgaaatagatgccgagaatgtaactttagacagtcttaattttattaatggaacttctaag

SEQ ID NO: 18273 - DNA, 30 bp, unidentified
  source 1..30: mol_type = unassigned DNA; note = methanogen bacteria
ataatggatcccgccctcgtggccgagggt

SEQ ID NO: 18274 - DNA, 30 bp, unidentified
  source 1..30: mol_type = unassigned DNA; note = methanogen bacteria
ctttcaataggtacagaacaaagactagca

SEQ ID NO: 18275 - DNA, 36 bp, unidentified
  source 1..36: mol_type = unassigned DNA; note = methanogen bacteria
gtgctacaagagatatttagaacaacaagtattcct

SEQ ID NO: 18276 - DNA, 48 bp, unidentified
  source 1..48: mol_type = unassigned DNA; note = methanogen bacteria
gatgatttaatccatagtggagtcaaagaaatcattttagattcagat

SEQ ID NO: 18277 - DNA, 51 bp, unidentified
  source 1..51: mol_type = unassigned DNA; note = methanogen bacteria
attacaattaaaaacatcacctttaaaaatggatacacaacagatgaagga

SEQ ID NO: 18278 - DNA, 30 bp, unidentified
  source 1..30: mol_type = unassigned DNA; note = methanogen bacteria
ttgtctaaaggttcttcccagttacttgcc

SEQ ID NO: 18279 - DNA, 33 bp, unidentified
  source 1..33: mol_type = unassigned DNA; note = methanogen bacteria
ttacaaaacatcttccataccactgcaattcca

SEQ ID NO: 18280 - DNA, 42 bp, unidentified; identical to SEQ ID NO: 18175
  source 1..42: mol_type = unassigned DNA; note = methanogen bacteria

SEQ ID NO: 18281 - DNA, 48 bp, unidentified
  source 1..48: mol_type = unassigned DNA; note = methanogen bacteria
atgggtttaactcaccaaatacatcagtctgtgggcatcgatatttct

SEQ ID NO: 18282 - DNA, 57 bp, unidentified
  source 1..57: mol_type = unassigned DNA; note = methanogen bacteria
ttaaatgaaaatgttgtattaactgttaataataaaaaatatacatttaaggcgaat

SEQ ID NO: 18283 - DNA, 33 bp, unidentified
  source 1..33: mol_type = unassigned DNA; note = methanogen bacteria
gatgctgattcatacagtgccgttgtgactttc

SEQ ID NO: 18284 - DNA, 189 bp, unidentified
  source 1..189: mol_type = unassigned DNA; note = methanogen bacteria
aattcagctagtaagaatactgattttatagtgtcaaaaaatgatgtaaatattgatttatctgtttcaaatgctacttatggagaaaagattattgttaaaacatttttaagtgatttgaaaggtaatttaattaatgaaaagcttaaacttgaaattgcaggtaatttatatgaaatcacatctaat

SEQ ID NO: 18285 - DNA, 45 bp, unidentified
  source 1..45: mol_type = unassigned DNA; note = methanogen bacteria
gttattttaaatgcatccaaatatgatgtaaaagtctcttttgaa

SEQ ID NO: 18286 - DNA, 33 bp, unidentified
  source 1..33: mol_type = unassigned DNA; note = methanogen bacteria
gatgcttcaacttatccggttaacattctattt

SEQ ID NO: 18287 - DNA, 183 bp, unidentified
  source 1..183: mol_type = unassigned DNA; note = methanogen bacteria
tcacaatatgtaaacgttaatgtaggtaaaacagaccctaaattagtgattaatgtatcagatatagaatatggtagtgatgtagtaattaaaaatgctttaaccggaattaataatgctgatatttatgctgttcttagtttagtcgttaatgataaaaaatatgctatcacttcaaatggc

SEQ ID NO: 18288 - DNA, 36 bp, unidentified
  source 1..36: mol_type = unassigned DNA; note = methanogen bacteria
gatgttggaaaatatagtgcagatatcactttcgat

SEQ ID NO: 18289 - DNA, 129 bp, unidentified
  source 1..129: mol_type = unassigned DNA; note = methanogen bacteria
gcttcaagatactctgttaaagtgttggatgagaaaggatctccattggccggagtcagtgtttcatttaatattaacggtgtattttacgaacgtaaaacaaattctgatggtgttgccagtctaaat

SEQ ID NO: 18290 - DNA, 225 bp, unidentified
  source 1..225: mol_type = unassigned DNA; note = methanogen bacteria
gattatataatcactgcagaatatgacggatcaagagtttctaacaatattaaagttttaaatgtgattaaaactggtgatgttgtcatgaaatatcgcgacggaaccagatttggtgctacaattttagataatcatggatatccatatcctaatcaatgtgttaggtttaacattaatggtgtattttatacaagaataacggatttaaatggtgttgctaat

SEQ ID NO: 18291 - DNA, 66 bp, unidentified
  source 1..66: mol_type = unassigned DNA; note = methanogen bacteria
aaatatataataacttcaatgtataatggattgagcgtttctaatacaattttaattaataatctt

SEQ ID NO: 18292 - DNA, 48 bp, unidentified
  source 1..48: mol_type = unassigned DNA; note = methanogen bacteria
atggggcttactgattccattaaacagtccactggcatcaacatatct

SEQ ID NO: 18293 - DNA, 48 bp, unidentified
  source 1..48: mol_type = unassigned DNA; note = methanogen bacteria
atgggtcttacccacagcattcaccaggcaaccggaatcaacatctct

SEQ ID NO: 18294 - DNA, 51 bp, unidentified
  source 1..51: mol_type = unassigned DNA; note = methanogen bacteria
ttaatgggcgttactcattctattaaagatgcaacaggcatcgatatatct

SEQ ID NO: 18295 - DNA, 51 bp, unidentified
  source 1..51: mol_type = unassigned DNA; note = methanogen bacteria
ttaatgggtgtaactcattctattcatgaagctacaggactgcacatatcc

SEQ ID NO: 18296 - DNA, 51 bp, unidentified
  source 1..51: mol_type = unassigned DNA; note = methanogen bacteria
ctggccggaattgtaaacagtttaaatcaggcaacaggtcttgacgtatcc

SEQ ID NO: 18297 - DNA, 48 bp, unidentified
  source 1..48: mol_type = unassigned DNA; note = methanogen bacteria
atgggactcacccacagcattcatgaagcaacaggattgaacatatcc

SEQ ID NO: 18298 - DNA, 45 bp, unidentified
  source 1..45: mol_type = unassigned DNA; note = methanogen bacteria
ggtattgtacattccctgaatcatgcaacaggactgaacatatct

SEQ ID NO: 18299 - DNA, 48 bp, unidentified
  source 1..48: mol_type = unassigned DNA; note = methanogen bacteria
atgggattatcacacgctattcacgaagctacaggattacatgtatct

SEQ ID NO: 18300 - DNA, 45 bp, unidentified
  source 1..45: mol_type = unassigned DNA; note = methanogen bacteria
ggcatcgttcactcaatcaaccattcaaccggtctgaacatctcc

SEQ ID NO: 18301 - DNA, 48 bp, unidentified
  source 1..48: mol_type = unassigned DNA; note = methanogen bacteria
atgggattaactcattcaatacatcaggcaacagggcttcatatttca

SEQ ID NO: 18302 - DNA, 48 bp, unidentified
  source 1..48: mol_type = unassigned DNA; note = methanogen bacteria
atgggactcacccatggcatccacaaggcaacaggactccacatatcc

SEQ ID NO: 18303 - DNA, 45 bp, unidentified
  source 1..45: mol_type = unassigned DNA; note = methanogen bacteria
ggcattgtacactcaatcaaccatgcgacaggattgcatatctcc

SEQ ID NO: 18304 - DNA, 48 bp, unidentified
  source 1..48: mol_type = unassigned DNA; note = methanogen bacteria
atgggcctgacacacggccttcatcagtcaacaggtctgcacatatca

SEQ ID NO: 18305 - DNA, 54 bp, unidentified
  source 1..54: mol_type = unassigned DNA; note = methanogen bacteria
cccttgagtggcatcgctcatccgcttcatcaggcaaccggactgcacatatca

SEQ ID NO: 18306 - DNA, 51 bp, unidentified
  source 1..51: mol_type = unassigned DNA; note = methanogen bacteria
ttggtgggcatcgctcatcagcttcatcaggcaaccggactgcacatatca

SEQ ID NO: 18307 - DNA, 231 bp, unidentified
  source 1..231: mol_type = unassigned DNA; note = methanogen bacteria
accattaactcaaccattataactgtaactgtaactttaaataaagcaaacattactgcaaaagatatgacattaaacgtaggcgaaaatagtactattgaatataccaccacacctgccgatttaaatgttagttttgttcccgatgattccggcattgtcaaagtttctgataatggtactgttacagcattaaaagaaggtaccgccaacattaccattactgtaggc

SEQ ID NO: 18308 - DNA, 48 bp, unidentified
  source 1..48: mol_type = unassigned DNA; note = methanogen bacteria
atgggtttaactcaccagatacatgaaagtacaggaattgacatttca

SEQ ID NO: 18309 - DNA, 48 bp, unidentified
  source 1..48: mol_type = unassigned DNA; note = methanogen bacteria
atgggattaactcaccagatacatgagtctacaggaatagatatctct

SEQ ID NO: 18310 - DNA, 48 bp, unidentified
  source 1..48: mol_type = unassigned DNA; note = methanogen bacteria
atgggactaacacatcagttgcatcaaagcacgggaatagatatttct

SEQ ID NO: 18311 - DNA, 51 bp, unidentified
  source 1..51: mol_type = unassigned DNA; note = methanogen bacteria
ttaatgggattaactcaccatttaaatcaaacaactgctattgatatttca

SEQ ID NO: 18312 - DNA, 45 bp, unidentified
  source 1..45: mol_type = unassigned DNA; note = methanogen bacteria
gatccattaaaaacttttactagtggtataaatgctcatatttct

SEQ ID NO: 18313 - DNA, 36 bp, unidentified
  source 1..36: mol_type = unassigned DNA; note = methanogen bacteria
gttgaaaacaattttattgaagatgttattcttatg

SEQ ID NO: 18314 - DNA, 132 bp, unidentified
  source 1..132: mol_type = unassigned DNA; note = methanogen bacteria
attaaaccgggtgttggcataaacatcgcagcaatcagtcaaacatcaaatgtgacccttaatcaaacaatgactgatttggttttaaatattattccggaaaatcctttaaatgctttagccagtagtgaa

SEQ ID NO: 18315 - DNA, 39 bp, unidentified
  source 1..39: mol_type = unassigned DNA; note = methanogen bacteria
gcggctcaatgttgtggaatggatttaggtacttcagct

SEQ ID NO: 18316 - DNA, 84 bp, unidentified
  source 1..84: mol_type = unassigned DNA; note = methanogen bacteria
tcaaccagtaccccgtcagttccattttcaggtcttgccactttaactttggtattcacctcagttggtcttccggttgaaata

SEQ ID NO: 18317 - DNA, 42 bp, unidentified
  source 1..42: mol_type = unassigned DNA; note = methanogen bacteria
gttgatgatccttttattgaaaattttatcttaatggataat

SEQ ID NO: 18318 - DNA, 132 bp, unidentified
  source 1..132: mol_type = unassigned DNA; note = methanogen bacteria
atcaaacctggtgtgggtttaaatatacctgcatccgacacattgtcaaattcaacgtcttccatggcattaactgatacgattttaaatatttttcctgaaaatccagtacatgcattgactaatggggaa

SEQ ID NO: 18319 - DNA, 33 bp, unidentified
  source 1..33: mol_type = unassigned DNA; note = methanogen bacteria
acttttggaacaatcggatttgaaagtatttta

SEQ ID NO: 18320 - DNA, 33 bp, unidentified
  source 1..33: mol_type = unassigned DNA; note = methanogen bacteria
caggcttatggaattgattttggcacaactgct

SEQ ID NO: 18321 - DNA, 51 bp, unidentified
  source 1..51: mol_type = unassigned DNA; note = methanogen bacteria
ttgaattccattgttgggggtctgaatcaggctaccggcttggatatatct

SEQ ID NO: 18322 - DNA, 39 bp, unidentified
  source 1..39: mol_type = unassigned DNA; note = methanogen bacteria
gatccgttaatggccgttacaatgggaacgcctgtatca

SEQ ID NO: 18323 - DNA, 30 bp, unidentified
  source 1..30: mol_type = unassigned DNA; note = methanogen bacteria
ttcagcatcaatgccacagagcaaaaggcc

SEQ ID NO: 18324 - DNA, 33 bp, unidentified
  source 1..33: mol_type = unassigned DNA; note = methanogen bacteria
ctgcaagtcatattcagaacaacctcacttaat

SEQ ID NO: 18325 - DNA, 90 bp, unidentified
  source 1..90: mol_type = unassigned DNA; note = methanogen bacteria
cgcatttatgattccaaaggaaatatcgtttatgacaaaaatttcgatgaaattagtgaacttccagatgatatgagtaacttgaccgaa

SEQ ID NO: 18326 - DNA, 72 bp, unidentified
  source 1..72: mol_type = unassigned DNA; note = methanogen bacteria
tatttaggttactatttctttatccatagaaacttaacagtcggaaaatatacatttgaattaagaaattta

SEQ ID NO: 18327 - DNA, 207 bp, unidentified
  source 1..207: mol_type = unassigned DNA; note = methanogen bacteria
gtaatcggatatatggttaacggcagttttgaaattataaaaaccacatccgaaattgaagtctatgtagaagatattgtatacggtgaagatttagaaatccatatcggcgttatcaataccacaatcgtcaatattataataaaagactataaaggcagcattgtttataatgataatgttaccagttccccaatcataatcaga

SEQ ID NO: 18328 - DNA, 201 bp, unidentified
  source 1..201: mol_type = unassigned DNA; note = methanogen bacteria
aattcatcatcacaagaattccaagtctttaaaatcaattccaccatcaaattaaacgacatatcagacatttattatgaagataatgtttcaattagttttgaagttgaaaataaaactattgtaaacatcaaaattcaaaatcaggacggagaagtagtttatgacaataacatcacatcagacatgattcaggtccct

SEQ ID NO: 18329 - DNA, 51 bp, unidentified
  source 1..51: mol_type = unassigned DNA; note = methanogen bacteria
attgacggagaatacacagttactatcgcaggtaaaaaaatcattgtaaat

SEQ ID NO: 18330 - DNA, 102 bp, unidentified
  source 1..102: mol_type = unassigned DNA; note = methanogen bacteria
gaaggtaatgtatttgcaagcgttgacggcaactatgttattgtcattggtgatattacaaaaatcgttagtgttaaaaacggtattggagaatttaattta

SEQ ID NO: 18331 - DNA, 117 bp, unidentified
  source 1..117: mol_type = unassigned DNA; note = methanogen bacteria
ttaaatgtcggcgattataatatttctgtgaattattacgaaaatgagaactataacagcaattccaacacaacaacatttaaagtaacaggaacaggtactaacttcaacataatt

SEQ ID NO: 18332 - DNA, 66 bp, unidentified
  source 1..66: mol_type = unassigned DNA; note = methanogen bacteria
atcacttacggcgaaaacattaaaataacacaaaaactcccaagcgatgcaacaggcacaataacc

SEQ ID NO: 18333 - DNA, 132 bp, unidentified
  source 1..132: mol_type = unassigned DNA; note = methanogen bacteria
tacaatcctggaataatgacttttgattcattcaatcaggtccaccagattgccagcggaagatataccaactggcacccatttttccatacattcattgaaatgatattatacaaaatctattccagccca

SEQ ID NO: 18334 - DNA, 51 bp, unidentified
  source 1..51: mol_type = unassigned DNA; note = methanogen bacteria
acttcaccaaaagaagaaagtgtcaaaaaagaagatgtgaaaaaacaggac

SEQ ID NO: 18335 - DNA, 90 bp, unidentified
  source 1..90: mol_type = unassigned DNA; note = methanogen bacteria
ttatttaaaggatggggcaataatcctagtgttttctttacaacaacattgcttcatagcacctctaatccatatgggctaacttatctt

SEQ ID NO: 18336 - DNA, 72 bp, unidentified
  source 1..72: mol_type = unassigned DNA; note = methanogen bacteria
caattgcctggatcacgtactggaataatggcattgtttaatccaaattggtctgtgcttttggattttaat

SEQ ID NO: 18337 - DNA, 111 bp, unidentified
  source 1..111: mol_type = unassigned DNA; note = methanogen bacteria
ggttttatggcattaggaaggaatattcctataactagtttagttagtgatagcttttcattgatatttgttgttttcccaaatgtattcaatataatggatccatgggtt

SEQ ID NO: 18338 - DNA, 90 bp, unidentified
  source 1..90: mol_type = unassigned DNA; note = methanogen bacteria
ttatttaagggatggggtagcaatcctagtgttttctttacaaccaccctattgcacagcacatctaatccatatggtcttacttatctt

SEQ ID NO: 18339 - DNA, 72 bp, unidentified
  source 1..72: mol_type = unassigned DNA; note = methanogen bacteria
cagcttcctgggtcccgtactggaataatggcattattcaatcctgattggtcagtgctcttgaatgtaaat

SEQ ID NO: 18340 - DNA, 111 bp, unidentified
  source 1..111: mol_type = unassigned DNA; note = methanogen bacteria
ggttatatggcattaggcagaaacattcctatcaccagcttagtcagtgatggattttcaataatcttcgttgttttcccaaatgttttcaatataatggatccatgggtt

SEQ ID NO: 18341 - DNA, 240 bp, unidentified
  source 1..240: mol_type = unassigned DNA; note = methanogen bacteria
atcattgaagcttcatgtgatgcaagattgaacagattaactattgttttgtctctgacctattcttgtgtagctgcaggtgtgcttggtggaattgtgggaggatatttctgcaaatctcctacaccttttattccagatcgttttgctgtagatgtaggtaatcctgaaattatcaattttataaatgatgagacaattattcaaggtgctataaggcctgagattccttttgaattc

SEQ ID NO: 18342 - DNA, 33 bp, unidentified
  source 1..33: mol_type = unassigned DNA; note = methanogen bacteria
ttacaaataatattcaagacaacttcaatcgga

SEQ ID NO: 18343 - DNA, 30 bp, unidentified
  source 1..30: mol_type = unassigned DNA; note = methanogen bacteria
gaattgaatacatcaaacgacactaaagca

SEQ ID NO: 18344 - DNA, 33 bp, unidentified
  source 1..33: mol_type = unassigned DNA; note = methanogen bacteria
cttcaaattatatttaagacaacatctatcgga

SEQ ID NO: 18345 - DNA, 33 bp, unidentified
  source 1..33: mol_type = unassigned DNA; note = methanogen bacteria
ctgcaaataatatttaaaacaacagccattgga

SEQ ID NO: 18346 - DNA, 132 bp, unidentified
  source 1..132: mol_type = unassigned DNA; note = methanogen bacteria
tacaatcctggaataatgacttttgattcattcaatcaagtccatcagattgccagcggaagatataccaactggcacccatttttccatacattcattgaaatgatattatacaaaatctattccagccca

SEQ ID NO: 18347 - DNA, 51 bp, unidentified; identical to SEQ ID NO: 18334
  source 1..51: mol_type = unassigned DNA; note = methanogen bacteria

SEQ ID NO: 18348 - DNA, 30 bp, unidentified
  source 1..30: mol_type = unassigned DNA; note = methanogen bacteria
atatccaaaggagtgccgacccaaaaggca

SEQ ID NO: 18349 - DNA, 33 bp, unidentified
  source 1..33: mol_type = unassigned DNA; note = methanogen bacteria
ctgcaagtcatattcagaacagcagccatcgga

SEQ ID NO: 18350 - DNA, 30 bp, unidentified
  source 1..30: mol_type = unassigned DNA; note = methanogen bacteria
ctgagcataaattcaagcaaaagcaaagcg

SEQ ID NO: 18351 - DNA, 33 bp, unidentified
  source 1..33: mol_type = unassigned DNA; note = methanogen bacteria
ctgcaaatcatattcaggaccacagcaatctca

SEQ ID NO: 18352 - DNA, 30 bp, unidentified
  source 1..30: mol_type = unassigned DNA; note = methanogen bacteria
atatccaccggcgtttcaacaacaaaggca

SEQ ID NO: 18353 - DNA, 33 bp, unidentified
  source 1..33: mol_type = unassigned DNA; note = methanogen bacteria
ctgcagacaatattcagaacaacatcaattgac

SEQ ID NO: 18354 - DNA, 30 bp, unidentified
  source 1..30: mol_type = unassigned DNA; note = methanogen bacteria
atatctacaggggtttcaacaagaaaggca

SEQ ID NO: 18355 - DNA, 33 bp, unidentified
  source 1..33: mol_type = unassigned DNA; note = methanogen bacteria
ctgcagacaatatttagaacaacatcaatcgac

SEQ ID NO: 18356 - DNA, 30 bp, unidentified
  source 1..30: mol_type = unassigned DNA; note = methanogen bacteria
atatcctccggcgtttcaacaaaaaaggcc

SEQ ID NO: 18357 - DNA, 33 bp, unidentified
  source 1..33: mol_type = unassigned DNA; note = methanogen bacteria
ctgcagacaatattcagaactacatccctcgac

SEQ ID NO: 18358 - DNA, 30 bp, unidentified
  source 1..30: mol_type = unassigned DNA; note = methanogen bacteria
atttcacagggagcatcaacaagaaatgca

SEQ ID NO: 18359 - DNA, 33 bp, unidentified
  source 1..33: mol_type = unassigned DNA; note = methanogen bacteria
cttcagataatattcagaacaacagcaataggt

SEQ ID NO: 18360 - DNA, 33 bp, unidentified
  source 1..33: mol_type = unassigned DNA; note = methanogen bacteria
ttaagcacaaattcaggtgaaagaaatgcaatg

SEQ ID NO: 18361 - DNA, 33 bp, unidentified
  source 1..33: mol_type = unassigned DNA; note = methanogen bacteria
ctgcaggtcatattcagaacgacttcaatatca

SEQ ID NO: 18362 - DNA, 30 bp, unidentified
  source 1..30: mol_type = unassigned DNA; note = methanogen bacteria
atatataatggagtagatacaagaaaggca

SEQ ID NO: 18363 - DNA, 33 bp, unidentified
  source 1..33: mol_type = unassigned DNA; note = methanogen bacteria
cttcagataatattcagaacaacttccatagga

SEQ ID NO: 18364 - DNA, 30 bp, unidentified
  source 1..30: mol_type = unassigned DNA; note = methanogen bacteria
atatccatcggatccaccacaacaaaagcg

SEQ ID NO: 18365 - DNA, 33 bp, unidentified
  source 1..33: mol_type = unassigned DNA; note = methanogen bacteria
ctacagataatattcagaacaactgccatctca

SEQ ID NO: 18366 - DNA, 33 bp, unidentified
  source 1..33: mol_type = unassigned DNA; note = methanogen bacteria
ttgcaaatcctattcagaaccacagcaatcgga

SEQ ID NO: 18367 - DNA, 30 bp, unidentified
  source 1..30: mol_type = unassigned DNA; note = methanogen bacteria
atatatagcggagcagataccagaaaagcc

SEQ ID NO: 18368 - DNA, 33 bp, unidentified
  source 1..33: mol_type = unassigned DNA; note = methanogen bacteria
ctacagacaatattcagaacaacatccatagga

SEQ ID NO: 18369 - DNA, 30 bp, unidentified
  source 1..30: mol_type = unassigned DNA; note = methanogen bacteria
ttaggcatccatacaaataaaagaaaagca

SEQ ID NO: 18370 - DNA, 33 bp, unidentified
  source 1..33: mol_type = unassigned DNA; note = methanogen bacteria
ctgcaaattatattcaggacagcacctatagga

SEQ ID NO: 18371 - DNA, 237 bp, unidentified
  source 1..237: mol_type = unassigned DNA; note = methanogen bacteria
acagtgttcaaggcaaatccaacattgaatgccaatattgaagatataacttatggcaatgatgcaggcttggcaattaaccttagtggagtgaatggtgaaaaattgaatgaaacattgatgattaccctcaatggagaagattacggtactgtcgatttaaataatggtattggaggtctcactttccagaatctgtcagttggaaactatactgtagggatttatttcagtgga

SEQ ID NO: 18372 - DNA, 30 bp, unidentified
  source 1..30: mol_type = unassigned DNA; note = methanogen bacteria
ttaggcatccatacaaatgaaagaaaagca

SEQ ID NO: 18373 - DNA, 33 bp, unidentified
  source 1..33: mol_type = unassigned DNA; note = methanogen bacteria
ctgcagattatattcaggacaacctcaatagga

SEQ ID NO: 18374 - DNA, 141 bp, unidentified
  source 1..141: mol_type = unassigned DNA; note = methanogen bacteria
actcaaatgttccataaaaatgaagcccttgaagcctttattgaaaagcatttccacaatggaacttatgataaaaccgccgcagaaaaaatcaaaaatcaaacttactatttaattgataattactcgatttggtcagga

SEQ ID NO: 18375 - DNA, 30 bp, unidentified
  source 1..30: mol_type = unassigned DNA; note = methanogen bacteria
ctgtcaataaatcagtcaatacaaaaacca

SEQ ID NO: 18376 - DNA, 33 bp, unidentified
  source 1..33: mol_type = unassigned DNA; note = methanogen bacteria
ttgcaaataatatttagaacaacaagcataaca

SEQ ID NO: 18377 - DNA, 30 bp, unidentified
  source 1..30: mol_type = unassigned DNA; note = methanogen bacteria
atgagtataaaccaaccagaaaaaaaagca

SEQ ID NO: 18378 - DNA, 33 bp, unidentified
  source 1..33: mol_type = unassigned DNA; note = methanogen bacteria
ctacaattaatatttagaacaaccgcaatatct

SEQ ID NO: 18379 - DNA, 33 bp, unidentified
  source 1..33: mol_type = unassigned DNA; note = methanogen bacteria
ttggaaacagtgtttaaaacacaggcaatagga

SEQ ID NO: 18380 - DNA, 30 bp, unidentified
  source 1..30: mol_type = unassigned DNA; note = methanogen bacteria
ttgagcattaactcaagcgaaagcaaagcg

SEQ ID NO: 18381 - DNA, 33 bp, unidentified
  source 1..33: mol_type = unassigned DNA; note = methanogen bacteria
ctgcagatcatattcagaaccacagcaatatca

SEQ ID NO: 18382 - DNA, 30 bp, unidentified
  source 1..30: mol_type = unassigned DNA; note = methanogen bacteria
atatcaaaaggagtttccacaagaaaggca

SEQ ID NO: 18383 - DNA, 33 bp, unidentified
  source 1..33: mol_type = unassigned DNA; note = methanogen bacteria
cttcagacagtattcagaacaacctcaatcggc

SEQ ID NO: 18384 - DNA, 30 bp, unidentified; identical to SEQ ID NO: 18323
  source 1..30: mol_type = unassigned DNA; note = methanogen bacteria

SEQ ID NO: 18385 - DNA, 33 bp, unidentified
  source 1..33: mol_type = unassigned DNA; note = methanogen bacteria
ctgcaactcatattcagaacaacctcacttaat

SEQ ID NO: 18386 - DNA, 33 bp, unidentified
  source 1..33: mol_type = unassigned DNA; note = methanogen bacteria
aaattttccttttcagtttatgaaaacggtggt

SEQ ID NO: 18387 - DNA, 90 bp, unidentified
  source 1..90: mol_type = unassigned DNA; note = methanogen bacteria
ttgttcaagggatggggatccaatcctagcgttttctttacaagaaccttactgcacagcacatccaatccatatggcttgacatatctt

SEQ ID NO: 18388 - DNA, 78 bp, unidentified
  source 1..78: mol_type = unassigned DNA; note = methanogen bacteria
gtttccctgccggggtcccgtactggaataatggtcttattcagcccaaactgggattatctatttgattcaagtctc

SEQ ID NO: 18389 - DNA, 111 bp, unidentified
  source 1..111: mol_type = unassigned DNA; note = methanogen bacteria
ttaggatatgctgcattaggcaataacataaccatcacaagccttgtcagcgacggctattcactgatttttgtagtcctgcctactgcattcaacctcatggggccatgg

SEQ ID NO: 18390 - DNA, 33 bp, unidentified
  source 1..33: mol_type = unassigned DNA; note = methanogen bacteria
ttttccttttcagtttatgaaaacggtggtgga

SEQ ID NO: 18391 - DNA, 90 bp, unidentified
  source 1..90: mol_type = unassigned DNA; note = methanogen bacteria
ttgttcaagggatgggggtccaatccaagtgttttctttacaaggaccttgctgcatagcacatccaatccatatgggttaacttacctt

SEQ ID NO: 18392 - DNA, 78 bp, unidentified
  source 1..78: mol_type = unassigned DNA; note = methanogen bacteria
gtttccctgccaggatcccgtacaggaataatggtcttattcagcccaaactgggattatctatttgattcaagccta

SEQ ID NO: 18393 - DNA, 108 bp, unidentified
  source 1..108: mol_type = unassigned DNA; note = methanogen bacteria
ggatatgcggcattaggcaaccatataaccatcacaagccttgtcagcgatggctattcattgatttttgtcgtcatgcctactgcattcaacctcatgggaccatgg

SEQ ID NO: 18394 - DNA, 33 bp, unidentified
  source 1..33: mol_type = unassigned DNA; note = methanogen bacteria
ttacagacaatttttagaaccacatcaatcgga

SEQ ID NO: 18395 - DNA, 30 bp, unidentified
  source 1..30: mol_type = unassigned DNA; note = methanogen bacteria
ttggaccagactacaataatcagaatggat

SEQ ID NO: 18396 - DNA, 33 bp, unidentified
  source 1..33: mol_type = unassigned DNA; note = methanogen bacteria
ttacaaattatatttagaacaacatcaatcaat

SEQ ID NO: 18397 - DNA, 33 bp, unidentified
  source 1..33: mol_type = unassigned DNA; note = methanogen bacteria
ctgcaggtcatattcagaacagcaccgatcaat

SEQ ID NO: 18398 - DNA, 90 bp, unidentified
  source 1..90: mol_type = unassigned DNA; note = methanogen bacteria
ttatttaagggatggggaagtaatcctagcgttttctttacaactaccctattgcacagcacttctaacccatatggattgacttatctt

SEQ ID NO: 18399 - DNA, 72 bp, unidentified
  source 1..72: mol_type = unassigned DNA; note = methanogen bacteria
caattgccgggctcccgtactggaattatggcattgttcaatccaaattggtcagtccttttggatttgaat

SEQ ID NO: 18400 - DNA, 108 bp, unidentified
  source 1..108: mol_type = unassigned DNA; note = methanogen bacteria
ggttatatggcattgggaaggaatattccaattaccagtttggtcagtgacggattttcattgatattcgtcgttttccctaatgtattcaacattatggatccttgg

SEQ ID NO: 18401 - DNA, 132 bp, unidentified
  source 1..132: mol_type = unassigned DNA; note = methanogen bacteria
tacaatccaggtattttaacttttgattcatttaatcaagttcatcaaattgcatctggccactataccaactggcatccatttttccacacattcattgaaatgctgctgtataaaatctactccagcccc

SEQ ID NO: 18402 - DNA, 48 bp, unidentified
  source 1..48: mol_type = unassigned DNA; note = methanogen bacteria
gaacctgaagatgaaacttcaccaaaagcagaaagtgtcaaaaaagag

SEQ ID NO: 18403 - DNA, 33 bp, unidentified
  source 1..33: mol_type = unassigned DNA; note = methanogen bacteria
gaaggaaaatcttcaaaagcagaaactgttaaa

SEQ ID NO: 18404 - DNA, 36 bp, unidentified
  source 1..36: mol_type = unassigned DNA; note = methanogen bacteria
tatccattaatcggtattgcaaaacctattgaaacc

SEQ ID NO: 18405 - DNA, 174 bp, unidentified
  source 1..174: mol_type = unassigned DNA; note = methanogen bacteria
atatcaaaccacatttggggttatgacatattctttgaatatcagtttgcaacatatgtgataaaaaacggaatttgggatcatacatggcctcatgcctataatgccatgctgagtgttgtaatgtatgcaccaattttcaacaagctatccggtatgactctgacctggata

SEQ ID NO: 18406 - DNA, 39 bp, unidentified
  source 1..39: mol_type = unassigned DNA; note = methanogen bacteria
gggttttcctatggatggatggtacagatggccagacaa

SEQ ID NO: 18407 - DNA, 93 bp, unidentified
  source 1..93: mol_type = unassigned DNA; note = methanogen bacteria
actgcagacagcaaacctatagcttcactctttgatgctttaagaatagtttccaaaaatttaaatacaattgttcttggaggaagcattaat

SEQ ID NO: 18408 - DNA, 33 bp, unidentified
  source 1..33: mol_type = unassigned DNA; note = methanogen bacteria
cctgcattcagaggacaattaagcttacaaaga

SEQ ID NO: 18409 - DNA, 36 bp, unidentified
  source 1..36: mol_type = unassigned DNA; note = methanogen bacteria
tatccttggtttggaatagctcatccaatagagact

SEQ ID NO: 18410 - DNA, 180 bp, unidentified
  source 1..180: mol_type = unassigned DNA; note = methanogen bacteria
ttaatatctaaccatatatggggatatgacatattcttcgagtaccagtttgctacatatgttataaagaatggtatatgggattatacatggccacacgcctataatgctatgttaagtgttgtgatgtatgctcctatatataataaattatctggaatgacgttaacatggatttta

SEQ ID NO: 18411 - DNA, 39 bp, unidentified
  source 1..39: mol_type = unassigned DNA; note = methanogen bacteria
gggttttcatatggttggatggtgcaaatggcacgtcag

SEQ ID NO: 18412 - DNA, 96 bp, unidentified
  source 1..96: mol_type = unassigned DNA; note = methanogen bacteria
cttaccgcagacagtaagccaatagcttctttatttgatgctttaaagatagttagtggtaatgttaaaacattaaccgtctcaggtgctgtccat

SEQ ID NO: 18413 - DNA, 30 bp, unidentified
  source 1..30: mol_type = unassigned DNA; note = methanogen bacteria
ccattcagattcatgaatattgttagcatt

SEQ ID NO: 18414 - DNA, 33 bp, unidentified
  source 1..33: mol_type = unassigned DNA; note = methanogen bacteria
ccatcattcagaggtcagcttagtctacagaga

SEQ ID NO: 18415 - DNA, 48 bp, unidentified
  source 1..48: mol_type = unassigned DNA; note = methanogen bacteria
atgggtttaacccaccaaatacatcagtctgtgggcatcgatatttct

SEQ ID NO: 18416 - DNA, 51 bp, unidentified
  source 1..51: mol_type = unassigned DNA; note = methanogen bacteria
agatttgagtataatgaggcctatgatgatggtggagcaatatgctgtaag

SEQ ID NO: 18417 - DNA, 39 bp, unidentified
  source 1..39: mol_type = unassigned DNA; note = methanogen bacteria
ggtggagcaatttcttgcgatatgttatatttccatgag

SEQ ID NO: 18418 - DNA, 123 bp, unidentified
  source 1..123: mol_type = unassigned DNA; note = methanogen bacteria
tccgttaacttctcgggtaatggttgggctgatagaaatccaattgttgttcatacttgccattataagggtattgagttcaacaaagatttggatgttgatggaaattatacttttgaattt

SEQ ID NO: 18419 - DNA, 144 bp, unidentified
  source 1..144: mol_type = unassigned DNA; note = methanogen bacteria
gttggcattgaggattccagatatccttccaatcacacaatccatgtaaactacagcgattatatcaatgtattatatagaatttacaagactgaagacattgatgaaggcagcgaagagtatcttttattcaccctttgcgat

SEQ ID NO: 18420 - DNA, 246 bp, unidentified
  source 1..246: mol_type = unassigned DNA; note = methanogen bacteria
gttattggaaattcatcatcacaggacttccaagtctttaaaatcaattccaccatcaaattaaacgacatatcagacatttattatgaagataatgtttcaattagttttgatgttgaaaataaaactattgtaaatatcaggattcaaaatcaggacggtgaagtagtttatgacaataacgtcacatcagacatgattcaggttcctaatttggatgctggaaactacactgtaaccgttaca

SEQ ID NO: 18421 - DNA, 81 bp, unidentified
  source 1..81: mol_type = unassigned DNA; note = methanogen bacteria
acaatccaagtcatagcagatattgacggagaatacacagttactatcgcaggtaaaaaaatcattgtaaatgtaataaat

SEQ ID NO: 18422 - DNA, 102 bp, unidentified
  source 1..102: mol_type = unassigned DNA; note = methanogen bacteria
gagggtaacgtatttgcaagcgttgacggcgactatattgttgtcatcaaagataactcaaaacttgtttctgttaaaaacggtgttggagaatttaatttt

SEQ ID NO: 18423 - DNA, 120 bp, unidentified
  source 1..120: mol_type = unassigned DNA; note = methanogen bacteria
actgatggagaatatacagtagtaataggtgataaaaaaatcattgtaaatgtaataaatggaatcggaaccggctcaatcgcattagacgcaggaaaatacacagccaatatcgaatac

SEQ ID NO: 18424 - DNA, 132 bp, unidentified
  source 1..132: mol_type = unassigned DNA; note = methanogen bacteria
tacaatccaggaatcctgacttttgattcattcaatcaggttcaccagattgccagtggaagatataccaattggcacccatttttccacactttcattgaaatgctgctgtataaaatctattccagccca

SEQ ID NO: 18425 - DNA, 78 bp, unidentified
  source 1..78: mol_type = unassigned DNA; note = methanogen bacteria
gatacttcaccaaaagcagaaactgttgaaaaagaggatgtaaaaaaacaggaagagcctaaagaaacacaaacacaa

SEQ ID NO: 18426 - DNA, 216 bp, unidentified
  source 1..216: mol_type = unassigned DNA; note = methanogen bacteria
ttgagggggggtgcagtttattcatcttggacaagattaaacattgtcgagtctgattttttaaacaacacggcatctcaaaatgccggagcactgtactttgataaaggcgatttaactattgaaaaatccaatttcattaataacaatgctgttaaacagctaaaaaacactgcaaatgcaatttatgctcatgatgttaatgcatacttcaaa

SEQ ID NO: 18427 - DNA, 51 bp, unidentified
  source 1..51: mol_type = unassigned DNA; note = methanogen bacteria
tccacatttgataatggaggaattggagtttacgcagattttgcagatgat

SEQ ID NO: 18428 - DNA, 174 bp, unidentified
  source 1..174: mol_type = unassigned DNA; note = methanogen bacteria
ttcattaacaatagagcagatgatgataatggtggagcaatacgttcgtatagtggtaaggtaactgcagtaaataccatattttctgaaaatagtgcagaacatcttggtggagcaatttattcttatggggatgtatacacagacaattgtttattcagattcaataagatt

SEQ ID NO: 18429 - DNA, 126 bp, unidentified
  source 1..126: mol_type = unassigned DNA; note = methanogen bacteria
gatgcagaacaatgttatggtggagcaatatatgcatatgaaaatgtccatataaataattccacatttgaaaataatcgtgctgaggattatggtggagcaatatatgcagataacatatatatt

SEQ ID NO: 18430 - DNA, 69 bp, unidentified
  source 1..69: mol_type = unassigned DNA; note = methanogen bacteria
ccacaaatgttttatccgtcaatgatgagaagctacagcatgcctagctggcatccgggttttgacatg

SEQ ID NO: 18431 - DNA, 51 bp, unidentified
  source 1..51: mol_type = unassigned DNA; note = methanogen bacteria
ctgatgatgaatgctgccggcgattccatttattatgttcctacattgaca

SEQ ID NO: 18432 - DNA, 48 bp, unidentified
  source 1..48: mol_type = unassigned DNA; note = methanogen bacteria
tcgattcatgtttcaggaagagtacttcaacaaaatacgcaaacacct

SEQ ID NO: 18433 - DNA, 45 bp, unidentified
  source 1..45: mol_type = unassigned DNA; note = methanogen bacteria
ttcaaacaagattcagtctttctgaaaggaacaacgacagacact

SEQ ID NO: 18434 - DNA, 141 bp, unidentified
  source 1..141: mol_type = unassigned DNA; note = methanogen bacteria
ggaatgcaattgctgaatacaatgatgcttcccggcttgaacatcaatccgatgctgaatacgatttcatcatccgacggcgggaaagtcattttgcagattaacggcgtaaataccacgccggaagaaattcagaccttg

SEQ ID NO: 18435 - DNA, 114 bp, unidentified
  source 1..114: mol_type = unassigned DNA; note = methanogen bacteria
tttcaacgcatcaacacgaataacagaaatcgcacaggtagttatcagtttgaaaattcatcccctatattgagggaagaaatcagtgccggaggtgattattcgtaccaaatg

SEQ ID NO: 18436 - DNA, 99 bp, unidentified
  source 1..99: mol_type = unassigned DNA; note = methanogen bacteria
ctgagcaatcagcctcacaacgatttcaacagttttctaaaagagaatggcacggacaaagggttgatttttgacggaagtcagcaaaaaattaatgtt

SEQ ID NO: 18437 - DNA, 96 bp, unidentified
  source 1..96: mol_type = unassigned DNA; note = methanogen bacteria
tatgcgaacgcagcatcttcgcggaattactgcgaatacaacgatgttgatactcttttcagcgaacgttcggaactgttttccgataaatattca

SEQ ID NO: 18438 - DNA, 69 bp, unidentified
  source 1..69: mol_type = unassigned DNA; note = methanogen bacteria
attcagtcgtttacagagcagacaattaatcagggcgaggaattcaaatcggatttgaatcaggcggaa

SEQ ID NO: 18439 - DNA, 45 bp, unidentified
  source 1..45: mol_type = unassigned DNA; note = methanogen bacteria
cgcctgcatttttccaatgtatctgttaccaaaagctattaccat

SEQ ID NO: 18440 - DNA, 102 bp, unidentified
  source 1..102: mol_type = unassigned DNA; note = methanogen bacteria
agtcaaacgaatccaaccctgatggagttggccgacacggaaatccgtcttgactcgtatcttgccgagaaagggaatctgttgcttcaaccgtacctgaat

SEQ ID NO: 18441 - DNA, 90 bp, unidentified
  source 1..90: mol_type = unassigned DNA; note = methanogen bacteria
cactacaaacacaatcctatcatggaatcgaaaagagaacatggaaatgtgttcctgacaatgcccgaaaacatgaaagattggaataag

SEQ ID NO: 18442 - DNA, 48 bp, unidentified
  source 1..48: mol_type = unassigned DNA; note = methanogen bacteria
aaccactttgacagtcgtgggaacaactattcgcatacccattctaat

SEQ ID NO: 18443 - DNA, 48 bp, unidentified
  source 1..48: mol_type = unassigned DNA; note = methanogen bacteria
ccttttgacgaaaggttatacggcgaaaccgtcataaaggatggtaat

SEQ ID NO: 18444 - DNA, 90 bp, unidentified
  source 1..90: mol_type = unassigned DNA; note = methanogen bacteria
aatccgtttaagaatgtttcccgaaccattatggaaaacaaaaatgcacaagcgcctttccgaagagaaagttttagcgatgcatcccga

SEQ ID NO: 18445 - DNA, 132 bp, unidentified
  source 1..132: mol_type = unassigned DNA; note = methanogen bacteria
tacaatccaggaatcttgacttttgattcattcaatcaggtccaccagattgccagtggaagatatagcaattggcacccatttttccacactttcattgaaatgttgctgtataaaatctattccagccca

SEQ ID NO: 18446 - DNA, 78 bp, unidentified
  source 1..78: mol_type = unassigned DNA; note = methanogen bacteria
gaaacttcaccaaaagcagagactgttgaaaaagaggatgtaaaaaaacaggaagaacctaaagaaacacaaacacaa

SEQ ID NO: 18447 - DNA, 81 bp, unidentified
  source 1..81: mol_type = unassigned DNA; note = methanogen bacteria
gaggccagagttaaatattggtggcaggatgatggaagcgagctattcggtggtgaaggatttgtatatccttttgatcct

SEQ ID NO: 18448 - DNA, 147 bp, unidentified
  source 1..147: mol_type = unassigned DNA; note = methanogen bacteria
aaaatcgcctatttcatatcagacggtgctacaggaaccattacatattatctggatggaactcaagttgctcaattgcctgtcggcgagttatacaatataccaaatctgagcatcggacttcatacttacgttttaaattattca

SEQ ID NO: 18449 - DNA, 66 bp, unidentified
  source 1..66: mol_type = unassigned DNA; note = methanogen bacteria
gaaaactttgattcagattcctttaatttatatgttaatatgaagccaaatgatgctcaattcggt

SEQ ID NO: 18450 - DNA, 219 bp, unidentified
  source 1..219: mol_type = unassigned DNA; note = methanogen bacteria
gtccagggggatgccattgaactttggagaggatctagtgattatcctactagcactaaggctacagtttatattgataacgtgcagttctgccaattattggctgagggccatactacattgccgcttttaagccctggaaggcattatctttatgcttacttccctggagattcaaagaatcctaagtgttatgatgcatgtttcgtcgatgtccag

SEQ ID NO: 18451 - DNA, 204 bp, unidentified
  source 1..204: mol_type = unassigned DNA; note = methanogen bacteria
catacagatatggagcttgaaattgctaacgccgtaattgactatggcgaaaccactgtcataaccagtatcctgcctgaaaatgctacaggcaccattgattattatgtgatggatcaatactacccggatgaagattccctgaatgaatcttcccaagttgaatatttcactgatgagattttcataggcagagtgaatgtt

SEQ ID NO: 18452 - DNA, 210 bp, unidentified
  source 1..210: mol_type = unassigned DNA; note = methanogen bacteria
accttgcctatattggacggaggaaatcgaattatccttgccaaatattccggtgacaggttctacatgaactccgccgcaagaacatatttgacgattaacaggattgaaccaatattcgaagtcgaagccagcgaaagtgaatttgactatggcgatagcgtttacattagccatgtattggacgatgtcgccacaggcaccattgaa

SEQ ID NO: 18453 - DNA, 30 bp, unidentified
  source 1..30: mol_type = unassigned DNA; note = methanogen bacteria
acctaccttggcgaagcacctgccaatgag

SEQ ID NO: 18454 - DNA, 30 bp, unidentified
  source 1..30: mol_type = unassigned DNA; note = methanogen bacteria
ggataccatgaaatcgttgcctggtatctg

SEQ ID NO: 18455 - DNA, 30 bp, unidentified
  source 1..30: mol_type = unassigned DNA; note = methanogen bacteria
gccactcacagcatatatgtcaatgtcaag

SEQ ID NO: 18456 - DNA, 72 bp, unidentified
  source 1..72: mol_type = unassigned DNA; note = methanogen bacteria
aacgaaaccaactatggtgaaatcgccacaatctgtcctgtattgccagatgacgctactggtaccattgca

SEQ ID NO: 18457 - DNA, 42 bp, unidentified
  source 1..42: mol_type = unassigned DNA; note = methanogen bacteria
ttaagcaacggaacctaccttggcgaagcatctgtcaatgag

SEQ ID NO: 18458 - DNA, 186 bp, unidentified
  source 1..186: mol_type = unassigned DNA; note = methanogen bacteria
gctgcaggaacccatgaaatcgttgctaactactccggtgacttgaactatctggccgccagttgcaatgcaaacacaattgtcaataaaaccaccatcttcgaagtggatattgacggcgaagttaactatggcgaaaccgcattagtccgttctgtattgccggatgacgctactggtaccatt

SEQ ID NO: 18459 - DNA, 30 bp, unidentified
  source 1..30: mol_type = unassigned DNA; note = methanogen bacteria
ggaacctaccttggcgaagcatctgtcaat

SEQ ID NO: 18460 - DNA, 36 bp, unidentified
  source 1..36: mol_type = unassigned DNA; note = methanogen bacteria
gatgtgggaacttatgtgatcgttgccaactattcc

SEQ ID NO: 18461 - DNA, 69 bp, unidentified
  source 1..69: mol_type = unassigned DNA; note = methanogen bacteria
cctcagctgttctatccgtcaatgagttctacatacatcctaccttcatgggagccagcatggagtatg

SEQ ID NO: 18462 - DNA, 51 bp, unidentified
  source 1..51: mol_type = unassigned DNA; note = methanogen bacteria
ataatgtgggaatcttccggagattcattttatatactcccttcaataact

SEQ ID NO: 18463 - DNA, 69 bp, unidentified
  source 1..69: mol_type = unassigned DNA; note = methanogen bacteria
cctaagctgttttatccatcaatgagctccacttacatattgccttcatgggaacctgcatggagcatg

SEQ ID NO: 18464 - DNA, 51 bp, unidentified
  source 1..51: mol_type = unassigned DNA; note = methanogen bacteria
ataatgtgggagtcatcaggagattcattttatattcttccatcaatatcc

SEQ ID NO: 18465 - DNA, 249 bp, unidentified
  source 1..249: mol_type = unassigned DNA; note = methanogen bacteria
ttcgcgtacggggtctccgccggcgacaattatgccctgtccggcggttccagtgcatccagtcaccttcgcatcgtaaccgagatacttgcaggaacctatgatcctgccaaccagatcaccatcaactacccgtacggatctggaagcatctctggccccctgttcgactacatcatcgcggccttcgcctacatcgtgaccctctgcggggtcagccaggcaactgcgtccgcaggaaccctcgcc

SEQ ID NO: 18466 - DNA, 33 bp, unidentified; identical to SEQ ID NO: 17867
  source 1..33: mol_type = unassigned DNA; note = methanogen bacteria

SEQ ID NO: 18467 - DNA, 36 bp, unidentified
  source 1..36: mol_type = unassigned DNA; note = methanogen bacteria
tactacatccccctcggactgtggagccccgtcttc

SEQ ID NO: 18468 - DNA, 114 bp, unidentified
  source 1..114: mol_type = unassigned DNA; note = methanogen bacteria
ttcgcaccttccgtatcttcggcactcctccacggcagcagcccccaggtcggtgcactcgccaccgatctcgcacaccagttcagcaggaccagcatctcctccatggcggca

SEQ ID NO: 18469 - DNA, 66 bp, unidentified
  source 1..66: mol_type = unassigned DNA; note = methanogen bacteria
ccttatctattctatccaacaatgtcatctacctattcgcttcctcgctggggaccttcatgggac

SEQ ID NO: 18470 - DNA, 48 bp, unidentified
  source 1..48: mol_type = unassigned DNA; note = methanogen bacteria
atgatggggtcaactggtgatgagtattgcttcccaatcaacatttac

SEQ ID NO: 18471 - DNA, 39 bp, unidentified
  source 1..39: mol_type = unassigned DNA; note = methanogen bacteria
ttatcagtagaaatgacattagaaggattaaaagttaat

SEQ ID NO: 18472 - DNA, 108 bp, unidentified
  source 1..108: mol_type = unassigned DNA; note = methanogen bacteria
gaaggtgaaactgttcctatggtatttttaaaattcccagatggtatagaaacagaagaaggatatcctgataaattatttaaaggtttcgataaaaaattaattaaa

SEQ ID NO: 18473 - DNA, 273 bp, unidentified
  source 1..273: mol_type = unassigned DNA; note = methanogen bacteria
ttgaacgttacctacgacaggctggatttctataatgttactgcaaatgtttcggatgagaacggcaatgctgcaggcaatggaaacgtaacattttatgttaatggagcaaactacactgctgaaatatataggggcattgcatcagttcaggttcctttgcctttaggtttgaacagcatatctgctgtctttgaatctccaaactatcatccatcaaattcaagcacaacctatgaggtttcaccgattgcattggatgtgaatattgtt

SEQ ID NO: 18474 - DNA, 240 bp, unidentified
  source 1..240: mol_type = unassigned DNA; note = methanogen bacteria
actcttgaagcagtctttgaaggtgaccaatcatatattgcctctaaaaactcttcttgggtcaatgtgacaaaatctcaaactcgaatcaacattacacgcatcagctacaattctttcaatctctttgacattgaggctgatgtttttgatcagctgaaccaaactgtcagcgaggggacaataactttcatagtcaacaatgtcgagtatgatactggcaggatgatatcgcttgca

SEQ ID NO: 18475 - DNA, 102 bp, unidentified
  source 1..102: mol_type = unassigned DNA; note = methanogen bacteria
gggaataacatttccgtttcattcaatgctttaaattattgtctttcaacaagtcatatctcctatgaggttctgccggttgatttgatgttgaacatctcc

SEQ ID NO: 18476 - DNA, 66 bp, unidentified
  source 1..66: mol_type = unassigned DNA; note = methanogen bacteria
cctcaattattttatccttcaatgtccgaatcatttgtactgccttcatttggtcctggttgggat

SEQ ID NO: 18477 - DNA, 51 bp, unidentified
  source 1..51: mol_type = unassigned DNA; note = methanogen bacteria
ataatgtgggcatcttctgatacttcattttatataatcccttcattatct

SEQ ID NO: 18478 - DNA, 66 bp, unidentified
  source 1..66: mol_type = unassigned DNA; note = methanogen bacteria
ccttatttattctatccatcaatgtctgcaatgtattcccttcctcattggggtcctgcttgggat

SEQ ID NO: 18479 - DNA, 57 bp, unidentified
  source 1..57: mol_type = unassigned DNA; note = methanogen bacteria
gaacttatgatgggctctactggagctgattattatttcccaatccatatatatcca

SEQ ID NO: 18480 - DNA, 198 bp, unidentified
  source 1..198: mol_type = unassigned DNA; note = methanogen bacteria
atggttaacggcagttttgaaattacaaaaaccacctccgaggttgaagtttatgtggaagatattgtatacggtgaagatttagaaatccatatcggcgttatcaataccacaactgtcaatattataataaaagactataaaggcagcattgtttataatgataatgttaccagttccccagtcataatcagaaat

SEQ ID NO: 18481 - DNA, 249 bp, unidentified
  source 1..249: mol_type = unassigned DNA; note = methanogen bacteria
attattggaaattcatcatcacaagacttccaagtctttaaaatcaattccaccatcaaattaaacgacatatcagacatttattatgaagataatgtttcaattagttttgaagttgaaaataaaactattgtaaacatcaaaattcaaaatcaggacggagaagtagtttatgacaataacatcacatcagacatgattcaggtccctaatttgaatgctggaaactacacagtaaccgttacaaat

SEQ ID NO: 18482 - DNA, 69 bp, unidentified
  source 1..69: mol_type = unassigned DNA; note = methanogen bacteria
ccatacatttttgttgacactatgcagtcatattacaccctgccttgctgggatccgggattcaatatg

SEQ ID NO: 18483 - DNA, 51 bp, unidentified
  source 1..51: mol_type = unassigned DNA; note = methanogen bacteria
gaatccatcaggagcaatactgacaagctgtattatccgacaaattattcc

SEQ ID NO: 18484 - DNA, 66 bp, unidentified
  source 1..66: mol_type = unassigned DNA; note = methanogen bacteria
ccatacatttttgtcgacaccatgaagtcctattacacattgccttgctgggatcccggattcagc

SEQ ID NO: 18485 - DNA, 51 bp, unidentified
  source 1..51: mol_type = unassigned DNA; note = methanogen bacteria
gaggccatcagaagcaatacggacaagttatattatccgacaaactattcc

SEQ ID NO: 18486 - DNA, 69 bp, unidentified
  source 1..69: mol_type = unassigned DNA; note = methanogen bacteria
ccatacatctttgttgacacaatgaagtcattttacacattgcctaactgggatcctggattcaatatg

SEQ ID NO: 18487 - DNA, 54 bp, unidentified
  source 1..54: mol_type = unassigned DNA; note = methanogen bacteria
gagtccatcagatccaattcagataccctgtattatccagtagattattcccca

SEQ ID NO: 18488 - DNA, 60 bp, unidentified
  source 1..60: mol_type = unassigned DNA; note = methanogen bacteria
ttcatgtttccattctttgaaacttcatataccatacctgcatggaagggcggattcagc

SEQ ID NO: 18489 - DNA, 57 bp, unidentified
  source 1..57: mol_type = unassigned DNA; note = methanogen bacteria
caggttgtaatggcttcaattggagaagattattactatccaagagttatacatccc

SEQ ID NO: 18490 - DNA, 36 bp, unidentified
  source 1..36: mol_type = unassigned DNA; note = methanogen bacteria
ttaggattaaattcaccttatggaaaaaccaaggca

SEQ ID NO: 18491 - DNA, 33 bp, unidentified
  source 1..33: mol_type = unassigned DNA; note = methanogen bacteria
ttacagataatattcaagacatgcccaatagga

SEQ ID NO: 18492 - DNA, 69 bp, unidentified
  source 1..69: mol_type = unassigned DNA; note = methanogen bacteria
cctaggatgttctatccttcaatggcaaccaattacagtatgccaagctggcatcctggttttgatatg

SEQ ID NO: 18493 - DNA, 54 bp, unidentified
  source 1..54: mol_type = unassigned DNA; note = methanogen bacteria
acactgatgatggatgctgccggggattcgctttattatgttccgtctctgaca

SEQ ID NO: 18494 - DNA, 66 bp, unidentified
  source 1..66: mol_type = unassigned DNA; note = methanogen bacteria
ccaagattattctatccaagtatgagttcaatgttttcattacctatttgggaacctacatgggat

SEQ ID NO: 18495 - DNA, 51 bp, unidentified
  source 1..51: mol_type = unassigned DNA; note = methanogen bacteria
tttatgatgcaaactagtggtgaaagctattatttcccgattaatatctat

SEQ ID NO: 18496 - DNA, 126 bp, unidentified
  source 1..126: mol_type = unassigned DNA; note = methanogen bacteria
tttgtaaaactaactgttggtggtactgttaccaatattgaagtacaagatggtgtcgcaacactaacaaccgtattggtaccaaacagttactttgttgatgtaacttaccttggtgataacaac

SEQ ID NO: 18497 - DNA, 252 bp, unidentified
  source 1..252: mol_type = unassigned DNA; note = methanogen bacteria
aatatgaacagaacctctgtgacattcactataacagatattaccaagaaaaacactaatatcgatcttaacattgatgtttatgaagatgctgcattggtaatggttgatgtgaatgaatccgcaacaggactggttaaattgtatatggtaggtaaagaaagcggtgaagaatatacaatgtacatggatgttataagcatcgaacctggaaactacaccgtagttgcaacatacatgggagactcagta

SEQ ID NO: 18498 - DNA, 54 bp, unidentified
  source 1..54: mol_type = unassigned DNA; note = methanogen bacteria
ctggacgatatgcaggtttcgtcggtcgcagcggccgacttctatgacgactac

SEQ ID NO: 18499 - DNA, 69 bp, unidentified; identical to SEQ ID NO: 17938
  source 1..69: mol_type = unassigned DNA; note = methanogen bacteria

SEQ ID NO: 18500 - DNA, 48 bp, unidentified
  source 1..48: mol_type = unassigned DNA; note = methanogen bacteria
atggatcttactcacagcattcaccaagcaaccggaattaacgtttct

SEQ ID NO: 18501 - DNA, 69 bp, unidentified
  source 1..69: mol_type = unassigned DNA; note = methanogen bacteria
cattacctttcatatccttcaataacctctttgttcagtttgccatacctgcatcagattgaagggatg

SEQ ID NO: 18502 - DNA, 54 bp, unidentified
  source 1..54: mol_type = unassigned DNA; note = methanogen bacteria
gcaatgatttgggaatcatcaagtgagaaattctttataattcctgaattgtct

SEQ ID NO: 18503 - DNA, 66 bp, unidentified
  source 1..66: mol_type = unassigned DNA; note = methanogen bacteria
ccacatctcttctatccaacaatggaagcgacctattcccttccaaaatgggctccaggattggat

SEQ ID NO: 18504 - DNA, 51 bp, unidentified
  source 1..51: mol_type = unassigned DNA; note = methanogen bacteria
atcatgatgggatcaactggaaatgactattggttcccaatatacatctat

SEQ ID NO: 18505 - DNA, 66 bp, unidentified
  source 1..66: mol_type = unassigned DNA; note = methanogen bacteria
ccatatctcttctatcctacaatgtcctcaacatattcacttcctagatggggacctgcatgggat

SEQ ID NO: 18506 - DNA, 54 bp, unidentified
  source 1..54: mol_type = unassigned DNA; note = methanogen bacteria
ggagttatgatggggtcaaccggtgatgattatttcttcccaatcaacatttac

SEQ ID NO: 18507 - DNA, 66 bp, unidentified
  source 1..66: mol_type = unassigned DNA; note = methanogen bacteria
ccgaagctattctacccatcgatgagctccacttacatcctgccgtcatgggaacctgcatggagc

SEQ ID NO: 18508 - DNA, 54 bp, unidentified
  source 1..54: mol_type = unassigned DNA; note = methanogen bacteria
aaggtaatgtgggagtcatcaggagactcattttatattctcccttcaatatcc

SEQ ID NO: 18509 - DNA, 69 bp, unidentified
  source 1..69: mol_type = unassigned DNA; note = methanogen bacteria
cctcagctgttttacccgtcaatgagcgctacatataagttgcctagttggaatcctgcatggagcatg

SEQ ID NO: 18510 - DNA, 51 bp, unidentified
  source 1..51: mol_type = unassigned DNA; note = methanogen bacteria
ataatgtgggaatcatcaggggattcattctatatcttgccttcaatatcc

SEQ ID NO: 18511 - DNA, 66 bp, unidentified
  source 1..66: mol_type = unassigned DNA; note = methanogen bacteria
cctccattgttctatccgtcaatgagtgcaaactataagctgccgtcctgggattcggcctggagc

SEQ ID NO: 18512 - DNA, 54 bp, unidentified
  source 1..54: mol_type = unassigned DNA; note = methanogen bacteria
gctataatgtgggagtcatctggggattcattctacatattgccttcaatatct

SEQ ID NO: 18513 - DNA, 54 bp, unidentified
  source 1..54: mol_type = unassigned DNA; note = methanogen bacteria
gcttacaaaccattgacaaatatatttaaattaccttatttaatgccatcaggt

SEQ ID NO: 18514 - DNA, 54 bp, unidentified
  source 1..54: mol_type = unassigned DNA; note = methanogen bacteria
aatataatatggaaatcatcaagtgagaaattctttatactgccaaacatatct

SEQ ID NO: 18515 - DNA, 63 bp, unidentified
  source 1..63: mol_type = unassigned DNA; note = methanogen bacteria
aacatatcgtacgcctcactgacgaatgtatttaaattaccttacctaacaccggtaaacacc

SEQ ID NO: 18516 - DNA, 54 bp, unidentified
  source 1..54: mol_type = unassigned DNA; note = methanogen bacteria
aatataatatggaagtcatcgagtaaaaaattctttataataccctcattgtct

SEQ ID NO: 18517 - DNA, 66 bp, unidentified
  source 1..66: mol_type = unassigned DNA; note = methanogen bacteria
cctcagctattttatccatcaatgagtgccacatataaattaccttcatggaatcctgtgtggagt

SEQ ID NO: 18518 - DNA, 54 bp, unidentified
  source 1..54: mol_type = unassigned DNA; note = methanogen bacteria
agtataatgtgggagtcatcaggagattcattttatattttaccttcaatatct

SEQ ID NO: 18519 - DNA, 69 bp, unidentified
  source 1..69: mol_type = unassigned DNA; note = methanogen bacteria
ccgcaactgttctatccttcaatgagtgctacatataagttaccttcatggcaacctgtgtggagtatg

SEQ ID NO: 18520 - DNA, 54 bp, unidentified
  source 1..54: mol_type = unassigned DNA; note = methanogen bacteria
aagataatgtgggaatcttcaggggattcattttacatattgccttcaatatcc

SEQ ID NO: 18521 - DNA, 66 bp, unidentified
  source 1..66: mol_type = unassigned DNA; note = methanogen bacteria
cctcagctgttttacccttcaatgagtgcaacatacaagttgccttcatggaatccttcatggagc

SEQ ID NO: 18522 - DNA, 54 bp, unidentified
  source 1..54: mol_type = unassigned DNA; note = methanogen bacteria
gatgtgatgtggaagtcatctggtgattcattttacatattgccttcaatatcc

SEQ ID NO: 18523 - DNA, 63 bp, unidentified
  source 1..63: mol_type = unassigned DNA; note = methanogen bacteria
cctcttttttatccatcaatgattaggtcatatcaacttccattatggaatcctgcatggagc

SEQ ID NO: 18524 - DNA, 54 bp, unidentified
  source 1..54: mol_type = unassigned DNA; note = methanogen bacteria
ggattgatgtggcagtcttcaggagatgcgttttacataatcccttcattaact

SEQ ID NO: 18525 - DNA, 69 bp, unidentified
  source 1..69: mol_type = unassigned DNA; note = methanogen bacteria
cctaagctgttctatccgacaatgagctccacatatatcctgccgtcatgggagcctgcatggagtttg

SEQ ID NO: 18526 - DNA, 51 bp, unidentified
  source 1..51: mol_type = unassigned DNA; note = methanogen bacteria
ataatgtgggaatcttcaggcgattcgttttatgttctgccttcgatatcc

SEQ ID NO: 18527 - DNA, 66 bp, unidentified
  source 1..66: mol_type = unassigned DNA; note = methanogen bacteria
ccgcagctattctatccatcaatgagctccacatacatattgccttcatgggacccaaaatggagc

SEQ ID NO: 18528 - DNA, 54 bp, unidentified
  source 1..54: mol_type = unassigned DNA; note = methanogen bacteria
aaagtcatgtgggagtcttcaggagattcattttatattctgccttccatatca

SEQ ID NO: 18529 - DNA, 66 bp, unidentified
  source 1..66: mol_type = unassigned DNA; note = methanogen bacteria
cctcagctcttctatccttcaatgagtgcaacatacaagctgccgtcatgggatcctgcatggagc

SEQ ID NO: 18530 - DNA, 48 bp, unidentified
  source 1..48: mol_type = unassigned DNA; note = methanogen bacteria
atgtgggagtcatccggtgattcattttacatattgccttcaataaca

SEQ ID NO: 18531 - DNA, 33 bp, unidentified
  source 1..33: mol_type = unassigned DNA; note = methanogen bacteria
ggcgcgagcatgccgttccgcgacgacgacccg

SEQ ID NO: 18532 - DNA, 33 bp, unidentified
  source 1..33: mol_type = unassigned DNA; note = methanogen bacteria
tggacgggcgatacaggcgccgtggaggacctg

SEQ ID NO: 18533 - DNA, 69 bp, unidentified
  source 1..69: mol_type = unassigned DNA; note = methanogen bacteria
cctcagctattttacccatcaatgagcgcaacatataagctaccgtcatgggaacctgcatggagcatg

SEQ ID NO: 18534 - DNA, 51 bp, unidentified
  source 1..51: mol_type = unassigned DNA; note = methanogen bacteria
ataatgtgggagtcctcaggagattccttctatattctcccttcaatatct

SEQ ID NO: 18535 - DNA, 66 bp, unidentified
  source 1..66: mol_type = unassigned DNA; note = methanogen bacteria
cctaatttattttatccttcaatgagttccacatatactttgcctgaatggaaaccagcatatagt

SEQ ID NO: 18536 - DNA, 54 bp, unidentified
  source 1..54: mol_type = unassigned DNA; note = methanogen bacteria
agtgtaatgtggcaatcttctggggattcattttacatggttccgaagatatct

SEQ ID NO: 18537 - DNA, 69 bp, unidentified
  source 1..69: mol_type = unassigned DNA; note = methanogen bacteria
ccgcggctgttttatccatcaatgatgagaacatttgtacttccttcatgggctcccgtttgggacatg

SEQ ID NO: 18538 - DNA, 54 bp, unidentified
  source 1..54: mol_type = unassigned DNA; note = methanogen bacteria
actatgatgtggcagtcttcaggagattcattatacatgataccttcattaact

SEQ ID NO: 18539 - DNA, 69 bp, unidentified
  source 1..69: mol_type = unassigned DNA; note = methanogen bacteria
cctaatttattttatccatcaatgagtgccacatacattttaccggaatggaaacctgcatggagcatg

SEQ ID NO: 18540 - DNA, 54 bp, unidentified
  source 1..54: mol_type = unassigned DNA; note = methanogen bacteria
gatataatgtggcaatcctctggtgattcattttatatattgccttcaatatca

SEQ ID NO: 18541 - DNA, 69 bp, unidentified
  source 1..69: mol_type = unassigned DNA; note = methanogen bacteria
cctaatctattttatccgtcaatgagttcaacatatattctgcctgaatggaaacctgcatggagcatg

SEQ ID NO: 18542 - DNA, 51 bp, unidentified
  source 1..51: mol_type = unassigned DNA; note = methanogen bacteria
ataatgtgggaatcatcaggagattcattttacatattgccttcaatatca

SEQ ID NO: 18543 - DNA, 66 bp, unidentified
  source 1..66: mol_type = unassigned DNA; note = methanogen bacteria
tatatccttgcttcaccttcaaggtttagagtctggaaatttccgttctggcataccggaggatat

SEQ ID NO: 18544 - DNA, 54 bp, unidentified
  source 1..54: mol_type = unassigned DNA; note = methanogen bacteria
cagattatgatttactcatttggggacaccatttatatgaggccgtcaatatca

SEQ ID NO: 18545 - DNA, 33 bp, unidentified
  source 1..33: mol_type = unassigned DNA; note = methanogen bacteria
ggagccgacatgccgttccgcggggacgacccg

SEQ ID NO: 18546 - DNA, 33 bp, unidentified
  source 1..33: mol_type = unassigned DNA; note = methanogen bacteria
tggacgggcgataccggcgccgtggaggacctg

SEQ ID NO: 18547 - DNA, 66 bp, unidentified
  source 1..66: mol_type = unassigned DNA; note = methanogen bacteria
ccggatctgttttatccgtcaatgacttccagatattcccttcctcaatggaatcctggttttgat

SEQ ID NO: 18548 - DNA, 51 bp, unidentified
  source 1..51: mol_type = unassigned DNA; note = methanogen bacteria
ttaatgctgaatgcctctggtgaatcaatgtatcatgttcctgtattgact

SEQ ID NO: 18549 - DNA, 69 bp, unidentified
  source 1..69: mol_type = unassigned DNA; note = methanogen bacteria
cctcagatgttttatccgtcaatgcagaccaattacagtatgcctagctggaatcctggatttgacatg

SEQ ID NO: 18550 - DNA, 51 bp, unidentified
  source 1..51: mol_type = unassigned DNA; note = methanogen bacteria
ttgatgatgaatgctgcaggagattccttgtattatattccgacattgaca

SEQ ID NO: 18551 - DNA, 69 bp, unidentified
  source 1..69: mol_type = unassigned DNA; note = methanogen bacteria
ccgcagatgttttatccgacaatgacaaaccgtttcagtttgcctgtctggcagcccggttttgatatg

SEQ ID NO: 18552 - DNA, 51 bp, unidentified
  source 1..51: mol_type = unassigned DNA; note = methanogen bacteria
cttatgcttaatgctgcaggtgattctctttattatgtgccgtctctgact

SEQ ID NO: 18553 - DNA, 69 bp, unidentified
  source 1..69: mol_type = unassigned DNA; note = methanogen bacteria
ccgaggctattttatccatctatgacatcaagatattctcttcctgtatggcatcccggttttgatatg

SEQ ID NO: 18554 - DNA, 51 bp, unidentified
  source 1..51: mol_type = unassigned DNA; note = methanogen bacteria
ttaatgatgaatgcagcaggtgattctttatactatattccttcattaact

SEQ ID NO: 18555 - DNA, 66 bp, unidentified
  source 1..66: mol_type = unassigned DNA; note = methanogen bacteria
ccaaatttgttctatccaacaatgtcttatagatattctcttcctgcatggcatcccggtttcgat

SEQ ID NO: 18556 - DNA, 51 bp, unidentified
  source 1..51: mol_type = unassigned DNA; note = methanogen bacteria
ttaatgatgaatgcagcgggggagtccttatattacattccatcattgact

SEQ ID NO: 18557 - DNA, 69 bp, unidentified
  source 1..69: mol_type = unassigned DNA; note = methanogen bacteria
ccaaggatgttttacccgacaatgactgcaacatatagcatgcccagctggaatcctggttttgatatg

SEQ ID NO: 18558 - DNA, 54 bp, unidentified
  source 1..54: mol_type = unassigned DNA; note = methanogen bacteria
accctgatgatgaatgctgcaggagattcactttactatattccgaaattgaca

SEQ ID NO: 18559 - DNA, 69 bp, unidentified
  source 1..69: mol_type = unassigned DNA; note = methanogen bacteria
cctcagatgttttatccatcaatgcagaccaattacagcatgcctagttggaatcctggatttgacatg

SEQ ID NO: 18560 - DNA, 51 bp, unidentified
  source 1..51: mol_type = unassigned DNA; note = methanogen bacteria
ttgatgatgaatgctgcaggcgattcattgtattatattccgacattgaca

SEQ ID NO: 18561 - DNA, 69 bp, unidentified
  source 1..69: mol_type = unassigned DNA; note = methanogen bacteria
ccaaggatgttttatcccacaatggcggcaacatatagcatgccaagatggtatcccggttttgacatg

SEQ ID NO: 18562 - DNA, 54 bp, unidentified
  source 1..54: mol_type = unassigned DNA; note = methanogen bacteria
acactgatgatggatgctgcgggagattctctttattatattccaaagttgacc

SEQ ID NO: 18563 - DNA, 69 bp, unidentified
  source 1..69: mol_type = unassigned DNA; note = methanogen bacteria
cccaaaatgttttatccgtcaatgtctgtcaattatagcatgccttcatggcatcccggttttgatatg

SEQ ID NO: 18564 - DNA, 51 bp, unidentified
  source 1..51: mol_type = unassigned DNA; note = methanogen bacteria
ttaatgatgaatgctgctggtgattcactttattatgttccttctttaact

SEQ ID NO: 18565 - DNA, 69 bp, unidentified
  source 1..69: mol_type = unassigned DNA; note = methanogen bacteria
ccacaaatgttttatccgacaatggcggcgacctacagcatgcctagttggaatcctggctttgacatg

SEQ ID NO: 18566 - DNA, 54 bp, unidentified
  source 1..54: mol_type = unassigned DNA; note = methanogen bacteria
acattgatgatgaatgccgcaggcgattcgctttactatatcccaacattgacc

SEQ ID NO: 18567 - DNA, 69 bp, unidentified
  source 1..69: mol_type = unassigned DNA; note = methanogen bacteria
ccaaggatgttttatccgacaatggctgcaacgtatagtatgccggtctggaatccgggttttgatatg

SEQ ID NO: 18568 - DNA, 54 bp, unidentified
  source 1..54: mol_type = unassigned DNA; note = methanogen bacteria
acccttatgatgaatgcggccggagattcgctttactatattcctaaactggct

SEQ ID NO: 18569 - DNA, 69 bp, unidentified
  source 1..69: mol_type = unassigned DNA; note = methanogen bacteria
ccacaaatgttttatccgacaatgaccgtaagctatagcatgccgtcatggaatcccggctttgacatg

SEQ ID NO: 18570 - DNA, 51 bp, unidentified
  source 1..51: mol_type = unassigned DNA; note = methanogen bacteria
ttgatgatgaatgccgccgggaactcactttactatattccatcgttgact

SEQ ID NO: 18571 - DNA, 69 bp, unidentified
  source 1..69: mol_type = unassigned DNA; note = methanogen bacteria
ccgcagatgttctatccgacaatgtccacaatgtacagcatgcctgcttggcatcctggttttgacatg

SEQ ID NO: 18572 - DNA, 54 bp, unidentified
  source 1..54: mol_type = unassigned DNA; note = methanogen bacteria
accctgatgttgaatgctgcgggggaatctctctattacgttccgaccctgacc

SEQ ID NO: 18573 - DNA, 57 bp, unidentified
  source 1..57: mol_type = unassigned DNA; note = methanogen bacteria
ttttatccatcaatgacatcaagattttccctacctgtgtggaagccaggttggaat

SEQ ID NO: 18574 - DNA, 51 bp, unidentified
  source 1..51: mol_type = unassigned DNA; note = methanogen bacteria
cttatgatggatgcgacaggcgattcattctattatgttccttcattaact

SEQ ID NO: 18575 - DNA, 63 bp, unidentified
  source 1..63: mol_type = unassigned DNA; note = methanogen bacteria
aatttattttatccaaccatgacttacagatattcacttcctgaatggaatcctggttttgac

SEQ ID NO: 18576 - DNA, 54 bp, unidentified
  source 1..54: mol_type = unassigned DNA; note = methanogen bacteria
acattaatggtggatgctgcaggtgaatctctgtattatattccttctttaact

SEQ ID NO: 18577 - DNA, 69 bp, unidentified
  source 1..69: mol_type = unassigned DNA; note = methanogen bacteria
ccatcattgtttttcccatcaatgagtgctttttatacacttccctcatggaaaggtggatttgacatt

SEQ ID NO: 18578 - DNA, 54 bp, unidentified
  source 1..54: mol_type = unassigned DNA; note = methanogen bacteria
cgtttattgatggattattctggaagtagtttctattatccgatacattattcg

SEQ ID NO: 18579 - DNA, 132 bp, unidentified; identical to SEQ ID NO: 18401
  source 1..132: mol_type = unassigned DNA; note = methanogen bacteria

SEQ ID NO: 18580 - DNA, 96 bp, unidentified
  source 1..96: mol_type = unassigned DNA; note = methanogen bacteria
aatttaacccctgaagaagtcaacagcatattgaatgaacctgaagacaaaacttcaccaacagaaactgatgaaaaagaagacacatatgacgaa

SEQ ID NO: 18581 - DNA, 153 bp, unidentified
  source 1..153: mol_type = unassigned DNA; note = methanogen bacteria
tttccaaaaggaaatcccaaaaaagcaacaaacacaacaaagaaaaacaaacccacaacaacaaacacaacaaagaaaaacaaacccacaacaacaaaaacaacaaagaaaaacaaacccacaacaacaaaaacaacaaagaaaaataacccc

SEQ ID NO: 18582 - DNA, 69 bp, unidentified
  source 1..69: mol_type = unassigned DNA; note = methanogen bacteria
ccgcgaatgttctatccatcaatggctacaaattacagcatgccaatatggtatcccggatttgacatg

SEQ ID NO: 18583 - DNA, 51 bp, unidentified
  source 1..51: mol_type = unassigned DNA; note = methanogen bacteria
ctgatgatgaatgcggcaggggattccctttattacgttccgacattaaca

SEQ ID NO: 18584 - DNA, 69 bp, unidentified
  source 1..69: mol_type = unassigned DNA; note = methanogen bacteria
cctccaatattctatccatcaatgattaaaacatataaactacctttatggagccctaccggaaatatg

SEQ ID NO: 18585 - DNA, 54 bp, unidentified
  source 1..54: mol_type = unassigned DNA; note = methanogen bacteria
gatctaatgtgggcctcttcaggaaattcattttatacaatacccaaattaacc

SEQ ID NO: 18586 - DNA, 69 bp, unidentified
  source 1..69: mol_type = unassigned DNA; note = methanogen bacteria
ccccaaatattctacccgccaatggccaggtcatatagcttaccggtatggagttcctcagtgaatatg

SEQ ID NO: 18587 - DNA, 54 bp, unidentified
  source 1..54: mol_type = unassigned DNA; note = methanogen bacteria
gatctaatttggtcatcttctggaaattcactttatgtgataccttcattaacc

SEQ ID NO: 18588 - DNA, 63 bp, unidentified
  source 1..63: mol_type = unassigned DNA; note = methanogen bacteria
ccaatattttatccttcaatgataaaagcatatgatcttccgttttggggtcctgccggagat

SEQ ID NO: 18589 - DNA, 54 bp, unidentified
  source 1..54: mol_type = unassigned DNA; note = methanogen bacteria
gacataatgtggacatcttccggaacttcattttatataatcccttcattaact

SEQ ID NO: 18590 - DNA, 69 bp, unidentified
  source 1..69: mol_type = unassigned DNA; note = methanogen bacteria
cctcaaatgttttatccctcaatgaagacaaattacagcatgcctagctggaatcctggttttgatgtg

SEQ ID NO: 18591 - DNA, 54 bp, unidentified
  source 1..54: mol_type = unassigned DNA; note = methanogen bacteria
acattgatgatgaatgctgcgggagattcgctttattatattccgacattgaca

SEQ ID NO: 18592 - DNA, 57 bp, unidentified
  source 1..57: mol_type = unassigned DNA; note = methanogen bacteria
ttctatccgtcaatgattagatcatatgatttgccattttggggtcctgctggagat

SEQ ID NO: 18593 - DNA, 54 bp, unidentified
  source 1..54: mol_type = unassigned DNA; note = methanogen bacteria
ggcgcaatgtggacatcttccgaaacttcattttatgtaatcccttcattaacg

SEQ ID NO: 18594 - DNA, 57 bp, unidentified
  source 1..57: mol_type = unassigned DNA; note = methanogen bacteria
ctttatcctgtaatggaacatttgtttatattgccgtcatggaaaactgtttcaggt

SEQ ID NO: 18595 - DNA, 54 bp, unidentified
  source 1..54: mol_type = unassigned DNA; note = methanogen bacteria
atgataatgtgtgcatcagctggggactcattttatatagtgcctaggctgtct

SEQ ID NO: 18596 - DNA, 69 bp, unidentified
  source 1..69: mol_type = unassigned DNA; note = methanogen bacteria
ccacaaatgttttatccgtcaatgatgagaagctacagtatgcctagctggcatcccggttttgacatg

SEQ ID NO: 18597 - DNA, 54 bp, unidentified
  source 1..54: mol_type = unassigned DNA; note = methanogen bacteria
actctaatgatgaatgctgccggcgattccctttattatgttcctacattgacc

SEQ ID NO: 18598 - DNA, 69 bp, unidentified
  source 1..69: mol_type = unassigned DNA; note = methanogen bacteria
cctgagatgttttatccttcaatgacatcacgttatagtttacctgtttggcatcctggatttgatatt

SEQ ID NO: 18599 - DNA, 48 bp, unidentified
  source 1..48: mol_type = unassigned DNA; note = methanogen bacteria
atgatggatgctgctggagattctttctattatgttccttctttaaca

SEQ ID NO: 18600 - DNA, 234 bp, unidentified
  source 1..234: mol_type = unassigned DNA; note = methanogen bacteria
atcattggtaatgatgtttacttcatgattgttgttactaacacaggtaactgtgatttaagtgatgttaaggtttcagagatctttaattcaaataatttgactttggttgattataataataagtctttatggtctatgtctggtgatgttttcacatattatgatgttttagctcctggtgaaagtgttaactttactatttggtttaccactttagtaaatggtactgtt

SEQ ID NO: 18601 - DNA, 48 bp, unidentified
  source 1..48: mol_type = unassigned DNA; note = methanogen bacteria
actgttaatgcatcttccaatatgactgataataagactgcaaataac

SEQ ID NO: 18602 - DNA, 219 bp, unidentified
  source 1..219: mol_type = unassigned DNA; note = methanogen bacteria
aatttaactgcgtttaaagttattgttactaacactggtgattgtgatttgagtgatgttgttgttagtgagatttataatcataatcaattgaagtttgctcgtttcagtggtgatggttggattaattctactgatgtttatagatatggtggagttttaaaacctggtgaaagtgctaactttactatttggtttaccactttggtgaacggtact

SEQ ID NO: 18603 - DNA, 57 bp, unidentified
  source 1..57: mol_type = unassigned DNA; note = methanogen bacteria
actgataataagactgctaataatgagactcgtgtttacaaacctaatatgacagtt

SEQ ID NO: 18604 - DNA, 297 bp, unidentified
  source 1..297: mol_type = unassigned DNA; note = methanogen bacteria
attggtgatcaaatttcatttattgttaatgttacaaatactggtaattgtgttttacacaatgttactgttactgaaatttataaattaaatgagttaagttatgtaaaccatactaacaaagatttatggattaaatcaggtaatattttcaaatataaaggtaatttggctgctggtcagagtgttgtgtttactattgtatttgatactttggtaaatggtactcttgtaaatacagttaatgctacatctgatgaaactgataatgttactgctaaaaataaaacacttgtt

SEQ ID NO: 18605 - DNA, 174 bp, unidentified
  source 1..174: mol_type = unassigned DNA; note = methanogen bacteria
atcattggtgacaatgtgtactttatgattgttgtaaaaaatactggagattgcaatttaactgatgttaaagttactgaaatctataattcaaatgaattgactttggttgatttcgataataagtctttatggtctatgtctggtgatgttttcgcttataatggtgtttta

SEQ ID NO: 18606 - DNA, 159 bp, unidentified
  source 1..159: mol_type = unassigned DNA; note = methanogen bacteria
ggtagtaactttgagtttattaattgtactttggctaatggaactagttatactggtgatacttggtatatcggtaatttgaataacggcactaacgttactttcacagtttatactcgtgctatacatgatggtatagatattcctcataatgtgtct

SEQ ID NO: 18607 - DNA, 204 bp, unidentified
  source 1..204: mol_type = unassigned DNA; note = methanogen bacteria
ggtacaaatgcttcaaatattaagttgagtgaattgattcctaaagaatttgagttcatgtactcttctgatgatgtagcttataacaatgaaaccggagtttggactattggaaacttggctaatggtactaacgttactttgaaaatatatactcatgctaaggttcctgcaagtgatattgaaaataaagttaatgtcacc

SEQ ID NO: 18608 - DNA, 60 bp, unidentified
  source 1..60: mol_type = unassigned DNA; note = methanogen bacteria
aataatttaactgttgttggtcctcgtggtgctactgatatggttaactgtactattgct

SEQ ID NO: 18609 - DNA, 81 bp, unidentified
  source 1..81: mol_type = unassigned DNA; note = methanogen bacteria
tctgttaatattaccagtgataaggatgagtactttgttgacgatatagctgtttggacaataactgttcataatgctgct

SEQ ID NO: 18610 - DNA, 39 bp, unidentified
  source 1..39: mol_type = unassigned DNA; note = methanogen bacteria
cctaatggaattaataacacagataattgtactgtatat

SEQ ID NO: 18611 - DNA, 81 bp, unidentified
  source 1..81: mol_type = unassigned DNA; note = methanogen bacteria
atttctgttaatattacaagcgacaaggatgagtactttatagatgatattgctgtctggacaataactgtttcaaatgct

SEQ ID NO: 18612 - DNA, 66 bp, unidentified
  source 1..66: mol_type = unassigned DNA; note = methanogen bacteria
ccatacatttttgtcgacaccatgaagtcatattacacattgccttgctgggatcccggattcaat

SEQ ID NO: 18613 - DNA, 51 bp, unidentified
  source 1..51: mol_type = unassigned DNA; note = methanogen bacteria
gaagccatcagaagcaatactgacaagttctattatccgacaaactatact

SEQ ID NO: 18614 - DNA, 57 bp, unidentified
  source 1..57: mol_type = unassigned DNA; note = methanogen bacteria
tatgtaaaaggaatacccttacttaaccccacacttagataccaactgaaagcttca

SEQ ID NO: 18615 - DNA, 261 bp, unidentified
  source 1..261: mol_type = unassigned DNA; note = methanogen bacteria
agatctttaaatgaaatgatgattacaagtgctattaatccaatatacacattacaaagccgtgttgattttacagttcatgtattaaatgagttagactttttatctggaaattttggtctaatgcatggaggatttatacttaaaactttgcctggaagtgattatggcccaagaatgatggttggaaaattaatatcatggagaaatggaataacaattactcctacacttattggaggaatgataatagattttgga

SEQ ID NO: 18616 - DNA, 69 bp, unidentified
  source 1..69: mol_type = unassigned DNA; note = methanogen bacteria
ataactgttatctcaagattgtttagtggtgaaatctcatttgaacaggccgtaatgggaatcataacc

SEQ ID NO: 18617 - DNA, 69 bp, unidentified
  source 1..69: mol_type = unassigned DNA; note = methanogen bacteria
cctcaaatgttctatccgacaatgtccaaaagctatagcatgcctagctggcatccgggttttgacatg

SEQ ID NO: 18618 - DNA, 51 bp, unidentified
  source 1..51: mol_type = unassigned DNA; note = methanogen bacteria
ttgatgctcaatgctgcaggagactctctgtattatgtaccttctttaaca

SEQ ID NO: 18619 - DNA, 39 bp, unidentified
  source 1..39: mol_type = unassigned DNA; note = methanogen bacteria
gcttccgtacgcgttctcaaggccgtcacacccaattcc

SEQ ID NO: 18620 - DNA, 114 bp, unidentified
  source 1..114: mol_type = unassigned DNA; note = methanogen bacteria
aagaggataatctactccggaggcgggaaggacattgaggaccgctcccatcacgcctggattataccgttgtttaccattacctccgccgtaaaggggtgccaaatgaacacg

SEQ ID NO: 18621 - DNA, 84 bp, unidentified
  source 1..84: mol_type = unassigned DNA; note = methanogen bacteria
taccgcatgccacagaccctctcccgcggaggcatcggtctggagtatgtgctcgcgatccccggtctgaaccccctgctcccg

SEQ ID NO: 18622 - DNA, 69 bp, unidentified
  source 1..69: mol_type = unassigned DNA; note = methanogen bacteria
ccccaaatgttttatccgacaatgtctgcaacttatagcatgccttcctggaatcccggctttgatgtg

SEQ ID NO: 18623 - DNA, 54 bp, unidentified
  source 1..54: mol_type = unassigned DNA; note = methanogen bacteria
actctgatgatgaacgcggctggcgattccctttattatgttccgtcacttacg

SEQ ID NO: 18624 - DNA, 120 bp, unidentified
  source 1..120: mol_type = unassigned DNA; note = methanogen bacteria
ttaggaagatatcctgtggcgcctatagatgtaattaaaactattttaagtcctatatttccatctttagttgtatcatctgaattgaattctatagtattcactataagattgcctagg

SEQ ID NO: 18625 - DNA, 30 bp, unidentified
  source 1..30: mol_type = unassigned DNA; note = methanogen bacteria
atatttaaaaaccctctagtttcacctgat

SEQ ID NO: 18626 - DNA, 84 bp, unidentified
  source 1..84: mol_type = unassigned DNA; note = methanogen bacteria
aagtttatggcagacccttatgataagttgcctcaaattacttattggcttatgggcagtttatctgcagtcaattttgataag

SEQ ID NO: 18627 - DNA, 30 bp, unidentified
  source 1..30: mol_type = unassigned DNA; note = methanogen bacteria
agaactttcatttcaattgaaattcctata

SEQ ID NO: 18628 - DNA, 48 bp, unidentified; identical to SEQ ID NO: 18293
  source 1..48: mol_type = unassigned DNA; note = methanogen bacteria

SEQ ID NO: 18629 - DNA, 30 bp, unidentified
  source 1..30: mol_type = unassigned DNA; note = methanogen bacteria
ctggacctccctgtccccctgaaggacgac

SEQ ID NO: 18630 - DNA, 36 bp, unidentified
  source 1..36: mol_type = unassigned DNA; note = methanogen bacteria
ctctacgacggccgcatggagttcatggaccacttg

SEQ ID NO: 18631 - DNA, 36 bp, unidentified
  source 1..36: mol_type = unassigned DNA; note = methanogen bacteria
agtgcaacaatggaaataaccccttttgaagcaatc

SEQ ID NO: 18632 - DNA, 69 bp, unidentified
  source 1..69: mol_type = unassigned DNA; note = methanogen bacteria
cctcagatgttttatccgtcaatgcagaccaattacagcatgcctagttggaatcctggatttgacatg

SEQ ID NO: 18633 - DNA, 54 bp, unidentified
  source 1..54: mol_type = unassigned DNA; note = methanogen bacteria
actttgatgatgaatgctgcaggagattccctgtattatattccaacattgaca

SEQ ID NO: 18634 - DNA, 66 bp, unidentified
  source 1..66: mol_type = unassigned DNA; note = methanogen bacteria
ccaaagttattttatccatcaatgagtgccacatacatcttgccttcatggaaacccgcttggagc

SEQ ID NO: 18635 - DNA, 51 bp, unidentified
  source 1..51: mol_type = unassigned DNA; note = methanogen bacteria
gtcatgtgggaatcatcaggagattcgttttacattctaccttcaatatcc

SEQ ID NO: 18636 - DNA, 57 bp, unidentified
  source 1..57: mol_type = unassigned DNA; note = methanogen bacteria
gcttatcctccattggctaagctatttgtaatgccttacttcactcctgttggagga

SEQ ID NO: 18637 - DNA, 57 bp, unidentified
  source 1..57: mol_type = unassigned DNA; note = methanogen bacteria
gacatggtttggaagtcatcaagtgaaaaatcatttattctgccttcaatatcttgg

SEQ ID NO: 18638 - DNA, 66 bp, unidentified
  source 1..66: mol_type = unassigned DNA; note = methanogen bacteria
ccatatatctttgttgacacaatgaagtcctattataccttaccttgctgggatccaggattcaat

SEQ ID NO: 18639 - DNA, 51 bp, unidentified
  source 1..51: mol_type = unassigned DNA; note = methanogen bacteria
gagtccatcagaagtaatactgacaaattatattatccggcagattattca

SEQ ID NO: 18640 - DNA, 69 bp, unidentified; identical to SEQ ID NO: 18549
  source 1..69: mol_type = unassigned DNA; note = methanogen bacteria

SEQ ID NO: 18641 - DNA, 51 bp, unidentified; identical to SEQ ID NO: 18550
  source 1..51: mol_type = unassigned DNA; note = methanogen bacteria

SEQ ID NO: 18642 - DNA, 129 bp, unidentified
  source 1..129: mol_type = unassigned DNA; note = methanogen bacteria
ggttctggaggtatatatccggttgaaattatgaatacaatctttggaatactatatccatatttaccaatgactcatggtattaatatagtacgtgaggctcagcttggtttgttatggaataattac

SEQ ID NO: 18643 - DNA, 42 bp, unidentified
  source 1..42: mol_type = unassigned DNA; note = methanogen bacteria
ggcatttggaaattttccttttcagtttatgaaaacggtggt

SEQ ID NO: 18644 - DNA, 90 bp, unidentified; identical to SEQ ID NO: 18387
  source 1..90: mol_type = unassigned DNA; note = methanogen bacteria

SEQ ID NO: 18645 - DNA, 75 bp, unidentified
  source 1..75: mol_type = unassigned DNA; note = methanogen bacteria
tccctgccggggtcccgtactggaataatggtcttattcagcccaaactgggattatctatttgattcaagtctc

SEQ ID NO: 18646 - DNA, 108 bp, unidentified
  source 1..108: mol_type = unassigned DNA; note = methanogen bacteria
ggatatgctgcattaggcaataacataaccatcacaagccttgtcagcgacggctattcactgatttttgtagtcctgcctactgcattcaacctcatggggccatgg

SEQ ID NO: 18647 - DNA, 132 bp, unidentified
  source 1..132: mol_type = unassigned DNA; note = methanogen bacteria
tacaatccaggaatcctgacttttgattcattcaatcaggttcaccagattgccagtggaagatataccaattggcacccatttttccacacattcattgaaatgttgctctataaaatctattccagccct

SEQ ID NO: 18648 - DNA, 60 bp, unidentified
  source 1..60: mol_type = unassigned DNA; note = methanogen bacteria
ttgacacctgaacaaaaagtttcaccatcagaaactgtcaaaaaagaagacgaatatgac

SEQ ID NO: 18649 - DNA, 69 bp, unidentified
  source 1..69: mol_type = unassigned DNA; note = methanogen bacteria
ttagagaattcttctgcttttttcaatattgatgatttatctgcagttaacattgtatttcaactgttt

SEQ ID NO: 18650 - DNA, 270 bp, unidentified
  source 1..270: mol_type = unassigned DNA; note = methanogen bacteria
attcacggatcatcattaagtttgctcaatatatctgcaaatcagcatagtgctttgtttggtgttccttttacggttcacggcgatgaatttagtgtagctacaccatttgcattttcccagtattttaataatttcgcctatttcagtgatattgtaaggtcagtgcctactgatatgtttctgttatatggacagcctgttctggacatagccagtctgttccgtccatttttctggggttatttatttttgcctaagggaatgggt

SEQ ID NO: 18651 - DNA, 168 bp, unidentified
  source 1..168: mol_type = unassigned DNA; note = methanogen bacteria
tatgatgcactgtttactacattgaacacctattatcctggaggcaggaagtattttggcggtgttgatttatattacggtgctgcaaatcctacatatctgctggattatatgagaactctattttatgcattgactccccagcagcttcctgtaaaaataagtctg

SEQ ID NO: 18652 - DNA, 57 bp, unidentified
  source 1..57: mol_type = unassigned DNA; note = methanogen bacteria
attacattcccggaaattgtcggaaaaattactctgttgagtatgtcaatgagtaca

SEQ ID NO: 18653 - DNA, 39 bp, unidentified
  source 1..39: mol_type = unassigned DNA; note = methanogen bacteria
gaggaaattggtaacagattagtgcctgctgttaataat

SEQ ID NO: 18654 - DNA, 96 bp, unidentified
  source 1..96: mol_type = unassigned DNA; note = methanogen bacteria
gaaggtgccgacgccttcggggacatcggcgtgctcgatttccttaccggcgatgtgtggaggccgtatgccgacagctacggctcggccaccctc

SEQ ID NO: 18655 - DNA, 45 bp, unidentified
  source 1..45: mol_type = unassigned DNA; note = methanogen bacteria
atccacagcatgttccccgaccagaccacctcgggcctcacctgg

SEQ ID NO: 18656 - DNA, 117 bp, unidentified
  source 1..117: mol_type = unassigned DNA; note = methanogen bacteria
gggaacaccgcggtcttccccgaccccgcctgggacgtcttctccgggatcaggacgctcaccgccactctggccatcgagatgccggaggtcgtcgtcggcagcacctggtattcg

SEQ ID NO: 18657 - DNA, 81 bp, unidentified
  source 1..81: mol_type = unassigned DNA; note = methanogen bacteria
caggccctgcccgcgctgagcctcgacttcatcaccgaagacccggtcagggcaggaaggagcggagggatataccccgcg

SEQ ID NO: 18658 - DNA, 42 bp, unidentified
  source 1..42: mol_type = unassigned DNA; note = methanogen bacteria
acgaccctcgggcccgtcatcggagcgaccgggtacaacctc

SEQ ID NO: 18659 - DNA, 114 bp, unidentified
  source 1..114: mol_type = unassigned DNA; note = methanogen bacteria
gcggtcgtcgtgcagtcctccgtgtccgattactcgctcaccaatcccgtgatggcgctgccctatcacctgtacttcctcgcgaccgagggccgcgcggacccatcgatgacc

SEQ ID NO: 18660 - DNA, 39 bp, unidentified
  source 1..39: mol_type = unassigned DNA; note = methanogen bacteria
gttggtagatttcaacaagaagctgttactttgttagga

SEQ ID NO: 18661 - DNA, 69 bp, unidentified
  source 1..69: mol_type = unassigned DNA; note = methanogen bacteria
gaaaactcacacctattttaccaaattgatggaattgagtatttaaagattttactaggtgttatttca

SEQ ID NO: 18662 - DNA, 270 bp, unidentified
  source 1..270: mol_type = unassigned DNA; note = methanogen bacteria
attcatggttcctcaattggagttattaattttgcaggtgaaagtcacaaaccattattaggttctctaagatggacaaaaacggatgaatatgcaatcaacacaatgtttgcattttcacaatactttaatggatttggatactttagtgaaattataagggcttttccaactgatgtttttgcaattggtgagttgccaatattagatttagtagtgctttttaaaccattccaatggggatatttactattttctcaaggaagaggt

SEQ ID NO: 18663 - DNA, 177 bp, unidentified
  source 1..177: mol_type = unassigned DNA; note = methanogen bacteria
aaatcttcacaagctatcaatacattaagtaatacaatttatccgggtttaagactttcaactggtggtgcgaacttttattggcttagtggagatccatatctttgctttgattatatgagaaacttgtttgaaccattaaaacctactcaaatcatttcaaggataagtatgagt

SEQ ID NO: 18664 - DNA, 57 bp, unidentified
  source 1..57: mol_type = unassigned DNA; note = methanogen bacteria
tttactttcccagaagcttatgcaaaaattacattacttggaaaaacccagccaagc

SEQ ID NO: 18665 - DNA, 174 bp, unidentified
  source 1..174: mol_type = unassigned DNA; note = methanogen bacteria
ggtcaaattaatatacattcagattcagcaacagcttcgcttctagtaaaaagtatgattgacaatatctctttaataccatcttcatggaattatgctaatggagacgtatggattctaggaagccatttatttgtttttcttcctcaaatatttattagcgatgtttctcta

SEQ ID NO: 18666 - DNA, 150 bp, unidentified
  source 1..150: mol_type = unassigned DNA; note = methanogen bacteria
tgtcacagtaattattatcatgttcactttacatctaatgacgatttaattttacctaattcgataacagatttatataataacatacaagtgactttggctaattttttttataattttggatataatggtaatgtaaaaatatttagc

SEQ ID NO: 18667 - DNA, 30 bp, unidentified
  source 1..30: mol_type = unassigned DNA; note = methanogen bacteria
ggcaacgcctcccccgagcgcctgaaggag

SEQ ID NO: 18668 - DNA, 33 bp, unidentified
  source 1..33: mol_type = unassigned DNA; note = methanogen bacteria
gtagatgtaggtattaaaaataaacaaattaac

SEQ ID NO: 18669 - DNA, 33 bp, unidentified
  source 1..33: mol_type = unassigned DNA; note = methanogen bacteria
acaatggttatcaataatagtattaccatagga

SEQ ID NO: 18670 - DNA, 39 bp, unidentified
  source 1..39: mol_type = unassigned DNA; note = methanogen bacteria
aagtacacccagtcaaaaagacagccaaaaaacttaccc

SEQ ID NO: 18671 - DNA, 93 bp, unidentified
  source 1..93: mol_type = unassigned DNA; note = methanogen bacteria
atgcagtgggtctcccagaacataggcatcatgatgctcaatgcgggagtggaccccttcctgcacgacctcgtcatctccggaatcctgggc

SEQ ID NO: 18672 - DNA, 138 bp, unidentified
  source 1..138: mol_type = unassigned DNA; note = methanogen bacteria
ttcggaaccgtggacgggaaatggttcgtgtatctcggcgacaatcagacttccgggtcgtatctcgccgcgttcggcaacgccttcacgtggatgttcgcacccatgggattcggcgacaagtgggagctgtccgtg

SEQ ID NO: 18673 - DNA, 81 bp, unidentified
  source 1..81: mol_type = unassigned DNA; note = methanogen bacteria
ctggcggtcctgctcgactcctccgcggactccgagggattcatcaccgccgcatccctcgccaattacaccacggtcggg

SEQ ID NO: 18674 - DNA, 117 bp, unidentified
  source 1..117: mol_type = unassigned DNA; note = methanogen bacteria
accgactggatcaacgacaccctcaccgcagacctctcagacgcggtctcgacatggtgcgaggacaacgaggtcgccgatgcgctcagcggcctggtcgtcgacggtatcatctcg

SEQ ID NO: 18675 - DNA, 129 bp, unidentified
  source 1..129: mol_type = unassigned DNA; note = methanogen bacteria
tcctacgactggggcctcagctacctcggcagcaacaccaccgaggggtccgcgctgtccgacatcggccacgcgctcaacccgatcttcgcatggagcgggttcggcgaccactgggagatcaccgtc

SEQ ID NO: 18676 - DNA, 84 bp, unidentified
  source 1..84: mol_type = unassigned DNA; note = methanogen bacteria
ctcgctgtcctgctcggggaccccggggatgcagaggggttcatcaccgcggacgccctggcggcctactgctcgtcgaacacc

SEQ ID NO: 18677 - DNA, 120 bp, unidentified
  source 1..120: mol_type = unassigned DNA; note = methanogen bacteria
tccgattacatcaacgacgagctcgtggtatgggtgcaggaccatgccgccgaggccatggactcagcgggcgtggataccgtcgtggcggacatgatgctcaccggcgttatcggagga

SEQ ID NO: 18678 - DNA, 135 bp, unidentified
  source 1..135: mol_type = unassigned DNA; note = methanogen bacteria
tcgttcaccttcaccggggagtacctgggcgacagcgcgaccactgattccattctctccgccataggcaaggctctctgctggatcttcgtaccgctgggattcggcggttccgagacctgggagctcaccgtg

SEQ ID NO: 18679 - DNA, 93 bp, unidentified
  source 1..93: mol_type = unassigned DNA; note = methanogen bacteria
gccgtccttctggattcggcggtgggtatcgacggtctccccaccatggaggtcctcaccgagtacctctccgtcacggcctatccggaagcg

SEQ ID NO: 18680 - DNA, 150 bp, unidentified
  source 1..150: mol_type = unassigned DNA; note = methanogen bacteria
ggggacatcaccggaatcggtacctatctgaccgactggctcaacggctacatcgaggatcccatcggaacctccgtggagcagtggtgcgccgacaacaacgtcagcgagcccctcaccggactcatcatgagcgcattcatcggcgga

SEQ ID NO: 18681 - DNA, 132 bp, unidentified
  source 1..132: mol_type = unassigned DNA; note = methanogen bacteria
agctacgacccctcgttcaactatctcggagccgatgcgaccaccgattcgatcctgcagaccatagggcaggcggtgtgcgtcatcttccagcccctcggatgggcggaccactgggagctcaccgtcgga

SEQ ID NO: 18682 - DNA, 84 bp, unidentified
  source 1..84: mol_type = unassigned DNA; note = methanogen bacteria
ctcggaaccctgttctcgctcgacgaggtcggagatgcgggagaggagtactgggacatcctggcggcatacctcacgcccgct

SEQ ID NO: 18683 - DNA, 150 bp, unidentified
  source 1..150: mol_type = unassigned DNA; note = methanogen bacteria
ggcgatttcgtcggaatcggaacctatctcaccgattggctgaacgggttcatcgagaaccccataggcacctccgtcgaagagtggtgtgctgacaacgatgtcagcgatcccctcaccggcctcatcatgagtgccttcatcggcggt

SEQ ID NO: 18684 - DNA, 132 bp, unidentified
  source 1..132: mol_type = unassigned DNA; note = methanogen bacteria
agttacgacggctcgttcaactaccccggggcggatgccaccaccgattcgatcctccagtccatcggagaggtcatcagcatcatcttccagcccctcggatgggaagaccactgggaactcacggtcgga

SEQ ID NO: 18685 - DNA, 78 bp, unidentified
  source 1..78: mol_type = unassigned DNA; note = methanogen bacteria
ggtaccctgttctccttcgacgaggtcagcgaggccggagaggagtactgggccatccttgcaacctatatcaccccc

SEQ ID NO: 18686 - DNA, 63 bp, unidentified
  source 1..63: mol_type = unassigned DNA; note = methanogen bacteria
gtagcagataaggaaattgacgttactcgtttattatattcttccatggttaatggaggcata

SEQ ID NO: 18687 - DNA, 45 bp, unidentified
  source 1..45: mol_type = unassigned DNA; note = methanogen bacteria
ttcacccataattatgattatagattcgatagattaaagcctgct

SEQ ID NO: 18688 - DNA, 30 bp, unidentified
  source 1..30: mol_type = unassigned DNA; note = methanogen bacteria
agttctattaaggcttgcattaaaccagtt

SEQ ID NO: 18689 - DNA, 30 bp, unidentified
  source 1..30: mol_type = unassigned DNA; note = methanogen bacteria
gctggaagtgtggtggacatagttcttaaa

SEQ ID NO: 18690 - DNA, 228 bp, unidentified
  source 1..228: mol_type = unassigned DNA; note = methanogen bacteria
gctgaaattatttcatcaaaatatgatgtcaactatgacaggttgtcaacatgcctgtttgtaattggcggatccgctgcagcaggtgcacttggtggtgtagcaggatactgggcagttacagcaggaacttcagcacaacctgttcaaaacggagtgtctttccaatttggtattgaagaggatgaagtaattgaagacgctgttgtaaaaacattattcggcaga

SEQ ID NO: 18691 - DNA, 192 bp, unidentified
  source 1..192: mol_type = unassigned DNA; note = methanogen bacteria
agaaccaatcagggaggtgcaataacctggatgggttcagacggtgaaatctcatattgctcattcaaaaacaatcatgttgactatccaaatgatgggggagccatctactgggccggtgaaaacggtaagataacttattgtgagtttttagataataatgcattttgtgggtctgctgtttactggagt

SEQ ID NO: 18692 - DNA, 72 bp, unidentified
  source 1..72: mol_type = unassigned DNA; note = methanogen bacteria
acaaacaagggaggagccattgtatggaatggtgataatggattagtgtccaactgtgctttcaaaaacaac

SEQ ID NO: 18693 - DNA, 129 bp, unidentified
  source 1..129: mol_type = unassigned DNA; note = methanogen bacteria
ggagcgatattctggaatggggatgatggaagaataactgattgtgagttttatgacaatgccgcatggttaggttctgcaatctactgggcaggcaatgacggagtggtggaatattcaaaattcaat

SEQ ID NO: 18694 - DNA, 72 bp, unidentified
  source 1..72: mol_type = unassigned DNA; note = methanogen bacteria
aagaaaggaaaatacactatcaaaacaacttataatggtttaaccaactcaaataagattattgttaaaaaa

SEQ ID NO: 18695 - DNA, 108 bp, unidentified
  source 1..108: mol_type = unassigned DNA; note = methanogen bacteria
tacaccggattcatcggagccggtaactactaccctgacgcatacgaggagcacatcgactggttcaccgtcggtaacttcacccttaccttcggattctacatcgat

SEQ ID NO: 18696 - DNA, 75 bp, unidentified
  source 1..75: mol_type = unassigned DNA; note = methanogen bacteria
atgaacggtcacctcgagtacacctacgtattcaacgtcgacaacctcgcagcagcctactccgcgaaccccggt

SEQ ID NO: 18697 - DNA, 72 bp, unidentified
  source 1..72: mol_type = unassigned DNA; note = methanogen bacteria
ctcatggcatccgccatctccgtcgagggaggaggcatcgtcatcgagaacatcgcagagttcacggccggt

SEQ ID NO: 18698 - DNA, 30 bp, unidentified
  source 1..30: mol_type = unassigned DNA; note = methanogen bacteria
gagctcttcgagggcaacatcaacaacacc

SEQ ID NO: 18699 - DNA, 129 bp, unidentified
  source 1..129: mol_type = unassigned DNA; note = methanogen bacteria
tgggagcacgtcttcaccttctctcaggtcggtgcagtcgccaacggagacgcgatcagctacttcctcgtcggtggagccggcaaggtgttcgagatctctctcgaccccgtcctcgagctcttcaag

SEQ ID NO: 18700 - DNA, 186 bp, unidentified
  source 1..186: mol_type = unassigned DNA; note = methanogen bacteria
gccattcctaaatggcagctgcagcacagcatcaacatttccaactgggattcctacatataccttgacaatggtcgaagctttgccggcatgggttggggtgacctccctcagattgcaccatttgtctcattcatgctgtcaattatgttccgcctcaatggaaacgtttatgcaggagcaatc

SEQ ID NO: 18701 - DNA, 186 bp, unidentified
  source 1..186: mol_type = unassigned DNA; note = methanogen bacteria
tacacaggcaatccaataccattctttggtcagttcgcaggcactgtttcaaatgtgaaggttctggattcaggatatatgcctgatccgtggtactatttgacatatcttcctaattatctatcaagcgtcatgggaggctccactaccgctgccgacctgctgacaccttcaaagaacactccg

SEQ ID NO: 18702 - DNA, 42 bp, unidentified
  source 1..42: mol_type = unassigned DNA; note = methanogen bacteria
agaaattttatcaatacaaactgtagtaatgtttctattttt

SEQ ID NO: 18703 - DNA, 36 bp, unidentified
  source 1..36: mol_type = unassigned DNA; note = methanogen bacteria
tcatatttttataataattctgttggttataatggt

SEQ ID NO: 18704 - DNA, 39 bp, unidentified
  source 1..39: mol_type = unassigned DNA; note = methanogen bacteria
gttagtgaatctttaatggatattgataattctttgttt

SEQ ID NO: 18705 - DNA, 234 bp, unidentified
  source 1..234: mol_type = unassigned DNA; note = methanogen bacteria
aaaacgaatattagtataattcaattaaatgatactgtatatacaagaaataatcagaatcagatatttttccagatattggataatggtggcagtaatgtagaaagaggaaaattaatattaaatattgataataataattatactgctagtgttgttaatggaatagctgaatttgataatgtattattatctcatacaggattttttaattgtaatgtattttatattgat

SEQ ID NO: 18706 - DNA, 117 bp, unidentified
  source 1..117: mol_type = unassigned DNA; note = methanogen bacteria
ttcggcccgtcccacagcatgtcgctgtccgaggcggccggcaatttggtctcggccatagacaaaggcgggaaagggctgaccaacgacgagctctacgtctacgagtcccgcctg

SEQ ID NO: 18707 - DNA, 42 bp, unidentified
  source 1..42: mol_type = unassigned DNA; note = methanogen bacteria
gccagcgggttcaccctttgggggctgctcagcagctcgaac

SEQ ID NO: 18708 - DNA, 81 bp, unidentified
  source 1..81: mol_type = unassigned DNA; note = methanogen bacteria
atactgaccacttccgattccgaggacctgcagaacgcggtctcctggctgtacgggagcttcacatccgtcgactgggac

SEQ ID NO: 18709 - DNA, 66 bp, unidentified
  source 1..66: mol_type = unassigned DNA; note = methanogen bacteria
gaaaattcttcttatttctacactattccaaaaactattattttaacagagtttttgaggtttttc

SEQ ID NO: 18710 - DNA, 270 bp, unidentified
  source 1..270: mol_type = unassigned DNA; note = methanogen bacteria
ttgcatggatcatcaattgctaaattggatatttctgacatgatgcataaatccatttttggtattgcgagaaatatacgttctgatgaatttaatgtaaatacgatgtttgcattttcacaatattataataattttaattattttagtgctattccaagagctgcgccaactgatatgtttatagtttatggtcagccggtatgggatttgcttattttatataggccatttttaattggatatttgtttttatcacctgctaaaggt

SEQ ID NO: 18711 - DNA, 153 bp, unidentified
  source 1..153: mol_type = unassigned DNA; note = methanogen bacteria
atgtcctgggataccatagtaactgttttaaacacttcctatcctggcggaagggttttcaccggagggggacaaataactaaattaggagaatatgctgcgaacttaatattcccattattccctgaaaaatcacctgatttagttaataat

SEQ ID NO: 18712 - DNA, 57 bp, unidentified
  source 1..57: mol_type = unassigned DNA; note = methanogen bacteria
ggtaattggcccgaactaattgcaaaagtcacattacttggaaaatcattaaacgaa

SEQ ID NO: 18713 - DNA, 42 bp, unidentified
  source 1..42: mol_type = unassigned DNA; note = methanogen bacteria
tacttcggaaccttcatcctcttcgagctcgacactctcacc

SEQ ID NO: 18714 - DNA, 69 bp, unidentified
  source 1..69: mol_type = unassigned DNA; note = methanogen bacteria
accctccaggtggacggagtcgtgttcagcctcaccaaggagtaccactacgagatcctcggcaagccc

SEQ ID NO: 18715 - DNA, 30 bp, unidentified
  source 1..30: mol_type = unassigned DNA; note = methanogen bacteria
atcagttccggctttacaataggacctctt

SEQ ID NO: 18716 - DNA, 33 bp, unidentified
  source 1..33: mol_type = unassigned DNA; note = methanogen bacteria
atcagcactgatttcaacataggcccccattat

SEQ ID NO: 18717 - DNA, 33 bp, unidentified
  source 1..33: mol_type = unassigned DNA; note = methanogen bacteria
atcagtacagatttcaatatcggccctgcatac

SEQ ID NO: 18718 - DNA, 30 bp, unidentified
  source 1..30: mol_type = unassigned DNA; note = methanogen bacteria
atcccagatgtctatgtcggcttttacggc

SEQ ID NO: 18719 - DNA, 30 bp, unidentified
  source 1..30: mol_type = unassigned DNA; note = methanogen bacteria
attagtgatgactttaatgtcggcttttgg

SEQ ID NO: 18720 - DNA, 33 bp, unidentified
  source 1..33: mol_type = unassigned DNA; note = methanogen bacteria
agtgcagactttacaattggcccagagtacaat

SEQ ID NO: 18721 - DNA, 30 bp, unidentified
  source 1..30: mol_type = unassigned DNA; note = methanogen bacteria
tgctcggatttcacatataccttttggtat

SEQ ID NO: 18722 - DNA, 33 bp, unidentified
  source 1..33: mol_type = unassigned DNA; note = methanogen bacteria
atcagtaccgactttaccgttggcccatggtat

SEQ ID NO: 18723 - DNA, 30 bp, unidentified
  source 1..30: mol_type = unassigned DNA; note = methanogen bacteria
agcgccgattttagcatcgggccatggtac

SEQ ID NO: 18724 - DNA, 33 bp, unidentified
  source 1..33: mol_type = unassigned DNA; note = methanogen bacteria
atcagtacggactttacagttggtccatggtat

SEQ ID NO: 18725 - DNA, 30 bp, unidentified
  source 1..30: mol_type = unassigned DNA; note = methanogen bacteria
agtaccgactttaccgttggcccatggtat

SEQ ID NO: 18726 - DNA, 30 bp, unidentified
  source 1..30: mol_type = unassigned DNA; note = methanogen bacteria
agtgcagactttacaataggcccatggtac

SEQ ID NO: 18727 - DNA, 117 bp, unidentified
  source 1..117: mol_type = unassigned DNA; note = methanogen bacteria
gtaaatactgcaactgttactggaaatgaatatgattacaatccaaataataataaggcatcaaaaactattaatgttcctaaggctgctgatttgtctattaataaggttgttaat

SEQ ID NO: 18728 - DNA, 252 bp, unidentified
  source 1..252: mol_type = unassigned DNA; note = methanogen bacteria
gatttggttaaatggacattaacagtaagaaacattggtccggatagtgcgtctaatgttactgttagtgatattttgcctgctggcttaatttatcagtcatattctgcttctgttggcagttatattaatggcatatggtatattggtaatttagctaaaggtgattctgtaactttgaatattgtttgtaaggttaataaaaccggttcaatcacgaatgttgcatcagttacagccacggaatatgat

SEQ ID NO: 18729 - DNA, 294 bp, unidentified
  source 1..294: mol_type = unassigned DNA; note = methanogen bacteria
aaaacaaataataatgatgatgaatctattgatgttcctaaagctgcagatttggaaataaaaaaattggtaaataattcatctccaaattatcatcaatatgtaaaatggtctattattgttaaaaacaatggtcctgatgatgcacatggtgttttcgttgaagatatattgcctgatggcttggtagtaatggctgctaatggtgattatgatggtaaaaaatggaatatcggtactttaaatgcattttcatcaaagaccttggaaatcacaacattagtcaataaaacc

SEQ ID NO: 18730 - DNA, 30 bp, unidentified
  source 1..30: mol_type = unassigned DNA; note = methanogen bacteria
agtacagactttacaatcggcccatggtac

SEQ ID NO: 18731 - DNA, 54 bp, unidentified
  source 1..54: mol_type = unassigned DNA; note = methanogen bacteria
gataatgcagatttagtgcaaaacttttcaaatagtttttttaaacatttttca

SEQ ID NO: 18732 - DNA, 270 bp, unidentified
  source 1..270: mol_type = unassigned DNA; note = methanogen bacteria
atacatgggtcttcaattaacgaattaaatttttttggtgtgaatcataaaactttacttggtgtgtcaagaccaattcgaggtgacgaatatgttgtaaacactatgtttgcattttcacaatatctaaatgattttgcatacttttcagacattgtcagagcatcaactaccgacatgtttataatttacggccaaccagttttagacattggaatgattttcagaccatttttaacagggtatttatttttaaatcaaggccaagga

SEQ ID NO: 18733 - DNA, 162 bp, unidentified
  source 1..162: mol_type = unassigned DNA; note = methanogen bacteria
tcattagaaacaattaagattattttaaatacatcctaccccggttcagaagtatttaatggaggaggggatgtaaacatattttcatattatatacctaccctattctatcctcttaaacaagatggcatattatttggttcaaatgtttgtaatttttca

SEQ ID NO: 18734 - DNA, 60 bp, unidentified
  source 1..60: mol_type = unassigned DNA; note = methanogen bacteria
atacatttaccagattttatcgttgatttaactttaagaggccatattaaaaattcaaga

SEQ ID NO: 18735 - DNA, 48 bp, unidentified
  source 1..48: mol_type = unassigned DNA; note = methanogen bacteria
ggaaatatgcaagtctatctaatagaatcaagcaaaactccaatgact

SEQ ID NO: 18736 - DNA, 174 bp, unidentified
  source 1..174: mol_type = unassigned DNA; note = methanogen bacteria
tggcagctgcagcacagcatcaacatttccaactgggattcctacatataccttgataatggtagaagctttgctggaatgggatggggcgacctccctcagattgcaccatttgtctcattcatgctgtcaattatgttccgcctcaatggaaacacttatgcaggagcaatc

SEQ ID NO: 18737 - DNA, 189 bp, unidentified
  source 1..189: mol_type = unassigned DNA; note = methanogen bacteria
gtatatacaggaaatccgattccatttttcggccagtttgcaggtactgtttcaaatgtgaaggtgctggattccggatatctgccggatccatggtattacctgacatacctgccacactatctctcaagcgtgatgggtggctccacaacagctgcagacctgctgaccccttcaaagaatactcca

SEQ ID NO: 18738 - DNA, 30 bp, unidentified
  source 1..30: mol_type = unassigned DNA; note = methanogen bacteria
atcagtgcggactttacaatcggatactgg

SEQ ID NO: 18739 - DNA, 30 bp, unidentified
  source 1..30: mol_type = unassigned DNA; note = methanogen bacteria
tttgcaagtggagcaatatatagctcaact

SEQ ID NO: 18740 - DNA, 108 bp, unidentified
  source 1..108: mol_type = unassigned DNA; note = methanogen bacteria
tacgtcggattcatcggagacggcaacctctatcctaacgcagtggagaaccacattgattggttcaagatcggcatctaccagctgaccttcggatactacatcgat

SEQ ID NO: 18741 - DNA, 78 bp, unidentified
  source 1..78: mol_type = unassigned DNA; note = methanogen bacteria
atgggcggacacctcgagtacaacgtcgtgttcaacgccgacaacctcgccgcagcatacgagaacaactccgagatg

SEQ ID NO: 18742 - DNA, 66 bp, unidentified
  source 1..66: mol_type = unassigned DNA; note = methanogen bacteria
atggcatgctccatcgccgtcaccggcggtcagatcgtcatcgaagagcccgagctcttcgcggtc

SEQ ID NO: 18743 - DNA, 30 bp, unidentified
  source 1..30: mol_type = unassigned DNA; note = methanogen bacteria
gaagtattcgaggagagctgcggaaccgag

SEQ ID NO: 18744 - DNA, 114 bp, unidentified
  source 1..114: mol_type = unassigned DNA; note = methanogen bacteria
tgggacggagtcttcaccttcatgggctccgagcactctgaaggtcagatccttcagtggatcgtcggtggatgggacaggcccaacgtcggtgtacactggctcgaggaactc

SEQ ID NO: 18745 - DNA, 51 bp, unidentified
  source 1..51: mol_type = unassigned DNA; note = methanogen bacteria
attgaacataataagttattttatgagttttctaatgtaaaatttatttct

SEQ ID NO: 18746 - DNA, 270 bp, unidentified
  source 1..270: mol_type = unassigned DNA; note = methanogen bacteria
attcatggatcttctattaatgaattaaatatttttaaagtttctcataaccctattttaggaatttccagagctatcaggactgatgaatatattgttaatacattatttgcgttttcacagtaccataatggatttcaatatttctccgatataattagggcagtaccaactgatgtgtttattgtttatggtcaacctgttttggatattgggatgattttcagaccatttttagttggatatttatttttaaatcagggccaggga

SEQ ID NO: 18747 - DNA, 159 bp, unidentified
  source 1..159: mol_type = unassigned DNA; note = methanogen bacteria
tcagtagatacaattaaattagtttttaacacggtttatccaggagcacttgtatttaatggggataattcattaaacactttagctgattatattccttcaatatttttccctatggcgccaaataatttaattcctaatgtatgcgaatgttcaatg

SEQ ID NO: 18748 - DNA, 51 bp, unidentified
  source 1..51: mol_type = unassigned DNA; note = methanogen bacteria
catttacctgaagctataataaaaatatttttaagagaccatataaatcac

SEQ ID NO: 18749 - DNA, 87 bp, unidentified
  source 1..87: mol_type = unassigned DNA; note = methanogen bacteria
gaggcattcggagcgttaggagaaatggttgcaggatatattgcaaatgaatatttagcttcattcatctgtgacggtatcatcggt

SEQ ID NO: 18750 - DNA, 108 bp, unidentified
  source 1..108: mol_type = unassigned DNA; note = methanogen bacteria
ttcccattaggtgtggaatatggatctgctcaaagtgtattgggtatgattggtactgctattgctccaatattcgctccattaggatttggaacttggcaggctgct

SEQ ID NO: 18751 - DNA, 84 bp, unidentified
  source 1..84: mol_type = unassigned DNA; note = methanogen bacteria
acattcggtactcttgcaggtatggaagaggatgatgaagaaggaatcactagtttggtccatgacacattcaccccattgtct

SEQ ID NO: 18752 - DNA, 57 bp, unidentified
  source 1..57: mol_type = unassigned DNA; note = methanogen bacteria
gagaataattatttaatttctaatttttcattaaatgattttattaatatattttca

SEQ ID NO: 18753 - DNA, 270 bp, unidentified
  source 1..270: mol_type = unassigned DNA; note = methanogen bacteria
attcacggatcatcaattaatgagatgaatcttttccatgtttctcataaacctcttctgggagtatccagaccaataagaagtgatgaatatgttgtaaatacaatgtttgcgttttctcaatatctaaatgactttgcgtatttttcagatattgttagagccactacaactgacatgtttattatctatggtcagcctgttctggatgtagctacaatctttagaccatttttaataggatatttatttttaaagcctgctcagggt

SEQ ID NO: 18754 - DNA, 159 bp, unidentified
  source 1..159: mol_type = unassigned DNA; note = methanogen bacteria
tctttagatactattaaaattatattaaatacctcttaccctagctctcagtcatttaatggaggaggcacccttaattctttattgtattatatgccaactatattctacccattagttcaggacaatctcacaatgaatgtttgtaattactcagta

SEQ ID NO: 18755 - DNA, 57 bp, unidentified
  source 1..57: mol_type = unassigned DNA; note = methanogen bacteria
aagtttccggatttgattgtggatttaacattaaggagccatatcaaaactagcagg

SEQ ID NO: 18756 - DNA, 99 bp, unidentified
  source 1..99: mol_type = unassigned DNA; note = methanogen bacteria
ttcggcccgtcccacagcatgtcgctgtccgaggcggccggcaatttggtctcggccatagacaaaggcgggaaagggctgaccaacgacgagctctac

SEQ ID NO: 18757 - DNA, 54 bp, unidentified
  source 1..54: mol_type = unassigned DNA; note = methanogen bacteria
cactctgctttggtgagcggattttctctttcaagttttttgaattatttttca

SEQ ID NO: 18758 - DNA, 270 bp, unidentified
  source 1..270: mol_type = unassigned DNA; note = methanogen bacteria
attcacggatcatcaattaatgagttgaattttttcgggcttaagcatgatataattttaggtgtttcaaggcagattcgtaccgatgagtttaatgtaaatacaatgctggctttttcgcaatactgtaacgattttgcttatttcagcgatattgtcagagctaatgctacggatatgtttttaatttatggtcagcctgtatgggatataggaatagttttaaagccatttttatggggttatcttttcttaaaccaggggcaaggt

SEQ ID NO: 18759 - DNA, 156 bp, unidentified
  source 1..156: mol_type = unassigned DNA; note = methanogen bacteria
tcgatggatactattaaaattttaatgaatactgtgtatccagctaatgaaatttttaatggaatgggtgaattgtcttatttcctcaactatgttccttcaatatttttttctattatgccggatggaatttcatcaaatgttgttgaagtttca

SEQ ID NO: 18760 - DNA, 54 bp, unidentified
  source 1..54: mol_type = unassigned DNA; note = methanogen bacteria
gtccttccggattttcttattgatattacattaagaggtcatgtgagaaatgcc

SEQ ID NO: 18761 - DNA, 54 bp, unidentified
  source 1..54: mol_type = unassigned DNA; note = methanogen bacteria
aatcaggctgtaaaaacagggttaaattttggaaatttttatcacttattttct

SEQ ID NO: 18762 - DNA, 270 bp, unidentified
  source 1..270: mol_type = unassigned DNA; note = methanogen bacteria
attcacggttcatccattaatgaacttaatttttttggtgtgaaacataacgtgctttttgggatttcaaggaatatgagatccgatgaatatattgtaaatactttatttgcattctcccaatatcataataattttggatacttttcagatattataagagcagcacctactgatatgtttattatatacggtcaggcggtttttgatattgctgtgatattcaggccattcaatattggatatctgtttttaaatcagggtatggga

SEQ ID NO: 18763 - DNA, 159 bp, unidentified
  source 1..159: mol_type = unassigned DNA; note = methanogen bacteria
aattcaatggatacggtaaagataattatgaatacggcttatccgagcggtgaaagatttaacggtgatggtgactggagttttctatttaattatttggcatcaatatttttcccaatgactaatgccaatattccattgaatacagttgaaaactca

SEQ ID NO: 18764 - DNA, 54 bp, unidentified
  source 1..54: mol_type = unassigned DNA; note = methanogen bacteria
ccactgcctgatccaatactctccataactttaagagaccatatgaaaacatca

SEQ ID NO: 18765 - DNA, 42 bp, unidentified
  source 1..42: mol_type = unassigned DNA; note = methanogen bacteria
gaaaattgctttgatattaggaatttaactggattattttca

SEQ ID NO: 18766 - DNA, 270 bp, unidentified
  source 1..270: mol_type = unassigned DNA; note = methanogen bacteria
atacatggttcatcaattaatgaacttaatatttttggtatcgaccataacgtattgatagggatttctcgtagtataaggtcagatgaatacaatgtaaatacattaatggcattttctcaatattataataactttgggtatttttcaagtatttttagagcaacaccaactgatatgtttatagtatatggtcaagcagttttagatattgctgtaatatttagaccattcaatataggatatttgtttttaaatcaaggtatggga

SEQ ID NO: 18767 - DNA, 156 bp, unidentified
  source 1..156: mol_type = unassigned DNA; note = methanogen bacteria
tcttatgaaacaattaaaatagtaatgaatactgcctatccaggtagtgaaatttttaatggctctggagaatggcataatcttcttaattatattgcttcagtatttttcccattaactaatataaatattccagtaaatacagtagaaaattct

SEQ ID NO: 18768 - DNA, 54 bp, unidentified
  source 1..54: mol_type = unassigned DNA; note = methanogen bacteria
atcctaccagattcaatagtttcaattacattaagaaaacatattaaaactaca

SEQ ID NO: 18769 - DNA, 72 bp, unidentified
  source 1..72: mol_type = unassigned DNA; note = methanogen bacteria
ttaggagaatatctggtagcctctgttggaaatgaaatgttaggttcattcctccaaaacggacttatcgga

SEQ ID NO: 18770 - DNA, 111 bp, unidentified
  source 1..111: mol_type = unassigned DNA; note = methanogen bacteria
ttgccatttggtgtggaatacggatcacaggaaagtatacttggtatgataggtagtgcaatagcccctatttttgctccgcttggtttttcaacctggcaagcaggtatt

SEQ ID NO: 18771 - DNA, 78 bp, unidentified
  source 1..78: mol_type = unassigned DNA; note = methanogen bacteria
tttaccacattaggtggacttgaagaagatgatgaggaaggaactgtcgcattagttcaagacttgttcacaccacta

SEQ ID NO: 18772 - DNA, 45 bp, unidentified
  source 1..45: mol_type = unassigned DNA; note = methanogen bacteria
gttagttgcagattaaatattaatgatttttttccattattttca

SEQ ID NO: 18773 - DNA, 270 bp, unidentified
  source 1..270: mol_type = unassigned DNA; note = methanogen bacteria
attcatggctcttctattaacgagcttaatctttttgggataaaacacgatttaatagctggtatttcaagatcaattagatcagatgaatatctggttaacacaatgcttgcattttcccaataccataacggattcggttatttttccgatattgttagagcagcacccactgacatgtttataatatatggtcaggctgtttttgatatagccgttatttttaggccattcaatattggatacttatttttaaatcagggtatgggt

SEQ ID NO: 18774 - DNA, 159 bp, unidentified
  source 1..159: mol_type = unassigned DNA; note = methanogen bacteria
tcacttgatacaataaaaataataatgaatactgcatatcctggcggtgaaagatttaacggtgccggtgaatgggaatatttctttaattatcttgcatcaatatttttcccattgacagaagttaatcttccaataaatgttgttgaacattctgtg

SEQ ID NO: 18775 - DNA, 54 bp, unidentified
  source 1..54: mol_type = unassigned DNA; note = methanogen bacteria
ccactgccggattctataatatctcttactttaagagaccatatgaaaacaaca

SEQ ID NO: 18776 - DNA, 45 bp, unidentified
  source 1..45: mol_type = unassigned DNA; note = methanogen bacteria
tctgtcgaaacacaattaaacattggaaatttaatagaaacattt

SEQ ID NO: 18777 - DNA, 270 bp, unidentified
  source 1..270: mol_type = unassigned DNA; note = methanogen bacteria
atacacggttcatcaatcagtgaattgaatatatttggcgttaatcacaagcctttaattggcatatcacgattcatgagatctgatgaatatcttgtaaacacattattcgcattttcacagtatccaaaccattttagctatttttccgaaattgtaagagcagcacctaccgacatgttcattgtatacggacaagctattttagatattgcagttatattcagaccatttaacatagggtatctgtttttaaatccaggtatggga

SEQ ID NO: 18778 - DNA, 159 bp, unidentified
  source 1..159: mol_type = unassigned DNA; note = methanogen bacteria
aattccatggataccattaaaatactcctcaatactgcatatcccggaggtgaagtatttaacggtgatggtacttggaactatttatttaattacattgcatccacttatttcccattaacatccgttaatatcccagtaaatactgttgaaaattct

SEQ ID NO: 18779 - DNA, 54 bp, unidentified
  source 1..54: mol_type = unassigned DNA; note = methanogen bacteria
cagttaccggattccattatttcaattacattaagaaaccatattaaaacttca

SEQ ID NO: 18780 - DNA, 66 bp, unidentified
  source 1..66: mol_type = unassigned DNA; note = methanogen bacteria
caggatataacagttgcaagtttaggagccagtgctttaatccatgaaggaacagttctttatcaa

SEQ ID NO: 18781 - DNA, 93 bp, unidentified
  source 1..93: mol_type = unassigned DNA; note = methanogen bacteria
gttattggtggttttatcactgctactggggaagtaattcctggagtaaatgaagcaatgttttatccagtattgggaattacatccttgcaa

SEQ ID NO: 18782 - DNA, 42 bp, unidentified
  source 1..42: mol_type = unassigned DNA; note = methanogen bacteria
ggcggaatttcaaatgtagcagttttaatttcaaatgccggt

SEQ ID NO: 18783 - DNA, 132 bp, unidentified
  source 1..132: mol_type = unassigned DNA; note = methanogen bacteria
tggcaaacatcccttggtggtacagaagttataaatggtgtaacatatgttggtgctcagaatatctactttgcacaactttcagattcaagtatagcccatatatctccagcggtcacacaatatttcggt

SEQ ID NO: 18784 - DNA, 87 bp, unidentified
  source 1..87: mol_type = unassigned DNA; note = methanogen bacteria
ttgaattttgctgtaggatgtacattttcctcaggtttactggatttgatctttttaggtatccttccaggtgctgaaagaacgagt

SEQ ID NO: 18785 - DNA, 129 bp, unidentified
  source 1..129: mol_type = unassigned DNA; note = methanogen bacteria
aaaataacacaaaaacttccaaataatgcaaaaggcacaataacctacacatatgccaatggagtcctaattaatatcatcaatgttaacgaatcattcgttttatccaaccttgatgcgggaacctat

SEQ ID NO: 18786 - DNA, 42 bp, unidentified
  source 1..42: mol_type = unassigned DNA; note = methanogen bacteria
atcattgtaaatgtaaaaaatggtatcggaatcagcacaatc

SEQ ID NO: 18787 - DNA, 33 bp, unidentified
  source 1..33: mol_type = unassigned DNA; note = methanogen bacteria
atcacaagtaaaccattcagcatagctaaagca

SEQ ID NO: 18788 - DNA, 63 bp, unidentified
  source 1..63: mol_type = unassigned DNA; note = methanogen bacteria
caagaaataataattgggcaattaggactcatttcattaatacatgaaggaactatcttattt

SEQ ID NO: 18789 - DNA, 93 bp, unidentified
  source 1..93: mol_type = unassigned DNA; note = methanogen bacteria
atttttggaaaagttattaatagtactggcgaattacttccaggtgcaaaagaagggatgattgctactatattaggaataccgacattacaa

SEQ ID NO: 18790 - DNA, 42 bp, unidentified
  source 1..42: mol_type = unassigned DNA; note = methanogen bacteria
tctggaattgtgtttttagcatcttatatttcaaatttagga

SEQ ID NO: 18791 - DNA, 135 bp, unidentified
  source 1..135: mol_type = unassigned DNA; note = methanogen bacteria
tggcaaacttcccttggaggtacacaagttataaatggagtaacttatgttggtgctcaaaatatttactttgcacaacttgcagattcaagtattcgtcacatatccccttctgtaacccaatattttggtgga

SEQ ID NO: 18792 - DNA, 87 bp, unidentified
  source 1..87: mol_type = unassigned DNA; note = methanogen bacteria
cttaattttgcagtaggatgtacattttcttcaggactattggatttaatctttttaggtatacttccaggtaatgatagaactgga

SEQ ID NO: 18793 - DNA, 144 bp, unidentified
  source 1..144: mol_type = unassigned DNA; note = methanogen bacteria
tttttattcactaattcaaattctaatacaattcctaatttaattggttattcaagaagtgatgttgaaatattattacattatttaaatttagattattctatatcagggtatgggtatgtagtaagtcaaaatattgcagag

SEQ ID NO: 18794 - DNA, 69 bp, unidentified
  source 1..69: mol_type = unassigned DNA; note = methanogen bacteria
acccaaatagatgaaaatactaaattagaattagctttggattcaaaaataaaaagttcagcaagtgaa

SEQ ID NO: 18795 - DNA, 66 bp, unidentified
  source 1..66: mol_type = unassigned DNA; note = methanogen bacteria
cctaagctgttttatccttcaatgagctctacatatatattgccttcatgggagcctgcatggagc

SEQ ID NO: 18796 - DNA, 51 bp, unidentified
  source 1..51: mol_type = unassigned DNA; note = methanogen bacteria
gtcatgtgggagtcttcaggagattcattctatattctcccttcaataagt

SEQ ID NO: 18797 - DNA, 66 bp, unidentified
  source 1..66: mol_type = unassigned DNA; note = methanogen bacteria
ccacagttattttatccgtcattgagtactacttataaattaccaagctggaaccctgcatggagt

SEQ ID NO: 18798 - DNA, 93 bp, unidentified
  source 1..93: mol_type = unassigned DNA; note = methanogen bacteria
catttccacaatggtacatatgataaaaccgaatctgaaaagatcaaaaaccaaacatattatttactcgataattactcagtctggagtgga

SEQ ID NO: 18799 - DNA, 39 bp, unidentified
  source 1..39: mol_type = unassigned DNA; note = methanogen bacteria
tctaatttcatagaagaagataatccaacaagacttaat

SEQ ID NO: 18800 - DNA, 87 bp, unidentified
  source 1..87: mol_type = unassigned DNA; note = methanogen bacteria
ggatttttcggctggatgggtccatatatagcggaaaatattggaaatgaagttttaggatcattcatctccaacggacttatcgga

SEQ ID NO: 18801 - DNA, 48 bp, unidentified
  source 1..48: mol_type = unassigned DNA; note = methanogen bacteria
ttcactgcaattcctgtatttgccatcggtccattcgttttaactcag

SEQ ID NO: 18802 - DNA, 111 bp, unidentified
  source 1..111: mol_type = unassigned DNA; note = methanogen bacteria
gttccgttcggtgttgaatacgcatccgacgacagtgcacttggtatgattggtacagcggttgcacctatatttgcccctctcggtttcggcgaatggcaggcaggtatt

SEQ ID NO: 18803 - DNA, 84 bp, unidentified
  source 1..84: mol_type = unassigned DNA; note = methanogen bacteria
ttaggaacgctggcaggcattgaggatgttgaaggtgatacagatgcaatggatgctatggttgcaagtttatttactccatta

SEQ ID NO: 18804 - DNA, 78 bp, unidentified
  source 1..78: mol_type = unassigned DNA; note = methanogen bacteria
ggttggttgggaccatacttagcagaacgtgctggaaacgaaattttaggttccttcattgccgacggtcttataggt

SEQ ID NO: 18805 - DNA, 48 bp, unidentified
  source 1..48: mol_type = unassigned DNA; note = methanogen bacteria
tttactgcaattccagtatttaaatttggaccattcgttttaactcag

SEQ ID NO: 18806 - DNA, 111 bp, unidentified
  source 1..111: mol_type = unassigned DNA; note = methanogen bacteria
gtaccgtttggtgttgaatatgcatctgccgacagtgcattaggaatgatcggtacagcggtttcaccaatttttgcccctctcggtttcggagaatggcaagcaggtatt

SEQ ID NO: 18807 - DNA, 87 bp, unidentified
  source 1..87: mol_type = unassigned DNA; note = methanogen bacteria
ctaggaacgctatcgggtgttgaagacgtcgaagcggatacggatgcgatggatgcaatggttgcaagtttatttaccccactgtct

SEQ ID NO: 18808 - DNA, 243 bp, unidentified
  source 1..243: mol_type = unassigned DNA; note = methanogen bacteria
gttaatataacaaacacaggcagttctcccattactccatcaagatccaatagggaagctggtcaaaacattactattaagggtgttgttaatggcaatattataaatacaactaaaatcactgatgaaaatggtgaaatcgttttagatgctggtgattatttgattattgttagccataagggagattcatactacacagaagttgctgaaacattatttacaaatatggcatttaatgta

SEQ ID NO: 18809 - DNA, 87 bp, unidentified
  source 1..87: mol_type = unassigned DNA; note = methanogen bacteria
gtaggattcgaaggattggttgaaatgatttatggtgctttaggcgagagcatgttatcttcatttatttgtgatggtattattggt

SEQ ID NO: 18810 - DNA, 48 bp, unidentified
  source 1..48: mol_type = unassigned DNA; note = methanogen bacteria
ttcgcagctattccagttttcgcattgggaccatttgttgtaactcaa

SEQ ID NO: 18811 - DNA, 114 bp, unidentified
  source 1..114: mol_type = unassigned DNA; note = methanogen bacteria
aatgttcctgcaggtgttgaaccggcatctgcggatagtgctttaggtgtaattggtactgcagtctcaccaatatttgctccattaggtttcggtgaatggcaagcaggtatt

SEQ ID NO: 18812 - DNA, 78 bp, unidentified
  source 1..78: mol_type = unassigned DNA; note = methanogen bacteria
tttgcatcgctggctggagttgatgaggaaaatgaggccgatatggatggactggttagggagttgtttactccatta

SEQ ID NO: 18813 - DNA, 90 bp, unidentified
  source 1..90: mol_type = unassigned DNA; note = methanogen bacteria
gatgaaggatttgcaatgttggcaggatatatggaaaccgttatctctgatccaactttattatcctttgtaaatgacggtatcatcggg

SEQ ID NO: 18814 - DNA, 48 bp, unidentified
  source 1..48: mol_type = unassigned DNA; note = methanogen bacteria
ttcggagcaattccggtatttgctttaggaccatttgtagtgactcaa

SEQ ID NO: 18815 - DNA, 111 bp, unidentified
  source 1..111: mol_type = unassigned DNA; note = methanogen bacteria
ctgccgttcggtgttgaatacggatctgcagacagtatattaggtatgatcggttcagtaattgcaccaatctttactccaatgggttacggaacctggcaagctggtatt

SEQ ID NO: 18816 - DNA, 78 bp, unidentified
  source 1..78: mol_type = unassigned DNA; note = methanogen bacteria
ttcggaacattatccggtgttgaagaggatgatgaagctggaatgactgcaatggttaaagacttgttcactccattg

SEQ ID NO: 18817 - DNA, 90 bp, unidentified
  source 1..90: mol_type = unassigned DNA; note = methanogen bacteria
gaagcaggattcacagcattatctgaatatttaagtgaagcgattaccaatcctactttagcatcatttatctgtgatggtcttattggt

SEQ ID NO: 18818 - DNA, 45 bp, unidentified
  source 1..45: mol_type = unassigned DNA; note = methanogen bacteria
tttgctgcagttccagtatttgctttaggacctattgtaattact

SEQ ID NO: 18819 - DNA, 108 bp, unidentified
  source 1..108: mol_type = unassigned DNA; note = methanogen bacteria
gtgccattcggtgttgaaccgggatcagcagaaagtgttttaggcatgattggatcagcaatttcacctatttttgcacctcttggttttgcaacatggcaagcaggt

SEQ ID NO: 18820 - DNA, 78 bp, unidentified
  source 1..78: mol_type = unassigned DNA; note = methanogen bacteria
ttcggtacattggctggtgttgaagaggatgatgaagaaggaatgtcttcaatgattcaagggttattcactccattg

SEQ ID NO: 18821 - DNA, 78 bp, unidentified
  source 1..78: mol_type = unassigned DNA; note = methanogen bacteria
gatattctggcaaattttgcaagaacattccttaataatcctgtcttagcatcttttgtatgtgatggagtaataggt

SEQ ID NO: 18822 - DNA, 45 bp, unidentified
  source 1..45: mol_type = unassigned DNA; note = methanogen bacteria
ttcgcagctattccagtatttgcatggggacctatagtaattacc

SEQ ID NO: 18823 - DNA, 108 bp, unidentified
  source 1..108: mol_type = unassigned DNA; note = methanogen bacteria
gtgccattcggcgttgaatatgcatcacagggaagtgttctgggcatgattggtagcgctatttcacctatatttggccctctcggtttcggccagtggcaggcgggt

SEQ ID NO: 18824 - DNA, 78 bp, unidentified
  source 1..78: mol_type = unassigned DNA; note = methanogen bacteria
ggtactttggcaggtgtcgatgaagcaaaccatgctgcaatgggtaatatgcttcatggattatttactcctttatca

SEQ ID NO: 18825 - DNA, 96 bp, unidentified
  source 1..96: mol_type = unassigned DNA; note = methanogen bacteria
tactggctgggagacagctatccccacgctgtggagagcagcatgcactggttctccatcgggagcctggacatcaacctcggttactacatcgac

SEQ ID NO: 18826 - DNA, 66 bp, unidentified
  source 1..66: mol_type = unassigned DNA; note = methanogen bacteria
gctatgggaagcctcgactactcggtcgtcttcaacatggacaacctcgaggccgcggaccagagc

SEQ ID NO: 18827 - DNA, 45 bp, unidentified
  source 1..45: mol_type = unassigned DNA; note = methanogen bacteria
ttcgcgctcggaatcgagtcgggcgacaccgccatgatggccgca

SEQ ID NO: 18828 - DNA, 33 bp, unidentified
  source 1..33: mol_type = unassigned DNA; note = methanogen bacteria
ttcgacgcgttcaacgacaccgctgacatcacc

SEQ ID NO: 18829 - DNA, 96 bp, unidentified
  source 1..96: mol_type = unassigned DNA; note = methanogen bacteria
ggatgggacggcgtgttcaccatctcgctccactccaccggctggcaggtcggcggcggcgaggctgacatgggattccactgggtcgaggagctc

SEQ ID NO: 18830 - DNA, 87 bp, unidentified
  source 1..87: mol_type = unassigned DNA; note = methanogen bacteria
gtggcattcggatctctggccgaatgggtcggcggattcatcgcaaatgaatatctcgcatcattcatctgtgacggtatcatcggt

SEQ ID NO: 18831 - DNA, 108 bp, unidentified
  source 1..108: mol_type = unassigned DNA; note = methanogen bacteria
ttcccattaggtgttgaatacggatcagctgacagtgtattaggtatgattggtaatgtaatagcaccgatattcgctccattaggatttggaacctggcaagctgct

SEQ ID NO: 18832 - DNA, 78 bp, unidentified
  source 1..78: mol_type = unassigned DNA; note = methanogen bacteria
ttcggtaccttggcgggtatggaagaggatgacgaagccggtatcactaaattgatacatgatactttcacaccattg

SEQ ID NO: 18833 - DNA, 39 bp, unidentified
  source 1..39: mol_type = unassigned DNA; note = methanogen bacteria
gtaacaattcccaatgctccatccttttcaccggagcta

SEQ ID NO: 18834 - DNA, 45 bp, unidentified
  source 1..45: mol_type = unassigned DNA; note = methanogen bacteria
tatattgatggattcgatttagcatatacatttactgatctaatc

SEQ ID NO: 18835 - DNA, 54 bp, unidentified
  source 1..54: mol_type = unassigned DNA; note = methanogen bacteria
gactttagagccataacagatctccttttcaatgattcaccccttgaatttaga

SEQ ID NO: 18836 - DNA, 75 bp, unidentified
  source 1..75: mol_type = unassigned DNA; note = methanogen bacteria
atgctttcaaagtttgtggagggcttcattccaaatcagtatcttgcatcattcatatgcgacggtgtcattgga

SEQ ID NO: 18837 - DNA, 111 bp, unidentified
  source 1..111: mol_type = unassigned DNA; note = methanogen bacteria
ttcccacttggagtgaaatatggatcagcagacagcatccttggaatgataggtaacgcgattgcacctgtttttgctccattggggttcggcacatggcaggctgcagta

SEQ ID NO: 18838 - DNA, 81 bp, unidentified
  source 1..81: mol_type = unassigned DNA; note = methanogen bacteria
ttcggtactcttggaggtgttggtgaggatgatgaaagcggaatgacccatcttgtacaggaaacattcacgccgctttca

SEQ ID NO: 18839 - DNA, 111 bp, unidentified
  source 1..111: mol_type = unassigned DNA; note = methanogen bacteria
gaaaataccatttttggccagtacattaaccctgcagtgactgctgttgttgttcagtatattccttgggtaccgattcaaaacctatttattggtgaatatggtatcgtc

SEQ ID NO: 18840 - DNA, 153 bp, unidentified
  source 1..153: mol_type = unassigned DNA; note = methanogen bacteria
ggaattttccaatggatcatcgcatgcatcagccctgttgtcaatgcgattggtcttccaacttcaacaagttcctcatttgtgctgggattctttagaagagactttggtgcagcaggacttatgacaatccagaatcaattgacaggagtt

SEQ ID NO: 18841 - DNA, 240 bp, unidentified
  source 1..240: mol_type = unassigned DNA; note = methanogen bacteria
tacaatactgatgttgtcgatgttgaattcactgttcggaaagtggttaatgaggttttagtctctgcatatgttcagaaggaagccattgattctgtcaacataaccattactgctgatgttgatggaatatatgttcttaatgttgggggagtgtctaagctcatttctgttgaaggtggaaagggttctacatattgcattttgcctcctagaacctatgaagctaatgcgtctttt

SEQ ID NO: 18842 - DNA, 63 bp, unidentified
  source 1..63: mol_type = unassigned DNA; note = methanogen bacteria
cattcagccaaagtattcacttcaaaaactcaaaatcaaggatttgattcagcatatacgccc

SEQ ID NO: 18843 - DNA, 81 bp, unidentified
  source 1..81: mol_type = unassigned DNA; note = methanogen bacteria
caaaatgaagaagacctgaaagtatataaaactgcaataagaaataatttatctaaatttccagttatagatgtttctggc

SEQ ID NO: 18844 - DNA, 60 bp, unidentified
  source 1..60: mol_type = unassigned DNA; note = methanogen bacteria
gattatttatttatgtttaatagaactaatgtaaaagatgaaaatgatttttttattaaa

SEQ ID NO: 18845 - DNA, 33 bp, unidentified
  source 1..33: mol_type = unassigned DNA; note = methanogen bacteria
ggatattcatgtgatattaacacagaatttact

SEQ ID NO: 18846 - DNA, 81 bp, unidentified
  source 1..81: mol_type = unassigned DNA; note = methanogen bacteria
tttatgcaaaattttgatggagttattgcttatactttcttagtttttgtagtgacaaaaataaaagttatgtatgagcat

SEQ ID NO: 18847 - DNA, 60 bp, unidentified
  source 1..60: mol_type = unassigned DNA; note = methanogen bacteria
ggtcagtatgtcggagatcatgttggaaatgagattcttgcttcattgctcaataggggt

SEQ ID NO: 18848 - DNA, 111 bp, unidentified
  source 1..111: mol_type = unassigned DNA; note = methanogen bacteria
ttgccggggggagaagctacttatggattggaaagcagttatttaggtatgataggtactgcaattgctccaattttcgctcctttaggttttggtacttggcaggcagct

SEQ ID NO: 18849 - DNA, 75 bp, unidentified
  source 1..75: mol_type = unassigned DNA; note = methanogen bacteria
tcaactcttggaggttttgaagatgatgatgaaacaggaaccatttctgttattaatgaccttttcacaccgttg

SEQ ID NO: 18850 - DNA, 78 bp, unidentified
  source 1..78: mol_type = unassigned DNA; note = methanogen bacteria
acaattcttgctaattttgcggcaggtttcatatcaaatccatatcttgaatcattcatctgtgatgctgtgattgga

SEQ ID NO: 18851 - DNA, 108 bp, unidentified
  source 1..108: mol_type = unassigned DNA; note = methanogen bacteria
ttcccattaggcgttaagtatgcgtccgcagaaagttaccttggcatgattggtaacttcatcgctccgattttcgctccgttaggatttggaacctggcaggccact

SEQ ID NO: 18852 - DNA, 81 bp, unidentified
  source 1..81: mol_type = unassigned DNA; note = methanogen bacteria
ttcggtaccatttcaggtatggagggggatgagaataccggcagaatgaatcatgtgctccatgaccttttcactccccta

SEQ ID NO: 18853 - DNA, 90 bp, unidentified
  source 1..90: mol_type = unassigned DNA; note = methanogen bacteria
gaaggatttggaattttaggtgaaatggtggcagcagctcttggtgatggaatgctcacctcatttatcgtagatggtatcatcggcgga

SEQ ID NO: 18854 - DNA, 108 bp, unidentified
  source 1..108: mol_type = unassigned DNA; note = methanogen bacteria
ttcccagctggagtggaatatggttctcaagaaagtgcaatcggtatgattggtactgcagtagcacctgtattcgcacctctcggattcggcagctggcaacctgca

SEQ ID NO: 18855 - DNA, 75 bp, unidentified
  source 1..75: mol_type = unassigned DNA; note = methanogen bacteria
agttcactcttcggagtagccgaggagggagcgggaatagcggcggcaatgcatggaatctttactccgttaacc

SEQ ID NO: 18856 - DNA, 75 bp, unidentified
  source 1..75: mol_type = unassigned DNA; note = methanogen bacteria
cttctgggggagtggattatttcgattctcggacattcaatgctctcatcatttttagttgacggcgtaatcggc

SEQ ID NO: 18857 - DNA, 105 bp, unidentified
  source 1..105: mol_type = unassigned DNA; note = methanogen bacteria
ttccctgcaggagtcacctacggatcacaggaaagtttcataggcatgataggaaccgcaatcgctccgatatttgctcctcttggatttggcagttggcaggct

SEQ ID NO: 18858 - DNA, 75 bp, unidentified
  source 1..75: mol_type = unassigned DNA; note = methanogen bacteria
agttcattattcggagtggctgaaggaagctttgccatgatgaatgcaatgcatggggttttcacaccgctttca

SEQ ID NO: 18859 - DNA, 81 bp, unidentified
  source 1..81: mol_type = unassigned DNA; note = methanogen bacteria
ttcggatcaatagcggaatttgttgcaggatacattgcaaatgaatacctagcatcattcatctgtgacggaatcatcggt

SEQ ID NO: 18860 - DNA, 108 bp, unidentified
  source 1..108: mol_type = unassigned DNA; note = methanogen bacteria
ttcccattaggtgtcgaatacggatctgccgaaagtgtattaggtatgatcggttcagctatcgcaccaatctttgctccattaggatttggaacctggcaagctgct

SEQ ID NO: 18861 - DNA, 78 bp, unidentified
  source 1..78: mol_type = unassigned DNA; note = methanogen bacteria
ttcggtacattagccggattggaagaggacgatgaagaaggaattaccaatttggtgcatgacacattcacaccattg

SEQ ID NO: 18862 - DNA, 66 bp, unidentified
  source 1..66: mol_type = unassigned DNA; note = methanogen bacteria
actcaatggggagaaatggcggcagcggcaatacctaatccatatattgcctcatttgttcaaaaa

SEQ ID NO: 18863 - DNA, 108 bp, unidentified
  source 1..108: mol_type = unassigned DNA; note = methanogen bacteria
ttcccattgggagtggcttacggatcacagcaaagtattttgggaatgatcggttctgcagttgcacctatatttgctcctctcggttttggaacatggcaggcagca

SEQ ID NO: 18864 - DNA, 75 bp, unidentified
  source 1..75: mol_type = unassigned DNA; note = methanogen bacteria
ggaacattgggcggccttgatgaagacgatgaagagggcataacaagtttggttcatgatacattcactccgctg

SEQ ID NO: 18865 - DNA, 69 bp, unidentified
  source 1..69: mol_type = unassigned DNA; note = methanogen bacteria
ggtgaatatttagctgaggctgttggaaatgaagtgctcggttcattactcgaaaaaggtatcattggc

SEQ ID NO: 18866 - DNA, 111 bp, unidentified
  source 1..111: mol_type = unassigned DNA; note = methanogen bacteria
gttccattcggtgtcgaatatggatcacaggaaagtgttcttggtatgataggttctgcgattgcacctatttttgccccacttggtttttccacatggcaagcaggtatt

SEQ ID NO: 18867 - DNA, 78 bp, unidentified
  source 1..78: mol_type = unassigned DNA; note = methanogen bacteria
ttcaccacattaggtggacttgaagaagatgacgaagaaggaacaatttcattggtacatgatttattcactccatta

SEQ ID NO: 18868 - DNA, 75 bp, unidentified
  source 1..75: mol_type = unassigned DNA; note = methanogen bacteria
tggtttggtgaatatttagctggtgctgtcggaaatgaaatattgggttcttttctccaagacggaattattggt

SEQ ID NO: 18869 - DNA, 111 bp, unidentified
  source 1..111: mol_type = unassigned DNA; note = methanogen bacteria
gtcccattcggtgtcgaatatggatcacaagaaagtgttcttggtatgataggttctgcaattgcacctgtattcgccccactagggttttccacatggcaagcaggtatt

SEQ ID NO: 18870 - DNA, 78 bp, unidentified
  source 1..78: mol_type = unassigned DNA; note = methanogen bacteria
ttcaccacattaggtggacttgaagaagatgacgaagaaggaacaatagctttggtacatgatttattcactccatta

SEQ ID NO: 18871 - DNA, 87 bp, unidentified
  source 1..87: mol_type = unassigned DNA; note = methanogen bacteria
gcaggatttgctgcacttggtgaatatctggccgaagcggttggaaatgagatgttaggttcattcctccaagatgggctcattggt

SEQ ID NO: 18872 - DNA, 108 bp, unidentified
  source 1..108: mol_type = unassigned DNA; note = methanogen bacteria
ttgcctatgggtgtagaatacggatcccaagaatgtgtattaggtatgattggtactgcaattgcaccaatatttgctccgttaggttttggaacatggcaagctggt

SEQ ID NO: 18873 - DNA, 75 bp, unidentified
  source 1..75: mol_type = unassigned DNA; note = methanogen bacteria
gctactttaggtggacttgaagaagatgatgaagaaggtgtaacacagttagttcatgacacatttactccgtta

SEQ ID NO: 18874 - DNA, 78 bp, unidentified
  source 1..78: mol_type = unassigned DNA; note = methanogen bacteria
ttctcaatattgactcatgcgatatcttcatacatgcctcatggcatcctaacttccttgatttgtaacggtataatt

SEQ ID NO: 18875 - DNA, 108 bp, unidentified
  source 1..108: mol_type = unassigned DNA; note = methanogen bacteria
atcttcccgtggggtggaacaaatcctaaaatgagtcttttgggcataataggttccttttttgctccaattttcgccccgttaggatttggaacctggcaggctgcc

SEQ ID NO: 18876 - DNA, 78 bp, unidentified
  source 1..78: mol_type = unassigned DNA; note = methanogen bacteria
ttcggaactttggcaggaatggattccaatgatcatgcgcgcatcaccaatttgattcatgacacattcactccgctg

SEQ ID NO: 18877 - DNA, 69 bp, unidentified
  source 1..69: mol_type = unassigned DNA; note = methanogen bacteria
ggtgaatacctggcaggtgccgttggaaatgaagttctcggttccttcttagaaaaaggtattatcggg

SEQ ID NO: 18878 - DNA, 108 bp, unidentified
  source 1..108: mol_type = unassigned DNA; note = methanogen bacteria
ttaccatttggtgttgaatacggatcacaggaaagtattcttggtatgattggtagtataatttcaccaatattaatccctcttggtttcggaacctggcaggctggt

SEQ ID NO: 18879 - DNA, 78 bp, unidentified
  source 1..78: mol_type = unassigned DNA; note = methanogen bacteria
ttcgctacacttaatggacttgaagaagatgatgaagaaggtactatgtcagtggttcaggaaattttcacaccactg

SEQ ID NO: 18880 - DNA, 78 bp, unidentified
  source 1..78: mol_type = unassigned DNA; note = methanogen bacteria
gtaatgctttcaaattttgtggcaggtcacattccaaatgagtatttggcgtcattcatatgtgatgcggttattgga

SEQ ID NO: 18881 - DNA, 108 bp, unidentified
  source 1..108: mol_type = unassigned DNA; note = methanogen bacteria
ttcccgttaggagtcaaatatggatcagctgatagtatattgggtatgatcggtagtttcatcgctccaatttttgctccattaggattcggtacatggcaggcggct

SEQ ID NO: 18882 - DNA, 75 bp, unidentified
  source 1..75: mol_type = unassigned DNA; note = methanogen bacteria
ggtactcttggaggcatggatgctgatgatgaaagtggtataactcatttgatacatgatacattcactccattg

SEQ ID NO: 18883 - DNA, 87 bp, unidentified
  source 1..87: mol_type = unassigned DNA; note = methanogen bacteria
gaagcattcggcgctttaggggaatttgtagccggattcattgcaaacgaatatctttcctccttcatctgtgacggtatcatcggt

SEQ ID NO: 18884 - DNA, 108 bp, unidentified
  source 1..108: mol_type = unassigned DNA; note = methanogen bacteria
ttcccattaggtgttgaatacggatccgccgaaagcctattaggtatgattggttcattcattgctccaatctttgccccattaggattcggaacctggcaggctgcc

SEQ ID NO: 18885 - DNA, 78 bp, unidentified
  source 1..78: mol_type = unassigned DNA; note = methanogen bacteria
ttcggtacattggcaggtatggaagaggatgatgaagaaggaatcaccagcttagtgcatgataccttcacaccattg

SEQ ID NO: 18886 - DNA, 69 bp, unidentified
  source 1..69: mol_type = unassigned DNA; note = methanogen bacteria
ggaagttggatcgcttctttcatttctaattattatcttaaagcatttatttgtgatgctattattggt

SEQ ID NO: 18887 - DNA, 108 bp, unidentified
  source 1..108: mol_type = unassigned DNA; note = methanogen bacteria
ttccctatgggtgtaaaatacggatctggtgatagttatttgggtatgattggaaatgcaatcgctccgattttcatcccattaggttttggaacctggcaggcggct

SEQ ID NO: 18888 - DNA, 78 bp, unidentified
  source 1..78: mol_type = unassigned DNA; note = methanogen bacteria
ttcggtactattgcaggtatggaagaaattgatgagaatgggatgagtccatttttacatgaccttttcactccgtta

SEQ ID NO: 18889 - DNA, 90 bp, unidentified
  source 1..90: mol_type = unassigned DNA; note = methanogen bacteria
gataatggatttatcatgttggctgattttgtagcaggatatatttccaatgaatatttacgttcattcgtctgtaatggtattattggt

SEQ ID NO: 18890 - DNA, 114 bp, unidentified
  source 1..114: mol_type = unassigned DNA; note = methanogen bacteria
agttacccatggggtgtgaaatatggatctgaacaaagtgttttgggtatgattggtaatgttgttgctccaatttttgctcctttaggatttggaacctggcaagcgactgta

SEQ ID NO: 18891 - DNA, 78 bp, unidentified
  source 1..78: mol_type = unassigned DNA; note = methanogen bacteria
ttcggtacattagcaggtatgcaaggagatgatggagatggaattacttcattggtgcatgatacattcacaccattg

SEQ ID NO: 18892 - DNA, 75 bp, unidentified
  source 1..75: mol_type = unassigned DNA; note = methanogen bacteria
gctttaggtgcatgggttgcttctttcctcggagaaggtttattctcctcattaatctgtgacggtattattggt

SEQ ID NO: 18893 - DNA, 105 bp, unidentified
  source 1..105: mol_type = unassigned DNA; note = methanogen bacteria
ttcccatggggaggaacagatcctcaaatgagtcttttaggtatgattggtactgtgattgcaccgatattcgccccattaggattcggaacctggcaggccgct

SEQ ID NO: 18894 - DNA, 78 bp, unidentified
  source 1..78: mol_type = unassigned DNA; note = methanogen bacteria
ttcggtactttagcaggtatggaagaggatgacgaagaaggtattactgctttggtacatgatactttcaccccattg

SEQ ID NO: 18895 - DNA, 87 bp, unidentified
  source 1..87: mol_type = unassigned DNA; note = methanogen bacteria
ggattttttgacgcactcaaagaaattgtaggaggatatatctctaatgagcttttatcctcatttatctgtgatggtatcattgga

SEQ ID NO: 18896 - DNA, 108 bp, unidentified
  source 1..108: mol_type = unassigned DNA; note = methanogen bacteria
atttacccatggggaggaacagatcctcaaatgagtcttttaggtattattggtagtgtaatttctccaatctttgccccattaggatttggaacatggcaagctgct

SEQ ID NO: 18897 - DNA, 78 bp, unidentified
  source 1..78: mol_type = unassigned DNA; note = methanogen bacteria
tttggtacattagcaggtatggaagaagatgatgaggaaggaataactaatttaatacatgatacatttaatcctttg

SEQ ID NO: 18898 - DNA, 78 bp, unidentified
  source 1..78: mol_type = unassigned DNA; note = methanogen bacteria
aatatgctttctgaatttctggccagttttattactaatccatatttaacatcatttttatgtgatgcggttattgga

SEQ ID NO: 18899 - DNA, 108 bp, unidentified
  source 1..108: mol_type = unassigned DNA; note = methanogen bacteria
ttcccgttaggtgttaaatacggatctgctgacagtctattaggtatgataggtagctttatcgccccaatttttgctccgttaggattcggcacatggcaagcggct

SEQ ID NO: 18900 - DNA, 75 bp, unidentified
  source 1..75: mol_type = unassigned DNA; note = methanogen bacteria
ggtactcttggaggaatgaacgaagatgatgaaaatggtatgacacatttaatacaggatactttcaccccattg

SEQ ID NO: 18901 - DNA, 87 bp, unidentified
  source 1..87: mol_type = unassigned DNA; note = methanogen bacteria
gatgcttttggaatgctttcaaattttttggcagcccacattccaaatgtgtatttggcatcattcatatgtgatgcggttattggg

SEQ ID NO: 18902 - DNA, 108 bp, unidentified
  source 1..108: mol_type = unassigned DNA; note = methanogen bacteria
ttcccgttaggggtcaaatacggatcacccgacagtatattgggtatgattggcagttttctagctccaatttttgccccattaggattcggtacatggcaggcggct

SEQ ID NO: 18903 - DNA, 75 bp, unidentified
  source 1..75: mol_type = unassigned DNA; note = methanogen bacteria
ggtactcttggaggcatggatgctgatgatgaaagcggcataacccatttgatacatgatacattcactccattg

SEQ ID NO: 18904 - DNA, 69 bp, unidentified
  source 1..69: mol_type = unassigned DNA; note = methanogen bacteria
gcagttgtggtgtgtccggcaattccaaatccttttttagcttcttttgttgaaaaaggaatttttggc

SEQ ID NO: 18905 - DNA, 108 bp, unidentified
  source 1..108: mol_type = unassigned DNA; note = methanogen bacteria
ttcccattgggtgttgcctatggttctcagcaaagtttactgggtatgattggctctactattgcacctattttcaaacctattggttttggaacctggcaggcggct

SEQ ID NO: 18906 - DNA, 75 bp, unidentified
  source 1..75: mol_type = unassigned DNA; note = methanogen bacteria
ggcactttgggtggtcttgaggaagatgatgaagagggaattatcaggttggttcatgatgttttcacacctctg

SEQ ID NO: 18907 - DNA, 87 bp, unidentified
  source 1..87: mol_type = unassigned DNA; note = methanogen bacteria
cagggattccgaatgctttcaggattcgttgcaggatacattcccaaccagtacctgtcatcattcatatgcgatgcagtcataggg

SEQ ID NO: 18908 - DNA, 108 bp, unidentified
  source 1..108: mol_type = unassigned DNA; note = methanogen bacteria
ttcccgttgggcgttaagtacggttctgccgatagctatcttgggatgatcggcaatttcatatctccggttttcgccccattgggattcggaacatggcaggctgct

SEQ ID NO: 18909 - DNA, 78 bp, unidentified
  source 1..78: mol_type = unassigned DNA; note = methanogen bacteria
ggaactcttgcgggcatggagggggatgatgaaagcggaatcactcatctcatacatgatacgttcactccattgtca

SEQ ID NO: 18910 - DNA, 87 bp, unidentified
  source 1..87: mol_type = unassigned DNA; note = methanogen bacteria
caaggatttagcgctttggctgaagctgtagcaggatatatttctaatgaatatttagcttcattcatctgtgacggtattattggt

SEQ ID NO: 18911 - DNA, 108 bp, unidentified
  source 1..108: mol_type = unassigned DNA; note = methanogen bacteria
ttcccattaggtgtagaatatggatccgaacaaagtgttttaggtatgataggtactttcatctccccaattttcgctcctttaggatttggaacatggcaagcggct

SEQ ID NO: 18912 - DNA, 78 bp, unidentified
  source 1..78: mol_type = unassigned DNA; note = methanogen bacteria
ttcggtacattagcaggtatggaagaagatgacgaagagggaatcacttcattaatccaggaaaccttcacgccttta

SEQ ID NO: 18913 - DNA, 72 bp, unidentified
  source 1..72: mol_type = unassigned DNA; note = methanogen bacteria
cttgctgaatgggttggaacattcattgccaatgaatacttagcttcattcatctgtgacggtatcatcggt

SEQ ID NO: 18914 - DNA, 108 bp, unidentified
  source 1..108: mol_type = unassigned DNA; note = methanogen bacteria
ttcccattaggtgttgaattcggatcagctgacagtgtgttaggtatgatcggtggtgcaatcgctccaattttcgcaccattaggatttggaacctggcaagctgga

SEQ ID NO: 18915 - DNA, 81 bp, unidentified
  source 1..81: mol_type = unassigned DNA; note = methanogen bacteria
ttcggtactttagctggtatggaagaggatgacgaagagggtatcacccaattggtacatgatactttcactccattgtct

SEQ ID NO: 18916 - DNA, 81 bp, unidentified
  source 1..81: mol_type = unassigned DNA; note = methanogen bacteria
tttggaatgcttgcggagtttgtaggttcatttattacaaacgaatatttagcttcatttatctgtgatggtattattggt

SEQ ID NO: 18917 - DNA, 108 bp, unidentified
  source 1..108: mol_type = unassigned DNA; note = methanogen bacteria
ttcccattaggtgtggaatatggatctgcagatagtgttttaggaatgataggtaatactattgcaccaatatttgctcctttaggattcggaacctggcaagcggct

SEQ ID NO: 18918 - DNA, 78 bp, unidentified
  source 1..78: mol_type = unassigned DNA; note = methanogen bacteria
ttcggtacattagcaggtatggaagaagatgatgaggatggaattacttcattagtccaggatacgttcacacctcta

SEQ ID NO: 18919 - DNA, 84 bp, unidentified
  source 1..84: mol_type = unassigned DNA; note = methanogen bacteria
tttttcaagtttctttcaggggaggttgctgtatatatagccaatccatatctcaaatcattcatttgtgatgcggtcatcggt

SEQ ID NO: 18920 - DNA, 111 bp, unidentified
  source 1..111: mol_type = unassigned DNA; note = methanogen bacteria
ttcccattgggtgtaaaatatgcctctgccgacagtctgttgggtcagatcggaagcgttattgcccctatttttgctccgttaggatttggaacatggcaagcggctgtt

SEQ ID NO: 18921 - DNA, 81 bp, unidentified
  source 1..81: mol_type = unassigned DNA; note = methanogen bacteria
ttcggaactctttcaggcatcagcggtgatgacaatgaaggaattacaagaatagttcaggatactttcacaccactttca

SEQ ID NO: 18922 - DNA, 78 bp, unidentified
  source 1..78: mol_type = unassigned DNA; note = methanogen bacteria
ggtcttttggccgagtttgttgcttcttaccttggtgatggtttgcttgcatcatttgtatgtgacggtatcattgga

SEQ ID NO: 18923 - DNA, 105 bp, unidentified
  source 1..105: mol_type = unassigned DNA; note = methanogen bacteria
ttcccatggggaggatcagaacctcaaatgagtcttttaggaataatcggtactgcaatcgctccaatatttgctccgttaggattcggaacatggcaggctgct

SEQ ID NO: 18924 - DNA, 81 bp, unidentified
  source 1..81: mol_type = unassigned DNA; note = methanogen bacteria
ttcggtactttggcaggtatggaagaggatgatgaagagggaatcacaaatttggtacatgatacattcactccattgtcc

SEQ ID NO: 18925 - DNA, 66 bp, unidentified
  source 1..66: mol_type = unassigned DNA; note = methanogen bacteria
cctaatctgttttatccgtcaatgagttccacttatatactgccgtcatgggaacctgcatggagc

SEQ ID NO: 18926 - DNA, 51 bp, unidentified
  source 1..51: mol_type = unassigned DNA; note = methanogen bacteria
gttatgtgggaatcttcaggagattcattctatatcctgccttcaatatct

SEQ ID NO: 18927 - DNA, 57 bp, unidentified
  source 1..57: mol_type = unassigned DNA; note = methanogen bacteria
ggccaaattgccgcttcatcaatacctaatccatatctggcatcatttgttcaaaag

SEQ ID NO: 18928 - DNA, 108 bp, unidentified
  source 1..108: mol_type = unassigned DNA; note = methanogen bacteria
tttccattgggagtggcttacggatcacagcaaagccttttgggaatgataggttctgcagttgcaccaatttttgcacctcttggttttggaacctggcaggcagct

SEQ ID NO: 18929 - DNA, 75 bp, unidentified
  source 1..75: mol_type = unassigned DNA; note = methanogen bacteria
gggacattgggtggtcttgatgaagatgacgaagagggcataacaagtttggttcgtgaaacattcactccattg

SEQ ID NO: 18930 - DNA, 87 bp, unidentified
  source 1..87: mol_type = unassigned DNA; note = methanogen bacteria
gaggcattcggagctttgggtgaattcgtttcaggatttatcgctaacgaatacttatcatcattcatctgtgacggtatcatcgga

SEQ ID NO: 18931 - DNA, 108 bp, unidentified
  source 1..108: mol_type = unassigned DNA; note = methanogen bacteria
ttcccgttaggtgttgaatacggatcagcagacagtctcttaggtatgatcggttcatttattgctccgatttttgctccattaggatttggaacctggcaggcagct

SEQ ID NO: 18932 - DNA, 78 bp, unidentified
  source 1..78: mol_type = unassigned DNA; note = methanogen bacteria
ttcggtacattggcaggtatggaagaggatgatgaagaaggaattaccaatctggtacatgatacattcacaccttta

SEQ ID NO: 18933 - DNA, 87 bp, unidentified
  source 1..87: mol_type = unassigned DNA; note = methanogen bacteria
gaaggattttctcttctggcggattttgtcagcggatttattgcagatgaatacctccgctcatttgtctgtgacggtatcataggt

SEQ ID NO: 18934 - DNA, 108 bp, unidentified
  source 1..108: mol_type = unassigned DNA; note = methanogen bacteria
ttcccgttaggtgttgagtacggatctaaggaaagtgtgctgggtattatcggcagtgccattgccccaatatttgctcctctgggtttcggattctggcaggctgct

SEQ ID NO: 18935 - DNA, 75 bp, unidentified
  source 1..75: mol_type = unassigned DNA; note = methanogen bacteria
ggtactcttggaggtatgaatgaagatgatgaagggggtattactgatttgattcagaatacattcactccattg

SEQ ID NO: 18936 - DNA, 78 bp, unidentified
  source 1..78: mol_type = unassigned DNA; note = methanogen bacteria
ggcatattatgtggttggctgttagaaatcttcggtgaaggtttagtttcctcattacttatcaatggggtaatagga

SEQ ID NO: 18937 - DNA, 105 bp, unidentified
  source 1..105: mol_type = unassigned DNA; note = methanogen bacteria
ctacctcctggagtagaatacggctccataaacagtataattggtatcgtaggtaattgggtagcaccaatatttgaaccattaggatttggtttctggcaagca

SEQ ID NO: 18938 - DNA, 75 bp, unidentified
  source 1..75: mol_type = unassigned DNA; note = methanogen bacteria
ggtactttattcacaatatctgaagatgatcaggaaggaattactggtgtgttgggacaaatgtttacaccatta

SEQ ID NO: 18939 - DNA, 75 bp, unidentified
  source 1..75: mol_type = unassigned DNA; note = methanogen bacteria
gctttaggagaatgggtcgcctcattgcttggtgaaggaatgtttacctcattaatctgtgacggtatcattggt

SEQ ID NO: 18940 - DNA, 108 bp, unidentified
  source 1..108: mol_type = unassigned DNA; note = methanogen bacteria
atttacccatggggaggatcagaacctcaaatgagtcttttaggtatgattggtagtgctattgctccaatattcgcaccattaggatttggaacctggcaagctgct

SEQ ID NO: 18941 - DNA, 78 bp, unidentified
  source 1..78: mol_type = unassigned DNA; note = methanogen bacteria
ttcggtactttagcaggtatggaagaggatgatgaagaaggtattactaatttagtacatgatactttcacaccactg

SEQ ID NO: 18942 - DNA, 78 bp, unidentified
  source 1..78: mol_type = unassigned DNA; note = methanogen bacteria
ggaatgcttggtgattggatccttgcaagtcttggagaaaccatgctttcctccttcctcgtagacggacttattgga

SEQ ID NO: 18943 - DNA, 108 bp, unidentified
  source 1..108: mol_type = unassigned DNA; note = methanogen bacteria
ttccctgctggagttgaatacggatctcaagaaagtgctattggtactattggtactgtagtggcacctgtatttgcacctttaggatttggcgaatggcaacctgct

SEQ ID NO: 18944 - DNA, 72 bp, unidentified
  source 1..72: mol_type = unassigned DNA; note = methanogen bacteria
agttcactctttggagtggccgaagagggagccgccataaatgcagcaatgcatggtatctttaccccactt

SEQ ID NO: 18945 - DNA, 78 bp, unidentified
  source 1..78: mol_type = unassigned DNA; note = methanogen bacteria
ggaatgcttggtgagttcgttatcgcttcccttggtgaaaccatgctttcatccttccttgttgatggactcattgga

SEQ ID NO: 18946 - DNA, 111 bp, unidentified
  source 1..111: mol_type = unassigned DNA; note = methanogen bacteria
tacttccctgcaggagtagaatacggatctcaagaaagtgctatcggtactatcggtactgtaatcgcaccagtatttgctccattaggattcggcgaatggcaacctgct

SEQ ID NO: 18947 - DNA, 72 bp, unidentified
  source 1..72: mol_type = unassigned DNA; note = methanogen bacteria
agttcgctatttggagttgccgaggagggagccggaatcgccgcagcaatgcatggaatattcactccactt

SEQ ID NO: 18948 - DNA, 81 bp, unidentified
  source 1..81: mol_type = unassigned DNA; note = methanogen bacteria
tttggaatgcttattgactttacagttttatcacttggtgactccatgctttcatcattcctcgttaatgggctcattgga

SEQ ID NO: 18949 - DNA, 111 bp, unidentified
  source 1..111: mol_type = unassigned DNA; note = methanogen bacteria
tacttcccagcaggtgttgaatacggatctcaagaaagtgctatcggtactttaggtactgcaattgcaccagtatttgctcctttaggatttggcgaatggcaaccatct

SEQ ID NO: 18950 - DNA, 72 bp, unidentified
  source 1..72: mol_type = unassigned DNA; note = methanogen bacteria
agttccctatttggcgttgccgaggagggagcgggaatcgccgctgctatgcatggaatattcactccgctt

SEQ ID NO: 18951 - DNA, 123 bp, unidentified
  source 1..123: mol_type = unassigned DNA; note = methanogen bacteria
gtagacttcttggaaaacacaatattcggccaatacatcaaccctgcagtaactgctgtggtcgttcaatatattccgtgggtgccgattcaaaatctctttgtaggtgaatacggtatagta

SEQ ID NO: 18952 - DNA, 153 bp, unidentified
  source 1..153: mol_type = unassigned DNA; note = methanogen bacteria
ggcattttccaatggatcatcgcttgcataagccctgtggttcatgcaattggtcttccaacatcaacaagttcctcctttgtacttggattctttagaagggactttggtgctgctggacttatgaccatccaaagtcaattgactggagtt

SEQ ID NO: 18953 - DNA, 111 bp, unidentified
  source 1..111: mol_type = unassigned DNA; note = methanogen bacteria
gaaaacgttctatttggtcagtacattaatcctcatataacttcacttgtggtccaatacattccatgggtgccgattcaagacttgattgtaggtccttatggtatagtg

SEQ ID NO: 18954 - DNA, 153 bp, unidentified
  source 1..153: mol_type = unassigned DNA; note = methanogen bacteria
ggtattttccaatggattatagcttgtgtaagtcctttagtaaatgcaattggccttccagactctacaagttcatcatttgttcttggcttctttagaagagactttggtgctgctggattaatgacaattaaaaatagcttgacaggtgtt

SEQ ID NO: 18955 - DNA, 33 bp, unidentified
  source 1..33: mol_type = unassigned DNA; note = methanogen bacteria
cacggccgcagggggaacaggggatggagatac

SEQ ID NO: 18956 - DNA, 78 bp, unidentified
  source 1..78: mol_type = unassigned DNA; note = methanogen bacteria
ggaatattaggagaaggcatactaggagtattaggtgaaacatggatttcttcattattagtcaccggagttattgga

SEQ ID NO: 18957 - DNA, 108 bp, unidentified
  source 1..108: mol_type = unassigned DNA; note = methanogen bacteria
ctaccaatgggtgttgaatatggaagccaagaaagtattactggacaaataggaaccttaattacccccgtatttgaaccattaggatttggaaattggcaaacagca

SEQ ID NO: 18958 - DNA, 75 bp, unidentified
  source 1..75: mol_type = unassigned DNA; note = methanogen bacteria
tttggaacccttatgggcgtaggagacgaaggagaaggactcgaacccatcttagcagatatgttcacaccatta

SEQ ID NO: 18959 - DNA, 171 bp, unidentified
  source 1..171: mol_type = unassigned DNA; note = methanogen bacteria
aaaggagtcgacggtgtaataggaatatttggaagtttaaccgggttattaaacttgcaatctgcatctgtggttgtaggtggattcccgaatgtacttatttccgttgcagagatgcaacaaccatcaatgcttggagctggaatgaattccatgtttttagctagtacc

SEQ ID NO: 18960 - DNA, 117 bp, unidentified
  source 1..117: mol_type = unassigned DNA; note = methanogen bacteria
atcggatccaagaccacgctcggagtgggcgaggcactgtccgcgatggtatcctccatcggaaagggaggccgcggactgacctacgaagagatgcttatctacaaccagaggctg

SEQ ID NO: 18961 - DNA, 42 bp, unidentified
  source 1..42: mol_type = unassigned DNA; note = methanogen bacteria
gccaacttcacattcttcggcctgttctccgcccagagcccc

SEQ ID NO: 18962 - DNA, 75 bp, unidentified
  source 1..75: mol_type = unassigned DNA; note = methanogen bacteria
atgatacgctccgggaccaagatgtccaacgcgctctcctggctttacggatcgttcgcatccgtctcctgggac

SEQ ID NO: 18963 - DNA, 39 bp, unidentified
  source 1..39: mol_type = unassigned DNA; note = methanogen bacteria
ctgcacggccgcagggggaacaggggacggagatacgga

SEQ ID NO: 18964 - DNA, 66 bp, unidentified
  source 1..66: mol_type = unassigned DNA; note = methanogen bacteria
cctcagctgttttatccctcaatgagcgcaacatacaagatgccttcatggaatcctgcatggagc

SEQ ID NO: 18965 - DNA, 54 bp, unidentified
  source 1..54: mol_type = unassigned DNA; note = methanogen bacteria
gatgtaatgtgggcatcatcaggggattcattctatatcttgccttcaataacc

SEQ ID NO: 18966 - DNA, 90 bp, unidentified
  source 1..90: mol_type = unassigned DNA; note = methanogen bacteria
gatgcaggattttcagcattaattgactatctaacaccaatcttaggtgatggattagtatcctcatttgtattaaatggtgtaattggt

SEQ ID NO: 18967 - DNA, 105 bp, unidentified
  source 1..105: mol_type = unassigned DNA; note = methanogen bacteria
ttaccaccaggtgtagaagaaggatcaattaacagtataattggtataattggtaacgcaatagcacctgtatttgctccattaggatttggattctggcaagct

SEQ ID NO: 18968 - DNA, 66 bp, unidentified
  source 1..66: mol_type = unassigned DNA; note = methanogen bacteria
ggtacattattcggtgtaggtgacgatggtataagtgcagtattacctacattatttactccacta

SEQ ID NO: 18969 - DNA, 60 bp, unidentified
  source 1..60: mol_type = unassigned DNA; note = methanogen bacteria
tccgacggtttaaccctcgaggaaggcgtcaggctgagtgcatatctagtaaacgacaag

SEQ ID NO: 18970 - DNA, 30 bp, unidentified
  source 1..30: mol_type = unassigned DNA; note = methanogen bacteria
aacgttaccgcaatcactgagaggagtgtc

SEQ ID NO: 18971 - DNA, 60 bp, unidentified
  source 1..60: mol_type = unassigned DNA; note = methanogen bacteria
agaaacatggacgatgcaatcgcaatattggatgccgcatataatgcaggaattgacttt

SEQ ID NO: 18972 - DNA, 57 bp, unidentified
  source 1..57: mol_type = unassigned DNA; note = methanogen bacteria
tcactctggattaggcgttttccgacagaacctaatatggacgaaaaaactcaggag

SEQ ID NO: 18973 - DNA, 45 bp, unidentified
  source 1..45: mol_type = unassigned DNA; note = methanogen bacteria
gacattcctgagctcttaaaagaaaattacgaagattacatgaac

SEQ ID NO: 18974 - DNA, 63 bp, unidentified
  source 1..63: mol_type = unassigned DNA; note = methanogen bacteria
atggactcacaaactgcgatgcttactgtatcatcaagacaaagtgaagtaatagatttactt

SEQ ID NO: 18975 - DNA, 63 bp, unidentified
  source 1..63: mol_type = unassigned DNA; note = methanogen bacteria
agtatctttattgcaaatatgtttgaagcagatatgacacagtttacctttaatatatctaaa

SEQ ID NO: 18976 - DNA, 39 bp, unidentified
  source 1..39: mol_type = unassigned DNA; note = methanogen bacteria
actggtggagtaaataaattaatggaacatgatgtaagt

SEQ ID NO: 18977 - DNA, 42 bp, unidentified
  source 1..42: mol_type = unassigned DNA; note = methanogen bacteria
aagtttatattaagttctattggagtaaatgatatattaaat

SEQ ID NO: 18978 - DNA, 48 bp, unidentified
  source 1..48: mol_type = unassigned DNA; note = methanogen bacteria
aattctgctctaaattgtgttaaacaagaaaatatggatttgatttta

SEQ ID NO: 18979 - DNA, 36 bp, unidentified
  source 1..36: mol_type = unassigned DNA; note = methanogen bacteria
tcaatatgcattgacactgtgaatattgttgattca

SEQ ID NO: 18980 - DNA, 54 bp, unidentified
  source 1..54: mol_type = unassigned DNA; note = methanogen bacteria
aacattgttaacctatttaccaatggaaatactgttgttgaacatgaagttata

SEQ ID NO: 18981 - DNA, 48 bp, unidentified
  source 1..48: mol_type = unassigned DNA; note = methanogen bacteria
aattctgctctaaattgtgttaaacaagaaaatatgggtttgatttta

SEQ ID NO: 18982 - DNA, 39 bp, unidentified
  source 1..39: mol_type = unassigned DNA; note = methanogen bacteria
tattccatatgcattgacactgtgaatattgttgattca

SEQ ID NO: 18983 - DNA, 54 bp, unidentified
  source 1..54: mol_type = unassigned DNA; note = methanogen bacteria
aacattgttaacctatttgccggtggaaataccgttgttgaaccgggggttata

SEQ ID NO: 18984 - DNA, 81 bp, unidentified
  source 1..81: mol_type = unassigned DNA; note = methanogen bacteria
aatccatttttaactcaaattgttttggctgttataccatggaaaccaatacaagacttgtttataggtagttatggtatt

SEQ ID NO: 18985 - DNA, 156 bp, unidentified
  source 1..156: mol_type = unassigned DNA; note = methanogen bacteria
ggtatcttccaattgattattaaattatttaatccgattatacaggctataggtcttccaacttcaacaacccaatcatttatcttaggattctttagaagagactttggtgcagcgggaatcttaaagattagggataccttaactggtgtacaa

SEQ ID NO: 18986 - DNA, 51 bp, unidentified
  source 1..51: mol_type = unassigned DNA; note = methanogen bacteria
tggtttggtgaatatttggctggtgctctcggaaatgaaatattaggttca

SEQ ID NO: 18987 - DNA, 111 bp, unidentified
  source 1..111: mol_type = unassigned DNA; note = methanogen bacteria
gttccattcggtgtcgaatatggatcacaagaaagtattcttggtatgataggttctgcaattgcacctgtattcgccccactagggttttccacatggcaagcaggtatt

SEQ ID NO: 18988 - DNA, 78 bp, unidentified; identical to SEQ ID NO: 18870
  source 1..78: mol_type = unassigned DNA; note = methanogen bacteria

SEQ ID NO: 18989 - DNA, 39 bp, unidentified
  source 1..39: mol_type = unassigned DNA; note = methanogen bacteria
gatgctttgaccggagttaaaaagcagaatgtagatttg

SEQ ID NO: 18990 - DNA, 42 bp, unidentified
  source 1..42: mol_type = unassigned DNA; note = methanogen bacteria
tccggatttacaattggctttgaaactgactatgtaattgat

SEQ ID NO: 18991 - DNA, 54 bp, unidentified
  source 1..54: mol_type = unassigned DNA; note = methanogen bacteria
acaactattgatttattgatttctaatttcgattcatctaacgatactgctatc

SEQ ID NO: 18992 - DNA, 30 bp, unidentified
  source 1..30: mol_type = unassigned DNA; note = methanogen bacteria
ttgtttgcaactaatgaaatccagttagga

SEQ ID NO: 18993 - DNA, 39 bp, unidentified
  source 1..39: mol_type = unassigned DNA; note = methanogen bacteria
atagctttaactggagttaaagaacagaaaataggcttg

SEQ ID NO: 18994 - DNA, 45 bp, unidentified
  source 1..45: mol_type = unassigned DNA; note = methanogen bacteria
aattccgggtacactattggctttgaaactgacagtgtaattgat

SEQ ID NO: 18995 - DNA, 54 bp, unidentified
  source 1..54: mol_type = unassigned DNA; note = methanogen bacteria
aagacggttgatttattgagttctaacatgaattcatctaacgattttgccatc

SEQ ID NO: 18996 - DNA, 30 bp, unidentified
  source 1..30: mol_type = unassigned DNA; note = methanogen bacteria
ttatcagttaatgaaatacagctgggaacc

SEQ ID NO: 18997 - DNA, 39 bp, unidentified
  source 1..39: mol_type = unassigned DNA; note = methanogen bacteria
gtggctctgaatggagttaaagaacagaatatcaacttg

SEQ ID NO: 18998 - DNA, 45 bp, unidentified
  source 1..45: mol_type = unassigned DNA; note = methanogen bacteria
tccggatacaccattggctttgaaactgacagtgcatttgattca

SEQ ID NO: 18999 - DNA, 54 bp, unidentified
  source 1..54: mol_type = unassigned DNA; note = methanogen bacteria
aagacagttgatttattggcttctaacatggattcatccaacgatgttgccatc

SEQ ID NO: 19000 - DNA, 30 bp, unidentified; identical to SEQ ID NO: 18996
  source 1..30: mol_type = unassigned DNA; note = methanogen bacteria

SEQ ID NO: 19001 - DNA, 42 bp, unidentified
  source 1..42: mol_type = unassigned DNA; note = methanogen bacteria
acggctttaactggagttaaagaacagaaaatagacttgctt

SEQ ID NO: 19002 - DNA, 42 bp, unidentified
  source 1..42: mol_type = unassigned DNA; note = methanogen bacteria
tccggatacagcattggctttgaaaccgacagcataattgat

SEQ ID NO: 19003 - DNA, 54 bp, unidentified
  source 1..54: mol_type = unassigned DNA; note = methanogen bacteria
aagacggttgatttattgggttctaatgtgaattcatctaacgatgttgccatc

SEQ ID NO: 19004 - DNA, 30 bp, unidentified; identical to SEQ ID NO: 18996
  source 1..30: mol_type = unassigned DNA; note = methanogen bacteria

SEQ ID NO: 19005 - DNA, 42 bp, unidentified
  source 1..42: mol_type = unassigned DNA; note = methanogen bacteria
gctgctttaactggagttaaagaacagaaaatagacttgctt

SEQ ID NO: 19006 - DNA, 45 bp, unidentified
  source 1..45: mol_type = unassigned DNA; note = methanogen bacteria
aattccggattcacaattggctttgaaactgacagtgtaattgat

SEQ ID NO: 19007 - DNA, 54 bp, unidentified
  source 1..54: mol_type = unassigned DNA; note = methanogen bacteria
aagactgttgatttattggcttctaacatggattcatctaatgatcttgctatt

SEQ ID NO: 19008 - DNA, 30 bp, unidentified
  source 1..30: mol_type = unassigned DNA; note = methanogen bacteria
ttatcagtaaatgaaatacatctaggaacc

SEQ ID NO: 19009 - DNA, 45 bp, unidentified
  source 1..45: mol_type = unassigned DNA; note = methanogen bacteria
ggtgctgctttgactggagttaaacagcagaatgttgatttgctt

SEQ ID NO: 19010 - DNA, 45 bp, unidentified
  source 1..45: mol_type = unassigned DNA; note = methanogen bacteria
aattccggatacacaatcggctttgaaacagacagcgtatttgac

SEQ ID NO: 19011 - DNA, 54 bp, unidentified
  source 1..54: mol_type = unassigned DNA; note = methanogen bacteria
aagactgctgatttattgctttctaattcaaatacattcaacgaccctactgtc

SEQ ID NO: 19012 - DNA, 30 bp, unidentified
  source 1..30: mol_type = unassigned DNA; note = methanogen bacteria
ttatcagttaatgagattcagctgggaact

SEQ ID NO: 19013 - DNA, 39 bp, unidentified
  source 1..39: mol_type = unassigned DNA; note = methanogen bacteria
gcggctttgtccggagttaaaaagcagaagttcgatatg

SEQ ID NO: 19014 - DNA, 42 bp, unidentified
  source 1..42: mol_type = unassigned DNA; note = methanogen bacteria
tcaggatacaccattggctttgaaactgataatgtaattgat

SEQ ID NO: 19015 - DNA, 51 bp, unidentified
  source 1..51: mol_type = unassigned DNA; note = methanogen bacteria
actgttgatttactgatttctaattttgattcatccaaagatactgctatt

SEQ ID NO: 19016 - DNA, 42 bp, unidentified
  source 1..42: mol_type = unassigned DNA; note = methanogen bacteria
gcggctttgactggagtcaaagaacagaacgttgatttgctt

SEQ ID NO: 19017 - DNA, 45 bp, unidentified
  source 1..45: mol_type = unassigned DNA; note = methanogen bacteria
aattcaggatacaccattggatttgaaactgatagtgtaattgat

SEQ ID NO: 19018 - DNA, 51 bp, unidentified
  source 1..51: mol_type = unassigned DNA; note = methanogen bacteria
acagttgatttattggcttccaattggaattcaactaatgaccctgctatc

SEQ ID NO: 19019 - DNA, 30 bp, unidentified
  source 1..30: mol_type = unassigned DNA; note = methanogen bacteria
ggtttaggcataaaaatagaacaacatgat

SEQ ID NO: 19020 - DNA, 42 bp, unidentified
  source 1..42: mol_type = unassigned DNA; note = methanogen bacteria
gtggctttggatggagttaagaatcagaatgccgatttgctt

SEQ ID NO: 19021 - DNA, 45 bp, unidentified
  source 1..45: mol_type = unassigned DNA; note = methanogen bacteria
tccggatatgtcattggatttgaaactgatagtgtagttgattca

SEQ ID NO: 19022 - DNA, 51 bp, unidentified
  source 1..51: mol_type = unassigned DNA; note = methanogen bacteria
aagactactgatttattggctgctgatttgagttttactaatcctgctatc

SEQ ID NO: 19023 - DNA, 30 bp, unidentified
  source 1..30: mol_type = unassigned DNA; note = methanogen bacteria
ttatccgttaatgagattccgctaggaact

SEQ ID NO: 19024 - DNA, 45 bp, unidentified
  source 1..45: mol_type = unassigned DNA; note = methanogen bacteria
ggtgtggctttgtctggagtcaaggagcagaacgccgatttgctt

SEQ ID NO: 19025 - DNA, 48 bp, unidentified
  source 1..48: mol_type = unassigned DNA; note = methanogen bacteria
aattccggatacaccataggatttgaaacagacagtgtaatcgattca

SEQ ID NO: 19026 - DNA, 51 bp, unidentified
  source 1..51: mol_type = unassigned DNA; note = methanogen bacteria
actgttgatttattggcgtctaattggaattcaactaatgaccctgccata

SEQ ID NO: 19027 - DNA, 30 bp, unidentified
  source 1..30: mol_type = unassigned DNA; note = methanogen bacteria
ttagcaggtaatgagattcagatagggact

SEQ ID NO: 19028 - DNA, 30 bp, unidentified
  source 1..30: mol_type = unassigned DNA; note = methanogen bacteria
ggattgggagttaccatagactattttgat

SEQ ID NO: 19029 - DNA, 276 bp, unidentified
  source 1..276: mol_type = unassigned DNA; note = methanogen bacteria
ggtactatcacaaacactgatataacacatcctagatataattcctacccaggacaaaacatcacaattgaaatctatgatgagtttgataatctgattgaaacaatccatgaaaaaacaaatgaaaacaatcaaataatctataatatgtcaaatattccatctgaaacatataaaatcgtcttttatcatgaggatgatgggtattatgccaattccacaactggagatttgagttttgaaaaggatcaaaacatatctgatgaaatcttggca

SEQ ID NO: 19030 - DNA, 114 bp, unidentified
  source 1..114: mol_type = unassigned DNA; note = methanogen bacteria
gaggttttagcagcattttcaacttatttcaatgaaaaaaccaactatatagcttatgtttatgtgaatgatgaattggttaatgttcaagagggatccgcttacaatggatat

SEQ ID NO: 19031 - DNA, 36 bp, unidentified
  source 1..36: mol_type = unassigned DNA; note = methanogen bacteria
tcagagtcctcttcttccaagagagactatgctttg

SEQ ID NO: 19032 - DNA, 30 bp, unidentified
  source 1..30: mol_type = unassigned DNA; note = methanogen bacteria
gcatgtttaaaagcatttacaatttccaaa

SEQ ID NO: 19033 - DNA, 72 bp, unidentified
  source 1..72: mol_type = unassigned DNA; note = methanogen bacteria
actcctattgatttcagagccattattttagatgaatttggagatttggtgaattatggattattcaatatt

SEQ ID NO: 19034 - DNA, 81 bp, unidentified
  source 1..81: mol_type = unassigned DNA; note = methanogen bacteria
gatagggagtatttaattgatgcaagcactaatcttacaattgcttttaatgaaaaaggaacttataggattttttacact

SEQ ID NO: 19035 - DNA, 51 bp, unidentified
  source 1..51: mol_type = unassigned DNA; note = methanogen bacteria
attgaaattggaaaattaaatgttgttgctttcccaacttcattttctttt

SEQ ID NO: 19036 - DNA, 42 bp, unidentified
  source 1..42: mol_type = unassigned DNA; note = methanogen bacteria
tgctatggcaatccagttcctgatggtgttgtttactttgaa

SEQ ID NO: 19037 - DNA, 51 bp, unidentified
  source 1..51: mol_type = unassigned DNA; note = methanogen bacteria
ttggatgttggaatctatgatgttcatgtgagattcaatggaaatgaggat

SEQ ID NO: 19038 - DNA, 114 bp, unidentified
  source 1..114: mol_type = unassigned DNA; note = methanogen bacteria
gattctgtaactggcaatgctcttgcaaacaagcaggttcagtataaattcaataatggaaaggttgctactgtcaaaacagatgccaatggagtagttaagataaaaatctca

SEQ ID NO: 19039 - DNA, 42 bp, unidentified
  source 1..42: mol_type = unassigned DNA; note = methanogen bacteria
gatgctttatctggagttaaagaacagaatattgacttgctt

SEQ ID NO: 19040 - DNA, 45 bp, unidentified
  source 1..45: mol_type = unassigned DNA; note = methanogen bacteria
aattccggatttaccattggctttgaaactgacagtgtagttgat

SEQ ID NO: 19041 - DNA, 54 bp, unidentified
  source 1..54: mol_type = unassigned DNA; note = methanogen bacteria
aatacggttaatttattgagttctaattggaattcatctaacgattttgctatt

SEQ ID NO: 19042 - DNA, 144 bp, unidentified
  source 1..144: mol_type = unassigned DNA; note = methanogen bacteria
aagtacattaacaattctgctccagaccactgtggagctgttatgtatttaaaggataatgttacaggaaatatcattgaaggctattttgaaaacaatacatgtacaaataccggtggagtaatgactgcaatgtcaactgca

SEQ ID NO: 19043 - DNA, 63 bp, unidentified
  source 1..63: mol_type = unassigned DNA; note = methanogen bacteria
aatactttcaaaggaagcttttataaaaattcagcacgtataggtggagtcctgtatttctat

SEQ ID NO: 19044 - DNA, 30 bp, unidentified
  source 1..30: mol_type = unassigned DNA; note = methanogen bacteria
ggattaggagttaacggtaatgaattagat

SEQ ID NO: 19045 - DNA, 45 bp, unidentified
  source 1..45: mol_type = unassigned DNA; note = methanogen bacteria
ataatacttaatattccatcttttgcacttgatgaagcattaact

SEQ ID NO: 19046 - DNA, 30 bp, unidentified
  source 1..30: mol_type = unassigned DNA; note = methanogen bacteria
ttattacattcccctgctgatttagctgca

SEQ ID NO: 19047 - DNA, 63 bp, unidentified
  source 1..63: mol_type = unassigned DNA; note = methanogen bacteria
ccaatttctcatttatttgtaataaataatgatactcttcaaatttcagctatgaattctgca

SEQ ID NO: 19048 - DNA, 66 bp, unidentified
  source 1..66: mol_type = unassigned DNA; note = methanogen bacteria
cgcgccctttctgcaccatcaaggtttagggtcttgaaatttccgttctggcatgttggaggatat

SEQ ID NO: 19049 - DNA, 48 bp, unidentified
  source 1..48: mol_type = unassigned DNA; note = methanogen bacteria
atgatttactcatttggggacaccatatatatgcggccgtcaatatct

SEQ ID NO: 19050 - DNA, 132 bp, unidentified
  source 1..132: mol_type = unassigned DNA; note = methanogen bacteria
aagaagtacacaatagccttaaaggacaatgcaggaaaggcaatcaagaaggccacagtctatttgaaagttggaggaaaaacttacaaggccacaaccaactccaagggaaaggccacctttaaaatcacc

SEQ ID NO: 19051 - DNA, 33 bp, unidentified
  source 1..33: mol_type = unassigned DNA; note = methanogen bacteria
gccaagacagtgaaggccaaactcaccattatg

SEQ ID NO: 19052 - DNA, 30 bp, unidentified
  source 1..30: mol_type = unassigned DNA; note = methanogen bacteria
caatacatctcatttatcccatatgccgaa

SEQ ID NO: 19053 - DNA, 33 bp, unidentified
  source 1..33: mol_type = unassigned DNA; note = methanogen bacteria
gctatagcaatcgcactcggaatgagtgaaaca

SEQ ID NO: 19054 - DNA, 60 bp, unidentified
  source 1..60: mol_type = unassigned DNA; note = methanogen bacteria
tccattggaggaattccgcttttaaaaccttcaattcgatatctcttaaaacctgccctg

SEQ ID NO: 19055 - DNA, 264 bp, unidentified
  source 1..264: mol_type = unassigned DNA; note = methanogen bacteria
tttcgttcacttggagagatgacaataacctcctcaaccagtccaatctattccctgcagtcaagagcggacttcacattgcatgtactgaatttgcttgatttcattggaggaaacttcggcgtgacacatggacacatgctggcaagctcaattccgggaagcgatctgggcccaagaatgatggttggaaaactgattgcatggagaaccgaggtaacggtgacccccaccttaatcggccagatggtggttgacttcgga

SEQ ID NO: 19056 - DNA, 36 bp, unidentified
  source 1..36: mol_type = unassigned DNA; note = methanogen bacteria
gattatttcgacctgggattcgaaggcgtctcgagc

SEQ ID NO: 19057 - DNA, 72 bp, unidentified
  source 1..72: mol_type = unassigned DNA; note = methanogen bacteria
acgggcgacttccatctcgggaccatcaccgacgagatggtgcctgacggatggaaatgggacggcaacgac

SEQ ID NO: 19058 - DNA, 84 bp, unidentified
  source 1..84: mol_type = unassigned DNA; note = methanogen bacteria
tacggggccctcggatactccgagatccacgagaacggggcctccactctcatccctgtggccaagtacggcttcggcgacacc

SEQ ID NO: 19059 - DNA, 111 bp, unidentified
  source 1..111: mol_type = unassigned DNA; note = methanogen bacteria
gcgtcgtggatcaccttcagcgggtccgacatgctcctccacgggtacgcgcaccacctgtacagcgggacgatgctgctcaccgccgacgggccggacggagcgcaggcc

SEQ ID NO: 19060 - DNA, 33 bp, unidentified
  source 1..33: mol_type = unassigned DNA; note = methanogen bacteria
tggaaccccgacggggcatctgcggccgacggg

SEQ ID NO: 19061 - DNA, 144 bp, unidentified
  source 1..144: mol_type = unassigned DNA; note = methanogen bacteria
gtccccctgcaggactacttcaaccagaggggcaacgcctccccagagcgtctgaaggagctgatcaaccaaatctacctcagcgccaaggagcacgacatgttcaacgacctgaacataaccgaggacccgggtgccgaaggt

SEQ ID NO: 19062 - DNA, 39 bp, unidentified
  source 1..39: mol_type = unassigned DNA; note = methanogen bacteria
gtcgacatgcaggacgccatcgacgatccttccggcacc

SEQ ID NO: 19063 - DNA, 39 bp, unidentified
  source 1..39: mol_type = unassigned DNA; note = methanogen bacteria
tggaagaccgtgcaggacctggccgacgtgtacatcgac

SEQ ID NO: 19064 - DNA, 33 bp, unidentified
  source 1..33: mol_type = unassigned DNA; note = methanogen bacteria
attactggaaattatttgctgggcgatttatgg

SEQ ID NO: 19065 - DNA, 42 bp, unidentified
  source 1..42: mol_type = unassigned DNA; note = methanogen bacteria
acaccatatatgaaagtagtatatccgttaaccggaaatatc

SEQ ID NO: 19066 - DNA, 33 bp, unidentified
  source 1..33: mol_type = unassigned DNA; note = methanogen bacteria
gtgagttatgtttttccaaatttaaattatgac

SEQ ID NO: 19067 - DNA, 132 bp, unidentified
  source 1..132: mol_type = unassigned DNA; note = methanogen bacteria
tttgacccaggaattctatctttggattcatataaccaattgcatcaaatagcaacatcaaactttacaaattggcacccgttttttcatacatttattgaaatgatttgtattagactgtatgctagtcca

SEQ ID NO: 19068 - DNA, 36 bp, unidentified
  source 1..36: mol_type = unassigned DNA; note = methanogen bacteria
gcattcttcaacaacaatgcatatgaaggtggtgca

SEQ ID NO: 19069 - DNA, 30 bp, unidentified
  source 1..30: mol_type = unassigned DNA; note = methanogen bacteria
ggagattatggtgctgttagcaattccaca

SEQ ID NO: 19070 - DNA, 30 bp, unidentified
  source 1..30: mol_type = unassigned DNA; note = methanogen bacteria
aacaacaatgcatatgatgggggagctatc

SEQ ID NO: 19071 - DNA, 45 bp, unidentified
  source 1..45: mol_type = unassigned DNA; note = methanogen bacteria
aacaccgcaaagtatggaggagccatcaactggaataacaaatat

SEQ ID NO: 19072 - DNA, 231 bp, unidentified
  source 1..231: mol_type = unassigned DNA; note = methanogen bacteria
aatgtttcctcttgcctattcataaacaacactgctacagttcttagtagcgtatattataacgattataatgatactagttattctaatttcaccaataatatcctgttaaataatgatcctgatgaaatatattacagagtctttgaaggttccaatgcagactacaattggtttggaaacaatgaaagcaattatgatcaaaaaccatatgcgaaatccagcacatgg

SEQ ID NO: 19073 - DNA, 48 bp, unidentified
  source 1..48: mol_type = unassigned DNA; note = methanogen bacteria
ctgactattgcaggatattttatagtccctgatatcggactgggccct

SEQ ID NO: 19074 - DNA, 48 bp, unidentified
  source 1..48: mol_type = unassigned DNA; note = methanogen bacteria
gcataccctccattgagctatctgtatccattaacaacagaaattaat

SEQ ID NO: 19075 - DNA, 51 bp, unidentified
  source 1..51: mol_type = unassigned DNA; note = methanogen bacteria
acattattaattcaacatcttactgaaaggtgggttacggatatcaatttt

SEQ ID NO: 19076 - DNA, 51 bp, unidentified
  source 1..51: mol_type = unassigned DNA; note = methanogen bacteria
tacatgtctattgcaggaagatttgtaattccagatattggacttggccct

SEQ ID NO: 19077 - DNA, 45 bp, unidentified
  source 1..45: mol_type = unassigned DNA; note = methanogen bacteria
tatccaccgtttagcgcattatatccattaacaactgaaattaat

SEQ ID NO: 19078 - DNA, 48 bp, unidentified
  source 1..48: mol_type = unassigned DNA; note = methanogen bacteria
ctattaattaagaatattaccgacaaatgggttgatgatatcaatttc

SEQ ID NO: 19079 - DNA, 276 bp, unidentified
  source 1..276: mol_type = unassigned DNA; note = methanogen bacteria
gagtataatgtcaccgcctatttggatgaatcatacctattttcatcaaacgttcttaatatcaatatcaatgttaaaagtacatcaatcgttgctcaggatatggttacaagcgatgaaaatatcacttatgccgtaaggttaattgatgagggtggaaatccattaaaggctaaacatatagaattcagattaaataatgccacatatacagacattacagataataacggcactgcaaaagttaatttaagtctgaaaaaaggaataaatgca

SEQ ID NO: 19080 - DNA, 219 bp, unidentified
  source 1..219: mol_type = unassigned DNA; note = methanogen bacteria
tcaactcaaatcatattcaaaccgatcataactgcaggtattgatgtagtgaatttgggaagttcaaaatcaattgaggtcatgttttcaatgccgattaatgaaagcgcaataatcttcgtcaatgatgaaaacactaccgtaagggtttcaaatggccaaaccttcctgatgctcagtaatttggaaaatggattatatgtcgtttcagttgaattg

SEQ ID NO: 19081 - DNA, 159 bp, unidentified
  source 1..159: mol_type = unassigned DNA; note = methanogen bacteria
tcaatcaactttacagttttactcaaagacactcaaataatggctgatgacttcataaccggtgatttcagcaatcagaactatgtgattacattgcttgatgaggatttaaatccgctttcaggccagtcaattgtattcctgattgataatagaaca

SEQ ID NO: 19082 - DNA, 84 bp, unidentified
  source 1..84: mol_type = unassigned DNA; note = methanogen bacteria
aaattcactactacagatgaaaacggccatgcagaaatgtcaattaatttggattatggaaattacaccatcgcatcctattat

SEQ ID NO: 19083 - DNA, 228 bp, unidentified
  source 1..228: mol_type = unassigned DNA; note = methanogen bacteria
gaaaatagcagcaaattggttgtaaaaataaatgcaactcctgtaattagagtgtcccctaatttgaaggatgtgaaaatcgaattctcattcacaagggcgataaacgatacaattactatttcagttgctgatgtaaaaacatcaatcaatataactgacggtcatggagaactaaacctaactgacttggaaaatggaaattatacagtttcaatcaatcttaat

SEQ ID NO: 19084 - DNA, 258 bp, unidentified
  source 1..258: mol_type = unassigned DNA; note = methanogen bacteria
tcacatttcgaacaggatttcgaagtgaatgtcaaagactcccaaataatcgtaaacgattttgaaacctattgccagagcggtgaatcttacacaatacaattgaccgaccagaatggaattccaattaaatcagctattgttgatattgctattgagagcatgggaaattatactcatcagacagatgctaatggggtagtgttgattcctatcaagcttgacgccggcagatataatgtttcagttaaattcaaa

SEQ ID NO: 19085 - DNA, 192 bp, unidentified
  source 1..192: mol_type = unassigned DNA; note = methanogen bacteria
tcatctcaagcaaatgccggcataacagtaaattcaagcatcgcatttacaaatgcccaatatgccttaaattcaaactatattgtattattaaaaggtaatgttagtggaaaaccggtcagcatcacaatcgatggcgttttatatgaggtaatcgctgaagaaggcagagcggcaatgaaaatcaatctt

SEQ ID NO: 19086 - DNA, 129 bp, unidentified
  source 1..129: mol_type = unassigned DNA; note = methanogen bacteria
ggtactgggggtatttatcctattcaattgatgggacaattccttcaagcagtcagcccatatatgccaatgacccatggaatcactttgctaagggaaaccgcattaggattggtttggtctaattac

SEQ ID NO: 19087 - DNA, 42 bp, unidentified
  source 1..42: mol_type = unassigned DNA; note = methanogen bacteria
gaagttcaacatataggtggctattacatatatgcagatatt

SEQ ID NO: 19088 - DNA, 42 bp, unidentified
  source 1..42: mol_type = unassigned DNA; note = methanogen bacteria
cataatttaaattattcatattctatttcagatgtagacttt

SEQ ID NO: 19089 - DNA, 36 bp, unidentified
  source 1..36: mol_type = unassigned DNA; note = methanogen bacteria
attttatcatacgttccaaaaataaatccatcatat

SEQ ID NO: 19090 - DNA, 42 bp, unidentified
  source 1..42: mol_type = unassigned DNA; note = methanogen bacteria
gaagttcaacatataggaggatattatatatatgcagatatt

SEQ ID NO: 19091 - DNA, 42 bp, unidentified
  source 1..42: mol_type = unassigned DNA; note = methanogen bacteria
cataatttaaattattcctattctatttcagatgtagacttt

SEQ ID NO: 19092 - DNA, 36 bp, unidentified
  source 1..36: mol_type = unassigned DNA; note = methanogen bacteria
attttatcgtatgttcctaaaatagatccatcatat

SEQ ID NO: 19093 - DNA, 42 bp, unidentified
  source 1..42: mol_type = unassigned DNA; note = methanogen bacteria
gaagttcaacacataggtggctattacatttatgcggatatt

SEQ ID NO: 19094 - DNA, 42 bp, unidentified
  source 1..42: mol_type = unassigned DNA; note = methanogen bacteria
cataatctaaattattcatattccatttcagatgtagacttt

SEQ ID NO: 19095 - DNA, 39 bp, unidentified
  source 1..39: mol_type = unassigned DNA; note = methanogen bacteria
ttaattttatcatacgttcctaaaatagatccatcatat

SEQ ID NO: 19096 - DNA, 33 bp, unidentified
  source 1..33: mol_type = unassigned DNA; note = methanogen bacteria
aagaaatatacattaactcaaccgttattaccg

SEQ ID NO: 19097 - DNA, 42 bp, unidentified
  source 1..42: mol_type = unassigned DNA; note = methanogen bacteria
catatgaattttggaggtaggttttttattccggatatgggt

SEQ ID NO: 19098 - DNA, 42 bp, unidentified
  source 1..42: mol_type = unassigned DNA; note = methanogen bacteria
tttccgagcataattggggatttatatagtttaaccagtttt

SEQ ID NO: 19099 - DNA, 54 bp, unidentified
  source 1..54: mol_type = unassigned DNA; note = methanogen bacteria
ctgcatgatgtgatagtaggattttcttttgtaaatgttttaaacataagattt

SEQ ID NO: 19100 - DNA, 51 bp, unidentified
  source 1..51: mol_type = unassigned DNA; note = methanogen bacteria
catatgaattttggaggtagattttttattccggatatgggtttggctcct

SEQ ID NO: 19101 - DNA, 42 bp, unidentified
  source 1..42: mol_type = unassigned DNA; note = methanogen bacteria
tttccagagataattggagatttatacagtttaaccagtttt

SEQ ID NO: 19102 - DNA, 36 bp, unidentified
  source 1..36: mol_type = unassigned DNA; note = methanogen bacteria
ctgggattctcttttgtaaataagtttaacctaaaa

SEQ ID NO: 19103 - DNA, 51 bp, unidentified
  source 1..51: mol_type = unassigned DNA; note = methanogen bacteria
gagcatatgccatttggaggagaatatatagtcgccgatgtaggtatcgca

SEQ ID NO: 19104 - DNA, 36 bp, unidentified
  source 1..36: mol_type = unassigned DNA; note = methanogen bacteria
tattcaaaaatgtatgtaatttatccattatcaagc

SEQ ID NO: 19105 - DNA, 36 bp, unidentified
  source 1..36: mol_type = unassigned DNA; note = methanogen bacteria
ttgatttttacatacaacttcaatgaagattacatt

SEQ ID NO: 19106 - DNA, 48 bp, unidentified
  source 1..48: mol_type = unassigned DNA; note = methanogen bacteria
gagcatatgccctttggaggagagtatataatcgccgatgttggtatt

SEQ ID NO: 19107 - DNA, 42 bp, unidentified
  source 1..42: mol_type = unassigned DNA; note = methanogen bacteria
gaagcatatcccaaaatgtatataatttatccattatcaagc

SEQ ID NO: 19108 - DNA, 39 bp, unidentified
  source 1..39: mol_type = unassigned DNA; note = methanogen bacteria
agtatgatttttacctacaacttcaatgaagattacatt

SEQ ID NO: 19109 - DNA, 51 bp, unidentified
  source 1..51: mol_type = unassigned DNA; note = methanogen bacteria
gagcatatgccctacggaggagaatatattgtcgccgatgttggtattgca

SEQ ID NO: 19110 - DNA, 36 bp, unidentified
  source 1..36: mol_type = unassigned DNA; note = methanogen bacteria
tatcaccacatgtatgtaatctatccgttatcaaca

SEQ ID NO: 19111 - DNA, 36 bp, unidentified
  source 1..36: mol_type = unassigned DNA; note = methanogen bacteria
agtatgatttttacataccacttcaatgaagattac

SEQ ID NO: 19112 - DNA, 39 bp, unidentified
  source 1..39: mol_type = unassigned DNA; note = methanogen bacteria
catttaaatattggtggaagatatttaaatccagacatg

SEQ ID NO: 19113 - DNA, 48 bp, unidentified
  source 1..48: mol_type = unassigned DNA; note = methanogen bacteria
tttcctgaagtaatgtctgatttatatagtatatctaatttcagaaat

SEQ ID NO: 19114 - DNA, 51 bp, unidentified
  source 1..51: mol_type = unassigned DNA; note = methanogen bacteria
cttgttatgaattattttaaatataatttacatgtattggataaaagtttt

SEQ ID NO: 19115 - DNA, 45 bp, unidentified
  source 1..45: mol_type = unassigned DNA; note = methanogen bacteria
ctcaataatcattatgatgttaacttcaatagattaaaacatgct

SEQ ID NO: 19116 - DNA, 45 bp, unidentified
  source 1..45: mol_type = unassigned DNA; note = methanogen bacteria
caaaattatgaccaagagttatataacttagcggattcatttgaa

SEQ ID NO: 19117 - DNA, 45 bp, unidentified
  source 1..45: mol_type = unassigned DNA; note = methanogen bacteria
gaagttcaacatatagggggctattacatatatgcagatattgct

SEQ ID NO: 19118 - DNA, 42 bp, unidentified
  source 1..42: mol_type = unassigned DNA; note = methanogen bacteria
cataatttaaattattcctattccatttcagatgtaaacttt

SEQ ID NO: 19119 - DNA, 39 bp, unidentified
  source 1..39: mol_type = unassigned DNA; note = methanogen bacteria
ttaattttatcatatgttcctaaaatagatccatcatat

SEQ ID NO: 19120 - DNA, 159 bp, unidentified
  source 1..159: mol_type = unassigned DNA; note = methanogen bacteria
aaggcatcttctactgctgcttctgtttattcttcatttaatgtatgtgctacaaatacaaaatttgaaggaaatgttgctgattatagtccttcaggtatatattccgaaaaaaaggtaagtgttattcgttgtttatttgattctaacaaagaaaga

SEQ ID NO: 19121 - DNA, 45 bp, unidentified
  source 1..45: mol_type = unassigned DNA; note = methanogen bacteria
ggcagtggcggtgcaatttgtgcaatggatgatgttactgttgat

SEQ ID NO: 19122 - DNA, 69 bp, unidentified
  source 1..69: mol_type = unassigned DNA; note = methanogen bacteria
tccacattttcaaataactatgctcaatgtgttggcggtgcaatatgttccgaaaaaggggatgtgtat

SEQ ID NO: 19123 - DNA, 300 bp, unidentified
  source 1..300: mol_type = unassigned DNA; note = methanogen bacteria
ggtaatagtgtagacactggtcatggcggagcaatttttacaaaagcatacttcggtaaagtatatgtaaaaaatacagtatttgattccaatcaggctaatgttgatggtggggcaattttttccggagctagtattgaagcaactaattgtatcttcaaatcaaataaagctgtgggatctacactccgtacttgttatggtggtgcaatacgaacatattatagcgcatatattaataactgttccttttttgacaattatgctgaaaacgatggtggggcaatatgtacccgtgat

SEQ ID NO: 19124 - DNA, 51 bp, unidentified
  source 1..51: mol_type = unassigned DNA; note = methanogen bacteria
tatacatatttcactggtgaatacctgcttgtggatattggatttgctcca

SEQ ID NO: 19125 - DNA, 51 bp, unidentified
  source 1..51: mol_type = unassigned DNA; note = methanogen bacteria
tatgatacttatgcaaattttgcctcagtttatccctaccattccaatttg

SEQ ID NO: 19126 - DNA, 42 bp, unidentified
  source 1..42: mol_type = unassigned DNA; note = methanogen bacteria
ttggttcctcaaatgatatggggaaatgcagatgcttcattt

SEQ ID NO: 19127 - DNA, 57 bp, unidentified
  source 1..57: mol_type = unassigned DNA; note = methanogen bacteria
gcagctatcggcaacatgcaggtttatgcgatatcctcagttaaacagcctctgaca

SEQ ID NO: 19128 - DNA, 129 bp, unidentified
  source 1..129: mol_type = unassigned DNA; note = methanogen bacteria
gcaactggaggaatctatccaattcaaatcatggccccattcttcagagtgctgtatccatatatgccaatgacttatggaatcacattggttcgtgaagcacaacttggggtagtctggtcaaactat

SEQ ID NO: 19129 - DNA, 45 bp, unidentified
  source 1..45: mol_type = unassigned DNA; note = methanogen bacteria
ctatcaccaaatagtattaatggtaatggtttgaatccgcatatg

SEQ ID NO: 19130 - DNA, 48 bp, unidentified
  source 1..48: mol_type = unassigned DNA; note = methanogen bacteria
gaaccggaaacgatactaatatttgaaccgaaatccatagcattcatt

SEQ ID NO: 19131 - DNA, 48 bp, unidentified
  source 1..48: mol_type = unassigned DNA; note = methanogen bacteria
catgtggatttaatgcttgatacagatttgagctatgatgaaattgta

SEQ ID NO: 19132 - DNA, 36 bp, unidentified
  source 1..36: mol_type = unassigned DNA; note = methanogen bacteria
gattacttcggtctgaacctcgacggtttcaccgcc

SEQ ID NO: 19133 - DNA, 72 bp, unidentified
  source 1..72: mol_type = unassigned DNA; note = methanogen bacteria
aacggtaccttccacatggccaccatctccgacgagctggtccccaccggatgggtatggaacggaaacaac

SEQ ID NO: 19134 - DNA, 84 bp, unidentified
  source 1..84: mol_type = unassigned DNA; note = methanogen bacteria
tacggtgcactcggaatcggccagatcgagatcgcgggagcagccaccctgatccccgtcgccgaggccgacttcggaaaggcc

SEQ ID NO: 19135 - DNA, 75 bp, unidentified
  source 1..75: mol_type = unassigned DNA; note = methanogen bacteria
tgcggatgggtcgacggaatgcccttcgtcaggggattctccctcttcagcgccagctgggccgacggcgtcttc

SEQ ID NO: 19136 - DNA, 39 bp, unidentified
  source 1..39: mol_type = unassigned DNA; note = methanogen bacteria
acctggaacatcttcggaggattcgtggtcctcggactc

SEQ ID NO: 19137 - DNA, 36 bp, unidentified
  source 1..36: mol_type = unassigned DNA; note = methanogen bacteria
gattacttcggtctgaaccttaccggctttactgcc

SEQ ID NO: 19138 - DNA, 72 bp, unidentified
  source 1..72: mol_type = unassigned DNA; note = methanogen bacteria
aacggaaccttccacatgtccaccatctccaacgaactcgtccccaccggatgggtctggaacggtaacaac

SEQ ID NO: 19139 - DNA, 84 bp, unidentified
  source 1..84: mol_type = unassigned DNA; note = methanogen bacteria
tacggtgcactcggaatcggcgagatcaccagtgcaggagctgcaacccttatccctgtcgctgaggctgacttcggtaaagcc

SEQ ID NO: 19140 - DNA, 78 bp, unidentified
  source 1..78: mol_type = unassigned DNA; note = methanogen bacteria
tgcggatgggtcgacggaatgcccttcgtcaggggattctccctcttcagcgccagctgggcagacggaatcttccag

SEQ ID NO: 19141 - DNA, 39 bp, unidentified
  source 1..39: mol_type = unassigned DNA; note = methanogen bacteria
acctgggatatcttcggaggattcgtcgtcctcggactc

SEQ ID NO: 19142 - DNA, 36 bp, unidentified
  source 1..36: mol_type = unassigned DNA; note = methanogen bacteria
aagtacattaacaattctgctccggaccactgtgga

SEQ ID NO: 19143 - DNA, 72 bp, unidentified
  source 1..72: mol_type = unassigned DNA; note = methanogen bacteria
atcattgaaggctattttgaaaacaatacatgtacaaataccggtggagtaatgactgcaatgtcaactgca

SEQ ID NO: 19144 - DNA, 60 bp, unidentified
  source 1..60: mol_type = unassigned DNA; note = methanogen bacteria
aatactttcaaaggaagcttttataaaaattcagcacgtataggtggagtcctgtatttc

SEQ ID NO: 19145 - DNA, 138 bp, unidentified
  source 1..138: mol_type = unassigned DNA; note = methanogen bacteria
aacacaataattggagaatttataaataattcagctacaagatatggaagtacaatctatttcagaggtactccatttaataaaataacaaattcttcattcataaataatcagattccatccaagaatctaaacgtt

SEQ ID NO: 19146 - DNA, 33 bp, unidentified
  source 1..33: mol_type = unassigned DNA; note = methanogen bacteria
gactacttcggtctcgatctcggtggaatgacc

SEQ ID NO: 19147 - DNA, 75 bp, unidentified
  source 1..75: mol_type = unassigned DNA; note = methanogen bacteria
ttcaacggaaccttcagcatggattacatctctaacgagatcgtccccgctggatgggaatggaacggaaacacc

SEQ ID NO: 19148 - DNA, 84 bp, unidentified
  source 1..84: mol_type = unassigned DNA; note = methanogen bacteria
tacggtgccctcgggcaggcccagattgaggctgccggtgccgcaaccctcatccccgtggccgagtccgacttcggaaaggct

SEQ ID NO: 19149 - DNA, 75 bp, unidentified
  source 1..75: mol_type = unassigned DNA; note = methanogen bacteria
tgcgactgggtcgagggaatgccctccgtactcggagcggtcttcttcaccgccgactgggccgacggaatctac

SEQ ID NO: 19150 - DNA, 36 bp, unidentified
  source 1..36: mol_type = unassigned DNA; note = methanogen bacteria
tgggacatctttactggaggagtcggcttcgcattc

SEQ ID NO: 19151 - DNA, 45 bp, unidentified
  source 1..45: mol_type = unassigned DNA; note = methanogen bacteria
gagcatttgcctatcggaggagaatatttcatacccgacatcggt

SEQ ID NO: 19152 - DNA, 42 bp, unidentified
  source 1..42: mol_type = unassigned DNA; note = methanogen bacteria
tcttccaaaatgtatgtaatatatcccttatatggcaacata

SEQ ID NO: 19153 - DNA, 42 bp, unidentified
  source 1..42: mol_type = unassigned DNA; note = methanogen bacteria
ttcctaagttcccttttcacaaataatctcgacacagcatac

SEQ ID NO: 19154 - DNA, 39 bp, unidentified
  source 1..39: mol_type = unassigned DNA; note = methanogen bacteria
acggatgtattggatttgggattatattgcccacatata

SEQ ID NO: 19155 - DNA, 42 bp, unidentified
  source 1..42: mol_type = unassigned DNA; note = methanogen bacteria
tatcacattatagatattgatgttaatttgacgatatatgta

SEQ ID NO: 19156 - DNA, 42 bp, unidentified
  source 1..42: mol_type = unassigned DNA; note = methanogen bacteria
accgattcatttttaatacaacccaccagtacaataaccaga

SEQ ID NO: 19157 - DNA, 30 bp, unidentified
  source 1..30: mol_type = unassigned DNA; note = methanogen bacteria
gttctgggaatatacattgcaaacgagccg

SEQ ID NO: 19158 - DNA, 129 bp, unidentified
  source 1..129: mol_type = unassigned DNA; note = methanogen bacteria
ggtaccggaggtatctatcctgtagagatcatggccccttttttcaatgtggcaaatccatatctgccgatgacatatgcaattaccttgatacgtgaatcccagcttggtctaatctggtccaattat

SEQ ID NO: 19159 - DNA, 39 bp, unidentified
  source 1..39: mol_type = unassigned DNA; note = methanogen bacteria
ttcagtaataattttgctcaggggttatctccccatgaa

SEQ ID NO: 19160 - DNA, 33 bp, unidentified
  source 1..33: mol_type = unassigned DNA; note = methanogen bacteria
tttttttatcccgaaacaatttccattaatcta

SEQ ID NO: 19161 - DNA, 48 bp, unidentified
  source 1..48: mol_type = unassigned DNA; note = methanogen bacteria
ttagtaaatgcaatgacttcactgcttccattgaatgatgttgaagtc

SEQ ID NO: 19162 - DNA, 45 bp, unidentified
  source 1..45: mol_type = unassigned DNA; note = methanogen bacteria
ctatcaccaaatagcattaatggcaatggtttgaatccgcatatg

SEQ ID NO: 19163 - DNA, 45 bp, unidentified
  source 1..45: mol_type = unassigned DNA; note = methanogen bacteria
ccggaaacgatactaatatttgaaccgaaatcagtagcattcatt

SEQ ID NO: 19164 - DNA, 51 bp, unidentified
  source 1..51: mol_type = unassigned DNA; note = methanogen bacteria
tatgtggatgtaatgcctgatacaaatttgagctatgatgaaagtgtatgg

SEQ ID NO: 19165 - DNA, 39 bp, unidentified
  source 1..39: mol_type = unassigned DNA; note = methanogen bacteria
ggcggatcacaaaattttggtgctggtttaaatgcatat

SEQ ID NO: 19166 - DNA, 57 bp, unidentified
  source 1..57: mol_type = unassigned DNA; note = methanogen bacteria
actacttttggatatgtgcttatagagtatctccctgttcctaattcggatgccttt

SEQ ID NO: 19167 - DNA, 42 bp, unidentified
  source 1..42: mol_type = unassigned DNA; note = methanogen bacteria
caccatggatcaaatttcggtgggggattgagcccacatgta

SEQ ID NO: 19168 - DNA, 33 bp, unidentified
  source 1..33: mol_type = unassigned DNA; note = methanogen bacteria
ttatatccagatacaatatcaataaccacactt

SEQ ID NO: 19169 - DNA, 54 bp, unidentified
  source 1..54: mol_type = unassigned DNA; note = methanogen bacteria
cacacattaattaccgcaattgacaatgtccttccaataaacaggactgaggta

SEQ ID NO: 19170 - DNA, 45 bp, unidentified
  source 1..45: mol_type = unassigned DNA; note = methanogen bacteria
gtcggcggatcagaaaattttggtgccggtttaaatgcatattta

SEQ ID NO: 19171 - DNA, 30 bp, unidentified
  source 1..30: mol_type = unassigned DNA; note = methanogen bacteria
acatatcctagaataaccgcaaacgaattc

SEQ ID NO: 19172 - DNA, 60 bp, unidentified
  source 1..60: mol_type = unassigned DNA; note = methanogen bacteria
gaaaattctaattttggatacttgcttatacaatatattccagttcctaatactgatgca

SEQ ID NO: 19173 - DNA, 42 bp, unidentified
  source 1..42: mol_type = unassigned DNA; note = methanogen bacteria
atgttaagtgatgatttcggctacggattttcaccacatgta

SEQ ID NO: 19174 - DNA, 36 bp, unidentified
  source 1..36: mol_type = unassigned DNA; note = methanogen bacteria
atactatatcctgagacaatagagactagttttgag

SEQ ID NO: 19175 - DNA, 57 bp, unidentified
  source 1..57: mol_type = unassigned DNA; note = methanogen bacteria
gatatactgcttgaagttatagacatattttcacctgtagagatggatgatttggtt

SEQ ID NO: 19176 - DNA, 42 bp, unidentified
  source 1..42: mol_type = unassigned DNA; note = methanogen bacteria
gccataggagataattttgctgaaggttattcaccccattta

SEQ ID NO: 19177 - DNA, 33 bp, unidentified
  source 1..33: mol_type = unassigned DNA; note = methanogen bacteria
ctattccagccggaaaccatgcatattactttt

SEQ ID NO: 19178 - DNA, 57 bp, unidentified
  source 1..57: mol_type = unassigned DNA; note = methanogen bacteria
gatgacgttctggcatttgccttggacgcatatcttccaatagatttaggtgaagta

SEQ ID NO: 19179 - DNA, 42 bp, unidentified
  source 1..42: mol_type = unassigned DNA; note = methanogen bacteria
aaaggcgggcaaaatttcggtggaggattaagtgttcatgtt

SEQ ID NO: 19180 - DNA, 39 bp, unidentified
  source 1..39: mol_type = unassigned DNA; note = methanogen bacteria
tatcttactcttccagaaacaatttccctaaattccact

SEQ ID NO: 19181 - DNA, 54 bp, unidentified
  source 1..54: mol_type = unassigned DNA; note = methanogen bacteria
cataatatcataactgcaatcagtaatttgctgccattgaatgtaaatgaagtt

SEQ ID NO: 19182 - DNA, 39 bp, unidentified
  source 1..39: mol_type = unassigned DNA; note = methanogen bacteria
ataggtaaaaattttgctgaaggctactctccccattta

SEQ ID NO: 19183 - DNA, 30 bp, unidentified
  source 1..30: mol_type = unassigned DNA; note = methanogen bacteria
ttttatagacccgaaaccagaccaatttct

SEQ ID NO: 19184 - DNA, 51 bp, unidentified
  source 1..51: mol_type = unassigned DNA; note = methanogen bacteria
gtgctggcatatgttttaaatctttaccttccaatagatatagatgaggta

SEQ ID NO: 19185 - DNA, 39 bp, unidentified
  source 1..39: mol_type = unassigned DNA; note = methanogen bacteria
actccaatgtggaaattaggattatattctccacatata

SEQ ID NO: 19186 - DNA, 30 bp, unidentified
  source 1..30: mol_type = unassigned DNA; note = methanogen bacteria
attttattccaaagcgaaatggaagagtat

SEQ ID NO: 19187 - DNA, 63 bp, unidentified
  source 1..63: mol_type = unassigned DNA; note = methanogen bacteria
aattttattattacgaataaaatttatttcaacgagtattctatggcgttttatctaatggag

SEQ ID NO: 19188 - DNA, 129 bp, unidentified
  source 1..129: mol_type = unassigned DNA; note = methanogen bacteria
ggtactggtggtatttatcctattcaattgatgggtccattacttcaaacagtcagtccatatatgcctatgactcatggaatcaatctattgagagaaagtgcattaggattggtatggtctaattat

SEQ ID NO: 19189 - DNA, 39 bp, unidentified
  source 1..39: mol_type = unassigned DNA; note = methanogen bacteria
atgggtgaaaattttggtgaaggattctctccccatgta

SEQ ID NO: 19190 - DNA, 36 bp, unidentified
  source 1..36: mol_type = unassigned DNA; note = methanogen bacteria
tatttgatgcatccagaaacagtttccattaatata

SEQ ID NO: 19191 - DNA, 60 bp, unidentified
  source 1..60: mol_type = unassigned DNA; note = methanogen bacteria
gaccacacatttattacagctgtcgatgaaattcttcctattgacttttatgaagttaag

SEQ ID NO: 19192 - DNA, 126 bp, unidentified
  source 1..126: mol_type = unassigned DNA; note = methanogen bacteria
actggtggtatttatccagttgaagttatgcccccactatttaaatcaattaatccatttatgcccatgacttatgcaattacaatgattagagaagcttgtttaggattatatttgcctaattac

SEQ ID NO: 19193 - DNA, 42 bp, unidentified
  source 1..42: mol_type = unassigned DNA; note = methanogen bacteria
acagattcatttttaatgaatcccacaagtgcagttacaaga

SEQ ID NO: 19194 - DNA, 42 bp, unidentified
  source 1..42: mol_type = unassigned DNA; note = methanogen bacteria
actgattcatttctaatgaatcctacaagtgcagtaacaaga

SEQ ID NO: 19195 - DNA, 42 bp, unidentified
  source 1..42: mol_type = unassigned DNA; note = methanogen bacteria
tcttccagaaatgtcagtcagggaatcaatgctcatataggt

SEQ ID NO: 19196 - DNA, 39 bp, unidentified
  source 1..39: mol_type = unassigned DNA; note = methanogen bacteria
aatctgctttattcaagtatgggttatgaaaatgctaca

SEQ ID NO: 19197 - DNA, 51 bp, unidentified
  source 1..51: mol_type = unassigned DNA; note = methanogen bacteria
gtgattataatggctgttgatgattttcttccattaagttttatggaaata

SEQ ID NO: 19198 - DNA, 36 bp, unidentified
  source 1..36: mol_type = unassigned DNA; note = methanogen bacteria
aaaatgaatgttagtgaatcatttagtccgcaaatt

SEQ ID NO: 19199 - DNA, 54 bp, unidentified
  source 1..54: mol_type = unassigned DNA; note = methanogen bacteria
gattcctcattaattgcaataatccagaaaatcattccattgacaaaaagtata

SEQ ID NO: 19200 - DNA, 39 bp, unidentified
  source 1..39: mol_type = unassigned DNA; note = methanogen bacteria
accgattcctttctgatgaatccgacaagtaaagtaacc

SEQ ID NO: 19201 - DNA, 42 bp, unidentified
  source 1..42: mol_type = unassigned DNA; note = methanogen bacteria
acttatggacataattatggagaaggattaagcccccatgta

SEQ ID NO: 19202 - DNA, 39 bp, unidentified
  source 1..39: mol_type = unassigned DNA; note = methanogen bacteria
tgcttaatcaatcctgaaacatcccctattactagcctt

SEQ ID NO: 19203 - DNA, 54 bp, unidentified
  source 1..54: mol_type = unassigned DNA; note = methanogen bacteria
catctcctcatcactgccatcgattctttacttccaataaatagaaccgaaatc

SEQ ID NO: 19204 - DNA, 45 bp, unidentified
  source 1..45: mol_type = unassigned DNA; note = methanogen bacteria
aaccatgggcaaaatttcggagagggatttgccccccatgatgga

SEQ ID NO: 19205 - DNA, 33 bp, unidentified
  source 1..33: mol_type = unassigned DNA; note = methanogen bacteria
ctctatccccaaataaaggtcgagtcttacatt

SEQ ID NO: 19206 - DNA, 45 bp, unidentified
  source 1..45: mol_type = unassigned DNA; note = methanogen bacteria
cttaccgcagttgactattacctgccaataagcatgaatgaaata

SEQ ID NO: 19207 - DNA, 39 bp, unidentified
  source 1..39: mol_type = unassigned DNA; note = methanogen bacteria
gattcgtttttaatgaatcctacaagtgcagtaacaaga

SEQ ID NO: 19208 - DNA, 48 bp, unidentified
  source 1..48: mol_type = unassigned DNA; note = methanogen bacteria
cacctgtattttattgaatataatctctcatttgacccttttgtgagt

SEQ ID NO: 19209 - DNA, 33 bp, unidentified
  source 1..33: mol_type = unassigned DNA; note = methanogen bacteria
gttaaaggacaatacgatgttaagaatttacat

SEQ ID NO: 19210 - DNA, 39 bp, unidentified
  source 1..39: mol_type = unassigned DNA; note = methanogen bacteria
attccgggcataataactccaacagacgtacttagcaat

SEQ ID NO: 19211 - DNA, 57 bp, unidentified
  source 1..57: mol_type = unassigned DNA; note = methanogen bacteria
tcttcttattatagatttaaatgcgacgtcgattctattccattggatacaggagat

SEQ ID NO: 19212 - DNA, 276 bp, unidentified
  source 1..276: mol_type = unassigned DNA; note = methanogen bacteria
gcaactataataagtggacaaggccttgaattaacattgcttaacaatagcatcaatgttactactcttccgtccagatttgatttacgtgactggggatggatgtcaccggttaaagatcagggatggatgggtgcctgctggacattcggaatgacaggtacattggaatcagcattattgaaagctgcaggcattaaaaccgatttttcagaaaataacatgagagacaccatgttaaaatattcaatatacggttcagatttcttagctgaa

SEQ ID NO: 19213 - DNA, 153 bp, unidentified
  source 1..153: mol_type = unassigned DNA; note = methanogen bacteria
acaactaatgaaaacggaacagccagattaaacattaacttacctcctggcgagtatatattaacagcaattgatccgttgaccggccttatgatgtcttataacattacagttttatctactctaaatgctactgacttggagatgtcatat

SEQ ID NO: 19214 - DNA, 132 bp, unidentified
  source 1..132: mol_type = unassigned DNA; note = methanogen bacteria
tttaatgtaactgttcttgatgggcaaggaaaaccagcatataaagctgcagttaaattcaacatcaacggaatattctacacaaaacacacagattctaaaggaatagctaaactgaacattaatttaatg

SEQ ID NO: 19215 - DNA, 63 bp, unidentified
  source 1..63: mol_type = unassigned DNA; note = methanogen bacteria
aaatacatcattacctcagaatacgatggattaaaaatttcaaacaccattacaattaaggat

SEQ ID NO: 19216 - DNA, 39 bp, unidentified
  source 1..39: mol_type = unassigned DNA; note = methanogen bacteria
aatggagaaaatttagggggagggctaagcccacatgtt

SEQ ID NO: 19217 - DNA, 30 bp, unidentified
  source 1..30: mol_type = unassigned DNA; note = methanogen bacteria
gcatatcctgacaccattccaataaagaat

SEQ ID NO: 19218 - DNA, 48 bp, unidentified
  source 1..48: mol_type = unassigned DNA; note = methanogen bacteria
atgatttcagccattaacaaactcatcccattaaacataaatggaatc

SEQ ID NO: 19219 - DNA, 42 bp, unidentified
  source 1..42: mol_type = unassigned DNA; note = methanogen bacteria
acggattcatttctaatgcagcctacaagtgcaataacaaga

SEQ ID NO: 19220 - DNA, 39 bp, unidentified
  source 1..39: mol_type = unassigned DNA; note = methanogen bacteria
accgattcctttctgatggagcctactagtgcagtcacc

SEQ ID NO: 19221 - DNA, 39 bp, unidentified
  source 1..39: mol_type = unassigned DNA; note = methanogen bacteria
gactcttttttaatgaatccgacaagtgaagtaactaga

SEQ ID NO: 19222 - DNA, 42 bp, unidentified
  source 1..42: mol_type = unassigned DNA; note = methanogen bacteria
accgactcctttttcatggaaccaaccagcgcagtgacaaga

SEQ ID NO: 19223 - DNA, 39 bp, unidentified
  source 1..39: mol_type = unassigned DNA; note = methanogen bacteria
accgattcatttctcatgcatcctacaagcgcagtgacc

SEQ ID NO: 19224 - DNA, 42 bp, unidentified
  source 1..42: mol_type = unassigned DNA; note = methanogen bacteria
acagactcatttttaatgaacccgacaagcgtggtgaccaga

SEQ ID NO: 19225 - DNA, 36 bp, unidentified
  source 1..36: mol_type = unassigned DNA; note = methanogen bacteria
gactcatttttaatgaatcctacaagtgatgttaca

SEQ ID NO: 19226 - DNA, 39 bp, unidentified
  source 1..39: mol_type = unassigned DNA; note = methanogen bacteria
ggacttgaaaatggaggtttattgaaacttcatttacaa

SEQ ID NO: 19227 - DNA, 39 bp, unidentified
  source 1..39: mol_type = unassigned DNA; note = methanogen bacteria
gtattatttaattattcatatgaaacattattatacaat

SEQ ID NO: 19228 - DNA, 39 bp, unidentified
  source 1..39: mol_type = unassigned DNA; note = methanogen bacteria
caaacaaacctccaaatgtttgccagtgccacagtatca

SEQ ID NO: 19229 - DNA, 30 bp, unidentified
  source 1..30: mol_type = unassigned DNA; note = methanogen bacteria
atgatgggtggtatagaccttgggttattt

SEQ ID NO: 19230 - DNA, 54 bp, unidentified
  source 1..54: mol_type = unassigned DNA; note = methanogen bacteria
cgcgattattctgatgttttatttacattgaaaaaattcggattatattatttg

SEQ ID NO: 19231 - DNA, 30 bp, unidentified
  source 1..30: mol_type = unassigned DNA; note = methanogen bacteria
attaaaggaaattctgatgcaagagactta

SEQ ID NO: 19232 - DNA, 39 bp, unidentified
  source 1..39: mol_type = unassigned DNA; note = methanogen bacteria
tttattcctgaagaaataacacctgattcaatactaggc

SEQ ID NO: 19233 - DNA, 129 bp, unidentified
  source 1..129: mol_type = unassigned DNA; note = methanogen bacteria
gcaactggaggtatctatccaattcaaatcatggccccattctttagagtgctgtatccatatatgcctatgacctatggaatcaccttagttcgtgaagcgcaacttggtgtggtctggtcaaactat

SEQ ID NO: 19234 - DNA, 39 bp, unidentified
  source 1..39: mol_type = unassigned DNA; note = methanogen bacteria
gaagttctctgggatttcggagtatttgccccccaaata

SEQ ID NO: 19235 - DNA, 51 bp, unidentified
  source 1..51: mol_type = unassigned DNA; note = methanogen bacteria
tattccaacgcatttataaatattaaaaatcttgaggaatacctgccgata

SEQ ID NO: 19236 - DNA, 42 bp, unidentified
  source 1..42: mol_type = unassigned DNA; note = methanogen bacteria
ttaccattgactagatactcagaaattataatcccccaaata

SEQ ID NO: 19237 - DNA, 51 bp, unidentified
  source 1..51: mol_type = unassigned DNA; note = methanogen bacteria
aattcttatttaagtcgatatttcggaggaaatacatacttaatcgtaatg

SEQ ID NO: 19238 - DNA, 57 bp, unidentified
  source 1..57: mol_type = unassigned DNA; note = methanogen bacteria
ggtgattataatgatattttagctacagtggacaacttcggattatattatctgatt

SEQ ID NO: 19239 - DNA, 87 bp, unidentified
  source 1..87: mol_type = unassigned DNA; note = methanogen bacteria
atattaactgcaacagatcctttaaccgatcttcaaatgtcatatgacatcacagttttacctacattaattgcagataatttagta

SEQ ID NO: 19240 - DNA, 135 bp, unidentified
  source 1..135: mol_type = unassigned DNA; note = methanogen bacteria
ttccatattagtttaattgatggtgatggcagtcctgtagcagacaaacagattgttatgaatattaacggagtattttacaaccgtacaaccaatgaaaacggaactgcaaaattaaacatcaacctaaaccca

SEQ ID NO: 19241 - DNA, 45 bp, unidentified
  source 1..45: mol_type = unassigned DNA; note = methanogen bacteria
tacatattaactgcaacagatcctttaaccgatcttcaaatgtcc

SEQ ID NO: 19242 - DNA, 276 bp, unidentified
  source 1..276: mol_type = unassigned DNA; note = methanogen bacteria
aacattacagtacttccagtattgaccgccgaagatgtaaagatgacatatctagatggaacacaattcaaggcaacattggtcgatggagaaggtgaagcacaatccgatgcaaacatcacattcaacatcaacggagtattctacaatagaaccactgatgaaaatggaactgctagcctaaacatcagattaatgcctggagaatacatcatcacatcacaatacggtcaagcagcaatttcaaataaaattactattgcagcaaaaggggat

SEQ ID NO: 19243 - DNA, 129 bp, unidentified
  source 1..129: mol_type = unassigned DNA; note = methanogen bacteria
ggtactggaggaatttatcctgtagagattatggctcctatctttgatatggcaaatccttatttgccgatgacctatgcaatcactttattgcgtgaagcccagttaggctgtatctggtcaaattat

SEQ ID NO: 19244 - DNA, 186 bp, unidentified
  source 1..186: mol_type = unassigned DNA; note = methanogen bacteria
tctaattctaatagtaattctaattctaatagtaattctaattctaatagtaattctaactccaataccaatactaacactaatgctggtaacgaaatattctatattgatttgccattccaagatgatattaaactgacattttcaaaaggcaaatataaagttaaagtctatgaatggagggtt

SEQ ID NO: 19245 - DNA, 204 bp, unidentified
  source 1..204: mol_type = unassigned DNA; note = methanogen bacteria
ccttattgtgaattagacattatactttttgattcaaatgataatcagatgagtaaatttgtatatgacacatattattattacgaaggaatgtggcatgacatgccagtaaatgaatggggcagtaactatcataaatcacgttttggccctgatgtacatattaccaaggttgctgtttcattaaaaggggcatcatggtat

SEQ ID NO: 19246 - DNA, 129 bp, unidentified
  source 1..129: mol_type = unassigned DNA; note = methanogen bacteria
ggaaccggaggaatctaccctattgagattatgggagacctcttccaggtgatttatccatacatgccgatgacatatgcaatcaatatgataagggagtcattgcttggtgtggtatggcacaattac

SEQ ID NO: 19247 - DNA, 45 bp, unidentified
  source 1..45: mol_type = unassigned DNA; note = methanogen bacteria
tcaccagagaagctctttgaatatggaatatacagttcacatatt

SEQ ID NO: 19248 - DNA, 30 bp, unidentified
  source 1..30: mol_type = unassigned DNA; note = methanogen bacteria
ggctttgacggctacgaagggtgggatgaa

SEQ ID NO: 19249 - DNA, 48 bp, unidentified
  source 1..48: mol_type = unassigned DNA; note = methanogen bacteria
tatgattatgtgacgaatatgaagaatgttaatccatacttatattta

SEQ ID NO: 19250 - DNA, 129 bp, unidentified
  source 1..129: mol_type = unassigned DNA; note = methanogen bacteria
ggaacaggaggaatatatcctattcagattatggacaacctattccaatggctttatccatttttaccgatgacctatgcaattaatctaatcagggaagcacaactaggattggtatggtccaattat

SEQ ID NO: 19251 - DNA, 42 bp, unidentified
  source 1..42: mol_type = unassigned DNA; note = methanogen bacteria
aatgccaatcaagtttacggcaatggattaaatccacataca

SEQ ID NO: 19252 - DNA, 36 bp, unidentified
  source 1..36: mol_type = unassigned DNA; note = methanogen bacteria
tttcatcctagcattttgaatataattacacatatt

SEQ ID NO: 19253 - DNA, 45 bp, unidentified
  source 1..45: mol_type = unassigned DNA; note = methanogen bacteria
atggataattctttaaacattaatgtaatgacatctgaatttgta

SEQ ID NO: 19254 - DNA, 36 bp, unidentified
  source 1..36: mol_type = unassigned DNA; note = methanogen bacteria
atccttatggattttggaatattcactccccatgta

SEQ ID NO: 19255 - DNA, 54 bp, unidentified
  source 1..54: mol_type = unassigned DNA; note = methanogen bacteria
cctgaagcccgccatattgtaaatattgattatattgataattttttacctgca

SEQ ID NO: 19256 - DNA, 129 bp, unidentified
  source 1..129: mol_type = unassigned DNA; note = methanogen bacteria
ggaaccggaggaatttaccctattcaattgatgcatccatttttccaaacactttatccttacctgcctatgacttatggaatcatgatgctgagagagtccttgctaggaatgatctggtccaattat

SEQ ID NO: 19257 - DNA, 42 bp, unidentified
  source 1..42: mol_type = unassigned DNA; note = methanogen bacteria
ctagacatattcatagagttgggaatatactaccctcatgtc

SEQ ID NO: 19258 - DNA, 33 bp, unidentified
  source 1..33: mol_type = unassigned DNA; note = methanogen bacteria
ggcatattctataataccaaactggacgagtat

SEQ ID NO: 19259 - DNA, 45 bp, unidentified
  source 1..45: mol_type = unassigned DNA; note = methanogen bacteria
tacacatacatcacccatttgaataatattaatatttacctgtat

SEQ ID NO: 19260 - DNA, 66 bp, unidentified
  source 1..66: mol_type = unassigned DNA; note = methanogen bacteria
ccacagctgttttacccgtcaatgagcgctacatataagttgcctagttggaatcctgcatggagc

SEQ ID NO: 19261 - DNA, 48 bp, unidentified
  source 1..48: mol_type = unassigned DNA; note = methanogen bacteria
atgtgggaatcatcaggggattcattctatatcttgccttcaatatcc

SEQ ID NO: 19262 - DNA, 126 bp, unidentified
  source 1..126: mol_type = unassigned DNA; note = methanogen bacteria
ggaaccggaggaatttatccaatagaaataatgcatgaatttttccaggtcctgtatccgtatctaccaatgacctatgcaattaatttaattagagaatcacaattaggattggtctggccaaat

SEQ ID NO: 19263 - DNA, 51 bp, unidentified
  source 1..51: mol_type = unassigned DNA; note = methanogen bacteria
tctgtaggaggaataccacttttaaaaccatcaattagatatctcttaaag

SEQ ID NO: 19264 - DNA, 261 bp, unidentified
  source 1..261: mol_type = unassigned DNA; note = methanogen bacteria
cgttcacttggagagctgacaataacctcatcaaccagcccgatatatagcctgcagacaagggcggactttacacttcacgtgttgaatttgcttgactttattggaggaaactttggcgtgacccatggccacatgcttgccagttcaattcctggaagtgatttggggccaaggatgatggttggaaagcttattgcatggagaaccgaagtgacaatcacaccaacattaatcggacaaatggtggttgattttgga

SEQ ID NO: 19265 - DNA, 126 bp, unidentified
  source 1..126: mol_type = unassigned DNA; note = methanogen bacteria
ggaaccggaggaatttatccgatagaaattatgcatgaatttttccaggccctatatccatacctgccaatgacttatgcaattaatttaattagagaatcccaattaggattggtgtggtccaat

SEQ ID NO: 19266 - DNA, 42 bp, unidentified
  source 1..42: mol_type = unassigned DNA; note = methanogen bacteria
tcagaaatatttttcgatttgggaatattcgctccccatgtt

SEQ ID NO: 19267 - DNA, 30 bp, unidentified
  source 1..30: mol_type = unassigned DNA; note = methanogen bacteria
agtaacatattattcaatgcaatgtctaac

SEQ ID NO: 19268 - DNA, 45 bp, unidentified
  source 1..45: mol_type = unassigned DNA; note = methanogen bacteria
tataattttgtagaatcaatggaaaatgtcaatctttacttatat

SEQ ID NO: 19269 - DNA, 30 bp, unidentified
  source 1..30: mol_type = unassigned DNA; note = methanogen bacteria
gcaggagtaatgaactatgagtttaaattt

SEQ ID NO: 19270 - DNA, 30 bp, unidentified
  source 1..30: mol_type = unassigned DNA; note = methanogen bacteria
ggtttgggcaacggcgaaaacaattttaat

SEQ ID NO: 19271 - DNA, 228 bp, unidentified
  source 1..228: mol_type = unassigned DNA; note = methanogen bacteria
acatttgtattaaaacaggatgatggcaaattgatggctttatatacaagatacaatcaggatggcacattcttcgtaggtgaattaaatggtagtcatgtaaataatataggaatagaaactttaaacaactcagcaatgagttcagctttacaaaaatctgcattccctgatggaaactggtttaacattcaatccttgacaaatgcatgggcaaatgaattacag

SEQ ID NO: 19272 - DNA, 72 bp, unidentified
  source 1..72: mol_type = unassigned DNA; note = methanogen bacteria
cagccaggattcttcatgagtgaatatatattggaaaactatccgttgggagaaaatgaatcatatttctat

SEQ ID NO: 19273 - DNA, 288 bp, unidentified
  source 1..288: mol_type = unassigned DNA; note = methanogen bacteria
aacacaaatacaaacactaacactcataaaaacactaacagtaattcaaactctaataaaaaaaccaataccagaaatacagttttaagtacaggttcagtttcagcaggaacttcacaatctacagtagaagcaataggtacagttgcagctgcagaagaaccatcaactgaaccaaatactgaagaaaaatcagaagatactccttcagaagaatcaagttccgacagtggaaaagcatacgaaatttcagaatcctcacctggaaattccgacaattcaaatgta

SEQ ID NO: 19274 - DNA, 42 bp, unidentified
  source 1..42: mol_type = unassigned DNA; note = methanogen bacteria
tcaatgcaattttttgaattaggaatacacaatccccatgta

SEQ ID NO: 19275 - DNA, 30 bp, unidentified
  source 1..30: mol_type = unassigned DNA; note = methanogen bacteria
ggtatttttttcagcaaggacattgatgaa

SEQ ID NO: 19276 - DNA, 39 bp, unidentified
  source 1..39: mol_type = unassigned DNA; note = methanogen bacteria
tttcttattgatataggtgggattaatccatatttactt

SEQ ID NO: 19277 - DNA, 33 bp, unidentified
  source 1..33: mol_type = unassigned DNA; note = methanogen bacteria
ttctctggatttggacttgaaaatcctcatgtc

SEQ ID NO: 19278 - DNA, 30 bp, unidentified
  source 1..30: mol_type = unassigned DNA; note = methanogen bacteria
attttctacaccacagcagtggacgaatac

SEQ ID NO: 19279 - DNA, 48 bp, unidentified
  source 1..48: mol_type = unassigned DNA; note = methanogen bacteria
tattcgtatttagaatccctaccgaatataaaccaatatctggtgctg

SEQ ID NO: 19280 - DNA, 39 bp, unidentified
  source 1..39: mol_type = unassigned DNA; note = methanogen bacteria
gatttctttcttgaattaggaatagaaagtccttatgtc

SEQ ID NO: 19281 - DNA, 30 bp, unidentified
  source 1..30: mol_type = unassigned DNA; note = methanogen bacteria
ggtcttataattagtactgatataattgac

SEQ ID NO: 19282 - DNA, 39 bp, unidentified
  source 1..39: mol_type = unassigned DNA; note = methanogen bacteria
aaatatgtggccagtttggatgcgaatatcttcatcacc

SEQ ID NO: 19283 - DNA, 60 bp, unidentified
  source 1..60: mol_type = unassigned DNA; note = methanogen bacteria
atgatattaagtatatgtagtgagcctaaaatattagaaataatgaaatatgtaaacata

SEQ ID NO: 19284 - DNA, 39 bp, unidentified
  source 1..39: mol_type = unassigned DNA; note = methanogen bacteria
agtaatttctgggattttggaattagcagcccacatcta

SEQ ID NO: 19285 - DNA, 42 bp, unidentified
  source 1..42: mol_type = unassigned DNA; note = methanogen bacteria
ttaatgaacattaacaaaatattcaaatactttgtttttatg

SEQ ID NO: 19286 - DNA, 39 bp, unidentified
  source 1..39: mol_type = unassigned DNA; note = methanogen bacteria
acatacatatatgcatatgggatatcgagcccccatatc

SEQ ID NO: 19287 - DNA, 45 bp, unidentified
  source 1..45: mol_type = unassigned DNA; note = methanogen bacteria
aactttttaaaagatattaatcatataaatcaatacattattcta

SEQ ID NO: 19288 - DNA, 36 bp, unidentified
  source 1..36: mol_type = unassigned DNA; note = methanogen bacteria
tatgccggccttggtgacggatgcacaccctatgtg

SEQ ID NO: 19289 - DNA, 57 bp, unidentified
  source 1..57: mol_type = unassigned DNA; note = methanogen bacteria
gataatacgctgatggtcgctctggcttctatacttccaataaattcggatgaagta

SEQ ID NO: 19290 - DNA, 33 bp, unidentified
  source 1..33: mol_type = unassigned DNA; note = methanogen bacteria
ggaatttatgaacatgaaattgcatctgaattt

SEQ ID NO: 19291 - DNA, 42 bp, unidentified
  source 1..42: mol_type = unassigned DNA; note = methanogen bacteria
ttagatatccttttggattttggtatggttcgtcccgatatt

SEQ ID NO: 19292 - DNA, 30 bp, unidentified
  source 1..30: mol_type = unassigned DNA; note = methanogen bacteria
gaactttctcttaatcaaagaatagctgaa

SEQ ID NO: 19293 - DNA, 45 bp, unidentified
  source 1..45: mol_type = unassigned DNA; note = methanogen bacteria
tataattatgtaatagatacagatattaatttatacctgcagatt

SEQ ID NO: 19294 - DNA, 45 bp, unidentified
  source 1..45: mol_type = unassigned DNA; note = methanogen bacteria
acagtccaacataacctttatggcgatggattgaatccgcatatg

SEQ ID NO: 19295 - DNA, 51 bp, unidentified
  source 1..51: mol_type = unassigned DNA; note = methanogen bacteria
ccagaatcaatcatcatattacttgattcagtttcaggaacatatattgat

SEQ ID NO: 19296 - DNA, 39 bp, unidentified
  source 1..39: mol_type = unassigned DNA; note = methanogen bacteria
atacttcttgaaaatgagatactgaataatgaatcagaa

SEQ ID NO: 19297 - DNA, 33 bp, unidentified
  source 1..33: mol_type = unassigned DNA; note = methanogen bacteria
ttctacggatatggaattgaaaaccctcatgtc

SEQ ID NO: 19298 - DNA, 48 bp, unidentified
  source 1..48: mol_type = unassigned DNA; note = methanogen bacteria
tataattatttagcaacaataccggatattaacctatacctgctgcta

SEQ ID NO: 19299 - DNA, 39 bp, unidentified
  source 1..39: mol_type = unassigned DNA; note = methanogen bacteria
tcaaatgccgtattagatttgggactatattgtccacat

SEQ ID NO: 19300 - DNA, 39 bp, unidentified
  source 1..39: mol_type = unassigned DNA; note = methanogen bacteria
catctaatagatattgatgttaatttgaccatatatgta

SEQ ID NO: 19301 - DNA, 30 bp, unidentified
  source 1..30: mol_type = unassigned DNA; note = methanogen bacteria
atttatgaacatggaattacatctgaattt

SEQ ID NO: 19302 - DNA, 153 bp, unidentified
  source 1..153: mol_type = unassigned DNA; note = methanogen bacteria
aatagaacagctcctatcaccgagggttggttcagcacatatgccgatatgatcctcagtggaaaagttccttacagagatttcgaacttgtcttgcctccgctttatacatatttggtagccgcagtcaatttggtattcggaaatcatctc

SEQ ID NO: 19303 - DNA, 90 bp, unidentified
  source 1..90: mol_type = unassigned DNA; note = methanogen bacteria
gcaggtgccgcagagaactgcctggagatgctgttctcatcaggcgtcaaagggaacctctctgacatggccacaggattcctaagacgc

SEQ ID NO: 19304 - DNA, 42 bp, unidentified
  source 1..42: mol_type = unassigned DNA; note = methanogen bacteria
tcggacatcagaacactgttgatgggccaactgcctgagcag

SEQ ID NO: 19305 - DNA, 36 bp, unidentified
  source 1..36: mol_type = unassigned DNA; note = methanogen bacteria
catcaaatatataatgaaattttcagcttaaacctt

SEQ ID NO: 19306 - DNA, 33 bp, unidentified
  source 1..33: mol_type = unassigned DNA; note = methanogen bacteria
ggaatttatgaagatgaaattacttctgaattt

SEQ ID NO: 19307 - DNA, 30 bp, unidentified
  source 1..30: mol_type = unassigned DNA; note = methanogen bacteria
ggtttgagagactatggagactatttaaat

SEQ ID NO: 19308 - DNA, 33 bp, unidentified
  source 1..33: mol_type = unassigned DNA; note = methanogen bacteria
atatttaatgaaatctttggtttaagccttgaa

SEQ ID NO: 19309 - DNA, 30 bp, unidentified
  source 1..30: mol_type = unassigned DNA; note = methanogen bacteria
atttatgaacatggaattgcatctgaattt

SEQ ID NO: 19310 - DNA, 42 bp, unidentified
  source 1..42: mol_type = unassigned DNA; note = methanogen bacteria
ttgccttcttcctccgggggacaaacagagttccagaccccg

SEQ ID NO: 19311 - DNA, 30 bp, unidentified
  source 1..30: mol_type = unassigned DNA; note = methanogen bacteria
tggtccggtctttccagcgagaccaatgag

SEQ ID NO: 19312 - DNA, 33 bp, unidentified
  source 1..33: mol_type = unassigned DNA; note = methanogen bacteria
ctcatgacggggagcgagatggacatcatgggc

SEQ ID NO: 19313 - DNA, 30 bp, unidentified
  source 1..30: mol_type = unassigned DNA; note = methanogen bacteria
ctcatcacccccgaatccatcatcaacaac

SEQ ID NO: 19314 - DNA, 30 bp, unidentified
  source 1..30: mol_type = unassigned DNA; note = methanogen bacteria
tacgtcaacggaatcatctccagcgatctt

SEQ ID NO: 19315 - DNA, 42 bp, unidentified
  source 1..42: mol_type = unassigned DNA; note = methanogen bacteria
gcggacttcatcaacgaccacacgccggaatcggtcagcctt

SEQ ID NO: 19316 - DNA, 45 bp, unidentified
  source 1..45: mol_type = unassigned DNA; note = methanogen bacteria
atgatgggtgaaaattttggtgagggcttttctccccatgtaggg

SEQ ID NO: 19317 - DNA, 36 bp, unidentified
  source 1..36: mol_type = unassigned DNA; note = methanogen bacteria
tatctaatgcatccggaaacaatttccttcaacatg

SEQ ID NO: 19318 - DNA, 63 bp, unidentified
  source 1..63: mol_type = unassigned DNA; note = methanogen bacteria
gaccaaacatttattaaagctatcgatgagatgattcttcctatagacttttatgaaattaag

SEQ ID NO: 19319 - DNA, 51 bp, unidentified
  source 1..51: mol_type = unassigned DNA; note = methanogen bacteria
ggctatatactcactgccctgaaaatcacgccggcgcatagccattaccgc

SEQ ID NO: 19320 - DNA, 183 bp, unidentified
  source 1..183: mol_type = unassigned DNA; note = methanogen bacteria
atgacggacatcccgtccagcgtatgcgatggatatttcccgtacgcagacgccatgatggacgggaccttcccttacactcatgatgtctgggtatatgatgattggaacacctgggaatacccgcctctggcatatgtgttcatcctcctgccgaggctgttggcatcatccgtggcggga

SEQ ID NO: 19321 - DNA, 171 bp, unidentified
  source 1..171: mol_type = unassigned DNA; note = methanogen bacteria
ggctccgacccgctgtcgttcgccaagtaccatacggaccgccctctggagatcgaatcggtggcagcctccgtcatcgagatcctttctcttctgggtcttactgacgtctcatatgcctacgatttcgggtcggacaatatctatgggtctgccagcagcgccgtgtcg

SEQ ID NO: 19322 - DNA, 36 bp, unidentified
  source 1..36: mol_type = unassigned DNA; note = methanogen bacteria
aacttcggattccgcggggaaggggaggccatgagc

SEQ ID NO: 19323 - DNA, 129 bp, unidentified
  source 1..129: mol_type = unassigned DNA; note = methanogen bacteria
ggaactggtggtatttatcctattcagctaatgggaaacatacttcaatcagtcagtcctttcatgccaatgactcatggtattacattgcttagggaatctgcattaggattggtatggtctaattat

SEQ ID NO: 19324 - DNA, 228 bp, unidentified
  source 1..228: mol_type = unassigned DNA; note = methanogen bacteria
aagaaatttaccttaaaagcaaccctcaaaatcaacggcaaaaaagtcaaaggcaaaaagataacattcaaattcaacggcaaaacctacaaggtcaaaaccaacaaaaaaggtgttgcacaaaaaacattaaacaaaaaaatcatcaaaaagctcaaaaaaggtaaaaaatacactgtcaaagtgacctacaaaaaagacaccattaaaacaactttaaaagtcaag

SEQ ID NO: 19325 - DNA, 123 bp, unidentified
  source 1..123: mol_type = unassigned DNA; note = methanogen bacteria
actgtaaataatgctgatgattataagaaagctaatggtcttaaagcttctacagtaatatcagaatataatgcattgaaaaaattagaattaggaaatgaaacttataattttgatacaatt

SEQ ID NO: 19326 - DNA, 117 bp, unidentified
  source 1..117: mol_type = unassigned DNA; note = methanogen bacteria
gtggatgatggaattgttactattgatggtaaaaactacaaagcttgtgatggtaataaacttgtttatatgaaaagtatgagctcagaatggcaaactgtagtaaaagttgtttgt

SEQ ID NO: 19327 - DNA, 39 bp, unidentified
  source 1..39: mol_type = unassigned DNA; note = methanogen bacteria
tgctcaaatgtctacgatataaacttttgcaggtggtcc

SEQ ID NO: 19328 - DNA, 255 bp, unidentified
  source 1..255: mol_type = unassigned DNA; note = methanogen bacteria
ggtgcactatggagtcctactactcattacactaatcctgatccggatgatatgtattcattaataccatttaattctaacacatacgtattgtcttctgatttggtttccagtataaaatcagataataatattcagaaaataaatgatttatttgataaatcaaacaatgaaatcacattcactgctgatgaagtattagctgctatttcatcaataaatctgaataatggtcaagttcatagtgttttatat

SEQ ID NO: 19329 - DNA, 267 bp, unidentified
  source 1..267: mol_type = unassigned DNA; note = methanogen bacteria
ttggcgaatggaaacctaaatattgaaaaatccaaatttaacagcaataatgcatctgtaagcggcggcgcaatatatacctcatatacggatttgaacttaaaaaatagtgaatttattaataattccgcctttaaaaatggtggggcaaattatatggaattaacaaattccactattgataatgtattatttatcgcaaataatgttgaaaatagcagcacgttgaatccgagcacaatttatgcttatgattcaagttcatat

SEQ ID NO: 19330 - DNA, 36 bp, unidentified
  source 1..36: mol_type = unassigned DNA; note = methanogen bacteria
aattccaagtacagcatttcttcagttttcaccatt

SEQ ID NO: 19331 - DNA, 39 bp, unidentified
  source 1..39: mol_type = unassigned DNA; note = methanogen bacteria
atagacaataaagattcaattggaaagcctaatatgaaa

SEQ ID NO: 19332 - DNA, 33 bp, unidentified
  source 1..33: mol_type = unassigned DNA; note = methanogen bacteria
gatttcagcaatgttgacaatgccgatttgtct

SEQ ID NO: 19333 - DNA, 153 bp, unidentified
  source 1..153: mol_type = unassigned DNA; note = methanogen bacteria
ccatttgctgataatgaaattctgaatttgtcttcactaaatggtaagctgtcttcaaaggataatgcaaaaagtttccaggaagattatggcacatgggcagaaaatgttgaaaatgaaagcagcagtaaacgggctgaatactttgatggt

SEQ ID NO: 19334 - DNA, 39 bp, unidentified
  source 1..39: mol_type = unassigned DNA; note = methanogen bacteria
catgtgccaaatgtttcagattatgatgatggtattttc

SEQ ID NO: 19335 - DNA, 108 bp, unidentified
  source 1..108: mol_type = unassigned DNA; note = methanogen bacteria
tttagtcaggcatttaaaacaagtgaatccgtagcaaatccttcctctgattcaggtggattcggtggctttggaggcggatctggaggtggtggaggtggagcattc

SEQ ID NO: 19336 - DNA, 54 bp, unidentified
  source 1..54: mol_type = unassigned DNA; note = methanogen bacteria
gctatcggcaacatgcaggtttatgcgatatcctcagttaaacagcctctgaca

SEQ ID NO: 19337 - DNA, 54 bp, unidentified
  source 1..54: mol_type = unassigned DNA; note = methanogen bacteria
aattcctatttagttcttgaattttccggaaatgatttcataaatctattttca

SEQ ID NO: 19338 - DNA, 270 bp, unidentified
  source 1..270: mol_type = unassigned DNA; note = methanogen bacteria
attcatgggtcatcaattggccaattaaatatttttgacattgatcataaacctctattgggagtttccaggataatccggtcagatgaatttatcgttaatactccatttgccttttctcaatattttaatgatttttcttatttttcagaaattgtcagaggcacactaaccgatatgttcatcatatatggacagccggttttagatattggaatgattttcagaccatttttaataggatacctattcttaaatcaggggcaggga

SEQ ID NO: 19339 - DNA, 156 bp, unidentified
  source 1..156: mol_type = unassigned DNA; note = methanogen bacteria
tcaatagatactattaagattatattaaataccgtttatcccgcttccgaaataactaacggaggaggaatcttaaactcttttgcctattacatccccacaatattcttccccatttatgatacaaatttattattgaacacctgtgaatattct

SEQ ID NO: 19340 - DNA, 57 bp, unidentified
  source 1..57: mol_type = unassigned DNA; note = methanogen bacteria
gttcatttacctgattttataattcaattaacattaagaagcaagatgaaaaataat

SEQ ID NO: 19341 - DNA, 192 bp, unidentified
  source 1..192: mol_type = unassigned DNA; note = methanogen bacteria
gtaaacccaattgattatggaacggacatgatatacgaatcaccattcctcaacgaagttgaaaacattgttgaaaatgaccctgatgcactctggattaccaaatcattgccaacagattatattattagtgttggagcaaaaaccgtaaattccgtaaatacatacctgatttggaaaaatgggaaaaat

SEQ ID NO: 19342 - DNA, 30 bp, unidentified
  source 1..30: mol_type = unassigned DNA; note = methanogen bacteria
ttcattgacaccagtttcttgggacctatt

SEQ ID NO: 19343 - DNA, 165 bp, unidentified
  source 1..165: mol_type = unassigned DNA; note = methanogen bacteria
caatacaacattggaattggtaactgggacacgtatctttacttagaaaatggtagaaattttgcaaaaatgggttggggagacgtacccagcatcgcaccggtaattcccataatactttcaaagatgtttctattagccggacatacatatcatgaagccata

SEQ ID NO: 19344 - DNA, 195 bp, unidentified
  source 1..195: mol_type = unassigned DNA; note = methanogen bacteria
gaattttacatccatcttggaacacccttcccatttcttggacagttcagtggaacagtgtccaacacagtggtaatggattcaggattcctaccagacagctggtactacattaaacacatacccaattacctgattagctatgttcctaatgttaacacattcaatgcaatagtcaatcccatgggcaacata

SEQ ID NO: 19345 - DNA, 51 bp, unidentified
  source 1..51: mol_type = unassigned DNA; note = methanogen bacteria
attgggaatatgaatgtttatttgattgaaacaactaaagttcctatgacc

SEQ ID NO: 19346 - DNA, 36 bp, unidentified
  source 1..36: mol_type = unassigned DNA; note = methanogen bacteria
tcttcaaagaaatctaagatagatggtaaagtatcc

SEQ ID NO: 19347 - DNA, 204 bp, unidentified
  source 1..204: mol_type = unassigned DNA; note = methanogen bacteria
gcatataatgaagaaaaagcaatagaacatgtaattaacacggtaaaacaagttaaggatataactgaaatcatcatagttgacgatggaagtacagataacacccataacattgtatcacggcaagataatgttatattattgactcatgaaaaaaataagggtaaaggttctgctatgaaaacaggacttaaacgcgtcacg

SEQ ID NO: 19348 - DNA, 99 bp, unidentified
  source 1..99: mol_type = unassigned DNA; note = methanogen bacteria
ctatcagagataaataaattacaggttgaatcaataattaagccaatccttaacggcgatgcagatattacaaaaacaaagtttaaaagagaagctgga

SEQ ID NO: 19349 - DNA, 138 bp, unidentified
  source 1..138: mol_type = unassigned DNA; note = methanogen bacteria
caggggatgagaattcaagaagtagatataggtaatatagtacatgagatgtctactcttaaagaattgaatataatggctaatgaagtagtacgtactattgttgatagagcaatccattatggtagattaacaatg

SEQ ID NO: 19350 - DNA, 30 bp, unidentified
  source 1..30: mol_type = unassigned DNA; note = methanogen bacteria
ataaaaggaaattctgatgcaatggactta

SEQ ID NO: 19351 - DNA, 39 bp, unidentified
  source 1..39: mol_type = unassigned DNA; note = methanogen bacteria
tttattcctgaggaaataaccccaaatgagatactcggc

SEQ ID NO: 19352 - DNA, 60 bp, unidentified
  source 1..60: mol_type = unassigned DNA; note = methanogen bacteria
gagatatccgaccgcatctacgacggcatcgtggcagactcattggacatggacacggtg

SEQ ID NO: 19353 - DNA, 60 bp, unidentified
  source 1..60: mol_type = unassigned DNA; note = methanogen bacteria
gagatctccgacctcatctacgacggcatcgtggctgattcgatcaatacggattctgtg

SEQ ID NO: 19354 - DNA, 129 bp, unidentified
  source 1..129: mol_type = unassigned DNA; note = methanogen bacteria
gcaacgggaggaatttaccctatcgaaatcatggcgaaatttttccattacatacatccatatatgccaatgacgtatgcgattaatctattgcgtgaggcgcagcttggagtcgtctggtcaaattac

SEQ ID NO: 19355 - DNA, 129 bp, unidentified
  source 1..129: mol_type = unassigned DNA; note = methanogen bacteria
gcgactgggggaatttatccgattcagattatgcatcaatttttccaatctatatatccgtatatgccgatgacttatgcaattaaattggtacgggaagcacaattgggtgttgtctggtccaattat

SEQ ID NO: 19356 - DNA, 129 bp, unidentified
  source 1..129: mol_type = unassigned DNA; note = methanogen bacteria
ggtaccggaggtatttacccggttgaaattatggcgcattacttcaatgtgttgaatccatacctgccgatgacatatgcaattacgttaatacgtgaagctcaattaggcctagtctggtctaattat

SEQ ID NO: 19357 - DNA, 129 bp, unidentified
  source 1..129: mol_type = unassigned DNA; note = methanogen bacteria
gcaacaggaggaatatatccaatagagatcatgcataaatttttccaaacattatacccatatatgccaatgacttatgcaattaaactgatacgggaagcacagttaggtgttgtctggtcaaattac

SEQ ID NO: 19358 - DNA, 129 bp, unidentified
  source 1..129: mol_type = unassigned DNA; note = methanogen bacteria
acaacaggagggatttatccaatcgaaattatgcattcttcattcaaaggactatactattatttcccaatgacttatgctattaaattaatgcgggaagcccagcttagtgttgtctggtcaaattac

SEQ ID NO: 19359 - DNA, 126 bp, unidentified
  source 1..126: mol_type = unassigned DNA; note = methanogen bacteria
gcaaccggaggaatctatcctatcgagattatgggcaagcttttccaattcatacatccgtatatgccgatgacgtatgcaatacggctgatacgtgaagcgcagcttggagtcgtttggtcgaac

SEQ ID NO: 19360 - DNA, 129 bp, unidentified
  source 1..129: mol_type = unassigned DNA; note = methanogen bacteria
gcaacaggcggaatttatccaatcgaaattatgcataaagtcttccaaacattatatccgtttatgccaatgacttatgcgattaaattaatacgggaagcacagcttggtgttgtctggtccaattat

SEQ ID NO: 19361 - DNA, 39 bp, unidentified
  source 1..39: mol_type = unassigned DNA; note = methanogen bacteria
agcgtgcgttgggtttatggaatatttgcccctcatgtt

SEQ ID NO: 19362 - DNA, 30 bp, unidentified
  source 1..30: mol_type = unassigned DNA; note = methanogen bacteria
ataaacagttcccagggaagtgataaagga

SEQ ID NO: 19363 - DNA, 57 bp, unidentified
  source 1..57: mol_type = unassigned DNA; note = methanogen bacteria
ggctatccaaatcaattcttaaatttgaaaaccattagaaagattttccctacaatg

SEQ ID NO: 19364 - DNA, 129 bp, unidentified
  source 1..129: mol_type = unassigned DNA; note = methanogen bacteria
gcgacaggaggaatctatccaattcagattatgcatcaatttttccaaacattatatccatacatgccaatgacctatgcaattaaattgattcgggaagcgcaactgggcgttgtctggtcaaattat

SEQ ID NO: 19365 - DNA, 129 bp, unidentified
  source 1..129: mol_type = unassigned DNA; note = methanogen bacteria
ggtaccggtggtgtctatcctgttcagattatgggggactttttcaagctcatgaatccttaccttccgatgacgtatgcaatcacattgatacgtgaagcgcaacttgggctggtttggtctaattat

SEQ ID NO: 19366 - DNA, 30 bp, unidentified
  source 1..30: mol_type = unassigned DNA; note = methanogen bacteria
agtgatgcggagatattatcaatacctctt

SEQ ID NO: 19367 - DNA, 129 bp, unidentified
  source 1..129: mol_type = unassigned DNA; note = methanogen bacteria
ggaactggtggtatttatcctgttgaaattatggctgactttttccaattaatgaatccgtatttgccaatgacgtatgcaataacgctaatacgggaagcacaattaggtttagtttggtctaattat

SEQ ID NO: 19368 - DNA, 126 bp, unidentified
  source 1..126: mol_type = unassigned DNA; note = methanogen bacteria
ggaaccggaggaatatatcctgtggaaattatgtccccaattttcaacatattgaatccatatctgccaatgacctatgcaatcacactgattcgtgaagcgcaattaggattaatctggtccaac

SEQ ID NO: 19369 - DNA, 129 bp, unidentified
  source 1..129: mol_type = unassigned DNA; note = methanogen bacteria
ggaacgggaggaatctatcctattgaaatcatgggagagtttttcagatacctatatccttatatgccaatgacgtatgcaattactctgctacgtgagtcacagcttggagttgtctggtcaaattac

SEQ ID NO: 19370 - DNA, 129 bp, unidentified
  source 1..129: mol_type = unassigned DNA; note = methanogen bacteria
ggtaccggtggaatctaccctattgaaatcatgggcagtttcttccagagcatatatccatacatgccaatgacatatgctatcaatctattgcgtgaagcacagattggagttgtctggtcaaattac

SEQ ID NO: 19371 - DNA, 60 bp, unidentified
  source 1..60: mol_type = unassigned DNA; note = methanogen bacteria
gagatttccgacgagatcttcgacggtatcggcacaggcaccaccgatacctcggcaatc

SEQ ID NO: 19372 - DNA, 30 bp, unidentified
  source 1..30: mol_type = unassigned DNA; note = methanogen bacteria
tctttagaatttgatatacttaaatttaat

SEQ ID NO: 19373 - DNA, 48 bp, unidentified
  source 1..48: mol_type = unassigned DNA; note = methanogen bacteria
atttattttagttcatcaggacatttggatttgtattctgcattgttg

SEQ ID NO: 19374 - DNA, 33 bp, unidentified
  source 1..33: mol_type = unassigned DNA; note = methanogen bacteria
tcaagtgatccgtcagtattttcaactccatta

SEQ ID NO: 19375 - DNA, 129 bp, unidentified
  source 1..129: mol_type = unassigned DNA; note = methanogen bacteria
ggtactgggggtatttatccagtacaaattatgggtgaagttttccaagcactaaacccatatctgccgatgacttatgcaattacgctaatgcgtgaagcacaattgggtcttgtatggtcaaattac

SEQ ID NO: 19376 - DNA, 30 bp, unidentified
  source 1..30: mol_type = unassigned DNA; note = methanogen bacteria
agtgatccttccgtatttacaacaccatta

SEQ ID NO: 19377 - DNA, 129 bp, unidentified
  source 1..129: mol_type = unassigned DNA; note = methanogen bacteria
ggtactggaggaatatatccagtggaaattatggctccaatatttgatattgcaaatccatacttaccaatgacatatggtataacattaatacgtgaggctcagcttggacttatatggtcaaattat

SEQ ID NO: 19378 - DNA, 30 bp, unidentified
  source 1..30: mol_type = unassigned DNA; note = methanogen bacteria
agtgacccatcagtattttcaacacctgaa

SEQ ID NO: 19379 - DNA, 30 bp, unidentified
  source 1..30: mol_type = unassigned DNA; note = methanogen bacteria
agtgacccgtccgtattttcaactccggta

SEQ ID NO: 19380 - DNA, 132 bp, unidentified
  source 1..132: mol_type = unassigned DNA; note = methanogen bacteria
ggtactggaggaatgtatcctgtacagattatgaacaatatctttggagttatatatccttatttaccgatgactcatggaattagcattgtccgtgaagcacagctgggtttaatatgggctaattatatt

SEQ ID NO: 19381 - DNA, 174 bp, unidentified
  source 1..174: mol_type = unassigned DNA; note = methanogen bacteria
tttcatcaagtgagaggagcatttaatcctgatatttatgcatatttagctggagcaattgaactctctggattaaattttcataatctttctggaggacaatggattcaaaattctccggttatcatatttttcacagcaattttatttagattaggatttattaatattaat

SEQ ID NO: 19382 - DNA, 180 bp, unidentified
  source 1..180: mol_type = unassigned DNA; note = methanogen bacteria
ttaggatattatccgtatctttcttatttttcaatggcaaatggatcaattagcggatataatttatccgttgatgtaaatcaggttaatagtaaattattttatttaaaaaattttataaaaatgatatcatgcaacttgatttcatttgatgaaaattttgttgaaatatttaacaat

SEQ ID NO: 19383 - DNA, 288 bp, unidentified
  source 1..288: mol_type = unassigned DNA; note = methanogen bacteria
tttacaaatactgttgaaattaatgaagatggtttggatcggattgatttttgtgattttattaaagaatatgataatgattatcaatctaaaagtttcatgggatacagggaattgaggatttttgaatggtatttgaataaggatatcttaaagtggggagaagatgtaaccgaatttaatccggatgattatgattatataattacggaagtaaaaacattggataatgttaattatgaagaggtgtaccataagggcaaatatcatttctatgaaagaatatac

SEQ ID NO: 19384 - DNA, 48 bp, unidentified
  source 1..48: mol_type = unassigned DNA; note = methanogen bacteria
gcacttatgagtggattcggaaagaatgttggggatttggatcaaaag

SEQ ID NO: 19385 - DNA, 90 bp, unidentified
  source 1..90: mol_type = unassigned DNA; note = methanogen bacteria
gactctgaagatgatactgaattcaccaaaacaaccttcattaccgtcaagtcaacagatggccttgaaaggtatgaaagggaattggtt

SEQ ID NO: 19386 - DNA, 165 bp, unidentified
  source 1..165: mol_type = unassigned DNA; note = methanogen bacteria
atcttaagaacatatgaattgaatggcagaatcagcttttcatatatggaggattgccttagagaggaaaaccaagcaagggcttaccaagacagatacaacaactggtgtgagaacttcaagaatgactatttgcccgatgaggtattccaggaatactttgac

SEQ ID NO: 19387 - DNA, 189 bp, unidentified
  source 1..189: mol_type = unassigned DNA; note = methanogen bacteria
atgcatgtttatggcggattgaacgattcaagctatacaacaaatgacctcttcatgttctattatcttggaggacataatcatattaacagttcattctcaactgcatcatccactatctcagctgctaacaatgactccattggaggaatcggaggtggttccggtggtggaggtggtggtgcattt

SEQ ID NO: 19388 - DNA, 30 bp, unidentified
  source 1..30: mol_type = unassigned DNA; note = methanogen bacteria
ggcatctggcacggcacgacgacctacggt

SEQ ID NO: 19389 - DNA, 30 bp, unidentified
  source 1..30: mol_type = unassigned DNA; note = methanogen bacteria
tttatagatacaagcttcatcggaccggta

SEQ ID NO: 19390 - DNA, 30 bp, unidentified
  source 1..30: mol_type = unassigned DNA; note = methanogen bacteria
actattgatacaagctttttaggcccagca

SEQ ID NO: 19391 - DNA, 30 bp, unidentified
  source 1..30: mol_type = unassigned DNA; note = methanogen bacteria
tttatcgatacaagcttcatgggaccagtg

SEQ ID NO: 19392 - DNA, 30 bp, unidentified
  source 1..30: mol_type = unassigned DNA; note = methanogen bacteria
tttatcgatacaagcttcatgggaccggta

SEQ ID NO: 19393 - DNA, 30 bp, unidentified
  source 1..30: mol_type = unassigned DNA; note = methanogen bacteria
tttatcgataccagtttcatggggtcttta

SEQ ID NO: 19394 - DNA, 30 bp, unidentified
  source 1..30: mol_type = unassigned DNA; note = methanogen bacteria
tttattgatacaagttttataggtcctata

SEQ ID NO: 19395 - DNA, 30 bp, unidentified
  source 1..30: mol_type = unassigned DNA; note = methanogen bacteria
tttattgatacaagctttatgggacctgca

SEQ ID NO: 19396 - DNA, 174 bp, unidentified
  source 1..174: mol_type = unassigned DNA; note = methanogen bacteria
tttcatcaaactagaggggcattcaatccggatatttatgcatatttagctggatcaattgaacttgcaggattaaattcaaatcatattcttggaggattttggattcaaaattcaccggtgattatatttttcactgctttactttttagattaggttttgtaaatattaac

SEQ ID NO: 19397 - DNA, 177 bp, unidentified
  source 1..177: mol_type = unassigned DNA; note = methanogen bacteria
ggtttttatcctgaaatttcatatttttcaatggcaagtggatcaattaaggggtattctagtgccgttgatgtaaataaaattaatgataagttattttatattaaaaatttctttaaattactatcttgcaattggatttcttttgatgaaaatttcactgaaatatttaatgat

SEQ ID NO: 19398 - DNA, 288 bp, unidentified
  source 1..288: mol_type = unassigned DNA; note = methanogen bacteria
tttacaaatactgttgaaattaatgaagatggtttggatcggattgatttttgtgattttattaaagaatatgataatgattatcaatctaaaagttttatgggatacagggaattgaggatttttgaatggtatttgaataaagatatcttaaagtggggagatgatgtaaccgaatttaatccggatgatcatgattatataattacggaagtaaaaacattggataatgttaattatgaagaggtgtaccataagggcaagtatcatttctatgaaagaatatac

SEQ ID NO: 19399 - DNA, 69 bp, unidentified
  source 1..69: mol_type = unassigned DNA; note = methanogen bacteria
gcgatcaccgacgagatctccggcgccgtgctcgggggcagggacatcgactccgatttcatctccggc

SEQ ID NO: 19400 - DNA, 30 bp, unidentified
  source 1..30: mol_type = unassigned DNA; note = methanogen bacteria
ctggtcgtcgagggcgagatcgggtacggg

SEQ ID NO: 19401 - DNA, 33 bp, unidentified
  source 1..33: mol_type = unassigned DNA; note = methanogen bacteria
ggtcctcaaatgggtattgaaccgttattcact

SEQ ID NO: 19402 - DNA, 63 bp, unidentified
  source 1..63: mol_type = unassigned DNA; note = methanogen bacteria
actgaaggggaatttgtttcaatcataggtccgtcaggttccggaaagtcaaccttgctcaac

SEQ ID NO: 19403 - DNA, 81 bp, unidentified
  source 1..81: mol_type = unassigned DNA; note = methanogen bacteria
tccaataaaaagttaaatgaattcagggcaagggagattggattcattttccagcttcataatttgattccaaatatttcc

SEQ ID NO: 19404 - DNA, 189 bp, unidentified
  source 1..189: mol_type = unassigned DNA; note = methanogen bacteria
ctagattcaaagacaagtactaaaatccttaagcaattaattgatttgcacgatactaagaatgtaacattgataattgtaactcatgatatggatgtcgctaaacttgcagacagagttatcgaagttttggatggtgaaataatatctgccggtgatgactcattaattaatagcaaaattgatgtt

SEQ ID NO: 19405 - DNA, 33 bp, unidentified
  source 1..33: mol_type = unassigned DNA; note = methanogen bacteria
ggtgctgatacaagctttatcggacctgtaatt

SEQ ID NO: 19406 - DNA, 33 bp, unidentified
  source 1..33: mol_type = unassigned DNA; note = methanogen bacteria
aacgatttcgtaaatgtctttgaacttggaata

SEQ ID NO: 19407 - DNA, 33 bp, unidentified
  source 1..33: mol_type = unassigned DNA; note = methanogen bacteria
aacaatattgaagacatattcgcattaggatat

SEQ ID NO: 19408 - DNA, 30 bp, unidentified
  source 1..30: mol_type = unassigned DNA; note = methanogen bacteria
aatgatattgaaggaatgtttgaactcgga

SEQ ID NO: 19409 - DNA, 30 bp, unidentified
  source 1..30: mol_type = unassigned DNA; note = methanogen bacteria
agcaatgttgaaaatatttttcggctaggc

SEQ ID NO: 19410 - DNA, 30 bp, unidentified
  source 1..30: mol_type = unassigned DNA; note = methanogen bacteria
ggagccgatacaagttttatcggacctata

SEQ ID NO: 19411 - DNA, 33 bp, unidentified
  source 1..33: mol_type = unassigned DNA; note = methanogen bacteria
aatgatattgaaggaatgtttgaacttggactc

SEQ ID NO: 19412 - DNA, 33 bp, unidentified
  source 1..33: mol_type = unassigned DNA; note = methanogen bacteria
ggcagtgatacaagtcttttttcaacgccacta

SEQ ID NO: 19413 - DNA, 129 bp, unidentified
  source 1..129: mol_type = unassigned DNA; note = methanogen bacteria
ggtacgggtggtatttatccggttgagattatgaatgaaattttcggagttttatatccttacctgccaatgacgtatggaatcaatatggttcgtgaagcgcagcttggtttaatatgggctaattat

SEQ ID NO: 19414 - DNA, 171 bp, unidentified
  source 1..171: mol_type = unassigned DNA; note = methanogen bacteria
atgtccggtggaatatttaatcctgatactgccgtttatttaatttctgcttataaatacgcaggcatggattttaataatatctgtgatgtcactgagttattttatactccagtcctttcatatctgaccgctttattattgatgttgggtattgatggacagttttct

SEQ ID NO: 19415 - DNA, 156 bp, unidentified
  source 1..156: mol_type = unassigned DNA; note = methanogen bacteria
ttggattatggttgttcattaacttttttagagcaatcccataattcattaaatgttgctaccgcttatgactcgggttctgtttcttacaatattgataaaagttactatctggaagagttggtgagcgtgtcattatttggtttttatagaagt

SEQ ID NO: 19416 - DNA, 66 bp, unidentified
  source 1..66: mol_type = unassigned DNA; note = methanogen bacteria
ataacaataatattcgaaggagatgaaatatacaacccaacaaacacaacaataaatgtaaaacta

SEQ ID NO: 19417 - DNA, 90 bp, unidentified
  source 1..90: mol_type = unassigned DNA; note = methanogen bacteria
atcacagtaaatataacctcaaatgtagagggtacagcaacaataacaataaacaaacaaacatacccagtaacaataaacaacaatgac

SEQ ID NO: 19418 - DNA, 51 bp, unidentified
  source 1..51: mol_type = unassigned DNA; note = methanogen bacteria
tatattgattttgatgtaacatatgacaatgcaattattttaaatattaca

SEQ ID NO: 19419 - DNA, 84 bp, unidentified
  source 1..84: mol_type = unassigned DNA; note = methanogen bacteria
aacattaatgatacagtaaatataaacattggcaataaaaattattcatttaaaatagaaaataatgatacaataataattccc

SEQ ID NO: 19420 - DNA, 213 bp, unidentified
  source 1..213: mol_type = unassigned DNA; note = methanogen bacteria
gtaacattaacatgggatgccgttagaattacaaaaatattaaccgtaaacaaaattaaaacgcaaataaatataaaagatatagaaatgttttataaagatggaagtaaagctataatcacattaaccgatgagaataataatatcttagcgaataaaaatgtttcttttaatattaatggtcaggattatgttagaacaacaaattctgat

SEQ ID NO: 19421 - DNA, 51 bp, unidentified
  source 1..51: mol_type = unassigned DNA; note = methanogen bacteria
aataactgttccattaaaatcaaaccaacattaatagcaaatgatttaaca

SEQ ID NO: 19422 - DNA, 72 bp, unidentified
  source 1..72: mol_type = unassigned DNA; note = methanogen bacteria
tttgtaaaggtacttgataaagcaggaaacataaaaccaaatagtaatgtgaacttcaatattaacggagta

SEQ ID NO: 19423 - DNA, 60 bp, unidentified
  source 1..60: mol_type = unassigned DNA; note = methanogen bacteria
attataacttccataaacgaagaaaccggcgaaatgatttcaaatacaattacagtatta

SEQ ID NO: 19424 - DNA, 48 bp, unidentified
  source 1..48: mol_type = unassigned DNA; note = methanogen bacteria
gtaaaagtcttcaataaagatggcagcatagcagccggtgtggacgta

SEQ ID NO: 19425 - DNA, 72 bp, unidentified
  source 1..72: mol_type = unassigned DNA; note = methanogen bacteria
ataattactgctgaatatcaggattgtaaagtatctaacaatattaaagttaaatctgttttatatgcagaa

SEQ ID NO: 19426 - DNA, 45 bp, unidentified
  source 1..45: mol_type = unassigned DNA; note = methanogen bacteria
aaactagttaacggtaaaggtgaagcatattcaatgcaatatatt

SEQ ID NO: 19427 - DNA, 60 bp, unidentified
  source 1..60: mol_type = unassigned DNA; note = methanogen bacteria
gaatatattattacatcttcttataattctgccagcatatcaaataaaattacaatacac

SEQ ID NO: 19428 - DNA, 54 bp, unidentified
  source 1..54: mol_type = unassigned DNA; note = methanogen bacteria
attgggaatatgaatgtttatttgattgaatcaactaaaaccccattgactacc

SEQ ID NO: 19429 - DNA, 168 bp, unidentified
  source 1..168: mol_type = unassigned DNA; note = methanogen bacteria
ctgtctggaggtacattaaatccggatattagtttatattctattactgctttaaaatatgctggaattgattattatggtattgtaaatccggaggagatattttacactcctattatttcgtttttaacttcattattatttaggatgggtttagttgataaagct

SEQ ID NO: 19430 - DNA, 150 bp, unidentified
  source 1..150: mol_type = unassigned DNA; note = methanogen bacteria
attttggattatggggggtctttaacattttttgaacaatctgtcaattcttttaatggaaataaggatattattatgtctaatatttttaatctggacaaatcttattatattgataatttttcagactttttatttgaaaaacaggat

SEQ ID NO: 19431 - DNA, 63 bp, unidentified
  source 1..63: mol_type = unassigned DNA; note = methanogen bacteria
acaacaatttttgacggcataaacaatatcatccacggtactggtacaatcgacataacgggg

SEQ ID NO: 19432 - DNA, 174 bp, unidentified
  source 1..174: mol_type = unassigned DNA; note = methanogen bacteria
tatcatcaaacaagaggtgctttcagttctgatctttatgtttatttagcagctgcattagattttgcaggtttaaatgttaataatatttctactcccatatatttggcgaattcgcccgtgatttgttttttaacttcgattttatttagattgggctttgttgatgttctt

SEQ ID NO: 19433 - DNA, 189 bp, unidentified
  source 1..189: mol_type = unassigned DNA; note = methanogen bacteria
ttgtccatgggttcagatttgacttattttggaatggcttcaggatcttttaatcatttcacttcaaataatcctgctggtcaagttaattatatagaagataaacttttttatataacacattacctccattttttatattgtaataaaataacattcagcgggctgattccaaagtttaccagtcct

SEQ ID NO: 19434 - DNA, 132 bp, unidentified
  source 1..132: mol_type = unassigned DNA; note = methanogen bacteria
ttattgaacttgcaatccgcttccgttgttgtaggtggattcccgaacgtacttatttccgttgcagagatgcaaatgccatccatgctcggtgcaggaatggcttcaatgtttttagcaaataccagtgga

SEQ ID NO: 19435 - DNA, 48 bp, unidentified
  source 1..48: mol_type = unassigned DNA; note = methanogen bacteria
gcagatatagttgacataggaatacagaatactgatttcaactatatc

SEQ ID NO: 19436 - DNA, 36 bp, unidentified
  source 1..36: mol_type = unassigned DNA; note = methanogen bacteria
tatgatgcaataatcggaaacgtattgactggagat

SEQ ID NO: 19437 - DNA, 165 bp, unidentified
  source 1..165: mol_type = unassigned DNA; note = methanogen bacteria
aacctcaatgagaatattggattatactgttcagatgtatttatttacttaactaattctttagcccttgcaggttatggtgctactcgagaatatctctatttatctcctttaatctgctttttaacatctattttatttagattaggattattgtctgaagtt

SEQ ID NO: 19438 - DNA, 183 bp, unidentified
  source 1..183: mol_type = unassigned DNA; note = methanogen bacteria
aattctggctcacatttgtcattcttaacacaaggctctacatttgcatctgggtctaaaggtgaggtaatagataatgcatatactgatgacacatttttctaccttcatgatttcccaaatttcctatttgcagaccatgtgatttttgacaatgtaatacctgttttgattggttctaca

SEQ ID NO: 19439 - DNA, 288 bp, unidentified
  source 1..288: mol_type = unassigned DNA; note = methanogen bacteria
acattccctggaactgttcattatgaccaagatttcaataagaacaaagtgattgcagattatctgattaattatgattctgattatagttcaaaagagattgcagcatatagtcaaaggtctcttaattggtatttaaaggataatgccattgcattaagggatgatcagttagactatttggaagcaagcaatataacctattacatttccgatggcaattttgatttagtgaattataccatgatttatgataaggatggattatacttgtatgaacggaataat

SEQ ID NO: 19440 - DNA, 66 bp, unidentified
  source 1..66: mol_type = unassigned DNA; note = methanogen bacteria
acaacactgatatttgatggaataaacaaaatcatccacaatacaggttcaattgatttaaatgca

SEQ ID NO: 19441 - DNA, 66 bp, unidentified
  source 1..66: mol_type = unassigned DNA; note = methanogen bacteria
acaacaacaatctttaacggaataaacaatatcatacacaacacaggaacaattgactttaccacc

SEQ ID NO: 19442 - DNA, 63 bp, unidentified
  source 1..63: mol_type = unassigned DNA; note = methanogen bacteria
accataatattttatggaatcaacaatatcatgaacaatacaggttcccttgattttgacaca

SEQ ID NO: 19443 - DNA, 69 bp, unidentified
  source 1..69: mol_type = unassigned DNA; note = methanogen bacteria
accaccacaatattcaacggaataaacgccatgatgaaccatacggacacaatagatttcgacaagctg

SEQ ID NO: 19444 - DNA, 69 bp, unidentified
  source 1..69: mol_type = unassigned DNA; note = methanogen bacteria
actacaataatctatgacggaatccaaaacatgattcatcatacaggttctgttgacattgcaggttta

SEQ ID NO: 19445 - DNA, 69 bp, unidentified
  source 1..69: mol_type = unassigned DNA; note = methanogen bacteria
acaaccatcatattcaatgggataaacaatatcatccaccataccggttcgattgatttggacgccttg

SEQ ID NO: 19446 - DNA, 33 bp, unidentified
  source 1..33: mol_type = unassigned DNA; note = methanogen bacteria
cctaacccttcagcacatgcaatggtattttca

SEQ ID NO: 19447 - DNA, 39 bp, unidentified
  source 1..39: mol_type = unassigned DNA; note = methanogen bacteria
cttggccctaataattcaacagaattaatgacaacaata

SEQ ID NO: 19448 - DNA, 132 bp, unidentified
  source 1..132: mol_type = unassigned DNA; note = methanogen bacteria
ggaactggtggaatttatccaattgaaattatgagtcaattctttagaacactatacccatatttaccaatgacacattcaattacacttctacgtgagtcagcactgggattactatggacctcctatacc

SEQ ID NO: 19449 - DNA, 66 bp, unidentified
  source 1..66: mol_type = unassigned DNA; note = methanogen bacteria
acaactataatatttgatggaataaacaacattatccataacacaggcacaattgacatcagcaca

SEQ ID NO: 19450 - DNA, 69 bp, unidentified
  source 1..69: mol_type = unassigned DNA; note = methanogen bacteria
aatatcctgctgaatggttatgccggaaatgtcgttgctaccttcggtaactttgttggcggtggtaat

SEQ ID NO: 19451 - DNA, 33 bp, unidentified
  source 1..33: mol_type = unassigned DNA; note = methanogen bacteria
cagggactggatatcaatgaggccttgcagcgt

SEQ ID NO: 19452 - DNA, 69 bp, unidentified
  source 1..69: mol_type = unassigned DNA; note = methanogen bacteria
accacaacaatattcaacgggataaacaatatcatccaccatacaggctcaatcgatttagatacgctg

SEQ ID NO: 19453 - DNA, 63 bp, unidentified
  source 1..63: mol_type = unassigned DNA; note = methanogen bacteria
acaataatatttgacggaatcaacaatatccttcacaatacaggttcaattgactttgaaagt

SEQ ID NO: 19454 - DNA, 30 bp, unidentified
  source 1..30: mol_type = unassigned DNA; note = methanogen bacteria
tctgaatccgatgatttgaataaatatcaa

SEQ ID NO: 19455 - DNA, 168 bp, unidentified
  source 1..168: mol_type = unassigned DNA; note = methanogen bacteria
cttcaatattcaattggtataggaaattgggacacttatttatacttagaaaacggccgtaattttgcaaaaatgggatggggtgatgtgtctagtattgcacctgttctaccaatgattctggcaaagatatttctaatcacacatcatacattccaggaagcaata

SEQ ID NO: 19456 - DNA, 198 bp, unidentified
  source 1..198: mol_type = unassigned DNA; note = methanogen bacteria
cagtttaataaggtgcttggaacaccatttccatttttaggacaatttagtggaacagtttcaaacactcaagttatggattcaggatatctgcctgacacatggtactatatcacacacatccctaactacttatcaagcacaatacccctaagatccacattcaatgcagtagttaaccctatgggtaacatacca

SEQ ID NO: 19457 - DNA, 63 bp, unidentified
  source 1..63: mol_type = unassigned DNA; note = methanogen bacteria
accctgatattcgatggaataaacaaacttatgcagcacacaggaacaattgatttcaacact

SEQ ID NO: 19458 - DNA, 66 bp, unidentified
  source 1..66: mol_type = unassigned DNA; note = methanogen bacteria
acaacaataatttatgacggaatcaacaatctcatccaccataccgggtcgattgattttgtaagc

SEQ ID NO: 19459 - DNA, 54 bp, unidentified
  source 1..54: mol_type = unassigned DNA; note = methanogen bacteria
attgggaacatgaatgtctatttgattgaatcaaccaaagttccaatgacacgt

SEQ ID NO: 19460 - DNA, 39 bp, unidentified
  source 1..39: mol_type = unassigned DNA; note = methanogen bacteria
gccatgattgataatagtacattcggcgaaccaaacatc

SEQ ID NO: 19461 - DNA, 246 bp, unidentified
  source 1..246: mol_type = unassigned DNA; note = methanogen bacteria
aaagaaaatgacaatctgctgctgacaattgaggatacctccattaacttggatatgggagaaaagattgtcgttaatattattgcacattttgcaaataacgatgttttaaacttgagcaatcttaaaaagcgaatgaaaagcaaaagcaatgctgaatggtttatgaataattttgatgattggaaagaagctgttgagaatgaatatttcactgatgatgttaaaaacaggtattttaatgat

SEQ ID NO: 19462 - DNA, 102 bp, unidentified
  source 1..102: mol_type = unassigned DNA; note = methanogen bacteria
taccatagctattacagtgcatacagcacaaattcctcatcaggttcaggtggcttcggaagcttcggaggaggatccggaggtggaggcggaggagcattt

SEQ ID NO: 19463 - DNA, 174 bp, unidentified
  source 1..174: mol_type = unassigned DNA; note = methanogen bacteria
tttcaccaaaccagaggggctttaaattcagatatatatgtttatttggcaggggcacttgatgttgcaaatatgaattataatcatatatccagccccatttggattcaaaactctcctgtgataatttttttaacatccttacttttcaggctgggtttagttgacattaat

SEQ ID NO: 19464 - DNA, 174 bp, unidentified
  source 1..174: mol_type = unassigned DNA; note = methanogen bacteria
ctgcaatatggtcagttgtcatacttttccatggctcaggggtcaattggccgttatactaatcccactgatccccaatttattacaagcagatattttttcttaaaaaattttttaaatttattgtctgcaaattcaatttcttttaatccgattgaacagttcaatgaaccg

SEQ ID NO: 19465 - DNA, 294 bp, unidentified
  source 1..294: mol_type = unassigned DNA; note = methanogen bacteria
aattttactaatactgttgaccataatgaagatgatttggatagagttgaattatgtgatttcataaaggaatatgacccggattatcaatctaaagaatttttatgcatgtgggatttaagatattttgaatggtatttaaataaggatatcattaaatatcgtgaggatgtaaatgaaattgaccccgatagatatgactatgtaatcacgtttaataaaacatttgattatgataattacagattggttcatcatgaaggaaattattatctaaatgagaaaattagttac

SEQ ID NO: 19466 - DNA, 66 bp, unidentified
  source 1..66: mol_type = unassigned DNA; note = methanogen bacteria
acaacagtaatatttaatggcattaacgatatgatgaatggaaccggaacaatcaatatggaaact

SEQ ID NO: 19467 - DNA, 81 bp, unidentified
  source 1..81: mol_type = unassigned DNA; note = methanogen bacteria
aggaaatactataagatgataacaagtacaaaggaagacacgataatacgaagactaaataaggataccggtgatttgaag

SEQ ID NO: 19468 - DNA, 138 bp, unidentified
  source 1..138: mol_type = unassigned DNA; note = methanogen bacteria
tttgaagatgaaaaacaaagaatatcattaacgagcataagcaaagaaagtggtgcattaagtcaattcatgaatgcatggaaaatagatgcactaagggatgttccggtaacaagagtacgtcagctttatgataaa

SEQ ID NO: 19469 - DNA, 48 bp, unidentified
  source 1..48: mol_type = unassigned DNA; note = methanogen bacteria
ataaaatatagcaacatatccgaatcagtcttatacgacaatgacgtg

SEQ ID NO: 19470 - DNA, 147 bp, unidentified
  source 1..147: mol_type = unassigned DNA; note = methanogen bacteria
tggggattcaaccatatgagaacggccttcctaccgataggaatatccaatcccaacttaggggacacgggatttgacacaggatcatttggtgatataggaggacctggttccggtggattcggtggagggggaggcggagtgttc

SEQ ID NO: 19471 - DNA, 171 bp, unidentified
  source 1..171: mol_type = unassigned DNA; note = methanogen bacteria
ataaagagtgatagtaaaataggaaatttctatatacatgatgtatatatctacttaaataacagtcttaattatgcaggactaggtggaagtagtaaaaatccaggtcttcctccagtaattccagttattacatcaatatttttctcattagggtttgtttctgataaa

SEQ ID NO: 19472 - DNA, 228 bp, unidentified
  source 1..228: mol_type = unassigned DNA; note = methanogen bacteria
tatcatatttctccattttttttgagtcaatataaaactatttctgcaacttcaaatccaggagcttcaagtgcagctgcaactaatactgtagctttaacaacaaataatatcttttactacataaacaatatccctctatatatgggaacatataaatggatcccattttcattaaaacctggaagatttgcatttgaaaagatggtatggttaggaaaccatcct

SEQ ID NO: 19473 - DNA, 129 bp, unidentified
  source 1..129: mol_type = unassigned DNA; note = methanogen bacteria
gcaactggaggaatctatccaattcaaatcatgcatccattcttcagggcattgtatccatacatgcctatgacttatggaattacattggtacgtgaagcacagcttggtactgtttggtcaaactat

SEQ ID NO: 19474 - DNA, 129 bp, unidentified
  source 1..129: mol_type = unassigned DNA; note = methanogen bacteria
gcaacaggaggaatatatccaattgaaatcatgcaccaatttttccagacattgtatccgtacatgccaatgacatatgcaatcacattaatacgtgaggctcagcttggtgtggtctggtcaaactat

SEQ ID NO: 19475 - DNA, 60 bp, unidentified
  source 1..60: mol_type = unassigned DNA; note = methanogen bacteria
actgcaaacccctcatcaagtggaggcggtggttcagatggtggaggcagcttcggagga

SEQ ID NO: 19476 - DNA, 30 bp, unidentified
  source 1..30: mol_type = unassigned DNA; note = methanogen bacteria
ggtaagcctataggaacttcagatttaaat

SEQ ID NO: 19477 - DNA, 48 bp, unidentified
  source 1..48: mol_type = unassigned DNA; note = methanogen bacteria
attgttggtaatgataatgatatgattattaagaggaaagacaaagat

SEQ ID NO: 19478 - DNA, 150 bp, unidentified
  source 1..150: mol_type = unassigned DNA; note = methanogen bacteria
cgatatgaagataaaaaaggtaatatttcattaaaaagtatatctgagggcgatagaggagaattttcacaattcatggatgcatgggaaatagatgttaataaagaagtaacatcagcaagagtaaaagaattatttgatgatacaggt

SEQ ID NO: 19479 - DNA, 117 bp, unidentified
  source 1..117: mol_type = unassigned DNA; note = methanogen bacteria
atgtattcatcatttaatacattaaacacgccggaaactgatactgaccctggttcctttggagacattggagatatcggatctggtggatttggtggaggtggaggtggagtattc

SEQ ID NO: 19480 - DNA, 42 bp, unidentified
  source 1..42: mol_type = unassigned DNA; note = methanogen bacteria
gagtacggtctcaacatggaccccctcagcagcaccgccacc

SEQ ID NO: 19481 - DNA, 96 bp, unidentified
  source 1..96: mol_type = unassigned DNA; note = methanogen bacteria
ggcatcaccgcgggagagggaggcatctccgccttctcgctcgagaacatcaagaccaacttcacgcctcccggctggaactggggagtcaacgac

SEQ ID NO: 19482 - DNA, 78 bp, unidentified
  source 1..78: mol_type = unassigned DNA; note = methanogen bacteria
ggaatgatgagccccgacgacatcgaggcatggggagtgtccaccctctaccccatcgcgcagttcgacttcggttcc

SEQ ID NO: 19483 - DNA, 210 bp, unidentified
  source 1..210: mol_type = unassigned DNA; note = methanogen bacteria
gtaaatgcacttgttgacaataaaagtgatattggaaatccgaatatgaaaggatttgaagcaacaattttaagtctgattgataggaaagtccttgacctatactcaaaggaaaacagtgaaacagagactcatgatttgtttttaacattcaattacgattcaaaaaatgaattgagtgacagtgaaacaatcgtattcgatacttta

SEQ ID NO: 19484 - DNA, 162 bp, unidentified
  source 1..162: mol_type = unassigned DNA; note = methanogen bacteria
aactttgctgatgacggtacattgaatttatccactttaaacgatacattgcagaatagtttcaatgcaggatggtttgcagaccagattaaaaattggcaaagccatgtcatttttgaacttgatgataatggtgttgaatcatactttaacgatactggc

SEQ ID NO: 19485 - DNA, 195 bp, unidentified
  source 1..195: mol_type = unassigned DNA; note = methanogen bacteria
ttgcaaatgccggatatttatgattataatgatggtattttcttatatcataactatggaggatattacatgatgcataatgcatattatatcggcgatcatatgggtgactcttcatcatccgattcatttgatttcggtggtttcgatgacttcggtggtggaggattcgatggtggaggtggaggagcattt

SEQ ID NO: 19486 - DNA, 195 bp, unidentified
  source 1..195: mol_type = unassigned DNA; note = methanogen bacteria
ttgcagatgcctgatgtttatgaatatgatgatggtattttcctctaccatacttatggtggatattacatgatgcataatgcatattatattggtgataatatgggagatccttcatcatccgattcattcgatttcggtggtttcgatgacttcggtggcggaggattcgatggtggaggtggaggagcattt

SEQ ID NO: 19487 - DNA, 36 bp, unidentified
  source 1..36: mol_type = unassigned DNA; note = methanogen bacteria
atagacaatactcatgaaatcggaacaccaaatatg

SEQ ID NO: 19488 - DNA, 72 bp, unidentified
  source 1..72: mol_type = unassigned DNA; note = methanogen bacteria
gagcgaaacagtgaaactgatttaaatgacctctatttaaaaataaataaagacaatcttgatggtttggct

SEQ ID NO: 19489 - DNA, 117 bp, unidentified
  source 1..117: mol_type = unassigned DNA; note = methanogen bacteria
gatttatcttatgaagcaaatgcaaagattttcatgaaagagtttaacacctggcaaaaagatgtcaaatatgaatatctggacagtgaaaatctcaagacatatttcaacaacaaa

SEQ ID NO: 19490 - DNA, 177 bp, unidentified
  source 1..177: mol_type = unassigned DNA; note = methanogen bacteria
aaaaatattgactcatactatgatgatgacgtattcctgtatcaccattatggaggatattacatgatgcacaacgccttcgtaacaggtcaaaacacagcaactccttcatcagattccgttggagacttcggaagcctcggaggaggatcaggtggtggaggtggaggtgcattc

SEQ ID NO: 19491 - DNA, 48 bp, unidentified
  source 1..48: mol_type = unassigned DNA; note = methanogen bacteria
actgcaatatttgacggtataaaaaccggaaacatgaatatggaatat

SEQ ID NO: 19492 - DNA, 45 bp, unidentified
  source 1..45: mol_type = unassigned DNA; note = methanogen bacteria
ttaatcgacaacagcagggatatcggaacacccaatatgaatgga

SEQ ID NO: 19493 - DNA, 72 bp, unidentified
  source 1..72: mol_type = unassigned DNA; note = methanogen bacteria
ctctacttaaaattaaatagagaacgaacttccagtctgtctattcatgaaaatacagttttcgacattatg

SEQ ID NO: 19494 - DNA, 156 bp, unidentified
  source 1..156: mol_type = unassigned DNA; note = methanogen bacteria
ttttcagacagcaacgatatcgtaaacctctcaaatttaaacaatgacctgtcatatgaatccaacgccaaaatgtttatggaagaatataatgaatggcagcaggacgtaaaacatgaatatctggattctgataatcttgaactctatttcaac

SEQ ID NO: 19495 - DNA, 177 bp, unidentified
  source 1..177: mol_type = unassigned DNA; note = methanogen bacteria
aagaatatatctgtatacgatgatgacgtattcctttaccaccactatggaggatactacatgatgcataatgcatttatgacaggccaatcctcagccaatccatcaaccgacagtgatttcggtgatttcggtggcctcggaggaggatcaggtggtggaggcggaggcgctttc

SEQ ID NO: 19496 - DNA, 54 bp, unidentified
  source 1..54: mol_type = unassigned DNA; note = methanogen bacteria
gttaatgcacttttggctgctgcaccagatttttctaaagctcaaaatctggaa

SEQ ID NO: 19497 - DNA, 63 bp, unidentified
  source 1..63: mol_type = unassigned DNA; note = methanogen bacteria
gctttaaccaacgttagtatcactggtgctggaaatccaagtatggatggatttaaagccaca

SEQ ID NO: 19498 - DNA, 162 bp, unidentified
  source 1..162: mol_type = unassigned DNA; note = methanogen bacteria
ttatttgaaagttattctattggaggaagatttagtttaaatgatttctcagaaaatatgaaaaacgaatcagatgctagagattatcgtgctaaatatagtgcatgggaacttagtgttgaaaacaatattggtgatagagcaagttcaatgttcattgga

SEQ ID NO: 19499 - DNA, 156 bp, unidentified
  source 1..156: mol_type = unassigned DNA; note = methanogen bacteria
agtgacttatatagattccattattatggaggttattctgtacttggtacttctatgactcttggttcaaccacaggtgtcgctacaagtagtagtgtcggtggtggatttggtggttccggaggcggaggcggaggaggtggaggaggagcattt

SEQ ID NO: 19500 - DNA, 174 bp, unidentified
  source 1..174: mol_type = unassigned DNA; note = methanogen bacteria
aacagcagttcgaacatactcggccacaactatcgtgatgcatacctttatctgattcaagcatatcattttgcaggaaccccaataggaggctacgattatgtgaattattattctcctttgatacctttcctaacctcactattattcagattgggtttcgtaagcgaggca

SEQ ID NO: 19501 - DNA, 141 bp, unidentified
  source 1..141: mol_type = unassigned DNA; note = methanogen bacteria
ataaacggcctgcccttcggattcatcaatcaggcaagggaggtttcaacagaaacaatttcctcaaacactgccgcagctccagctaatgatttgttcttctatatttccagtcttccaaggttcatatacagccctcaa

SEQ ID NO: 19502 - DNA, 168 bp, unidentified
  source 1..168: mol_type = unassigned DNA; note = methanogen bacteria
atccttaaaggttttatgtataatggtgtaatcgactttaaaaagatggaaaatgatttaagaaatgaagaaaatgcagaaagattcaataacgtatatagggcctggaaaactagctttatctctagaaatatacctgaaagcataaaaagagaatactttgatgat

SEQ ID NO: 19503 - DNA, 45 bp, unidentified
  source 1..45: mol_type = unassigned DNA; note = methanogen bacteria
tacaataacatcacagacagctattattataccaatgacgtattc

SEQ ID NO: 19504 - DNA, 117 bp, unidentified
  source 1..117: mol_type = unassigned DNA; note = methanogen bacteria
tactttggtggaatgaatgcattagaatctgcaataacaaccggaataaacacggtcaatacctcagatattggcgatgttggagggggatctggtggtggaggtggaggagctttc

SEQ ID NO: 19505 - DNA, 66 bp, unidentified
  source 1..66: mol_type = unassigned DNA; note = methanogen bacteria
aatgcgcttgttgataataaaaatgatattggaaatccgaatatgaaaggatttgaagcgacaatt

SEQ ID NO: 19506 - DNA, 135 bp, unidentified
  source 1..135: mol_type = unassigned DNA; note = methanogen bacteria
agtctaattgatcgaaaagtccttgatttgcactcacaggagaacagtgaaaccaatactcgtgatttgtatttaacatttaattatgattcaaaagaccaattgagcgatagcgaaacaattgtattcgatact

SEQ ID NO: 19507 - DNA, 162 bp, unidentified
  source 1..162: mol_type = unassigned DNA; note = methanogen bacteria
tttgctgaggagggtactttgaatttatcatctttcaatgaccagttgcaaaatagcttcaatgcaggctggtttgcagaccaaattagaaattggcaaagtcatgtcatttttgaaattgacgaaaatggtgttgaatcatactttaacgatactggttca

SEQ ID NO: 19508 - DNA, 189 bp, unidentified
  source 1..189: mol_type = unassigned DNA; note = methanogen bacteria
cagatgcctgatgtttatgaatatgatgatggtattttcttatatcaccactatggtggatattacatgatgcataatgcatattatattggtgataagatgggtgatccttcagcggattcatttgattttggcggttttgatgacttcggcggcggaggattcgacggcggaggtggaggggcattt

SEQ ID NO: 19509 - DNA, 66 bp, unidentified
  source 1..66: mol_type = unassigned DNA; note = methanogen bacteria
aatgcactgatggacaactcacatgatattggtacaccaaatatggatggatttgaagcaacaatt

SEQ ID NO: 19510 - DNA, 267 bp, unidentified
  source 1..267: mol_type = unassigned DNA; note = methanogen bacteria
aaagacagcaaaaccgaaatcaacgaattatacctgacattgcataaagacaccacttcaaatctggacattcatgaacagaccgtcgtagatattttatcaatgtttgctgatgaaaacaatgtcgttaatatgtccggtttaaatgcagatttatccgatgaaacaaatgccaaactattcatggaagagtataacacatggcagaaagatgttaaacacgaatacctggacagcgaaaatctgaaaagctatttccacaaaaaa

SEQ ID NO: 19511 - DNA, 174 bp, unidentified
  source 1..174: mol_type = unassigned DNA; note = methanogen bacteria
aaaaatatcgattcaattttggatgatgatgtgttcctataccaccattacggaggttattaccttatgcatgatgcattcgtgaccggtcaatcagcagccaatccttcatcagactccggcggtttcggaggtcttggaggaggatctggtggtggaggtggaggtgctttc

SEQ ID NO: 19512 - DNA, 51 bp, unidentified
  source 1..51: mol_type = unassigned DNA; note = methanogen bacteria
acaactgcaatatttgacggaataaactctggaaacatgaatctagaatat

SEQ ID NO: 19513 - DNA, 54 bp, unidentified
  source 1..54: mol_type = unassigned DNA; note = methanogen bacteria
gttaatgctcttctggctgtcgctccaaacttcactcaggcacaaaacttggat

SEQ ID NO: 19514 - DNA, 54 bp, unidentified
  source 1..54: mol_type = unassigned DNA; note = methanogen bacteria
gttaatgcccttctgtcagttgctcccgatttcacaaaggcacaaaatctggat

SEQ ID NO: 19515 - DNA, 54 bp, unidentified
  source 1..54: mol_type = unassigned DNA; note = methanogen bacteria
gttaatgctcttttaactgtcgctccaaactttagccaggcacagaacttggat

SEQ ID NO: 19516 - DNA, 54 bp, unidentified
  source 1..54: mol_type = unassigned DNA; note = methanogen bacteria
gttaatgctcttttaactgtcgctcccaacttcagtcaggctcagaacctggat

SEQ ID NO: 19517 - DNA, 177 bp, unidentified
  source 1..177: mol_type = unassigned DNA; note = methanogen bacteria
tttcaaatgtctggaggtatttacagtccagatgaaagtctttatttaatttcagcttttaaatatgctggtttagattattataatatttgtgatgtgaatgatctattttatactccagttatttcttatctcacttcgttattattaagattagggattgatggtcatttttca

SEQ ID NO: 19518 - DNA, 165 bp, unidentified
  source 1..165: mol_type = unassigned DNA; note = methanogen bacteria
ttatttgattataatgcaaaattaggattttttgatttatctgctgtaacattacatgtatctaataccaatactaatgcaatagattataatggaagtaaattgttttatatatttggtttacttaatgatttttcatttggttttgttagggattttaatttt

SEQ ID NO: 19519 - DNA, 51 bp, unidentified
  source 1..51: mol_type = unassigned DNA; note = methanogen bacteria
acaactgcaatatttgaaggtataaactctggaaatatgaatttagaatat

SEQ ID NO: 19520 - DNA, 84 bp, unidentified
  source 1..84: mol_type = unassigned DNA; note = methanogen bacteria
aatgtacttatttctgttgcagagatgcaaatgccaagtatgcttggagctggtatgaattcagcatttttagctaatactaat

SEQ ID NO: 19521 - DNA, 57 bp, unidentified
  source 1..57: mol_type = unassigned DNA; note = methanogen bacteria
gtaaatgccatcttaactgttgcaccaaatttctctcaagcacagaacctagataca

SEQ ID NO: 19522 - DNA, 36 bp, unidentified
  source 1..36: mol_type = unassigned DNA; note = methanogen bacteria
attgtcaaggaagaaaatttaggcaagaaccgagta

SEQ ID NO: 19523 - DNA, 111 bp, unidentified
  source 1..111: mol_type = unassigned DNA; note = methanogen bacteria
atgcttaacagcgcatttaacgatggaatatctgcagcaaacccgtcatctgatggagggggatttggtgatatcggtggcggatcaggtggtggaggcggtggagcattt

SEQ ID NO: 19524 - DNA, 51 bp, unidentified
  source 1..51: mol_type = unassigned DNA; note = methanogen bacteria
tcaatcacccacgttatcgacactgtaaaaatgataagtaaaatcacggag

SEQ ID NO: 19525 - DNA, 60 bp, unidentified
  source 1..60: mol_type = unassigned DNA; note = methanogen bacteria
tcaagtgacaacacatacgaccttgtatctgaatatgatgacgtaatcctgttgaggcat

SEQ ID NO: 19526 - DNA, 45 bp, unidentified
  source 1..45: mol_type = unassigned DNA; note = methanogen bacteria
atcatacagcccatacttgatggggaggcagacattacaaaaacg

SEQ ID NO: 19527 - DNA, 78 bp, unidentified
  source 1..78: mol_type = unassigned DNA; note = methanogen bacteria
aatgctcttgttgatagcaaaaatgatattggaactccgaacatgaagggattcgaagcaacaattttaagcctaatt

SEQ ID NO: 19528 - DNA, 84 bp, unidentified
  source 1..84: mol_type = unassigned DNA; note = methanogen bacteria
aggaaagtccttgatttgtactcacgggagaatagtgaaacagatactcgtgatttgttcttaaaatttgattatgattcaaaa

SEQ ID NO: 19529 - DNA, 156 bp, unidentified
  source 1..156: mol_type = unassigned DNA; note = methanogen bacteria
tttgctgatgacggcattttgaacctgtccacattaaataatctgttggaaaatgaagacaatgcaatatggtttgcaggccaaatccaaaattggcaaggttatgtcatttttgaaagtgatgaaagcggaattgacgcctactttgatgattcc

SEQ ID NO: 19530 - DNA, 195 bp, unidentified
  source 1..195: mol_type = unassigned DNA; note = methanogen bacteria
aaactgcaaatgccggatatttatgactatgatgacggtattttcttatatcatcactatggtggatattacatgatgcataatgcatatcatgtcggtgatatgggtgcgccttcatcatctgattcacatgatttcggcggtttcgatgacttcggtggcggaggattcgacggcggaggcggaggagcattt

SEQ ID NO: 19531 - DNA, 54 bp, unidentified
  source 1..54: mol_type = unassigned DNA; note = methanogen bacteria
gttaatgccattttagcagtcgccccaaacttcagccaagcgcaaaacctagat

SEQ ID NO: 19532 - DNA, 66 bp, unidentified
  source 1..66: mol_type = unassigned DNA; note = methanogen bacteria
aatgcattaatcgaaaacagcagggacatcggaacacctaatatgaatggatttgaagctacgata

SEQ ID NO: 19533 - DNA, 99 bp, unidentified
  source 1..99: mol_type = unassigned DNA; note = methanogen bacteria
agagacccaaatactgatttgacagaattatatttaaagttgaacagacaaaaaacttccagcctatcaattcatgaaaatacagttttcgacattatg

SEQ ID NO: 19534 - DNA, 156 bp, unidentified
  source 1..156: mol_type = unassigned DNA; note = methanogen bacteria
atgttttcagacagccatgacatcgtaaacctctcaaatctaaacaatgatttgtcatatgaatccaacgccaaaatgtttatggaggaatataatgaatggcagcaagacgtcaaacatgaatatctggataatcttgaactctacttcaacaat

SEQ ID NO: 19535 - DNA, 186 bp, unidentified
  source 1..186: mol_type = unassigned DNA; note = methanogen bacteria
cttcaggaaaagaatatacctgcatacgatgatgacatattcctataccaccactacggaggatactacatgatgcataatgcatttatgacagggcaatcttcagccaatccatcaaccgacagtgactttggcgatttcggaggccttggaggcggatcaggtggtggagggggaggcgctttc

SEQ ID NO: 19536 - DNA, 39 bp, unidentified
  source 1..39: mol_type = unassigned DNA; note = methanogen bacteria
accactttccttaccgtaaagtcaatggatggtcttgaa

SEQ ID NO: 19537 - DNA, 156 bp, unidentified
  source 1..156: mol_type = unassigned DNA; note = methanogen bacteria
acctatgaattgaatggaagaatcagtttctcatacatgcaggattgccttagagaggaaaaccaagctcgctcttaccaagacagatacaacaattggtgtcaaaacttcaagaatgactatttgcctgaagaggtattcgaggaatactttgat

SEQ ID NO: 19538 - DNA, 177 bp, unidentified
  source 1..177: mol_type = unassigned DNA; note = methanogen bacteria
ggtggattggacaatccgaattacacaacaaatgacttgttcatgttctattaccttggtggatacaatcatgtaaacagttcatttgcaactgcatcatctaccatttcagctgccaacaatgactccataggaggaatcggaggcggttcaggtggtggaggtggtggtgcgttt

SEQ ID NO: 19539 - DNA, 48 bp, unidentified
  source 1..48: mol_type = unassigned DNA; note = methanogen bacteria
actgcaatatttgatgggataaactctggaaatatgaatttgaatcat

SEQ ID NO: 19540 - DNA, 48 bp, unidentified
  source 1..48: mol_type = unassigned DNA; note = methanogen bacteria
actgcaatatttgatgggataaactctgggaatatgaacatagagcat

SEQ ID NO: 19541 - DNA, 174 bp, unidentified
  source 1..174: mol_type = unassigned DNA; note = methanogen bacteria
caccaatctagaggcgcatttaattcagatatctatgtttatttagctagtgccttagattatgctggaatgaactatggccatatatctgatttaggatatatgtctaattcaccattaatttgttatttgacttctttattgtttaaattgggatttgtgagtattaattca

SEQ ID NO: 19542 - DNA, 174 bp, unidentified
  source 1..174: mol_type = unassigned DNA; note = methanogen bacteria
ctatcatataatgctcctatttcctattttagtggagctatgggttcaattggtagatttcacaaccctaaggatcctaattatattgtagataaattcttttatattaaaaattatttaagtttgttatttgcaaataagattacatctcctatgcaaatagaaaaattcaga

SEQ ID NO: 19543 - DNA, 276 bp, unidentified
  source 1..276: mol_type = unassigned DNA; note = methanogen bacteria
ataaatacagttgaaattgatgattggagtttaaattttgattcagcttctaattttttattggattatgattcagattatcaatctaaagaaataggggttgatgttggcgataggtattatgagtggtattttttaaaggatgttgatttgatcaatccacatagtttcaattcgtcggattataattatatatttgtaaattctaatttggataatgatgattatcataaaatttatcgtgatggccgtataagggtatatgaaagaaattat

SEQ ID NO: 19544 - DNA, 42 bp, unidentified
  source 1..42: mol_type = unassigned DNA; note = methanogen bacteria
gatgctttgacaggagttaaaaagcagcaaatcgatttgctt

SEQ ID NO: 19545 - DNA, 45 bp, unidentified
  source 1..45: mol_type = unassigned DNA; note = methanogen bacteria
aattctggatactccattggctttgaaactgacagtataattgat

SEQ ID NO: 19546 - DNA, 51 bp, unidentified
  source 1..51: mol_type = unassigned DNA; note = methanogen bacteria
acgcttgatttattgatttctaatttgaattcatccaacgatattgctatc

SEQ ID NO: 19547 - DNA, 36 bp, unidentified
  source 1..36: mol_type = unassigned DNA; note = methanogen bacteria
atccaaaataaaagatctatcggtaaaccaaacatg

SEQ ID NO: 19548 - DNA, 132 bp, unidentified
  source 1..132: mol_type = unassigned DNA; note = methanogen bacteria
gttaacaatatcctgaatatgtctgaactttcatctaaattaagtaatgaaactaatggaaaatggtttgcaaataactttgatttatggaaaaaaactgtagccaatgagtatttaaataaaaaagaactt

SEQ ID NO: 19549 - DNA, 180 bp, unidentified
  source 1..180: mol_type = unassigned DNA; note = methanogen bacteria
ccacatgtaagtgatgatgactattattattacgacctatacacattccacagatattctggattaataatgctcagtagcgcatttaataccggtattcatgcatccaacgcatctaactcaggcggaagctttggaaatgttggtggaggttccggtggaggaggtggaggagcattc

SEQ ID NO: 19550 - DNA, 51 bp, unidentified
  source 1..51: mol_type = unassigned DNA; note = methanogen bacteria
acaactgcaatatttgacggcataacctcaggaaatatgaatattgaatat

SEQ ID NO: 19551 - DNA, 66 bp, unidentified
  source 1..66: mol_type = unassigned DNA; note = methanogen bacteria
ttcgatgaatggaaagatattgttaaagatgattgtataggtaaagataaagtatcatcatacttc

SEQ ID NO: 19552 - DNA, 126 bp, unidentified
  source 1..126: mol_type = unassigned DNA; note = methanogen bacteria
tcaggtttaataatgcttaacagtgcattcaacacaggagtatccgcagcaaacccatcatcatctgatatgggcgactttggcgatataggaggcggatccggtggaggtggtggaggagctttc

SEQ ID NO: 19553 - DNA, 48 bp, unidentified
  source 1..48: mol_type = unassigned DNA; note = methanogen bacteria
actgcaatatttgatggaataaactccggaaacatgaatattgaatac

SEQ ID NO: 19554 - DNA, 153 bp, unidentified
  source 1..153: mol_type = unassigned DNA; note = methanogen bacteria
tatgagcttaatggcagaataagcttcaactatatgcaggattgcttacgttcagagtatcatgcaagggctttccaagacagatacaataattggtgtgaaaactttaagaatgaatatctgcctgatgaagtattgaaagaatactttgac

SEQ ID NO: 19555 - DNA, 39 bp, unidentified
  source 1..39: mol_type = unassigned DNA; note = methanogen bacteria
ggtggattgaacgattatagctataccactaatgatctg

SEQ ID NO: 19556 - DNA, 129 bp, unidentified
  source 1..129: mol_type = unassigned DNA; note = methanogen bacteria
tattatcttggtggttataatcatgttggcagttcattctctacagcttcttccactatttcctctgctaacaatgactccattggaggaattggaggaggttccggtggtggaggtggaggagctttc

SEQ ID NO: 19557 - DNA, 66 bp, unidentified
  source 1..66: mol_type = unassigned DNA; note = methanogen bacteria
aatactatagttgaaacatcatactcagactccggtgattatggaagttctggtagtggcggattt

SEQ ID NO: 19558 - DNA, 48 bp, unidentified
  source 1..48: mol_type = unassigned DNA; note = methanogen bacteria
atgtctattgcaggaagatttgtaattccagatattggacttggccct

SEQ ID NO: 19559 - DNA, 42 bp, unidentified
  source 1..42: mol_type = unassigned DNA; note = methanogen bacteria
tatccaccgtttagcgcattatatccattaacaactgaaatt

SEQ ID NO: 19560 - DNA, 48 bp, unidentified; identical to SEQ ID NO: 19078
  source 1..48: mol_type = unassigned DNA; note = methanogen bacteria

SEQ ID NO: 19561 - DNA, 93 bp, unidentified
  source 1..93: mol_type = unassigned DNA; note = methanogen bacteria
aacggaaaattatttgtggaaaaatttgatgaatggaaatatattgttaaaaatcaaagtttaggagaagaaagaatctccagatactttaac

SEQ ID NO: 19562 - DNA, 123 bp, unidentified
  source 1..123: mol_type = unassigned DNA; note = methanogen bacteria
tccggattgataatgcttgatagtgcatttaataatggagtatccgcagccaacccatcatctgacggtggtggatttggtggagtcggaggcggttccggcggaggaggtggaggagctttc

SEQ ID NO: 19563 - DNA, 45 bp, unidentified
  source 1..45: mol_type = unassigned DNA; note = methanogen bacteria
aatgcaatgattgataacagtaccttcggagagccaaacataagg

SEQ ID NO: 19564 - DNA, 255 bp, unidentified
  source 1..255: mol_type = unassigned DNA; note = methanogen bacteria
tccattaaaaaagaaaatgaggatttgctgctgacaattgaggacacttccataaatttggacatgggagaaaaaattgtcgtcaacattctgtcacattttgcaaataatggtgtcttaaacttaagcggacttaaacaacgaatgaagagtaaagacaatgccgaatggtttataaataatttcaatgactggaaaaaagctgttgagaacgaatatttcaaagatgaagttaaaaacaggtattttaatgat

SEQ ID NO: 19565 - DNA, 108 bp, unidentified
  source 1..108: mol_type = unassigned DNA; note = methanogen bacteria
tgcttctaccatagctattaccgtgcatacagcacaaactcctcctccggttcaggcggcttcggaagctttggtggaggatccggcggaggcggcggaggagcattt

SEQ ID NO: 19566 - DNA, 162 bp, unidentified
  source 1..162: mol_type = unassigned DNA; note = methanogen bacteria
tttaataaggatttgggaatatactgttctgatgtattcatttacctttataattcactagtatttgctagaatagctttcttttctaattatttatatttatctcctttaatttgctttttgacttccattttatttagattggggtatgttagtgaagtg

SEQ ID NO: 19567 - DNA, 183 bp, unidentified
  source 1..183: mol_type = unassigned DNA; note = methanogen bacteria
tcctttggatctcaattgactttcttaacacaaggttccacaatttcttcaggctctaaaggtgcagttaatgatagtgcatacactacagacacactcttttatttacatgactttttaaactttttattctctcaaaaggtagtctttgatggaattatccctaatttgattggtgcaagt

SEQ ID NO: 19568 - DNA, 285 bp, unidentified
  source 1..285: mol_type = unassigned DNA; note = methanogen bacteria
tttacaggcacaattgaacatgatactgatttcaatgattataaggttgtttcagactatttgatgcaatatgatgatgattatgcctctaaagatattgctgtttctaagcaaaggcagttcagttggtttttaaggggttatacaatagcggtcactgttgagcaaaccgattttctggagtctagtaatataacctattatgtctgtgatgaggatatggaaataaagaattatagaaagatatataattataaggacatatttttatatgaaagagtaaat

SEQ ID NO: 19569 - DNA, 48 bp, unidentified
  source 1..48: mol_type = unassigned DNA; note = methanogen bacteria
gacgagatcatcggctcgatgccggattacagcgaggccgacggcgtg

SEQ ID NO: 19570 - DNA, 30 bp, unidentified
  source 1..30: mol_type = unassigned DNA; note = methanogen bacteria
aacggcgggacggactggtcctcgggattc

SEQ ID NO: 19571 - DNA, 81 bp, unidentified
  source 1..81: mol_type = unassigned DNA; note = methanogen bacteria
tggtttatggaccaattttcagaatggcaatatgaggttcaatgtgaaatagataatggtgtagaatcctatttcaacagc

SEQ ID NO: 19572 - DNA, 36 bp, unidentified
  source 1..36: mol_type = unassigned DNA; note = methanogen bacteria
atggattatgaagatgatattttcctataccataat

SEQ ID NO: 19573 - DNA, 117 bp, unidentified
  source 1..117: mol_type = unassigned DNA; note = methanogen bacteria
ttcatgagtagcgcattccacactatgaacaattcaatgaactcaggtgatttcggagacttcggtgactttggagacttcggaggaggatccggcggaggtggtggaggagcattc

SEQ ID NO: 19574 - DNA, 45 bp, unidentified
  source 1..45: mol_type = unassigned DNA; note = methanogen bacteria
cttatagacaataaggattcaattggaaagcccaatatgaaagga

SEQ ID NO: 19575 - DNA, 153 bp, unidentified
  source 1..153: mol_type = unassigned DNA; note = methanogen bacteria
tttgctgaaaatgaaattctgaatttgtcttctttaaatgataaactgtcttcacagcataatgctaaaagttttcaagaggattacaatacttgggcagatcatgttaaaaaagaaagcagcagtaaacggtcagaatactttgatgatagg

SEQ ID NO: 19576 - DNA, 39 bp, unidentified
  source 1..39: mol_type = unassigned DNA; note = methanogen bacteria
gtgcctgatatttcagattatgatgatggtatcttcctg

SEQ ID NO: 19577 - DNA, 120 bp, unidentified
  source 1..120: mol_type = unassigned DNA; note = methanogen bacteria
ggatattatgtatttagtcaggcattcaagacaagtgaatctgcagcaaatccttcatccggttcaggtggcttcggtggatttggcggaggatctggagggggaggaggtggagcattc

SEQ ID NO: 19578 - DNA, 63 bp, unidentified
  source 1..63: mol_type = unassigned DNA; note = methanogen bacteria
aatatcatccttgaaggatcaattagaataatgaaccataccggaacaatagattttcccaat

SEQ ID NO: 19579 - DNA, 42 bp, unidentified
  source 1..42: mol_type = unassigned DNA; note = methanogen bacteria
gcgatgatgaaatcacacgggcttggagatcccgacatggaa

SEQ ID NO: 19580 - DNA, 57 bp, unidentified
  source 1..57: mol_type = unassigned DNA; note = methanogen bacteria
ttcagcacaaaggatttgatattgaaattcgaaagagatgacctcaaggatttgaag

SEQ ID NO: 19581 - DNA, 180 bp, unidentified
  source 1..180: mol_type = unassigned DNA; note = methanogen bacteria
aacctttacaacatgctctactccctctcagacggaggagtattgaacatgtcagaacttgactccaagctctcaagcgagtcaaagggaaaatggttcatgggggagcttgacaatttctacgagtctgcaaagtcagaatatctttcagaagaaacagtaaatagatacttcaacaac

SEQ ID NO: 19582 - DNA, 171 bp, unidentified
  source 1..171: mol_type = unassigned DNA; note = methanogen bacteria
atacctgattatgctgattatgatgacagtgtattggtttatcactattatggaggttatcatatgatgcacaccgcatatgataccggatattcagctgccaatccttctgactccagcggtttcggaggactcggcggaggttccggcggtggtggtggaggagctttc

SEQ ID NO: 19583 - DNA, 63 bp, unidentified
  source 1..63: mol_type = unassigned DNA; note = methanogen bacteria
aatattctcattgaaggagcgaataacattattaaccataccggaacatttgattttgataga

SEQ ID NO: 19584 - DNA, 300 bp, unidentified
  source 1..300: mol_type = unassigned DNA; note = methanogen bacteria
gctcctgcagctgatttaaatagtttagatgctgacggtaaggcattatataccgatgcatcaggtcttccttatttcagtgaaatggattcatactataactacaggttgaccaacgattatgtggatcacggctatgtgggagatgaaaaggtaaacggcagcgaatgggatttgcataggaatgccccggacggtaataagattcaatacgagctgggtatcgtatatctgacatcatggatgcatgacatggcaaacaatttccttggatggcacatgtcagttaaagaagtcgca

SEQ ID NO: 19585 - DNA, 177 bp, unidentified
  source 1..177: mol_type = unassigned DNA; note = methanogen bacteria
caaggtatcgacggggttaccggaatattttcaagggtatttggactgcttaacttgcaatcagcatccgttgctgtaggtggattcccgaacgtacttatttccgttgcagagatgcaaatgccaagcatgcttggtgctggaatgacatcaatgtttttagcaagcactgacggt

SEQ ID NO: 19586 - DNA, 105 bp, unidentified
  source 1..105: mol_type = unassigned DNA; note = methanogen bacteria
ggagcattccagacctcaaacggtgttattccgggtacacaggactacatgtggaacgcaatggaatggattggagacacccaggacaacgatacagtaaggcga

SEQ ID NO: 19587 - DNA, 84 bp, unidentified
  source 1..84: mol_type = unassigned DNA; note = methanogen bacteria
attaacccaattgttataagtttggtggttaataacattccgtgggttcctattcaagagcttattgtaggtccatatggtatt

SEQ ID NO: 19588 - DNA, 153 bp, unidentified
  source 1..153: mol_type = unassigned DNA; note = methanogen bacteria
ggtatttttgaattcattattgctgctgttcgtcctcttgtaaatgcaattggtcttcctgatcaaacaagcgcttcatttgtacttggatttttcagaagagactttggtgctgcaggattaatgtcaatacatactatgttaactggtgtt

SEQ ID NO: 19589 - DNA, 111 bp, unidentified
  source 1..111: mol_type = unassigned DNA; note = methanogen bacteria
ctcaacagcgcattcaacacaggagtatctgcagcaaacccatcatccaatggcggcggaggaatcggtgatatcggaggaggttccggtggaggaggtggaggagctttc

SEQ ID NO: 19590 - DNA, 63 bp, unidentified
  source 1..63: mol_type = unassigned DNA; note = methanogen bacteria
acaatcatattcgatggcattaatgcaatgaacagtcatactggtacaattgatttaaataca

SEQ ID NO: 19591 - DNA, 63 bp, unidentified
  source 1..63: mol_type = unassigned DNA; note = methanogen bacteria
acaaccatatacaatggaataaatctgatacttaaccatacaggtacaattgatattaataga

SEQ ID NO: 19592 - DNA, 63 bp, unidentified
  source 1..63: mol_type = unassigned DNA; note = methanogen bacteria
acaacaatatttgatggactcaatgctattgcaaccaatacaggaacaatggatttaaacaga

SEQ ID NO: 19593 - DNA, 42 bp, unidentified
  source 1..42: mol_type = unassigned DNA; note = methanogen bacteria
atagataatcgagcatcacttggtgaacctaatatgaaaggt

SEQ ID NO: 19594 - DNA, 156 bp, unidentified
  source 1..156: mol_type = unassigned DNA; note = methanogen bacteria
ttgtatccttttgcagacggtgatattttaaatctttctacattggaggataagttgtcttccgaacgcaatgcaaaaagctttcaagaggattataagtcttgggttaaacatgttgaaaaggaaactgaaggtaagaaagcagaatacttcgat

SEQ ID NO: 19595 - DNA, 45 bp, unidentified
  source 1..45: mol_type = unassigned DNA; note = methanogen bacteria
gtgccgaatgtttccgattatgatgatggcattttcatctatcat

SEQ ID NO: 19596 - DNA, 120 bp, unidentified
  source 1..120: mol_type = unassigned DNA; note = methanogen bacteria
ggatattatctgtttgctcatgcatatgataccagtgtatctgcagcaaatccttcatcaggatcaggcggttttggtggcttcggaggaggttccggaggtggtggaggtggagctttc

SEQ ID NO: 19597 - DNA, 42 bp, unidentified
  source 1..42: mol_type = unassigned DNA; note = methanogen bacteria
gcactgtattcttcaggaaacattggaactcctaatatggat

SEQ ID NO: 19598 - DNA, 93 bp, unidentified
  source 1..93: mol_type = unassigned DNA; note = methanogen bacteria
accgtaaccgataaagataccgaaaccaaggatttaatcataaacttcagtgaaaacaccagcggactcaaatcaaatgaaaagcaggtctat

SEQ ID NO: 19599 - DNA, 147 bp, unidentified
  source 1..147: mol_type = unassigned DNA; note = methanogen bacteria
cgcttttcaaataatgatcagttgaatttatctagcttaaactcaaaattatcaaccgaatcaaatgcgaaatggtttatgggccgatataaggattggcaagagaatgtatgtgattctttggaattcagaactgatgaagaattt

SEQ ID NO: 19600 - DNA, 174 bp, unidentified
  source 1..174: mol_type = unassigned DNA; note = methanogen bacteria
caggatatctacaggtatgatgcggatattttcatgtatcaccgttatggaggatcatacatgatgcacagtgcaataatgagcggacaatcaacaatgagtaactcctcttcagattccggtggctttggtggcctcggcggaggatctggaggtggaggtggaggagctttc

SEQ ID NO: 19601 - DNA, 90 bp, unidentified
  source 1..90: mol_type = unassigned DNA; note = methanogen bacteria
aattttttctttcctgagattaattatgatcagccattaagtggtcaatttgctgcaaaacgttcagttttaaataaacttaatttcgaa

SEQ ID NO: 19602 - DNA, 162 bp, unidentified
  source 1..162: mol_type = unassigned DNA; note = methanogen bacteria
gttttagatgccgatgttagaggaattaaaatcatggaggttgacattggagatatccaacatgacatgtctccattgggtgatttacatgaaatggccaatgaggttgtaagaacaatcattacacgtgctatggattatggacgtatatcaatgattgat

SEQ ID NO: 19603 - DNA, 69 bp, unidentified
  source 1..69: mol_type = unassigned DNA; note = methanogen bacteria
aaacaaccaaattatttaataagtcaactactaaaattgtttaaaacgagctgtaatagcaatacttct

SEQ ID NO: 19604 - DNA, 63 bp, unidentified
  source 1..63: mol_type = unassigned DNA; note = methanogen bacteria
aatatcctcctcgatggatcacttcgaataatgaaccatactggaacaatagattttcctaaa

SEQ ID NO: 19605 - DNA, 33 bp, unidentified
  source 1..33: mol_type = unassigned DNA; note = methanogen bacteria
aacttgccattcagcaaatggttatattttatc

SEQ ID NO: 19606 - DNA, 138 bp, unidentified
  source 1..138: mol_type = unassigned DNA; note = methanogen bacteria
gatggaaatatgcttaatgtatccagactttcgtccaaattgaataatgaatataacggcaaattatttaaagaaaaattggatgactggaaggaaagtgtaaaaaatcaacacataggtcagatttcagaatacttc

SEQ ID NO: 19607 - DNA, 120 bp, unidentified
  source 1..120: mol_type = unassigned DNA; note = methanogen bacteria
ggtttgataatgcttgaaagtgcattcaacaatggaatatcagcagcaaacccttcatcagatggtggtggattcggtgatatcggaggaggttccggtggtggaggtggaggagctttc

SEQ ID NO: 19608 - DNA, 48 bp, unidentified
  source 1..48: mol_type = unassigned DNA; note = methanogen bacteria
gcagatatagtaaatgtcggcattcaaaataccaatttccagtttatc

SEQ ID NO: 19609 - DNA, 36 bp, unidentified
  source 1..36: mol_type = unassigned DNA; note = methanogen bacteria
tatgacgcattgaatggaggggtgctgacaggagac

SEQ ID NO: 19610 - DNA, 60 bp, unidentified
  source 1..60: mol_type = unassigned DNA; note = methanogen bacteria
cttgtagaggacagaaccgatttgggaactccgacaatgaaaggatttgaggcttcaata

SEQ ID NO: 19611 - DNA, 78 bp, unidentified
  source 1..78: mol_type = unassigned DNA; note = methanogen bacteria
tccccacaggaaaatgtcgattttgacacccgtgacttgattttaacattcgaccaggacaaaaagtctgaattgagt

SEQ ID NO: 19612 - DNA, 180 bp, unidentified
  source 1..180: mol_type = unassigned DNA; note = methanogen bacteria
gaaaagatcgtcttcaatacactggaacatttcgcaaacaacaacactttaaatctctccatgctgaacggacagttatccacagaatatgaagccaaatggttcatgtcacagcttgaaatgtgggaaaaaaatgttgaaaaccagattaatcttgaagaatactttgatggtacaggt

SEQ ID NO: 19613 - DNA, 180 bp, unidentified
  source 1..180: mol_type = unassigned DNA; note = methanogen bacteria
ctgcaagctccaaactacgtagattatgatgatgatttattctactatcattactacggaggatacggcttaatgtattcagcatttagaactggacaaaccacagcaaacccttcatccgactccggtggctttggtggccttggaggaggatccggtggtggaggtggaggagctttc

SEQ ID NO: 19614 - DNA, 33 bp, unidentified
  source 1..33: mol_type = unassigned DNA; note = methanogen bacteria
aaaggagaccttggaaagcccaacatgaaggga

SEQ ID NO: 19615 - DNA, 147 bp, unidentified
  source 1..147: mol_type = unassigned DNA; note = methanogen bacteria
gcccatgacaatgcattgaacctgtccaggcttaacggcagcctgacatccgaatatgaggcaaagtggttcatgaaccagattcagagttgggaaaactcagtgaaaagcagctttgacctgtcgaaatacttcaatgacacaggc

SEQ ID NO: 19616 - DNA, 33 bp, unidentified
  source 1..33: mol_type = unassigned DNA; note = methanogen bacteria
ccgaacatctcagactatgatgatggaatcttc

SEQ ID NO: 19617 - DNA, 120 bp, unidentified
  source 1..120: mol_type = unassigned DNA; note = methanogen bacteria
ggatacggcatcatgtacagcgcatacaacaagagttactcaacagtatataactcttcagactccggaggcttcggcggcttcggaggaggatccggtggtggaggtggaggagctttc

SEQ ID NO: 19618 - DNA, 87 bp, unidentified
  source 1..87: mol_type = unassigned DNA; note = methanogen bacteria
cttttcaatacattaacccattttgcaaaggacaacgtgttgaacctatctcaattgaacagcaaattctcttcggaaacacaagcg

SEQ ID NO: 19619 - DNA, 75 bp, unidentified
  source 1..75: mol_type = unassigned DNA; note = methanogen bacteria
ttcctgaaccatgtcaaaagttgggaagaatcagttaaaaatgaaattaacctgccagaatactttgatgatgct

SEQ ID NO: 19620 - DNA, 126 bp, unidentified
  source 1..126: mol_type = unassigned DNA; note = methanogen bacteria
tatggaggatacgggttattccacggattttacagttcaagctattcaaccgttcattcatcatccgattccggaggcttcggcggcttcggaggaggatccggtggtggaggtggaggagctttc

SEQ ID NO: 19621 - DNA, 36 bp, unidentified
  source 1..36: mol_type = unassigned DNA; note = methanogen bacteria
gcaaagggaagcattggaaagccggatatggatggt

SEQ ID NO: 19622 - DNA, 141 bp, unidentified
  source 1..141: mol_type = unassigned DNA; note = methanogen bacteria
ggagatactctgaatctgtcagctctgaactcatcactctcatttgaacgagatgcagaatggtttatggatgaataccatgcatggcaggaaagtgttgaaatcgaagtaaaacagaaagttgaaagggaattcaatgat

SEQ ID NO: 19623 - DNA, 123 bp, unidentified
  source 1..123: mol_type = unassigned DNA; note = methanogen bacteria
ggaggatactatatgatgcatcatgcaataatgagcggagagaaaaccgtaagttcctcatcagacaccggtgatttcggcggtcttggaggaggatcaggaggtggaggcggtggagcattt

SEQ ID NO: 19624 - DNA, 36 bp, unidentified
  source 1..36: mol_type = unassigned DNA; note = methanogen bacteria
tcacaggacaataccctgaacctctcacagctaagc

SEQ ID NO: 19625 - DNA, 63 bp, unidentified
  source 1..63: mol_type = unassigned DNA; note = methanogen bacteria
gacaggattggagattgggaggagtcagtcaaaaacgagatcaaccttgaggaatacttcgac

SEQ ID NO: 19626 - DNA, 33 bp, unidentified
  source 1..33: mol_type = unassigned DNA; note = methanogen bacteria
ccgaatattccagattacgatgacggtttgttc

SEQ ID NO: 19627 - DNA, 123 bp, unidentified
  source 1..123: mol_type = unassigned DNA; note = methanogen bacteria
ggcggatacggaatattcctaagcgcatacaacacaagcaattcaacaatcaattcatcatcagactccggtggcttcggaggcctcggaggaggatctggtggtggaggtggaggagcattc

SEQ ID NO: 19628 - DNA, 42 bp, unidentified
  source 1..42: mol_type = unassigned DNA; note = methanogen bacteria
gtttatgcaacgggaagtattggaaagccggatatggacggt

SEQ ID NO: 19629 - DNA, 69 bp, unidentified
  source 1..69: mol_type = unassigned DNA; note = methanogen bacteria
atcgccaatgaaaataccggaacaaatgatctctacatcagattccatggggacatgtccgaacttgaa

SEQ ID NO: 19630 - DNA, 147 bp, unidentified
  source 1..147: mol_type = unassigned DNA; note = methanogen bacteria
gccgacggagacactctgaatctgtcagctctaaactcaacactctcatttgaatccaatgcagaatggtttatggatgaataccatgcatggcaggaaagtgttgaaagcgaagtaaaacagaaagttgaaaaggaattcgatgac

SEQ ID NO: 19631 - DNA, 165 bp, unidentified
  source 1..165: mol_type = unassigned DNA; note = methanogen bacteria
ttcaatttccgtgacgatgacatcttcatatatcattactacggaggatactatatgatgcatcatgcaataatgagcggacaggaaaccgtaagttcctcatcagactccggtggcttcggcggtctcggaggaggatcaggaggcggaggcggaggagcgttc

SEQ ID NO: 19632 - DNA, 66 bp, unidentified
  source 1..66: mol_type = unassigned DNA; note = methanogen bacteria
gtaaatgcaatttatgcgcagggagaaattggaacaccaaacatggacgggtttgaagcatgtatc

SEQ ID NO: 19633 - DNA, 273 bp, unidentified
  source 1..273: mol_type = unassigned DNA; note = methanogen bacteria
gttttaaacatccaaaccgtaaccaatcctgataccgatacaaacgatttgtaccttaaattcagcggagatacatcagagctaaaagccaacgaaaagcaggtttatgacatactgcataactttgccaatggagacacactgaacatgtcaagtctgaatacaagattatccaatgaaagcaatgcaaaatggttcatggaccagtacaatacatggagggatcaggtatcaaacgaagtgaaaggcaaggttgaagaggaattcaatgac

SEQ ID NO: 19634 - DNA, 180 bp, unidentified
  source 1..180: mol_type = unassigned DNA; note = methanogen bacteria
ctgcaggagattccaacaggatactatgatgatgacatcttcctataccacagctacggaggatactacatgatgcatgcagcatttatgtccggccaaagtactgtaaactcatcatcaagctccggaggcttcggtggccttggcggaggatcaggtggtggaggtggaggagcgttc

SEQ ID NO: 19635 - DNA, 63 bp, unidentified
  source 1..63: mol_type = unassigned DNA; note = methanogen bacteria
gtaaatgcactatattcttcaggaaatgttggaactcccaatatggatggatttgaagctgca

SEQ ID NO: 19636 - DNA, 96 bp, unidentified
  source 1..96: mol_type = unassigned DNA; note = methanogen bacteria
gaaaccgtaaccgatgaagataccgaaaccaaggatttaatcataaaattcagtggaaacaccagcggactcaaatcaaatgaaaagcaggtctat

SEQ ID NO: 19637 - DNA, 156 bp, unidentified
  source 1..156: mol_type = unassigned DNA; note = methanogen bacteria
cttcatcgcttttcaaataatgacaggttgaatttatctatcttaaactcaagattatcaaccgaatcaaatgcgaaatggtttatgggccaatttaatgattggcaggataatgtatctgcttctttggaattcagagctgatgaagaatttaat

SEQ ID NO: 19638 - DNA, 162 bp, unidentified
  source 1..162: mol_type = unassigned DNA; note = methanogen bacteria
tatggttatgatgaggatattttcatgtatcaccgttatggaggatcctacatgatgcacagtgcaataatgagcggacaatcaacaatgagctcctcttcagattccggcggctttggtggcctcggcggaggatccggaggaggaggtggaggagctttc

SEQ ID NO: 19639 - DNA, 60 bp, unidentified
  source 1..60: mol_type = unassigned DNA; note = methanogen bacteria
aatgcgctatattcttcaggaaacgttggaactcctaatatggatggatttgaagctgca

SEQ ID NO: 19640 - DNA, 255 bp, unidentified
  source 1..255: mol_type = unassigned DNA; note = methanogen bacteria
accgtagccgatgaagataccgaaaccaaggatttattcataaacttcagcggaaacaccagcgaactcaaatcaaatgaaaaacaggtctatgatatccttcatcgcttttcaaataatgacaggttgaatttatctagcttaaactcaagattatcaaccgaatcaaatgcgaaatggtttatgggccaatataatgattggcaagagaatgtaagtgcttctttggaattcagaactgataaagaatttgat

SEQ ID NO: 19641 - DNA, 177 bp, unidentified
  source 1..177: mol_type = unassigned DNA; note = methanogen bacteria
caggaacaggatatcgacaagtatgatgcggatattttcatgtatcaccgttatggaggatcatacatgatgcacagtgcaataatgagtggacaatcaacaatgagctcatcttcagattccggtggctttggtggcctcggaggaggatccggaggtggaggtggaggagctttc

SEQ ID NO: 19642 - DNA, 36 bp, unidentified
  source 1..36: mol_type = unassigned DNA; note = methanogen bacteria
agtaatttgattggtgctgttgcattatccgctatc

SEQ ID NO: 19643 - DNA, 60 bp, unidentified
  source 1..60: mol_type = unassigned DNA; note = methanogen bacteria
ggtccgattataggaattttatgtccttctgctcaaatacaaccgattgttttccaatat

SEQ ID NO: 19644 - DNA, 48 bp, unidentified
  source 1..48: mol_type = unassigned DNA; note = methanogen bacteria
ttgatgttatatcaggtcaacaatccttcagatattcctattgtattg

SEQ ID NO: 19645 - DNA, 48 bp, unidentified
  source 1..48: mol_type = unassigned DNA; note = methanogen bacteria
atcacagtcccacataacctttacggcgatggattgaatccgcatatg

SEQ ID NO: 19646 - DNA, 48 bp, unidentified
  source 1..48: mol_type = unassigned DNA; note = methanogen bacteria
ccagaatcaatcatattacttgattcagtttcaggaacatatattgat

SEQ ID NO: 19647 - DNA, 36 bp, unidentified
  source 1..36: mol_type = unassigned DNA; note = methanogen bacteria
cttcttgaaaatgagatactggataatgaatcagaa

SEQ ID NO: 19648 - DNA, 30 bp, unidentified
  source 1..30: mol_type = unassigned DNA; note = methanogen bacteria
ttccataatgtaaccttaattaaaatggaa

SEQ ID NO: 19649 - DNA, 30 bp, unidentified
  source 1..30: mol_type = unassigned DNA; note = methanogen bacteria
gttgcaggacttggacagactgcaattgcg

SEQ ID NO: 19650 - DNA, 60 bp, unidentified
  source 1..60: mol_type = unassigned DNA; note = methanogen bacteria
aggccattacttgaaagttatggtgcttctggtcaaacattaaatgaggctatagcttat

SEQ ID NO: 19651 - DNA, 33 bp, unidentified
  source 1..33: mol_type = unassigned DNA; note = methanogen bacteria
tcaatggttggaggagattatggagtagcaacg

SEQ ID NO: 19652 - DNA, 60 bp, unidentified
  source 1..60: mol_type = unassigned DNA; note = methanogen bacteria
ttagctacaatttttgcatatactccagaaactgctcaattagttccgggcattactact

SEQ ID NO: 19653 - DNA, 129 bp, unidentified
  source 1..129: mol_type = unassigned DNA; note = methanogen bacteria
ggaaccggaggtatttatccaattgaaatcatgaatcctattttccaggcactgtatccatatctgccgatgacatatgctataaatatagtaagagaaactgtacttggacttatttggagcaattat

SEQ ID NO: 19654 - DNA, 129 bp, unidentified
  source 1..129: mol_type = unassigned DNA; note = methanogen bacteria
ggaactggaggtatttatccgattgaaattatgaaccctattttccagatgctttatccgttcctgccgatgacatatgcaataaacattatacgggaagttacattgggattgatttggagtaattac

SEQ ID NO: 19655 - DNA, 48 bp, unidentified
  source 1..48: mol_type = unassigned DNA; note = methanogen bacteria
gcaattatagacaataagaattccattggtacgccaaatatgaaggga

SEQ ID NO: 19656 - DNA, 150 bp, unidentified
  source 1..150: mol_type = unassigned DNA; note = methanogen bacteria
gctgaaaatgaaattctgaatttatcttcactgaatgataaattgtcttcaaaaaccaatgcaaaaagctttcaggaagattacggcacttggttagatcatgtaaaaaatgaatgtggtgataaaaaatcacaatactttgatgatagg

SEQ ID NO: 19657 - DNA, 42 bp, unidentified
  source 1..42: mol_type = unassigned DNA; note = methanogen bacteria
catgtgtccaatatttcagattatgatgatggtattttcctg

SEQ ID NO: 19658 - DNA, 120 bp, unidentified
  source 1..120: mol_type = unassigned DNA; note = methanogen bacteria
ggatattatgtatttaatcaggcatttaaaacaagtgagtccgcagcaaatccatcatccgattcgggtggattcggtggattcggaggcggatctggaggtggtgggggtggagcattc

SEQ ID NO: 19659 - DNA, 45 bp, unidentified
  source 1..45: mol_type = unassigned DNA; note = methanogen bacteria
gcattccattggctggaagccaatgtcgccggtgtcccccggtac

SEQ ID NO: 19660 - DNA, 69 bp, unidentified
  source 1..69: mol_type = unassigned DNA; note = methanogen bacteria
tataatgaagaaacttcagtagcacatgtagtaaagactgcattatcttgtaaatatgttaatgaagtt

SEQ ID NO: 19661 - DNA, 87 bp, unidentified
  source 1..87: mol_type = unassigned DNA; note = methanogen bacteria
ggctcttctgataaaacatatgacattgcaacttcagcgggggcaaatgtaattcgccatgaaactaatattggtaaaggttcggca

SEQ ID NO: 19662 - DNA, 48 bp, unidentified
  source 1..48: mol_type = unassigned DNA; note = methanogen bacteria
ttaaatttaactaaaaaacaaattgaagtaatgattgaaccaattatt

SEQ ID NO: 19663 - DNA, 45 bp, unidentified
  source 1..45: mol_type = unassigned DNA; note = methanogen bacteria
ggtaaaactgatatcactaaaactaaatttaaacgagaagctgga

SEQ ID NO: 19664 - DNA, 39 bp, unidentified
  source 1..39: mol_type = unassigned DNA; note = methanogen bacteria
actatagttgatcgggctattgaatatggtcgtattact

SEQ ID NO: 19665 - DNA, 33 bp, unidentified
  source 1..33: mol_type = unassigned DNA; note = methanogen bacteria
tttttaataggttctttaaatttagctgcaatt

SEQ ID NO: 19666 - DNA, 75 bp, unidentified
  source 1..75: mol_type = unassigned DNA; note = methanogen bacteria
gatcctattgttggccttttatgttcggctaatatggaagtcagctcccagttatttcctctcgtaaaggatttc

SEQ ID NO: 19667 - DNA, 51 bp, unidentified
  source 1..51: mol_type = unassigned DNA; note = methanogen bacteria
ctgttcctttttagcattaatgaccctgcatatgtccctgttgtaaccgat

SEQ ID NO: 19668 - DNA, 30 bp, unidentified
  source 1..30: mol_type = unassigned DNA; note = methanogen bacteria
ttccataatgtgactgttataagaatggaa

SEQ ID NO: 19669 - DNA, 66 bp, unidentified
  source 1..66: mol_type = unassigned DNA; note = methanogen bacteria
gttacaataatctttgacggcgcaaacaatattctgcacggtacaggaaccatggacttcgcctct

SEQ ID NO: 19670 - DNA, 30 bp, unidentified
  source 1..30: mol_type = unassigned DNA; note = methanogen bacteria
tcccagataaatgttcatgctttttttgct

SEQ ID NO: 19671 - DNA, 54 bp, unidentified
  source 1..54: mol_type = unassigned DNA; note = methanogen bacteria
ggaatattatatagtgtagatcaatctgactcatatcttttagtttgggattat

SEQ ID NO: 19672 - DNA, 30 bp, unidentified
  source 1..30: mol_type = unassigned DNA; note = methanogen bacteria
ataatgactactggggaaattggaccaata

SEQ ID NO: 19673 - DNA, 54 bp, unidentified
  source 1..54: mol_type = unassigned DNA; note = methanogen bacteria
gattatgcatttggctttttctccattacaggaatgggaacaaaaatttattgg

SEQ ID NO: 19674 - DNA, 45 bp, unidentified
  source 1..45: mol_type = unassigned DNA; note = methanogen bacteria
tatatagtggtgataaaattatatattcaaaatattatatattat

SEQ ID NO: 19675 - DNA, 123 bp, unidentified
  source 1..123: mol_type = unassigned DNA; note = methanogen bacteria
ctgctcggtggtgtaaatactgcaaacacagcactttccgatatggttaatctatatcctgctgaagcccttaaaacaggtggtactgggtggacatcgtttccaaaactaggaactccgttc

SEQ ID NO: 19676 - DNA, 105 bp, unidentified
  source 1..105: mol_type = unassigned DNA; note = methanogen bacteria
tccaatgtttatttctatgataaattaggtaaaattgcagtagatgttgttggaggaaacattgacaaaattatcccaacattcattacaatggcattgcccgaa

SEQ ID NO: 19677 - DNA, 84 bp, unidentified
  source 1..84: mol_type = unassigned DNA; note = methanogen bacteria
gcaaaaaccgcaaaaggactcgggatatgtatggcattattcggtgttgaaacaatattgcctgtagcgccatggccgtttatt

SEQ ID NO: 19678 - DNA, 39 bp, unidentified
  source 1..39: mol_type = unassigned DNA; note = methanogen bacteria
gacgtcatgggtgacaacagctacgacttcgacatcagc

SEQ ID NO: 19679 - DNA, 33 bp, unidentified
  source 1..33: mol_type = unassigned DNA; note = methanogen bacteria
gtactccagggaggggagatggaggggcagtcc

SEQ ID NO: 19680 - DNA, 30 bp, unidentified
  source 1..30: mol_type = unassigned DNA; note = methanogen bacteria
gaggtcaccatctcggggataaccgataac

SEQ ID NO: 19681 - DNA, 48 bp, unidentified
  source 1..48: mol_type = unassigned DNA; note = methanogen bacteria
ccggccgcctggtggctgcaggaccgctacggattctacgaggaccag

SEQ ID NO: 19682 - DNA, 33 bp, unidentified
  source 1..33: mol_type = unassigned DNA; note = methanogen bacteria
aacttttttggtaaaattggtcttgcagcattc

SEQ ID NO: 19683 - DNA, 54 bp, unidentified
  source 1..54: mol_type = unassigned DNA; note = methanogen bacteria
aatgttgcgcaaatgttgggtgctactggtgaatcatttaatgcaacagtatca

SEQ ID NO: 19684 - DNA, 30 bp, unidentified
  source 1..30: mol_type = unassigned DNA; note = methanogen bacteria
gtaatggttgggggattaatatttttaagt

SEQ ID NO: 19685 - DNA, 45 bp, unidentified
  source 1..45: mol_type = unassigned DNA; note = methanogen bacteria
gtttatatgtttggaaaaaatccggaggtatatgatgtaacagta

SEQ ID NO: 19686 - DNA, 84 bp, unidentified
  source 1..84: mol_type = unassigned DNA; note = methanogen bacteria
attaatgttcaatatattagttatttgctcgcaagtatattaaaacctattattgaaacgattattcaacttgcttataaatta

SEQ ID NO: 19687 - DNA, 48 bp, unidentified
  source 1..48: mol_type = unassigned DNA; note = methanogen bacteria
gataattgggatacaatatcagcgattttaggcaagattggtgaatgg

SEQ ID NO: 19688 - DNA, 33 bp, unidentified
  source 1..33: mol_type = unassigned DNA; note = methanogen bacteria
ttcctattagggtctgtacaattgtctgtagtt

SEQ ID NO: 19689 - DNA, 57 bp, unidentified
  source 1..57: mol_type = unassigned DNA; note = methanogen bacteria
gatcagatattgatgttcttcaatactccacatgagatatttaaactcagtaaagaa

SEQ ID NO: 19690 - DNA, 48 bp, unidentified
  source 1..48: mol_type = unassigned DNA; note = methanogen bacteria
ttgaaattattcaatgttgtcaacccatatcatgcagaagttattagt

SEQ ID NO: 19691 - DNA, 129 bp, unidentified
  source 1..129: mol_type = unassigned DNA; note = methanogen bacteria
ggttccggaggtatctatcctgtcgaaattatgagcaagttctttggagtactgttcccttatctgccaatgactcatgcaatttcatgtgtacgtgaggctcaacttggtttgatttggtcaaattac

SEQ ID NO: 19692 - DNA, 30 bp, unidentified
  source 1..30: mol_type = unassigned DNA; note = methanogen bacteria
ttacatgatgtgaccattataagaatggaa

SEQ ID NO: 19693 - DNA, 54 bp, unidentified
  source 1..54: mol_type = unassigned DNA; note = methanogen bacteria
agcaatgaggatgatacagtactgagattgacaaatacggatacaagcaatcta

SEQ ID NO: 19694 - DNA, 33 bp, unidentified
  source 1..33: mol_type = unassigned DNA; note = methanogen bacteria
gaaagaaatggggacatatccttaaagacaata

SEQ ID NO: 19695 - DNA, 99 bp, unidentified
  source 1..99: mol_type = unassigned DNA; note = methanogen bacteria
gacacgggagatccatatgaatttaaggatttcagggaaacatggaaaaagaacacttcagaggcagtacctgaatcactgatagagaggtatttcatt

SEQ ID NO: 19696 - DNA, 120 bp, unidentified
  source 1..120: mol_type = unassigned DNA; note = methanogen bacteria
tacggaggattcaataacttagacactacattcgcagcactaacaccatccgattccggttcaggcggaataggaagtgtaggcggtggcggatttggtggaggtggaggtggaaccttc

SEQ ID NO: 19697 - DNA, 174 bp, unidentified
  source 1..174: mol_type = unassigned DNA; note = methanogen bacteria
ttccatgcctctggaggagttttttcgccagataaagcagtttatctaataaacgcactaatgtacagtggaatggattattatcatattgctaatcccggagacatattttttagtccagttatttcatttttaacttcaatattgttcagaatgggtcttgttgatcaacta

SEQ ID NO: 19698 - DNA, 159 bp, unidentified
  source 1..159: mol_type = unassigned DNA; note = methanogen bacteria
attcttgattttggtggatcgttaacctttatttctcaatcatccaatactattaatgtgcaatcatttactggaggtacagattacaatccagataaattattttatataaaaaatttttcagaattcctaattagtgaaaatcgtgcgttagataga

SEQ ID NO: 19699 - DNA, 291 bp, unidentified
  source 1..291: mol_type = unassigned DNA; note = methanogen bacteria
acatttatagaacctatggaaattgagggatattctaatagtttaattgatgcttcagattatattatttcccatgatcctaattatcattcaaaaacgtttgcatcaaataatcataattatagattagtaaaatgggatttaaatgtaaatgtttcatatataattggagaacacgaaaatccggattcatgtaatactacctatatcatcaattggaaaaaatacaataatttagaaaattatcataaaatttattctaatgataagtatcatatttatcgtcacaat

SEQ ID NO: 19700 - DNA, 48 bp, unidentified
  source 1..48: mol_type = unassigned DNA; note = methanogen bacteria
aatgcaatgattgacaataagaattttggagagccgaatattagggga

SEQ ID NO: 19701 - DNA, 264 bp, unidentified
  source 1..264: mol_type = unassigned DNA; note = methanogen bacteria
aaggtattcaacatcaaaaaggataatgaagatctgttaatgacatttaatgaaggtgcagataatctggattatggagaaaaaattgtctataactgtttatcaggctttgcaagtgacggtgtattgaatctctcagaacttgatgacaagatggattctagagttaattcattaaggttcgtcaatcagtttgacatgtggaaagaagctgttgaaatggaatatttaaacgatgatattaaagacaggtactttgacgac

SEQ ID NO: 19702 - DNA, 33 bp, unidentified
  source 1..33: mol_type = unassigned DNA; note = methanogen bacteria
gtgccaagtgtcgacagatatgacggtggagta

SEQ ID NO: 19703 - DNA, 123 bp, unidentified
  source 1..123: mol_type = unassigned DNA; note = methanogen bacteria
ggttccaatacattttatcactgctacggcactgcaagcagcaacacttcaagcagcagtagtggcagtgacagcttcggaagttttggaggaggttccggtggtggaggtggaggagcattc

SEQ ID NO: 19704 - DNA, 69 bp, unidentified
  source 1..69: mol_type = unassigned DNA; note = methanogen bacteria
aacgacatgaccgacgccatccaggagcaggtggtgtccggagacacgtcggactccgccgtcactgag

SEQ ID NO: 19705 - DNA, 51 bp, unidentified
  source 1..51: mol_type = unassigned DNA; note = methanogen bacteria
atcatcgcatcgtcgtccggcacggcggccaagatgtccgatttctcggac

SEQ ID NO: 19706 - DNA, 126 bp, unidentified
  source 1..126: mol_type = unassigned DNA; note = methanogen bacteria
actggaggagtatatccaattgatataatgcatccatttttcaaaacattatatccatatcttccaatgacatatgcaattaaaatgcttcgtgaggtaatgttaggtttattatggtctaattat

SEQ ID NO: 19707 - DNA, 69 bp, unidentified
  source 1..69: mol_type = unassigned DNA; note = methanogen bacteria
aacgacatgaccgacgccatccaggagcaggtggtgtccggagatacaacgaactccgccgtcaccgag

SEQ ID NO: 19708 - DNA, 51 bp, unidentified
  source 1..51: mol_type = unassigned DNA; note = methanogen bacteria
atcatcgcctcgtcgtccggaacggcggccaagatgtccgagttctccgac

SEQ ID NO: 19709 - DNA, 129 bp, unidentified
  source 1..129: mol_type = unassigned DNA; note = methanogen bacteria
ggaacagggggaatttacccaatagaaatcatgcctaaattattccaggatttatataattaccttccaatgacatatgcaatcaaactagttcgtgaagcacaactgggcgttatttggtccaattat

SEQ ID NO: 19710 - DNA, 129 bp, unidentified
  source 1..129: mol_type = unassigned DNA; note = methanogen bacteria
ggaacaggaggaatatacccaatagaaattatgcctaaactattccaggaattatatagttaccttccaatgacatatggaatcaaactagttcgtgaagcacaactgggcattatttggcccaattat

SEQ ID NO: 19711 - DNA, 168 bp, unidentified
  source 1..168: mol_type = unassigned DNA; note = methanogen bacteria
gaccacaacctaaatcttggaatctactgttcagatgttttcgtgtatttgaccaattcacttacttttgcaggtttcaaatcaagtaacgtatatttgtatttgtctccgctaatctgttttttaacatccatcttttttaggttgggatttttatctgaaacttcc

SEQ ID NO: 19712 - DNA, 171 bp, unidentified
  source 1..171: mol_type = unassigned DNA; note = methanogen bacteria
ggttctcatttgtcctttttaactcaaagctctacatttgcctctggttctaaaggagaagttattgacaatgcatatacaactgacacattattctatcttcatgattttcctaacttcctcttttcagattatgtaagctttgatgatgtcattccagttttgaatgga

SEQ ID NO: 19713 - DNA, 288 bp, unidentified
  source 1..288: mol_type = unassigned DNA; note = methanogen bacteria
tctttccctgcaacagttcattacaatgaggatttcaacaagaacaaggtgattgcagattatttgattgattatgatccagattatgcttctaaagaggttgcagtattccatcaaaggtctttgaattggttcttgaagaccaatacagttgccattacagatgaccaattggattatcttgaatcaagcaatatcacttattacatttcagatgataactttaaattagagaattatactatgatccatcaagagaatggtttgtatttatttgagaggattaat

SEQ ID NO: 19714 - DNA, 132 bp, unidentified
  source 1..132: mol_type = unassigned DNA; note = methanogen bacteria
ggtactggtggtatttatccgattgaaattatggatcctatttttaaagcattatacccgtatctgccgatgacatatgctataaacattgtaagggaagctactttaggtttgctctggagtaattatatg

SEQ ID NO: 19715 - DNA, 33 bp, unidentified; identical to SEQ ID NO: 19682
  source 1..33: mol_type = unassigned DNA; note = methanogen bacteria

SEQ ID NO: 19716 - DNA, 51 bp, unidentified
  source 1..51: mol_type = unassigned DNA; note = methanogen bacteria
gttgcgcaaatattgggggcttctggtgaatcatttaatgcaacagtatca

SEQ ID NO: 19717 - DNA, 45 bp, unidentified
  source 1..45: mol_type = unassigned DNA; note = methanogen bacteria
gtttatatgtttggaaaaaatccggaggtatatgatgtcgcagta

SEQ ID NO: 19718 - DNA, 33 bp, unidentified
  source 1..33: mol_type = unassigned DNA; note = methanogen bacteria
aacttttttggcaatattggtcttgcagcattc

SEQ ID NO: 19719 - DNA, 54 bp, unidentified
  source 1..54: mol_type = unassigned DNA; note = methanogen bacteria
gatgttgcgcaaatattgggggcttccggtgaatcatttaattcaacagtatcc

SEQ ID NO: 19720 - DNA, 45 bp, unidentified
  source 1..45: mol_type = unassigned DNA; note = methanogen bacteria
gtttatatgtttggaaaaaatcctgaggtgtatgatgtcgcagta

SEQ ID NO: 19721 - DNA, 30 bp, unidentified
  source 1..30: mol_type = unassigned DNA; note = methanogen bacteria
ttccataacgttacattaatcagaatggaa

SEQ ID NO: 19722 - DNA, 33 bp, unidentified
  source 1..33: mol_type = unassigned DNA; note = methanogen bacteria
tcttcttttattggagaaagtgcagtagctgca

SEQ ID NO: 19723 - DNA, 60 bp, unidentified
  source 1..60: mol_type = unassigned DNA; note = methanogen bacteria
gatattttaataaacattttagaacctcctgctgatgttttaccatatattaatcagtat

SEQ ID NO: 19724 - DNA, 30 bp, unidentified
  source 1..30: mol_type = unassigned DNA; note = methanogen bacteria
atatatatggggtctgttggtttggtttca

SEQ ID NO: 19725 - DNA, 48 bp, unidentified
  source 1..48: mol_type = unassigned DNA; note = methanogen bacteria
ctggttttatacaacctccatacatctcccaatgtagaaacattcaga

SEQ ID NO: 19726 - DNA, 30 bp, unidentified
  source 1..30: mol_type = unassigned DNA; note = methanogen bacteria
ttccatggcccaaccattattagaatggaa

SEQ ID NO: 19727 - DNA, 36 bp, unidentified
  source 1..36: mol_type = unassigned DNA; note = methanogen bacteria
ggtaatttctttggtaaattgggtcttagtgcattt

SEQ ID NO: 19728 - DNA, 54 bp, unidentified
  source 1..54: mol_type = unassigned DNA; note = methanogen bacteria
caggtggcactgatgcttggtgcatctaaagagtccatagcatccgtttcggat

SEQ ID NO: 19729 - DNA, 45 bp, unidentified
  source 1..45: mol_type = unassigned DNA; note = methanogen bacteria
gtctatgcattcggaaaaaatcccgaagtatatgacacggcaatc

SEQ ID NO: 19730 - DNA, 174 bp, unidentified
  source 1..174: mol_type = unassigned DNA; note = methanogen bacteria
aactccaacacaaattttctaggtagatcttatcgtgatgtgtatttatatctatcattggctttaagattttcaggtgttcaatttgcaggatatgcttatataaacaatttacctccccttgtgcctttcttaacttcacttctctttagattaggtttcgtggatgtttca

SEQ ID NO: 19731 - DNA, 138 bp, unidentified
  source 1..138: mol_type = unassigned DNA; note = methanogen bacteria
aatcattatgccttcggatttttaagtcaatccggtgaggttgcaggtgaggttgcaaaacaatcacagctttcccatcccgttgttaatgatctgggattctatctaactcatgctgtaaactgtataagtaactta

SEQ ID NO: 19732 - DNA, 33 bp, unidentified
  source 1..33: mol_type = unassigned DNA; note = methanogen bacteria
tttttaataggttcacaacaattatcaataatt

SEQ ID NO: 19733 - DNA, 57 bp, unidentified
  source 1..57: mol_type = unassigned DNA; note = methanogen bacteria
gataatatattgatgatgtataattgtcctaaagagattttcaatatttctaaagaa

SEQ ID NO: 19734 - DNA, 45 bp, unidentified
  source 1..45: mol_type = unassigned DNA; note = methanogen bacteria
ttagctatatttaatgtatctaatccatattatgcagaagtagtt

SEQ ID NO: 19735 - DNA, 30 bp, unidentified
  source 1..30: mol_type = unassigned DNA; note = methanogen bacteria
ttccatcaaggtacagttattagaatggaa

SEQ ID NO: 19736 - DNA, 240 bp, unidentified
  source 1..240: mol_type = unassigned DNA; note = methanogen bacteria
gaagaaatcaaaaacatattaaatgaacctgaaacttcaccaaaagaagaaagtgtcaaaaaagaagatgtgaaaaaacaggacgaacctaaagaaatacaaacacaagaaaaaccaaaacaacaaacccaaaaagaacaaaccccacaacaacaaacacaaacacaagaaaaaccaaaacaacaaacacaaacacaagaaaaaccaaaacaacaaacacaaacacaagaaaaaccaaaa

SEQ ID NO: 19737 - DNA, 177 bp, unidentified
  source 1..177: mol_type = unassigned DNA; note = methanogen bacteria
gatttttgttggtccgcatgcatatccaatccggatattgcggtttatcttctcagtggtttaaaatatgctggattggactattataatgttgtgtatccatcagaactattttacactccgatattgtcatttttatcatcattattctttagattgggctatgttgataagaat

SEQ ID NO: 19738 - DNA, 159 bp, unidentified
  source 1..159: mol_type = unassigned DNA; note = methanogen bacteria
attttagactttggaggttcattgaccttttttgaacagtctgtaaagacatttaatggcactcaaactccaagtaatattattgattttaataatgacaagtcttattacatggaccatttcacggatattttattcttagccgggtatcattccaat

SEQ ID NO: 19739 - DNA, 33 bp, unidentified
  source 1..33: mol_type = unassigned DNA; note = methanogen bacteria
atgtttttgggttccacacaattggctgtggtt

SEQ ID NO: 19740 - DNA, 57 bp, unidentified
  source 1..57: mol_type = unassigned DNA; note = methanogen bacteria
gataacatattaatgttttttaatacgcctgcagatatttttaatttaagtaaagaa

SEQ ID NO: 19741 - DNA, 48 bp, unidentified
  source 1..48: mol_type = unassigned DNA; note = methanogen bacteria
ttgtcactatttaatatttccaatccgtatcatgtgaaagttgttact

SEQ ID NO: 19742 - DNA, 33 bp, unidentified
  source 1..33: mol_type = unassigned DNA; note = methanogen bacteria
ggatcccttattggaagttcacaattacctgca

SEQ ID NO: 19743 - DNA, 48 bp, unidentified
  source 1..48: mol_type = unassigned DNA; note = methanogen bacteria
ctattacacctattaaatgttccttcatatctcttcaattcaagtaaa

SEQ ID NO: 19744 - DNA, 51 bp, unidentified
  source 1..51: mol_type = unassigned DNA; note = methanogen bacteria
ttatatactttattcaatattaccacatattcagaacaacagattatatct

SEQ ID NO: 19745 - DNA, 39 bp, unidentified
  source 1..39: mol_type = unassigned DNA; note = methanogen bacteria
gttgaaccattgacaggcggggaaattatcgaacctaat

SEQ ID NO: 19746 - DNA, 30 bp, unidentified
  source 1..30: mol_type = unassigned DNA; note = methanogen bacteria
ttccataatactacattaattaggatggat

SEQ ID NO: 19747 - DNA, 39 bp, unidentified
  source 1..39: mol_type = unassigned DNA; note = methanogen bacteria
attgagcctcttatgggaggggatgttgttgaaccaaac

SEQ ID NO: 19748 - DNA, 30 bp, unidentified
  source 1..30: mol_type = unassigned DNA; note = methanogen bacteria
ttccatggagctacaataatcaggatggag

SEQ ID NO: 19749 - DNA, 39 bp, unidentified
  source 1..39: mol_type = unassigned DNA; note = methanogen bacteria
gtaggaccgttgacgggcggagaaatcatggatcctaat

SEQ ID NO: 19750 - DNA, 39 bp, unidentified
  source 1..39: mol_type = unassigned DNA; note = methanogen bacteria
gtagaaccgttaaccggcggagaaattattgagccaaac

SEQ ID NO: 19751 - DNA, 243 bp, unidentified
  source 1..243: mol_type = unassigned DNA; note = methanogen bacteria
ttgaactgcgataaaaacacaatttcaaacaataactttgaaagcaatcagaaagcagcatatgccttaaatgacaatgaaatcagttttaataaattcaaaaacaataaaaacggacttattctaaaaaacaataataaaatctattctaatacattttcaggcaatgatattgggattaattcaagcaataacaataaaatagggtctaatgatttttccaataatgataattcattattt

SEQ ID NO: 19752 - DNA, 276 bp, unidentified
  source 1..276: mol_type = unassigned DNA; note = methanogen bacteria
acttttaaaaacaacaaaatagggattgttttaaatgaaagtaacaccatttcttcaaatgttttttataataattccttggctttgaaatgcttgaagtcaaacaggatactgaataacagtttttcatataatgaaaatggtgctaggcttgctggttcaagcaatgagttgttcagcaattctttttcctataatacaataggaatccatatgattcaatcaaataacaatattatcaagtccaattcattcactaataattatcaaaactca

SEQ ID NO: 19753 - DNA, 87 bp, unidentified
  source 1..87: mol_type = unassigned DNA; note = methanogen bacteria
agcggtaaatactgcaatgtttacataaaaggaaatgaaaacaaggcatcaggcaacatcttcaaaaacaacaaataccatgccttg

SEQ ID NO: 19754 - DNA, 105 bp, unidentified
  source 1..105: mol_type = unassigned DNA; note = methanogen bacteria
aataatatcttcaaagacactggaaacataagcctgcgagtaaatggaaacagcatcaagatcaaaaacaacaagttcacaggcaataagaacacccagatacaa

SEQ ID NO: 19755 - DNA, 30 bp, unidentified
  source 1..30: mol_type = unassigned DNA; note = methanogen bacteria
tccaaaataggggttgaagcgttttttgca

SEQ ID NO: 19756 - DNA, 51 bp, unidentified
  source 1..51: mol_type = unassigned DNA; note = methanogen bacteria
atcctattttatgtggataaggctgataaatatattttggttttcgattat

SEQ ID NO: 19757 - DNA, 48 bp, unidentified
  source 1..48: mol_type = unassigned DNA; note = methanogen bacteria
gctttcagcttattctccatcactggaatgtctgatgaaatattttgg

SEQ ID NO: 19758 - DNA, 45 bp, unidentified
  source 1..45: mol_type = unassigned DNA; note = methanogen bacteria
tactgggcggaaccattaaccggaggagaaattgttgatccaaac

SEQ ID NO: 19759 - DNA, 234 bp, unidentified
  source 1..234: mol_type = unassigned DNA; note = methanogen bacteria
gacaactatctgaatgcttcattaaatggctcattcaaggttagaaatctcactagcatttcattaagcttaaaggatattatttatggcgagatagaaaacatcaccagcattctgaacattaatggagttaacctgacttatgtcatcaatggatctaatggatatgaaggagtattcaattcttcagattctttaatcctaagtgatttggatgttggaatctatgatgtt

SEQ ID NO: 19760 - DNA, 39 bp, unidentified
  source 1..39: mol_type = unassigned DNA; note = methanogen bacteria
gtaggaccattgactggcggggaaataatcgatcccaac

SEQ ID NO: 19761 - DNA, 39 bp, unidentified
  source 1..39: mol_type = unassigned DNA; note = methanogen bacteria
attaatccattgatgggaggtgaatatgtaagtcctgat

SEQ ID NO: 19762 - DNA, 30 bp, unidentified
  source 1..30: mol_type = unassigned DNA; note = methanogen bacteria
ttccatggtgcaacaataatcagaatggaa

SEQ ID NO: 19763 - DNA, 36 bp, unidentified
  source 1..36: mol_type = unassigned DNA; note = methanogen bacteria
gatccattactgggtggaaattatattagtcctaat

SEQ ID NO: 19764 - DNA, 153 bp, unidentified
  source 1..153: mol_type = unassigned DNA; note = methanogen bacteria
gaaggtacaacaaccagcacaacattcaaagtaacaccacaaacaaccaccataaccataaaccatattcctagtgttcaatactctgaaagtgttacaatcagtggtaaatacactgatacgaataatttaaacctcagatacacaccacta

SEQ ID NO: 19765 - DNA, 105 bp, unidentified
  source 1..105: mol_type = unassigned DNA; note = methanogen bacteria
actgctacaacattccaggtaaaaactaaagacaccatactatcattaaacccattgaaaaatgcacaatactccgattacataaacataactggtcgttacact

SEQ ID NO: 19766 - DNA, 57 bp, unidentified
  source 1..57: mol_type = unassigned DNA; note = methanogen bacteria
agcaactccacatcattccaggtaacaagcataaataccacaattacgttaaatccg

SEQ ID NO: 19767 - DNA, 132 bp, unidentified
  source 1..132: mol_type = unassigned DNA; note = methanogen bacteria
cctgaaacacttgttggagataacgttacaataaccggtaaatatattgacgctaatggaaaccctcttagaaaaacatctttaacattagtggttaatgacgaaaaaacacatgtgagaacagatgataat

SEQ ID NO: 19768 - DNA, 48 bp, unidentified
  source 1..48: mol_type = unassigned DNA; note = methanogen bacteria
ttacaccttttaaatattcctccagttatatttaatacaagtaaaact

SEQ ID NO: 19769 - DNA, 42 bp, unidentified
  source 1..42: mol_type = unassigned DNA; note = methanogen bacteria
acaatattcaatataacagcagcaaaagatcaaataattatt

SEQ ID NO: 19770 - DNA, 51 bp, unidentified
  source 1..51: mol_type = unassigned DNA; note = methanogen bacteria
tctcttttgcatcttttaaatatttctgaaagcatttttgaaaccagtaaa

SEQ ID NO: 19771 - DNA, 48 bp, unidentified
  source 1..48: mol_type = unassigned DNA; note = methanogen bacteria
tgcatcatgttcaatataactggagcttatgcgcaggagattatttca

SEQ ID NO: 19772 - DNA, 30 bp, unidentified
  source 1..30: mol_type = unassigned DNA; note = methanogen bacteria
tctaaaataagcattgaagccttttttgca

SEQ ID NO: 19773 - DNA, 51 bp, unidentified
  source 1..51: mol_type = unassigned DNA; note = methanogen bacteria
atattattttatataaatcaggcacaaacatacattttagcctttgattat

SEQ ID NO: 19774 - DNA, 45 bp, unidentified
  source 1..45: mol_type = unassigned DNA; note = methanogen bacteria
gcatttagtttattttccattaatggaatggaaacagaagtattt

SEQ ID NO: 19775 - DNA, 45 bp, unidentified
  source 1..45: mol_type = unassigned DNA; note = methanogen bacteria
attactagtgcaccaacaggagtggacaattccgttcgttttgga

SEQ ID NO: 19776 - DNA, 87 bp, unidentified
  source 1..87: mol_type = unassigned DNA; note = methanogen bacteria
gtaaatgatttaaacattgttgcttctgcaattaacgcatttttagcaatgggtgctcaaatcattggttgtatggctgatccatgg

SEQ ID NO: 19777 - DNA, 48 bp, unidentified
  source 1..48: mol_type = unassigned DNA; note = methanogen bacteria
acccaaggtttcagttcaattggtatgaaagtaagtggttttggtata

SEQ ID NO: 19778 - DNA, 105 bp, unidentified
  source 1..105: mol_type = unassigned DNA; note = methanogen bacteria
tataccactattttaggtggagaagatcaagctctcattaccttaatgaaaacatctccattatccttcagcggtatttttgaagcattatccgcttctgatgca

SEQ ID NO: 19779 - DNA, 57 bp, unidentified
  source 1..57: mol_type = unassigned DNA; note = methanogen bacteria
gacttaggtactgctgattatttggtaggtgttcttaagggtgcaatcccagtattt

SEQ ID NO: 19780 - DNA, 33 bp, unidentified
  source 1..33: mol_type = unassigned DNA; note = methanogen bacteria
gcttgggcagtaaatcctgaaatgggctttgta

SEQ ID NO: 19781 - DNA, 33 bp, unidentified
  source 1..33: mol_type = unassigned DNA; note = methanogen bacteria
ttcttaattggggctataaatctatcagcgatt

SEQ ID NO: 19782 - DNA, 57 bp, unidentified
  source 1..57: mol_type = unassigned DNA; note = methanogen bacteria
actctcattccgatgttgactacaagtaaagagattattcctctcgttgatgagttt

SEQ ID NO: 19783 - DNA, 51 bp, unidentified
  source 1..51: mol_type = unassigned DNA; note = methanogen bacteria
gcactgacattatatagtgttcatggccaggctactccggctgtggttaat

SEQ ID NO: 19784 - DNA, 165 bp, unidentified
  source 1..165: mol_type = unassigned DNA; note = methanogen bacteria
aattttaatcaggcattaggaatttactgttctgatgtctttatttatttatcaaattcccttgtttttgcaggttatgaatcaagtatcctttatctgtacttgtcacctgttatttgcattttaacagctattcttttcaaattaggatttttatctgaagct

SEQ ID NO: 19785 - DNA, 180 bp, unidentified
  source 1..180: mol_type = unassigned DNA; note = methanogen bacteria
tatgggtctaatttatcatttttaacacaaagctctacatttgcttcaggttctaaaggagaagtgattgataatgcatatacaactgacacattcttttatcttcatgatttcccaaatttcctatactcggactatgtgagttttgataatgttattccagtattaaatggctcaaat

SEQ ID NO: 19786 - DNA, 285 bp, unidentified
  source 1..285: mol_type = unassigned DNA; note = methanogen bacteria
ttcacatctacagttcattataatgaggatttcaataagaataaggtaattgcagattacttaacagaatatgattctgattatatgtcaaaggatgttgctgtatttaaacaaaggccttacaattggttcttaaggatgtatacaattccaataacagatgaccgattggattatttggagtcaagcaatatcacttattacatctctgatggtaattttaatttatcaaattatacaatgatttatcaaaaagaagggttatatttatacgaaaggattaat

SEQ ID NO: 19787 - DNA, 33 bp, unidentified
  source 1..33: mol_type = unassigned DNA; note = methanogen bacteria
cttataggaagtttgcagttatccgcattgaat

SEQ ID NO: 19788 - DNA, 54 bp, unidentified
  source 1..54: mol_type = unassigned DNA; note = methanogen bacteria
cctcttttgcatattctaaatattcctgaaagcatttttgatgcgagtaaaaca

SEQ ID NO: 19789 - DNA, 42 bp, unidentified
  source 1..42: mol_type = unassigned DNA; note = methanogen bacteria
gttttatttaatataactggcattaatgaacaaatgattgtt

SEQ ID NO: 19790 - DNA, 63 bp, unidentified
  source 1..63: mol_type = unassigned DNA; note = methanogen bacteria
gccataaccgacgagatctccggcgccgtgctcgggggcagggacatcgacacggacctcatc

SEQ ID NO: 19791 - DNA, 30 bp, unidentified
  source 1..30: mol_type = unassigned DNA; note = methanogen bacteria
ctgatcgtcgggggcgagatcgggtacgga

SEQ ID NO: 19792 - DNA, 33 bp, unidentified
  source 1..33: mol_type = unassigned DNA; note = methanogen bacteria
tttttaattggagccattaacatttctgcaatt

SEQ ID NO: 19793 - DNA, 60 bp, unidentified
  source 1..60: mol_type = unassigned DNA; note = methanogen bacteria
gacattataataagcatactgtgtcaaactacaaatattatacctcttgttaaagattat

SEQ ID NO: 19794 - DNA, 33 bp, unidentified
  source 1..33: mol_type = unassigned DNA; note = methanogen bacteria
gggtcattaatgggaagttcaggatttgccgca

SEQ ID NO: 19795 - DNA, 54 bp, unidentified
  source 1..54: mol_type = unassigned DNA; note = methanogen bacteria
gcagttgtgatgtattccgttaaacaaggcgttgatgtggagttagtagttact

SEQ ID NO: 19796 - DNA, 42 bp, unidentified
  source 1..42: mol_type = unassigned DNA; note = methanogen bacteria
ttcgactggatgaacgagaaccttaccggacttcccaggtac

SEQ ID NO: 19797 - DNA, 120 bp, unidentified
  source 1..120: mol_type = unassigned DNA; note = methanogen bacteria
aatctcacggatattactgttgaccttccggaaactgctcagggcaatttggaagttagaatcaataattattcaatttataatgaaacaatcaccaataaatcagtggccatcccaatt

SEQ ID NO: 19798 - DNA, 204 bp, unidentified
  source 1..204: mol_type = unassigned DNA; note = methanogen bacteria
gtttatgtggattatgctccaattaagataaagcctatatcaactaaagtttcatattgtggtgaatataaggtaaaggttacaggtaaaactggtaaagcaatcaaaaatgctgctgtaactttcaaaatcaatggcaaaaaagtcaaatctacaaaaacaaactctaaaggtattgcaaaacttaaattgccatcaaattgg

SEQ ID NO: 19799 - DNA, 45 bp, unidentified
  source 1..45: mol_type = unassigned DNA; note = methanogen bacteria
ataacacagatgccagccgatggaaataattcagcaaggtttgga

SEQ ID NO: 19800 - DNA, 81 bp, unidentified
  source 1..81: mol_type = unassigned DNA; note = methanogen bacteria
accgacttaaatattgtcaatagtgccgtaaatgcatttttagcgattgcaaaacaaatcattacaagcatgtccgatcct

SEQ ID NO: 19801 - DNA, 48 bp, unidentified
  source 1..48: mol_type = unassigned DNA; note = methanogen bacteria
gctgcaggttttaaaacaattggaatggatgtaagcggattcggaata

SEQ ID NO: 19802 - DNA, 105 bp, unidentified
  source 1..105: mol_type = unassigned DNA; note = methanogen bacteria
ggatacacctcaattttaagtggaaacgatcaaacactcatcacattaatgaaaacttccccattatcatttgagggaatatttgaagcattatctgcatcagac

SEQ ID NO: 19803 - DNA, 57 bp, unidentified
  source 1..57: mol_type = unassigned DNA; note = methanogen bacteria
gaagttggtactgcagactacctggtaagtgttttaaaaggtacaattccctactgg

SEQ ID NO: 19804 - DNA, 36 bp, unidentified
  source 1..36: mol_type = unassigned DNA; note = methanogen bacteria
gcatgggcggtttcaccagacatgggattcgtcatt

SEQ ID NO: 19805 - DNA, 42 bp, unidentified
  source 1..42: mol_type = unassigned DNA; note = methanogen bacteria
acttccacaccaaccggtgtcgataattctgtaagattcggt

SEQ ID NO: 19806 - DNA, 87 bp, unidentified
  source 1..87: mol_type = unassigned DNA; note = methanogen bacteria
gtaaacgatttgaacatcgtttccacagcagtaaacgcatttttaaacttaggttctcaagtcatcgcatgtatggcagacccttgg

SEQ ID NO: 19807 - DNA, 48 bp, unidentified
  source 1..48: mol_type = unassigned DNA; note = methanogen bacteria
gctgctggtttccaatcagtcggagcaaccaacgtaactggattcgga

SEQ ID NO: 19808 - DNA, 108 bp, unidentified
  source 1..108: mol_type = unassigned DNA; note = methanogen bacteria
ggatacaccaccattttaggtggagaagatcaggctctcattaccttaatgaaaactgcgccattatcattcaacggtatttttgaagcattatcagcttctgacgca

SEQ ID NO: 19809 - DNA, 60 bp, unidentified
  source 1..60: mol_type = unassigned DNA; note = methanogen bacteria
ggtgaagtcggaactgctgactacttagttggtgttttaagcaatacaatccctgcattc

SEQ ID NO: 19810 - DNA, 36 bp, unidentified
  source 1..36: mol_type = unassigned DNA; note = methanogen bacteria
ggttgggcagtaagtaccggtgatatgagtttcaca

SEQ ID NO: 19811 - DNA, 42 bp, unidentified
  source 1..42: mol_type = unassigned DNA; note = methanogen bacteria
tctcaaacacctgcagatgccgataattctgtaagatttgga

SEQ ID NO: 19812 - DNA, 87 bp, unidentified
  source 1..87: mol_type = unassigned DNA; note = methanogen bacteria
gcaaatgacatcaatatcatttccactatcgtaaatgcgttccttaatctggcttcacaggtaatcacctgtatggctgacccatgg

SEQ ID NO: 19813 - DNA, 51 bp, unidentified
  source 1..51: mol_type = unassigned DNA; note = methanogen bacteria
gctgccggtttccagtcagtcggagtatcaaatgcaacaggttttggaata

SEQ ID NO: 19814 - DNA, 108 bp, unidentified
  source 1..108: mol_type = unassigned DNA; note = methanogen bacteria
ggatacacctcaattttaggcggagaagatcaggctctcataactctgatgaaaacatccccattatcattcaatggtatatttgaagcattgtcagcttcagatgca

SEQ ID NO: 19815 - DNA, 60 bp, unidentified
  source 1..60: mol_type = unassigned DNA; note = methanogen bacteria
ggtgaggtcggaactgctgattatctggtaggaatcctgagcggttcaatacctgcattt

SEQ ID NO: 19816 - DNA, 36 bp, unidentified
  source 1..36: mol_type = unassigned DNA; note = methanogen bacteria
ggatgggcggtaagttcaggtgatatgagctttact

SEQ ID NO: 19817 - DNA, 36 bp, unidentified
  source 1..36: mol_type = unassigned DNA; note = methanogen bacteria
ggattcctattagattccacacaattatctgtactt

SEQ ID NO: 19818 - DNA, 60 bp, unidentified
  source 1..60: mol_type = unassigned DNA; note = methanogen bacteria
gacgaaatactaattagcttaaatacaccggcagagatttttaacatcagtaaagagtat

SEQ ID NO: 19819 - DNA, 48 bp, unidentified
  source 1..48: mol_type = unassigned DNA; note = methanogen bacteria
ctcataatattcgatatcaccgaagcatattacattgaacctgttaca

SEQ ID NO: 19820 - DNA, 57 bp, unidentified
  source 1..57: mol_type = unassigned DNA; note = methanogen bacteria
gatcccattttaaaactattaaatataccagaaactcttttcgaaataagtaaaact

SEQ ID NO: 19821 - DNA, 54 bp, unidentified
  source 1..54: mol_type = unassigned DNA; note = methanogen bacteria
atattcaatttattaaatataaactcagctcaacaacaagcatacattacacat

SEQ ID NO: 19822 - DNA, 33 bp, unidentified
  source 1..33: mol_type = unassigned DNA; note = methanogen bacteria
ttcttatccaactcaacacagttatctgtactc

SEQ ID NO: 19823 - DNA, 57 bp, unidentified
  source 1..57: mol_type = unassigned DNA; note = methanogen bacteria
gacaacatattaaccatgttgaatacaccagcagaaatttttaacgacagtagagga

SEQ ID NO: 19824 - DNA, 48 bp, unidentified
  source 1..48: mol_type = unassigned DNA; note = methanogen bacteria
cttaaaatattcaatatcgttgacccccaatatttcgaacctgttacg

SEQ ID NO: 19825 - DNA, 33 bp, unidentified
  source 1..33: mol_type = unassigned DNA; note = methanogen bacteria
tctaaaataaatattgatgcattttatgcaatg

SEQ ID NO: 19826 - DNA, 54 bp, unidentified
  source 1..54: mol_type = unassigned DNA; note = methanogen bacteria
ggagttttgttttattctgatagtgaaaaatcatatgttttgatttttgactat

SEQ ID NO: 19827 - DNA, 36 bp, unidentified
  source 1..36: mol_type = unassigned DNA; note = methanogen bacteria
tcattattagtgtctatgagcagtatgggtccgatt

SEQ ID NO: 19828 - DNA, 48 bp, unidentified
  source 1..48: mol_type = unassigned DNA; note = methanogen bacteria
atatttagtttgttcggaattacagaaatgcaaactgaaatattctgg

SEQ ID NO: 19829 - DNA, 36 bp, unidentified
  source 1..36: mol_type = unassigned DNA; note = methanogen bacteria
ttcatattgggatctgaatacttagcggtcattcaa

SEQ ID NO: 19830 - DNA, 60 bp, unidentified
  source 1..60: mol_type = unassigned DNA; note = methanogen bacteria
gatgcatatacagaaatattatgccagtccgctgcattgcaatctcttgtaaaacaatat

SEQ ID NO: 19831 - DNA, 30 bp, unidentified
  source 1..30: mol_type = unassigned DNA; note = methanogen bacteria
gctttagtcggtgtaattgggttggaagca

SEQ ID NO: 19832 - DNA, 48 bp, unidentified
  source 1..48: mol_type = unassigned DNA; note = methanogen bacteria
ctgtatcttttcaatgtgcatgatccagataggattccatttgtaata

SEQ ID NO: 19833 - DNA, 36 bp, unidentified
  source 1..36: mol_type = unassigned DNA; note = methanogen bacteria
ggatttttatcaagctccactcaattatccatactc

SEQ ID NO: 19834 - DNA, 60 bp, unidentified
  source 1..60: mol_type = unassigned DNA; note = methanogen bacteria
gacagcatattaaatatattaaatactcctgaagagatttttaacgacagtaaaggattt

SEQ ID NO: 19835 - DNA, 48 bp, unidentified
  source 1..48: mol_type = unassigned DNA; note = methanogen bacteria
attaatatattcagtattgctgaaccacaatattatgaaccgatcata

SEQ ID NO: 19836 - DNA, 51 bp, unidentified
  source 1..51: mol_type = unassigned DNA; note = methanogen bacteria
ggggagatcaccgaccacatcgttctcaaccattccgatgtcgtcatgcag

SEQ ID NO: 19837 - DNA, 54 bp, unidentified
  source 1..54: mol_type = unassigned DNA; note = methanogen bacteria
gggctcatcatgggcatcaccggccaggaggccaggttcctgaagtactccgac

SEQ ID NO: 19838 - DNA, 39 bp, unidentified
  source 1..39: mol_type = unassigned DNA; note = methanogen bacteria
acacagatgccagaaggagataattctgttcgttttgga

SEQ ID NO: 19839 - DNA, 84 bp, unidentified
  source 1..84: mol_type = unassigned DNA; note = methanogen bacteria
actgatttgaacattgtttcatctgcagttaatgcatttttaggaattggtcaacaggttatttcatgtatggctgatccgtgg

SEQ ID NO: 19840 - DNA, 48 bp, unidentified
  source 1..48: mol_type = unassigned DNA; note = methanogen bacteria
gcatcaggattccagtcaatcggtatgacaaacgttacaggttttgga

SEQ ID NO: 19841 - DNA, 105 bp, unidentified
  source 1..105: mol_type = unassigned DNA; note = methanogen bacteria
tacactgcaatattgggtggagaggaccaggctttaatccatctgatgcacactgctccattatcattcaacggtatttttgaagcactcgcagcatctgatgct

SEQ ID NO: 19842 - DNA, 57 bp, unidentified
  source 1..57: mol_type = unassigned DNA; note = methanogen bacteria
gaagtcggaacagcagactatcttgttggagtcctaaaaggtgctattccagcattc

SEQ ID NO: 19843 - DNA, 33 bp, unidentified
  source 1..33: mol_type = unassigned DNA; note = methanogen bacteria
gcatgggcagtctgtccggacatgacattcact

SEQ ID NO: 19844 - DNA, 30 bp, unidentified
  source 1..30: mol_type = unassigned DNA; note = methanogen bacteria
tctagaataagtgacgatgcattttttgca

SEQ ID NO: 19845 - DNA, 48 bp, unidentified
  source 1..48: mol_type = unassigned DNA; note = methanogen bacteria
gtcctattctatgtagatgatcagaagtcatatgttctgatttttgat

SEQ ID NO: 19846 - DNA, 36 bp, unidentified
  source 1..36: mol_type = unassigned DNA; note = methanogen bacteria
ctactagtaggtatgaacagtatgggtcctattttg

SEQ ID NO: 19847 - DNA, 51 bp, unidentified
  source 1..51: mol_type = unassigned DNA; note = methanogen bacteria
tatatatttggtttattttcaattactggaatgcagacacaaatattttgg

SEQ ID NO: 19848 - DNA, 264 bp, unidentified
  source 1..264: mol_type = unassigned DNA; note = methanogen bacteria
catgctaatgaagatggtggtgcaatatgttcaaaaaattcagtttatataaataattgtacttttaaggataattgtgctgacaatagtgggggagcaatttacacttattatacaataattaataattctttattcgactctaataaagcggataatgatggtggagctataaatgcaataaataatgcacaactaaaaaatgacatatttactagaaacactgcaaaaaacggtggagcaagttatgcttatgttttgaac

SEQ ID NO: 19849 - DNA, 51 bp, unidentified
  source 1..51: mol_type = unassigned DNA; note = methanogen bacteria
acatttaaagataataaagcagataatggtggtgcaatatatgctagttca

SEQ ID NO: 19850 - DNA, 135 bp, unidentified
  source 1..135: mol_type = unassigned DNA; note = methanogen bacteria
attgcagataactgtggaggagcaatattttcaaaaaataaaatagaggcaattaacagtgaattttataagaataatgcttgtgaagatggtggagctattttctctgataatgcatatgtatctcgttgttta

SEQ ID NO: 19851 - DNA, 81 bp, unidentified
  source 1..81: mol_type = unassigned DNA; note = methanogen bacteria
gttgaaaattccacatttaaaaataattatgctgatgattatggtggagctttatactcaaaagaagattcatatataaaa

SEQ ID NO: 19852 - DNA, 60 bp, unidentified
  source 1..60: mol_type = unassigned DNA; note = methanogen bacteria
aatgcttatgaagatggtggagctattttctgcaataatgcaagtatagcacattgttta

SEQ ID NO: 19853 - DNA, 30 bp, unidentified
  source 1..30: mol_type = unassigned DNA; note = methanogen bacteria
acatttaaaaataattatgctgatgattat

SEQ ID NO: 19854 - DNA, 42 bp, unidentified
  source 1..42: mol_type = unassigned DNA; note = methanogen bacteria
tcttcagcacctgctgatgcagataactcagtgagatttgga

SEQ ID NO: 19855 - DNA, 87 bp, unidentified
  source 1..87: mol_type = unassigned DNA; note = methanogen bacteria
gtaaacgacatgaacatcgtttcaacattagtgaatgcgttcctgaacatgggtacacagattattgcttgcatgtctgatccttgg

SEQ ID NO: 19856 - DNA, 48 bp, unidentified
  source 1..48: mol_type = unassigned DNA; note = methanogen bacteria
gcttccggtttccagtcagttggagtaacaaatgttaccggttttgga

SEQ ID NO: 19857 - DNA, 108 bp, unidentified
  source 1..108: mol_type = unassigned DNA; note = methanogen bacteria
ggatacaccaccattctcggtggggaagatcaggcccttatagcaatcatgaaatcatctccattatcattcaatggtgtatataccgcattttcccaggcggatgca

SEQ ID NO: 19858 - DNA, 60 bp, unidentified
  source 1..60: mol_type = unassigned DNA; note = methanogen bacteria
ggtgaagtcggaactgcagactatcttgtaggcgtattgggcaactcaatacccgctttc

SEQ ID NO: 19859 - DNA, 36 bp, unidentified
  source 1..36: mol_type = unassigned DNA; note = methanogen bacteria
gcatgggcaataagttcaggtgacatgtcatttaca

SEQ ID NO: 19860 - DNA, 42 bp, unidentified
  source 1..42: mol_type = unassigned DNA; note = methanogen bacteria
acccaagcacctgcaaccgataatcccgcagcaaaatttgga

SEQ ID NO: 19861 - DNA, 84 bp, unidentified
  source 1..84: mol_type = unassigned DNA; note = methanogen bacteria
aatgatttaaacattgttagcagtgcggttaatgcatttttagcaataggaaatgaagtgatttcatgtatggccgacccgtgg

SEQ ID NO: 19862 - DNA, 45 bp, unidentified
  source 1..45: mol_type = unassigned DNA; note = methanogen bacteria
gcatctggttttaaatcaattggaatggacgttagtggattcggc

SEQ ID NO: 19863 - DNA, 105 bp, unidentified
  source 1..105: mol_type = unassigned DNA; note = methanogen bacteria
tacactactattttaagtggagaaaaccaagcacttatcactttaatgaaaactgccccattatcattcaacggtatttttgaagcattatctgcttcaaacgca

SEQ ID NO: 19864 - DNA, 57 bp, unidentified
  source 1..57: mol_type = unassigned DNA; note = methanogen bacteria
aatgtaggtactgcagattatctggcaattgttctaaaaggcaccatcccctattgg

SEQ ID NO: 19865 - DNA, 36 bp, unidentified
  source 1..36: mol_type = unassigned DNA; note = methanogen bacteria
gcatgggctatttcaccagatataggattcgttgtt

SEQ ID NO: 19866 - DNA, 30 bp, unidentified
  source 1..30: mol_type = unassigned DNA; note = methanogen bacteria
tttataggttctcaacaattatccattatt

SEQ ID NO: 19867 - DNA, 60 bp, unidentified
  source 1..60: mol_type = unassigned DNA; note = methanogen bacteria
gataatatattgattatgtataattgtcctgcagagattttcaatatctctaaagaatat

SEQ ID NO: 19868 - DNA, 48 bp, unidentified
  source 1..48: mol_type = unassigned DNA; note = methanogen bacteria
ttatccatatttaatgtggttaatccacatgatgctgaagtggttact

SEQ ID NO: 19869 - DNA, 42 bp, unidentified
  source 1..42: mol_type = unassigned DNA; note = methanogen bacteria
acttcaacacctgcaaatgcggacaattcggtgaggttcggc

SEQ ID NO: 19870 - DNA, 81 bp, unidentified
  source 1..81: mol_type = unassigned DNA; note = methanogen bacteria
aacgacctcaatatcattactagttcagttaacgcattcctcaatttggctacacagataatcgcatgtatggccgacccg

SEQ ID NO: 19871 - DNA, 48 bp, unidentified
  source 1..48: mol_type = unassigned DNA; note = methanogen bacteria
gctgccggattcaaatccgtcggtgtgacaaacattaccggttttgga

SEQ ID NO: 19872 - DNA, 108 bp, unidentified
  source 1..108: mol_type = unassigned DNA; note = methanogen bacteria
ggatacactaccattatgggtgggcaagaccaggctctcattgcaatcatgaaatcctctccattatcattcaatggtatatatacggcgcttgcacaatcagacgca

SEQ ID NO: 19873 - DNA, 60 bp, unidentified
  source 1..60: mol_type = unassigned DNA; note = methanogen bacteria
ggcgaagtcggaactgccgactatcttgtaggggttcttaaaagcacaatacctgcattc

SEQ ID NO: 19874 - DNA, 36 bp, unidentified
  source 1..36: mol_type = unassigned DNA; note = methanogen bacteria
gcatgggcaatcagttccggagacctgtcatttaca

SEQ ID NO: 19875 - DNA, 42 bp, unidentified
  source 1..42: mol_type = unassigned DNA; note = methanogen bacteria
tcctcaacccctgcaaacgctgataattcagtgaggttcggt

SEQ ID NO: 19876 - DNA, 87 bp, unidentified
  source 1..87: mol_type = unassigned DNA; note = methanogen bacteria
tgcaatgacttaaacatcatctcaacagcaatcaatgcattcctcaacttaggctcacaggtcatctcctgtatggctgacccttgg

SEQ ID NO: 19877 - DNA, 51 bp, unidentified
  source 1..51: mol_type = unassigned DNA; note = methanogen bacteria
gctgccggtttccaatcagtgggcgtgaacaatgtcactggattcggaata

SEQ ID NO: 19878 - DNA, 108 bp, unidentified
  source 1..108: mol_type = unassigned DNA; note = methanogen bacteria
ggatacactaccatcctgggcggtgaagaccaagcattaatcactttaatgaaaacttccccattatcattcaacggtatattcgaggcattgtctcaatccgacgct

SEQ ID NO: 19879 - DNA, 60 bp, unidentified
  source 1..60: mol_type = unassigned DNA; note = methanogen bacteria
ggtgaagtcggaacagctgattatttggttggtgttttaagcagcaccattccggcatgg

SEQ ID NO: 19880 - DNA, 36 bp, unidentified
  source 1..36: mol_type = unassigned DNA; note = methanogen bacteria
gcatgggctgtaagttccggtgacatgaacttcact

SEQ ID NO: 19881 - DNA, 42 bp, unidentified
  source 1..42: mol_type = unassigned DNA; note = methanogen bacteria
tcaacaacacctgctgatgcagataactctgtcagattcggt

SEQ ID NO: 19882 - DNA, 87 bp, unidentified
  source 1..87: mol_type = unassigned DNA; note = methanogen bacteria
tcaaatgatttaaacatcatttccacaatagtcaacgcattcctaaacttaggttcacaagtcatcagttgtatggctgacccttgg

SEQ ID NO: 19883 - DNA, 48 bp, unidentified
  source 1..48: mol_type = unassigned DNA; note = methanogen bacteria
gctgctggtttccaatcagtaggagtaactaacgtaacaggattcgga

SEQ ID NO: 19884 - DNA, 108 bp, unidentified
  source 1..108: mol_type = unassigned DNA; note = methanogen bacteria
ggatacaccaccattctaggtggagaagaccaagctctcataactttaatgcaaactgctccattatcatttgatggtatcttccaggcattatctcaatccgatgca

SEQ ID NO: 19885 - DNA, 57 bp, unidentified
  source 1..57: mol_type = unassigned DNA; note = methanogen bacteria
gaagtcggaaccgctgactaccttgtaggtattctaagcagtacaattcctgcatgg

SEQ ID NO: 19886 - DNA, 36 bp, unidentified
  source 1..36: mol_type = unassigned DNA; note = methanogen bacteria
gcatgggctgtaagtactggtgacatgagctttaca

SEQ ID NO: 19887 - DNA, 30 bp, unidentified
  source 1..30: mol_type = unassigned DNA; note = methanogen bacteria
tggtcggggcgctcccaggacacggacgac

SEQ ID NO: 19888 - DNA, 30 bp, unidentified
  source 1..30: mol_type = unassigned DNA; note = methanogen bacteria
atgatgagcggcagcgatatggagatcagc

SEQ ID NO: 19889 - DNA, 30 bp, unidentified
  source 1..30: mol_type = unassigned DNA; note = methanogen bacteria
gagatcaagccctcctacctggtggacaac

SEQ ID NO: 19890 - DNA, 30 bp, unidentified
  source 1..30: mol_type = unassigned DNA; note = methanogen bacteria
ctggacgcaggcatcctctcgagcgacttc

SEQ ID NO: 19891 - DNA, 45 bp, unidentified
  source 1..45: mol_type = unassigned DNA; note = methanogen bacteria
gagttcatcgcggacaacaccatgatggagatgtacagcgcgacg

SEQ ID NO: 19892 - DNA, 39 bp, unidentified
  source 1..39: mol_type = unassigned DNA; note = methanogen bacteria
tctctgccggcaaactctgataatgctatcaggtttggt

SEQ ID NO: 19893 - DNA, 87 bp, unidentified
  source 1..87: mol_type = unassigned DNA; note = methanogen bacteria
gtaaatgacgtaaatatcattaccacagcaatcaatgcattccttgctttaggcggacaggtcattgcctgtatggccgacccttgg

SEQ ID NO: 19894 - DNA, 51 bp, unidentified
  source 1..51: mol_type = unassigned DNA; note = methanogen bacteria
gctgccggtttccaatcagtcggagcaaccaatgtaaccggattcggaata

SEQ ID NO: 19895 - DNA, 108 bp, unidentified
  source 1..108: mol_type = unassigned DNA; note = methanogen bacteria
ggatacaccggaattttaggtggagaagatcaggctctcattactttaatgaaaacttctccattatcattcaacggtatatttgaagcacttgccgcttctgatgca

SEQ ID NO: 19896 - DNA, 60 bp, unidentified
  source 1..60: mol_type = unassigned DNA; note = methanogen bacteria
ggtgaagtcggtactgctgattatcttgtcggagttttaagcggaactattcccgcatgg

SEQ ID NO: 19897 - DNA, 36 bp, unidentified
  source 1..36: mol_type = unassigned DNA; note = methanogen bacteria
ggatgggcagtaagtagcggtgacatgaactttact

SEQ ID NO: 19898 - DNA, 39 bp, unidentified
  source 1..39: mol_type = unassigned DNA; note = methanogen bacteria
tcaaatttacctgaaggagataatgctgtaagattaggt

SEQ ID NO: 19899 - DNA, 81 bp, unidentified
  source 1..81: mol_type = unassigned DNA; note = methanogen bacteria
aatgatacaaacatcataaccactgctattaatgcatttttaaaactgggtactgaggtaatttcagtaatatctgatcct

SEQ ID NO: 19900 - DNA, 45 bp, unidentified
  source 1..45: mol_type = unassigned DNA; note = methanogen bacteria
gcatctggttttcagtcaattggtatggatgtaagtggttttggt

SEQ ID NO: 19901 - DNA, 99 bp, unidentified
  source 1..99: mol_type = unassigned DNA; note = methanogen bacteria
ttaactattttggacggaaatgatgcagcacttattgctttaatgaaaaattcaccattatcatttgaggctatttttgaagcattatctaattctgat

SEQ ID NO: 19902 - DNA, 60 bp, unidentified
  source 1..60: mol_type = unassigned DNA; note = methanogen bacteria
ggtgagattggaactgcacaatatttggtttcagttttaaaaggtacaattccggcattt

SEQ ID NO: 19903 - DNA, 39 bp, unidentified
  source 1..39: mol_type = unassigned DNA; note = methanogen bacteria
ctttcatgggcaatttcaccggatatgggttttgctgta

SEQ ID NO: 19904 - DNA, 42 bp, unidentified
  source 1..42: mol_type = unassigned DNA; note = methanogen bacteria
tcaacaacaccggcaaacgctgacaattccgttagattcgga

SEQ ID NO: 19905 - DNA, 87 bp, unidentified
  source 1..87: mol_type = unassigned DNA; note = methanogen bacteria
tgcaatgatttaaacatcatctcaactataatcaatgctttcctggatttaggttcacagattatttcttgtatggcagatccatgg

SEQ ID NO: 19906 - DNA, 48 bp, unidentified
  source 1..48: mol_type = unassigned DNA; note = methanogen bacteria
gctgccggtttccaatcagttggtgtgaccaacgtaaccggatttgga

SEQ ID NO: 19907 - DNA, 108 bp, unidentified
  source 1..108: mol_type = unassigned DNA; note = methanogen bacteria
ggatacaccaccattttaggtggagaagaccaagctctcattaccttgatgaaaacttcaccgttatcattcaacggtatatttgaagcattatcacaatctgacgct

SEQ ID NO: 19908 - DNA, 60 bp, unidentified
  source 1..60: mol_type = unassigned DNA; note = methanogen bacteria
ggtgaagttggaaccgctgattatcttgttggtgttttaagcagtaccattcctgcatgg

SEQ ID NO: 19909 - DNA, 36 bp, unidentified
  source 1..36: mol_type = unassigned DNA; note = methanogen bacteria
gcatgggctgtaagtaccggagacatgaacttcaca

SEQ ID NO: 19910 - DNA, 42 bp, unidentified
  source 1..42: mol_type = unassigned DNA; note = methanogen bacteria
tcttcaacacctgccggtgctgacaattcagtgagattcggc

SEQ ID NO: 19911 - DNA, 84 bp, unidentified
  source 1..84: mol_type = unassigned DNA; note = methanogen bacteria
gtaaacgatgtaaatattatttcaacagcagtaaatgcattcctgaaattatgtgtgcagattatcgcttgtatgtctgatccg

SEQ ID NO: 19912 - DNA, 48 bp, unidentified
  source 1..48: mol_type = unassigned DNA; note = methanogen bacteria
gcttccggtttcaaatctattggagttaccaatattactggttttgga

SEQ ID NO: 19913 - DNA, 108 bp, unidentified
  source 1..108: mol_type = unassigned DNA; note = methanogen bacteria
ggatacactaccattttaggtggagaagaccaggcactcattgcaatcatgaagtcatctccattatcattcaatggtatatatacagctttatctcaatcagatgca

SEQ ID NO: 19914 - DNA, 57 bp, unidentified
  source 1..57: mol_type = unassigned DNA; note = methanogen bacteria
gaaatcggaactgccgactatctggttggagttctgagcagcacaatacctgctttc

SEQ ID NO: 19915 - DNA, 36 bp, unidentified
  source 1..36: mol_type = unassigned DNA; note = methanogen bacteria
gcatgggcaatcagttcaggagacatgtcctttacc

SEQ ID NO: 19916 - DNA, 36 bp, unidentified
  source 1..36: mol_type = unassigned DNA; note = methanogen bacteria
ttcttactgggcgctggtaacctgtctgcaattcaa

SEQ ID NO: 19917 - DNA, 60 bp, unidentified
  source 1..60: mol_type = unassigned DNA; note = methanogen bacteria
tcaattgcaaaattcctatgtgcttcacagtctgctctaattcctgatgttaatagctat

SEQ ID NO: 19918 - DNA, 48 bp, unidentified
  source 1..48: mol_type = unassigned DNA; note = methanogen bacteria
ctgatgctgtatagtgttaaaaatcctgctgatgttcctgtggtattg

SEQ ID NO: 19919 - DNA, 33 bp, unidentified
  source 1..33: mol_type = unassigned DNA; note = methanogen bacteria
ataacacaaataaacattcatgcttcttttgca

SEQ ID NO: 19920 - DNA, 54 bp, unidentified
  source 1..54: mol_type = unassigned DNA; note = methanogen bacteria
gaaatgttatatagtgtagactctgctaattcatatcttttagctatggattat

SEQ ID NO: 19921 - DNA, 30 bp, unidentified
  source 1..30: mol_type = unassigned DNA; note = methanogen bacteria
acaataacaatgggacctattggaccagta

SEQ ID NO: 19922 - DNA, 51 bp, unidentified
  source 1..51: mol_type = unassigned DNA; note = methanogen bacteria
tatgcatttagccttttttccattaccggaatgcagacagaaatattctgg

SEQ ID NO: 19923 - DNA, 54 bp, unidentified
  source 1..54: mol_type = unassigned DNA; note = methanogen bacteria
attgggaacatgaatgtctatttgattgaatcaactaaagttccaatgacacgt

SEQ ID NO: 19924 - DNA, 48 bp, unidentified
  source 1..48: mol_type = unassigned DNA; note = methanogen bacteria
attagcgacaatgatgtgtctgctgcacttgatgatgatgttatggat

SEQ ID NO: 19925 - DNA, 42 bp, unidentified
  source 1..42: mol_type = unassigned DNA; note = methanogen bacteria
gatagttttgccctaacagacatgagtgcgactgaagtcgag

SEQ ID NO: 19926 - DNA, 33 bp, unidentified
  source 1..33: mol_type = unassigned DNA; note = methanogen bacteria
ataacacaaataaacattcatgcttcctttgca

SEQ ID NO: 19927 - DNA, 57 bp, unidentified
  source 1..57: mol_type = unassigned DNA; note = methanogen bacteria
caggaaatattatatagtgtaaaccctgctgattcatatcttttagctatggattat

SEQ ID NO: 19928 - DNA, 30 bp, unidentified
  source 1..30: mol_type = unassigned DNA; note = methanogen bacteria
acagcgacaatgggacctgtcggaccggta

SEQ ID NO: 19929 - DNA, 48 bp, unidentified
  source 1..48: mol_type = unassigned DNA; note = methanogen bacteria
gcatttagccttttttccattaccggaatgcagacagaaatactttgg

SEQ ID NO: 19930 - DNA, 33 bp, unidentified
  source 1..33: mol_type = unassigned DNA; note = methanogen bacteria
gtaacacaaataaacattcatgcttcttttgca

SEQ ID NO: 19931 - DNA, 54 bp, unidentified
  source 1..54: mol_type = unassigned DNA; note = methanogen bacteria
gaaataatatatagtataaaccctgctgattcatatcttttagctatggattat

SEQ ID NO: 19932 - DNA, 30 bp, unidentified
  source 1..30: mol_type = unassigned DNA; note = methanogen bacteria
acagtgacaatgggacctgttggaccggtg

SEQ ID NO: 19933 - DNA, 45 bp, unidentified
  source 1..45: mol_type = unassigned DNA; note = methanogen bacteria
gcatttagcattttttccattaaaggaatgcagacagaaatatta

SEQ ID NO: 19934 - DNA, 42 bp, unidentified
  source 1..42: mol_type = unassigned DNA; note = methanogen bacteria
tcctccatacctgccaacgagaataatgccatcaggttcggc

SEQ ID NO: 19935 - DNA, 84 bp, unidentified
  source 1..84: mol_type = unassigned DNA; note = methanogen bacteria
gtaaatgatttgaacattatctccacaataatcaacgcattccttcaattgggcgctcaggtcatttcctgtatggcagaccca

SEQ ID NO: 19936 - DNA, 48 bp, unidentified
  source 1..48: mol_type = unassigned DNA; note = methanogen bacteria
gctgcaggattcaagtctgtcggcgcaaccaacattacaggtttcgga

SEQ ID NO: 19937 - DNA, 102 bp, unidentified
  source 1..102: mol_type = unassigned DNA; note = methanogen bacteria
tacactgccattttaggcggacaagatcagacattaattacattaatgaaaacagctccattatcattcaaaggtgtttttgaagccctttcagcatcagat

SEQ ID NO: 19938 - DNA, 57 bp, unidentified
  source 1..57: mol_type = unassigned DNA; note = methanogen bacteria
gagataggtaccgctgattatctggtaggagtattgagcggatcaatacctcagttt

SEQ ID NO: 19939 - DNA, 36 bp, unidentified
  source 1..36: mol_type = unassigned DNA; note = methanogen bacteria
ggatgggcagtaagtacaggagatatgaacttcaca

SEQ ID NO: 19940 - DNA, 84 bp, unidentified
  source 1..84: mol_type = unassigned DNA; note = methanogen bacteria
ggtttcttcttcccagaattaaaatacgaacagccattaagcggtcagtttgcaggtaaacgctctgcacttagcaaaatcaaa

SEQ ID NO: 19941 - DNA, 162 bp, unidentified
  source 1..162: mol_type = unassigned DNA; note = methanogen bacteria
gtattggatgctgatgttcacggtatgagcatattggaagttgatattggagatatttcacatgatatgtctcctctttctgacttaaacaagatggcaaatgaggtagttcgtacaatcattgatagggctgtggattatggccgtgtcacaatgatggac

SEQ ID NO: 19942 - DNA, 30 bp, unidentified
  source 1..30: mol_type = unassigned DNA; note = methanogen bacteria
ctgatgaacggccaggacatggatgtcacg

SEQ ID NO: 19943 - DNA, 30 bp, unidentified
  source 1..30: mol_type = unassigned DNA; note = methanogen bacteria
ctcatcagaccggaggacatcctgaacaac

SEQ ID NO: 19944 - DNA, 30 bp, unidentified
  source 1..30: mol_type = unassigned DNA; note = methanogen bacteria
ttcagcaacggcatcatcaccagcgacttc

SEQ ID NO: 19945 - DNA, 48 bp, unidentified
  source 1..48: mol_type = unassigned DNA; note = methanogen bacteria
gacctcataaacaacaataccccggaggtcatcagcctgtatgctacc

SEQ ID NO: 19946 - DNA, 36 bp, unidentified
  source 1..36: mol_type = unassigned DNA; note = methanogen bacteria
agtaatctgataggtgctgttgcattatcggcaatc

SEQ ID NO: 19947 - DNA, 60 bp, unidentified
  source 1..60: mol_type = unassigned DNA; note = methanogen bacteria
ggcccgattatagcgattctgtgcccatctgcccaaatacagcctatcgttttccagtat

SEQ ID NO: 19948 - DNA, 51 bp, unidentified
  source 1..51: mol_type = unassigned DNA; note = methanogen bacteria
ttgatgttgtatcatgtcaacagtccttcagatatccctattgttctgaat

SEQ ID NO: 19949 - DNA, 36 bp, unidentified
  source 1..36: mol_type = unassigned DNA; note = methanogen bacteria
tttttaatcggtgcaggaaatctgtcagcaattcaa

SEQ ID NO: 19950 - DNA, 57 bp, unidentified
  source 1..57: mol_type = unassigned DNA; note = methanogen bacteria
cctatctctcaaatgctatgtgcttcacagccagagttagttccggatgtaaatctg

SEQ ID NO: 19951 - DNA, 48 bp, unidentified
  source 1..48: mol_type = unassigned DNA; note = methanogen bacteria
ttgttgttgtatagtgttaaagactctgcacaggttcctgttgtttta

SEQ ID NO: 19952 - DNA, 33 bp, unidentified
  source 1..33: mol_type = unassigned DNA; note = methanogen bacteria
tttttaattggtgcaagcaatcttgcgccaata

SEQ ID NO: 19953 - DNA, 60 bp, unidentified
  source 1..60: mol_type = unassigned DNA; note = methanogen bacteria
agcattgcgcaatttttatgcgcttcacagcctgaattggtttctgatgtatccagctat

SEQ ID NO: 19954 - DNA, 48 bp, unidentified
  source 1..48: mol_type = unassigned DNA; note = methanogen bacteria
cttttcctgtacagcgttaaaaatcctgccgacgttccggttgtattg

SEQ ID NO: 19955 - DNA, 30 bp, unidentified
  source 1..30: mol_type = unassigned DNA; note = methanogen bacteria
gcttataatgaagaagataccgtggctacc

SEQ ID NO: 19956 - DNA, 39 bp, unidentified
  source 1..39: mol_type = unassigned DNA; note = methanogen bacteria
gaagtagttaaaaaggtgtcgtttgttgatgaaatcatt

SEQ ID NO: 19957 - DNA, 90 bp, unidentified
  source 1..90: mol_type = unassigned DNA; note = methanogen bacteria
aatgacggttcatctgataatacacaatcagaagcagttaaagccggtgctcacgttataaatcatgaaaccaacaaaggtaagggtgaa

SEQ ID NO: 19958 - DNA, 96 bp, unidentified
  source 1..96: mol_type = unassigned DNA; note = methanogen bacteria
cataacttgacatccaaaaaagtggaagcaatgattattccaattcttgaaggcaaaactgatattacaaaaaccaaatttgcacgtgctcacgga

SEQ ID NO: 19959 - DNA, 69 bp, unidentified
  source 1..69: mol_type = unassigned DNA; note = methanogen bacteria
gacattggtgcaattgaacatgacatgtctccgcttgcggatttgaatttaatggctaacgaagttgta

SEQ ID NO: 19960 - DNA, 45 bp, unidentified
  source 1..45: mol_type = unassigned DNA; note = methanogen bacteria
attatgaaccgtgccaataagtatggccgtgtaatcatgattgat

SEQ ID NO: 19961 - DNA, 33 bp, unidentified
  source 1..33: mol_type = unassigned DNA; note = methanogen bacteria
aacaatattgaggacatatatgcattagggtac

SEQ ID NO: 19962 - DNA, 36 bp, unidentified
  source 1..36: mol_type = unassigned DNA; note = methanogen bacteria
agtatgcttttaggcccaatgaacctatcggtcatt

SEQ ID NO: 19963 - DNA, 63 bp, unidentified
  source 1..63: mol_type = unassigned DNA; note = methanogen bacteria
ccggatagcttacttcaggcgttatgcaattccaatcagttaaaaccgttggtttacgagtat

SEQ ID NO: 19964 - DNA, 30 bp, unidentified
  source 1..30: mol_type = unassigned DNA; note = methanogen bacteria
ggagtcttggctaatgtgggattggttgct

SEQ ID NO: 19965 - DNA, 45 bp, unidentified
  source 1..45: mol_type = unassigned DNA; note = methanogen bacteria
tacctattctccgtaagcgacccgtcacatctccctattgtgatg

SEQ ID NO: 19966 - DNA, 81 bp, unidentified
  source 1..81: mol_type = unassigned DNA; note = methanogen bacteria
ccggcttataatgaagaggataccgtagctaccgttgttggggtagtcaaagaggtgtcgtttgtcgatgaaatcattgtt

SEQ ID NO: 19967 - DNA, 93 bp, unidentified
  source 1..93: mol_type = unassigned DNA; note = methanogen bacteria
aatgatgggtcatccgataatacagaatcagaagcaattaaagcaggagcccgtgttataaaccatgaaaccaacaagggtaagggtgaagca

SEQ ID NO: 19968 - DNA, 99 bp, unidentified
  source 1..99: mol_type = unassigned DNA; note = methanogen bacteria
attcataacctgacatccaaaaaagtggaagcaatgatcatgccgattcttgaaggcaaaacagatattaccaaaaccaaatttgcccgtgctcatgga

SEQ ID NO: 19969 - DNA, 138 bp, unidentified
  source 1..138: mol_type = unassigned DNA; note = methanogen bacteria
atttcaattatggaagttgacattggtgcaattgaacatgacatgtctccgctggctgatttgaatttaatggctaatgaagttgtaagaacaattatgaaccgtgccaataagtacggtcgcgtaatcatgattgat

SEQ ID NO: 19970 - DNA, 33 bp, unidentified
  source 1..33: mol_type = unassigned DNA; note = methanogen bacteria
tttttaattggtgcatctaatcttgcaccaatt

SEQ ID NO: 19971 - DNA, 60 bp, unidentified
  source 1..60: mol_type = unassigned DNA; note = methanogen bacteria
agtattacacagtttttatgttcctcccagcccgaactgattcctgaggtaacttcatat

SEQ ID NO: 19972 - DNA, 48 bp, unidentified
  source 1..48: mol_type = unassigned DNA; note = methanogen bacteria
ttgttcctgtacagtgttaaaaatcctgcagatgttcctgttgtattg

SEQ ID NO: 19973 - DNA, 33 bp, unidentified
  source 1..33: mol_type = unassigned DNA; note = methanogen bacteria
agtgcattgttaggtccgatgaacctgtcagta

SEQ ID NO: 19974 - DNA, 63 bp, unidentified
  source 1..63: mol_type = unassigned DNA; note = methanogen bacteria
ccggatagcttacttcagatattatgcaattcatgccaattaaggccattggtcttcgaatac

SEQ ID NO: 19975 - DNA, 54 bp, unidentified
  source 1..54: mol_type = unassigned DNA; note = methanogen bacteria
atactggccatgttctcactaagcgattcttcacaagttcctgtggtaatgaat

SEQ ID NO: 19976 - DNA, 42 bp, unidentified
  source 1..42: mol_type = unassigned DNA; note = methanogen bacteria
acccaagcgcctgcaagtgataatcctgcaacaagatttggt

SEQ ID NO: 19977 - DNA, 84 bp, unidentified
  source 1..84: mol_type = unassigned DNA; note = methanogen bacteria
gcaaatgatttaaatattgtaggcagtgcagtcaatgcattcttagctataggacatgaagtaatatcctgtatggctgacccc

SEQ ID NO: 19978 - DNA, 45 bp, unidentified
  source 1..45: mol_type = unassigned DNA; note = methanogen bacteria
gcagcaggttttaaaacaatcggaatgaatgttagtggattcgga

SEQ ID NO: 19979 - DNA, 108 bp, unidentified
  source 1..108: mol_type = unassigned DNA; note = methanogen bacteria
ggatacactacaattttagctggagataatcaaactctcatcactttaatgaaaactgcaccattatcattcaacggtatttttgaagcattatctgcttccgatgca

SEQ ID NO: 19980 - DNA, 60 bp, unidentified
  source 1..60: mol_type = unassigned DNA; note = methanogen bacteria
ggaaatgttggtactgccaattatttggtaggcattctaaaaggaaccattccctactgg

SEQ ID NO: 19981 - DNA, 36 bp, unidentified
  source 1..36: mol_type = unassigned DNA; note = methanogen bacteria
gcctgggctgtttcaccagacatgggattcgtcatt

SEQ ID NO: 19982 - DNA, 36 bp, unidentified
  source 1..36: mol_type = unassigned DNA; note = methanogen bacteria
agtaatttgattggtgctgttgcattatctgctatc

SEQ ID NO: 19983 - DNA, 60 bp, unidentified
  source 1..60: mol_type = unassigned DNA; note = methanogen bacteria
ggtccgattatagcgattttatgcccttccgctcagatacaaccaattgttttccaatat

SEQ ID NO: 19984 - DNA, 48 bp, unidentified
  source 1..48: mol_type = unassigned DNA; note = methanogen bacteria
ttgatgttataccatgtcaacaatccttcagatatccctattgtattg

SEQ ID NO: 19985 - DNA, 36 bp, unidentified
  source 1..36: mol_type = unassigned DNA; note = methanogen bacteria
agtgccctgttaggtccaatgaacctgtcagtcatt

SEQ ID NO: 19986 - DNA, 63 bp, unidentified
  source 1..63: mol_type = unassigned DNA; note = methanogen bacteria
ccggatgctttccttcagatattatgcaattccagtcaattaaagccattggtctttgaatat

SEQ ID NO: 19987 - DNA, 30 bp, unidentified
  source 1..30: mol_type = unassigned DNA; note = methanogen bacteria
ggagtaatggcaaatgttggtttggttgca

SEQ ID NO: 19988 - DNA, 48 bp, unidentified
  source 1..48: mol_type = unassigned DNA; note = methanogen bacteria
ttaacaatattctccgtaagcgatccttcccacattccttcagtgatg

SEQ ID NO: 19989 - DNA, 36 bp, unidentified
  source 1..36: mol_type = unassigned DNA; note = methanogen bacteria
tttttgcttggagcaggaaacctctctgcaatccag

SEQ ID NO: 19990 - DNA, 60 bp, unidentified
  source 1..60: mol_type = unassigned DNA; note = methanogen bacteria
caaagcatctcccagtttctgtgctcatcacagcctgccttgactaatgatgtaagacag

SEQ ID NO: 19991 - DNA, 48 bp, unidentified
  source 1..48: mol_type = unassigned DNA; note = methanogen bacteria
ctgttcctctacagcgttaaggatcctgctgacatacctgtggtttta

SEQ ID NO: 19992 - DNA, 36 bp, unidentified
  source 1..36: mol_type = unassigned DNA; note = methanogen bacteria
agcgcactgttaggtccgatgaacctatcagtaatt

SEQ ID NO: 19993 - DNA, 63 bp, unidentified
  source 1..63: mol_type = unassigned DNA; note = methanogen bacteria
ccagatagtttccttgagatattatgcaattcaagccacttgagaccattggtttatgaatat

SEQ ID NO: 19994 - DNA, 33 bp, unidentified
  source 1..33: mol_type = unassigned DNA; note = methanogen bacteria
cttggagtcattgcggatgtgggattggttgca

SEQ ID NO: 19995 - DNA, 48 bp, unidentified
  source 1..48: mol_type = unassigned DNA; note = methanogen bacteria
ttatgcgtattctccgtaagtgatccgtcacacattccttccgtgatg

SEQ ID NO: 19996 - DNA, 36 bp, unidentified
  source 1..36: mol_type = unassigned DNA; note = methanogen bacteria
tttttaatcggagcaggaaatctggctccaatacaa

SEQ ID NO: 19997 - DNA, 57 bp, unidentified
  source 1..57: mol_type = unassigned DNA; note = methanogen bacteria
aatatttcacagctattgtgcatctcacagcctggactggctcatgatgttaacatg

SEQ ID NO: 19998 - DNA, 48 bp, unidentified
  source 1..48: mol_type = unassigned DNA; note = methanogen bacteria
ctgctgctttacagcgtaaagaatccttcagacattccagtcgtgttg

SEQ ID NO: 19999 - DNA, 36 bp, unidentified
  source 1..36: mol_type = unassigned DNA; note = methanogen bacteria
tttttaattggagccagtaatttggctcctattcaa

SEQ ID NO: 20000 - DNA, 60 bp, unidentified
  source 1..60: mol_type = unassigned DNA; note = methanogen bacteria
aataatatttcacagttactgtgtatatcacagccaatgttggcttctagcgttaaggat

SEQ ID NO: 20001 - DNA, 48 bp, unidentified
  source 1..48: mol_type = unassigned DNA; note = methanogen bacteria
ctgttattgtatagtgttaaaaacccttcagacattccggttgtattg

SEQ ID NO: 20002 - DNA, 171 bp, unidentified
  source 1..171: mol_type = unassigned DNA; note = methanogen bacteria
gggaattcttttccttattggtatttacttacaaatcaacttgatgaattgctattaattaataatgctcatttgggccaatactttgctaattggaatattcattcgttaagtaaaacccttggttattctctttttttaaagtttgttaatgttattgggttgccttat

SEQ ID NO: 20003 - DNA, 45 bp, unidentified
  source 1..45: mol_type = unassigned DNA; note = methanogen bacteria
tcctcatttttaggttattgtgaatatactatggcctattcatct

SEQ ID NO: 20004 - DNA, 33 bp, unidentified
  source 1..33: mol_type = unassigned DNA; note = methanogen bacteria
tttttaattggtgcgagcaatcttgcaccaatc

SEQ ID NO: 20005 - DNA, 57 bp, unidentified
  source 1..57: mol_type = unassigned DNA; note = methanogen bacteria
aatattgcacagtttttatgcatttcccaacctgaactggttccggatgttacaagt

SEQ ID NO: 20006 - DNA, 48 bp, unidentified
  source 1..48: mol_type = unassigned DNA; note = methanogen bacteria
ttgttcctatatagtgttaagaatcctgcagatgttcctgtagtattg

SEQ ID NO: 20007 - DNA, 39 bp, unidentified
  source 1..39: mol_type = unassigned DNA; note = methanogen bacteria
agcatgtttatgggatcaacgtatttgtctgttgttcaa

SEQ ID NO: 20008 - DNA, 60 bp, unidentified
  source 1..60: mol_type = unassigned DNA; note = methanogen bacteria
ggccaatatgtccaattgttatgtcactccgaccaattaaaaccctttgtcacacagtat

SEQ ID NO: 20009 - DNA, 45 bp, unidentified
  source 1..45: mol_type = unassigned DNA; note = methanogen bacteria
ttcatattcaatgtaagcaatccctcagacattccgacaataatg

SEQ ID NO: 20010 - DNA, 36 bp, unidentified
  source 1..36: mol_type = unassigned DNA; note = methanogen bacteria
agtgccctgttaggtccgatgaacctgtcagtcatt

SEQ ID NO: 20011 - DNA, 63 bp, unidentified
  source 1..63: mol_type = unassigned DNA; note = methanogen bacteria
ccggatggtttccttcagatattatgcaattccactcagttaaagccattggtctttgaatac

SEQ ID NO: 20012 - DNA, 30 bp, unidentified
  source 1..30: mol_type = unassigned DNA; note = methanogen bacteria
tcagtaatagcaaatgtgggtttggttgca

SEQ ID NO: 20013 - DNA, 48 bp, unidentified
  source 1..48: mol_type = unassigned DNA; note = methanogen bacteria
ttggtcatattctccgtaagcgatccttcacatattccttcagtgatg

SEQ ID NO: 20014 - DNA, 36 bp, unidentified
  source 1..36: mol_type = unassigned DNA; note = methanogen bacteria
agcgccctgttaggtccaatgaacctgtcagtcatt

SEQ ID NO: 20015 - DNA, 63 bp, unidentified
  source 1..63: mol_type = unassigned DNA; note = methanogen bacteria
ccagatgccttccttcagatattatgcaattccactcagttaaagccattggtctttgaatat

SEQ ID NO: 20016 - DNA, 30 bp, unidentified; identical to SEQ ID NO: 19987
  source 1..30: mol_type = unassigned DNA; note = methanogen bacteria

SEQ ID NO: 20017 - DNA, 48 bp, unidentified
  source 1..48: mol_type = unassigned DNA; note = methanogen bacteria
ttggtcatattctcagtaagcaacccttcacacattccttcagtgatg

SEQ ID NO: 20018 - DNA, 36 bp, unidentified
  source 1..36: mol_type = unassigned DNA; note = methanogen bacteria
agtgcacttctgggtccaatgaacctgtcagtcatt

SEQ ID NO: 20019 - DNA, 60 bp, unidentified
  source 1..60: mol_type = unassigned DNA; note = methanogen bacteria
aataattttcttgagatattatgcagttccactgagttacggcccttagtttatgaatat

SEQ ID NO: 20020 - DNA, 30 bp, unidentified
  source 1..30: mol_type = unassigned DNA; note = methanogen bacteria
acagtcatggcaaatgtgggattggttgca

SEQ ID NO: 20021 - DNA, 48 bp, unidentified
  source 1..48: mol_type = unassigned DNA; note = methanogen bacteria
ttatgcgtattttcactaagcaatccctcagacgttcctgccgtgatg

SEQ ID NO: 20022 - DNA, 30 bp, unidentified
  source 1..30: mol_type = unassigned DNA; note = methanogen bacteria
tttttaattggtgcgagcaatcttgcacca

SEQ ID NO: 20023 - DNA, 57 bp, unidentified
  source 1..57: mol_type = unassigned DNA; note = methanogen bacteria
aatattgcacagttcttatgcatttcccaacctggcctggcttcagatgttaaaagt

SEQ ID NO: 20024 - DNA, 48 bp, unidentified
  source 1..48: mol_type = unassigned DNA; note = methanogen bacteria
ctgttcctgtatagtgttaaaaatcctgcggatgttcctgttgtattg

SEQ ID NO: 20025 - DNA, 33 bp, unidentified
  source 1..33: mol_type = unassigned DNA; note = methanogen bacteria
tttttgctcggtgcagccaacctgtcagcaatt

SEQ ID NO: 20026 - DNA, 57 bp, unidentified
  source 1..57: mol_type = unassigned DNA; note = methanogen bacteria
tcaattgcccagtttttatgtgcttcacagcccgaattgattccggatgtcactagc

SEQ ID NO: 20027 - DNA, 48 bp, unidentified
  source 1..48: mol_type = unassigned DNA; note = methanogen bacteria
ttgatgttgtacagcgttaaggacccggcttatgttcctgttgtctta

SEQ ID NO: 20028 - DNA, 36 bp, unidentified
  source 1..36: mol_type = unassigned DNA; note = methanogen bacteria
tttttaattggggcaggcaatatatctgtaattcaa

SEQ ID NO: 20029 - DNA, 57 bp, unidentified
  source 1..57: mol_type = unassigned DNA; note = methanogen bacteria
aatattgttcaatttttatgtatatcacaaccggagttaattcctgatgttagtcag

SEQ ID NO: 20030 - DNA, 48 bp, unidentified
  source 1..48: mol_type = unassigned DNA; note = methanogen bacteria
ttatatatgtatagtgttaaaaatccggcttacattccagttgtttta

SEQ ID NO: 20031 - DNA, 42 bp, unidentified
  source 1..42: mol_type = unassigned DNA; note = methanogen bacteria
acaactgcaatatttgatgggataaactctggaaatatgaat

SEQ ID NO: 20032 - DNA, 39 bp, unidentified
  source 1..39: mol_type = unassigned DNA; note = methanogen bacteria
agcgcatttttaggtcctatgaacctatccgtcattcaa

SEQ ID NO: 20033 - DNA, 63 bp, unidentified
  source 1..63: mol_type = unassigned DNA; note = methanogen bacteria
ccggatagctttctgcagatattatgtaattccagtcagttaaggccattggtttatgaatat

SEQ ID NO: 20034 - DNA, 48 bp, unidentified
  source 1..48: mol_type = unassigned DNA; note = methanogen bacteria
ttatgtatcttttcagtaagcaatccatcagatgttccgactgtattg

SEQ ID NO: 20035 - DNA, 177 bp, unidentified
  source 1..177: mol_type = unassigned DNA; note = methanogen bacteria
cctgcctacaacgaagaggatactgtagccaaagttgtcgaagtggttagggaggtatcctttgttgatgagatactcgttgtcaatgatggttcatccgataacaccgaagccgaagcgattaatgccggagctcgtgtaattacccatgatatcaacaagggtaagggtgaagca

SEQ ID NO: 20036 - DNA, 99 bp, unidentified
  source 1..99: mol_type = unassigned DNA; note = methanogen bacteria
attcataacctgacttccaaaaaggttgaggctatgattatgccgattctcgaaggcaaaaccgatattaccaaaaccaaattcgcacgtgctcgtgga

SEQ ID NO: 20037 - DNA, 117 bp, unidentified
  source 1..117: mol_type = unassigned DNA; note = methanogen bacteria
ggaatttcaataactgaagtggacatcggtgcaatcgagcatgacatgtcccctcttgaggatttgaacttaatggccaatgaggttgttaggacaatcatgagccgtgcaaataaa

SEQ ID NO: 20038 - DNA, 33 bp, unidentified
  source 1..33: mol_type = unassigned DNA; note = methanogen bacteria
tttctaattggtgcaggcaatatgtctgctatt

SEQ ID NO: 20039 - DNA, 60 bp, unidentified
  source 1..60: mol_type = unassigned DNA; note = methanogen bacteria
ccatctgttgttcagattctatgttccactaagcctgatttaattcctcttgcaagtcag

SEQ ID NO: 20040 - DNA, 48 bp, unidentified
  source 1..48: mol_type = unassigned DNA; note = methanogen bacteria
ttgactttatatacagtaaaaaacccctctgatgttccggttgttttg

SEQ ID NO: 20041 - DNA, 36 bp, unidentified
  source 1..36: mol_type = unassigned DNA; note = methanogen bacteria
agcgccatgctgggtccaatgaatctgtcagtcatc

SEQ ID NO: 20042 - DNA, 63 bp, unidentified
  source 1..63: mol_type = unassigned DNA; note = methanogen bacteria
ccagatagctacctgcatatactatccaattcacctgatctaagaccgctgatattcgaatac

SEQ ID NO: 20043 - DNA, 30 bp, unidentified
  source 1..30: mol_type = unassigned DNA; note = methanogen bacteria
ggagttttcacaaatgttgggctggttgca

SEQ ID NO: 20044 - DNA, 48 bp, unidentified
  source 1..48: mol_type = unassigned DNA; note = methanogen bacteria
ttatacgtcttctcagtaagcaatccttcacacatccctacagtaatg

SEQ ID NO: 20045 - DNA, 36 bp, unidentified
  source 1..36: mol_type = unassigned DNA; note = methanogen bacteria
agcgcactgttgggtcctatgaatctgtcagtcatt

SEQ ID NO: 20046 - DNA, 63 bp, unidentified
  source 1..63: mol_type = unassigned DNA; note = methanogen bacteria
ccgaatagcttccttgagatattatgcaattcaagccagttaagaccgttggtttatgaatat

SEQ ID NO: 20047 - DNA, 30 bp, unidentified
  source 1..30: mol_type = unassigned DNA; note = methanogen bacteria
cttggagttatggcgaatgtggggttggtt

SEQ ID NO: 20048 - DNA, 48 bp, unidentified
  source 1..48: mol_type = unassigned DNA; note = methanogen bacteria
ttatgcgtattctctgtaagcgatccgtcacagattccttccgtgatg

SEQ ID NO: 20049 - DNA, 42 bp, unidentified
  source 1..42: mol_type = unassigned DNA; note = methanogen bacteria
gaccaatgtcctgccggagatgacaatgctgtcagattcggt

SEQ ID NO: 20050 - DNA, 90 bp, unidentified
  source 1..90: mol_type = unassigned DNA; note = methanogen bacteria
tgcgctgacggcttgaacattttctctactattgttcaggctttccttggaattgcaggccaggttatctcttccatggcagatccatgg

SEQ ID NO: 20051 - DNA, 48 bp, unidentified
  source 1..48: mol_type = unassigned DNA; note = methanogen bacteria
aaggatggatttgcttcaatcggcatgaatgttggtagttttggtatt

SEQ ID NO: 20052 - DNA, 105 bp, unidentified
  source 1..105: mol_type = unassigned DNA; note = methanogen bacteria
ggttataccactattctggatggtagcgaccaggctctcattaccttgatgaaaacatctccattgtcattcaatggtatttttgaggcattgtcccagtctgac

SEQ ID NO: 20053 - DNA, 60 bp, unidentified
  source 1..60: mol_type = unassigned DNA; note = methanogen bacteria
ggagaagttggaacagcagactaccttgtaggagttctcaaggaagccattccaatgttc

SEQ ID NO: 20054 - DNA, 33 bp, unidentified
  source 1..33: mol_type = unassigned DNA; note = methanogen bacteria
gcatgggctatcagtcctgacatgggctttgca

SEQ ID NO: 20055 - DNA, 33 bp, unidentified
  source 1..33: mol_type = unassigned DNA; note = methanogen bacteria
ttcttacttggtgcaagcaaccttgcaccgatt

SEQ ID NO: 20056 - DNA, 57 bp, unidentified
  source 1..57: mol_type = unassigned DNA; note = methanogen bacteria
aatattgcacatttcttatgtctctcccagcctgaattggtgtttgatgttagcagt

SEQ ID NO: 20057 - DNA, 48 bp, unidentified
  source 1..48: mol_type = unassigned DNA; note = methanogen bacteria
ttgttcttgtatagtgtcaaaaatccggctgatgttcctgttgtattg

SEQ ID NO: 20058 - DNA, 36 bp, unidentified
  source 1..36: mol_type = unassigned DNA; note = methanogen bacteria
tttttgcttggtgcaggaaacctttcagcaattcag

SEQ ID NO: 20059 - DNA, 60 bp, unidentified
  source 1..60: mol_type = unassigned DNA; note = methanogen bacteria
catcccattgcagagttcctatgttcatcacagccggctttgattcctgacgttacccag

SEQ ID NO: 20060 - DNA, 57 bp, unidentified
  source 1..57: mol_type = unassigned DNA; note = methanogen bacteria
caatcactgctaatgttatacagcgttaaaaatcctgaacatgttcctgttgtttta

SEQ ID NO: 20061 - DNA, 33 bp, unidentified
  source 1..33: mol_type = unassigned DNA; note = methanogen bacteria
tctgcaaaacctaaaaaatatcagaaggtttca

SEQ ID NO: 20062 - DNA, 75 bp, unidentified
  source 1..75: mol_type = unassigned DNA; note = methanogen bacteria
ccggcatacaatgaggaagaaactgttgccaaagtcgttgaagtaatcaaaaaggtgtcgtttgtagatgaaatc

SEQ ID NO: 20063 - DNA, 90 bp, unidentified
  source 1..90: mol_type = unassigned DNA; note = methanogen bacteria
aatgacggatcaagcgacaataccgaaggcgaagctttaaaggcaggcgcaaaagtaatcaaccatgaagttaacaagggaaagggtgaa

SEQ ID NO: 20064 - DNA, 99 bp, unidentified
  source 1..99: mol_type = unassigned DNA; note = methanogen bacteria
atctataacctgacttccaataaggttgaagccatgattaggcctatccttgaaggtaaaaccgatattacaaaaactaaatttgcccgtgaaagcgga

SEQ ID NO: 20065 - DNA, 90 bp, unidentified
  source 1..90: mol_type = unassigned DNA; note = methanogen bacteria
ggaatttcaattatggaagtggacattggtgcaattcagcatgacatgtctccattggccgatttgcatttgatggctaatgaggttgta

SEQ ID NO: 20066 - DNA, 48 bp, unidentified
  source 1..48: mol_type = unassigned DNA; note = methanogen bacteria
acaattatcaaccgtgcaaacaagtacggtagagtgacaatgatagat

SEQ ID NO: 20067 - DNA, 45 bp, unidentified
  source 1..45: mol_type = unassigned DNA; note = methanogen bacteria
agccggatcaccgacgcctaccttctcgaggaccacgataccgtc

SEQ ID NO: 20068 - DNA, 51 bp, unidentified
  source 1..51: mol_type = unassigned DNA; note = methanogen bacteria
atcatcttcaacgctcccaccgccgtcgagcagaaactcttgttctccgat

SEQ ID NO: 20069 - DNA, 42 bp, unidentified
  source 1..42: mol_type = unassigned DNA; note = methanogen bacteria
accaatgcaccagctggagacgataatgcagttcgtttcggt

SEQ ID NO: 20070 - DNA, 84 bp, unidentified
  source 1..84: mol_type = unassigned DNA; note = methanogen bacteria
gttaacgatttaaacattatcagttctgctatcaatgcatttttagcaatgggtactcaaattatatcttgtatggctgatcca

SEQ ID NO: 20071 - DNA, 45 bp, unidentified
  source 1..45: mol_type = unassigned DNA; note = methanogen bacteria
actcaaggtttccaatccattggaatgaatgtaagtggattcggt

SEQ ID NO: 20072 - DNA, 108 bp, unidentified
  source 1..108: mol_type = unassigned DNA; note = methanogen bacteria
ggatataccactatcttaggtggagaagatcaagctttaattaccttaatgaaaacctctccattatcattcaacggtatatttgaagcattagcagcttctgatgca

SEQ ID NO: 20073 - DNA, 57 bp, unidentified
  source 1..57: mol_type = unassigned DNA; note = methanogen bacteria
gaattaggtactgctgattacttagtaggtgtattggcaggtgcaatacctatattt

SEQ ID NO: 20074 - DNA, 33 bp, unidentified
  source 1..33: mol_type = unassigned DNA; note = methanogen bacteria
gcttgggcagttaaccctgaaatgggctttgta

SEQ ID NO: 20075 - DNA, 42 bp, unidentified
  source 1..42: mol_type = unassigned DNA; note = methanogen bacteria
acaagtgcaccaaatagtaaagacaatgcagttcgtttcgga

SEQ ID NO: 20076 - DNA, 87 bp, unidentified
  source 1..87: mol_type = unassigned DNA; note = methanogen bacteria
gttaacgacttaaacattgtaaactctgctatcaatgcatttttagcaatggattctcaaatcatcagcagtatggctgatccatgg

SEQ ID NO: 20077 - DNA, 42 bp, unidentified
  source 1..42: mol_type = unassigned DNA; note = methanogen bacteria
caaggtttccactctattggaatgaatgttagtggattcgga

SEQ ID NO: 20078 - DNA, 108 bp, unidentified
  source 1..108: mol_type = unassigned DNA; note = methanogen bacteria
ggatacaccactattttaggtggggaagacaaagctttaatcaccttaatgcatacttctccattgtcattcaatggtatatttgaagcattatctgcttccgatgca

SEQ ID NO: 20079 - DNA, 60 bp, unidentified
  source 1..60: mol_type = unassigned DNA; note = methanogen bacteria
ggtgacttaggtactgctgattacttggtaggtattctggcaggttcaataccagtattc

SEQ ID NO: 20080 - DNA, 33 bp, unidentified
  source 1..33: mol_type = unassigned DNA; note = methanogen bacteria
gcttgggcagtaaaccctgaaatgggctttgta

SEQ ID NO: 20081 - DNA, 33 bp, unidentified
  source 1..33: mol_type = unassigned DNA; note = methanogen bacteria
ttcttgattggtgcaagcaatcttgcaccgatt

SEQ ID NO: 20082 - DNA, 57 bp, unidentified
  source 1..57: mol_type = unassigned DNA; note = methanogen bacteria
aatattgcacatttcttatgcatgtcccagccggaattgactgcggatgtcagcagt

SEQ ID NO: 20083 - DNA, 48 bp, unidentified
  source 1..48: mol_type = unassigned DNA; note = methanogen bacteria
ttgttcctgtatagcgtcaaaaatccggctgatgttcctgttgtattg

SEQ ID NO: 20084 - DNA, 72 bp, unidentified
  source 1..72: mol_type = unassigned DNA; note = methanogen bacteria
gcatacaatgaagagcctacagtaggtcaggtcgtatcaacagcacttaaattgtcctatgtggacgaagtc

SEQ ID NO: 20085 - DNA, 96 bp, unidentified
  source 1..96: mol_type = unassigned DNA; note = methanogen bacteria
ggttcaacagatagaactactgaagaggctgaaaaggctggagctactgttatcggacacataaccaaccaaggcaaaggttccgctatcaaaaca

SEQ ID NO: 20086 - DNA, 93 bp, unidentified
  source 1..93: mol_type = unassigned DNA; note = methanogen bacteria
tcaaatctgtccaccaacaagatagataccatgatccgtccgattctcgaaggcgaggcggatattacaaaaaccaaattcgcccgtgaaagc

SEQ ID NO: 20087 - DNA, 114 bp, unidentified
  source 1..114: mol_type = unassigned DNA; note = methanogen bacteria
catggaatcaagatagtcgaagtcgacatcggcgagataaatcatgacatgtctcctctagccaatttgaataagatggctaatgaagtggtcaggacaatcattgaccgcgct

SEQ ID NO: 20088 - DNA, 180 bp, unidentified
  source 1..180: mol_type = unassigned DNA; note = methanogen bacteria
caaaatattatacatcaaattggaataggatatccttatatagacatatatttgtatttaattgaggcatcaagattatttggtatagaaactggaggatataaatatataaactttttacccccttttataccttttttaacttcactcttatttagaataggttttgtatcagaattt

SEQ ID NO: 20089 - DNA, 159 bp, unidentified
  source 1..159: mol_type = unassigned DNA; note = methanogen bacteria
aataaaattcctctaggatttataaatcaagcacaagaaatatcatcaagggcatctcttaaattcgctacaagtgagattaatttaatgggaaatgatttatttttttatattaaaattatagaaaaaatcattagctttccattatggaaaatagaa

SEQ ID NO: 20090 - DNA, 300 bp, unidentified
  source 1..300: mol_type = unassigned DNA; note = methanogen bacteria
tatattaaccatttgaaatatgataaaaatgcagctgatgaaaaacttgctgtaaattacctaaaagataaagaaggagttattatgtctgataggggccctgtttatacattttatttaaaaaaagaggttaaattaataagagatatggatcagaagaatcttgataaagagcttttagataatcatgcagaatatgttaccacattccatcaagttaatttaacccattactcccccattaaagaatttggaaatataactatttataaaaaaaataatgaaaacgagtttgtccaa

SEQ ID NO: 20091 - DNA, 39 bp, unidentified
  source 1..39: mol_type = unassigned DNA; note = methanogen bacteria
agtaacttaataggagctatggcattatccgctattcaa

SEQ ID NO: 20092 - DNA, 60 bp, unidentified
  source 1..60: mol_type = unassigned DNA; note = methanogen bacteria
cctcagattgtacctatattatgttcttctccacaggttcaacctcttgtttaccaatat

SEQ ID NO: 20093 - DNA, 51 bp, unidentified
  source 1..51: mol_type = unassigned DNA; note = methanogen bacteria
ttaacatttttattccatgttaaaaatcctgctgatatgccaattgttttg

SEQ ID NO: 20094 - DNA, 30 bp, unidentified
  source 1..30: mol_type = unassigned DNA; note = methanogen bacteria
ctttttatgggatccacatttttatctgtt

SEQ ID NO: 20095 - DNA, 54 bp, unidentified
  source 1..54: mol_type = unassigned DNA; note = methanogen bacteria
atgattatccagtttctgtgtcattctccaaatatgaaacagtatttcgcacaa

SEQ ID NO: 20096 - DNA, 45 bp, unidentified
  source 1..45: mol_type = unassigned DNA; note = methanogen bacteria
ttcatattcaatatgcacaatcctgagcatgttccgattgcaatg

SEQ ID NO: 20097 - DNA, 33 bp, unidentified
  source 1..33: mol_type = unassigned DNA; note = methanogen bacteria
tttgtacttacatcatctgctttaagtattttt

SEQ ID NO: 20098 - DNA, 57 bp, unidentified
  source 1..57: mol_type = unassigned DNA; note = methanogen bacteria
ggtcctgtattgaataattttttgacagccgatttaattcaacctactcaaaccttt

SEQ ID NO: 20099 - DNA, 57 bp, unidentified
  source 1..57: mol_type = unassigned DNA; note = methanogen bacteria
gaaattatattgacacttttcagtgttaaagatcccctacaggcggaatatatttca

SEQ ID NO: 20100 - DNA, 33 bp, unidentified
  source 1..33: mol_type = unassigned DNA; note = methanogen bacteria
tttattttaggttctaattatttggctgttgtt

SEQ ID NO: 20101 - DNA, 60 bp, unidentified
  source 1..60: mol_type = unassigned DNA; note = methanogen bacteria
gatttttttacccagatgttatgtcaggcacctgaattacagcctttggttaatcagtat

SEQ ID NO: 20102 - DNA, 51 bp, unidentified
  source 1..51: mol_type = unassigned DNA; note = methanogen bacteria
tcattgtttatatttaatgtaaatgatcctaatactattcctgttgtattg

SEQ ID NO: 20103 - DNA, 30 bp, unidentified
  source 1..30: mol_type = unassigned DNA; note = methanogen bacteria
tctaaaataaatgctgatgcattttatgca

SEQ ID NO: 20104 - DNA, 45 bp, unidentified
  source 1..45: mol_type = unassigned DNA; note = methanogen bacteria
ttgttttattctgttagtgaaaaatcatatgttttgatttttgac

SEQ ID NO: 20105 - DNA, 30 bp, unidentified
  source 1..30: mol_type = unassigned DNA; note = methanogen bacteria
ctgttaatatctatgaacaccatcggtccg

SEQ ID NO: 20106 - DNA, 45 bp, unidentified
  source 1..45: mol_type = unassigned DNA; note = methanogen bacteria
atatttggtttgttcggaattacagaaatgcaaactgaaatattt

SEQ ID NO: 20107 - DNA, 33 bp, unidentified
  source 1..33: mol_type = unassigned DNA; note = methanogen bacteria
agtgaaaaacctaaaaaatatcaaaaggtttca

SEQ ID NO: 20108 - DNA, 75 bp, unidentified
  source 1..75: mol_type = unassigned DNA; note = methanogen bacteria
gcatacaacgaggaggataccgttgccaaagtagttgaagtggtaaaaaaggcatccttcgtagatgaaatcatt

SEQ ID NO: 20109 - DNA, 90 bp, unidentified
  source 1..90: mol_type = unassigned DNA; note = methanogen bacteria
gatggatcaagtgacaataccattgaagaagctgaaaatgcaggcgcaatagtgatatctcatgaaaccaataaaggtaagggtgaagca

SEQ ID NO: 20110 - DNA, 96 bp, unidentified
  source 1..96: mol_type = unassigned DNA; note = methanogen bacteria
tataatttaacctctaaaaaagttgaggctatgattaggccaattcttgaaggtaaagctgaaattacaaaaaccaaatttgcccgtgaaagtgga

SEQ ID NO: 20111 - DNA, 138 bp, unidentified
  source 1..138: mol_type = unassigned DNA; note = methanogen bacteria
atatctattctggaagtggacatcggtgcaatacagcatgatatgtctccgcttgctgatttgaatctgatggcaaacgaagttgtaagaacaattattaaccgtgctaacaagtacggaagagtaacaatgattgat

SEQ ID NO: 20112 - DNA, 105 bp, unidentified
  source 1..105: mol_type = unassigned DNA; note = methanogen bacteria
ttcagatatttagatgagttgattcacagtggagtaaaagagattgttttagactcggatattgtattggatcctgatgaagaatcacaatatttgaatggaatt

SEQ ID NO: 20113 - DNA, 150 bp, unidentified
  source 1..150: mol_type = unassigned DNA; note = methanogen bacteria
ggaaacggacatgcaatagatgcacagggtttaacacgaatattttactgcacaggaaaaaatattattattaaaaacattattttaaaaaatggatttacaaaagaaaatggtggagcaatacacaacaatgagggtgagttaacaata

SEQ ID NO: 20114 - DNA, 30 bp, unidentified
  source 1..30: mol_type = unassigned DNA; note = methanogen bacteria
tcatctgaatataggggatattctgtcagg

SEQ ID NO: 20115 - DNA, 111 bp, unidentified
  source 1..111: mol_type = unassigned DNA; note = methanogen bacteria
gctcgtttccttgataagtctggaaataatttgtccggtgttgtggatattgtcattggtggtattaaacatgaggttttggtgcgtgatggtgttggctgtgttgatgtc

SEQ ID NO: 20116 - DNA, 168 bp, unidentified
  source 1..168: mol_type = unassigned DNA; note = methanogen bacteria
gttgagatttgtaatcttgatactggtgaggttaaaaatcagactgtcagtgttttggaaaggatttctggtaatgaggatttgactgggtattatggctctcctttggtttataaggttcgcgtattggatgaccacggtgatattgcactcaaagttcctgttact

SEQ ID NO: 20117 - DNA, 45 bp, unidentified
  source 1..45: mol_type = unassigned DNA; note = methanogen bacteria
gatttaattgtgtattatggttctcaggtggtttataaggttcgt

SEQ ID NO: 20118 - DNA, 48 bp, unidentified
  source 1..48: mol_type = unassigned DNA; note = methanogen bacteria
gcttttgagactggtggtgaaacttactctaggttgactgatgatgaa

SEQ ID NO: 20119 - DNA, 57 bp, unidentified
  source 1..57: mol_type = unassigned DNA; note = methanogen bacteria
gtttatgagatttcatctgaatataggggatattctgtcaggaacaatctgactgtc

SEQ ID NO: 20120 - DNA, 156 bp, unidentified
  source 1..156: mol_type = unassigned DNA; note = methanogen bacteria
ttcaatgctcatttccttgataaatccggaaacaatctgtccggcaaggctttaattcgcattggagacaattattatgatgttctggtgtctgaaggtattggccgtgtcaatgtccttttgaatcctggcagctatttggttcaggtctcaaat

SEQ ID NO: 20121 - DNA, 39 bp, unidentified
  source 1..39: mol_type = unassigned DNA; note = methanogen bacteria
ttcttcataccagattcaacattgcttgctgcaataaat

SEQ ID NO: 20122 - DNA, 60 bp, unidentified
  source 1..60: mol_type = unassigned DNA; note = methanogen bacteria
gacgagttaatcatggccctttatggtcccgcacaaactatttatatagtatttttagtg

SEQ ID NO: 20123 - DNA, 48 bp, unidentified
  source 1..48: mol_type = unassigned DNA; note = methanogen bacteria
gtatttatttttaccattgatgatccctcagaacttgaggtaatctgt

SEQ ID NO: 20124 - DNA, 78 bp, unidentified
  source 1..78: mol_type = unassigned DNA; note = methanogen bacteria
gcatataatgaggaggatactgttgcccaggtagttgaagtggtaaaaaaggtgtcgtttgtagatgagattatcgtt

SEQ ID NO: 20125 - DNA, 93 bp, unidentified
  source 1..93: mol_type = unassigned DNA; note = methanogen bacteria
aacgatggatcaagtgacaataccgttgaggaagccgaaaaagccggtgcaatcgtaattacccatgaaaccaacaaaggaaagggtgaagca

SEQ ID NO: 20126 - DNA, 99 bp, unidentified
  source 1..99: mol_type = unassigned DNA; note = methanogen bacteria
tataatttaacttcaaaaaaagttgaatcaatgatcagacctattcttgaaggcaaagccgaaattacaaaaaccaaatttgcccgtgaaagtggacgt

SEQ ID NO: 20127 - DNA, 99 bp, unidentified
  source 1..99: mol_type = unassigned DNA; note = methanogen bacteria
ttggaagtggacattggtgcgatacagcatgacatgtcccctcttgccgatttaaatctgatggcaaatgaagttgtaagaacaattatcaaccgtgcg

SEQ ID NO: 20128 - DNA, 33 bp, unidentified
  source 1..33: mol_type = unassigned DNA; note = methanogen bacteria
atgtttatgggatccatgtacttgtctgttgtt

SEQ ID NO: 20129 - DNA, 60 bp, unidentified
  source 1..60: mol_type = unassigned DNA; note = methanogen bacteria
ggccaatatgtccagttgttatgtcacaccgaccaattaaaaccctttgtcacccagtat

SEQ ID NO: 20130 - DNA, 42 bp, unidentified
  source 1..42: mol_type = unassigned DNA; note = methanogen bacteria
atatttaatgtaaacaatcctgctgatattcctacagtaatg

SEQ ID NO: 20131 - DNA, 36 bp, unidentified
  source 1..36: mol_type = unassigned DNA; note = methanogen bacteria
atgtttatgggatccatgtacttgtctgttgttcaa

SEQ ID NO: 20132 - DNA, 60 bp, unidentified
  source 1..60: mol_type = unassigned DNA; note = methanogen bacteria
ggtccatatgtccaattgttatgtcacacagaccaattaaaaccctttgtcacacagtat

SEQ ID NO: 20133 - DNA, 45 bp, unidentified
  source 1..45: mol_type = unassigned DNA; note = methanogen bacteria
ttcatattcaatgtaaataaccctgccgatattccaacaataatt

SEQ ID NO: 20134 - DNA, 108 bp, unidentified
  source 1..108: mol_type = unassigned DNA; note = methanogen bacteria
ttgaatgttggaagctatactgttcgtgtgatatttgctggaaatgataattataatggaaatgttaatgaaagcgcttttgaggttactcggtctggaactaatttc

SEQ ID NO: 20135 - DNA, 36 bp, unidentified
  source 1..36: mol_type = unassigned DNA; note = methanogen bacteria
atgttcatgggttcagtgtatttgtctgttgttcaa

SEQ ID NO: 20136 - DNA, 60 bp, unidentified
  source 1..60: mol_type = unassigned DNA; note = methanogen bacteria
aatgaatacgttaatctattatgtcattctccccaatttaagcaatttgttacccaatac

SEQ ID NO: 20137 - DNA, 45 bp, unidentified
  source 1..45: mol_type = unassigned DNA; note = methanogen bacteria
ttcatgtttaatgtaaacaatcctgcagatattcctatgataatg

SEQ ID NO: 20138 - DNA, 96 bp, unidentified
  source 1..96: mol_type = unassigned DNA; note = methanogen bacteria
aaaccacttttgaactttttcttcccggaaatttcatttgaacagcctttaagcggtcaatttgcagctcgtaaggaaattttaaagaaaattcat

SEQ ID NO: 20139 - DNA, 168 bp, unidentified
  source 1..168: mol_type = unassigned DNA; note = methanogen bacteria
attgttattgatgctgatgtattgggtatttccattatggaagttgacattggtgcaattgaacatgatatgtctcctttggctgatttaaataatatggccaatgaagttgtcagaacgattatgaaccgtgctaataagtatggtagggtaacgatgattgatgac

SEQ ID NO: 20140 - DNA, 240 bp, unidentified
  source 1..240: mol_type = unassigned DNA; note = methanogen bacteria
aagggttctgataaatcagtttccattgttattcctgcatacaatgaagaggctactgtcgctaaagtggtaagcgtagctcgcaagctatcatatgtgactgaagttatagtagttgatgatggatccactgacagaactgttgaagaggctgaaagcgctggagctactgtaataagccacataatgaatgaaggtaaaggttcagctattaaaacaggttttaaaaactctcatgga

SEQ ID NO: 20141 - DNA, 99 bp, unidentified
  source 1..99: mol_type = unassigned DNA; note = methanogen bacteria
tctaacttcacttcagaaaagatagataaaatcatcaggccgatattagaggaccagactgacattaccaaaaccaagtttgcaagggaaagcggtcgt

SEQ ID NO: 20142 - DNA, 120 bp, unidentified
  source 1..120: mol_type = unassigned DNA; note = methanogen bacteria
gttcacggaataaagattttggaagttgatattggagacattagtcatgacatgtccccacttgccgatttaaacaagatggctaatgaagttgtcagaacaattattgacagagctgtg

SEQ ID NO: 20143 - DNA, 48 bp, unidentified
  source 1..48: mol_type = unassigned DNA; note = methanogen bacteria
gcaagcattgtaaacataggaattcaaaacactgattttgcctatatc

SEQ ID NO: 20144 - DNA, 36 bp, unidentified
  source 1..36: mol_type = unassigned DNA; note = methanogen bacteria
tatgacgctcttgcaggtaatatactgacaggagac

SEQ ID NO: 20145 - DNA, 42 bp, unidentified
  source 1..42: mol_type = unassigned DNA; note = methanogen bacteria
tcccaaacacctgcaaattcaaataattctatcagattcgga

SEQ ID NO: 20146 - DNA, 81 bp, unidentified
  source 1..81: mol_type = unassigned DNA; note = methanogen bacteria
aatgatttgaatatcttctccacaatcaccaatgcattcataaaattaagttcccaggtcatctccagtatggcagaccca

SEQ ID NO: 20147 - DNA, 45 bp, unidentified
  source 1..45: mol_type = unassigned DNA; note = methanogen bacteria
gcaggatttgaatcgatcggtataacaaatatttcagcttttgga

SEQ ID NO: 20148 - DNA, 102 bp, unidentified
  source 1..102: mol_type = unassigned DNA; note = methanogen bacteria
tacactgcaattttaaacggaagcgatcaggctctcattaccttaatgaaaacatctccattatcatttgatggaatttttcaagcgctttcagcttcaaat

SEQ ID NO: 20149 - DNA, 57 bp, unidentified
  source 1..57: mol_type = unassigned DNA; note = methanogen bacteria
gaagtcggtacttcagactatctggtaggtattttaagcggaactcttcctgcattt

SEQ ID NO: 20150 - DNA, 36 bp, unidentified
  source 1..36: mol_type = unassigned DNA; note = methanogen bacteria
gcatgggcagtaagctcaggagacatgggctttacc

SEQ ID NO: 20151 - DNA, 45 bp, unidentified
  source 1..45: mol_type = unassigned DNA; note = methanogen bacteria
gctcaagttgtaggtgtggcacgtaagcttgattatgtggatgaa

SEQ ID NO: 20152 - DNA, 78 bp, unidentified
  source 1..78: mol_type = unassigned DNA; note = methanogen bacteria
tctagcgatagaacttcagaagaggctaaaggtgcaggggctattgtaataaagcattctgtcaatgaaggtaaaggt

SEQ ID NO: 20153 - DNA, 78 bp, unidentified
  source 1..78: mol_type = unassigned DNA; note = methanogen bacteria
tcagataagatcgataagatcataaggcctattttggaagataagacagatatcaccaaaactaagtttgcaagagaa

SEQ ID NO: 20154 - DNA, 45 bp, unidentified
  source 1..45: mol_type = unassigned DNA; note = methanogen bacteria
atttcttcagcacctgccggtgacgacaatgctgtaagattcggc

SEQ ID NO: 20155 - DNA, 87 bp, unidentified
  source 1..87: mol_type = unassigned DNA; note = methanogen bacteria
gtaaatgatttaaacatcgtttccactgcagtaaatgcattccttcagttaggaactgacatcatcggatgtatggctgacccatgg

SEQ ID NO: 20156 - DNA, 48 bp, unidentified
  source 1..48: mol_type = unassigned DNA; note = methanogen bacteria
gctgctggttttgagtctgtaggcgtaaccaatgtaaccggttttgga

SEQ ID NO: 20157 - DNA, 108 bp, unidentified
  source 1..108: mol_type = unassigned DNA; note = methanogen bacteria
ggatacaccactatattaggtggagaagatcaggctttgattaccttgatgaaaacagctcctttaagctttgacggtattttccaggcattatctcaatctgatgct

SEQ ID NO: 20158 - DNA, 60 bp, unidentified
  source 1..60: mol_type = unassigned DNA; note = methanogen bacteria
ggaaatatcggaaccgctgattatctggtaggtgtcttaagtaatgcacttcctgcattc

SEQ ID NO: 20159 - DNA, 36 bp, unidentified
  source 1..36: mol_type = unassigned DNA; note = methanogen bacteria
ggttgggcgatcagttcaggagacatgtcctttaca

SEQ ID NO: 20160 - DNA, 75 bp, unidentified
  source 1..75: mol_type = unassigned DNA; note = methanogen bacteria
gcatacaatgaagaggagacagtggccaaggtcattgatgtggtaaagaaagtaacgtttgtcgatgagataatc

SEQ ID NO: 20161 - DNA, 93 bp, unidentified
  source 1..93: mol_type = unassigned DNA; note = methanogen bacteria
aacgacggatcctcggacaataccgaatcggaagcccttaaagcaggagcaagagtgataactcatgaagtcaacaagggtaagggtgaagca

SEQ ID NO: 20162 - DNA, 93 bp, unidentified
  source 1..93: mol_type = unassigned DNA; note = methanogen bacteria
aatctaacttcccgcaaggtggaatcaataatcaggcctatactggaaggcaaaactgacattacaaaaaccaagttttcacgtgccagcgga

SEQ ID NO: 20163 - DNA, 105 bp, unidentified
  source 1..105: mol_type = unassigned DNA; note = methanogen bacteria
tcaataatggaagtggacatcggtgcaatcgagcatgacatgtctccattatcagatttaaacctaatggccaatgaggtcgtaagaaccatcataggccgtgcc

SEQ ID NO: 20164 - DNA, 30 bp, unidentified
  source 1..30: mol_type = unassigned DNA; note = methanogen bacteria
gatattggaccaagattatttgatattcca

SEQ ID NO: 20165 - DNA, 129 bp, unidentified
  source 1..129: mol_type = unassigned DNA; note = methanogen bacteria
ggttctggtggaatatatccaattcaaattatgaataatgtctcacaaatattttatccatttttgcctatgacttatgctattaacataattcgtgaagcacaattaggtgtagtttggggaaattac

SEQ ID NO: 20166 - DNA, 57 bp, unidentified
  source 1..57: mol_type = unassigned DNA; note = methanogen bacteria
tctaacttcatagaagaagataatccagaaagacttaatatgataagacaattagaa

SEQ ID NO: 20167 - DNA, 45 bp, unidentified
  source 1..45: mol_type = unassigned DNA; note = methanogen bacteria
tttgatagaaatacgaagcatataagtggtatacttccacttatg

SEQ ID NO: 20168 - DNA, 33 bp, unidentified
  source 1..33: mol_type = unassigned DNA; note = methanogen bacteria
gtgaagattttgtattggttatttgtacttctt

SEQ ID NO: 20169 - DNA, 258 bp, unidentified
  source 1..258: mol_type = unassigned DNA; note = methanogen bacteria
aaaaattcaaaaccaaaatatcaaaaggttacagttattattcctgcttttaatgaagaggatagtgtagcgaaggttgttggagttattcgaaaagtttcatttattgatgaagttattgttgtcaatgacggatcaactgataatactgaatccgaagcatctaaggctggagcaattgttataaatcatgaaacgaataagggaaaaggtgaagcattatacactggctatagacaatccgactgtgatattata

SEQ ID NO: 20170 - DNA, 111 bp, unidentified
  source 1..111: mol_type = unassigned DNA; note = methanogen bacteria
gatgcagatatccataatttaacttcaaaaaaagtagaagctataataaagccgattctatatggaaaaacagatattaccaaaacaaagtttgcacgtgaaagcgggcgt

SEQ ID NO: 20171 - DNA, 30 bp, unidentified
  source 1..30: mol_type = unassigned DNA; note = methanogen bacteria
ccggaaatttcatttgaacagccgctgagc

SEQ ID NO: 20172 - DNA, 144 bp, unidentified
  source 1..144: mol_type = unassigned DNA; note = methanogen bacteria
ttgggtatttctattttggaagttgatattggagcaattgagcatgatatgtctccattgtccgatttgaatatgatggccaatgaagttgtcagaacaattatgaaccgtgccaataaatacggcagggtaactatgattgat

SEQ ID NO: 20173 - DNA, 54 bp, unidentified
  source 1..54: mol_type = unassigned DNA; note = methanogen bacteria
gcagatatcgtaaacataggtattcaaaacaccaatttcgatataattacaagt

SEQ ID NO: 20174 - DNA, 36 bp, unidentified
  source 1..36: mol_type = unassigned DNA; note = methanogen bacteria
tttgatgcattgaatggttcactgttaacaggagac

SEQ ID NO: 20175 - DNA, 36 bp, unidentified
  source 1..36: mol_type = unassigned DNA; note = methanogen bacteria
aaatcatcaaaaccaaaatatcaaaaggtttctgtt

SEQ ID NO: 20176 - DNA, 81 bp, unidentified
  source 1..81: mol_type = unassigned DNA; note = methanogen bacteria
cctgcttttaatgaggaaagtacggtagctagggttgtagaagtaattaaacaagtttcatgtgtagatgaaattattgtt

SEQ ID NO: 20177 - DNA, 93 bp, unidentified
  source 1..93: mol_type = unassigned DNA; note = methanogen bacteria
aatgatggatcgtcagataatacagctcaggaggctacaaaagcaggtgctattgtaatttctcatgatgttaataaaggtaagggtgaagct

SEQ ID NO: 20178 - DNA, 99 bp, unidentified
  source 1..99: mol_type = unassigned DNA; note = methanogen bacteria
attcacaatttaacttctaaaaaagtttcagcaatgattaaaccaattttggatggaaaaacagatattactaagactaaatttgcacgtgaaagcgga

SEQ ID NO: 20179 - DNA, 108 bp, unidentified
  source 1..108: mol_type = unassigned DNA; note = methanogen bacteria
atttctattatggaagtcgacatcggtgcaattgaacatgacatgtctcctttatctgatttacacatgatggctaatgaagttgtaagaactattatgagtcgtgcc

SEQ ID NO: 20180 - DNA, 39 bp, unidentified
  source 1..39: mol_type = unassigned DNA; note = methanogen bacteria
gttgcaacattcattgggtctaatgggctggctgcattg

SEQ ID NO: 20181 - DNA, 60 bp, unidentified
  source 1..60: mol_type = unassigned DNA; note = methanogen bacteria
gatacattaatttcaatattgcatccggtagctgatgcagttcaatatgtaaaagcatat

SEQ ID NO: 20182 - DNA, 63 bp, unidentified
  source 1..63: mol_type = unassigned DNA; note = methanogen bacteria
gatggaatcttgatgttttttaaccttgcaaatgtgcataatgatgcattggttgaaaatgct

SEQ ID NO: 20183 - DNA, 54 bp, unidentified
  source 1..54: mol_type = unassigned DNA; note = methanogen bacteria
gccaatatagttgatataggtattcaaaatgcagatataaactatattacagat

SEQ ID NO: 20184 - DNA, 36 bp, unidentified
  source 1..36: mol_type = unassigned DNA; note = methanogen bacteria
tatgatgcaattgcaggcaatattttaactggggac

SEQ ID NO: 20185 - DNA, 54 bp, unidentified
  source 1..54: mol_type = unassigned DNA; note = methanogen bacteria
gccagtatagttaataatgggattcagaagactaatataaatctaatctatcat

SEQ ID NO: 20186 - DNA, 36 bp, unidentified
  source 1..36: mol_type = unassigned DNA; note = methanogen bacteria
tacacagcactgaacggaacactgctaacaggtgat

SEQ ID NO: 20187 - DNA, 54 bp, unidentified
  source 1..54: mol_type = unassigned DNA; note = methanogen bacteria
gcaagcattgttgatattggtattcaaaatgcagatttgaattacattacaaat

SEQ ID NO: 20188 - DNA, 36 bp, unidentified
  source 1..36: mol_type = unassigned DNA; note = methanogen bacteria
tacgatgccatttcaggaaatattttgacaggagat

SEQ ID NO: 20189 - DNA, 33 bp, unidentified
  source 1..33: mol_type = unassigned DNA; note = methanogen bacteria
ctgcttatcggaggctcacagctatcttcatta

SEQ ID NO: 20190 - DNA, 57 bp, unidentified
  source 1..57: mol_type = unassigned DNA; note = methanogen bacteria
gataatatactgcacttgttgcatgccccatccgaaatattttaccaggcgaagagt

SEQ ID NO: 20191 - DNA, 51 bp, unidentified
  source 1..51: mol_type = unassigned DNA; note = methanogen bacteria
ttgattaaactattcaacattacaaatccccaatacatccaaatcgttacc

SEQ ID NO: 20192 - DNA, 48 bp, unidentified
  source 1..48: mol_type = unassigned DNA; note = methanogen bacteria
gcagagattgttaatgtcggcattcaaaatacaaatttccagttcatc

SEQ ID NO: 20193 - DNA, 36 bp, unidentified
  source 1..36: mol_type = unassigned DNA; note = methanogen bacteria
tatgacgcgttgagcggaggattgctgacaggagac

SEQ ID NO: 20194 - DNA, 54 bp, unidentified
  source 1..54: mol_type = unassigned DNA; note = methanogen bacteria
tccaaaattgttgatataggcattgcaaatggtgatatagcatacatttacagt

SEQ ID NO: 20195 - DNA, 33 bp, unidentified
  source 1..33: mol_type = unassigned DNA; note = methanogen bacteria
tatcaaatagaatcaggaacaatcctaacaggt

SEQ ID NO: 20196 - DNA, 48 bp, unidentified
  source 1..48: mol_type = unassigned DNA; note = methanogen bacteria
gcggccattgtaaacattggtatacaaaacactgattttcaattcatc

SEQ ID NO: 20197 - DNA, 39 bp, unidentified
  source 1..39: mol_type = unassigned DNA; note = methanogen bacteria
gcatatgatgcaataaacaacggaattttaacaggagac

SEQ ID NO: 20198 - DNA, 48 bp, unidentified
  source 1..48: mol_type = unassigned DNA; note = methanogen bacteria
gcagatatcgtaaacataggtatccagaacacggatttccagtttatc

SEQ ID NO: 20199 - DNA, 39 bp, unidentified
  source 1..39: mol_type = unassigned DNA; note = methanogen bacteria
gcgtatgatgcattaagcggaggcgttcttacaggagac

SEQ ID NO: 20200 - DNA, 48 bp, unidentified
  source 1..48: mol_type = unassigned DNA; note = methanogen bacteria
gcaggcattgtggatataggaattcagaatgctgattttcaatacatc

SEQ ID NO: 20201 - DNA, 39 bp, unidentified
  source 1..39: mol_type = unassigned DNA; note = methanogen bacteria
gcattcggcgcacttgacggctcacttcttacaggccag

SEQ ID NO: 20202 - DNA, 51 bp, unidentified
  source 1..51: mol_type = unassigned DNA; note = methanogen bacteria
gcagatattgtaaatataggtatccaaaatactgattttaactttataata

SEQ ID NO: 20203 - DNA, 36 bp, unidentified
  source 1..36: mol_type = unassigned DNA; note = methanogen bacteria
tatgatgcgatgaacggttcaatcctaaccggagac

SEQ ID NO: 20204 - DNA, 48 bp, unidentified
  source 1..48: mol_type = unassigned DNA; note = methanogen bacteria
gcagacattgtggatataggcatccagaacaccaatttccagttcatc

SEQ ID NO: 20205 - DNA, 39 bp, unidentified
  source 1..39: mol_type = unassigned DNA; note = methanogen bacteria
gcctatgacgctatgagcggaggaatccttacaggagac

SEQ ID NO: 20206 - DNA, 51 bp, unidentified
  source 1..51: mol_type = unassigned DNA; note = methanogen bacteria
gcaaatattgtaaatacaggtattcaaaacaccgattttaattatattgca

SEQ ID NO: 20207 - DNA, 36 bp, unidentified
  source 1..36: mol_type = unassigned DNA; note = methanogen bacteria
tatgatgcaataagcgggtcaatccttaccggagac

SEQ ID NO: 20208 - DNA, 180 bp, unidentified
  source 1..180: mol_type = unassigned DNA; note = methanogen bacteria
gaaaacatcatacatcaaagaggaataggaactcattataaagatgtatattgttatttaattgaatcattaagattagcaggtatacaaattggaggatataagtttgtaaactattttcctccgttcataccctttttaacatcccttttgtttagaataggttttgtatcagaatat

SEQ ID NO: 20209 - DNA, 144 bp, unidentified
  source 1..144: mol_type = unassigned DNA; note = methanogen bacteria
aataaaattcctctaggatttataaatcaagcacaagaaatatcatcaagggcatctcttaaattcgctactagtgagagtaatttaatgggaaatgatttatttttttattttaaaattattccacatatcattacctatcag

SEQ ID NO: 20210 - DNA, 297 bp, unidentified
  source 1..297: mol_type = unassigned DNA; note = methanogen bacteria
tatattgacagtttaaaagatgataaaaatgtcattgatgaaaagaatgctgcaaattggataaaagataaagatggaattatcatgtctgatagaggtccggcttataccttttatttaaaaaaagagattaaacatgtaaaaggtattaagcaggagagacatcttgatgaaaaacttttagataatgatgcagattattttataggcataaatccagttaatttaacttattactcgccaataaaagaatttggaaacgtaacagtttatcaaagaaatgatgaaatctatact

SEQ ID NO: 20211 - DNA, 48 bp, unidentified
  source 1..48: mol_type = unassigned DNA; note = methanogen bacteria
gcagatatcgtcaatataggcatccagaacaccaatttccaattcatc

SEQ ID NO: 20212 - DNA, 39 bp, unidentified
  source 1..39: mol_type = unassigned DNA; note = methanogen bacteria
gcatatgacgccatacacaatggagttttaaccggtgac

SEQ ID NO: 20213 - DNA, 72 bp, unidentified
  source 1..72: mol_type = unassigned DNA; note = methanogen bacteria
gcatataatgaggaagctactgttgctcaagttgtaagcgtagcacgcaagcttgactatgtagatgaggtg

SEQ ID NO: 20214 - DNA, 99 bp, unidentified
  source 1..99: mol_type = unassigned DNA; note = methanogen bacteria
gatgggtccagtgataggactgtggaagaggcagaaggagcaggagctactgtaatcagccatattaccaatgaaggtaagggttcagctatcaagaca

SEQ ID NO: 20215 - DNA, 93 bp, unidentified
  source 1..93: mol_type = unassigned DNA; note = methanogen bacteria
aatttcacatccggcaaaatagataagatcatcaggccgattctagagggtaagacagatataacaaaaaccaaatttgcaagggaaagcggt

SEQ ID NO: 20216 - DNA, 63 bp, unidentified
  source 1..63: mol_type = unassigned DNA; note = methanogen bacteria
catggtatcagtattttggaagttgacatcggtgacatttctcacgacatgtctcctcttgcc

SEQ ID NO: 20217 - DNA, 48 bp, unidentified
  source 1..48: mol_type = unassigned DNA; note = methanogen bacteria
gctgacattgtcaatattggtatacagaatacaaatttccagttcatc

SEQ ID NO: 20218 - DNA, 39 bp, unidentified
  source 1..39: mol_type = unassigned DNA; note = methanogen bacteria
gcatatgacgccataaacaatggtgtcctgacaggagac

SEQ ID NO: 20219 - DNA, 48 bp, unidentified
  source 1..48: mol_type = unassigned DNA; note = methanogen bacteria
gcgtatattgtaaatatcgggatacaaaatactgattttcagtttatt

SEQ ID NO: 20220 - DNA, 39 bp, unidentified
  source 1..39: mol_type = unassigned DNA; note = methanogen bacteria
gcatatgatgccataagtggaggactccttaccggagac

SEQ ID NO: 20221 - DNA, 54 bp, unidentified
  source 1..54: mol_type = unassigned DNA; note = methanogen bacteria
tccaacattgttgatataggtgttgcaaatggtgatatagcatacatttacagt

SEQ ID NO: 20222 - DNA, 36 bp, unidentified
  source 1..36: mol_type = unassigned DNA; note = methanogen bacteria
tttcaaatagaatcaggaacaattctaacaggcgac

SEQ ID NO: 20223 - DNA, 51 bp, unidentified
  source 1..51: mol_type = unassigned DNA; note = methanogen bacteria
ggcaagataatcaacgaaggcattcagtacggtgatatgaatgcaatatac

SEQ ID NO: 20224 - DNA, 39 bp, unidentified
  source 1..39: mol_type = unassigned DNA; note = methanogen bacteria
tcatatgaagtttccggcggacttatcatgactggaaat

SEQ ID NO: 20225 - DNA, 30 bp, unidentified
  source 1..30: mol_type = unassigned DNA; note = methanogen bacteria
aacaatgtgtcgtttgtagatgaaatcatc

SEQ ID NO: 20226 - DNA, 81 bp, unidentified
  source 1..81: mol_type = unassigned DNA; note = methanogen bacteria
tcctctgacaacacagaagaggaagctattaaagcaggcgctatcgttatcaatcatgaatcaaataagggtaaaggggaa

SEQ ID NO: 20227 - DNA, 84 bp, unidentified
  source 1..84: mol_type = unassigned DNA; note = methanogen bacteria
acatctaaaaaagttgaatcaatgatcaagccaattttacttggagaagctgaaatcactaaaactaaattttcacgtgccagt

SEQ ID NO: 20228 - DNA, 81 bp, unidentified
  source 1..81: mol_type = unassigned DNA; note = methanogen bacteria
tcatctgataagaccgaagaggaagctattaatgctggagctatagttattaatcatgaaaccaataaaggtaagggtgaa

SEQ ID NO: 20229 - DNA, 84 bp, unidentified
  source 1..84: mol_type = unassigned DNA; note = methanogen bacteria
ttaacttccaaaaaagtagaatcaatgattatgccaattttgcttggagatgctgagattactaaaactaaattttcacgtgtt

SEQ ID NO: 20230 - DNA, 75 bp, unidentified
  source 1..75: mol_type = unassigned DNA; note = methanogen bacteria
tcttctgataaaactgaagaggaagctattaaggctggagctatagttattaatcatgaaactaataaaggtaag

SEQ ID NO: 20231 - DNA, 72 bp, unidentified
  source 1..72: mol_type = unassigned DNA; note = methanogen bacteria
acatccaaaaaagtcgaatcaatgattatgccgattttgcttggaaatgctgagattactaaaactaaattt

SEQ ID NO: 20232 - DNA, 171 bp, unidentified
  source 1..171: mol_type = unassigned DNA; note = methanogen bacteria
aatatcgatggaaaagcaggagtttattatgtaagggatgtttttttctatttaaataatgctctattttatgcaggctatgatactggatttaatgccactaaaggtttgtctccatttattccaatgctgacctcattatttttccgaatgggattcatatatgatttt

SEQ ID NO: 20233 - DNA, 201 bp, unidentified
  source 1..201: mol_type = unassigned DNA; note = methanogen bacteria
tatcttgatatcagtctgtttttcgtatctcaaggacaggggattacacaagctcaaaacacctcaaatatgctacattacttcacatactatgtcaataatattccgatttatttgggcagtgctaaattcattccttattcattgaaaccaggtgtattcttaatatctgaaatggagtggattgggggtaagccttct

SEQ ID NO: 20234 - DNA, 39 bp, unidentified
  source 1..39: mol_type = unassigned DNA; note = methanogen bacteria
aaaactcaaaaacctaagaaatatcagaaggtttcagtt

SEQ ID NO: 20235 - DNA, 180 bp, unidentified
  source 1..180: mol_type = unassigned DNA; note = methanogen bacteria
cccgcatacaatgaggaagaaactgttgccaaggtagttaaggtcataaagaaagtgtcgtttgtagatgaaatcattgttgttaatgatggttcaagcgacaatactgctgaagaagccattaatgctggcgctcgcgttattacccatgaagttaataagggtaagggtgaagcttta

SEQ ID NO: 20236 - DNA, 111 bp, unidentified
  source 1..111: mol_type = unassigned DNA; note = methanogen bacteria
gatgcggatatttacaatttgacttcagctaaggtagaagctatgattaggcctattttagagggaaaaaccgatatcaccaagactaaattttcacgtgcaagtggcagg

SEQ ID NO: 20237 - DNA, 30 bp, unidentified
  source 1..30: mol_type = unassigned DNA; note = methanogen bacteria
ccagaaatttcattcgaacaaccgttgagc

SEQ ID NO: 20238 - DNA, 153 bp, unidentified
  source 1..153: mol_type = unassigned DNA; note = methanogen bacteria
cttggaatttcaataatggaagtcgacatcggtgcaattgaacatgacatgtctccacttttagatttaaatttgatggctaatgaggttgtcaggacaattatcggacgtgcaaacaagtacggaagagttgtcatgattgatgatattggt

SEQ ID NO: 20239 - DNA, 33 bp, unidentified
  source 1..33: mol_type = unassigned DNA; note = methanogen bacteria
ctgatgaccggtaccgacatggatatcaccgga

SEQ ID NO: 20240 - DNA, 30 bp, unidentified
  source 1..30: mol_type = unassigned DNA; note = methanogen bacteria
ctcatcaaaccctccgacatcatcaacaac

SEQ ID NO: 20241 - DNA, 39 bp, unidentified
  source 1..39: mol_type = unassigned DNA; note = methanogen bacteria
gacttcatcaacgcccacaccccggagcgcatcagtctc

SEQ ID NO: 20242 - DNA, 36 bp, unidentified
  source 1..36: mol_type = unassigned DNA; note = methanogen bacteria
gtgattaaagaggtgtcgtttgttgatgaaatcatt

SEQ ID NO: 20243 - DNA, 84 bp, unidentified
  source 1..84: mol_type = unassigned DNA; note = methanogen bacteria
ggatcaacagataatactgaaaatgaagctattaatgccggagctattgttatcaatcatgaaactaataagggtaagggtgaa

SEQ ID NO: 20244 - DNA, 90 bp, unidentified
  source 1..90: mol_type = unassigned DNA; note = methanogen bacteria
aatttaacttctaaaaaagttgaatctatgattatgccaattttgcttggaaaagctgaaatcactaaaactaaattttcacgtgctagt

SEQ ID NO: 20245 - DNA, 42 bp, unidentified
  source 1..42: mol_type = unassigned DNA; note = methanogen bacteria
gggcctgagatcgcaagatcgctggacggtcttgagctgtac

SEQ ID NO: 20246 - DNA, 33 bp, unidentified
  source 1..33: mol_type = unassigned DNA; note = methanogen bacteria
gcgatctacatcctcggcctcagcaccctcgag

SEQ ID NO: 20247 - DNA, 30 bp, unidentified
  source 1..30: mol_type = unassigned DNA; note = methanogen bacteria
cagctcaccatcgggtctgaactgacgtat

SEQ ID NO: 20248 - DNA, 171 bp, unidentified
  source 1..171: mol_type = unassigned DNA; note = methanogen bacteria
aacaagatcgacgaggagctcagagaccatgtcagcaatacggtctacggaatgatctcccacgataccggctgccttcaggacctcttcaatgcgatttccagtccgactgtggagaacctgcccataattaatgccgcaaatggcatcctcgaagcgttcgccaattcc

SEQ ID NO: 20249 - DNA, 36 bp, unidentified
  source 1..36: mol_type = unassigned DNA; note = methanogen bacteria
acccaaaagcccaaaaaataccagaaggtttcagtg

SEQ ID NO: 20250 - DNA, 180 bp, unidentified
  source 1..180: mol_type = unassigned DNA; note = methanogen bacteria
cccgcctacaacgaggaggataccgtagctaccgttgttgaagtagttaaacaggcagcatttgtcgatgaaataatcgttgtcaacgacgggtcatccgacaataccgaggccgaagcggccaaggcaggcgcccgcgtaatcacccataagaccaacaagggtaagggtgaagcgttg

SEQ ID NO: 20251 - DNA, 99 bp, unidentified
  source 1..99: mol_type = unassigned DNA; note = methanogen bacteria
attcataatctgacatccaagaaggtcgaggcgatgataatacctatcttggaaggaaaaactgacattaccaaaaccaaattcgcacgtgcccgtgga

SEQ ID NO: 20252 - DNA, 30 bp, unidentified
  source 1..30: mol_type = unassigned DNA; note = methanogen bacteria
ccggaaatcacttttgaacagccgttgagc

SEQ ID NO: 20253 - DNA, 135 bp, unidentified
  source 1..135: mol_type = unassigned DNA; note = methanogen bacteria
ttgggaatttcaataaccgaagtcgacatcggcgcaatcgagcatgacatgtccacattggaagatttgaatctaatggccaatgaggttgtaaggacaatcatgagccgtgcaaacaagtatggccgtgtcatc

SEQ ID NO: 20254 - DNA, 75 bp, unidentified
  source 1..75: mol_type = unassigned DNA; note = methanogen bacteria
gcttataacgaagaggaaactgttgctaccgttattgaagtagttaagaaggtgtcgtttgtagatgagataatc

SEQ ID NO: 20255 - DNA, 93 bp, unidentified
  source 1..93: mol_type = unassigned DNA; note = methanogen bacteria
aatgacggatcatccgacaacaccgaatcagaagctattaaggcgggagcccgtgttatcaatcatgcagtcaacaggggtaagggtgaagct

SEQ ID NO: 20256 - DNA, 96 bp, unidentified
  source 1..96: mol_type = unassigned DNA; note = methanogen bacteria
tacaatttaacctcacataaggttgaatctatcatcaagcctatattggatggtgaaaccgacattacaaaaaccaagttttcacgtgctagtggg

SEQ ID NO: 20257 - DNA, 90 bp, unidentified
  source 1..90: mol_type = unassigned DNA; note = methanogen bacteria
ggtatttcaataaaagaggttgatatcggagcaatcgagcatgacatgtctccattgtctgatttgaatctgatggcaaatgaagttgtt

SEQ ID NO: 20258 - DNA, 42 bp, unidentified
  source 1..42: mol_type = unassigned DNA; note = methanogen bacteria
gggcctgagatcgcaaggtcgctggacggtcttgagctgtac

SEQ ID NO: 20259 - DNA, 30 bp, unidentified
  source 1..30: mol_type = unassigned DNA; note = methanogen bacteria
gccatatacatcctgggcctcactacgctc

SEQ ID NO: 20260 - DNA, 171 bp, unidentified
  source 1..171: mol_type = unassigned DNA; note = methanogen bacteria
aacaagatcaacgacgagctcagagagcatgtcagcagcgaggtctacgggatgatcgagcatgataccggctgcctccaggatctcttcaacgccgcctccaacccgactcttgaaaacatgcctataatcaatgctgcgaacgacatcctcctgtccttcgccaactcc

SEQ ID NO: 20261 - DNA, 180 bp, unidentified
  source 1..180: mol_type = unassigned DNA; note = methanogen bacteria
cccgcctataacgaagaagataccgtagctaccgttgtggatgtggtgaagaaggtatcctttgttgacgaaataatagttgtcaatgacggatcatctgacaataccgaagctgaagcaatgaaggcaggggctcgcgtgattactcatgtgaccaacaagggtaaaggtgaagcattg

SEQ ID NO: 20262 - DNA, 102 bp, unidentified
  source 1..102: mol_type = unassigned DNA; note = methanogen bacteria
gacattcataatttaacatccaaaaaggtagaggcaatgataatgcctattcttatgggtaaaactgatattactaaaaccaaattcgcacgtgcccgtgga

SEQ ID NO: 20263 - DNA, 117 bp, unidentified
  source 1..117: mol_type = unassigned DNA; note = methanogen bacteria
ggaatttcaataactgaggtcgacattggtgcaatcgagcatgacatgtccccacttgaggatttgaacttgatggcaaatgaagttgtaaggacaatcatgagccgggctaacaag

SEQ ID NO: 20264 - DNA, 261 bp, unidentified
  source 1..261: mol_type = unassigned DNA; note = methanogen bacteria
ataaaaacccaaaaacctaaaaagtaccagaaggtttctgttatcatccccgcctataacgaagaagataccgtagccactgttgtaggagtggtcaaggaggtatcctttgttgatgaaataatcgtagtcaatgacggttcatccgacaataccgaagccgaagcgattaaagctggagctcgcgtgattacccatagggtcaacaagggtaaaggtgaagcattgttcacaggttataggaaagcggaatgtgatgtt

SEQ ID NO: 20265 - DNA, 114 bp, unidentified
  source 1..114: mol_type = unassigned DNA; note = methanogen bacteria
gatgcggatattcataatctgacatccaaaaaggttgaggcaatgataatgcctatccttgaaggcaaaaccgatattaccaaaaccaaattcgcacgtgctcgtggacgtgta

SEQ ID NO: 20266 - DNA, 57 bp, unidentified
  source 1..57: mol_type = unassigned DNA; note = methanogen bacteria
ttcttccctgaaattacttttgaacaacctttgagcggtcagtttgcagcacgtaag

SEQ ID NO: 20267 - DNA, 156 bp, unidentified
  source 1..156: mol_type = unassigned DNA; note = methanogen bacteria
gacgctgacgtattgggaatttcgataactgaagtggatattggtgcaatcgagcatgacatgtccccgcttggggatttgaacttaatggctaatgaagtagtaaggacaatcatgagccgggcaaataagtatggccgtgttataatgattgat

SEQ ID NO: 20268 - DNA, 72 bp, unidentified
  source 1..72: mol_type = unassigned DNA; note = methanogen bacteria
gcttacaatgaagaaaatacagtagctattgtcgttgatgtaataaaaaaagtttcatgtgttgatgaaata

SEQ ID NO: 20269 - DNA, 87 bp, unidentified
  source 1..87: mol_type = unassigned DNA; note = methanogen bacteria
ggatcatctgataatactgctcaagaagctatgaaagcaggtgctatagtaatttcacatgaagttaataaaggtaagggtgaggct

SEQ ID NO: 20270 - DNA, 96 bp, unidentified
  source 1..96: mol_type = unassigned DNA; note = methanogen bacteria
cataatttaactactaataaagttgaatctatgattaaacctattttaactgggaaggctgagattactaagactaagtttgcccgtgaaagtggt

SEQ ID NO: 20271 - DNA, 96 bp, unidentified
  source 1..96: mol_type = unassigned DNA; note = methanogen bacteria
gaaattgacattggggcaattgaacatgacatgtctcctttagctgatttacatttgatggctaatgaagttgtaagaactattatgaatcgtgct

SEQ ID NO: 20272 - DNA, 39 bp, unidentified
  source 1..39: mol_type = unassigned DNA; note = methanogen bacteria
gtatcaacatatatcggacacaatgcacaggcggcttta

SEQ ID NO: 20273 - DNA, 57 bp, unidentified
  source 1..57: mol_type = unassigned DNA; note = methanogen bacteria
gccttaattaatctattgcatccaactgccggagcactaccttatgtaaacgcatat

SEQ ID NO: 20274 - DNA, 30 bp, unidentified
  source 1..30: mol_type = unassigned DNA; note = methanogen bacteria
agtggagttttaggagagctaggtttggac

SEQ ID NO: 20275 - DNA, 63 bp, unidentified
  source 1..63: mol_type = unassigned DNA; note = methanogen bacteria
gatggattattaatatttttcaaacttcaccaaatgcctaatgattcattagtggaaaatgcg

SEQ ID NO: 20276 - DNA, 36 bp, unidentified
  source 1..36: mol_type = unassigned DNA; note = methanogen bacteria
tcagcgcttttaggtgtagaggcactttcaggtttg

SEQ ID NO: 20277 - DNA, 57 bp, unidentified
  source 1..57: mol_type = unassigned DNA; note = methanogen bacteria
aatgtaataatcggattcctatcaaattctccgaatattaatcagtatgctttagat

SEQ ID NO: 20278 - DNA, 30 bp, unidentified
  source 1..30: mol_type = unassigned DNA; note = methanogen bacteria
tacctaatgggtaatgatggactgattgaa

SEQ ID NO: 20279 - DNA, 51 bp, unidentified
  source 1..51: mol_type = unassigned DNA; note = methanogen bacteria
atactaacattatattcagtagatgcgcactatcatgcccttgtctcacat

SEQ ID NO: 20280 - DNA, 45 bp, unidentified
  source 1..45: mol_type = unassigned DNA; note = methanogen bacteria
tcaagttctgatagggtagtcgacaatgttttatcaggagaaaca

SEQ ID NO: 20281 - DNA, 177 bp, unidentified
  source 1..177: mol_type = unassigned DNA; note = methanogen bacteria
caaaattccactcattacattttaggcaacagttatagggatgtatttctctatctgattgaagcattgagaatgtcaggtgtggaaatcgaaggctatgcctatgttaattatttgccgccatttgttccttttttaacatctcttttgttcaggatgggatttgtatctctggca

SEQ ID NO: 20282 - DNA, 147 bp, unidentified
  source 1..147: mol_type = unassigned DNA; note = methanogen bacteria
attaacaatattcctctgggatttttaaatcaggcttccgaagtttcatctgaaagctccctaacaaccactcatgcaggtaaactggttgtcaatgatttgtttttctatatcaagggcattatctatgatatctcttctacaaga

SEQ ID NO: 20283 - DNA, 285 bp, unidentified
  source 1..285: mol_type = unassigned DNA; note = methanogen bacteria
aattatattgttggtgttcatgataatccggtagctgtcaatgaacatgatgcttccggttggcttgacggtaaagatgggattatgttttcaaacagaggtccggtttacacatggtatctgcaaaaagaagttaaatatgccagaaatgttggcaatgatactttgttaagtcgggaactgcatgacggaaatgccacttattacatttccacgggcaaagtaaatctgacaggttaccgtatggttaaagaatttggggatgttaaaatatatgaatcaaaa

SEQ ID NO: 20284 - DNA, 45 bp, unidentified
  source 1..45: mol_type = unassigned DNA; note = methanogen bacteria
tcaagttctgacagggttgtggataatgttttatccggtgaaact

SEQ ID NO: 20285 - DNA, 57 bp, unidentified
  source 1..57: mol_type = unassigned DNA; note = methanogen bacteria
atggacaatttagttataaacttagctgactttttaaaagctaactacaattcatat

SEQ ID NO: 20286 - DNA, 156 bp, unidentified
  source 1..156: mol_type = unassigned DNA; note = methanogen bacteria
tttattatgcttaaccctgatgaagggtttcattttaatgttggattaagtttattgcaaggttctaatttatatgttgatactgatacagcaacgacaggacttgttaattcatttatacttttgatttggttcaaaatttttggcccatcaatc

SEQ ID NO: 20287 - DNA, 123 bp, unidentified
  source 1..123: mol_type = unassigned DNA; note = methanogen bacteria
gcaggaagtctagaatggttttttagattatatttttataatgctttcagtcatatatcaagttcatttcaagattatttgttgaatatgtgtgccttgataaaatatatgtcgaaatttatg

SEQ ID NO: 20288 - DNA, 30 bp, unidentified
  source 1..30: mol_type = unassigned DNA; note = methanogen bacteria
gtaattaaaatggtatcttttgtagatgaa

SEQ ID NO: 20289 - DNA, 75 bp, unidentified
  source 1..75: mol_type = unassigned DNA; note = methanogen bacteria
tctagtgataatactgaatttgaagctattaaagctggagctcaggttattaatcatgatactaataaaggaaaa

SEQ ID NO: 20290 - DNA, 84 bp, unidentified
  source 1..84: mol_type = unassigned DNA; note = methanogen bacteria
ttaacttctaaaaaagttgaagcaatgattaaacctattttaaatggaaaaactgatattactaaaactaagtttgcccgtgaa

SEQ ID NO: 20291 - DNA, 33 bp, unidentified
  source 1..33: mol_type = unassigned DNA; note = methanogen bacteria
actcaaaaacctaaaaaatatcagaaggtttca

SEQ ID NO: 20292 - DNA, 204 bp, unidentified
  source 1..204: mol_type = unassigned DNA; note = methanogen bacteria
cccgcttacaatgaggaggatactgtatccaaagtagttgaagtggttaaaaaggtatcgtttgtagatgaaatcatcgttgttaatgacggatcaaccgataatactgaagccgaagctataaaggccggagccaaagttattaatcacgaaacaaataggggtaaaggtcaagcattatatacaggttatcaaaaggcagaa

SEQ ID NO: 20293 - DNA, 108 bp, unidentified
  source 1..108: mol_type = unassigned DNA; note = methanogen bacteria
gcggatatttataatttaacttcaaaaaaagtggaagctattattcacccgattttgattggaaaaacagatattaccaaaactaaatttgcccgtgaaagtggacgt

SEQ ID NO: 20294 - DNA, 30 bp, unidentified
  source 1..30: mol_type = unassigned DNA; note = methanogen bacteria
ccggaaatttcatttgaacagccgttaagt

SEQ ID NO: 20295 - DNA, 147 bp, unidentified
  source 1..147: mol_type = unassigned DNA; note = methanogen bacteria
cttggaatatccatcatggaagtggacattggtgcgatacaacatgacatgtcccctctttcagatttaaatatgatggctaatgaggttgtaagaacaattataagccgtgctaataagtatggtagagttgtaatgattgatgac

SEQ ID NO: 20296 - DNA, 33 bp, unidentified
  source 1..33: mol_type = unassigned DNA; note = methanogen bacteria
gcaaattttattggacacaatggacaagctgct

SEQ ID NO: 20297 - DNA, 63 bp, unidentified
  source 1..63: mol_type = unassigned DNA; note = methanogen bacteria
gatgcattaattgcaatattgcatccgccgtctcctgatttgataccctatgtaaaatcattt

SEQ ID NO: 20298 - DNA, 57 bp, unidentified
  source 1..57: mol_type = unassigned DNA; note = methanogen bacteria
atattattaatattctttaagcttcaccagatgcctaatgattcacttgtggaaact

SEQ ID NO: 20299 - DNA, 54 bp, unidentified
  source 1..54: mol_type = unassigned DNA; note = methanogen bacteria
tccggcctctccgaggagcctgctgtaaaggacttcctcggcggtatcgagaat

SEQ ID NO: 20300 - DNA, 66 bp, unidentified
  source 1..66: mol_type = unassigned DNA; note = methanogen bacteria
ggtatggccaccggaggggacgtcaccttcagcagcatattctccggagcgttctcctcagccgcc

SEQ ID NO: 20301 - DNA, 75 bp, unidentified
  source 1..75: mol_type = unassigned DNA; note = methanogen bacteria
gcctacaatgaggaggagactgtagccaaggtcatcgaagtggtcaagaaggtatcgtttgtagatgaaatcatc

SEQ ID NO: 20302 - DNA, 93 bp, unidentified
  source 1..93: mol_type = unassigned DNA; note = methanogen bacteria
aatgacggatcatccgacaacactgaaaaggaggccaccgaagccggcgctatagtaatcaaccacgaaacaaacaagggtaagggtgaagcg

SEQ ID NO: 20303 - DNA, 96 bp, unidentified
  source 1..96: mol_type = unassigned DNA; note = methanogen bacteria
ttcaatttaacttccgctaaagtggaagcgatgattaagcctatcttggatgggaaaaccgatattacaaagaccaaattttcacgtgccagtgga

SEQ ID NO: 20304 - DNA, 132 bp, unidentified
  source 1..132: mol_type = unassigned DNA; note = methanogen bacteria
ggtatttcaataactgaagtcgacatcggtgccattgagcatgacatgtctccattgtctgacctgaacctgatggcaaatgaggtcgtaaggacaatcataggccgtgcgaacaagtacggcagggttgtg

SEQ ID NO: 20305 - DNA, 36 bp, unidentified
  source 1..36: mol_type = unassigned DNA; note = methanogen bacteria
gcaacatatgttagtgcagatgcacaagcagcatta

SEQ ID NO: 20306 - DNA, 60 bp, unidentified
  source 1..60: mol_type = unassigned DNA; note = methanogen bacteria
gattatgtaatggcaatattgcattgtcgtgctgatttagcaccgctcgccaaatcatat

SEQ ID NO: 20307 - DNA, 30 bp, unidentified
  source 1..30: mol_type = unassigned DNA; note = methanogen bacteria
gaagcagttatgggtaaacctggtttaaat

SEQ ID NO: 20308 - DNA, 60 bp, unidentified
  source 1..60: mol_type = unassigned DNA; note = methanogen bacteria
gatacaattttaatgttctttagccttacagataatgcagctgcagatcaaataagaaat

SEQ ID NO: 20309 - DNA, 33 bp, unidentified
  source 1..33: mol_type = unassigned DNA; note = methanogen bacteria
gcttcttttattggagaaagtgcagtagctgca

SEQ ID NO: 20310 - DNA, 57 bp, unidentified
  source 1..57: mol_type = unassigned DNA; note = methanogen bacteria
actataattaactttttgaatcctcctgctgatgctttgccatatctcaatgcgtat

SEQ ID NO: 20311 - DNA, 33 bp, unidentified
  source 1..33: mol_type = unassigned DNA; note = methanogen bacteria
accatatatatggggtctgttggtttggtttca

SEQ ID NO: 20312 - DNA, 57 bp, unidentified
  source 1..57: mol_type = unassigned DNA; note = methanogen bacteria
gatatattcctgatgttatacaaccttcatacatctccacatgtagaaacattcaga

SEQ ID NO: 20313 - DNA, 39 bp, unidentified
  source 1..39: mol_type = unassigned DNA; note = methanogen bacteria
attttagttaaaaatgagactattcctgggtttatacct

SEQ ID NO: 20314 - DNA, 39 bp, unidentified
  source 1..39: mol_type = unassigned DNA; note = methanogen bacteria
attttagttaaaaataatgctcttgatgagtttgtgcct

SEQ ID NO: 20315 - DNA, 132 bp, unidentified; identical to SEQ ID NO: 19380
  source 1..132: mol_type = unassigned DNA; note = methanogen bacteria

SEQ ID NO: 20316 - DNA, 36 bp, unidentified
  source 1..36: mol_type = unassigned DNA; note = methanogen bacteria
tcttccttaattggtgagagtgcattggcggcaatt

SEQ ID NO: 20317 - DNA, 54 bp, unidentified
  source 1..54: mol_type = unassigned DNA; note = methanogen bacteria
ttaattaacattttacatcctccggctggtgttttgccttatgttcagcaatat

SEQ ID NO: 20318 - DNA, 33 bp, unidentified
  source 1..33: mol_type = unassigned DNA; note = methanogen bacteria
gtttacttaggggaaataggattggtttcatac

SEQ ID NO: 20319 - DNA, 54 bp, unidentified
  source 1..54: mol_type = unassigned DNA; note = methanogen bacteria
ttcctgatgctttataagctgaatctatctcctaatgttgaaacattcaggttc

SEQ ID NO: 20320 - DNA, 36 bp, unidentified
  source 1..36: mol_type = unassigned DNA; note = methanogen bacteria
tcaacattcatcggacacaatgcacaagcggctttg

SEQ ID NO: 20321 - DNA, 57 bp, unidentified
  source 1..57: mol_type = unassigned DNA; note = methanogen bacteria
gccttagttagtctattgcatccaactgctggatcactaccttatgtaaatgcatat

SEQ ID NO: 20322 - DNA, 30 bp, unidentified
  source 1..30: mol_type = unassigned DNA; note = methanogen bacteria
agtggcgttttaggagaactgggtttggat

SEQ ID NO: 20323 - DNA, 63 bp, unidentified
  source 1..63: mol_type = unassigned DNA; note = methanogen bacteria
gatggattattgatgtttttcaaacttcatcaaatgcctaatgacggattggtggaaaatgcg

SEQ ID NO: 20324 - DNA, 36 bp, unidentified
  source 1..36: mol_type = unassigned DNA; note = methanogen bacteria
gtatcaacattcatagggcacaatgcacaagcggct

SEQ ID NO: 20325 - DNA, 60 bp, unidentified
  source 1..60: mol_type = unassigned DNA; note = methanogen bacteria
gattccttaataaatctattgcatcctactgcaggagcactaccttatgtaaatgcatat

SEQ ID NO: 20326 - DNA, 30 bp, unidentified
  source 1..30: mol_type = unassigned DNA; note = methanogen bacteria
agtggagtcttaggagagttgggtttggac

SEQ ID NO: 20327 - DNA, 63 bp, unidentified
  source 1..63: mol_type = unassigned DNA; note = methanogen bacteria
gatggattattaatctttttcaaacttcatcaaatgcctaatgacggattggtggaaaatgcg

SEQ ID NO: 20328 - DNA, 33 bp, unidentified
  source 1..33: mol_type = unassigned DNA; note = methanogen bacteria
ggggcatatattggtaaggatgcagttgctgca

SEQ ID NO: 20329 - DNA, 57 bp, unidentified
  source 1..57: mol_type = unassigned DNA; note = methanogen bacteria
cctttatctaactttttaggcgcttctaaagctacaaaacctcttgtattggaatat

SEQ ID NO: 20330 - DNA, 30 bp, unidentified
  source 1..30: mol_type = unassigned DNA; note = methanogen bacteria
aaagcaactttaggtgacactggattaact

SEQ ID NO: 20331 - DNA, 60 bp, unidentified
  source 1..60: mol_type = unassigned DNA; note = methanogen bacteria
gaaggatttttgaccctttatggtcttcagaatgtggatattaccggatttatagtaaat

SEQ ID NO: 20332 - DNA, 36 bp, unidentified
  source 1..36: mol_type = unassigned DNA; note = methanogen bacteria
tcaacattcatcggacacaatgcacaagcagcttta

SEQ ID NO: 20333 - DNA, 60 bp, unidentified
  source 1..60: mol_type = unassigned DNA; note = methanogen bacteria
gatgccttaattggtatattgcatccaacttctggagcactaccttatgtaaacgcgtat

SEQ ID NO: 20334 - DNA, 30 bp, unidentified
  source 1..30: mol_type = unassigned DNA; note = methanogen bacteria
ggtggagtcttaggagaactaggtttggac

SEQ ID NO: 20335 - DNA, 63 bp, unidentified
  source 1..63: mol_type = unassigned DNA; note = methanogen bacteria
gatggattattgatatttttcaaacttcatcaaatgcctaatgacggattggtggaaaatgcg

SEQ ID NO: 20336 - DNA, 33 bp, unidentified
  source 1..33: mol_type = unassigned DNA; note = methanogen bacteria
gcaacattcatcggacacaatggacaggcggct

SEQ ID NO: 20337 - DNA, 60 bp, unidentified
  source 1..60: mol_type = unassigned DNA; note = methanogen bacteria
gatgcggtaattggcctattgcatccaactgccgacgcagtaccttatgtgaaatcatat

SEQ ID NO: 20338 - DNA, 30 bp, unidentified
  source 1..30: mol_type = unassigned DNA; note = methanogen bacteria
ggtggagttttaggagagttgggtttggat

SEQ ID NO: 20339 - DNA, 60 bp, unidentified
  source 1..60: mol_type = unassigned DNA; note = methanogen bacteria
gatgggctattgatatttttcaacctcagccaaatgcctaatgacagtttggtagagaat

SEQ ID NO: 20340 - DNA, 123 bp, unidentified
  source 1..123: mol_type = unassigned DNA; note = methanogen bacteria
gttctcggaggagttactgaggcaaatacagcattaactcaaatggctcacctttatcctgcagatgcgattgctgaaggaggtaccggatggaccagctatcctgcatttggaactccattc

SEQ ID NO: 20341 - DNA, 102 bp, unidentified
  source 1..102: mol_type = unassigned DNA; note = methanogen bacteria
aatgtttacttctatcagaatttcggccagatagctattgactatgttggcggaaacatggattcaattattccgacatttatttcaactgctcttcctgaa

SEQ ID NO: 20342 - DNA, 90 bp, unidentified
  source 1..90: mol_type = unassigned DNA; note = methanogen bacteria
tacaagaaaactgcaacaggtcttggaatctgccagttcctgttcggccagccaatgcttatcaacacaatgccttggtatgcgatggat

SEQ ID NO: 20343 - DNA, 36 bp, unidentified
  source 1..36: mol_type = unassigned DNA; note = methanogen bacteria
gcattgtttattggatctgaggcgatggctgcatta

SEQ ID NO: 20344 - DNA, 60 bp, unidentified
  source 1..60: mol_type = unassigned DNA; note = methanogen bacteria
gatgctttaatttcaattttgtactctccagtttctgtaattccatatgtaaaatcttat

SEQ ID NO: 20345 - DNA, 60 bp, unidentified
  source 1..60: mol_type = unassigned DNA; note = methanogen bacteria
gatggaatattgatgttttttaatcttgccaatatgcctaatgacgtatttgtggaaaat

SEQ ID NO: 20346 - DNA, 174 bp, unidentified
  source 1..174: mol_type = unassigned DNA; note = methanogen bacteria
aattccactcataatattcttggtcattcctatagggatgtttttttctatttaataggagcattacgtttttcaggtgttgaaattggaggatataaacatattaattatttgcctccccttattccatttttaacttctattctttttagattgggatttgtatctgaatca

SEQ ID NO: 20347 - DNA, 147 bp, unidentified
  source 1..147: mol_type = unassigned DNA; note = methanogen bacteria
atttataatattccattaggatttttaaatcaggcaggcgaagtttcctcaaaaacttccactgccgccacacacaacggcaaacttgtaggaaatgatttgtttttctatattaaaggattaacaagctatatttcttctgaacgg

SEQ ID NO: 20348 - DNA, 285 bp, unidentified
  source 1..285: mol_type = unassigned DNA; note = methanogen bacteria
gttgtgcattttgatgcgataagtgatgatagtttagtttcctgtgaaaaaaatgcgggcagctggatttcagataaggaaggtgttgttttggcagagagaggttgcgcgtatacgtggtatctgcagaaggaaatgccttccaccagagaaagtaattcggttctgcttgatgaagagcttcttgaaaacaatgcaacatggtatattggattggaagatgttaatttaacccattattcaaaagttaaggaatttggtaaagtttccatttatcaaagaatc

SEQ ID NO: 20349 - DNA, 33 bp, unidentified
  source 1..33: mol_type = unassigned DNA; note = methanogen bacteria
ggctcatatattggagaacttgctgttggcgct

SEQ ID NO: 20350 - DNA, 57 bp, unidentified
  source 1..57: mol_type = unassigned DNA; note = methanogen bacteria
ccgctggctacaatattgcatgcaacacctgccaacaaaccccttgtattgcagtat

SEQ ID NO: 20351 - DNA, 30 bp, unidentified
  source 1..30: mol_type = unassigned DNA; note = methanogen bacteria
gcctcaaccctaggagataccggattgacc

SEQ ID NO: 20352 - DNA, 60 bp, unidentified
  source 1..60: mol_type = unassigned DNA; note = methanogen bacteria
gacgcattccttgccctttataacttcaatcataaggatatcggagagtttgcaaaacat

SEQ ID NO: 20353 - DNA, 33 bp, unidentified
  source 1..33: mol_type = unassigned DNA; note = methanogen bacteria
ggcacctttattggtgaaaatgcagttgctgca

SEQ ID NO: 20354 - DNA, 60 bp, unidentified
  source 1..60: mol_type = unassigned DNA; note = methanogen bacteria
gatccactggctgacctattgcatgcaacaccaggtacaaaacctctcatactgcaatac

SEQ ID NO: 20355 - DNA, 30 bp, unidentified
  source 1..30: mol_type = unassigned DNA; note = methanogen bacteria
gctgcagaattaggagatatgggattgacc

SEQ ID NO: 20356 - DNA, 60 bp, unidentified
  source 1..60: mol_type = unassigned DNA; note = methanogen bacteria
gacggattcctggccctttataatttcggccataaggacattgcaggatttgcaacacat

SEQ ID NO: 20357 - DNA, 36 bp, unidentified
  source 1..36: mol_type = unassigned DNA; note = methanogen bacteria
gggtcatttataggtccgaatgcagttgcagcaatt

SEQ ID NO: 20358 - DNA, 60 bp, unidentified
  source 1..60: mol_type = unassigned DNA; note = methanogen bacteria
gatcctatcgctacacttttaggttcagatgcagttacaaaacctcttgttatgcaatat

SEQ ID NO: 20359 - DNA, 60 bp, unidentified
  source 1..60: mol_type = unassigned DNA; note = methanogen bacteria
caaggatttttagctctttacaatttcaatcatttagaaatggcaggctttgcaattcat

SEQ ID NO: 20360 - DNA, 33 bp, unidentified
  source 1..33: mol_type = unassigned DNA; note = methanogen bacteria
ggcagatttatcggtccaaatgcagttgctgca

SEQ ID NO: 20361 - DNA, 54 bp, unidentified
  source 1..54: mol_type = unassigned DNA; note = methanogen bacteria
ttggctccatatttaggtgcttcacatgctacaaaacctcttttgttacaatat

SEQ ID NO: 20362 - DNA, 60 bp, unidentified
  source 1..60: mol_type = unassigned DNA; note = methanogen bacteria
gaaggattcctggcactttacaaattcgaacatatggaaattgcaggtttcgcaataaat

SEQ ID NO: 20363 - DNA, 36 bp, unidentified
  source 1..36: mol_type = unassigned DNA; note = methanogen bacteria
gtatcaacattcatcggacacaatgctcaagcggct

SEQ ID NO: 20364 - DNA, 60 bp, unidentified
  source 1..60: mol_type = unassigned DNA; note = methanogen bacteria
gatccattaattaatatattgcatccgcctgaaggagcactaccttacgtaaacgcatat

SEQ ID NO: 20365 - DNA, 63 bp, unidentified
  source 1..63: mol_type = unassigned DNA; note = methanogen bacteria
gatggattattaatgtttttcaaacttcaccaaatgcctaatgattcattagtagaaaatgcg

SEQ ID NO: 20366 - DNA, 177 bp, unidentified
  source 1..177: mol_type = unassigned DNA; note = methanogen bacteria
caaaattccgctcattacattttaggtaacagttatagagatgtatttttatatctgattgaagcattaagaatgtctggtgtggaaatcggaggttatgcatatgttaattatctgccaccattcattccttttttaacatctctcttgttcaggatgggatttgtatctctggca

SEQ ID NO: 20367 - DNA, 147 bp, unidentified
  source 1..147: mol_type = unassigned DNA; note = methanogen bacteria
attaataatattcctttgggatttttaaatcaggcttccgaagtttcatctgaaagctccctaacaaccattcatgcaggcaaactggttgtcaatgatttatttttctatgtcaagggcattatatatgatatttcctccaccaaa

SEQ ID NO: 20368 - DNA, 285 bp, unidentified
  source 1..285: mol_type = unassigned DNA; note = methanogen bacteria
aattatattgctaatgttcacgataattcggtagccgtcaatgaacacgatgcttccggttggcttgaaggtaaggatggaatcatgttttcaaacagaggtcccgtttacacctggtatctgcaaaaagaagttaaatatgccagaaatgtaggtaatgatactttattaagtcaggaactccatgatggaaatgccacttactatatttccacgggcaaagtaaacctgaccggttacagtatggtcaaagaatttggggatgttaaaatatatgaatcaaaa

SEQ ID NO: 20369 - DNA, 36 bp, unidentified
  source 1..36: mol_type = unassigned DNA; note = methanogen bacteria
ggcagatttataggtccaaatgcagttgctgccatt

SEQ ID NO: 20370 - DNA, 57 bp, unidentified
  source 1..57: mol_type = unassigned DNA; note = methanogen bacteria
cctttgactccacgtttaggtgcttcagcagctttaaaacctcttgtgctacaatat

SEQ ID NO: 20371 - DNA, 30 bp, unidentified
  source 1..30: mol_type = unassigned DNA; note = methanogen bacteria
gctgctacattaggagacaaaggattgact

SEQ ID NO: 20372 - DNA, 60 bp, unidentified
  source 1..60: mol_type = unassigned DNA; note = methanogen bacteria
gaaggattcctgtcactttacaaatttgatcatatggaaattgcaggtttcgcaatacat

SEQ ID NO: 20373 - DNA, 45 bp, unidentified
  source 1..45: mol_type = unassigned DNA; note = methanogen bacteria
ggcgcattggacaatgttgactcgtggatcaatagcgttatcgac

SEQ ID NO: 20374 - DNA, 96 bp, unidentified
  source 1..96: mol_type = unassigned DNA; note = methanogen bacteria
aactacgaccagatctggaacgccatcaccctcatcgtcggcgacgccttcgaccctgcagactgggtcagcaccaccgattcgctgttcggcggc

SEQ ID NO: 20375 - DNA, 93 bp, unidentified
  source 1..93: mol_type = unassigned DNA; note = methanogen bacteria
ctcacctactccgacttcgatgtcctcatccaggccggctcgaccaaggccgcccttgttcaggacgtcatgggcgagagcttcctcgacgat

SEQ ID NO: 20376 - DNA, 33 bp, unidentified
  source 1..33: mol_type = unassigned DNA; note = methanogen bacteria
tccacatttattggagatgttgcattagcagca

SEQ ID NO: 20377 - DNA, 60 bp, unidentified
  source 1..60: mol_type = unassigned DNA; note = methanogen bacteria
aatggtctaataacatttctacattctaaaccagaaataacaccatatgtacaacaatat

SEQ ID NO: 20378 - DNA, 33 bp, unidentified
  source 1..33: mol_type = unassigned DNA; note = methanogen bacteria
ggaggaattttaggcgcaaatggtttagttaca

SEQ ID NO: 20379 - DNA, 60 bp, unidentified
  source 1..60: mol_type = unassigned DNA; note = methanogen bacteria
caaacatatctgacattatataatctccagaatgtttcatatctgccccttataactaat

SEQ ID NO: 20380 - DNA, 36 bp, unidentified
  source 1..36: mol_type = unassigned DNA; note = methanogen bacteria
tcctccttaattggtgagagtgcattggcagcaatt

SEQ ID NO: 20381 - DNA, 54 bp, unidentified
  source 1..54: mol_type = unassigned DNA; note = methanogen bacteria
ttaattaatattttacatcctcctgccggtgttttgccttatgttcagcaatat

SEQ ID NO: 20382 - DNA, 33 bp, unidentified
  source 1..33: mol_type = unassigned DNA; note = methanogen bacteria
acagtttacttaggtgaaataggattggtttca

SEQ ID NO: 20383 - DNA, 54 bp, unidentified
  source 1..54: mol_type = unassigned DNA; note = methanogen bacteria
ttcctgatgctttataagctgaatctttctcctaatgttgaaacattcagattc

SEQ ID NO: 20384 - DNA, 33 bp, unidentified
  source 1..33: mol_type = unassigned DNA; note = methanogen bacteria
ggccggtttataggtgaatatgcggttgctgca

SEQ ID NO: 20385 - DNA, 60 bp, unidentified
  source 1..60: mol_type = unassigned DNA; note = methanogen bacteria
gacccgatagctacactacttcatgcaacaccggctacaaaaccgctcatacttcaatat

SEQ ID NO: 20386 - DNA, 30 bp, unidentified
  source 1..30: mol_type = unassigned DNA; note = methanogen bacteria
gcttcaacattgggagatatcggactgacc

SEQ ID NO: 20387 - DNA, 60 bp, unidentified
  source 1..60: mol_type = unassigned DNA; note = methanogen bacteria
caaggattccttgccctttataacttccaccatcaggacattgtaggatttgcagagcat

SEQ ID NO: 20388 - DNA, 33 bp, unidentified
  source 1..33: mol_type = unassigned DNA; note = methanogen bacteria
ggctcatttattggtgaacttgcggttggtgct

SEQ ID NO: 20389 - DNA, 60 bp, unidentified
  source 1..60: mol_type = unassigned DNA; note = methanogen bacteria
gacccgctggctacactacttcatgcaacacctgccaacaaatcgctcgtacttgaatat

SEQ ID NO: 20390 - DNA, 30 bp, unidentified
  source 1..30: mol_type = unassigned DNA; note = methanogen bacteria
gcttcaacattaggagataccggactgacc

SEQ ID NO: 20391 - DNA, 60 bp, unidentified
  source 1..60: mol_type = unassigned DNA; note = methanogen bacteria
gacgcattccttgccctttataacttcaatcataaggacattggagaatttgccaaacat

SEQ ID NO: 20392 - DNA, 51 bp, unidentified
  source 1..51: mol_type = unassigned DNA; note = methanogen bacteria
gacggtctcagttttaccgacgacaccctcgaagcattcgaggccgtaaag

SEQ ID NO: 20393 - DNA, 33 bp, unidentified
  source 1..33: mol_type = unassigned DNA; note = methanogen bacteria
aacaagggtaacatgaacaccctcacctacgac

SEQ ID NO: 20394 - DNA, 36 bp, unidentified
  source 1..36: mol_type = unassigned DNA; note = methanogen bacteria
gggtcatttattggaccaaatgcggtttctgcaatt

SEQ ID NO: 20395 - DNA, 57 bp, unidentified
  source 1..57: mol_type = unassigned DNA; note = methanogen bacteria
gaattggctacattcttaggctctacagctgctacaaagccacttgtaatggattat

SEQ ID NO: 20396 - DNA, 30 bp, unidentified
  source 1..30: mol_type = unassigned DNA; note = methanogen bacteria
gtatcaacccttggagatatgggattggca

SEQ ID NO: 20397 - DNA, 60 bp, unidentified
  source 1..60: mol_type = unassigned DNA; note = methanogen bacteria
caaggatttttggctctttataatttcaatcgtgctgatatagctgattttgcaatcaat

SEQ ID NO: 20398 - DNA, 75 bp, unidentified
  source 1..75: mol_type = unassigned DNA; note = methanogen bacteria
gatcctattgttggccttttgtgttcggcaaatatggaagtcagctcccagttatttcctctcgtaaaggatttc

SEQ ID NO: 20399 - DNA, 51 bp, unidentified
  source 1..51: mol_type = unassigned DNA; note = methanogen bacteria
ctgttccttttcagcattaatgaccctgcatatattcctgttgcaaccgat

SEQ ID NO: 20400 - DNA, 33 bp, unidentified
  source 1..33: mol_type = unassigned DNA; note = methanogen bacteria
gctacatacataggccataatggacaggcagca

SEQ ID NO: 20401 - DNA, 63 bp, unidentified
  source 1..63: mol_type = unassigned DNA; note = methanogen bacteria
aatcagatgattaacttattgcatcctccatcagcagaagttgttccttttgttaaaaatttt

SEQ ID NO: 20402 - DNA, 57 bp, unidentified
  source 1..57: mol_type = unassigned DNA; note = methanogen bacteria
gatgcatttttaatgttctataatctgcatgcagtagacgattcaattgtggaagcc

SEQ ID NO: 20403 - DNA, 78 bp, unidentified
  source 1..78: mol_type = unassigned DNA; note = methanogen bacteria
gcttataatgaagaagatactgtagggtctgttgttgaggttataaagaaagtatcctttgtcgatgagattattgtt

SEQ ID NO: 20404 - DNA, 93 bp, unidentified
  source 1..93: mol_type = unassigned DNA; note = methanogen bacteria
aacgatggatcatctgataatacagctgaagaggctttaaaagccggggctcgagtaattacacatgaaaataataaaggtaaaggggaagca

SEQ ID NO: 20405 - DNA, 102 bp, unidentified
  source 1..102: mol_type = unassigned DNA; note = methanogen bacteria
attcataatttaacttctaaaaaagtagaagctatgattaaaccaattttgcttggaaatgctgaaattactaaaaccaaattttcaagggaaagcggacgt

SEQ ID NO: 20406 - DNA, 147 bp, unidentified
  source 1..147: mol_type = unassigned DNA; note = methanogen bacteria
ttgggtatttctattttagaagtcgacattggtgcaatcgagcatgatatgtctcctttagatgatttaaatttaatggctaatgaagttgttagaacaattatgggacgtgctaataagtatggcagggttataatgattgatgat

SEQ ID NO: 20407 - DNA, 39 bp, unidentified
  source 1..39: mol_type = unassigned DNA; note = methanogen bacteria
ctccagccgatcaaacagcacttcggcgagagcgaattc

SEQ ID NO: 20408 - DNA, 30 bp, unidentified
  source 1..30: mol_type = unassigned DNA; note = methanogen bacteria
tactacatcgccgagatgggccagccctac

SEQ ID NO: 20409 - DNA, 42 bp, unidentified
  source 1..42: mol_type = unassigned DNA; note = methanogen bacteria
ttgacttgtattaaatcagggctttatgaggatactttttca

SEQ ID NO: 20410 - DNA, 45 bp, unidentified
  source 1..45: mol_type = unassigned DNA; note = methanogen bacteria
gggaacaaggacgaccgccacaggaaggattacgacagcctgcgc

SEQ ID NO: 20411 - DNA, 42 bp, unidentified
  source 1..42: mol_type = unassigned DNA; note = methanogen bacteria
atgttcggagtggacgtcgcggccatcatcacctcggccgga

SEQ ID NO: 20412 - DNA, 54 bp, unidentified
  source 1..54: mol_type = unassigned DNA; note = methanogen bacteria
ccgttccagaagggcgacctcatacaggtgggcacggacaccacggtgtaccgc

SEQ ID NO: 20413 - DNA, 36 bp, unidentified
  source 1..36: mol_type = unassigned DNA; note = methanogen bacteria
tcgacccttgagacctccaggatcaagaacatcacc

SEQ ID NO: 20414 - DNA, 36 bp, unidentified
  source 1..36: mol_type = unassigned DNA; note = methanogen bacteria
ctgcaaccgataaaacagcatttcggtgaaagcgag

SEQ ID NO: 20415 - DNA, 30 bp, unidentified
  source 1..30: mol_type = unassigned DNA; note = methanogen bacteria
tattacatcaccgagatggaccagccttac

SEQ ID NO: 20416 - DNA, 33 bp, unidentified
  source 1..33: mol_type = unassigned DNA; note = methanogen bacteria
attatattgggttctacacaggcatccgtgatt

SEQ ID NO: 20417 - DNA, 57 bp, unidentified
  source 1..57: mol_type = unassigned DNA; note = methanogen bacteria
gataatatattaatgatgcttaatgttcctgcagaaatttttaatttaggtaaagaa

SEQ ID NO: 20418 - DNA, 48 bp, unidentified
  source 1..48: mol_type = unassigned DNA; note = methanogen bacteria
ttatccatatttaatattgttgaccccaatcatgctaaagtggttaca

SEQ ID NO: 20419 - DNA, 45 bp, unidentified
  source 1..45: mol_type = unassigned DNA; note = methanogen bacteria
tcaagttctgatagggtagtggataatgttttatccggtgaaacc

SEQ ID NO: 20420 - DNA, 33 bp, unidentified
  source 1..33: mol_type = unassigned DNA; note = methanogen bacteria
aacaatattgaagacatatttgcattaggatat

SEQ ID NO: 20421 - DNA, 72 bp, unidentified
  source 1..72: mol_type = unassigned DNA; note = methanogen bacteria
gcatacggatccgacatcgccgggatcatcggaagccccagcttcttcctctccggcttcgagggtgagtac

SEQ ID NO: 20422 - DNA, 42 bp, unidentified
  source 1..42: mol_type = unassigned DNA; note = methanogen bacteria
tggggatccggaggatggctcgctgaatggggataccacgac

SEQ ID NO: 20423 - DNA, 42 bp, unidentified
  source 1..42: mol_type = unassigned DNA; note = methanogen bacteria
ctcgccgtctccggatatgatggggccgcaagcgcggatttc

SEQ ID NO: 20424 - DNA, 51 bp, unidentified
  source 1..51: mol_type = unassigned DNA; note = methanogen bacteria
ttcgacaccggctccgggctcttctacggaggcggagcggatgcactgacc

SEQ ID NO: 20425 - DNA, 165 bp, unidentified
  source 1..165: mol_type = unassigned DNA; note = methanogen bacteria
ttggatagttctgctaaagctgcttttgatgtctttatgaagactgctcttgaggtcagtggtttgaatagttactggacgattaataaggatgttaatcttgtggctaaggtgaaggatcagtttggtgcttatattaatgagggcagtgttaatattactgtt

SEQ ID NO: 20426 - DNA, 132 bp, unidentified
  source 1..132: mol_type = unassigned DNA; note = methanogen bacteria
tatccttctaatgttgtttccaagttgattaatattaatccggttaagacggctttgtctttatctttgagtaaggacgtgctgtttgttggtgattctttatctgtaaaagttagtgttaatgctactcag

SEQ ID NO: 20427 - DNA, 102 bp, unidentified
  source 1..102: mol_type = unassigned DNA; note = methanogen bacteria
tatcttaatgatgttttaaaaggtactgttaatgttgacagtaaaggtatggcatctattgttttaaaagatctttcttatggtacctataatttaaatgct

SEQ ID NO: 20428 - DNA, 42 bp, unidentified; identical to SEQ ID NO: 20409
  source 1..42: mol_type = unassigned DNA; note = methanogen bacteria

SEQ ID NO: 20429 - DNA, 42 bp, unidentified
  source 1..42: mol_type = unassigned DNA; note = methanogen bacteria
ttataccatattaaggcggggagatataatgctactttttta

SEQ ID NO: 20430 - DNA, 177 bp, unidentified
  source 1..177: mol_type = unassigned DNA; note = methanogen bacteria
caaaactcaactcatcatattctgggaaaccagtatcaggatgtgttctactatctgattgaagcccttaaaatgtcaggcgttgagattgacggctacaggttcgtggggtacctgcctccgttcatacctttcctgacctcgatactgttcaggctgggctttgtttcatcaaca

SEQ ID NO: 20431 - DNA, 153 bp, unidentified
  source 1..153: mol_type = unassigned DNA; note = methanogen bacteria
atgattaatgaaattcctctgggtttcataaaccaggccgcttcagtatcctctcaaagcagtcgcgtaatcacttatgcgggacgtgttgttcacaatgacctgtttttctacattaattccataacatataacatttcatcaggccaagca

SEQ ID NO: 20432 - DNA, 279 bp, unidentified
  source 1..279: mol_type = unassigned DNA; note = methanogen bacteria
gtaattcatattgaggacgaccctgtccctatctgcgaacagaatgctgccaattggcttgacggaaaggagggcatagtgttttcaaacaggggttacgctcaaacatggtatcttcaaaagaatgttttcattcccggaaacattggaaacgccacactgttgaataaggaactgctcaacggcaatgcaacgtattatgtatcgtcgggaggcaccaacctcaccgactattcccttgtccaggagttcaacgccataaaaatatataaaaggaat

SEQ ID NO: 20433 - DNA, 54 bp, unidentified
  source 1..54: mol_type = unassigned DNA; note = methanogen bacteria
gccgacttcgccgaggagccctccgtgagggactacctcgcgagcatcgacaac

SEQ ID NO: 20434 - DNA, 60 bp, unidentified
  source 1..60: mol_type = unassigned DNA; note = methanogen bacteria
tacgggttcaacaccgactacggcgcgctgttcagcggaatgttccccagcgagcagatc

SEQ ID NO: 20435 - DNA, 42 bp, unidentified
  source 1..42: mol_type = unassigned DNA; note = methanogen bacteria
ttcaaggaattcttcattcctaccttattaacttcaatatcc

SEQ ID NO: 20436 - DNA, 60 bp, unidentified; identical to SEQ ID NO: 19643
  source 1..60: mol_type = unassigned DNA; note = methanogen bacteria

SEQ ID NO: 20437 - DNA, 48 bp, unidentified; identical to SEQ ID NO: 19644
  source 1..48: mol_type = unassigned DNA; note = methanogen bacteria

SEQ ID NO: 20438 - DNA, 156 bp, unidentified
  source 1..156: mol_type = unassigned DNA; note = methanogen bacteria
aagcaaataaatattggtatctattattgggatatctttttatatttaaataatggattaacttttgcaggaaatcgattaggtgatactatgtatttatcaccatttttatcatttttatattctattttttttcgtataggtttcattaatgaa

SEQ ID NO: 20439 - DNA, 186 bp, unidentified
  source 1..186: mol_type = unassigned DNA; note = methanogen bacteria
ttttatctaaatacaggtagtctttttccatttattaaacaatttgataattcagtatcaggatctgtttctactgttaatccaggatttaatttagatttaacttattatttaaaattcataccaaattatatttctagtttttcaatgcctaactacacagatattattacacctaataaatct

SEQ ID NO: 20440 - DNA, 30 bp, unidentified
  source 1..30: mol_type = unassigned DNA; note = methanogen bacteria
atggataatggtataagatttttaggttat

SEQ ID NO: 20441 - DNA, 36 bp, unidentified; identical to SEQ ID NO: 19642
  source 1..36: mol_type = unassigned DNA; note = methanogen bacteria

SEQ ID NO: 20442 - DNA, 60 bp, unidentified
  source 1..60: mol_type = unassigned DNA; note = methanogen bacteria
ggtccgattataggaattttatgtccttccgctcaaatacaaccgattgttttccaatat

SEQ ID NO: 20443 - DNA, 48 bp, unidentified; identical to SEQ ID NO: 19644
  source 1..48: mol_type = unassigned DNA; note = methanogen bacteria

SEQ ID NO: 20444 - DNA, 123 bp, unidentified
  source 1..123: mol_type = unassigned DNA; note = methanogen bacteria
gtcttaggtggtgtaaccgaagcgaacaccgctttaaccaatatggctcatttataccctgcagatgctctggctgaagggggtacaggttggacaagcttccctaaatttgcaagtccattc

SEQ ID NO: 20445 - DNA, 102 bp, unidentified
  source 1..102: mol_type = unassigned DNA; note = methanogen bacteria
aatgtatacttctatcagaactttggacagatagctattgattttgttggaggaaacatggactcaatcatcccaacattcatttcaactgcacttcctgaa

SEQ ID NO: 20446 - DNA, 90 bp, unidentified
  source 1..90: mol_type = unassigned DNA; note = methanogen bacteria
ttcaagaaaactgcaaccggattaggtatttgtaaattcattttcggtgtagatatgttaatcaatactatgccttggtataccattgac

SEQ ID NO: 20447 - DNA, 57 bp, unidentified
  source 1..57: mol_type = unassigned DNA; note = methanogen bacteria
atattgatgttggttattaaggaatatacgatagaactccaaagtctacttgaaatg

SEQ ID NO: 20448 - DNA, 33 bp, unidentified
  source 1..33: mol_type = unassigned DNA; note = methanogen bacteria
accaacttcagcctggactccctgaaaatcata

SEQ ID NO: 20449 - DNA, 123 bp, unidentified
  source 1..123: mol_type = unassigned DNA; note = methanogen bacteria
gtattaggtggtgttactgaagcgaataccgcattaaccaatatggctcctctttatcctcctgatgctatcgcagaaggtggtacaggttggacaagtttcccaacacttggaagtccattc

SEQ ID NO: 20450 - DNA, 102 bp, unidentified
  source 1..102: mol_type = unassigned DNA; note = methanogen bacteria
aatgtatacttctatcagaatttcggacagattgcaattgattatgttggaggaaacatggattcaatcattccaacattcatttcaacagcacttcctgaa

SEQ ID NO: 20451 - DNA, 90 bp, unidentified
  source 1..90: mol_type = unassigned DNA; note = methanogen bacteria
tttaagaaaactgcaacaggtctcggtatttgtaaactcatattcggtgtagacatgttaatcaataccatgccttggtatacaattgat

SEQ ID NO: 20452 - DNA, 204 bp, unidentified
  source 1..204: mol_type = unassigned DNA; note = methanogen bacteria
agatattcatcacctaccctactgcattcatggagggggtcacgtaatctggtcaactcaactctgcagattcaatatttgatggataatcctaagcatggtataaatttctttaaaattatattcacacgggatttaaggcatttggctaatggagtattcagtttcttcggggcacgtcaagttatggatcactataccgac

SEQ ID NO: 20453 - DNA, 48 bp, unidentified
  source 1..48: mol_type = unassigned DNA; note = methanogen bacteria
acatgggcattcattggtcaatttaatttaggattaagcttaaggtat

SEQ ID NO: 20454 - DNA, 93 bp, unidentified
  source 1..93: mol_type = unassigned DNA; note = methanogen bacteria
atgtttttaatatatggacaaccggttttagatattggaatgctcttcagaccatttttaatcggatacctattcttaaatcagggacaggga

SEQ ID NO: 20455 - DNA, 156 bp, unidentified
  source 1..156: mol_type = unassigned DNA; note = methanogen bacteria
tcaattgatgccatcaatattacattaaataccatttatcccggttctgaaatatataacggaggaggtaccttaaactcttttaccaattacattcccacaatatttttcccattagattatgcaaatttattaaagaatacatgcgattattct

SEQ ID NO: 20456 - DNA, 54 bp, unidentified
  source 1..54: mol_type = unassigned DNA; note = methanogen bacteria
caattacctgattttataattcaattaacattaagaagtaagatgaaaagtttc

SEQ ID NO: 20457 - DNA, 36 bp, unidentified
  source 1..36: mol_type = unassigned DNA; note = methanogen bacteria
atcgatgcgcttattggatcaaatgattttgacgag

SEQ ID NO: 20458 - DNA, 81 bp, unidentified
  source 1..81: mol_type = unassigned DNA; note = methanogen bacteria
cctgcatacaatgaagaggctactgtcgctaaagtggtaagcgtagctcgcaagctatcatatgtgactgaagttatagta

SEQ ID NO: 20459 - DNA, 123 bp, unidentified
  source 1..123: mol_type = unassigned DNA; note = methanogen bacteria
gatgatggatccactgacagaactgttgaagaggctgaaagcgctggagctactgtaataagccacataatgaatgaaggtaaaggttcagctattaaaacaggttttaaaaactctcatgga

SEQ ID NO: 20460 - DNA, 96 bp, unidentified
  source 1..96: mol_type = unassigned DNA; note = methanogen bacteria
tctaacttcacttcagaaaagatagataaaatcatcaggccgatattagaggaccagactgacattaccaaaacaaagtttgcaagggaaagcggt

SEQ ID NO: 20461 - DNA, 120 bp, unidentified
  source 1..120: mol_type = unassigned DNA; note = methanogen bacteria
gttcacggaatcaagattttggaagttgatattggagacatttgtcatgacatgtccccacttgccgatttaaacaagatggctaatgaggttgtcagaaccattattgacagggctgtg

SEQ ID NO: 20462 - DNA, 156 bp, unidentified
  source 1..156: mol_type = unassigned DNA; note = methanogen bacteria
caaagtgttattggagttagttactgggatatattcgtatatcttcaagatgcattactatttgctaatattaatattggtagtcagctaagtgttccgccagtactctccctattaacatcaatacccttcaggttaggctttatatccgaaaca

SEQ ID NO: 20463 - DNA, 183 bp, unidentified
  source 1..183: mol_type = unassigned DNA; note = methanogen bacteria
cagggatctattcctttccttagccagtttgtcgaggtctctaatagtaatcaggtttctagtgttaatgtgggatatgaactaaatccgttctattatcttcaacatttacccgagattttaacttgctggagtgctagttcacagtattctatgatgttaactactgctgttaataatccg

SEQ ID NO: 20464 - DNA, 36 bp, unidentified
  source 1..36: mol_type = unassigned DNA; note = methanogen bacteria
accaagattgcaaacgagttgaatggcaacggtctt

SEQ ID NO: 20465 - DNA, 39 bp, unidentified
  source 1..39: mol_type = unassigned DNA; note = methanogen bacteria
ttcggaaccttcatcctcttcgagctcgacaccctcacc

SEQ ID NO: 20466 - DNA, 66 bp, unidentified
  source 1..66: mol_type = unassigned DNA; note = methanogen bacteria
ctccaggtggatggagtgaaattcgatggcaacaaggagttcctttacacgattaccggaaagccc

SEQ ID NO: 20467 - DNA, 165 bp, unidentified
  source 1..165: mol_type = unassigned DNA; note = methanogen bacteria
tcccagtatgtgaacaatctcggtacctatgcaaattatcctgccgttaccgacaaagcaactgagtttatccagcccatgttggcttatctgattcctggcgccccgttgtatgatgcaacaggcacagtgccgaatgccattctgcaggcattcatcaagtct

SEQ ID NO: 20468 - DNA, 30 bp, unidentified
  source 1..30: mol_type = unassigned DNA; note = methanogen bacteria
gggttcgggggtcaggccgcgacgcacggc

SEQ ID NO: 20469 - DNA, 33 bp, unidentified
  source 1..33: mol_type = unassigned DNA; note = methanogen bacteria
gtcgccgtcatcaccgggctgaacgactactac

SEQ ID NO: 20470 - DNA, 123 bp, unidentified
  source 1..123: mol_type = unassigned DNA; note = methanogen bacteria
gcggagctcgacggcgtcaccgcggcgttcgagagcctggcggacctgccggcatcctcggcttccggggtgctacccgggttcgagggctgggacagcgtggcggacttcggatcttcggaa

SEQ ID NO: 20471 - DNA, 132 bp, unidentified
  source 1..132: mol_type = unassigned DNA; note = methanogen bacteria
tccaacgtcttcttctggaacaacggggaggggctggcggcggcgcacgtcgcgagcatctacggcagcgggtccaccgacttcatcatcccccagttcatcctcgagctcttcgacgggaagaccggaggc

SEQ ID NO: 20472 - DNA, 90 bp, unidentified
  source 1..90: mol_type = unassigned DNA; note = methanogen bacteria
aacacctcgacctcggtgttcctgccgatctgcaagtggatcaccgggaacagcgtgctgttcacggagggctccatccagtactgcgat

SEQ ID NO: 20473 - DNA, 66 bp, unidentified
  source 1..66: mol_type = unassigned DNA; note = methanogen bacteria
acccaatgggacagcgtctccgacgtctggaacgacacgtcggagatgggccagatctgggaggcc

SEQ ID NO: 20474 - DNA, 54 bp, unidentified
  source 1..54: mol_type = unassigned DNA; note = methanogen bacteria
tggggatgccccgacggcgtggacatccccgggctggggctccatctctccccc

SEQ ID NO: 20475 - DNA, 87 bp, unidentified
  source 1..87: mol_type = unassigned DNA; note = methanogen bacteria
ctcatgatcctgggacatcagaccgacttcttcaccggcccgacgtacatcatgacccacaagcacgggaacgaggccaccccggag

SEQ ID NO: 20476 - DNA, 45 bp, unidentified
  source 1..45: mol_type = unassigned DNA; note = methanogen bacteria
ctgacggagcccggcgacatagacgggggcaggctggccgggtcg

SEQ ID NO: 20477 - DNA, 30 bp, unidentified
  source 1..30: mol_type = unassigned DNA; note = methanogen bacteria
tggactgacatcggggacggggtgccggag

SEQ ID NO: 20478 - DNA, 96 bp, unidentified
  source 1..96: mol_type = unassigned DNA; note = methanogen bacteria
gccatcgcgccggacgtggattccgtgccgatctacatcgtcaacctggtccagaagggagtggagaccggcgacccgtcatgctatgccgatgcg

SEQ ID NO: 20479 - DNA, 45 bp, unidentified
  source 1..45: mol_type = unassigned DNA; note = methanogen bacteria
tatgaacctaatttaaaggaattaaataaaggaaaaattactaaa

SEQ ID NO: 20480 - DNA, 69 bp, unidentified
  source 1..69: mol_type = unassigned DNA; note = methanogen bacteria
attattttagaagataaaattaataaatgtaatagcaaagtggaactagaggaaatagatgttttaaga

SEQ ID NO: 20481 - DNA, 66 bp, unidentified
  source 1..66: mol_type = unassigned DNA; note = methanogen bacteria
agtcaaagtaaatcattaaataatgataaaagaaataaatcatatgaaaatgattatacctacagt

SEQ ID NO: 20482 - DNA, 54 bp, unidentified
  source 1..54: mol_type = unassigned DNA; note = methanogen bacteria
gaaataaaagaaaataataatgttaaaaacaataccgaagaatttaaaatttta

SEQ ID NO: 20483 - DNA, 30 bp, unidentified
  source 1..30: mol_type = unassigned DNA; note = methanogen bacteria
ggtttcggcggacaggcggccacccacggt

SEQ ID NO: 20484 - DNA, 30 bp, unidentified
  source 1..30: mol_type = unassigned DNA; note = methanogen bacteria
gtcgccgtcctcaccggactcaccgattac

SEQ ID NO: 20485 - DNA, 123 bp, unidentified
  source 1..123: mol_type = unassigned DNA; note = methanogen bacteria
accctcggcggagtcacccccgccttcgagtcgctggccgacctgagcacctccgaagcctccggcgtactgcccggattcaacggctggaccgaggtcgcgagcttcggcagcaacgaatgg

SEQ ID NO: 20486 - DNA, 126 bp, unidentified
  source 1..126: mol_type = unassigned DNA; note = methanogen bacteria
tccaacgtgttcttcatgaacgagcacagtcaggcagccgcagcctatgtcagcggtctcggactcggtaccgacttcatcgtcccccagtacatcctcgaggtcttcgacagcgtcttcggagga

SEQ ID NO: 20487 - DNA, 90 bp, unidentified
  source 1..90: mol_type = unassigned DNA; note = methanogen bacteria
aacagctccatgtcggtgttcatgcccatctgcaggtggatcaccggtaacgctgtgctcttccccaacacctggctggcattttgcgac

SEQ ID NO: 20488 - DNA, 123 bp, unidentified
  source 1..123: mol_type = unassigned DNA; note = methanogen bacteria
accggaggaatatatcctattcagattatgcataagtttttccagtctttatatccgtatatgccaatgacttatgctatccgattagtacgtgaagcacaattaggtgttgtttggggaaat

SEQ ID NO: 20489 - DNA, 54 bp, unidentified
  source 1..54: mol_type = unassigned DNA; note = methanogen bacteria
gcagacattgttaacattggtatccaaaacgcaaattttcagtacataatagat

SEQ ID NO: 20490 - DNA, 39 bp, unidentified
  source 1..39: mol_type = unassigned DNA; note = methanogen bacteria
gcatatgatgccataaatagcggaattttaaccggagac

SEQ ID NO: 20491 - DNA, 69 bp, unidentified
  source 1..69: mol_type = unassigned DNA; note = methanogen bacteria
ggtattatcaactctgttgttaattcgttcattttctctactccattttcaattgatgatgttaatgat

SEQ ID NO: 20492 - DNA, 60 bp, unidentified
  source 1..60: mol_type = unassigned DNA; note = methanogen bacteria
ttttacccgtcaatgagcgctacatataagttgcctagttggaatcctgcatggagcatg

SEQ ID NO: 20493 - DNA, 156 bp, unidentified
  source 1..156: mol_type = unassigned DNA; note = methanogen bacteria
caaacaattcgctcaatcagttactgggatatttttgtatatctgcaaaatgctatgcttttcagccatataaacataggaagccagttaagtgttccaccggtattgtcactattaacgtccattccattcagattaggattcatcagcgaaaca

SEQ ID NO: 20494 - DNA, 189 bp, unidentified
  source 1..189: mol_type = unassigned DNA; note = methanogen bacteria
agttatcagggtaccattccattcattagtcagtttatggaagtttccagcagcagccaagtttccagcatcaatgtgggttatgaactaaatccatggtattatattcagaatttacctgaatatctaacaagctttggtgtttcaaattcatatttttctaccttaagcaccagtgacaactcccca

SEQ ID NO: 20495 - DNA, 201 bp, unidentified
  source 1..201: mol_type = unassigned DNA; note = methanogen bacteria
tattcaactcctacattattgcattcatggagaggatcacgcaatttagttaattcaactttacagatcgaatatttaaaaaataatcctaaacatactttagatttctttaaaattatatttactagagatttaagacatttggctaatggagtattcagtttctttggtgctcgtcaagtaattgaccattatattgac

SEQ ID NO: 20496 - DNA, 48 bp, unidentified
  source 1..48: mol_type = unassigned DNA; note = methanogen bacteria
acttgggcattcattggcagatttaatttagggttaagcataagatat

SEQ ID NO: 20497 - DNA, 204 bp, unidentified
  source 1..204: mol_type = unassigned DNA; note = methanogen bacteria
agatattctactcctacgctgttgcattcatggagggcttctcgtaatttagttaattctactttacaaatccaatatattaaggataatccgagttatctggtgcaattctttaaaacaatatttgttcgtgatttgagacatttggctaatggtgtatttagcttctttggtgctcgtcaagttgttgaccactatattgat

SEQ ID NO: 20498 - DNA, 48 bp, unidentified
  source 1..48: mol_type = unassigned DNA; note = methanogen bacteria
acctgggcatttattggtaaatttaatttgggattaagcttaagatac

SEQ ID NO: 20499 - DNA, 30 bp, unidentified; identical to SEQ ID NO: 20483
  source 1..30: mol_type = unassigned DNA; note = methanogen bacteria

SEQ ID NO: 20500 - DNA, 30 bp, unidentified
  source 1..30: mol_type = unassigned DNA; note = methanogen bacteria
gccgtcctcaccggactcaccgattactac

SEQ ID NO: 20501 - DNA, 126 bp, unidentified
  source 1..126: mol_type = unassigned DNA; note = methanogen bacteria
aacgcggtcggaggagtgaccgagggattcaccgctctcagcgagatctccaccggagaggcctccggagtccttcccggattcaatggatggaccgaggtcgccgacttcggaagcaacgagtgg

SEQ ID NO: 20502 - DNA, 129 bp, unidentified
  source 1..129: mol_type = unassigned DNA; note = methanogen bacteria
ctctccaacgtgttcttcatggacgagcaccacctggccgcttccaggtacgtagcgggtctcggactcggtaccgatttcatcgtcccccagtacatcctcgaggtcttcgaggatatcttcggaggc

SEQ ID NO: 20503 - DNA, 90 bp, unidentified
  source 1..90: mol_type = unassigned DNA; note = methanogen bacteria
aacagttcgatgtcggtattcatgccgatatgcaaatggattaccggcgacgcggtcctcttccccgacacctggctggcattctgcgac

SEQ ID NO: 20504 - DNA, 201 bp, unidentified
  source 1..201: mol_type = unassigned DNA; note = methanogen bacteria
agatattctgctccaacattattgcattcatggagatcatcccgtaatttaattaattcaacactgcaatttaatcatttcatttctcatcctgcacttgttccaaaattcttctataatattttctttttagatttgccgaatatggtaactggtgtatttagtttctttggagctcgtcagttccatcattatgatgat

SEQ ID NO: 20505 - DNA, 51 bp, unidentified
  source 1..51: mol_type = unassigned DNA; note = methanogen bacteria
ttaacttgggctagtgtaggttattataatttaggtattagtacaaggtat

SEQ ID NO: 20506 - DNA, 54 bp, unidentified
  source 1..54: mol_type = unassigned DNA; note = methanogen bacteria
aacactgcaccctatggaggagctatctatatcaagggtacaatgagcactgta

SEQ ID NO: 20507 - DNA, 45 bp, unidentified
  source 1..45: mol_type = unassigned DNA; note = methanogen bacteria
acagcagactatggaggagcaatcagcgggtatggtgcaaatggt

SEQ ID NO: 20508 - DNA, 69 bp, unidentified
  source 1..69: mol_type = unassigned DNA; note = methanogen bacteria
tccacctttaacaacaacaccgcagagtatggtggagccatcttttgggataataaagacggtgctgta

SEQ ID NO: 20509 - DNA, 54 bp, unidentified
  source 1..54: mol_type = unassigned DNA; note = methanogen bacteria
acattcaacaacaacaatgcaataatgcatggtggagccatcaattggaataat

SEQ ID NO: 20510 - DNA, 54 bp, unidentified
  source 1..54: mol_type = unassigned DNA; note = methanogen bacteria
tctaacttgggagaaactatttacttatattcatccagcgcaaacggcatagaa

SEQ ID NO: 20511 - DNA, 39 bp, unidentified
  source 1..39: mol_type = unassigned DNA; note = methanogen bacteria
accgtaattaaatttagagatgtaacaattgggaaagta

SEQ ID NO: 20512 - DNA, 45 bp, unidentified
  source 1..45: mol_type = unassigned DNA; note = methanogen bacteria
aaatatgataaagttattatcacagcaatgataaacaaggatgca

SEQ ID NO: 20513 - DNA, 291 bp, unidentified
  source 1..291: mol_type = unassigned DNA; note = methanogen bacteria
atcacgaccaacacaaaattttggattgcatctgctttagatttttcatttggtccctcaggaatagatgtaaaagtagcttcttttgataattttgtaagaggtggaatttcgtttgccgtaccaccaaatacagaacttggcgaaagagtacaagaaggagatatatttaaactgtatgacagtgaaaagagttctttgctgaaagaatataaagattacatagaatacattttactgtttaaatcatcagtaaagggattagcaaaaggggcaagtgtagaatacctc

SEQ ID NO: 20514 - DNA, 132 bp, unidentified
  source 1..132: mol_type = unassigned DNA; note = methanogen bacteria
gttctcattcgtattcaaaaagaaagattaaccaatggtaatgatcaacctgacgaaaaaataatcgcacaaatagaatctgctataaaaaagggactaagaggaactctcgaatcatccaatttattaaca

SEQ ID NO: 20515 - DNA, 273 bp, unidentified
  source 1..273: mol_type = unassigned DNA; note = methanogen bacteria
aacttgtttgtcaatttagttatggatacaaagaacaattcagaaaatgaagaaataattacaacttataagggatacagagtaattccgactaaagttgccggtgtgattgagatggcagaaaaaattgagttgtttatagataatttaaactctcttaacattaaggcaatctctgataatctcaataatctacttggggaaatgattaagactgcggataacctcaaggctattacagataatcttaaatctacaactaaaaatgaaaat

SEQ ID NO: 20516 - DNA, 120 bp, unidentified
  source 1..120: mol_type = unassigned DNA; note = methanogen bacteria
aatgtacttgattcgtactccgggaacgcaaatttatacatggaattaaataaaaccttacgagaactaaatctggtccttaaggatgtcaatggtttaaccaaacaggcaaatgataaa

SEQ ID NO: 20517 - DNA, 30 bp, unidentified
  source 1..30: mol_type = unassigned DNA; note = methanogen bacteria
gacgaacaaccaacagtcaataagaaaaag

SEQ ID NO: 20518 - DNA, 201 bp, unidentified
  source 1..201: mol_type = unassigned DNA; note = methanogen bacteria
tattcagctccaacgttattgcattcatggagatcatcccataacttgattaattcaacaatgcagtttaatcatgttattcatcatccttcaagtatttcaaaattcttttataatattgttttcattgaaatacctaatatgatgactggtgtattcagtttctttggtgctcatcagttccatcattatgctgacagg

SEQ ID NO: 20519 - DNA, 48 bp, unidentified
  source 1..48: mol_type = unassigned DNA; note = methanogen bacteria
acatgggcaagtgtcggctatttcaatttgggtataagcacaaggtat

SEQ ID NO: 20520 - DNA, 162 bp, unidentified
  source 1..162: mol_type = unassigned DNA; note = methanogen bacteria
ccatttcagagcgaattgaatttggaaaaaaattcaaagctaaatgagctgaatgccttgtataaggggcctttagagttaaattcaaatgcttatactttaaagaatagaattgatcaatcttatgatattgaagaaatcaagtcgattgatgttttaagg

SEQ ID NO: 20521 - DNA, 204 bp, unidentified
  source 1..204: mol_type = unassigned DNA; note = methanogen bacteria
tatcatagttctaagattgtatcttctaaggatgattttggtagagtgatgatgtcttatggagaaaataagaatattatcatgtctgttaaagatgcaaatgattttgttaaggataatgatgctaaaatcctatcaaatgttcaattcaataaagtcaacacagtcattgttccaatttctcttacaaggcttcaggctact

SEQ ID NO: 20522 - DNA, 141 bp, unidentified
  source 1..141: mol_type = unassigned DNA; note = methanogen bacteria
ttaagagataattcttcagagcatatggatgattatgatagtatggatagcaatgtaagttcagtgcaatcaaatgaaaccattgctaatggcactttggaagagaatgaagaagacccaattgtaagtggagcaacagtt

SEQ ID NO: 20523 - DNA, 252 bp, unidentified
  source 1..252: mol_type = unassigned DNA; note = methanogen bacteria
atcctgcgttctaaggatagtggtttagttgatagcactgtttccaaatcaagaacaatcattaaaggaaatgaaacaaaaccatttgaaaacactgtttcctattcaagtgatgttgaagaacttcttaaatctgcagtattgaattcaaacaatgttgttgatgctttagattcttatttgatgaattatggtgttagattgtctaatttcgaaagaatgtctaatttgggtgatctcgattcagagtat

SEQ ID NO: 20524 - DNA, 48 bp, unidentified
  source 1..48: mol_type = unassigned DNA; note = methanogen bacteria
gaggtccctcattctgatgttaatttcatcatcaacaatatggataat

SEQ ID NO: 20525 - DNA, 96 bp, unidentified
  source 1..96: mol_type = unassigned DNA; note = methanogen bacteria
acaattcctacagattttgctcctgactgggtcgttaatgaattgaatgaaacatattatgaaaacttatatcaggacaattctttggatttatta

SEQ ID NO: 20526 - DNA, 30 bp, unidentified
  source 1..30: mol_type = unassigned DNA; note = methanogen bacteria
ctgggtgccggggaggagatcatcgacatc

SEQ ID NO: 20527 - DNA, 72 bp, unidentified
  source 1..72: mol_type = unassigned DNA; note = methanogen bacteria
atcagacgtgccgtcgtcaaggccggggactacaacctcaaggaggaggaggcggacttcgacagcttccgc

SEQ ID NO: 20528 - DNA, 42 bp, unidentified
  source 1..42: mol_type = unassigned DNA; note = methanogen bacteria
ctcggattcaacctcgctgcgatcatcacctccgcaggactc

SEQ ID NO: 20529 - DNA, 66 bp, unidentified
  source 1..66: mol_type = unassigned DNA; note = methanogen bacteria
ctcgccacccgtcccttcaagaagggcgacctggtggccgtgggtgccgacgtacaggtctaccgc

SEQ ID NO: 20530 - DNA, 204 bp, unidentified
  source 1..204: mol_type = unassigned DNA; note = methanogen bacteria
aaatattcaacgcctacattattgcattcctggagagcatcccgtaatctggttaattcatcgttgcagatagaatatttcatgagtaattccacatttaggatagatttctttaaaacaatatttttgcgtgacgtaaagcatttggctaatggagtattcagcttcttcggtgctcgccaagttatagaccactatactgat

SEQ ID NO: 20531 - DNA, 48 bp, unidentified
  source 1..48: mol_type = unassigned DNA; note = methanogen bacteria
acctgggcatttataggtcaatttaacttgggattaagtttaaggtat

SEQ ID NO: 20532 - DNA, 54 bp, unidentified
  source 1..54: mol_type = unassigned DNA; note = methanogen bacteria
aactctattttatctgatttttttaataataaaacctcactttcttttgaagct

SEQ ID NO: 20533 - DNA, 57 bp, unidentified
  source 1..57: mol_type = unassigned DNA; note = methanogen bacteria
aattctgttcttgatttttatatttttgataaagaagtttatattcatgagtctttt

SEQ ID NO: 20534 - DNA, 30 bp, unidentified
  source 1..30: mol_type = unassigned DNA; note = methanogen bacteria
gtggttaaaggcacgctgtctcttggtgaa

SEQ ID NO: 20535 - DNA, 54 bp, unidentified
  source 1..54: mol_type = unassigned DNA; note = methanogen bacteria
aattcagttcttaattttttccttgaaaatgaaccgttttacatttcggattct

SEQ ID NO: 20536 - DNA, 33 bp, unidentified
  source 1..33: mol_type = unassigned DNA; note = methanogen bacteria
atggtaattgaaggcacaatatctcttggagag

SEQ ID NO: 20537 - DNA, 201 bp, unidentified
  source 1..201: mol_type = unassigned DNA; note = methanogen bacteria
aggtattctgctccaaaattattgcattcttggagatcatcccgtaatcttattaattctacaatgcagcttaattatgttttaagtcatccagccagtatttctaaatttttctacaatatatttttcttagatttacctgttatactggtgggagtatttaatttctttggtgctcttcagtttagtcattatattgat

SEQ ID NO: 20538 - DNA, 48 bp, unidentified
  source 1..48: mol_type = unassigned DNA; note = methanogen bacteria
acatgggcaagtgttggttataataatctgggtatcagtacaagatat

SEQ ID NO: 20539 - DNA, 201 bp, unidentified
  source 1..201: mol_type = unassigned DNA; note = methanogen bacteria
tattcaacacctactttgatgcattcctggagatcatcttataattatgttgattctgcagcgcaattaaattatttaatcactaatcctaatcagattttaaactttttagcacatatattcaccattgatttgggatatgttgtaaatggagtatttaacttttttaatggaaagttaggtttgcattatcaggaccat

SEQ ID NO: 20540 - DNA, 51 bp, unidentified
  source 1..51: mol_type = unassigned DNA; note = methanogen bacteria
ctgacttggtcatatgttggtcaaataaatttgggagtctctataagatat

SEQ ID NO: 20541 - DNA, 204 bp, unidentified
  source 1..204: mol_type = unassigned DNA; note = methanogen bacteria
tattcagctccaacgttaatgcattcctggagatcttctcataatttgattaattcaacaatgcagcttgattatgtcataaaacatgcaagaactagcattccgaaatttatctacaatatatttatcatagaggtgcctaaaatggtgggtggtgtattcagcttctttggtgctagacaattccaccattatactgatgag

SEQ ID NO: 20542 - DNA, 48 bp, unidentified
  source 1..48: mol_type = unassigned DNA; note = methanogen bacteria
acttgggcaagtgttggatattataatttaggtattagtactagatat

SEQ ID NO: 20543 - DNA, 36 bp, unidentified
  source 1..36: mol_type = unassigned DNA; note = methanogen bacteria
tcccagcttattctcgatttaaatacttcattaagc

SEQ ID NO: 20544 - DNA, 171 bp, unidentified
  source 1..171: mol_type = unassigned DNA; note = methanogen bacteria
gcaactgcaggaatagctgatgcagtagatatttatgtgcctgatgccaaccagacacaatttgaagtcggaacaggagcgtatttggaaaaactaggaaatttaaatgaaagcagcattctctcccaagatgtcaaagcgaaaatcgtcaacatagtcctgacagatgcc

SEQ ID NO: 20545 - DNA, 60 bp, unidentified
  source 1..60: mol_type = unassigned DNA; note = methanogen bacteria
gtaaatagccaagctatttacttattcactatttttttattcaagtcacgtgcgacaaga

SEQ ID NO: 20546 - DNA, 54 bp, unidentified
  source 1..54: mol_type = unassigned DNA; note = methanogen bacteria
aactctattttatactattatttttataaaacccctttttctattgaagaaaac

SEQ ID NO: 20547 - DNA, 30 bp, unidentified
  source 1..30: mol_type = unassigned DNA; note = methanogen bacteria
aataaggggcctatgttttatgacatgcct

SEQ ID NO: 20548 - DNA, 42 bp, unidentified
  source 1..42: mol_type = unassigned DNA; note = methanogen bacteria
cctatcattacaaactattatcacaagccagaggcactattg

SEQ ID NO: 20549 - DNA, 36 bp, unidentified
  source 1..36: mol_type = unassigned DNA; note = methanogen bacteria
ggaggattcttagctgcatctgcaataggttacttt

SEQ ID NO: 20550 - DNA, 51 bp, unidentified
  source 1..51: mol_type = unassigned DNA; note = methanogen bacteria
gagattatgggccttgtatactttacaaattccgcctacatgaacggtgca

SEQ ID NO: 20551 - DNA, 30 bp, unidentified
  source 1..30: mol_type = unassigned DNA; note = methanogen bacteria
gatgcagggccaaaattctatgatatgcct

SEQ ID NO: 20552 - DNA, 30 bp, unidentified
  source 1..30: mol_type = unassigned DNA; note = methanogen bacteria
gatgtagggcctagattctatgaaatgcca

SEQ ID NO: 20553 - DNA, 198 bp, unidentified
  source 1..198: mol_type = unassigned DNA; note = methanogen bacteria
tctgctccagccctgatgcattcatggagatcaaaacttaattatatggaccctaaattgcagctgaattatttgataaatcatccgtttagcattttgagattcatgaggctgattttcacatataccttaggaatcacagtaaatggtttatttaatttcttcggagcaaatagtctcaatcattatgctgaccat

SEQ ID NO: 20554 - DNA, 51 bp, unidentified
  source 1..51: mol_type = unassigned DNA; note = methanogen bacteria
ttgacctgggcggatgtcggttcaacaaatattggtgttagcacaaggtat

SEQ ID NO: 20555 - DNA, 30 bp, unidentified
  source 1..30: mol_type = unassigned DNA; note = methanogen bacteria
gacagagggccaatgctgtttgacatgccg

SEQ ID NO: 20556 - DNA, 33 bp, unidentified
  source 1..33: mol_type = unassigned DNA; note = methanogen bacteria
gcttctttcattggagaaagtgcaatagctgca

SEQ ID NO: 20557 - DNA, 57 bp, unidentified
  source 1..57: mol_type = unassigned DNA; note = methanogen bacteria
gctatacttaactttttgcatcctcctgctgatgctatgccatatctcaaagcgtat

SEQ ID NO: 20558 - DNA, 36 bp, unidentified
  source 1..36: mol_type = unassigned DNA; note = methanogen bacteria
acaatatatatgggttctgttggtttagtttcatat

SEQ ID NO: 20559 - DNA, 48 bp, unidentified
  source 1..48: mol_type = unassigned DNA; note = methanogen bacteria
ttgatgttatacaaccttcatacatctccacatgtagaaacattcaga

SEQ ID NO: 20560 - DNA, 33 bp, unidentified
  source 1..33: mol_type = unassigned DNA; note = methanogen bacteria
ttttttgatcatgttactgtacttagaatggat

SEQ ID NO: 20561 - DNA, 39 bp, unidentified
  source 1..39: mol_type = unassigned DNA; note = methanogen bacteria
atcgtcggacttgacgaagaatggatcgacctcatcaac

SEQ ID NO: 20562 - DNA, 69 bp, unidentified
  source 1..69: mol_type = unassigned DNA; note = methanogen bacteria
aggatcttcatccaggccgacgactacaccaaaggcgattcggccaccgacttcgagagcttccgcccg

SEQ ID NO: 20563 - DNA, 48 bp, unidentified
  source 1..48: mol_type = unassigned DNA; note = methanogen bacteria
ctcggattcaacctcgccgcagtcatcacctccgcaggactcgtatcc

SEQ ID NO: 20564 - DNA, 78 bp, unidentified
  source 1..78: mol_type = unassigned DNA; note = methanogen bacteria
atcctcgcgacccgccccttcaagaggggagatctcatctccgtaggaacagataccctcatctaccgcgtacgccgc

SEQ ID NO: 20565 - DNA, 123 bp, unidentified
  source 1..123: mol_type = unassigned DNA; note = methanogen bacteria
ttacttggaggggtttcaaatgcaaacatggctcttactaatatggtaaacttatatccggccgatgctatagcgacgggcggtacgggatggacgagttttccaacgatgggaactccattc

SEQ ID NO: 20566 - DNA, 102 bp, unidentified
  source 1..102: mol_type = unassigned DNA; note = methanogen bacteria
aatgtttatttccatcagaacttgggtaaaattgcagtggatgttgttggaggaaatatcgacaaaattataccgacatttattacatcagcattgcctgaa

SEQ ID NO: 20567 - DNA, 84 bp, unidentified
  source 1..84: mol_type = unassigned DNA; note = methanogen bacteria
gcaaaaacagcaaaaggtcttggaatttgtatggcattgttgggtgttgaaacaataattcctactgcaccatggccgttcatt

SEQ ID NO: 20568 - DNA, 123 bp, unidentified
  source 1..123: mol_type = unassigned DNA; note = methanogen bacteria
ctgcttggaggagtcagcacagcaaacaccgcattgacaaacatggttaatctgtatcctgccgatgcgcttgcaacgggaggtacgggctggacggccttcccagagtttggaacaccattc

SEQ ID NO: 20569 - DNA, 102 bp, unidentified
  source 1..102: mol_type = unassigned DNA; note = methanogen bacteria
aacgtatacttctttgacaagctgggcaaaatcgctgttgatgtggttggaggaaacatcgataaggtcattccgactttcatcacaatggcgcttccggaa

SEQ ID NO: 20570 - DNA, 87 bp, unidentified
  source 1..87: mol_type = unassigned DNA; note = methanogen bacteria
ttcaagaaaaccgcagtgggtcttggaatatgtaaattcttattaggtgtggaaacactgcttccggcagcaccatggccattcatt

SEQ ID NO: 20571 - DNA, 123 bp, unidentified
  source 1..123: mol_type = unassigned DNA; note = methanogen bacteria
ttgcttggaggagtcgacacagcaaatacagctctaacgaatatgggcaatctgtatcctgccgatgctatggctactggtggaacaggttggacatcgttcccgaaatttggaacaccgttc

SEQ ID NO: 20572 - DNA, 102 bp, unidentified
  source 1..102: mol_type = unassigned DNA; note = methanogen bacteria
aatgtatatttcatggataaattgggaaagattgcagtggatgtagttggaggaaacattgataaaatcattccaacatttattacaatggcactgcctgaa

SEQ ID NO: 20573 - DNA, 90 bp, unidentified
  source 1..90: mol_type = unassigned DNA; note = methanogen bacteria
ttcaaaaagactgcggtaggtcttggaatctgtaaatttatatttggtgttgaaacaattctccctgctgctccatggccgtttattgat

SEQ ID NO: 20574 - DNA, 123 bp, unidentified
  source 1..123: mol_type = unassigned DNA; note = methanogen bacteria
ttgcttggcggaatcgatactgcaaatactgcacttacgaatatgggtaacttgtatcctgccgatgctttggctactggtggaacgggttggacttcgttcccggaattcggaacaccattc

SEQ ID NO: 20575 - DNA, 102 bp, unidentified
  source 1..102: mol_type = unassigned DNA; note = methanogen bacteria
aatgtatatttcatggataaattaggtaaaattgcagtggatgttgttggaggaaatattgataagattattcctacattcattacaatggcattgcctgaa

SEQ ID NO: 20576 - DNA, 90 bp, unidentified
  source 1..90: mol_type = unassigned DNA; note = methanogen bacteria
ttcaaaaagactgcagttggtcttggaatttgtaaattcatatttggtattgatacactcttgcctgcagcaccatggccgtttattgat

SEQ ID NO: 20577 - DNA, 123 bp, unidentified
  source 1..123: mol_type = unassigned DNA; note = methanogen bacteria
ttgcttggaggagttgacacagcaaacactgcattaactaatatgagtcatctctatcctgcagacgcactgtctacgggaggtacgggatggacatcgttcccagagtttggaacaccgttc

SEQ ID NO: 20578 - DNA, 102 bp, unidentified
  source 1..102: mol_type = unassigned DNA; note = methanogen bacteria
aacgtatacttctttgacaaattaggtcaaatagcagtggatgttgttggaggaaacatcgataagattatccctacattcattacaatggcactgcctgaa

SEQ ID NO: 20579 - DNA, 84 bp, unidentified
  source 1..84: mol_type = unassigned DNA; note = methanogen bacteria
gcaaaaacagcaaccggtcttggaatctgtaaattcatattaggtgtagaaacaatattgcctgctgcaccatggccgtttatt

SEQ ID NO: 20580 - DNA, 123 bp, unidentified
  source 1..123: mol_type = unassigned DNA; note = methanogen bacteria
ttacttggaggagttacacatgcaaacacagctcttacaaatatggtaaacttatatcctgcagaggccacggccacagggggtacgggatggacgagttttccgacgtttggaactacattc

SEQ ID NO: 20581 - DNA, 102 bp, unidentified
  source 1..102: mol_type = unassigned DNA; note = methanogen bacteria
aatgtttatttctatcagaatttaggtaaaatagctgtggatgttgtccaaggaaatattgataaaattattcctacatttattacttcagcattgcctgaa

SEQ ID NO: 20582 - DNA, 84 bp, unidentified
  source 1..84: mol_type = unassigned DNA; note = methanogen bacteria
aaaaagactgctgtaggattaggtatttgtaaatttatatttggtgtagaaactttattgcctaatgcaccttggccatttatt

SEQ ID NO: 20583 - DNA, 123 bp, unidentified
  source 1..123: mol_type = unassigned DNA; note = methanogen bacteria
ttgcttggaggaatcgatacagcaaacacagctttaacaaatatggttaatctttatcctgctgaagcccttaagacgggaggaacaggatggacggcatttccgaagttcggaacaccattc

SEQ ID NO: 20584 - DNA, 102 bp, unidentified
  source 1..102: mol_type = unassigned DNA; note = methanogen bacteria
aacgtatatttctatgacaaattaggcaagattgctgtggatgttgttggaggaaacattgataaggttattccaacattcattacaatggcactgcctgaa

SEQ ID NO: 20585 - DNA, 84 bp, unidentified
  source 1..84: mol_type = unassigned DNA; note = methanogen bacteria
aagaaaactgcagtaggacttggaatctgtaaattcatatgtggagtggatacattattgccaaatgctccatggccgttcatt

SEQ ID NO: 20586 - DNA, 123 bp, unidentified
  source 1..123: mol_type = unassigned DNA; note = methanogen bacteria
ctacttggaggagtggacaccgcaaacactgccctgacaagcatggtcaacctgtatcctgctgaggcgacagccactggaggtacggggtggacgtcgtttccaacgttcggaacgccgttc

SEQ ID NO: 20587 - DNA, 102 bp, unidentified
  source 1..102: mol_type = unassigned DNA; note = methanogen bacteria
aacgtatacttctttgacaaggtgggaaaaatcgctgtggatgtcgtcggaggaaacatcgacaagatcattcctacattcatcacaatggcccttcccgaa

SEQ ID NO: 20588 - DNA, 87 bp, unidentified
  source 1..87: mol_type = unassigned DNA; note = methanogen bacteria
aaaaagactgctgtgggactcggattgtgtaaattcatcttcggagccgaaacattgctggctgccgctccatggccgtccattgat

SEQ ID NO: 20589 - DNA, 57 bp, unidentified
  source 1..57: mol_type = unassigned DNA; note = methanogen bacteria
gtgctgatgttgcttattaaggaatatacgatagaactggataccctactggaaacg

SEQ ID NO: 20590 - DNA, 33 bp, unidentified
  source 1..33: mol_type = unassigned DNA; note = methanogen bacteria
gccaccttcgatctgtcctccatgaaaattata

SEQ ID NO: 20591 - DNA, 123 bp, unidentified
  source 1..123: mol_type = unassigned DNA; note = methanogen bacteria
ttgcttggcggtgtaagcactgcaaacacagcattgacaaatatggtaaacttatatcctgctgatgctattgcaactggtggtacgggctggacggcattccctcagttcggatctccgttc

SEQ ID NO: 20592 - DNA, 105 bp, unidentified
  source 1..105: mol_type = unassigned DNA; note = methanogen bacteria
tcaaatgtatatttctatgataaattaggtaaaattgcagttgatgttgttggaggaaacattgataaggttattccaacattcattacaatggcgctgcctgaa

SEQ ID NO: 20593 - DNA, 84 bp, unidentified
  source 1..84: mol_type = unassigned DNA; note = methanogen bacteria
aaaaagactgctgtgggattaggtatttgtaaattcatatttggtgtagaaaccctattgcctgctgctccatggccatttatt

SEQ ID NO: 20594 - DNA, 264 bp, unidentified
  source 1..264: mol_type = unassigned DNA; note = methanogen bacteria
tatatatcacatacaattaaactgccaagaatagaaaacattttgggattggaaaattcaaataatacaaacattagtatgaataatgagaatacaataagtctcaacaattcaaacacctctgataatccattaaatgcaactaagaaaaagccgtttttatcttttgaaactatgaaaatcatattaaaaagtgcatttttacaattatatgaccaatatgaaagattatttacatttggatggctgacgtaccaatccaag

SEQ ID NO: 20595 - DNA, 60 bp, unidentified
  source 1..60: mol_type = unassigned DNA; note = methanogen bacteria
ggatttacaatatacctagaccctaatgctacagtggttagtggtgtgcaagggagatat

SEQ ID NO: 20596 - DNA, 123 bp, unidentified
  source 1..123: mol_type = unassigned DNA; note = methanogen bacteria
atacttggtggagtcgacacagctaacactgcactgacaagcatgggcaacttataccctgcagatgccatggcaacgggaggaacgggttggacatcattccctgagtttggaacaccgttc

SEQ ID NO: 20597 - DNA, 102 bp, unidentified
  source 1..102: mol_type = unassigned DNA; note = methanogen bacteria
aacgtatacttctttgacaagctgggtaagatcgcagtggatgtggttggaggaaacatcgacaagattattccgacattcatcacaatggccctgcctgaa

SEQ ID NO: 20598 - DNA, 84 bp, unidentified
  source 1..84: mol_type = unassigned DNA; note = methanogen bacteria
aaaaagactgctgtgggacttggattatgtaaattcatacttggtgtggaaacaattcttccagcagctccatggccgttcatt

SEQ ID NO: 20599 - DNA, 123 bp, unidentified
  source 1..123: mol_type = unassigned DNA; note = methanogen bacteria
cttttaggtggtgttgatagttcaaatacagcactttcaaacatggttaatttatatcctgcagaagcaattaaaacgggaggtactggatggacgagctttccaacatttggaactccattc

SEQ ID NO: 20600 - DNA, 102 bp, unidentified
  source 1..102: mol_type = unassigned DNA; note = methanogen bacteria
aatgtatatttcttccaaaaattaggtaaaatcgcagttgatgttgttggaggaaatatcgataaaattattccaacatttattacaatggcattacctgaa

SEQ ID NO: 20601 - DNA, 84 bp, unidentified
  source 1..84: mol_type = unassigned DNA; note = methanogen bacteria
gcaaaaaccgctaaaggtctcggaatctgtatggcattatttggagttgaaacaattttacctgcagctccatggccgtttatt

SEQ ID NO: 20602 - DNA, 123 bp, unidentified
  source 1..123: mol_type = unassigned DNA; note = methanogen bacteria
cttcttggaggggtcacccatgcaaacaccgcccttacaaatatggtaaacttgtatcctgctgatgccatagcaaccggtggtacgggatggacgagttttccaacgttgggaactccattc

SEQ ID NO: 20603 - DNA, 102 bp, unidentified
  source 1..102: mol_type = unassigned DNA; note = methanogen bacteria
aatgtttatttccatcagaatttaggtaaaattgctgttgatgtggtgggaggaaatattgataaaattataccaacattcattacttcagcattacctgaa

SEQ ID NO: 20604 - DNA, 84 bp, unidentified
  source 1..84: mol_type = unassigned DNA; note = methanogen bacteria
gcaaaaactgcaaaaggtcttggaatttgtatggcgttatttggtgtagaaacattactgcctacagcaccatggccattcatt

SEQ ID NO: 20605 - DNA, 123 bp, unidentified
  source 1..123: mol_type = unassigned DNA; note = methanogen bacteria
ttgcttggtggtgtagaccatgcaaatactgctctttccaatatggttggtttatatccttcaagtgctgtttcaacaggcggtacgggttggactacatttcccgagtttggaactccgttc

SEQ ID NO: 20606 - DNA, 105 bp, unidentified
  source 1..105: mol_type = unassigned DNA; note = methanogen bacteria
tcaaatgtttatttctatgataaactgggtaaaattgctgttgatgtagttggaggaaacattgataagattataccaacatttattactatggctttgcctgaa

SEQ ID NO: 20607 - DNA, 84 bp, unidentified
  source 1..84: mol_type = unassigned DNA; note = methanogen bacteria
gcaaaaactgcaaaaggaataggaatatgcatgtcattatttggtgttgaatcattaattcaggctgcaccatggccgttcatt

SEQ ID NO: 20608 - DNA, 204 bp, unidentified
  source 1..204: mol_type = unassigned DNA; note = methanogen bacteria
aattattccaccccaacactgttacattcctggaggtcatatctttttgatgttaattcaactgcgcaggcacaatacttcctaagtaatcctccaaaaatacttgaattcattcaacacatatttacagtagatttatggacggttattacaggagtatttaatttctatagtggaggcacaccaaatcaccactatgaggac

SEQ ID NO: 20609 - DNA, 54 bp, unidentified
  source 1..54: mol_type = unassigned DNA; note = methanogen bacteria
ttattaacatggtctcctgttggaaaaattagaccaggagtaagtatacggtat

SEQ ID NO: 20610 - DNA, 201 bp, unidentified
  source 1..201: mol_type = unassigned DNA; note = methanogen bacteria
tattcagaaccggccctgatgcattcatggagatcaaagcttaattacatgaatccttcactgcagttacagtttctgatggatcatccgtttaacattctgagattcattaggatgattttcacatatactttaggaatcaccctgaacggttttttcaatttcttcggagcatacagcgccaatcattatgcagaccac

SEQ ID NO: 20611 - DNA, 51 bp, unidentified
  source 1..51: mol_type = unassigned DNA; note = methanogen bacteria
ttgacatgggcggatgtcggaggaacgaatattggtgtcagcacaaggtat

SEQ ID NO: 20612 - DNA, 114 bp, unidentified
  source 1..114: mol_type = unassigned DNA; note = methanogen bacteria
gtcaacgaactcggcggctgggacagcacggcggacatcctcgatgacatgatgagcaccggacgcgctccggaccacttcaccagcctgctgtacagcggcgggaccgggatc

SEQ ID NO: 20613 - DNA, 84 bp, unidentified
  source 1..84: mol_type = unassigned DNA; note = methanogen bacteria
agggcgtacatctccgacagcggaaccgcgctggacaacccggagaacatcttcatcgtcctcgcagactccatgttcccggca

SEQ ID NO: 20614 - DNA, 51 bp, unidentified
  source 1..51: mol_type = unassigned DNA; note = methanogen bacteria
ggagggatcatcgccggaggagactggctcatctgggattcccagctctat

SEQ ID NO: 20615 - DNA, 198 bp, unidentified
  source 1..198: mol_type = unassigned DNA; note = methanogen bacteria
ttttcaaccaatacccttgcccactcatggagatcaaaatataacctcatcaattcaacccagcaactgagcctcttatataaccagccttcattcatactggagttcttcaacaagattttcggcgaagaggttgtgaccatggtattcggattcttcaatttctacggctcagacaaggcatcctataccgaccat

SEQ ID NO: 20616 - DNA, 54 bp, unidentified
  source 1..54: mol_type = unassigned DNA; note = methanogen bacteria
cttctgacctgggcgcgtgttggaagaaccaatctgggaaccagcctcagatat

SEQ ID NO: 20617 - DNA, 195 bp, unidentified
  source 1..195: mol_type = unassigned DNA; note = methanogen bacteria
tcaacgccggcactgatgcactcctggagatcaaagctcaattacatgaacccttcaatgcaactgcagttccttataggccaccccctccacatactctacttcctaaagcagattttcacattcaatctgggaagcgtcgtcaacgggctttttaatttcttcggggcaaacaacccgaaccactattcagac

SEQ ID NO: 20618 - DNA, 51 bp, unidentified
  source 1..51: mol_type = unassigned DNA; note = methanogen bacteria
ttgacatggtcggatgtggggcaccgctaccttggagtcagcaccagatac

SEQ ID NO: 20619 - DNA, 189 bp, unidentified
  source 1..189: mol_type = unassigned DNA; note = methanogen bacteria
atgtcttataaagcatttcctatggataatgttccatacaatgttttaaacgttaaatttgagggaaatgctgcagattatgatagtttattatctgataagttagctggtgattataattcatttgttgagaaggctgaacattcaagcgtaagccaattttctgaagaaatggatcagcataagatg

SEQ ID NO: 20620 - DNA, 66 bp, unidentified
  source 1..66: mol_type = unassigned DNA; note = methanogen bacteria
ccgcaactgttctatccttcaatgagtgctacatataagttaccttcatggcaacctgtgtggagt

SEQ ID NO: 20621 - DNA, 72 bp, unidentified
  source 1..72: mol_type = unassigned DNA; note = methanogen bacteria
tgtgggaatcttcaggggattcattttacatattgccttcaatatccattacaaatttcatattggctgcaa

SEQ ID NO: 20622 - DNA, 201 bp, unidentified
  source 1..201: mol_type = unassigned DNA; note = methanogen bacteria
tattcaacacctgctttaatgcattcatggagatctaaacttaattatatgaatccttctctacaattggagtttttaattaatcatcctattaagatattgtattttttaaaacagatttttacattcaatcttggatctattttatctggatttttcaatttcttcggagcgaataatcctaatcattattcagatcat

SEQ ID NO: 20623 - DNA, 51 bp, unidentified
  source 1..51: mol_type = unassigned DNA; note = methanogen bacteria
ttaacttgggctgatgtgggcggttcggctttaggtattagtactagatat

SEQ ID NO: 20624 - DNA, 123 bp, unidentified
  source 1..123: mol_type = unassigned DNA; note = methanogen bacteria
atgcttggtggagttgataacgcacatactgccttaacaaatatggttaatttatatcctgctgaggctattaaaacgggaggtactggttggacgtcattcccaacggttggatctccgttc

SEQ ID NO: 20625 - DNA, 102 bp, unidentified
  source 1..102: mol_type = unassigned DNA; note = methanogen bacteria
aatgtttatttctatgataaattgggtaaaatcgcagttgatgttgttgagggaaatattgataagattataccaacttttattacaatggcattgcctgaa

SEQ ID NO: 20626 - DNA, 87 bp, unidentified
  source 1..87: mol_type = unassigned DNA; note = methanogen bacteria
gctaagactgcaactggacttggaatttgtaaattcatatttggtgttgatacattattgtctgcagcaccatggccttatattgat

SEQ ID NO: 20627 - DNA, 42 bp, unidentified
  source 1..42: mol_type = unassigned DNA; note = methanogen bacteria
gagggtgttttaagagattatttgggtataatacatggaaat

SEQ ID NO: 20628 - DNA, 48 bp, unidentified
  source 1..48: mol_type = unassigned DNA; note = methanogen bacteria
tttggacaatctacaatcctcacttttcctgttttggacattccgctt

SEQ ID NO: 20629 - DNA, 60 bp, unidentified
  source 1..60: mol_type = unassigned DNA; note = methanogen bacteria
cctgaaatcagtgacggaggtcacttcatgatggacatgctggacattgccattccgtcc

SEQ ID NO: 20630 - DNA, 33 bp, unidentified
  source 1..33: mol_type = unassigned DNA; note = methanogen bacteria
gttccagcctttggattgcagcatgacctgatt

SEQ ID NO: 20631 - DNA, 123 bp, unidentified
  source 1..123: mol_type = unassigned DNA; note = methanogen bacteria
ttactcggaggagtcaattctgcaaacactgccctgacaaatatggttaatttgtatcctgctgaagctcttgctactggtggaacgggctggacggcattccctgagtttggaactccattc

SEQ ID NO: 20632 - DNA, 105 bp, unidentified
  source 1..105: mol_type = unassigned DNA; note = methanogen bacteria
tcaaacgtatacttctatgataaattaggaaaaatagccgtggatgtggttggaggaaacattgacaaagtcattccgacatttattacaatggcactgccggaa

SEQ ID NO: 20633 - DNA, 87 bp, unidentified
  source 1..87: mol_type = unassigned DNA; note = methanogen bacteria
tttaagaaaactgcagtgggtcttggaatatgtaagttcgtatttggtgtggaaacattattgcctgcggcaccttggccattcatt

SEQ ID NO: 20634 - DNA, 201 bp, unidentified
  source 1..201: mol_type = unassigned DNA; note = methanogen bacteria
agatactccacgccgacactgctgcattcctggaggtcaagccttcgattcatcgactcaacagcacagctgcactacatcgcagaccatccggtatttacgctgaagttcatatcacagcttttcacatataacttctcacatatagtgtacggagccttcaacttcttcggagcggcccagaaggtccactactgcgac

SEQ ID NO: 20635 - DNA, 48 bp, unidentified
  source 1..48: mol_type = unassigned DNA; note = methanogen bacteria
acatgggcaagcgtgggattccttaatctgggaatcacgacacgctat

SEQ ID NO: 20636 - DNA, 48 bp, unidentified
  source 1..48: mol_type = unassigned DNA; note = methanogen bacteria
aactccagctcagatagagttgttgacaatgtattatccggtgagact

SEQ ID NO: 20637 - DNA, 51 bp, unidentified
  source 1..51: mol_type = unassigned DNA; note = methanogen bacteria
aattcattgatgaggtatgcgttagacttaaacggtaatccaacaaaaact

SEQ ID NO: 20638 - DNA, 201 bp, unidentified
  source 1..201: mol_type = unassigned DNA; note = methanogen bacteria
tattccgaacctgctttgatgcattcatggagatcaaaacttaattatatgaaccctgcattgcaggcagaatatctgataaacaatccacttgccattttaaactttttaaggttgattttcacacaaactttaggcattacagtaaatggtctgttcaatttctttgcagcaggcagcgcatatcattattcagaccat

SEQ ID NO: 20639 - DNA, 51 bp, unidentified
  source 1..51: mol_type = unassigned DNA; note = methanogen bacteria
ttgacatgggcagatgtgggaaatacaaatataggagtcagtacaaggtac

SEQ ID NO: 20640 - DNA, 198 bp, unidentified
  source 1..198: mol_type = unassigned DNA; note = methanogen bacteria
tattccacacctgcgttaatgcattcatggagatcatcctataattatgttaactcaactcagcaattacagtatttgaccaataatccatcagacatatttaaattcttgtatcacacagtaactggcggtttatcaaatatattgcctgaacttttcaattatgattacagaaacgcagcgagctttgaaacttac

SEQ ID NO: 20641 - DNA, 48 bp, unidentified
  source 1..48: mol_type = unassigned DNA; note = methanogen bacteria
acatgggccaatgtaggagatatgaacgttggagtgcatatgagatat

SEQ ID NO: 20642 - DNA, 33 bp, unidentified
  source 1..33: mol_type = unassigned DNA; note = methanogen bacteria
agtagaatgctcggaccggaaggatatgggtta

SEQ ID NO: 20643 - DNA, 42 bp, unidentified
  source 1..42: mol_type = unassigned DNA; note = methanogen bacteria
gattttattgcaaacgagatatttcataaaccgctagtcgta

SEQ ID NO: 20644 - DNA, 36 bp, unidentified
  source 1..36: mol_type = unassigned DNA; note = methanogen bacteria
ggtgtttttatgttatccactgatgtagggttttat

SEQ ID NO: 20645 - DNA, 42 bp, unidentified
  source 1..42: mol_type = unassigned DNA; note = methanogen bacteria
attattcaattgctgtttggagaagtttacactccgggttct

SEQ ID NO: 20646 - DNA, 54 bp, unidentified
  source 1..54: mol_type = unassigned DNA; note = methanogen bacteria
aattcactaatgaggtatgcgttagatttaagcgatgctccatcaaaaacttta

SEQ ID NO: 20647 - DNA, 33 bp, unidentified
  source 1..33: mol_type = unassigned DNA; note = methanogen bacteria
ttggtatataccggaagcatagatatgggaaca

SEQ ID NO: 20648 - DNA, 30 bp, unidentified
  source 1..30: mol_type = unassigned DNA; note = methanogen bacteria
tttggaggtttagcaggtaccaatggtatg

SEQ ID NO: 20649 - DNA, 123 bp, unidentified
  source 1..123: mol_type = unassigned DNA; note = methanogen bacteria
atacttggaggagtaactgaagcacataccttattagcaaacatggcaccgttattcccggaaagtgctaaagcaacaggggcaacgggatggacaacattcccacaagtcggaactgtattc

SEQ ID NO: 20650 - DNA, 105 bp, unidentified
  source 1..105: mol_type = unassigned DNA; note = methanogen bacteria
tccaatgcatacttctatcaaactacaggacagatagccattcaggccgcaggaggaaatgtagataaaattatccctacattcattagctcagcaatgcctcaa

SEQ ID NO: 20651 - DNA, 90 bp, unidentified
  source 1..90: mol_type = unassigned DNA; note = methanogen bacteria
caccaaaaagaagcagcaggaataggattatgtaaattattgactggtcagacagtgttatttacagctatgccatggccatatgtagat

SEQ ID NO: 20652 - DNA, 198 bp, unidentified
  source 1..198: mol_type = unassigned DNA; note = methanogen bacteria
tactccacaccgacactattgcattcctggagatccagtcttcgcttcatcgactcaacagcacagataaactacatcacagaaaatcccgcattttcgctgaagttcctctcacagcttttcacatataacctttcacacatactatatggaacattcaacttcttcggagcggcccagaaggtccactattccgac

SEQ ID NO: 20653 - DNA, 48 bp, unidentified
  source 1..48: mol_type = unassigned DNA; note = methanogen bacteria
acatgggcaagcgtgggattcatcaatcttggaatcactacacgctat

SEQ ID NO: 20654 - DNA, 207 bp, unidentified
  source 1..207: mol_type = unassigned DNA; note = methanogen bacteria
tattcaatgccgaatatgagaagatcacataggggacctagggcccaggaattaaatattgacacggttttacagttgaaattcatgttttccagtgtaaaatatttcacggcagtaatgggtgacatcctatcaaagacatggtatgtatttaaagacttattcagattctgtgattggcagggaaaatatggtgtatatcaatct

SEQ ID NO: 20655 - DNA, 54 bp, unidentified
  source 1..54: mol_type = unassigned DNA; note = methanogen bacteria
ttaacctggacacctgtaggatcacttagaattcaaggagttcaaggaagatac

SEQ ID NO: 20656 - DNA, 201 bp, unidentified
  source 1..201: mol_type = unassigned DNA; note = methanogen bacteria
tattctgaacctgctttgatgcattcatggagatcaaaacttaattacatggaccctgcattgcaggctaaatatctgataaacaatccgatgttcattttagaatttttaaggatgattttcacatatacattgggcattacagtaaatggtcttttcaatttcttttcagcagcaaatccataccactactcagaccac

SEQ ID NO: 20657 - DNA, 51 bp, unidentified
  source 1..51: mol_type = unassigned DNA; note = methanogen bacteria
ttgacatgggcagatgttggaaacacaaatatcggagttagtgcgaggtac

SEQ ID NO: 20658 - DNA, 201 bp, unidentified
  source 1..201: mol_type = unassigned DNA; note = methanogen bacteria
agatattcagaacctgcactgatgcactcctggagagccagactcaagtatctcgatccgacaggacagatgcactatttcatgacacatcctatatttattggaaggttctttagccagatattcacatataatatagcaaagattctatacggcacattcaatttcttcggagcagcccaaaagacacattattcagac

SEQ ID NO: 20659 - DNA, 54 bp, unidentified
  source 1..54: mol_type = unassigned DNA; note = methanogen bacteria
cttttgacatgggcaagtgtcgggaaattgaatttgggtctttcaacacggtat

SEQ ID NO: 20660 - DNA, 30 bp, unidentified
  source 1..30: mol_type = unassigned DNA; note = methanogen bacteria
tccaaaataggcgtagaggcattttatgca

SEQ ID NO: 20661 - DNA, 57 bp, unidentified
  source 1..57: mol_type = unassigned DNA; note = methanogen bacteria
gaaggaatattgtacacactggatgcaggggattcatatgcccttatctttgattat

SEQ ID NO: 20662 - DNA, 30 bp, unidentified
  source 1..30: mol_type = unassigned DNA; note = methanogen bacteria
attggaacaatgggcgccattggaccgata

SEQ ID NO: 20663 - DNA, 48 bp, unidentified
  source 1..48: mol_type = unassigned DNA; note = methanogen bacteria
tatgcatttagcttattctccattacaggtatggataatgcaatattc

SEQ ID NO: 20664 - DNA, 204 bp, unidentified
  source 1..204: mol_type = unassigned DNA; note = methanogen bacteria
catcaggttactccaacgttggcacattcatggagatcaaaatatcagccggtaaattcaacattgcagattaattatctgatgaatcatccgggacatgcattaaatgtgttcagcagatttttgaatgaggaaattttaaagctatctggccagtttttcaatttcttcaatagtgcaaagcttcctcattatagtgacagg

SEQ ID NO: 20665 - DNA, 54 bp, unidentified
  source 1..54: mol_type = unassigned DNA; note = methanogen bacteria
ttattgtcatttgcaaaagttggaggtcacggtttaggaatttcattaaggtat

SEQ ID NO: 20666 - DNA, 198 bp, unidentified
  source 1..198: mol_type = unassigned DNA; note = methanogen bacteria
agatatgcaactcctgcattaatgcattcatggaggtctaagcttaattatgttaattcaggtgaccagattgcttatttattacataatcacgggtttgcagttaaattcataacgcagatatttactactgatttgggggcgatgttttatggtgttttcaattttttcagttcagcaagcaaatatcattatgca

SEQ ID NO: 20667 - DNA, 51 bp, unidentified
  source 1..51: mol_type = unassigned DNA; note = methanogen bacteria
ttaacctgggcaggtgtaggatacactggtttgggtattaatacaagatat

SEQ ID NO: 20668 - DNA, 99 bp, unidentified
  source 1..99: mol_type = unassigned DNA; note = methanogen bacteria
tcggacatgagcatcgcggactcagtgttcgagtccgtgtcggcgttcaccaccaccggcgctacgatcctgaacgacccggagtcggtcgacggctcc

SEQ ID NO: 20669 - DNA, 96 bp, unidentified
  source 1..96: mol_type = unassigned DNA; note = methanogen bacteria
ggcgtctccccgttcgaatcggtctgcatctccctctccgacatcccgaccggaggcctcctcccgagggcggacagcatggccagctacgatttc

SEQ ID NO: 20670 - DNA, 132 bp, unidentified
  source 1..132: mol_type = unassigned DNA; note = methanogen bacteria
gtatcgagcgagaccgagtactccttcgacaccctcgggaagatcggagagtccctctggcatgcggcctacacggtcgtcgccgccgggaccacctccggattcgccatcaccgattatacccagtggcct

SEQ ID NO: 20671 - DNA, 117 bp, unidentified
  source 1..117: mol_type = unassigned DNA; note = methanogen bacteria
atcgagccgggttacgacgtccacaccgcgttcgggaccgtgctggcggccatcaccaacaccggcgtcggcagcggccacttcaacccgttcaccagctatgaggagctgggggcc

SEQ ID NO: 20672 - DNA, 69 bp, unidentified
  source 1..69: mol_type = unassigned DNA; note = methanogen bacteria
tccgatgaaacttcaatagacagcactgaaaatgttgaacctgtccaacaaacagaaaacatttcagat

SEQ ID NO: 20673 - DNA, 72 bp, unidentified
  source 1..72: mol_type = unassigned DNA; note = methanogen bacteria
attctgggtgcatcagcacaatcagcagacagcaaaaatgtaaataaagtctcttcgaattcgacaaaggaa

SEQ ID NO: 20674 - DNA, 129 bp, unidentified
  source 1..129: mol_type = unassigned DNA; note = methanogen bacteria
gtcaagaaaggaaacacatattatgtgaaattgaccacatctaacggcaaagcggttgcaaataaaaaattgagcgtaagcttcaacggaaaaacatatacaaaaactactgattccaatggaaaaatt

SEQ ID NO: 20675 - DNA, 279 bp, unidentified
  source 1..279: mol_type = unassigned DNA; note = methanogen bacteria
ttttccaagtcatataaactgtatcttgtcaatacgttttcaatcaacatcgcaaatgcaaaactgctcaccaacggatacctgagaatatattttacaggttctaaaaagtttattgcagataatacagctaaaataagtattggaggcaaaatatttaataaaaaagccaattcagagggatttattgtcataaaacctcagctaagtgccaaaaaatacacagttactgtagatatcggcaagcatttcaaatccaaaaaggtcaaatgcatcaag

SEQ ID NO: 20676 - DNA, 117 bp, unidentified
  source 1..117: mol_type = unassigned DNA; note = methanogen bacteria
gaagtgcttaaaagggacagctatgctttgtatttatatggaaaactatcaaaatacgtctgctttaaaacaaaaacagctcctaaaacttaccatattctccatagaagcaaatgg

SEQ ID NO: 20677 - DNA, 216 bp, unidentified
  source 1..216: mol_type = unassigned DNA; note = methanogen bacteria
tatggagattataatgttggcggcgattccaggattccgacaggctgggtgtcattaagcaagttcaaagcaaaatttgctggtgttggattggtcgttaaacttaattataaattatctaaaaatgtaaaaactcaaatcaagaattattatcagagcatgggtcctaattgggctagacaaaacactaatgaaagaattccaaatgtgcctatc

SEQ ID NO: 20678 - DNA, 132 bp, unidentified
  source 1..132: mol_type = unassigned DNA; note = methanogen bacteria
tatgatccaggtattttaagtgttgattcttataatcaactgcatcagattgctactgggcactttagcaactggcatccatttttccacacatttattgaaatgatatgtataaaaatatatgccaacccc

SEQ ID NO: 20679 - DNA, 201 bp, unidentified
  source 1..201: mol_type = unassigned DNA; note = methanogen bacteria
agatattcaacgcctacattaatgcattcctggaggtcaaaacttaattgggtcaactctgccgatcagatttcccttttgatacatgacccgatgtttgcctggaaattcatatctcaaatctttaccacggatttggcctggatgatttatggtatatttaacttttttagtgctggaagtaaatatcattatgcaaat

SEQ ID NO: 20680 - DNA, 51 bp, unidentified
  source 1..51: mol_type = unassigned DNA; note = methanogen bacteria
ttgacatggtccagtgttggatacattcagttaggtattaatacacgttat

SEQ ID NO: 20681 - DNA, 30 bp, unidentified
  source 1..30: mol_type = unassigned DNA; note = methanogen bacteria
tttggaggattagccggaacaaacggtctt

SEQ ID NO: 20682 - DNA, 123 bp, unidentified
  source 1..123: mol_type = unassigned DNA; note = methanogen bacteria
atgcttggaggagttacacatgctcatcaactattaactaatatggcacctttattccctgaatcctcaaagattacaggagcaactggttggaccacgttccctgtgacgggcagtgtgttc

SEQ ID NO: 20683 - DNA, 102 bp, unidentified
  source 1..102: mol_type = unassigned DNA; note = methanogen bacteria
aatgtatatttctatcagacgtcaggacaactagctatacaggctgctggtggaaatgtagataaaattattcctacatttattaacagtgctatgcctaca

SEQ ID NO: 20684 - DNA, 90 bp, unidentified
  source 1..90: mol_type = unassigned DNA; note = methanogen bacteria
cataaaaaagaagctgcagggcttggtatttgcaaactattaactggccaaacagtattatttagtagtatgccatggccttatgttgat

SEQ ID NO: 20685 - DNA, 195 bp, unidentified
  source 1..195: mol_type = unassigned DNA; note = methanogen bacteria
actaacgaatggccattaagttgggatgtttatactcatattaattatgctatgacctatatgaattatggtattaatactgtggatccatatctaaatgctcctagtggaaagacaattggttatgctccactgttccatttcttattgatatttgttgcttttattactaattctagtcttttatctgcagca

SEQ ID NO: 20686 - DNA, 105 bp, unidentified
  source 1..105: mol_type = unassigned DNA; note = methanogen bacteria
attagtccatcacatatatctcaaatatttagtggatttaattctatactttccgaccctatgtcattatttatgggacaaaaagctatgggacttgaaagatat

SEQ ID NO: 20687 - DNA, 33 bp, unidentified
  source 1..33: mol_type = unassigned DNA; note = methanogen bacteria
cattggtttggtattccggtgtatacttttaga

SEQ ID NO: 20688 - DNA, 201 bp, unidentified
  source 1..201: mol_type = unassigned DNA; note = methanogen bacteria
agatactccactcctacattaatgcattcatggagatctaaactcaattatgttaactcagcagaacaggtttcttatttcattcatcatcctatgtttgcatggaaattcattagccagatattcacaacggacttggcgtggatggtttatggaatattcaacttcttcagtgccggaagcgctaatcattatgcaaat

SEQ ID NO: 20689 - DNA, 51 bp, unidentified
  source 1..51: mol_type = unassigned DNA; note = methanogen bacteria
ttgacctgggcaggagtaggatatactggattaggcataaatacaagatat

SEQ ID NO: 20690 - DNA, 51 bp, unidentified
  source 1..51: mol_type = unassigned DNA; note = methanogen bacteria
actacagcttctgacagggttgtagacaatgttttatctggtgaaacagct

SEQ ID NO: 20691 - DNA, 201 bp, unidentified
  source 1..201: mol_type = unassigned DNA; note = methanogen bacteria
tattcggaaccttcattgatgcattcatggagatcaaaacttaattatatgaatcctgcactacaggttgaatatctccttaaccacccatttgccattctgaacttcttaagaatgattttcacattcactttaggcattacattaaacggtcttttcaatttcttttcagcaggcagcgcataccactactcagaccac

SEQ ID NO: 20692 - DNA, 51 bp, unidentified
  source 1..51: mol_type = unassigned DNA; note = methanogen bacteria
ttgacttgggcggatgtcggaaagacaaatatcggcgtcagcgcaaggtac

SEQ ID NO: 20693 - DNA, 201 bp, unidentified; identical to SEQ ID NO: 20658
  source 1..201: mol_type = unassigned DNA; note = methanogen bacteria

SEQ ID NO: 20694 - DNA, 51 bp, unidentified
  source 1..51: mol_type = unassigned DNA; note = methanogen bacteria
ttgacatgggcaagtgtcgggaaattgaatttgggtctttcaacacggtat

SEQ ID NO: 20695 - DNA, 123 bp, unidentified
  source 1..123: mol_type = unassigned DNA; note = methanogen bacteria
aaacttggaggaattcagaatgcaaatatggcattaactaacatggcaccattatattccaaagaagctattgctcaaggaggacttggatggacggcatttcctaaatttggaagtcctttc

SEQ ID NO: 20696 - DNA, 102 bp, unidentified
  source 1..102: mol_type = unassigned DNA; note = methanogen bacteria
aatgtttacttctatcagaaattaggtaaaactgcagtagaggttgtaggtggaaacattgacaagattattccaacttttattaatatggcacttccggag

SEQ ID NO: 20697 - DNA, 90 bp, unidentified
  source 1..90: mol_type = unassigned DNA; note = methanogen bacteria
tataagaaaacagctgccgctttaggtatttgtcaatttttaactggtaatcctgttctaatcacaacaatgccatggcctgtagtagat

SEQ ID NO: 20698 - DNA, 30 bp, unidentified
  source 1..30: mol_type = unassigned DNA; note = methanogen bacteria
tatagaactatagcgcatccgacttatgag

SEQ ID NO: 20699 - DNA, 201 bp, unidentified
  source 1..201: mol_type = unassigned DNA; note = methanogen bacteria
agatattcagaacctgcattgatgcattcctggagagccagactcagatacatcaatccgacaggacagatgaactatatcatgtcacatccggctttcattggaaagttctttggtcaaattttcacatataacctagccaagattctatacggcacattcaatttcttcggagcagctcaaaggtcacattattcagac

SEQ ID NO: 20700 - DNA, 51 bp, unidentified
  source 1..51: mol_type = unassigned DNA; note = methanogen bacteria
ttgacatgggcaagtgtaggacagttaaatctaggtctttcagcacggtat

SEQ ID NO: 20701 - DNA, 201 bp, unidentified
  source 1..201: mol_type = unassigned DNA; note = methanogen bacteria
agatattcagaaccgacactgatgcattcatggagagccaggctacgttacctagaccctgcaggacagagaaaatatatcatgtcaaatccaggtttccttggaaatttcttcggtcagattttcacatataacatagccaagatcctatacggtacattcaatttcttcggaggggctcaaaggacacattacgcagac

SEQ ID NO: 20702 - DNA, 48 bp, unidentified
  source 1..48: mol_type = unassigned DNA; note = methanogen bacteria
acatgggcaagtgtcggaaatttaaatctgggtctttcagcccggtac

SEQ ID NO: 20703 - DNA, 201 bp, unidentified
  source 1..201: mol_type = unassigned DNA; note = methanogen bacteria
agatattccgcacccgcattgatgcattcatggagatcaagactcaaatacctcgatccaccaggacagatgaactatatcatttcacatccgagtttcatgggaaatttctttgctcagatattcacacataacatagccaagattctatacggcacgttcaatttcttcggtgctgctcaaaaaatacattatgcagac

SEQ ID NO: 20704 - DNA, 51 bp, unidentified
  source 1..51: mol_type = unassigned DNA; note = methanogen bacteria
ttgacttgggcaagtgtcggaaagttaaatctgggactttcaacacgatat

SEQ ID NO: 20705 - DNA, 201 bp, unidentified
  source 1..201: mol_type = unassigned DNA; note = methanogen bacteria
agatactcggcacctaccctgatgcactcatggagatcccgcctgaggttcaccaactcgacggcccagatggcatacgtctcctcacatcctgcattttcgctggatttcgtatcccagctcttcacatataacctgtcccatatcgcatacggagcattcaatttctttggagccgccaaaaaggtccattataccgac

SEQ ID NO: 20706 - DNA, 51 bp, unidentified
  source 1..51: mol_type = unassigned DNA; note = methanogen bacteria
ctgacctgggcaagcgtcggatacctgaatctgggaatttcaacacgctat

SEQ ID NO: 20707 - DNA, 201 bp, unidentified
  source 1..201: mol_type = unassigned DNA; note = methanogen bacteria
agatattcacaacctgcacttatgcattcctggagatccagactcaagtacctcgatccgacaggacagatgaactatgtcatgacacatccgatatttattggaaggttctttacccagatattcacatataacatagccaagattctatacggcacattcaatttcttcggagcggcccaaaagacacattattcagac

SEQ ID NO: 20708 - DNA, 51 bp, unidentified
  source 1..51: mol_type = unassigned DNA; note = methanogen bacteria
ttgacatgggcaagtgttggaaagttaaatctaggtctttcaacacggtat

SEQ ID NO: 20709 - DNA, 201 bp, unidentified
  source 1..201: mol_type = unassigned DNA; note = methanogen bacteria
aaatattccacacctacattaatgcactcttggagatctagactcagattcattaactcaacagcacaaatggattatattacttcacatccaatgttttcactaaaattcatatatcaactcttcactaatagtttatcccatgttatttatggtgtatttaatttctttggagcagctcaaaaggtacattattcagac

SEQ ID NO: 20710 - DNA, 51 bp, unidentified
  source 1..51: mol_type = unassigned DNA; note = methanogen bacteria
ttaacctgggcaagtgttggttatttaaatttaggactttctacacgttat

SEQ ID NO: 20711 - DNA, 201 bp, unidentified
  source 1..201: mol_type = unassigned DNA; note = methanogen bacteria
tattcagaaccggctttgatgcattcctggagatcaaaacttaattatatgaatcctgaattacaggctaaatatcttataaataatcctatggagattttaagatttttaagattgattttcacatatactgtaagtattacactaaatggtctgttcaatttctttggagcaggaagtgcaaaccattattcagaccat

SEQ ID NO: 20712 - DNA, 51 bp, unidentified
  source 1..51: mol_type = unassigned DNA; note = methanogen bacteria
ttaacatgggcagatgttggaggaacaaatattggtgtcagtgcacggtac

SEQ ID NO: 20713 - DNA, 204 bp, unidentified
  source 1..204: mol_type = unassigned DNA; note = methanogen bacteria
agatattctgaacctacattgatgcattcatggagagcaagactcaaatatatcgatccaacaggacagatgaactatattatgtcacatccaacatttataggaaaattctttggtcagatattcacatacaacttagctaagacaatgtatggtacattcaatttcttcggtgcagcgaaaattccgcattatgcagacagc

SEQ ID NO: 20714 - DNA, 51 bp, unidentified
  source 1..51: mol_type = unassigned DNA; note = methanogen bacteria
ttaacttgggcaagtgtgggaaaattaaatctaggtctttcaacacgatat

SEQ ID NO: 20715 - DNA, 201 bp, unidentified
  source 1..201: mol_type = unassigned DNA; note = methanogen bacteria
tattccgaaccggctttgatgcattcatggagatcaaaacttaattatatggaccctggtatgcaggttcaatacctgttaaatcatccgtttgctattttaagatttttaaggctgattttcacatatactgtgggcattacgctaaacggccttttcaatttcttcgctgcaggcagtgcaaaccattattcagatcat

SEQ ID NO: 20716 - DNA, 48 bp, unidentified
  source 1..48: mol_type = unassigned DNA; note = methanogen bacteria
acctgggcaagtgtcggcgatactaatatcggagtaagcgcaaggtac

SEQ ID NO: 20717 - DNA, 201 bp, unidentified
  source 1..201: mol_type = unassigned DNA; note = methanogen bacteria
agatattcccagcctgcactgatgcattcgtggagggcaagactcaagtatctcgatccgacaggacagatgaactatgtactttcacatccgatgttcatggtggatttcttttcacagatattcacatacaacatagccaagatcttctacggcacattcaatttcttcggagccgctcaaaagacacattattcagac

SEQ ID NO: 20718 - DNA, 51 bp, unidentified
  source 1..51: mol_type = unassigned DNA; note = methanogen bacteria
ctgacctgggcaagtgtcgggaaactgaatctgggtctttcaacacgatat

SEQ ID NO: 20719 - DNA, 48 bp, unidentified
  source 1..48: mol_type = unassigned DNA; note = methanogen bacteria
gattcaagttttgtatcaacattccttggatcctatgcacaagcggcg

SEQ ID NO: 20720 - DNA, 60 bp, unidentified
  source 1..60: mol_type = unassigned DNA; note = methanogen bacteria
gatactctaattggtctattgtatccgccgcagggagcattaccatatgtaaatgcatat

SEQ ID NO: 20721 - DNA, 63 bp, unidentified
  source 1..63: mol_type = unassigned DNA; note = methanogen bacteria
gatggattattaatatttttcaaacttcaccaaatgcctaacgacgcaatggtggaaaatgcg

SEQ ID NO: 20722 - DNA, 204 bp, unidentified
  source 1..204: mol_type = unassigned DNA; note = methanogen bacteria
agatattcccaacctgcactgatgcattcctggagatccagactcaagtacctagatcctgcaggacagatgaattatatcctttcacatccgaatttcattggaaatttcttttctcagatattcacatataacatagccaagattttatacggcacattcaatttctttggagcagctcaaaagacacattattcagatgat

SEQ ID NO: 20723 - DNA, 51 bp, unidentified
  source 1..51: mol_type = unassigned DNA; note = methanogen bacteria
ttgacatgggcaagtgtcgggagattaaatctgggtctttcaacacggtat

SEQ ID NO: 20724 - DNA, 201 bp, unidentified
  source 1..201: mol_type = unassigned DNA; note = methanogen bacteria
tattcagaacctgctttgatgcattcatggagatcaaaacttaattatatgaacccttcattgcaggctcaatatctgataaacaatcctatggcaattttacacttcctaaggatgattttcacacacactctgggcattacattaaacggtctgttcaatttctttgcagcaggcagcgcaaaccattattcagaccaa

SEQ ID NO: 20725 - DNA, 51 bp, unidentified
  source 1..51: mol_type = unassigned DNA; note = methanogen bacteria
ttgacttgggcagatgttggaaagacaaatataggtgtcagtgcaaggtac

SEQ ID NO: 20726 - DNA, 189 bp, unidentified
  source 1..189: mol_type = unassigned DNA; note = methanogen bacteria
tattcaactcctactttaatgcattcgtggagatctaatttaaattatattaattccacccaacaaattgcattcctaaaaaataatcctctacagatactagaatttttaaaacatacagttactggaggattatcatttataattagtcaactttttaattttgattatcgtaatgctgaaagtatt

SEQ ID NO: 20727 - DNA, 51 bp, unidentified
  source 1..51: mol_type = unassigned DNA; note = methanogen bacteria
ttgacatgggcgtatgttggaaatatgtatgtggatgtgcatatgagatat

SEQ ID NO: 20728 - DNA, 36 bp, unidentified
  source 1..36: mol_type = unassigned DNA; note = methanogen bacteria
acaatatttgaagacaataaggcagatgattatgct

SEQ ID NO: 20729 - DNA, 192 bp, unidentified
  source 1..192: mol_type = unassigned DNA; note = methanogen bacteria
aacaaatactcacaattcaaaaactgtgtgttcaaatacaatgtggccggtgatgataatggtggtgcaataaattcaaaagcaaaattatatcttaaaaattgtacatttgattcaaataaggcaaaagttgatggcggtgcaatatgctgtgatgaagatgtccaagcatatggatgcttgtttaaaaac

SEQ ID NO: 20730 - DNA, 87 bp, unidentified
  source 1..87: mol_type = unassigned DNA; note = methanogen bacteria
aagaaagatgtatatgttgaggcttgtgactttatagagaattctgctgaggattatggtggagcaatatatgccaaaaacatatac

SEQ ID NO: 20731 - DNA, 135 bp, unidentified
  source 1..135: mol_type = unassigned DNA; note = methanogen bacteria
gcattatatgctgaaggtgatgttgatgctgataatgtcactttagaaaagaataaagcatatgaagatggtggagcaattttctgtaaaaatgcaaaattaagaaatgcagatttagcttataatagagctgaa

SEQ ID NO: 20732 - DNA, 66 bp, unidentified
  source 1..66: mol_type = unassigned DNA; note = methanogen bacteria
atttacgaaaattttgcacatgatattggtggtgcaattacatgtgataatataaatttctatcac

SEQ ID NO: 20733 - DNA, 117 bp, unidentified
  source 1..117: mol_type = unassigned DNA; note = methanogen bacteria
ttttgggaaagtactactgatagagatggtggcatgtatagttgtcctgtatatattggcgacatcaaatatgatggggaatttgaggttaatgctagtcatgctaactgttacttt

SEQ ID NO: 20734 - DNA, 201 bp, unidentified
  source 1..201: mol_type = unassigned DNA; note = methanogen bacteria
agatattcaactcctgcattaatgcattcatggagatctaaacttaattatatgaattcctctgctcaaattgattatatgatgcatcatcccgtttttgtaaaaaattttttaactcaaatttttacaatagatttggggagtatgatgtatggagttttcaatttcttttatgcagcatctgcttatcattattcagac

SEQ ID NO: 20735 - DNA, 51 bp, unidentified
  source 1..51: mol_type = unassigned DNA; note = methanogen bacteria
ttaacatgggcaagtgttggatatactaatttaggtattaatacaagatat

SEQ ID NO: 20736 - DNA, 117 bp, unidentified
  source 1..117: mol_type = unassigned DNA; note = methanogen bacteria
ttccctgtgggtgtaaaatacggatctggtgatagttatttgggcatgattggaaatgcaatcgctccgattttcactccattaggttttggaacctggcaggcggatggaagaaat

SEQ ID NO: 20737 - DNA, 201 bp, unidentified
  source 1..201: mol_type = unassigned DNA; note = methanogen bacteria
agttattcaacacctacattaatgcattcctggaggtctatgtataattatgttaattctacacagcaattaaattttttattgactaaccatttcttcattttcgattttttacatcaaatatttacttctgaactatcttttttagcaaatggattatttaatttttataatggtactcccggtatacattatgatgat

SEQ ID NO: 20738 - DNA, 51 bp, unidentified
  source 1..51: mol_type = unassigned DNA; note = methanogen bacteria
ttgacttgggcatatgttggtgaaattaatttgggcatatcaattagatat

SEQ ID NO: 20739 - DNA, 96 bp, unidentified
  source 1..96: mol_type = unassigned DNA; note = methanogen bacteria
ctgaacatacactttgtagacgctctttttgaaaacatgtccgcatggaccggaagcggaatgacattctttgtgaatgtagaagttcttccatac

SEQ ID NO: 20740 - DNA, 99 bp, unidentified
  source 1..99: mol_type = unassigned DNA; note = methanogen bacteria
gggcttccggtttttgatgctgtaaaccttgcattcacaagcatatcaacaggtggaatgagcatcaagaatctgaatgtgggattctaccagaacaat

SEQ ID NO: 20741 - DNA, 105 bp, unidentified
  source 1..105: mol_type = unassigned DNA; note = methanogen bacteria
aacagcggcatcgtgccaatggatatactgttccatgtggtttcagcagtgacaaccacagggtccaacataagcacagcacagacaataagcacatggcatggc

SEQ ID NO: 20742 - DNA, 93 bp, unidentified
  source 1..93: mol_type = unassigned DNA; note = methanogen bacteria
ggactcgacccattgaatgcattatttgatgtggtttctatcctaagtaataatggattaagtacaggcatagtctggggaggacttcctctg

SEQ ID NO: 20743 - DNA, 57 bp, unidentified
  source 1..57: mol_type = unassigned DNA; note = methanogen bacteria
gtgcagtcaatttcaaccgacgggaatggtattgccaatttgggggttgatttacct

SEQ ID NO: 20744 - DNA, 84 bp, unidentified
  source 1..84: mol_type = unassigned DNA; note = methanogen bacteria
gatgatgattatggagcctctgaaagtagttttaatatccacgtccataaaataggcacaacaattactgtgagaaatacgact

SEQ ID NO: 20745 - DNA, 126 bp, unidentified
  source 1..126: mol_type = unassigned DNA; note = methanogen bacteria
gtttatggaggcactttctatgcttatttaaaggatgcctatggaaattcaatgataggttctgatgtgttttatactgttaatggcgtgacatattccataaccactaaaatctatggtgttgca

SEQ ID NO: 20746 - DNA, 69 bp, unidentified
  source 1..69: mol_type = unassigned DNA; note = methanogen bacteria
aagactattgacctgaaagttcttgcatcaacttcaattgtcattggaaatgatatccttttgactaat

SEQ ID NO: 20747 - DNA, 105 bp, unidentified
  source 1..105: mol_type = unassigned DNA; note = methanogen bacteria
tgcttgagaatttatctcaaatcaaatcagcagaatctgatttccaacaaaacggttaagattaccattaacaatgtcacttttataaaacagacaaattctgaa

SEQ ID NO: 20748 - DNA, 63 bp, unidentified
  source 1..63: mol_type = unassigned DNA; note = methanogen bacteria
accgcatcaaaagaggtaacaggtatcagcggaagccctaaaaatccattaatttcaagtatt

SEQ ID NO: 20749 - DNA, 180 bp, unidentified
  source 1..180: mol_type = unassigned DNA; note = methanogen bacteria
acaaaatggttaactgtaaactatatgtatgctcgttttaacaattatgacacttcaggtttaattgttaaactgaaatatagtttaaacgcagccactaaagctaaagttaataatttctacaacagcatgggtacaaaatggaccagacaaaatgttaatgaaagaatacctcaaatt

SEQ ID NO: 20750 - DNA, 162 bp, unidentified
  source 1..162: mol_type = unassigned DNA; note = methanogen bacteria
ttttatgttgatcctggagttttcgcttcttgtagaagtgtccattatgataattctgctaatgcaatagaacaattaaaatttattttaagccataaaaaggatactttaattgaattatgccacatatttgcaaatattaacaacgatttaagctttact

SEQ ID NO: 20751 - DNA, 54 bp, unidentified
  source 1..54: mol_type = unassigned DNA; note = methanogen bacteria
ttgtcctggacacctgttggacaattaacaccaattggtgttcaacctagatat

SEQ ID NO: 20752 - DNA, 171 bp, unidentified
  source 1..171: mol_type = unassigned DNA; note = methanogen bacteria
aactttaatcaaaatttggggatttattgtagcgatgtttatgtttatcttttaaatgctgtttattatacagggcataatatctattccaccactacaatatacttgtcaccggtaatctgttttttaacttcaatactgatgactctcggaattaaggatgccacttcg

SEQ ID NO: 20753 - DNA, 189 bp, unidentified
  source 1..189: mol_type = unassigned DNA; note = methanogen bacteria
gtcacatctatgggggatggaaattttgaacctacaacacagatttcagaaggaattggcggagaacacgggcgcaccaatgatcctgcatacagcacagacgtaggatattacctgtcaaattttttaaatttcatctcctcatcaaaagtcacttttgaaggcaatacgcccgccttaaaagaccct

SEQ ID NO: 20754 - DNA, 288 bp, unidentified
  source 1..288: mol_type = unassigned DNA; note = methanogen bacteria
ttttgtcttgcatttgaagaaacaaatcagtatatagctccccaggaaataagtgagtatataattcatgaaattccgaattatgaaaaatatgaaataggcgtttataatatacggcctttttactggtatctgggtgaaaatgtaacagggattgaaaatcataatactgcaaagattgatgcaagtaacgtgagttattacatttcaaaagctcccctaaatggtttgaacaactatagcgaaataaagaatatccataacatgtatttatataaaaagaatgtt

SEQ ID NO: 20755 - DNA, 201 bp, unidentified
  source 1..201: mol_type = unassigned DNA; note = methanogen bacteria
tattccgaacctgccctcatgcattcatggagatccaagctcaattacatggatgccgatcgtcagctggaatatattatgggccatccttggttcattgtccacttcttcaggctgattttcacattcaccctgggccttacagtcaacgggcttttcaatttctttgctgccggaagtccgaaccattatatggaccac

SEQ ID NO: 20756 - DNA, 51 bp, unidentified
  source 1..51: mol_type = unassigned DNA; note = methanogen bacteria
ctcacctgggcggatgtcggaaaatacaatatcggtgtcagcacaaggtat

SEQ ID NO: 20757 - DNA, 126 bp, unidentified
  source 1..126: mol_type = unassigned DNA; note = methanogen bacteria
tactctttaggtggtgtaactactgctcatcaatctttaacaaatattgcttatcttgtacctgaatctgcacgtgcatttggttgtaatggatggactgagtttccaacatttggttcacaattg

SEQ ID NO: 20758 - DNA, 105 bp, unidentified
  source 1..105: mol_type = unassigned DNA; note = methanogen bacteria
tctaatgtatatttcttaagagaaacaggacaaattgcagttcaagttgctcaaaacaacattgacagtattattccaatatttatcaacatggccctaccagaa

SEQ ID NO: 20759 - DNA, 84 bp, unidentified
  source 1..84: mol_type = unassigned DNA; note = methanogen bacteria
gcaaaaactgcaggaggattaggtttagttaccttattaacaggtcaaacttcaattttaacacaaccatggagtattatggat

SEQ ID NO: 20760 - DNA, 42 bp, unidentified
  source 1..42: mol_type = unassigned DNA; note = methanogen bacteria
gattacattgcaattaatatattcaaaaaaccacttgcagca

SEQ ID NO: 20761 - DNA, 33 bp, unidentified
  source 1..33: mol_type = unassigned DNA; note = methanogen bacteria
aaacttatggctacagaatttactggatattat

SEQ ID NO: 20762 - DNA, 39 bp, unidentified
  source 1..39: mol_type = unassigned DNA; note = methanogen bacteria
ctagaattattattttcaacagaatatgttgcagctgca

SEQ ID NO: 20763 - DNA, 90 bp, unidentified
  source 1..90: mol_type = unassigned DNA; note = methanogen bacteria
tttacaaagggctggggcgctaatccggatgtattcttttcaagcaatgtcctgcaggcaagcgattcaatagcgggcatatttactttt

SEQ ID NO: 20764 - DNA, 72 bp, unidentified
  source 1..72: mol_type = unassigned DNA; note = methanogen bacteria
cttacactgcctggagcatcaataggatacactcaaatttacacacctgactggagtgccttgctgaatttt

SEQ ID NO: 20765 - DNA, 108 bp, unidentified
  source 1..108: mol_type = unassigned DNA; note = methanogen bacteria
ggattcatgacattcactacaggaattccattcaatgatttggtaaccgaaggcacaggacttgcatttgttgttttcccacaggtattcaaccaaatgggtgcagtt

SEQ ID NO: 20766 - DNA, 123 bp, unidentified
  source 1..123: mol_type = unassigned DNA; note = methanogen bacteria
attctcggtggtgttgaccatgcaaatactgcattaactaatatgtcttctttatatcctaaagaagcattagctcagggaggaacaggatttacaagctttccaactctatttagtccgttt

SEQ ID NO: 20767 - DNA, 105 bp, unidentified
  source 1..105: mol_type = unassigned DNA; note = methanogen bacteria
tccaatgtatatttctatcagaaacttggaaaaactgcagttgaggttgtagggggaaatatagataagattattccaacatttattgatatggcacttccagaa

SEQ ID NO: 20768 - DNA, 90 bp, unidentified
  source 1..90: mol_type = unassigned DNA; note = methanogen bacteria
tatgacaaatctgctacaactttaggtatttgtaagtttatatttgctaaacctgttttaattcaaacaatgccatggccttatatagac

SEQ ID NO: 20769 - DNA, 201 bp, unidentified
  source 1..201: mol_type = unassigned DNA; note = methanogen bacteria
tattcagaaccggcgctgatgcactcatggagatcaaaactcaattatatggattcccatcgtcagcttgagtatgtcctgaatcatccttggtttatcgtgagattcttcaggtcaattttcacatatactataggaattacaattaatggagtatttaatttcttctctgctgcaaacggacagcattatgcagattca

SEQ ID NO: 20770 - DNA, 54 bp, unidentified
  source 1..54: mol_type = unassigned DNA; note = methanogen bacteria
cttctgacatgggctgatgtcggacagttgaatctcggtatcagtacgaggtat

SEQ ID NO: 20771 - DNA, 93 bp, unidentified
  source 1..93: mol_type = unassigned DNA; note = methanogen bacteria
agttttacaaagggctggggtgctaatccggatgtattcttttcaagcaatgtcctgcaggcaagtgattcaatagcgggcatatttactttt

SEQ ID NO: 20772 - DNA, 75 bp, unidentified
  source 1..75: mol_type = unassigned DNA; note = methanogen bacteria
cttacactgcctggagcatcaataggatacactcaaatttacacacctgactggagtgccttgctgaattttaat

SEQ ID NO: 20773 - DNA, 108 bp, unidentified
  source 1..108: mol_type = unassigned DNA; note = methanogen bacteria
ggattcatgaccttcactactggaattccattcaatgatttggtaactgaaggtactggacttgcatttgttgttttcccacaggtattcaatcaaatgggagatgcg

SEQ ID NO: 20774 - DNA, 42 bp, unidentified
  source 1..42: mol_type = unassigned DNA; note = methanogen bacteria
ccatggttggcatatggttatctaaataaaccccttgcttta

SEQ ID NO: 20775 - DNA, 33 bp, unidentified
  source 1..33: mol_type = unassigned DNA; note = methanogen bacteria
aaatttttaacattggacgctgttggttttttt

SEQ ID NO: 20776 - DNA, 51 bp, unidentified
  source 1..51: mol_type = unassigned DNA; note = methanogen bacteria
cctaccttaagggtattgtattttgcaaaacctgaatatgttgccggtgct

SEQ ID NO: 20777 - DNA, 162 bp, unidentified
  source 1..162: mol_type = unassigned DNA; note = methanogen bacteria
tttaatttgaattttggaatatactgttcagatgtttatgtatacctattgaatgcactttattatactggaaccaacatacgtgccaccggaacaatttatttatccccgatgatttgttatttaacctcaatatttttccgtttcggatttgttgacaaa

SEQ ID NO: 20778 - DNA, 186 bp, unidentified
  source 1..186: mol_type = unassigned DNA; note = methanogen bacteria
ttaattatgggttcaggtacctttggtgcaggagatcagatttcagatggaatcaacggagtacagggtactgaaattgatcctgcatacaataccaacgtcacatattatgtaagcaatttattaaatttcatttcaaattcgcataccgtgattgacggaaatcctgtacttgaaaattcaaca

SEQ ID NO: 20779 - DNA, 294 bp, unidentified
  source 1..294: mol_type = unassigned DNA; note = methanogen bacteria
tttacatttacatttgatgaaaccgccgaatatacaacaatcgaagatgtttcggactacattattaacaccaatccggattataagaatttatcaataggaacatataacgtaagagcatataactggtggctgggggaagatctccttgcaataaaaagcaacgatgaaccgacgattgatgcaagcaatgccacatattacatatcggataaagttcttgagaatgtaacaaattatactgaaataaaaaatattaacaatgtttatatttataaaaaaaagtgtttaaaa

SEQ ID NO: 20780 - DNA, 201 bp, unidentified
  source 1..201: mol_type = unassigned DNA; note = methanogen bacteria
tattccgagcctgcactgatgcattcctggagatcaaagctcaattacatggatgcttcagggcaaatggagtatctgatgagccatcctttcgcaatcctcacattcttcagattgattttcacatacacattgggaatcactctgactggggtcttcaatttcttcgctgccggaagtgcgaaccattacgccgacaca

SEQ ID NO: 20781 - DNA, 51 bp, unidentified
  source 1..51: mol_type = unassigned DNA; note = methanogen bacteria
ctcacatgggctgatgtgggtgccttcaatcttggaatcagcacaaggtat

SEQ ID NO: 20782 - DNA, 201 bp, unidentified
  source 1..201: mol_type = unassigned DNA; note = methanogen bacteria
tattccgaaccggctttgatgcattcatggagatcaaaacttaattatatggaccctgcactacaggttaaatatcttattgaccatccacttgccattttgaagtttttaaggatgattttcacatacactttaggcattacattaaatggtcttttcaatttcttttcagcaggcagtgcataccactactcagaccac

SEQ ID NO: 20783 - DNA, 51 bp, unidentified
  source 1..51: mol_type = unassigned DNA; note = methanogen bacteria
ttgacatgggcagatgtcggaaagacaaatatcggcgtcagcgcaaggtac

SEQ ID NO: 20784 - DNA, 192 bp, unidentified
  source 1..192: mol_type = unassigned DNA; note = methanogen bacteria
tccaatgagttcccgttaggttgggacatttacactcacattaattatgctttagcttatatgaataatggaataaccagtgttgactatttgcttaatgcaccaaatggtaaggttatcggttatcctcctttgtttcatgcattgttgataattgtttcttcaataaccggttctaatttgatgaatggt

SEQ ID NO: 20785 - DNA, 90 bp, unidentified
  source 1..90: mol_type = unassigned DNA; note = methanogen bacteria
agtccatcccatttatcccaattattaaatggaattgtttctataataaataatccttttgacctgttcatggggcaggttgcaatggga

SEQ ID NO: 20786 - DNA, 30 bp, unidentified
  source 1..30: mol_type = unassigned DNA; note = methanogen bacteria
tggtttgggattcctgtatatacattcagg

SEQ ID NO: 20787 - DNA, 168 bp, unidentified
  source 1..168: mol_type = unassigned DNA; note = methanogen bacteria
aactttaacctggaagtgggtataagctgttctgacgtgtacgtttatcttttaaatgcactttactacacaggaataaatcaccactctacaaacaacatttatctatcgccgataatctgttttttaacatctattcttttcagattcggcctagtggataaactg

SEQ ID NO: 20788 - DNA, 180 bp, unidentified
  source 1..180: mol_type = unassigned DNA; note = methanogen bacteria
ggcatgggaaacggacaatttgaagctgcatcacagatttccaatggaattgcaggaaaaggaggtgcagaaacagaccctgcattcaatactgaagtcggatactatctcttcaacatggcgaatttcatttcaaactcccatacagtatttgagggaaatcctgtattggaaaatcct

SEQ ID NO: 20789 - DNA, 291 bp, unidentified
  source 1..291: mol_type = unassigned DNA; note = methanogen bacteria
tttacatacacattcgaaccgacagacaagtacaatacaacagaggaaatgtcacagtatctgaaaagtgtcgacccgaattatgaaaatgtcaagatcggtgtttacaacatacgccctttcctctggtggattggagataatgtggaaggaataccgatagtcgaccaggccgcaatagataaaagcaacatgacgtattacatttcaaatgcaaagatgaaaaatttaacaaattacacagagattaaaaatattaataatctgtacttatataacagaacaagctat

SEQ ID NO: 20790 - DNA, 99 bp, unidentified
  source 1..99: mol_type = unassigned DNA; note = methanogen bacteria
tacggattccaccccgtcgatgcgttcttcgaggccatcagcggttataccaccaccggtgcgaccatcgtccccgacctcgacgaactcccgtccagt

SEQ ID NO: 20791 - DNA, 99 bp, unidentified
  source 1..99: mol_type = unassigned DNA; note = methanogen bacteria
tgcagcgtcgaactgttcgactccgtgtgcatctcgttctccaacgtccccaccggaggactcctcccccgcgacgacagcatggccagttatggtatg

SEQ ID NO: 20792 - DNA, 117 bp, unidentified
  source 1..117: mol_type = unassigned DNA; note = methanogen bacteria
gagcactccggcgacttcaccggcgaatatctcgcggataccttctggacctcgctctactcggtcatatcgtcgggtaccggtaccggattcgccatccaggacttcgtgtatccg

SEQ ID NO: 20793 - DNA, 129 bp, unidentified
  source 1..129: mol_type = unassigned DNA; note = methanogen bacteria
ctggaacccgatgtgggacgtttcactcccgacggcgtcgacgagctgcagacctacttcggcatcatcctcgccgcgatcgccaacgcgggtatcggacccctggcgagttacgacgtcctcagcatc

SEQ ID NO: 20794 - DNA, 165 bp, unidentified
  source 1..165: mol_type = unassigned DNA; note = methanogen bacteria
aacttcaactatagtttgggcattgattgcagtgacgtttacgtataccttttaaattctttatactatgcgggatacgatgtaaatgtaacctataatatctttttatccccagtgatatgcattctaacctcaatactttttagatttggccttgttgacaaa

SEQ ID NO: 20795 - DNA, 177 bp, unidentified
  source 1..177: mol_type = unassigned DNA; note = methanogen bacteria
ataggtcacggcagttttgaagcgggagctcaaatggcaagaggaatacaaggaacccttggaagtcaaaatgatcctgcatacaatcctgatttcagttattacctgatgaacatgctgaactttgtctcaaattcacatacctactttgatggaaatccagtattagacagtgca

SEQ ID NO: 20796 - DNA, 291 bp, unidentified
  source 1..291: mol_type = unassigned DNA; note = methanogen bacteria
ttcacgttcacattcgagcctacaacacagtacatcacaacagaggaagtgtccaattacatcattgaaaacaaccctgactatgaaaacatcaaaataggcgtttacaacatcaggccattcagctggtggcttggtgcaaatgcaacaggaatccctgtcaacaaccagactgcgattgattcaagcaatgttacatactacatttcaaacatgaaactcgataacctgacaaactattcggaaataaaaaatattaatgaaatccacttatatgaaaaaataaatgtt

SEQ ID NO: 20797 - DNA, 120 bp, unidentified
  source 1..120: mol_type = unassigned DNA; note = methanogen bacteria
cctggggttcaatacttcggaggacacaatccaagccttatcggctcaatgttgcctgcttccttgaatggaactctggcatccatgtataatacgggtattgtgtatgtattctccgat

SEQ ID NO: 20798 - DNA, 72 bp, unidentified
  source 1..72: mol_type = unassigned DNA; note = methanogen bacteria
actatcggttcattgaatattacagacattgtatatgtgcttaatcacaatctggttgatcctttatcaccg

SEQ ID NO: 20799 - DNA, 165 bp, unidentified
  source 1..165: mol_type = unassigned DNA; note = methanogen bacteria
tttaactataattttggaatatactgttcggacgtttatgtgtatcttctaaatgcgatttactattccacaggagaaaacatacgttctacaggaacaatctacctatccccgttagtctgctttttgacatcaatattattcagattgggccttgtcgacaag

SEQ ID NO: 20800 - DNA, 177 bp, unidentified
  source 1..177: mol_type = unassigned DNA; note = methanogen bacteria
atgggaagcggacagttcggtgccagtggagagatatccggcggaatcagtggaacattgggttcacaaaaggatcctgcatacaatccggacgtagcatattatgtttcaaatttcgccaatttcatttcaaacacaaatacaacaatggagggaaatcctacccttgaaaatgcc

SEQ ID NO: 20801 - DNA, 288 bp, unidentified
  source 1..288: mol_type = unassigned DNA; note = methanogen bacteria
tttaccatgacctttgagaaaacccacgagttcatggcaatagaggatgtttcagattatatcaaagacaacaatcctgattatgaaaacatgagcattggagtgtttaatgtaagggcattcaactggtggcttggggaaaaccttcttccaatatcaagtaccgatgaagcactaatcgattcctgcaatgcaacgtactacatctcaaatagagtattggataacgttaccaactatactgaaataaaagaaatcgataacattcacatatatgaaaaaattgtc

SEQ ID NO: 20802 - DNA, 177 bp, unidentified
  source 1..177: mol_type = unassigned DNA; note = methanogen bacteria
tactcaaataaagtaattgcaaatagtacaaatagaagatattaccttgcaaatgaagcaactcataaatcttatattttacatcactttacaagttatttacaagctttatttgacccttcattgtatagttatttaataaaagacattttcttctttagtaatccaggatatttt

SEQ ID NO: 20803 - DNA, 54 bp, unidentified
  source 1..54: mol_type = unassigned DNA; note = methanogen bacteria
tatttatcatacacaaagcgttttgacataatattaggagttcaaggtagatat

SEQ ID NO: 20804 - DNA, 39 bp, unidentified
  source 1..39: mol_type = unassigned DNA; note = methanogen bacteria
atacttcatcatttattcccatcaatgaaaatacttatt

SEQ ID NO: 20805 - DNA, 171 bp, unidentified
  source 1..171: mol_type = unassigned DNA; note = methanogen bacteria
aatttcaataataatattggaatttactgttctgacgtttacgtttacttattgaatgcactttactatacaggaacaaatatacgttcaactgcaacaattcacctgtctccattaatctgttttttaacctcaatcttttttgatttgggttttgttgacaaacaggcg

SEQ ID NO: 20806 - DNA, 180 bp, unidentified
  source 1..180: mol_type = unassigned DNA; note = methanogen bacteria
atgggaaacggacatttcggagcgggcagccagatatccgatggtatcagcggagcgcagggagcggaaatagatcctgcatacaacactgatgtaagctattacgcagccaatttccttaacttcatctcaaattcacatacggtcattgacggaaatcctattttggaaaattccacc

SEQ ID NO: 20807 - DNA, 288 bp, unidentified
  source 1..288: mol_type = unassigned DNA; note = methanogen bacteria
ttcacatttaccttcgagccgacagacgaattcaaaacaatagaagaagtttcagattacataattacaacccatcccgactatgaaaacatatccatcggcgtatataacgtcagggcttataactggtggctgggtggaaatctcatacctatagcaagcgatgatgaggatttgattgactcaagcaacgtaacgtattacatttcaaatgaaattttgaatgacgtgacaaattacagtgacataaaaaacatcaataatgtttacatatacgagaaaagtgtt

SEQ ID NO: 20808 - DNA, 171 bp, unidentified
  source 1..171: mol_type = unassigned DNA; note = methanogen bacteria
aatttcaatgacaatcttggaacctactgttccgatgtctacgtttatctcttgaatgcgctttactataccggaacaaatatccgagcaacaggaaccatctatctctccccattgatttgccgattgacctcgatattcttctatttcggatttgtagacaagcaggca

SEQ ID NO: 20809 - DNA, 186 bp, unidentified
  source 1..186: mol_type = unassigned DNA; note = methanogen bacteria
atgggaatgggaaacggcaatttcgctgcgggaaaccagatttcatcgggagtcagcggagcccaaggatcgcaaaccgaccctgcatacaatacggatgtgagctactacctgacaaatttcattaacttcatctcgaattcccataccacaatagatggaaaccccgttttaagcaaccccaca

SEQ ID NO: 20810 - DNA, 288 bp, unidentified
  source 1..288: mol_type = unassigned DNA; note = methanogen bacteria
ttcacctatacatttgaggaaacggacaaattcaagacgatagaagatgtttcagactacatcatttcaaataatcccgattatgaaaacatttcaataggagtgtacaatgtaagggcttacaattggtggctgggaggaaatctcgtgccgataaaaagccatgaggccggactgatcgattcaagcaacgttacctactacatatccgaccgaaccctgagcaatataacaaactacactgaaattaaaaatattaacgacgtccatatttacgaaaaaagtgtt

SEQ ID NO: 20811 - DNA, 42 bp, unidentified
  source 1..42: mol_type = unassigned DNA; note = methanogen bacteria
gaaaacatcctattttccacattaaaatacattcaaggagac

SEQ ID NO: 20812 - DNA, 48 bp, unidentified
  source 1..48: mol_type = unassigned DNA; note = methanogen bacteria
tttggacaaagcccaatattcccattcacatcattgaatcttccttta

SEQ ID NO: 20813 - DNA, 60 bp, unidentified
  source 1..60: mol_type = unassigned DNA; note = methanogen bacteria
cctaatgtgcttggtggaggatactccatgatgcatttaatagaatatgccctcccacca

SEQ ID NO: 20814 - DNA, 168 bp, unidentified
  source 1..168: mol_type = unassigned DNA; note = methanogen bacteria
atattcaattccaattttggaatatactgttctgacgtttatgtttatcttctcaatgcactctactatacaggagtcaacatacggtcaaccggaacaatatacctatcgcccttgatttgctttctaacatcaatatttttctatgcaggattcatagacaaactg

SEQ ID NO: 20815 - DNA, 180 bp, unidentified
  source 1..180: mol_type = unassigned DNA; note = methanogen bacteria
atgggaagcgggcatttcgccgccagcggacagatttccaatggaataagcggcgcccaaggttcaaatgtggatccggcatacaataccgatgtcagctattatgtgagcaacttcctgaatttcatttcaaactcacataccgtcgttaacggaaaccccattctggaaaaccccaca

SEQ ID NO: 20816 - DNA, 288 bp, unidentified
  source 1..288: mol_type = unassigned DNA; note = methanogen bacteria
ttcacattcacctttgagcctacaaatgagttcaaagccatagaagaggtttcagattacattatcgacaacaatcccgattatgagaacctacccatcggggtttacaatgtaagggcatacaactggtggctgggaagccatcttttaccgataagcagcagcgaccaggacattatcgattcaagcaacgccacctattacatctccgatagggtgctgaataatgttacaaactataccgagataaaaaatatcgatcacatttacatatatgagaagagtgtt

SEQ ID NO: 20817 - DNA, 42 bp, unidentified
  source 1..42: mol_type = unassigned DNA; note = methanogen bacteria
gaaaatatcttattttctacattgaagtatatacaaggagac

SEQ ID NO: 20818 - DNA, 48 bp, unidentified
  source 1..48: mol_type = unassigned DNA; note = methanogen bacteria
tttggacaaagcccaatattcccattcacatcattgaaccttccatta

SEQ ID NO: 20819 - DNA, 60 bp, unidentified
  source 1..60: mol_type = unassigned DNA; note = methanogen bacteria
cctaatgtgcttggtggaggacactcaatgatgcatttgatagagtatacattacctcca

SEQ ID NO: 20820 - DNA, 45 bp, unidentified
  source 1..45: mol_type = unassigned DNA; note = methanogen bacteria
gcacctatcattacagcatatttccaaaagccagaggcattattg

SEQ ID NO: 20821 - DNA, 36 bp, unidentified
  source 1..36: mol_type = unassigned DNA; note = methanogen bacteria
ggaggattcttagcggcatctgcaatcggttacttt

SEQ ID NO: 20822 - DNA, 51 bp, unidentified
  source 1..51: mol_type = unassigned DNA; note = methanogen bacteria
gagattatgggtcttgtatactttaccaattctgcatacatgaatggtgca

SEQ ID NO: 20823 - DNA, 168 bp, unidentified
  source 1..168: mol_type = unassigned DNA; note = methanogen bacteria
atgtttaatttgaatttaggaatatactgctcagacgtttatgtatacttgttgaacgctctttattatactggaaccaacatacgcgctaccggaacaatttatttgtccccactgatttgttatttaacatcaatattttttcgtttcggatttgttgacaaatta

SEQ ID NO: 20824 - DNA, 189 bp, unidentified
  source 1..189: mol_type = unassigned DNA; note = methanogen bacteria
attttaattatgggttctggcacctttggtgcgggagaccagatttcaaatggaatcagtggagtgcagggcgctgaaattgatcccgcatacaataccgacaccagttattatgtaagcaatttcctgaatttcatttcaaattcacatactgtaattgacggaaatcctatacttgaaaattcaaca

SEQ ID NO: 20825 - DNA, 288 bp, unidentified
  source 1..288: mol_type = unassigned DNA; note = methanogen bacteria
tttacctttacatttgatgaaacctctgagtataacacaatcgaggatgtttcagactatattattgacaccaatccggattataaaaatttatccattggagcatataatgtaagagcctataactggtggctgggggaaaatctccttgcaataaaaagcagtgatgaagcaacgattgatgcaagcaatgccacctactatatatcagataaagtccttgagaatgtaacaaattatactgaaataaaaaatattaataatgtttatatttacgaaaagagtgtt

SEQ ID NO: 20826 - DNA, 168 bp, unidentified
  source 1..168: mol_type = unassigned DNA; note = methanogen bacteria
ttcaataataatcttggaatttactgctctgacgtttacgtttatcttttaaatgcactttattatactggaacaaatattcgttcaaccggaacgatttatttgtctccgttaatttgttatttaacatcaatattcttccgtttaggatttgtagacctgcaggct

SEQ ID NO: 20827 - DNA, 183 bp, unidentified
  source 1..183: mol_type = unassigned DNA; note = methanogen bacteria
actttgggagaagggacttttggtgcaggtgaccaaatttcatctggagtcagcggcacccaaggggcacaaactgaccctgcatataatactgatgtaagctactatgtgacaaatttcatcaatttcatttcaaattcacatacagtaattgatggaaatccagttttagacaatcctacg

SEQ ID NO: 20828 - DNA, 291 bp, unidentified
  source 1..291: mol_type = unassigned DNA; note = methanogen bacteria
acattcacatacacttttgaggaaacaggtgagtttagagcaataaaagacgtttcagactacattattgccaataatcctgattataaaaatatttcaatcggcacttacaatgtaagagcctacaattggtggttaggtgaaaatgccctgccaataaaaagctatgacaccgaaacgattgatgcaagtaatgtcacttattacatatcgaaccgaatccaaaataatctgacaaattatactgaagtaaaaaatataaataatctttacatatacaaaaaaagtgtt

SEQ ID NO: 20829 - DNA, 30 bp, unidentified
  source 1..30: mol_type = unassigned DNA; note = methanogen bacteria
ggcaacctgctccatgagggagtcatgtgg

SEQ ID NO: 20830 - DNA, 171 bp, unidentified
  source 1..171: mol_type = unassigned DNA; note = methanogen bacteria
aacttcaacaatagcattggagtctactgttccgatgtttacgtttatcttttaaatgctctttattatacgggaatcaatcttcgttcaacatccacgatttacttatcacccgtaatatgtcgattgacctcaatattcttttattttggctttgtaaacaagcaggcc

SEQ ID NO: 20831 - DNA, 180 bp, unidentified
  source 1..180: mol_type = unassigned DNA; note = methanogen bacteria
atgggaaatggacaatttgatgcaggaagccaaatttcatcgggaatgattggtgcccagggaacacaatccgatcctgcatatactgaagacacaggctactacatagccaatctccccaatttcatttcaaattcacatacagtaattgacggaaatcctactttagacaatcctacg

SEQ ID NO: 20832 - DNA, 288 bp, unidentified
  source 1..288: mol_type = unassigned DNA; note = methanogen bacteria
gcattcacatacacttttgaagagacaaataaatttaaagccatagaagagattgcagattacattatcgtcaaccatccggattatgaaaacattaaaattggagtgtacaatgtaagagcctacaactggtggttaggtgaaaaccttctgccaataaaaagcagcgacaccggaataattgactcgagcaatgccacatattacatatcgaacaaagacataaatctgacaaactataccatgataaaaaacatagacaccatttacctatatgaaaaaagtgtc

SEQ ID NO: 20833 - DNA, 42 bp, unidentified
  source 1..42: mol_type = unassigned DNA; note = methanogen bacteria
gaatccattgtttttaatgtaatttttattgttaaaaccaat

SEQ ID NO: 20834 - DNA, 48 bp, unidentified
  source 1..48: mol_type = unassigned DNA; note = methanogen bacteria
ttcggacaatcaactgtttttaaaatagcctctccaaacatccccctt

SEQ ID NO: 20835 - DNA, 60 bp, unidentified
  source 1..60: mol_type = unassigned DNA; note = methanogen bacteria
ccccagatattggaggggggatattcaatggtaaattcacttaattatttaattcctgga

SEQ ID NO: 20836 - DNA, 30 bp, unidentified
  source 1..30: mol_type = unassigned DNA; note = methanogen bacteria
attccagtatttggacttaaccctacaatt

SEQ ID NO: 20837 - DNA, 42 bp, unidentified
  source 1..42: mol_type = unassigned DNA; note = methanogen bacteria
gaaaacattctcttttccacaattgaatatgtgaaaggagat

SEQ ID NO: 20838 - DNA, 48 bp, unidentified
  source 1..48: mol_type = unassigned DNA; note = methanogen bacteria
tttggacaaagcccaatattcccattcacctcattgaatcttccttta

SEQ ID NO: 20839 - DNA, 60 bp, unidentified
  source 1..60: mol_type = unassigned DNA; note = methanogen bacteria
cctaatgtcttaggcggaggatattcaatgatgtccttaatagaaatcagcctgcctcca

SEQ ID NO: 20840 - DNA, 30 bp, unidentified
  source 1..30: mol_type = unassigned DNA; note = methanogen bacteria
ccgattttcggattcgaccctttgattgca

SEQ ID NO: 20841 - DNA, 42 bp, unidentified
  source 1..42: mol_type = unassigned DNA; note = methanogen bacteria
gaagacattttaagacattatttaaccatcattaatgggaat

SEQ ID NO: 20842 - DNA, 48 bp, unidentified
  source 1..48: mol_type = unassigned DNA; note = methanogen bacteria
tttggtcagtctactgcacttacatttccaatatccaatattcctctt

SEQ ID NO: 20843 - DNA, 60 bp, unidentified
  source 1..60: mol_type = unassigned DNA; note = methanogen bacteria
cctgaaataagctgcggcggacattatatgttgggattatttgatgttgctgttccatct

SEQ ID NO: 20844 - DNA, 33 bp, unidentified
  source 1..33: mol_type = unassigned DNA; note = methanogen bacteria
attccaatatgtggtcttgacaatgtattaatc

SEQ ID NO: 20845 - DNA, 240 bp, unidentified
  source 1..240: mol_type = unassigned DNA; note = methanogen bacteria
atgaccaacgtggattcgtggggatggtaccgctccggggagaatatcatctcgggagacggattctatgcccgttccggttacagttacgggcccgcattcggatatctgatcaccttctcgctgatccctctgacgtatctgctgccgataggtaccttctcgcagcagagcgatgcgatgatcgcactgcagccgtacttcgacttctcccccgccctgcagaccatcgagttcctg

SEQ ID NO: 20846 - DNA, 81 bp, unidentified
  source 1..81: mol_type = unassigned DNA; note = methanogen bacteria
cagctgatggacggtacgttcatggacacgtggcaggtcgtcttcggcagggtggaccacgccggaaacctcgtagggaga

SEQ ID NO: 20847 - DNA, 42 bp, unidentified
  source 1..42: mol_type = unassigned DNA; note = methanogen bacteria
agcggagggatcacgaacatgttctccgacctgttccacgtc

SEQ ID NO: 20848 - DNA, 111 bp, unidentified
  source 1..111: mol_type = unassigned DNA; note = methanogen bacteria
gcggcgctgctggtatccatcgcccagtacaccgacctcatcagcatggaccttgtgatcgatctcacgaagatgtacgtcacgggaggggtcgtcatcggcgactacagc

SEQ ID NO: 20849 - DNA, 30 bp, unidentified
  source 1..30: mol_type = unassigned DNA; note = methanogen bacteria
atcatcctgggactcgaggaatccgacaag

SEQ ID NO: 20850 - DNA, 105 bp, unidentified
  source 1..105: mol_type = unassigned DNA; note = methanogen bacteria
ttcaccatgggcggctggggagaggtcacctccaactgggacgaggtctccatcgaggtcgcacacttcaccgacctgttctatgacggcggtgcaccccttacg

SEQ ID NO: 20851 - DNA, 96 bp, unidentified
  source 1..96: mol_type = unassigned DNA; note = methanogen bacteria
agggcatgggcacacagccagggtatcgagacggatttcaccggtactgctaaagaaaccatcttcatcgcaatggccggtgcgatgttcgccacc

SEQ ID NO: 20852 - DNA, 54 bp, unidentified
  source 1..54: mol_type = unassigned DNA; note = methanogen bacteria
tccggcggaatcatcggtgcgggagagtactgcctgtacaacacccagctgtac

SEQ ID NO: 20853 - DNA, 45 bp, unidentified
  source 1..45: mol_type = unassigned DNA; note = methanogen bacteria
tcagaagatgtattaagaagctatctggcaataataaacagtaat

SEQ ID NO: 20854 - DNA, 48 bp, unidentified
  source 1..48: mol_type = unassigned DNA; note = methanogen bacteria
tttggccagtctacagcattgacatttccaatatcaaatatcccgctt

SEQ ID NO: 20855 - DNA, 60 bp, unidentified
  source 1..60: mol_type = unassigned DNA; note = methanogen bacteria
cctaagataagctgtggcggacattatatgatgggattatttgatgtggccattccttct

SEQ ID NO: 20856 - DNA, 30 bp, unidentified
  source 1..30: mol_type = unassigned DNA; note = methanogen bacteria
attccgatttgtggtcttgacaatgcattg

SEQ ID NO: 20857 - DNA, 45 bp, unidentified
  source 1..45: mol_type = unassigned DNA; note = methanogen bacteria
ccatggcttgcaaacgatattttccataaccccaatgcattatta

SEQ ID NO: 20858 - DNA, 36 bp, unidentified
  source 1..36: mol_type = unassigned DNA; note = methanogen bacteria
ggtgttttcttatctgactcattaatcggttattat

SEQ ID NO: 20859 - DNA, 48 bp, unidentified
  source 1..48: mol_type = unassigned DNA; note = methanogen bacteria
attatgagaattgtatactttacaaatccagcatacacctccggggca

SEQ ID NO: 20860 - DNA, 33 bp, unidentified
  source 1..33: mol_type = unassigned DNA; note = methanogen bacteria
accatcatcctcggcctctccgagaacgacaag

SEQ ID NO: 20861 - DNA, 108 bp, unidentified
  source 1..108: mol_type = unassigned DNA; note = methanogen bacteria
gtcaccctcggcggatggggagaggtcaccgccatctggaacagtcccctttccggactccctgcgcacttcaccgacatcatgtacgacggcggcgagaagatcacg

SEQ ID NO: 20862 - DNA, 93 bp, unidentified
  source 1..93: mol_type = unassigned DNA; note = methanogen bacteria
agggcctgggcaatccacagcggttctgttgcctcgctcatcggtaatgaagagaccatcttcatcgccatggcaggagccctgttcaccacc

SEQ ID NO: 20863 - DNA, 54 bp, unidentified
  source 1..54: mol_type = unassigned DNA; note = methanogen bacteria
ggcggaggtatcatcggcggcggaagctactgcatctacgacaccggcctctac

SEQ ID NO: 20864 - DNA, 45 bp, unidentified
  source 1..45: mol_type = unassigned DNA; note = methanogen bacteria
tctgaggatatattaaggggctatttaagtattattaacagcaat

SEQ ID NO: 20865 - DNA, 48 bp, unidentified
  source 1..48: mol_type = unassigned DNA; note = methanogen bacteria
tttggccagtccacaatattgtcttttcctgtagccaacattccatta

SEQ ID NO: 20866 - DNA, 60 bp, unidentified
  source 1..60: mol_type = unassigned DNA; note = methanogen bacteria
cctgagataagtgacggcggacatttcatgatgggaatgcttgatgtagctgttccgtcc

SEQ ID NO: 20867 - DNA, 33 bp, unidentified
  source 1..33: mol_type = unassigned DNA; note = methanogen bacteria
attccgatttgcggtcttgaaagtgttctggtt

SEQ ID NO: 20868 - DNA, 42 bp, unidentified
  source 1..42: mol_type = unassigned DNA; note = methanogen bacteria
ccgtggcttgcctacagttacctgggaaaacctgtagctctt

SEQ ID NO: 20869 - DNA, 36 bp, unidentified
  source 1..36: mol_type = unassigned DNA; note = methanogen bacteria
ggtaaatttttagctttggatgctattggtttttat

SEQ ID NO: 20870 - DNA, 54 bp, unidentified
  source 1..54: mol_type = unassigned DNA; note = methanogen bacteria
ccgattttaagggtattctactttactgatcctgcatatgttgccggtgcctct

SEQ ID NO: 20871 - DNA, 171 bp, unidentified
  source 1..171: mol_type = unassigned DNA; note = methanogen bacteria
aacttcaacaatagtattggaatttactgttccgatgtttatgtttatcttttaaatgcgctttattatactggaatcaatcttcgttcaacatcaacgatttatttatcacccataatatgtcgcttaacctcaatattcttttattttggctttgtagacaagcaagcc

SEQ ID NO: 20872 - DNA, 180 bp, unidentified
  source 1..180: mol_type = unassigned DNA; note = methanogen bacteria
atggggcatggtcaatttggtgcaggaacccaaatctcatcaggaatgattggtgcccaaggctcacaagccgatcctgcatttaatgaagacgtgagctattatgtagccaatttcatcaatttcatatcaaattcacacacagtaattgatggaaatccaattttagataatcctaca

SEQ ID NO: 20873 - DNA, 285 bp, unidentified
  source 1..285: mol_type = unassigned DNA; note = methanogen bacteria
ttcacatacacttttgaagaaacaaataaatttaatgcaataaaagatatggcagattacgttatcgacaacaatccggattatgaaaacattaccattggagtgttcaatgtaagagcctacaactggtggctaggtgaaaatctcctgccaataaggagcactgacatttcaacgattgactcaagcaatgttacttattatatatcggacaatgccctgaacctgacaaactatactgaaataaaacaaatcgacagcattcacctatatgaaaaaagtgtt

SEQ ID NO: 20874 - DNA, 39 bp, unidentified
  source 1..39: mol_type = unassigned DNA; note = methanogen bacteria
cttatggcgaatgtctttttaaaaaagcctgaaacatta

SEQ ID NO: 20875 - DNA, 33 bp, unidentified
  source 1..33: mol_type = unassigned DNA; note = methanogen bacteria
aagtttttaacacttgaaagcgtcggatttttc

SEQ ID NO: 20876 - DNA, 51 bp, unidentified
  source 1..51: mol_type = unassigned DNA; note = methanogen bacteria
cctactttacaggtattttactttaaaaatccttcttatgttaatggtgct

SEQ ID NO: 20877 - DNA, 294 bp, unidentified
  source 1..294: mol_type = unassigned DNA; note = methanogen bacteria
aatcctatttgcaatgtttctgatgaaattgaacatttaacccgtgcagatataacatcacatggtattttgatgccagattatgtgaacggttcttttaaagtttctagctttgttcctgacttttttgaaaaaagtagagcattaactgttctacaagtaagtggggacacggcaaaaattaataattctatgtctacttatcattcagcttttcagcaaaatcctttttatccatatattcctcaaacaatggggatattgattgctaaattcttagatttaaatgttatt

SEQ ID NO: 20878 - DNA, 216 bp, unidentified
  source 1..216: mol_type = unassigned DNA; note = methanogen bacteria
attgctatgcctagttatactcattcttggagggctgaatattataaaaatcatataattaatccacctcaacaaactaactatattttacatcatcctgttgattttgctatttctgttttacatattccaaacacattattaaatagttcaatattatcagaatttaatactgtacattcagttattcctcttcaaaccaaggtgtatacttca

SEQ ID NO: 20879 - DNA, 54 bp, unidentified
  source 1..54: mol_type = unassigned DNA; note = methanogen bacteria
attagttggggtatggttggtcatttagaggatatggctcttcatgccaggtat

SEQ ID NO: 20880 - DNA, 168 bp, unidentified
  source 1..168: mol_type = unassigned DNA; note = methanogen bacteria
tttaatttaaatttaggaatccaatgttctgatgtttatctctatcttgtaaatgcactctattataatggaataactatcccacatatagaaaatatagttttatcacctacaatatgttatctaacatctcttctttttaaattgggtttaacagacacctcatca

SEQ ID NO: 20881 - DNA, 189 bp, unidentified
  source 1..189: mol_type = unassigned DNA; note = methanogen bacteria
attacaaatttaagtggaggagatttcctaccaggttcacagattaatagtggaataagtggatcgcagggaaaagaaactgatcctgcattcaaccaggatatcggatattatttaaataatcttccaaatttcatttcaaattcacatacctattttggtgcaaatcctgttttggacaatccaact

SEQ ID NO: 20882 - DNA, 285 bp, unidentified
  source 1..285: mol_type = unassigned DNA; note = methanogen bacteria
tttacattaaccattgatgaaacatatacatttaaacaaactgaagacatgtccaattacataattgaaaacaatccggattacaaaaatataccgattgcaacatacaatatgcgaccttatatgtggtggcttggacctcagattagtggaatagctcatactgaaacacaaagaatagatgaaagtaattttacctattacatctcaagtaacccattaaatcttacaaattatacagaagttaaaaatataggaacactatatttatacaaaaagaatgtt

SEQ ID NO: 20883 - DNA, 42 bp, unidentified
  source 1..42: mol_type = unassigned DNA; note = methanogen bacteria
cctgttttggcctataagtacttgggcaagcctttggcatta

SEQ ID NO: 20884 - DNA, 36 bp, unidentified
  source 1..36: mol_type = unassigned DNA; note = methanogen bacteria
ggtaaattcctgacatttgctgatgtcggattcttt

SEQ ID NO: 20885 - DNA, 51 bp, unidentified
  source 1..51: mol_type = unassigned DNA; note = methanogen bacteria
cctactttaagtttgctgtatttcaaaaatcccgcttatgttgctggtgca

SEQ ID NO: 20886 - DNA, 39 bp, unidentified
  source 1..39: mol_type = unassigned DNA; note = methanogen bacteria
ctgttggccaataattttttacataaacctcttgcttta

SEQ ID NO: 20887 - DNA, 33 bp, unidentified
  source 1..33: mol_type = unassigned DNA; note = methanogen bacteria
aaatttttaactttggatgctgttggttttttt

SEQ ID NO: 20888 - DNA, 51 bp, unidentified
  source 1..51: mol_type = unassigned DNA; note = methanogen bacteria
cctactttaagagtcttgtattttgctaaaccggaatatgttgcaggtgct

SEQ ID NO: 20889 - DNA, 39 bp, unidentified
  source 1..39: mol_type = unassigned DNA; note = methanogen bacteria
ttgttggccaataatttcatgggaaaacctgaagtaatg

SEQ ID NO: 20890 - DNA, 36 bp, unidentified
  source 1..36: mol_type = unassigned DNA; note = methanogen bacteria
ggcagatttttaacattggaaagcatcggttttttc

SEQ ID NO: 20891 - DNA, 48 bp, unidentified
  source 1..48: mol_type = unassigned DNA; note = methanogen bacteria
attttaaggttgctttactttaaaatacctgcttatgctgcaggagct

SEQ ID NO: 20892 - DNA, 42 bp, unidentified
  source 1..42: mol_type = unassigned DNA; note = methanogen bacteria
gaccacagtcttggaatcccccttaccgacggaacaaccatt

SEQ ID NO: 20893 - DNA, 93 bp, unidentified
  source 1..93: mol_type = unassigned DNA; note = methanogen bacteria
ctcaccgtcggcggcggagaactgtccggattcagcatcgacaacatcgtcgaccacctgacccccgacggttgggattggggagtctccgac

SEQ ID NO: 20894 - DNA, 81 bp, unidentified
  source 1..81: mol_type = unassigned DNA; note = methanogen bacteria
tacggaatgatgtctcccgagcagatcgatgcatggggagtatccaccctgtacccgatagccgaatacgacttcggttcc

SEQ ID NO: 20895 - DNA, 168 bp, unidentified
  source 1..168: mol_type = unassigned DNA; note = methanogen bacteria
tttaatgaccatttagggatatattgctcagatgtttatgtttacctgttaaacgcactatattatgcgggaaccaatatctattcaacaaaatcaatttatctctcaccagtagtctgttttttaacgtccctcatatttgatttgggttatgttgataaaactgca

SEQ ID NO: 20896 - DNA, 186 bp, unidentified
  source 1..186: mol_type = unassigned DNA; note = methanogen bacteria
acgtcaatgggagatggtcaattagtttttgacggattgcttacaagtggagttgaaggaaatctcggatcaacccatgacaatgcgtataatcctgatcttggatattacctgataaatatgggaaattttatttcctcatccaatacaacatttgttgctaacacgccatcattaaaccaacca

SEQ ID NO: 20897 - DNA, 291 bp, unidentified
  source 1..291: mol_type = unassigned DNA; note = methanogen bacteria
tttacatacacatttgatgataccaatgaatttaatgctcctgaaaaaatgactgactatattaaagaaaatatagataactggagcgaaatcaaaatcggtaactacaatatacgtccatattactggtatttaggtatgaattctccgggaatagaaagctataatactcaaaaaattattgatagtaacgttacatattatatctcggatattgagcagaagaatctgaccaactatacggagataaaacagattgaaaatctatatttatataagaaaatacgtgaa

SEQ ID NO: 20898 - DNA, 42 bp, unidentified
  source 1..42: mol_type = unassigned DNA; note = methanogen bacteria
cttttggctaataatttcatgggtaagcctgaagttcaagtt

SEQ ID NO: 20899 - DNA, 36 bp, unidentified
  source 1..36: mol_type = unassigned DNA; note = methanogen bacteria
ggaagatttttatcattggaaagcatcggatttttc

SEQ ID NO: 20900 - DNA, 48 bp, unidentified
  source 1..48: mol_type = unassigned DNA; note = methanogen bacteria
attttaagattgctttactttcaaattcccgcttatgcagccggggct

SEQ ID NO: 20901 - DNA, 42 bp, unidentified
  source 1..42: mol_type = unassigned DNA; note = methanogen bacteria
cctattattacaaactattatcataagcctgaagcattgctt

SEQ ID NO: 20902 - DNA, 51 bp, unidentified
  source 1..51: mol_type = unassigned DNA; note = methanogen bacteria
ggagtgatggggcttgtatactttacaaatgctgcatatatgaatggggca

SEQ ID NO: 20903 - DNA, 165 bp, unidentified
  source 1..165: mol_type = unassigned DNA; note = methanogen bacteria
tttaacaataacttagggatttactgttctgacgtttatgtttacctgttaaatgcattatattatgccggaaccaatattcattcaacaaaatccatttatctatctcccgtcgtttgttttttaacgtcccttatttttgagttgggatatgttgataaagtt

SEQ ID NO: 20904 - DNA, 192 bp, unidentified
  source 1..192: mol_type = unassigned DNA; note = methanogen bacteria
gtttcatcaatgggtgaaagttatttaggctttgatggaatgcttgtcggaggagcagagggaaatctcggatccacacacgataactcatataaccccgacatcggatattacctgttgaatatgggcaatttcatctcatcttcaaatacaacatttgttgtaaaaacccccgcattaaataatccaaca

SEQ ID NO: 20905 - DNA, 288 bp, unidentified
  source 1..288: mol_type = unassigned DNA; note = methanogen bacteria
ttcacattgacctttgaagagactaacgaattcaatgcgccggaaaaaatgacagattacattaaagcgaatatagaaaactggagcgatattcacataggcaattataacatccgcccgtattactggtatttaggcctcaatacgccaggaatagaaagcagcaatgcacaaaagattattgatagcgatgtgacatattatatatcggatcaaaaagaaaaaaatttaacgggttttgcggaaataaaagaaatcgacggtttgtatttatacaaaagaaatgca

SEQ ID NO: 20906 - DNA, 45 bp, unidentified
  source 1..45: mol_type = unassigned DNA; note = methanogen bacteria
ccttggttagttgataattatttacataaacctattgcattaatt

SEQ ID NO: 20907 - DNA, 36 bp, unidentified
  source 1..36: mol_type = unassigned DNA; note = methanogen bacteria
ggtaagtttttaagcttagactccattggatttttt

SEQ ID NO: 20908 - DNA, 51 bp, unidentified
  source 1..51: mol_type = unassigned DNA; note = methanogen bacteria
cctactttaagagtattttactttactaattccgcttatgttgctggtgct

SEQ ID NO: 20909 - DNA, 45 bp, unidentified
  source 1..45: mol_type = unassigned DNA; note = methanogen bacteria
ccttggctgacttattcttatttgggcaaacctgaagcattagtt

SEQ ID NO: 20910 - DNA, 33 bp, unidentified
  source 1..33: mol_type = unassigned DNA; note = methanogen bacteria
aaatttttaacgttggatgctgtcggatttttt

SEQ ID NO: 20911 - DNA, 51 bp, unidentified
  source 1..51: mol_type = unassigned DNA; note = methanogen bacteria
cctactttgagggtattgtattttgccaaaccggaatatgttgctggtgca

SEQ ID NO: 20912 - DNA, 39 bp, unidentified
  source 1..39: mol_type = unassigned DNA; note = methanogen bacteria
ctccaaccgatcaaacagcacttcggcgagagtgagttc

SEQ ID NO: 20913 - DNA, 30 bp, unidentified
  source 1..30: mol_type = unassigned DNA; note = methanogen bacteria
tactacatcgcagagatggaccagccctat

SEQ ID NO: 20914 - DNA, 33 bp, unidentified; identical to SEQ ID NO: 20642
  source 1..33: mol_type = unassigned DNA; note = methanogen bacteria

SEQ ID NO: 20915 - DNA, 42 bp, unidentified
  source 1..42: mol_type = unassigned DNA; note = methanogen bacteria
gattttattgcaaatgcaatatttcataaacccctagttgta

SEQ ID NO: 20916 - DNA, 36 bp, unidentified
  source 1..36: mol_type = unassigned DNA; note = methanogen bacteria
ggtgtttttatgttatctagggatgtagggttttat

SEQ ID NO: 20917 - DNA, 39 bp, unidentified
  source 1..39: mol_type = unassigned DNA; note = methanogen bacteria
attcaattactgtttggagaagtttatactccaggttca

SEQ ID NO: 20918 - DNA, 42 bp, unidentified
  source 1..42: mol_type = unassigned DNA; note = methanogen bacteria
gaagatattttaagaggttatctgttaattattaatggcaat

SEQ ID NO: 20919 - DNA, 48 bp, unidentified
  source 1..48: mol_type = unassigned DNA; note = methanogen bacteria
tttggtcaatctaccgtactgtcatttcctgtttcaaatattcccctt

SEQ ID NO: 20920 - DNA, 60 bp, unidentified
  source 1..60: mol_type = unassigned DNA; note = methanogen bacteria
cctgaaatcagctgtggcggacattatatgatgggaatgttggatgtggctgttccatcc

SEQ ID NO: 20921 - DNA, 30 bp, unidentified
  source 1..30: mol_type = unassigned DNA; note = methanogen bacteria
attccaatctgtgggcttgaaaatgctttg

SEQ ID NO: 20922 - DNA, 45 bp, unidentified
  source 1..45: mol_type = unassigned DNA; note = methanogen bacteria
tcggaaagtgttttgagagattatttgggtataatacatggtaat

SEQ ID NO: 20923 - DNA, 51 bp, unidentified
  source 1..51: mol_type = unassigned DNA; note = methanogen bacteria
tttggccagtctacaatccttaatttccccgtcttaaccattcctttgccg

SEQ ID NO: 20924 - DNA, 60 bp, unidentified
  source 1..60: mol_type = unassigned DNA; note = methanogen bacteria
cctgaaataagcgatggaggacacttcatgatggacattctggacattgctgtgccttca

SEQ ID NO: 20925 - DNA, 33 bp, unidentified
  source 1..33: mol_type = unassigned DNA; note = methanogen bacteria
gttcctgcattcggctggcagcatgatgtgatt

SEQ ID NO: 20926 - DNA, 42 bp, unidentified
  source 1..42: mol_type = unassigned DNA; note = methanogen bacteria
gaacatattttaagaaactatttaaacataatacatggaaat

SEQ ID NO: 20927 - DNA, 48 bp, unidentified
  source 1..48: mol_type = unassigned DNA; note = methanogen bacteria
tttggccaatcaacaatcctgaatttccctgttttaaatattcctctt

SEQ ID NO: 20928 - DNA, 60 bp, unidentified
  source 1..60: mol_type = unassigned DNA; note = methanogen bacteria
ccagaaataagtgatggtggacactttatgatggatatgttgggtgttgcaattccatct

SEQ ID NO: 20929 - DNA, 30 bp, unidentified
  source 1..30: mol_type = unassigned DNA; note = methanogen bacteria
gttcctgcattcggatggcagcatgagttg

SEQ ID NO: 20930 - DNA, 39 bp, unidentified; identical to SEQ ID NO: 20874
  source 1..39: mol_type = unassigned DNA; note = methanogen bacteria

SEQ ID NO: 20931 - DNA, 33 bp, unidentified
  source 1..33: mol_type = unassigned DNA; note = methanogen bacteria
aagttcttaacacttgaaagcgtaggatttttc

SEQ ID NO: 20932 - DNA, 51 bp, unidentified; identical to SEQ ID NO: 20876
  source 1..51: mol_type = unassigned DNA; note = methanogen bacteria

SEQ ID NO: 20933 - DNA, 42 bp, unidentified
  source 1..42: mol_type = unassigned DNA; note = methanogen bacteria
gaacacattttaagaaactatttaaacgtaatacatggaaat

SEQ ID NO: 20934 - DNA, 48 bp, unidentified
  source 1..48: mol_type = unassigned DNA; note = methanogen bacteria
tttggtcaatcaacaattcttaactttccggttttaaatattcctctt

SEQ ID NO: 20935 - DNA, 60 bp, unidentified
  source 1..60: mol_type = unassigned DNA; note = methanogen bacteria
ccagaaataagtgatggaggacacttcatgatggatatgttgggtgttgcaattccgtct

SEQ ID NO: 20936 - DNA, 45 bp, unidentified
  source 1..45: mol_type = unassigned DNA; note = methanogen bacteria
tcagagcatgttttaagagactatttaagtattattaatggaaat

SEQ ID NO: 20937 - DNA, 48 bp, unidentified
  source 1..48: mol_type = unassigned DNA; note = methanogen bacteria
tttggtcagtctacaatcctgaatttccctgttttaaatattccattg

SEQ ID NO: 20938 - DNA, 60 bp, unidentified
  source 1..60: mol_type = unassigned DNA; note = methanogen bacteria
cctgaaataagtgatggaggacacttcatgatggatatgctggatatagctattccatct

SEQ ID NO: 20939 - DNA, 30 bp, unidentified
  source 1..30: mol_type = unassigned DNA; note = methanogen bacteria
gttccaactttcggatggcagcatgatttg

SEQ ID NO: 20940 - DNA, 165 bp, unidentified
  source 1..165: mol_type = unassigned DNA; note = methanogen bacteria
tttaatgctaatctgggtatttactgttctgatgtctatgtctacctgttaaatgccctttactattcgggaaccaacattcattcaacaagatcaatttatctatcgccagttgtctgttatttaacatcactgttatttgatttgggatatgttgataaagta

SEQ ID NO: 20941 - DNA, 186 bp, unidentified
  source 1..186: mol_type = unassigned DNA; note = methanogen bacteria
acttactcaatgggcgagggcaatttagtctttgataaactcattgaaggaggagtggagggaaatcttggatcttcaaacgataacgcatataatccggattttggatattatttagttaatatgggaaatttcatctcttcgtcaaatacaacctttatgggtaaaaccccttatttaggtaac

SEQ ID NO: 20942 - DNA, 288 bp, unidentified
  source 1..288: mol_type = unassigned DNA; note = methanogen bacteria
tttacattgacttttgaagatacaaatgaatttagtgctccagaagaaatgtcagattatattaaagcaaatattgagaattggagtgagattaaaataggaaactataatatacgaccatattactggtacttaggtttaaattctccgggaatagaaagtagtcatccggagaaaattattgaaaataatgttagttattacatctcgaatgtgaaacagaataatttaactaactatactgaaataaaacaaattgataatttgtatttatacaagaaaaatgta

SEQ ID NO: 20943 - DNA, 42 bp, unidentified
  source 1..42: mol_type = unassigned DNA; note = methanogen bacteria
gagatgaaggtagggagactggaagagctcgaaccctacaag

SEQ ID NO: 20944 - DNA, 48 bp, unidentified
  source 1..48: mol_type = unassigned DNA; note = methanogen bacteria
gctccctactggctcaccgtcgaggggagcgacgaattcctcagcaac

SEQ ID NO: 20945 - DNA, 102 bp, unidentified
  source 1..102: mol_type = unassigned DNA; note = methanogen bacteria
gaatgcgagatctccaccctcttcccgctgacctactaccccatcttcaacggcgatgtggaactcgtcgagggaatcagggcgttggaccagaaggaaatc

SEQ ID NO: 20946 - DNA, 33 bp, unidentified
  source 1..33: mol_type = unassigned DNA; note = methanogen bacteria
accaacaactccggacttacccacatcttcgat

SEQ ID NO: 20947 - DNA, 42 bp, unidentified
  source 1..42: mol_type = unassigned DNA; note = methanogen bacteria
ccatatctggcttatgattatttagaaaaacctgttaccctg

SEQ ID NO: 20948 - DNA, 36 bp, unidentified
  source 1..36: mol_type = unassigned DNA; note = methanogen bacteria
ggtagatttttaacattggatgagataggctttttt

SEQ ID NO: 20949 - DNA, 51 bp, unidentified
  source 1..51: mol_type = unassigned DNA; note = methanogen bacteria
cctaccttaagggtgctttactttaaaaatccagcttatgttgcaggagca

SEQ ID NO: 20950 - DNA, 33 bp, unidentified; identical to SEQ ID NO: 20642
  source 1..33: mol_type = unassigned DNA; note = methanogen bacteria

SEQ ID NO: 20951 - DNA, 42 bp, unidentified
  source 1..42: mol_type = unassigned DNA; note = methanogen bacteria
gattttattgcaaatgaaatatttcataaaccactagtcgta

SEQ ID NO: 20952 - DNA, 36 bp, unidentified
  source 1..36: mol_type = unassigned DNA; note = methanogen bacteria
ggtgttttcatgttatcctctgatgtagggttttat

SEQ ID NO: 20953 - DNA, 39 bp, unidentified
  source 1..39: mol_type = unassigned DNA; note = methanogen bacteria
attcaattgctatttggagaagtttatacccccggttcc

SEQ ID NO: 20954 - DNA, 42 bp, unidentified
  source 1..42: mol_type = unassigned DNA; note = methanogen bacteria
ccgtatctggcctatgactatcttggaaagcctgccgcactg

SEQ ID NO: 20955 - DNA, 36 bp, unidentified
  source 1..36: mol_type = unassigned DNA; note = methanogen bacteria
ggcaagtttctgacatttgcagacatcgggtttttt

SEQ ID NO: 20956 - DNA, 51 bp, unidentified
  source 1..51: mol_type = unassigned DNA; note = methanogen bacteria
cctacattgaggatactctactttaagaaccctgcatatgttgcgggtgcg

SEQ ID NO: 20957 - DNA, 45 bp, unidentified
  source 1..45: mol_type = unassigned DNA; note = methanogen bacteria
ccatggttaacttatcattatttaaataaacctttggcgttagtt

SEQ ID NO: 20958 - DNA, 36 bp, unidentified
  source 1..36: mol_type = unassigned DNA; note = methanogen bacteria
ggtagatttttaactttggatgatgttggatttttt

SEQ ID NO: 20959 - DNA, 54 bp, unidentified
  source 1..54: mol_type = unassigned DNA; note = methanogen bacteria
cctactttaagaatcctttactttgaaaatccggcttatgttgctggtgcttct

SEQ ID NO: 20960 - DNA, 42 bp, unidentified
  source 1..42: mol_type = unassigned DNA; note = methanogen bacteria
ccttatctcgcatatcattaccttggaaagcctgcggcattg

SEQ ID NO: 20961 - DNA, 36 bp, unidentified
  source 1..36: mol_type = unassigned DNA; note = methanogen bacteria
ggcaggtttttaacctttgatgagattggatttttt

SEQ ID NO: 20962 - DNA, 51 bp, unidentified
  source 1..51: mol_type = unassigned DNA; note = methanogen bacteria
cctacattgagaatcctttactttaaaaatcccgcctatgttgcaggtgcc

SEQ ID NO: 20963 - DNA, 102 bp, unidentified
  source 1..102: mol_type = unassigned DNA; note = methanogen bacteria
tacggcatgaacgtgacggactcgttcttcgagggcatcagcggatacaccaccaccggtgccaccatcgtcgacgacctcggcgccatgcccgacagcctg

SEQ ID NO: 20964 - DNA, 96 bp, unidentified
  source 1..96: mol_type = unassigned DNA; note = methanogen bacteria
agcgtcaccgccttcgactccctctgcatcgcactgtccaacgtccccaccggagggctgctcccccgcaacgagagcatggcatgctactccatc

SEQ ID NO: 20965 - DNA, 135 bp, unidentified
  source 1..135: mol_type = unassigned DNA; note = methanogen bacteria
ccccatctcgacggcctcaccgccggcgagctcggagactccgcatggaagtccgtctacagcgtcatctcctccggtaccggtaccggattcgccatcttcagctactcccagctctacggagcggggaacctg

SEQ ID NO: 20966 - DNA, 102 bp, unidentified
  source 1..102: mol_type = unassigned DNA; note = methanogen bacteria
tgcgaacccgacctgaacctccaggagcagttcggtgtgactcttgcggcaatcaccaacgcgggaatcggtcccctcgactcctacggttcgctctccatc

SEQ ID NO: 20967 - DNA, 39 bp, unidentified
  source 1..39: mol_type = unassigned DNA; note = methanogen bacteria
ttgctggccattaattttatgggaaaacctgaagttatg

SEQ ID NO: 20968 - DNA, 36 bp, unidentified
  source 1..36: mol_type = unassigned DNA; note = methanogen bacteria
ggcagatttttaacaatggctgatattggttttttc

SEQ ID NO: 20969 - DNA, 48 bp, unidentified
  source 1..48: mol_type = unassigned DNA; note = methanogen bacteria
atcttgagattgctctatttccagattcccgcttatgttgcaggtgct

SEQ ID NO: 20970 - DNA, 168 bp, unidentified
  source 1..168: mol_type = unassigned DNA; note = methanogen bacteria
ttcaataataatttgggaatatactgctcagatgtttatgtctatctgttaaatgcactatattttgcaggaacaaacatccactcaacaaaatccatttatttatccccagtagtctgttttttaacatccctgatttttgatttgggttatgttgacaaagttgca

SEQ ID NO: 20971 - DNA, 186 bp, unidentified
  source 1..186: mol_type = unassigned DNA; note = methanogen bacteria
aactacatgggtaacggatttattgctttcgatggtttgctttcaagcggagttagcggtaaccttggatctacacatgacaactcatataatcccgaccttggatattatctagtgaatatgggaaatttcatttcttcatcaaatacgacatttgttgccaaaactccatcactggcaaatcca

SEQ ID NO: 20972 - DNA, 288 bp, unidentified
  source 1..288: mol_type = unassigned DNA; note = methanogen bacteria
ttcacatacacattcgaacagacagatgaattcaactcacctgagctgatgacaaattacattaaggaaaatatagataactggagtgaaatccaaataggaaactacaatatacgaccatactattggtatttaggcctaaactcaccgggaattgaaagcggcaatacacagaaaattatagacagcaatgttagttattacatctcgaatcatcctcaaaagaacttaacgaattatactgaaatcaaaaatattaatgatctttatttatacaaaagaaatgga

SEQ ID NO: 20973 - DNA, 42 bp, unidentified
  source 1..42: mol_type = unassigned DNA; note = methanogen bacteria
ccatttattgctaataattttatgcataagcctgaggttatg

SEQ ID NO: 20974 - DNA, 36 bp, unidentified
  source 1..36: mol_type = unassigned DNA; note = methanogen bacteria
ggtaaatttctgacattggcggatattggttttttc

SEQ ID NO: 20975 - DNA, 51 bp, unidentified
  source 1..51: mol_type = unassigned DNA; note = methanogen bacteria
cctacattgcagctcttatacttcaaaaatcctgattatgttgcgggagct

SEQ ID NO: 20976 - DNA, 42 bp, unidentified
  source 1..42: mol_type = unassigned DNA; note = methanogen bacteria
ccttatttggcttataattatttgcaaaagcctgctgcattg

SEQ ID NO: 20977 - DNA, 36 bp, unidentified
  source 1..36: mol_type = unassigned DNA; note = methanogen bacteria
ggtaagtttttgacttttaacgacatcggttttttc

SEQ ID NO: 20978 - DNA, 51 bp, unidentified
  source 1..51: mol_type = unassigned DNA; note = methanogen bacteria
cctactctggcgcttctatactttaaaaatcctgcatatattgccggggca

SEQ ID NO: 20979 - DNA, 99 bp, unidentified
  source 1..99: mol_type = unassigned DNA; note = methanogen bacteria
tacggtatgggcataaccgattccttcttcgagggaatcagcggatacaccaccaccggtgccaccatcgtcgacgatctgagggcgatgcccgacagc

SEQ ID NO: 20980 - DNA, 96 bp, unidentified
  source 1..96: mol_type = unassigned DNA; note = methanogen bacteria
gaagtgaccgccttcgattctctctgcatcgcgctttccaacatccccaccggaggactgctccccaggaacgagagcatcgcctgctactccatc

SEQ ID NO: 20981 - DNA, 135 bp, unidentified
  source 1..135: mol_type = unassigned DNA; note = methanogen bacteria
cctaacctcaacggcctgaccgcagaccaattgggagattccgcctggaaatccgtttacagtgttatttcctccggtaccggtaccggattcgccatattcagctactcccagctctacggagcgggtaacctg

SEQ ID NO: 20982 - DNA, 102 bp, unidentified
  source 1..102: mol_type = unassigned DNA; note = methanogen bacteria
tgcgaaccgcatctgaacctccaggaacagttcggtgtcacccttgcggctatcaccaacgcaggtatcggacccctcgattcctacggttccctttccatc

SEQ ID NO: 20983 - DNA, 171 bp, unidentified
  source 1..171: mol_type = unassigned DNA; note = methanogen bacteria
ttcaataataatctgggaatatactgttccgatgtttatgtttacctattgaatgcactgtattttgcaggaaccaatatccactccacaaaatcaatttacctttccccagtcgtttgctttttaacatcacttatctttgatttgggttatgtcgataaagtggcgatt

SEQ ID NO: 20984 - DNA, 186 bp, unidentified
  source 1..186: mol_type = unassigned DNA; note = methanogen bacteria
tatacaatgggtaatggattcatagctttcgatggacttatatccggaggcgtaagcggccacctcggatctacgcacgacaactcatataatcctgactttggatattacctgacgaatatgggaaatttcatttcatcatcaaatactacattcgtcgctaaaactccatcattggccaacccc

SEQ ID NO: 20985 - DNA, 291 bp, unidentified
  source 1..291: mol_type = unassigned DNA; note = methanogen bacteria
gctttcacatccacatttgaacagacaaatgaattcaatggccccgaattgatgacagactacattaaagagaatatagacaattggagtgaaattcaaataggaaactataatatacgcccatattattggtatttgggcatgaattctccgggaattgaaagcggtgctacgcaaaaaattattgaaagcaatgtgagctattatatctcgaatcatcctcaaaaaaatttaacgaactatactgaaattaaaaacattgatggattgtatttataccaaagaaatgca

SEQ ID NO: 20986 - DNA, 33 bp, unidentified
  source 1..33: mol_type = unassigned DNA; note = methanogen bacteria
agtagaatgttaggtccggaaggttatggttta

SEQ ID NO: 20987 - DNA, 42 bp, unidentified
  source 1..42: mol_type = unassigned DNA; note = methanogen bacteria
gatttcattgcaaataacatattccataaaccattagtggta

SEQ ID NO: 20988 - DNA, 33 bp, unidentified
  source 1..33: mol_type = unassigned DNA; note = methanogen bacteria
atattaatgttatccactgatgtaggttattat

SEQ ID NO: 20989 - DNA, 45 bp, unidentified
  source 1..45: mol_type = unassigned DNA; note = methanogen bacteria
ccgataatagaattgctatttggtagtgcatacatttcaggttct

SEQ ID NO: 20990 - DNA, 42 bp, unidentified
  source 1..42: mol_type = unassigned DNA; note = methanogen bacteria
gaaaatgttttaagaagttatctaaaaataatacatggaaat

SEQ ID NO: 20991 - DNA, 48 bp, unidentified
  source 1..48: mol_type = unassigned DNA; note = methanogen bacteria
tttggccaatcaacaattttaaatttccctgttttaaacattcctttg

SEQ ID NO: 20992 - DNA, 60 bp, unidentified
  source 1..60: mol_type = unassigned DNA; note = methanogen bacteria
cctgaaatcagtgatgggggccatttcatgatggacatgttggatttaaccattccttca

SEQ ID NO: 20993 - DNA, 42 bp, unidentified
  source 1..42: mol_type = unassigned DNA; note = methanogen bacteria
cctattatggcgaatgtctttttaaaaaagcctgaaacattg

SEQ ID NO: 20994 - DNA, 33 bp, unidentified
  source 1..33: mol_type = unassigned DNA; note = methanogen bacteria
aagttcttatcacttgcaagcgtcggatttttc

SEQ ID NO: 20995 - DNA, 51 bp, unidentified; identical to SEQ ID NO: 20876
  source 1..51: mol_type = unassigned DNA; note = methanogen bacteria

SEQ ID NO: 20996 - DNA, 42 bp, unidentified
  source 1..42: mol_type = unassigned DNA; note = methanogen bacteria
ccatggttggcttatggttatctaaataaacctcttgcttta

SEQ ID NO: 20997 - DNA, 36 bp, unidentified
  source 1..36: mol_type = unassigned DNA; note = methanogen bacteria
ggtaaatttttgacattggatgctgtcggctttttt

SEQ ID NO: 20998 - DNA, 51 bp, unidentified
  source 1..51: mol_type = unassigned DNA; note = methanogen bacteria
cctacattaagggtattgtattttgccaaacccgaatatgttgcgggggct

SEQ ID NO: 20999 - DNA, 171 bp, unidentified
  source 1..171: mol_type = unassigned DNA; note = methanogen bacteria
gcccattcattgattcatattgatgaatattttactcttgaagtggttaaacttcctttattggatgcatggagagttataataggggattaccaccccccattgtattatattttattaaaaattgtgaaaaaacttttattaacaacaaatatcccattagatcttatt

SEQ ID NO: 21000 - DNA, 102 bp, unidentified
  source 1..102: mol_type = unassigned DNA; note = methanogen bacteria
tttagacaaacaggaaaagtaagtgaggactactggatagcaactccagatataaatgagatattccattacttctacatctgcggtaccaattcaggggat

SEQ ID NO: 21001 - DNA, 45 bp, unidentified
  source 1..45: mol_type = unassigned DNA; note = methanogen bacteria
ccttaccttgcctataatttcctgcacaagccgataacactggtt

SEQ ID NO: 21002 - DNA, 36 bp, unidentified
  source 1..36: mol_type = unassigned DNA; note = methanogen bacteria
ggaaagtttctgacattggcggatatcggatttttc

SEQ ID NO: 21003 - DNA, 51 bp, unidentified
  source 1..51: mol_type = unassigned DNA; note = methanogen bacteria
cctacacttcaggtattgtactttaagaatcctgcctatgttgcaggtgca

SEQ ID NO: 21004 - DNA, 45 bp, unidentified
  source 1..45: mol_type = unassigned DNA; note = methanogen bacteria
tcagaacatgtgcttagggattatttaagtattattcatggaaat

SEQ ID NO: 21005 - DNA, 48 bp, unidentified
  source 1..48: mol_type = unassigned DNA; note = methanogen bacteria
ttcggccagactacaatcctgaattttcctgttttgaacattcctctt

SEQ ID NO: 21006 - DNA, 60 bp, unidentified
  source 1..60: mol_type = unassigned DNA; note = methanogen bacteria
cctgaaatcagtgacggcggtcactttatgatggacatgttgggtctgacaatcccatca

SEQ ID NO: 21007 - DNA, 45 bp, unidentified
  source 1..45: mol_type = unassigned DNA; note = methanogen bacteria
ccatatattgcaaatgaagtttggagaaatcctgatgctttactt

SEQ ID NO: 21008 - DNA, 30 bp, unidentified
  source 1..30: mol_type = unassigned DNA; note = methanogen bacteria
gtttttataacaaataatttaattggatat

SEQ ID NO: 21009 - DNA, 54 bp, unidentified
  source 1..54: mol_type = unassigned DNA; note = methanogen bacteria
ccaataatgagacttgtctactttactaatagtgcatacagttgtggggcacct

SEQ ID NO: 21010 - DNA, 45 bp, unidentified
  source 1..45: mol_type = unassigned DNA; note = methanogen bacteria
tcagaacatgttttaagagattatttgacaataatacgtggaaat

SEQ ID NO: 21011 - DNA, 48 bp, unidentified
  source 1..48: mol_type = unassigned DNA; note = methanogen bacteria
tttggccagtcaacagcactgacattcgtaattccaaatattccgctg

SEQ ID NO: 21012 - DNA, 60 bp, unidentified
  source 1..60: mol_type = unassigned DNA; note = methanogen bacteria
ccagaaataagcgacggcggacacttcatgatggacatgctggatatagcaatgccttca

SEQ ID NO: 21013 - DNA, 33 bp, unidentified
  source 1..33: mol_type = unassigned DNA; note = methanogen bacteria
gttccgattttcggttttgagcaggatttaatc

SEQ ID NO: 21014 - DNA, 45 bp, unidentified
  source 1..45: mol_type = unassigned DNA; note = methanogen bacteria
tctgaaagtgttttgagaggttatttaaacataatccatggaaac

SEQ ID NO: 21015 - DNA, 48 bp, unidentified
  source 1..48: mol_type = unassigned DNA; note = methanogen bacteria
ttcggcccggccacgatactgtcatttccgataaacagcatccctctt

SEQ ID NO: 21016 - DNA, 60 bp, unidentified
  source 1..60: mol_type = unassigned DNA; note = methanogen bacteria
cccgaaatcagtgacggcggacacttcatgatggatatgctggatttggcaattccttca

SEQ ID NO: 21017 - DNA, 33 bp, unidentified
  source 1..33: mol_type = unassigned DNA; note = methanogen bacteria
gttccgacattcggctggcagcatgacctgata

SEQ ID NO: 21018 - DNA, 39 bp, unidentified
  source 1..39: mol_type = unassigned DNA; note = methanogen bacteria
ccgcttatggctgttttcttaaagaagcccgaaaccatg

SEQ ID NO: 21019 - DNA, 33 bp, unidentified
  source 1..33: mol_type = unassigned DNA; note = methanogen bacteria
aagtttttaacccttgctgaggttggattcttc

SEQ ID NO: 21020 - DNA, 48 bp, unidentified
  source 1..48: mol_type = unassigned DNA; note = methanogen bacteria
atcctgcagcttttctactttaagaatccttcttatgtcaatggtgct

SEQ ID NO: 21021 - DNA, 45 bp, unidentified
  source 1..45: mol_type = unassigned DNA; note = methanogen bacteria
tctgaaagtgttttaagaaattatctaagtataattcatggaaat

SEQ ID NO: 21022 - DNA, 48 bp, unidentified
  source 1..48: mol_type = unassigned DNA; note = methanogen bacteria
ttcggtcaatcaacaatccttcattttcctgttttaaatattcctctt

SEQ ID NO: 21023 - DNA, 60 bp, unidentified
  source 1..60: mol_type = unassigned DNA; note = methanogen bacteria
cctgagataagtgacggaggtcactttatgatggacatgctggatgtggccattccatct

SEQ ID NO: 21024 - DNA, 42 bp, unidentified
  source 1..42: mol_type = unassigned DNA; note = methanogen bacteria
ccatggcttgcatataatttcctgcacaaaccattaacaatg

SEQ ID NO: 21025 - DNA, 36 bp, unidentified
  source 1..36: mol_type = unassigned DNA; note = methanogen bacteria
ggcagatttctgaccctagctgacatcggatttttc

SEQ ID NO: 21026 - DNA, 51 bp, unidentified
  source 1..51: mol_type = unassigned DNA; note = methanogen bacteria
cctaccctgaaggtactctactttaaaaacacagcttatgttgcaggagca

SEQ ID NO: 21027 - DNA, 36 bp, unidentified
  source 1..36: mol_type = unassigned DNA; note = methanogen bacteria
ctcgagcagcttgcccctaatgctccacacatatca

SEQ ID NO: 21028 - DNA, 48 bp, unidentified
  source 1..48: mol_type = unassigned DNA; note = methanogen bacteria
atctacggcccagatgctgcaattgtgaaaacattcagcagaattttt

SEQ ID NO: 21029 - DNA, 66 bp, unidentified
  source 1..66: mol_type = unassigned DNA; note = methanogen bacteria
accacaggcttatccaactggatgggcagctgtctcagcggcatgataggatctaatccatcagag

SEQ ID NO: 21030 - DNA, 33 bp, unidentified
  source 1..33: mol_type = unassigned DNA; note = methanogen bacteria
actacagcgatgtcaatgggattcagccctatt

SEQ ID NO: 21031 - DNA, 201 bp, unidentified
  source 1..201: mol_type = unassigned DNA; note = methanogen bacteria
ctgtattcagtcccgacatattacaactcattcagaatagatcatgcattaaaaagcaatattaatatgactaaccagatatccttcatgacaactcatttgccggaaaccatgtttacgcttatacaaatccccaaatcaattgggattcatttcaactcactgtttatttactcattccacccatacgaatatacatca

SEQ ID NO: 21032 - DNA, 60 bp, unidentified
  source 1..60: mol_type = unassigned DNA; note = methanogen bacteria
ttcctaacttggacacctgtaggtgacttcaaagaaattttaggagtaagtgtacgatat

SEQ ID NO: 21033 - DNA, 165 bp, unidentified
  source 1..165: mol_type = unassigned DNA; note = methanogen bacteria
tttaatgctaatttggggatttattgctctgatgtttatgtttatttattaaatgcattatattatgtgggaactaatattcattcaacaaagtcaatttatctctcacctataatttgttttttaacatccctcatatttgatttgggttatgttgataaagtc

SEQ ID NO: 21034 - DNA, 186 bp, unidentified
  source 1..186: mol_type = unassigned DNA; note = methanogen bacteria
atgtcaatggggggcggtaatttagttttcgatggaatgctttcgaatggaattcagggaaatcttggatcaactcatgataatgcatataatcctgattttggatattatctgttaaatattggaaattttatttcatcatccaatacaacatttgttggtaaaactcctgcattaaacaatcca

SEQ ID NO: 21035 - DNA, 285 bp, unidentified
  source 1..285: mol_type = unassigned DNA; note = methanogen bacteria
tttacatatacatttgaagatacaaatgaatttaatgctcctgagcaaatgtgtgactatattaaagcaaatatagacaactggagtgatattcaaataggaaattataatatacgtccatattactggtatctgggcttaaattctccaggaatagaaagtaaaagtcctcaaaagattattgacagcaacgtttcatattatatctcgaatattgaacaaacaaatctaacgggatatgttgaaataaaaaagattgaaaatctatatttatatcaaaaaata

SEQ ID NO: 21036 - DNA, 42 bp, unidentified
  source 1..42: mol_type = unassigned DNA; note = methanogen bacteria
ccatggctggcggaccattatctgcacaagcccgctgccctg

SEQ ID NO: 21037 - DNA, 36 bp, unidentified
  source 1..36: mol_type = unassigned DNA; note = methanogen bacteria
ggaaggtttttgacctttgatgacatcggatttttc

SEQ ID NO: 21038 - DNA, 51 bp, unidentified
  source 1..51: mol_type = unassigned DNA; note = methanogen bacteria
cctactttaagggttttatacttcaagaatccggcatatgttgcaggggca

SEQ ID NO: 21039 - DNA, 45 bp, unidentified
  source 1..45: mol_type = unassigned DNA; note = methanogen bacteria
tctgaaactgttttaagggattatttaagtataatacatggaaat

SEQ ID NO: 21040 - DNA, 48 bp, unidentified
  source 1..48: mol_type = unassigned DNA; note = methanogen bacteria
ttcggacaggctacaatattgtcatttccgatttatgacattcccctt

SEQ ID NO: 21041 - DNA, 60 bp, unidentified
  source 1..60: mol_type = unassigned DNA; note = methanogen bacteria
cctgaaatcagtgacggaggacacttcatgatggatatgcttgatgtggccattccctca

SEQ ID NO: 21042 - DNA, 33 bp, unidentified
  source 1..33: mol_type = unassigned DNA; note = methanogen bacteria
gtgccgtcactgggtctgcagcatgacctgatt

SEQ ID NO: 21043 - DNA, 45 bp, unidentified
  source 1..45: mol_type = unassigned DNA; note = methanogen bacteria
tcggaacatatcttaagagattatttgggtatgatacatggaaat

SEQ ID NO: 21044 - DNA, 48 bp, unidentified
  source 1..48: mol_type = unassigned DNA; note = methanogen bacteria
ttcggccagtccaccatattgtcatttccgatttacaacattccactt

SEQ ID NO: 21045 - DNA, 60 bp, unidentified
  source 1..60: mol_type = unassigned DNA; note = methanogen bacteria
cccgaaataagtgacggcggacatttcatgatggacatgttggatttagccatgccgtct

SEQ ID NO: 21046 - DNA, 33 bp, unidentified
  source 1..33: mol_type = unassigned DNA; note = methanogen bacteria
gttcctgcattcggactggagcatgacttgatt

SEQ ID NO: 21047 - DNA, 45 bp, unidentified
  source 1..45: mol_type = unassigned DNA; note = methanogen bacteria
tctgaaagtgttttaagggattacttaagcataatacatgggaat

SEQ ID NO: 21048 - DNA, 48 bp, unidentified
  source 1..48: mol_type = unassigned DNA; note = methanogen bacteria
tttggtcaggctacaatattgtcgtttccaataattgatgttcctctt

SEQ ID NO: 21049 - DNA, 60 bp, unidentified
  source 1..60: mol_type = unassigned DNA; note = methanogen bacteria
cctgaaatcagtgatggaggacacttcatgatggacatgcttgacatggcaattccttca

SEQ ID NO: 21050 - DNA, 33 bp, unidentified
  source 1..33: mol_type = unassigned DNA; note = methanogen bacteria
gtgccggcattgggtttgcataatgacttgatt

SEQ ID NO: 21051 - DNA, 45 bp, unidentified
  source 1..45: mol_type = unassigned DNA; note = methanogen bacteria
gcgccaatattcaccgacttctttggaaagcctgaagcattgctt

SEQ ID NO: 21052 - DNA, 33 bp, unidentified
  source 1..33: mol_type = unassigned DNA; note = methanogen bacteria
gccttccttactgctgcggctgtgggatacttc

SEQ ID NO: 21053 - DNA, 51 bp, unidentified
  source 1..51: mol_type = unassigned DNA; note = methanogen bacteria
gagatacttggccttgtatactttaccaacggagcatacatgaacggagga

SEQ ID NO: 21054 - DNA, 42 bp, unidentified
  source 1..42: mol_type = unassigned DNA; note = methanogen bacteria
gagcctattgctataggttggtggcataagcctgctgcactt

SEQ ID NO: 21055 - DNA, 33 bp, unidentified
  source 1..33: mol_type = unassigned DNA; note = methanogen bacteria
gcttacttaacaagtaattatgcaggttattac

SEQ ID NO: 21056 - DNA, 42 bp, unidentified
  source 1..42: mol_type = unassigned DNA; note = methanogen bacteria
attttaggtcttttatttggacatgaatacactttaggtact

SEQ ID NO: 21057 - DNA, 33 bp, unidentified
  source 1..33: mol_type = unassigned DNA; note = methanogen bacteria
agtagaatgttaggaccagaaggttatggttta

SEQ ID NO: 21058 - DNA, 42 bp, unidentified
  source 1..42: mol_type = unassigned DNA; note = methanogen bacteria
gattttattgctaatgctatttttcacaagcctgctgttgta

SEQ ID NO: 21059 - DNA, 33 bp, unidentified
  source 1..33: mol_type = unassigned DNA; note = methanogen bacteria
atattcatgttgtctagtgatgttggttattat

SEQ ID NO: 21060 - DNA, 48 bp, unidentified
  source 1..48: mol_type = unassigned DNA; note = methanogen bacteria
gagcctgttatcacaatactctttggaagtaattatattaaaggtgca

SEQ ID NO: 21061 - DNA, 39 bp, unidentified
  source 1..39: mol_type = unassigned DNA; note = methanogen bacteria
gtggacataggcgacgatttcggcaggggctcccacgac

SEQ ID NO: 21062 - DNA, 30 bp, unidentified
  source 1..30: mol_type = unassigned DNA; note = methanogen bacteria
tacctgcagagcatcggggcgctcaccgcc

SEQ ID NO: 21063 - DNA, 63 bp, unidentified
  source 1..63: mol_type = unassigned DNA; note = methanogen bacteria
tcgatgatcatggggtccgccgacggcctcgagcccgagaggtacggggtcttcgccgatacc

SEQ ID NO: 21064 - DNA, 33 bp, unidentified
  source 1..33: mol_type = unassigned DNA; note = methanogen bacteria
cgtggtgcaggtactgcaactgtttctgtaacc

SEQ ID NO: 21065 - DNA, 60 bp, unidentified
  source 1..60: mol_type = unassigned DNA; note = methanogen bacteria
actaatgtgactgttactgttaataaggttcctactgaaatcactgcagaaggctgtgag

SEQ ID NO: 21066 - DNA, 39 bp, unidentified
  source 1..39: mol_type = unassigned DNA; note = methanogen bacteria
actgcaactgtttctgtctcatactttggaaatgatatg

SEQ ID NO: 21067 - DNA, 30 bp, unidentified
  source 1..30: mol_type = unassigned DNA; note = methanogen bacteria
agactattatcaacaactggttacggaatt

SEQ ID NO: 21068 - DNA, 42 bp, unidentified
  source 1..42: mol_type = unassigned DNA; note = methanogen bacteria
gaaccgattgctgttggaatatggaataaaccggaagcttta

SEQ ID NO: 21069 - DNA, 42 bp, unidentified
  source 1..42: mol_type = unassigned DNA; note = methanogen bacteria
atggtattgttatttggaaatgaatatgctcaaggttcagaa

SEQ ID NO: 21070 - DNA, 30 bp, unidentified
  source 1..30: mol_type = unassigned DNA; note = methanogen bacteria
agaatacttagtgctgcggattatggaatt

SEQ ID NO: 21071 - DNA, 42 bp, unidentified
  source 1..42: mol_type = unassigned DNA; note = methanogen bacteria
gaacctattgctgtaggttggtgggctaaacctaatgcagtt

SEQ ID NO: 21072 - DNA, 36 bp, unidentified
  source 1..36: mol_type = unassigned DNA; note = methanogen bacteria
ggtgcgaatttaccaagtaaatttgcaggatattat

SEQ ID NO: 21073 - DNA, 39 bp, unidentified
  source 1..39: mol_type = unassigned DNA; note = methanogen bacteria
ttaggattattatttggtgctgaatatactctaggtgca

SEQ ID NO: 21074 - DNA, 30 bp, unidentified
  source 1..30: mol_type = unassigned DNA; note = methanogen bacteria
tttcgcataacacttcctataattgataaa

SEQ ID NO: 21075 - DNA, 132 bp, unidentified
  source 1..132: mol_type = unassigned DNA; note = methanogen bacteria
caggagtatgcatattaccatctaatcaatttggaacagatgaataaacttcaagtacttttacaagaattatttagaattggaataaatatttcagacttaacagcaataaaggcatggcttagcttaata

SEQ ID NO: 21076 - DNA, 141 bp, unidentified
  source 1..141: mol_type = unassigned DNA; note = methanogen bacteria
ggttatttgtgtggaaaccagttttgtgccgaattgttgaagactattaatccatatctttatgagccacaacaaaatgttggctggtggccgccgttgctatggcctgatcggttacgcagtttgtttgtagaaccgagt

SEQ ID NO: 21077 - DNA, 69 bp, unidentified
  source 1..69: mol_type = unassigned DNA; note = methanogen bacteria
gtggtgaatgctatatatgcaaatggagacattggaactcctaacatggacggttttgaagcagccatt

SEQ ID NO: 21078 - DNA, 267 bp, unidentified
  source 1..267: mol_type = unassigned DNA; note = methanogen bacteria
ctaaccaagcaattcgatgagaacactgaaaccaatgacctatacattgaattcagcggaaacacacaaaacctcaagtcaaatgagaaacaggtctatgacatcctgcacaacttcgcctatggggacaccctgaacctgtcaagcctcaacaccagtttgtcatcagaggcaaatgcaaaatggtttatggaacagtatgcagactggtgcgccaatgttgaagatgagctggaacctagagtgagtgaagagttcaatgacact

SEQ ID NO: 21079 - DNA, 33 bp, unidentified
  source 1..33: mol_type = unassigned DNA; note = methanogen bacteria
gacgatatctttggacaatggacttcaaagggt

SEQ ID NO: 21080 - DNA, 30 bp, unidentified
  source 1..30: mol_type = unassigned DNA; note = methanogen bacteria
agactattaacaaccactggatatggtata

SEQ ID NO: 21081 - DNA, 42 bp, unidentified
  source 1..42: mol_type = unassigned DNA; note = methanogen bacteria
gagccggtagcaataggcatgtggcataaaccagaagcatta

SEQ ID NO: 21082 - DNA, 30 bp, unidentified
  source 1..30: mol_type = unassigned DNA; note = methanogen bacteria
gtatttctaccagcagcatttgcaggatta

SEQ ID NO: 21083 - DNA, 42 bp, unidentified
  source 1..42: mol_type = unassigned DNA; note = methanogen bacteria
ataatgtcattattattcggaaatgcctatgcacagggtgca

SEQ ID NO: 21084 - DNA, 114 bp, unidentified
  source 1..114: mol_type = unassigned DNA; note = methanogen bacteria
gtcaacgagctcggcggctgggacagcacgatggacatcctcgacaacatgatgagcaccggggaagcgccggaccacttcaccagcctgctgtacagcggcggggcggggatc

SEQ ID NO: 21085 - DNA, 87 bp, unidentified
  source 1..87: mol_type = unassigned DNA; note = methanogen bacteria
ggcagggcgtacatctccgacagcggaacagcgctggacaactccgagaacatcttcatcgtcctggccgactccatgttcccggcg

SEQ ID NO: 21086 - DNA, 54 bp, unidentified
  source 1..54: mol_type = unassigned DNA; note = methanogen bacteria
gccggaggcatcatcgccggaggggattggtgcctgtacaacaccaagctctac

SEQ ID NO: 21087 - DNA, 87 bp, unidentified
  source 1..87: mol_type = unassigned DNA; note = methanogen bacteria
gtctatatctgggggctcgaccagaccgagtccctggatatattcgcgcagtacaggaccatcatggccggagcctcgggaaccatc

SEQ ID NO: 21088 - DNA, 48 bp, unidentified
  source 1..48: mol_type = unassigned DNA; note = methanogen bacteria
ggatacctcgtcccatcggacacgttcgtggacatgttcgggagcgcg

SEQ ID NO: 21089 - DNA, 168 bp, unidentified
  source 1..168: mol_type = unassigned DNA; note = methanogen bacteria
acgctcaactggtacgctgtcgacgacagcgcggcgacatcgctgagcaacccgcctgcgggaaccattcccaaggcgatctatgtgctgatgaacacgaactcgtccgacatgatgaacggcgggtatgagatgatattcctgggccacctgggccagccgaatccc

SEQ ID NO: 21090 - DNA, 186 bp, unidentified
  source 1..186: mol_type = unassigned DNA; note = methanogen bacteria
ttctacaccaacggcttcctcagcagcatacccttcctcggagccaacgactccatcggatactatgagtccgggagcaccactgcatccgcaggtatggcatggtatctgtcgacgccgcagggactgaccgattggctgctgccgatcctgaatccgtccagctacggcaacggacactcagtg

SEQ ID NO: 21091 - DNA, 42 bp, unidentified
  source 1..42: mol_type = unassigned DNA; note = methanogen bacteria
ccatggttggctttggagttttacaaaaagcctatagcattg

SEQ ID NO: 21092 - DNA, 48 bp, unidentified
  source 1..48: mol_type = unassigned DNA; note = methanogen bacteria
gagattctgggatttatatttttcaccaatccagagtatatgaatgga

SEQ ID NO: 21093 - DNA, 36 bp, unidentified
  source 1..36: mol_type = unassigned DNA; note = methanogen bacteria
acccagcttgttgatgatttgcatactaatgtgaat

SEQ ID NO: 21094 - DNA, 168 bp, unidentified
  source 1..168: mol_type = unassigned DNA; note = methanogen bacteria
ataatgggaggcgtttctgatgcagtcgacatgtacatccctgaacattcaggagatgaagcattcgagtcagatgtctatgattacttccaaaatatggacagtgtagacactgttaaagagaacagcactgttgaaaacattttagacaccattactcaggagtct

SEQ ID NO: 21095 - DNA, 192 bp, unidentified
  source 1..192: mol_type = unassigned DNA; note = methanogen bacteria
aagtatgcctatcctatttcatgggatgtctattatcatatgcacatgattgagttatatatgcagaatggattggttttctgggattatgctactgtcgcacccaagggcagactgataatgtaccctccattatttcatctggtatttgcagaattatctaaattacttaatataagttcggccgagtta

SEQ ID NO: 21096 - DNA, 66 bp, unidentified
  source 1..66: mol_type = unassigned DNA; note = methanogen bacteria
attgcaataaattatactctggtgttcaattcattacccggagcaaaccttttaataacggatttt

SEQ ID NO: 21097 - DNA, 30 bp, unidentified
  source 1..30: mol_type = unassigned DNA; note = methanogen bacteria
cttttgggttttaacattgtctccataaga

SEQ ID NO: 21098 - DNA, 168 bp, unidentified
  source 1..168: mol_type = unassigned DNA; note = methanogen bacteria
tatgcagatccaggattttacatgtcatttagaaccaaacattatgcattacgaggcattaatccaggtgcacaaatcaattatatgttaagcaatttaggattaacttttgtcacaatattaggacttccagcaaatataggttcttgggatggatttttacattcc

SEQ ID NO: 21099 - DNA, 57 bp, unidentified
  source 1..57: mol_type = unassigned DNA; note = methanogen bacteria
ctttcatggactcctgtaggacaactttctccaattttaggtgttcaaactagatat

SEQ ID NO: 21100 - DNA, 42 bp, unidentified
  source 1..42: mol_type = unassigned DNA; note = methanogen bacteria
atttcttcagttgttgctgatttgaatactgatgtgagtacc

SEQ ID NO: 21101 - DNA, 171 bp, unidentified
  source 1..171: mol_type = unassigned DNA; note = methanogen bacteria
gttattggtggtattagtgatggtgttaatacttatgctcctgatcattctggtgatcagatgtacgaaaaaggagtatataattacttccagtctataagcagtatcaacgaggttaatcaagaaaatagtacagttcaaaatgttgtaaatgttattattaaagattcc

SEQ ID NO: 21102 - DNA, 30 bp, unidentified
  source 1..30: mol_type = unassigned DNA; note = methanogen bacteria
agaggcccaatgttatgggacatgccattg

SEQ ID NO: 21103 - DNA, 45 bp, unidentified
  source 1..45: mol_type = unassigned DNA; note = methanogen bacteria
gctccaatcattacaggatactaccataagcctgaagcattgctt

SEQ ID NO: 21104 - DNA, 30 bp, unidentified
  source 1..30: mol_type = unassigned DNA; note = methanogen bacteria
acattcctgcctgcagttgcaatcggatac

SEQ ID NO: 21105 - DNA, 51 bp, unidentified
  source 1..51: mol_type = unassigned DNA; note = methanogen bacteria
ggaatcatgggccttgtatactttacaaatgcatcctacatgaacggggca

SEQ ID NO: 21106 - DNA, 84 bp, unidentified
  source 1..84: mol_type = unassigned DNA; note = methanogen bacteria
aacctgcccaaccgcctcagcagcgggacctcgataggcatcgagtatgtcctggccatacccgggatcaatccccttctgccc

SEQ ID NO: 21107 - DNA, 174 bp, unidentified
  source 1..174: mol_type = unassigned DNA; note = methanogen bacteria
cttaaccatcttattctgcatgtggatgagtacttcacactgacacttatcaatttcaatgtaaacgaaatggtacgtctcactgcagcagatgtgcatccgccattatattatctgatacttaagttcgccatgtctgtttttggttttttcggaatctcttcccataacctc

SEQ ID NO: 21108 - DNA, 96 bp, unidentified
  source 1..96: mol_type = unassigned DNA; note = methanogen bacteria
tttgctcaattaggcactattcaccatggattttgggttccgcgaattactgttaaatcacttattgaagactttggatactatgcatattctaat

SEQ ID NO: 21109 - DNA, 39 bp, unidentified
  source 1..39: mol_type = unassigned DNA; note = methanogen bacteria
atttctcaaattagtgctaatttgaatactgatgtcagt

SEQ ID NO: 21110 - DNA, 171 bp, unidentified
  source 1..171: mol_type = unassigned DNA; note = methanogen bacteria
gttatgggaggtataaatactgcagtcgatacctatgcgcccgaacattcaggtgatgaacaattccatcaagatgtctatgattacttccaaaaagtgggtaatatagatgatgttaaagcacaggatagtattattgtaaatactgcagatataattattcagaatgca

SEQ ID NO: 21111 - DNA, 39 bp, unidentified
  source 1..39: mol_type = unassigned DNA; note = methanogen bacteria
atttcttcagttgttgctgatttgaatactgatgtgagc

SEQ ID NO: 21112 - DNA, 171 bp, unidentified
  source 1..171: mol_type = unassigned DNA; note = methanogen bacteria
attattggaggcattagtgatggagttaatacctatgctccagagcattccagtgaccagacatacgagaaaagcgtttatgattatttccagtcaataggcagtataaacgaggttaatgcagaaaacagtactgttcaaagcattgtaaatatcatcattaaggattcc

SEQ ID NO: 21113 - DNA, 102 bp, unidentified
  source 1..102: mol_type = unassigned DNA; note = methanogen bacteria
tacttaacaatcacgaatgcattagttgaagatggagctgctggtatgggactatttgctacaggacaagcaatggttcttggcgtacaagtaactgacttg

SEQ ID NO: 21114 - DNA, 45 bp, unidentified
  source 1..45: mol_type = unassigned DNA; note = methanogen bacteria
gcaagtgcaatcagaaatgcttctacattcattaacgaatcaggt

SEQ ID NO: 21115 - DNA, 144 bp, unidentified
  source 1..144: mol_type = unassigned DNA; note = methanogen bacteria
ccatttgacttcactgcaattggcggaacagcagttgtaggtggtgaaacagtatatggtgcagcaaatatcttctacgctgaaatgccattaattgctaatggaacattaacaactgtagattcatcgttaagatttgcatca

SEQ ID NO: 21116 - DNA, 81 bp, unidentified
  source 1..81: mol_type = unassigned DNA; note = methanogen bacteria
tctggttgtaagacatataacatttacggcttgattgaattgttaacagttaatcttgcgcttccaatgagtgttacaaaa

SEQ ID NO: 21117 - DNA, 198 bp, unidentified
  source 1..198: mol_type = unassigned DNA; note = methanogen bacteria
tcacaaactacaccaatttatgatttttcaagacagggttattatgcgatcaataatatcaattcgagccaacagattaattttatgattcatcatcctacggatagtattatatcactattatatattattccaaatgtttttgaaatgttatataatactttcacattttataatggaattgaattattttcatct

SEQ ID NO: 21118 - DNA, 60 bp, unidentified
  source 1..60: mol_type = unassigned DNA; note = methanogen bacteria
ttatttaagtggactcctgtgggtcagctttatccaattttaggtgttcaatcaaggtat

SEQ ID NO: 21119 - DNA, 195 bp, unidentified
  source 1..195: mol_type = unassigned DNA; note = methanogen bacteria
tcaaatactacaccaatatacgatttttcaagacagggatactatatgatacataatattaattctactaatcaaatttcttatatgcttagccatccaaatgatagtatcgtttcattcttatatattatcccaagtgtttttgaaaatttattctacacttacacattttatgtatcaacagatttattttca

SEQ ID NO: 21120 - DNA, 60 bp, unidentified
  source 1..60: mol_type = unassigned DNA; note = methanogen bacteria
ttattaaaatggactcctgtaggccaacttttcccaattttgggtgttcaacctagatat

SEQ ID NO: 21121 - DNA, 48 bp, unidentified
  source 1..48: mol_type = unassigned DNA; note = methanogen bacteria
tttggcgatgctttgactggagttaaaagtcagaatatcgatttgctt

SEQ ID NO: 21122 - DNA, 42 bp, unidentified
  source 1..42: mol_type = unassigned DNA; note = methanogen bacteria
tccggatactccatcggctttgaaaccgacagtgtaattgat

SEQ ID NO: 21123 - DNA, 51 bp, unidentified
  source 1..51: mol_type = unassigned DNA; note = methanogen bacteria
gttgatttattgattgctaatttgaattcatccaatgatattgccatctac

SEQ ID NO: 21124 - DNA, 96 bp, unidentified
  source 1..96: mol_type = unassigned DNA; note = methanogen bacteria
gtgtggggaatgaacgatttcttggatcccgattgcatagccggtctgggaggagcgattctagaaaagaaggacgtgagcaccgacacagcatat

SEQ ID NO: 21125 - DNA, 45 bp, unidentified
  source 1..45: mol_type = unassigned DNA; note = methanogen bacteria
gctggattcccgatgatggacacgatcggcgagatcgccgacccc

SEQ ID NO: 21126 - DNA, 51 bp, unidentified
  source 1..51: mol_type = unassigned DNA; note = methanogen bacteria
ggtccggccagcgcactgggatacactgattcaacaagcagcggagataag

SEQ ID NO: 21127 - DNA, 177 bp, unidentified
  source 1..177: mol_type = unassigned DNA; note = methanogen bacteria
tattcaactccaggatttttgcaatcttatagaatggacctttggattacaaatcatgtaaattctactgaacagataaattacttgattgctaataaaaaagatggattgataatgctattacaaacaccaaaatacatagtcaaaaatcttaatcttaattatgatatgagtgga

SEQ ID NO: 21128 - DNA, 57 bp, unidentified
  source 1..57: mol_type = unassigned DNA; note = methanogen bacteria
ctaacatggacaccaattggtcaattaaacgatattttaggagttcaaccaagatac

SEQ ID NO: 21129 - DNA, 189 bp, unidentified
  source 1..189: mol_type = unassigned DNA; note = methanogen bacteria
tatgcgactaaacacttgttaaattcatggagaggcacctatttcataaaaaacaatgtgaacatattaggtcaattaacatatatggcacaccatccattgaactcactttatttactgtttacaccagataatcttataaacgttattagcggatatttctcatttggtaatttaccgccatacaca

SEQ ID NO: 21130 - DNA, 57 bp, unidentified
  source 1..57: mol_type = unassigned DNA; note = methanogen bacteria
tatctaacctggtgtaatgtcggaatgtcaaggattgaaggtgtctttggaagatat

SEQ ID NO: 21131 - DNA, 30 bp, unidentified
  source 1..30: mol_type = unassigned DNA; note = methanogen bacteria
ataacacaaataaacattcatgcttccttt

SEQ ID NO: 21132 - DNA, 45 bp, unidentified
  source 1..45: mol_type = unassigned DNA; note = methanogen bacteria
tctctgatatcccgttatattgggtttggcgattatgaaatgatg

SEQ ID NO: 21133 - DNA, 30 bp, unidentified; identical to SEQ ID NO: 19928
  source 1..30: mol_type = unassigned DNA; note = methanogen bacteria

SEQ ID NO: 21134 - DNA, 51 bp, unidentified
  source 1..51: mol_type = unassigned DNA; note = methanogen bacteria
tatgcatttagccttttttccattaccggaatgcagacagaaatactttgg

SEQ ID NO: 21135 - DNA, 204 bp, unidentified
  source 1..204: mol_type = unassigned DNA; note = methanogen bacteria
ataattactcattgcgacaaaactgctgatcaaaatattattaccgaagttattgatggtattaaagaaagcaccattggagaattaataagagacctatctggttcagatgaggatatagatataaactcactctatcccaatgaagttcatactgagggattaaaagtaatgtcaatgatttatagtgataaattaactatt

SEQ ID NO: 21136 - DNA, 294 bp, unidentified
  source 1..294: mol_type = unassigned DNA; note = methanogen bacteria
attccaatcgattcggtttcagatgaaggggaacattttacacgtgctgaattgacttcaagaggaattttatttccggaatatgtcaatggttcatttaaaacaattgatagtatcccaggttttttcgttcactctatagataaaactgtttttgaagttaatggagataccggcaagattaataatactctagttgaagtttcttcggcctttgaacaaaacccattttttggatatctattctcaggattggggattttcatcgctaaattattggatttaaatgtaatt

SEQ ID NO: 21137 - DNA, 213 bp, unidentified
  source 1..213: mol_type = unassigned DNA; note = methanogen bacteria
aagtcttatgcaactcctgcattagttcattcatggagggcaacatatattactcaaaataatgtgagtatagctaatcaaatgaattttttattatctgatccattaaatatttttaatgcatttataaatattttatatagctttagttatattttcaatggattttttagtttttatgcatataccattgaaggcggagtttataatgct

SEQ ID NO: 21138 - DNA, 57 bp, unidentified
  source 1..57: mol_type = unassigned DNA; note = methanogen bacteria
ttattatcatggtcacctgcaggtagtttaactattactggagtacataccagatat

SEQ ID NO: 21139 - DNA, 87 bp, unidentified
  source 1..87: mol_type = unassigned DNA; note = methanogen bacteria
gtatatatctggggactcgaccagtcgggctccctggatatgttcgcgcagtacaggaccatcatggccggggcatccggtacgatc

SEQ ID NO: 21140 - DNA, 45 bp, unidentified
  source 1..45: mol_type = unassigned DNA; note = methanogen bacteria
tacctcgtgccctccgacgcgttcgtatcgcagttcggaagctgg

SEQ ID NO: 21141 - DNA, 162 bp, unidentified
  source 1..162: mol_type = unassigned DNA; note = methanogen bacteria
gcgctgaactggtatccgctccagggattcggcaccgagtacgcgctctccaacccgcctgcgggaaccatccccaaggcgatctacatcctcacccacaccagctccgcggagatggcgtcgggaggatacgagatgatcctgttgggtgctcccaacccg

SEQ ID NO: 21142 - DNA, 186 bp, unidentified
  source 1..186: mol_type = unassigned DNA; note = methanogen bacteria
ctgtacaccaacgacttcctgagctccatccccctcatcggaggcaacggggccataggaacgtacgagaccggaagcaccaccgcctcgggaggtatcgcatggtatctctcgacaccgcagggtctgaccgattggctactgccgattctcaacccggcgtcgtacggtaacggacacagcgtg

SEQ ID NO: 21143 - DNA, 36 bp, unidentified
  source 1..36: mol_type = unassigned DNA; note = methanogen bacteria
ccaggtatagccatcgaattgaatttttctgctgaa

SEQ ID NO: 21144 - DNA, 33 bp, unidentified
  source 1..33: mol_type = unassigned DNA; note = methanogen bacteria
ctgcatttgcaatatgttttaaatgttgaagag

SEQ ID NO: 21145 - DNA, 54 bp, unidentified
  source 1..54: mol_type = unassigned DNA; note = methanogen bacteria
attggaaatcagcaattgggacctaaccatattaatcatttattcgttcagtca

SEQ ID NO: 21146 - DNA, 87 bp, unidentified
  source 1..87: mol_type = unassigned DNA; note = methanogen bacteria
gtttatatctggggattggaccagtccgattccctggatatattcgcccagtacaggaccatcatggccggggcttccggtaccatt

SEQ ID NO: 21147 - DNA, 45 bp, unidentified
  source 1..45: mol_type = unassigned DNA; note = methanogen bacteria
tatctcatcccttccagtgcgttcacctctcagttcggggacgga

SEQ ID NO: 21148 - DNA, 159 bp, unidentified
  source 1..159: mol_type = unassigned DNA; note = methanogen bacteria
gcactcaactggtaccccgtgagttcggctgcggattactctctgagcaatccccctgcgggaaccatacccaaggctatctacatcctgatgaacaccgacagtgccgacatggcctccggcggttacgagatgatcctcctgggtcagcccaatccg

SEQ ID NO: 21149 - DNA, 186 bp, unidentified
  source 1..186: mol_type = unassigned DNA; note = methanogen bacteria
ttctacaccagcgacttcctgagctcgatacccctcctcggacacaacgacgcgctcggagtctacgagaccggcagcaccacggcttccggaggtctcgcctggttcctttccacgccgcagggtctgaccgattggctcatgccgatgctcaaccccgacagttacggaaacggacacggcgtg

SEQ ID NO: 21150 - DNA, 33 bp, unidentified
  source 1..33: mol_type = unassigned DNA; note = methanogen bacteria
ctgcagattatatttaaaacaacagcaatcgga

SEQ ID NO: 21151 - DNA, 210 bp, unidentified
  source 1..210: mol_type = unassigned DNA; note = methanogen bacteria
gtgtctcatgctatgagtttaccagcattagaaatgttttttagtcaatcagccaatactggaaattcaagcataaatacgggtaattctaattcattaacttcaaaattttcaattaaaaatttaaattttttaataaaaagtgagatctttggtttttatgagcagtgtgtcagattatttacatttggatggttaacatacacctcc

SEQ ID NO: 21152 - DNA, 63 bp, unidentified
  source 1..63: mol_type = unassigned DNA; note = methanogen bacteria
attgattattcattatatcattgccctgatgcaactttaattcaaggtgtgcaaggaagatat

SEQ ID NO: 21153 - DNA, 33 bp, unidentified
  source 1..33: mol_type = unassigned DNA; note = methanogen bacteria
tttaaaacaccatcaggtacatggttaagtgga

SEQ ID NO: 21154 - DNA, 90 bp, unidentified
  source 1..90: mol_type = unassigned DNA; note = methanogen bacteria
aatttgaagactaaaacaattggagatatagcaagtatagcatcaggactacctaaattccatataccgatggtacctataacttttcaa

SEQ ID NO: 21155 - DNA, 33 bp, unidentified
  source 1..33: mol_type = unassigned DNA; note = methanogen bacteria
tttaaaaccccttcaggtgcatggttaactgga

SEQ ID NO: 21156 - DNA, 93 bp, unidentified
  source 1..93: mol_type = unassigned DNA; note = methanogen bacteria
ggattaaatacacaaacaataggggatatagcaagtatcagtccacaacttccttcttttcatattccaatggtaccgataacatatgaatca

SEQ ID NO: 21157 - DNA, 36 bp, unidentified
  source 1..36: mol_type = unassigned DNA; note = methanogen bacteria
gtctcaggattggggaccgcatccgcttccgccgta

SEQ ID NO: 21158 - DNA, 54 bp, unidentified
  source 1..54: mol_type = unassigned DNA; note = methanogen bacteria
caggctgtccgcttcatgggggcggaggacgtcatggacgaggccgtgctgtac

SEQ ID NO: 21159 - DNA, 66 bp, unidentified
  source 1..66: mol_type = unassigned DNA; note = methanogen bacteria
gaaccgctgatgtccgtcatgaccgtcgaggagtccatgagggaagtgcgccccgatttcgtgaag

SEQ ID NO: 21160 - DNA, 183 bp, unidentified
  source 1..183: mol_type = unassigned DNA; note = methanogen bacteria
aacaacactgctgattggggtggtgcaaactactttaagaacacaattagccatttaatcataacaggagatttcataaataatgttgcacagatatctggtggtgcaaactactttaacgacgaggttaccaatgtttcaattactggagacttcagcgataatgttgcagcaaacggttct

SEQ ID NO: 21161 - DNA, 33 bp, unidentified
  source 1..33: mol_type = unassigned DNA; note = methanogen bacteria
tttaaaactccatctggtgattggttaactggt

SEQ ID NO: 21162 - DNA, 93 bp, unidentified
  source 1..93: mol_type = unassigned DNA; note = methanogen bacteria
gcactacatacaaaaacaattggtgatattgcaagtatttcactgggtcttccaagttttcacattccaatggttccaattactgtagaatca

SEQ ID NO: 21163 - DNA, 36 bp, unidentified
  source 1..36: mol_type = unassigned DNA; note = methanogen bacteria
tttaaaacaggtactggtgcatggcttaccggtact

SEQ ID NO: 21164 - DNA, 90 bp, unidentified
  source 1..90: mol_type = unassigned DNA; note = methanogen bacteria
ggattaaacaccaagacaataggagatattgccaatattgctagcggactgccaacatttcacatccctatggttccagtaacaatagaa

SEQ ID NO: 21165 - DNA, 165 bp, unidentified
  source 1..165: mol_type = unassigned DNA; note = methanogen bacteria
tatgctaatccaggattttttgaatcttggcggagtaacaaatggcttttagaaaatatcaatacaacagaacaaataaattatgtttttaataataataaagaaacattaattagcctgttaaatacccttggattattgaaagacgacattagctggaatata

SEQ ID NO: 21166 - DNA, 57 bp, unidentified
  source 1..57: mol_type = unassigned DNA; note = methanogen bacteria
ttaagttggacccccgtaggacaattgtcacctattatgggagttcaagtcagatat

SEQ ID NO: 21167 - DNA, 213 bp, unidentified
  source 1..213: mol_type = unassigned DNA; note = methanogen bacteria
ttttattcaattaacagtttaaacaatagtattagaacatacatgtttgaactacatggcactaatccaaatgaacagattaaatacatgtcaactcatattaaagaaacaatacttcttttttcaacattaatatacgaggttccaaagttaatgttaaaaatgtttaatctttcttataactattattatgttgattattcaaaaggaata

SEQ ID NO: 21168 - DNA, 57 bp, unidentified
  source 1..57: mol_type = unassigned DNA; note = methanogen bacteria
tgggtaggcgttggaaactttgaaaaaggagttgtttggggtgtgcatttaagatat

SEQ ID NO: 21169 - DNA, 39 bp, unidentified
  source 1..39: mol_type = unassigned DNA; note = methanogen bacteria
atggacgcaaccatattcaccgatatcttcggatactac

SEQ ID NO: 21170 - DNA, 81 bp, unidentified
  source 1..81: mol_type = unassigned DNA; note = methanogen bacteria
cactacatcgattcgctgggagactacatctacttcggtagcgaagatgcaccgtactgcggaatcttcatgtacacctcc

SEQ ID NO: 21171 - DNA, 69 bp, unidentified
  source 1..69: mol_type = unassigned DNA; note = methanogen bacteria
ggtgccctcggtaccatcgatctcgcagtcatcggtgcaaagacccacgatcccgacttcacctacagt

SEQ ID NO: 21172 - DNA, 33 bp, unidentified
  source 1..33: mol_type = unassigned DNA; note = methanogen bacteria
ttcgtcggtgtaaccgcagtcaaggtggaacct

SEQ ID NO: 21173 - DNA, 33 bp, unidentified
  source 1..33: mol_type = unassigned DNA; note = methanogen bacteria
ggagcaatctacaacgacggagtcatgtctcag

SEQ ID NO: 21174 - DNA, 57 bp, unidentified
  source 1..57: mol_type = unassigned DNA; note = methanogen bacteria
gacatcatccttgatccctgtgcaaccgcagcgaacgatctgcttcactggtggatg

SEQ ID NO: 21175 - DNA, 72 bp, unidentified
  source 1..72: mol_type = unassigned DNA; note = methanogen bacteria
ttggtcattgaaaactgcagttttgattcattcaatgccaactttggaggagccatctgtgcccttgatact

SEQ ID NO: 21176 - DNA, 33 bp, unidentified
  source 1..33: mol_type = unassigned DNA; note = methanogen bacteria
ggaaccggaggaatatatccaattcaaatcatg

SEQ ID NO: 21177 - DNA, 84 bp, unidentified
  source 1..84: mol_type = unassigned DNA; note = methanogen bacteria
tatagaatgcctcagacccttaccaacggaggcctcggactggaatacgttcttgccattcccggtctgaatcctctgctcccg

SEQ ID NO: 21178 - DNA, 81 bp, unidentified
  source 1..81: mol_type = unassigned DNA; note = methanogen bacteria
cgtctcccctcgaccttcggacgtgccggcatgggtgtggagtacgttctcgccatccccggtctgaatcccctcctgccc

SEQ ID NO: 21179 - DNA, 183 bp, unidentified
  source 1..183: mol_type = unassigned DNA; note = methanogen bacteria
ttgtttgattctaataagattgatggatacggggattcatctcagtgttatggtggtgctattcgtgcaaaaaatgatgtaactgttgataatagtacctttaaggataattatgctcatgattatggtggtgctatttatggaaataatatatatgttaataacaatcagggttccaacgga

SEQ ID NO: 21180 - DNA, 36 bp, unidentified
  source 1..36: mol_type = unassigned DNA; note = methanogen bacteria
tctaaaattgttgctgatttgaatactgatgttagt

SEQ ID NO: 21181 - DNA, 171 bp, unidentified
  source 1..171: mol_type = unassigned DNA; note = methanogen bacteria
gttatgggtggtatcagtactgcaatcgatacctatgcacctaatcactccggagacgagcaattccatcaggatgtctatgattacttccaaaaattaggtaatatagatgatgttaaagcgcaggataatattattgtcaatactgccgatataattattcaaaatgca

SEQ ID NO: 21182 - DNA, 36 bp, unidentified
  source 1..36: mol_type = unassigned DNA; note = methanogen bacteria
tctcaggtcgttgtggatttaaatactgatgtgagt

SEQ ID NO: 21183 - DNA, 171 bp, unidentified
  source 1..171: mol_type = unassigned DNA; note = methanogen bacteria
attggaggaattagtaatgcagtcgatgtctatgcaccacaatattcagcagacgaacaattccaccaagatgtttatgatgcctttcaaaaagtaaataatatagacgaaataaaagcacaggataataccgttgttgtaaatgttgtagatatcattattcatagcgca

SEQ ID NO: 21184 - DNA, 36 bp, unidentified
  source 1..36: mol_type = unassigned DNA; note = methanogen bacteria
atggacgcaaccttcattaccgatatcttccagcac

SEQ ID NO: 21185 - DNA, 81 bp, unidentified
  source 1..81: mol_type = unassigned DNA; note = methanogen bacteria
accgccgacaacggacttgccggcttcaacgagttcggtcaggccggggacgcattcttcggactgttcgtgtacaacaag

SEQ ID NO: 21186 - DNA, 60 bp, unidentified
  source 1..60: mol_type = unassigned DNA; note = methanogen bacteria
tccctcggcaccctcaagcttgccgctctcggacccgctctggcagccagcggatacacc

SEQ ID NO: 21187 - DNA, 30 bp, unidentified
  source 1..30: mol_type = unassigned DNA; note = methanogen bacteria
gtcgctgcacaggccactgtctccatcgag

SEQ ID NO: 21188 - DNA, 39 bp, unidentified
  source 1..39: mol_type = unassigned DNA; note = methanogen bacteria
ggagccatctacgacggtggagccggagccgtatccgga

SEQ ID NO: 21189 - DNA, 48 bp, unidentified
  source 1..48: mol_type = unassigned DNA; note = methanogen bacteria
gacctcatcctcggcccctgcgctgacgcagctgcagtgctgttcgcc

SEQ ID NO: 21190 - DNA, 42 bp, unidentified; identical to SEQ ID NO: 20049
  source 1..42: mol_type = unassigned DNA; note = methanogen bacteria

SEQ ID NO: 21191 - DNA, 93 bp, unidentified
  source 1..93: mol_type = unassigned DNA; note = methanogen bacteria
tgcgctgacggcttgaacattttctctactattgttcaggctttccttggaattgcaggccaggttatctcttccatggcagatccatggaat

SEQ ID NO: 21192 - DNA, 57 bp, unidentified
  source 1..57: mol_type = unassigned DNA; note = methanogen bacteria
aaggatggatttgcttcaatcggcatgaatgttggtagttttggtattttcctccaa

SEQ ID NO: 21193 - DNA, 99 bp, unidentified
  source 1..99: mol_type = unassigned DNA; note = methanogen bacteria
actattctggatggtagcgaccaggctctcattaccttgatgaaaacatctccattgtcattcaatggtatttttgaggcattgtcccagtctgacgct

SEQ ID NO: 21194 - DNA, 60 bp, unidentified; identical to SEQ ID NO: 20053
  source 1..60: mol_type = unassigned DNA; note = methanogen bacteria

SEQ ID NO: 21195 - DNA, 33 bp, unidentified; identical to SEQ ID NO: 20054
  source 1..33: mol_type = unassigned DNA; note = methanogen bacteria

SEQ ID NO: 21196 - DNA, 36 bp, unidentified
  source 1..36: mol_type = unassigned DNA; note = methanogen bacteria
tcccaggttgttgctgatttgaatactactgtaagt

SEQ ID NO: 21197 - DNA, 168 bp, unidentified
  source 1..168: mol_type = unassigned DNA; note = methanogen bacteria
atgggaggcattgctaatggagtcgatacctatgcaccagaatattcaggaaatgaacaagtacatcaagacatctttgattacttcgaaaaagtagggaatgtagacgatattaaatcagagaacagtactgtcattaatattgcagatactgttattcaggattca

SEQ ID NO: 21198 - DNA, 36 bp, unidentified
  source 1..36: mol_type = unassigned DNA; note = methanogen bacteria
tcccaggttgttgtggacctgcatactgatgtgagt

SEQ ID NO: 21199 - DNA, 168 bp, unidentified
  source 1..168: mol_type = unassigned DNA; note = methanogen bacteria
gttatgggtggtattagtaacgcagttgatgtccatgcccctgaccattccggagacgaacaatttcagttggaagttgctaattacttccagaaagtgggtaatatagataatcttaaagacaatagtactgttgttgatattgtaaacatcattgtccagagtact

SEQ ID NO: 21200 - DNA, 36 bp, unidentified
  source 1..36: mol_type = unassigned DNA; note = methanogen bacteria
tctcaggtcgttgctgatttgaatacagatgtaagt

SEQ ID NO: 21201 - DNA, 165 bp, unidentified
  source 1..165: mol_type = unassigned DNA; note = methanogen bacteria
atgggaggtgtttctcatgcagtcgatgtatatgcacctcaacattcaggagacgaacacttccaacaagttgtaattgaacagttccagaaggtaggtaatataaacgatattaagtcagatcaaactgtagttcaaattgtagacacagttattcaggaaacc

SEQ ID NO: 21202 - DNA, 174 bp, unidentified
  source 1..174: mol_type = unassigned DNA; note = methanogen bacteria
cttgaccatcttattctccatgttgacgagtatttcacactgacgcttatcaatttcgatgtgggtgaaatgataagcctcaccgctgcggacgtgcatccgccattatattatctgatacttaagtttgcaatgactgttttcggatttttcggagtctctgcccacagtatc

SEQ ID NO: 21203 - DNA, 96 bp, unidentified
  source 1..96: mol_type = unassigned DNA; note = methanogen bacteria
tttgctcagttgggtgccgttcaccatgggttctgggttcctagagttactgttaaatcacttatcgaggattttggatactatgcatattgcaat

SEQ ID NO: 21204 - DNA, 33 bp, unidentified
  source 1..33: mol_type = unassigned DNA; note = methanogen bacteria
tttcttgattgtttgggggcagaatttatcgga

SEQ ID NO: 21205 - DNA, 39 bp, unidentified
  source 1..39: mol_type = unassigned DNA; note = methanogen bacteria
cctttgatatttgaaaaagcagaaatgccatggagtatc

SEQ ID NO: 21206 - DNA, 39 bp, unidentified
  source 1..39: mol_type = unassigned DNA; note = methanogen bacteria
atcaactggtggcttggcccacaatacatattagaagat

SEQ ID NO: 21207 - DNA, 183 bp, unidentified
  source 1..183: mol_type = unassigned DNA; note = methanogen bacteria
ttctatgcaaaccccggatttctcaactcctggagaggaaacaaatgggtgttggagaacttcaactccacaaggcagatggactacatcatgcaccacaaaaaggaggcgattttcgaactgacgaagatgccgctgtacctgcctgatgcactctcattcagcatgaactatgtggacttc

SEQ ID NO: 21208 - DNA, 63 bp, unidentified
  source 1..63: mol_type = unassigned DNA; note = methanogen bacteria
atgatttcctggtgcgaggtcggaaaattgtaccactactacccgggtgtgcagattagatac

SEQ ID NO: 21209 - DNA, 36 bp, unidentified
  source 1..36: mol_type = unassigned DNA; note = methanogen bacteria
gctcaggttgttgctgatctgcatactgatgtaagt

SEQ ID NO: 21210 - DNA, 168 bp, unidentified
  source 1..168: mol_type = unassigned DNA; note = methanogen bacteria
gttatgggtggtgtttctcatgcagtagatatatatgccccagactattccggaaatgaaacattccagttagaggttctgaatcacttccaaaaagtaggtaatttaaacgatgttaaagcggacagtactattgtgaatgttgtagatatcattcttcaagattca

SEQ ID NO: 21211 - DNA, 39 bp, unidentified
  source 1..39: mol_type = unassigned DNA; note = methanogen bacteria
tctcaggttgttgtagacctgaaaactgatgtgagcaca

SEQ ID NO: 21212 - DNA, 168 bp, unidentified
  source 1..168: mol_type = unassigned DNA; note = methanogen bacteria
gttatgggtgctatcggcactgctgtcgacacttatgcgcctgaacattcaggagatgcacaattccatcaggatgttgctaattacttgcagaaagtcggtaatgtagacaaccttcaggacaacagtacatttgtagatgcagtgaacctcattatccaaaatacc

SEQ ID NO: 21213 - DNA, 60 bp, unidentified; identical to SEQ ID NO: 20101
  source 1..60: mol_type = unassigned DNA; note = methanogen bacteria

SEQ ID NO: 21214 - DNA, 51 bp, unidentified
  source 1..51: mol_type = unassigned DNA; note = methanogen bacteria
tcattgcttatatttaatgtaaatgatcctaacactattcctgttgtattg

SEQ ID NO: 21215 - DNA, 36 bp, unidentified
  source 1..36: mol_type = unassigned DNA; note = methanogen bacteria
tctcaggttgtcgctgatttgaatactgatgtaagt

SEQ ID NO: 21216 - DNA, 171 bp, unidentified
  source 1..171: mol_type = unassigned DNA; note = methanogen bacteria
attatgggtggtattagtaatgcagtcgatcactatgcacccgaacattcaggagacgaacaatttcatcaagatatctatgattatttccaaaaagttggtaatatgaatgagattagattacaaggcagtactgtcgtgactattgtagatgagatttttcaggatgca

SEQ ID NO: 21217 - DNA, 39 bp, unidentified
  source 1..39: mol_type = unassigned DNA; note = methanogen bacteria
atctctcacattgttgttgatttgaatactgatgtcagt

SEQ ID NO: 21218 - DNA, 162 bp, unidentified
  source 1..162: mol_type = unassigned DNA; note = methanogen bacteria
gttatgggaggtattagtactgcagtcgatacctacgcaccggattattcaggagacgagcaattccatcaggaggtttatgatcacttccaaaaattggatactatagatggacatgacagtgttgttgttaatactgcagatataattattcaaaatgca

SEQ ID NO: 21219 - DNA, 174 bp, unidentified
  source 1..174: mol_type = unassigned DNA; note = methanogen bacteria
cttgaccatcttattttgcatgttgacgagtatttcacactaacacttattaatttcgatgtaggtgaaatgataagccttactgcagccgatgtgcatccgccattgtattatctaatacttaagttcgcaatgactgtttttggcttttttgggatctcacctcacagcatc

SEQ ID NO: 21220 - DNA, 93 bp, unidentified
  source 1..93: mol_type = unassigned DNA; note = methanogen bacteria
gctcaattgaatgcaattcatcaaggattttgggtccctagaattactattcaatcacttatagaggactttggatactatgcatattgtaat

SEQ ID NO: 21221 - DNA, 87 bp, unidentified
  source 1..87: mol_type = unassigned DNA; note = methanogen bacteria
aacgtcaacgacctctccaagttcgatgtgaactatggctggatcaacgccgccggactcaagatgtccatcatcctgaccgtcgac

SEQ ID NO: 21222 - DNA, 87 bp, unidentified
  source 1..87: mol_type = unassigned DNA; note = methanogen bacteria
ttcgagtctgcatacctcgccggcagcggaaccatcgacttcagcttcgcattcgtgaagcagtggatgcccggagccgactctgtg

SEQ ID NO: 21223 - DNA, 30 bp, unidentified
  source 1..30: mol_type = unassigned DNA; note = methanogen bacteria
atcgaggctctccccggtgcgctcggcagc

SEQ ID NO: 21224 - DNA, 39 bp, unidentified
  source 1..39: mol_type = unassigned DNA; note = methanogen bacteria
atgggcggtgtcgcctccggtgacgccaacctcgtcaag

SEQ ID NO: 21225 - DNA, 45 bp, unidentified
  source 1..45: mol_type = unassigned DNA; note = methanogen bacteria
gatctcgcgatcagctacatctccggatacgcaggaggtctgatc

SEQ ID NO: 21226 - DNA, 36 bp, unidentified
  source 1..36: mol_type = unassigned DNA; note = methanogen bacteria
atggacgcatccttcattaccaatatcttccagtac

SEQ ID NO: 21227 - DNA, 78 bp, unidentified
  source 1..78: mol_type = unassigned DNA; note = methanogen bacteria
accgccgacaacggactcggcagctacaacatgctcggtcagcccggagatgccttctacggtctgttcgtgtacaac

SEQ ID NO: 21228 - DNA, 66 bp, unidentified
  source 1..66: mol_type = unassigned DNA; note = methanogen bacteria
ggctccctcggaaccctcgagctcggagcactcggctccgccctcgcaaccaagggatactcctgg

SEQ ID NO: 21229 - DNA, 36 bp, unidentified
  source 1..36: mol_type = unassigned DNA; note = methanogen bacteria
ttcgtcgccgcacaggccaccgtctccatcgagcct

SEQ ID NO: 21230 - DNA, 36 bp, unidentified
  source 1..36: mol_type = unassigned DNA; note = methanogen bacteria
ggagcgatcttcggtaccgagggcgcggtgtccgga

SEQ ID NO: 21231 - DNA, 48 bp, unidentified
  source 1..48: mol_type = unassigned DNA; note = methanogen bacteria
gacctcatcctcaacccctgcgctgacgcagccgctgcgctgttcgcc

SEQ ID NO: 21232 - DNA, 36 bp, unidentified
  source 1..36: mol_type = unassigned DNA; note = methanogen bacteria
tctcaggttgttgctgatttgaatactgatgttagt

SEQ ID NO: 21233 - DNA, 168 bp, unidentified
  source 1..168: mol_type = unassigned DNA; note = methanogen bacteria
gttatgggtggtgtttcccatgccgtagatgtttatgcacctgatcactcaggagatgatgcattcaaattacaagttttagaacagttccaaaaagtgggcaatataaacgatgttaaatcagatcataccgttgttcaaattgtagatatgattatccaggatgct

SEQ ID NO: 21234 - DNA, 36 bp, unidentified
  source 1..36: mol_type = unassigned DNA; note = methanogen bacteria
tcccaggttgttgctgatttgaatactgatgtgagc

SEQ ID NO: 21235 - DNA, 168 bp, unidentified
  source 1..168: mol_type = unassigned DNA; note = methanogen bacteria
attggaggcattgctaatggagtggatacctacgcaccagaatattcaggcaatgaacaagtacatcaggacatatttgattacttccaaaaagtaggaaatgtggatgatattaaatcagagaacagtactgtcattaacattgcagataccgttattcaggactca

SEQ ID NO: 21236 - DNA, 222 bp, unidentified
  source 1..222: mol_type = unassigned DNA; note = methanogen bacteria
tcagcacaatcagcagacagcaaaaatgtaaataaagtcgcttcgaattcgacaaaggaagatttgaaaatcgttaaaagttctaattttgttaagaaaggaaacacatattatatgaaattgaccacatctaacggcaaggcggttgcaaataaaaaattgagcgtaagcttcaacggaaaaacatatgcaaaaactaccgattccaatggcaaatttgga

SEQ ID NO: 21237 - DNA, 120 bp, unidentified
  source 1..120: mol_type = unassigned DNA; note = methanogen bacteria
aatgcattttcaaagtcatataaactgtatactgtcaatatgctttcaatcaacatcgcaaatgcgaaactgctcaccaacggctacctgaaaatatatattacagcttccaaaaagttc

SEQ ID NO: 21238 - DNA, 156 bp, unidentified
  source 1..156: mol_type = unassigned DNA; note = methanogen bacteria
acagttaaaataagcattggcggcaaggtatttaagaaaaaggcaaatgtagagggattcgttgtcataaaacctcagttaagtgccaaaaaatacacagttaccgtagatatcaacaagtattccaaaaccaaaaaggtcaaatgcatcaagggt

SEQ ID NO: 21239 - DNA, 216 bp, unidentified
  source 1..216: mol_type = unassigned DNA; note = methanogen bacteria
tatggagcatataatgttggcggcaattccagaattccgacaggctgggtgtcattaagcaagttcaaagcaaaatttgctggtgttggattggtcgttaaacttaattataaattgtctaaaaaagtcaaaactgaaattaagaattattataaaagtatgggtcctaattgggctagacaaaacactaacgaaagaattccaaatgtgcctatc

SEQ ID NO: 21240 - DNA, 66 bp, unidentified
  source 1..66: mol_type = unassigned DNA; note = methanogen bacteria
cctcagctgttctatccgtcaatgagcgcaacctataagctgccgtcatggaatcctgcatggagc

SEQ ID NO: 21241 - DNA, 48 bp, unidentified
  source 1..48: mol_type = unassigned DNA; note = methanogen bacteria
atgtgggagtcatccggagattcattctatatcctgccgtcaatatct

SEQ ID NO: 21242 - DNA, 39 bp, unidentified
  source 1..39: mol_type = unassigned DNA; note = methanogen bacteria
tcacaggttgttgtagacttgaatactgatgtaagtact

SEQ ID NO: 21243 - DNA, 165 bp, unidentified
  source 1..165: mol_type = unassigned DNA; note = methanogen bacteria
gttatgggcggtatcagtactgctgtcgatacatatgcacctgatcattcaggagacgaacaattccatcaagacgtctataattacttccaaaaagttggtaatatagacaatattacccaggacagttttcttgtagacgttacaaacatcattattcaagaa

SEQ ID NO: 21244 - DNA, 36 bp, unidentified
  source 1..36: mol_type = unassigned DNA; note = methanogen bacteria
gcgcaggttgttgctgatttgaatactgatgtgagt

SEQ ID NO: 21245 - DNA, 168 bp, unidentified
  source 1..168: mol_type = unassigned DNA; note = methanogen bacteria
gtttttggaggcatttctaatgcagttgatatctatgctcctgaatattcgggaaatgaaacattccatattgatgtatttaatcactttgaaaaaatgggaaatatgaacgaaattaatgctgacagcactgttatggctattgcaaacgtcattattcaggatgcc

SEQ ID NO: 21246 - DNA, 36 bp, unidentified
  source 1..36: mol_type = unassigned DNA; note = methanogen bacteria
tcacaggttgttgtagacttgaatactgacgtcagt

SEQ ID NO: 21247 - DNA, 165 bp, unidentified
  source 1..165: mol_type = unassigned DNA; note = methanogen bacteria
gttatgggcggtatcagcactgctgtcgatacctatgcaccagatcattcaggagacgaacaattccaacttgaagttgcaaattacttccaaaaagttgctactatagatgatcttaaacaggacagtacccttgtagatgttgcaaacatcattattcaaaat

SEQ ID NO: 21248 - DNA, 171 bp, unidentified
  source 1..171: mol_type = unassigned DNA; note = methanogen bacteria
caaaagccttttttacacattgacgagtggttcaccagaggtctgttgaacatctcctttaaggaaatggttagtgtaacagctggtgatgtgcatcctccgttatactatgccatagctttggttccagtatatctgttggaatggcttcatattccatacgacatgatt

SEQ ID NO: 21249 - DNA, 105 bp, unidentified
  source 1..105: mol_type = unassigned DNA; note = methanogen bacteria
tataggcaaatgaaaactgttaaaggcagttattggattgaaggaattacaattgaaaaattcttggaatttttcgctacaacatttgtcactgaaaatcaggat

SEQ ID NO: 21250 - DNA, 36 bp, unidentified
  source 1..36: mol_type = unassigned DNA; note = methanogen bacteria
gctcaggttgttgcagatttgcatactgatgtaagt

SEQ ID NO: 21251 - DNA, 168 bp, unidentified
  source 1..168: mol_type = unassigned DNA; note = methanogen bacteria
gttattggaggcgtttcccatgcagtcgacatctatgccccagaccaatcaggaaatgaaacattccagcttgaagtattggatcacttccaaaaggtaggtaatttaaacgatgctaaagccgaccatactgttgtggaaatcgtagataccattcttcaggatgcg

SEQ ID NO: 21252 - DNA, 294 bp, unidentified
  source 1..294: mol_type = unassigned DNA; note = methanogen bacteria
actccttcttttattgtttgtgatgagattgagcattatgcaagaagtgatcttacagcacagggaatactattcccggaatatattaataatgaaggttataatgtttcaagtaattttaatcatctattagctattaggggttcaagtatacttgatcctgctatttttaatgataatgttgctgaaaatcattcgctttttaatggttgttttcctcaaaatccattttatccttatttactttcaggattgggtatattattggcgaagttattgaatctaagtgatata

SEQ ID NO: 21253 - DNA, 195 bp, unidentified
  source 1..195: mol_type = unassigned DNA; note = methanogen bacteria
aatgcatctaaattgttaaaatatacaatcagaaatgatcattttattgaacatcatgttaatcctggaaatcagtttgttaatatgataaatcatccgcatcatacatttgttctgttttcatcaatatttgcatttactcaggatatgatttgggatttatttaggttttcttatgaaaaatggacttgtgca

SEQ ID NO: 21254 - DNA, 63 bp, unidentified
  source 1..63: mol_type = unassigned DNA; note = methanogen bacteria
ttgagttgggctccattcgcatatcctaggttagatatgaatattggagtatattcaagatat

SEQ ID NO: 21255 - DNA, 39 bp, unidentified
  source 1..39: mol_type = unassigned DNA; note = methanogen bacteria
gcccaagttgttgctgatttgcatactgatgtaagtact

SEQ ID NO: 21256 - DNA, 168 bp, unidentified
  source 1..168: mol_type = unassigned DNA; note = methanogen bacteria
gttttcggaggtatttcccatgcagtcgacgtgtatgctcccgaatattcgggaaatgaaacattcgagctagaagcatatgaaagctttcagacagtaagtagtataaacgatatccaatccgatcctactgttgtaggaattgtggatattattcttcaggacaca

SEQ ID NO: 21257 - DNA, 48 bp, unidentified
  source 1..48: mol_type = unassigned DNA; note = methanogen bacteria
tcattcgatctgatgttcgaactcaacgccttcccttccacgctttat

SEQ ID NO: 21258 - DNA, 36 bp, unidentified
  source 1..36: mol_type = unassigned DNA; note = methanogen bacteria
atcgccctcttcacataccagatgtcggtcctcgag

SEQ ID NO: 21259 - DNA, 174 bp, unidentified
  source 1..174: mol_type = unassigned DNA; note = methanogen bacteria
aacgtctacatgaaggacaaaatcggagccaccatcgattactggaattcggtcctgccggtgagtcttccgtcagataccggactcgccaacctgctggtcacgcccctgagggatgtcatcatgatgatccccggccttgaccttgacattgccaacatattcgccgacgga

SEQ ID NO: 21260 - DNA, 36 bp, unidentified
  source 1..36: mol_type = unassigned DNA; note = methanogen bacteria
tctcgaattgttgttgatttgaatactgatgttagt

SEQ ID NO: 21261 - DNA, 162 bp, unidentified
  source 1..162: mol_type = unassigned DNA; note = methanogen bacteria
gttatgggcggtattagtactgcagtcgatacctatgcgcctgattattcaggagatgaacaattccatcaggaggtctatgactacttccaaaaattagacactatagagggacaagacagtattgttgtagatactgcagatataattatccagaatgca

SEQ ID NO: 21262 - DNA, 186 bp, unidentified
  source 1..186: mol_type = unassigned DNA; note = methanogen bacteria
tatgcatcttttgcttttcaaaattcttttagacataattattggattttaaagcatatcaataataaaagtcagttatcttatgttttatctcataaatttgcttctttaattgcagtattacaaatgtttaccaaatatttgggttctgatttatattttaaatccagtaatttgtttgttaat

SEQ ID NO: 21263 - DNA, 60 bp, unidentified
  source 1..60: mol_type = unassigned DNA; note = methanogen bacteria
ttatttacttggactccagtaggacaattaaataaaataattggtgtacaatcaaggtat

SEQ ID NO: 21264 - DNA, 36 bp, unidentified; identical to SEQ ID NO: 21260
  source 1..36: mol_type = unassigned DNA; note = methanogen bacteria

SEQ ID NO: 21265 - DNA, 162 bp, unidentified
  source 1..162: mol_type = unassigned DNA; note = methanogen bacteria
gttatgggtggtattagtactgcagtcgatacctatgcacccgattattcaggaaacgagcaattccatcaggagatctatgattacttccaaaaattagatactatagagggacaagatagtgttgttgtgaatactgcagatataattattcagaatgca

SEQ ID NO: 21266 - DNA, 39 bp, unidentified
  source 1..39: mol_type = unassigned DNA; note = methanogen bacteria
tctcaggttgttgccgatttgaatactgatgtaagcgcc

SEQ ID NO: 21267 - DNA, 168 bp, unidentified
  source 1..168: mol_type = unassigned DNA; note = methanogen bacteria
gttattggaggaattagtacagcagtcgatacctatgcgcctgaacattcaggagacgaagagtaccagcagggcgtctatgattacttccaaaaaattggtagtataaatgaggtcaaatcacaggatgcattcattgtaaatattgtcgatgccattattcagaat

SEQ ID NO: 21268 - DNA, 36 bp, unidentified
  source 1..36: mol_type = unassigned DNA; note = methanogen bacteria
tctaaaattgttgtggatttgaatactgatgtcagt

SEQ ID NO: 21269 - DNA, 162 bp, unidentified
  source 1..162: mol_type = unassigned DNA; note = methanogen bacteria
gttatggggggtattagtactgcagtcgatacctacgcaccggcttattcaggagacgagcaattccatcaggaggtctatgattacttccaaaaattagatactataaatggacaagacagtattattgtaaatactgcagatataattatccaaaatgca

SEQ ID NO: 21270 - DNA, 39 bp, unidentified
  source 1..39: mol_type = unassigned DNA; note = methanogen bacteria
atttctcatattgttgttgatttgaatactgatgttagt

SEQ ID NO: 21271 - DNA, 162 bp, unidentified
  source 1..162: mol_type = unassigned DNA; note = methanogen bacteria
gttatgggaggtattagtactgctgttgatacctatgcacctagtcattcaggagacgaccaattccatttagaggtctataatcacttccagaaattagataatttagatggacaagataagattattgtgaatactgcaaatattattattcaaaatgca

SEQ ID NO: 21272 - DNA, 195 bp, unidentified
  source 1..195: mol_type = unassigned DNA; note = methanogen bacteria
acaagtgtattggccaattcctggagaggagatcatttcatatccaatcatgttaatgctaaagaacaaatgaatcttcttttaagcaacccaatattttcaattgaaagattttccaatgttttcaatgaatttccagttattatagatagattcttttatttttcaaatgcaggtggtgcttattcatccaga

SEQ ID NO: 21273 - DNA, 57 bp, unidentified
  source 1..57: mol_type = unassigned DNA; note = methanogen bacteria
ttaacttgggcaagtgttggtgctgaaactgttatgaatggagtgtttagtcgttat

SEQ ID NO: 21274 - DNA, 132 bp, unidentified
  source 1..132: mol_type = unassigned DNA; note = methanogen bacteria
tataatcctggaatattaactacagaatcatttaatcaattacatcaaattgcaaccggtgaatttaacaatggtcagccatttttccatacttttattgaaatgatatttctcaaaatatttggcagccca

SEQ ID NO: 21275 - DNA, 285 bp, unidentified
  source 1..285: mol_type = unassigned DNA; note = methanogen bacteria
gttatttatgatgtggacgacatgcaaaaatcaggcactcatgatttaaaaacaaaagcgatggtatttggaattacaagaaatgcaaactgggacggacaggtttattacatttttgaagacggagcccatcttaaagaggcacgggacaaatactttaaagacattaaccaaactccaaaagaaagttatgaaagtttaacttcgccaaaacttggacaacataattacaatgcagtaaattcatatgcgcttgcctttaaaaacaatacggttttagataca

SEQ ID NO: 21276 - DNA, 36 bp, unidentified
  source 1..36: mol_type = unassigned DNA; note = methanogen bacteria
tcacaggttgttgtggatttaaatactgatgtgagt

SEQ ID NO: 21277 - DNA, 168 bp, unidentified
  source 1..168: mol_type = unassigned DNA; note = methanogen bacteria
gttatgggaggtatcagcactgcagtagatgtctacgcacctgatcattcaggagatgaacaattccagcaagacgtcttggattacttccaaaaagtcggtactattgatgatcttaaaggcaacagtactgttgtagatattgtaaacatcatcgttcagaatact

SEQ ID NO: 21278 - DNA, 36 bp, unidentified
  source 1..36: mol_type = unassigned DNA; note = methanogen bacteria
tctcaacttgttgctgatttaaatactgaagtgagt

SEQ ID NO: 21279 - DNA, 150 bp, unidentified
  source 1..150: mol_type = unassigned DNA; note = methanogen bacteria
gtttttggaggcatttctaatgcagtcgatatctatgccccagaatattcagataatgaaacattccagattgaagtttttgatagctttgaaaaaatggatactgtaaacggtgttgaagtggacattctaaacaccattattcaggag

SEQ ID NO: 21280 - DNA, 39 bp, unidentified
  source 1..39: mol_type = unassigned DNA; note = methanogen bacteria
gtcaggctcggacagctgaccaggctggaggacttcaag

SEQ ID NO: 21281 - DNA, 90 bp, unidentified
  source 1..90: mol_type = unassigned DNA; note = methanogen bacteria
gcgttcatccgcttcatccccgagggatacgtcaacgacgtggaggtctacatcttcagggacagcaacatccccatcctcagggacctc

SEQ ID NO: 21282 - DNA, 66 bp, unidentified
  source 1..66: mol_type = unassigned DNA; note = methanogen bacteria
gagatctgcaacgacttcgacaggtatgcgtacataacgttcggcaacatcctgaacgctcccatc

SEQ ID NO: 21283 - DNA, 30 bp, unidentified
  source 1..30: mol_type = unassigned DNA; note = methanogen bacteria
cccgccaccggtatcagcaacctgttcagc

SEQ ID NO: 21284 - DNA, 36 bp, unidentified; identical to SEQ ID NO: 21260
  source 1..36: mol_type = unassigned DNA; note = methanogen bacteria

SEQ ID NO: 21285 - DNA, 162 bp, unidentified
  source 1..162: mol_type = unassigned DNA; note = methanogen bacteria
gttatgggcggtattagtactgcaatcgatacctatgcacctgattattcaggagatgaacaattccatcaagaagtctatgatcacttccaaaaattagatacaatagacggacaagatagtattgttgtaaatactgcagatatagttattcaaaatgca

SEQ ID NO: 21286 - DNA, 174 bp, unidentified
  source 1..174: mol_type = unassigned DNA; note = methanogen bacteria
atcaaccatcttattttgcatattgacgagtattttacactgacacttattaatttcaatgtaagtgacattataagtattactgcagctgatgtgcatcctccgttatattatctgatattaaagttcgccatgaatgtttttggcttttttggaatttcatctcataatcta

SEQ ID NO: 21287 - DNA, 93 bp, unidentified
  source 1..93: mol_type = unassigned DNA; note = methanogen bacteria
aatcaattaaacgctgttcacaaagcattttgggttccaagacttaggattgagacacttattcaggctgtaggttattatgcctatttaaac

SEQ ID NO: 21288 - DNA, 90 bp, unidentified
  source 1..90: mol_type = unassigned DNA; note = methanogen bacteria
ctttttaaaggatggggttcaaatccggatgcattctttatgaataatatagttgtgggttccaataacctgaacaatgttacaggattt

SEQ ID NO: 21289 - DNA, 72 bp, unidentified
  source 1..72: mol_type = unassigned DNA; note = methanogen bacteria
accttacctgggatgtttattggattaacaaatttattaaatcctgattgggcattgttgtgggatattaat

SEQ ID NO: 21290 - DNA, 108 bp, unidentified
  source 1..108: mol_type = unassigned DNA; note = methanogen bacteria
ggattcatgtcatttacaagtggacttccgataaatgaaatagcaactagtggaacaggattgttgttcatagtatttccggagatattcaatgttatgggtgatatg

SEQ ID NO: 21291 - DNA, 36 bp, unidentified
  source 1..36: mol_type = unassigned DNA; note = methanogen bacteria
tctcaggttgttgctgatttgaatactgatgtgagc

SEQ ID NO: 21292 - DNA, 168 bp, unidentified
  source 1..168: mol_type = unassigned DNA; note = methanogen bacteria
gttttcggaggcatttcccatgcagtcgacatatatgctccagaatattcaggaaatgaaacattccatcaagaggcttatgattactttcaaaaagtgggcagtataaacgaaattaaagagaatgctaccattgaggatattgtaaatatcattattcaggataca

SEQ ID NO: 21293 - DNA, 36 bp, unidentified
  source 1..36: mol_type = unassigned DNA; note = methanogen bacteria
tctcaacttgttattgatttgaaaactgatgtgagt

SEQ ID NO: 21294 - DNA, 168 bp, unidentified
  source 1..168: mol_type = unassigned DNA; note = methanogen bacteria
gtatttggaggtatttctcatgcagttgatatctatgcaccagaatattccggaaatgaaacattccaactagaggcctttaatcagtttgaacaaatggaaaatataaataatactgaaacagacattactgtaagaggtattttagacactattatccaggatacc

SEQ ID NO: 21295 - DNA, 36 bp, unidentified
  source 1..36: mol_type = unassigned DNA; note = methanogen bacteria
tctcaggttgttgctgatttgaatactgatgtgagt

SEQ ID NO: 21296 - DNA, 168 bp, unidentified
  source 1..168: mol_type = unassigned DNA; note = methanogen bacteria
gtttttggaggcatttcccatgcagtcgacatctatgccccacaatattcaggaaatgaaacataccatcaagaagtttatgattacttccaaacagtaggtaatataaacgactttaaagatgacggcaccgttgaggatattgtaaatatcattattcaggacact

SEQ ID NO: 21297 - DNA, 126 bp, unidentified
  source 1..126: mol_type = unassigned DNA; note = methanogen bacteria
accattataactgtaaatgttactttaaataatgcaaacattaccgccaaagacatagaattaacagttggtgaaaatagtactattgaatataccaccacacctgccgatttaaatgttagtttt

SEQ ID NO: 21298 - DNA, 90 bp, unidentified
  source 1..90: mol_type = unassigned DNA; note = methanogen bacteria
cccgatgattccggcattgtcaaagtttctgataatggtactgttacagcattaaaagaaggtaccgccaacattaccattactgtaggc

SEQ ID NO: 21299 - DNA, 258 bp, unidentified
  source 1..258: mol_type = unassigned DNA; note = methanogen bacteria
accattaactcaaccgttattaccgtaactgtaagtaaaatacctaccaaaatcattattcaaaataagactttggatatgaaagttggtgatgaggccaatcctgttgtcagtttaatgccttccaatgcaggtaatttatcttttgttgttagtgatgaaagtattattcttgtaaatggttatggtattgttactgctgtaggtcaaggtaatgctacagttactatcagtttcagaggcaatgacaaatattta

SEQ ID NO: 21300 - DNA, 42 bp, unidentified
  source 1..42: mol_type = unassigned DNA; note = methanogen bacteria
atggatgctacagtaatcactgacatattcggggagtactcc

SEQ ID NO: 21301 - DNA, 57 bp, unidentified
  source 1..57: mol_type = unassigned DNA; note = methanogen bacteria
ggggacaactacccctcggagtacgcgacctacgccaatctgttcacgtacaatgac

SEQ ID NO: 21302 - DNA, 63 bp, unidentified
  source 1..63: mol_type = unassigned DNA; note = methanogen bacteria
ggcgcgctcggaaccctctccatcagcgagatgggggccgctctcggcgacgccggatattcc

SEQ ID NO: 21303 - DNA, 39 bp, unidentified
  source 1..39: mol_type = unassigned DNA; note = methanogen bacteria
gtcttcgccaacgcggccgccggactcgagatcgaggag

SEQ ID NO: 21304 - DNA, 42 bp, unidentified
  source 1..42: mol_type = unassigned DNA; note = methanogen bacteria
ggagccatctacgcagaagacgggagcggtgtcatcacccag

SEQ ID NO: 21305 - DNA, 45 bp, unidentified
  source 1..45: mol_type = unassigned DNA; note = methanogen bacteria
atcatcctcgacctctgcagcgatgcggcatccgctctgctcggc

SEQ ID NO: 21306 - DNA, 84 bp, unidentified
  source 1..84: mol_type = unassigned DNA; note = methanogen bacteria
gtatacgatcttcccgacctacttaacagtctttcagctaatcttacagaaaaccaccccagcctcagcaccgacgcgaacact

SEQ ID NO: 21307 - DNA, 33 bp, unidentified
  source 1..33: mol_type = unassigned DNA; note = methanogen bacteria
ctcatcgcagggaacactgagagctccaaccct

SEQ ID NO: 21308 - DNA, 48 bp, unidentified
  source 1..48: mol_type = unassigned DNA; note = methanogen bacteria
tgcggatacaacctgttctacgccatcggcgatgtcctctgcgaccct

SEQ ID NO: 21309 - DNA, 42 bp, unidentified
  source 1..42: mol_type = unassigned DNA; note = methanogen bacteria
ttcggacccgaggacgcccttgggtacgatgacgactccatg

SEQ ID NO: 21310 - DNA, 291 bp, unidentified
  source 1..291: mol_type = unassigned DNA; note = methanogen bacteria
actccagtattaatcgtatgtgatgaaagcgagcattttgccagaagtgatttgactgcacagggcatattaaatccggaatatgttaatggtggatatggtgttactcatctttgtaatcagttgtttagtcatagtggagaaacattttttgataataatttaattaacgaaaagatcgattcttcaatcagcttttatgatagctgttttgcccataatccattttatgcctatttaatttcggcatttggtatatttttagctaaattattggatttaaatgttatt

SEQ ID NO: 21311 - DNA, 192 bp, unidentified
  source 1..192: mol_type = unassigned DNA; note = methanogen bacteria
tcagctttacttcttaactctgcaagaagagattattttataggaaataatgttaattcttcattacaattgaataatttattagattatccatttaaaactatgttgttagtttcatctattttttcttttacgattggaatgattactgacctttttagattttcccatgcatattggagttatgaatct

SEQ ID NO: 21312 - DNA, 63 bp, unidentified
  source 1..63: mol_type = unassigned DNA; note = methanogen bacteria
ttgagctgggctcctgttggttatggaaaattggacatgattattggggtttatagtagatat

SEQ ID NO: 21313 - DNA, 129 bp, unidentified
  source 1..129: mol_type = unassigned DNA; note = methanogen bacteria
gatggtactgattcgtcttatttgcaggatgattctttagttgttgattgtgatggttcttcattggatggtggggattctttagttgttgattgtgatgattcttcattgaatgatgaggattcagct

SEQ ID NO: 21314 - DNA, 294 bp, unidentified
  source 1..294: mol_type = unassigned DNA; note = methanogen bacteria
accccagcttttgttgtttgtgatgaaatcgaacattatgcaagaagtgatcttacatcacagggaattttattcccggaatatatcaataatgagggatatagtgtttcaagcggctttaattatctgtttccattcgtgggagagacaatacataattttgattttttctccccaaatgccaataataatcattcgcttttcaacggttgttttcctcaaaatccattttatccctatctgctttccggattggggatatttataacaagcttattgaatctgaatccagca

SEQ ID NO: 21315 - DNA, 198 bp, unidentified
  source 1..198: mol_type = unassigned DNA; note = methanogen bacteria
aatgcttcaaaaatgcttaaaaatacgattagaaatgaacattttattgcaaataaagttaatcctaaaaatcagcttaataatatgatcaatcatccaatggatacattaattctcttttccagtattttttcattaacactagatttatgtgttgatttattcagattttcttatcaaatgtggacatacacatca

SEQ ID NO: 21316 - DNA, 63 bp, unidentified
  source 1..63: mol_type = unassigned DNA; note = methanogen bacteria
ttgagttgggcaccatttgcctatcctaaattggacatgattgttggggtatatgcaagatat

SEQ ID NO: 21317 - DNA, 171 bp, unidentified
  source 1..171: mol_type = unassigned DNA; note = methanogen bacteria
gctcattcattgattcatattgatgaatattttacgctagaaattgttaaacttcctttatcagatgcttggaaaattataataggagactaccaccctccattatattatattctattaaaaattgtgaaaaaactttcattaatgacaagcctcaatttagaccttatt

SEQ ID NO: 21318 - DNA, 102 bp, unidentified
  source 1..102: mol_type = unassigned DNA; note = methanogen bacteria
tttaaccaaacaggaaaagtcagtgatgaatattggatagcaaccccggatataaatgaaatattccattacttttacatcagcggtacaaattcaggagat

SEQ ID NO: 21319 - DNA, 141 bp, unidentified
  source 1..141: mol_type = unassigned DNA; note = methanogen bacteria
ggaaatcattactttggtggatatcaaccattaataaacggcggtttaacagcacaattaccagcatatgctaatgcaataatatctggttctgtattagaatatttccacccagcaattacctatgcatttggaccaggt

SEQ ID NO: 21320 - DNA, 75 bp, unidentified
  source 1..75: mol_type = unassigned DNA; note = methanogen bacteria
ttaacaggtaacgtaaacatatcagatatggtaatgatgatacacagtggagcagttgacccaactaacccagta

SEQ ID NO: 21321 - DNA, 39 bp, unidentified
  source 1..39: mol_type = unassigned DNA; note = methanogen bacteria
aaatacatgttatgtcaagctgcaatgactgcaggaata

SEQ ID NO: 21322 - DNA, 54 bp, unidentified
  source 1..54: mol_type = unassigned DNA; note = methanogen bacteria
cctgacatagtaacaagcagactaggtgtcctagctttatccgctttaacatta

SEQ ID NO: 21323 - DNA, 192 bp, unidentified
  source 1..192: mol_type = unassigned DNA; note = methanogen bacteria
acaaatgaattattacattcatggagaggattgcacatgagtgaaaaacatgtcaattcaaccgaacagttaagttatctgttttcaaacccaatcgttttcggcgataaaatcatcagattattcacagaactgccaataataattgatagatatttcttcttccctgatgcaggtcgtgtacaattctca

SEQ ID NO: 21324 - DNA, 57 bp, unidentified
  source 1..57: mol_type = unassigned DNA; note = methanogen bacteria
ctgacctggtcaagtgttggtgctgctaaaataacagcaggagtttacggtcgttat

SEQ ID NO: 21325 - DNA, 36 bp, unidentified
  source 1..36: mol_type = unassigned DNA; note = methanogen bacteria
tctcaggttgttgctgatttgaatactaatgtcagc

SEQ ID NO: 21326 - DNA, 168 bp, unidentified
  source 1..168: mol_type = unassigned DNA; note = methanogen bacteria
gttattggaggaattattgatgcaatcgatacctacgcacccgaacatatagatgatgtgcaactgtatgatgacatctatgaagatttccaaaaagttggaaatgttgatgacctaaaagcatataatagcactgttgtgcatgctgcagacctcattgttcagaat

SEQ ID NO: 21327 - DNA, 39 bp, unidentified
  source 1..39: mol_type = unassigned DNA; note = methanogen bacteria
tctcaggttgttgccgatttgcatactgatgtaagtact

SEQ ID NO: 21328 - DNA, 168 bp, unidentified
  source 1..168: mol_type = unassigned DNA; note = methanogen bacteria
gttttcggaggtatttctcatgcagtcgacatatacgccccacaatattccggaaatgaaacattccagcttgaagtttacaatcactttcaggaagtaggcaacataaacgatgttaatgtagataataatgttgtaaatattgtaaatactgttgttcaggatgct

SEQ ID NO: 21329 - DNA, 33 bp, unidentified
  source 1..33: mol_type = unassigned DNA; note = methanogen bacteria
ttcaaactggctaacggccaatggataagcgga

SEQ ID NO: 21330 - DNA, 93 bp, unidentified
  source 1..93: mol_type = unassigned DNA; note = methanogen bacteria
ggacttaaaacaaaaagcattggtgatatagcaagtgtctctgcgggacttccggcatttcacattccaatggttccgataacacttgaatcg

SEQ ID NO: 21331 - DNA, 135 bp, unidentified
  source 1..135: mol_type = unassigned DNA; note = methanogen bacteria
atgtcgtcttttgcttttaaacttctgtcacttgtttccatatatgatctatatattgttaatgcaagcaatgcaataacaattacgcctccgaataataaaatgtattctgcagcgccttgtccggaattttca

SEQ ID NO: 21332 - DNA, 54 bp, unidentified
  source 1..54: mol_type = unassigned DNA; note = methanogen bacteria
gagtatggtgctatttatgatgacagaaagtccatatctgatattcgttccgac

SEQ ID NO: 21333 - DNA, 174 bp, unidentified
  source 1..174: mol_type = unassigned DNA; note = methanogen bacteria
attaatcatcttattttgcatgttgatgagtacttcacactgtctattatcaattttaatgttaatgacttaattagtgttactgcagccgatgtgcatccgccattgtattacctgatacttaagttcgccatgaacgtctttggcttatttggaatctcttcccataatctc

SEQ ID NO: 21334 - DNA, 96 bp, unidentified
  source 1..96: mol_type = unassigned DNA; note = methanogen bacteria
tttaatcaattggatgccgttcatcacggattctgggttcctagagttaagtttgattcacttgtccagtccttaggatactatgcctattgcaaa

SEQ ID NO: 21335 - DNA, 198 bp, unidentified
  source 1..198: mol_type = unassigned DNA; note = methanogen bacteria
tatgcaacaagtgtattggcgaattcatggagaggagaatattttataaatagtcatgttaatagtacacaacaggctaacaatttaataaatcatccgaaattcgcttttgaaagatttttaaatgtgtttactcaatttcctattattgcagatcgatttttctacttctcaaatgatgttcgtcagtattcatca

SEQ ID NO: 21336 - DNA, 60 bp, unidentified
  source 1..60: mol_type = unassigned DNA; note = methanogen bacteria
tatttaacatgggctaaagttggtgctgaaagtgttgttaatggagtattcgcaagatat

SEQ ID NO: 21337 - DNA, 195 bp, unidentified
  source 1..195: mol_type = unassigned DNA; note = methanogen bacteria
gcaacaagtgtccttacaaactcctggagaggagaattctttgcaaacaaacatgttaatgcaacagaacaattgaactatcttgtttcaaatccgggttttgcggtcgaaagattcattaatttatttacacagttcccaacagtagtggaaaggttcttttacttttcaaatgatgttcgtgactattcctca

SEQ ID NO: 21338 - DNA, 60 bp, unidentified
  source 1..60: mol_type = unassigned DNA; note = methanogen bacteria
tatttaacttgggccagcgttggtgctaaaagtgttatgaatggtgttttcagccgatac

SEQ ID NO: 21339 - DNA, 51 bp, unidentified
  source 1..51: mol_type = unassigned DNA; note = methanogen bacteria
tctgaagtcgttaaaatcagtcttcaaaaatataatgtaactttaactcca

SEQ ID NO: 21340 - DNA, 36 bp, unidentified
  source 1..36: mol_type = unassigned DNA; note = methanogen bacteria
cagtttggcaagtcctacgctaatcttccggttttc

SEQ ID NO: 21341 - DNA, 66 bp, unidentified
  source 1..66: mol_type = unassigned DNA; note = methanogen bacteria
gacggaaggaatttcaaggattttaccgataatgagggttacgcttatattaatgctgatgtaaat

SEQ ID NO: 21342 - DNA, 69 bp, unidentified
  source 1..69: mol_type = unassigned DNA; note = methanogen bacteria
aaaaaatgtcaagtaacaattattaaaaagacttccattacaatttataacgataaacttcttaaagga

SEQ ID NO: 21343 - DNA, 117 bp, unidentified
  source 1..117: mol_type = unassigned DNA; note = methanogen bacteria
aaacagactttaacaattaaaataggtgctaaaacattcgttgaaaaaaccaactccgagggaattgtcataattaaacctaatatgaccaaaaagacatacacagttgatgtaact

SEQ ID NO: 21344 - DNA, 105 bp, unidentified
  source 1..105: mol_type = unassigned DNA; note = methanogen bacteria
aaatccaaatcggttgagggaatttatggatatgcaatcaatcctttgtataaggatgtcccttcaaaaggaggagttcccgatattgattacatgactgaagat

SEQ ID NO: 21345 - DNA, 42 bp, unidentified
  source 1..42: mol_type = unassigned DNA; note = methanogen bacteria
ggagacatgacatacaccgttttgaaatcacagtataaggaa

SEQ ID NO: 21346 - DNA, 297 bp, unidentified
  source 1..297: mol_type = unassigned DNA; note = methanogen bacteria
aaatggaatgtacttgaaagagaactgtttaaaagtctgattcttaaaaatcagcatgattactggccaagtgagattactgcttcattaaaaggtaaagcatatacttattcggaagttagggatgttcaaaatacagattatacctgcggtccgacatcatgcagcatgtgcagtcaggtattaagaaattactgctgtgaaagttatcttgcaaggttatccggttcagaaccagatgttggaacgtctgtccctgccatggacagcgctttggagaaaaataatttcaaatgc

SEQ ID NO: 21347 - DNA, 66 bp, unidentified
  source 1..66: mol_type = unassigned DNA; note = methanogen bacteria
tcttatgattatgctttgagcgaacttaaaaaaggtggttgcgctgttgtattccatgcgaaaaat

SEQ ID NO: 21348 - DNA, 39 bp, unidentified
  source 1..39: mol_type = unassigned DNA; note = methanogen bacteria
gtggctatactggacatatctaaagatgggaactatgtg

SEQ ID NO: 21349 - DNA, 78 bp, unidentified
  source 1..78: mol_type = unassigned DNA; note = methanogen bacteria
tatgataatattgaaacaggatggcaaagcactaactatatgaaaacaagatactacaaaaattatgatgacggtttg

SEQ ID NO: 21350 - DNA, 90 bp, unidentified
  source 1..90: mol_type = unassigned DNA; note = methanogen bacteria
ccgtcaactaaaaatgaaatcaatcagttctatcataatatgggcagttggacaaggcaaaatacgaatgaaaatattctggtggattac

SEQ ID NO: 21351 - DNA, 171 bp, unidentified
  source 1..171: mol_type = unassigned DNA; note = methanogen bacteria
cccctaaatcagcttatcatccacatcgacgagtacttttcgctgacacttgtcacactcccgattcatgatattctgacagtcacaacatgggacgtgcatcctccgctgtactatcttctgggaaagatggcggccaagtttgcctcaatgaccgggatggatcttctt

SEQ ID NO: 21352 - DNA, 96 bp, unidentified
  source 1..96: mol_type = unassigned DNA; note = methanogen bacteria
attattcaggtgacccaggttcatcaaagctactggattcctgaagtcagcgcacccacactgatgaattccttcggatattacgcatacacttca

SEQ ID NO: 21353 - DNA, 54 bp, unidentified
  source 1..54: mol_type = unassigned DNA; note = methanogen bacteria
cagagcgagtacttcgacgagtacatcggcttcatggcggacatcgacccgacc

SEQ ID NO: 21354 - DNA, 75 bp, unidentified
  source 1..75: mol_type = unassigned DNA; note = methanogen bacteria
atcgacgggtccttcagcctggacaccgtcagcagggactggacctcccccgactgggagtgggacgccaacggg

SEQ ID NO: 21355 - DNA, 87 bp, unidentified
  source 1..87: mol_type = unassigned DNA; note = methanogen bacteria
ttcggcaccctcggctacgacggcgtcgacgtcgcaggatatgcgaccctggcccctctctgcgtgagcgacttcggtgacgagggg

SEQ ID NO: 21356 - DNA, 36 bp, unidentified
  source 1..36: mol_type = unassigned DNA; note = methanogen bacteria
ttctatattttctttcctaattttagaactattttg

SEQ ID NO: 21357 - DNA, 45 bp, unidentified
  source 1..45: mol_type = unassigned DNA; note = methanogen bacteria
gtcattgaaattgatttaactgacaacattcaagtagttttattg

SEQ ID NO: 21358 - DNA, 30 bp, unidentified
  source 1..30: mol_type = unassigned DNA; note = methanogen bacteria
ggccaatctatggatgatatttttaatgta

SEQ ID NO: 21359 - DNA, 126 bp, unidentified
  source 1..126: mol_type = unassigned DNA; note = methanogen bacteria
atttcagttttaccaattcatccatatgctttttcaatggcttccggtataggaagtgcaagtatgaatgcagcatctttggcttcaatatctcatgttcatccatctatggctactgaatttgaa

SEQ ID NO: 21360 - DNA, 48 bp, unidentified
  source 1..48: mol_type = unassigned DNA; note = methanogen bacteria
ggtgttccaacatccagttttgtcatgcattatgtttcacaaatcaat

SEQ ID NO: 21361 - DNA, 30 bp, unidentified
  source 1..30: mol_type = unassigned DNA; note = methanogen bacteria
ttggcaattctgctcaatttggtggtgcta

SEQ ID NO: 21362 - DNA, 36 bp, unidentified
  source 1..36: mol_type = unassigned DNA; note = methanogen bacteria
tctaaggttgtagttgatctgcatactgatgtaagt

SEQ ID NO: 21363 - DNA, 165 bp, unidentified
  source 1..165: mol_type = unassigned DNA; note = methanogen bacteria
gttatgggaggtctttccactgcaatcgatatgtatgcaccagaccatgcaaacgacccgcaattctttgatgatgcagccaattacctccaggcagccggtaccgaaaatattacacaagacagtactgtcatgaatgccgtagatgtcattattcaggaagct

SEQ ID NO: 21364 - DNA, 36 bp, unidentified
  source 1..36: mol_type = unassigned DNA; note = methanogen bacteria
atgtctacactatcggcgaagaacttcgagaagcca

SEQ ID NO: 21365 - DNA, 204 bp, unidentified
  source 1..204: mol_type = unassigned DNA; note = methanogen bacteria
agctattcagaaccggctttgatgcattcatggagatcaaaacttaattatatggatcctgcattgcaggccaaatatcttattaacaatccgtttgaaattttgagatttttaaggctcattttcacatatacattgggcattacagtaaacggtcttttcaatttcttttcagcaggcagcgcaaaccattactctgaccaa

SEQ ID NO: 21366 - DNA, 51 bp, unidentified
  source 1..51: mol_type = unassigned DNA; note = methanogen bacteria
ttgacatgggcagacgttggaagtacaaatataggagtcagtgcaagatac

SEQ ID NO: 21367 - DNA, 87 bp, unidentified
  source 1..87: mol_type = unassigned DNA; note = methanogen bacteria
attacattcagctggggaactgatgccgcattatactttgttaataatgttggaggaagttctaatttaagtaatgcaagtttcctg

SEQ ID NO: 21368 - DNA, 69 bp, unidentified
  source 1..69: mol_type = unassigned DNA; note = methanogen bacteria
acattgcctggagcagatattggaataaatactttactaaatccaacatggagcaaattatatgatgta

SEQ ID NO: 21369 - DNA, 105 bp, unidentified
  source 1..105: mol_type = unassigned DNA; note = methanogen bacteria
ggattcatgtcatatacaaccggaactccaatggtgcaactaattactgaaggaaccggactgatatttatcgtattcccaatgattttcaatattatgggtgca

SEQ ID NO: 21370 - DNA, 90 bp, unidentified
  source 1..90: mol_type = unassigned DNA; note = methanogen bacteria
actcctgtcggtgagcttgacaagttcaacttcaccgcagactggatcagtgccggcggactcaagatgtctttcatcttcgtcgtcgac

SEQ ID NO: 21371 - DNA, 81 bp, unidentified
  source 1..81: mol_type = unassigned DNA; note = methanogen bacteria
caggccgcatccatcaacggtgtcgctgacttcagcttcgaggcagtcaagactgcactcaacggatcccccgattcgctg

SEQ ID NO: 21372 - DNA, 54 bp, unidentified
  source 1..54: mol_type = unassigned DNA; note = methanogen bacteria
gaccttgcactcagctatctcgctgactattccgcatatgtaggaggtctgatc

SEQ ID NO: 21373 - DNA, 168 bp, unidentified
  source 1..168: mol_type = unassigned DNA; note = methanogen bacteria
aatagatctatctggtctgatgaagctttaactttggatataataaatcaatcttattttggaatgatacaattaactgcatctgatgttcatcctccattatattatatcattattaaaacaacattaataattattaatttctttaaaataccatttgatgaaatt

SEQ ID NO: 21374 - DNA, 117 bp, unidentified
  source 1..117: mol_type = unassigned DNA; note = methanogen bacteria
ttgagaattaaaaataattattggattcaagcaattaattttaaatctattatatcctatttttattttataacatctccttcttcttattatgatttaatttatttaacttcgttt

SEQ ID NO: 21375 - DNA, 171 bp, unidentified
  source 1..171: mol_type = unassigned DNA; note = methanogen bacteria
ctcaaccattacataatgcacattgacgagtacttctcaatgagcctaaccacccttcctttatgggatatcataaacgtgaccagttgggacgtgcacccaccactttactacattttaggaaaaattgcggtaaaaattggtggagcaatcggaatggaaccaatccac

SEQ ID NO: 21376 - DNA, 93 bp, unidentified
  source 1..93: mol_type = unassigned DNA; note = methanogen bacteria
aggcagctgacccaggttcacggaagctactggattccgcaggtcaactccaacgtcttcatcaacgctttaggatattatgcatatgcaaat

SEQ ID NO: 21377 - DNA, 171 bp, unidentified
  source 1..171: mol_type = unassigned DNA; note = methanogen bacteria
cctcttaacaattacataatgcacgttgatgaatactttacaataagtgttctcacccttcctataggagatatcttgaacataaccagttgggacgtgcatccgccactgtactactttttgggcaagattgcaataaacgtggcagacacatttggattggattatctt

SEQ ID NO: 21378 - DNA, 99 bp, unidentified
  source 1..99: mol_type = unassigned DNA; note = methanogen bacteria
atgaggcaaatgacacaggttaaggctgcatattggattcgtcagctcaacccggaaacattcatcaagacattaagctactttgcatatacaaatgat

SEQ ID NO: 21379 - DNA, 294 bp, unidentified
  source 1..294: mol_type = unassigned DNA; note = methanogen bacteria
tcaccaatttttgtagttcctgatgaagttgaacactttgcaagaagtgatttaacatcagaaggagtactgtttccccaatatacgcctaatcaaggatattatatgaataattacttttgggatatgctttataatgcgggattaaccattttcaatgctaatttaacacattgggatatatgggatgcgcaggccttttttgaatcggcattttcgcaaaatcttttttatggatatattgctcaagcaattggaatacttctagctaaaattttagatttatctgtaata

SEQ ID NO: 21380 - DNA, 195 bp, unidentified
  source 1..195: mol_type = unassigned DNA; note = methanogen bacteria
aaatatgcttcacctgaactattaaaaagtggaagagctttaataatggctcaaaataatgtatctgtatcaggtcaaataaattatatgttaaataatccattaaatgctactttaacacttattaaaagtgttggaggttctatttacacaatatttatttatgaattaaagctttatagcgaaaaatatgta

SEQ ID NO: 21381 - DNA, 54 bp, unidentified
  source 1..54: mol_type = unassigned DNA; note = methanogen bacteria
ttgagttggtcaccagttggtggtaatgaaattttaggtattcaagcaagatat

SEQ ID NO: 21382 - DNA, 63 bp, unidentified
  source 1..63: mol_type = unassigned DNA; note = methanogen bacteria
atttcatggtatgtgggccaacataattatgacccagattatcaggcctggaaaacatatgca

SEQ ID NO: 21383 - DNA, 90 bp, unidentified
  source 1..90: mol_type = unassigned DNA; note = methanogen bacteria
aatcttctttatgctgaaattttgtctgatactgcatctgttgctccaaataatcaaatgccggcaagtgcttatctttacacagtatta

SEQ ID NO: 21384 - DNA, 39 bp, unidentified
  source 1..39: mol_type = unassigned DNA; note = methanogen bacteria
tacatcgacaatctgggtcttgcgacctacggtataatc

SEQ ID NO: 21385 - DNA, 45 bp, unidentified
  source 1..45: mol_type = unassigned DNA; note = methanogen bacteria
ccgtacatattcggtgttgccggcaacagctacggcgaggtccag

SEQ ID NO: 21386 - DNA, 30 bp, unidentified
  source 1..30: mol_type = unassigned DNA; note = methanogen bacteria
aacatatacatcggcgcggaggcggaggga

SEQ ID NO: 21387 - DNA, 48 bp, unidentified
  source 1..48: mol_type = unassigned DNA; note = methanogen bacteria
caggtcatagaggcgtgggtaggggcggactatgtctacctggcggac

SEQ ID NO: 21388 - DNA, 36 bp, unidentified
  source 1..36: mol_type = unassigned DNA; note = methanogen bacteria
atgctgtccccctccgacagcttcgagagagtggag

SEQ ID NO: 21389 - DNA, 96 bp, unidentified
  source 1..96: mol_type = unassigned DNA; note = methanogen bacteria
tcaggtgatttaggatttattgactcaatatttcaaggaatgtctggtataacaacaacaggattttctttaattcctgctgaagaaacctctttt

SEQ ID NO: 21390 - DNA, 99 bp, unidentified
  source 1..99: mol_type = unassigned DNA; note = methanogen bacteria
ggattagatttatttgatgcaatatgctattgtttttgtggaatagcaacaggtggattttcagttgatgcaaatcatgttgaacattttagtcaacct

SEQ ID NO: 21391 - DNA, 117 bp, unidentified
  source 1..117: mol_type = unassigned DNA; note = methanogen bacteria
tttggaggatactaccatcaggatatagtaaaaatattctcacactcattattccaagtagtatcagtaatgtcttcaacaggttttactacaacagatataactccctggccatcc

SEQ ID NO: 21392 - DNA, 93 bp, unidentified
  source 1..93: mol_type = unassigned DNA; note = methanogen bacteria
tgtaataacctagaaatagcttattcattagctgcatcatcacttggaaacacaggcgttggaccagattatttctcaataacaatgccactt

SEQ ID NO: 21393 - DNA, 168 bp, unidentified
  source 1..168: mol_type = unassigned DNA; note = methanogen bacteria
tatgctttaaatggtttaattcaatcacctagatataattttaatttaaacacacattatcaattgttatttattaaaagtcattttacaagttatctaattacaattactaaaccaagtttatattattcattaatctttattaaagttggattctttagatatgtt

SEQ ID NO: 21394 - DNA, 57 bp, unidentified
  source 1..57: mol_type = unassigned DNA; note = methanogen bacteria
tacttaacaaataataaaattggagctaataatgtttctggtgtacaatttagatat

SEQ ID NO: 21395 - DNA, 174 bp, unidentified
  source 1..174: mol_type = unassigned DNA; note = methanogen bacteria
cccctcaaccattacataatgcacatagatgagtacttcacaatgagtattacaacccttccattaggagacatcgtgaacgtagccagctggtatgtgcatccgccactgtactatattttaggaaaggttgcagtaaccataggtgcaacaatcggaatggattcactccac

SEQ ID NO: 21396 - DNA, 96 bp, unidentified
  source 1..96: mol_type = unassigned DNA; note = methanogen bacteria
aatcaaatgtcacaggctcacgcaatctccgggattgcacagattaacctcaacacattcatcaatgcactgggatacattgcatatgcaaatgac

SEQ ID NO: 21397 - DNA, 171 bp, unidentified
  source 1..171: mol_type = unassigned DNA; note = methanogen bacteria
ctcaacaattatataatgcacgttgatgagtactttacaataagtgtcctatcccttcctgtacaagacatcatacacataaccagctgggatgtgcatccgccactgtactaccttttgggaaagattgcagtaaatatcggtactgcaataggaatggatgaactccac

SEQ ID NO: 21398 - DNA, 96 bp, unidentified
  source 1..96: mol_type = unassigned DNA; note = methanogen bacteria
atggtgcaaatgacaaaagttaaggcggcctactggattcgtcagctcaacctggaaacatttccaaagacattgagctactttgcatatacaaat

SEQ ID NO: 21399 - DNA, 90 bp, unidentified
  source 1..90: mol_type = unassigned DNA; note = methanogen bacteria
ttttttaaaggatggggatctgaccctaatacatttttaagccataatatactacactctactaattcactagggggtatttttcatttt

SEQ ID NO: 21400 - DNA, 72 bp, unidentified
  source 1..72: mol_type = unassigned DNA; note = methanogen bacteria
actttaccgggtgcaaatattggtttaaatgaactgtttaaaccaaactttgaagctttatggaatttcgat

SEQ ID NO: 21401 - DNA, 102 bp, unidentified
  source 1..102: mol_type = unassigned DNA; note = methanogen bacteria
ggatatatgtcacttcaatcagggatccctattgaaaagattgtatctgagggtgcaagtctaatttttgttacatatcctcaaatatttaatattttagga

SEQ ID NO: 21402 - DNA, 177 bp, unidentified
  source 1..177: mol_type = unassigned DNA; note = methanogen bacteria
gtcaaatatccttttttaagtgttgatgaaggatatacaagaggattattgaatttaaatcttgcagatatggtaagcgttactgcaaatgatgtgcatccgccattgtactatttcattaattacctgtttgcccagttggttaatgcaattggtttgaaaatgagtgttatgcat

SEQ ID NO: 21403 - DNA, 102 bp, unidentified
  source 1..102: mol_type = unassigned DNA; note = methanogen bacteria
taccatcaactgcattacgttcagggaaacttttttataaccaaagttacattcaataatttagtatactatctcagttacggatttacaatttcaggaaat

SEQ ID NO: 21404 - DNA, 174 bp, unidentified
  source 1..174: mol_type = unassigned DNA; note = methanogen bacteria
acaaagccttttttacatattgatgaaagatttaccatgggtcttctcgacatttcattcaaggaaatggttcatttaaccgcaattgatgtgcatcctccgttgtattatgccttcaatctgattcccgtatatattctgaagggaattttccatcttcagttcgacaagatc

SEQ ID NO: 21405 - DNA, 102 bp, unidentified
  source 1..102: mol_type = unassigned DNA; note = methanogen bacteria
tataagcagatgaaatctgtacatggaagctactggattgaaaaaatcacaatcgttgaattcgtggaatttttctcttcaatattcacagtcaacacagag

SEQ ID NO: 21406 - DNA, 174 bp, unidentified
  source 1..174: mol_type = unassigned DNA; note = methanogen bacteria
ctcaaccaacttattttgcatgttgatgagtattttacactgactattgtcaatttcaatgtgggtgacctcataaacaccactgcggcggatgtgcatcctccattatattatctgatacttaagtttgccatgtatcttttcggattatttggaatctcttcccataatctc

SEQ ID NO: 21407 - DNA, 93 bp, unidentified
  source 1..93: mol_type = unassigned DNA; note = methanogen bacteria
aatcagttgactgctatccacaagggattttgggttcctagagttagatttgatacacttatccagtccgtggggtactatgctcattgcagc

SEQ ID NO: 21408 - DNA, 96 bp, unidentified
  source 1..96: mol_type = unassigned DNA; note = methanogen bacteria
ttaaacttcccattgatcaatggtttatttgaaaatatgtcaacctggacaggtacaggacttacaatgtttacaaatgttgaggttttacctaaa

SEQ ID NO: 21409 - DNA, 99 bp, unidentified
  source 1..99: mol_type = unassigned DNA; note = methanogen bacteria
ggattacctccatttgatgcaattaacctttgttttgcaatgatctgtaccggcggaatgtcaataaaaaatgccaatataggattttacaacaatgag

SEQ ID NO: 21410 - DNA, 99 bp, unidentified
  source 1..99: mol_type = unassigned DNA; note = methanogen bacteria
tgcaagattcttccaacagatgcattattcatggtaatatctgcaacaacctcaactggtgcaaattgtatatcttcaaatcaaatgatgggatggaat

SEQ ID NO: 21411 - DNA, 96 bp, unidentified
  source 1..96: mol_type = unassigned DNA; note = methanogen bacteria
aatggatacaatggattagacagtttatttgatgtgatatccgcatgtggcaatagtggattaagttccggggttacaggtccagatatgccaata

SEQ ID NO: 21412 - DNA, 93 bp, unidentified
  source 1..93: mol_type = unassigned DNA; note = methanogen bacteria
agctttactaaggcatggggttcaaatccagatttgttcttctccaacaatgttttgcaagcatctgattccatttcaggaatgtttactata

SEQ ID NO: 21413 - DNA, 75 bp, unidentified
  source 1..75: mol_type = unassigned DNA; note = methanogen bacteria
ttaaccttgcctggtgcttctataggttatacacagatattcactcctgattggtctgcattgaccaatttgaat

SEQ ID NO: 21414 - DNA, 105 bp, unidentified
  source 1..105: mol_type = unassigned DNA; note = methanogen bacteria
tttatggcattaagcactggcattccatttaatgagttagtaactgaaggtactggtttggcatttgtagtgttccctcaagtatttaatattatgggaccttgg

SEQ ID NO: 21415 - DNA, 87 bp, unidentified
  source 1..87: mol_type = unassigned DNA; note = methanogen bacteria
gaggcagacgatctcgggcagttcgatttcagcgccaactggatcgactccgccggcctgacgatgaacctcatgttcaccgtcgac

SEQ ID NO: 21416 - DNA, 87 bp, unidentified
  source 1..87: mol_type = unassigned DNA; note = methanogen bacteria
ttcgaagcggcctcaatcaacggagaagggatcaacttctcgttcgagtacatctcgcaggcctgcggcaacttcggcgagaccttc

SEQ ID NO: 21417 - DNA, 30 bp, unidentified
  source 1..30: mol_type = unassigned DNA; note = methanogen bacteria
atcgagaaccttcagctcggtgccgagaac

SEQ ID NO: 21418 - DNA, 45 bp, unidentified
  source 1..45: mol_type = unassigned DNA; note = methanogen bacteria
cttgcgctcgatatgatcggatacttcgcgtatcctgcatggatg

SEQ ID NO: 21419 - DNA, 60 bp, unidentified
  source 1..60: mol_type = unassigned DNA; note = methanogen bacteria
gatggtgtaatcaatctgttgcatccaactgccggagcactgccttatgtacacgcatac

SEQ ID NO: 21420 - DNA, 60 bp, unidentified
  source 1..60: mol_type = unassigned DNA; note = methanogen bacteria
gatggcctattgatgtttttcaagcttcacaatatgcctaatgacggattggtggaaaat

SEQ ID NO: 21421 - DNA, 30 bp, unidentified
  source 1..30: mol_type = unassigned DNA; note = methanogen bacteria
ttaattttaggtccaaattatctctctgtc

SEQ ID NO: 21422 - DNA, 60 bp, unidentified
  source 1..60: mol_type = unassigned DNA; note = methanogen bacteria
gattccattgctcaaatactatgcaattcagttcaattaagacctttagttaatcaatat

SEQ ID NO: 21423 - DNA, 60 bp, unidentified
  source 1..60: mol_type = unassigned DNA; note = methanogen bacteria
gaaaccatattaaccatattcattttaaatagtcctgcagagattccaatggtagtggag

SEQ ID NO: 21424 - DNA, 39 bp, unidentified
  source 1..39: mol_type = unassigned DNA; note = methanogen bacteria
aattcgggatacaccattggctttgaaactaacagtgta

SEQ ID NO: 21425 - DNA, 51 bp, unidentified
  source 1..51: mol_type = unassigned DNA; note = methanogen bacteria
actcttgatttattgatttctaatttgaattcatccaacgatattgctatc

SEQ ID NO: 21426 - DNA, 30 bp, unidentified
  source 1..30: mol_type = unassigned DNA; note = methanogen bacteria
ttagcaggtaatgaaatacagctgggaacc

SEQ ID NO: 21427 - DNA, 93 bp, unidentified
  source 1..93: mol_type = unassigned DNA; note = methanogen bacteria
agttttacaaaagcatggggatcaaaccctgacctatactttactaattcagtattacactctacagattcaatatccggattttttactatc

SEQ ID NO: 21428 - DNA, 75 bp, unidentified
  source 1..75: mol_type = unassigned DNA; note = methanogen bacteria
ttaactttaccaggtgcatcagcaggttatacacaaattttcacaccagattggtcggcgttgggcaatttagat

SEQ ID NO: 21429 - DNA, 108 bp, unidentified
  source 1..108: mol_type = unassigned DNA; note = methanogen bacteria
ggattcatgaccgtgacaagcggaattccatttaatgaacttgtaacatccggaacaggacttgcatttgtagtattcccacaagtattcaatacaatggggcctgca

SEQ ID NO: 21430 - DNA, 171 bp, unidentified
  source 1..171: mol_type = unassigned DNA; note = methanogen bacteria
caaaaaccctttttagatattgatgaatggtatacaatgggtatattaaatacttcctttaaaaacattatccatttaactgccattgatgtgcatcctccggtgtattatctcattgctcggattcctatatacatactaaatcatcttaatgtcgcttatgacatgatt

SEQ ID NO: 21431 - DNA, 102 bp, unidentified
  source 1..102: mol_type = unassigned DNA; note = methanogen bacteria
tataaacaaatgactggagtcaaccagggttattggattgaaagcattaccttcaatgatttcttgggctttttctcatcagtattcacatttaatccggat

SEQ ID NO: 21432 - DNA, 171 bp, unidentified
  source 1..171: mol_type = unassigned DNA; note = methanogen bacteria
caaaagccttttttacacattgacgagtggttcaccagaggtctgttgaacgtttcatttaaggaaatggttagcgtaacagctggtgatgtgcatcctccattatactatgccatagctttggttccagtatacttgttggaatggcttcatattccatatgacatgatt

SEQ ID NO: 21433 - DNA, 105 bp, unidentified
  source 1..105: mol_type = unassigned DNA; note = methanogen bacteria
tataggcaaatgaaaacagttaaaggcagctattggattgaaggaattacaattgaaaaattcctggagtttttcgctacaacattcgttaccgaaaatcaggat

SEQ ID NO: 21434 - DNA, 300 bp, unidentified
  source 1..300: mol_type = unassigned DNA; note = methanogen bacteria
tctccaattaacagcgtatctgatgaaggagaacatttcatgaggtctgaaataacatcccatggagatttctttcccaaatacatcacacagaacaataaaaacggatttatgagcatagattcattagctcatatgccaatggataaaactttctttgaaactacttcctggaatacacaacctataaacacaaccccacaactagttaactcagcatttgagcaaaatccattttatgtttatattgcacaggccatgggaatagatttggcaaaattattaaatttaaatcaaata

SEQ ID NO: 21435 - DNA, 189 bp, unidentified
  source 1..189: mol_type = unassigned DNA; note = methanogen bacteria
tatgctgtcggaagcatatcacattcatggagagcttctttatttgcacaaaaaaacgttaatgctaacggtcaaataaaatatttattgtcagatgcacatggtttaattacatttttacaaatcgaaaatcaaatacccgtgcaaattgatgcattatcaaaactttatactaattataataatttt

SEQ ID NO: 21436 - DNA, 63 bp, unidentified
  source 1..63: mol_type = unassigned DNA; note = methanogen bacteria
tatttaacatgggctcctgttggcgctaaggatttaattgaatctggagttgttcccagatac

SEQ ID NO: 21437 - DNA, 258 bp, unidentified
  source 1..258: mol_type = unassigned DNA; note = methanogen bacteria
ttaacaatgccgtatatatttgaaaaaggtattttacagccaggtgaattcttgataataccaaatgatcctaattatttaagaaaaggaaatgtttctgatttgaatgtaagtgattatgtttttgcttcaagatatattgctgcattagatggatatggggtagcaaggactaatgaattcacttataatttcgtaacggatgaatttaatgaaaaatatgtggatatttatgttgcaaatgatgatgggtctctt

SEQ ID NO: 21438 - DNA, 237 bp, unidentified
  source 1..237: mol_type = unassigned DNA; note = methanogen bacteria
caatatgtaataactgcaataaatcttgtaactggagaaaaaacagcaaacaacatcacagtaattccaagaataattgaaaacaatgacataatcaaatattataggaatgggacccaatacactgttaaaatccttgggggtgatggcaatcctgttggtgcaggtgaaaacgtaacatttaatattaatggagtattttacactcgtcagactgatgaaaatggtattgctaag

SEQ ID NO: 21439 - DNA, 216 bp, unidentified
  source 1..216: mol_type = unassigned DNA; note = methanogen bacteria
attgtgactgcagaatgcaaaggatgtgtcgtatcaaataacatcaaagtattatctgtattgaatgcaaacgatattacaatgaaatatggtgatggcactcaattcaaagttaatttggttgatggtcgaggtaatccttatgcagatcaatctgttgcatttaacattaatggtatgttctataatagaatgactgacagtaacggtcaggct

SEQ ID NO: 21440 - DNA, 63 bp, unidentified
  source 1..63: mol_type = unassigned DNA; note = methanogen bacteria
gaatacattataacctcaagttattatggttctagtattgcaaacaaaataactattgaaagt

SEQ ID NO: 21441 - DNA, 174 bp, unidentified
  source 1..174: mol_type = unassigned DNA; note = methanogen bacteria
atcagcaatgttttaatacatattgatgaatggtggacagtcgctttgataaaaacatcctttttggaatgtttgaaaataacaattaaggatgttcatcctcctttgtactacatgatagttcaaacggtctgttatgttctaaatgctcttcatattcaatatgatttgata

SEQ ID NO: 21442 - DNA, 108 bp, unidentified
  source 1..108: mol_type = unassigned DNA; note = methanogen bacteria
aaacaggtaagtaaaaccatggaatatcaaaagaattttccacatttatatgatctgttcagttatgtttcatggtttgcagtaaacagtactactgatttttcttat

SEQ ID NO: 21443 - DNA, 90 bp, unidentified
  source 1..90: mol_type = unassigned DNA; note = methanogen bacteria
ttctttaagggatggggatcaaatccaaatgcattccttaccaataatgttctgcatgccagttccaatttaggggatgtcactacattt

SEQ ID NO: 21444 - DNA, 75 bp, unidentified
  source 1..75: mol_type = unassigned DNA; note = methanogen bacteria
ttaaccttacctggagcaaatcttggtttgaatgaactgtttaaaccggactggtcccttttaagcaatttttca

SEQ ID NO: 21445 - DNA, 108 bp, unidentified
  source 1..108: mol_type = unassigned DNA; note = methanogen bacteria
ttaggatatatgtcacttcaatcaggggttcctgtttcagaaatcgtatctcaaggaacaggtttgatttttgttgtatatccaacagtattcaatatattaggtcct

SEQ ID NO: 21446 - DNA, 171 bp, unidentified
  source 1..171: mol_type = unassigned DNA; note = methanogen bacteria
cagaaaccttttttacatattgatgaatggtttacacgaggtttgatgtacatttcatttaaggaaatggttcatgtaactgcaattgacgttcaccccccattgtactatgcaattgctttgattccagtgtatctatttaactggctacacattccatatgacatgact

SEQ ID NO: 21447 - DNA, 99 bp, unidentified
  source 1..99: mol_type = unassigned DNA; note = methanogen bacteria
agacaaatgaaatctgtaaaaggggactattggattgaacctatttcactcaatgacttcctgcagttttttgcatcaatattcacagatacaggggaa

SEQ ID NO: 21448 - DNA, 90 bp, unidentified
  source 1..90: mol_type = unassigned DNA; note = methanogen bacteria
tttgttaaaggatggggttcagatccaaatacctttttatcaaatactgtacttcagtctagtgattcaattaatggtatttttaatttt

SEQ ID NO: 21449 - DNA, 72 bp, unidentified
  source 1..72: mol_type = unassigned DNA; note = methanogen bacteria
acattacctggggccagtattgggctggctgaattattcgcacctgatttatctcttttatggcattttgat

SEQ ID NO: 21450 - DNA, 108 bp, unidentified
  source 1..108: mol_type = unassigned DNA; note = methanogen bacteria
ttaggttatatgtctcttcagtcaggaactcctgttgctgatttagtatctggaggtacaacattaattttcgtcgtatatcctcagatatttaatgttttaggtgtt

SEQ ID NO: 21451 - DNA, 66 bp, unidentified
  source 1..66: mol_type = unassigned DNA; note = methanogen bacteria
ttaagtccaaattatacgatacctgagtttacaacacctggtttatatttaactgataaacctttg

SEQ ID NO: 21452 - DNA, 93 bp, unidentified
  source 1..93: mol_type = unassigned DNA; note = methanogen bacteria
gcatttttccatagtcagccacaacttgcagcatcatttgctggaactccatcaattggagtatatgaaatgtcatcaaaattacttaatcct

SEQ ID NO: 21453 - DNA, 132 bp, unidentified
  source 1..132: mol_type = unassigned DNA; note = methanogen bacteria
tatggaaatcatttctttggaggatattctccattattcctaaattcatcttgggctacaaatttgccatccacaataactaattcaattttatttaattttcatcctgcaattacttatgtatttggaggt

SEQ ID NO: 21454 - DNA, 72 bp, unidentified
  source 1..72: mol_type = unassigned DNA; note = methanogen bacteria
ttaactggaaatgtcaatatatctgatattataatagcaattaaaacaggtgtagttactccagataatcct

SEQ ID NO: 21455 - DNA, 45 bp, unidentified
  source 1..45: mol_type = unassigned DNA; note = methanogen bacteria
aatattgttacaaatgcattttcacaatttgcaatggggttgtta

SEQ ID NO: 21456 - DNA, 300 bp, unidentified
  source 1..300: mol_type = unassigned DNA; note = methanogen bacteria
tcccctctcaacagtgtatcggatgagggagagcatttcatgagatctgaaattacatctcatggagatttcttcccccaatacattactaacggaagcagaaccggatttatgagcattgaatcattggcacatatgcctatggataaaacattttttaaaactactgactggaataatcagcccataaataaaacgccccgtgttgtcaattctgcctttgagcagaacccgttttatgcttatcttgcacaggctataggtattgacattgccaaattattgaatttaaaccagata

SEQ ID NO: 21457 - DNA, 186 bp, unidentified
  source 1..186: mol_type = unassigned DNA; note = methanogen bacteria
tatgcagtggactgtataagccattcatggagagcaaacctgtttagagaaaaacatgtaaattcaacagaacagctgcattatattctctccagtccccagtcaatagttacatttctgcatattggaaatcagattccagttcagattgatgcattgtcaaagctttacacaaattatgataat

SEQ ID NO: 21458 - DNA, 63 bp, unidentified
  source 1..63: mol_type = unassigned DNA; note = methanogen bacteria
tttttaacctgggcgcctgtcggttctaaaaatcttgtggatgcaggtgttgtgccaagatac

SEQ ID NO: 21459 - DNA, 90 bp, unidentified
  source 1..90: mol_type = unassigned DNA; note = methanogen bacteria
tttttcaagggatggggaacagatccgaataccttcttaaatgtcaatctgctgcaggcaactgactcattaagcggagtttccaacttc

SEQ ID NO: 21460 - DNA, 69 bp, unidentified
  source 1..69: mol_type = unassigned DNA; note = methanogen bacteria
accctgcctggagcatatatcggccttgcagagctgttcgatccggactggtcacttctatggcatttt

SEQ ID NO: 21461 - DNA, 108 bp, unidentified
  source 1..108: mol_type = unassigned DNA; note = methanogen bacteria
ttgggatacatgtcccttcaatcaggagccccaatttctgaaatcgtttcacagggaacaaccctgatttttgtagcatacccccaagtgttcaatatccttggaacc

SEQ ID NO: 21462 - DNA, 153 bp, unidentified
  source 1..153: mol_type = unassigned DNA; note = methanogen bacteria
acacataccttcattaatgttgacgaatattggacttacagtttggtaaatcttccatttatgcagggaatgattgtagcagttcatgacgtccatccaccactgtactatatgatattgtatttgctaacaccactgggattgcaaaacctt

SEQ ID NO: 21463 - DNA, 105 bp, unidentified
  source 1..105: mol_type = unassigned DNA; note = methanogen bacteria
catcaaatgcaaacccaggcgggcgaacctcgtgaaggctttgaattagccaatgcaatacattaccttactgcttttgcaatcaaaggtcaaaatttcgaattt

SEQ ID NO: 21464 - DNA, 129 bp, unidentified
  source 1..129: mol_type = unassigned DNA; note = methanogen bacteria
agttatggattacattactttggtggtcatcaaccattagcattatcaaatattgctaatctttcaacatatattactaattcatcattatataatttacatcctgcaattacctatgcatacactcca

SEQ ID NO: 21465 - DNA, 75 bp, unidentified
  source 1..75: mol_type = unassigned DNA; note = methanogen bacteria
atttgtggtagtgtaaatattacagatattagtttagctattagtaatttggttcatacaccagaggccagtggc

SEQ ID NO: 21466 - DNA, 45 bp, unidentified
  source 1..45: mol_type = unassigned DNA; note = methanogen bacteria
gaacttgttactaatcctatttcacaatctataggaggattatta

SEQ ID NO: 21467 - DNA, 48 bp, unidentified
  source 1..48: mol_type = unassigned DNA; note = methanogen bacteria
tcgctatatcaaccgagcaatataatctacgacaattatgtctttact

SEQ ID NO: 21468 - DNA, 45 bp, unidentified
  source 1..45: mol_type = unassigned DNA; note = methanogen bacteria
cttgatttatctgttgataggaaatttttgtcctttgagttacct

SEQ ID NO: 21469 - DNA, 36 bp, unidentified
  source 1..36: mol_type = unassigned DNA; note = methanogen bacteria
ttagacatgaatgccttgcctttagataaaattagt

SEQ ID NO: 21470 - DNA, 63 bp, unidentified
  source 1..63: mol_type = unassigned DNA; note = methanogen bacteria
tttccagcagagagaaaaatgttatcagatttatcatttagttttaacattccaacaaatgga

SEQ ID NO: 21471 - DNA, 30 bp, unidentified
  source 1..30: mol_type = unassigned DNA; note = methanogen bacteria
tttggaggagttgcaggtaaatatggtatg

SEQ ID NO: 21472 - DNA, 123 bp, unidentified
  source 1..123: mol_type = unassigned DNA; note = methanogen bacteria
gttttaggcggtgtcactgaagctaacacagctttaaccaatatggctcacttgtatcctcctgatgctcttgcagaaggtggtactggatggaccagcttccctaaatttggaagtccattc

SEQ ID NO: 21473 - DNA, 102 bp, unidentified
  source 1..102: mol_type = unassigned DNA; note = methanogen bacteria
aacgtatacttctatcaaaacttcggtcaaattgcaattgactatgttggaggaaatatggattcaatcattccaacattcatctcaactgcacttcctgaa

SEQ ID NO: 21474 - DNA, 90 bp, unidentified
  source 1..90: mol_type = unassigned DNA; note = methanogen bacteria
ttcaaaaagactgcaactggtcttggaatctgtaagatgctctttggtgtagatatgctaatcaataccatgccttggtataccattgat

SEQ ID NO: 21475 - DNA, 93 bp, unidentified
  source 1..93: mol_type = unassigned DNA; note = methanogen bacteria
agtttttttaaaggatggggagcaaatccaaatgcatttttagcaaataacgttttacatgcaagcagtaatttaagtgacataactacattc

SEQ ID NO: 21476 - DNA, 75 bp, unidentified
  source 1..75: mol_type = unassigned DNA; note = methanogen bacteria
ctaatgctaccgggagcaagcattggattaaatgaattattcaatcctgactggtcgcttttagggcattttgat

SEQ ID NO: 21477 - DNA, 108 bp, unidentified
  source 1..108: mol_type = unassigned DNA; note = methanogen bacteria
ctaggatacatgtctcttcagtcagcaactccagtttctcaaattgtgactcaaggaacaggattaatatttgtcgtatatccgacagtatttaatatacttggagat

SEQ ID NO: 21478 - DNA, 168 bp, unidentified
  source 1..168: mol_type = unassigned DNA; note = methanogen bacteria
caaaagccttttttacacattgacgaatggtttacacagggattaatgtatatttcatttaaggaaatggttcatttaaccgcaattgatgtgcatccgccgctctattatgccattgccctgatccccgtatatctcctgaactggcttcacattccatacgatatg

SEQ ID NO: 21479 - DNA, 102 bp, unidentified
  source 1..102: mol_type = unassigned DNA; note = methanogen bacteria
tacaggcaaataaaagatgtgaaaggggattattggattcaaagcattaccgttgacaagttcgtgcaatttttcgcatcaatattcacagacgtcaacgat

SEQ ID NO: 21480 - DNA, 93 bp, unidentified
  source 1..93: mol_type = unassigned DNA; note = methanogen bacteria
agttttacaaaagcatggggaccaaataccgatttatatttcacacaaaatgttctgcatgcaacagattccataaacggaatattcacaatc

SEQ ID NO: 21481 - DNA, 72 bp, unidentified
  source 1..72: mol_type = unassigned DNA; note = methanogen bacteria
acacttccaggagcatatattggttattcacaattattccatccggactggtcagcattaacaaatttagat

SEQ ID NO: 21482 - DNA, 105 bp, unidentified
  source 1..105: mol_type = unassigned DNA; note = methanogen bacteria
tttatgtcaatgagcagcggaatagcatttaatgaattagtaacagaaggaacaggacttgcatttgtagtatttccacaggcattcaatataatgaaaaccgga

SEQ ID NO: 21483 - DNA, 168 bp, unidentified
  source 1..168: mol_type = unassigned DNA; note = methanogen bacteria
ttttatgttactccaggtttattaaattcatttcgccatggccttgtgagcaatagggcaattccaatcgaacagttaaagtacattttatcgcataaaaaagatgcattcgttcatttgttgcagttgccacttaccatttctggaaatttaacatttgcttggaat

SEQ ID NO: 21484 - DNA, 57 bp, unidentified
  source 1..57: mol_type = unassigned DNA; note = methanogen bacteria
ttattttcttggactcctgcaggtcaattggatattataggggttcaaccaagatat

SEQ ID NO: 21485 - DNA, 90 bp, unidentified
  source 1..90: mol_type = unassigned DNA; note = methanogen bacteria
ttcttccaaggctggggtgcaaatcctgatgtattcttcactacaagtgttttgaatgcatctgattctctttcaggtatttttaccatt

SEQ ID NO: 21486 - DNA, 75 bp, unidentified
  source 1..75: mol_type = unassigned DNA; note = methanogen bacteria
gtgactttgccaggtgcttcaataggctatactcaaatattcactcctgattggtctgcattgactgatttgaat

SEQ ID NO: 21487 - DNA, 108 bp, unidentified
  source 1..108: mol_type = unassigned DNA; note = methanogen bacteria
ggtttcatgactttcaccagtggcattccatttaatcaattggtaactgaaggaaccggtttagcatttgttgttttcccaaatgtatttaatgttatgcatccttgg

SEQ ID NO: 21488 - DNA, 93 bp, unidentified
  source 1..93: mol_type = unassigned DNA; note = methanogen bacteria
agtttcactaaaggttggggagcagatcctaacgctttcttttcaactactcttctacaatcttctgaatccgtatcaagcttacttaatttc

SEQ ID NO: 21489 - DNA, 72 bp, unidentified
  source 1..72: mol_type = unassigned DNA; note = methanogen bacteria
cttaccttgcctggtgcttcaattggtctagccgaattattcaatcctgattggtcacttctattcaatttt

SEQ ID NO: 21490 - DNA, 111 bp, unidentified
  source 1..111: mol_type = unassigned DNA; note = methanogen bacteria
ttaggttacatgtcaatgcaatcaggaacagcagtagctgatcttgtaactcaaggaacaggccttgtatttgttgtttatcctaccgtattcaatgtactgggtgattgg

SEQ ID NO: 21491 - DNA, 90 bp, unidentified
  source 1..90: mol_type = unassigned DNA; note = methanogen bacteria
ttttttaagggatggggagcggatccaaatacctttttaaatgttaatctgctgcagtccaccaattcattgagcggtgtttttaatttc

SEQ ID NO: 21492 - DNA, 72 bp, unidentified
  source 1..72: mol_type = unassigned DNA; note = methanogen bacteria
acattaccaggagctaatatcggccttgcggagttattccatcctgattggtcacttttagggcatttcgac

SEQ ID NO: 21493 - DNA, 108 bp, unidentified
  source 1..108: mol_type = unassigned DNA; note = methanogen bacteria
cttggatacatgtcccttcagtcaggaactccagtttccgaaatcatttcacagggaacaaccctgatttttgtagcatatccgcaagtattcaatattctgggaaca

SEQ ID NO: 21494 - DNA, 96 bp, unidentified
  source 1..96: mol_type = unassigned DNA; note = methanogen bacteria
ttaagtttcgttcaagggtggggtgcaaatcctgatgtgttcttcacagtggatgttttgcatgcatctgattcactttcaggtatctttactatt

SEQ ID NO: 21495 - DNA, 72 bp, unidentified
  source 1..72: mol_type = unassigned DNA; note = methanogen bacteria
ttgactttgccgggtgcttcaataggatacaaacagatatttactcctaattggtccgcattgactgattta

SEQ ID NO: 21496 - DNA, 105 bp, unidentified
  source 1..105: mol_type = unassigned DNA; note = methanogen bacteria
ttcatgacttttacaagtggaattccatttaatgaattggtaactgaaggaaccggtttggcatttgttgttttcccaaatgtattcaatctcatgcaaccttgg

SEQ ID NO: 21497 - DNA, 90 bp, unidentified
  source 1..90: mol_type = unassigned DNA; note = methanogen bacteria
ttttttaaaggttggggtgccgaccctaatacattcttcaacacttcccttctacaggtttcaagttctccaactggactccttacattt

SEQ ID NO: 21498 - DNA, 69 bp, unidentified
  source 1..69: mol_type = unassigned DNA; note = methanogen bacteria
atgcttcctggagcaagcattggattaagtgaattgtaccaaccggattggtcttcattatttgatttc

SEQ ID NO: 21499 - DNA, 111 bp, unidentified
  source 1..111: mol_type = unassigned DNA; note = methanogen bacteria
cttggatacatgtcacttcaaacaggtacagcagtggaacaattggtaactcaaggtgcaggattgatattcatcgtttatccaacagcattcaatgcaataggaacttgg

SEQ ID NO: 21500 - DNA, 129 bp, unidentified
  source 1..129: mol_type = unassigned DNA; note = methanogen bacteria
tatccgggtattggcacatatgatacatttaatcagatacatcaaattgcctctaatcattttacgaattggcatcctttttttcatacatttattgagatgttatgtttaaaagtctatcccagcacc

SEQ ID NO: 21501 - DNA, 90 bp, unidentified
  source 1..90: mol_type = unassigned DNA; note = methanogen bacteria
ttcttcaagggttggggggctgatcctaatgtttactttacaacaacccttcttcaatcttcagattcttacatgggattattgcagttc

SEQ ID NO: 21502 - DNA, 75 bp, unidentified
  source 1..75: mol_type = unassigned DNA; note = methanogen bacteria
cttacattgcctggcgcttcaataggtttggcggagcttttcaatcctgactggtcacttctgggcaattttgaa

SEQ ID NO: 21503 - DNA, 108 bp, unidentified
  source 1..108: mol_type = unassigned DNA; note = methanogen bacteria
ttgggttacatgtcccttcagtccggaacaccggtggctgagctggtaactcagggaaccggattggtgttcatcgtatatcctacagtattcaatgtattgggtcaa

SEQ ID NO: 21504 - DNA, 57 bp, unidentified
  source 1..57: mol_type = unassigned DNA; note = methanogen bacteria
attcttaatccaattattagacccgttacacacttatttttaatgggatcctcaaaa

SEQ ID NO: 21505 - DNA, 189 bp, unidentified
  source 1..189: mol_type = unassigned DNA; note = methanogen bacteria
ttcagacaacaaatgggaattaaacttaacactgttttttgttctatgtctaacacaatgagttctacaagcattttgcatacccacctactaaagtcaattattggagcccttataagtcaaattatgggaccttttgttcaaagtaacatcaatactggcgttggcctatattcatatgttccaagt

SEQ ID NO: 21506 - DNA, 240 bp, unidentified
  source 1..240: mol_type = unassigned DNA; note = methanogen bacteria
aggatgagcgttggagtggctggtgctgaaaccgaccattacacagtagacgttataaacccaacagacaacattgatttgggagacattaatttaaaagtcattgaacaaaaaaattataccgattcaaataagaccacatattatatcgaccacaactataatgaaatggaacttataaatgatttgaagcatccgctgaagattaccctgaaattaatagatatagttttatattac

SEQ ID NO: 21507 - DNA, 30 bp, unidentified
  source 1..30: mol_type = unassigned DNA; note = methanogen bacteria
cgaacattaactcaaaatggcattgattca

SEQ ID NO: 21508 - DNA, 33 bp, unidentified
  source 1..33: mol_type = unassigned DNA; note = methanogen bacteria
gaatcaatgaacaccgttccactatctttagca

SEQ ID NO: 21509 - DNA, 30 bp, unidentified
  source 1..30: mol_type = unassigned DNA; note = methanogen bacteria
cttgatgttttaaatttttcaattccattg

SEQ ID NO: 21510 - DNA, 48 bp, unidentified
  source 1..48: mol_type = unassigned DNA; note = methanogen bacteria
ttttatcatccaagcactattacctatgatacgcctgtatttaacaca

SEQ ID NO: 21511 - DNA, 48 bp, unidentified
  source 1..48: mol_type = unassigned DNA; note = methanogen bacteria
tttataacagattatgttgaaagagatgttagcttttattcaatccct

SEQ ID NO: 21512 - DNA, 33 bp, unidentified
  source 1..33: mol_type = unassigned DNA; note = methanogen bacteria
ttcattgatacgggtgcgatagatgaaattaat

SEQ ID NO: 21513 - DNA, 51 bp, unidentified
  source 1..51: mol_type = unassigned DNA; note = methanogen bacteria
tttccaatagatgtggaggtgaagtttattcataatgttccagttaacgga

SEQ ID NO: 21514 - DNA, 195 bp, unidentified
  source 1..195: mol_type = unassigned DNA; note = methanogen bacteria
gctacaagtgtaatgaacaattcatggagaggacactacagcattgttaacaacgtaaatccccaaaaacaggttaattatcttctgtcccatcctgcttttttccttgaaagaataggtaatctcttcagtgagttttcaataatggttgagagaatgttctgcttctccaatggtgatggcaaatatcagtcc

SEQ ID NO: 21515 - DNA, 57 bp, unidentified
  source 1..57: mol_type = unassigned DNA; note = methanogen bacteria
cttacctgggcaagcgttggagaaaaaactcttatcagtggtgtttacggcaggtac

SEQ ID NO: 21516 - DNA, 90 bp, unidentified
  source 1..90: mol_type = unassigned DNA; note = methanogen bacteria
tttttcaagggatggggaacagacccgaatacctatttaaatgttaatctgcttcaggcaaccaattcattaagcggcctttccaacttc

SEQ ID NO: 21517 - DNA, 69 bp, unidentified
  source 1..69: mol_type = unassigned DNA; note = methanogen bacteria
accctgccaggagcatatattggtcttgcagagctgttcaatcctaactggtcacttctatggaatttc

SEQ ID NO: 21518 - DNA, 108 bp, unidentified
  source 1..108: mol_type = unassigned DNA; note = methanogen bacteria
ttgggatacatgtcccttcaatcaggaattccagtttctgaaatcgtttcacagggaacaacccttattttcgtggcatatcctcaagtattcaacattttgggaaca

SEQ ID NO: 21519 - DNA, 93 bp, unidentified
  source 1..93: mol_type = unassigned DNA; note = methanogen bacteria
agtttcaccaagggttggggcgcaaacccggacactttctttgcaaccactcttcttcaatcctcagactcaatgtccggtttggcccatttc

SEQ ID NO: 21520 - DNA, 75 bp, unidentified
  source 1..75: mol_type = unassigned DNA; note = methanogen bacteria
ttgactttgcctggtgcttcaataggtcttgcagaactcttcaatcctgactggtcacttttaacacactttgaa

SEQ ID NO: 21521 - DNA, 111 bp, unidentified
  source 1..111: mol_type = unassigned DNA; note = methanogen bacteria
ttaggatacatgtcacttcagtccggaacagctgtagcggaccttgtaactcagggaactggtcttgtatttgtagtctatcctacagtatttaatgtattgggtcagtgg

SEQ ID NO: 21522 - DNA, 90 bp, unidentified
  source 1..90: mol_type = unassigned DNA; note = methanogen bacteria
ttctttaagggttggggagcaaatccagatgctttctttgcaaccactcttctacaatcttcagaatcttacctgggcttacttaatttc

SEQ ID NO: 21523 - DNA, 72 bp, unidentified
  source 1..72: mol_type = unassigned DNA; note = methanogen bacteria
actttgccgggcgcttcaatcggccttgcagagctgttcaatcctgactggtcacttttgggacattttgaa

SEQ ID NO: 21524 - DNA, 108 bp, unidentified
  source 1..108: mol_type = unassigned DNA; note = methanogen bacteria
ttaggttatatgtcattgcagtccggaaccgcagtttcagagcttgtgactcaaggaacaggacttgtgtttgtagtttatccgacagtatttaatgtattgggtcaa

SEQ ID NO: 21525 - DNA, 93 bp, unidentified
  source 1..93: mol_type = unassigned DNA; note = methanogen bacteria
agtttctttaaaggatggggagcagatccgaacacttactttacaactactttgcttcaggcttcctcatcatacacaggacttttgaatttc

SEQ ID NO: 21526 - DNA, 75 bp, unidentified
  source 1..75: mol_type = unassigned DNA; note = methanogen bacteria
ctgacattgcccggcgcttctgttggacttgccgaactcttccatccggactggtcactattgggcaattttgaa

SEQ ID NO: 21527 - DNA, 111 bp, unidentified
  source 1..111: mol_type = unassigned DNA; note = methanogen bacteria
ctcggttacatgtccatgcagtccggaactgcagtagctgaccttgtaacacagggaacaggacttgtatttatcgtatatcctacagtattcaatgttttaggtcagtgg

SEQ ID NO: 21528 - DNA, 132 bp, unidentified
  source 1..132: mol_type = unassigned DNA; note = methanogen bacteria
tacaatccaggtgttttaactgcctcatcatacagtcagcttcaccagatagttaccggacagtttacaaatgctcatccaatattccacacattatttgaaaaagcttgtattaaaatatttaaaagccca

SEQ ID NO: 21529 - DNA, 231 bp, unidentified
  source 1..231: mol_type = unassigned DNA; note = methanogen bacteria
atatatgatgttgacaatgatacttcaaatatcaaaacaaatgatgcatttgaagagggaattaatcttgaaaatgctaaaaatcagtttttctcatcaataaatgacaatccaagcaatgatattgaaaatacagcttcaataaacattaaaaacagcaattaccatatggttgattcatttgttaatctgtttagagaaaatttcattatagatggtttgcttaacaat

SEQ ID NO: 21530 - DNA, 42 bp, unidentified
  source 1..42: mol_type = unassigned DNA; note = methanogen bacteria
catcaaaatgggggtattgagcttgattcaatagtctttaac

SEQ ID NO: 21531 - DNA, 45 bp, unidentified
  source 1..45: mol_type = unassigned DNA; note = methanogen bacteria
atagattcatttgttcaaagggattttggttcttttgtcatacct

SEQ ID NO: 21532 - DNA, 33 bp, unidentified
  source 1..33: mol_type = unassigned DNA; note = methanogen bacteria
tatattgatattggtacattagataaggttaat

SEQ ID NO: 21533 - DNA, 48 bp, unidentified
  source 1..48: mol_type = unassigned DNA; note = methanogen bacteria
ttcccagaaaaccctcctattttcatttataacataccattcaatgga

SEQ ID NO: 21534 - DNA, 90 bp, unidentified
  source 1..90: mol_type = unassigned DNA; note = methanogen bacteria
ttttttaaaagttggggtgctaatccgggattttactttgaacatactctcatgcagtcttcagacagtttcatgggaatattgaatttt

SEQ ID NO: 21535 - DNA, 69 bp, unidentified
  source 1..69: mol_type = unassigned DNA; note = methanogen bacteria
accttgcccggagcttcaataggtctttccgaattatataatcctgactggtcacttttattcaatttc

SEQ ID NO: 21536 - DNA, 108 bp, unidentified
  source 1..108: mol_type = unassigned DNA; note = methanogen bacteria
ttaggttacatgtccttacagacatcaacacctgttccaaatcttatagatcagggaacaggactgattttcgtaacatatccaacaatattaaatattttaggccag

SEQ ID NO: 21537 - DNA, 93 bp, unidentified
  source 1..93: mol_type = unassigned DNA; note = methanogen bacteria
agtttcacaaagggttggggtgcaaatcctgatacattctttgcaacaactcttctccagtcaagtgattccatatccgggctgttgcatttt

SEQ ID NO: 21538 - DNA, 75 bp, unidentified
  source 1..75: mol_type = unassigned DNA; note = methanogen bacteria
ttgactttgcctggtgcttcaataggtcttgcggagcttttcaacccggactggtcacttctgagccattttgaa

SEQ ID NO: 21539 - DNA, 111 bp, unidentified
  source 1..111: mol_type = unassigned DNA; note = methanogen bacteria
ttaggttacatgtcaatgcagtcaggaactgcagtatctgaacttgtaacccaaggaacaggacttgtatttgtggcatatccgacagtgttcaatgtactgggccaatgg

SEQ ID NO: 21540 - DNA, 90 bp, unidentified
  source 1..90: mol_type = unassigned DNA; note = methanogen bacteria
ttctttaagggatggggagcagacccgaacacttactttgcaacaacattattgcaatcaagcgaatctgtttccggaattacaagcttc

SEQ ID NO: 21541 - DNA, 72 bp, unidentified
  source 1..72: mol_type = unassigned DNA; note = methanogen bacteria
acattacctggtgcaatgatcggtttaaatgaattgttttcaccagattggagcttactgcttgactttaat

SEQ ID NO: 21542 - DNA, 111 bp, unidentified
  source 1..111: mol_type = unassigned DNA; note = methanogen bacteria
cttggatatatgtcattgcaaagtggaactgcagttgcagaccttgttactcaaggaactggacttgtatttattgcatatccaactgtacttaacgtattaggtcaatat

SEQ ID NO: 21543 - DNA, 99 bp, unidentified
  source 1..99: mol_type = unassigned DNA; note = methanogen bacteria
acaatagacataagctttttagatgcctttttcgaaaatctttccgcttggacaggtagtggattgactctcattagcgatgttgaagcattaccaatg

SEQ ID NO: 21544 - DNA, 99 bp, unidentified
  source 1..99: mol_type = unassigned DNA; note = methanogen bacteria
ggcctttccatattcgattcaataaatttgacattcacaacaatttccacaggaggaatgtcaataaagaatgccaatgtaggattttaccaaaacaat

SEQ ID NO: 21545 - DNA, 102 bp, unidentified
  source 1..102: mol_type = unassigned DNA; note = methanogen bacteria
gccaatatagccccaatgaatgttatattccatgtggtctcagcaataacaacaacaggagcaaatattgtcccttcaagtgaattagcttccatagcccca

SEQ ID NO: 21546 - DNA, 96 bp, unidentified
  source 1..96: mol_type = unassigned DNA; note = methanogen bacteria
ttcacaaatgatccattcaatgcacttttcgataccgcatccacaataggcaatgttggattaagcactggagtgataaatgaaggtttaaatcct

SEQ ID NO: 21547 - DNA, 90 bp, unidentified
  source 1..90: mol_type = unassigned DNA; note = methanogen bacteria
ttttttaaaggatggggggcggatccaaacacatttttaaatgtcaatctgctgcaggccacagattcattaagcggtgtttttaacttt

SEQ ID NO: 21548 - DNA, 69 bp, unidentified
  source 1..69: mol_type = unassigned DNA; note = methanogen bacteria
actttgcctggtgctttaattggtcttacagtgttattcaatccgaactggtcccttttatggcatttt

SEQ ID NO: 21549 - DNA, 105 bp, unidentified
  source 1..105: mol_type = unassigned DNA; note = methanogen bacteria
ggttatatgtcccttcagtccggaactcctgtttctgaaattgtttcacagggaacaactttgatttttgtagcatatcctcaagtattcaatattctaggaaca

SEQ ID NO: 21550 - DNA, 93 bp, unidentified
  source 1..93: mol_type = unassigned DNA; note = methanogen bacteria
agcttcaccaaaggttggggagcagatcctaatacttttttcactacgacattacttcaatcaagcggaaactatttgcatttaactcatttc

SEQ ID NO: 21551 - DNA, 75 bp, unidentified
  source 1..75: mol_type = unassigned DNA; note = methanogen bacteria
cttacacttcctggcgcatccattgggctggctgaactatttaatcctgactgggctgttttatctgattttgga

SEQ ID NO: 21552 - DNA, 111 bp, unidentified
  source 1..111: mol_type = unassigned DNA; note = methanogen bacteria
ttaggctatatgtcaatgcagtcaggaactgccgtggcggatttggtaacgcagggtacaggtttggtatttatagtttatccgacagtatttaatgttttaggtgattgg

SEQ ID NO: 21553 - DNA, 168 bp, unidentified
  source 1..168: mol_type = unassigned DNA; note = methanogen bacteria
cttaatcattacattatgcatgttgatgaatactttacattgagtgtcctcacccttccgataggtgatgtcataaacattaccagttgggatgtccatccgccactgtactacattttgggaaagattgcagtagatatcgctgcggcaattggaatggattccctc

SEQ ID NO: 21554 - DNA, 96 bp, unidentified
  source 1..96: mol_type = unassigned DNA; note = methanogen bacteria
ataaggcaaatgacacaggttcacgcagcctactggattcgtcaggtcaaccccgatttattaatcaaggcactgggatacattgcatattcagat

SEQ ID NO: 21555 - DNA, 45 bp, unidentified
  source 1..45: mol_type = unassigned DNA; note = methanogen bacteria
ttatatgatcccaaccttcctgtaagggacacaatagtctttaat

SEQ ID NO: 21556 - DNA, 45 bp, unidentified
  source 1..45: mol_type = unassigned DNA; note = methanogen bacteria
ataaatgattatgttcaaagggatttgggcttttttacagtgccc

SEQ ID NO: 21557 - DNA, 30 bp, unidentified
  source 1..30: mol_type = unassigned DNA; note = methanogen bacteria
atagatattggttctgtggataagatcggc

SEQ ID NO: 21558 - DNA, 51 bp, unidentified
  source 1..51: mol_type = unassigned DNA; note = methanogen bacteria
ttcccaacggaagaaagctcatcttttatttttagcatgcccattaacgga

SEQ ID NO: 21559 - DNA, 90 bp, unidentified
  source 1..90: mol_type = unassigned DNA; note = methanogen bacteria
tttttcaagggatggggagcagatccaagcacattcttcacagcatccttgattcaggattcagaaaactatatgggcttgttccatttt

SEQ ID NO: 21560 - DNA, 72 bp, unidentified
  source 1..72: mol_type = unassigned DNA; note = methanogen bacteria
cttacccttccaggtgcatcaattgggctttcggaactctttaaccctaactggactcttttatgggacttt

SEQ ID NO: 21561 - DNA, 105 bp, unidentified
  source 1..105: mol_type = unassigned DNA; note = methanogen bacteria
ggatatatgtcactgcagtcaggaactccagttgcagaactggtaactcagggaacaggacttgtattcaatgtatatcctattgtatttaatgttttaggccaa

SEQ ID NO: 21562 - DNA, 93 bp, unidentified
  source 1..93: mol_type = unassigned DNA; note = methanogen bacteria
agtttcaccaagggatggggtgcaaatcctgatgcattctttgcaaccactcttcttcagtcctctgagtcaatttccggtttgttccatttc

SEQ ID NO: 21563 - DNA, 75 bp, unidentified
  source 1..75: mol_type = unassigned DNA; note = methanogen bacteria
ttgactttgcctggtgcttcaattgggcttgcagagctgtttaacccggattggtctttgcttggccactttgaa

SEQ ID NO: 21564 - DNA, 111 bp, unidentified
  source 1..111: mol_type = unassigned DNA; note = methanogen bacteria
ttaggatacatgtctttgcagtccggaactgcggtggctgaccttgtaactcagggaacaggtcttgtatttgtagtatatcctacagtatttaacgtattgggtcagtgg

SEQ ID NO: 21565 - DNA, 93 bp, unidentified
  source 1..93: mol_type = unassigned DNA; note = methanogen bacteria
agtttaaccaaggcatggggtgcaaatcctgatttgttctttacagttaatgttttacatgcctctgattccctttctggtatttttaccatt

SEQ ID NO: 21566 - DNA, 75 bp, unidentified
  source 1..75: mol_type = unassigned DNA; note = methanogen bacteria
ttgactttacctggtgcttcaataggttatactcagatattcactcctgattggtctgctttaaccaatttgaac

SEQ ID NO: 21567 - DNA, 108 bp, unidentified
  source 1..108: mol_type = unassigned DNA; note = methanogen bacteria
ggattcatgactttaaccagtggaattccattcaacgaattggttactgaaggaacaggtttggcatttgttgttttcccaaaggtatttaatgtaatgggtccttgg

SEQ ID NO: 21568 - DNA, 33 bp, unidentified
  source 1..33: mol_type = unassigned DNA; note = methanogen bacteria
atacatgtgcttcacttttcaattccattatct

SEQ ID NO: 21569 - DNA, 45 bp, unidentified
  source 1..45: mol_type = unassigned DNA; note = methanogen bacteria
ctatatgctccaagcagtgttcagctgacaacaattacatttaat

SEQ ID NO: 21570 - DNA, 54 bp, unidentified
  source 1..54: mol_type = unassigned DNA; note = methanogen bacteria
atcctatttgaagaaaactatgttttaagggattatggatttttagtattgcct

SEQ ID NO: 21571 - DNA, 39 bp, unidentified
  source 1..39: mol_type = unassigned DNA; note = methanogen bacteria
agttatcaaattgatattggagcaactgataaggtcaat

SEQ ID NO: 21572 - DNA, 57 bp, unidentified
  source 1..57: mol_type = unassigned DNA; note = methanogen bacteria
ttcccaggaccagaaagtacagtaaactatataggacatatgccaattaatggatta

SEQ ID NO: 21573 - DNA, 42 bp, unidentified
  source 1..42: mol_type = unassigned DNA; note = methanogen bacteria
atcacttcatgccaatataatttagcacatgacagactaaag

SEQ ID NO: 21574 - DNA, 168 bp, unidentified
  source 1..168: mol_type = unassigned DNA; note = methanogen bacteria
cttaaccattacattatgcacgttgatgaatactttacattaagtgtcctcacccttccgataggtgatgtcataaacattaccagttgggatgtccatccgccattgtactatattttgggaaagattgcagtagatatggctgctgcaattggaatggattcactc

SEQ ID NO: 21575 - DNA, 96 bp, unidentified
  source 1..96: mol_type = unassigned DNA; note = methanogen bacteria
ataaggcaaatgacacaggttcacgcagcttactggattcgccaggtcaacccggacatgttcatcaaatcattgggttaccttgcatatgcacat

SEQ ID NO: 21576 - DNA, 30 bp, unidentified
  source 1..30: mol_type = unassigned DNA; note = methanogen bacteria
cttgatgttttgaatttctcgattccattg

SEQ ID NO: 21577 - DNA, 45 bp, unidentified
  source 1..45: mol_type = unassigned DNA; note = methanogen bacteria
ttatatactcccaacaatcctgttcgagatacaataatctttaat

SEQ ID NO: 21578 - DNA, 42 bp, unidentified
  source 1..42: mol_type = unassigned DNA; note = methanogen bacteria
gatatgtatgttcaaagggatttgagcttttttacaatacct

SEQ ID NO: 21579 - DNA, 33 bp, unidentified
  source 1..33: mol_type = unassigned DNA; note = methanogen bacteria
tatatagatattgatgctgtgaataaaattagc

SEQ ID NO: 21580 - DNA, 51 bp, unidentified
  source 1..51: mol_type = unassigned DNA; note = methanogen bacteria
ttcccagaggaaggaagtgtgtcttttatttttggcttgccaattaacgga

SEQ ID NO: 21581 - DNA, 93 bp, unidentified
  source 1..93: mol_type = unassigned DNA; note = methanogen bacteria
agcttcttcaagggatggggagcagaccccaacacttactttaccgcaacactccttcaatcctcagaatcaatgaatggaatgttccacttc

SEQ ID NO: 21582 - DNA, 75 bp, unidentified
  source 1..75: mol_type = unassigned DNA; note = methanogen bacteria
ctcaccttgcctggtgcgtcaataggccttgcggaactcttccatccggactggtcacttctgggcaaatttgaa

SEQ ID NO: 21583 - DNA, 108 bp, unidentified
  source 1..108: mol_type = unassigned DNA; note = methanogen bacteria
ctagggtacatgtcccttcagtcaggcactgcagtgtctgaccttgtgacccagggaacaggactggtgttcattgtataccctacagtattcaacgtactgggtcaa

SEQ ID NO: 21584 - DNA, 96 bp, unidentified
  source 1..96: mol_type = unassigned DNA; note = methanogen bacteria
ttaggcattcctttcatagatgcagtattcgaaaacatgtctgcatggacaggaagcggaatgactttttttataaatgttgaaatcttacctaaa

SEQ ID NO: 21585 - DNA, 99 bp, unidentified
  source 1..99: mol_type = unassigned DNA; note = methanogen bacteria
ggacttcctatctttgattctgtgaacttgacatttacaagcatctccactggaggaatgtccatcaaaaatgccaatgtaggattttatcaaaacgat

SEQ ID NO: 21586 - DNA, 102 bp, unidentified
  source 1..102: mol_type = unassigned DNA; note = methanogen bacteria
aacaaaacagtgcctatagaggaactcttcaccatagtctctgcaattacaactactggagcaaatgtagttccccctacagaccttgcaacatggaaaagc

SEQ ID NO: 21587 - DNA, 96 bp, unidentified
  source 1..96: mol_type = unassigned DNA; note = methanogen bacteria
tatggctatgacccatttacagcattattcgatgtaatatccttacaaagtaataatggattaagtacaggaatagtatttggaggattgccaaca

SEQ ID NO: 21588 - DNA, 90 bp, unidentified
  source 1..90: mol_type = unassigned DNA; note = methanogen bacteria
ttctttaaaggatggggagcagatccaaacaccttctttacagcaaccttattgcaatctcaagagtcagttagcggattgactacattt

SEQ ID NO: 21589 - DNA, 75 bp, unidentified
  source 1..75: mol_type = unassigned DNA; note = methanogen bacteria
ttgacattgcctggtgcaatgataggattgaaagaacttttcgcacctgattggagtttgctccttgactttgac

SEQ ID NO: 21590 - DNA, 108 bp, unidentified
  source 1..108: mol_type = unassigned DNA; note = methanogen bacteria
ctcggatacatgtctcttcaaagcggtacagctgtagcagaccttgttacacaaggtacaggattggtattcatagcatatcctactgtattgaatgttttaggacaa

SEQ ID NO: 21591 - DNA, 90 bp, unidentified
  source 1..90: mol_type = unassigned DNA; note = methanogen bacteria
ttctttaagggatggggagcagaccctaatacctactttgcaacaaccttgcttcaatctcaggaaacctttagcggaataactaacttc

SEQ ID NO: 21592 - DNA, 72 bp, unidentified
  source 1..72: mol_type = unassigned DNA; note = methanogen bacteria
accttacctggtgcaatgataggattgaatgagctcttttcacctgattggagcttgctcttggactttgac

SEQ ID NO: 21593 - DNA, 108 bp, unidentified
  source 1..108: mol_type = unassigned DNA; note = methanogen bacteria
ctaggatacatgtcacttcaaagcggtacagcagttgcagaccttgtagcacaaggtacaggattggtattcgtagcttatccaactgttttgaatgtattaggccaa

SEQ ID NO: 21594 - DNA, 69 bp, unidentified
  source 1..69: mol_type = unassigned DNA; note = methanogen bacteria
ggagagtggataatttcgattttcggacattccatgatctcatcctttttagtcgacggcgtaatcgga

SEQ ID NO: 21595 - DNA, 234 bp, unidentified
  source 1..234: mol_type = unassigned DNA; note = methanogen bacteria
gtgcacaattacaagtccaaaaacaacaaaatcaactacaactacattgtcaatgaaaagcacaatcttgttggaactggaaacatcgatgcagattacaactggtggggaaagaacaagctattcaaggtttccaaatcattcaaaatcaaaaagtttgtagttatgtatttaaacgcaccacataatctgaaattcaataagacatataaaatcaatatactattcaaggac

SEQ ID NO: 21596 - DNA, 63 bp, unidentified
  source 1..63: mol_type = unassigned DNA; note = methanogen bacteria
aaaatatctaatattttgggcaaggttgattttgcttatgaaatgatttcaaatcctataaga

SEQ ID NO: 21597 - DNA, 48 bp, unidentified
  source 1..48: mol_type = unassigned DNA; note = methanogen bacteria
accgttaagattgttaaaggttattatgataatttcttaacttttata

SEQ ID NO: 21598 - DNA, 36 bp, unidentified
  source 1..36: mol_type = unassigned DNA; note = methanogen bacteria
gcatttaagaataatgttacttttttaagaaagaaa

SEQ ID NO: 21599 - DNA, 195 bp, unidentified
  source 1..195: mol_type = unassigned DNA; note = methanogen bacteria
aaaataaagctctattttaaaaagcatccaaagtatttatatggggcatcaaaagcagcgcaaaaaatactttggccaggctataaaagtaaaaggagttatagcaataaaaacaccaaacctataaaacattccacaaaaaacatcctatacaaaggattaaactttataaaaaataagattttaaaaaaatca

SEQ ID NO: 21600 - DNA, 30 bp, unidentified
  source 1..30: mol_type = unassigned DNA; note = methanogen bacteria
ctttatgttttggatttctcgattccattg

SEQ ID NO: 21601 - DNA, 51 bp, unidentified
  source 1..51: mol_type = unassigned DNA; note = methanogen bacteria
tcattagatgcccccatcaaccctattcaagatacaatagtctttaatttg

SEQ ID NO: 21602 - DNA, 45 bp, unidentified
  source 1..45: mol_type = unassigned DNA; note = methanogen bacteria
atagacacatatgtccaaagggatttgagcttttatacaatacct

SEQ ID NO: 21603 - DNA, 33 bp, unidentified
  source 1..33: mol_type = unassigned DNA; note = methanogen bacteria
tatatagatattggttctgtggataaaatcagc

SEQ ID NO: 21604 - DNA, 51 bp, unidentified
  source 1..51: mol_type = unassigned DNA; note = methanogen bacteria
cattttccacaagaagaagcggattttatttttaacctgccaattaacgga

SEQ ID NO: 21605 - DNA, 132 bp, unidentified; identical to SEQ ID NO: 21528
  source 1..132: mol_type = unassigned DNA; note = methanogen bacteria

SEQ ID NO: 21606 - DNA, 228 bp, unidentified
  source 1..228: mol_type = unassigned DNA; note = methanogen bacteria
atatatgatgttgaaaatgatacttcaaatattaaaacaaatgacgcttttgaagagggcattaatcttgaaaatgctaaaaatcagtttttctcatcaataaatgataatccaagtaatgaacttgaaaaaactgattcaataaatattaaaaatagcaagtataatctagttgattcatttgttaatctgtttagagaaaatttcattttagatggtttatttaac

SEQ ID NO: 21607 - DNA, 93 bp, unidentified
  source 1..93: mol_type = unassigned DNA; note = methanogen bacteria
agtttctttaagggttggggagcagatcctaatgcatacttcactacaacccttcttcaatcctccgattccctgagtggattattaagtttc

SEQ ID NO: 21608 - DNA, 75 bp, unidentified
  source 1..75: mol_type = unassigned DNA; note = methanogen bacteria
ttgaccctgcctggagcttcagttggattggccgaactcttccatcctgactggtcacttttaggtaatttcgac

SEQ ID NO: 21609 - DNA, 111 bp, unidentified
  source 1..111: mol_type = unassigned DNA; note = methanogen bacteria
ctgggatacatgtcacttcagtcaggtaccgcagtggcggaccttgtaacccagggaaccggtctggtattcattgtatatcctacagtatttaatgtattgggcaattgg

SEQ ID NO: 21610 - DNA, 174 bp, unidentified
  source 1..174: mol_type = unassigned DNA; note = methanogen bacteria
aacagcagttcaaacatactcggccacaactatcgtgatgcatacctttatctgattcaagcatatcattttgcaggaacacccataggaggctacgattatgtgaattattattctcctttgatacctttcctaacctcactattattcagattgggtttcgtaagcgaggca

SEQ ID NO: 21611 - DNA, 141 bp, unidentified
  source 1..141: mol_type = unassigned DNA; note = methanogen bacteria
ataaacggcctgccatttggattcatcaatcaggccagggaggtttcaactgaaaccgtttcctcaaacactgccgcaactccagctaatgatttgttcttctatatttccagtcttccaaggttcatatacagccctcaa

SEQ ID NO: 21612 - DNA, 54 bp, unidentified
  source 1..54: mol_type = unassigned DNA; note = methanogen bacteria
agtcgattactgtccaagcagtgtgaatataagcgaacttggagactatctcaa

SEQ ID NO: 21613 - DNA, 30 bp, unidentified
  source 1..30: mol_type = unassigned DNA; note = methanogen bacteria
ctttatgttttggatttctcaattccattg

SEQ ID NO: 21614 - DNA, 45 bp, unidentified
  source 1..45: mol_type = unassigned DNA; note = methanogen bacteria
ttatatgaccccaacaatcctgttcgagatacaatagtccttaat

SEQ ID NO: 21615 - DNA, 45 bp, unidentified
  source 1..45: mol_type = unassigned DNA; note = methanogen bacteria
ataaatacttatgtccaaagggatttgagcttttttacaatacct

SEQ ID NO: 21616 - DNA, 33 bp, unidentified
  source 1..33: mol_type = unassigned DNA; note = methanogen bacteria
tatatagatattgattctgtggataaaatcagc

SEQ ID NO: 21617 - DNA, 57 bp, unidentified
  source 1..57: mol_type = unassigned DNA; note = methanogen bacteria
cgtttcccaccggaaggaactgagtcttttatttttcacatgccggttcatggactg

SEQ ID NO: 21618 - DNA, 93 bp, unidentified
  source 1..93: mol_type = unassigned DNA; note = methanogen bacteria
agtttctttaagggttggggagcagatcctaatacctatttcacaactacattattgcagtcttcaaattccatggatgggctgtttaatttc

SEQ ID NO: 21619 - DNA, 75 bp, unidentified
  source 1..75: mol_type = unassigned DNA; note = methanogen bacteria
cttacattgcctggtgcatcaatagggctttcagagcttttccatccggactggtcacttttaggcaattttgag

SEQ ID NO: 21620 - DNA, 111 bp, unidentified
  source 1..111: mol_type = unassigned DNA; note = methanogen bacteria
ttaggatacatgtctcttcagtcaggaactgcagtgtctgatttggtagttcagggaacaggtcttgtgttcatcgcttatccgaccgtatttaatgtattgggtcaatgg

SEQ ID NO: 21621 - DNA, 93 bp, unidentified
  source 1..93: mol_type = unassigned DNA; note = methanogen bacteria
agctttacaaaggcatggggagcaaatccagatttatactttacaaataatgtcctccatgtagcaaattcatgggatggagtgtttagcatc

SEQ ID NO: 21622 - DNA, 72 bp, unidentified
  source 1..72: mol_type = unassigned DNA; note = methanogen bacteria
ttgacattacctggtgcatctgtaggatatacccagattttcacaccagactggagtgcactgaccaatctg

SEQ ID NO: 21623 - DNA, 105 bp, unidentified
  source 1..105: mol_type = unassigned DNA; note = methanogen bacteria
ttcatgacagttagcagtggaattgccttcaatgaactagtaacatcaggatcaggccttgcatttgtagttttcccacaggtgttcaataccatgggacctgca

SEQ ID NO: 21624 - DNA, 87 bp, unidentified
  source 1..87: mol_type = unassigned DNA; note = methanogen bacteria
agttttaatttcggatggggaaatgaccctgcctcattttttacaaattatgttgggggaagttcaagctcatcacttacaacaata

SEQ ID NO: 21625 - DNA, 69 bp, unidentified
  source 1..69: mol_type = unassigned DNA; note = methanogen bacteria
acattgccaggattccaagttggaataaccacattgcttacccctaattggtcggcacttttagacata

SEQ ID NO: 21626 - DNA, 105 bp, unidentified
  source 1..105: mol_type = unassigned DNA; note = methanogen bacteria
ggatatatgtcaatgcactcttcaatacctatgaatgaattaattagccagggtagcggattaatatttattgtattcccacagatattcaatacaatgggaatg

SEQ ID NO: 21627 - DNA, 96 bp, unidentified
  source 1..96: mol_type = unassigned DNA; note = methanogen bacteria
ttgagtttctccaaaggatggggagcaaatcccgatacattctttgcaaatactcttcttcattcaacagattcagtgtctggtctgctgactttc

SEQ ID NO: 21628 - DNA, 75 bp, unidentified
  source 1..75: mol_type = unassigned DNA; note = methanogen bacteria
ctgactttgccgggggcttcaataggtctttctgaattgttcaatccgaattggtcacttctaggccattttgaa

SEQ ID NO: 21629 - DNA, 111 bp, unidentified
  source 1..111: mol_type = unassigned DNA; note = methanogen bacteria
ttgggatacatgtcaatgcagtcaggaactgctgtggctgacctcgtaactcagggaacaggccttgtatttgtagtatatcctacagtgtttaatgtgcttggccaatgg

SEQ ID NO: 21630 - DNA, 30 bp, unidentified
  source 1..30: mol_type = unassigned DNA; note = methanogen bacteria
tatatattgaatttttcacatccattagca

SEQ ID NO: 21631 - DNA, 48 bp, unidentified
  source 1..48: mol_type = unassigned DNA; note = methanogen bacteria
tcattatatgttccaagtactatccagtatgaccattatatttctaat

SEQ ID NO: 21632 - DNA, 51 bp, unidentified
  source 1..51: mol_type = unassigned DNA; note = methanogen bacteria
tttttcatagacaattatgtagataggaatataagcttttttaatatccct

SEQ ID NO: 21633 - DNA, 36 bp, unidentified
  source 1..36: mol_type = unassigned DNA; note = methanogen bacteria
tatatagatattgatgctgtaagtaaaataaattta

SEQ ID NO: 21634 - DNA, 57 bp, unidentified
  source 1..57: mol_type = unassigned DNA; note = methanogen bacteria
gaatttccagtatatgatactccaaaatttgtatattctatacctattgatggaata

SEQ ID NO: 21635 - DNA, 93 bp, unidentified
  source 1..93: mol_type = unassigned DNA; note = methanogen bacteria
agttttacaaaagcatggggtgcaaacccagatttatacttctcaaataacgtattacatgcaacagattccgtttcaggaatatttacaatt

SEQ ID NO: 21636 - DNA, 72 bp, unidentified
  source 1..72: mol_type = unassigned DNA; note = methanogen bacteria
ctgacattgcctggtgcatcaatcggatatactcagatttttacacctaactggagtgcattgggaaatctg

SEQ ID NO: 21637 - DNA, 102 bp, unidentified
  source 1..102: mol_type = unassigned DNA; note = methanogen bacteria
tttatggcattatccagcggaattccattcaatgaactagtaactgaaggaactggccttgcatttgtagttttcccacaagtatttaatataatgggtcct

SEQ ID NO: 21638 - DNA, 171 bp, unidentified
  source 1..171: mol_type = unassigned DNA; note = methanogen bacteria
caaaaaccttttatgcacattgatgagtggttcactcaggggattttaaacatttcctttaaggaaatgattcacctgacagcaaaggatgtgcatcctccgttgtactatgccatcgctttggtgccggtatatctgttaaagtggctacatattccatttagcatgatg

SEQ ID NO: 21639 - DNA, 99 bp, unidentified
  source 1..99: mol_type = unassigned DNA; note = methanogen bacteria
aaacagataaattccgtatccggcagctattggattgatgagattacgtttgaaacattcgtgcagtttttcgcatcaatatttatggacacttccgag

SEQ ID NO: 21640 - DNA, 93 bp, unidentified
  source 1..93: mol_type = unassigned DNA; note = methanogen bacteria
agcttcacaaaggcttggggagcaaaccccgacgtgttctttacacagaatgtccttcatgcaaccgaatccatgacgggactgttcacgatt

SEQ ID NO: 21641 - DNA, 72 bp, unidentified
  source 1..72: mol_type = unassigned DNA; note = methanogen bacteria
ttgacactgcctggcgcttcagtgggatatagtcagatttttacgcccgactggtcggcactgacaaatctg

SEQ ID NO: 21642 - DNA, 105 bp, unidentified
  source 1..105: mol_type = unassigned DNA; note = methanogen bacteria
ttcatggccgtgacaaccgccattccattcaatgagcttgtaacatcaggatcaggccttgcattcgttgtcttcccacaggtgttcaacataatgggcgatgcg

SEQ ID NO: 21643 - DNA, 273 bp, unidentified
  source 1..273: mol_type = unassigned DNA; note = methanogen bacteria
gtgcttatcgaaggatacgggacttcaattgactcttccaacttcacatccaacaatgttacaaaaaacggaggggccatatatatcctaggttccaatacaagaatctccgattcaagccttgagttcaataatgcgattccagacaaggccgacatcagccgcggtcttggaggcgccttgtacatcaagggaaatgacaatatcgttgatggctccaatttcacattcaacaccgctcgaaacggatcagccatctacactgatggtatt

SEQ ID NO: 21644 - DNA, 93 bp, unidentified
  source 1..93: mol_type = unassigned DNA; note = methanogen bacteria
agcatgtttaaagcgtggggagcagatccaaacttattctattcaagcacccttacacattcaaccaccaatgtaagcggagtcttgaatttc

SEQ ID NO: 21645 - DNA, 72 bp, unidentified
  source 1..72: mol_type = unassigned DNA; note = methanogen bacteria
actcttcctggtgcttccattggtcttgctgaattgtacactcctgattggtcacttttaacagattttaat

SEQ ID NO: 21646 - DNA, 108 bp, unidentified
  source 1..108: mol_type = unassigned DNA; note = methanogen bacteria
ttaggttatatgtctttgcagactgcaacacctgtttcggatattgtaagccaaggcactggattgatatttgtagtttaccctgcagtgtttaatattttaggtcag

SEQ ID NO: 21647 - DNA, 93 bp, unidentified
  source 1..93: mol_type = unassigned DNA; note = methanogen bacteria
agttttacaaaagcatggggagcaaatcccgacctgtattttgcaaacaatgttttgcatgcaacagagtcagtatcaggaatatttacaatc

SEQ ID NO: 21648 - DNA, 69 bp, unidentified
  source 1..69: mol_type = unassigned DNA; note = methanogen bacteria
acacttccaggtgcttcacttggatatacacaaattttcaatcctgattggagtgccctgaccaatctt

SEQ ID NO: 21649 - DNA, 102 bp, unidentified
  source 1..102: mol_type = unassigned DNA; note = methanogen bacteria
tttatggcactatcctccggagttccattcaatgaacttgtaaccgaaggaacaggacttgcattcgtagttttcccacaggtattcaatacaatgggacct

SEQ ID NO: 21650 - DNA, 171 bp, unidentified
  source 1..171: mol_type = unassigned DNA; note = methanogen bacteria
cagaaaccttttctgcacattgacgaatggtttacaaaaggtctgatgaccctttcccttagggacatggtgcatattaccgcaggagatgtgcatcctccgctatactatataacagtctgggcgccggcaaaggtgctgaatcttctccatatcaaatttgacaagatc

SEQ ID NO: 21651 - DNA, 105 bp, unidentified
  source 1..105: mol_type = unassigned DNA; note = methanogen bacteria
tataaacagacaattgaagataaaggaggcaattgggcgaataccatatcattggatgctatctttgaatttttctcatcagcattttccagttcatcagataca

SEQ ID NO: 21652 - DNA, 168 bp, unidentified
  source 1..168: mol_type = unassigned DNA; note = methanogen bacteria
ttaaatcatgttattgttcactacgatgagtattttacattgacactccttaatctgcctgtaatggatatgataacaatcactgcaggggatgtccatccgccgctatactatctgatggcagaagtttttgtaaacatcaccaaacctttaggatgggatcttctt

SEQ ID NO: 21653 - DNA, 96 bp, unidentified
  source 1..96: mol_type = unassigned DNA; note = methanogen bacteria
ataagccagctggaaacagtccaccatacatactggattcccggcattactataagtacaatcatcaatgcccttggctatttcgcatacaataat

SEQ ID NO: 21654 - DNA, 36 bp, unidentified
  source 1..36: mol_type = unassigned DNA; note = methanogen bacteria
gtagcaggacttggtgcagaaccacttgcagctata

SEQ ID NO: 21655 - DNA, 45 bp, unidentified
  source 1..45: mol_type = unassigned DNA; note = methanogen bacteria
ctaaaaataatgggagccagtagtgttttaaaatacgcaatggac

SEQ ID NO: 21656 - DNA, 33 bp, unidentified
  source 1..33: mol_type = unassigned DNA; note = methanogen bacteria
acaatagtatcaggatcacttgcagtagcagtt

SEQ ID NO: 21657 - DNA, 63 bp, unidentified
  source 1..63: mol_type = unassigned DNA; note = methanogen bacteria
caaattgcattcatattctcatattcagaatcaagctcacacttagaaccattaattgcatca

SEQ ID NO: 21658 - DNA, 39 bp, unidentified
  source 1..39: mol_type = unassigned DNA; note = methanogen bacteria
atttctcaaattagtgctgatttgaatactgatgttagt

SEQ ID NO: 21659 - DNA, 171 bp, unidentified
  source 1..171: mol_type = unassigned DNA; note = methanogen bacteria
gttatgggaggtattagtactgcagtcgatacctacgcacctgaacattcaggtgatgaacaattccatcaagatgtctatgattacttccaaaaagtgggtaatatagatgatgttaaagcacaggatagtattattgtgaatactgcagatataattattcagaatgca

SEQ ID NO: 21660 - DNA, 123 bp, unidentified
  source 1..123: mol_type = unassigned DNA; note = methanogen bacteria
gttccgggggttcaatacttcggagggcataatccaagccttatcagctcaatgttgcctgcttccttgaatggaactctcgcatccatgtttaatacaggtattgtatatgtattctccgat

SEQ ID NO: 21661 - DNA, 72 bp, unidentified
  source 1..72: mol_type = unassigned DNA; note = methanogen bacteria
actatcggttcattgaatattacagacattgtatatgtgcttaatcacaatctggttgatcctttatcacct

SEQ ID NO: 21662 - DNA, 42 bp, unidentified
  source 1..42: mol_type = unassigned DNA; note = methanogen bacteria
attgtaacaaatgtgttctcttcattcatcggaggattgata

SEQ ID NO: 21663 - DNA, 30 bp, unidentified
  source 1..30: mol_type = unassigned DNA; note = methanogen bacteria
acaaaatccttttctactgcagaatatggt

SEQ ID NO: 21664 - DNA, 39 bp, unidentified
  source 1..39: mol_type = unassigned DNA; note = methanogen bacteria
gggccaattgcaggtggtctttttaatgggaatgtatat

SEQ ID NO: 21665 - DNA, 45 bp, unidentified
  source 1..45: mol_type = unassigned DNA; note = methanogen bacteria
cttttaagtataactacttttgatattgctcaaaatggttttttt

SEQ ID NO: 21666 - DNA, 36 bp, unidentified
  source 1..36: mol_type = unassigned DNA; note = methanogen bacteria
cctgatatagccaatgaattaaatttttctgctgaa

SEQ ID NO: 21667 - DNA, 33 bp, unidentified
  source 1..33: mol_type = unassigned DNA; note = methanogen bacteria
ctgcatttgcaatatattttagatattgaagcg

SEQ ID NO: 21668 - DNA, 54 bp, unidentified
  source 1..54: mol_type = unassigned DNA; note = methanogen bacteria
attggaaaccagcagctggggcctgaccatattgatcatttattcgttcaggct

SEQ ID NO: 21669 - DNA, 87 bp, unidentified
  source 1..87: mol_type = unassigned DNA; note = methanogen bacteria
tcgagtattgatttttcatggggaagtgatactgcactttactttgaaaaagttggcggaagctctgatttatcaactatgacaaca

SEQ ID NO: 21670 - DNA, 72 bp, unidentified
  source 1..72: mol_type = unassigned DNA; note = methanogen bacteria
atttctcttccaggttcaggcataggtattaatgcattattgaatcctaagtgggaggctttaactaatatt

SEQ ID NO: 21671 - DNA, 105 bp, unidentified
  source 1..105: mol_type = unassigned DNA; note = methanogen bacteria
ggttatatgtcttcaacttccggaatacctatcgtcaatttaattaaggaagggacagggttaatctttgtagttttcccaacgattttcaatataatgggtcct

SEQ ID NO: 21672 - DNA, 90 bp, unidentified
  source 1..90: mol_type = unassigned DNA; note = methanogen bacteria
tttacaaaggcatggggttcaaatccggatttatacttttcacaaaatgttttacatgcatcagattcaatatcaggaatatttacaata

SEQ ID NO: 21673 - DNA, 72 bp, unidentified
  source 1..72: mol_type = unassigned DNA; note = methanogen bacteria
acacttcccggagcatccataggatattcgcagatattcagtccgaactggtctgctttagctgatcctgat

SEQ ID NO: 21674 - DNA, 105 bp, unidentified
  source 1..105: mol_type = unassigned DNA; note = methanogen bacteria
ttcatggccatgacaagcggaattgcatttaacgacctagtaacagaaggaacaggccttgcatttgtagttttcccgcaggcacttaacatgatgcagacagga

SEQ ID NO: 21675 - DNA, 114 bp, unidentified
  source 1..114: mol_type = unassigned DNA; note = methanogen bacteria
gtccaatacttcggtggtcacaatcctagccttttgacaagttcacttccagcaaatcttgttaacactcttgttgcaggctataacactggtattgtatatgcctttgcaaat

SEQ ID NO: 21676 - DNA, 75 bp, unidentified
  source 1..75: mol_type = unassigned DNA; note = methanogen bacteria
ggaacaataggttcagtcaatattgcagatatcatttttgtaattagcaacaagtttgtccagccttactctcca

SEQ ID NO: 21677 - DNA, 45 bp, unidentified
  source 1..45: mol_type = unassigned DNA; note = methanogen bacteria
aatatagtgactgatgtatttattccatttgcagggggcctgatt

SEQ ID NO: 21678 - DNA, 45 bp, unidentified
  source 1..45: mol_type = unassigned DNA; note = methanogen bacteria
atgctgggtttcgggggcctgttcggctcttcgcccataggcata

SEQ ID NO: 21679 - DNA, 42 bp, unidentified
  source 1..42: mol_type = unassigned DNA; note = methanogen bacteria
ctggcgcctgtatcctccctttccgggtccgacatctccggc

SEQ ID NO: 21680 - DNA, 201 bp, unidentified
  source 1..201: mol_type = unassigned DNA; note = methanogen bacteria
agatactccacgccgacactgctgcattcctggaggtcaagccttcgattcatcgactcaacagcacaactgcactacatcgcagaccatccggtatttacgctgaagttcatatcacagctttttacatataacttctcacatatagtatacggagcattcaacttcttcggagctgcccagaaggtccactattgcgac

SEQ ID NO: 21681 - DNA, 48 bp, unidentified
  source 1..48: mol_type = unassigned DNA; note = methanogen bacteria
acatgggcaagcgtgggattcctgaatctgggaatcacgacacgctat

SEQ ID NO: 21682 - DNA, 30 bp, unidentified
  source 1..30: mol_type = unassigned DNA; note = methanogen bacteria
gtttcagaatgtggatctgctagcttaatt

SEQ ID NO: 21683 - DNA, 45 bp, unidentified
  source 1..45: mol_type = unassigned DNA; note = methanogen bacteria
ttattagcacttaacatttatgagccagctattgagcctgcttta

SEQ ID NO: 21684 - DNA, 33 bp, unidentified
  source 1..33: mol_type = unassigned DNA; note = methanogen bacteria
ttattaaattcacctccggatttagcagcattt

SEQ ID NO: 21685 - DNA, 60 bp, unidentified
  source 1..60: mol_type = unassigned DNA; note = methanogen bacteria
caaattacgcatctatttgttgttaataatgatatggctgaaattgctgcattgaatttt

SEQ ID NO: 21686 - DNA, 168 bp, unidentified
  source 1..168: mol_type = unassigned DNA; note = methanogen bacteria
cttaatcattatattctgcatgttgatgagtactttacaataagtgtcctcactcttcccttaggagacattgtgaacataaccagctgggatgtgcaccctccactgtactatattctaggtaaaattgcagttaaaatcgctgaagcaataggaattgacagcatg

SEQ ID NO: 21687 - DNA, 102 bp, unidentified
  source 1..102: mol_type = unassigned DNA; note = methanogen bacteria
ccgcttataaggcaaatgacacaggttcgagcagcttactggattcgccaggtaaatcctgaccttttcatcaagtcactgggatacatcgcatatgcaaat

SEQ ID NO: 21688 - DNA, 114 bp, unidentified
  source 1..114: mol_type = unassigned DNA; note = methanogen bacteria
atccaatacttcggtggtcacgacccagcccttcttgcaagctcacttccatcaaacttggtcggcactcttgtggcaagctacaatactggtattgtttatgtctttgaaaat

SEQ ID NO: 21689 - DNA, 72 bp, unidentified
  source 1..72: mol_type = unassigned DNA; note = methanogen bacteria
acaattggttcagtaaacatcaatgatattatatttgcaataagcaacaactatgtaaacccttatgctcca

SEQ ID NO: 21690 - DNA, 45 bp, unidentified
  source 1..45: mol_type = unassigned DNA; note = methanogen bacteria
aatatagtaactgatgtattcattccatttgcaggaggattgatc

SEQ ID NO: 21691 - DNA, 114 bp, unidentified
  source 1..114: mol_type = unassigned DNA; note = methanogen bacteria
gtccaatatttcggtggacataacccatcactattggcaagctcacttccatccaatttgctaggcactcttgcagcaagctacaatacaggtattgtttatatatttggaaac

SEQ ID NO: 21692 - DNA, 72 bp, unidentified
  source 1..72: mol_type = unassigned DNA; note = methanogen bacteria
acaatcggttcagtaaacatcaatgatataatttatgcaataagcaataatttcgtaaatccatattctcca

SEQ ID NO: 21693 - DNA, 45 bp, unidentified; identical to SEQ ID NO: 21690
  source 1..45: mol_type = unassigned DNA; note = methanogen bacteria

SEQ ID NO: 21694 - DNA, 39 bp, unidentified
  source 1..39: mol_type = unassigned DNA; note = methanogen bacteria
ccttattatatggatgattttgcagtatcttctgcaact

SEQ ID NO: 21695 - DNA, 30 bp, unidentified
  source 1..30: mol_type = unassigned DNA; note = methanogen bacteria
gttcaaaatgtagcatattattcttcaaca

SEQ ID NO: 21696 - DNA, 48 bp, unidentified
  source 1..48: mol_type = unassigned DNA; note = methanogen bacteria
ctggcaaatggaaaaattactcacaatcagatttctgtcaattcattt

SEQ ID NO: 21697 - DNA, 90 bp, unidentified
  source 1..90: mol_type = unassigned DNA; note = methanogen bacteria
tttacaaaagtttggggatcaaaccctgatttattcttttcaaataatgtattgcattcaacagattccattactgggatatttaccatt

SEQ ID NO: 21698 - DNA, 69 bp, unidentified
  source 1..69: mol_type = unassigned DNA; note = methanogen bacteria
acacttcctggagcatcaataggttatatgcaaatatttactccagattggaatgctttaacgaattta

SEQ ID NO: 21699 - DNA, 105 bp, unidentified
  source 1..105: mol_type = unassigned DNA; note = methanogen bacteria
tttatggcattaagcacaggacttaattttaaccaactagttacagaaggaagcggattagcattcattgtatttccacaagtatttaatataatgggtccttca

SEQ ID NO: 21700 - DNA, 99 bp, unidentified
  source 1..99: mol_type = unassigned DNA; note = methanogen bacteria
tcaggggatttatcattcatagatgcatactttgaaggaatgtcaggaattacatcaacaggatttacaatgtatgctaatgttcctatagcatattcc

SEQ ID NO: 21701 - DNA, 99 bp, unidentified
  source 1..99: mol_type = unassigned DNA; note = methanogen bacteria
ggattagaccttttcacagcaatatgttattccttttcaggattaggcacggggggattctcatcagatccaaactatttaaattatttttcaaatcca

SEQ ID NO: 21702 - DNA, 117 bp, unidentified
  source 1..117: mol_type = unassigned DNA; note = methanogen bacteria
cagaataacatctatgatcataacatattagttactcttaatcatgcattattccaggtaatatctgtattaacttcaacaggatttcaaacaaccgacataaacgcttggcctgca

SEQ ID NO: 21703 - DNA, 93 bp, unidentified
  source 1..93: mol_type = unassigned DNA; note = methanogen bacteria
tgtaatgattttaaaattgcatattccatagttgccggttcaataggaaatacggggcttggtccaagttatattaacccttcaattccattt

SEQ ID NO: 21704 - DNA, 93 bp, unidentified
  source 1..93: mol_type = unassigned DNA; note = methanogen bacteria
agttttacaaaagcttggggatcaaatcctgacttatactttacaaataacgttttacaggcaacagattcaatatctggaatatttacaatc

SEQ ID NO: 21705 - DNA, 72 bp, unidentified
  source 1..72: mol_type = unassigned DNA; note = methanogen bacteria
ctaacattacctggcgcatccataggttatacacagatatttactccagactggtctgcattaaccaattta

SEQ ID NO: 21706 - DNA, 105 bp, unidentified
  source 1..105: mol_type = unassigned DNA; note = methanogen bacteria
tttatgacattaacaagcggaattccatttaatgaacttgtaacatcaggaacaggactcgcatttgttgttttcccacaagtattcaatacaatgggacctgca

SEQ ID NO: 21707 - DNA, 93 bp, unidentified
  source 1..93: mol_type = unassigned DNA; note = methanogen bacteria
agtgttacaaaagcttggggagcaaatcctgatttatatttcgcaaataacgtattgcacgcaaccgattcaatgtccggactgttcactatt

SEQ ID NO: 21708 - DNA, 72 bp, unidentified
  source 1..72: mol_type = unassigned DNA; note = methanogen bacteria
ctcacacttcctggtgcatcaatcggatattcgcagatttttacacctgactggagtgccctgggaaatctt

SEQ ID NO: 21709 - DNA, 105 bp, unidentified
  source 1..105: mol_type = unassigned DNA; note = methanogen bacteria
tttatgacattcacttcaggaatacctttcaatgaacttgtaactgaaggaaccgggcttgcatttgtagtgttcccacaggtattcaatacaatgggagatgtt

SEQ ID NO: 21710 - DNA, 54 bp, unidentified
  source 1..54: mol_type = unassigned DNA; note = methanogen bacteria
tatattttagatttagtaaatattccaaaaagtcttctagagactagtaaaact

SEQ ID NO: 21711 - DNA, 54 bp, unidentified
  source 1..54: mol_type = unassigned DNA; note = methanogen bacteria
ataatattcactttattaaatataacctcccctcaacaacaaacatacattgaa

SEQ ID NO: 21712 - DNA, 96 bp, unidentified
  source 1..96: mol_type = unassigned DNA; note = methanogen bacteria
ttaagttttacaaaagcatggggagcaaatccggatttatatttcacaaataacgttttacacgctacagattccatgtctggaatatttacaatt

SEQ ID NO: 21713 - DNA, 72 bp, unidentified
  source 1..72: mol_type = unassigned DNA; note = methanogen bacteria
ctgacattgccgggagcatcagtcggatatactcagattttcacaccggactggtcggcattgactaatctg

SEQ ID NO: 21714 - DNA, 108 bp, unidentified
  source 1..108: mol_type = unassigned DNA; note = methanogen bacteria
ggattcatgactgtgacaagcggaataccgtttaatgaacttgtaacatcaggaactggacttgcatttgtagttttcccacaggtatttaatacaatgggccctgca

SEQ ID NO: 21715 - DNA, 171 bp, unidentified
  source 1..171: mol_type = unassigned DNA; note = methanogen bacteria
ctcaatcactacatcatgcacgttgacgagtactttacgatgagtgtcctcacccttccgatagccgacgtcataagcattaccagctgggatgtgcaccctccggtttactacattctcgcaaagattgcagtaatgatggccgaagctgtaggaatggacagcctccat

SEQ ID NO: 21716 - DNA, 96 bp, unidentified
  source 1..96: mol_type = unassigned DNA; note = methanogen bacteria
ataaggcagatgactcaggttcacgcagcctactggattcgccaggtcaatcccgagatgctggtaaagtctgtgggctatatcgcatatgcggac

SEQ ID NO: 21717 - DNA, 93 bp, unidentified
  source 1..93: mol_type = unassigned DNA; note = methanogen bacteria
agttttacaaaagcatggggatcaaatcccgatttatattttactaatacagtattacaatctacagaatcagtgtctggattgtttacaatt

SEQ ID NO: 21718 - DNA, 72 bp, unidentified
  source 1..72: mol_type = unassigned DNA; note = methanogen bacteria
ttaacattgccaggtgcatcagcaggatatacacaaattttcacacccgattggtcggcattgggcaatttt

SEQ ID NO: 21719 - DNA, 108 bp, unidentified
  source 1..108: mol_type = unassigned DNA; note = methanogen bacteria
ggattcatgacagtgacaagcgggattccatttaatgaacttgtaacatcaggaacaggacttgcatttgtagtattcccacaggtgttcaatacaatgggacctgca

SEQ ID NO: 21720 - DNA, 99 bp, unidentified
  source 1..99: mol_type = unassigned DNA; note = methanogen bacteria
tcattagatatcccctttgtcgatgcgctttttgaaaacatgtctgcatggacaggtagtggaatgactttttttgtaaacgttgaaattttacctaaa

SEQ ID NO: 21721 - DNA, 99 bp, unidentified
  source 1..99: mol_type = unassigned DNA; note = methanogen bacteria
ggacttccaatattcgatgcaataaatcttacatttaccagcatttccactggaggaatgtcaattaaaaacgcaaatgtaggattctatcaaaacagc

SEQ ID NO: 21722 - DNA, 102 bp, unidentified
  source 1..102: mol_type = unassigned DNA; note = methanogen bacteria
aataaaatggtgcctatcgaggaattgttcaccattgtttctgcaatcacaactaccggtgcaaatgtagttcctccttatgaacttgcaagatggagcagc

SEQ ID NO: 21723 - DNA, 96 bp, unidentified
  source 1..96: mol_type = unassigned DNA; note = methanogen bacteria
tatggatatgatccatttacagcattatttgacgttatttccattcaaagcaataacggattgagtactggaattgtatttggtggattgccaatg

SEQ ID NO: 21724 - DNA, 96 bp, unidentified
  source 1..96: mol_type = unassigned DNA; note = methanogen bacteria
ttagacatatcatttatagatgccttttttgaaaacatttccgcatggaccggaagtggattgaccatgttcagtgacgttgaatcactgccaatg

SEQ ID NO: 21725 - DNA, 99 bp, unidentified
  source 1..99: mol_type = unassigned DNA; note = methanogen bacteria
ggacttcctctctttgactctataaatcttacatttacaaccatttccactggaggaatgtcaataaagaatgcaaatgtaggattctataacaacaac

SEQ ID NO: 21726 - DNA, 102 bp, unidentified
  source 1..102: mol_type = unassigned DNA; note = methanogen bacteria
acccatatggctccaatgaacgtaatattccatatagtctcagcagtgacaacaaccggtgcgaatatcgcaagttccagcgaattggcatcctgggcacct

SEQ ID NO: 21727 - DNA, 96 bp, unidentified
  source 1..96: mol_type = unassigned DNA; note = methanogen bacteria
tatacaaatgatccaatcaattcattgtttgatgtgacatctacaataggtaacgttggattaagcacaggcatgataaatggaagcttagctaca

SEQ ID NO: 21728 - DNA, 93 bp, unidentified
  source 1..93: mol_type = unassigned DNA; note = methanogen bacteria
agcatgtttaaaggttggggagcagatcctaatgctttctttacaactactcttacccattcatctacaagcgtttccggaatcttaaatttc

SEQ ID NO: 21729 - DNA, 75 bp, unidentified
  source 1..75: mol_type = unassigned DNA; note = methanogen bacteria
gttacacttcctggagcttccattggtcttgctgaattatacaggcctaactggtcccttttatctgatcctaac

SEQ ID NO: 21730 - DNA, 108 bp, unidentified
  source 1..108: mol_type = unassigned DNA; note = methanogen bacteria
ttagggtacatgtctttgcaaacagcaacacctgttggagaccttgttagccaaggaactggattgatattcataatttatcctgcgatattcaatattttaggtcaa

SEQ ID NO: 21731 - DNA, 33 bp, unidentified
  source 1..33: mol_type = unassigned DNA; note = methanogen bacteria
atacatgtacttcatttttcaattccattgtcc

SEQ ID NO: 21732 - DNA, 48 bp, unidentified
  source 1..48: mol_type = unassigned DNA; note = methanogen bacteria
ctatatgctccaggtgcagttgaacaaacggtaattacatttaatctg

SEQ ID NO: 21733 - DNA, 54 bp, unidentified
  source 1..54: mol_type = unassigned DNA; note = methanogen bacteria
gttatatttgaggaaagctatgttgtaagagattatggatttttggtattgcca

SEQ ID NO: 21734 - DNA, 36 bp, unidentified
  source 1..36: mol_type = unassigned DNA; note = methanogen bacteria
tatctgattgatgtgggtgtgacaaataaaatcaat

SEQ ID NO: 21735 - DNA, 57 bp, unidentified
  source 1..57: mol_type = unassigned DNA; note = methanogen bacteria
attttcccggcatctgaagtcccaacattattcatcggatcttttcctataaatgga

SEQ ID NO: 21736 - DNA, 93 bp, unidentified
  source 1..93: mol_type = unassigned DNA; note = methanogen bacteria
agcttcacaaaggcatggggcgcaaaccctgacctgtactttgcaaacaacgtactgcatgcaacagactcaatgtccggactgttcaccata

SEQ ID NO: 21737 - DNA, 69 bp, unidentified
  source 1..69: mol_type = unassigned DNA; note = methanogen bacteria
acacttccgggagcatcaatcggatacactcagattttcacaccggactggagtgcactgacaaacctg

SEQ ID NO: 21738 - DNA, 105 bp, unidentified
  source 1..105: mol_type = unassigned DNA; note = methanogen bacteria
ttcatgacactatcctcaggaataccattcaacgagcttgtaaccgaaggaacaggccttgcgtttgtagtgttccctcaagtgttcaacacaatgggaccggcg

SEQ ID NO: 21739 - DNA, 99 bp, unidentified
  source 1..99: mol_type = unassigned DNA; note = methanogen bacteria
tcattagatatccactttgttgatgcactctttgaaaacatgtctgcatggacaggtagtggaatgactttttttgtaaacgttgagatcttacctaaa

SEQ ID NO: 21740 - DNA, 99 bp, unidentified
  source 1..99: mol_type = unassigned DNA; note = methanogen bacteria
ggccttccaatatttgatgcagtaaaccttacatttaccagcatttccactggaggaatgtcaatcaaaaatgcaaatgttggattctatcaaaacagc

SEQ ID NO: 21741 - DNA, 102 bp, unidentified
  source 1..102: mol_type = unassigned DNA; note = methanogen bacteria
aataaaatggtgcctatagaggaattgttcaccattgtttctgcaattacaactactggtgcaaatgtagttcctccatatgaacttgcaaggtggagcagc

SEQ ID NO: 21742 - DNA, 96 bp, unidentified
  source 1..96: mol_type = unassigned DNA; note = methanogen bacteria
tatggatatgacccatttacagcattatttgacatcgtttccttacaatgtaataatggattaagtacaggcatagtctttggaggattgccaaca

SEQ ID NO: 21743 - DNA, 93 bp, unidentified
  source 1..93: mol_type = unassigned DNA; note = methanogen bacteria
agttttacaaaagcatggggttcaaatccagatatatactttgcaaataatgtattacattcaacagattctatttcaggaatatttacaatt

SEQ ID NO: 21744 - DNA, 72 bp, unidentified
  source 1..72: mol_type = unassigned DNA; note = methanogen bacteria
cttacactacctggagcatcagaaggttatacccaaattttcacaccagattggagtgcattaactaatctg

SEQ ID NO: 21745 - DNA, 105 bp, unidentified
  source 1..105: mol_type = unassigned DNA; note = methanogen bacteria
ttcatggctgtaacaagcggaattgcatttgataatcttgtaacagaaggtagtggacttgcatttgttgtatttccacaagtatttaatataatggggccagca

SEQ ID NO: 21746 - DNA, 93 bp, unidentified
  source 1..93: mol_type = unassigned DNA; note = methanogen bacteria
agttttacaaaagcatggggagccaatcctgatttatacttctcaaataatgtattgcatgcgacagattcaatgtccggattgtttacaatc

SEQ ID NO: 21747 - DNA, 72 bp, unidentified
  source 1..72: mol_type = unassigned DNA; note = methanogen bacteria
ttgacattgcctggagcatcaatcggatacacacaaatcttcactccggactggagcgctttgctcaacctg

SEQ ID NO: 21748 - DNA, 108 bp, unidentified
  source 1..108: mol_type = unassigned DNA; note = methanogen bacteria
ggattcatgaccgcaacttccggaattccatttaacgagcttgtgactgaaggaacaggacttgcgttcgttgttttcccacaggtgttcaatacaatgggcggtgca

SEQ ID NO: 21749 - DNA, 57 bp, unidentified
  source 1..57: mol_type = unassigned DNA; note = methanogen bacteria
cctgatgtcaccgtattctcctcaacggtcaacgtcatcttctacgacgtaaactac

SEQ ID NO: 21750 - DNA, 51 bp, unidentified
  source 1..51: mol_type = unassigned DNA; note = methanogen bacteria
cccaaatacatcctcggcatcgcattcgactccggcggagtcaccaccgga

SEQ ID NO: 21751 - DNA, 90 bp, unidentified
  source 1..90: mol_type = unassigned DNA; note = methanogen bacteria
gcggggatctcggacctcatggtccctaatgtcacggaagccacggtcgataccgtgagcctggacactatgatgcaccattacaaacaa

SEQ ID NO: 21752 - DNA, 60 bp, unidentified
  source 1..60: mol_type = unassigned DNA; note = methanogen bacteria
tcaggtttcatgcccatcgcacaggagatcggcgtgtatctcatcgataatgacgccgga

SEQ ID NO: 21753 - DNA, 36 bp, unidentified
  source 1..36: mol_type = unassigned DNA; note = methanogen bacteria
gcagaggtcctgggaggagagatagcctccgagaac

SEQ ID NO: 21754 - DNA, 291 bp, unidentified
  source 1..291: mol_type = unassigned DNA; note = methanogen bacteria
acacccccatttagttttattgacgaatctgcacattttacaagagcagaattaataagcgagggttcattatatcctgaaactacagataaagggatttatgtcaatgattattactttccttttcaggagtcatattatggagtaactatactgtctgaaaataattacaataatcccattactgatcacaagaattattggttgatgacgacgaaaacaccattttattcgtatttattatcggggttcggaattttaatagctaaattattgaatttaactgcgata

SEQ ID NO: 21755 - DNA, 189 bp, unidentified
  source 1..189: mol_type = unassigned DNA; note = methanogen bacteria
atattcatatccacaacagctgcaaataattcaggtggagttataaccaacatatctatgattggacaggccagatttatagcatccaatccagctattattctgactttaattaaggatatgattgtttctattcctaatcttttcttattaaaatctaattttttccattatacaggatataaagga

SEQ ID NO: 21756 - DNA, 54 bp, unidentified
  source 1..54: mol_type = unassigned DNA; note = methanogen bacteria
ttaattggaactccaatgaaaagtcaggtgattttgggagttcaatcaaggtat

SEQ ID NO: 21757 - DNA, 93 bp, unidentified
  source 1..93: mol_type = unassigned DNA; note = methanogen bacteria
agttttacaaaagcatggggatcaaatcctgatttatactttacaaatagtgttttacattcaacagattcaatatctggaatatttacaatc

SEQ ID NO: 21758 - DNA, 72 bp, unidentified
  source 1..72: mol_type = unassigned DNA; note = methanogen bacteria
ctaacattacctggtgcatccgtaggttatacgcagatatttacacctgactggtctgcactaaccaattta

SEQ ID NO: 21759 - DNA, 102 bp, unidentified
  source 1..102: mol_type = unassigned DNA; note = methanogen bacteria
tttatgacattaaccagcggaattccatttaatgaacttgtaacatcaggaaccggacttgcatttgttgttttcccacaagtattcaatataatgggacct

SEQ ID NO: 21760 - DNA, 168 bp, unidentified
  source 1..168: mol_type = unassigned DNA; note = methanogen bacteria
cttaatcatttggtttgtcaaattgatgaatattttacaagaactattctgcttcttcccgtttcagatatcattactgtaactgctggtgatgttcacccgcctttatattatctgatgggaaaagcggtggctgaactcagcgcagttctgggcgttgatttatta

SEQ ID NO: 21761 - DNA, 96 bp, unidentified
  source 1..96: mol_type = unassigned DNA; note = methanogen bacteria
ttaagtcagatggcccatgttcacaacggttactggattccggaaattacctgggaaagtgcacttttgttttacggatattacggatataacgaa

SEQ ID NO: 21762 - DNA, 36 bp, unidentified
  source 1..36: mol_type = unassigned DNA; note = methanogen bacteria
cagatgttcgagtgggatatcgaaggatggacctat

SEQ ID NO: 21763 - DNA, 69 bp, unidentified
  source 1..69: mol_type = unassigned DNA; note = methanogen bacteria
tccggcgagttcgagttctcgaacataaccgacaacatcaccgcgcccggctggagctgggacttcgag

SEQ ID NO: 21764 - DNA, 90 bp, unidentified
  source 1..90: mol_type = unassigned DNA; note = methanogen bacteria
gggtccttcgatcagagcaaccccgacgatgcggcgctcatgaccaatgccatcctggcgccgctctccgaggccgtcttcggcgacaca

SEQ ID NO: 21765 - DNA, 93 bp, unidentified
  source 1..93: mol_type = unassigned DNA; note = methanogen bacteria
tccagccttaatttcagctggggaagcgattcggcactttattttgtaaaaaatgttggcggaagctcaaacctatcaaatatgggaaacttc

SEQ ID NO: 21766 - DNA, 72 bp, unidentified
  source 1..72: mol_type = unassigned DNA; note = methanogen bacteria
actcttcctggtgccggcatcggcataggtgcattgctgaatccggattggaacatgcttttgaatgtgaat

SEQ ID NO: 21767 - DNA, 105 bp, unidentified
  source 1..105: mol_type = unassigned DNA; note = methanogen bacteria
ggatacatgtcatatacttcgggaactccaatggttcagctggtaagtgaaggttcaagtctggtatttatcgtttttccaatgattttcaatgcaatgggcttt

SEQ ID NO: 21768 - DNA, 63 bp, unidentified
  source 1..63: mol_type = unassigned DNA; note = methanogen bacteria
actgtcactgaatcaccagcactgagcagtgattctttagatgtagacaatgcttattctaaa

SEQ ID NO: 21769 - DNA, 267 bp, unidentified
  source 1..267: mol_type = unassigned DNA; note = methanogen bacteria
gatgtctatgagcctttctcaattactgttaatgtaacagtcaataagattgcctcccaattgtcctcacgaaatgtaaccgcatttttcaatgaaggaaaaatcgtggccaggctgactgataagtacggcaagcctttggctgattcaaacgtgtcccttcatctggcatatatccacaggactttcaagacaaatcagagtggtgaagtcgaatttgaaattgaaggtttgactgaaggaaaccacaccggtcaaatcgtattt

SEQ ID NO: 21770 - DNA, 93 bp, unidentified
  source 1..93: mol_type = unassigned DNA; note = methanogen bacteria
agtttaacaaaagcttggggtgcaaatcctgatttattctttgcaaataatgttctgcaagcaacagattcaatatctggaatatttaaaata

SEQ ID NO: 21771 - DNA, 72 bp, unidentified
  source 1..72: mol_type = unassigned DNA; note = methanogen bacteria
ttaacactccccggcgcatcaatcggatatacacaaatttttactcctgattggtctgcattaaccaatttg

SEQ ID NO: 21772 - DNA, 108 bp, unidentified
  source 1..108: mol_type = unassigned DNA; note = methanogen bacteria
ggatttatggcattgactacaggaatgccattcaatgaacttgttaccgaaggaactggtcttgcatttgttgttttcccacaagtattcaatacaatgggagacgtt

SEQ ID NO: 21773 - DNA, 90 bp, unidentified
  source 1..90: mol_type = unassigned DNA; note = methanogen bacteria
tttacaaaggcatggggatcaaatcccgatttgtacttttcacaaaacgttctgcacgctacggattccatatccggaatatttacaata

SEQ ID NO: 21774 - DNA, 72 bp, unidentified
  source 1..72: mol_type = unassigned DNA; note = methanogen bacteria
acacttccaggcgcatcaattggatattcacagatatttgctccaaactggtctgcattagccgatcccgat

SEQ ID NO: 21775 - DNA, 105 bp, unidentified
  source 1..105: mol_type = unassigned DNA; note = methanogen bacteria
ttcatggcaatgacaagcggaattgcatttaacgatctggtaacggaaggaacaggccttgcatttgtagtgttcccgcaggcacttaacctgatgcagacagga

SEQ ID NO: 21776 - DNA, 171 bp, unidentified
  source 1..171: mol_type = unassigned DNA; note = methanogen bacteria
gcaaattccctttttcatattgatgaattcttcacattaagtttaataaaatattcaatcaataatgcgattacaataacttcttatgatgttcatcctccattatattacattatccttaaaattgtaacaaaaatattaactttattaaatataaattttaacactatt

SEQ ID NO: 21777 - DNA, 105 bp, unidentified
  source 1..105: mol_type = unassigned DNA; note = methanogen bacteria
aatcaaatatccagagtccatcaatcattttgggttgaaccagttacatttataactattatggattcattatcttatttcatgattcctataacttgtgatgat

SEQ ID NO: 21778 - DNA, 48 bp, unidentified
  source 1..48: mol_type = unassigned DNA; note = methanogen bacteria
ttcggtcaggcctggtccattgccgaccttcccgtatcggactatgtc

SEQ ID NO: 21779 - DNA, 30 bp, unidentified
  source 1..30: mol_type = unassigned DNA; note = methanogen bacteria
gtgaacgtaaacttcgacctcatcagcgtg

SEQ ID NO: 21780 - DNA, 36 bp, unidentified
  source 1..36: mol_type = unassigned DNA; note = methanogen bacteria
aagctgtacctgaccttctacgagttcaacatctac

SEQ ID NO: 21781 - DNA, 132 bp, unidentified
  source 1..132: mol_type = unassigned DNA; note = methanogen bacteria
ataagcaacgtcatcgacaggaaccacgtttccgaggcaatcaatctctccgctgccgataacatcgtctcagccatcatggagtacgtgatgtccggtgtgaagtacgtggccgattcgctggccagcggt

SEQ ID NO: 21782 - DNA, 93 bp, unidentified
  source 1..93: mol_type = unassigned DNA; note = methanogen bacteria
agttttacaaagggttggggtgcaaatccagatttatattttgcaaataatgttctgcatgcgacagactcagtttccggaatatttacaatc

SEQ ID NO: 21783 - DNA, 75 bp, unidentified
  source 1..75: mol_type = unassigned DNA; note = methanogen bacteria
ttaacattgcccggagcatcaattggttatactcaaattcttacacccgattggagcgccttaggaaatgctgaa

SEQ ID NO: 21784 - DNA, 108 bp, unidentified
  source 1..108: mol_type = unassigned DNA; note = methanogen bacteria
ggatttatgacactcaccagcggaatcccatttaatgaacttgtaactgaagggtcaggcctggcatttgttgttttcccacaggtatttaatacaatgggacctgct

SEQ ID NO: 21785 - DNA, 291 bp, unidentified
  source 1..291: mol_type = unassigned DNA; note = methanogen bacteria
ggtccgccactggcatttttggatgaatcggcccattttacaagagcagaattattatcggaaggagttataaatcctgaagaaaaggataatggcttttatgtaaacaattattatttcggattaaataaagctcaaaaaggactgacagtattggataatcctgcggttaataatcccatcaatgaatcaaaaggatactggagttttacaacagaaacaccattttattcatatattccatccgcaataggaatatcaatagccaaatttcttgatttaacagccatt

SEQ ID NO: 21786 - DNA, 195 bp, unidentified
  source 1..195: mol_type = unassigned DNA; note = methanogen bacteria
ctggacataattttccctgtagcaacccaggttaaaagccatatgccaagcaacatttcaccaggaaagcagctgaattatattttgacaaatccattaataatgtttgatttaatgaaatacattgttacaagcattcctagtgtctttgttatagatttaacaatctttcattatgctgattttaaaggcttg

SEQ ID NO: 21787 - DNA, 57 bp, unidentified
  source 1..57: mol_type = unassigned DNA; note = methanogen bacteria
tatttgacatacacccctattggttccggagagattttaggtgttcaggcaagatat

SEQ ID NO: 21788 - DNA, 96 bp, unidentified
  source 1..96: mol_type = unassigned DNA; note = methanogen bacteria
atcagtttctttaagggatggggttctgatccggaacagttctttggaacagttctgctgcaaagttcaacaacacccgatggattgtttcatgta

SEQ ID NO: 21789 - DNA, 72 bp, unidentified
  source 1..72: mol_type = unassigned DNA; note = methanogen bacteria
acattacctggagcatccttgggggtagcaacattatttacacccgattggaattcaattgtaaatccggtg

SEQ ID NO: 21790 - DNA, 102 bp, unidentified
  source 1..102: mol_type = unassigned DNA; note = methanogen bacteria
ggttatatgagtacgacaagcaatataccaataggaaaccttgtttcacagggaacaactttagcattcatagcattcccacagatattcaatatcatggga

SEQ ID NO: 21791 - DNA, 132 bp, unidentified
  source 1..132: mol_type = unassigned DNA; note = methanogen bacteria
tttcatcctggaatagctacattagactcatttgaccaattacatcaaattgcttctagtcaatttactaattggcatcctttttttcatacatttattgaaattttatgtttaaaagtgtatcctagcata

SEQ ID NO: 21792 - DNA, 90 bp, unidentified
  source 1..90: mol_type = unassigned DNA; note = methanogen bacteria
agtttcacatttagttggggaactgatgcagcggcttactttactcaaaatgtcggtggaagttcaaatctgtccaatgttggcttctta

SEQ ID NO: 21793 - DNA, 69 bp, unidentified
  source 1..69: mol_type = unassigned DNA; note = methanogen bacteria
actttgcctggtgcaggcattggtgttaatactctgctcactcctgattggagcaaacttatggatgta

SEQ ID NO: 21794 - DNA, 105 bp, unidentified
  source 1..105: mol_type = unassigned DNA; note = methanogen bacteria
ggttacatgtcgtttacttcgggaactcctatggttcaattaattacagagggtactggattaattttcattgttttcccaatgatttttaatattatgggtcct

SEQ ID NO: 21795 - DNA, 237 bp, unidentified
  source 1..237: mol_type = unassigned DNA; note = methanogen bacteria
gtgcacaattacaagtccaaaaacaacaaaatcaactacaactacattgtcaatgaaaagcacaatcttgttggaactggaaacatcgatgcagattacaactggtggggaaagaacaaactattcaaggtttccaaatcattcaaaatcaaaaagtttgtagttatgtatttaaacgcaccacataatctgaaattcaataagacatataaaatcaatatactattcaaagacaat

SEQ ID NO: 21796 - DNA, 78 bp, unidentified
  source 1..78: mol_type = unassigned DNA; note = methanogen bacteria
tttttaagttttttaagcaaatattctaaagttagtaaaataataaaaggttattatgataatgttttgagtacaata

SEQ ID NO: 21797 - DNA, 159 bp, unidentified
  source 1..159: mol_type = unassigned DNA; note = methanogen bacteria
tctaaacagcataaaaagaaatccgttaggggtgctgttagaaaaattgttaaaaataatccgaaaattgtttataaagccgttaagatagcaaaacgaattttaatgcctaaatataattcgaatagaaatcctaataaaaataataaatcaaaagat

SEQ ID NO: 21798 - DNA, 51 bp, unidentified
  source 1..51: mol_type = unassigned DNA; note = methanogen bacteria
tctattagaaaagtaatttaccaaggtgttaaatatataaagaaatatttg

SEQ ID NO: 21799 - DNA, 90 bp, unidentified
  source 1..90: mol_type = unassigned DNA; note = methanogen bacteria
agtttcacatttagttggggaactgatgctgctgcttactttactcagaacgtcggtggaagttcaaatctctccaatgctaacttctta

SEQ ID NO: 21800 - DNA, 69 bp, unidentified
  source 1..69: mol_type = unassigned DNA; note = methanogen bacteria
actttgccgggtgcaggcattggtattaatactctgctcactcctgattggagtaaacttatggatgta

SEQ ID NO: 21801 - DNA, 105 bp, unidentified
  source 1..105: mol_type = unassigned DNA; note = methanogen bacteria
gggtacatgtcatatactgcaggaactcctatggttcaattaattactgagggaactggattaattttcattgttttcccaatgatttttaatataatgggtcct

SEQ ID NO: 21802 - DNA, 264 bp, unidentified
  source 1..264: mol_type = unassigned DNA; note = methanogen bacteria
tactgggaggggggcagtaactatgatgtttctttaaatccaattgtcattgcaaatcctataaatgttaataaacctaataacaacttaacttttattgtacctgaggaatatgaagggattttaacattgactatcggtggtgaaaagcgcagtgttaatgtcacccatggtattgtgtctattgagttatttaacctcaattccacagaatatgatgatgaatatgaatctttcgtcttaagatatgatttaagatttgaa

SEQ ID NO: 21803 - DNA, 39 bp, unidentified
  source 1..39: mol_type = unassigned DNA; note = methanogen bacteria
acagaaataatggcagattttcatgtatcttcaacttct

SEQ ID NO: 21804 - DNA, 36 bp, unidentified
  source 1..36: mol_type = unassigned DNA; note = methanogen bacteria
tttgttcaaagtgttgcctatcactctgcaacggaa

SEQ ID NO: 21805 - DNA, 51 bp, unidentified
  source 1..51: mol_type = unassigned DNA; note = methanogen bacteria
tttgcgggaggtaatcctacccataataatgtttcagtttcagcatttggt

SEQ ID NO: 21806 - DNA, 93 bp, unidentified
  source 1..93: mol_type = unassigned DNA; note = methanogen bacteria
tccagttttaatttcgcttggggaaatgatgcaggtttatttttcactaatgttgttggcggaagctctaatttgaattcaattaccacgttt

SEQ ID NO: 21807 - DNA, 75 bp, unidentified
  source 1..75: mol_type = unassigned DNA; note = methanogen bacteria
ttgaccttgcctggtgctggaatcggtatcaatactctgttgacgcctgactggtcaaaattgcttgatgttaac

SEQ ID NO: 21808 - DNA, 105 bp, unidentified
  source 1..105: mol_type = unassigned DNA; note = methanogen bacteria
ggatacatgtcgcatactgcaggaactcccatggttgagctagtcgctgaaggtacgggactgatatttattgtttttcctatgatatttaacataatgggtcct

SEQ ID NO: 21809 - DNA, 93 bp, unidentified
  source 1..93: mol_type = unassigned DNA; note = methanogen bacteria
agtttttatcatggatggggaagcaatccgaatttattctttacagaaactctgctacactctacaagctctatatctggattgggggacatt

SEQ ID NO: 21810 - DNA, 75 bp, unidentified
  source 1..75: mol_type = unassigned DNA; note = methanogen bacteria
gttactcttcctggagcaagcattggatacagcgcattgttcaatcctaaatggtattccatatgtgatcctcac

SEQ ID NO: 21811 - DNA, 105 bp, unidentified
  source 1..105: mol_type = unassigned DNA; note = methanogen bacteria
ggatatatgtcctttgtccaagatgttcctttaagatatttggtaaccgaaggaaccggactcatctttgttgcatttccatctatcttcaatgaaatgggagta

SEQ ID NO: 21812 - DNA, 96 bp, unidentified
  source 1..96: mol_type = unassigned DNA; note = methanogen bacteria
ataaaattcccactgatagatggattatttgaaaatatgtcaatgttgacagggaccggattaaccttatttttagatattgaagctctccctaaa

SEQ ID NO: 21813 - DNA, 99 bp, unidentified
  source 1..99: mol_type = unassigned DNA; note = methanogen bacteria
ggaatgccattatttgactctataacactctgttttgcaatgatatgtacagggggaatgagtataaaaaaccaaaatattggattttaccatagtaat

SEQ ID NO: 21814 - DNA, 99 bp, unidentified
  source 1..99: mol_type = unassigned DNA; note = methanogen bacteria
aaagtatttaatattgatatcctatttgcaattattactactatctctactacaggtgcaaattccgttccttctaatgttatgatgagttggccaagg

SEQ ID NO: 21815 - DNA, 96 bp, unidentified
  source 1..96: mol_type = unassigned DNA; note = methanogen bacteria
tgtggttatagtgattttaatgcattatttgatgttatatctgcaataggtaataatggattaagttcaggttttacaaatccaggtttaccaatt

SEQ ID NO: 21816 - DNA, 93 bp, unidentified
  source 1..93: mol_type = unassigned DNA; note = methanogen bacteria
tccagtttaaatttcaactggggaagtaattctacactttattttttagaaaatgttggtggaagctcaaatttatctaatatgactaatttc

SEQ ID NO: 21817 - DNA, 69 bp, unidentified
  source 1..69: mol_type = unassigned DNA; note = methanogen bacteria
acactaccaggtgctaatatcggtataaatacactgctaaaaccagattggcaaatgcttttaaatgtt

SEQ ID NO: 21818 - DNA, 105 bp, unidentified
  source 1..105: mol_type = unassigned DNA; note = methanogen bacteria
cttggatatatgtcctatacttctggaacacctatgaccaaattggtaagtgaaggtacaggactagtattcattgtttttccaatgatttttaataagatgggt

SEQ ID NO: 21819 - DNA, 96 bp, unidentified
  source 1..96: mol_type = unassigned DNA; note = methanogen bacteria
ggatccagttttaactttgcttggggaagtgattctgcactttattttatagaaaatgtagggggaagctcaaatttatcccatatatcaaatttt

SEQ ID NO: 21820 - DNA, 69 bp, unidentified
  source 1..69: mol_type = unassigned DNA; note = methanogen bacteria
acactatctggtgctagcataggggtaaatgcattactgaatcctgattggcagatgcttttaaatgta

SEQ ID NO: 21821 - DNA, 108 bp, unidentified
  source 1..108: mol_type = unassigned DNA; note = methanogen bacteria
ctcggatatatgtcctatacctctggaacacctatagccaaattggttagtgaaggtacaggactggtattcattgtttttcctaagatttttaatattatgggtcct

SEQ ID NO: 21822 - DNA, 75 bp, unidentified
  source 1..75: mol_type = unassigned DNA; note = methanogen bacteria
tacaccgacggcatcatgtacggcaccagttcggtggacctcagcgattacggcctggccatgggggcctccgac

SEQ ID NO: 21823 - DNA, 105 bp, unidentified
  source 1..105: mol_type = unassigned DNA; note = methanogen bacteria
ctgagctgggacagccttccggccgtcgctcaggtcctggtgttcgccatcccgttctcccatcccatgatggtcatgaacaacctcgtcttcgggaacatctcc

SEQ ID NO: 21824 - DNA, 171 bp, unidentified
  source 1..171: mol_type = unassigned DNA; note = methanogen bacteria
gtcagataccccttcctgaccgttgacggctggtttacgaaaggtttgctgagtctgccgattacacagcaaatttcaatcactgcaattgacgtgcatccgccgctgtactatctgattttgaatgctgttgtaagcgtgctgggcgtgtttaatgctgatttgattttg

SEQ ID NO: 21825 - DNA, 99 bp, unidentified
  source 1..99: mol_type = unassigned DNA; note = methanogen bacteria
aggcaaatgagaagtgtcaaaagcggctactggattgaacctgccagcctgaaactggttgtggactgttttggaagctacattacattttatccttca

SEQ ID NO: 21826 - DNA, 99 bp, unidentified
  source 1..99: mol_type = unassigned DNA; note = methanogen bacteria
tccttagatatccactttatcgatgcactttttgaaaatatgtctgcatggacgggaagtggaatgactttttttgtaaatgttgaaatcttacctaaa

SEQ ID NO: 21827 - DNA, 99 bp, unidentified
  source 1..99: mol_type = unassigned DNA; note = methanogen bacteria
ggactgcctatctttgattcagtgaaccttacattcacaagcatttccactggaggaatgtccattaagaatgcaaatataggtttctatcaaaatagc

SEQ ID NO: 21828 - DNA, 102 bp, unidentified
  source 1..102: mol_type = unassigned DNA; note = methanogen bacteria
aatactggagtgcctatagaagagctatacaccatcatttctgcagttacaactactggtgcaaatgtaattcctcctcaagagcttgcaacatggaaagga

SEQ ID NO: 21829 - DNA, 96 bp, unidentified
  source 1..96: mol_type = unassigned DNA; note = methanogen bacteria
tatggatatgacccatttactgcattattcgatgttatttccttacaaagcaataatggattaagtacaggaatcgtatggggaggattgccaata

SEQ ID NO: 21830 - DNA, 102 bp, unidentified
  source 1..102: mol_type = unassigned DNA; note = methanogen bacteria
gtcatagacatatcctttttagacgctttttttgaaaacatttctgcttggacaggaagtggtttgacattaatcagtgatgtggaatcattgcctcattcc

SEQ ID NO: 21831 - DNA, 99 bp, unidentified
  source 1..99: mol_type = unassigned DNA; note = methanogen bacteria
gggcttccattattcgattctgtaaatctaacatttacaaccatatccactggtggaatgtcaataaaaaatgccaacattggattttaccataacaat

SEQ ID NO: 21832 - DNA, 102 bp, unidentified
  source 1..102: mol_type = unassigned DNA; note = methanogen bacteria
gcaaatttagctccaattgatgcaatgttccatgttatttctgcaataacaacaactggagcaaatatagcaagcccagatgatatggttggatgggctcct

SEQ ID NO: 21833 - DNA, 96 bp, unidentified
  source 1..96: mol_type = unassigned DNA; note = methanogen bacteria
tataccaatgacccaattatgacattatttgacgtgacttctacaataggtaacgttggattaagtacaggtatagtgaatggaagtttggatcca

SEQ ID NO: 21834 - DNA, 39 bp, unidentified
  source 1..39: mol_type = unassigned DNA; note = methanogen bacteria
gttccagctattgcacaggaatttgcaatgaataacgtt

SEQ ID NO: 21835 - DNA, 33 bp, unidentified
  source 1..33: mol_type = unassigned DNA; note = methanogen bacteria
taccacttccagtatgtaaggggatgggatgct

SEQ ID NO: 21836 - DNA, 36 bp, unidentified
  source 1..36: mol_type = unassigned DNA; note = methanogen bacteria
atgggaaccttgcctcttgcaaccaaatatgctgga

SEQ ID NO: 21837 - DNA, 132 bp, unidentified
  source 1..132: mol_type = unassigned DNA; note = methanogen bacteria
tataatcctggaatattgacttatgactcatttaatcaattacatcaaattgctacaggtaattttaataattggcaaccatttttccatacattcatagaaatggtttgtattaaaatatatgctagccca

SEQ ID NO: 21838 - DNA, 30 bp, unidentified
  source 1..30: mol_type = unassigned DNA; note = methanogen bacteria
ggtggaaacgcgtggttcggcatcacggct

SEQ ID NO: 21839 - DNA, 120 bp, unidentified
  source 1..120: mol_type = unassigned DNA; note = methanogen bacteria
gctaatgaagatggtggtgcaatatgttcaaaaaattcagtttatataaataattgtacttttaaggataattgtgctgacaatagtgggggagcaatttacacttattatacaataatt

SEQ ID NO: 21840 - DNA, 69 bp, unidentified
  source 1..69: mol_type = unassigned DNA; note = methanogen bacteria
ttattcgactctaataaagcggataatgatggtggagctataaatgcaataaataatgcacaactaaaa

SEQ ID NO: 21841 - DNA, 63 bp, unidentified
  source 1..63: mol_type = unassigned DNA; note = methanogen bacteria
atatttactagaaacactgcaaaaaacggtggagcaagttatgcttatgttttgaactccgat

SEQ ID NO: 21842 - DNA, 63 bp, unidentified
  source 1..63: mol_type = unassigned DNA; note = methanogen bacteria
tctacatttaaagataataaagcagataatggtggtgcaatatatgctagttcagcattaatt

SEQ ID NO: 21843 - DNA, 126 bp, unidentified
  source 1..126: mol_type = unassigned DNA; note = methanogen bacteria
attgcagataactgtggaggagcaatattttcaaaaaataaaatagaggcaattaacagtgaattttataagaataatgcttgtgaagatggtggagctattttctctgataatgcatatgtatct

SEQ ID NO: 21844 - DNA, 90 bp, unidentified
  source 1..90: mol_type = unassigned DNA; note = methanogen bacteria
agtttcacatttggatggggaagcgatccatcagcatttttcactgcaaatgttggaggttcctctaatttaagcggaatcacatccata

SEQ ID NO: 21845 - DNA, 75 bp, unidentified
  source 1..75: mol_type = unassigned DNA; note = methanogen bacteria
tttacattaccgggatttgaattaggattgactacattgcttacccctaattgggaaatgctattagacatcaat

SEQ ID NO: 21846 - DNA, 105 bp, unidentified
  source 1..105: mol_type = unassigned DNA; note = methanogen bacteria
ggatacatgtctgtaacaagctcaattcctataactgaattgatcagtgacggaacaagcctgatatttatcgttcttccggaagtctttgaagttatgggccct

SEQ ID NO: 21847 - DNA, 75 bp, unidentified
  source 1..75: mol_type = unassigned DNA; note = methanogen bacteria
tacactgacggcgtaatgtacggcgccgattcggtgaacctcggcgattacggcctggctatgggagcttccgac

SEQ ID NO: 21848 - DNA, 102 bp, unidentified
  source 1..102: mol_type = unassigned DNA; note = methanogen bacteria
atgagctgggacagccttcctgctgcagcgcaggccctgatcttcgccatcccgttctcccatcccatgatggtcatgaacaacctcgtcttcggaaatatc

SEQ ID NO: 21849 - DNA, 36 bp, unidentified
  source 1..36: mol_type = unassigned DNA; note = methanogen bacteria
gcctccgggctcggagatgaggacctgtccgcgctc

SEQ ID NO: 21850 - DNA, 57 bp, unidentified
  source 1..57: mol_type = unassigned DNA; note = methanogen bacteria
gacccgatcatctcgttcatgggcgcggacgatgtccgcgacgggtgcagggaatat

SEQ ID NO: 21851 - DNA, 30 bp, unidentified
  source 1..30: mol_type = unassigned DNA; note = methanogen bacteria
atcgcgggcgggaccgttgccgtcatgatg

SEQ ID NO: 21852 - DNA, 60 bp, unidentified
  source 1..60: mol_type = unassigned DNA; note = methanogen bacteria
ccactgatcggagtgttcacgacggaaccgtcgatggccgagcacagggatgagatggtg

SEQ ID NO: 21853 - DNA, 93 bp, unidentified
  source 1..93: mol_type = unassigned DNA; note = methanogen bacteria
ctaagcttctttaagggttggggaacagatacaaatgcattctttaacaatgtagtgctagaagcatcaaatccgggaggaatattccacata

SEQ ID NO: 21854 - DNA, 72 bp, unidentified
  source 1..72: mol_type = unassigned DNA; note = methanogen bacteria
actctaccgggagcaagtattggtataatgacactgctaacaccacagccaagcacacttaccaatgtaaac

SEQ ID NO: 21855 - DNA, 105 bp, unidentified
  source 1..105: mol_type = unassigned DNA; note = methanogen bacteria
ggatttatgagtacaacaaataacataccaattgaccaactagtgacacagggaacaggactagcattcatagtatttccacaaatcttcaatgcaatgggaata

SEQ ID NO: 21856 - DNA, 168 bp, unidentified
  source 1..168: mol_type = unassigned DNA; note = methanogen bacteria
aaggtcaatttaggactgaatgttgacgaagcattttcattaatgattacaaacactaatttcatggatactatcagtctgactgccagtgatgtccatccgccgttatattacctgattcttaaagtattcatgaaaatcttcgcttttgaaaacatagatagaatt

SEQ ID NO: 21857 - DNA, 99 bp, unidentified
  source 1..99: mol_type = unassigned DNA; note = methanogen bacteria
tctcaaatcaacaagtatcagggcgattactggattcagccactgtatcttcagcagttaattgaaacttactggtatgttttttcttcatacaccaca

SEQ ID NO: 21858 - DNA, 90 bp, unidentified
  source 1..90: mol_type = unassigned DNA; note = methanogen bacteria
agcttcaatttcggatggggaaatgaccctacatcattttttacaagttatgttggaggaagttcaaatttatcatcctcaacaacaata

SEQ ID NO: 21859 - DNA, 72 bp, unidentified
  source 1..72: mol_type = unassigned DNA; note = methanogen bacteria
actttacccggttttcacatgggagtaaccacattgcttaatccgaattggtcagcacttttaaacataaat

SEQ ID NO: 21860 - DNA, 105 bp, unidentified
  source 1..105: mol_type = unassigned DNA; note = methanogen bacteria
ggatatatgtctttaaactcttcaatacctatgaacgaactaattagtgaaggtacaggattgatatttatcatattcccacagatattcaacacaatgggaatg

SEQ ID NO: 21861 - DNA, 132 bp, unidentified
  source 1..132: mol_type = unassigned DNA; note = methanogen bacteria
tacaatccggggattttgacaacacagtcattcagccagctgcaccagattgcctcaggccagttcaacagcagtgtgccgtttttatacactgtaattgtaatgatttttcttaaagtcttccagacccca

SEQ ID NO: 21862 - DNA, 285 bp, unidentified
  source 1..285: mol_type = unassigned DNA; note = methanogen bacteria
tttgcatatcatgttgaagatgcacacacaaacagtgcaggcggagttccgatggtgtggagcgttttaagaggagatgactgggaaggtcaggcatattatctaacagcaaacgcagaccctgttaaagaggcccaaaacaagttctacacacagggcaaaatcaccccgactgaaagctatgaaaagcttacctcagccaattacggcaagggaagctacaatatggtaaattcatatgcgctctatttcaaggaccacactcttacagatacactgtttatg

SEQ ID NO: 21863 - DNA, 30 bp, unidentified
  source 1..30: mol_type = unassigned DNA; note = methanogen bacteria
acatgtcctctaaatgaaaacaggttcctt

SEQ ID NO: 21864 - DNA, 93 bp, unidentified
  source 1..93: mol_type = unassigned DNA; note = methanogen bacteria
acaagtttctcatttggttggggagctgatacagctgcttactttacaaatactgttggaggaagtgcagatttagccaaaggaggaattttc

SEQ ID NO: 21865 - DNA, 69 bp, unidentified
  source 1..69: mol_type = unassigned DNA; note = methanogen bacteria
acattgccaggtcatatgattggaatagatgctttgctacgtccaaagtggagtatgcttttggatatt

SEQ ID NO: 21866 - DNA, 105 bp, unidentified
  source 1..105: mol_type = unassigned DNA; note = methanogen bacteria
ggatatatgtctttaaactcaggaatggctttaagcaaattggttacagaaggtactggacttgtatttattgtattcccaatgattttcaatgtaatgggtaca

SEQ ID NO: 21867 - DNA, 90 bp, unidentified
  source 1..90: mol_type = unassigned DNA; note = methanogen bacteria
agcttaacctttagctggggaactgatactgcagcatattttgtccataatgttggaggaggcgaaaatctctcaaaaataggcaatttc

SEQ ID NO: 21868 - DNA, 69 bp, unidentified
  source 1..69: mol_type = unassigned DNA; note = methanogen bacteria
accctgccaggggcaggtataggaatcaatgctttaataaacccaaattggaatcttttatgggacatt

SEQ ID NO: 21869 - DNA, 105 bp, unidentified
  source 1..105: mol_type = unassigned DNA; note = methanogen bacteria
ggttatatgtccgcaacatcaggaactccactggtcgaattagtcagtgagggaacaggattaatattcgtagtatttccaaaaatattcagcctgatgggattt

SEQ ID NO: 21870 - DNA, 93 bp, unidentified
  source 1..93: mol_type = unassigned DNA; note = methanogen bacteria
tcaagcttcacgttcagctggggaacaaacgcagcaaactacttcgtcagcactgtcgggggaagctcaaacctgtcaaatgcaagtttcctg

SEQ ID NO: 21871 - DNA, 75 bp, unidentified
  source 1..75: mol_type = unassigned DNA; note = methanogen bacteria
ttgacactgcctggtgcgggactgggtgtttcaacactcctgtcacctgactggggtaaattgactgacgtcaac

SEQ ID NO: 21872 - DNA, 105 bp, unidentified
  source 1..105: mol_type = unassigned DNA; note = methanogen bacteria
ggttacatgtcacacatctccggaaccccgatggtacagctgattacggaaggaactggactcatattcatcgtgttcccgatgattttcaacatcatgggtccg

SEQ ID NO: 21873 - DNA, 84 bp, unidentified
  source 1..84: mol_type = unassigned DNA; note = methanogen bacteria
agctttacattcagttggggttctgacaccaccagtttctttgcaaacaccgttggaggaggttctgattttgcaaatgctgga

SEQ ID NO: 21874 - DNA, 72 bp, unidentified
  source 1..72: mol_type = unassigned DNA; note = methanogen bacteria
ttcaccttacctggacatatgattggtatcgatacattgcttaggcctagatggggcatgctttggaatatt

SEQ ID NO: 21875 - DNA, 105 bp, unidentified
  source 1..105: mol_type = unassigned DNA; note = methanogen bacteria
ggattcatgtcattgcattctggaactgcaatgagccatttggtttcagaaggtaccagtcttgtatttgtcgtattcccaatgatcttcaatatcatgggaccg

SEQ ID NO: 21876 - DNA, 132 bp, unidentified
  source 1..132: mol_type = unassigned DNA; note = methanogen bacteria
ttcaatccgggcattgcaacaacagacaccttcaaccagtttcaccagattgcatccggcgcatttacaaactggcatccgtttttccatacgttcattgagatgatgtgtctgagcgtttatccgagcacc

SEQ ID NO: 21877 - DNA, 87 bp, unidentified
  source 1..87: mol_type = unassigned DNA; note = methanogen bacteria
attacattcggctggggaagcgatactgcagcgtactttgtgcaaaacgttggaggcagcgaaaatctcgccaacattggaaatttc

SEQ ID NO: 21878 - DNA, 72 bp, unidentified
  source 1..72: mol_type = unassigned DNA; note = methanogen bacteria
acactgcccggagcaagcatcggaattgatgcgttaatacatccgaattggaatctactttcagacattaac

SEQ ID NO: 21879 - DNA, 105 bp, unidentified
  source 1..105: mol_type = unassigned DNA; note = methanogen bacteria
ggatatatgtcagcgacatcaggaacacctctggtgcaattggtcagtgagggcactgggctgatatttgtcgtatttccaaaaatattcagtttaatgggagtc

SEQ ID NO: 21880 - DNA, 90 bp, unidentified
  source 1..90: mol_type = unassigned DNA; note = methanogen bacteria
agtttcacattcaactggggaactaatacagctgaatacttcgtacagactgtaggtgggagttcaaacctttcaaacgcaagtttcctg

SEQ ID NO: 21881 - DNA, 72 bp, unidentified
  source 1..72: mol_type = unassigned DNA; note = methanogen bacteria
acattgcctggtgcaggcataggtataaatacgctgcttaaacctgactggaacatgcttttggacgttaac

SEQ ID NO: 21882 - DNA, 105 bp, unidentified
  source 1..105: mol_type = unassigned DNA; note = methanogen bacteria
ggatacatgtcggttaccgcaggtactcctatggttcagcttgtaactgaaggaacaggtcttgtatttattgtgttccctatgattttcaacattatgggtcct

SEQ ID NO: 21883 - DNA, 90 bp, unidentified
  source 1..90: mol_type = unassigned DNA; note = methanogen bacteria
agttttacttttagctggggaagcgatactgcagcatattttgttcaaaatgttgggggaagcgaaaatctctcaaaaattggcgaattc

SEQ ID NO: 21884 - DNA, 69 bp, unidentified
  source 1..69: mol_type = unassigned DNA; note = methanogen bacteria
acactgcctggagcaagtattggaataaatgctctaattaatcccaattggaatcttttatgggacatt

SEQ ID NO: 21885 - DNA, 105 bp, unidentified
  source 1..105: mol_type = unassigned DNA; note = methanogen bacteria
ggttatatgtctgcaacatccggaacaccaatggttcaattagttagtgaaggaacaggattaatatttgtagtatttccaaaaatatttagtttaatgggattt

SEQ ID NO: 21886 - DNA, 90 bp, unidentified
  source 1..90: mol_type = unassigned DNA; note = methanogen bacteria
agttttaccttcaattggggaactgatacagcagcttactttgttcaaaatgttggtggaagttccaatctgtccaacgcaggatttttg

SEQ ID NO: 21887 - DNA, 72 bp, unidentified
  source 1..72: mol_type = unassigned DNA; note = methanogen bacteria
acactgcctggtgcaggtttaggtatcaatacattgcttactcccgattggggcagacttgcagatgtaaat

SEQ ID NO: 21888 - DNA, 105 bp, unidentified
  source 1..105: mol_type = unassigned DNA; note = methanogen bacteria
ggttacatgtcagtgacggccggaactccgatgactcagctggtaactgaaggtaccggtttgatttttgttgtatttccaatgattttcaatattatgggtcct

SEQ ID NO: 21889 - DNA, 93 bp, unidentified
  source 1..93: mol_type = unassigned DNA; note = methanogen bacteria
tcaagtttctcttttcagtggggggccgatgcggcgttatacttcgttgacagtgttggaggaagctccaatctcaacaacattggtcttttt

SEQ ID NO: 21890 - DNA, 69 bp, unidentified
  source 1..69: mol_type = unassigned DNA; note = methanogen bacteria
acactgcccggtgcgaatattggtattgaaacactgctgaaaccggactggatgaaactgctcgacatc

SEQ ID NO: 21891 - DNA, 105 bp, unidentified
  source 1..105: mol_type = unassigned DNA; note = methanogen bacteria
ggatacatgtcatttacctcgggaacaccaatgattcaactggtaagtgaaggaacaggattaatattcattgtatttccgatgattttcaatattatgggagtt

SEQ ID NO: 21892 - DNA, 90 bp, unidentified
  source 1..90: mol_type = unassigned DNA; note = methanogen bacteria
agctttaatttttcttggggagcagatccgaccattttctttgcgggctttgttggaggaagctccaatctggctaatgcctggaccttg

SEQ ID NO: 21893 - DNA, 75 bp, unidentified
  source 1..75: mol_type = unassigned DNA; note = methanogen bacteria
ttcaccttacctggacatatgataggtattgatgcattgattaggccaaactggagtacccttttggatattgac

SEQ ID NO: 21894 - DNA, 105 bp, unidentified
  source 1..105: mol_type = unassigned DNA; note = methanogen bacteria
ggattcatgtctctccattcaggaataagattaagtaatctggcaactgagggtactgggcttgtatttaatgtatttccaatgatttttaatgttatgggccct

SEQ ID NO: 21895 - DNA, 90 bp, unidentified
  source 1..90: mol_type = unassigned DNA; note = methanogen bacteria
agtttcacattcagttggggtgctgatacagcagcttacttcacaaccactgtaggtggaagctctgatttggctagtgcaggattcttg

SEQ ID NO: 21896 - DNA, 75 bp, unidentified
  source 1..75: mol_type = unassigned DNA; note = methanogen bacteria
ttgacattgcctggacacatgataggtgtagatgctctcttaaggccgagatggtcaatgcttttggatatcaat

SEQ ID NO: 21897 - DNA, 105 bp, unidentified
  source 1..105: mol_type = unassigned DNA; note = methanogen bacteria
ggttacatgtcactccattcaggtatggcaatgtccaaattggttactgaaggtacagggcttgtattcgttgttttcccaatgatctttaatatcatgggtcca

SEQ ID NO: 21898 - DNA, 93 bp, unidentified
  source 1..93: mol_type = unassigned DNA; note = methanogen bacteria
tcaagtttcacttttcggtggggaaccgacgccgcattatacttcgttgacagtgtaggcggaagctccaatctcaacaacatatgttttctt

SEQ ID NO: 21899 - DNA, 69 bp, unidentified
  source 1..69: mol_type = unassigned DNA; note = methanogen bacteria
acgctgcccggcgcaaatatcggtatcgaaacactgctgaaaccggactggacgaaacttctggacata

SEQ ID NO: 21900 - DNA, 105 bp, unidentified
  source 1..105: mol_type = unassigned DNA; note = methanogen bacteria
ggatacatgtcctttacatccggaacaccaatgatacagctggttagtgaaggaaccggactgatattcattgtattcccgatgattttcaatattatgggaatt

SEQ ID NO: 21901 - DNA, 90 bp, unidentified
  source 1..90: mol_type = unassigned DNA; note = methanogen bacteria
agtttcaatttaggatggggaaatgatccatcatcctttttttcacattatgttggaggaagttcgaatttatcatctcctataacaata

SEQ ID NO: 21902 - DNA, 75 bp, unidentified
  source 1..75: mol_type = unassigned DNA; note = methanogen bacteria
tttactttacctggttctcatttgggaataacaacactacttactccaaactggtctgcactatatgatataaat

SEQ ID NO: 21903 - DNA, 108 bp, unidentified
  source 1..108: mol_type = unassigned DNA; note = methanogen bacteria
ctcggatatatgtcagtgacatcatcaacacctatgaacgaattaattagtgaaggtactggattaatctttattgtatttcctcaaatattcaattcaatggggata

SEQ ID NO: 21904 - DNA, 90 bp, unidentified
  source 1..90: mol_type = unassigned DNA; note = methanogen bacteria
agctttacattcggctggggaagcgataccgcagcatactttattcaaaatgttggaggcagtgaaaatctctccaatatcggcaacttt

SEQ ID NO: 21905 - DNA, 69 bp, unidentified
  source 1..69: mol_type = unassigned DNA; note = methanogen bacteria
acactgcccggagcaagtatcggaacagatgcattattaaatcctgattggaatctccttttcaacatc

SEQ ID NO: 21906 - DNA, 105 bp, unidentified
  source 1..105: mol_type = unassigned DNA; note = methanogen bacteria
ggatacatgtcagcaacatccggaacccctctggtacaattagtcactgagggaactggactgatatttgtggtattccctaaaatattcagtttaatgggaatt

SEQ ID NO: 21907 - DNA, 36 bp, unidentified
  source 1..36: mol_type = unassigned DNA; note = methanogen bacteria
cctgaaatatcttcaaaattaaatttctcagctgaa

SEQ ID NO: 21908 - DNA, 33 bp, unidentified
  source 1..33: mol_type = unassigned DNA; note = methanogen bacteria
ctgcatttgcagtatgttttagatactacagaa

SEQ ID NO: 21909 - DNA, 54 bp, unidentified
  source 1..54: mol_type = unassigned DNA; note = methanogen bacteria
gttggaaatagggaattggggccacagcatcttgattttttgctaatccaatca

SEQ ID NO: 21910 - DNA, 90 bp, unidentified
  source 1..90: mol_type = unassigned DNA; note = methanogen bacteria
agctttactttcagctggggaaacgataccgcaacatactttgttcaaaatgttggaggaggcagaaatcccgcagatatcagcaatttc

SEQ ID NO: 21911 - DNA, 69 bp, unidentified
  source 1..69: mol_type = unassigned DNA; note = methanogen bacteria
acgcttcccggagcgggcatcggaatcaatgctttgattgaacccaactggaatctcctttggaacatc

SEQ ID NO: 21912 - DNA, 105 bp, unidentified
  source 1..105: mol_type = unassigned DNA; note = methanogen bacteria
ggatatatgtcagcaacatccggaatcccccttacccaactggtcagtgaaggaaccggattgattttcgtggtatttccaaaaatattcactttaatgggagtt

SEQ ID NO: 21913 - DNA, 90 bp, unidentified
  source 1..90: mol_type = unassigned DNA; note = methanogen bacteria
agcttcagcttcggctggggaagcgatactgcagcatacttcgtgcataatgttggaggcagcgaaaatctctccaaaatcggcaatttc

SEQ ID NO: 21914 - DNA, 72 bp, unidentified
  source 1..72: mol_type = unassigned DNA; note = methanogen bacteria
acactgcctggagcaagtatcggaattgatgcgttaattaatccgaattggaatctcctttcagacattaac

SEQ ID NO: 21915 - DNA, 105 bp, unidentified
  source 1..105: mol_type = unassigned DNA; note = methanogen bacteria
ggatacatgtcagcgacatcaggaacacctttggcacaattagtcagcgagggcacaggactgatatttgtcgtatttccaaaaatattcagtttaatgggagtt

SEQ ID NO: 21916 - DNA, 93 bp, unidentified
  source 1..93: mol_type = unassigned DNA; note = methanogen bacteria
aacagtttcaatttcggatggggaaatgacccaacagccttttttacaaatcacgttggaggaagttcgaatttagcatcagccaccacactg

SEQ ID NO: 21917 - DNA, 69 bp, unidentified
  source 1..69: mol_type = unassigned DNA; note = methanogen bacteria
acattaccgggatttcatcttggaataaccacattgcttactcccgattggtcggcactttttaatatt

SEQ ID NO: 21918 - DNA, 105 bp, unidentified
  source 1..105: mol_type = unassigned DNA; note = methanogen bacteria
ggatatatgtctttaacatcttcagtgcctatgaatgaattaattagtgaaggcacaggattagtatttatcgtcttccctcagatattcaatacaatgggtgta

SEQ ID NO: 21919 - DNA, 96 bp, unidentified
  source 1..96: mol_type = unassigned DNA; note = methanogen bacteria
actggtataggcatcgttgacagtatttttgaatgtatgtctgcattaactggcagtggaattacaatatatcctgatgtcgaaattctaccatat

SEQ ID NO: 21920 - DNA, 99 bp, unidentified
  source 1..99: mol_type = unassigned DNA; note = methanogen bacteria
ggaatgcctcttttcgattccatttgtaatacattttgcattatttccactggtggtatgagcgtaaaaaatgcgaatattggattttatcaaaatgac

SEQ ID NO: 21921 - DNA, 102 bp, unidentified
  source 1..102: mol_type = unassigned DNA; note = methanogen bacteria
tccaatattgttcctatggacaatctgtttacggtagtttctgccgttacaacaactggggcaagtattcaaagtgcaactgtcatgggtgggtggccacca

SEQ ID NO: 21922 - DNA, 96 bp, unidentified
  source 1..96: mol_type = unassigned DNA; note = methanogen bacteria
tatggtcatgacccttttaattcattgtttttcacaatgtccatgcagggtaacgttggtttggaaataggacaaatttcacaaacaatggaatgg

SEQ ID NO: 21923 - DNA, 87 bp, unidentified
  source 1..87: mol_type = unassigned DNA; note = methanogen bacteria
ttaacattcggttggggaactgacacagcagcatattttgtccaaaatgttggaggaagcgaaaatctcaaaaatattggcagattc

SEQ ID NO: 21924 - DNA, 69 bp, unidentified
  source 1..69: mol_type = unassigned DNA; note = methanogen bacteria
acactgcccggagcaagtataggaatcaatgccctaatcaacccaaactggaatctcctctgggacatt

SEQ ID NO: 21925 - DNA, 105 bp, unidentified
  source 1..105: mol_type = unassigned DNA; note = methanogen bacteria
ggatatatgtcagcaacatcaggaatcccattggttcaattggttagtgaaggaaccggattaatatttgtggtatttccaaaaatattcagtttaatgggtgtt

SEQ ID NO: 21926 - DNA, 36 bp, unidentified
  source 1..36: mol_type = unassigned DNA; note = methanogen bacteria
ccagatatatctaatgatttgaatattccattaaat

SEQ ID NO: 21927 - DNA, 30 bp, unidentified
  source 1..30: mol_type = unassigned DNA; note = methanogen bacteria
tatttacaggttattttaggattagatact

SEQ ID NO: 21928 - DNA, 51 bp, unidentified
  source 1..51: mol_type = unassigned DNA; note = methanogen bacteria
atactaaaaaatgagaatatgaaaagtgatattgtgggtttatcttattct

SEQ ID NO: 21929 - DNA, 99 bp, unidentified
  source 1..99: mol_type = unassigned DNA; note = methanogen bacteria
gtaactgatataggtgtcattgacagtatttttgaatgcatgtctgctttaactggcagtgggattacaatatatcctgatgtggaaattctgccacac

SEQ ID NO: 21930 - DNA, 99 bp, unidentified
  source 1..99: mol_type = unassigned DNA; note = methanogen bacteria
ggaatgccattttttgattccatctgcaatacattctgcattatttccactgggggtatgagcgtcaaaaatgctaatattggattttatcaaaatgat

SEQ ID NO: 21931 - DNA, 102 bp, unidentified
  source 1..102: mol_type = unassigned DNA; note = methanogen bacteria
tccaatattgttcctatggacaatctgttcacggtagtttctgctgtgacaacaacaggggcaagtattcaaagttcaactgtcatgggtggatggccacca

SEQ ID NO: 21932 - DNA, 96 bp, unidentified
  source 1..96: mol_type = unassigned DNA; note = methanogen bacteria
tatggtcatgatcctttaaactcattgtttttcacaatatctatgcagggtaacgtgggtttggagattggacaaatttcacaaacattggaattg

SEQ ID NO: 21933 - DNA, 96 bp, unidentified
  source 1..96: mol_type = unassigned DNA; note = methanogen bacteria
aattacggcctacattacttcggaggatatcagccgatgacggataatgtgacaaacataatttatcatccggcgattacatattcctttaatttc

SEQ ID NO: 21934 - DNA, 72 bp, unidentified
  source 1..72: mol_type = unassigned DNA; note = methanogen bacteria
attacaggtactgttaatgtcactgatattgtagcaataatacgtggcggtcttatagatgctacttctcca

SEQ ID NO: 21935 - DNA, 48 bp, unidentified
  source 1..48: mol_type = unassigned DNA; note = methanogen bacteria
gatgtggtaacaagtggaatttctaattatgtaggaggcttgttacta

SEQ ID NO: 21936 - DNA, 96 bp, unidentified
  source 1..96: mol_type = unassigned DNA; note = methanogen bacteria
aattacggtctacacttctttggcggatacgagccaatggtggataatgtaacgaacatactttatcatccggctattacatattcatttgacttt

SEQ ID NO: 21937 - DNA, 72 bp, unidentified
  source 1..72: mol_type = unassigned DNA; note = methanogen bacteria
atgacgggtactgttaatgttactgacattgtagcaattctgcgtggaggtcttttaaacgttacttctcca

SEQ ID NO: 21938 - DNA, 48 bp, unidentified
  source 1..48: mol_type = unassigned DNA; note = methanogen bacteria
aatgttgtaactagtggaatttctaactatgtaggaggattgttacta

SEQ ID NO: 21939 - DNA, 93 bp, unidentified
  source 1..93: mol_type = unassigned DNA; note = methanogen bacteria
tccagtttcaatttcagttggggagctgattcggcactttattttgtaagaaatgttggcggaagctcaaatctatccaatatgacaagtttc

SEQ ID NO: 21940 - DNA, 69 bp, unidentified
  source 1..69: mol_type = unassigned DNA; note = methanogen bacteria
acacttccgggcgcaggcataggaataaatgcattattgaatcctgattggcaaatgctttttaatgta

SEQ ID NO: 21941 - DNA, 105 bp, unidentified
  source 1..105: mol_type = unassigned DNA; note = methanogen bacteria
ggatacatgtcttatacttccggaacaccaatggttgaacttgttagtgagggtacaggattggtatttgttgtttttccaatgattttcaatattatggggcct

SEQ ID NO: 21942 - DNA, 90 bp, unidentified
  source 1..90: mol_type = unassigned DNA; note = methanogen bacteria
agttttacattccactggggaactgacactgcggcttacttcgttcagtccgtagggggaagttccaatctgtcaaatgcaagcttcctg

SEQ ID NO: 21943 - DNA, 75 bp, unidentified
  source 1..75: mol_type = unassigned DNA; note = methanogen bacteria
ctgacactgcctggcgcgtcactgggtatcagcactctgctgactcctgactggggaatgcttttggacataaac

SEQ ID NO: 21944 - DNA, 108 bp, unidentified
  source 1..108: mol_type = unassigned DNA; note = methanogen bacteria
ttgggatatatgtcaaccacttcaggaacacctatggttcagctggtgactgaaggtacgggacttgtgtttatagtatttccaatgattttcaacattatgggccca

SEQ ID NO: 21945 - DNA, 99 bp, unidentified
  source 1..99: mol_type = unassigned DNA; note = methanogen bacteria
ttggatatgtcattcatagatgccttttttgaaaacatttctgcatggacaggcagtggattgaccatgatcagtgatgtggaatccttgccaatgtct

SEQ ID NO: 21946 - DNA, 99 bp, unidentified
  source 1..99: mol_type = unassigned DNA; note = methanogen bacteria
gggcttcctctttttgatgcagtgaatctgacatttacaacaatatcaactggtggaatgtccataaaaaatgcaaatgttggattctacaacaatgat

SEQ ID NO: 21947 - DNA, 102 bp, unidentified
  source 1..102: mol_type = unassigned DNA; note = methanogen bacteria
acacatatggctcctatgaatgtcgtattccatatcgtttcagcaattacaacaacaggtgcaaatatagcaacttcaagtgaattggcatcatgggcacct

SEQ ID NO: 21948 - DNA, 96 bp, unidentified
  source 1..96: mol_type = unassigned DNA; note = methanogen bacteria
tatacagacaatccaatgaatgcattgtttgatgtcacatccacaataggtaatgtaggtttgagtacaggcgtaattaatgcaagcctagacacc

SEQ ID NO: 21949 - DNA, 93 bp, unidentified
  source 1..93: mol_type = unassigned DNA; note = methanogen bacteria
aacagtttcaatttcggatggggagacaacccgtcttcatttttcataaataatgttggaggaagcacgaatttagctaacgcaacatcattt

SEQ ID NO: 21950 - DNA, 69 bp, unidentified
  source 1..69: mol_type = unassigned DNA; note = methanogen bacteria
acattaccaaattctaatttagggattaaaacattacttaatccgaattggtcagcattattaaatata

SEQ ID NO: 21951 - DNA, 108 bp, unidentified
  source 1..108: mol_type = unassigned DNA; note = methanogen bacteria
ctgggatacatgtcttctgtttccccaatacccatgaatgaactgattagtgaaggcacaggattgatatttattgtatttcctcagatttgtaatgaaatggggatg

SEQ ID NO: 21952 - DNA, 96 bp, unidentified
  source 1..96: mol_type = unassigned DNA; note = methanogen bacteria
aattatggattgcatttcttcggcggttaccagccgattatggataatgttacaaatgtaatttatcatccggcgattacatattcatttgatttc

SEQ ID NO: 21953 - DNA, 72 bp, unidentified
  source 1..72: mol_type = unassigned DNA; note = methanogen bacteria
atgacaggtaccgttaatgtcacagatatcgtgtcaattattcgtggcggtcttttggatgtaacttcacct

SEQ ID NO: 21954 - DNA, 48 bp, unidentified
  source 1..48: mol_type = unassigned DNA; note = methanogen bacteria
gatgttgtaactagtggaatttctaattatgtgggaggcttgttacca

SEQ ID NO: 21955 - DNA, 96 bp, unidentified
  source 1..96: mol_type = unassigned DNA; note = methanogen bacteria
aactatggtttacattattttggaggttatcaacctgtattggaacctataacaaatatgacttatcatccggccattacatattcatttaacttc

SEQ ID NO: 21956 - DNA, 72 bp, unidentified
  source 1..72: mol_type = unassigned DNA; note = methanogen bacteria
ttaacaggtagtgtaaatattactgatattgttttagctatccgtagtggtattgtaaactttaaatctcca

SEQ ID NO: 21957 - DNA, 48 bp, unidentified
  source 1..48: mol_type = unassigned DNA; note = methanogen bacteria
gatgttgttactaatggaatttcacagtatgttggaggtatgatacat

SEQ ID NO: 21958 - DNA, 96 bp, unidentified
  source 1..96: mol_type = unassigned DNA; note = methanogen bacteria
actggtacaggcatcattgactgtgcttttgaatgcatgtcagctttaaccggtagtggaattaccatttatgctgatgtggaggctttgccatac

SEQ ID NO: 21959 - DNA, 99 bp, unidentified
  source 1..99: mol_type = unassigned DNA; note = methanogen bacteria
ggaatgcctattttcgatgcggtctgcaatacattcagcattatctcaaccggaggtatgagcatcaagaacgcaaacataggattttaccagaatgac

SEQ ID NO: 21960 - DNA, 102 bp, unidentified
  source 1..102: mol_type = unassigned DNA; note = methanogen bacteria
tcaaacattcttccaatggatgtcttgttcacagtggtttctgcaattacaacaactggagcaagtattgagagttccactgtaatgggcgcctggccgtca

SEQ ID NO: 21961 - DNA, 96 bp, unidentified
  source 1..96: mol_type = unassigned DNA; note = methanogen bacteria
tactgtcatgaccctttcaattcactgtttttctccatgtccatgcagggtaacatcggtttggagattggacaactgtcacaaacaatggaatgg

SEQ ID NO: 21962 - DNA, 93 bp, unidentified
  source 1..93: mol_type = unassigned DNA; note = methanogen bacteria
aacagtttttcctttagctggggaagtgatactgcggcctattttgtacataatgtcggaggaagtgaaaacctttcaaaaattggcaatttc

SEQ ID NO: 21963 - DNA, 72 bp, unidentified
  source 1..72: mol_type = unassigned DNA; note = methanogen bacteria
accctacccggtgcgatgattggaattaatgcgcttcttaatcccaattggatggcattgactgacatcaac

SEQ ID NO: 21964 - DNA, 105 bp, unidentified
  source 1..105: mol_type = unassigned DNA; note = methanogen bacteria
ggattcatgtcagtaacttcaggaactccaatggttgaactggtcagtgaaggtacgggactgatatttgtcgtatttccaaaaatctttgacatgatgggaatt

SEQ ID NO: 21965 - DNA, 93 bp, unidentified
  source 1..93: mol_type = unassigned DNA; note = methanogen bacteria
aattatggccttcactacttcggtggttatgagcctatgataaatgatgcggtaaagatgatgtatcatccggcaatcacatattcattcaca

SEQ ID NO: 21966 - DNA, 75 bp, unidentified
  source 1..75: mol_type = unassigned DNA; note = methanogen bacteria
ttgacaggtagtgtaaacgttacagatattgcagcagcggttcacaacggtttggttgatgctacttctccagta

SEQ ID NO: 21967 - DNA, 45 bp, unidentified
  source 1..45: mol_type = unassigned DNA; note = methanogen bacteria
gatgtcgttacaaacggaatttctaactttgtaggagggatatta

SEQ ID NO: 21968 - DNA, 93 bp, unidentified
  source 1..93: mol_type = unassigned DNA; note = methanogen bacteria
tccagcttcacgttcagttggggagtggacactgcccactacttcgtaagcactgtcggaggaagctccaacctcagcaatgccaatttcctt

SEQ ID NO: 21969 - DNA, 72 bp, unidentified
  source 1..72: mol_type = unassigned DNA; note = methanogen bacteria
acccttccgggagcaggcattggcgtaaatactcttttgactcctgactggtcaaagcttgccgatgtgaac

SEQ ID NO: 21970 - DNA, 108 bp, unidentified
  source 1..108: mol_type = unassigned DNA; note = methanogen bacteria
ctgggatacatgtcactcaccaacggaacgccgatggttcagctcattaccgaaggtacgggtctcatattcatcgtcttcccgatgatattcaatattatggggccg

SEQ ID NO: 21971 - DNA, 96 bp, unidentified
  source 1..96: mol_type = unassigned DNA; note = methanogen bacteria
aactatggtcttcattactttggtggatatgaacctatgttggacaatgtcacaaatgtgatgttccatccggcaattacctattcattcacattc

SEQ ID NO: 21972 - DNA, 75 bp, unidentified
  source 1..75: mol_type = unassigned DNA; note = methanogen bacteria
atgactggtagcgtaaatattaccgatatcgctgctgctgttcacaatggtttggttgatgttacttctccagta

SEQ ID NO: 21973 - DNA, 48 bp, unidentified
  source 1..48: mol_type = unassigned DNA; note = methanogen bacteria
cctgatgttgtaacaaatggaatttctaactttgtaggagggatatta

SEQ ID NO: 21974 - DNA, 90 bp, unidentified
  source 1..90: mol_type = unassigned DNA; note = methanogen bacteria
agttttacattcagttggggaactgatgctgcagcttacttcactcaaacagtaggtggaagttctaacctgtcaaatgccagcttcctg

SEQ ID NO: 21975 - DNA, 72 bp, unidentified
  source 1..72: mol_type = unassigned DNA; note = methanogen bacteria
accttgcctggtgcagatattggtgtttccacattgctaactccagattggggaaaacttatggatgttaat

SEQ ID NO: 21976 - DNA, 105 bp, unidentified
  source 1..105: mol_type = unassigned DNA; note = methanogen bacteria
ggatatatgtccgcaacttcgggaactcctatggttcagctgattaccgaaggaaccggtttgattttcgttgttttcccaatgattttcaatataatgggtcct

SEQ ID NO: 21977 - DNA, 93 bp, unidentified
  source 1..93: mol_type = unassigned DNA; note = methanogen bacteria
aattacggccttcactacttcggcggttatcagccgatgttggataatgtaaccggagtgatgtatcatccggcaattacatattcattcaca

SEQ ID NO: 21978 - DNA, 72 bp, unidentified
  source 1..72: mol_type = unassigned DNA; note = methanogen bacteria
ttgaccggtagtgtaaatgtctcagatatcgcggcggctgttcacgcaggtttagttaatgctacatctcca

SEQ ID NO: 21979 - DNA, 45 bp, unidentified
  source 1..45: mol_type = unassigned DNA; note = methanogen bacteria
gacgtggttacaagcggaatttctaactttgtaggagggatatta

SEQ ID NO: 21980 - DNA, 30 bp, unidentified
  source 1..30: mol_type = unassigned DNA; note = methanogen bacteria
gtttccgaatgtggggagggaagtttgatt

SEQ ID NO: 21981 - DNA, 45 bp, unidentified
  source 1..45: mol_type = unassigned DNA; note = methanogen bacteria
atggcacttcatattcatgagtttgcacttgatgatgcatttact

SEQ ID NO: 21982 - DNA, 60 bp, unidentified
  source 1..60: mol_type = unassigned DNA; note = methanogen bacteria
tttattgcaggtttatttgtaacagatggtaatatgatggaaatggaagcgattaaatat

SEQ ID NO: 21983 - DNA, 96 bp, unidentified
  source 1..96: mol_type = unassigned DNA; note = methanogen bacteria
aattacggtcttcattactttggaggttatgagccgatactggataatgtaacaaacgtaatgtatcatccggcaattacctattcattcacattc

SEQ ID NO: 21984 - DNA, 72 bp, unidentified
  source 1..72: mol_type = unassigned DNA; note = methanogen bacteria
atgacaggtagtgtaaatgtaactgatatagctgcagctgttcataatggtttaataagctcaacttctcca

SEQ ID NO: 21985 - DNA, 45 bp, unidentified
  source 1..45: mol_type = unassigned DNA; note = methanogen bacteria
gatgtagtaacaaatggaatttctaactttgtaggaggaatatta

SEQ ID NO: 21986 - DNA, 90 bp, unidentified
  source 1..90: mol_type = unassigned DNA; note = methanogen bacteria
agtttttattttggttggggtgctgatacagctttattttttgtaaataatgttggtggaggttccaattttaattcacctgtaactatt

SEQ ID NO: 21987 - DNA, 72 bp, unidentified
  source 1..72: mol_type = unassigned DNA; note = methanogen bacteria
tttacattgcctaactttcatttaggcatatctacactttttaaaccaaattggaatatgcttttggatatt

SEQ ID NO: 21988 - DNA, 105 bp, unidentified
  source 1..105: mol_type = unassigned DNA; note = methanogen bacteria
ggatatatgtctgtaaaatcaggtattcctatagataaattaattacagatggttcaggattaatatttgttgtatttcctcaaatttttaattctatgggattt

SEQ ID NO: 21989 - DNA, 93 bp, unidentified
  source 1..93: mol_type = unassigned DNA; note = methanogen bacteria
aattatggtctccattactttggaggatatgagccaattttggataatgtgactaatgtgatgtatcatccggcgattacatattcattcaca

SEQ ID NO: 21990 - DNA, 72 bp, unidentified
  source 1..72: mol_type = unassigned DNA; note = methanogen bacteria
ttgacaggtagtgttaacgttacagatatagtagccgctgttcacaacggtttggttaatgtaaaatctcca

SEQ ID NO: 21991 - DNA, 45 bp, unidentified
  source 1..45: mol_type = unassigned DNA; note = methanogen bacteria
gatgtggtaacaaatggaatttccaactttgtaggagggatatta

SEQ ID NO: 21992 - DNA, 96 bp, unidentified
  source 1..96: mol_type = unassigned DNA; note = methanogen bacteria
ggatccagttttaactttagctggggaagcgataccgcactttattttataaaaaacgttgggggaagttcaaacttatcaaatatgactcaaatt

SEQ ID NO: 21993 - DNA, 72 bp, unidentified
  source 1..72: mol_type = unassigned DNA; note = methanogen bacteria
acacttcctggggcatatattggaataaatgcactgatgactcctgaatggagcctgctttttaatgtaaac

SEQ ID NO: 21994 - DNA, 108 bp, unidentified
  source 1..108: mol_type = unassigned DNA; note = methanogen bacteria
ctaggatacatgacctatacctcaggaacgccattgactcaactcgtcagcgaaggaaccggactggtatttgtagtgcttccaaggattttcgatgccatgggtcca

SEQ ID NO: 21995 - DNA, 93 bp, unidentified
  source 1..93: mol_type = unassigned DNA; note = methanogen bacteria
tcaagtttcaccttcagctggggaaccgacgccgcttactactttgtgagcaaggtgggcggaagctccaacctcagcaatgcaagcttcctt

SEQ ID NO: 21996 - DNA, 72 bp, unidentified
  source 1..72: mol_type = unassigned DNA; note = methanogen bacteria
accctgcctggcgctgaaatcggaatcaatacgcttctcacccccgactggggaaagctgatggatgttaac

SEQ ID NO: 21997 - DNA, 108 bp, unidentified
  source 1..108: mol_type = unassigned DNA; note = methanogen bacteria
ctgggatatatgtcgtttaccaacggaacgccgatggtccagctcatcaccgaaggcacaggactgatattcatagttttccctatgatattcaacatcatggggcct

SEQ ID NO: 21998 - DNA, 90 bp, unidentified
  source 1..90: mol_type = unassigned DNA; note = methanogen bacteria
agcttcacgctaggatggggaaatgacccgtcatcattctttacaagctatgttggaggaagttcaaatttggcctctgcaaccacgata

SEQ ID NO: 21999 - DNA, 75 bp, unidentified
  source 1..75: mol_type = unassigned DNA; note = methanogen bacteria
ttcacactgcctggattcagcatcggaataaccacattgctcactcccgactggtcggcgcttttgaatgtcaat

SEQ ID NO: 22000 - DNA, 105 bp, unidentified
  source 1..105: mol_type = unassigned DNA; note = methanogen bacteria
gggtacatgtcactgacatcatcaatgccgatgaatgagctggtcagcgaaggcaccggactgatattcatcgtgtttccacagatattcaccacaatggggccc

SEQ ID NO: 22001 - DNA, 93 bp, unidentified
  source 1..93: mol_type = unassigned DNA; note = methanogen bacteria
aattatggccttcacttctttggaggttatgcgccgattgcagataatgtgacaggtttaatcttccatccggcgattacctattcatttaca

SEQ ID NO: 22002 - DNA, 72 bp, unidentified
  source 1..72: mol_type = unassigned DNA; note = methanogen bacteria
atgacaggtagtgtaaatattactgatatagcagcggctgttcacaatggtttggttagctcaacatctcca

SEQ ID NO: 22003 - DNA, 45 bp, unidentified
  source 1..45: mol_type = unassigned DNA; note = methanogen bacteria
gatgtggtaacaaatggaatttctaactttgtaggaggaatatta

SEQ ID NO: 22004 - DNA, 93 bp, unidentified
  source 1..93: mol_type = unassigned DNA; note = methanogen bacteria
tcaagcattaatttcggctggggagcggattccgcattgtattttgttagaaatgttggcggaagctctaatctggccaatatggcaaacttt

SEQ ID NO: 22005 - DNA, 69 bp, unidentified
  source 1..69: mol_type = unassigned DNA; note = methanogen bacteria
acacttcctggagccggtattggaataagcgcacttctaaatccggactggcagatgcttttaaatgtt

SEQ ID NO: 22006 - DNA, 105 bp, unidentified
  source 1..105: mol_type = unassigned DNA; note = methanogen bacteria
ggatatatgtcctatacttcaggaacgccgatggttgagcttgtaagtgaaggtacaggacttgtatttgttgtatttccgatgatttttaatgttatgggattt

SEQ ID NO: 22007 - DNA, 90 bp, unidentified
  source 1..90: mol_type = unassigned DNA; note = methanogen bacteria
agctttacttttgcttggggaacagatacaagtagttattttattaataatgttggaggaagtgccaatttactagatgcaactactttt

SEQ ID NO: 22008 - DNA, 69 bp, unidentified
  source 1..69: mol_type = unassigned DNA; note = methanogen bacteria
acattgcctggacatatgattggtatagatgcattgcttaggcctaaatggcatacccttttagacatt

SEQ ID NO: 22009 - DNA, 105 bp, unidentified
  source 1..105: mol_type = unassigned DNA; note = methanogen bacteria
ggatatatgtctcttcatactggaaccgcattagaacatattgtctcagagggaacagggcttgtatttgttgtattcccaatggtatttaatattatgggtcct

SEQ ID NO: 22010 - DNA, 93 bp, unidentified
  source 1..93: mol_type = unassigned DNA; note = methanogen bacteria
tcaagctttaatttcagttggggagcagatacaaccagcttctttattaacagtgttggaggaagcactaatttagcacgtcctggtactttc

SEQ ID NO: 22011 - DNA, 75 bp, unidentified
  source 1..75: mol_type = unassigned DNA; note = methanogen bacteria
cttacattacctggacatatgattggaatagacactttgcttagacctaaatggtttatgcttttggatgttaat

SEQ ID NO: 22012 - DNA, 108 bp, unidentified
  source 1..108: mol_type = unassigned DNA; note = methanogen bacteria
cttggatatatgtctctccatactggaacagcaatgagcaaactggttacagagggaacaagccttgtatttgttgtattcccaatgatctttaatatcatgggtaca

SEQ ID NO: 22013 - DNA, 93 bp, unidentified
  source 1..93: mol_type = unassigned DNA; note = methanogen bacteria
tcaagcataaatttcaattggggaagcgatgcttcactctattttgtaaatgttgttggaggtagctcaaatctatcaaatatgacaacattt

SEQ ID NO: 22014 - DNA, 72 bp, unidentified
  source 1..72: mol_type = unassigned DNA; note = methanogen bacteria
ttgacccttccaggagcgtatataggtatagaaacattgctgaagcctgactggaatatgctttggaacata

SEQ ID NO: 22015 - DNA, 108 bp, unidentified
  source 1..108: mol_type = unassigned DNA; note = methanogen bacteria
cttggttacatgtcatattcctctggaacacctatgattgaattaatcagtgaaggtacagggctagtatttgtagttttcccaagaatctttaatgttatgggacct

SEQ ID NO: 22016 - DNA, 93 bp, unidentified
  source 1..93: mol_type = unassigned DNA; note = methanogen bacteria
agcagcctgtcattcggctggggtagcgatactgcgctttattttgtcaagaatgttggcggaacagcaaacattgcagacttcgcaaacttc

SEQ ID NO: 22017 - DNA, 75 bp, unidentified
  source 1..75: mol_type = unassigned DNA; note = methanogen bacteria
ttgaccttgcctggagcaggcataggaatagatgcactgattaatccgaattgggctggccttttggacatcaat

SEQ ID NO: 22018 - DNA, 105 bp, unidentified
  source 1..105: mol_type = unassigned DNA; note = methanogen bacteria
ggatacatgaccgcaacatccggaactccattagtgcagcttgtaagcgaaggaaccggactgatattcgtagtatttccaaaaatcttcagtctgatggggcct

SEQ ID NO: 22019 - DNA, 93 bp, unidentified
  source 1..93: mol_type = unassigned DNA; note = methanogen bacteria
aattatggattgcattactttggcggatatgaacctattttggataatgtgacaagtttcgtatatcatcctgcaattacctattcatttact

SEQ ID NO: 22020 - DNA, 75 bp, unidentified
  source 1..75: mol_type = unassigned DNA; note = methanogen bacteria
ttgactggtagtgtaaatgttactgatattgcaacagctgttcataatggtttggttgacgctacatctccagta

SEQ ID NO: 22021 - DNA, 45 bp, unidentified
  source 1..45: mol_type = unassigned DNA; note = methanogen bacteria
gatgttgttgtaaatggaatttctagctttgtaggagggatatta

SEQ ID NO: 22022 - DNA, 93 bp, unidentified
  source 1..93: mol_type = unassigned DNA; note = methanogen bacteria
tccagttttaatttcaactggggaagcgattccgcactttattttgtaaagaatgttggtggaagttcaaatctatccaatatggcgaatttc

SEQ ID NO: 22023 - DNA, 69 bp, unidentified
  source 1..69: mol_type = unassigned DNA; note = methanogen bacteria
acgcttcctggagcgggcataggcataaacgcattgctgaaacccgattggcaaatgcttttgaacgtg

SEQ ID NO: 22024 - DNA, 105 bp, unidentified
  source 1..105: mol_type = unassigned DNA; note = methanogen bacteria
ggatatatgtcctatacctctggaacaccaatggttgaattggtaagcgaaggtactggactggtatttgttgtctttccaatgattttcaatattatgggacct

SEQ ID NO: 22025 - DNA, 90 bp, unidentified
  source 1..90: mol_type = unassigned DNA; note = methanogen bacteria
agctttactttcggatggggaaatgacccgtcatcattttttacaagttatgttggaggaaactcaaatctagcatccgccaccacaata

SEQ ID NO: 22026 - DNA, 72 bp, unidentified
  source 1..72: mol_type = unassigned DNA; note = methanogen bacteria
acattgccaggattccacattggagttgccacattactcactcccgactggtcggcacttttcaatattaat

SEQ ID NO: 22027 - DNA, 105 bp, unidentified
  source 1..105: mol_type = unassigned DNA; note = methanogen bacteria
ggatacatgtcaatatcatcttcaataccaatgaacgaactcatcagcgagggcacgggactgatattcatcatattcccacagatattcaattcaatgggaatg

SEQ ID NO: 22028 - DNA, 93 bp, unidentified
  source 1..93: mol_type = unassigned DNA; note = methanogen bacteria
tcaagctttacattcagttggggagccgatgctgcacattactttgtaaataatgtgggaggaagttcaaacctcagtaacgcaagtttcctt

SEQ ID NO: 22029 - DNA, 72 bp, unidentified
  source 1..72: mol_type = unassigned DNA; note = methanogen bacteria
acccttcccggagctaatgtcggaattgccacacttctcactcccgactggtcgaaactcgtggatgtaaac

SEQ ID NO: 22030 - DNA, 108 bp, unidentified
  source 1..108: mol_type = unassigned DNA; note = methanogen bacteria
cttggatatatgtcggttaccaacggaacacctatggttcagctaattactgaaggaaccggattgatatttattgtgttcccgatgattttcaacatcatggggcca

SEQ ID NO: 22031 - DNA, 90 bp, unidentified
  source 1..90: mol_type = unassigned DNA; note = methanogen bacteria
tacggcctccactactttggaggttatgaaccgatgctggatactgtatctggtgtactatatcatccggcgattacatactcatttacc

SEQ ID NO: 22032 - DNA, 72 bp, unidentified
  source 1..72: mol_type = unassigned DNA; note = methanogen bacteria
cttactggaagtgtgaatgtcacggatattgccgtggctgttcacaacggtctggttgatgtaacttctccg

SEQ ID NO: 22033 - DNA, 45 bp, unidentified
  source 1..45: mol_type = unassigned DNA; note = methanogen bacteria
gacatggctacaggaggaatttccaactttgtaggagggatatta

SEQ ID NO: 22034 - DNA, 96 bp, unidentified
  source 1..96: mol_type = unassigned DNA; note = methanogen bacteria
aactatggtcttcactactttggaggatacgctccgatgctcgataacgtgaccagcgtaatgtatcacccggcaatcacatattcgttcacattc

SEQ ID NO: 22035 - DNA, 75 bp, unidentified
  source 1..75: mol_type = unassigned DNA; note = methanogen bacteria
ttgactggaagcgtgaatgtgacagacattgcagctgcagtgcataacggtttggttgacgctacttctccagtg

SEQ ID NO: 22036 - DNA, 45 bp, unidentified
  source 1..45: mol_type = unassigned DNA; note = methanogen bacteria
gatcttgtcacaagcggaatttctaacttcgtaggagggatatta

SEQ ID NO: 22037 - DNA, 90 bp, unidentified
  source 1..90: mol_type = unassigned DNA; note = methanogen bacteria
agtcttacatttgattggggagctgatgcagcaaactattttgttaatactgttggtggaagttccaatttagcggatgcaagcagtttt

SEQ ID NO: 22038 - DNA, 72 bp, unidentified
  source 1..72: mol_type = unassigned DNA; note = methanogen bacteria
ttcacattacctggtgcaaaaattggaatagatactttgatttatccgaaatgggaaatgctttgggatgtg

SEQ ID NO: 22039 - DNA, 105 bp, unidentified
  source 1..105: mol_type = unassigned DNA; note = methanogen bacteria
ggatatatgtcatttacaagcggaacaccaatgatacagcttattactgaaggaaccggattaatattcattgttttcccaaggattttcaatgtcatgggttta

SEQ ID NO: 22040 - DNA, 93 bp, unidentified
  source 1..93: mol_type = unassigned DNA; note = methanogen bacteria
agcagtttcacattcagctggggaaccgatgccgcccagtacttcgtaagcaatgttggtggaagttccaacctttcaaatgccagtttcttg

SEQ ID NO: 22041 - DNA, 69 bp, unidentified
  source 1..69: mol_type = unassigned DNA; note = methanogen bacteria
accttgcctggtgctggaatcggtatcagcactctgcttacccctgactgggctaagctaatggacatc

SEQ ID NO: 22042 - DNA, 108 bp, unidentified
  source 1..108: mol_type = unassigned DNA; note = methanogen bacteria
ttgggttacatgtcctataccggtggaacaccgatggttcagctgattactgaaggaaccggactgatattcatcgtattcccaatgattttcaacatcatgggacct

SEQ ID NO: 22043 - DNA, 93 bp, unidentified
  source 1..93: mol_type = unassigned DNA; note = methanogen bacteria
tccagctttaccttcagctggggaactgatgcggcacattactttgtaaataatgtgggcggaagctcaaacttaagcaacgcaagtttcctt

SEQ ID NO: 22044 - DNA, 72 bp, unidentified
  source 1..72: mol_type = unassigned DNA; note = methanogen bacteria
ctgagtctgcccggagcaaatatcggaatcggcacgcttctcacccccgactggtcgaaactcctggacgtg

SEQ ID NO: 22045 - DNA, 108 bp, unidentified
  source 1..108: mol_type = unassigned DNA; note = methanogen bacteria
ctgggatacatgtcctttacaaacggaacgccgatggttcagctcatcaccgaaggaaccggtctgatatttgtcgtgtttccgatgattttcaacatcatgggtcca

SEQ ID NO: 22046 - DNA, 90 bp, unidentified
  source 1..90: mol_type = unassigned DNA; note = methanogen bacteria
agttttactttcggatggggaaatgacccttcatcctttttcacaacttatgttggaggaagctcaaaccttacatcctccaccacaata

SEQ ID NO: 22047 - DNA, 72 bp, unidentified
  source 1..72: mol_type = unassigned DNA; note = methanogen bacteria
acattgccgggattcaatattggagttgccacattactcactccagactggtcggcgcttttcaacattaat

SEQ ID NO: 22048 - DNA, 105 bp, unidentified
  source 1..105: mol_type = unassigned DNA; note = methanogen bacteria
ggatacatgtcactgtcatcctcaatacccatgaatgaactcataagcgagggcacgggactgatattcatcatattccctcagatattcaattcaatgggaatg

SEQ ID NO: 22049 - DNA, 30 bp, unidentified
  source 1..30: mol_type = unassigned DNA; note = methanogen bacteria
gccagataccttggaacaactaattttggt

SEQ ID NO: 22050 - DNA, 36 bp, unidentified
  source 1..36: mol_type = unassigned DNA; note = methanogen bacteria
aatatgttaactacaagtgctgttgtaggggaatat

SEQ ID NO: 22051 - DNA, 45 bp, unidentified
  source 1..45: mol_type = unassigned DNA; note = methanogen bacteria
attatattatttatctatggaccagcttatgtgaacactatacca

SEQ ID NO: 22052 - DNA, 93 bp, unidentified
  source 1..93: mol_type = unassigned DNA; note = methanogen bacteria
gctagttttaattttagctggggagcggattctgcactttattttgtaaaaaatgttggtgggagctcaaatttatctaatgtggcaagtttc

SEQ ID NO: 22053 - DNA, 69 bp, unidentified
  source 1..69: mol_type = unassigned DNA; note = methanogen bacteria
acacttcctggtgcgggcataggaataaatgcattattgaaaccggattggcaaatgctttttaatatt

SEQ ID NO: 22054 - DNA, 105 bp, unidentified
  source 1..105: mol_type = unassigned DNA; note = methanogen bacteria
ggatatatgtcttatacttccggaactccaatggttgaattggtaagtgaaggtactggtttggtatttgttgtttttccaatgatttttaatattatgggtcct

SEQ ID NO: 22055 - DNA, 90 bp, unidentified
  source 1..90: mol_type = unassigned DNA; note = methanogen bacteria
agttttacttttagctggggtgcagatgctgcagcttactttacacaaactgttggtggaagttccaatctctcaaatgcgggtttccta

SEQ ID NO: 22056 - DNA, 72 bp, unidentified
  source 1..72: mol_type = unassigned DNA; note = methanogen bacteria
acattacctggtgcaggtattggtatgaatgctcttttatctcctgactggtctaaattaggagatgtaaat

SEQ ID NO: 22057 - DNA, 105 bp, unidentified
  source 1..105: mol_type = unassigned DNA; note = methanogen bacteria
ggttacatgtcatttactgcaggaacaccgatgattgaattaattactgaaggaacaggattaatatttgtggtattcccaatgatatttaacattatgggtcca

SEQ ID NO: 22058 - DNA, 93 bp, unidentified
  source 1..93: mol_type = unassigned DNA; note = methanogen bacteria
aattatggtcttcattactttggaggttatgaaccaatattggataatgtaactggtattacatatcatccagctattgtatattcatttaca

SEQ ID NO: 22059 - DNA, 72 bp, unidentified
  source 1..72: mol_type = unassigned DNA; note = methanogen bacteria
ttaactggtagtgtaaatataactgatattgtatatgcggttcataatggtttagttgacagtaaatctccg

SEQ ID NO: 22060 - DNA, 45 bp, unidentified
  source 1..45: mol_type = unassigned DNA; note = methanogen bacteria
gatgttgtaacaaatggtatttctaactttgttggagggatatta

SEQ ID NO: 22061 - DNA, 90 bp, unidentified
  source 1..90: mol_type = unassigned DNA; note = methanogen bacteria
ggtcttcactactttggaggatacgctccgatattggataatgtgacaagtacggtctatcaccctgcaatcacatattcattcacattc

SEQ ID NO: 22062 - DNA, 72 bp, unidentified
  source 1..72: mol_type = unassigned DNA; note = methanogen bacteria
ttgactggaagtgtaaacataacagatattgcggctgcggtccataacggtttagtggatatgacttctcca

SEQ ID NO: 22063 - DNA, 45 bp, unidentified
  source 1..45: mol_type = unassigned DNA; note = methanogen bacteria
gacgttgttgtatcaggaatcactagctttgtaggaggaatatta

SEQ ID NO: 22064 - DNA, 93 bp, unidentified
  source 1..93: mol_type = unassigned DNA; note = methanogen bacteria
tcaagcttcacattcagctggggaaccgacgttgcgcactactttgtaaacaacgttggaggcagttccaacctttccaatgcaagtttcctt

SEQ ID NO: 22065 - DNA, 75 bp, unidentified
  source 1..75: mol_type = unassigned DNA; note = methanogen bacteria
ctgaccctgcctggtgcgagcatcggtatcaacactctcctgactccggactggacaaaactgacagatgtcaac

SEQ ID NO: 22066 - DNA, 108 bp, unidentified
  source 1..108: mol_type = unassigned DNA; note = methanogen bacteria
ctgggatatatgtcatttacacacggtactccaatggttcagctgattaccgagggtacaggtttggttttcgtcgttttccctatgatatttaacatcatgggtccg

SEQ ID NO: 22067 - DNA, 93 bp, unidentified
  source 1..93: mol_type = unassigned DNA; note = methanogen bacteria
aattacggtcttcactacttcggtggttatgagcctatccttgacaacgtaacaggggtaatgtatcatccggcaattacatattcattcaca

SEQ ID NO: 22068 - DNA, 75 bp, unidentified
  source 1..75: mol_type = unassigned DNA; note = methanogen bacteria
ttgaccggtagtgtaaatgtaacagatattgctgctgcagttcattcaggtttaattgatgccacatctccagta

SEQ ID NO: 22069 - DNA, 45 bp, unidentified
  source 1..45: mol_type = unassigned DNA; note = methanogen bacteria
gatgtcgttacacagggcatttctaactttgtaggagggatatta

SEQ ID NO: 22070 - DNA, 93 bp, unidentified
  source 1..93: mol_type = unassigned DNA; note = methanogen bacteria
agttttaatttcggatggggaaatgacccttcatcattttttacaagttatgttgggggaagttcaaatttggcatcctcagggaccataata

SEQ ID NO: 22071 - DNA, 69 bp, unidentified
  source 1..69: mol_type = unassigned DNA; note = methanogen bacteria
acattaaagggatttaatgttggaataactacactgcttactcctaactggtcggcgctatttaatata

SEQ ID NO: 22072 - DNA, 105 bp, unidentified
  source 1..105: mol_type = unassigned DNA; note = methanogen bacteria
ggatatatgtcattgacctcttcagtgcctatgaatgaattaatcagcgaaggtacaggattaatatttatcatattcccacagatattcaatacaatgggcttg

SEQ ID NO: 22073 - DNA, 93 bp, unidentified
  source 1..93: mol_type = unassigned DNA; note = methanogen bacteria
aattatggtcttcattacttcggaggatatgctccaataatggataatgtaacaaatgtgatgttccatccagcaattacctattcatttaca

SEQ ID NO: 22074 - DNA, 72 bp, unidentified
  source 1..72: mol_type = unassigned DNA; note = methanogen bacteria
ttgactggtagtgtgaatgtcactgatattgccgctgcagttcacaatggtttggttaatgttacttctcca

SEQ ID NO: 22075 - DNA, 45 bp, unidentified
  source 1..45: mol_type = unassigned DNA; note = methanogen bacteria
gatgctgtcacaagtggaatttctaactttgtaggagggatatta

SEQ ID NO: 22076 - DNA, 90 bp, unidentified
  source 1..90: mol_type = unassigned DNA; note = methanogen bacteria
agctttaccttttcatggggaactgacgcggcggcttactttacccagacggtaggaggaagttcaaacctgtcaaatgcaagcttcctg

SEQ ID NO: 22077 - DNA, 72 bp, unidentified
  source 1..72: mol_type = unassigned DNA; note = methanogen bacteria
accctgcctggggcaggcataggaatcagcacactgctcactcctaactgggcaatgcttcttgatgttaac

SEQ ID NO: 22078 - DNA, 105 bp, unidentified
  source 1..105: mol_type = unassigned DNA; note = methanogen bacteria
ggatacatgtcagccacttccggaacgccgatggttcagctggttactgaaggtactggactgatttttatagttttcccgatgattttcaatgtaatgggtccg

SEQ ID NO: 22079 - DNA, 93 bp, unidentified
  source 1..93: mol_type = unassigned DNA; note = methanogen bacteria
tcaagcttcacgttcagttggggagcagacgctgcgcagtactttacaagcactgtcggtggaagttccaacctcagcaatgccagttttctc

SEQ ID NO: 22080 - DNA, 72 bp, unidentified
  source 1..72: mol_type = unassigned DNA; note = methanogen bacteria
accctgcctggtgcagaaattggtatcaacactcttctgacaccggattggacaaagcttatggatgtcaac

SEQ ID NO: 22081 - DNA, 108 bp, unidentified
  source 1..108: mol_type = unassigned DNA; note = methanogen bacteria
ttgggatacatgtcattcaccaacggaacgccgatggttcagctgattaccgaaggaacaggtctgatattcatcgttttcccgatgattttcaatatcatggggcca

SEQ ID NO: 22082 - DNA, 90 bp, unidentified
  source 1..90: mol_type = unassigned DNA; note = methanogen bacteria
agttttactttcggatggggaaatgacccttcatccttttttgcaagttatgttgggggaagctcaaatttggcatctgccactacaata

SEQ ID NO: 22083 - DNA, 69 bp, unidentified
  source 1..69: mol_type = unassigned DNA; note = methanogen bacteria
acactgcccggatttaacattggaataactacattactcactccggactggtcggcacttttcaatatt

SEQ ID NO: 22084 - DNA, 105 bp, unidentified
  source 1..105: mol_type = unassigned DNA; note = methanogen bacteria
ggatacatgtcattaacctcctcaataccaatgaatgaactaatcactgaaggcacgggattaatattcatcatatttccgcaaatattcaatgcaatgggatca

SEQ ID NO: 22085 - DNA, 93 bp, unidentified
  source 1..93: mol_type = unassigned DNA; note = methanogen bacteria
tcaagtttgaattttcaatggggaaatgatgcggcattatactttgttgaaagtgttggaggaagttctaatctgaataatataggttttctt

SEQ ID NO: 22086 - DNA, 69 bp, unidentified
  source 1..69: mol_type = unassigned DNA; note = methanogen bacteria
actcttcccggtgcaaatataggtattgaaacactgctaaaaccagattggacaaaattgctggacatt

SEQ ID NO: 22087 - DNA, 105 bp, unidentified
  source 1..105: mol_type = unassigned DNA; note = methanogen bacteria
ggatatatgtcatttacttccggaacaccaatgattcagcttgtcagtgaaggaacaggattaatattcatcgtatttccaatgattttcaatatcatgggaatt

SEQ ID NO: 22088 - DNA, 93 bp, unidentified
  source 1..93: mol_type = unassigned DNA; note = methanogen bacteria
tcaagcttcacgttcagctggggaacagatgctgctaattactttgtaagcactgtcggaggaagttccaacctaagcaatgcaagtttcctt

SEQ ID NO: 22089 - DNA, 72 bp, unidentified
  source 1..72: mol_type = unassigned DNA; note = methanogen bacteria
acccttcctggtgcaggaataggtataaataccctgctgacacctgactggtcaaagcttactgatgtaaac

SEQ ID NO: 22090 - DNA, 108 bp, unidentified
  source 1..108: mol_type = unassigned DNA; note = methanogen bacteria
cttggatacatgtcattcaccaacggaacaccgatggttcagctcattaccgaaggaacaggtctgatattcatcgttttcccaatgatattcaatatcatgggtccg

SEQ ID NO: 22091 - DNA, 90 bp, unidentified
  source 1..90: mol_type = unassigned DNA; note = methanogen bacteria
agtttcactttcggatggggaaatgaccctgcatccttctttacaagctatgtaggaggaagttcagacctatcatcatccacaacaata

SEQ ID NO: 22092 - DNA, 69 bp, unidentified
  source 1..69: mol_type = unassigned DNA; note = methanogen bacteria
accttgccaggatttcatattggagtaagcacattgcttacccctaattggtcaatgcttttagatata

SEQ ID NO: 22093 - DNA, 108 bp, unidentified
  source 1..108: mol_type = unassigned DNA; note = methanogen bacteria
ggatatatgtcactgcactcttcaataccgatgaatgaactaattagcgaaggtactggattgatattcattgtattcccacagatattcaatacaatgggtggaatg

SEQ ID NO: 22094 - DNA, 96 bp, unidentified
  source 1..96: mol_type = unassigned DNA; note = methanogen bacteria
acaggtataagtattgtagattctatttttgaaagtatgtctgctttaactggaagtggaattacaatatatgctgatgtagaagtcttgcctcat

SEQ ID NO: 22095 - DNA, 99 bp, unidentified
  source 1..99: mol_type = unassigned DNA; note = methanogen bacteria
ggaatgcctgtttttgattcaatttgtaatacgttcagtaccatttcaaccggtggtatgagcgttaaaaatgccaacatcggatattatcaaagtgat

SEQ ID NO: 22096 - DNA, 102 bp, unidentified
  source 1..102: mol_type = unassigned DNA; note = methanogen bacteria
tcaaatattgttccaatggaaattttattccatgtagtttctgccattacaacaacgggggcaagtattcaaagttcgacagtaatgggaacctggcctgcg

SEQ ID NO: 22097 - DNA, 96 bp, unidentified
  source 1..96: mol_type = unassigned DNA; note = methanogen bacteria
tatggtcatgacccttttaattcattgtttttcactatttctatgcagggcaatgtaggtttggaaattgggcaaatgtcacaggtaattgaatgg

SEQ ID NO: 22098 - DNA, 96 bp, unidentified
  source 1..96: mol_type = unassigned DNA; note = methanogen bacteria
aattatggccttcattactttgggggttatgagccgattttggacaatgtgacaaatgcggtttaccatcctgcgattacctattcatttacattc

SEQ ID NO: 22099 - DNA, 72 bp, unidentified
  source 1..72: mol_type = unassigned DNA; note = methanogen bacteria
atgacaggtactgtaaatgtcacagatattgccgctgctgttcacaatggtttaattaatgttacttctcca

SEQ ID NO: 22100 - DNA, 45 bp, unidentified
  source 1..45: mol_type = unassigned DNA; note = methanogen bacteria
gatattgttataaacggaatttctaactttgtaggaggaatatta

SEQ ID NO: 22101 - DNA, 90 bp, unidentified
  source 1..90: mol_type = unassigned DNA; note = methanogen bacteria
agttttacatttagctggggaactgatgccgcagcttacttcactcaaactgtaggtggaagttcaaacctttccaatgcaaacttctta

SEQ ID NO: 22102 - DNA, 75 bp, unidentified
  source 1..75: mol_type = unassigned DNA; note = methanogen bacteria
ttgactttacctggtgctggtattggtattaatactctactaactccaaattggggaatgcttttgaatgtaaat

SEQ ID NO: 22103 - DNA, 108 bp, unidentified
  source 1..108: mol_type = unassigned DNA; note = methanogen bacteria
ttaggttatatgtctgctactgcaggtacgcctatgacccaattgattacagagggtaccggattgatttttgttgttttcccaatgatatttaatattatgggtcct

SEQ ID NO: 22104 - DNA, 93 bp, unidentified
  source 1..93: mol_type = unassigned DNA; note = methanogen bacteria
tccagtgtcacattttcatggggaagtgatgtggcggcatattttgtgcaaaatgttggcggaagttccaatttatcaaatctaggttcttta

SEQ ID NO: 22105 - DNA, 69 bp, unidentified
  source 1..69: mol_type = unassigned DNA; note = methanogen bacteria
acacttcctggagccagcataggtatacaaacattgctgcagccggattggagcaaattgaccgatatt

SEQ ID NO: 22106 - DNA, 105 bp, unidentified
  source 1..105: mol_type = unassigned DNA; note = methanogen bacteria
gggttcatgtcattttcaacaggaactccgatggtccaattggtcagcgaaggcaccggtctgatatttgttgttttcccaatgatctttaatattatgggcatt

SEQ ID NO: 22107 - DNA, 87 bp, unidentified
  source 1..87: mol_type = unassigned DNA; note = methanogen bacteria
tttacatctgcatggggtagcgataccacttcattttttgttaataatgttggtggaagttcaaatttaacatcttccgtaagtatt

SEQ ID NO: 22108 - DNA, 69 bp, unidentified
  source 1..69: mol_type = unassigned DNA; note = methanogen bacteria
tctttacctggatctttttcgggaataagtacactttttactccaaattggaatgcattatatgatatt

SEQ ID NO: 22109 - DNA, 105 bp, unidentified
  source 1..105: mol_type = unassigned DNA; note = methanogen bacteria
ggatacatgtctttaatgtcatccgttccaattaatgaattaatcacaagcggtcctagtttaatatttgttgtttttccacagatttttaatgtaatgggtccg

SEQ ID NO: 22110 - DNA, 93 bp, unidentified
  source 1..93: mol_type = unassigned DNA; note = methanogen bacteria
tccagttttaattttgcatggggaagtgatgtagttggttactttacaaatagtgttggtggaagttctaatttaagtttaacgacttcatta

SEQ ID NO: 22111 - DNA, 72 bp, unidentified
  source 1..72: mol_type = unassigned DNA; note = methanogen bacteria
actctgccaggtgcgaatattggaataaatgcactgttgacgccggactggtataagttactggatgttaat

SEQ ID NO: 22112 - DNA, 105 bp, unidentified
  source 1..105: mol_type = unassigned DNA; note = methanogen bacteria
ggattcatgtctctaaacagtggactgccgatagctcagctggtatctgaaggaacggggttaatatttatggtgcttccaatgattttcaataagatgggtcta

SEQ ID NO: 22113 - DNA, 90 bp, unidentified
  source 1..90: mol_type = unassigned DNA; note = methanogen bacteria
agcattaatttttcatggggaagtgatcctgcactttactttgcaaactctgttggaggaagtcctgatttatcacagataacttcattc

SEQ ID NO: 22114 - DNA, 75 bp, unidentified
  source 1..75: mol_type = unassigned DNA; note = methanogen bacteria
atttctcttcccggatctgccataggtatcaatactctgttaaatcctgactggaattctttaactaaagtcgaa

SEQ ID NO: 22115 - DNA, 105 bp, unidentified
  source 1..105: mol_type = unassigned DNA; note = methanogen bacteria
ggatacatgtctgcaactgcaggaacgcctatagttcatttaataagtgaaggaaccggtctggtctttatagtttttccaatgattttcaatataatgggtcct

SEQ ID NO: 22116 - DNA, 63 bp, unidentified
  source 1..63: mol_type = unassigned DNA; note = methanogen bacteria
atgtcgggattagattcgtttattgacagtttaagtgatagcgtcaatgacggcatagccttc

SEQ ID NO: 22117 - DNA, 75 bp, unidentified
  source 1..75: mol_type = unassigned DNA; note = methanogen bacteria
aacctcggcggagtgccccacgcgttcaagatgatattcgagtatgccttcaccgtgcccagcgctctcggcgga

SEQ ID NO: 22118 - DNA, 90 bp, unidentified
  source 1..90: mol_type = unassigned DNA; note = methanogen bacteria
tcctacgggaacttcgaaagcatcctcgcattcggcgagaaggggtccgtgctcgtccagagcatcgcctcggagagcgttggcaacgac

SEQ ID NO: 22119 - DNA, 90 bp, unidentified
  source 1..90: mol_type = unassigned DNA; note = methanogen bacteria
agttttaatttcggatggggaaatgaccctgcatccttttttacaagttatgtagggggaagctcaaatttagcatcttttacaactata

SEQ ID NO: 22120 - DNA, 72 bp, unidentified
  source 1..72: mol_type = unassigned DNA; note = methanogen bacteria
acattgcctggatttaatatgggaatagccacattgcttaatcctaattggtctgcacttttaaatataaat

SEQ ID NO: 22121 - DNA, 105 bp, unidentified
  source 1..105: mol_type = unassigned DNA; note = methanogen bacteria
ggatatatgtcaatggcatcatcaataccaatggatgaattaattactcaaggtactggattaatatttattgtatttccacagatattcaattcgatgggaata

SEQ ID NO: 22122 - DNA, 42 bp, unidentified
  source 1..42: mol_type = unassigned DNA; note = methanogen bacteria
attgacgttttggagtttgacataatacaagaccaaacagta

SEQ ID NO: 22123 - DNA, 132 bp, unidentified
  source 1..132: mol_type = unassigned DNA; note = methanogen bacteria
tataatccgggcattttgaccgctgcttcattcagccagcttcaccaaattgctacaggcgaatttaccggcgcatatccaatattgcacacaattattgagatgatatgtcttaaaatctatgcatcccct

SEQ ID NO: 22124 - DNA, 225 bp, unidentified
  source 1..225: mol_type = unassigned DNA; note = methanogen bacteria
atatatcaaaccgatgccaacaacaatttccctgcaaatgatgcatttgaagatggagtcaatcttgaaaatgctaaaagtcagtttttcaagggaatcaatgacgttccaaaggaaggctttgaaaatgcaactcaggtaaatgtcaaaacagacaagttcaagtcactgaattcaatcgttgacatgacccgggaaaacatcatccttgacgggcttttaaac

SEQ ID NO: 22125 - DNA, 36 bp, unidentified
  source 1..36: mol_type = unassigned DNA; note = methanogen bacteria
ccaagcatagctgcggaatatggaatgagcaacatc

SEQ ID NO: 22126 - DNA, 36 bp, unidentified
  source 1..36: mol_type = unassigned DNA; note = methanogen bacteria
tatcacttgcagtacatcaagggattggattcacaa

SEQ ID NO: 22127 - DNA, 54 bp, unidentified
  source 1..54: mol_type = unassigned DNA; note = methanogen bacteria
attatgggtgatgttgcgataatagaaccctactatccattgctggttcaaagc

SEQ ID NO: 22128 - DNA, 90 bp, unidentified
  source 1..90: mol_type = unassigned DNA; note = methanogen bacteria
agttttaattttggatggggaactgatactgcagcgtattttgctaatactgttgggggtagttctaatttatcaaattccggtttttta

SEQ ID NO: 22129 - DNA, 72 bp, unidentified
  source 1..72: mol_type = unassigned DNA; note = methanogen bacteria
actcttccgggtgcaggaataggtattgatgcattattaaaacctaattgggcaatgcttttggatgttaat

SEQ ID NO: 22130 - DNA, 105 bp, unidentified
  source 1..105: mol_type = unassigned DNA; note = methanogen bacteria
ggtttcatgtctttaaattcgggcatacctattaatgaattagtaactgagggtacaggtttgattttcattgtttttccaaggatatttaatttaatgggtcct

SEQ ID NO: 22131 - DNA, 90 bp, unidentified
  source 1..90: mol_type = unassigned DNA; note = methanogen bacteria
agtttcacattcggatggggaacggatactgtatcatatttcacccatactgttggtggaagctctaatttagagtcagcaggattttta

SEQ ID NO: 22132 - DNA, 75 bp, unidentified
  source 1..75: mol_type = unassigned DNA; note = methanogen bacteria
ttaacattgcctggtgccggaataggtatcaatactctgttgacacctgactggtcaaaattacttgatgttaac

SEQ ID NO: 22133 - DNA, 105 bp, unidentified
  source 1..105: mol_type = unassigned DNA; note = methanogen bacteria
ggatatatgtcacatactgctggaacaccgatgatacagctaattactgaaggtacaggtcttatattcattgttttccctatgatattcaatattatggggcca

SEQ ID NO: 22134 - DNA, 156 bp, unidentified
  source 1..156: mol_type = unassigned DNA; note = methanogen bacteria
ctttcaaacatgatgatacatgttgatgaatattggactgtatcactcataaatctaccattcattgaaggaatgagagttgcagcatgtgatgtgcatcctccactccattatctgattatatatgctttatctccaataacacataacagccta

SEQ ID NO: 22135 - DNA, 102 bp, unidentified
  source 1..102: mol_type = unassigned DNA; note = methanogen bacteria
agacaaatcggcacacagatgaatgtcacatacaaggatatgactttagccgacattttcaattacattacaagctttgcaatcaacaatcccgatttcact

SEQ ID NO: 22136 - DNA, 84 bp, unidentified
  source 1..84: mol_type = unassigned DNA; note = methanogen bacteria
agtttcaatttcggatggggaaatgatcccgcatccttttttacaaattatgttggaggaagttcaaatttaacctctgcaaca

SEQ ID NO: 22137 - DNA, 75 bp, unidentified
  source 1..75: mol_type = unassigned DNA; note = methanogen bacteria
tttacattaccaggatttaatacaggaataacaacactgcttactcccgattggtctgcactttttaatataaat

SEQ ID NO: 22138 - DNA, 105 bp, unidentified
  source 1..105: mol_type = unassigned DNA; note = methanogen bacteria
ggatacatgtcattaacatcttcaatacctatgaatgaattaatcagtgaaggtaccggattaatctttattgtatttccccacatattcaatacaatgggcgtt

SEQ ID NO: 22139 - DNA, 87 bp, unidentified
  source 1..87: mol_type = unassigned DNA; note = methanogen bacteria
aatcggtgtgatggacaaggagattgtataaaaaattgtcctagtgaagctatacgatttgtagataacaaatcctttagttgcatg

SEQ ID NO: 22140 - DNA, 48 bp, unidentified
  source 1..48: mol_type = unassigned DNA; note = methanogen bacteria
ccaaatcacgctatatttaagaataagtatggaggctatgtagtagat

SEQ ID NO: 22141 - DNA, 45 bp, unidentified
  source 1..45: mol_type = unassigned DNA; note = methanogen bacteria
aaattcacatgtcctatagaaagtattcatcttgataatggtgtt

SEQ ID NO: 22142 - DNA, 138 bp, unidentified
  source 1..138: mol_type = unassigned DNA; note = methanogen bacteria
gtaaaatgtggaagatgtgcatattactgtccaacccgtgcaattgaagttataattcaagatgaaggatattgtgtaggatgtaaggtttgtgaagacctttgtccaactggcgctttaaaggatggccaatatgat

SEQ ID NO: 22143 - DNA, 102 bp, unidentified
  source 1..102: mol_type = unassigned DNA; note = methanogen bacteria
attagcgacgcattatctgtcaaggactttgagattgtccgcagcattaaagacgacacattatattcaaatgctgaaggaagcatagtcagttgcctaaac

SEQ ID NO: 22144 - DNA, 66 bp, unidentified
  source 1..66: mol_type = unassigned DNA; note = methanogen bacteria
ggattatgtgtagatacatttgacagtcctgcaatggtgcgcaagttaaatgccttaaggtatgac

SEQ ID NO: 22145 - DNA, 36 bp, unidentified
  source 1..36: mol_type = unassigned DNA; note = methanogen bacteria
ttaactgaaaatgaagacaacaagctattcggatat

SEQ ID NO: 22146 - DNA, 42 bp, unidentified
  source 1..42: mol_type = unassigned DNA; note = methanogen bacteria
ggaaaatgtgttgaagtatgtaatgaggatgcaagaaacttt

SEQ ID NO: 22147 - DNA, 75 bp, unidentified
  source 1..75: mol_type = unassigned DNA; note = methanogen bacteria
gcagaattatgtcctaaagaggctatcacacttaagaaaggcaagatcaatgttgatttggatgaatgtatcatg

SEQ ID NO: 22148 - DNA, 63 bp, unidentified
  source 1..63: mol_type = unassigned DNA; note = methanogen bacteria
gaaacctgtggaatacactgtcctaaggatgcaatacctaagaagtcttctgtcaaatatgaa

SEQ ID NO: 22149 - DNA, 30 bp, unidentified
  source 1..30: mol_type = unassigned DNA; note = methanogen bacteria
aactacattgatgaaaacctatgtgtaaaa

SEQ ID NO: 22150 - DNA, 33 bp, unidentified
  source 1..33: mol_type = unassigned DNA; note = methanogen bacteria
cctgaagatgcaatttacacaatagatatttca

SEQ ID NO: 22151 - DNA, 93 bp, unidentified
  source 1..93: mol_type = unassigned DNA; note = methanogen bacteria
tccagtttcacattttcatggggcaacgatgtagcattatattttgttaaaaatgttggtggaagttccaatttgtcaaatttaagttctttt

SEQ ID NO: 22152 - DNA, 69 bp, unidentified
  source 1..69: mol_type = unassigned DNA; note = methanogen bacteria
acactgcctggagctaacataggtatacaaacattgctgcaacctgactggagcaaattaactgatatt

SEQ ID NO: 22153 - DNA, 105 bp, unidentified
  source 1..105: mol_type = unassigned DNA; note = methanogen bacteria
ggattcatgtcattttcatcaggaactccgatggtccaactggttagtgaaggtacaggattgatatttgttgttttcccaatgatttttaatattatgggtgca

SEQ ID NO: 22154 - DNA, 102 bp, unidentified
  source 1..102: mol_type = unassigned DNA; note = methanogen bacteria
atgtatttaacaactaataagtgtgatggacaaggggattgtataagaaattgtccaagtgaagcaatacgctttgttgataataaggcttttagctgtatg

SEQ ID NO: 22155 - DNA, 141 bp, unidentified
  source 1..141: mol_type = unassigned DNA; note = methanogen bacteria
gaagcttgtccgaatcatgctatattcaagaataaatacggaggatatgtggttgatagggcaaaatgtaatggttgtggtgtttgccagttcacttgccctatagaaagcattcatcttgatgatggtatagttaaaggt

SEQ ID NO: 22156 - DNA, 144 bp, unidentified
  source 1..144: mol_type = unassigned DNA; note = methanogen bacteria
gtgaaatgtggaagatgtgcttactactgtcctaccagatcaattgaagtgattatccaggatgaaggatactgtgtaggctgtaaggtatgtgaagatgtctgtcctacaggtgcattgaaagacggcgagtatgataagagc

SEQ ID NO: 22157 - DNA, 102 bp, unidentified
  source 1..102: mol_type = unassigned DNA; note = methanogen bacteria
atcaatgaggcattatgcgtagatgactttaagattaaaagaagcattaaggatgacaccttgtattcaaatgttgaaggaagcattgtaagttgcctcaat

SEQ ID NO: 22158 - DNA, 135 bp, unidentified
  source 1..135: mol_type = unassigned DNA; note = methanogen bacteria
aactgtcctgtttcatcattaacagaaagtgaagacaataagctctttggatactgcgtatcctgtggaaaatgtgtaaatgaatgtaaggaagatgcaagaaacttccaagtaatctcttgggatggagaagtt

SEQ ID NO: 22159 - DNA, 204 bp, unidentified
  source 1..204: mol_type = unassigned DNA; note = methanogen bacteria
ggtatttgtgctgaactttgtccagaagatgcaataacccttcaaagaggggcaatcaatgttgatttggataaatgtatcatgtgtgaaacctgtgcaattcactgtcctaaggacgcaattccaaaaacaacaagcgtcaagtatgaaatctctggaggattcaattacattgacgataacttgtgtgtaaaatgcggatta

SEQ ID NO: 22160 - DNA, 45 bp, unidentified
  source 1..45: mol_type = unassigned DNA; note = methanogen bacteria
gcgattaatgcagttgaaattccaagtgatgaagtcaatctcgga

SEQ ID NO: 22161 - DNA, 153 bp, unidentified
  source 1..153: mol_type = unassigned DNA; note = methanogen bacteria
ttaacccaagtgattacaaacattaatgaatttttcacattgacacttatcaattttccaataagtgacatattgcatatacttggtggagaaacaaacccgccactatatttcctgcttgtgaaaggattaagcaagctagcaaatgacttc

SEQ ID NO: 22162 - DNA, 87 bp, unidentified
  source 1..87: mol_type = unassigned DNA; note = methanogen bacteria
aagcttctacaatccatgaatcctcttggcaatttgacaacagattcaattatccaatcctttgctcattttgcatacagcggagac

SEQ ID NO: 22163 - DNA, 105 bp, unidentified
  source 1..105: mol_type = unassigned DNA; note = methanogen bacteria
atgtatttaacaactaataagtgtgatggacaaggagattgtataaggaattgtccaagtgaagcaatacgctttatagataatacatcttttagctgtatgtgt

SEQ ID NO: 22164 - DNA, 144 bp, unidentified
  source 1..144: mol_type = unassigned DNA; note = methanogen bacteria
gaagcttgtccaaatcatgcaatatttgagaataaatacggaggatatgttgtagatagggcaaaatgtaatggatgtggtgtttgtgaattcacttgccctatagaaagcattcatcttgataatggaattgttaagggtatc

SEQ ID NO: 22165 - DNA, 162 bp, unidentified
  source 1..162: mol_type = unassigned DNA; note = methanogen bacteria
gagaagtgtgtaaaatgtggaagatgtgcatattactgtcctacaagatccattgaagtcattattcaggatgaaggatattgtgtaggatgtaaggtatgtgaagatttatgccctaccggtgccctaaaagatggagaatacgacaaaagcctttgtact

SEQ ID NO: 22166 - DNA, 150 bp, unidentified
  source 1..150: mol_type = unassigned DNA; note = methanogen bacteria
gaaaactgtgtaaatgatgcattgagcgtcaatgactttaagattattcgaaacattaaggatgacacattatattccaatgttgaaggaagcattgtcagctgtttaaactgcggattatgtaaggaaacatttgacagtcctgcattg

SEQ ID NO: 22167 - DNA, 72 bp, unidentified
  source 1..72: mol_type = unassigned DNA; note = methanogen bacteria
gacatatgtcctgaggaagcaatttatacagttgagatttcaaatgatgaagcaaatctcggaacaaagaat

SEQ ID NO: 22168 - DNA, 45 bp, unidentified
  source 1..45: mol_type = unassigned DNA; note = methanogen bacteria
gataaatgtatttattgtggagcttgtatgaacatctgcccatct

SEQ ID NO: 22169 - DNA, 30 bp, unidentified
  source 1..30: mol_type = unassigned DNA; note = methanogen bacteria
gctagatatcttggaacctatgactatggt

SEQ ID NO: 22170 - DNA, 30 bp, unidentified
  source 1..30: mol_type = unassigned DNA; note = methanogen bacteria
ctatcaggaagctatgcagtgggattattc

SEQ ID NO: 22171 - DNA, 51 bp, unidentified
  source 1..51: mol_type = unassigned DNA; note = methanogen bacteria
aaggacattatatacataatctatggtagtgagtatgtggtaggagctaat

SEQ ID NO: 22172 - DNA, 39 bp, unidentified
  source 1..39: mol_type = unassigned DNA; note = methanogen bacteria
tatgaccttatagctatcgatgactcaaatttaacttta

SEQ ID NO: 22173 - DNA, 93 bp, unidentified
  source 1..93: mol_type = unassigned DNA; note = methanogen bacteria
tccagtttcacattttcatggggcaatgatgtggcgttgtatttcgtgcaaaatgtcggtggaagttccaatctatccaatttaagttcattt

SEQ ID NO: 22174 - DNA, 69 bp, unidentified
  source 1..69: mol_type = unassigned DNA; note = methanogen bacteria
acattacccggagccaacataggcatacaaacattgctgcaacctgattggagcaaattaaccgatatc

SEQ ID NO: 22175 - DNA, 102 bp, unidentified
  source 1..102: mol_type = unassigned DNA; note = methanogen bacteria
gggtttatgtcattttcaacaggaactcctatggttcagctaattagtgaaggtacgggattaatatttgtagttttcccaatgatttttaatattatgggt

SEQ ID NO: 22176 - DNA, 129 bp, unidentified
  source 1..129: mol_type = unassigned DNA; note = methanogen bacteria
aatccaggaatagctacccatgacacattcaatcagcttcatcaaatcgcttccggacactttacgaactggcaccctttctttcataccttcatcagcatgctatgcctgaatgtctatccaaacaca

SEQ ID NO: 22177 - DNA, 93 bp, unidentified
  source 1..93: mol_type = unassigned DNA; note = methanogen bacteria
tctagcttctcattttcatggggcaatgatgtggcattgtattttgtgaaaaatgttggtggaagctccaatttatcaaatttaggttctttt

SEQ ID NO: 22178 - DNA, 69 bp, unidentified
  source 1..69: mol_type = unassigned DNA; note = methanogen bacteria
acgcttcccggagccaacataggcatacagacattgctgcagccggattggagcaagctgtttgatatt

SEQ ID NO: 22179 - DNA, 105 bp, unidentified
  source 1..105: mol_type = unassigned DNA; note = methanogen bacteria
ggtttcatgtcattttcaacaggtactccaatggtacaattggtcagtgaaggtacaggattgatatttgtggttttcccaatgatttttaatatcatgggtttt

SEQ ID NO: 22180 - DNA, 45 bp, unidentified
  source 1..45: mol_type = unassigned DNA; note = methanogen bacteria
ggcagatctgcaagagttgtagatagtgtggcttctggagaatat

SEQ ID NO: 22181 - DNA, 66 bp, unidentified
  source 1..66: mol_type = unassigned DNA; note = methanogen bacteria
atgaaacaattaaggaacattcttggattccactcgttggttgctgatttgaatactgatgtgggc

SEQ ID NO: 22182 - DNA, 168 bp, unidentified
  source 1..168: mol_type = unassigned DNA; note = methanogen bacteria
tttatgggtggtatcagtcacgctgttgatgtatatgcgcctgatcactcaggagacccacaatacgaacaaggaatttatgactacttccaaaaagtgggtagtataaatgatatcaaatcagacaatcttgttatgaatattgtcgacagcattcttcaggatgct

SEQ ID NO: 22183 - DNA, 60 bp, unidentified
  source 1..60: mol_type = unassigned DNA; note = methanogen bacteria
atatttgccaatagtgcccaaaataaaaccgtcgttaataaggccagtgataacaaaaca

SEQ ID NO: 22184 - DNA, 291 bp, unidentified
  source 1..291: mol_type = unassigned DNA; note = methanogen bacteria
aacgttatattaagtttaaccgaagttaccaatgtcactgaagcagttgttggtgaatcaatcaaatacacaatcaccatacacaatagcggattgtcagatgcaactgacattaaagtttggaatattctacctgctggcgtcaaatatgtatccggtgccgatacttacaatgaaaccactcgcaatgccacctggaccattgataaaattgaaacgggaaaatccgccagatttgttttagtaattaaggttatccaagcaggaaaattaaacaataccttcttcgcc

SEQ ID NO: 22185 - DNA, 297 bp, unidentified
  source 1..297: mol_type = unassigned DNA; note = methanogen bacteria
aaaacagttgtcaatagaaccagcgacaatataactgtcattcctaatgttgtattgagtgtggataagtctgttgatgtttcttatgttgttgtgggtgatttggtcaaatatattattattgtgcataatgatggtttgtctgatgctactgatgttaaggtttgggatgttttacctgttggtgttatgtatgtgtctggtgctgatgcttatgatgaagctacacataatgctacttggaccattgctaaaattgaagcaggtaaatctgccagtgttgttcttgttgtgaat

SEQ ID NO: 22186 - DNA, 222 bp, unidentified
  source 1..222: mol_type = unassigned DNA; note = methanogen bacteria
agaggaaatgatagtgcatttgcttattgttgtgagaatacgactgttgttaatggaacatgtggtgttgttattatttggaatttggaatatagtggtttgactgatgctaatgatcagtttaagctttctgcagttgattttgcttttggtcaatctaattctatttcccatagaaaaaataataatccatctaatgaaacttttaatttcattgtaaaa

SEQ ID NO: 22187 - DNA, 93 bp, unidentified
  source 1..93: mol_type = unassigned DNA; note = methanogen bacteria
aacagtattaatttttcatggggaacagacacggcagcatattttgtgcagaatgtcgggggaggttcaaacctttcaaaaataggaaatttc

SEQ ID NO: 22188 - DNA, 72 bp, unidentified
  source 1..72: mol_type = unassigned DNA; note = methanogen bacteria
acactgcccggtgcaaatataggaatcgatgcattacttaaacccaattggaatgctcttttggatgttaac

SEQ ID NO: 22189 - DNA, 105 bp, unidentified
  source 1..105: mol_type = unassigned DNA; note = methanogen bacteria
ggatatatgacagcaacttccggaacaccactggttgaaatcgttagcgaaggtacgggattgatttttgtcgtatttccaagaatttttgatataatgggactg

SEQ ID NO: 22190 - DNA, 93 bp, unidentified
  source 1..93: mol_type = unassigned DNA; note = methanogen bacteria
aatagtttcacatttaattggggaagtgaccctgcagcttattttgtgcacaatgttggaggaagcgataatctttcaaacatatggaatttc

SEQ ID NO: 22191 - DNA, 72 bp, unidentified
  source 1..72: mol_type = unassigned DNA; note = methanogen bacteria
acattacctggtgcaataattggaattaatgcactgcttaatcctaattggaatgctcttttagatgttaac

SEQ ID NO: 22192 - DNA, 105 bp, unidentified
  source 1..105: mol_type = unassigned DNA; note = methanogen bacteria
ggttatatgagcgcaacatcaggaacacctctggcggaaattgttagtgaaggtacaggattgatatttgtggtatttccaaaaatttttgatttgatgggattt

SEQ ID NO: 22193 - DNA, 33 bp, unidentified
  source 1..33: mol_type = unassigned DNA; note = methanogen bacteria
gtcatgggcggctggacactcaccgacatggaa

SEQ ID NO: 22194 - DNA, 69 bp, unidentified
  source 1..69: mol_type = unassigned DNA; note = methanogen bacteria
ggacatttcgaattttccaacatcaccgaggcatggagattccccgtcgacggaagggacgacatcgca

SEQ ID NO: 22195 - DNA, 81 bp, unidentified
  source 1..81: mol_type = unassigned DNA; note = methanogen bacteria
tacggtgagatcggtcaggcaggtgtcgtgggcaacgactaccactctctctaccccatcgccatcgcggcgttcggagac

SEQ ID NO: 22196 - DNA, 33 bp, unidentified
  source 1..33: mol_type = unassigned DNA; note = methanogen bacteria
cctagtgaagcaatacgctttgttgataacaag

SEQ ID NO: 22197 - DNA, 69 bp, unidentified
  source 1..69: mol_type = unassigned DNA; note = methanogen bacteria
tattactgtcctacaagagcgatagaagtgatcattcaggatgatggatactgtgtaggatgtaaggta

SEQ ID NO: 22198 - DNA, 42 bp, unidentified
  source 1..42: mol_type = unassigned DNA; note = methanogen bacteria
gaagatgtctgccctacaggtgctctaaaagatggcctctat

SEQ ID NO: 22199 - DNA, 30 bp, unidentified
  source 1..30: mol_type = unassigned DNA; note = methanogen bacteria
aacgtttgtaaagaggatgcaagaaacttc

SEQ ID NO: 22200 - DNA, 48 bp, unidentified
  source 1..48: mol_type = unassigned DNA; note = methanogen bacteria
gtagatgcaatcagtcttaaaagaggttcaatcaatgttgacttggat

SEQ ID NO: 22201 - DNA, 36 bp, unidentified
  source 1..36: mol_type = unassigned DNA; note = methanogen bacteria
gtcatgggcggatgggagctcagcgacatgcagaac

SEQ ID NO: 22202 - DNA, 69 bp, unidentified
  source 1..69: mol_type = unassigned DNA; note = methanogen bacteria
gggaacttccagttctccaacatctccaacgcctggcacttccccgtcgtcggatactccgacatgatg

SEQ ID NO: 22203 - DNA, 84 bp, unidentified
  source 1..84: mol_type = unassigned DNA; note = methanogen bacteria
tacggtgagatcggtcagggcggactcgaggctgctggataccactccctccaccccatcgccatcgatgcgttcggagacgtc

SEQ ID NO: 22204 - DNA, 36 bp, unidentified
  source 1..36: mol_type = unassigned DNA; note = methanogen bacteria
gtcatgggcggatgggaactctctgatatgcagaat

SEQ ID NO: 22205 - DNA, 69 bp, unidentified
  source 1..69: mol_type = unassigned DNA; note = methanogen bacteria
ggaaacttccagttctccaacatctccaacgcatggcacttccccgtcgtcggatactctgacatgatg

SEQ ID NO: 22206 - DNA, 84 bp, unidentified
  source 1..84: mol_type = unassigned DNA; note = methanogen bacteria
tacggagagattggacagggcggactcgaggctgcaggataccactccctccacccgatcgccatcgatgctttcggtgaggtc

SEQ ID NO: 22207 - DNA, 30 bp, unidentified
  source 1..30: mol_type = unassigned DNA; note = methanogen bacteria
gcaagatacttgggcactactaatttcggt

SEQ ID NO: 22208 - DNA, 36 bp, unidentified
  source 1..36: mol_type = unassigned DNA; note = methanogen bacteria
aacatgctgacgaccagtgcagtagtaggagaatat

SEQ ID NO: 22209 - DNA, 45 bp, unidentified
  source 1..45: mol_type = unassigned DNA; note = methanogen bacteria
ataataatgttcatgtatggttctgcatatgtcaatacagtccca

SEQ ID NO: 22210 - DNA, 30 bp, unidentified
  source 1..30: mol_type = unassigned DNA; note = methanogen bacteria
gcaagatatttgggtacttttaattttggt

SEQ ID NO: 22211 - DNA, 33 bp, unidentified
  source 1..33: mol_type = unassigned DNA; note = methanogen bacteria
tttatgtctggaagtgtggccgttggacttttc

SEQ ID NO: 22212 - DNA, 45 bp, unidentified
  source 1..45: mol_type = unassigned DNA; note = methanogen bacteria
gacataatcaatatcatatttggtgccgaatttttggatgccggt

SEQ ID NO: 22213 - DNA, 30 bp, unidentified
  source 1..30: mol_type = unassigned DNA; note = methanogen bacteria
acaaaatcatttacaactgcagaatacggc

SEQ ID NO: 22214 - DNA, 39 bp, unidentified
  source 1..39: mol_type = unassigned DNA; note = methanogen bacteria
ggaccgatagcagatgcgctttttaatggaagcatgcag

SEQ ID NO: 22215 - DNA, 42 bp, unidentified
  source 1..42: mol_type = unassigned DNA; note = methanogen bacteria
ctgtatgtcataacaactcctgaaatagcacttggaggttat

SEQ ID NO: 22216 - DNA, 144 bp, unidentified
  source 1..144: mol_type = unassigned DNA; note = methanogen bacteria
atggcatttgtgggtgacgatattcattatgcgaaaattttatcaaatcaatcattgagcagttttctaacttttagatactatgaatggtccagtagactaattatagactgcattacagtaattttagctaaagaaaactac

SEQ ID NO: 22217 - DNA, 123 bp, unidentified
  source 1..123: mol_type = unassigned DNA; note = methanogen bacteria
gctccaggcaattctaaaagagtcattgctgaaactgcaagattttatgcagaatatgtaaacttcggaataattgaaaaactatacttgggtacaatcccaacaattggaattctattaaaa

SEQ ID NO: 22218 - DNA, 153 bp, unidentified
  source 1..153: mol_type = unassigned DNA; note = methanogen bacteria
attgacattacaagtattccaacatatttaaaaatcggattaatgcataaccctattgttatatcagtattttccacagtggattcaattaccaaaagtatgcccctaataaacgataccatacgcttattaacatataaaggactgccaaac

SEQ ID NO: 22219 - DNA, 30 bp, unidentified
  source 1..30: mol_type = unassigned DNA; note = methanogen bacteria
tcaccaacagtctttgcatcaggatctaga

SEQ ID NO: 22220 - DNA, 132 bp, unidentified
  source 1..132: mol_type = unassigned DNA; note = methanogen bacteria
tttaatccagggtttttaacttttgattcttataatcaaatgcatcaaattgctacaaattcttataataattggcatccttttttccatacatttattgaaatgctttgtcttaaattatacgctagtcct

SEQ ID NO: 22221 - DNA, 132 bp, unidentified
  source 1..132: mol_type = unassigned DNA; note = methanogen bacteria
tttaatccaggctttttagcttatgattcttataatcaattgcatcaaattgctacaaattcttataataattggcatccttttttccatacatttattgaaatgctttgtcttaaagtatatgcaagtcct

SEQ ID NO: 22222 - DNA, 144 bp, unidentified
  source 1..144: mol_type = unassigned DNA; note = methanogen bacteria
atgtcatttataggtgatgatatttggtatgcaaaggttttatcaaatcaaccattggtcaatttcctatcttttagatactatgaatggtccagtagactacttatagactgcattacagtaattttagctaaagaaaactac

SEQ ID NO: 22223 - DNA, 120 bp, unidentified
  source 1..120: mol_type = unassigned DNA; note = methanogen bacteria
tctccaggtaatgataaaagagttattgccgaaactgcaagattttatgtagaatatgcaaacttcggaataattgaaaaactatacttgggtacaatcccaacaattggaattctatta

SEQ ID NO: 22224 - DNA, 153 bp, unidentified
  source 1..153: mol_type = unassigned DNA; note = methanogen bacteria
attgatattacaagcattccaaactatttaaaaattggattaatgcataaccctattgttgtatcagcattttctacagtggattcaattaccaaaagtatgccactaataaacgataccatccacttattcacatataaaggactgccaaat

SEQ ID NO: 22225 - DNA, 30 bp, unidentified
  source 1..30: mol_type = unassigned DNA; note = methanogen bacteria
tcaccaacagtttttgcatcagggtccaga

SEQ ID NO: 22226 - DNA, 129 bp, unidentified
  source 1..129: mol_type = unassigned DNA; note = methanogen bacteria
aatccgggaatagccacaattgatacattcaatcagctgcatcagattgcttccggtcattttactaattggcatcctttttttcatacattcattgaaatgctgtgtctgaggatatatccaagcaca

SEQ ID NO: 22227 - DNA, 36 bp, unidentified
  source 1..36: mol_type = unassigned DNA; note = methanogen bacteria
ccaaatatgcttatagatttaaatttaactgccgat

SEQ ID NO: 22228 - DNA, 33 bp, unidentified
  source 1..33: mol_type = unassigned DNA; note = methanogen bacteria
tttcacttgcgatatgttttggactatgaagaa

SEQ ID NO: 22229 - DNA, 57 bp, unidentified
  source 1..57: mol_type = unassigned DNA; note = methanogen bacteria
ttcatcgataaacaacctttaactctaaaatatctaaatccactaataattaaatca

SEQ ID NO: 22230 - DNA, 30 bp, unidentified
  source 1..30: mol_type = unassigned DNA; note = methanogen bacteria
attgacgggcttggcgcctcggcagtcatc

SEQ ID NO: 22231 - DNA, 57 bp, unidentified
  source 1..57: mol_type = unassigned DNA; note = methanogen bacteria
aagcccatatgcgtaatggccaatattggagagtacagcaatatgatatatgcctat

SEQ ID NO: 22232 - DNA, 57 bp, unidentified
  source 1..57: mol_type = unassigned DNA; note = methanogen bacteria
aatccaatcatatcactcttttcatcggaatatcttgttgtgcgcgaagtcaggaac

SEQ ID NO: 22233 - DNA, 258 bp, unidentified
  source 1..258: mol_type = unassigned DNA; note = methanogen bacteria
aaatttgaagaattgcgtcaactcttagaacaattaaaagatggcgatacattcgatttcgatagggattgcttatttgaaattgatggtgatttgactatcaatgcaaacaacatcaccatcaacggcaacggctacaaaatatatggaaatgactcattgtcttgcctattcaatatatttggagacaatgtcagaatcattggcttgacatttgatttcatgtcccaatgttacagttgcccaagctttatcacc

SEQ ID NO: 22234 - DNA, 69 bp, unidentified
  source 1..69: mol_type = unassigned DNA; note = methanogen bacteria
ggaaataatggcatgcttgtaaactgtacctttatgggaaatgccgcaaaagttggcggaaccgtaaat

SEQ ID NO: 22235 - DNA, 33 bp, unidentified
  source 1..33: mol_type = unassigned DNA; note = methanogen bacteria
ggtgacaatggtctaattgataactgtgtgttc

SEQ ID NO: 22236 - DNA, 48 bp, unidentified
  source 1..48: mol_type = unassigned DNA; note = methanogen bacteria
ggcctccttacaggatgtagttttattggaaatattgcagaattcggt

SEQ ID NO: 22237 - DNA, 54 bp, unidentified
  source 1..54: mol_type = unassigned DNA; note = methanogen bacteria
attattgataacaatgaattcattgacaattgcgctttatatgctgggggtgca

SEQ ID NO: 22238 - DNA, 228 bp, unidentified
  source 1..228: mol_type = unassigned DNA; note = methanogen bacteria
catagcttcattgacggatatgtaaatgacatagatttagactatttatccacatatcaatgtgtattaggttttgctgatgaatatattaatctttatccgcttgtttatgctgccaatatgaatgcaggggttaagtattacaatgatgacctatattcctatggcaactacaactctgaaaacggggaatttacattcaatttagttaaagaattccgtgatttt

SEQ ID NO: 22239 - DNA, 30 bp, unidentified
  source 1..30: mol_type = unassigned DNA; note = methanogen bacteria
acaaaatcattcaccacagcagaatatggt

SEQ ID NO: 22240 - DNA, 39 bp, unidentified
  source 1..39: mol_type = unassigned DNA; note = methanogen bacteria
aatgcaattgcaaatgcattattcaatggaagcatgcaa

SEQ ID NO: 22241 - DNA, 42 bp, unidentified
  source 1..42: mol_type = unassigned DNA; note = methanogen bacteria
ctatacataatcacaacacctgagattgcgcttggaggttat

SEQ ID NO: 22242 - DNA, 30 bp, unidentified
  source 1..30: mol_type = unassigned DNA; note = methanogen bacteria
acaaagtcatttaccaccgcagaatatggt

SEQ ID NO: 22243 - DNA, 39 bp, unidentified
  source 1..39: mol_type = unassigned DNA; note = methanogen bacteria
aacacaattgcaaatgcattattcaacggaagcatgcaa

SEQ ID NO: 22244 - DNA, 42 bp, unidentified
  source 1..42: mol_type = unassigned DNA; note = methanogen bacteria
ttatacataatcacaacccctgaaattgcacttggaggttat

SEQ ID NO: 22245 - DNA, 36 bp, unidentified
  source 1..36: mol_type = unassigned DNA; note = methanogen bacteria
ccagcaataagtgaatactttactatttcacttaat

SEQ ID NO: 22246 - DNA, 33 bp, unidentified
  source 1..33: mol_type = unassigned DNA; note = methanogen bacteria
ttctacacagaaaaaatattaggtataagttcc

SEQ ID NO: 22247 - DNA, 81 bp, unidentified
  source 1..81: mol_type = unassigned DNA; note = methanogen bacteria
ttatctttatcaattccagagggattacttacaaatactataataagaggttcaggtatacaagagttcctgacaggtatg

SEQ ID NO: 22248 - DNA, 126 bp, unidentified
  source 1..126: mol_type = unassigned DNA; note = methanogen bacteria
aatccgggaattgcaacagttgattcaattaatcagttgcatcagattgcttctggacattttacaaattggcatccatttttccatacattcatagaaatgctgtgtttaaagatatatccaagt

SEQ ID NO: 22249 - DNA, 144 bp, unidentified
  source 1..144: mol_type = unassigned DNA; note = methanogen bacteria
atgggattgatgggggatgacgttagattttctaaagttctgtcaaatcatactgttattgattatgcatacatgagatatcatgattggtccagtaggatgataattgaaagtgttttgatttcaatttctcatgtaaatatg

SEQ ID NO: 22250 - DNA, 123 bp, unidentified
  source 1..123: mol_type = unassigned DNA; note = methanogen bacteria
tgtcctggcaatgcagtaagggttgcggctgaaactgccagatggtatcctgaatttgcaagctttggacttatgcaaaaattgtatttgggtttggttccaactttcggactgttgtttgaa

SEQ ID NO: 22251 - DNA, 165 bp, unidentified
  source 1..165: mol_type = unassigned DNA; note = methanogen bacteria
gatattgctcacttgcaagattctcttggtgctatggggtctgttgccagcttgattaaaattccaattgtatcaagcatattgggagtatttaaatcaatcgttggtattttgccgggattggaaaatactatttatcttcttacttatgagggaattcctaaa

SEQ ID NO: 22252 - DNA, 30 bp, unidentified
  source 1..30: mol_type = unassigned DNA; note = methanogen bacteria
actccaacagtatttgcatcaggttacagg

SEQ ID NO: 22253 - DNA, 141 bp, unidentified
  source 1..141: mol_type = unassigned DNA; note = methanogen bacteria
acatttattggtgatgatattgggtatgcgaatgtcttatcaaatcaatcattgacagatttcatatcttttagataccatgaatggtccagcagacttattatagactgcattacagtaattttagctaaagaaaactat

SEQ ID NO: 22254 - DNA, 123 bp, unidentified
  source 1..123: mol_type = unassigned DNA; note = methanogen bacteria
actcctggaaatgctaaaagagtgattgtcgaaactgcaagatattatcctgaatatgtaaacttcggaataattgaaaaactatacctgggcactatcccaacaattggaattctattaaaa

SEQ ID NO: 22255 - DNA, 153 bp, unidentified
  source 1..153: mol_type = unassigned DNA; note = methanogen bacteria
attgatatttcaagcattcccgagtatttgaatattggattaatgcacaaccctactgttgtatcagcattttccgcagtggattctatttccaaatgtatccccctaatatacgatactctcagcttatttgcatataaaggattgccaaat

SEQ ID NO: 22256 - DNA, 30 bp, unidentified
  source 1..30: mol_type = unassigned DNA; note = methanogen bacteria
tcaccaacaatctttgaatcaggatctaga

SEQ ID NO: 22257 - DNA, 132 bp, unidentified
  source 1..132: mol_type = unassigned DNA; note = methanogen bacteria
ttcaatccaggaattttaactgttaattcatacagcattctccatcagattgcaagtggtgaatttgtaggaccatactcaatattttacacattcatcgtgatggtctgccttaagatttatccctctgcc

SEQ ID NO: 22258 - DNA, 219 bp, unidentified
  source 1..219: mol_type = unassigned DNA; note = methanogen bacteria
gtattcaatgtccatgattcaaatgaaaagttaatcgaaagtaatggaattaaccttgaaaagtcaaaatatgattttttctcaaggataaatgaaaatccaagtgcaagttatgaaagtgcaacctcaataaatcagggatcagataaatatacttccatgaatggatttgtatctgcattcagcaacaatccaatactggggacactgtttgaaaat

SEQ ID NO: 22259 - DNA, 144 bp, unidentified
  source 1..144: mol_type = unassigned DNA; note = methanogen bacteria
atgggatttattggtgacgatatttggtattcaaaggttttatcaagatatacattgcctgatttcttatcttatagatactatgaatggtcaggcagactagttatagatgctattacaataattttaactaaagaaagctat

SEQ ID NO: 22260 - DNA, 123 bp, unidentified
  source 1..123: mol_type = unassigned DNA; note = methanogen bacteria
tgtccgggcaatgctgaaagagtgattgccgaaactggaagattttatgcagaatatgtgaacttcggaataattgaaaaactatacttgggcacaatcccaacaattggaatttttttaaaa

SEQ ID NO: 22261 - DNA, 150 bp, unidentified
  source 1..150: mol_type = unassigned DNA; note = methanogen bacteria
attgatatttcaagcatcccaagatacttaaacattggattgatgcatgaacctattgttaaatcactattttccacagtgaattcaattaccaaaagcattcctttaataaacagtaccattcacgtatttacatataaaggaatacca

SEQ ID NO: 22262 - DNA, 30 bp, unidentified
  source 1..30: mol_type = unassigned DNA; note = methanogen bacteria
tcaccaacaatctttgcatcaggatctaga

SEQ ID NO: 22263 - DNA, 39 bp, unidentified
  source 1..39: mol_type = unassigned DNA; note = methanogen bacteria
ctgcaatatctggcgacaaacgcggctgtaggtatgtat

SEQ ID NO: 22264 - DNA, 45 bp, unidentified
  source 1..45: mol_type = unassigned DNA; note = methanogen bacteria
ccgttaatgaccttaatctatggtagccaatatgcaggttcaggt

SEQ ID NO: 22265 - DNA, 156 bp, unidentified
  source 1..156: mol_type = unassigned DNA; note = methanogen bacteria
tctgttgacttctataataagatatacaatcaatcaacacctattggagatatgaatttcataattccagtattagagaatttcaccattaaattttctaaggattatgtaagcaactgtgtctttacaaacaatgtggcaaacggtcgtggcgga

SEQ ID NO: 22266 - DNA, 36 bp, unidentified
  source 1..36: mol_type = unassigned DNA; note = methanogen bacteria
agcacatttacatcaaataaggctggtgaaaaaggt

SEQ ID NO: 22267 - DNA, 45 bp, unidentified
  source 1..45: mol_type = unassigned DNA; note = methanogen bacteria
tcaaaattcacaggaaatagtgcttctaaatatggtggtgcagta

SEQ ID NO: 22268 - DNA, 240 bp, unidentified
  source 1..240: mol_type = unassigned DNA; note = methanogen bacteria
catgaaagcagcggccactatgaaggcagcaaatggatttctgaagtaaaatactttaaaaatcttattcagacatcctcatttacaaaaaacactgctagcaaaggaggagcaatctatggattcaagtcatcctcttcagattcccacagtgctaaagcagtaaaatgtaattttaccaataataaggcaacaacaggcagagacatatttggtgcaactagctcaaactgcatatac

SEQ ID NO: 22269 - DNA, 255 bp, unidentified
  source 1..255: mol_type = unassigned DNA; note = methanogen bacteria
acagttaccattaagaaatctgctagcaaacttaccttaactgcaaagcttacaaaaggcaaaaccttaatcaaaggcaaaaagattacttttacatttaatggaaaaacctatagcgcaaagacaaattccaaaggaattgctaagatcaccattagtaaaaccgtgcttaaaaagcttaaagttggtaaaaccataaaatatcaagccaaatatggtagtttaactgttaaaaaatcagcaaaagttaaaaaa

SEQ ID NO: 22270 - DNA, 129 bp, unidentified
  source 1..129: mol_type = unassigned DNA; note = methanogen bacteria
tatatgccaggaatcttaacttttgattcatttaatcaactacaccagattgctggaaataattataataattggcaaccttttttccatacatttatagagatgttatgtattaaggtttatccaagc

SEQ ID NO: 22271 - DNA, 138 bp, unidentified
  source 1..138: mol_type = unassigned DNA; note = methanogen bacteria
ggatttttaggggatgatgaagggtattccaagctcctgtctgattatccattgacaaggctcattgtcgacagatacaatgaatggtccagcagagtgattatagatgccttaacgattatcctaagccgagaattc

SEQ ID NO: 22272 - DNA, 123 bp, unidentified
  source 1..123: mol_type = unassigned DNA; note = methanogen bacteria
tgcccaggcaatgcggagcggaccgttatcgaaaccggaagatattatgcggaatatgcaaacttcggaatagtcgaaaagctgtacctgggaactattccgacaatcgagattctattgaaa

SEQ ID NO: 22273 - DNA, 156 bp, unidentified
  source 1..156: mol_type = unassigned DNA; note = methanogen bacteria
gttgacatttcaagcatcaatacccatctaaacattggacttatgcataagcctgtcgttgcatcccttctttctgcagccaagacagtcaccgaaagtgtgcctctggtaaacgatgcgattggcctattcagctataagggaataccgaaaaca

SEQ ID NO: 22274 - DNA, 30 bp, unidentified
  source 1..30: mol_type = unassigned DNA; note = methanogen bacteria
tcaccgacaatctttgaatccggatccaga

SEQ ID NO: 22275 - DNA, 33 bp, unidentified
  source 1..33: mol_type = unassigned DNA; note = methanogen bacteria
agtggtttaggccatgtagaagttagtgcagta

SEQ ID NO: 22276 - DNA, 57 bp, unidentified
  source 1..57: mol_type = unassigned DNA; note = methanogen bacteria
gataaaatactctatgttgtcggtgcaggcgtaagctttgagtactgttatgattac

SEQ ID NO: 22277 - DNA, 33 bp, unidentified
  source 1..33: mol_type = unassigned DNA; note = methanogen bacteria
atatatgaaggtttagtgtatattacagcatac

SEQ ID NO: 22278 - DNA, 54 bp, unidentified
  source 1..54: mol_type = unassigned DNA; note = methanogen bacteria
tttttaagctatacattataccaaacaaaggatatggttgtaataaatcaaatt

SEQ ID NO: 22279 - DNA, 36 bp, unidentified
  source 1..36: mol_type = unassigned DNA; note = methanogen bacteria
cctcagatagctgtagatttaaattttaatatagat

SEQ ID NO: 22280 - DNA, 33 bp, unidentified
  source 1..33: mol_type = unassigned DNA; note = methanogen bacteria
tttcatttactttacatcaatgattatggggaa

SEQ ID NO: 22281 - DNA, 51 bp, unidentified
  source 1..51: mol_type = unassigned DNA; note = methanogen bacteria
atagtgggcggtcagttgggcgatacgaatgttgattatttgttaatagta

SEQ ID NO: 22282 - DNA, 51 bp, unidentified
  source 1..51: mol_type = unassigned DNA; note = methanogen bacteria
atgtctattgcagatacgctgaacggaccgatctccgacgcattctacttt

SEQ ID NO: 22283 - DNA, 78 bp, unidentified
  source 1..78: mol_type = unassigned DNA; note = methanogen bacteria
ctcaacatcagcggagtcgtcaacgccttcgtcatgatcttccagtacgcattcaactggcagtccatgttcggcgga

SEQ ID NO: 22284 - DNA, 93 bp, unidentified
  source 1..93: mol_type = unassigned DNA; note = methanogen bacteria
tcctacggaagctacgaccagatcctggccatcggagccaagggtgcacccctggtgcagaatgtcatcgccagcaccgccatcggcgaggct

SEQ ID NO: 22285 - DNA, 30 bp, unidentified
  source 1..30: mol_type = unassigned DNA; note = methanogen bacteria
atgaatcctaacgggccatttagtaattct

SEQ ID NO: 22286 - DNA, 48 bp, unidentified
  source 1..48: mol_type = unassigned DNA; note = methanogen bacteria
ccgatggttgttgtgaatgatcagacgggaatgtattcgacaggtcct

SEQ ID NO: 22287 - DNA, 30 bp, unidentified
  source 1..30: mol_type = unassigned DNA; note = methanogen bacteria
acaaaaaatttctcaacagcagattatggt

SEQ ID NO: 22288 - DNA, 39 bp, unidentified
  source 1..39: mol_type = unassigned DNA; note = methanogen bacteria
ctgcctatatcacaggcactgttcaacggaaatatgcag

SEQ ID NO: 22289 - DNA, 45 bp, unidentified
  source 1..45: mol_type = unassigned DNA; note = methanogen bacteria
cttgaaatccttacaactgatataatagcgtcacaggggtatatg

SEQ ID NO: 22290 - DNA, 30 bp, unidentified
  source 1..30: mol_type = unassigned DNA; note = methanogen bacteria
acaaagaatttctccacttcagattatggt

SEQ ID NO: 22291 - DNA, 39 bp, unidentified
  source 1..39: mol_type = unassigned DNA; note = methanogen bacteria
aatcaaattgcaggtgcgctgtttgatggaaatatgcag

SEQ ID NO: 22292 - DNA, 45 bp, unidentified
  source 1..45: mol_type = unassigned DNA; note = methanogen bacteria
ctttacgttctaaccacagacattatcgcaaatcagggatatatg

SEQ ID NO: 22293 - DNA, 30 bp, unidentified
  source 1..30: mol_type = unassigned DNA; note = methanogen bacteria
accaaatccttttctactgcagaatatggt

SEQ ID NO: 22294 - DNA, 39 bp, unidentified
  source 1..39: mol_type = unassigned DNA; note = methanogen bacteria
gggccaattgcaggtgctctttttaatggaaatgtatat

SEQ ID NO: 22295 - DNA, 45 bp, unidentified
  source 1..45: mol_type = unassigned DNA; note = methanogen bacteria
cttttaagtataactacttttgatatcgctcaaaatggttttttc

SEQ ID NO: 22296 - DNA, 36 bp, unidentified
  source 1..36: mol_type = unassigned DNA; note = methanogen bacteria
ccacaaatacttattgattttaattttagttcagac

SEQ ID NO: 22297 - DNA, 33 bp, unidentified
  source 1..33: mol_type = unassigned DNA; note = methanogen bacteria
ttccatttacagtacattttagatttcgaggaa

SEQ ID NO: 22298 - DNA, 54 bp, unidentified
  source 1..54: mol_type = unassigned DNA; note = methanogen bacteria
ataggtgatcaggccttgggtccggaacatttagacaatatgttattagcatct

SEQ ID NO: 22299 - DNA, 30 bp, unidentified
  source 1..30: mol_type = unassigned DNA; note = methanogen bacteria
accaaaagcttttcgactgcagattatggt

SEQ ID NO: 22300 - DNA, 39 bp, unidentified
  source 1..39: mol_type = unassigned DNA; note = methanogen bacteria
aaccagattgcaggtgcgttgtttgacggaagcatgcag

SEQ ID NO: 22301 - DNA, 45 bp, unidentified
  source 1..45: mol_type = unassigned DNA; note = methanogen bacteria
ctttacatattgactacaaccgtcattgcggataatgggttcatg

SEQ ID NO: 22302 - DNA, 36 bp, unidentified
  source 1..36: mol_type = unassigned DNA; note = methanogen bacteria
ccacaaatacttattgattttaattttagttcagaa

SEQ ID NO: 22303 - DNA, 30 bp, unidentified
  source 1..30: mol_type = unassigned DNA; note = methanogen bacteria
tatttacagtacattttagatttcgaggaa

SEQ ID NO: 22304 - DNA, 51 bp, unidentified
  source 1..51: mol_type = unassigned DNA; note = methanogen bacteria
ataggtaatcaggccttgggtccggaacatttagatcatatgttattaata

SEQ ID NO: 22305 - DNA, 135 bp, unidentified
  source 1..135: mol_type = unassigned DNA; note = methanogen bacteria
accggaaatatcattgaaggatattttgaaaacaatacctgtacaaataccggtggagtaatgacttcaatggcaactgtacaaaataatactttcaaaggaagcttttataaaaactcagcacgtataggtgga

SEQ ID NO: 22306 - DNA, 138 bp, unidentified
  source 1..138: mol_type = unassigned DNA; note = methanogen bacteria
aacataataattggagaatttataaataattccgctacaagatatggaagcgcaatttatttcagaggtactccattcaataaaataataaattcttcattcataaataatcagattccatccaagaatctaaacgtt

SEQ ID NO: 22307 - DNA, 108 bp, unidentified
  source 1..108: mol_type = unassigned DNA; note = methanogen bacteria
gctattaatttaaaccctggcaattatacaattgaaactatattcaatggaacaagcgttgaaaacaatattgaagttttaccaacactaatcgctcagaacttaatt

SEQ ID NO: 22308 - DNA, 57 bp, unidentified
  source 1..57: mol_type = unassigned DNA; note = methanogen bacteria
tttttaatttcattgattgatggtaaaagcaatcctgtagctaatgttaacattacc

SEQ ID NO: 22309 - DNA, 102 bp, unidentified
  source 1..102: mol_type = unassigned DNA; note = methanogen bacteria
atattaactgctattgatccattaactggactgatggtatcctataatataacagtactacctactttaacagtagatgatttaaacatgacttatttagat

SEQ ID NO: 22310 - DNA, 54 bp, unidentified
  source 1..54: mol_type = unassigned DNA; note = methanogen bacteria
caatttaaagcaaaactggttgacggtcagggaaaagaactagaaaatgctggt

SEQ ID NO: 22311 - DNA, 36 bp, unidentified
  source 1..36: mol_type = unassigned DNA; note = methanogen bacteria
agatatacagattcatctggaattgcagctttaaac

SEQ ID NO: 22312 - DNA, 57 bp, unidentified
  source 1..57: mol_type = unassigned DNA; note = methanogen bacteria
tccatgtatgaaaatgctgttacatcaaataaaataactattttttctaaagaggat

SEQ ID NO: 22313 - DNA, 39 bp, unidentified
  source 1..39: mol_type = unassigned DNA; note = methanogen bacteria
attccaacaatagccgctgagtttcatatgagcaatatc

SEQ ID NO: 22314 - DNA, 36 bp, unidentified
  source 1..36: mol_type = unassigned DNA; note = methanogen bacteria
tatcacttgcagtacattaagggatatgattcacag

SEQ ID NO: 22315 - DNA, 54 bp, unidentified
  source 1..54: mol_type = unassigned DNA; note = methanogen bacteria
gtgatgggcaatgtgccgattgtagaagagtattatcctcttttaataagcagc

SEQ ID NO: 22316 - DNA, 30 bp, unidentified
  source 1..30: mol_type = unassigned DNA; note = methanogen bacteria
actaaaaacttttctacagccgattatggt

SEQ ID NO: 22317 - DNA, 39 bp, unidentified
  source 1..39: mol_type = unassigned DNA; note = methanogen bacteria
catcagatttcagatgtcctgtttgatggaagcatgcag

SEQ ID NO: 22318 - DNA, 45 bp, unidentified
  source 1..45: mol_type = unassigned DNA; note = methanogen bacteria
cttcatatcctaacaacaacggttatcgccgacaatggatttatg

SEQ ID NO: 22319 - DNA, 30 bp, unidentified
  source 1..30: mol_type = unassigned DNA; note = methanogen bacteria
actaaaagtttttcaactgcggattatggg

SEQ ID NO: 22320 - DNA, 39 bp, unidentified
  source 1..39: mol_type = unassigned DNA; note = methanogen bacteria
ccgcaaatcgccgatgctctgtttgatggaagcttgcag

SEQ ID NO: 22321 - DNA, 45 bp, unidentified
  source 1..45: mol_type = unassigned DNA; note = methanogen bacteria
ctttatattttaacaacaaccattattgcagacagtggatttatg

SEQ ID NO: 22322 - DNA, 30 bp, unidentified
  source 1..30: mol_type = unassigned DNA; note = methanogen bacteria
actaaaaacttttccactgctgattatggt

SEQ ID NO: 22323 - DNA, 39 bp, unidentified
  source 1..39: mol_type = unassigned DNA; note = methanogen bacteria
caccagattgccgatgccttgtttgatggaagtatgcag

SEQ ID NO: 22324 - DNA, 45 bp, unidentified
  source 1..45: mol_type = unassigned DNA; note = methanogen bacteria
ctgtatattctaaccacaactgttattgcagataatggatttatg

SEQ ID NO: 22325 - DNA, 30 bp, unidentified
  source 1..30: mol_type = unassigned DNA; note = methanogen bacteria
acaaaaagtttttcaactgcggattatggt

SEQ ID NO: 22326 - DNA, 39 bp, unidentified
  source 1..39: mol_type = unassigned DNA; note = methanogen bacteria
aatcaaatcgccagtgctttgtttgacggaagcatgcag

SEQ ID NO: 22327 - DNA, 45 bp, unidentified
  source 1..45: mol_type = unassigned DNA; note = methanogen bacteria
ctttacatattaaccacaaccgtcattgcagacaacggtttcatg

SEQ ID NO: 22328 - DNA, 96 bp, unidentified
  source 1..96: mol_type = unassigned DNA; note = methanogen bacteria
gtgaatgcaccattcatagatgcattctttgaaaacatgtccgcatggacaggaagcggacttactctttttgcggatgttgaaatcctgccatac

SEQ ID NO: 22329 - DNA, 99 bp, unidentified
  source 1..99: mol_type = unassigned DNA; note = methanogen bacteria
gggcttcctgtttttgatgcgataaaccttacattcacaactatctccacaggaggaatgagcattaaaaatgcgaatgtgggattttatcatgacaac

SEQ ID NO: 22330 - DNA, 102 bp, unidentified
  source 1..102: mol_type = unassigned DNA; note = methanogen bacteria
acaagaaacgaacctgttgaaacattgttccatgtgatttccgcaatcactacaactggagccaatatctcttcacctgcatacatgacaacatggcccagt

SEQ ID NO: 22331 - DNA, 96 bp, unidentified
  source 1..96: mol_type = unassigned DNA; note = methanogen bacteria
tttggatatgatccgtttcagtcactctttgatatcatttcaacacagggtaatgtgggactaagccttggcgttatcggtccgggattacctgat

SEQ ID NO: 22332 - DNA, 99 bp, unidentified
  source 1..99: mol_type = unassigned DNA; note = methanogen bacteria
gcaaccaacataccgatcattgacggcgtttttgaaagcatgtccgccctgaccggtaccggaatcacaatgttcatggatgtggaaatattacctcac

SEQ ID NO: 22333 - DNA, 99 bp, unidentified
  source 1..99: mol_type = unassigned DNA; note = methanogen bacteria
ggaatgcccctgtttgattccatctgcaatacattccatactgtttcgacaggaggaatgagcatcaaaaacgcaaatatgggattctatcataataac

SEQ ID NO: 22334 - DNA, 102 bp, unidentified
  source 1..102: mol_type = unassigned DNA; note = methanogen bacteria
tcaaacattgttccaatcgaactgctttttacagtcgtgtctgcaatgacaacaacaggagcaagcgtagcatcacctacagcaatggcaggatggcaacct

SEQ ID NO: 22335 - DNA, 93 bp, unidentified
  source 1..93: mol_type = unassigned DNA; note = methanogen bacteria
ggctacgacccattcaaaagcctgtttgcggcaatgtcccttcagggaaacaacggtttagaccttggaataatcaattatcatctggatcct

SEQ ID NO: 22336 - DNA, 96 bp, unidentified
  source 1..96: mol_type = unassigned DNA; note = methanogen bacteria
acaggcataagtccggtagacagcgtttttgaaagcatgtccgctttgactggaagtggaattaccatatatagtgatgtggaagccctgccatac

SEQ ID NO: 22337 - DNA, 99 bp, unidentified
  source 1..99: mol_type = unassigned DNA; note = methanogen bacteria
gggatgcccttttttgattccatctgcaataccttctgcattatctcaacaggcggaatgagcgtgaaaaatgcgaatataggatactataatgattat

SEQ ID NO: 22338 - DNA, 99 bp, unidentified
  source 1..99: mol_type = unassigned DNA; note = methanogen bacteria
tccacaatcattccaatggatatgctgtttacagtggtttcctcaattacgacaacaggagcaagcattcctaattcaacagtaatggcggcatggcca

SEQ ID NO: 22339 - DNA, 96 bp, unidentified
  source 1..96: mol_type = unassigned DNA; note = methanogen bacteria
tatggtcatgatccattcaattcactgtttttcacattttccatgcagggaaatataggtctggaaatcggacagctgtcccaaacaatagagtgg

SEQ ID NO: 22340 - DNA, 144 bp, unidentified
  source 1..144: mol_type = unassigned DNA; note = methanogen bacteria
atgggattaaatggagacgacatcaaatatgcaaaagtcctgtctaatcaaactttagttgactatctccattatagatattataactggtctagcagactaattattgacggcattttagtaattttagctcgtctagacatg

SEQ ID NO: 22341 - DNA, 120 bp, unidentified
  source 1..120: mol_type = unassigned DNA; note = methanogen bacteria
cctggaaacagcatacgatttgcacacgaggctgctttctggtatcctgaatttgtcaatttcacaattattgaaaaatcctatttaggtcttgttacaacatttggaacattaatagaa

SEQ ID NO: 22342 - DNA, 171 bp, unidentified
  source 1..171: mol_type = unassigned DNA; note = methanogen bacteria
attgacatttccattttagacagttccgtgaaatctcttggaagcttttcaaatgtcattaaaagttcaccattaatcgtgattccgaaaatgtttaaacatgtcgttggtgcaactccttaccttacagagacactgaagttattcacctatgaaggtgttccagcactt

SEQ ID NO: 22343 - DNA, 30 bp, unidentified
  source 1..30: mol_type = unassigned DNA; note = methanogen bacteria
tcccctgttgtatttccttcaggtgcaaga

SEQ ID NO: 22344 - DNA, 99 bp, unidentified
  source 1..99: mol_type = unassigned DNA; note = methanogen bacteria
tctacaaacataccgattgttgatggtgtttttgaaagcatgtccgcattaaccggtaccggaataaccatgtttgaagatgtcgaaatattacctcat

SEQ ID NO: 22345 - DNA, 99 bp, unidentified
  source 1..99: mol_type = unassigned DNA; note = methanogen bacteria
ggaatgcctctttttgattcaatctgcaattcattccacataatttcaaccggcggaatgagcataaaaaatgccaatatgggctactaccaaaatgat

SEQ ID NO: 22346 - DNA, 102 bp, unidentified
  source 1..102: mol_type = unassigned DNA; note = methanogen bacteria
tcaaacatcgtgccgatagatttgttatttacagttgtttcagcaattacaaccaccggtgcaagtgttgcaatgcctgctgaaatggcaggttggccaccg

SEQ ID NO: 22347 - DNA, 96 bp, unidentified
  source 1..96: mol_type = unassigned DNA; note = methanogen bacteria
tatggctatgacccatttaaaagtttatttgcagcaatgtcccttcaaggtaacaacggtttggaccttggaatagtcaaccacacattaaatcca

SEQ ID NO: 22348 - DNA, 144 bp, unidentified
  source 1..144: mol_type = unassigned DNA; note = methanogen bacteria
atgggattcaatggggatgacattaaatatgcaaaggtcctgaccaatcaaagtcttgttgattatatcaattacagatattataattggtccagcaggctgattatagatggtcttttggtaattttaacccgtatagatatg

SEQ ID NO: 22349 - DNA, 123 bp, unidentified
  source 1..123: mol_type = unassigned DNA; note = methanogen bacteria
tgtcccggaaataacataaggtttgcacatgaagtcgcttactggtatcctgaattcgccaattttacaatccttgataaatcgtatttgggtctggttacaacattcggaagcctgattgag

SEQ ID NO: 22350 - DNA, 171 bp, unidentified
  source 1..171: mol_type = unassigned DNA; note = methanogen bacteria
attgatatttccgttttggagacttccctgaaatctcttggaaacgttccgggcgtcatcaaaaactcacctctgatggcaattccgcatctgtttgagcaaattgtcagtgcaaccccatatctgacagaaactttgaagctatttacctatgaaggtcttccaaagctg

SEQ ID NO: 22351 - DNA, 33 bp, unidentified
  source 1..33: mol_type = unassigned DNA; note = methanogen bacteria
tcaccggtagtatttccttcaggcgcaagagtt

SEQ ID NO: 22352 - DNA, 99 bp, unidentified
  source 1..99: mol_type = unassigned DNA; note = methanogen bacteria
acaaacatgccctatatcgacgctgtttttgaaagtctttccgcattaaccggaaccggaataacaatgttcagcgatgttgaagcattgccccatagt

SEQ ID NO: 22353 - DNA, 99 bp, unidentified
  source 1..99: mol_type = unassigned DNA; note = methanogen bacteria
ggaatgcctgcatttgattcactctgtaacacttttacaataatttcaaccggcggaatgaatatcaaaaatgcgaatatgggttattaccaaagtgac

SEQ ID NO: 22354 - DNA, 102 bp, unidentified
  source 1..102: mol_type = unassigned DNA; note = methanogen bacteria
tcaaatattgttcctatggaattactgttcacaatcgtttcagcaattactacaaccggagcaaatgtagcaccacaacatgtaatggccgcatggccatct

SEQ ID NO: 22355 - DNA, 93 bp, unidentified
  source 1..93: mol_type = unassigned DNA; note = methanogen bacteria
ggatatgacccattcaaaagtttatttgcagcaatgaccatgcagggaaacaacggtctagagcttggaataataaaccacacgttaaatccc

SEQ ID NO: 22356 - DNA, 99 bp, unidentified
  source 1..99: mol_type = unassigned DNA; note = methanogen bacteria
ataactggcctaagtatgatagacagtatttttgaatgcatgtctgcattaactggaagtggaatcacaatatatcctgatgttgaaatattgccttat

SEQ ID NO: 22357 - DNA, 99 bp, unidentified
  source 1..99: mol_type = unassigned DNA; note = methanogen bacteria
gggatgcctatttttgattctgtctgcaatacattttgcattatttcgaccggaggtatgagtgtaaaaaatgcaaacatcggattttatcaaaacaac

SEQ ID NO: 22358 - DNA, 102 bp, unidentified
  source 1..102: mol_type = unassigned DNA; note = methanogen bacteria
tcatatattgttccgatggacattttatttgttgtagtttccgcaatcactacaactggtgccagtattcagagttcaactgtaatgggtggatggccagca

SEQ ID NO: 22359 - DNA, 96 bp, unidentified
  source 1..96: mol_type = unassigned DNA; note = methanogen bacteria
tacggtcatgatacattcgattcattatttttcactatttctatgcagggtaatattggtttggagataggtcagatatcacaatccttggattgg

SEQ ID NO: 22360 - DNA, 48 bp, unidentified
  source 1..48: mol_type = unassigned DNA; note = methanogen bacteria
atgattaatatgtatactataataaatatagcaaatttattaaatcag

SEQ ID NO: 22361 - DNA, 69 bp, unidentified
  source 1..69: mol_type = unassigned DNA; note = methanogen bacteria
tttaaaaacattccttcaatgtttatcttaatttttcaagatgcctttaattttcaatctatttttgga

SEQ ID NO: 22362 - DNA, 78 bp, unidentified
  source 1..78: mol_type = unassigned DNA; note = methanogen bacteria
tgtactggaataatgcctgatgcaagtttagctggtgccccctatgtacaaaattcgatacaaacagtattaggtaat

SEQ ID NO: 22363 - DNA, 99 bp, unidentified
  source 1..99: mol_type = unassigned DNA; note = methanogen bacteria
tctacaaatatacccattgttgatggtgttttcgaaagcatgtccgcattaacaggtaccggaataacaatgtttgaaaatgttgaaatattacctcac

SEQ ID NO: 22364 - DNA, 99 bp, unidentified
  source 1..99: mol_type = unassigned DNA; note = methanogen bacteria
ggaatgcccctatttgattccatctgcaattcattccacataatctccactggaggaatgagcataaaaaatgccaatatgggttactaccaaaatgat

SEQ ID NO: 22365 - DNA, 102 bp, unidentified
  source 1..102: mol_type = unassigned DNA; note = methanogen bacteria
tcaaatatcgtgccaatagatttgttatttacagttgtttcagcaattacaaccaccggagcaagtgttgcaatgccgcatgacatggcaggttggccatca

SEQ ID NO: 22366 - DNA, 93 bp, unidentified
  source 1..93: mol_type = unassigned DNA; note = methanogen bacteria
ggatatgatccgtttaaaagcttatttgctgcaatgtctcttcaaggtaacaatggtttagaccttggaattgttaatcataccctaaatcct

SEQ ID NO: 22367 - DNA, 141 bp, unidentified
  source 1..141: mol_type = unassigned DNA; note = methanogen bacteria
ggatttaatggagatgacatcaaatatgcgaaagtcctgtctaatcaaactttaattgactatcttcattttagatattataactggtcaagcagattaattatagacggccttttagtaattttagttcgtcttgacatg

SEQ ID NO: 22368 - DNA, 120 bp, unidentified
  source 1..120: mol_type = unassigned DNA; note = methanogen bacteria
cctggaaacagcatacgatttgcacatgaagctgctttctggtatcctgaatttgtcaatttcacaatcattgaaaaatcctatttaggtctggttacaacatttggaacattaatagaa

SEQ ID NO: 22369 - DNA, 171 bp, unidentified
  source 1..171: mol_type = unassigned DNA; note = methanogen bacteria
atagacatttccattttagacagttccttgaaatcccttggaagctcttcaaatgccattaaaagctcaccattaattgggattacaaaaatgtttaaacagatcgttggtgcaactcctttccttacagagacattgaagctattcacctatgaaggtgttccggcactt

SEQ ID NO: 22370 - DNA, 30 bp, unidentified
  source 1..30: mol_type = unassigned DNA; note = methanogen bacteria
tctccagttgtatttccttcaggtgcaaga

SEQ ID NO: 22371 - DNA, 96 bp, unidentified
  source 1..96: mol_type = unassigned DNA; note = methanogen bacteria
acacacatgcctgcgattgatgcagtttttgaaagtatgtctgcattaaccggaacaggaataaccatgtttgaagacgttgaagtattacctcac

SEQ ID NO: 22372 - DNA, 99 bp, unidentified
  source 1..99: mol_type = unassigned DNA; note = methanogen bacteria
ggaatgcctgtttttgattcaatatgtaacacattcagcatcatttctaccggaggaatgagtattaaaaatgcaaatatgggtttttaccagaacgat

SEQ ID NO: 22373 - DNA, 102 bp, unidentified
  source 1..102: mol_type = unassigned DNA; note = methanogen bacteria
tcaaatattgttccaatcgatttgctttttacagtagtgtctgcaattacaacaacaggagccagtgttgcatcaccgttagccatgggaaactggccatcc

SEQ ID NO: 22374 - DNA, 93 bp, unidentified
  source 1..93: mol_type = unassigned DNA; note = methanogen bacteria
ggatacgatcctttcagaagcctgtttgcagcgatgtcccttcagggaaacaacggtttggaacttggagttataaatcatacattacatcct

SEQ ID NO: 22375 - DNA, 96 bp, unidentified
  source 1..96: mol_type = unassigned DNA; note = methanogen bacteria
acggacataagcattgttgacagtattttcgaaagcatgtctgctttaactggaagtggtataactatatatagtgatgttgaggttctgcctcaa

SEQ ID NO: 22376 - DNA, 99 bp, unidentified
  source 1..99: mol_type = unassigned DNA; note = methanogen bacteria
ggaatgccggtttttgattcagtgtgcaatacattctgcattatttcaaccggaggtatgagtattaaaaatgcaaatataggattttatcaaaatgat

SEQ ID NO: 22377 - DNA, 102 bp, unidentified
  source 1..102: mol_type = unassigned DNA; note = methanogen bacteria
tcaaatatacttcctatggatattgtatttgtcgttgtttctgcggttactaccaccggggccagcattcaaagttcgacagttatgggcggctggcatcca

SEQ ID NO: 22378 - DNA, 96 bp, unidentified
  source 1..96: mol_type = unassigned DNA; note = methanogen bacteria
tatggacatgaccctctcaattctttatttttttccatgtccatgcagggtaatgtcggtttggaaataggttctatgtcccagacaattgaaatg

SEQ ID NO: 22379 - DNA, 99 bp, unidentified
  source 1..99: mol_type = unassigned DNA; note = methanogen bacteria
atcactgatgcaaacattgtaaattgtctgtttgaatgtatgtccgcactaacgggcagtggaataacaatatttgcagatgtagagagcctacctcaa

SEQ ID NO: 22380 - DNA, 99 bp, unidentified
  source 1..99: mol_type = unassigned DNA; note = methanogen bacteria
ggaatgcccctttttgattctgtctgcaatacattcaccatcatctcaaccggaggtatgagtatcaaaaatgcaaacataggtttttatcagagcgat

SEQ ID NO: 22381 - DNA, 102 bp, unidentified
  source 1..102: mol_type = unassigned DNA; note = methanogen bacteria
tcgaatattgttccgattgaaatattatttactgtcgtatctgcaataacaacaacaggagcaagtgtgcaaagttcaacagtaatggggagctggccgcca

SEQ ID NO: 22382 - DNA, 99 bp, unidentified
  source 1..99: mol_type = unassigned DNA; note = methanogen bacteria
tgtggtcatgacgttatagatagcttattttacacaatatccattcaaggtaatgtaggattggaaataggaaatattagtcaagcacttcaaccccag

SEQ ID NO: 22383 - DNA, 300 bp, unidentified
  source 1..300: mol_type = unassigned DNA; note = methanogen bacteria
tcccctatgggcagtattgcacatgaaaaaagcgaatttgtacattctgaaattacttcacagggtgtcttatttccaggatatattgatagtcaaaacaatgcttccggatatctaacaattgcttcggctgccaatttacctaaagaaaaaactatatttactacagattggagcaatgaaaatataaactacacaaaagtttcatataacctggattttaaagataacattttttattcatatgtcgctcaggcgattggtattgaattggcaaaaattttaaatttaaataatatt

SEQ ID NO: 22384 - DNA, 132 bp, unidentified
  source 1..132: mol_type = unassigned DNA; note = methanogen bacteria
agtagttacattggctttagtcagttgaaatttgttattacagattacccatccttaatttcaataataaaaatccctaatcagatagctatgcaaatcaatttattttccgtgattgataatcatccatta

SEQ ID NO: 22385 - DNA, 54 bp, unidentified
  source 1..54: mol_type = unassigned DNA; note = methanogen bacteria
tccctatcaaaaggaataattaatttagaaacaggaatcgacataatatattat

SEQ ID NO: 22386 - DNA, 102 bp, unidentified
  source 1..102: mol_type = unassigned DNA; note = methanogen bacteria
gcaacaaatatggctcctatcgatgctgtttttgaaagcatgtccgctttgactggaaatggaatgaccctataccctgatgttgaaatattgccacacagc

SEQ ID NO: 22387 - DNA, 99 bp, unidentified
  source 1..99: mol_type = unassigned DNA; note = methanogen bacteria
ggaatgccactatttgattccatctgcagcaccctttcaattgtctcaacaggcggaatgagcattaagaatgcaaatatgggatactatcatgacgat

SEQ ID NO: 22388 - DNA, 102 bp, unidentified
  source 1..102: mol_type = unassigned DNA; note = methanogen bacteria
tcaaatattgttccaatggatctgctgtttacagttgtttctgcaattacaacaaccggagcaagcgttgcaagcccaactgcaatgggaaactggccttca

SEQ ID NO: 22389 - DNA, 96 bp, unidentified
  source 1..96: mol_type = unassigned DNA; note = methanogen bacteria
tacggctacgatccgttcaaaagtttatttgctgcaatgtccctgcagggaaataacggtttggagcttggaataatcaccccatcacttgacccc

SEQ ID NO: 22390 - DNA, 144 bp, unidentified
  source 1..144: mol_type = unassigned DNA; note = methanogen bacteria
atgggattcaatggtgatgatatcaggtatgcaaaggtattgtctaatcagactttgattgattatatcggttttagatactataactggtccagcaggattattatcgacggtcttacagtgtttttaactcgccagaatatg

SEQ ID NO: 22391 - DNA, 117 bp, unidentified
  source 1..117: mol_type = unassigned DNA; note = methanogen bacteria
cctggaaatggcgtaaggtttgcatatgaggttacatcatggtatcctgaatttgccggctttggcgttatggaaaaatcatatttggggctagttacaacatttggaaagttaatt

SEQ ID NO: 22392 - DNA, 171 bp, unidentified
  source 1..171: mol_type = unassigned DNA; note = methanogen bacteria
attgacatttcagttttggatagctccctgaaatcccttggaagtgtttttgatgcgattaaaaattcgcctctgatggcgataccggacatgtttaagcatatagtcaatgctgttccattcgttaccggaactttgaaactgtttacttatgaaggcgttccggggatt

SEQ ID NO: 22393 - DNA, 30 bp, unidentified
  source 1..30: mol_type = unassigned DNA; note = methanogen bacteria
tctccggtgatattcccttcgggtgcaagg

SEQ ID NO: 22394 - DNA, 99 bp, unidentified
  source 1..99: mol_type = unassigned DNA; note = methanogen bacteria
attacaggcataaacatagaagacagtttgtttgaaagcatgtctgcacttacaggcagtggaattacaatataccaagatgtagaaattttacctcaa

SEQ ID NO: 22395 - DNA, 99 bp, unidentified
  source 1..99: mol_type = unassigned DNA; note = methanogen bacteria
ggaatgcctatttttgattctgtttgcaatacattcaccattatctcaacaggcggtatgagtattaaaaatgcaaatattggcttttaccaaaatgat

SEQ ID NO: 22396 - DNA, 102 bp, unidentified
  source 1..102: mol_type = unassigned DNA; note = methanogen bacteria
tccgatattgtcccgattgaaatattatttactgtagtatcagcagttacaacaactggagccagtgtgcaaagttcaacagttatggggaattggccacca

SEQ ID NO: 22397 - DNA, 99 bp, unidentified
  source 1..99: mol_type = unassigned DNA; note = methanogen bacteria
tacggacatgaccccatagaaggattattctttacaatgtctcttcaaggaaacgttggtttagaaatagggcatgttacatccgcacttcaacctcaa

SEQ ID NO: 22398 - DNA, 39 bp, unidentified
  source 1..39: mol_type = unassigned DNA; note = methanogen bacteria
ctagaaaatattattggaaattttgctactggaatatat

SEQ ID NO: 22399 - DNA, 48 bp, unidentified
  source 1..48: mol_type = unassigned DNA; note = methanogen bacteria
gatataatattattgatttatggtccagaatacattgattcagctcca

SEQ ID NO: 22400 - DNA, 99 bp, unidentified
  source 1..99: mol_type = unassigned DNA; note = methanogen bacteria
gccacccacattccagtccttgacggcgtttttgaaagcatgtccgctttaactggcacgggaatcaccatgtttatggatgtggaaattctgccacac

SEQ ID NO: 22401 - DNA, 99 bp, unidentified
  source 1..99: mol_type = unassigned DNA; note = methanogen bacteria
ggaatgcctgtcttcgattccatctgcaatacattccatatggtttcaacaggaggaatgagcatcaaaaatgcgaatatgggattctaccacgatgac

SEQ ID NO: 22402 - DNA, 102 bp, unidentified
  source 1..102: mol_type = unassigned DNA; note = methanogen bacteria
tcaaacattgttcccatcgatttgctgttcactgtcgtgtccgcaatgacaacaacaggggcaagcgtggcatcgcctgccacaatggccggctggccacca

SEQ ID NO: 22403 - DNA, 93 bp, unidentified
  source 1..93: mol_type = unassigned DNA; note = methanogen bacteria
ggatatgacccattcaaaagcctgtttgcagcaatgtcccttcaaggaaacaacggtctggagcttggaataatcaattatacgctggaccca

SEQ ID NO: 22404 - DNA, 45 bp, unidentified
  source 1..45: mol_type = unassigned DNA; note = methanogen bacteria
cttccttcaatcgagcagagcttttccctgacaagcagggaatca

SEQ ID NO: 22405 - DNA, 39 bp, unidentified
  source 1..39: mol_type = unassigned DNA; note = methanogen bacteria
atagactcaagcaatttcaccgcaagccttttgtcaatg

SEQ ID NO: 22406 - DNA, 33 bp, unidentified
  source 1..33: mol_type = unassigned DNA; note = methanogen bacteria
cttgttatcctttccatgggattgaatgaccag

SEQ ID NO: 22407 - DNA, 96 bp, unidentified
  source 1..96: mol_type = unassigned DNA; note = methanogen bacteria
acacatatgcctccgttagatgctgtttttgaaagcatgtccgcactaagcggaactggaataaccatgtttaatgatgttgaaatattacctcac

SEQ ID NO: 22408 - DNA, 99 bp, unidentified
  source 1..99: mol_type = unassigned DNA; note = methanogen bacteria
ggaatgcctgtttttgattccatctgtaactcatttcatattatttcaaccggaggaatgggtattaaaaatgccaatatgggatattatcataatgat

SEQ ID NO: 22409 - DNA, 102 bp, unidentified
  source 1..102: mol_type = unassigned DNA; note = methanogen bacteria
tcaaatattgttccgatagaacttttatttactgtcgtatcagcaatgacaacaacaggagcgagtgttgcaagttcaactacaatggcaggatggccatca

SEQ ID NO: 22410 - DNA, 93 bp, unidentified
  source 1..93: mol_type = unassigned DNA; note = methanogen bacteria
ggatatgatccatttaaaagtctgtttgcggcaatgacactgcagggtaacaacggtttggaacttggaataataaacaacacactaaaccct

SEQ ID NO: 22411 - DNA, 132 bp, unidentified
  source 1..132: mol_type = unassigned DNA; note = methanogen bacteria
tatgatcctggaatattggctcaggacagtttttatcaaatgaatcaaatagctaggggcagttttactaactggcatccgtttttccatacttttatagaaatgctgtgtctgaaattgtatcctgataca

SEQ ID NO: 22412 - DNA, 141 bp, unidentified
  source 1..141: mol_type = unassigned DNA; note = methanogen bacteria
gggtttaatggggatgatattaaatatgctaaaatcctaaataatcagactttaatagattatgttaattttagatattataactggtcttccagaataattatagatactgttttggcaattttagcccgtcaaaacatg

SEQ ID NO: 22413 - DNA, 120 bp, unidentified
  source 1..120: mol_type = unassigned DNA; note = methanogen bacteria
cctggaaacagcataagatttgcacaggaagtttcatactggtatcctgaatttgcaaatttcacaatccttcaaaaatcatatctgggtcttgttacaacatttggaaacctgattgag

SEQ ID NO: 22414 - DNA, 168 bp, unidentified
  source 1..168: mol_type = unassigned DNA; note = methanogen bacteria
attgacatttccgttttagaaacttctctaaaatctcttggaagtgttccgaatgttattaaaagttctccattaatgttgattccgcagatattcaaacagattgtcaatatagttccgttcatcacagatacattaaagctgtttacctatgaaggccttccaaag

SEQ ID NO: 22415 - DNA, 33 bp, unidentified
  source 1..33: mol_type = unassigned DNA; note = methanogen bacteria
tctcctgtgatatttccttcaggtgcaagagtt

SEQ ID NO: 22416 - DNA, 42 bp, unidentified
  source 1..42: mol_type = unassigned DNA; note = methanogen bacteria
ctcggttatctggcttctaattctgcggttggtttgtataat

SEQ ID NO: 22417 - DNA, 45 bp, unidentified
  source 1..45: mol_type = unassigned DNA; note = methanogen bacteria
ttaatgaatttaatatatggaaatcagtatgtgaatgcaggttct

SEQ ID NO: 22418 - DNA, 42 bp, unidentified
  source 1..42: mol_type = unassigned DNA; note = methanogen bacteria
gcggttccgtcaattgatgcagagtatggaatgaacaacatt

SEQ ID NO: 22419 - DNA, 36 bp, unidentified
  source 1..36: mol_type = unassigned DNA; note = methanogen bacteria
tatcaccttcaatacatcaagggatatgattcacag

SEQ ID NO: 22420 - DNA, 54 bp, unidentified
  source 1..54: mol_type = unassigned DNA; note = methanogen bacteria
gtaatgggcaatgtgccgatgactgagaaatacttccctcagttaatagcaagc

SEQ ID NO: 22421 - DNA, 96 bp, unidentified
  source 1..96: mol_type = unassigned DNA; note = methanogen bacteria
acagacatacacataatagatgccatttttgaaagtatgtccgctttaactggcagtggaattacaatatatagcgatgtggaatccctaccgcac

SEQ ID NO: 22422 - DNA, 99 bp, unidentified
  source 1..99: mol_type = unassigned DNA; note = methanogen bacteria
ggaatgcccctttttgattcagtttgcaatacattctgcattatctcaactggaggaatgagcgtgaaaaacgcgaatattggtttctacaataatgaa

SEQ ID NO: 22423 - DNA, 102 bp, unidentified
  source 1..102: mol_type = unassigned DNA; note = methanogen bacteria
tcaactatcattccaatggacatgttttttactgtagtttcagccattacaacaaccggagcaagcattccaaattctgttacaatgggcggatggccatca

SEQ ID NO: 22424 - DNA, 99 bp, unidentified
  source 1..99: mol_type = unassigned DNA; note = methanogen bacteria
tacggccatgatccattcaattcattattcttcacaatgtccatgcagggtaatgtcggtttggaaatagggcagatatcacaaacaatggaattgcca

SEQ ID NO: 22425 - DNA, 99 bp, unidentified
  source 1..99: mol_type = unassigned DNA; note = methanogen bacteria
gcaacaaatatgccaattattgatgctgtttttgaaagcatgtctgccctaacaggaagtgggatgacaatgtatcctgacgtggaaatattacctcat

SEQ ID NO: 22426 - DNA, 99 bp, unidentified
  source 1..99: mol_type = unassigned DNA; note = methanogen bacteria
ggactgcctgcttttgattccatctgcaatacactgagcattatttcaacaggcggtatgagcatcaagaatgctaatatgggcttttatcatgacgac

SEQ ID NO: 22427 - DNA, 102 bp, unidentified
  source 1..102: mol_type = unassigned DNA; note = methanogen bacteria
tccaacatagtcccaatggatttattgtttaccgtcgtctcagcaattacaacaaccggagcaaatgtggcatcaccagcaaccatggccagctggccgcca

SEQ ID NO: 22428 - DNA, 93 bp, unidentified
  source 1..93: mol_type = unassigned DNA; note = methanogen bacteria
ggatacgatccattcagaagcctatttgcagtaatgtcacttcagggaaataacggtttagaactcggaatcataaacagcgcattgcatccg

SEQ ID NO: 22429 - DNA, 90 bp, unidentified
  source 1..90: mol_type = unassigned DNA; note = methanogen bacteria
agtttcacattcaactggggaaccgatactgcagcatacttcgttaatactgtagggggaagttccaacctttcaaatgcaagcttcctt

SEQ ID NO: 22430 - DNA, 72 bp, unidentified
  source 1..72: mol_type = unassigned DNA; note = methanogen bacteria
acattgcctggtgcaggcatcggtatcaacacccttctgactcctgactggagcatgctttggaatgtggat

SEQ ID NO: 22431 - DNA, 105 bp, unidentified
  source 1..105: mol_type = unassigned DNA; note = methanogen bacteria
ggattcatgtcatttaccaatggtacacctatgattcagttgattaccgagggtaccggtctggtatttatcgtattcccaatgattttcaacattatgggtcct

SEQ ID NO: 22432 - DNA, 99 bp, unidentified
  source 1..99: mol_type = unassigned DNA; note = methanogen bacteria
tcaacaaacattccaattcttgacggtgtttttgaaagtgtgtctgcccttaccggcacaggcataacaatgtttcaggatgttgaaatattacctcac

SEQ ID NO: 22433 - DNA, 99 bp, unidentified
  source 1..99: mol_type = unassigned DNA; note = methanogen bacteria
ggaatgccgatttttgatgctctttgtaatacatttcacattatatcaactggtggaatgagtgttaaaaatgcaaacatgggctattatcatgatgat

SEQ ID NO: 22434 - DNA, 102 bp, unidentified
  source 1..102: mol_type = unassigned DNA; note = methanogen bacteria
tcaaatatccttccgatggaactgctttttacagtagtatctgcaataacaacaacaggtgcaaacattgttccttcaaacgttatgggaagctggccatct

SEQ ID NO: 22435 - DNA, 93 bp, unidentified
  source 1..93: mol_type = unassigned DNA; note = methanogen bacteria
ggttatgatccgtttaaaagtctttttgtagcaatgtcacttcaagggaacaatggattagacataggattaataaaccacacgttaaaccca

SEQ ID NO: 22436 - DNA, 96 bp, unidentified
  source 1..96: mol_type = unassigned DNA; note = methanogen bacteria
accgacataagctttatagacagtgcttttgaaagtatgtccgctttaactggaagtgggattacaatatacagtgatgtggaagttctgccttac

SEQ ID NO: 22437 - DNA, 99 bp, unidentified
  source 1..99: mol_type = unassigned DNA; note = methanogen bacteria
ggaatgccgttttttgactccatctgcaacaccttctgcatcatctcaaccggaggtatgagcgtgaaaaacgcaaacatgggattttacaacaatgat

SEQ ID NO: 22438 - DNA, 99 bp, unidentified
  source 1..99: mol_type = unassigned DNA; note = methanogen bacteria
tcccaaatcgttccaatagacatgttattcactgtagtttcagcggttacaacaaccggagcaagcattccaaattctaccgtaatgggtaactggccg

SEQ ID NO: 22439 - DNA, 96 bp, unidentified
  source 1..96: mol_type = unassigned DNA; note = methanogen bacteria
tacggtcatgacgcattcaattcattgtttttcacgatatcaatgcagggtaatgtcggtttggaaattggccagatttcccagactatgcaatgg

SEQ ID NO: 22440 - DNA, 99 bp, unidentified
  source 1..99: mol_type = unassigned DNA; note = methanogen bacteria
tcaaccaacatccccattattgacggtgtttttgaaagcatgtctgcccttacaggtaccggaattacaatgtttatggatgtggagattttaccccat

SEQ ID NO: 22441 - DNA, 99 bp, unidentified
  source 1..99: mol_type = unassigned DNA; note = methanogen bacteria
ggaatgcctgtttttgattccgtctgcaacacattcaccatcatctcaaccggaggaatgagcatcaaaaatgcaaatatgggattctatcacaatgac

SEQ ID NO: 22442 - DNA, 102 bp, unidentified
  source 1..102: mol_type = unassigned DNA; note = methanogen bacteria
tcaaatatcattccaatcgaattattattcactgtcgtatcggcaattaccacaaccggagcaagcattgcaatgccccatacgatggcaggatggccgtca

SEQ ID NO: 22443 - DNA, 93 bp, unidentified
  source 1..93: mol_type = unassigned DNA; note = methanogen bacteria
ggttatgatccgtttaaaagtctctttgcggccatgtcgcttcagggaaacaacggacttgaacttggaattataaattacacattaaacccg

SEQ ID NO: 22444 - DNA, 102 bp, unidentified
  source 1..102: mol_type = unassigned DNA; note = methanogen bacteria
gtaaccgacataggcatcatagacgccgtttttgaaagcgtatccgcattgaccggaagcggaataacaatatatcccgatgttgaatcactgcctcacagc

SEQ ID NO: 22445 - DNA, 99 bp, unidentified
  source 1..99: mol_type = unassigned DNA; note = methanogen bacteria
gggatgcctgttttcgattcaatctgcaatactttcagcataatctcgaccgggggaatgaacgttaaaaacgcgaatatgggattctacaacaatgac

SEQ ID NO: 22446 - DNA, 102 bp, unidentified
  source 1..102: mol_type = unassigned DNA; note = methanogen bacteria
tccacaataatccccatggacaacctgttcgtcgtggtttcagccgtcacaacaaccggggcaagcattcaatcccctatggtgatggggggatggcctcca

SEQ ID NO: 22447 - DNA, 96 bp, unidentified
  source 1..96: mol_type = unassigned DNA; note = methanogen bacteria
gggggtcatgaccctttcgactcattgtttttcacattttccatgcagggaaatatcggattggaaatcgggaacatttcacaggctttaagctct

SEQ ID NO: 22448 - DNA, 96 bp, unidentified
  source 1..96: mol_type = unassigned DNA; note = methanogen bacteria
acaggaatttcacctatcgacggcgttttcgaaagcatgtccgcattgaccggtaccggaatcacaatgttcgtggacgtggaagtcctgccccac

SEQ ID NO: 22449 - DNA, 99 bp, unidentified
  source 1..99: mol_type = unassigned DNA; note = methanogen bacteria
ggaatgcccgtctttgatgccatctgcaacacattccacattgtttcaacaggaggaatgggcattaaaaacgccaacatgggctattaccaaagcgac

SEQ ID NO: 22450 - DNA, 102 bp, unidentified
  source 1..102: mol_type = unassigned DNA; note = methanogen bacteria
tccgacatcgtgccgatagacctggtgttcaccgtcgtatcagcaatcaccaccaccggtgccagcgttgccgtgccgaacgtgatggcaggatggccttca

SEQ ID NO: 22451 - DNA, 93 bp, unidentified
  source 1..93: mol_type = unassigned DNA; note = methanogen bacteria
ggctacgacccattcaggagcctctttgccgcaatgtccctgcagggtaacaatggtttggaacttggaatcatcacccctacattaaatcct

SEQ ID NO: 22452 - DNA, 99 bp, unidentified
  source 1..99: mol_type = unassigned DNA; note = methanogen bacteria
gccacacatatccctcttcttgatggtgtttttgaaagcctgtccgcacttaccggaaccggaataacaatgttcaacgatgttgagatattacctcac

SEQ ID NO: 22453 - DNA, 99 bp, unidentified
  source 1..99: mol_type = unassigned DNA; note = methanogen bacteria
ggaatgccagtttttgattcgatctgtgccacattccacataatttccacaggaggaatgggaattaaaaacgcgaatatggcctattacaatagtgac

SEQ ID NO: 22454 - DNA, 105 bp, unidentified
  source 1..105: mol_type = unassigned DNA; note = methanogen bacteria
acttcaactatcgtcccaatggagttgctgtttaccgtcgtatcagcaatcacaacaacaggagcaacaattgtccctgcacctgtaatgggcaactggccgcca

SEQ ID NO: 22455 - DNA, 93 bp, unidentified
  source 1..93: mol_type = unassigned DNA; note = methanogen bacteria
ggatatgacccattcaaaagtctgttcagcgtaatcacccttcaagggaacaacggtttggatagtggagtcatcaccaatgcattgcatcct

SEQ ID NO: 22456 - DNA, 99 bp, unidentified
  source 1..99: mol_type = unassigned DNA; note = methanogen bacteria
gtaagtgatttaagttttattaatggagtttttgaaagtatgtctgctttaaccggaagcggaattacaatgtatcagaatgttgaaatcctaccatac

SEQ ID NO: 22457 - DNA, 99 bp, unidentified
  source 1..99: mol_type = unassigned DNA; note = methanogen bacteria
ggaatgcctgtttttgattccatttgtaatacatttactataatttcaacaggcggaatgagtattaaaaatgcaaatatcggatattaccaaagcgac

SEQ ID NO: 22458 - DNA, 102 bp, unidentified
  source 1..102: mol_type = unassigned DNA; note = methanogen bacteria
tccgatatctacccaatagagttattatttacagtagtatctgctgcaacaacaacaggtgcaagtgttgttggatttgacgttatgagaacctggccatca

SEQ ID NO: 22459 - DNA, 99 bp, unidentified
  source 1..99: mol_type = unassigned DNA; note = methanogen bacteria
tacggacatgatccattttacagtttatttgacactatttccattcagggaaatgttggtttgacattaggagaaattaatttttcacttgaagacccc

SEQ ID NO: 22460 - DNA, 96 bp, unidentified
  source 1..96: mol_type = unassigned DNA; note = methanogen bacteria
acaaacatcccacttcttgacggaatttttgaaagcatgtccgcattgacaggaaccggaatcaccatgttccaggatgttgaaatcttgccacac

SEQ ID NO: 22461 - DNA, 99 bp, unidentified
  source 1..99: mol_type = unassigned DNA; note = methanogen bacteria
ggaatgccgcttttcgatgcaatctgcagcacactccacattgtatccacaggaggaatgggaatcaagaatgcaaacatggcatactaccacaatgac

SEQ ID NO: 22462 - DNA, 102 bp, unidentified
  source 1..102: mol_type = unassigned DNA; note = methanogen bacteria
tccaacatcgtaccgatggaactgctctttacagttgtatctgcaataaccaccacaggagcaacagttgtgcatccagacatcatggcgggatggccgtca

SEQ ID NO: 22463 - DNA, 93 bp, unidentified
  source 1..93: mol_type = unassigned DNA; note = methanogen bacteria
ggatatgacccgttcaaaagcctctttgcagccatgacccttcagggaaacaacggtctggaactgggaataataaaccataccctacatccc

SEQ ID NO: 22464 - DNA, 99 bp, unidentified
  source 1..99: mol_type = unassigned DNA; note = methanogen bacteria
gcaacgaatattccgattattgatgccatctttgaaagtatgtccgcattgaccggaacaggagtgacaatgtatcctgacgtggaagtgttgccccac

SEQ ID NO: 22465 - DNA, 99 bp, unidentified
  source 1..99: mol_type = unassigned DNA; note = methanogen bacteria
ggaatgcctctttttgattcagtctgcaacaccttcagcatcatatcaaccggaggaatgggcatcaaaaatgcgaatatgggcttttaccaaaatgat

SEQ ID NO: 22466 - DNA, 102 bp, unidentified
  source 1..102: mol_type = unassigned DNA; note = methanogen bacteria
tccaacatcattccgatggaactgctcttcacagttgtctcagccatgacaacaacaggtgccagtgtagttcctgcccatgtaatggccggatggccatca

SEQ ID NO: 22467 - DNA, 93 bp, unidentified
  source 1..93: mol_type = unassigned DNA; note = methanogen bacteria
ggatatgatccattcaacagtttgtttgctgcaatgacccttcaaggaaacaacggtttggaattgggtgttgtaactcacaaattgcatcct

SEQ ID NO: 22468 - DNA, 96 bp, unidentified
  source 1..96: mol_type = unassigned DNA; note = methanogen bacteria
actggcatcagcatcgtggatgctatttttgaaagcatgtccgcattaaccggaagtggaatcacaatatatggtgatgtagaatccttaccctat

SEQ ID NO: 22469 - DNA, 99 bp, unidentified
  source 1..99: mol_type = unassigned DNA; note = methanogen bacteria
ggaatgcccctttttgattccatctgcaatacattctgcatcatctcaaccggaggcatgagcgtaaaaaatgcaaatatcggattttacaacaatgat

SEQ ID NO: 22470 - DNA, 102 bp, unidentified
  source 1..102: mol_type = unassigned DNA; note = methanogen bacteria
tccaaaattgtcccgatggatatcctatttactgtagtgtccgcgattacaacaacaggagcaagtattcaaagttcaacggtaatggttggatggccatca

SEQ ID NO: 22471 - DNA, 96 bp, unidentified
  source 1..96: mol_type = unassigned DNA; note = methanogen bacteria
tatggtcacgacccaatccattcattgtttttcaccatatctatgcagggtaacgttggtttggaaatcggacaaatctcctctgtattagaatgg

SEQ ID NO: 22472 - DNA, 144 bp, unidentified
  source 1..144: mol_type = unassigned DNA; note = methanogen bacteria
atgggcttaaatggagatgatatcaaatatgcaaaaatccttaataatcaaactattattgagtatatcaatttcagatacttcaattggtccagcaggttaattatagatacccttttagctattctggcccgtcaaaacatg

SEQ ID NO: 22473 - DNA, 120 bp, unidentified
  source 1..120: mol_type = unassigned DNA; note = methanogen bacteria
cctggaaattccatcaggtttgcgcatgaggtttcctactggtatccggaatttgctaatttcactatcattgaaaagtcatatctcggccttgttacaacattcggaaatctaatcgag

SEQ ID NO: 22474 - DNA, 171 bp, unidentified
  source 1..171: mol_type = unassigned DNA; note = methanogen bacteria
attgacatttccgttttggaaacttccatcaagtctcttggaagcgttccggaagtcattaaaaactcacaggcgatggcagttccggcaatgtttaagcaagtggtaaatgcaactccatacattactgaaactttaaagttatttacctatgaaggaattcctaaggtc

SEQ ID NO: 22475 - DNA, 30 bp, unidentified
  source 1..30: mol_type = unassigned DNA; note = methanogen bacteria
tctccgacagtattcccttcaggcgcaagg

SEQ ID NO: 22476 - DNA, 96 bp, unidentified
  source 1..96: mol_type = unassigned DNA; note = methanogen bacteria
actgacattaatattttagacggcatgtttgaaagtatgtctgcacttaccggaagtggaattacaatatattcagatgtggaagtccttcctcaa

SEQ ID NO: 22477 - DNA, 99 bp, unidentified
  source 1..99: mol_type = unassigned DNA; note = methanogen bacteria
ggaatgcctatttttgattcaatctgcaatacgttcaccaccatatcaacaggaggtatgagcatcaaaaatgcaaatataggattttatcaaaatgac

SEQ ID NO: 22478 - DNA, 99 bp, unidentified
  source 1..99: mol_type = unassigned DNA; note = methanogen bacteria
tcgaatatcattccaattgaactgttatttactgttgtatccgccgttacaacaactggagccagtgtgcaaccttcaacagtgatggggacctggccc

SEQ ID NO: 22479 - DNA, 93 bp, unidentified
  source 1..93: mol_type = unassigned DNA; note = methanogen bacteria
ggacatgacccaattgttggactattttatacaatgtcaattcagggaaatgtaggtctggaaattggacaaataacacaagtacttcaacca

SEQ ID NO: 22480 - DNA, 96 bp, unidentified
  source 1..96: mol_type = unassigned DNA; note = methanogen bacteria
acaggcataagcatcgtagacagtgtttttgaaagcatgtccgctttgaccggaagtggaattacaatatacagtgatgtggaagtattaccatac

SEQ ID NO: 22481 - DNA, 99 bp, unidentified
  source 1..99: mol_type = unassigned DNA; note = methanogen bacteria
gggatgccattattcgattctatctgcaatacgttctgtattatctcaaccggcggaatgagcgtgaaaaatgcaaacatagggtattacaacgattat

SEQ ID NO: 22482 - DNA, 99 bp, unidentified
  source 1..99: mol_type = unassigned DNA; note = methanogen bacteria
tcgacaatcattccaatggacatgttattcactgtggtttcctccattacgacaacaggagcaagcattccgaattcaacagtgatggccaggtggccg

SEQ ID NO: 22483 - DNA, 96 bp, unidentified
  source 1..96: mol_type = unassigned DNA; note = methanogen bacteria
tatggtcacgacccatttaattcattgtttttcacattttccctgcaaggtaatatcggtttagaaatcgggcagctttcccaaacaatagaatgg

SEQ ID NO: 22484 - DNA, 99 bp, unidentified
  source 1..99: mol_type = unassigned DNA; note = methanogen bacteria
gttacaggaataggcctcatcgacgggatttttgaaagtatgtctgcattaacgggcagcggaattaccatatatgacaatgttgagattttaccctac

SEQ ID NO: 22485 - DNA, 99 bp, unidentified
  source 1..99: mol_type = unassigned DNA; note = methanogen bacteria
ggaatgcctatttttgattctgtctgttccacattctccatcatatcaaccggaggtatgagtatcaagaatgcaaacatcggatattatcaaagtgat

SEQ ID NO: 22486 - DNA, 105 bp, unidentified
  source 1..105: mol_type = unassigned DNA; note = methanogen bacteria
accaccactatcgttccaattgatttattattcacaatagtatctgcagtaacaaccacaggagccagtgttgagtctccaataatgatgggaagctggcctacc

SEQ ID NO: 22487 - DNA, 96 bp, unidentified
  source 1..96: mol_type = unassigned DNA; note = methanogen bacteria
tacggccatgaaccgatagcaagcttattttacacaatatcactccagggaaatgtaggacttgaaatttccagaatgacaagcactcttgaactt

SEQ ID NO: 22488 - DNA, 99 bp, unidentified
  source 1..99: mol_type = unassigned DNA; note = methanogen bacteria
tcaacccacattccaatcatcgacggcgtttttgagagcatgtccgccctgacaggtaccggaatcaccatgttcatggatgtggaaatattacctcac

SEQ ID NO: 22489 - DNA, 99 bp, unidentified
  source 1..99: mol_type = unassigned DNA; note = methanogen bacteria
ggaatgcccctttttgattctgtctgcaatacgttccacatggtttcgacagggggaatgagcattaaaaacgcaaatatgggattctaccacaatgat

SEQ ID NO: 22490 - DNA, 102 bp, unidentified
  source 1..102: mol_type = unassigned DNA; note = methanogen bacteria
tcaaatatcgttccaatcgacctgctgtttacggtcgtgtctgcaatgacaacaaccggagcaagcgtagcgtcacctaccacaatggcaggatggccatca

SEQ ID NO: 22491 - DNA, 93 bp, unidentified
  source 1..93: mol_type = unassigned DNA; note = methanogen bacteria
ggatatgacccatttaaaagcctgtttgcagcaatgtcccttcagggaaacaacggtctggagcttggaataatcaattataccttagatcct

SEQ ID NO: 22492 - DNA, 96 bp, unidentified
  source 1..96: mol_type = unassigned DNA; note = methanogen bacteria
acgggcataagcatagtagacagcgtttttgaaagcatgtccgctttgaccggaagtggaattaccatatacagtgatgtggaagtcttaccatat

SEQ ID NO: 22493 - DNA, 99 bp, unidentified
  source 1..99: mol_type = unassigned DNA; note = methanogen bacteria
gggatgcccctttttgattcaatctgcaatacgttctgcattatctcaaccggaggaatgagcattaaaaatgcaaacataggatattacaatgattat

SEQ ID NO: 22494 - DNA, 99 bp, unidentified
  source 1..99: mol_type = unassigned DNA; note = methanogen bacteria
tcaaccatcattccaatggacatgctattcacagtggtttccgccattacgacaaccggagcaagcattccaaatgcaaccgtgatggccagatggccc

SEQ ID NO: 22495 - DNA, 96 bp, unidentified
  source 1..96: mol_type = unassigned DNA; note = methanogen bacteria
tatggtcatgacccattccattcattgtttttcacattttccatgcagggcaatataggtttggaaattggacagctatcccaaacaatagaatgg

SEQ ID NO: 22496 - DNA, 42 bp, unidentified
  source 1..42: mol_type = unassigned DNA; note = methanogen bacteria
atgcttacaaatatggtaggtagttacgaaaatggtatttat

SEQ ID NO: 22497 - DNA, 48 bp, unidentified
  source 1..48: mol_type = unassigned DNA; note = methanogen bacteria
gatattgtggtactattctttggacaaaaatattccccaactagttct

SEQ ID NO: 22498 - DNA, 144 bp, unidentified
  source 1..144: mol_type = unassigned DNA; note = methanogen bacteria
atgggattcaatggggatgatattaagtatgcaaaggttctggccaatcaaagcctggtggattatatccattacagatactataattggtccagcagggtaattatagatggccttctggtaattctgacccgctacaacatg

SEQ ID NO: 22499 - DNA, 123 bp, unidentified
  source 1..123: mol_type = unassigned DNA; note = methanogen bacteria
cctggaaacagcataaggtttgctcatgaggtctcttactggtatcctgaatttgccaatttcactatcattgacaaatcctatttgggtcttgttacaacattcggaaacattattgagcaa

SEQ ID NO: 22500 - DNA, 168 bp, unidentified
  source 1..168: mol_type = unassigned DNA; note = methanogen bacteria
atcgatatttccgttttggatacttccctgaaatcccttggaagtgttccgggcttcatcaaaagctcacctctgatggcaattccacagatattcaagcagatagtcagcgcaacaccatacctgacagaaaccttgaagctatttacctatgaaggccttccaaag

SEQ ID NO: 22501 - DNA, 30 bp, unidentified
  source 1..30: mol_type = unassigned DNA; note = methanogen bacteria
tcaccggtaatattcccttcaggcgcaaga

SEQ ID NO: 22502 - DNA, 96 bp, unidentified
  source 1..96: mol_type = unassigned DNA; note = methanogen bacteria
acaaatctgcctattcttgacggcgtttttgaaagcatgtctgcattgacaggcagcggaataacaatgtatgaaaatgtggaaatattgcctcac

SEQ ID NO: 22503 - DNA, 99 bp, unidentified
  source 1..99: mol_type = unassigned DNA; note = methanogen bacteria
ggaatgcctatgttcgattccatctgtaacgcattttcaataatatccacaggaggaatgaatgtgaaaaatgcaaatatgggatactaccagagtgat

SEQ ID NO: 22504 - DNA, 102 bp, unidentified
  source 1..102: mol_type = unassigned DNA; note = methanogen bacteria
tcaaacattatgccgatggaccttctcttcaccatagtttctgcaattacaacaactggagcaaatgttgcaccccctacagcaatggccaactggccaccg

SEQ ID NO: 22505 - DNA, 93 bp, unidentified
  source 1..93: mol_type = unassigned DNA; note = methanogen bacteria
ggatatgacccattcagaagcctgtttgcaattatgtcccttcagggaaacaatggattggaattgggaatagtcaattatacattacaccct

SEQ ID NO: 22506 - DNA, 96 bp, unidentified
  source 1..96: mol_type = unassigned DNA; note = methanogen bacteria
accgaaattcacatagtggacggcatgtttgaaagcatgtctgcacttacgggcagcggaataacaatttatggtgatgtggaagtcctgcctaaa

SEQ ID NO: 22507 - DNA, 99 bp, unidentified
  source 1..99: mol_type = unassigned DNA; note = methanogen bacteria
ggaatgcctctttttgactcgatttgtaataccttcagcacaatttcaacaggaggtatggggattaaaaatgcaaatatgggattttatcaaaatgac

SEQ ID NO: 22508 - DNA, 99 bp, unidentified
  source 1..99: mol_type = unassigned DNA; note = methanogen bacteria
tcatatatagtgccaatcgagttgttatttaccgttgtatctgccataacaacaacaggagcaagcgtacagcccgcttcagtgatgggaacatggcca

SEQ ID NO: 22509 - DNA, 93 bp, unidentified
  source 1..93: mol_type = unassigned DNA; note = methanogen bacteria
ggttatgaaccattttcaggactattctatacaatgtccattcagggtaatgtaggtttagagatttctacgattgctccgacacttgaactt

SEQ ID NO: 22510 - DNA, 36 bp, unidentified
  source 1..36: mol_type = unassigned DNA; note = methanogen bacteria
ctctcaaaaatggtgggaaactatgcaacagggatt

SEQ ID NO: 22511 - DNA, 48 bp, unidentified
  source 1..48: mol_type = unassigned DNA; note = methanogen bacteria
gatattatacaattaatttacggccacaaatatgatgctgcttcttca

SEQ ID NO: 22512 - DNA, 36 bp, unidentified
  source 1..36: mol_type = unassigned DNA; note = methanogen bacteria
tccatgcttgctggagattatgctacaggactttat

SEQ ID NO: 22513 - DNA, 42 bp, unidentified
  source 1..42: mol_type = unassigned DNA; note = methanogen bacteria
cttattaacttgatatatactaatgaatttgctcttgcgtca

SEQ ID NO: 22514 - DNA, 39 bp, unidentified
  source 1..39: mol_type = unassigned DNA; note = methanogen bacteria
ttaggttttatgactactgcatattctacaggaatttat

SEQ ID NO: 22515 - DNA, 39 bp, unidentified
  source 1..39: mol_type = unassigned DNA; note = methanogen bacteria
attgttctaatttatggtaatgcatatatatcatcaagt

SEQ ID NO: 22516 - DNA, 30 bp, unidentified
  source 1..30: mol_type = unassigned DNA; note = methanogen bacteria
gccaggtatcttggagttgaaaaatacggt

SEQ ID NO: 22517 - DNA, 36 bp, unidentified
  source 1..36: mol_type = unassigned DNA; note = methanogen bacteria
cttcaaaatatgattggaaattatgctactggtatt

SEQ ID NO: 22518 - DNA, 45 bp, unidentified
  source 1..45: mol_type = unassigned DNA; note = methanogen bacteria
gacataatacaacttatttatggaaataaatatgacccctcatca

SEQ ID NO: 22519 - DNA, 30 bp, unidentified
  source 1..30: mol_type = unassigned DNA; note = methanogen bacteria
gctcgttatctgggtgtatctgattttgga

SEQ ID NO: 22520 - DNA, 39 bp, unidentified
  source 1..39: mol_type = unassigned DNA; note = methanogen bacteria
actcaatttgttggaggttatttcactggtctttataat

SEQ ID NO: 22521 - DNA, 48 bp, unidentified
  source 1..48: mol_type = unassigned DNA; note = methanogen bacteria
ggggacgttatatcgattatttatggaaatcagtattcagattctgct

SEQ ID NO: 22522 - DNA, 39 bp, unidentified
  source 1..39: mol_type = unassigned DNA; note = methanogen bacteria
cttcaaaatatggttggaaattatgctacaggtatttac

SEQ ID NO: 22523 - DNA, 48 bp, unidentified
  source 1..48: mol_type = unassigned DNA; note = methanogen bacteria
gatataatacaattcatttatggtaataaatatgatcctgcatcatca

SEQ ID NO: 22524 - DNA, 96 bp, unidentified
  source 1..96: mol_type = unassigned DNA; note = methanogen bacteria
actggcataaatatcatagatggtgtttttgaaagtatgtctgctttaaccggaagtggaattacaatctatcctgatgtggaaattttaccatac

SEQ ID NO: 22525 - DNA, 99 bp, unidentified
  source 1..99: mol_type = unassigned DNA; note = methanogen bacteria
ggaatgcctatttttgattcaatttgtcatacattcaccaccatttcaacaggtgggatgagcataaaaaacgccaatataggcttttatcacaatgac

SEQ ID NO: 22526 - DNA, 102 bp, unidentified
  source 1..102: mol_type = unassigned DNA; note = methanogen bacteria
tccaatattgtccctatggatattttgttccacattgtttctgcaattacaacaacaggagctagtattcaaagtccaaccgtaatgggtacatggccggcc

SEQ ID NO: 22527 - DNA, 96 bp, unidentified
  source 1..96: mol_type = unassigned DNA; note = methanogen bacteria
tatggtcatgacccgttcaactcattgttttttgctatttccatgcagggcaatgttggtttggagatcggccagatgtcacagacattggaattg

SEQ ID NO: 22528 - DNA, 39 bp, unidentified
  source 1..39: mol_type = unassigned DNA; note = methanogen bacteria
cttaccaacatagtagggaattatgcctcaggaatatac

SEQ ID NO: 22529 - DNA, 51 bp, unidentified
  source 1..51: mol_type = unassigned DNA; note = methanogen bacteria
aacgatataatacacttaatttatggaaacaaatatgatgctgcatcacct

SEQ ID NO: 22530 - DNA, 36 bp, unidentified
  source 1..36: mol_type = unassigned DNA; note = methanogen bacteria
ctaacaaatatggtggggagctatgcaacaggaatc

SEQ ID NO: 22531 - DNA, 48 bp, unidentified
  source 1..48: mol_type = unassigned DNA; note = methanogen bacteria
ctagatttaattcaattaatttatggacacgaatacgattctgcttat

SEQ ID NO: 22532 - DNA, 39 bp, unidentified
  source 1..39: mol_type = unassigned DNA; note = methanogen bacteria
aaagaaaacaaaaacaacaaagaaaaagaagaaaaacat

SEQ ID NO: 22533 - DNA, 72 bp, unidentified
  source 1..72: mol_type = unassigned DNA; note = methanogen bacteria
acctacaccattttcttttttataccaccaaccattcaaacattcaccacttccgattcagcccgccactct

SEQ ID NO: 22534 - DNA, 33 bp, unidentified
  source 1..33: mol_type = unassigned DNA; note = methanogen bacteria
ctaaacaatataattggagattatgcaactgga

SEQ ID NO: 22535 - DNA, 45 bp, unidentified
  source 1..45: mol_type = unassigned DNA; note = methanogen bacteria
gacatcatgttaatcatatatggtcaagaatatgctatgggaggt

SEQ ID NO: 22536 - DNA, 42 bp, unidentified
  source 1..42: mol_type = unassigned DNA; note = methanogen bacteria
atgcttaccaatatggtaagtagttatgcaaatggtatttat

SEQ ID NO: 22537 - DNA, 48 bp, unidentified
  source 1..48: mol_type = unassigned DNA; note = methanogen bacteria
gatattgttgtattcttctttgggcaaaaatatgctccaacaagttcc

SEQ ID NO: 22538 - DNA, 156 bp, unidentified
  source 1..156: mol_type = unassigned DNA; note = methanogen bacteria
ctggcaaatacctttatccacgttgatgaatactggacatacactcttgtgaatctgcctttcatcgatggaatgaaggtggcatttcatgacgtccatcctccattgtactatatgatattgtatttgctgactcctttcggtttggacaatctc

SEQ ID NO: 22539 - DNA, 114 bp, unidentified
  source 1..114: mol_type = unassigned DNA; note = methanogen bacteria
attcgccagatttcaaccgaagctgcaggatcacatgaaggctttgaaatgtcaagccttgtgcattatatgttaggatttgcaattaaaagcgaaaacttcagagccgacagc

SEQ ID NO: 22540 - DNA, 39 bp, unidentified
  source 1..39: mol_type = unassigned DNA; note = methanogen bacteria
cttcaaaatatggttggaagttatgctactggaatttat

SEQ ID NO: 22541 - DNA, 48 bp, unidentified
  source 1..48: mol_type = unassigned DNA; note = methanogen bacteria
gatataatacaactaatttatggaaataaatatgatcccgcatcatca

SEQ ID NO: 22542 - DNA, 132 bp, unidentified
  source 1..132: mol_type = unassigned DNA; note = methanogen bacteria
tatgatccgggaattttgactcaagatagtttctatcaaatgaatcaaattgcaagttctaattttactaactggcatccgtttttccatacttttatagaaatgctgtgtctgaaattgtatccggataca

SEQ ID NO: 22543 - DNA, 96 bp, unidentified
  source 1..96: mol_type = unassigned DNA; note = methanogen bacteria
actggtataaacttcatagactgtatttttgaaagcatgtctgctttaactggaagtggaattacaatttatagtgatgttgaagtattaccttat

SEQ ID NO: 22544 - DNA, 102 bp, unidentified
  source 1..102: mol_type = unassigned DNA; note = methanogen bacteria
gcggggatgcctgtttttgattcgatttgccatacattcagtactatttcgacaggaggtatgagcgtaaaaaatgccaacattggattttaccacagtgat

SEQ ID NO: 22545 - DNA, 102 bp, unidentified
  source 1..102: mol_type = unassigned DNA; note = methanogen bacteria
tccaatatagttcctatggaggttttattccatgttgtctctgcaataacaacaacgggtgcaagcattcaaagtgctactgtaatggcgggctggccgtca

SEQ ID NO: 22546 - DNA, 99 bp, unidentified
  source 1..99: mol_type = unassigned DNA; note = methanogen bacteria
tatggtcatgacccgttccagtcattattctttactatttcaatgcagggcaatgtcggtctggaaatcggacagatgtcccaggcaatagaattgccg

SEQ ID NO: 22547 - DNA, 36 bp, unidentified
  source 1..36: mol_type = unassigned DNA; note = methanogen bacteria
ttatctaatataattggtgattatgctactggtatc

SEQ ID NO: 22548 - DNA, 51 bp, unidentified
  source 1..51: mol_type = unassigned DNA; note = methanogen bacteria
acagatattattcaattaatattcggtatagaatttattgaatcagcatct

SEQ ID NO: 22549 - DNA, 30 bp, unidentified
  source 1..30: mol_type = unassigned DNA; note = methanogen bacteria
gctagataccttggagttagtaattatgga

SEQ ID NO: 22550 - DNA, 36 bp, unidentified
  source 1..36: mol_type = unassigned DNA; note = methanogen bacteria
ttaacccaaattgttgggaactatgcaactggaata

SEQ ID NO: 22551 - DNA, 51 bp, unidentified
  source 1..51: mol_type = unassigned DNA; note = methanogen bacteria
ctagacataattcaattaatttatggacatgaatatgatgcagcatcatca

SEQ ID NO: 22552 - DNA, 30 bp, unidentified
  source 1..30: mol_type = unassigned DNA; note = methanogen bacteria
gctcgatatcttggagttgagcaatatggt

SEQ ID NO: 22553 - DNA, 36 bp, unidentified
  source 1..36: mol_type = unassigned DNA; note = methanogen bacteria
cttacaaatatggttggaaattatgcaactggtatt

SEQ ID NO: 22554 - DNA, 51 bp, unidentified
  source 1..51: mol_type = unassigned DNA; note = methanogen bacteria
acagacatcatccatttgatttacggacatcaatacgatgcatcatcttca

SEQ ID NO: 22555 - DNA, 96 bp, unidentified
  source 1..96: mol_type = unassigned DNA; note = methanogen bacteria
acaggcataaatatcattgacggtatttttgaaagtatgtctgctttaaccggaagtggaattacaatctatcctgatgtggaagtcttgccttat

SEQ ID NO: 22556 - DNA, 99 bp, unidentified
  source 1..99: mol_type = unassigned DNA; note = methanogen bacteria
ggaatgcctttttttgattcggtttgccatacattcaccaccatttcaaccggaggtatgagtataaaaaatgccaacataggcttttatcacaatgac

SEQ ID NO: 22557 - DNA, 102 bp, unidentified
  source 1..102: mol_type = unassigned DNA; note = methanogen bacteria
tcaaatattgtgcctatggatattttattccatattgtttctgcaattacaacaactggggcaagtattcaaagttcaaccgtaatggggacctggcctgcc

SEQ ID NO: 22558 - DNA, 96 bp, unidentified
  source 1..96: mol_type = unassigned DNA; note = methanogen bacteria
tatggtcatgacccgttcaattcattattttttgctatttcaatgcagggcaatgttggtttggagattggacagatttcacagaacttggaattg

SEQ ID NO: 22559 - DNA, 36 bp, unidentified
  source 1..36: mol_type = unassigned DNA; note = methanogen bacteria
ctaacaaatattattggagactatcctacaggaata

SEQ ID NO: 22560 - DNA, 48 bp, unidentified
  source 1..48: mol_type = unassigned DNA; note = methanogen bacteria
gacataattcattttatctatggtcatcaatacgaggaggcatcatct

SEQ ID NO: 22561 - DNA, 39 bp, unidentified
  source 1..39: mol_type = unassigned DNA; note = methanogen bacteria
cttacaaatatggttggaagttatgcgactggaatttat

SEQ ID NO: 22562 - DNA, 51 bp, unidentified
  source 1..51: mol_type = unassigned DNA; note = methanogen bacteria
tttgatattgtgcaactaatctatgggcataaatttgaccctgcttcctca

SEQ ID NO: 22563 - DNA, 42 bp, unidentified
  source 1..42: mol_type = unassigned DNA; note = methanogen bacteria
atgttaaccaatatggttggaaattatgccacaggaatttat

SEQ ID NO: 22564 - DNA, 51 bp, unidentified
  source 1..51: mol_type = unassigned DNA; note = methanogen bacteria
acagacattatccatctgatatatgggcatcaatatgatgcatccgcttca

SEQ ID NO: 22565 - DNA, 36 bp, unidentified
  source 1..36: mol_type = unassigned DNA; note = methanogen bacteria
cagtttttagttggtgattatcctacaggaatttat

SEQ ID NO: 22566 - DNA, 45 bp, unidentified
  source 1..45: mol_type = unassigned DNA; note = methanogen bacteria
tatttgattaatttgatttattcaagtgaatatgctctagcagct

SEQ ID NO: 22567 - DNA, 96 bp, unidentified
  source 1..96: mol_type = unassigned DNA; note = methanogen bacteria
acaaacattcctattattgatggtgtttttgaaagtgtttcagcattaactggaactggaataacgatatttgaaaatgtggaggcattaccctat

SEQ ID NO: 22568 - DNA, 99 bp, unidentified
  source 1..99: mol_type = unassigned DNA; note = methanogen bacteria
ggaatgcctctttttgatgctgtttgtaatactttctgtatcatttcaacaggaggtatgggggttaagaatgcaaatatgggatattaccaaaatgat

SEQ ID NO: 22569 - DNA, 102 bp, unidentified
  source 1..102: mol_type = unassigned DNA; note = methanogen bacteria
tcagacattattccaatggaactggtattcacagtaacatccgtcattacaacaactggtgccagtgtagcttcagtggatgcgatggcaagttggccggca

SEQ ID NO: 22570 - DNA, 93 bp, unidentified
  source 1..93: mol_type = unassigned DNA; note = methanogen bacteria
ggatatgatccattcaaaagcctatttgcatcaatgtcacttcaaggaaacaatggtttagaactaggaataataaaccataccatgaaccca

SEQ ID NO: 22571 - DNA, 36 bp, unidentified
  source 1..36: mol_type = unassigned DNA; note = methanogen bacteria
ttaactaaacttgttggtaattatgccactggaata

SEQ ID NO: 22572 - DNA, 51 bp, unidentified
  source 1..51: mol_type = unassigned DNA; note = methanogen bacteria
acagacattatacatttaatttacggtcatgaatacgatgctgcatcatca

SEQ ID NO: 22573 - DNA, 30 bp, unidentified
  source 1..30: mol_type = unassigned DNA; note = methanogen bacteria
gccagatatcttggtgtaaacaattatggt

SEQ ID NO: 22574 - DNA, 36 bp, unidentified
  source 1..36: mol_type = unassigned DNA; note = methanogen bacteria
cttagcgaacttgttggtgattatgcaaacggaatc

SEQ ID NO: 22575 - DNA, 45 bp, unidentified
  source 1..45: mol_type = unassigned DNA; note = methanogen bacteria
gatattatccaattaatttacggccaccaatatgatgctgcagca

SEQ ID NO: 22576 - DNA, 36 bp, unidentified
  source 1..36: mol_type = unassigned DNA; note = methanogen bacteria
ctcacaaatatggttggaacttatgcaacaggaata

SEQ ID NO: 22577 - DNA, 48 bp, unidentified
  source 1..48: mol_type = unassigned DNA; note = methanogen bacteria
gatataattactttaatttatggtcatgaatatgatgccgcatcatct

SEQ ID NO: 22578 - DNA, 96 bp, unidentified
  source 1..96: mol_type = unassigned DNA; note = methanogen bacteria
actggattaaatattattgacagtatatttgaaagtatgtccgccttaaccggaagcggagttacaatgtatcataatgttgaaattctaccccac

SEQ ID NO: 22579 - DNA, 99 bp, unidentified
  source 1..99: mol_type = unassigned DNA; note = methanogen bacteria
ggaatgccaatttttgattctgtgtgtaatactttcagtatcatatccaccggtggaatgagtattaaaaatgcaaatatcggattttaccacaacaat

SEQ ID NO: 22580 - DNA, 102 bp, unidentified
  source 1..102: mol_type = unassigned DNA; note = methanogen bacteria
acaaatattgttccaatggaactattgtttaccattgtatcagcaattacaacaaccggcgcaagtgttcaaggacctgccgtgatgatgacttggccatca

SEQ ID NO: 22581 - DNA, 93 bp, unidentified
  source 1..93: mol_type = unassigned DNA; note = methanogen bacteria
tatggtcatgacccattcaaaagtctgtttgatacaatatcaatacaaggaaatgttggtttagaccttggccaaattacaacctgtgaacta

SEQ ID NO: 22582 - DNA, 39 bp, unidentified
  source 1..39: mol_type = unassigned DNA; note = methanogen bacteria
cttacagcattaattggagattatgctactggaatatac

SEQ ID NO: 22583 - DNA, 45 bp, unidentified
  source 1..45: mol_type = unassigned DNA; note = methanogen bacteria
gaaattatcacatttatttatggtcatgaatttgatgcatcagca

SEQ ID NO: 22584 - DNA, 36 bp, unidentified
  source 1..36: mol_type = unassigned DNA; note = methanogen bacteria
cttaccaaaattgttggtgattatgcaacaggaatt

SEQ ID NO: 22585 - DNA, 45 bp, unidentified
  source 1..45: mol_type = unassigned DNA; note = methanogen bacteria
gacatcatacagttaatatacggtcatcagtatgatgccgcagca

SEQ ID NO: 22586 - DNA, 33 bp, unidentified
  source 1..33: mol_type = unassigned DNA; note = methanogen bacteria
gctagatatttgggtccttctgagtttggtatt

SEQ ID NO: 22587 - DNA, 42 bp, unidentified
  source 1..42: mol_type = unassigned DNA; note = methanogen bacteria
cttactcaattttcatcaacttatgacactggtctttataac

SEQ ID NO: 22588 - DNA, 48 bp, unidentified
  source 1..48: mol_type = unassigned DNA; note = methanogen bacteria
tttgatattattaatatttatggttctgattatgatggtgctgctgat

SEQ ID NO: 22589 - DNA, 39 bp, unidentified
  source 1..39: mol_type = unassigned DNA; note = methanogen bacteria
ctcaccaatcttattggaaattccgctacaggaatatat

SEQ ID NO: 22590 - DNA, 42 bp, unidentified
  source 1..42: mol_type = unassigned DNA; note = methanogen bacteria
attgtcctattgatttatggtccggaattcaccgattcagca

SEQ ID NO: 22591 - DNA, 99 bp, unidentified
  source 1..99: mol_type = unassigned DNA; note = methanogen bacteria
acagatatcggtattgtggatagcctttttgaaagcatgtctgccctgactggaagtggaattacaatatatcctgatgttgaatccttgcctaatagt

SEQ ID NO: 22592 - DNA, 99 bp, unidentified
  source 1..99: mol_type = unassigned DNA; note = methanogen bacteria
ggaatgcctctttttgattctatatgtcatacattcagtgtcatttcaacagggggtatgagtacaaagaatgcaaacattggattttaccatgatgat

SEQ ID NO: 22593 - DNA, 102 bp, unidentified
  source 1..102: mol_type = unassigned DNA; note = methanogen bacteria
tcacaaatcactccaatggataatttatttgttgtggtttctgcgattacaaccactggatcaagtattcaaagttcaactgttatgggcggatggcctcca

SEQ ID NO: 22594 - DNA, 96 bp, unidentified
  source 1..96: mol_type = unassigned DNA; note = methanogen bacteria
tatgggcatgatgcttttgattccttgtttttttcaatgtccatgcaggggaatgtcggtttggagattgggcagatgtcacaaacaattgaatgg

SEQ ID NO: 22595 - DNA, 132 bp, unidentified
  source 1..132: mol_type = unassigned DNA; note = methanogen bacteria
tataatcctggtgtcttaactgtttcttcatacagtcagcttcaccagatagctaccggcgaatttacaactgcccatccgatttttcacacattaatcgaaatgctattgattaaaatctttggaacaccg

SEQ ID NO: 22596 - DNA, 213 bp, unidentified
  source 1..213: mol_type = unassigned DNA; note = methanogen bacteria
tacgatgtccagactgataaattaaaaatacctgcagatgatgcgtttgaaaacaacattaaccttaagggcgctcaaaatcagtttttctcaacaataaatgctgaacctgaacaggaatatgaaaagataagttcagtaaatacaaaacaaggcagttatgccattatagattcgtatgttgacacatggcaggaaaatccgattttagag

SEQ ID NO: 22597 - DNA, 45 bp, unidentified
  source 1..45: mol_type = unassigned DNA; note = methanogen bacteria
atcaaagaaattagaataacagataccataagctttttgcttttg

SEQ ID NO: 22598 - DNA, 30 bp, unidentified
  source 1..30: mol_type = unassigned DNA; note = methanogen bacteria
agcggacagtcaattgaaaccatatttcat

SEQ ID NO: 22599 - DNA, 126 bp, unidentified
  source 1..126: mol_type = unassigned DNA; note = methanogen bacteria
gtttcacttctgccgtaccatccatatgcattcgcaatggcatcaggtattggaagcgcaagtatgaatgccgctgcattggttccattggtacacatgcatcctgccatggaaacacagctggaa

SEQ ID NO: 22600 - DNA, 48 bp, unidentified
  source 1..48: mol_type = unassigned DNA; note = methanogen bacteria
ggaatgccaacttcagaatttgtaacccattacgcttcacaggtagag

SEQ ID NO: 22601 - DNA, 66 bp, unidentified
  source 1..66: mol_type = unassigned DNA; note = methanogen bacteria
cctccaataatgtttgaagagatggctgatttgtattctattccttactggttaactggattcaac

SEQ ID NO: 22602 - DNA, 54 bp, unidentified
  source 1..54: mol_type = unassigned DNA; note = methanogen bacteria
cagtacttgtggggaacaatgggtgattcattttacttgaaagcgaacatttct

SEQ ID NO: 22603 - DNA, 36 bp, unidentified
  source 1..36: mol_type = unassigned DNA; note = methanogen bacteria
ctatcttatttgtctggaaattattcaactgggctt

SEQ ID NO: 22604 - DNA, 51 bp, unidentified
  source 1..51: mol_type = unassigned DNA; note = methanogen bacteria
agacctttagttgatttgatttaccgcaatcagtattctttagcaaccacc

SEQ ID NO: 22605 - DNA, 30 bp, unidentified
  source 1..30: mol_type = unassigned DNA; note = methanogen bacteria
gcaaattatttgggtgctgaaggttttgga

SEQ ID NO: 22606 - DNA, 36 bp, unidentified
  source 1..36: mol_type = unassigned DNA; note = methanogen bacteria
tcttttatacaaggagatatttctgtaggtttgtat

SEQ ID NO: 22607 - DNA, 45 bp, unidentified
  source 1..45: mol_type = unassigned DNA; note = methanogen bacteria
gaaataattttttttatttattctccagaatatttagattcagtt

SEQ ID NO: 22608 - DNA, 93 bp, unidentified
  source 1..93: mol_type = unassigned DNA; note = methanogen bacteria
tcaagtttcaattttgcatggggaagtgatccggcactttactttgtaaaatccgttggtggaagctcaaatatctccaatttcacatcaatt

SEQ ID NO: 22609 - DNA, 72 bp, unidentified
  source 1..72: mol_type = unassigned DNA; note = methanogen bacteria
atttcccttcctggtgctggtattggtattgatactttgttaaatcctaattggaatagcttaacggatgct

SEQ ID NO: 22610 - DNA, 105 bp, unidentified
  source 1..105: mol_type = unassigned DNA; note = methanogen bacteria
ggatacatgtctttaacttcaggaacgccgatgattcaattgatatcggaaggaacaggacttgttttcattgtttttccaatgatttttaatataatgggtcct

SEQ ID NO: 22611 - DNA, 36 bp, unidentified
  source 1..36: mol_type = unassigned DNA; note = methanogen bacteria
cttacccctatggccggagactatgcaacaggaata

SEQ ID NO: 22612 - DNA, 51 bp, unidentified
  source 1..51: mol_type = unassigned DNA; note = methanogen bacteria
acagatattgttgttttattcttcggcagagaatatgcggctgcttcaaca

SEQ ID NO: 22613 - DNA, 36 bp, unidentified
  source 1..36: mol_type = unassigned DNA; note = methanogen bacteria
ttatcctatttgactggagactatgcaacaggactc

SEQ ID NO: 22614 - DNA, 51 bp, unidentified
  source 1..51: mol_type = unassigned DNA; note = methanogen bacteria
agacctcttgtagaccttatctacagcaatcaatactcacttgcaacaact

SEQ ID NO: 22615 - DNA, 132 bp, unidentified
  source 1..132: mol_type = unassigned DNA; note = methanogen bacteria
ttcaatcccggtgttttgacttatgattcatttgaccagttaagccagattgcatatcataattttggcacttggcatccgtttttccatacttttattgaaatgctatgtcttaaaatttatcctgaccct

SEQ ID NO: 22616 - DNA, 39 bp, unidentified
  source 1..39: mol_type = unassigned DNA; note = methanogen bacteria
atacaatttctagctggagattatgctacaggaatctat

SEQ ID NO: 22617 - DNA, 51 bp, unidentified
  source 1..51: mol_type = unassigned DNA; note = methanogen bacteria
ccttatataatcgatttgatttacagtagcgagtatgctttggcgtcttct

SEQ ID NO: 22618 - DNA, 36 bp, unidentified
  source 1..36: mol_type = unassigned DNA; note = methanogen bacteria
cagatgattgcaggagattatgctacaggattatat

SEQ ID NO: 22619 - DNA, 48 bp, unidentified
  source 1..48: mol_type = unassigned DNA; note = methanogen bacteria
tatataatcaatttaatttacagcagccaatatgcattagcttcacca

SEQ ID NO: 22620 - DNA, 42 bp, unidentified
  source 1..42: mol_type = unassigned DNA; note = methanogen bacteria
atgcttactcaaatgtcaaatacatattatgtgggtttatat

SEQ ID NO: 22621 - DNA, 45 bp, unidentified
  source 1..45: mol_type = unassigned DNA; note = methanogen bacteria
gatatgatcgttttctgttttggttcaaagttttcagaggcaggt

SEQ ID NO: 22622 - DNA, 30 bp, unidentified
  source 1..30: mol_type = unassigned DNA; note = methanogen bacteria
gcaagatacttgggtccatcagaatatggt

SEQ ID NO: 22623 - DNA, 42 bp, unidentified
  source 1..42: mol_type = unassigned DNA; note = methanogen bacteria
atgatcactcagatgtcaacaacttacaatgcaggtttgtac

SEQ ID NO: 22624 - DNA, 45 bp, unidentified
  source 1..45: mol_type = unassigned DNA; note = methanogen bacteria
tatgatttaattggaatttatggagcacagttcattgaagcgggt

SEQ ID NO: 22625 - DNA, 36 bp, unidentified
  source 1..36: mol_type = unassigned DNA; note = methanogen bacteria
tcatggcttgtaggagattatgctacaggaatctat

SEQ ID NO: 22626 - DNA, 51 bp, unidentified
  source 1..51: mol_type = unassigned DNA; note = methanogen bacteria
ccatacttgataactctcatttatggcagcacatatgctctagctgctatt

SEQ ID NO: 22627 - DNA, 36 bp, unidentified
  source 1..36: mol_type = unassigned DNA; note = methanogen bacteria
atatcttatttaagtggagactatgctacaggactc

SEQ ID NO: 22628 - DNA, 51 bp, unidentified
  source 1..51: mol_type = unassigned DNA; note = methanogen bacteria
agacctcttgtagatcttatctacagcaatcaatactcacttgcaacaact

SEQ ID NO: 22629 - DNA, 39 bp, unidentified
  source 1..39: mol_type = unassigned DNA; note = methanogen bacteria
atttcttggttgtctggagattattctacaggtatttat

SEQ ID NO: 22630 - DNA, 48 bp, unidentified
  source 1..48: mol_type = unassigned DNA; note = methanogen bacteria
tatatagttacattaatttatagtagccaatatgctttggcatctgcg

SEQ ID NO: 22631 - DNA, 36 bp, unidentified
  source 1..36: mol_type = unassigned DNA; note = methanogen bacteria
attgcaggccttggtgtagaccagcttgctgctata

SEQ ID NO: 22632 - DNA, 57 bp, unidentified
  source 1..57: mol_type = unassigned DNA; note = methanogen bacteria
gaactgattatttttatgggaggtcgtggaattgcacttgactatgctatgcaatat

SEQ ID NO: 22633 - DNA, 36 bp, unidentified
  source 1..36: mol_type = unassigned DNA; note = methanogen bacteria
ctggaggtttctacaacggattatattgctgttttt

SEQ ID NO: 22634 - DNA, 60 bp, unidentified
  source 1..60: mol_type = unassigned DNA; note = methanogen bacteria
cttgcatatctcttttcatatggtgaaacgagtataaggttattgaatccaacaaccaca

SEQ ID NO: 22635 - DNA, 33 bp, unidentified
  source 1..33: mol_type = unassigned DNA; note = methanogen bacteria
tcttttttaactggaaactacgcaactggactt

SEQ ID NO: 22636 - DNA, 51 bp, unidentified
  source 1..51: mol_type = unassigned DNA; note = methanogen bacteria
agaccaattgttgatttcatttacagtaatcaatattcattagcatcaacc

SEQ ID NO: 22637 - DNA, 30 bp, unidentified
  source 1..30: mol_type = unassigned DNA; note = methanogen bacteria
gctagatatttgggaaaatctgattttgga

SEQ ID NO: 22638 - DNA, 39 bp, unidentified
  source 1..39: mol_type = unassigned DNA; note = methanogen bacteria
ttggaatatttatccgctcaatcatctgtaggcatgtat

SEQ ID NO: 22639 - DNA, 39 bp, unidentified
  source 1..39: mol_type = unassigned DNA; note = methanogen bacteria
atgaatttcatttatgggagccaatattatggtactgga

SEQ ID NO: 22640 - DNA, 36 bp, unidentified
  source 1..36: mol_type = unassigned DNA; note = methanogen bacteria
atttcttggttggcaaatgattatgcaactggatta

SEQ ID NO: 22641 - DNA, 51 bp, unidentified
  source 1..51: mol_type = unassigned DNA; note = methanogen bacteria
ccatatctaattgatttaatttatactaatcagtatgctttagcttctctg

SEQ ID NO: 22642 - DNA, 39 bp, unidentified
  source 1..39: mol_type = unassigned DNA; note = methanogen bacteria
cttacaaatatggttagtagttatgcaaatggtatttat

SEQ ID NO: 22643 - DNA, 48 bp, unidentified
  source 1..48: mol_type = unassigned DNA; note = methanogen bacteria
gatattgttgtcctattttttggaaaagaatttctagcagcaagttca

SEQ ID NO: 22644 - DNA, 39 bp, unidentified; identical to SEQ ID NO: 22616
  source 1..39: mol_type = unassigned DNA; note = methanogen bacteria

SEQ ID NO: 22645 - DNA, 51 bp, unidentified; identical to SEQ ID NO: 22617
  source 1..51: mol_type = unassigned DNA; note = methanogen bacteria

SEQ ID NO: 22646 - DNA, 36 bp, unidentified
  source 1..36: mol_type = unassigned DNA; note = methanogen bacteria
tctcaggttgttgttgatttgaatactgatgtgagt

SEQ ID NO: 22647 - DNA, 162 bp, unidentified
  source 1..162: mol_type = unassigned DNA; note = methanogen bacteria
attatgggcggtatcagcaatgcagtaggtacctatgcacctgcacattccggcgacgaacagttccatcaggatgttttcaatcacttccagaaaatggctagtgtaaacgaaattgcatcacagggcagtactgttgtgactattgtagacagtattttt

SEQ ID NO: 22648 - DNA, 30 bp, unidentified
  source 1..30: mol_type = unassigned DNA; note = methanogen bacteria
gctcgttatctgggtgtttataataatggt

SEQ ID NO: 22649 - DNA, 42 bp, unidentified
  source 1..42: mol_type = unassigned DNA; note = methanogen bacteria
atgctaactcaattttcaagtgcatatcaaacaggtctttat

SEQ ID NO: 22650 - DNA, 51 bp, unidentified
  source 1..51: mol_type = unassigned DNA; note = methanogen bacteria
aatgatataattgttttctgttacggtaaccagtatgccagtgcagacaat

SEQ ID NO: 22651 - DNA, 36 bp, unidentified
  source 1..36: mol_type = unassigned DNA; note = methanogen bacteria
tcatggcttgcaggagattatgcaacgggactttat

SEQ ID NO: 22652 - DNA, 51 bp, unidentified
  source 1..51: mol_type = unassigned DNA; note = methanogen bacteria
ccatacttaataactctcatttatggtagcacatatgctttagccgctgtt

SEQ ID NO: 22653 - DNA, 39 bp, unidentified
  source 1..39: mol_type = unassigned DNA; note = methanogen bacteria
attacccaattttcaacaacatatgctacaggactttat

SEQ ID NO: 22654 - DNA, 45 bp, unidentified
  source 1..45: mol_type = unassigned DNA; note = methanogen bacteria
tatgatttgattggaatttatggagcagagtacattgaagcagga

SEQ ID NO: 22655 - DNA, 63 bp, unidentified
  source 1..63: mol_type = unassigned DNA; note = methanogen bacteria
atcggcggatacagcttccccgccatgagtatcgagaacctccaccccgcaggcctggaactg

SEQ ID NO: 22656 - DNA, 96 bp, unidentified
  source 1..96: mol_type = unassigned DNA; note = methanogen bacteria
gcatattacggcggtacggggggattgacagcctcgctcgatgcccacggcgcctcggcggtcatctacgacctgtccatcgatgtcgccggcagt

SEQ ID NO: 22657 - DNA, 102 bp, unidentified
  source 1..102: mol_type = unassigned DNA; note = methanogen bacteria
tatcttgatgatttaaattcttatgttcttgcttctactttgaatgattatgtacaaaactctgctttagatgcttatgcaactgctgctgatttagcaaga

SEQ ID NO: 22658 - DNA, 30 bp, unidentified
  source 1..30: mol_type = unassigned DNA; note = methanogen bacteria
gatttaactgctcttcaagcgattgaaaat

SEQ ID NO: 22659 - DNA, 39 bp, unidentified
  source 1..39: mol_type = unassigned DNA; note = methanogen bacteria
gcatggactggttctgaatgggatcagtttggtagtatt

SEQ ID NO: 22660 - DNA, 54 bp, unidentified
  source 1..54: mol_type = unassigned DNA; note = methanogen bacteria
gttatgaatgatggtaaagtgaccgctcaagagtctggtattcttattactact

SEQ ID NO: 22661 - DNA, 36 bp, unidentified
  source 1..36: mol_type = unassigned DNA; note = methanogen bacteria
gaaattgaatgcattgataactgcccaattcaaggt

SEQ ID NO: 22662 - DNA, 42 bp, unidentified
  source 1..42: mol_type = unassigned DNA; note = methanogen bacteria
tctaatggtcctgctggattcactggtaaagttggcgatagc

SEQ ID NO: 22663 - DNA, 51 bp, unidentified
  source 1..51: mol_type = unassigned DNA; note = methanogen bacteria
ggctcttatgctgttgtttatgatcaaagcgcaaagtatcctgcagtagat

SEQ ID NO: 22664 - DNA, 33 bp, unidentified
  source 1..33: mol_type = unassigned DNA; note = methanogen bacteria
tcttatttaactggaaactattcaactggactt

SEQ ID NO: 22665 - DNA, 51 bp, unidentified
  source 1..51: mol_type = unassigned DNA; note = methanogen bacteria
agacctttagttgatttgatttacagcaatcagtattctctagcaaccact

SEQ ID NO: 22666 - DNA, 240 bp, unidentified
  source 1..240: mol_type = unassigned DNA; note = methanogen bacteria
tcgatggtctacgacaccgactactgggccctggtcatcaggaacatcgacagcggcaacgggctctacgggctcgacgggtacttctacacgccggtctggggctacctcctggcgctggaggagtggttcaacgactccttcctgggcctgggcgaatcggccgtacgcgtctcggagatcgtgtacttcgagaacggcgaccaccagaccgccgccaccatcacatcggtggccttc

SEQ ID NO: 22667 - DNA, 84 bp, unidentified
  source 1..84: mol_type = unassigned DNA; note = methanogen bacteria
atctcggacggtaccgtgggggagtgcttccgtttcataaccgaccgcatggggatatcgttcggggattcggcgggaagccgc

SEQ ID NO: 22668 - DNA, 93 bp, unidentified
  source 1..93: mol_type = unassigned DNA; note = methanogen bacteria
atgccgatcgccgtttggacggacctcctggacgtctcctcgctggcacattactatgacgtctggaacgccgggcccggcgtgctcaccgta

SEQ ID NO: 22669 - DNA, 36 bp, unidentified
  source 1..36: mol_type = unassigned DNA; note = methanogen bacteria
ctcggactcgacgaggagctcatcgaccttatcaac

SEQ ID NO: 22670 - DNA, 66 bp, unidentified
  source 1..66: mol_type = unassigned DNA; note = methanogen bacteria
atcttcctgcgtgctgacgagttcaccaaaggagacgctgcggccgacttcgacagtttccgcccc

SEQ ID NO: 22671 - DNA, 48 bp, unidentified
  source 1..48: mol_type = unassigned DNA; note = methanogen bacteria
ctcggattcaacctcaccgcgatcatcacctccgccggactcgtctcc

SEQ ID NO: 22672 - DNA, 75 bp, unidentified
  source 1..75: mol_type = unassigned DNA; note = methanogen bacteria
atcctcgccacccgtcccttcaagaagggcgacctggtggccgtgggtgccgacgtacaggtctaccgcgtccgc

SEQ ID NO: 22673 - DNA, 249 bp, unidentified
  source 1..249: mol_type = unassigned DNA; note = methanogen bacteria
ctggagaactgggacaacaccgacgtgttcatcatgcccaacagcctgctgaccaccaacaagatcaggaacatcacccgcgagaccctcatcagcaaggtctacctcactgtggacatcgcctacggaagcgacgtgaacctcgcccgcaagctcatgcaggaagcggccaccgagaacccccacgtcatctccgacggaagcgtcaagaggccgtacacccgtctcgaggccttcgaggacagcaac

SEQ ID NO: 22674 - DNA, 156 bp, unidentified
  source 1..156: mol_type = unassigned DNA; note = methanogen bacteria
acacacaccattttgcatattgatgagtactggacatattcgctggtgaacctgcctttcatgcaggggatgaccgttgcagttcatgatgtgcatccgatactttattacttgatactgtatctcttcaagccgattgcaggctcagacaatttt

SEQ ID NO: 22675 - DNA, 102 bp, unidentified
  source 1..102: mol_type = unassigned DNA; note = methanogen bacteria
caccagattcaggggcaaagcgacgagtttcaccaggcaataaactggagcacaattccgaattattttacatattttgccatcaaaagcgacagctttgcg

SEQ ID NO: 22676 - DNA, 36 bp, unidentified
  source 1..36: mol_type = unassigned DNA; note = methanogen bacteria
ttgtcttatataagtggagattatgcaactggactt

SEQ ID NO: 22677 - DNA, 51 bp, unidentified
  source 1..51: mol_type = unassigned DNA; note = methanogen bacteria
agacctattgtcgaccttatatatagcaaccaatactcccttgcatcaaca

SEQ ID NO: 22678 - DNA, 153 bp, unidentified
  source 1..153: mol_type = unassigned DNA; note = methanogen bacteria
acacataccatcattaatgttgacgaatattggacttacagcctggtgaatcttccatttatgcagggaatgattgtagcagttcacgatgttcatccaccactgtactatatgatattgtatttgctaacaccgctgggcctggaaaacctt

SEQ ID NO: 22679 - DNA, 105 bp, unidentified
  source 1..105: mol_type = unassigned DNA; note = methanogen bacteria
caccaaatgcaaacccaggcaggtgaacctcgcgaaggctttgaactggccagtgcaatacattaccttacggcttttgcaatcaaaggtcagaatttcgaattt

SEQ ID NO: 22680 - DNA, 30 bp, unidentified
  source 1..30: mol_type = unassigned DNA; note = methanogen bacteria
accaaatcattcaccacagcagaatacggt

SEQ ID NO: 22681 - DNA, 39 bp, unidentified
  source 1..39: mol_type = unassigned DNA; note = methanogen bacteria
aatactattgcaaattccctattcaatggaagtatgcaa

SEQ ID NO: 22682 - DNA, 42 bp, unidentified
  source 1..42: mol_type = unassigned DNA; note = methanogen bacteria
ttatacataatcacaactccagagattgctcttggagggtat

SEQ ID NO: 22683 - DNA, 63 bp, unidentified
  source 1..63: mol_type = unassigned DNA; note = methanogen bacteria
tcgtacatctacccggaattcctccagggatatctctacactgtcgaaggctacgacatctac

SEQ ID NO: 22684 - DNA, 60 bp, unidentified
  source 1..60: mol_type = unassigned DNA; note = methanogen bacteria
ttttccggagaccctgccaacatctccgagaatgccttctccggttcaggaggagatgcc

SEQ ID NO: 22685 - DNA, 96 bp, unidentified
  source 1..96: mol_type = unassigned DNA; note = methanogen bacteria
ggatcggtgatggatgaatcgcagatacaggcctctatgaccgggaacgggcttgttaccgcagacgcgatggcgatcgctttagggaaccaggcc

SEQ ID NO: 22686 - DNA, 78 bp, unidentified
  source 1..78: mol_type = unassigned DNA; note = methanogen bacteria
ctcagcggcgacgggatactggacgcgttcggcagcatcttcggcgacgccctctccccgccgtccgtcatcggcgga

SEQ ID NO: 22687 - DNA, 90 bp, unidentified
  source 1..90: mol_type = unassigned DNA; note = methanogen bacteria
tcctacgctgacgtgggcgctttcataggcggggacggcgactccatcgactgcctacaggaggtcttcaaggagaccatcgggagcggc

SEQ ID NO: 22688 - DNA, 39 bp, unidentified
  source 1..39: mol_type = unassigned DNA; note = methanogen bacteria
atgtctttcgattcgttcattgactcggtatgggagttc

SEQ ID NO: 22689 - DNA, 33 bp, unidentified
  source 1..33: mol_type = unassigned DNA; note = methanogen bacteria
tctttcaccggagcttacgaattcgagtacaac

SEQ ID NO: 22690 - DNA, 81 bp, unidentified
  source 1..81: mol_type = unassigned DNA; note = methanogen bacteria
atgaacgccgggggaatccccgatgcgatcgaggccatattcacctgtgcgttcaacgtccccgccgccgtaggaggaggt

SEQ ID NO: 22691 - DNA, 93 bp, unidentified
  source 1..93: mol_type = unassigned DNA; note = methanogen bacteria
ttcttccacggcgactacgatgccatgatgggtctcgggatcgaggattccatgcccctgctcgaacacgtcctgagcgagagcctcggcggc

SEQ ID NO: 22692 - DNA, 78 bp, unidentified
  source 1..78: mol_type = unassigned DNA; note = methanogen bacteria
ctcagcggcgacggcatactcgacgcgttcggcagcatcttcggcgacgccctctccccgccgtcagtcatcggcgga

SEQ ID NO: 22693 - DNA, 90 bp, unidentified
  source 1..90: mol_type = unassigned DNA; note = methanogen bacteria
tcctatgcggacgtgggagcgttcatcggcggggacggagactccatcgattgcctccaggaggtcttcaaggacaccatcggaagcggt

SEQ ID NO: 22694 - DNA, 69 bp, unidentified
  source 1..69: mol_type = unassigned DNA; note = methanogen bacteria
atggatctgcttttaaaatattctatatttaaaaataattatgctactactcaggcaggtgctgtactt

SEQ ID NO: 22695 - DNA, 30 bp, unidentified
  source 1..30: mol_type = unassigned DNA; note = methanogen bacteria
attaaaaattgttcttttataaataactct

SEQ ID NO: 22696 - DNA, 153 bp, unidentified
  source 1..153: mol_type = unassigned DNA; note = methanogen bacteria
acccatacaatcattaatattgatgagtattggacttattctttggtaaatcttccgtttatggaaggaatggctgtagctattcatgatgttcatccgccgttgtattattggatattgtatctgttcactccatttggtttaggcaatctt

SEQ ID NO: 22697 - DNA, 108 bp, unidentified
  source 1..108: mol_type = unassigned DNA; note = methanogen bacteria
catcagattcaaacccatgctaatgatgccaaggaaggttttgaattggtcaatgtcatacactattttacggcctttgcgattaaaagccagaatttcaggttagac

SEQ ID NO: 22698 - DNA, 66 bp, unidentified
  source 1..66: mol_type = unassigned DNA; note = methanogen bacteria
ttaaatccaaattatacaattcctgagtttacaacaccaggtttatatttaactgataaacctatt

SEQ ID NO: 22699 - DNA, 90 bp, unidentified
  source 1..90: mol_type = unassigned DNA; note = methanogen bacteria
tttttccatagtcagccacaacttgcagcatcatttgctggaactccatcaattggagtatatgaaatgtcatcaaaattacttaatcct

SEQ ID NO: 22700 - DNA, 132 bp, unidentified
  source 1..132: mol_type = unassigned DNA; note = methanogen bacteria
tacaatccgggcgttttgaccgccgcatcattcagccagcttcatcagatagctacaggcaaattcaccggcgcatatcctatattgcatacattgattgagataatatgtcttaaaatctatgcatcccca

SEQ ID NO: 22701 - DNA, 219 bp, unidentified
  source 1..219: mol_type = unassigned DNA; note = methanogen bacteria
tatcatgttgacggcactggaaattccaacttcccggcaaatgatgcctttgaagatggagtcaaccttgcaaatgcgaaaaatcaatttttcactagcgtcaatgacgttccgagagaaaattttgaaaattcaacttccgcaaatctgaaaaccgacaaattcaagtcactgaattcattcgttgatttgactcgggaaaacatcattctggatggg

SEQ ID NO: 22702 - DNA, 51 bp, unidentified
  source 1..51: mol_type = unassigned DNA; note = methanogen bacteria
ttatattatatggcatctagcatacctgaacattctgtattcttatttaca

SEQ ID NO: 22703 - DNA, 57 bp, unidentified
  source 1..57: mol_type = unassigned DNA; note = methanogen bacteria
ctattctgtaaaacttatgtaagtcctactattccgtttacaaattttaatatttca

SEQ ID NO: 22704 - DNA, 33 bp, unidentified
  source 1..33: mol_type = unassigned DNA; note = methanogen bacteria
aaaacatatgatggcagtacaccaatagatatg

SEQ ID NO: 22705 - DNA, 63 bp, unidentified
  source 1..63: mol_type = unassigned DNA; note = methanogen bacteria
gcatatccaagtgatccgggagttgtgactaaatttttaggtttaatcccagttcctgatttg

SEQ ID NO: 22706 - DNA, 57 bp, unidentified
  source 1..57: mol_type = unassigned DNA; note = methanogen bacteria
tcatattatgcttatggtggtgctgtttattgggctggtgataagggtacccttgcc

SEQ ID NO: 22707 - DNA, 81 bp, unidentified
  source 1..81: mol_type = unassigned DNA; note = methanogen bacteria
attgtggcggttccattcttgtcaaatggtgttattgtggcggttccaacaatagcttctgattttgcaatgaataatgtt

SEQ ID NO: 22708 - DNA, 33 bp, unidentified
  source 1..33: mol_type = unassigned DNA; note = methanogen bacteria
tatcacttccagtatgttagaggatggaatacc

SEQ ID NO: 22709 - DNA, 57 bp, unidentified
  source 1..57: mol_type = unassigned DNA; note = methanogen bacteria
tggataatgggtgacttgccgatgcttgcaaaatatgctgatttgattgtgcaaggg

SEQ ID NO: 22710 - DNA, 156 bp, unidentified
  source 1..156: mol_type = unassigned DNA; note = methanogen bacteria
atatcaaatgttttgattcatgttgacgaatactggacactgtcacttatcaatctgccgttccttgaagggatgaggattgccataagcgacgtccatcctccgcttcattacataatactttatgcggcctccccaataacatccaacaacatt

SEQ ID NO: 22711 - DNA, 102 bp, unidentified
  source 1..102: mol_type = unassigned DNA; note = methanogen bacteria
aggcaaatcggcacccagacaagcgcatcacatgaggccacaactttcaacaatgtagcgaactatctgaccgtttttgccataaacaagggcggtttcagc

SEQ ID NO: 22712 - DNA, 45 bp, unidentified
  source 1..45: mol_type = unassigned DNA; note = methanogen bacteria
gtaaaagagattaagataacagatactatcagtgttttactattg

SEQ ID NO: 22713 - DNA, 123 bp, unidentified
  source 1..123: mol_type = unassigned DNA; note = methanogen bacteria
tcactcataccattccatccatatgcatttgctatggcatctggtataggtagtgcaagtatgaatgctgcagcattggttccattagtgcatacttatccagctatggctactcaattggaa

SEQ ID NO: 22714 - DNA, 48 bp, unidentified
  source 1..48: mol_type = unassigned DNA; note = methanogen bacteria
ggtgttccaactgcggaatttatagttcattatgtttcccaagttgaa

SEQ ID NO: 22715 - DNA, 153 bp, unidentified
  source 1..153: mol_type = unassigned DNA; note = methanogen bacteria
atgaacatatatcttcatgttgatgagtattggacatacacattaatcaatcttccaattagaaatgcaataactgtaatcgttaatgatgttcatcctccattgtattatggaatagtgtatttgctaactccatttggtttgaataacctt

SEQ ID NO: 22716 - DNA, 108 bp, unidentified
  source 1..108: mol_type = unassigned DNA; note = methanogen bacteria
cgccaaattatgactgaatcttctgggtttcatgagggattcaaactagatagtttaatacattatctttttgcttttgcaatcaagagtgaagatttcaggcatgaa

SEQ ID NO: 22717 - DNA, 42 bp, unidentified
  source 1..42: mol_type = unassigned DNA; note = methanogen bacteria
atgttggatgtaattgtaacaatattgactgaaattgataat

SEQ ID NO: 22718 - DNA, 33 bp, unidentified
  source 1..33: mol_type = unassigned DNA; note = methanogen bacteria
attgaatactcattttacaacccttccacaaca

SEQ ID NO: 22719 - DNA, 72 bp, unidentified
  source 1..72: mol_type = unassigned DNA; note = methanogen bacteria
aattatgcaaacatcccttcaatgtttattctcatccttcaggacgcctttgatttcaagtccatagcggga

SEQ ID NO: 22720 - DNA, 78 bp, unidentified
  source 1..78: mol_type = unassigned DNA; note = methanogen bacteria
tccacaggtgttgcaagaaacgccgcagtttcaggcgctccttatgttcaggatgcaatatccacagtctttggcatt

SEQ ID NO: 22721 - DNA, 132 bp, unidentified
  source 1..132: mol_type = unassigned DNA; note = methanogen bacteria
ttcaatcagggagtagccaccatcgactccttcaatcagctgcaccagattgcatccggcgagtttaccaactggcatcctttttttcatacattcattgaaatgctatgcctgaagatatatccaagcaca

SEQ ID NO: 22722 - DNA, 153 bp, unidentified
  source 1..153: mol_type = unassigned DNA; note = methanogen bacteria
actaatatgttcataaatgttgatgaatactggacttacagtttggtaaatcttccatttatgcagggtatgatcgtagcagttcacgatgttcatcctccattgtattacatgattttgtatttatttgccccttttggcttagctaatctt

SEQ ID NO: 22723 - DNA, 102 bp, unidentified
  source 1..102: mol_type = unassigned DNA; note = methanogen bacteria
catcaaatccaaactcagtccggtgagcctaatgagggttttgaattggtcaatgcaatacattatctcacagcatttgcaatcaaaagccaaaattttgaa

SEQ ID NO: 22724 - DNA, 39 bp, unidentified
  source 1..39: mol_type = unassigned DNA; note = methanogen bacteria
atgatagacccatcttttatattaaatcaagttgacaat

SEQ ID NO: 22725 - DNA, 30 bp, unidentified
  source 1..30: mol_type = unassigned DNA; note = methanogen bacteria
atggactattcattctataattccgcaaca

SEQ ID NO: 22726 - DNA, 72 bp, unidentified
  source 1..72: mol_type = unassigned DNA; note = methanogen bacteria
aattatcacaacattccgtcaatgtttgttttgattttccaggatgcctttgactttaaatccatcgccgga

SEQ ID NO: 22727 - DNA, 78 bp, unidentified
  source 1..78: mol_type = unassigned DNA; note = methanogen bacteria
tcaactggcgttgcaagagatgcgacagttgcaggcgccccatatgtacagactgcaatcggcagcgttttgggcatt

SEQ ID NO: 22728 - DNA, 30 bp, unidentified
  source 1..30: mol_type = unassigned DNA; note = methanogen bacteria
atggactatgcattttacaatgccaacacc

SEQ ID NO: 22729 - DNA, 72 bp, unidentified
  source 1..72: mol_type = unassigned DNA; note = methanogen bacteria
aattatgcaaacattccttcaatgattatgatcatattccaggatgcctttgatttccagtcaatcgccgga

SEQ ID NO: 22730 - DNA, 78 bp, unidentified
  source 1..78: mol_type = unassigned DNA; note = methanogen bacteria
tcaacaggagttgcaagagatgccgcagtttcaggtgcaccgtatgtgcagaatgcgctttcaacagttatgggaact

SEQ ID NO: 22731 - DNA, 39 bp, unidentified
  source 1..39: mol_type = unassigned DNA; note = methanogen bacteria
atgttagatattttcacgattttaaatcaaatagatagt

SEQ ID NO: 22732 - DNA, 72 bp, unidentified
  source 1..72: mol_type = unassigned DNA; note = methanogen bacteria
cttttctatattccatcaatgttcatgttgattttccagaatgcatttgacttccaatccattgctggggga

SEQ ID NO: 22733 - DNA, 78 bp, unidentified
  source 1..78: mol_type = unassigned DNA; note = methanogen bacteria
tcaactggtgttgcaagaaatgcggcggtttcaggcgctccatatgtacaaaatgcgattttcagtgtttttggccca

SEQ ID NO: 22734 - DNA, 39 bp, unidentified
  source 1..39: mol_type = unassigned DNA; note = methanogen bacteria
atgcagaatatagtttcaatcctgaatcaaaccgatgac

SEQ ID NO: 22735 - DNA, 30 bp, unidentified
  source 1..30: mol_type = unassigned DNA; note = methanogen bacteria
atcgattattccttctacagccctgcaaca

SEQ ID NO: 22736 - DNA, 72 bp, unidentified
  source 1..72: mol_type = unassigned DNA; note = methanogen bacteria
aattatcagaatgtgcctgcaatggtattgctgatttttcaggatgcatttaatttccaatccattttagga

SEQ ID NO: 22737 - DNA, 78 bp, unidentified
  source 1..78: mol_type = unassigned DNA; note = methanogen bacteria
tcaaccggagtggcacgtaatgcgacagtctccggagccccttatgtgcagaatgcaatccatacggtattcggcact

SEQ ID NO: 22738 - DNA, 69 bp, unidentified
  source 1..69: mol_type = unassigned DNA; note = methanogen bacteria
tatgcaaacattccttcaatgtttttcctgatttttcaggatgcttttgatttccagtccatagctgga

SEQ ID NO: 22739 - DNA, 78 bp, unidentified
  source 1..78: mol_type = unassigned DNA; note = methanogen bacteria
tcaacaggagttgcaagggatgcagctgtcagtggagccccttatgtgcagaatgcaatttcgactgttttcggatgg

SEQ ID NO: 22740 - DNA, 72 bp, unidentified
  source 1..72: mol_type = unassigned DNA; note = methanogen bacteria
aatatacaaaacgttcctgcaatgtttcttttaatatttcaagatgcttttgatttccattctatcttagga

SEQ ID NO: 22741 - DNA, 78 bp, unidentified
  source 1..78: mol_type = unassigned DNA; note = methanogen bacteria
tctactggtgttgcaagggatgcagttgtttcaggtgcaccatatgtgcaaaatgcgatttctacagtcttaggtcct

SEQ ID NO: 22742 - DNA, 39 bp, unidentified
  source 1..39: mol_type = unassigned DNA; note = methanogen bacteria
gttccatcaattgcaaatgagttcggaatgaacaatgtt

SEQ ID NO: 22743 - DNA, 33 bp, unidentified
  source 1..33: mol_type = unassigned DNA; note = methanogen bacteria
tatcatttccaatatgtaaggggatggaatgcc

SEQ ID NO: 22744 - DNA, 54 bp, unidentified
  source 1..54: mol_type = unassigned DNA; note = methanogen bacteria
attatgggaagcttaaaactctcctcacaatatgcaggcatggttgttcaggct

SEQ ID NO: 22745 - DNA, 39 bp, unidentified
  source 1..39: mol_type = unassigned DNA; note = methanogen bacteria
gtttatttgatgagcgacttttccgtctcatcaacacaa

SEQ ID NO: 22746 - DNA, 36 bp, unidentified
  source 1..36: mol_type = unassigned DNA; note = methanogen bacteria
ttattcattcaaggaatagcttacaattcagcaatc

SEQ ID NO: 22747 - DNA, 45 bp, unidentified
  source 1..45: mol_type = unassigned DNA; note = methanogen bacteria
gctggaggtgcaataggccacaattctgcttcagttgtagcattc

SEQ ID NO: 22748 - DNA, 30 bp, unidentified
  source 1..30: mol_type = unassigned DNA; note = methanogen bacteria
atgttagaagtattgcatttttcagtacct

SEQ ID NO: 22749 - DNA, 54 bp, unidentified
  source 1..54: mol_type = unassigned DNA; note = methanogen bacteria
ttgttttatctaactgctaatgtagctgaacattcttcttttttattttcatat

SEQ ID NO: 22750 - DNA, 54 bp, unidentified
  source 1..54: mol_type = unassigned DNA; note = methanogen bacteria
tcaatggattatgtcaacaatattattccagttattaactatgaaatatttccg

SEQ ID NO: 22751 - DNA, 60 bp, unidentified
  source 1..60: mol_type = unassigned DNA; note = methanogen bacteria
gctttacctagtggaggagaaaccacaatgttattaggtattattcctatttcaaatatt

SEQ ID NO: 22752 - DNA, 66 bp, unidentified
  source 1..66: mol_type = unassigned DNA; note = methanogen bacteria
tatcaaaacattccatcaatgtttatgctgattttccaggatgcctttaatttaaaacctattatc

SEQ ID NO: 22753 - DNA, 78 bp, unidentified
  source 1..78: mol_type = unassigned DNA; note = methanogen bacteria
tccactggagtggcaagggacgtaagtgtttccggcgctccatatgtgcagaatgcaatctccacggttttcggcact

SEQ ID NO: 22754 - DNA, 45 bp, unidentified
  source 1..45: mol_type = unassigned DNA; note = methanogen bacteria
atgatgagcctcagcggcatgttcgggtccgggaccatggatgtt

SEQ ID NO: 22755 - DNA, 54 bp, unidentified
  source 1..54: mol_type = unassigned DNA; note = methanogen bacteria
tccatgctggaacccatcaaggagttggcctcgggtataagcatcggccccacc

SEQ ID NO: 22756 - DNA, 30 bp, unidentified
  source 1..30: mol_type = unassigned DNA; note = methanogen bacteria
atgattgacgtgctgcatttttcagaccct

SEQ ID NO: 22757 - DNA, 54 bp, unidentified
  source 1..54: mol_type = unassigned DNA; note = methanogen bacteria
agtctgtttaacatcacagcaaatgttcacgagcattcagcattgcttttcacc

SEQ ID NO: 22758 - DNA, 51 bp, unidentified
  source 1..51: mol_type = unassigned DNA; note = methanogen bacteria
gctgaaagccatgtcaacaatgtgattccattcatcaatcagagtgtgtct

SEQ ID NO: 22759 - DNA, 54 bp, unidentified
  source 1..54: mol_type = unassigned DNA; note = methanogen bacteria
tttccaaatcaaaatccaacaatgctgtttaatataattcctattgcaaacctt

SEQ ID NO: 22760 - DNA, 39 bp, unidentified
  source 1..39: mol_type = unassigned DNA; note = methanogen bacteria
atgatagacatagtcgcaatattaacagcaattgatgat

SEQ ID NO: 22761 - DNA, 66 bp, unidentified
  source 1..66: mol_type = unassigned DNA; note = methanogen bacteria
tatcaaaacattccatcaatgattatgctaattttccaggatgcctttaattttaaaactatattg

SEQ ID NO: 22762 - DNA, 78 bp, unidentified
  source 1..78: mol_type = unassigned DNA; note = methanogen bacteria
tccaccggagtggcaagggacgtaagtgtttccggtgctccatatgtgcagaatgcaatttccacagttttcggaact

SEQ ID NO: 22763 - DNA, 36 bp, unidentified
  source 1..36: mol_type = unassigned DNA; note = methanogen bacteria
gtaggtattatgagtgattttcatgtttcttcaacc

SEQ ID NO: 22764 - DNA, 36 bp, unidentified
  source 1..36: mol_type = unassigned DNA; note = methanogen bacteria
ctctttgttcaaggggtatgtaatcaatctgcaaca

SEQ ID NO: 22765 - DNA, 54 bp, unidentified
  source 1..54: mol_type = unassigned DNA; note = methanogen bacteria
gtattcactggaggttacgtagcgcataataagattactgttggtgctttcagc

SEQ ID NO: 22766 - DNA, 30 bp, unidentified
  source 1..30: mol_type = unassigned DNA; note = methanogen bacteria
atgtacgaagttttgcatttttctgtgcaa

SEQ ID NO: 22767 - DNA, 57 bp, unidentified
  source 1..57: mol_type = unassigned DNA; note = methanogen bacteria
agcctatattatttaacagaagctgttccgacccattccaccctgctgttctcatac

SEQ ID NO: 22768 - DNA, 51 bp, unidentified
  source 1..51: mol_type = unassigned DNA; note = methanogen bacteria
atacactacatcaacaatacaattccatttacaaacattacaatagctcct

SEQ ID NO: 22769 - DNA, 60 bp, unidentified
  source 1..60: mol_type = unassigned DNA; note = methanogen bacteria
tgtgtgccaacaccaggacactgcactaaactatttggattgattcaaattaatagccta

SEQ ID NO: 22770 - DNA, 66 bp, unidentified
  source 1..66: mol_type = unassigned DNA; note = methanogen bacteria
atgaaccctcattatacaattcctgaatttacaactcctgggctttatttaactacaaaatctatc

SEQ ID NO: 22771 - DNA, 90 bp, unidentified
  source 1..90: mol_type = unassigned DNA; note = methanogen bacteria
tttttccatgggcaacctcaattggctgttatttatggtgctacacctgctgttggtgtaaacgagatggctacaacattggttggctct

SEQ ID NO: 22772 - DNA, 33 bp, unidentified
  source 1..33: mol_type = unassigned DNA; note = methanogen bacteria
gttgcgggattaggtgcagaaccattagctgca

SEQ ID NO: 22773 - DNA, 48 bp, unidentified
  source 1..48: mol_type = unassigned DNA; note = methanogen bacteria
cttaagatgatgggtgcaacaagtgttttaaaatatgctcttgattat

SEQ ID NO: 22774 - DNA, 36 bp, unidentified
  source 1..36: mol_type = unassigned DNA; note = methanogen bacteria
acaattgtatccggaccaacatcagtagcagtatat

SEQ ID NO: 22775 - DNA, 63 bp, unidentified
  source 1..63: mol_type = unassigned DNA; note = methanogen bacteria
caaattgcatttatattttcatattcagaaaatagtgctcaattggaaccattaatagctagt

SEQ ID NO: 22776 - DNA, 39 bp, unidentified
  source 1..39: mol_type = unassigned DNA; note = methanogen bacteria
tttccacatattatggtggaatatgcaattagtgctgga

SEQ ID NO: 22777 - DNA, 30 bp, unidentified
  source 1..30: mol_type = unassigned DNA; note = methanogen bacteria
taccttgaaacctcacttcatacaagttca

SEQ ID NO: 22778 - DNA, 75 bp, unidentified
  source 1..75: mol_type = unassigned DNA; note = methanogen bacteria
attggtcagaataattatttaagtgctattgcaaatccaacagcagtacaacatgctttagcattggctaaaggg

SEQ ID NO: 22779 - DNA, 66 bp, unidentified
  source 1..66: mol_type = unassigned DNA; note = methanogen bacteria
cttaatccatcatactccattccggagtttacaacacagggattgtatttaactgacaaaaacatt

SEQ ID NO: 22780 - DNA, 90 bp, unidentified
  source 1..90: mol_type = unassigned DNA; note = methanogen bacteria
tttttccacggccagcctcaacttgcagcaatctacggcgcacagcctgcagtggcagtaaaggaaatggcaacagtattggtaggacct

SEQ ID NO: 22781 - DNA, 30 bp, unidentified
  source 1..30: mol_type = unassigned DNA; note = methanogen bacteria
gtttcatctattggtgaagcagcagtatca

SEQ ID NO: 22782 - DNA, 60 bp, unidentified
  source 1..60: mol_type = unassigned DNA; note = methanogen bacteria
tatattattgatattttatttggccaaattggagatgatgtcttttacaatgcacatatc

SEQ ID NO: 22783 - DNA, 30 bp, unidentified
  source 1..30: mol_type = unassigned DNA; note = methanogen bacteria
tctacattcggtactgtagctattgctgca

SEQ ID NO: 22784 - DNA, 51 bp, unidentified
  source 1..51: mol_type = unassigned DNA; note = methanogen bacteria
ctttcattatatggtctcacaccagaatgtaaagatttagcggcacagatg

SEQ ID NO: 22785 - DNA, 39 bp, unidentified
  source 1..39: mol_type = unassigned DNA; note = methanogen bacteria
gtttatctgatgagtgacttttctgtctcatcaacacag

SEQ ID NO: 22786 - DNA, 33 bp, unidentified
  source 1..33: mol_type = unassigned DNA; note = methanogen bacteria
atattcgttcagggcgttgcctacaattccgca

SEQ ID NO: 22787 - DNA, 48 bp, unidentified
  source 1..48: mol_type = unassigned DNA; note = methanogen bacteria
ctggcgggaggtgccatagaccacaatgcagcatcagttgcgggattc

SEQ ID NO: 22788 - DNA, 33 bp, unidentified
  source 1..33: mol_type = unassigned DNA; note = methanogen bacteria
gtagctggtttaggtcctggcgcactttctgca

SEQ ID NO: 22789 - DNA, 48 bp, unidentified
  source 1..48: mol_type = unassigned DNA; note = methanogen bacteria
ttaatattgataggagcaggaaacgttcttaactatgcaatggattat

SEQ ID NO: 22790 - DNA, 30 bp, unidentified
  source 1..30: mol_type = unassigned DNA; note = methanogen bacteria
atgcaagtgtctaatcatatatcagtagca

SEQ ID NO: 22791 - DNA, 63 bp, unidentified
  source 1..63: mol_type = unassigned DNA; note = methanogen bacteria
caaattgcaactatctttagttattccagtgaaagtgcaggattagcacctcaaattgcatca

SEQ ID NO: 22792 - DNA, 93 bp, unidentified
  source 1..93: mol_type = unassigned DNA; note = methanogen bacteria
agtttcaccaaagggtggggtgcaaacccggacactttctttgcaaacactcttcttcaatcctcagaatcaatggctggtttgactcatttc

SEQ ID NO: 22793 - DNA, 75 bp, unidentified
  source 1..75: mol_type = unassigned DNA; note = methanogen bacteria
ctgactttgccgggagcttcaataggtcttgcggaactcttcaaccccgattggtctcttttgacacactttgaa

SEQ ID NO: 22794 - DNA, 111 bp, unidentified
  source 1..111: mol_type = unassigned DNA; note = methanogen bacteria
ttaggatacatgtcacttcagtcaggaactgccgtggctgaccttgtaactcagggaaccggtcttgtatttgtagtgtatcctacagtatttaatgtattgggtcattgg

SEQ ID NO: 22795 - DNA, 90 bp, unidentified
  source 1..90: mol_type = unassigned DNA; note = methanogen bacteria
aacgtaacatacacattccttataaatggaaccgtaataaaacaagcaacagttgcaatcaacgaaaccgatgcaagctacacagacaaa

SEQ ID NO: 22796 - DNA, 45 bp, unidentified
  source 1..45: mol_type = unassigned DNA; note = methanogen bacteria
atactcatcgaatacacaggaccgacgaatacggaacaacaacaa

SEQ ID NO: 22797 - DNA, 39 bp, unidentified
  source 1..39: mol_type = unassigned DNA; note = methanogen bacteria
atgggtgacgcagtaggtgcatacgaaagaatgcactta

SEQ ID NO: 22798 - DNA, 48 bp, unidentified
  source 1..48: mol_type = unassigned DNA; note = methanogen bacteria
tccatcgtacaagacaccattgcaaaagctgaagctgatggcattatt

SEQ ID NO: 22799 - DNA, 42 bp, unidentified
  source 1..42: mol_type = unassigned DNA; note = methanogen bacteria
aacgacaacattgaattcgctactggtttaccaagtatcgac

SEQ ID NO: 22800 - DNA, 54 bp, unidentified
  source 1..54: mol_type = unassigned DNA; note = methanogen bacteria
tccccagaagcaacttctggtttaattaaagaagtatacagtgagattgacgaa

SEQ ID NO: 22801 - DNA, 36 bp, unidentified
  source 1..36: mol_type = unassigned DNA; note = methanogen bacteria
gtatcgtccataagcagtgatgctgttgtggctatg

SEQ ID NO: 22802 - DNA, 51 bp, unidentified
  source 1..51: mol_type = unassigned DNA; note = methanogen bacteria
gtattgaagtttatggacgtatcagaatctgttgaattggctaagcagtat

SEQ ID NO: 22803 - DNA, 45 bp, unidentified
  source 1..45: mol_type = unassigned DNA; note = methanogen bacteria
tatgtctatcaatcgttttctgtggttaatatggaaacctccatt

SEQ ID NO: 22804 - DNA, 87 bp, unidentified
  source 1..87: mol_type = unassigned DNA; note = methanogen bacteria
attacatttagttggggaactgatgctgcactatactttgtaaataatgttggaggaagttcaaatttaagtgatgcgagtttcctg

SEQ ID NO: 22805 - DNA, 69 bp, unidentified
  source 1..69: mol_type = unassigned DNA; note = methanogen bacteria
actttacctggagtagatattggaattaatactttgctaaatccatcatgggacaaattatttgatgtg

SEQ ID NO: 22806 - DNA, 105 bp, unidentified
  source 1..105: mol_type = unassigned DNA; note = methanogen bacteria
ggattcatgtcatatacaaacggaactccaatggtacaattaattactgaaggaacaggactaatatttatcgtattcccaatgatttttaatattatgggagta

SEQ ID NO: 22807 - DNA, 66 bp, unidentified
  source 1..66: mol_type = unassigned DNA; note = methanogen bacteria
ctaaatccagcatatacaataccagaatttacaacacaaggattatacttaacagataaaaacatt

SEQ ID NO: 22808 - DNA, 90 bp, unidentified
  source 1..90: mol_type = unassigned DNA; note = methanogen bacteria
tttttccatgtccaaccacaacttgctgcaggatatgcagcagctccaacagtggcagtttatgaaatggcaacaaaattacttaatcca

SEQ ID NO: 22809 - DNA, 63 bp, unidentified
  source 1..63: mol_type = unassigned DNA; note = methanogen bacteria
attattgatacatttaatgttaacatttttgatgcatcaactgtaaaaactgcagtcatggga

SEQ ID NO: 22810 - DNA, 51 bp, unidentified
  source 1..51: mol_type = unassigned DNA; note = methanogen bacteria
ctctacaatttaagcactgcaatcccaactcattccaacttccttttcact

SEQ ID NO: 22811 - DNA, 51 bp, unidentified
  source 1..51: mol_type = unassigned DNA; note = methanogen bacteria
atgaattatgttaacaatacagtaccatttatcaactatacgctaagccct

SEQ ID NO: 22812 - DNA, 63 bp, unidentified
  source 1..63: mol_type = unassigned DNA; note = methanogen bacteria
gcattcccagaaaagccgggcgtggtgaatagtttattcggcctcatcccaatccctaattta

SEQ ID NO: 22813 - DNA, 30 bp, unidentified
  source 1..30: mol_type = unassigned DNA; note = methanogen bacteria
agttttctgttgacaatcctctcaccagaa

SEQ ID NO: 22814 - DNA, 30 bp, unidentified
  source 1..30: mol_type = unassigned DNA; note = methanogen bacteria
tttcaaaccccaatttcatcaggagtgtct

SEQ ID NO: 22815 - DNA, 66 bp, unidentified
  source 1..66: mol_type = unassigned DNA; note = methanogen bacteria
atcggaaatccccgaagcggaattgccgtatacatgtcatatctaatctctgagatgacactgaac

SEQ ID NO: 22816 - DNA, 108 bp, unidentified
  source 1..108: mol_type = unassigned DNA; note = methanogen bacteria
accctgaaccactggatggacggtgccttcgagctatggaccagctgttcaacaagctcagcatcgaaggcactcccgacaacctcacacttctcccgacccttgagc

SEQ ID NO: 22817 - DNA, 60 bp, unidentified
  source 1..60: mol_type = unassigned DNA; note = methanogen bacteria
gtactttgttgcaggttcaggcttgctgtttgcactcacatgtctcatatctgtacttgt

SEQ ID NO: 22818 - DNA, 45 bp, unidentified
  source 1..45: mol_type = unassigned DNA; note = methanogen bacteria
agtaaaacaataccaataactagctctgtgacaattgttataatg

SEQ ID NO: 22819 - DNA, 30 bp, unidentified
  source 1..30: mol_type = unassigned DNA; note = methanogen bacteria
ggccaatccataataacaattatacaagca

SEQ ID NO: 22820 - DNA, 120 bp, unidentified
  source 1..120: mol_type = unassigned DNA; note = methanogen bacteria
tcagtattaccactacatccttatgcatttgcaatggcaagtggaattggtagtggaagtatgaatgcggcagcattagcaccattactaaaaacattcccttcaatggcaagagacata

SEQ ID NO: 22821 - DNA, 48 bp, unidentified
  source 1..48: mol_type = unassigned DNA; note = methanogen bacteria
ggcatgccaacagcagatttcttaataaattacactaatcaaatagaa

SEQ ID NO: 22822 - DNA, 51 bp, unidentified
  source 1..51: mol_type = unassigned DNA; note = methanogen bacteria
tttaaaaccactatgttcggccctattgggggaactcttcctctgtggaat

SEQ ID NO: 22823 - DNA, 51 bp, unidentified
  source 1..51: mol_type = unassigned DNA; note = methanogen bacteria
tttaaaaccactttattcggcccaattggtggtcatttgggcttttccagc

SEQ ID NO: 22824 - DNA, 54 bp, unidentified
  source 1..54: mol_type = unassigned DNA; note = methanogen bacteria
tttcatacaactctttttggtccgataggggaccatttgggctatgaaacttat

SEQ ID NO: 22825 - DNA, 54 bp, unidentified
  source 1..54: mol_type = unassigned DNA; note = methanogen bacteria
ttttacacaactatttttggacctattggtggtcatttaggttatgaggaatat

SEQ ID NO: 22826 - DNA, 54 bp, unidentified
  source 1..54: mol_type = unassigned DNA; note = methanogen bacteria
ttcgagacaactttatttggtccaattggagaccatttaagttatgaaacttac

SEQ ID NO: 22827 - DNA, 51 bp, unidentified
  source 1..51: mol_type = unassigned DNA; note = methanogen bacteria
tttaaaactactttatttggtcctattgggggccatttaggctttcagagc

SEQ ID NO: 22828 - DNA, 33 bp, unidentified
  source 1..33: mol_type = unassigned DNA; note = methanogen bacteria
gtagctggtttaggtcctggtgcactttctgca

SEQ ID NO: 22829 - DNA, 48 bp, unidentified
  source 1..48: mol_type = unassigned DNA; note = methanogen bacteria
ttaatattaataggagcaggaaacgttcttaactatgcaatggattat

SEQ ID NO: 22830 - DNA, 30 bp, unidentified; identical to SEQ ID NO: 22790
  source 1..30: mol_type = unassigned DNA; note = methanogen bacteria

SEQ ID NO: 22831 - DNA, 63 bp, unidentified
  source 1..63: mol_type = unassigned DNA; note = methanogen bacteria
caaattgcaacaatctttacttataccagtgaaagtgcaggattagcacctcaaattgcatca

SEQ ID NO: 22832 - DNA, 42 bp, unidentified
  source 1..42: mol_type = unassigned DNA; note = methanogen bacteria
accacgatgtttggtccaataggaggacatttaagtttagaa

SEQ ID NO: 22833 - DNA, 54 bp, unidentified
  source 1..54: mol_type = unassigned DNA; note = methanogen bacteria
ttccatactacaatatttggccctattgggggtcatttaccgttgcatagttat

SEQ ID NO: 22834 - DNA, 54 bp, unidentified
  source 1..54: mol_type = unassigned DNA; note = methanogen bacteria
tttaaaacaacaatatttgggcctattggaggacatttgcccctacaagattat

SEQ ID NO: 22835 - DNA, 54 bp, unidentified
  source 1..54: mol_type = unassigned DNA; note = methanogen bacteria
tttaaaactacaatttttggcccaatagggggacatttacctattcagagttat

SEQ ID NO: 22836 - DNA, 54 bp, unidentified
  source 1..54: mol_type = unassigned DNA; note = methanogen bacteria
ttcaatacaacaatattcggtccgattggaggtcatttagggttttatagctat

SEQ ID NO: 22837 - DNA, 45 bp, unidentified
  source 1..45: mol_type = unassigned DNA; note = methanogen bacteria
aagactaccctattcggtccgattggaggccatttgggcttcatc

SEQ ID NO: 22838 - DNA, 54 bp, unidentified
  source 1..54: mol_type = unassigned DNA; note = methanogen bacteria
tttcatacaactttattcggaccaattggggaacatttaccccttcatgactat

SEQ ID NO: 22839 - DNA, 48 bp, unidentified
  source 1..48: mol_type = unassigned DNA; note = methanogen bacteria
ttcaaaaccacattatttggtcctttaggaggatccttgccctttatg

SEQ ID NO: 22840 - DNA, 48 bp, unidentified
  source 1..48: mol_type = unassigned DNA; note = methanogen bacteria
tttaaaaccactttgtttggtcctttaggaggatctttgccatttatg

SEQ ID NO: 22841 - DNA, 48 bp, unidentified
  source 1..48: mol_type = unassigned DNA; note = methanogen bacteria
ttcaaaactactttgtttggcccaattggaggtcatttgggttctatt

SEQ ID NO: 22842 - DNA, 45 bp, unidentified
  source 1..45: mol_type = unassigned DNA; note = methanogen bacteria
aaaactactttattcggacctatcggaggacacttgggctttttc

SEQ ID NO: 22843 - DNA, 48 bp, unidentified
  source 1..48: mol_type = unassigned DNA; note = methanogen bacteria
aaaaccacactgttcgggccactagggggccatttaggtttccaaagt

SEQ ID NO: 22844 - DNA, 51 bp, unidentified
  source 1..51: mol_type = unassigned DNA; note = methanogen bacteria
tttaaaaccaccatattcggtccgttaggaggatcattgccgtttacagat

SEQ ID NO: 22845 - DNA, 54 bp, unidentified
  source 1..54: mol_type = unassigned DNA; note = methanogen bacteria
tttaaaactaccctatttggacctattggagaacatttgcctctccaggattat

SEQ ID NO: 22846 - DNA, 51 bp, unidentified
  source 1..51: mol_type = unassigned DNA; note = methanogen bacteria
tttaaaactacattgttcggtccgctcggcggccatttgggctttcagagt

SEQ ID NO: 22847 - DNA, 51 bp, unidentified
  source 1..51: mol_type = unassigned DNA; note = methanogen bacteria
atttccgttgacgattcaggaatagtggtcaacaagctgaatcaaaaggcg

SEQ ID NO: 22848 - DNA, 30 bp, unidentified
  source 1..30: mol_type = unassigned DNA; note = methanogen bacteria
attccaaaatcaacaatgtacaagaatgag

SEQ ID NO: 22849 - DNA, 48 bp, unidentified
  source 1..48: mol_type = unassigned DNA; note = methanogen bacteria
aaaacaacgatgtttggccctattggtggacatttaagttttcaaagc

SEQ ID NO: 22850 - DNA, 51 bp, unidentified
  source 1..51: mol_type = unassigned DNA; note = methanogen bacteria
tttcatactactttatttggtccaattggaaagcatttaggcgggcaaagt

SEQ ID NO: 22851 - DNA, 45 bp, unidentified
  source 1..45: mol_type = unassigned DNA; note = methanogen bacteria
cccatgatgggcatgagcgggctcttcaaatcgggcattgaccag

SEQ ID NO: 22852 - DNA, 48 bp, unidentified
  source 1..48: mol_type = unassigned DNA; note = methanogen bacteria
atcctcgggcccatgagggccctggcgggcatggcggacgacggcagc

SEQ ID NO: 22853 - DNA, 51 bp, unidentified
  source 1..51: mol_type = unassigned DNA; note = methanogen bacteria
tttaaaaccacattgttcggtccaattggagggcatttaggcttatcaagc

SEQ ID NO: 22854 - DNA, 51 bp, unidentified
  source 1..51: mol_type = unassigned DNA; note = methanogen bacteria
tttaagactactttgtttggccctattggtggtcatttaggcttttccagt

SEQ ID NO: 22855 - DNA, 45 bp, unidentified
  source 1..45: mol_type = unassigned DNA; note = methanogen bacteria
cccatgatgggcatgagcggactcttccaatcggcgatggatacc

SEQ ID NO: 22856 - DNA, 45 bp, unidentified
  source 1..45: mol_type = unassigned DNA; note = methanogen bacteria
ctgggccccatgagggctatggcaggtatggcggacgacggaagc

SEQ ID NO: 22857 - DNA, 48 bp, unidentified
  source 1..48: mol_type = unassigned DNA; note = methanogen bacteria
tttgaaaccaacattattggtgttggaacacatattgctggaatagaa

SEQ ID NO: 22858 - DNA, 54 bp, unidentified
  source 1..54: mol_type = unassigned DNA; note = methanogen bacteria
tttaaaaccacattgttcggaccgattggaggtcatttaggcgttgacagttat

SEQ ID NO: 22859 - DNA, 51 bp, unidentified
  source 1..51: mol_type = unassigned DNA; note = methanogen bacteria
tttgaaacaactttatttggcccgattggagggcatttgggttatgatatc

SEQ ID NO: 22860 - DNA, 30 bp, unidentified
  source 1..30: mol_type = unassigned DNA; note = methanogen bacteria
aaatttctgactattgacgcatacgctggt

SEQ ID NO: 22861 - DNA, 30 bp, unidentified
  source 1..30: mol_type = unassigned DNA; note = methanogen bacteria
cagttgttggatacaaggtcttttgcgttg

SEQ ID NO: 22862 - DNA, 36 bp, unidentified
  source 1..36: mol_type = unassigned DNA; note = methanogen bacteria
gtttcattatttataaaaagctacatggatatattc

SEQ ID NO: 22863 - DNA, 171 bp, unidentified
  source 1..171: mol_type = unassigned DNA; note = methanogen bacteria
actttaaatggagcatttatccacatagatgaatattttacattaggatttataagatttccagttaatgaattaataacaataactgcaaatgatgttcatcctcctttatattatgtcttattaaaaatcataaataatagttctatcattaatgactctgtattcact

SEQ ID NO: 22864 - DNA, 99 bp, unidentified
  source 1..99: mol_type = unassigned DNA; note = methanogen bacteria
caccaattaacccaagttcataacggttattggattgaaccattagacttttatgatataatagattgtttatcattttatgctgtaaatttagatgta

SEQ ID NO: 22865 - DNA, 39 bp, unidentified
  source 1..39: mol_type = unassigned DNA; note = methanogen bacteria
gtttatttgatgagtgatttttctgtttcatcaactcaa

SEQ ID NO: 22866 - DNA, 36 bp, unidentified
  source 1..36: mol_type = unassigned DNA; note = methanogen bacteria
atatttattcaaggcatagcttacaattccgcaatc

SEQ ID NO: 22867 - DNA, 48 bp, unidentified
  source 1..48: mol_type = unassigned DNA; note = methanogen bacteria
ttggcaggaggtgccattgaccacaattctgcttcagttgtaggattc

SEQ ID NO: 22868 - DNA, 33 bp, unidentified
  source 1..33: mol_type = unassigned DNA; note = methanogen bacteria
gtagctggacttggtgcagacgcacttgcagca

SEQ ID NO: 22869 - DNA, 51 bp, unidentified
  source 1..51: mol_type = unassigned DNA; note = methanogen bacteria
atactaaatcttatgggagcaggaaatacaatcaaatatgccctagattat

SEQ ID NO: 22870 - DNA, 36 bp, unidentified
  source 1..36: mol_type = unassigned DNA; note = methanogen bacteria
gtgattgtggctggaacaacagcagtggcagtatat

SEQ ID NO: 22871 - DNA, 66 bp, unidentified
  source 1..66: mol_type = unassigned DNA; note = methanogen bacteria
caaatagctaccgctttcagttacacttcagcaagttcagctcttgcacctgaaattgcaactgca

SEQ ID NO: 22872 - DNA, 45 bp, unidentified
  source 1..45: mol_type = unassigned DNA; note = methanogen bacteria
gttaaagagattagaatcactgataccataagtgttttattattg

SEQ ID NO: 22873 - DNA, 30 bp, unidentified
  source 1..30: mol_type = unassigned DNA; note = methanogen bacteria
agcggacaatccattgatattatttttaat

SEQ ID NO: 22874 - DNA, 123 bp, unidentified
  source 1..123: mol_type = unassigned DNA; note = methanogen bacteria
tcgctcataccttaccatccatatgcctttgcaatggcttcaggtataggaagcgcaagcatgaatgctgcagcattggttccattggtgcatatgtaccctgccatggctacccaattggag

SEQ ID NO: 22875 - DNA, 48 bp, unidentified
  source 1..48: mol_type = unassigned DNA; note = methanogen bacteria
ggagttccaacttcagacattataataacttatgtctctcaaattgag

SEQ ID NO: 22876 - DNA, 39 bp, unidentified
  source 1..39: mol_type = unassigned DNA; note = methanogen bacteria
gtttacctgatgagtgacttttctgtctcatcaacgcag

SEQ ID NO: 22877 - DNA, 33 bp, unidentified
  source 1..33: mol_type = unassigned DNA; note = methanogen bacteria
atattcattcagggcgtagcctacaattccgca

SEQ ID NO: 22878 - DNA, 45 bp, unidentified
  source 1..45: mol_type = unassigned DNA; note = methanogen bacteria
gcaggaggagccatagaccacaatactgcttcagtagtagcattc

SEQ ID NO: 22879 - DNA, 36 bp, unidentified
  source 1..36: mol_type = unassigned DNA; note = methanogen bacteria
cctacaatatcatcagatttaagtttaaatgttgaa

SEQ ID NO: 22880 - DNA, 54 bp, unidentified
  source 1..54: mol_type = unassigned DNA; note = methanogen bacteria
gttttaggggcttcaaattctcttgaaagtaatattcctttgtttataacttcg

SEQ ID NO: 22881 - DNA, 30 bp, unidentified
  source 1..30: mol_type = unassigned DNA; note = methanogen bacteria
acaaaatcatttaccacagcagagtatggt

SEQ ID NO: 22882 - DNA, 39 bp, unidentified
  source 1..39: mol_type = unassigned DNA; note = methanogen bacteria
aatcaaatcgcaaatgcattattcaatggaagcatgcag

SEQ ID NO: 22883 - DNA, 42 bp, unidentified
  source 1..42: mol_type = unassigned DNA; note = methanogen bacteria
ctatacataatcacaactccagaaattgctcttggaggttat

SEQ ID NO: 22884 - DNA, 39 bp, unidentified
  source 1..39: mol_type = unassigned DNA; note = methanogen bacteria
ctcaatcaattagttggaaattatgctactggaatatat

SEQ ID NO: 22885 - DNA, 51 bp, unidentified
  source 1..51: mol_type = unassigned DNA; note = methanogen bacteria
acagacattatacaattaatttatggacataaatatgatgcagctgctgaa

SEQ ID NO: 22886 - DNA, 33 bp, unidentified
  source 1..33: mol_type = unassigned DNA; note = methanogen bacteria
gttgcaggactcggtcctgatgcattggctgca

SEQ ID NO: 22887 - DNA, 48 bp, unidentified
  source 1..48: mol_type = unassigned DNA; note = methanogen bacteria
ctcgttctcatgggtgcaggaaaaaccatgacctatgcatacagatac

SEQ ID NO: 22888 - DNA, 33 bp, unidentified
  source 1..33: mol_type = unassigned DNA; note = methanogen bacteria
gtgattgttgctggaacagatgcagtagctgca

SEQ ID NO: 22889 - DNA, 60 bp, unidentified
  source 1..60: mol_type = unassigned DNA; note = methanogen bacteria
atatcctcaatcttcgcatacaccagtgcaagtgcaagccttggtccgcagatagcatat

SEQ ID NO: 22890 - DNA, 33 bp, unidentified
  source 1..33: mol_type = unassigned DNA; note = methanogen bacteria
gttgcatctcttggtgaagttgcaatttcaggt

SEQ ID NO: 22891 - DNA, 57 bp, unidentified
  source 1..57: mol_type = unassigned DNA; note = methanogen bacteria
ttaatcaatacattgtttggacaaatagatcaggatgtatttgacactgcaaatatc

SEQ ID NO: 22892 - DNA, 30 bp, unidentified
  source 1..30: mol_type = unassigned DNA; note = methanogen bacteria
tccacattcggtacaatggctattgctgca

SEQ ID NO: 22893 - DNA, 51 bp, unidentified
  source 1..51: mol_type = unassigned DNA; note = methanogen bacteria
ttgcagatatatgccttgtctccggcaactgctgccatgacctctgaaatg

SEQ ID NO: 22894 - DNA, 30 bp, unidentified
  source 1..30: mol_type = unassigned DNA; note = methanogen bacteria
gtgaaccgtaccggcagcttcgacaaccta

SEQ ID NO: 22895 - DNA, 51 bp, unidentified
  source 1..51: mol_type = unassigned DNA; note = methanogen bacteria
accggatacatcttctacgtcaccaaggaggccaccgtagtatacgggtcg

SEQ ID NO: 22896 - DNA, 78 bp, unidentified
  source 1..78: mol_type = unassigned DNA; note = methanogen bacteria
tccaaaggactgaccagcggactcaccgacagttctgtggatctggcacagtacggtctcgtgatggacaccttcgac

SEQ ID NO: 22897 - DNA, 105 bp, unidentified
  source 1..105: mol_type = unassigned DNA; note = methanogen bacteria
ttctcgagctgggagagtctcggtaccgtgggtcaggcattgatgttcctgataccgttctcgcatccgatgatggccatggacaacctgatattcggcgatatg

SEQ ID NO: 22898 - DNA, 87 bp, unidentified
  source 1..87: mol_type = unassigned DNA; note = methanogen bacteria
tcgagtattgatttttcatggggaagtgatactgcactttactttgaaaaagttggtggaacctctgatttatcgaccatgacaaca

SEQ ID NO: 22899 - DNA, 72 bp, unidentified
  source 1..72: mol_type = unassigned DNA; note = methanogen bacteria
atttctcttccaggttcaggcataggtattaatacattattgaatcctaagtgggaggctttaactaatatt

SEQ ID NO: 22900 - DNA, 105 bp, unidentified
  source 1..105: mol_type = unassigned DNA; note = methanogen bacteria
ggttatatgtcttcaacttcaggagtacctatcgtcaatttaattaaggaagggacagggttaatctttgtagttttcccaacgattttcaatataatgggtcct

SEQ ID NO: 22901 - DNA, 30 bp, unidentified
  source 1..30: mol_type = unassigned DNA; note = methanogen bacteria
tctattttaggaacaaaagctttttctgca

SEQ ID NO: 22902 - DNA, 54 bp, unidentified
  source 1..54: mol_type = unassigned DNA; note = methanogen bacteria
aatattttactaactctcggtgcatcaagtgtaatagatttggctttagaatat

SEQ ID NO: 22903 - DNA, 30 bp, unidentified
  source 1..30: mol_type = unassigned DNA; note = methanogen bacteria
agtcctgatggtttcaatttaggtattagt

SEQ ID NO: 22904 - DNA, 36 bp, unidentified
  source 1..36: mol_type = unassigned DNA; note = methanogen bacteria
gctcatatagcaaataatcatgctgttgcttcatat

SEQ ID NO: 22905 - DNA, 54 bp, unidentified
  source 1..54: mol_type = unassigned DNA; note = methanogen bacteria
ttatcattattattttgtttagctgaagatagtaaatctttaacagatttagtt

SEQ ID NO: 22906 - DNA, 36 bp, unidentified
  source 1..36: mol_type = unassigned DNA; note = methanogen bacteria
gtagctggtttaggccctgatgcactttctgcaatt

SEQ ID NO: 22907 - DNA, 54 bp, unidentified
  source 1..54: mol_type = unassigned DNA; note = methanogen bacteria
cctattttaatatggataggggcaggaaatgttctaagctatgcaatggattat

SEQ ID NO: 22908 - DNA, 36 bp, unidentified
  source 1..36: mol_type = unassigned DNA; note = methanogen bacteria
atacaagtgtctaatcatgtatcagtagcagtattt

SEQ ID NO: 22909 - DNA, 60 bp, unidentified
  source 1..60: mol_type = unassigned DNA; note = methanogen bacteria
attgcaactatctttagttattccagtgaaagtgcaggattaacacctcaaattgcatca

SEQ ID NO: 22910 - DNA, 36 bp, unidentified
  source 1..36: mol_type = unassigned DNA; note = methanogen bacteria
cccgacatcggcgagagcctcggcgtcgatacggcc

SEQ ID NO: 22911 - DNA, 33 bp, unidentified
  source 1..33: mol_type = unassigned DNA; note = methanogen bacteria
ttctacgggaggaccgtcgagggcatgagctcc

SEQ ID NO: 22912 - DNA, 60 bp, unidentified
  source 1..60: mol_type = unassigned DNA; note = methanogen bacteria
ttctcgaagtcggacggggtcgacatcggggatgtcaccagggacgccttcctcgacggg

SEQ ID NO: 22913 - DNA, 33 bp, unidentified
  source 1..33: mol_type = unassigned DNA; note = methanogen bacteria
ctcgacggcaaacctgaacacgtcgtcctcaac

SEQ ID NO: 22914 - DNA, 51 bp, unidentified
  source 1..51: mol_type = unassigned DNA; note = methanogen bacteria
acggatgcggtgttcacggtcgacagcgagaccggactgtatgcacgcggg

SEQ ID NO: 22915 - DNA, 30 bp, unidentified
  source 1..30: mol_type = unassigned DNA; note = methanogen bacteria
atgattgatgtactgcatttttcagaccca

SEQ ID NO: 22916 - DNA, 57 bp, unidentified
  source 1..57: mol_type = unassigned DNA; note = methanogen bacteria
agcttgtttgctctttcaacaaatatccaagaacattcagccctattgttcacttat

SEQ ID NO: 22917 - DNA, 54 bp, unidentified
  source 1..54: mol_type = unassigned DNA; note = methanogen bacteria
ttcgctgaaagccatgtgaacaacattattccatttataaaccatgaaatagca

SEQ ID NO: 22918 - DNA, 30 bp, unidentified
  source 1..30: mol_type = unassigned DNA; note = methanogen bacteria
ggcagcattggcagcggcatgaaactaaac

SEQ ID NO: 22919 - DNA, 54 bp, unidentified
  source 1..54: mol_type = unassigned DNA; note = methanogen bacteria
tttccgaacgacaatccaacaatgttgttcaatatcattccaattgcaaatctt

SEQ ID NO: 22920 - DNA, 33 bp, unidentified
  source 1..33: mol_type = unassigned DNA; note = methanogen bacteria
gtagctggtatcggttcagatgcattggctgca

SEQ ID NO: 22921 - DNA, 48 bp, unidentified
  source 1..48: mol_type = unassigned DNA; note = methanogen bacteria
ctacaacttatgggagcaggcgatacaataggatatgcactcgattac

SEQ ID NO: 22922 - DNA, 36 bp, unidentified
  source 1..36: mol_type = unassigned DNA; note = methanogen bacteria
gttattacagctggaactgatgcagtggctgtatat

SEQ ID NO: 22923 - DNA, 63 bp, unidentified
  source 1..63: mol_type = unassigned DNA; note = methanogen bacteria
caaattgctacagcattcagttatacaaacgcaagtgcaggactttcatcacaaatcgcaact

SEQ ID NO: 22924 - DNA, 60 bp, unidentified
  source 1..60: mol_type = unassigned DNA; note = methanogen bacteria
ggaagcggggaagttatatatgatacaaaaatacttggtattgtagttacaaaaaattcc

SEQ ID NO: 22925 - DNA, 36 bp, unidentified
  source 1..36: mol_type = unassigned DNA; note = methanogen bacteria
cccgacatcggagagagcctcggcgtcgatacggcc

SEQ ID NO: 22926 - DNA, 33 bp, unidentified
  source 1..33: mol_type = unassigned DNA; note = methanogen bacteria
ttctacgggaggaccgtcgaaggcatgagctcc

SEQ ID NO: 22927 - DNA, 60 bp, unidentified
  source 1..60: mol_type = unassigned DNA; note = methanogen bacteria
ttctccggatcgggcggggtcgacatcagcgatgtcaccagggacgccttcctcgacggc

SEQ ID NO: 22928 - DNA, 39 bp, unidentified
  source 1..39: mol_type = unassigned DNA; note = methanogen bacteria
cttcccgacataggcagttcgttcggtgtcgataccggc

SEQ ID NO: 22929 - DNA, 30 bp, unidentified
  source 1..30: mol_type = unassigned DNA; note = methanogen bacteria
tatgccgagatatgtctggggatgtcttcc

SEQ ID NO: 22930 - DNA, 63 bp, unidentified
  source 1..63: mol_type = unassigned DNA; note = methanogen bacteria
ctcgcctcgggcacggacgggatcgacatcgattcgctcaccgcccccgtgttcctgagcggc

SEQ ID NO: 22931 - DNA, 33 bp, unidentified
  source 1..33: mol_type = unassigned DNA; note = methanogen bacteria
gtggcaggactaggagccgatcctctggcagca

SEQ ID NO: 22932 - DNA, 51 bp, unidentified
  source 1..51: mol_type = unassigned DNA; note = methanogen bacteria
ttgattatagccatgggtggaaaagacgtattaacccatgctgtggattat

SEQ ID NO: 22933 - DNA, 33 bp, unidentified
  source 1..33: mol_type = unassigned DNA; note = methanogen bacteria
gcagcagtggctggaacaacagcggtagcagtc

SEQ ID NO: 22934 - DNA, 66 bp, unidentified
  source 1..66: mol_type = unassigned DNA; note = methanogen bacteria
taccttgcaatcatgttttcatactcatcttcaagtgcaagcctggctcctttgatatccgagttc

SEQ ID NO: 22935 - DNA, 39 bp, unidentified
  source 1..39: mol_type = unassigned DNA; note = methanogen bacteria
ctccccgacataggcagttcgttcggtgtcgatacggga

SEQ ID NO: 22936 - DNA, 30 bp, unidentified
  source 1..30: mol_type = unassigned DNA; note = methanogen bacteria
tacgctgagatctgtctggggatgtcctcg

SEQ ID NO: 22937 - DNA, 66 bp, unidentified
  source 1..66: mol_type = unassigned DNA; note = methanogen bacteria
accatagcatccggtaccgacggaatcgacatcgactcggtaacctccgcccagttcctcagcggt

SEQ ID NO: 22938 - DNA, 33 bp, unidentified
  source 1..33: mol_type = unassigned DNA; note = methanogen bacteria
gttgcaggactcggtccggatgcccttgctgct

SEQ ID NO: 22939 - DNA, 54 bp, unidentified
  source 1..54: mol_type = unassigned DNA; note = methanogen bacteria
cctatattgcagtttatgggtgcaggaaatactattcaatatgcaatggattac

SEQ ID NO: 22940 - DNA, 36 bp, unidentified
  source 1..36: mol_type = unassigned DNA; note = methanogen bacteria
gtgcttgcggcaggaactactgcagtggcagtatat

SEQ ID NO: 22941 - DNA, 66 bp, unidentified
  source 1..66: mol_type = unassigned DNA; note = methanogen bacteria
ggacagattgctgcagtattttcttatactcaagccagtgccggtttggcatcagaaattgcaaca

SEQ ID NO: 22942 - DNA, 33 bp, unidentified
  source 1..33: mol_type = unassigned DNA; note = methanogen bacteria
gttgcaggacttggtgccgatgctctggctgca

SEQ ID NO: 22943 - DNA, 54 bp, unidentified
  source 1..54: mol_type = unassigned DNA; note = methanogen bacteria
cctatcctgcagtttatgggagcaggagacaccatccaatatgcaatggactac

SEQ ID NO: 22944 - DNA, 36 bp, unidentified
  source 1..36: mol_type = unassigned DNA; note = methanogen bacteria
gttcttgcagcaggaacaacagccgttgcagtatat

SEQ ID NO: 22945 - DNA, 63 bp, unidentified
  source 1..63: mol_type = unassigned DNA; note = methanogen bacteria
cagattgcaacattattctcctacactgaagcaagtgcggcactatctccgcagatagcaaca

SEQ ID NO: 22946 - DNA, 33 bp, unidentified
  source 1..33: mol_type = unassigned DNA; note = methanogen bacteria
gtagctggacttggtcctgatgctcttgcagct

SEQ ID NO: 22947 - DNA, 54 bp, unidentified
  source 1..54: mol_type = unassigned DNA; note = methanogen bacteria
cctatattgcaatttatgggtgccggacatactatccaatatgcaatggattac

SEQ ID NO: 22948 - DNA, 36 bp, unidentified
  source 1..36: mol_type = unassigned DNA; note = methanogen bacteria
gtgctggcggcaggaactacagcagtggcagtatat

SEQ ID NO: 22949 - DNA, 63 bp, unidentified
  source 1..63: mol_type = unassigned DNA; note = methanogen bacteria
ccgattgcaacggtattttcatatacccaagccagtgcaggccttgcatcagaaatcgcaaca

SEQ ID NO: 22950 - DNA, 33 bp, unidentified
  source 1..33: mol_type = unassigned DNA; note = methanogen bacteria
gtggcaggacttggtgctgatgcccttgcggca

SEQ ID NO: 22951 - DNA, 57 bp, unidentified
  source 1..57: mol_type = unassigned DNA; note = methanogen bacteria
gtgcctatccttgagttcatgggtgccggaaacacgatggactatgcaatgagctac

SEQ ID NO: 22952 - DNA, 36 bp, unidentified
  source 1..36: mol_type = unassigned DNA; note = methanogen bacteria
gtcatggcagacggaacgactgcggtggctgtgtat

SEQ ID NO: 22953 - DNA, 66 bp, unidentified
  source 1..66: mol_type = unassigned DNA; note = methanogen bacteria
cagattgcgacgatgtttgcatacacctcggcaagcgcaagccttgctccccaaatcgccgatgcg

SEQ ID NO: 22954 - DNA, 33 bp, unidentified
  source 1..33: mol_type = unassigned DNA; note = methanogen bacteria
gtagcaggacttggtgcagatgcattagctgca

SEQ ID NO: 22955 - DNA, 48 bp, unidentified
  source 1..48: mol_type = unassigned DNA; note = methanogen bacteria
cttgaaattatgggagcaggagaatcaataagttatgcttcaagctat

SEQ ID NO: 22956 - DNA, 36 bp, unidentified
  source 1..36: mol_type = unassigned DNA; note = methanogen bacteria
gtgatagttgctggaacaagtgctgtagcagtctat

SEQ ID NO: 22957 - DNA, 63 bp, unidentified
  source 1..63: mol_type = unassigned DNA; note = methanogen bacteria
cagatagcaactgcattcagttatacaagtgcaagttcctctttggcacctgaaattgcaaca

SEQ ID NO: 22958 - DNA, 33 bp, unidentified
  source 1..33: mol_type = unassigned DNA; note = methanogen bacteria
gccgcctggctgggaggctcggccgtggcaggg

SEQ ID NO: 22959 - DNA, 54 bp, unidentified
  source 1..54: mol_type = unassigned DNA; note = methanogen bacteria
gacctcatggatcttttcggggcggacgaatcggcctcggaggcgctggactac

SEQ ID NO: 22960 - DNA, 36 bp, unidentified
  source 1..36: mol_type = unassigned DNA; note = methanogen bacteria
atcggcgtcggcggggaggacgtcgtcgggacgtac

SEQ ID NO: 22961 - DNA, 54 bp, unidentified
  source 1..54: mol_type = unassigned DNA; note = methanogen bacteria
gcctgggccttcacggtctcccccgacctggagcccctgcggggcgacatggcg

SEQ ID NO: 22962 - DNA, 33 bp, unidentified
  source 1..33: mol_type = unassigned DNA; note = methanogen bacteria
ttcgccataggcctcggttccacgcacccctac

SEQ ID NO: 22963 - DNA, 36 bp, unidentified
  source 1..36: mol_type = unassigned DNA; note = methanogen bacteria
gtggtggacggggaccccaaccaggtggtcttcaac

SEQ ID NO: 22964 - DNA, 54 bp, unidentified
  source 1..54: mol_type = unassigned DNA; note = methanogen bacteria
acggagttcgtgttcacggtcgacgataccaccggcctctattcgcgcgcaccc

SEQ ID NO: 22965 - DNA, 39 bp, unidentified
  source 1..39: mol_type = unassigned DNA; note = methanogen bacteria
gttccggccattgcagcggaatttgcaatgaacaatgtg

SEQ ID NO: 22966 - DNA, 33 bp, unidentified
  source 1..33: mol_type = unassigned DNA; note = methanogen bacteria
tatcatttccagtatgtgagaggatggaatgcg

SEQ ID NO: 22967 - DNA, 54 bp, unidentified
  source 1..54: mol_type = unassigned DNA; note = methanogen bacteria
gtaatgggcagcctggaactggctccacagtatgcttcaatgattgttcaggca

SEQ ID NO: 22968 - DNA, 33 bp, unidentified
  source 1..33: mol_type = unassigned DNA; note = methanogen bacteria
gtggcagggcttggtgcagacgccctggccgca

SEQ ID NO: 22969 - DNA, 54 bp, unidentified
  source 1..54: mol_type = unassigned DNA; note = methanogen bacteria
cctattctgcagttcatgggtgcgggtaacacaatccaatatgcattggactac

SEQ ID NO: 22970 - DNA, 36 bp, unidentified
  source 1..36: mol_type = unassigned DNA; note = methanogen bacteria
gttatggctgacggaacaactgccgtagcagtatat

SEQ ID NO: 22971 - DNA, 63 bp, unidentified
  source 1..63: mol_type = unassigned DNA; note = methanogen bacteria
caaattgcatcaatgtttgcatacacctcagcaagctcaactttggctccgcaaattgcacat

SEQ ID NO: 22972 - DNA, 39 bp, unidentified
  source 1..39: mol_type = unassigned DNA; note = methanogen bacteria
ttccacagggggttaatagttaattttaacttcaatttt

SEQ ID NO: 22973 - DNA, 39 bp, unidentified
  source 1..39: mol_type = unassigned DNA; note = methanogen bacteria
gtttatttgatgagtgacttttccgtctcatcaacacaa

SEQ ID NO: 22974 - DNA, 36 bp, unidentified
  source 1..36: mol_type = unassigned DNA; note = methanogen bacteria
atattcattcagggcgtagcttacaattcagcaatc

SEQ ID NO: 22975 - DNA, 45 bp, unidentified
  source 1..45: mol_type = unassigned DNA; note = methanogen bacteria
gcaggaggtgctataaatcacaattccgcttcagtcgtagcattc

SEQ ID NO: 22976 - DNA, 39 bp, unidentified
  source 1..39: mol_type = unassigned DNA; note = methanogen bacteria
gtttatctgatgagtgacttttcagtttcatcaacgcag

SEQ ID NO: 22977 - DNA, 36 bp, unidentified
  source 1..36: mol_type = unassigned DNA; note = methanogen bacteria
atattcattcagggcgtgggctataattcagctatt

SEQ ID NO: 22978 - DNA, 48 bp, unidentified
  source 1..48: mol_type = unassigned DNA; note = methanogen bacteria
ctggccggaggaagcattgaccacaatcatgcctccgttgttgcattc

SEQ ID NO: 22979 - DNA, 36 bp, unidentified
  source 1..36: mol_type = unassigned DNA; note = methanogen bacteria
gtatctggtttaggtcctaatgcactttctgcaatg

SEQ ID NO: 22980 - DNA, 54 bp, unidentified
  source 1..54: mol_type = unassigned DNA; note = methanogen bacteria
cctattttaatatttataggagcagaaaaggttcttaactatgcaatggattat

SEQ ID NO: 22981 - DNA, 36 bp, unidentified
  source 1..36: mol_type = unassigned DNA; note = methanogen bacteria
aaacgagcatctaattctgtatcagtgggagtatat

SEQ ID NO: 22982 - DNA, 63 bp, unidentified
  source 1..63: mol_type = unassigned DNA; note = methanogen bacteria
cctattgcaacaatatttagttattccaataaaagtgcagaattaacacctctaattgcatca

SEQ ID NO: 22983 - DNA, 39 bp, unidentified
  source 1..39: mol_type = unassigned DNA; note = methanogen bacteria
gtgcctgctattgctcgggaatttgcaatgaataatgtt

SEQ ID NO: 22984 - DNA, 33 bp, unidentified
  source 1..33: mol_type = unassigned DNA; note = methanogen bacteria
tatcattttcagtatgttagaggatgggatgct

SEQ ID NO: 22985 - DNA, 54 bp, unidentified
  source 1..54: mol_type = unassigned DNA; note = methanogen bacteria
ataatgggtactcttccacttgcacataaatactctggtatgattctccaatcc

SEQ ID NO: 22986 - DNA, 33 bp, unidentified
  source 1..33: mol_type = unassigned DNA; note = methanogen bacteria
gctggtttaggtcctaatgcactttctgcaatt

SEQ ID NO: 22987 - DNA, 57 bp, unidentified
  source 1..57: mol_type = unassigned DNA; note = methanogen bacteria
aaacctattttaatatttataggggcaagaaatgttctaagctatgcaatggattat

SEQ ID NO: 22988 - DNA, 36 bp, unidentified
  source 1..36: mol_type = unassigned DNA; note = methanogen bacteria
atacaagtatctaatcatgtatcagtagcagtattt

SEQ ID NO: 22989 - DNA, 63 bp, unidentified
  source 1..63: mol_type = unassigned DNA; note = methanogen bacteria
catattgcaactatatttagttattccaataaaagtgtaggattaacacctaaaattacatca

SEQ ID NO: 22990 - DNA, 36 bp, unidentified
  source 1..36: mol_type = unassigned DNA; note = methanogen bacteria
ccagatatttctatagacttagatgttcctgttgat

SEQ ID NO: 22991 - DNA, 30 bp, unidentified
  source 1..30: mol_type = unassigned DNA; note = methanogen bacteria
tatttacagcttgttttaaaattaaacaat

SEQ ID NO: 22992 - DNA, 51 bp, unidentified
  source 1..51: mol_type = unassigned DNA; note = methanogen bacteria
tttgtaggttatgatgagatacaagatgatattcttggtttatgtcaatct

SEQ ID NO: 22993 - DNA, 36 bp, unidentified
  source 1..36: mol_type = unassigned DNA; note = methanogen bacteria
gtagcgggtttaggtcctaatgcactttctgcaatt

SEQ ID NO: 22994 - DNA, 54 bp, unidentified
  source 1..54: mol_type = unassigned DNA; note = methanogen bacteria
cctattttaatatttgtaggggcaggagatgttcttagttatgcaatggattat

SEQ ID NO: 22995 - DNA, 30 bp, unidentified
  source 1..30: mol_type = unassigned DNA; note = methanogen bacteria
acacaagcatctaattctgtatcagtggga

SEQ ID NO: 22996 - DNA, 63 bp, unidentified
  source 1..63: mol_type = unassigned DNA; note = methanogen bacteria
cctattgcaacaatctttagttattccaataaaagtgtgggattaacaccccaaattgcatca

SEQ ID NO: 22997 - DNA, 39 bp, unidentified
  source 1..39: mol_type = unassigned DNA; note = methanogen bacteria
gttcctgcaatagccaatgactttgctatgaacaatgtt

SEQ ID NO: 22998 - DNA, 33 bp, unidentified
  source 1..33: mol_type = unassigned DNA; note = methanogen bacteria
tatcatttccagtatgtcagaggatggaatgca

SEQ ID NO: 22999 - DNA, 54 bp, unidentified
  source 1..54: mol_type = unassigned DNA; note = methanogen bacteria
gtaatgggcaatttgcctttatcaacccagtacgctgacttgattgtccgctct

SEQ ID NO: 23000 - DNA, 39 bp, unidentified
  source 1..39: mol_type = unassigned DNA; note = methanogen bacteria
gttccagctattgcacaggactttgcaatgaataacgtt

SEQ ID NO: 23001 - DNA, 33 bp, unidentified
  source 1..33: mol_type = unassigned DNA; note = methanogen bacteria
tatcatttccagtatgtaagaggatggaatgct

SEQ ID NO: 23002 - DNA, 57 bp, unidentified
  source 1..57: mol_type = unassigned DNA; note = methanogen bacteria
tgggtgatgggcagcctggaactggctccacaatatgcaggcatgattgtacaggca

SEQ ID NO: 23003 - DNA, 39 bp, unidentified
  source 1..39: mol_type = unassigned DNA; note = methanogen bacteria
gttcccgccatcgcagctgaatttggaatgaacaatatc

SEQ ID NO: 23004 - DNA, 33 bp, unidentified
  source 1..33: mol_type = unassigned DNA; note = methanogen bacteria
tatcacttccagtacgttaggggctggaacgct

SEQ ID NO: 23005 - DNA, 57 bp, unidentified
  source 1..57: mol_type = unassigned DNA; note = methanogen bacteria
tggataatgggtgatttgattctgtcttcacaatatgctaatctgatagttcaatgt

SEQ ID NO: 23006 - DNA, 39 bp, unidentified
  source 1..39: mol_type = unassigned DNA; note = methanogen bacteria
gttccagctattgcacaagaatttgcaatgaataatgtt

SEQ ID NO: 23007 - DNA, 33 bp, unidentified
  source 1..33: mol_type = unassigned DNA; note = methanogen bacteria
tatcatttccaatatgttaggggttgggatgct

SEQ ID NO: 23008 - DNA, 54 bp, unidentified
  source 1..54: mol_type = unassigned DNA; note = methanogen bacteria
gtaatgggaaatcttgaacttggacctcaatatgcagcaatggttgttcaagca

SEQ ID NO: 23009 - DNA, 36 bp, unidentified
  source 1..36: mol_type = unassigned DNA; note = methanogen bacteria
gtagcgggtttaggtcctagtgcactttctgcaatt

SEQ ID NO: 23010 - DNA, 57 bp, unidentified
  source 1..57: mol_type = unassigned DNA; note = methanogen bacteria
aaacctattttaatatttgtaggggcaggagatgttcttagttatgcaatggattat

SEQ ID NO: 23011 - DNA, 30 bp, unidentified
  source 1..30: mol_type = unassigned DNA; note = methanogen bacteria
acacgagcatctgattctgtatcggtggga

SEQ ID NO: 23012 - DNA, 63 bp, unidentified
  source 1..63: mol_type = unassigned DNA; note = methanogen bacteria
cctattgcaacaatctttagttattccaataaaagtgtaggattaacaccccaaattgcatca

SEQ ID NO: 23013 - DNA, 39 bp, unidentified
  source 1..39: mol_type = unassigned DNA; note = methanogen bacteria
gtttatttgatgagtgacttctctgtctcatcaacacaa

SEQ ID NO: 23014 - DNA, 36 bp, unidentified
  source 1..36: mol_type = unassigned DNA; note = methanogen bacteria
atattcatgcaaggtatagcttacaattccgcaata

SEQ ID NO: 23015 - DNA, 45 bp, unidentified
  source 1..45: mol_type = unassigned DNA; note = methanogen bacteria
gcaggaggttccacaggccacaattccgcttcagttgtagcattc

SEQ ID NO: 23016 - DNA, 39 bp, unidentified
  source 1..39: mol_type = unassigned DNA; note = methanogen bacteria
gttcccgctattgcaaatgattttgcaatgaataatgtt

SEQ ID NO: 23017 - DNA, 33 bp, unidentified
  source 1..33: mol_type = unassigned DNA; note = methanogen bacteria
tatcatttccaatatgttaggggctggaatgcc

SEQ ID NO: 23018 - DNA, 54 bp, unidentified
  source 1..54: mol_type = unassigned DNA; note = methanogen bacteria
gttatgggtaatttggctttatccacacaatatgcagatttaattgtcaaatca

SEQ ID NO: 23019 - DNA, 42 bp, unidentified
  source 1..42: mol_type = unassigned DNA; note = methanogen bacteria
ctcccggacatcggtgccgatttcggcgtggataccgccacg

SEQ ID NO: 23020 - DNA, 30 bp, unidentified
  source 1..30: mol_type = unassigned DNA; note = methanogen bacteria
ttcggggagatctgcatggggatgtcgtcc

SEQ ID NO: 23021 - DNA, 63 bp, unidentified
  source 1..63: mol_type = unassigned DNA; note = methanogen bacteria
ttctccaagaccgacggtatcgacatccaggacgtgagtgcgtcggctttcgagaacggattc

SEQ ID NO: 23022 - DNA, 36 bp, unidentified
  source 1..36: mol_type = unassigned DNA; note = methanogen bacteria
gtttatttgatgagtgacttttctgtctcatcaaca

SEQ ID NO: 23023 - DNA, 36 bp, unidentified
  source 1..36: mol_type = unassigned DNA; note = methanogen bacteria
atattcatgcagggcatagcttacaattctgcaata

SEQ ID NO: 23024 - DNA, 45 bp, unidentified
  source 1..45: mol_type = unassigned DNA; note = methanogen bacteria
gcaggaggtaccatagatcacaatcatgcttcagttgtagcattc

SEQ ID NO: 23025 - DNA, 30 bp, unidentified
  source 1..30: mol_type = unassigned DNA; note = methanogen bacteria
agtggacttggctctggaccacttgccgct

SEQ ID NO: 23026 - DNA, 57 bp, unidentified
  source 1..57: mol_type = unassigned DNA; note = methanogen bacteria
agggatttgcttattctctttggagccagtgaagtaattgattttgcaatggactat

SEQ ID NO: 23027 - DNA, 30 bp, unidentified
  source 1..30: mol_type = unassigned DNA; note = methanogen bacteria
ttcataactgccggtacaatggaagtggct

SEQ ID NO: 23028 - DNA, 66 bp, unidentified
  source 1..66: mol_type = unassigned DNA; note = methanogen bacteria
tatccgatttcagagggattcaatttcataaacggaaatcctcaaatgatttcaagaactgcagag

SEQ ID NO: 23029 - DNA, 36 bp, unidentified
  source 1..36: mol_type = unassigned DNA; note = methanogen bacteria
cctgccattgcaatcgattttggaatgaacaatgtt

SEQ ID NO: 23030 - DNA, 33 bp, unidentified
  source 1..33: mol_type = unassigned DNA; note = methanogen bacteria
taccatttccaatatgttagggggtggaatgct

SEQ ID NO: 23031 - DNA, 54 bp, unidentified
  source 1..54: mol_type = unassigned DNA; note = methanogen bacteria
attatgggaagcttgccacttgcaaccaagtatgctggcatggtggttcaggca

SEQ ID NO: 23032 - DNA, 39 bp, unidentified
  source 1..39: mol_type = unassigned DNA; note = methanogen bacteria
gttccagctattgcacaagagtttgcaatgaataatgtt

SEQ ID NO: 23033 - DNA, 33 bp, unidentified
  source 1..33: mol_type = unassigned DNA; note = methanogen bacteria
taccacttccagtacgttagaggatgggatgca

SEQ ID NO: 23034 - DNA, 54 bp, unidentified
  source 1..54: mol_type = unassigned DNA; note = methanogen bacteria
gtcatgggaagcttgccgcttgcaaccaaatatgctggtatggtggttcaaaca

SEQ ID NO: 23035 - DNA, 30 bp, unidentified
  source 1..30: mol_type = unassigned DNA; note = methanogen bacteria
agcggattaggtaatgttgaagtatctgtt

SEQ ID NO: 23036 - DNA, 57 bp, unidentified
  source 1..57: mol_type = unassigned DNA; note = methanogen bacteria
gataagatacttgccttgttttgcactaatcaaatttttgacgcttcctattcatat

SEQ ID NO: 23037 - DNA, 33 bp, unidentified
  source 1..33: mol_type = unassigned DNA; note = methanogen bacteria
ttatatgaaggtttaatttacattacagcttac

SEQ ID NO: 23038 - DNA, 57 bp, unidentified
  source 1..57: mol_type = unassigned DNA; note = methanogen bacteria
ttcttaagttatgtcttatatcaaactaaggatatgcttgttatcaaccagatttcc

SEQ ID NO: 23039 - DNA, 33 bp, unidentified
  source 1..33: mol_type = unassigned DNA; note = methanogen bacteria
gttgcaggacttggtgcagatgcccttgcagca

SEQ ID NO: 23040 - DNA, 57 bp, unidentified
  source 1..57: mol_type = unassigned DNA; note = methanogen bacteria
gttcctatccttaagttcatgggagccggagaaacaatccagtatgcgatggactac

SEQ ID NO: 23041 - DNA, 36 bp, unidentified
  source 1..36: mol_type = unassigned DNA; note = methanogen bacteria
gtcattgcagcaggaacaacagcggttgcagtatat

SEQ ID NO: 23042 - DNA, 63 bp, unidentified
  source 1..63: mol_type = unassigned DNA; note = methanogen bacteria
ccgattgcaacaatgttttcatataccgaagcaagtgcggcactctccccgcagattgcacag

SEQ ID NO: 23043 - DNA, 39 bp, unidentified
  source 1..39: mol_type = unassigned DNA; note = methanogen bacteria
gttcccgcaattgcacaggactttgcaatgaataatgtt

SEQ ID NO: 23044 - DNA, 33 bp, unidentified
  source 1..33: mol_type = unassigned DNA; note = methanogen bacteria
taccacttccagtatgtaaggggatgggacgca

SEQ ID NO: 23045 - DNA, 57 bp, unidentified
  source 1..57: mol_type = unassigned DNA; note = methanogen bacteria
tgggtgatgggcagcttggaattggctcctcaatatgcttccatgattgtgcaggca

SEQ ID NO: 23046 - DNA, 33 bp, unidentified
  source 1..33: mol_type = unassigned DNA; note = methanogen bacteria
gtagccggtcttggagctgacgcccttgctgca

SEQ ID NO: 23047 - DNA, 57 bp, unidentified
  source 1..57: mol_type = unassigned DNA; note = methanogen bacteria
gtgcctatccttgagtttatgggtgcgggaaatacaattcagtatgcactggattac

SEQ ID NO: 23048 - DNA, 36 bp, unidentified
  source 1..36: mol_type = unassigned DNA; note = methanogen bacteria
gtgctggcagcaggaacaacagccgttgcagtatat

SEQ ID NO: 23049 - DNA, 63 bp, unidentified
  source 1..63: mol_type = unassigned DNA; note = methanogen bacteria
caaatagcaacaatgttttcatatacagaagcaagtgctgcgctttcaccacagattgcacag

SEQ ID NO: 23050 - DNA, 126 bp, unidentified
  source 1..126: mol_type = unassigned DNA; note = methanogen bacteria
ttgtatccaagccattattattttaatccaattaaggttcttccagaaattctatatcctttaatttcaatttctagcgtaagggtattttatccattgacaggagattttgttggtagtataggg

SEQ ID NO: 23051 - DNA, 42 bp, unidentified
  source 1..42: mol_type = unassigned DNA; note = methanogen bacteria
ggtaagaatggtaattatttgttaaaagaagtaaacgttacc

SEQ ID NO: 23052 - DNA, 114 bp, unidentified
  source 1..114: mol_type = unassigned DNA; note = methanogen bacteria
tcaaagggaggacgagctgcatccctaggaataaaggctccatttacattcaacagagttgaacaagccttttcatatttctttagtacaactatagatgcaattggaataaaa

SEQ ID NO: 23053 - DNA, 33 bp, unidentified
  source 1..33: mol_type = unassigned DNA; note = methanogen bacteria
gtaaaaacagattgctggtatcaacaaagatcg

SEQ ID NO: 23054 - DNA, 285 bp, unidentified
  source 1..285: mol_type = unassigned DNA; note = methanogen bacteria
caaaaacctgtatttgaagagacaaatatgcttcctaatacaaatatattagcagtaaaaaaattcagtaacgacattgttgatcggttaaaaaaagcggaacaacaagaattcactgaattaaagcttcaggttccaaactttaaaagaaatgataattggccattaggtgtatacgcaggagatgcgatagcaaacactctaagaaaacacggaattataaaaaggaagctaaaagttgtaattgttccagacaatcaaatgaataaatactattccttacca

SEQ ID NO: 23055 - DNA, 39 bp, unidentified
  source 1..39: mol_type = unassigned DNA; note = methanogen bacteria
gtaccggccattgcaaatgactttgcaatgaacaatgta

SEQ ID NO: 23056 - DNA, 33 bp, unidentified
  source 1..33: mol_type = unassigned DNA; note = methanogen bacteria
tatcattttcaatatgtgaggggatggaatgcc

SEQ ID NO: 23057 - DNA, 54 bp, unidentified
  source 1..54: mol_type = unassigned DNA; note = methanogen bacteria
attatgggtaatcttcctttatccacccagtatgctgatttgatagttcaatct

SEQ ID NO: 23058 - DNA, 39 bp, unidentified
  source 1..39: mol_type = unassigned DNA; note = methanogen bacteria
gtgccttccattgcaggcgattttgcaatgaacaatatc

SEQ ID NO: 23059 - DNA, 33 bp, unidentified
  source 1..33: mol_type = unassigned DNA; note = methanogen bacteria
tatcatttccaatatgtcagaggatggaacgcc

SEQ ID NO: 23060 - DNA, 54 bp, unidentified
  source 1..54: mol_type = unassigned DNA; note = methanogen bacteria
gttatgggcagtttaaaactatcttcacagtatgcggatatgattgttcaaagc

SEQ ID NO: 23061 - DNA, 33 bp, unidentified
  source 1..33: mol_type = unassigned DNA; note = methanogen bacteria
gtagcaggtctcggagcagatgcacttgccgca

SEQ ID NO: 23062 - DNA, 54 bp, unidentified
  source 1..54: mol_type = unassigned DNA; note = methanogen bacteria
attcttcaatttatgggtgctggagatacaattggatatgcaatggaatacagt

SEQ ID NO: 23063 - DNA, 36 bp, unidentified
  source 1..36: mol_type = unassigned DNA; note = methanogen bacteria
gttttagctgcaggaacaactgctgttgcagtatat

SEQ ID NO: 23064 - DNA, 63 bp, unidentified
  source 1..63: mol_type = unassigned DNA; note = methanogen bacteria
cagcttgctgctatgttttcatacacagaagcaagtgcagctctctcacctgaaattgcaaca

SEQ ID NO: 23065 - DNA, 36 bp, unidentified
  source 1..36: mol_type = unassigned DNA; note = methanogen bacteria
atctccatcggagaggatttcggcgtgggctcccac

SEQ ID NO: 23066 - DNA, 30 bp, unidentified
  source 1..30: mol_type = unassigned DNA; note = methanogen bacteria
tatctgcagagcgtgggaaagatgaccgcc

SEQ ID NO: 23067 - DNA, 63 bp, unidentified
  source 1..63: mol_type = unassigned DNA; note = methanogen bacteria
gcggtggtcatgggatccatggacaacctcggtcccgatactctcggatcgttcgtcgccgcg

SEQ ID NO: 23068 - DNA, 171 bp, unidentified
  source 1..171: mol_type = unassigned DNA; note = methanogen bacteria
accctgaaccactggatggacggcgccttcgagctctcgtcctcctaccagatggtctgcgacaggctgaacatgaccatggaccagctgttcaacaagctcagcatcgaaggcacccccgacaacctcacacttctcccgacccttgagcgcaccgccgagatcaacgcc

SEQ ID NO: 23069 - DNA, 42 bp, unidentified
  source 1..42: mol_type = unassigned DNA; note = methanogen bacteria
cccgaggtctgcgtaaccgtcgcagagaccctgcccataggg

SEQ ID NO: 23070 - DNA, 36 bp, unidentified
  source 1..36: mol_type = unassigned DNA; note = methanogen bacteria
gtttatctgatgagtgacttttctgtctcatcaaca

SEQ ID NO: 23071 - DNA, 36 bp, unidentified
  source 1..36: mol_type = unassigned DNA; note = methanogen bacteria
atattcattcaaggcatagcttacaattccgcaatt

SEQ ID NO: 23072 - DNA, 45 bp, unidentified
  source 1..45: mol_type = unassigned DNA; note = methanogen bacteria
gcaggaggctccatagaccacaattccgcttctgttgtagcattc

SEQ ID NO: 23073 - DNA, 39 bp, unidentified
  source 1..39: mol_type = unassigned DNA; note = methanogen bacteria
gttccggcaattgctaatgattttgcaatgaataatgtt

SEQ ID NO: 23074 - DNA, 33 bp, unidentified
  source 1..33: mol_type = unassigned DNA; note = methanogen bacteria
tatcattttcagtacgttaagggatggaatgct

SEQ ID NO: 23075 - DNA, 54 bp, unidentified
  source 1..54: mol_type = unassigned DNA; note = methanogen bacteria
gtaatgggtagtttgcctttgtcaactgaatatgccggcttgattgtccagtct

SEQ ID NO: 23076 - DNA, 39 bp, unidentified
  source 1..39: mol_type = unassigned DNA; note = methanogen bacteria
tacgcagacaccatcaacctcgccaaatcataccacatt

SEQ ID NO: 23077 - DNA, 36 bp, unidentified
  source 1..36: mol_type = unassigned DNA; note = methanogen bacteria
gtagttgacgggaacccagcacagacgacgctcaac

SEQ ID NO: 23078 - DNA, 54 bp, unidentified
  source 1..54: mol_type = unassigned DNA; note = methanogen bacteria
acagagttcgtattcacaatcgacgaaacgaccggcctttatgcccgtgcacct

SEQ ID NO: 23079 - DNA, 36 bp, unidentified
  source 1..36: mol_type = unassigned DNA; note = methanogen bacteria
atatcaatcggagaagatttcggagtgggttctcac

SEQ ID NO: 23080 - DNA, 30 bp, unidentified
  source 1..30: mol_type = unassigned DNA; note = methanogen bacteria
tatctgcagagtgtcggaaagatgacagct

SEQ ID NO: 23081 - DNA, 63 bp, unidentified
  source 1..63: mol_type = unassigned DNA; note = methanogen bacteria
gcgatagtgatgggatccatggacaatctggggcccgacaccctcggttccttcgtggccgcg

SEQ ID NO: 23082 - DNA, 33 bp, unidentified
  source 1..33: mol_type = unassigned DNA; note = methanogen bacteria
gtagcaggactcggtgcagatgcattggcggca

SEQ ID NO: 23083 - DNA, 54 bp, unidentified
  source 1..54: mol_type = unassigned DNA; note = methanogen bacteria
cctatccttcagttcatgggtgcaggaaacacaatccaatatgcattggactac

SEQ ID NO: 23084 - DNA, 36 bp, unidentified
  source 1..36: mol_type = unassigned DNA; note = methanogen bacteria
gtaatggctgacggaacaacagccgtagctgtatat

SEQ ID NO: 23085 - DNA, 63 bp, unidentified
  source 1..63: mol_type = unassigned DNA; note = methanogen bacteria
caaatcgcagcgatgtttgcatacacctcagcaagctcaagccttgcccctcaaattgcaagg

SEQ ID NO: 23086 - DNA, 33 bp, unidentified
  source 1..33: mol_type = unassigned DNA; note = methanogen bacteria
gtggcaggattaggttcagacgcacttgcagct

SEQ ID NO: 23087 - DNA, 54 bp, unidentified
  source 1..54: mol_type = unassigned DNA; note = methanogen bacteria
cctatattgcagtttatgggtgcaggaaacacaatccaatatgcaatggactac

SEQ ID NO: 23088 - DNA, 42 bp, unidentified
  source 1..42: mol_type = unassigned DNA; note = methanogen bacteria
cttgtaattgcatccggaacagatgcggtggcagcatataca

SEQ ID NO: 23089 - DNA, 66 bp, unidentified
  source 1..66: mol_type = unassigned DNA; note = methanogen bacteria
cagattgcggcagtattttcatacacttcagccagctcatcactggctccgcaaattgcaagtgca

SEQ ID NO: 23090 - DNA, 33 bp, unidentified
  source 1..33: mol_type = unassigned DNA; note = methanogen bacteria
gttgcaggtctaggcccggagcctttggctgca

SEQ ID NO: 23091 - DNA, 45 bp, unidentified
  source 1..45: mol_type = unassigned DNA; note = methanogen bacteria
cttcttatgatgggtgctgaaagcgtaataaattatgcaatggat

SEQ ID NO: 23092 - DNA, 33 bp, unidentified
  source 1..33: mol_type = unassigned DNA; note = methanogen bacteria
acaatcgtttcaggacctgtttctgtggcagtt

SEQ ID NO: 23093 - DNA, 63 bp, unidentified
  source 1..63: mol_type = unassigned DNA; note = methanogen bacteria
cagattgcatttatattttcatactctgaaaacagtgcacagctggagcctttgattgccagt

SEQ ID NO: 23094 - DNA, 39 bp, unidentified
  source 1..39: mol_type = unassigned DNA; note = methanogen bacteria
ccttattatatggatgattttgcagtatcttcagcaact

SEQ ID NO: 23095 - DNA, 30 bp, unidentified
  source 1..30: mol_type = unassigned DNA; note = methanogen bacteria
gttcaaaacgtagcatattactcttcaaca

SEQ ID NO: 23096 - DNA, 48 bp, unidentified
  source 1..48: mol_type = unassigned DNA; note = methanogen bacteria
ttggcaaatggaaaaattactcataatcagatttctgtcaattcattc

SEQ ID NO: 23097 - DNA, 36 bp, unidentified
  source 1..36: mol_type = unassigned DNA; note = methanogen bacteria
gtggccggacttggtgcagaacccttggccgcactt

SEQ ID NO: 23098 - DNA, 48 bp, unidentified
  source 1..48: mol_type = unassigned DNA; note = methanogen bacteria
ctcattatgatgggagcaacatccgtaatagactatgcaatggaatat

SEQ ID NO: 23099 - DNA, 33 bp, unidentified
  source 1..33: mol_type = unassigned DNA; note = methanogen bacteria
acaatagtgtccggacctatggcagtagcggtt

SEQ ID NO: 23100 - DNA, 66 bp, unidentified
  source 1..66: mol_type = unassigned DNA; note = methanogen bacteria
caaattgcattcattttctcatattctgaaagcagtgccgatttggcgccttcaatagctagtttc

SEQ ID NO: 23101 - DNA, 39 bp, unidentified
  source 1..39: mol_type = unassigned DNA; note = methanogen bacteria
gttccggcaattgcacaggaatttgtaatgaataacgtt

SEQ ID NO: 23102 - DNA, 33 bp, unidentified
  source 1..33: mol_type = unassigned DNA; note = methanogen bacteria
tatcatttccagtatgtgcgcggttggaatgct

SEQ ID NO: 23103 - DNA, 57 bp, unidentified
  source 1..57: mol_type = unassigned DNA; note = methanogen bacteria
tgggtaatgggatctctgcagctggcaccggaatatgctgcaatgattgttcaggca

SEQ ID NO: 23104 - DNA, 39 bp, unidentified
  source 1..39: mol_type = unassigned DNA; note = methanogen bacteria
ccgtattatattgatgattttgcaatatcttcagcaact

SEQ ID NO: 23105 - DNA, 48 bp, unidentified
  source 1..48: mol_type = unassigned DNA; note = methanogen bacteria
ttggcaaatggaaaaatcactcataatcagttttccgttaattcattt

SEQ ID NO: 23106 - DNA, 45 bp, unidentified
  source 1..45: mol_type = unassigned DNA; note = methanogen bacteria
ctgccatccatcgagcaaagctttaacctgaccagcagagaatca

SEQ ID NO: 23107 - DNA, 39 bp, unidentified
  source 1..39: mol_type = unassigned DNA; note = methanogen bacteria
attgattcaagtaacttcatcagcagcttattgtcttca

SEQ ID NO: 23108 - DNA, 33 bp, unidentified
  source 1..33: mol_type = unassigned DNA; note = methanogen bacteria
cttgttattctttcaatggggctgaacgaccag

SEQ ID NO: 23109 - DNA, 30 bp, unidentified
  source 1..30: mol_type = unassigned DNA; note = methanogen bacteria
gctagataccttggagttaatgattatggt

SEQ ID NO: 23110 - DNA, 36 bp, unidentified
  source 1..36: mol_type = unassigned DNA; note = methanogen bacteria
ctcaatcaactagttggagattatgcaactggaata

SEQ ID NO: 23111 - DNA, 48 bp, unidentified
  source 1..48: mol_type = unassigned DNA; note = methanogen bacteria
acagacattatacaattaatttatggacaagagtataatatagctgca

SEQ ID NO: 23112 - DNA, 39 bp, unidentified
  source 1..39: mol_type = unassigned DNA; note = methanogen bacteria
gtgccggccattgcacaggagtttgcaatgaacaacgtc

SEQ ID NO: 23113 - DNA, 33 bp, unidentified
  source 1..33: mol_type = unassigned DNA; note = methanogen bacteria
tatcatttccaatatgtaagggggtgggatgcc

SEQ ID NO: 23114 - DNA, 54 bp, unidentified
  source 1..54: mol_type = unassigned DNA; note = methanogen bacteria
gtaatgggcaaccttgagctggcccctcagtatgcatccatgattgttcagtca

SEQ ID NO: 23115 - DNA, 39 bp, unidentified
  source 1..39: mol_type = unassigned DNA; note = methanogen bacteria
aatggaattatgaatgattttcatatactgtctacaacc

SEQ ID NO: 23116 - DNA, 30 bp, unidentified
  source 1..30: mol_type = unassigned DNA; note = methanogen bacteria
tttgttcaaagtgtagataattattctgca

SEQ ID NO: 23117 - DNA, 48 bp, unidentified
  source 1..48: mol_type = unassigned DNA; note = methanogen bacteria
tttgctggaggatctatcggtcataatcacctttcagtatcagcattc

SEQ ID NO: 23118 - DNA, 45 bp, unidentified
  source 1..45: mol_type = unassigned DNA; note = methanogen bacteria
cttccgtcaatagaacagacttttaatctcacaagcagggaatca

SEQ ID NO: 23119 - DNA, 39 bp, unidentified
  source 1..39: mol_type = unassigned DNA; note = methanogen bacteria
attgattcaaataattttgtaaatagtgttttatcgcta

SEQ ID NO: 23120 - DNA, 33 bp, unidentified
  source 1..33: mol_type = unassigned DNA; note = methanogen bacteria
ctggtaattatttcaatgggtttaaatgatcag

SEQ ID NO: 23121 - DNA, 36 bp, unidentified
  source 1..36: mol_type = unassigned DNA; note = methanogen bacteria
ccttattatatggctgatttctcactatcttctgca

SEQ ID NO: 23122 - DNA, 48 bp, unidentified
  source 1..48: mol_type = unassigned DNA; note = methanogen bacteria
ttggcaaacggaaacattgctcataatcagctttccgttaactcattt

SEQ ID NO: 23123 - DNA, 66 bp, unidentified
  source 1..66: mol_type = unassigned DNA; note = methanogen bacteria
ttaaatccatggtatacaattcctgaaattactacacagggactgtacttaactgacaaacctatt

SEQ ID NO: 23124 - DNA, 90 bp, unidentified
  source 1..90: mol_type = unassigned DNA; note = methanogen bacteria
tttttccacggccagccacagcttggtttaatatatgcagcagaacctgcagttgcagtctatgaaatggctgataaactgctcagtcat

SEQ ID NO: 23125 - DNA, 42 bp, unidentified
  source 1..42: mol_type = unassigned DNA; note = methanogen bacteria
ttgccttccattgagcaaagctttaatctaacaagtagagaa

SEQ ID NO: 23126 - DNA, 42 bp, unidentified
  source 1..42: mol_type = unassigned DNA; note = methanogen bacteria
atagattcaagcaatttcataaatagtattttgtctttaaat

SEQ ID NO: 23127 - DNA, 33 bp, unidentified
  source 1..33: mol_type = unassigned DNA; note = methanogen bacteria
ttagtaattctttcaatgagtttaaacgaccaa

SEQ ID NO: 23128 - DNA, 36 bp, unidentified
  source 1..36: mol_type = unassigned DNA; note = methanogen bacteria
actgggataatggctgactttcatgtatcatctaca

SEQ ID NO: 23129 - DNA, 36 bp, unidentified
  source 1..36: mol_type = unassigned DNA; note = methanogen bacteria
tttgttcaaaacgtatcttattactcagcaactgaa

SEQ ID NO: 23130 - DNA, 51 bp, unidentified
  source 1..51: mol_type = unassigned DNA; note = methanogen bacteria
tttgctggaggcaatattaatcacaatgctgtatctgtaaatgcatttgga

SEQ ID NO: 23131 - DNA, 36 bp, unidentified
  source 1..36: mol_type = unassigned DNA; note = methanogen bacteria
ccaaatatgtctttagaattaggtatttctattgaa

SEQ ID NO: 23132 - DNA, 54 bp, unidentified
  source 1..54: mol_type = unassigned DNA; note = methanogen bacteria
tatatgggtaataatagtttatatgaaaatattagtggatttactcaatccaca

SEQ ID NO: 23133 - DNA, 66 bp, unidentified
  source 1..66: mol_type = unassigned DNA; note = methanogen bacteria
ttaaatcctgcataccacatccctgaatttactacacagggactatacttgactgataagccaata

SEQ ID NO: 23134 - DNA, 90 bp, unidentified
  source 1..90: mol_type = unassigned DNA; note = methanogen bacteria
tttttccatggccagccacaacttgcagcaatttatgcggcaaccccaacagttgcagtgaatgaaatggcaacaaaattacttggacca

SEQ ID NO: 23135 - DNA, 36 bp, unidentified
  source 1..36: mol_type = unassigned DNA; note = methanogen bacteria
ccgtctattgcaagtgagtttggaatgaataatata

SEQ ID NO: 23136 - DNA, 33 bp, unidentified
  source 1..33: mol_type = unassigned DNA; note = methanogen bacteria
tatcatttccagtatgtccggggatggaatgca

SEQ ID NO: 23137 - DNA, 54 bp, unidentified
  source 1..54: mol_type = unassigned DNA; note = methanogen bacteria
attatgggcaatcttgaactgtcatcccaatatgccggcatgattgttcaaagt

SEQ ID NO: 23138 - DNA, 66 bp, unidentified
  source 1..66: mol_type = unassigned DNA; note = methanogen bacteria
ttaaatccctcataccccattccggaattcacaacacagggactgtacttaaccgacaaatcaata

SEQ ID NO: 23139 - DNA, 90 bp, unidentified
  source 1..90: mol_type = unassigned DNA; note = methanogen bacteria
tttttccacagtcagcctcaacttgcagcaatttatgcggcgaccccatcagttgcagcaaatgcaatggcaacagaattgcttggacca

SEQ ID NO: 23140 - DNA, 33 bp, unidentified
  source 1..33: mol_type = unassigned DNA; note = methanogen bacteria
gttgcaggattgggtgcggatgcacttgcggca

SEQ ID NO: 23141 - DNA, 54 bp, unidentified
  source 1..54: mol_type = unassigned DNA; note = methanogen bacteria
cctatcctccagttcatgggtgccggtgataccatcggctatgcaatggactac

SEQ ID NO: 23142 - DNA, 36 bp, unidentified
  source 1..36: mol_type = unassigned DNA; note = methanogen bacteria
gttatggctgcaggaacaacagcagttgcagtatat

SEQ ID NO: 23143 - DNA, 63 bp, unidentified
  source 1..63: mol_type = unassigned DNA; note = methanogen bacteria
caaatagctacaatgtttgcatatacatctgcaagttccgctttggcccctgagattgcaaaa

SEQ ID NO: 23144 - DNA, 42 bp, unidentified
  source 1..42: mol_type = unassigned DNA; note = methanogen bacteria
ctgccgtcaattgaaaatacctttaatctgacaagcagagaa

SEQ ID NO: 23145 - DNA, 39 bp, unidentified
  source 1..39: mol_type = unassigned DNA; note = methanogen bacteria
atagattcaagcaatttcataaaaagtctcatgtccgtc

SEQ ID NO: 23146 - DNA, 33 bp, unidentified
  source 1..33: mol_type = unassigned DNA; note = methanogen bacteria
ttagtaattctttcaatgggtttgaatgaccag

SEQ ID NO: 23147 - DNA, 33 bp, unidentified
  source 1..33: mol_type = unassigned DNA; note = methanogen bacteria
gttgctggacttggccaggcggctattgcaggt

SEQ ID NO: 23148 - DNA, 57 bp, unidentified
  source 1..57: mol_type = unassigned DNA; note = methanogen bacteria
tctttgcttaagacatacggtgccagcggccaatcattgactgaagcaataaaatat

SEQ ID NO: 23149 - DNA, 36 bp, unidentified
  source 1..36: mol_type = unassigned DNA; note = methanogen bacteria
tcatctgttggtggtgaatatggtattgcagcattc

SEQ ID NO: 23150 - DNA, 63 bp, unidentified
  source 1..63: mol_type = unassigned DNA; note = methanogen bacteria
ttgtctatgatttttgcatatactcccgaaaccgctccattaattccggaaattacaaacttt

SEQ ID NO: 23151 - DNA, 39 bp, unidentified
  source 1..39: mol_type = unassigned DNA; note = methanogen bacteria
ctgagcatcggcgaggagttcggggtgggttcccacgac

SEQ ID NO: 23152 - DNA, 30 bp, unidentified
  source 1..30: mol_type = unassigned DNA; note = methanogen bacteria
taccttcagagcatcggcgaactgtccgcc

SEQ ID NO: 23153 - DNA, 63 bp, unidentified
  source 1..63: mol_type = unassigned DNA; note = methanogen bacteria
tccgtcataatgggaacgaccgacaacctcggacccgagacctacgggaccttcgtcacggtg

SEQ ID NO: 23154 - DNA, 39 bp, unidentified
  source 1..39: mol_type = unassigned DNA; note = methanogen bacteria
gttccggctattgcacaggaatttgtaatgaacaatgta

SEQ ID NO: 23155 - DNA, 33 bp, unidentified
  source 1..33: mol_type = unassigned DNA; note = methanogen bacteria
tatcatttccagtatgtccgtggatgggatgca

SEQ ID NO: 23156 - DNA, 54 bp, unidentified
  source 1..54: mol_type = unassigned DNA; note = methanogen bacteria
gtaatgggcaacctgcagcttgaaccccaatatgctgcaatgattgtgcaggct

SEQ ID NO: 23157 - DNA, 45 bp, unidentified
  source 1..45: mol_type = unassigned DNA; note = methanogen bacteria
cttccttcaatcgaacagagttttcatcttacaagcagggactca

SEQ ID NO: 23158 - DNA, 39 bp, unidentified
  source 1..39: mol_type = unassigned DNA; note = methanogen bacteria
attgattcaagtaattttgtaaacagtctgctgtctttt

SEQ ID NO: 23159 - DNA, 36 bp, unidentified
  source 1..36: mol_type = unassigned DNA; note = methanogen bacteria
tctttggtgattctttcaatgggattaagcgaacag

SEQ ID NO: 23160 - DNA, 39 bp, unidentified
  source 1..39: mol_type = unassigned DNA; note = methanogen bacteria
ccttattatatgaatgattttgcaatatcttctgcaacc

SEQ ID NO: 23161 - DNA, 30 bp, unidentified; identical to SEQ ID NO: 21695
  source 1..30: mol_type = unassigned DNA; note = methanogen bacteria

SEQ ID NO: 23162 - DNA, 48 bp, unidentified
  source 1..48: mol_type = unassigned DNA; note = methanogen bacteria
ttggcaaatggaaatattactcacaatcagctttccgtcaattcattt

SEQ ID NO: 23163 - DNA, 36 bp, unidentified
  source 1..36: mol_type = unassigned DNA; note = methanogen bacteria
gtttctggactaaatgctgatgctcttgcagcatta

SEQ ID NO: 23164 - DNA, 57 bp, unidentified
  source 1..57: mol_type = unassigned DNA; note = methanogen bacteria
aaggatttaatgatattttcaggtgcatccagtgttgtttcatattgtttggattat

SEQ ID NO: 23165 - DNA, 36 bp, unidentified
  source 1..36: mol_type = unassigned DNA; note = methanogen bacteria
atatccacttcaggagttaatgaagttgcagctttc

SEQ ID NO: 23166 - DNA, 66 bp, unidentified
  source 1..66: mol_type = unassigned DNA; note = methanogen bacteria
tatccaatatgtgggttctttaattcccaagcagctaacttcacattagccaatcgtgcagcagaa

SEQ ID NO: 23167 - DNA, 45 bp, unidentified
  source 1..45: mol_type = unassigned DNA; note = methanogen bacteria
cttccctcaatagagcaaagctttcacctgacaagcagggaatcc

SEQ ID NO: 23168 - DNA, 39 bp, unidentified
  source 1..39: mol_type = unassigned DNA; note = methanogen bacteria
atcgactcaaataatttcatgaacagtctattatcttta

SEQ ID NO: 23169 - DNA, 33 bp, unidentified
  source 1..33: mol_type = unassigned DNA; note = methanogen bacteria
cttgtaattctttcaatgggtttgaatgaccaa

SEQ ID NO: 23170 - DNA, 66 bp, unidentified
  source 1..66: mol_type = unassigned DNA; note = methanogen bacteria
ctaaatccgtcatacacaattcctgaattcacgacacaaggattatacttaaccgataaaacaatt

SEQ ID NO: 23171 - DNA, 90 bp, unidentified
  source 1..90: mol_type = unassigned DNA; note = methanogen bacteria
tttttccatggccagccacaacttgcggttctttacggatcaaccccctcagttgcagtgaatcaaatggcaacaaccctgctcgggccg

SEQ ID NO: 23172 - DNA, 33 bp, unidentified
  source 1..33: mol_type = unassigned DNA; note = methanogen bacteria
gttgcaggattaggtgcagacgcacttgcggca

SEQ ID NO: 23173 - DNA, 54 bp, unidentified
  source 1..54: mol_type = unassigned DNA; note = methanogen bacteria
cctattcttcagtttatgggtgcaggtgaaacaataggctatgcaatggactac

SEQ ID NO: 23174 - DNA, 36 bp, unidentified
  source 1..36: mol_type = unassigned DNA; note = methanogen bacteria
gtacttgcggcaggaacaacagcagtggctgtatat

SEQ ID NO: 23175 - DNA, 63 bp, unidentified
  source 1..63: mol_type = unassigned DNA; note = methanogen bacteria
cagatagctacaatatttgcatatacctcagcaagttccgctttggcaccgcagattgcatca

SEQ ID NO: 23176 - DNA, 39 bp, unidentified
  source 1..39: mol_type = unassigned DNA; note = methanogen bacteria
gttccagcaatagctaatgattttgcaatgaataatgtc

SEQ ID NO: 23177 - DNA, 33 bp, unidentified
  source 1..33: mol_type = unassigned DNA; note = methanogen bacteria
taccactttcagtatgtacggggatgggatgcc

SEQ ID NO: 23178 - DNA, 57 bp, unidentified
  source 1..57: mol_type = unassigned DNA; note = methanogen bacteria
tgggtaatgggcaatttaaccatgactccccaatatgcagatatgattcttcgggca

SEQ ID NO: 23179 - DNA, 39 bp, unidentified
  source 1..39: mol_type = unassigned DNA; note = methanogen bacteria
ttgccatattatatggctgatttttcaatatcttctgca

SEQ ID NO: 23180 - DNA, 48 bp, unidentified
  source 1..48: mol_type = unassigned DNA; note = methanogen bacteria
ctggcaaacggaaacattacccataatcagttttcagtcaactcattt

SEQ ID NO: 23181 - DNA, 36 bp, unidentified
  source 1..36: mol_type = unassigned DNA; note = methanogen bacteria
ccatcaatagcaagtgagtttggaatgaacaatgtt

SEQ ID NO: 23182 - DNA, 33 bp, unidentified
  source 1..33: mol_type = unassigned DNA; note = methanogen bacteria
tatcatttccaatatgtcagaggatggaatgct

SEQ ID NO: 23183 - DNA, 54 bp, unidentified
  source 1..54: mol_type = unassigned DNA; note = methanogen bacteria
attatgggaagcctgaagttgtcttcccaatatgcaggtatggttgtacaggca

SEQ ID NO: 23184 - DNA, 45 bp, unidentified
  source 1..45: mol_type = unassigned DNA; note = methanogen bacteria
cttccatcaatcgaacaaagcttccacttgacaagtagggaatca

SEQ ID NO: 23185 - DNA, 39 bp, unidentified
  source 1..39: mol_type = unassigned DNA; note = methanogen bacteria
atcgattcaagcaatttcacaaacagcttcttgtccatt

SEQ ID NO: 23186 - DNA, 33 bp, unidentified
  source 1..33: mol_type = unassigned DNA; note = methanogen bacteria
cttgttatactttcaatgggattgaatgaacag

SEQ ID NO: 23187 - DNA, 45 bp, unidentified
  source 1..45: mol_type = unassigned DNA; note = methanogen bacteria
cttccctcaatcgaacaaagctttcatctgacaagcagggagtcc

SEQ ID NO: 23188 - DNA, 39 bp, unidentified
  source 1..39: mol_type = unassigned DNA; note = methanogen bacteria
atagattcaagtaatttcatcagcagtttgttatcttta

SEQ ID NO: 23189 - DNA, 33 bp, unidentified
  source 1..33: mol_type = unassigned DNA; note = methanogen bacteria
ttggtaatcatttccatgggattgaatgaccaa

SEQ ID NO: 23190 - DNA, 66 bp, unidentified
  source 1..66: mol_type = unassigned DNA; note = methanogen bacteria
ttaaatccatcatactccattccggagtttacaacacaaggcatgtatctcactgacaaaagcatt

SEQ ID NO: 23191 - DNA, 90 bp, unidentified
  source 1..90: mol_type = unassigned DNA; note = methanogen bacteria
tttttccacggccagccacagcttgcagcaatttatggtgcggcacctgcagtagcagtcaatgaaatggcaacagtattggtagggcct

SEQ ID NO: 23192 - DNA, 42 bp, unidentified
  source 1..42: mol_type = unassigned DNA; note = methanogen bacteria
ctgccgtctattgaacaaagctttaacttaacaagccgagaa

SEQ ID NO: 23193 - DNA, 39 bp, unidentified
  source 1..39: mol_type = unassigned DNA; note = methanogen bacteria
attgattcaagcaatttcattaatagtctattgtcattt

SEQ ID NO: 23194 - DNA, 33 bp, unidentified
  source 1..33: mol_type = unassigned DNA; note = methanogen bacteria
ttagtaattctttcaatgggcttgaataatcag

SEQ ID NO: 23195 - DNA, 39 bp, unidentified
  source 1..39: mol_type = unassigned DNA; note = methanogen bacteria
gtttatctgatgagcgacttttccgtttcatcaacacag

SEQ ID NO: 23196 - DNA, 33 bp, unidentified
  source 1..33: mol_type = unassigned DNA; note = methanogen bacteria
atatttattcagggtgtagcatacaattccgca

SEQ ID NO: 23197 - DNA, 45 bp, unidentified
  source 1..45: mol_type = unassigned DNA; note = methanogen bacteria
gcaggaggtgccatagaccacaattcagcttccgttgttgcattc

SEQ ID NO: 23198 - DNA, 39 bp, unidentified
  source 1..39: mol_type = unassigned DNA; note = methanogen bacteria
ttttttgcaagatatggtccagcgtacgaatttaacttc

SEQ ID NO: 23199 - DNA, 39 bp, unidentified
  source 1..39: mol_type = unassigned DNA; note = methanogen bacteria
gtgccggcaattgcaagcgattttgcaatgaacaatgtt

SEQ ID NO: 23200 - DNA, 33 bp, unidentified
  source 1..33: mol_type = unassigned DNA; note = methanogen bacteria
tatcacttccagtatgttaggggatggaatgca

SEQ ID NO: 23201 - DNA, 54 bp, unidentified
  source 1..54: mol_type = unassigned DNA; note = methanogen bacteria
ataatgggcaatttggagttatctccgcaatatgcatccatgattgtccaatct

SEQ ID NO: 23202 - DNA, 39 bp, unidentified
  source 1..39: mol_type = unassigned DNA; note = methanogen bacteria
gttcctgctattgcacaggaatttgtaatgaataatgta

SEQ ID NO: 23203 - DNA, 33 bp, unidentified
  source 1..33: mol_type = unassigned DNA; note = methanogen bacteria
tatcattttcaatatgttcgaggttgggatgct

SEQ ID NO: 23204 - DNA, 54 bp, unidentified
  source 1..54: mol_type = unassigned DNA; note = methanogen bacteria
gttatgggtaatttacaattatctccagaatatgcaaatatgattgttcaagca

SEQ ID NO: 23205 - DNA, 45 bp, unidentified
  source 1..45: mol_type = unassigned DNA; note = methanogen bacteria
ctgccttcaattgagcaaagctttaaccttacaagcagggaatca

SEQ ID NO: 23206 - DNA, 39 bp, unidentified
  source 1..39: mol_type = unassigned DNA; note = methanogen bacteria
atagactcaagcaatttcataagcagcctattgtcaatg

SEQ ID NO: 23207 - DNA, 33 bp, unidentified
  source 1..33: mol_type = unassigned DNA; note = methanogen bacteria
ttggtcattctttcaatgggattgaatgatcag

SEQ ID NO: 23208 - DNA, 36 bp, unidentified
  source 1..36: mol_type = unassigned DNA; note = methanogen bacteria
ccatattatatggcggatttctcagtatcttctgca

SEQ ID NO: 23209 - DNA, 48 bp, unidentified
  source 1..48: mol_type = unassigned DNA; note = methanogen bacteria
ttggcaaacggaaacattacccataatcagatttccgttaattcattt

SEQ ID NO: 23210 - DNA, 45 bp, unidentified
  source 1..45: mol_type = unassigned DNA; note = methanogen bacteria
cttccgtcaatagaacacactttccatattacaagcagggaatcc

SEQ ID NO: 23211 - DNA, 39 bp, unidentified
  source 1..39: mol_type = unassigned DNA; note = methanogen bacteria
atcgattcaagtaatttcattagcagtctgctgtcagtt

SEQ ID NO: 23212 - DNA, 33 bp, unidentified
  source 1..33: mol_type = unassigned DNA; note = methanogen bacteria
cttgtgattctttcaatgggtttcaatgaccag

SEQ ID NO: 23213 - DNA, 45 bp, unidentified
  source 1..45: mol_type = unassigned DNA; note = methanogen bacteria
ctgccatcaattgaacagagcttccagttgacaagcagagactcc

SEQ ID NO: 23214 - DNA, 42 bp, unidentified
  source 1..42: mol_type = unassigned DNA; note = methanogen bacteria
agaatcgattcagacaatttcatcaatagtttattctcccct

SEQ ID NO: 23215 - DNA, 33 bp, unidentified
  source 1..33: mol_type = unassigned DNA; note = methanogen bacteria
ctggtgattctttcaatgggtttgaatgatcag

SEQ ID NO: 23216 - DNA, 36 bp, unidentified
  source 1..36: mol_type = unassigned DNA; note = methanogen bacteria
ccatccattactgaaactttaaaattaagtatggat

SEQ ID NO: 23217 - DNA, 30 bp, unidentified
  source 1..30: mol_type = unassigned DNA; note = methanogen bacteria
tacttgcagtatcatgaagattatgatcca

SEQ ID NO: 23218 - DNA, 60 bp, unidentified
  source 1..60: mol_type = unassigned DNA; note = methanogen bacteria
gtatttggtgatactggtacttatgaaggtaatctattgcaccttatcatgactggggaa

SEQ ID NO: 23219 - DNA, 45 bp, unidentified
  source 1..45: mol_type = unassigned DNA; note = methanogen bacteria
ctgccttctatcgaaatggcctataatctgacaacaagacaatca

SEQ ID NO: 23220 - DNA, 39 bp, unidentified
  source 1..39: mol_type = unassigned DNA; note = methanogen bacteria
atagattcaagcgatttcatcaacagcctaacatcactc

SEQ ID NO: 23221 - DNA, 33 bp, unidentified
  source 1..33: mol_type = unassigned DNA; note = methanogen bacteria
ctggtaatcctttcaatgggtttgaatgaccag

SEQ ID NO: 23222 - DNA, 39 bp, unidentified
  source 1..39: mol_type = unassigned DNA; note = methanogen bacteria
gttccagcgatagcacaggacttcgcaatgaataatgtt

SEQ ID NO: 23223 - DNA, 33 bp, unidentified
  source 1..33: mol_type = unassigned DNA; note = methanogen bacteria
taccatttccaatatgtaaggggatgggatgcc

SEQ ID NO: 23224 - DNA, 54 bp, unidentified
  source 1..54: mol_type = unassigned DNA; note = methanogen bacteria
gtaatgggcagcctaaaattagatcctcaatatgctgcaatgattgtgcaggca

SEQ ID NO: 23225 - DNA, 36 bp, unidentified
  source 1..36: mol_type = unassigned DNA; note = methanogen bacteria
tctgaaataatgattgattttcaaatatcctccacg

SEQ ID NO: 23226 - DNA, 36 bp, unidentified
  source 1..36: mol_type = unassigned DNA; note = methanogen bacteria
ttgtttgctcaaagtgtagcatatcattctgcaaca

SEQ ID NO: 23227 - DNA, 51 bp, unidentified
  source 1..51: mol_type = unassigned DNA; note = methanogen bacteria
tttgcaggaggaaatgttgctcacaatgcaatttcagcagccgcattcagt

SEQ ID NO: 23228 - DNA, 45 bp, unidentified
  source 1..45: mol_type = unassigned DNA; note = methanogen bacteria
ttaccatcaattgaacaaagctttcatttaacaagcagggaatcc

SEQ ID NO: 23229 - DNA, 39 bp, unidentified
  source 1..39: mol_type = unassigned DNA; note = methanogen bacteria
attgattcaagtaattttataaacagtttattttcttta

SEQ ID NO: 23230 - DNA, 36 bp, unidentified
  source 1..36: mol_type = unassigned DNA; note = methanogen bacteria
tctttggcgattctttcaatgggactaaatgaccag

SEQ ID NO: 23231 - DNA, 45 bp, unidentified
  source 1..45: mol_type = unassigned DNA; note = methanogen bacteria
cttccttcaattgagcaaagctttaaccttacaagcagggaatca

SEQ ID NO: 23232 - DNA, 39 bp, unidentified
  source 1..39: mol_type = unassigned DNA; note = methanogen bacteria
atagattcaagcaatttcataaatagtttgacatcactc

SEQ ID NO: 23233 - DNA, 36 bp, unidentified
  source 1..36: mol_type = unassigned DNA; note = methanogen bacteria
tccttagcaattatttcaatgggtctcaatgaccag

SEQ ID NO: 23234 - DNA, 39 bp, unidentified
  source 1..39: mol_type = unassigned DNA; note = methanogen bacteria
gttccggcaattgctcaggaattcgcaatgaacaatgta

SEQ ID NO: 23235 - DNA, 33 bp, unidentified; identical to SEQ ID NO: 21835
  source 1..33: mol_type = unassigned DNA; note = methanogen bacteria

SEQ ID NO: 23236 - DNA, 54 bp, unidentified
  source 1..54: mol_type = unassigned DNA; note = methanogen bacteria
gtgatgggcagccttgagctggctccgcagtatgcaaacatgattgttcaggca

SEQ ID NO: 23237 - DNA, 45 bp, unidentified
  source 1..45: mol_type = unassigned DNA; note = methanogen bacteria
ctaccttcgattgaacagagcttccatttaaccagcagagaatcc

SEQ ID NO: 23238 - DNA, 39 bp, unidentified
  source 1..39: mol_type = unassigned DNA; note = methanogen bacteria
attgattcaagcaatttcataaatagttcaatatcagtg

SEQ ID NO: 23239 - DNA, 33 bp, unidentified
  source 1..33: mol_type = unassigned DNA; note = methanogen bacteria
ctggtaatcctttccatgggtttaaatgaccag

SEQ ID NO: 23240 - DNA, 36 bp, unidentified
  source 1..36: mol_type = unassigned DNA; note = methanogen bacteria
ccttattatatgaatgattttgcaatatcttctgca

SEQ ID NO: 23241 - DNA, 30 bp, unidentified
  source 1..30: mol_type = unassigned DNA; note = methanogen bacteria
gttcaaaacgtggcatattattcttcaaca

SEQ ID NO: 23242 - DNA, 48 bp, unidentified
  source 1..48: mol_type = unassigned DNA; note = methanogen bacteria
ttggcaaatggaaaaattactcataatcagctatccgtcaattcattc

SEQ ID NO: 23243 - DNA, 33 bp, unidentified
  source 1..33: mol_type = unassigned DNA; note = methanogen bacteria
gtagccggactaggtgccgatgctcttgcagga

SEQ ID NO: 23244 - DNA, 51 bp, unidentified
  source 1..51: mol_type = unassigned DNA; note = methanogen bacteria
attctcattgcaatgggtgttggtggaacaatcagctatgctttggagtat

SEQ ID NO: 23245 - DNA, 36 bp, unidentified
  source 1..36: mol_type = unassigned DNA; note = methanogen bacteria
gcaacagtagcttcaactgatgctgtggctgtttat

SEQ ID NO: 23246 - DNA, 63 bp, unidentified
  source 1..63: mol_type = unassigned DNA; note = methanogen bacteria
cagattgcaggggttttcacatatgccggaaccagctcaaggctgactccaagcttagttgca

SEQ ID NO: 23247 - DNA, 84 bp, unidentified
  source 1..84: mol_type = unassigned DNA; note = methanogen bacteria
atacctttatacggtttaagtcaagcggcagtagatcaattcgcccaattaagagctgttatggcaggtagcttcgggtcaata

SEQ ID NO: 23248 - DNA, 30 bp, unidentified
  source 1..30: mol_type = unassigned DNA; note = methanogen bacteria
ggaagtctggtggctatagaccagtcttac

SEQ ID NO: 23249 - DNA, 105 bp, unidentified
  source 1..105: mol_type = unassigned DNA; note = methanogen bacteria
acaggtacattcaacttcctgcctgcatctgtggcatcttcaactgcttcaggtattcttcctgcatttatccaatcaatagtcggcggagctcctaactttaca

SEQ ID NO: 23250 - DNA, 117 bp, unidentified
  source 1..117: mol_type = unassigned DNA; note = methanogen bacteria
agcgtgttccagaaacttggattccctattttaggagaggtttcaggaggccgtgcagttagcggagtagctttatggctctccactccaaacagctacacagtgctcttcaccaat

SEQ ID NO: 23251 - DNA, 36 bp, unidentified
  source 1..36: mol_type = unassigned DNA; note = methanogen bacteria
gcagggataatggctgatttccatattccttcgaca

SEQ ID NO: 23252 - DNA, 33 bp, unidentified
  source 1..33: mol_type = unassigned DNA; note = methanogen bacteria
tttgcacaaagcatagcaaattatgatgcaaca

SEQ ID NO: 23253 - DNA, 48 bp, unidentified
  source 1..48: mol_type = unassigned DNA; note = methanogen bacteria
tttgcaggaggaaatgtgggtcataactccatttcagtatctgcattt

SEQ ID NO: 23254 - DNA, 66 bp, unidentified
  source 1..66: mol_type = unassigned DNA; note = methanogen bacteria
ctgaatcctgcatactccattccagagtttacaacacagggactatatctgactgagaaaagcatt

SEQ ID NO: 23255 - DNA, 90 bp, unidentified
  source 1..90: mol_type = unassigned DNA; note = methanogen bacteria
tttttccacggccaacctcaacttgcggtaatttatggtgcagaaccttcagtggcagtcaaacaaatggcaacagcattggttggacct

SEQ ID NO: 23256 - DNA, 39 bp, unidentified
  source 1..39: mol_type = unassigned DNA; note = methanogen bacteria
gttccagcgatagcacaggactttgcaatgaacaatgtt

SEQ ID NO: 23257 - DNA, 33 bp, unidentified
  source 1..33: mol_type = unassigned DNA; note = methanogen bacteria
tatcatttccagtatgtgagaggctgggatgct

SEQ ID NO: 23258 - DNA, 54 bp, unidentified
  source 1..54: mol_type = unassigned DNA; note = methanogen bacteria
gtaatgggcagcctgaaactggatcctcaatatgcggcaatgattgtgcaggca

SEQ ID NO: 23259 - DNA, 36 bp, unidentified
  source 1..36: mol_type = unassigned DNA; note = methanogen bacteria
gcaggaatcatggctgactttcatgtttcttcaact

SEQ ID NO: 23260 - DNA, 33 bp, unidentified
  source 1..33: mol_type = unassigned DNA; note = methanogen bacteria
tttgttcagactgtcacttctcacaatgcaaca

SEQ ID NO: 23261 - DNA, 48 bp, unidentified
  source 1..48: mol_type = unassigned DNA; note = methanogen bacteria
tttgcaggaggggcactggctcataatcgtgtttctgtagcagcattc

SEQ ID NO: 23262 - DNA, 36 bp, unidentified
  source 1..36: mol_type = unassigned DNA; note = methanogen bacteria
ttaccttcaattgcaaaggcgtttaatctaaataac

SEQ ID NO: 23263 - DNA, 30 bp, unidentified
  source 1..30: mol_type = unassigned DNA; note = methanogen bacteria
catttacagtatatcctaggatggaattcg

SEQ ID NO: 23264 - DNA, 54 bp, unidentified
  source 1..54: mol_type = unassigned DNA; note = methanogen bacteria
ataatgggaagtgtggagattattcctaaatactatggtttattgtccttaagc

SEQ ID NO: 23265 - DNA, 36 bp, unidentified
  source 1..36: mol_type = unassigned DNA; note = methanogen bacteria
attgcaggccttggcgtggaccagcttgctgcaatc

SEQ ID NO: 23266 - DNA, 57 bp, unidentified
  source 1..57: mol_type = unassigned DNA; note = methanogen bacteria
gaacttattgtttgtgtgggaggccgtggaatcgcacttgactatgccctggaatac

SEQ ID NO: 23267 - DNA, 36 bp, unidentified
  source 1..36: mol_type = unassigned DNA; note = methanogen bacteria
cttgcggtttctacaacagattcgattgccgtattt

SEQ ID NO: 23268 - DNA, 60 bp, unidentified
  source 1..60: mol_type = unassigned DNA; note = methanogen bacteria
cagcttgcatatctcttttcatatggcgaaagcgcaaggctgcttgaaccgacaatcaca

SEQ ID NO: 23269 - DNA, 39 bp, unidentified
  source 1..39: mol_type = unassigned DNA; note = methanogen bacteria
gttccttcaatcgccgatgagttcgcaatgaacaatgtc

SEQ ID NO: 23270 - DNA, 33 bp, unidentified
  source 1..33: mol_type = unassigned DNA; note = methanogen bacteria
tatcattttcagtatgtcagaaactgggatgcc

SEQ ID NO: 23271 - DNA, 54 bp, unidentified
  source 1..54: mol_type = unassigned DNA; note = methanogen bacteria
ataatgggtagcttaaagctttccagtgaacatgccgatttgatagttcagtgc

SEQ ID NO: 23272 - DNA, 39 bp, unidentified
  source 1..39: mol_type = unassigned DNA; note = methanogen bacteria
gttccggcaatagcgcaggaatttgcaatgaacaatgtt

SEQ ID NO: 23273 - DNA, 33 bp, unidentified
  source 1..33: mol_type = unassigned DNA; note = methanogen bacteria
tatcatttccagtacgtcagaggatggaatgca

SEQ ID NO: 23274 - DNA, 57 bp, unidentified
  source 1..57: mol_type = unassigned DNA; note = methanogen bacteria
tgggtaatgggcagtctggaattagctccgcaatatgcatcaatgattgtgcaggct

SEQ ID NO: 23275 - DNA, 36 bp, unidentified
  source 1..36: mol_type = unassigned DNA; note = methanogen bacteria
tcaggcatcatggccgattttaacatatcttcaaca

SEQ ID NO: 23276 - DNA, 30 bp, unidentified
  source 1..30: mol_type = unassigned DNA; note = methanogen bacteria
tttgttcaaaacgtagcatatcattcagca

SEQ ID NO: 23277 - DNA, 48 bp, unidentified
  source 1..48: mol_type = unassigned DNA; note = methanogen bacteria
tttgctggaggaaatgtggcccgtaatgcagtttctgttgcagcattc

SEQ ID NO: 23278 - DNA, 36 bp, unidentified
  source 1..36: mol_type = unassigned DNA; note = methanogen bacteria
gtttatttaatgagagacttctcagttagctcaaca

SEQ ID NO: 23279 - DNA, 33 bp, unidentified
  source 1..33: mol_type = unassigned DNA; note = methanogen bacteria
ctatttattcagggtgttgcctaccattcccca

SEQ ID NO: 23280 - DNA, 45 bp, unidentified
  source 1..45: mol_type = unassigned DNA; note = methanogen bacteria
gctggaggcaacataactcacaatcaggcttctgtaattggattt

SEQ ID NO: 23281 - DNA, 39 bp, unidentified
  source 1..39: mol_type = unassigned DNA; note = methanogen bacteria
actgggataatgggagattttcaagttcattcaacaaca

SEQ ID NO: 23282 - DNA, 33 bp, unidentified
  source 1..33: mol_type = unassigned DNA; note = methanogen bacteria
tttgttcaaaatgttggttatttctcagcaact

SEQ ID NO: 23283 - DNA, 54 bp, unidentified
  source 1..54: mol_type = unassigned DNA; note = methanogen bacteria
gcatttgcaggaggtaccatcaatcataatacaatatctgtttcagcttttggt

SEQ ID NO: 23284 - DNA, 39 bp, unidentified
  source 1..39: mol_type = unassigned DNA; note = methanogen bacteria
actcccgagattgcagctgactttggaatgaacaatgtg

SEQ ID NO: 23285 - DNA, 33 bp, unidentified
  source 1..33: mol_type = unassigned DNA; note = methanogen bacteria
taccatttccagtatgtaaaaggatgggatcct

SEQ ID NO: 23286 - DNA, 57 bp, unidentified
  source 1..57: mol_type = unassigned DNA; note = methanogen bacteria
tgggtaatgggcagtctggcactgtccagtcaatattcagacatgattgttgaatct

SEQ ID NO: 23287 - DNA, 66 bp, unidentified
  source 1..66: mol_type = unassigned DNA; note = methanogen bacteria
tttaatcctgcatacacaattcctgaatttacaacacagggattgtatttaactgaaaaaagtatt

SEQ ID NO: 23288 - DNA, 90 bp, unidentified
  source 1..90: mol_type = unassigned DNA; note = methanogen bacteria
tttttccacggtcagcctcagcttgcagcaatttacagtgcaacaccttcagtagcggttaatgaaatggcaacagcgttagttgggcca

SEQ ID NO: 23289 - DNA, 66 bp, unidentified
  source 1..66: mol_type = unassigned DNA; note = methanogen bacteria
ttgaatcctgcatacactattccggagtttacaacacaaggattatatttgactgaccaaagcatt

SEQ ID NO: 23290 - DNA, 93 bp, unidentified
  source 1..93: mol_type = unassigned DNA; note = methanogen bacteria
gcatttttccatggccagcctcagcttgcggcagtttacggttcttcaccggctgtggcagtcgagcaaatggcatctgcattagtcggaccg

SEQ ID NO: 23291 - DNA, 39 bp, unidentified
  source 1..39: mol_type = unassigned DNA; note = methanogen bacteria
gtgccatccattgcaggcgagtttgcaatgaacaacatt

SEQ ID NO: 23292 - DNA, 33 bp, unidentified
  source 1..33: mol_type = unassigned DNA; note = methanogen bacteria
taccatttccagtatgtcaggggatggaacgcc

SEQ ID NO: 23293 - DNA, 54 bp, unidentified
  source 1..54: mol_type = unassigned DNA; note = methanogen bacteria
attatgggtagcctgaagctgtcttccgagtatgccgggatgattgtccaaagc

SEQ ID NO: 23294 - DNA, 33 bp, unidentified
  source 1..33: mol_type = unassigned DNA; note = methanogen bacteria
gtagctggtcttggggccgacgcccttgccgct

SEQ ID NO: 23295 - DNA, 54 bp, unidentified
  source 1..54: mol_type = unassigned DNA; note = methanogen bacteria
cctatccttgagtttatgggtgccggaaacacaataagctatgctgcagagtac

SEQ ID NO: 23296 - DNA, 39 bp, unidentified
  source 1..39: mol_type = unassigned DNA; note = methanogen bacteria
gtgatagctgcaaattcagatgcggtagcggtatataca

SEQ ID NO: 23297 - DNA, 66 bp, unidentified
  source 1..66: mol_type = unassigned DNA; note = methanogen bacteria
cagattgcagcactcttttcctataccgatgcaagtgcggcactggcacctcagattgcaacagca

SEQ ID NO: 23298 - DNA, 66 bp, unidentified
  source 1..66: mol_type = unassigned DNA; note = methanogen bacteria
ataaatcctgcatacactatccccgaatttacaacaagcggattgtacttaactgacaaaaacatt

SEQ ID NO: 23299 - DNA, 90 bp, unidentified
  source 1..90: mol_type = unassigned DNA; note = methanogen bacteria
tttttccacagtcagcctcaacttgccgcaatttataatgcatcacctgcagtggcagttaatagaatggcaacagttttggtcggacct

SEQ ID NO: 23300 - DNA, 45 bp, unidentified; identical to SEQ ID NO: 23184
  source 1..45: mol_type = unassigned DNA; note = methanogen bacteria

SEQ ID NO: 23301 - DNA, 39 bp, unidentified
  source 1..39: mol_type = unassigned DNA; note = methanogen bacteria
atcgattcaagcaatttcttaaacagtctattgtctttg

SEQ ID NO: 23302 - DNA, 33 bp, unidentified
  source 1..33: mol_type = unassigned DNA; note = methanogen bacteria
cttgtaatcctttctatgggattgaatgaacag

SEQ ID NO: 23303 - DNA, 30 bp, unidentified
  source 1..30: mol_type = unassigned DNA; note = methanogen bacteria
gcaggacttggtccagacccacttgctgca

SEQ ID NO: 23304 - DNA, 48 bp, unidentified
  source 1..48: mol_type = unassigned DNA; note = methanogen bacteria
cttaagttgatgggagcatcaagcgttttgtattatgccattcaatat

SEQ ID NO: 23305 - DNA, 33 bp, unidentified
  source 1..33: mol_type = unassigned DNA; note = methanogen bacteria
acattagtttcaggacctattgctgttgctgtt

SEQ ID NO: 23306 - DNA, 63 bp, unidentified
  source 1..63: mol_type = unassigned DNA; note = methanogen bacteria
caaattgcatttgtattctcatattcagaaagcagtgcacaattagagcctttgattacaagc

SEQ ID NO: 23307 - DNA, 36 bp, unidentified
  source 1..36: mol_type = unassigned DNA; note = methanogen bacteria
ccatcaattgcaaatgattttggaatgaacaacatt

SEQ ID NO: 23308 - DNA, 33 bp, unidentified
  source 1..33: mol_type = unassigned DNA; note = methanogen bacteria
tatcatttccaatatgtgaggggatggaatgca

SEQ ID NO: 23309 - DNA, 54 bp, unidentified
  source 1..54: mol_type = unassigned DNA; note = methanogen bacteria
atgatgggaagtcttaaactttcttcagaatatgctgctctgatagttcaaagt

SEQ ID NO: 23310 - DNA, 36 bp, unidentified
  source 1..36: mol_type = unassigned DNA; note = methanogen bacteria
gcagggataatgtcagattttcatgtatcatcaaca

SEQ ID NO: 23311 - DNA, 48 bp, unidentified
  source 1..48: mol_type = unassigned DNA; note = methanogen bacteria
tttgcagggggagttatcggatccaatcctatgtcagtatatgcattt

SEQ ID NO: 23312 - DNA, 36 bp, unidentified
  source 1..36: mol_type = unassigned DNA; note = methanogen bacteria
gcaggaataatggctgattttcatatatcctcaaca

SEQ ID NO: 23313 - DNA, 33 bp, unidentified
  source 1..33: mol_type = unassigned DNA; note = methanogen bacteria
tttgcccaaagcatatccaattacgatgcaaca

SEQ ID NO: 23314 - DNA, 48 bp, unidentified
  source 1..48: mol_type = unassigned DNA; note = methanogen bacteria
tttgcaggaggaaacgtcggacacaactatgtttctgtaaatgcattt

SEQ ID NO: 23315 - DNA, 36 bp, unidentified
  source 1..36: mol_type = unassigned DNA; note = methanogen bacteria
gcagggataatggctgattttcacatatcctcaaca

SEQ ID NO: 23316 - DNA, 33 bp, unidentified
  source 1..33: mol_type = unassigned DNA; note = methanogen bacteria
tttgcccagagcatatccaattacgatgcaaca

SEQ ID NO: 23317 - DNA, 45 bp, unidentified
  source 1..45: mol_type = unassigned DNA; note = methanogen bacteria
tttgcaggaggaaacgttggacacaaccatgtttcagtatcagca

SEQ ID NO: 23318 - DNA, 39 bp, unidentified
  source 1..39: mol_type = unassigned DNA; note = methanogen bacteria
gttccggcaatagcgcaggactttgcaatgaacaacgtc

SEQ ID NO: 23319 - DNA, 33 bp, unidentified
  source 1..33: mol_type = unassigned DNA; note = methanogen bacteria
taccacttccaatacgtaaggggatggaacgca

SEQ ID NO: 23320 - DNA, 54 bp, unidentified
  source 1..54: mol_type = unassigned DNA; note = methanogen bacteria
ataatgggaaacctggagctttccacacaatacgccggcatgatcatacaggca

SEQ ID NO: 23321 - DNA, 66 bp, unidentified
  source 1..66: mol_type = unassigned DNA; note = methanogen bacteria
ataaatccagcatataacattcctgaatttacaacaaaaggattatacttaactgacaaaagcatt

SEQ ID NO: 23322 - DNA, 90 bp, unidentified
  source 1..90: mol_type = unassigned DNA; note = methanogen bacteria
tttttccatggtcagcctcaacttgcagtaatttatggcgcatccccttcagttgcagttaatgaaatggctttaacgttggtaggtccg

SEQ ID NO: 23323 - DNA, 39 bp, unidentified
  source 1..39: mol_type = unassigned DNA; note = methanogen bacteria
gttccggcaattgcacaggattttgcaatgaacaatgtc

SEQ ID NO: 23324 - DNA, 33 bp, unidentified
  source 1..33: mol_type = unassigned DNA; note = methanogen bacteria
taccacttccagtacgtgcgcggatgggatgcc

SEQ ID NO: 23325 - DNA, 54 bp, unidentified
  source 1..54: mol_type = unassigned DNA; note = methanogen bacteria
ataatgggcagtctcgaacttgcccctcaatatgctagcatgatcgtgcaagcg

SEQ ID NO: 23326 - DNA, 39 bp, unidentified
  source 1..39: mol_type = unassigned DNA; note = methanogen bacteria
gtttatctgatgagtgatttttcagtcacatcaacacag

SEQ ID NO: 23327 - DNA, 33 bp, unidentified
  source 1..33: mol_type = unassigned DNA; note = methanogen bacteria
atattcattcagggtgtagcctataattcagct

SEQ ID NO: 23328 - DNA, 48 bp, unidentified
  source 1..48: mol_type = unassigned DNA; note = methanogen bacteria
ttggctgggggtactatagatcataataatgcttccgttgttgcgttc

SEQ ID NO: 23329 - DNA, 39 bp, unidentified
  source 1..39: mol_type = unassigned DNA; note = methanogen bacteria
gtttatctgatgaatgatttttctgtttcatcaacacaa

SEQ ID NO: 23330 - DNA, 36 bp, unidentified
  source 1..36: mol_type = unassigned DNA; note = methanogen bacteria
atattcatgcagggaatagcttacaattcagcaatt

SEQ ID NO: 23331 - DNA, 48 bp, unidentified
  source 1..48: mol_type = unassigned DNA; note = methanogen bacteria
ttagcaggaggttctatagaccataatactgcttcagttgttgcattc

SEQ ID NO: 23332 - DNA, 36 bp, unidentified
  source 1..36: mol_type = unassigned DNA; note = methanogen bacteria
gatggaattatggcagatttccatattcattcaaca

SEQ ID NO: 23333 - DNA, 33 bp, unidentified
  source 1..33: mol_type = unassigned DNA; note = methanogen bacteria
tttgttcaaagtatcacctatcatgatgctaca

SEQ ID NO: 23334 - DNA, 48 bp, unidentified
  source 1..48: mol_type = unassigned DNA; note = methanogen bacteria
tttgctggaggatatattgctcataatgatctttctattgctgctttt

SEQ ID NO: 23335 - DNA, 36 bp, unidentified
  source 1..36: mol_type = unassigned DNA; note = methanogen bacteria
gcggggataatggctgatttccatgttcactcaaca

SEQ ID NO: 23336 - DNA, 36 bp, unidentified
  source 1..36: mol_type = unassigned DNA; note = methanogen bacteria
ttgtttgcccaaagtgtatccaattatgatgcaaca

SEQ ID NO: 23337 - DNA, 48 bp, unidentified
  source 1..48: mol_type = unassigned DNA; note = methanogen bacteria
tttgctggtggaaatgtgggtcataactatctttcagtatcagcattt

SEQ ID NO: 23338 - DNA, 33 bp, unidentified
  source 1..33: mol_type = unassigned DNA; note = methanogen bacteria
gtgcccataatggaagattttcatgtcacttca

SEQ ID NO: 23339 - DNA, 33 bp, unidentified
  source 1..33: mol_type = unassigned DNA; note = methanogen bacteria
atttttgttcagggaattgcaggccatgatgca

SEQ ID NO: 23340 - DNA, 48 bp, unidentified
  source 1..48: mol_type = unassigned DNA; note = methanogen bacteria
ttggctggtggagaagttggacaaaatttagtttcagaggttgcattt

SEQ ID NO: 23341 - DNA, 240 bp, unidentified
  source 1..240: mol_type = unassigned DNA; note = methanogen bacteria
cttacccacatgggcgattcgtccgcatggccgaggataatggcgtccgtcgagagcgggaacgacatctacggggtcatggggaactattacactccggtctgggggtacctcctttccttccttgacatgatgatccaggcggtcggggctgtgccgcttttcggagattacttcgaaggacttctgcccctggaaggggtcaggagctacaggccgttcgtcatttcccccgagatg

SEQ ID NO: 23342 - DNA, 84 bp, unidentified
  source 1..84: mol_type = unassigned DNA; note = methanogen bacteria
gccaacgggcagatcgacgacgcgttcgtgttcctgaccgataggcagggcacggacttcggttccctgtacgaggctgcgaca

SEQ ID NO: 23343 - DNA, 87 bp, unidentified
  source 1..87: mol_type = unassigned DNA; note = methanogen bacteria
tgcctgtcgtgcgcctattatgggctgatcgattacgataccttcacgtccctgtcggtgtccttcgccgaggacctgcccgtgcat

SEQ ID NO: 23344 - DNA, 36 bp, unidentified
  source 1..36: mol_type = unassigned DNA; note = methanogen bacteria
ttcgccgtcgtcatcgattccacgcacccctaccac

SEQ ID NO: 23345 - DNA, 36 bp, unidentified; identical to SEQ ID NO: 22963
  source 1..36: mol_type = unassigned DNA; note = methanogen bacteria

SEQ ID NO: 23346 - DNA, 54 bp, unidentified; identical to SEQ ID NO: 22964
  source 1..54: mol_type = unassigned DNA; note = methanogen bacteria

SEQ ID NO: 23347 - DNA, 93 bp, unidentified
  source 1..93: mol_type = unassigned DNA; note = methanogen bacteria
agcttttttaagggatggggagctgaccctaatgcgtttttcacaacaacccttttgcagtcttcagactcctacaccacactgaccagcttc

SEQ ID NO: 23348 - DNA, 75 bp, unidentified
  source 1..75: mol_type = unassigned DNA; note = methanogen bacteria
cttacacttcccggtgcgtcagtgggacttgccgagctcttcaatcccgactggtcacttttgagccattttgag

SEQ ID NO: 23349 - DNA, 111 bp, unidentified
  source 1..111: mol_type = unassigned DNA; note = methanogen bacteria
ctcggctatatgtcagtccagtcaggaactgcagtttcagagcttgtaactcagggaacaggactggtgtttattgtatatcctacagtattcaacgtgctgggtcagtgg

SEQ ID NO: 23350 - DNA, 33 bp, unidentified
  source 1..33: mol_type = unassigned DNA; note = methanogen bacteria
gatgtggtgaacaactcttcaatccatcagctg

SEQ ID NO: 23351 - DNA, 36 bp, unidentified
  source 1..36: mol_type = unassigned DNA; note = methanogen bacteria
gcaggaattatggcggactttcatgtttcttcgact

SEQ ID NO: 23352 - DNA, 33 bp, unidentified
  source 1..33: mol_type = unassigned DNA; note = methanogen bacteria
tttgttcaaaccgtcacttcccacaatgcaaca

SEQ ID NO: 23353 - DNA, 48 bp, unidentified
  source 1..48: mol_type = unassigned DNA; note = methanogen bacteria
tttgcaggaggaacactggctcataatcgtgtttcagtaactgcattt

SEQ ID NO: 23354 - DNA, 66 bp, unidentified
  source 1..66: mol_type = unassigned DNA; note = methanogen bacteria
atgaatccggcatacagcattcctgagtttacaacacagggattgtatctaactgacaaaaacatt

SEQ ID NO: 23355 - DNA, 90 bp, unidentified
  source 1..90: mol_type = unassigned DNA; note = methanogen bacteria
tttttccacggccagcctcagcttgcagcgatttacggtgccacacctgcagtgggggtcgaacaaatggcaaaaatattgttaggacct

SEQ ID NO: 23356 - DNA, 36 bp, unidentified
  source 1..36: mol_type = unassigned DNA; note = methanogen bacteria
ccaagcattgcagtcgagtttcacatgagcaatatc

SEQ ID NO: 23357 - DNA, 36 bp, unidentified
  source 1..36: mol_type = unassigned DNA; note = methanogen bacteria
tatcatctgcagtacatcaagggattcgattcacag

SEQ ID NO: 23358 - DNA, 54 bp, unidentified
  source 1..54: mol_type = unassigned DNA; note = methanogen bacteria
ataatgggtgatgttccgataatccagcagtactatccgctgctgattcaaagc

SEQ ID NO: 23359 - DNA, 36 bp, unidentified
  source 1..36: mol_type = unassigned DNA; note = methanogen bacteria
gcagggataatgactgattttcatattcattcaaca

SEQ ID NO: 23360 - DNA, 33 bp, unidentified
  source 1..33: mol_type = unassigned DNA; note = methanogen bacteria
tttgcacaaagcatagcaaatcatgatgcaaca

SEQ ID NO: 23361 - DNA, 48 bp, unidentified
  source 1..48: mol_type = unassigned DNA; note = methanogen bacteria
tttgcaggaggaaatatgggtcataacaatatttcagtatctgcattt

SEQ ID NO: 23362 - DNA, 36 bp, unidentified
  source 1..36: mol_type = unassigned DNA; note = methanogen bacteria
gtgtcctggctcggcggcagcgcggtgggaggtctg

SEQ ID NO: 23363 - DNA, 57 bp, unidentified
  source 1..57: mol_type = unassigned DNA; note = methanogen bacteria
ggcccgttgatggattgtttcggagacccatcagcatcggatgcggccatcgcctac

SEQ ID NO: 23364 - DNA, 33 bp, unidentified
  source 1..33: mol_type = unassigned DNA; note = methanogen bacteria
gtcggtgtggccggagctgacaccgtcggtgtt

SEQ ID NO: 23365 - DNA, 54 bp, unidentified
  source 1..54: mol_type = unassigned DNA; note = methanogen bacteria
gcgatggtcttcacggctgccgacgacctgcagtatctgaggaacaacatggtg

SEQ ID NO: 23366 - DNA, 39 bp, unidentified
  source 1..39: mol_type = unassigned DNA; note = methanogen bacteria
gttccatcaattgcaaatgaatttgtaatgaacaatgta

SEQ ID NO: 23367 - DNA, 33 bp, unidentified
  source 1..33: mol_type = unassigned DNA; note = methanogen bacteria
tatcacttccaatatgtaagaggatgggatgcc

SEQ ID NO: 23368 - DNA, 51 bp, unidentified
  source 1..51: mol_type = unassigned DNA; note = methanogen bacteria
atgggtaacttagaactaaaccatcaatatgcaaatatgatagtacaatca

SEQ ID NO: 23369 - DNA, 33 bp, unidentified
  source 1..33: mol_type = unassigned DNA; note = methanogen bacteria
gtagctggtcttggccaggcggcaatagccgga

SEQ ID NO: 23370 - DNA, 60 bp, unidentified
  source 1..60: mol_type = unassigned DNA; note = methanogen bacteria
gaacctctgcttcgagcttatggtgcaagcggacaaaaccttgccgaaggaatcaaatat

SEQ ID NO: 23371 - DNA, 36 bp, unidentified
  source 1..36: mol_type = unassigned DNA; note = methanogen bacteria
tcaacaatcggaggagaatacggtattgcctcattc

SEQ ID NO: 23372 - DNA, 63 bp, unidentified
  source 1..63: mol_type = unassigned DNA; note = methanogen bacteria
cttgcaacattatttgcatacacaaaggaaacagcagtactggttcctgaaatcacaagattc

SEQ ID NO: 23373 - DNA, 30 bp, unidentified
  source 1..30: mol_type = unassigned DNA; note = methanogen bacteria
agtggtttaggcaatattgaagttactgcc

SEQ ID NO: 23374 - DNA, 57 bp, unidentified
  source 1..57: mol_type = unassigned DNA; note = methanogen bacteria
gacaaaatacttattttattttgcaataatcaagtttttgatgcttcttattcttat

SEQ ID NO: 23375 - DNA, 33 bp, unidentified
  source 1..33: mol_type = unassigned DNA; note = methanogen bacteria
gtatatgaaggtttaatttacattactgcttat

SEQ ID NO: 23376 - DNA, 57 bp, unidentified
  source 1..57: mol_type = unassigned DNA; note = methanogen bacteria
tttttaagtttcatgctctatcagacgaaagatttaattgtcattaatcagatttct

SEQ ID NO: 23377 - DNA, 33 bp, unidentified
  source 1..33: mol_type = unassigned DNA; note = methanogen bacteria
cctcttattgctcgtgagctttcaatgagcaat

SEQ ID NO: 23378 - DNA, 30 bp, unidentified
  source 1..30: mol_type = unassigned DNA; note = methanogen bacteria
cattttcaatacattatgggcttagactcc

SEQ ID NO: 23379 - DNA, 54 bp, unidentified
  source 1..54: mol_type = unassigned DNA; note = methanogen bacteria
attatgggaaatgtgcctattgttcctgaatattatccattgcttatggaaagt

SEQ ID NO: 23380 - DNA, 33 bp, unidentified
  source 1..33: mol_type = unassigned DNA; note = methanogen bacteria
ccacttattgcccgtgaacttgcaatgagcaat

SEQ ID NO: 23381 - DNA, 30 bp, unidentified
  source 1..30: mol_type = unassigned DNA; note = methanogen bacteria
cattttcagtacattatgggtcttgactcc

SEQ ID NO: 23382 - DNA, 54 bp, unidentified
  source 1..54: mol_type = unassigned DNA; note = methanogen bacteria
attatgggaaatgttcctatcgttccagaaaattatccattgctgatggcaagt

SEQ ID NO: 23383 - DNA, 36 bp, unidentified
  source 1..36: mol_type = unassigned DNA; note = methanogen bacteria
attgccggtttaaatgttgattcattgattgcaatt

SEQ ID NO: 23384 - DNA, 51 bp, unidentified
  source 1..51: mol_type = unassigned DNA; note = methanogen bacteria
caaatactcttgtcacttggagctgccagtgtaattgatttgtctatggag

SEQ ID NO: 23385 - DNA, 33 bp, unidentified
  source 1..33: mol_type = unassigned DNA; note = methanogen bacteria
ctgattttatccagtaatctggatgtggcaaca

SEQ ID NO: 23386 - DNA, 63 bp, unidentified
  source 1..63: mol_type = unassigned DNA; note = methanogen bacteria
cagttcgcttatatcttttcatatacagaatctactcaagtcttgattgagtctcttgttttt

SEQ ID NO: 23387 - DNA, 36 bp, unidentified
  source 1..36: mol_type = unassigned DNA; note = methanogen bacteria
cctttgatttccaatgatttacatttaaccattgaa

SEQ ID NO: 23388 - DNA, 30 bp, unidentified
  source 1..30: mol_type = unassigned DNA; note = methanogen bacteria
catttacaatacgttttaggatacgattca

SEQ ID NO: 23389 - DNA, 51 bp, unidentified
  source 1..51: mol_type = unassigned DNA; note = methanogen bacteria
ttcataggtaatgaagttattaatagcagcaatgtaagcggattaataaaa

SEQ ID NO: 23390 - DNA, 39 bp, unidentified
  source 1..39: mol_type = unassigned DNA; note = methanogen bacteria
atgatagatatagcatttatacttaatcaaatcgacaat

SEQ ID NO: 23391 - DNA, 69 bp, unidentified
  source 1..69: mol_type = unassigned DNA; note = methanogen bacteria
atccaaaatatacctgcaatgttcgcattaattttcaaagatgcttttgatttcacatcaatttttggc

SEQ ID NO: 23392 - DNA, 78 bp, unidentified
  source 1..78: mol_type = unassigned DNA; note = methanogen bacteria
tccactggagtaccaataacttcagtcgtttcaggagctccatatgtgcagaatgcaatcgcaagcgtatttggatgg

SEQ ID NO: 23393 - DNA, 36 bp, unidentified
  source 1..36: mol_type = unassigned DNA; note = methanogen bacteria
ccagctattgctttggaattccatatgagtaatata

SEQ ID NO: 23394 - DNA, 30 bp, unidentified
  source 1..30: mol_type = unassigned DNA; note = methanogen bacteria
cacttccaatacctggaaggattaaatgca

SEQ ID NO: 23395 - DNA, 54 bp, unidentified
  source 1..54: mol_type = unassigned DNA; note = methanogen bacteria
gttatgggcaatgtacctattgaaccatcaaattataatttactagtaacaagt

SEQ ID NO: 23396 - DNA, 33 bp, unidentified
  source 1..33: mol_type = unassigned DNA; note = methanogen bacteria
attgcaggtttaggaactgagccgcttgcagca

SEQ ID NO: 23397 - DNA, 54 bp, unidentified
  source 1..54: mol_type = unassigned DNA; note = methanogen bacteria
cctataattgttttaataggagcttcagaagtattaacatatgctgaaagttat

SEQ ID NO: 23398 - DNA, 33 bp, unidentified
  source 1..33: mol_type = unassigned DNA; note = methanogen bacteria
tcaattgttgctggaactgctattgtagcatca

SEQ ID NO: 23399 - DNA, 63 bp, unidentified
  source 1..63: mol_type = unassigned DNA; note = methanogen bacteria
caaatagcatatctatttgcatatggttctaatagtggatctttaaatacattaatagttcaa

SEQ ID NO: 23400 - DNA, 36 bp, unidentified
  source 1..36: mol_type = unassigned DNA; note = methanogen bacteria
gtagcaggtttaggatcagatgcattagcagcaata

SEQ ID NO: 23401 - DNA, 48 bp, unidentified
  source 1..48: mol_type = unassigned DNA; note = methanogen bacteria
ctagagattatgggtgctggatcttcaacacaattagcactagattat

SEQ ID NO: 23402 - DNA, 36 bp, unidentified
  source 1..36: mol_type = unassigned DNA; note = methanogen bacteria
gtaatagtatcaggaaacgttgcagtagctacatat

SEQ ID NO: 23403 - DNA, 57 bp, unidentified
  source 1..57: mol_type = unassigned DNA; note = methanogen bacteria
ataagtataatatttgcttatggttcaacagcatcccttgcaccaagaatagcaagt

SEQ ID NO: 23404 - DNA, 126 bp, unidentified
  source 1..126: mol_type = unassigned DNA; note = methanogen bacteria
ggaactaatggtatttatcctattgaaatcatgtcaccattattccaaggattaatgccatatctaccaatgacatatgcaatattactattaaaagatgcagtattcggcgtaatttggccaaca

SEQ ID NO: 23405 - DNA, 33 bp, unidentified
  source 1..33: mol_type = unassigned DNA; note = methanogen bacteria
gtgtcctggctcggaggcaacgccgtcggaggt

SEQ ID NO: 23406 - DNA, 54 bp, unidentified
  source 1..54: mol_type = unassigned DNA; note = methanogen bacteria
ccgctcatggactgcttcggcaaccccgcggcccgcgacgaggccatcgcctac

SEQ ID NO: 23407 - DNA, 33 bp, unidentified
  source 1..33: mol_type = unassigned DNA; note = methanogen bacteria
gtgggcgtggccggagcggacaccgtaggtgtt

SEQ ID NO: 23408 - DNA, 54 bp, unidentified
  source 1..54: mol_type = unassigned DNA; note = methanogen bacteria
gccatggtgttcaccgcggccgacgacctgcactacctcagggacaacatgttc

SEQ ID NO: 23409 - DNA, 33 bp, unidentified
  source 1..33: mol_type = unassigned DNA; note = methanogen bacteria
gttgctggacttggtcaggcagctattgcaggt

SEQ ID NO: 23410 - DNA, 57 bp, unidentified
  source 1..57: mol_type = unassigned DNA; note = methanogen bacteria
gaacctgtgcttaaaacctatggtgccagtggccagtcattgactgaagcattaaaa

SEQ ID NO: 23411 - DNA, 36 bp, unidentified; identical to SEQ ID NO: 23149
  source 1..36: mol_type = unassigned DNA; note = methanogen bacteria

SEQ ID NO: 23412 - DNA, 63 bp, unidentified
  source 1..63: mol_type = unassigned DNA; note = methanogen bacteria
ttgtctatgatttttgcatatactcccgaaaccgctccattaattccggaaattacaagcttt

SEQ ID NO: 23413 - DNA, 36 bp, unidentified
  source 1..36: mol_type = unassigned DNA; note = methanogen bacteria
gtggcaggactaggagccgacgcacttgcagcagtc

SEQ ID NO: 23414 - DNA, 48 bp, unidentified
  source 1..48: mol_type = unassigned DNA; note = methanogen bacteria
ctcaacctcatgggagccggcagctcaacacagctgggaatagaatac

SEQ ID NO: 23415 - DNA, 36 bp, unidentified
  source 1..36: mol_type = unassigned DNA; note = methanogen bacteria
acaattgctgcaggaacaaccgcagtagctgtctat

SEQ ID NO: 23416 - DNA, 63 bp, unidentified
  source 1..63: mol_type = unassigned DNA; note = methanogen bacteria
tatatcgcccttctgtttgcatattcagaccagagtgcctccctggctccgatgatttcaagc

SEQ ID NO: 23417 - DNA, 33 bp, unidentified
  source 1..33: mol_type = unassigned DNA; note = methanogen bacteria
gttgcaggacttggtgcagacgctcttgcggcc

SEQ ID NO: 23418 - DNA, 54 bp, unidentified
  source 1..54: mol_type = unassigned DNA; note = methanogen bacteria
ccaatccttcagtttatgggtgccggcgataccatccagtatgcaatggactac

SEQ ID NO: 23419 - DNA, 36 bp, unidentified
  source 1..36: mol_type = unassigned DNA; note = methanogen bacteria
gtaatcgcagcgggaaccactgcggtggctgtatat

SEQ ID NO: 23420 - DNA, 66 bp, unidentified
  source 1..66: mol_type = unassigned DNA; note = methanogen bacteria
tctcaaatagctggaatgttttcatatacacaggcaagtgcaggaatggcttccgaaattgcaaca

SEQ ID NO: 23421 - DNA, 36 bp, unidentified
  source 1..36: mol_type = unassigned DNA; note = methanogen bacteria
gtttctggacttagtgctgatgcacttactgcaatt

SEQ ID NO: 23422 - DNA, 60 bp, unidentified
  source 1..60: mol_type = unassigned DNA; note = methanogen bacteria
gatgatttgatagtattggttggtggtgaaagcgtattgcctctttgtagggcttatatt

SEQ ID NO: 23423 - DNA, 33 bp, unidentified
  source 1..33: mol_type = unassigned DNA; note = methanogen bacteria
tttacagcaggtgttggcgaaattgcatcttac

SEQ ID NO: 23424 - DNA, 66 bp, unidentified
  source 1..66: mol_type = unassigned DNA; note = methanogen bacteria
catcaattttgcggaatattcagtctaacattatcagatacaaatgtaatcgacagggctgcagaa

SEQ ID NO: 23425 - DNA, 33 bp, unidentified
  source 1..33: mol_type = unassigned DNA; note = methanogen bacteria
gttgctggtttaggagcagaacctttagctgca

SEQ ID NO: 23426 - DNA, 48 bp, unidentified
  source 1..48: mol_type = unassigned DNA; note = methanogen bacteria
cttaaattgatgggtgcctcaagtgttttggattacggaatgcaatat

SEQ ID NO: 23427 - DNA, 33 bp, unidentified
  source 1..33: mol_type = unassigned DNA; note = methanogen bacteria
acattggtttcaggaccagttgcagtggctgtt

SEQ ID NO: 23428 - DNA, 63 bp, unidentified
  source 1..63: mol_type = unassigned DNA; note = methanogen bacteria
caaattgctttcgtattttcatattctgaaagcagcgctcatttggaacctttaatcgcaagt

SEQ ID NO: 23429 - DNA, 30 bp, unidentified
  source 1..30: mol_type = unassigned DNA; note = methanogen bacteria
tcacaattaagtcctgaagcatttttcgca

SEQ ID NO: 23430 - DNA, 54 bp, unidentified
  source 1..54: mol_type = unassigned DNA; note = methanogen bacteria
gatatattgaataaaatgggtgttaccaaatctattgatttagcaataacttat

SEQ ID NO: 23431 - DNA, 48 bp, unidentified
  source 1..48: mol_type = unassigned DNA; note = methanogen bacteria
tatggatttgctttattttccattacaggagctgaaacatcagtattt

SEQ ID NO: 23432 - DNA, 93 bp, unidentified
  source 1..93: mol_type = unassigned DNA; note = methanogen bacteria
aacagctttacatttggatggggaactaaccctgcagcattctttactgcaaatgttggagaatcctctgatttagctggaatcgattatctg

SEQ ID NO: 23433 - DNA, 72 bp, unidentified
  source 1..72: mol_type = unassigned DNA; note = methanogen bacteria
acattacctggtttccatttaggattggtcacactgcttaatccgaattggggaatgcttttagacattgac

SEQ ID NO: 23434 - DNA, 105 bp, unidentified
  source 1..105: mol_type = unassigned DNA; note = methanogen bacteria
ggatacatgtctgtaacaagctcaattccaataaccgaattgattactgaaggaacaagcctgatttttgtagttcttccagaagtctttgaagtgatgggtcct

SEQ ID NO: 23435 - DNA, 33 bp, unidentified
  source 1..33: mol_type = unassigned DNA; note = methanogen bacteria
gttgctggtattggtgttaatgctcttgctggt

SEQ ID NO: 23436 - DNA, 57 bp, unidentified
  source 1..57: mol_type = unassigned DNA; note = methanogen bacteria
aggcctattcttgtgtatatgggtgctggtagtactattggttatgctttggaatat

SEQ ID NO: 23437 - DNA, 36 bp, unidentified
  source 1..36: mol_type = unassigned DNA; note = methanogen bacteria
acaatagttagtggtactgatgctgttgctgtttat

SEQ ID NO: 23438 - DNA, 63 bp, unidentified
  source 1..63: mol_type = unassigned DNA; note = methanogen bacteria
attgtaatgttattttcatatgctgatagtagtgtttctttgtcagattccttgattgacttt

SEQ ID NO: 23439 - DNA, 39 bp, unidentified
  source 1..39: mol_type = unassigned DNA; note = methanogen bacteria
gttccaagtttggctcaagacttttcaatgagtaatatt

SEQ ID NO: 23440 - DNA, 36 bp, unidentified
  source 1..36: mol_type = unassigned DNA; note = methanogen bacteria
tatcatctacaatatataaggggttttgattcacaa

SEQ ID NO: 23441 - DNA, 54 bp, unidentified
  source 1..54: mol_type = unassigned DNA; note = methanogen bacteria
ataatgggtaatgtacctataattccagaatattatcatttattaacggcttct

SEQ ID NO: 23442 - DNA, 36 bp, unidentified
  source 1..36: mol_type = unassigned DNA; note = methanogen bacteria
ccttcaattggtgtggatttaaatttaagtattgaa

SEQ ID NO: 23443 - DNA, 30 bp, unidentified
  source 1..30: mol_type = unassigned DNA; note = methanogen bacteria
tatttacaatatgttttgggttatgattca

SEQ ID NO: 23444 - DNA, 54 bp, unidentified
  source 1..54: mol_type = unassigned DNA; note = methanogen bacteria
atctttgggacttccgagaggattggagatgatattgcttcttttttaatatct

SEQ ID NO: 23445 - DNA, 243 bp, unidentified
  source 1..243: mol_type = unassigned DNA; note = methanogen bacteria
ttcacctatcccttcgacatcgagcactggggggttatcctgcagaacaccgagagcgggaacggcctcttcgggctcacgggctacttctacacgccggtgtgggggtacatcctcggattcgaggacatcatcctcaacctcctgcccggcatcacctacggcgagcgtttcaccgatctcctggagatcgaggggatggccttcccttactacaccgccacgaccaccacgcccgccttc

SEQ ID NO: 23446 - DNA, 72 bp, unidentified
  source 1..72: mol_type = unassigned DNA; note = methanogen bacteria
ctggacgggacgctgatgaacgccttctcgttcatcttcggcaggacctcggaatacgatctgctgctcacg

SEQ ID NO: 23447 - DNA, 108 bp, unidentified
  source 1..108: mol_type = unassigned DNA; note = methanogen bacteria
aattcgttatcgttgctgaccaccgcttccgagtacctccacctgtgcgatccccagaccgtgatctcctggatgcacgcattggagggcccggtgttcggcatacct

SEQ ID NO: 23448 - DNA, 33 bp, unidentified
  source 1..33: mol_type = unassigned DNA; note = methanogen bacteria
ccggcaattgcagaggaattcggcatgaacaat

SEQ ID NO: 23449 - DNA, 30 bp, unidentified
  source 1..30: mol_type = unassigned DNA; note = methanogen bacteria
cacttccagtacgtgatgggttgggatgca

SEQ ID NO: 23450 - DNA, 54 bp, unidentified
  source 1..54: mol_type = unassigned DNA; note = methanogen bacteria
ataatgggcagccggaagctgtcaagccagtatgcagacatgattgttcaatct

SEQ ID NO: 23451 - DNA, 30 bp, unidentified
  source 1..30: mol_type = unassigned DNA; note = methanogen bacteria
ataatgccctacgacaactcgtgggaccgc

SEQ ID NO: 23452 - DNA, 33 bp, unidentified
  source 1..33: mol_type = unassigned DNA; note = methanogen bacteria
atacaatgcaccgacccctccagcgacctgata

SEQ ID NO: 23453 - DNA, 48 bp, unidentified
  source 1..48: mol_type = unassigned DNA; note = methanogen bacteria
accagctgcctgttcaccatcgagaacggagtgtatacggttacggaa

SEQ ID NO: 23454 - DNA, 39 bp, unidentified
  source 1..39: mol_type = unassigned DNA; note = methanogen bacteria
gttccagctattgcaagtgaattcggtatgaataatgtt

SEQ ID NO: 23455 - DNA, 33 bp, unidentified
  source 1..33: mol_type = unassigned DNA; note = methanogen bacteria
tatcatttccagtatgtcagaggatgggatgcc

SEQ ID NO: 23456 - DNA, 54 bp, unidentified
  source 1..54: mol_type = unassigned DNA; note = methanogen bacteria
gtaatgggcagtcttccattatcaacagaatatgcgaatttaatagtccaaagt

SEQ ID NO: 23457 - DNA, 36 bp, unidentified
  source 1..36: mol_type = unassigned DNA; note = methanogen bacteria
attgctggaatcggagcgaatgcaatagctgctact

SEQ ID NO: 23458 - DNA, 57 bp, unidentified
  source 1..57: mol_type = unassigned DNA; note = methanogen bacteria
agacccatgcttgagataatgcaagctggagatgccatggaatatgcaatgacctac

SEQ ID NO: 23459 - DNA, 42 bp, unidentified
  source 1..42: mol_type = unassigned DNA; note = methanogen bacteria
cttacaatggttgcaggcacaatggctgttggagcatacacc

SEQ ID NO: 23460 - DNA, 63 bp, unidentified
  source 1..63: mol_type = unassigned DNA; note = methanogen bacteria
gagtacatatcacttctattcacatacagcccagagagcattgcaatgaggcctatgcttatc

SEQ ID NO: 23461 - DNA, 36 bp, unidentified
  source 1..36: mol_type = unassigned DNA; note = methanogen bacteria
cccacaatagaagtggatttgaatttaaatgtggaa

SEQ ID NO: 23462 - DNA, 30 bp, unidentified
  source 1..30: mol_type = unassigned DNA; note = methanogen bacteria
ttgcagaatgctttaggatatgattctcgt

SEQ ID NO: 23463 - DNA, 54 bp, unidentified
  source 1..54: mol_type = unassigned DNA; note = methanogen bacteria
gtcttaggtgcttcaaataccctgaataagaatattcattcatttttaacttca

SEQ ID NO: 23464 - DNA, 36 bp, unidentified
  source 1..36: mol_type = unassigned DNA; note = methanogen bacteria
gtagttggattaggaccagaaccgcttgtagctatg

SEQ ID NO: 23465 - DNA, 48 bp, unidentified
  source 1..48: mol_type = unassigned DNA; note = methanogen bacteria
ttaatattattaggtgcaggaacatctttgaaatatggaatggattat

SEQ ID NO: 23466 - DNA, 33 bp, unidentified
  source 1..33: mol_type = unassigned DNA; note = methanogen bacteria
ttgaaagtagctggccatacagctgttgcagta

SEQ ID NO: 23467 - DNA, 63 bp, unidentified
  source 1..63: mol_type = unassigned DNA; note = methanogen bacteria
gaaatagcacatatatttagttataataatcaaaatgctatattaaaaccctatattgcatca

SEQ ID NO: 23468 - DNA, 30 bp, unidentified
  source 1..30: mol_type = unassigned DNA; note = methanogen bacteria
attgctggattaggagaatctgcaattgcg

SEQ ID NO: 23469 - DNA, 51 bp, unidentified
  source 1..51: mol_type = unassigned DNA; note = methanogen bacteria
tatttaagtatttatactcatgatgaacaaacaaaaatagaagctatcact

SEQ ID NO: 23470 - DNA, 33 bp, unidentified
  source 1..33: mol_type = unassigned DNA; note = methanogen bacteria
gctgatattgctggtgatttaggtttatctatt

SEQ ID NO: 23471 - DNA, 66 bp, unidentified
  source 1..66: mol_type = unassigned DNA; note = methanogen bacteria
caattagcttacttatttatgattgtttctgaaaatcctcaattaactgctggtatttctcataat

SEQ ID NO: 23472 - DNA, 36 bp, unidentified
  source 1..36: mol_type = unassigned DNA; note = methanogen bacteria
atatcacaaataaatattcatgccagttttgcagtt

SEQ ID NO: 23473 - DNA, 57 bp, unidentified
  source 1..57: mol_type = unassigned DNA; note = methanogen bacteria
caaggcctattatatgatgttaaccaatctgaatcgtatcttttagtttgggattat

SEQ ID NO: 23474 - DNA, 30 bp, unidentified
  source 1..30: mol_type = unassigned DNA; note = methanogen bacteria
atagtaacaatgggcgaaattggacccata

SEQ ID NO: 23475 - DNA, 48 bp, unidentified
  source 1..48: mol_type = unassigned DNA; note = methanogen bacteria
caagcatacaactttttttccattagtggaagagcaacagaaataaat

SEQ ID NO: 23476 - DNA, 33 bp, unidentified
  source 1..33: mol_type = unassigned DNA; note = methanogen bacteria
ccatcaattgctaaagaatttggaatgaataat

SEQ ID NO: 23477 - DNA, 33 bp, unidentified
  source 1..33: mol_type = unassigned DNA; note = methanogen bacteria
tattatttccaatatgtcaaaggttttaattct

SEQ ID NO: 23478 - DNA, 51 bp, unidentified
  source 1..51: mol_type = unassigned DNA; note = methanogen bacteria
atgggaaatttaaacttatctacaatttatgcgaatatgattcttaaagca

SEQ ID NO: 23479 - DNA, 30 bp, unidentified
  source 1..30: mol_type = unassigned DNA; note = methanogen bacteria
gttaacggtttgggcacaactgccatcata

SEQ ID NO: 23480 - DNA, 57 bp, unidentified
  source 1..57: mol_type = unassigned DNA; note = methanogen bacteria
gaacctatttgtgtcatggcgggcattggcgagtacactgacatgatatttgcatat

SEQ ID NO: 23481 - DNA, 57 bp, unidentified
  source 1..57: mol_type = unassigned DNA; note = methanogen bacteria
aatccgattataggcatattttcaacggagaatgtcgttttggatgaggtgagaaac

SEQ ID NO: 23482 - DNA, 36 bp, unidentified
  source 1..36: mol_type = unassigned DNA; note = methanogen bacteria
ccaaaaatatcttcaaacttaaatttttcagctgaa

SEQ ID NO: 23483 - DNA, 30 bp, unidentified
  source 1..30: mol_type = unassigned DNA; note = methanogen bacteria
catttacaatatgttttaaatataaaagaa

SEQ ID NO: 23484 - DNA, 54 bp, unidentified
  source 1..54: mol_type = unassigned DNA; note = methanogen bacteria
gtagggaatcagagattaggacccgacaaacttgattctctcctagttcagtca

SEQ ID NO: 23485 - DNA, 33 bp, unidentified
  source 1..33: mol_type = unassigned DNA; note = methanogen bacteria
gtttcctctctgggtgctgatgcattggcaggg

SEQ ID NO: 23486 - DNA, 57 bp, unidentified
  source 1..57: mol_type = unassigned DNA; note = methanogen bacteria
aaggatatccttttggctataggcgcatccactacaataggttatgctatggattat

SEQ ID NO: 23487 - DNA, 36 bp, unidentified
  source 1..36: mol_type = unassigned DNA; note = methanogen bacteria
actgttgttgctacaactgatgctgtggcagtttat

SEQ ID NO: 23488 - DNA, 66 bp, unidentified
  source 1..66: mol_type = unassigned DNA; note = methanogen bacteria
ggtcaaattgtttccctatttgtctatgcaggtacaagtgcaaggctagagagtcaattggtatca

SEQ ID NO: 23489 - DNA, 30 bp, unidentified
  source 1..30: mol_type = unassigned DNA; note = methanogen bacteria
gtcagtggtttgggcacagctgccatcata

SEQ ID NO: 23490 - DNA, 57 bp, unidentified
  source 1..57: mol_type = unassigned DNA; note = methanogen bacteria
gagccaatttgtgtcatggcaggcatttccgagtatactgacatgatatttgcgtat

SEQ ID NO: 23491 - DNA, 33 bp, unidentified
  source 1..33: mol_type = unassigned DNA; note = methanogen bacteria
cttcacctgtatgcctcaccaattgcagtctct

SEQ ID NO: 23492 - DNA, 57 bp, unidentified
  source 1..57: mol_type = unassigned DNA; note = methanogen bacteria
ggtccaatagtgggcttattttcatctgaatacgtcattttggaggaagttaaaaat

SEQ ID NO: 23493 - DNA, 30 bp, unidentified
  source 1..30: mol_type = unassigned DNA; note = methanogen bacteria
ggaggacttggtgccggtgcattggctgca

SEQ ID NO: 23494 - DNA, 45 bp, unidentified
  source 1..45: mol_type = unassigned DNA; note = methanogen bacteria
ctgattcagatgggagctggagaagtaattgaagatgctttaaat

SEQ ID NO: 23495 - DNA, 36 bp, unidentified
  source 1..36: mol_type = unassigned DNA; note = methanogen bacteria
acattgctttcaggaacaattgccattgcatcatat

SEQ ID NO: 23496 - DNA, 66 bp, unidentified
  source 1..66: mol_type = unassigned DNA; note = methanogen bacteria
gagccactatcacacatatttgcatattcagcaaacagtgcagttctatccctaagaataacagaa

SEQ ID NO: 23497 - DNA, 33 bp, unidentified
  source 1..33: mol_type = unassigned DNA; note = methanogen bacteria
gtagcaggattaggtccggctcctttggcagca

SEQ ID NO: 23498 - DNA, 48 bp, unidentified
  source 1..48: mol_type = unassigned DNA; note = methanogen bacteria
ttgaagataatgggagctagtgatgtattgaaatatgctatggattat

SEQ ID NO: 23499 - DNA, 36 bp, unidentified
  source 1..36: mol_type = unassigned DNA; note = methanogen bacteria
actttggtttcaggttcaactgctgtagccgtttat

SEQ ID NO: 23500 - DNA, 63 bp, unidentified
  source 1..63: mol_type = unassigned DNA; note = methanogen bacteria
caagttgcattcatattctcttattcagaggcaagctcacatcttgaaccgttgattgcttca

SEQ ID NO: 23501 - DNA, 33 bp, unidentified
  source 1..33: mol_type = unassigned DNA; note = methanogen bacteria
gtatctggcttaggtgctgatgctctcgcaggt

SEQ ID NO: 23502 - DNA, 54 bp, unidentified
  source 1..54: mol_type = unassigned DNA; note = methanogen bacteria
aaggacattctacttggaatgggtgcaggaagcacaattgattatgcaatggat

SEQ ID NO: 23503 - DNA, 36 bp, unidentified
  source 1..36: mol_type = unassigned DNA; note = methanogen bacteria
gttgttgtggcttcaactgatgctgttgcagtatat

SEQ ID NO: 23504 - DNA, 63 bp, unidentified
  source 1..63: mol_type = unassigned DNA; note = methanogen bacteria
cagatagtatccgtgtttgcatacacaggcacaagcacaagattggctccacagctcattgca

SEQ ID NO: 23505 - DNA, 33 bp, unidentified
  source 1..33: mol_type = unassigned DNA; note = methanogen bacteria
gtatctggcttaggtgcagatgctcttgcagga

SEQ ID NO: 23506 - DNA, 54 bp, unidentified
  source 1..54: mol_type = unassigned DNA; note = methanogen bacteria
aaggacattctccttgggatgggtgcaggaagcacaatcgattatgcgatggat

SEQ ID NO: 23507 - DNA, 36 bp, unidentified
  source 1..36: mol_type = unassigned DNA; note = methanogen bacteria
gttgttgtagcaaatacagatgctgttgcagtatat

SEQ ID NO: 23508 - DNA, 63 bp, unidentified
  source 1..63: mol_type = unassigned DNA; note = methanogen bacteria
caaatcgtttcagtatttgcatacacaggtacaagtacaagattgactccacagcttattgca

SEQ ID NO: 23509 - DNA, 33 bp, unidentified
  source 1..33: mol_type = unassigned DNA; note = methanogen bacteria
gcaggacttggtccaggacctcttgctgcaatt

SEQ ID NO: 23510 - DNA, 48 bp, unidentified
  source 1..48: mol_type = unassigned DNA; note = methanogen bacteria
ttaaaggtaatgggtgcaagtgaggtgatgggatatgcaatggattat

SEQ ID NO: 23511 - DNA, 36 bp, unidentified
  source 1..36: mol_type = unassigned DNA; note = methanogen bacteria
actttggtttcaggttcaactgctgtagctgtttat

SEQ ID NO: 23512 - DNA, 63 bp, unidentified
  source 1..63: mol_type = unassigned DNA; note = methanogen bacteria
caagtggcatacatattctcatattcagaggcaagtgcacatcttgaaccattgattgcttca

SEQ ID NO: 23513 - DNA, 36 bp, unidentified
  source 1..36: mol_type = unassigned DNA; note = methanogen bacteria
ccatcaatagccagtgaattccatatgagcaatatt

SEQ ID NO: 23514 - DNA, 36 bp, unidentified
  source 1..36: mol_type = unassigned DNA; note = methanogen bacteria
taccatttgcaatatattaaaggatttgattcacaa

SEQ ID NO: 23515 - DNA, 54 bp, unidentified
  source 1..54: mol_type = unassigned DNA; note = methanogen bacteria
attatgggtgatgttcctattgttgagcaatattatccgttattgataagcagt

SEQ ID NO: 23516 - DNA, 36 bp, unidentified
  source 1..36: mol_type = unassigned DNA; note = methanogen bacteria
gtctccggtctcggaacagaagcgggatcggccgtg

SEQ ID NO: 23517 - DNA, 57 bp, unidentified
  source 1..57: mol_type = unassigned DNA; note = methanogen bacteria
aggccggcgataggcttcatgggggccgatgatgttgcaggcgaggcagaggcctac

SEQ ID NO: 23518 - DNA, 30 bp, unidentified
  source 1..30: mol_type = unassigned DNA; note = methanogen bacteria
atcatggccggcggcacaagcgccgtgatg

SEQ ID NO: 23519 - DNA, 66 bp, unidentified
  source 1..66: mol_type = unassigned DNA; note = methanogen bacteria
gaccctctgatgtctgtaatgaccatcgaggaatcgatgagggagatgcgcccggacttcgttaag

SEQ ID NO: 23520 - DNA, 33 bp, unidentified
  source 1..33: mol_type = unassigned DNA; note = methanogen bacteria
gtagccggactaggtcaagcagcaatagcagga

SEQ ID NO: 23521 - DNA, 48 bp, unidentified
  source 1..48: mol_type = unassigned DNA; note = methanogen bacteria
ttaaaaatatacggagcaagtgatcaatctttaattgaaggaataaaa

SEQ ID NO: 23522 - DNA, 39 bp, unidentified
  source 1..39: mol_type = unassigned DNA; note = methanogen bacteria
atttcaacatgtggtggagaatatggaatagctgcattt

SEQ ID NO: 23523 - DNA, 63 bp, unidentified
  source 1..63: mol_type = unassigned DNA; note = methanogen bacteria
ctttcattaatatttgcatacactcctgaaacagcatcattaataccagaaataactaatttt

SEQ ID NO: 23524 - DNA, 33 bp, unidentified
  source 1..33: mol_type = unassigned DNA; note = methanogen bacteria
gttgcaggacttggacaggcagctattgcggga

SEQ ID NO: 23525 - DNA, 54 bp, unidentified
  source 1..54: mol_type = unassigned DNA; note = methanogen bacteria
ccgttactcaaaacctatggtgcaagtggacaatcattagttgaggcaatgaag

SEQ ID NO: 23526 - DNA, 36 bp, unidentified
  source 1..36: mol_type = unassigned DNA; note = methanogen bacteria
tcatccatcggaggggagtatggtattgcggcattc

SEQ ID NO: 23527 - DNA, 63 bp, unidentified
  source 1..63: mol_type = unassigned DNA; note = methanogen bacteria
ttggccttgattttcgcatacactccagacactgcacctctaatcccagaaatcactaacttc

SEQ ID NO: 23528 - DNA, 39 bp, unidentified
  source 1..39: mol_type = unassigned DNA; note = methanogen bacteria
gcattaccaacgatagcccttgactttaatatgagtaat

SEQ ID NO: 23529 - DNA, 30 bp, unidentified
  source 1..30: mol_type = unassigned DNA; note = methanogen bacteria
cattttcaatatttgaatggtctaaatcct

SEQ ID NO: 23530 - DNA, 51 bp, unidentified
  source 1..51: mol_type = unassigned DNA; note = methanogen bacteria
atgggaaatgttcctattattccatcaaattatcatttactggttcaaagc

SEQ ID NO: 23531 - DNA, 75 bp, unidentified
  source 1..75: mol_type = unassigned DNA; note = methanogen bacteria
ggaagcaatccgaatttattctttacagaaactctgctacactctacaagctctatatctggattgggggacatt

SEQ ID NO: 23532 - DNA, 75 bp, unidentified; identical to SEQ ID NO: 21810
  source 1..75: mol_type = unassigned DNA; note = methanogen bacteria

SEQ ID NO: 23533 - DNA, 105 bp, unidentified; identical to SEQ ID NO: 21811
  source 1..105: mol_type = unassigned DNA; note = methanogen bacteria

SEQ ID NO: 23534 - DNA, 36 bp, unidentified
  source 1..36: mol_type = unassigned DNA; note = methanogen bacteria
atgtatgatatgaattcatttactttgatttttgac

SEQ ID NO: 23535 - DNA, 33 bp, unidentified
  source 1..33: mol_type = unassigned DNA; note = methanogen bacteria
ttggtaatgtctatgggtgacatgggtccgatt

SEQ ID NO: 23536 - DNA, 51 bp, unidentified
  source 1..51: mol_type = unassigned DNA; note = methanogen bacteria
tatatatttgatttatttggaattacagaaatgtcaactgaaatattctgg

SEQ ID NO: 23537 - DNA, 30 bp, unidentified
  source 1..30: mol_type = unassigned DNA; note = methanogen bacteria
tctggtttaggtgcaaatcagcttgcggct

SEQ ID NO: 23538 - DNA, 45 bp, unidentified
  source 1..45: mol_type = unassigned DNA; note = methanogen bacteria
ttgatctttataggtgctggaaacacgattagttacagtctggac

SEQ ID NO: 23539 - DNA, 36 bp, unidentified
  source 1..36: mol_type = unassigned DNA; note = methanogen bacteria
gcatatatcggaacaaccgatgcggttgcggtatat

SEQ ID NO: 23540 - DNA, 66 bp, unidentified
  source 1..66: mol_type = unassigned DNA; note = methanogen bacteria
cctcagattgtggctatatttacctatggaggtacaagtcaacgactaaacggaagcctaatcgca

SEQ ID NO: 23541 - DNA, 33 bp, unidentified
  source 1..33: mol_type = unassigned DNA; note = methanogen bacteria
gtggcaggtcttggatcaaatgcattagcagca

SEQ ID NO: 23542 - DNA, 54 bp, unidentified
  source 1..54: mol_type = unassigned DNA; note = methanogen bacteria
gaaattctattattaatgggtgctggtagctcattacaaatgggtttagattat

SEQ ID NO: 23543 - DNA, 36 bp, unidentified
  source 1..36: mol_type = unassigned DNA; note = methanogen bacteria
acattagttgcaggtacaactgcagtagctgtatat

SEQ ID NO: 23544 - DNA, 63 bp, unidentified
  source 1..63: mol_type = unassigned DNA; note = methanogen bacteria
tatatagcattattatttgcatatacggaccaaagtgcaatgttggctccattaatatcagag

SEQ ID NO: 23545 - DNA, 30 bp, unidentified
  source 1..30: mol_type = unassigned DNA; note = methanogen bacteria
tctggattaggaccaaatgcattatccgct

SEQ ID NO: 23546 - DNA, 48 bp, unidentified
  source 1..48: mol_type = unassigned DNA; note = methanogen bacteria
ttaatattcttaaatgtaggaggggctttaaactatgcattagatttc

SEQ ID NO: 23547 - DNA, 33 bp, unidentified
  source 1..33: mol_type = unassigned DNA; note = methanogen bacteria
ttacaagtttccagtactatgtcatttgcagtg

SEQ ID NO: 23548 - DNA, 63 bp, unidentified
  source 1..63: mol_type = unassigned DNA; note = methanogen bacteria
caaatagcatccttatttacttataattctacaaatgctatgttaagaccacaaatttcacaa

SEQ ID NO: 23549 - DNA, 30 bp, unidentified
  source 1..30: mol_type = unassigned DNA; note = methanogen bacteria
tcaggccttggatcacaaccattggcttct

SEQ ID NO: 23550 - DNA, 45 bp, unidentified
  source 1..45: mol_type = unassigned DNA; note = methanogen bacteria
ctctattttatgggggctagtagtgtaatgaaatatgctacagat

SEQ ID NO: 23551 - DNA, 30 bp, unidentified
  source 1..30: mol_type = unassigned DNA; note = methanogen bacteria
acattattatctgggcctgtagcagtagca

SEQ ID NO: 23552 - DNA, 66 bp, unidentified
  source 1..66: mol_type = unassigned DNA; note = methanogen bacteria
tatcaaatagcagatatctttgcatatactcaagcaacatctaacttaaaacctgctattgctgat

SEQ ID NO: 23553 - DNA, 30 bp, unidentified
  source 1..30: mol_type = unassigned DNA; note = methanogen bacteria
tcaggattaggacctaaggctctagcagct

SEQ ID NO: 23554 - DNA, 45 bp, unidentified
  source 1..45: mol_type = unassigned DNA; note = methanogen bacteria
ttaataatgattggtgcaaaagaggctttagattatgcattagat

SEQ ID NO: 23555 - DNA, 36 bp, unidentified
  source 1..36: mol_type = unassigned DNA; note = methanogen bacteria
gtagtattagggggacatgcagcagttgctgtgtat

SEQ ID NO: 23556 - DNA, 63 bp, unidentified
  source 1..63: mol_type = unassigned DNA; note = methanogen bacteria
aatatagcatctatatttacttattcatcagccagtgcctctttagccccaaaaatatctgca

SEQ ID NO: 23557 - DNA, 36 bp, unidentified
  source 1..36: mol_type = unassigned DNA; note = methanogen bacteria
ccatctatcgccagtgaatttcatatgagcaatatt

SEQ ID NO: 23558 - DNA, 36 bp, unidentified
  source 1..36: mol_type = unassigned DNA; note = methanogen bacteria
tatcatttacagtatattaaaggatttgattcacag

SEQ ID NO: 23559 - DNA, 54 bp, unidentified
  source 1..54: mol_type = unassigned DNA; note = methanogen bacteria
gtaatgggtgatgttccgattgttgagcaatattatcccttattaataagtagc

SEQ ID NO: 23560 - DNA, 33 bp, unidentified
  source 1..33: mol_type = unassigned DNA; note = methanogen bacteria
gttgcaggactaggagctgagcctttagccgca

SEQ ID NO: 23561 - DNA, 48 bp, unidentified
  source 1..48: mol_type = unassigned DNA; note = methanogen bacteria
cttaatatgatgggcgcaagcagtgtaataaactatgcaatggaatat

SEQ ID NO: 23562 - DNA, 33 bp, unidentified
  source 1..33: mol_type = unassigned DNA; note = methanogen bacteria
acaatagtatccggaccggtagcagtagcggta

SEQ ID NO: 23563 - DNA, 66 bp, unidentified
  source 1..66: mol_type = unassigned DNA; note = methanogen bacteria
aatcagattgcatttatattttcatactcagaaaacagcgcacaactcgaaccgttaatagccagt

SEQ ID NO: 23564 - DNA, 36 bp, unidentified
  source 1..36: mol_type = unassigned DNA; note = methanogen bacteria
gtttcaggtttgaatactgattcacttgcagcatta

SEQ ID NO: 23565 - DNA, 54 bp, unidentified
  source 1..54: mol_type = unassigned DNA; note = methanogen bacteria
gatttagtcatacttttaggtgcatcaagagttagttcatattgcttaaattat

SEQ ID NO: 23566 - DNA, 36 bp, unidentified
  source 1..36: mol_type = unassigned DNA; note = methanogen bacteria
ataacaacttcaggagttgatgaaatcgcatcattt

SEQ ID NO: 23567 - DNA, 66 bp, unidentified
  source 1..66: mol_type = unassigned DNA; note = methanogen bacteria
cacccactttgtgaactattcaatttccaaacaggaaacttaacattaataaatcgttcaagtgaa

SEQ ID NO: 23568 - DNA, 33 bp, unidentified
  source 1..33: mol_type = unassigned DNA; note = methanogen bacteria
gtagcaggattggggccagaacctttagctgct

SEQ ID NO: 23569 - DNA, 45 bp, unidentified
  source 1..45: mol_type = unassigned DNA; note = methanogen bacteria
cttaatatgatgggggcaagcagtgtaataaaatatgcaatggat

SEQ ID NO: 23570 - DNA, 33 bp, unidentified
  source 1..33: mol_type = unassigned DNA; note = methanogen bacteria
actattgtatcaggaccaatttcagtggccgta

SEQ ID NO: 23571 - DNA, 63 bp, unidentified
  source 1..63: mol_type = unassigned DNA; note = methanogen bacteria
cagattgcatttatattttcatattcggaaaacagtgcccagcttgaacctttaatagcaagt

SEQ ID NO: 23572 - DNA, 36 bp, unidentified
  source 1..36: mol_type = unassigned DNA; note = methanogen bacteria
ccattgatttctggtgaattgaatttaagcattgaa

SEQ ID NO: 23573 - DNA, 30 bp, unidentified
  source 1..30: mol_type = unassigned DNA; note = methanogen bacteria
catttacaatatgttctgggctatgactca

SEQ ID NO: 23574 - DNA, 51 bp, unidentified
  source 1..51: mol_type = unassigned DNA; note = methanogen bacteria
ataggaaatcaagaaataggtggaaataatatacctgaactgattttatct

SEQ ID NO: 23575 - DNA, 33 bp, unidentified
  source 1..33: mol_type = unassigned DNA; note = methanogen bacteria
gtctctggcttaggggctgatgcattagctggt

SEQ ID NO: 23576 - DNA, 54 bp, unidentified
  source 1..54: mol_type = unassigned DNA; note = methanogen bacteria
aaggacattctccttgcaatgggtgcaggggctacaattgattatgcaatggat

SEQ ID NO: 23577 - DNA, 36 bp, unidentified
  source 1..36: mol_type = unassigned DNA; note = methanogen bacteria
gttgttgtggcttcaactgatgctgtagcggtttat

SEQ ID NO: 23578 - DNA, 63 bp, unidentified
  source 1..63: mol_type = unassigned DNA; note = methanogen bacteria
caaatagtttcaatatttgcatatgccggcacaagtacaagattagagcctcagcttgttgcc

SEQ ID NO: 23579 - DNA, 33 bp, unidentified
  source 1..33: mol_type = unassigned DNA; note = methanogen bacteria
gtctccggtcttggagctgacgctcttgcaggt

SEQ ID NO: 23580 - DNA, 48 bp, unidentified
  source 1..48: mol_type = unassigned DNA; note = methanogen bacteria
ttgaatgtcatgggtgcaggccagactatcggctatgcgacagagtat

SEQ ID NO: 23581 - DNA, 36 bp, unidentified
  source 1..36: mol_type = unassigned DNA; note = methanogen bacteria
gtttatgtcggctcaactgattccgttgcggtttac

SEQ ID NO: 23582 - DNA, 69 bp, unidentified
  source 1..69: mol_type = unassigned DNA; note = methanogen bacteria
ggtgatatcgcatcgatttttgcatccagtggaagcagtgcaagaatcgctccggagcttactagcttc

SEQ ID NO: 23583 - DNA, 33 bp, unidentified
  source 1..33: mol_type = unassigned DNA; note = methanogen bacteria
gttgcaggtctgggtgctgatgcattagccgct

SEQ ID NO: 23584 - DNA, 48 bp, unidentified
  source 1..48: mol_type = unassigned DNA; note = methanogen bacteria
ttaaaagctatgggtgcaggagatacaatccaatatgcactggattat

SEQ ID NO: 23585 - DNA, 36 bp, unidentified
  source 1..36: mol_type = unassigned DNA; note = methanogen bacteria
gtaattgcatccggaacaacagctgtagcagtatat

SEQ ID NO: 23586 - DNA, 60 bp, unidentified
  source 1..60: mol_type = unassigned DNA; note = methanogen bacteria
attgcggcattgttttcatatacatcagctagtgtagaacttgctcctgaaattgcaaag

SEQ ID NO: 23587 - DNA, 33 bp, unidentified
  source 1..33: mol_type = unassigned DNA; note = methanogen bacteria
gtttcaggtcttggtgcagatgcacttgcaggg

SEQ ID NO: 23588 - DNA, 45 bp, unidentified
  source 1..45: mol_type = unassigned DNA; note = methanogen bacteria
ttaattttaatgggtgtcggccgaactattaattatgcaatggat

SEQ ID NO: 23589 - DNA, 36 bp, unidentified
  source 1..36: mol_type = unassigned DNA; note = methanogen bacteria
gcctatgtgggatctacagattctgttgctgtttat

SEQ ID NO: 23590 - DNA, 69 bp, unidentified
  source 1..69: mol_type = unassigned DNA; note = methanogen bacteria
ccggaaattacaacaattttttcatattctgcagctagtgtaagaatagctccagaattaactagcttt

SEQ ID NO: 23591 - DNA, 33 bp, unidentified
  source 1..33: mol_type = unassigned DNA; note = methanogen bacteria
gttgcaggattgggacaggctgcaattgcgggg

SEQ ID NO: 23592 - DNA, 57 bp, unidentified
  source 1..57: mol_type = unassigned DNA; note = methanogen bacteria
gagccgcttttaagggcatacggcgcatcaggccaggcactggttgaaggtttaaaa

SEQ ID NO: 23593 - DNA, 36 bp, unidentified
  source 1..36: mol_type = unassigned DNA; note = methanogen bacteria
tcagcaatcggtggggaatacggtattgcagcattc

SEQ ID NO: 23594 - DNA, 63 bp, unidentified
  source 1..63: mol_type = unassigned DNA; note = methanogen bacteria
ctcgcactgatatttgcatatactccggatactgctccactgattccggaaatcactaatttc

SEQ ID NO: 23595 - DNA, 36 bp, unidentified
  source 1..36: mol_type = unassigned DNA; note = methanogen bacteria
ccttcgattgcagcagaatttcatatgagtaatatt

SEQ ID NO: 23596 - DNA, 36 bp, unidentified
  source 1..36: mol_type = unassigned DNA; note = methanogen bacteria
tatcatctgcaatatattaaagggttggattcacaa

SEQ ID NO: 23597 - DNA, 54 bp, unidentified
  source 1..54: mol_type = unassigned DNA; note = methanogen bacteria
gtaatgggtgatgtacctattgttgaagagtattatcctttattgataagtagt

SEQ ID NO: 23598 - DNA, 30 bp, unidentified
  source 1..30: mol_type = unassigned DNA; note = methanogen bacteria
gcaggtcttggacctgaacctttggccgca

SEQ ID NO: 23599 - DNA, 51 bp, unidentified
  source 1..51: mol_type = unassigned DNA; note = methanogen bacteria
cttctaattatgatgggtgctgagagcgtaataggttatgctacagagtat

SEQ ID NO: 23600 - DNA, 30 bp, unidentified
  source 1..30: mol_type = unassigned DNA; note = methanogen bacteria
actatcgtatcagggccggttgccgtggct

SEQ ID NO: 23601 - DNA, 63 bp, unidentified
  source 1..63: mol_type = unassigned DNA; note = methanogen bacteria
cagatcgctttcatattttcttattctgaaaacagtgcacagcttgctcaggctattgccggt

SEQ ID NO: 23602 - DNA, 39 bp, unidentified
  source 1..39: mol_type = unassigned DNA; note = methanogen bacteria
gtctccggcctgggtgcggtatccagttctgcggtcgct

SEQ ID NO: 23603 - DNA, 54 bp, unidentified
  source 1..54: mol_type = unassigned DNA; note = methanogen bacteria
aggcccctgattctgattatgggtgcggagagcatcgtcgacgaatgcctcctc

SEQ ID NO: 23604 - DNA, 63 bp, unidentified
  source 1..63: mol_type = unassigned DNA; note = methanogen bacteria
gaacccctgatatccatcctgacctacgaggactccatgagggagctccgtccgcagttcgtc

SEQ ID NO: 23605 - DNA, 36 bp, unidentified
  source 1..36: mol_type = unassigned DNA; note = methanogen bacteria
ccttccattgcaaaggcatttggaatgaataatgta

SEQ ID NO: 23606 - DNA, 36 bp, unidentified
  source 1..36: mol_type = unassigned DNA; note = methanogen bacteria
taccatttacagtacatcatgggtatgaactcacag

SEQ ID NO: 23607 - DNA, 54 bp, unidentified
  source 1..54: mol_type = unassigned DNA; note = methanogen bacteria
atcatgggtaacgttgccatagagccacaatattaccctctcctgctacaaagt

SEQ ID NO: 23608 - DNA, 33 bp, unidentified
  source 1..33: mol_type = unassigned DNA; note = methanogen bacteria
gtagctggattaggatctgacccactagcagca

SEQ ID NO: 23609 - DNA, 54 bp, unidentified
  source 1..54: mol_type = unassigned DNA; note = methanogen bacteria
caaatactaacaataatgggagcaggaagtgtactaacctatgctaaaccctat

SEQ ID NO: 23610 - DNA, 33 bp, unidentified
  source 1..33: mol_type = unassigned DNA; note = methanogen bacteria
ataaccgtagctaatactacagttgtagcagca

SEQ ID NO: 23611 - DNA, 63 bp, unidentified
  source 1..63: mol_type = unassigned DNA; note = methanogen bacteria
caagttgctttcatattcagttattcttctaccagtgaaaatttaggaaatctgataactgaa

SEQ ID NO: 23612 - DNA, 33 bp, unidentified
  source 1..33: mol_type = unassigned DNA; note = methanogen bacteria
gtgtccggtttgggtgctgatgctcttgcagga

SEQ ID NO: 23613 - DNA, 48 bp, unidentified
  source 1..48: mol_type = unassigned DNA; note = methanogen bacteria
ttgaatgcgatgggtgtgggtcaaacaatttcttatgcaacagattat

SEQ ID NO: 23614 - DNA, 36 bp, unidentified
  source 1..36: mol_type = unassigned DNA; note = methanogen bacteria
gcattcctgtcatctacggattccgttgctgtttat

SEQ ID NO: 23615 - DNA, 69 bp, unidentified
  source 1..69: mol_type = unassigned DNA; note = methanogen bacteria
ggggatattgcttcggtttttgcttcaagcggttccagcgtaaggattttaggtgaattgaccagtttt

SEQ ID NO: 23616 - DNA, 36 bp, unidentified
  source 1..36: mol_type = unassigned DNA; note = methanogen bacteria
gtttcaggtctgggcgctgatgcccttgcaggagtg

SEQ ID NO: 23617 - DNA, 51 bp, unidentified
  source 1..51: mol_type = unassigned DNA; note = methanogen bacteria
atattgaattcaatgggtgcaggttcaacaatcggctatgcaaccgattat

SEQ ID NO: 23618 - DNA, 36 bp, unidentified
  source 1..36: mol_type = unassigned DNA; note = methanogen bacteria
gcatatgtcggatcaactgattcagtagcggtttat

SEQ ID NO: 23619 - DNA, 69 bp, unidentified
  source 1..69: mol_type = unassigned DNA; note = methanogen bacteria
ggagatattgctcatgtctttgcatcaagtggcagcagtgtcagaatagcttcagaacttacaagcttt

SEQ ID NO: 23620 - DNA, 36 bp, unidentified
  source 1..36: mol_type = unassigned DNA; note = methanogen bacteria
gtagcaggacttggtgcagaaccacttgctgcatta

SEQ ID NO: 23621 - DNA, 51 bp, unidentified
  source 1..51: mol_type = unassigned DNA; note = methanogen bacteria
atgctcgaacttatgggagcaagcagcgtaataaactatgctatggactat

SEQ ID NO: 23622 - DNA, 33 bp, unidentified
  source 1..33: mol_type = unassigned DNA; note = methanogen bacteria
acaatagtatccggaccgacatcagtagcagtt

SEQ ID NO: 23623 - DNA, 63 bp, unidentified
  source 1..63: mol_type = unassigned DNA; note = methanogen bacteria
caaatagcaattatcttctcatattcacaaagcagcgcagatttagcaccattgattgcaagt

SEQ ID NO: 23624 - DNA, 33 bp, unidentified
  source 1..33: mol_type = unassigned DNA; note = methanogen bacteria
gtttccggtcttggcgccgatgctcttgcaggt

SEQ ID NO: 23625 - DNA, 51 bp, unidentified
  source 1..51: mol_type = unassigned DNA; note = methanogen bacteria
attctaaatgcaatgggtgcaggtcaaactatcggttatgcgacggattat

SEQ ID NO: 23626 - DNA, 36 bp, unidentified
  source 1..36: mol_type = unassigned DNA; note = methanogen bacteria
gcctatgtgggctcgacagattctgttgctgtttat

SEQ ID NO: 23627 - DNA, 69 bp, unidentified
  source 1..69: mol_type = unassigned DNA; note = methanogen bacteria
ggggatattgcatcagttttcacatcatccggaagcagtgcaagaatcgcttctgaactgactgcattt

SEQ ID NO: 23628 - DNA, 36 bp, unidentified
  source 1..36: mol_type = unassigned DNA; note = methanogen bacteria
gtgtccggtttgggtgcggatgcgcttgctgggatt

SEQ ID NO: 23629 - DNA, 54 bp, unidentified
  source 1..54: mol_type = unassigned DNA; note = methanogen bacteria
cccattttgaatgccatgggtgctggttctacaatttattatgcaacagactat

SEQ ID NO: 23630 - DNA, 39 bp, unidentified
  source 1..39: mol_type = unassigned DNA; note = methanogen bacteria
gcttatgttggctcagcggattccgtagctgtttactca

SEQ ID NO: 23631 - DNA, 69 bp, unidentified
  source 1..69: mol_type = unassigned DNA; note = methanogen bacteria
ggggacattgcatcaatatttgcatcatccgggagcagtgtgaggattgcacctgagcttacaagcttc

SEQ ID NO: 23632 - DNA, 33 bp, unidentified
  source 1..33: mol_type = unassigned DNA; note = methanogen bacteria
tcaggattaaattctgatgccctggcggcatta

SEQ ID NO: 23633 - DNA, 54 bp, unidentified
  source 1..54: mol_type = unassigned DNA; note = methanogen bacteria
gacatagtaatattgttgggtgcaggcagtgtcagttcatactgtttaagttat

SEQ ID NO: 23634 - DNA, 36 bp, unidentified
  source 1..36: mol_type = unassigned DNA; note = methanogen bacteria
atggtaacggcaggtgttggtgaagtggcatccttt

SEQ ID NO: 23635 - DNA, 66 bp, unidentified
  source 1..66: mol_type = unassigned DNA; note = methanogen bacteria
tatccgatttgcgaaatttttaatgtttatacaactaatgtggcattggttgaacggtcttttgaa

SEQ ID NO: 23636 - DNA, 36 bp, unidentified
  source 1..36: mol_type = unassigned DNA; note = methanogen bacteria
ccaacaatttcatcagatttacatctatctgttaaa

SEQ ID NO: 23637 - DNA, 30 bp, unidentified
  source 1..30: mol_type = unassigned DNA; note = methanogen bacteria
ttacaacatgctataggatttgatgctcgt

SEQ ID NO: 23638 - DNA, 54 bp, unidentified
  source 1..54: mol_type = unassigned DNA; note = methanogen bacteria
gttctaggaagttcaaatgcccttgaaaagaatattccatcactaatattctca

SEQ ID NO: 23639 - DNA, 33 bp, unidentified
  source 1..33: mol_type = unassigned DNA; note = methanogen bacteria
attactggtttaggcataaatgcaattacaggt

SEQ ID NO: 23640 - DNA, 51 bp, unidentified
  source 1..51: mol_type = unassigned DNA; note = methanogen bacteria
ttagatatttatggaggatcttatcttataaataaagaggcaatttcatat

SEQ ID NO: 23641 - DNA, 33 bp, unidentified
  source 1..33: mol_type = unassigned DNA; note = methanogen bacteria
ttaattggtggtgaattaggtatatcaatatat

SEQ ID NO: 23642 - DNA, 66 bp, unidentified
  source 1..66: mol_type = unassigned DNA; note = methanogen bacteria
caaatagcttctatatttatgataactacaaattatccaccattaactgagggtatttctcagtat

SEQ ID NO: 23643 - DNA, 36 bp, unidentified
  source 1..36: mol_type = unassigned DNA; note = methanogen bacteria
gtttcaggccttggtgctgatgctcttgcaggtgtg

SEQ ID NO: 23644 - DNA, 51 bp, unidentified
  source 1..51: mol_type = unassigned DNA; note = methanogen bacteria
atattgaattcgatgggtgcgggctcaacaattggctatgcaactgattat

SEQ ID NO: 23645 - DNA, 36 bp, unidentified
  source 1..36: mol_type = unassigned DNA; note = methanogen bacteria
gcatatgtcgggtcaactgattcggtagcggtttat

SEQ ID NO: 23646 - DNA, 69 bp, unidentified
  source 1..69: mol_type = unassigned DNA; note = methanogen bacteria
ggtgatattgctcatgttttcgcatcaagcggcagcagtgtcagaatagctccggaacttacaagcttt

SEQ ID NO: 23647 - DNA, 33 bp, unidentified
  source 1..33: mol_type = unassigned DNA; note = methanogen bacteria
gtatcaggactcggtgcagatgctctagcggga

SEQ ID NO: 23648 - DNA, 54 bp, unidentified
  source 1..54: mol_type = unassigned DNA; note = methanogen bacteria
cccatattgaatgcaatgggtgctggccaaaccattaattatgcaactgattat

SEQ ID NO: 23649 - DNA, 36 bp, unidentified
  source 1..36: mol_type = unassigned DNA; note = methanogen bacteria
acatatgtcggttcaacagattctgttgcggtttac

SEQ ID NO: 23650 - DNA, 69 bp, unidentified
  source 1..69: mol_type = unassigned DNA; note = methanogen bacteria
ggagatattgcaggcattttcgcttcatccggaagcagtaccagaattctgcctgaattgacaagcttt

SEQ ID NO: 23651 - DNA, 30 bp, unidentified
  source 1..30: mol_type = unassigned DNA; note = methanogen bacteria
gcaggactcggaccggacccattggcagca

SEQ ID NO: 23652 - DNA, 48 bp, unidentified
  source 1..48: mol_type = unassigned DNA; note = methanogen bacteria
cttataatgatgggagcatcatcagtattaagctatgcaatggagtac

SEQ ID NO: 23653 - DNA, 33 bp, unidentified
  source 1..33: mol_type = unassigned DNA; note = methanogen bacteria
acaatcgtatccggacctacagcggttgcagta

SEQ ID NO: 23654 - DNA, 63 bp, unidentified
  source 1..63: mol_type = unassigned DNA; note = methanogen bacteria
cagattgcattcatattttcatattcggaaagcagtgctgagcttgcaccgcttatagcaagt

SEQ ID NO: 23655 - DNA, 36 bp, unidentified
  source 1..36: mol_type = unassigned DNA; note = methanogen bacteria
cccacaatatcatcagatttaagtttagatgttgaa

SEQ ID NO: 23656 - DNA, 54 bp, unidentified
  source 1..54: mol_type = unassigned DNA; note = methanogen bacteria
attttaggaacttcaaatactcttgaaagtaatattcctttgtttataacctca

SEQ ID NO: 23657 - DNA, 33 bp, unidentified
  source 1..33: mol_type = unassigned DNA; note = methanogen bacteria
gtgtcaggtcttggtgccgatgcccttgcaggt

SEQ ID NO: 23658 - DNA, 51 bp, unidentified
  source 1..51: mol_type = unassigned DNA; note = methanogen bacteria
attttaaaagcaatgggtgcaggtcagaccatcggctatgcaacagattat

SEQ ID NO: 23659 - DNA, 36 bp, unidentified
  source 1..36: mol_type = unassigned DNA; note = methanogen bacteria
gcatatgtcggctcaacggattctgtggcggtttat

SEQ ID NO: 23660 - DNA, 69 bp, unidentified
  source 1..69: mol_type = unassigned DNA; note = methanogen bacteria
ggagacattgcatcagtatttgcatcaagcggcagcagcgtcagaattgcttcagagctcaccagcttt

SEQ ID NO: 23661 - DNA, 36 bp, unidentified
  source 1..36: mol_type = unassigned DNA; note = methanogen bacteria
ccaacgattgcggctgaatttcatatgaacaatatt

SEQ ID NO: 23662 - DNA, 36 bp, unidentified
  source 1..36: mol_type = unassigned DNA; note = methanogen bacteria
tatcatttgcaatatattaaaggcatggattcacag

SEQ ID NO: 23663 - DNA, 54 bp, unidentified
  source 1..54: mol_type = unassigned DNA; note = methanogen bacteria
gtgatgggtgatgtgccgattgttgagcaatattatcctctattgataagcagc

SEQ ID NO: 23664 - DNA, 30 bp, unidentified
  source 1..30: mol_type = unassigned DNA; note = methanogen bacteria
gcgggactcggtgcagaaccgctggcagca

SEQ ID NO: 23665 - DNA, 48 bp, unidentified
  source 1..48: mol_type = unassigned DNA; note = methanogen bacteria
ctcaacatgatgggcgccggaagcgtaataggctatgcaatggattac

SEQ ID NO: 23666 - DNA, 33 bp, unidentified
  source 1..33: mol_type = unassigned DNA; note = methanogen bacteria
acaatagtatccggacctgtggcggtggccgtt

SEQ ID NO: 23667 - DNA, 63 bp, unidentified
  source 1..63: mol_type = unassigned DNA; note = methanogen bacteria
cagattgcattcatattctcatactccaaaagcagtgcggatttagctccgatgatagcaagt

SEQ ID NO: 23668 - DNA, 39 bp, unidentified
  source 1..39: mol_type = unassigned DNA; note = methanogen bacteria
tccgagaccttcgcggaccgctacggggtcagcccgtca

SEQ ID NO: 23669 - DNA, 45 bp, unidentified
  source 1..45: mol_type = unassigned DNA; note = methanogen bacteria
gggtcgttctacaccaacgtctatagttacggggagcacgacgcg

SEQ ID NO: 23670 - DNA, 33 bp, unidentified
  source 1..33: mol_type = unassigned DNA; note = methanogen bacteria
gtatcaggtcttggtgctgatgtacttgcgggt

SEQ ID NO: 23671 - DNA, 54 bp, unidentified
  source 1..54: mol_type = unassigned DNA; note = methanogen bacteria
cctattttgaatgttatgggtgcgggtcatactattgaatatgctatggattat

SEQ ID NO: 23672 - DNA, 36 bp, unidentified
  source 1..36: mol_type = unassigned DNA; note = methanogen bacteria
actgttgttggttcaacagattctgtagctgtttac

SEQ ID NO: 23673 - DNA, 69 bp, unidentified
  source 1..69: mol_type = unassigned DNA; note = methanogen bacteria
gcggatattacttcaatatttacatctgctggaagtagtgtaagaattgcttcccagttaactagtttt

SEQ ID NO: 23674 - DNA, 222 bp, unidentified
  source 1..222: mol_type = unassigned DNA; note = methanogen bacteria
cagattgtatccacggtcaatgatctcattaataatataaatgaccagatcgtcggcgtcctcgactgggcggacaagatcaccggaggccgcttccataggcagctgtcgagcgccaaggaagacaaaaacatcacaaatgccctgaattcagccctgacctacgtgcaggactacctccacctgggcagcaacgacgatgtcgtcaacaccctgaccagc

SEQ ID NO: 23675 - DNA, 33 bp, unidentified
  source 1..33: mol_type = unassigned DNA; note = methanogen bacteria
gtggcgggacttggaactgaaccactggctgca

SEQ ID NO: 23676 - DNA, 48 bp, unidentified
  source 1..48: mol_type = unassigned DNA; note = methanogen bacteria
ctcaagcttatgggagcggaaagcgtcttaagctatgcaatggactac

SEQ ID NO: 23677 - DNA, 33 bp, unidentified
  source 1..33: mol_type = unassigned DNA; note = methanogen bacteria
acgatagtgtccggacctacagcagtggccgtc

SEQ ID NO: 23678 - DNA, 63 bp, unidentified
  source 1..63: mol_type = unassigned DNA; note = methanogen bacteria
cagatagctttcatattctcatactctgaaggaagcgcacaactggagccattgattgcaagc

SEQ ID NO: 23679 - DNA, 33 bp, unidentified
  source 1..33: mol_type = unassigned DNA; note = methanogen bacteria
gtatccggtttgggtgccgatgcgctttcgggc

SEQ ID NO: 23680 - DNA, 54 bp, unidentified
  source 1..54: mol_type = unassigned DNA; note = methanogen bacteria
cctattttaaatgcgatgggtgcaggccaaactattggatatgcaaccgattat

SEQ ID NO: 23681 - DNA, 36 bp, unidentified
  source 1..36: mol_type = unassigned DNA; note = methanogen bacteria
acgtttgtcgggtcaacagattcggttgcggtatat

SEQ ID NO: 23682 - DNA, 69 bp, unidentified
  source 1..69: mol_type = unassigned DNA; note = methanogen bacteria
agcgatattgcatcgatattcacttcatcaccgggcagtgcaagaatagcttcggaactcaccagcttt

SEQ ID NO: 23683 - DNA, 33 bp, unidentified
  source 1..33: mol_type = unassigned DNA; note = methanogen bacteria
gtgtctggtctcggtgccgatgcacttgcaggt

SEQ ID NO: 23684 - DNA, 48 bp, unidentified
  source 1..48: mol_type = unassigned DNA; note = methanogen bacteria
ttaaatacaatgggtgcaggtaaaacaataggttatgctactgattat

SEQ ID NO: 23685 - DNA, 36 bp, unidentified
  source 1..36: mol_type = unassigned DNA; note = methanogen bacteria
gcttttgtcgggtcaactgattctgttgctgtttac

SEQ ID NO: 23686 - DNA, 69 bp, unidentified
  source 1..69: mol_type = unassigned DNA; note = methanogen bacteria
ggagatattacctcagtatttgcatctaacggcagtagtgtaagaattgcacctgagttaactagtttt

SEQ ID NO: 23687 - DNA, 36 bp, unidentified
  source 1..36: mol_type = unassigned DNA; note = methanogen bacteria
cctgatatagctattgaattaaatttttctgctgaa

SEQ ID NO: 23688 - DNA, 33 bp, unidentified
  source 1..33: mol_type = unassigned DNA; note = methanogen bacteria
ctgcatttgcaatatattttagatgttgaagag

SEQ ID NO: 23689 - DNA, 54 bp, unidentified
  source 1..54: mol_type = unassigned DNA; note = methanogen bacteria
attggggaccaccaattgggacctgaatatattgatcatttatttattcagtca

SEQ ID NO: 23690 - DNA, 30 bp, unidentified
  source 1..30: mol_type = unassigned DNA; note = methanogen bacteria
gcaggactaggtgcagaccctttggccgct

SEQ ID NO: 23691 - DNA, 48 bp, unidentified
  source 1..48: mol_type = unassigned DNA; note = methanogen bacteria
atgctcattatgatgggtgcaagcagtgtaattaactatgcaatggac

SEQ ID NO: 23692 - DNA, 33 bp, unidentified
  source 1..33: mol_type = unassigned DNA; note = methanogen bacteria
acaatagtgtcaggaccggtatcagtggccgtc

SEQ ID NO: 23693 - DNA, 63 bp, unidentified
  source 1..63: mol_type = unassigned DNA; note = methanogen bacteria
cagattgcacttgcattttcatattccgagtccagttcacaactggccccattaattgctaat

SEQ ID NO: 23694 - DNA, 33 bp, unidentified
  source 1..33: mol_type = unassigned DNA; note = methanogen bacteria
gtatctggccttggtgctgatgcacttgctggt

SEQ ID NO: 23695 - DNA, 51 bp, unidentified
  source 1..51: mol_type = unassigned DNA; note = methanogen bacteria
attatgaatgctatgggtgcaggacaaaccattggttatgctacagattat

SEQ ID NO: 23696 - DNA, 36 bp, unidentified
  source 1..36: mol_type = unassigned DNA; note = methanogen bacteria
acttttgttggttcaactgattcggttgccgtctat

SEQ ID NO: 23697 - DNA, 69 bp, unidentified
  source 1..69: mol_type = unassigned DNA; note = methanogen bacteria
ggagatattgcttctgtatttgcatctggtggcagtagttcaagaatcgcatcagaattaactagtttt

SEQ ID NO: 23698 - DNA, 81 bp, unidentified
  source 1..81: mol_type = unassigned DNA; note = methanogen bacteria
attccgttatacggtttgagtccaactgcagttgatcaattcgcccagttaagggctgttatggctggaagcttcgggtca

SEQ ID NO: 23699 - DNA, 30 bp, unidentified
  source 1..30: mol_type = unassigned DNA; note = methanogen bacteria
ggaagtttagtacctatcgaccaatcatat

SEQ ID NO: 23700 - DNA, 102 bp, unidentified
  source 1..102: mol_type = unassigned DNA; note = methanogen bacteria
ggaacatttaacttcttaccagcttctgcagcatctacatctgcttcaggtattcttcctgcatttatccaatccattttcggtggatctccaaacttcact

SEQ ID NO: 23701 - DNA, 108 bp, unidentified
  source 1..108: mol_type = unassigned DNA; note = methanogen bacteria
caaaaaataggtttcccaattttcggagaagtttctggaggaagagctatccgtggtcttgcattatggttaacaacccctaacagtttaagtatattgttcactaac

SEQ ID NO: 23702 - DNA, 30 bp, unidentified
  source 1..30: mol_type = unassigned DNA; note = methanogen bacteria
gcaggtttgggtccgcatccccttgctgcc

SEQ ID NO: 23703 - DNA, 45 bp, unidentified
  source 1..45: mol_type = unassigned DNA; note = methanogen bacteria
ctgcttttgatgggtgccggagaggttatcaatgaaacaatggcc

SEQ ID NO: 23704 - DNA, 36 bp, unidentified
  source 1..36: mol_type = unassigned DNA; note = methanogen bacteria
acaatactgtcaggaacaatagctgttgcggcatat

SEQ ID NO: 23705 - DNA, 60 bp, unidentified
  source 1..60: mol_type = unassigned DNA; note = methanogen bacteria
ctatcatttatattttcatactcatcagacagttccattttagctcctaaagtcgttgaa

SEQ ID NO: 23706 - DNA, 36 bp, unidentified
  source 1..36: mol_type = unassigned DNA; note = methanogen bacteria
cctgatatagctgctgaattaaatttttctgctgaa

SEQ ID NO: 23707 - DNA, 33 bp, unidentified; identical to SEQ ID NO: 21144
  source 1..33: mol_type = unassigned DNA; note = methanogen bacteria

SEQ ID NO: 23708 - DNA, 54 bp, unidentified
  source 1..54: mol_type = unassigned DNA; note = methanogen bacteria
attggaaatcagcaattgggacctgaccacattgaccatttgtttgttcagtca

SEQ ID NO: 23709 - DNA, 33 bp, unidentified
  source 1..33: mol_type = unassigned DNA; note = methanogen bacteria
gtagctggacttggaacagaacctctagccgca

SEQ ID NO: 23710 - DNA, 45 bp, unidentified
  source 1..45: mol_type = unassigned DNA; note = methanogen bacteria
cttgaattaatgggtgcggaaactgttttaaattatgcaatggat

SEQ ID NO: 23711 - DNA, 33 bp, unidentified
  source 1..33: mol_type = unassigned DNA; note = methanogen bacteria
acaatagtatccggacctatagcagtagccgtt

SEQ ID NO: 23712 - DNA, 63 bp, unidentified
  source 1..63: mol_type = unassigned DNA; note = methanogen bacteria
caaatagcatttattttctcatattcagaaggaagtgcacaattagaaccgttgatttcaagt

SEQ ID NO: 23713 - DNA, 165 bp, unidentified
  source 1..165: mol_type = unassigned DNA; note = methanogen bacteria
ataggaggcatcagcaatgcagtcgatacctatgcaccggaccattcgggagatggacagttccatcaggacatctatgattacttccaaaatgtaggtaatataaacgagattgaatcacagggaagtgctgttgtgactattgtggatgagatttttcaggat

SEQ ID NO: 23714 - DNA, 33 bp, unidentified
  source 1..33: mol_type = unassigned DNA; note = methanogen bacteria
gttgccggattgggtgcagatgcccttgccggt

SEQ ID NO: 23715 - DNA, 54 bp, unidentified
  source 1..54: mol_type = unassigned DNA; note = methanogen bacteria
cctgttttgataatcatgggtgctgctcacacactgccatatgctcatgagtat

SEQ ID NO: 23716 - DNA, 39 bp, unidentified
  source 1..39: mol_type = unassigned DNA; note = methanogen bacteria
ctagctattgtggcaggcactgatgctgttgctgtttat

SEQ ID NO: 23717 - DNA, 66 bp, unidentified
  source 1..66: mol_type = unassigned DNA; note = methanogen bacteria
cctcaaatagtttatgtattcagctattcagacaacagcgctcatctggcggctccaatggctgca

SEQ ID NO: 23718 - DNA, 30 bp, unidentified
  source 1..30: mol_type = unassigned DNA; note = methanogen bacteria
gcaggacttggacccgaccccctagcggca

SEQ ID NO: 23719 - DNA, 48 bp, unidentified
  source 1..48: mol_type = unassigned DNA; note = methanogen bacteria
ctgatgatgatgggtgcctcatcagtgattgactatgcaatggagtac

SEQ ID NO: 23720 - DNA, 33 bp, unidentified
  source 1..33: mol_type = unassigned DNA; note = methanogen bacteria
acaatagtgtccggaccgacatcagtggcagtg

SEQ ID NO: 23721 - DNA, 60 bp, unidentified
  source 1..60: mol_type = unassigned DNA; note = methanogen bacteria
atcgccctgatattctcatactcccaaagcagcgccaagctggcgccgttgattgcaggg

SEQ ID NO: 23722 - DNA, 81 bp, unidentified
  source 1..81: mol_type = unassigned DNA; note = methanogen bacteria
attccattatatggtttgagtccagctgcagttgatcaatttgcccaattaagagctgttatggcaggtagttttgggtca

SEQ ID NO: 23723 - DNA, 108 bp, unidentified
  source 1..108: mol_type = unassigned DNA; note = methanogen bacteria
actggtacattcaatttcttgccagcgtctgcagcatccacatctgcttcaggtattcttcctgcatttatacaatccattattggtggagctccaaacttccctata

SEQ ID NO: 23724 - DNA, 111 bp, unidentified
  source 1..111: mol_type = unassigned DNA; note = methanogen bacteria
ttccaaaaaattggtttccctattttaggtgaagtttccggtggaagacctatcagtggtcttgcattatggttaacaacccctaacagcttaagtgtattgtttaccaat

SEQ ID NO: 23725 - DNA, 30 bp, unidentified
  source 1..30: mol_type = unassigned DNA; note = methanogen bacteria
gcgggacttggggcagaaccactagctgca

SEQ ID NO: 23726 - DNA, 48 bp, unidentified
  source 1..48: mol_type = unassigned DNA; note = methanogen bacteria
cttgtcctaatgggcgcatcatcagtcttggattatgcaatggaatac

SEQ ID NO: 23727 - DNA, 33 bp, unidentified
  source 1..33: mol_type = unassigned DNA; note = methanogen bacteria
acaatagtgtccggaccgacctcggttgcagtt

SEQ ID NO: 23728 - DNA, 63 bp, unidentified
  source 1..63: mol_type = unassigned DNA; note = methanogen bacteria
caaatcgcattgatattttcatattcagaaaacagtgcaagattggcgccattgatagccggt

SEQ ID NO: 23729 - DNA, 33 bp, unidentified
  source 1..33: mol_type = unassigned DNA; note = methanogen bacteria
gtttcaggtcttggcgccgatgctcttgcaggt

SEQ ID NO: 23730 - DNA, 51 bp, unidentified
  source 1..51: mol_type = unassigned DNA; note = methanogen bacteria
atattgaatgctatgggtgcaggtcaaactataggctatgcaaccgattat

SEQ ID NO: 23731 - DNA, 36 bp, unidentified
  source 1..36: mol_type = unassigned DNA; note = methanogen bacteria
gcttatgtgggttcaacagattccgttgctgtttac

SEQ ID NO: 23732 - DNA, 69 bp, unidentified
  source 1..69: mol_type = unassigned DNA; note = methanogen bacteria
ggagatattgcttcggtgtttgcttcaacaggaagcagtgtcagaatagctccggaactgacagcattt

SEQ ID NO: 23733 - DNA, 36 bp, unidentified
  source 1..36: mol_type = unassigned DNA; note = methanogen bacteria
atatcaggtcttggagctgatgcacttgcaggtatt

SEQ ID NO: 23734 - DNA, 54 bp, unidentified
  source 1..54: mol_type = unassigned DNA; note = methanogen bacteria
acaatattgaaaacaatgggtgcgggtcagacaatttcttatgctatggattat

SEQ ID NO: 23735 - DNA, 36 bp, unidentified
  source 1..36: mol_type = unassigned DNA; note = methanogen bacteria
acttttgttggttcaactgattcggttgcagtatat

SEQ ID NO: 23736 - DNA, 69 bp, unidentified
  source 1..69: mol_type = unassigned DNA; note = methanogen bacteria
ggcgatattgcttcaatttttacatcaaccggcactagtgttagaattgcacctgaacttaccagtttt

SEQ ID NO: 23737 - DNA, 33 bp, unidentified
  source 1..33: mol_type = unassigned DNA; note = methanogen bacteria
ctggagccggccgctgtcggatactccttctcc

SEQ ID NO: 23738 - DNA, 57 bp, unidentified
  source 1..57: mol_type = unassigned DNA; note = methanogen bacteria
aggatcatcgtgcacggtgccgacagcgccctgggccccggcgatttcaccgacccc

SEQ ID NO: 23739 - DNA, 123 bp, unidentified
  source 1..123: mol_type = unassigned DNA; note = methanogen bacteria
gcgggattcacttccaacgcccacacccttcccgacgcatccctcgtgtcggggataacggcccccgacctcggattgttcgccaaggtcttcaccggcttcgagatgttcccggccaccctg

SEQ ID NO: 23740 - DNA, 30 bp, unidentified
  source 1..30: mol_type = unassigned DNA; note = methanogen bacteria
gcaggactcggaccggacccattggcggca

SEQ ID NO: 23741 - DNA, 48 bp, unidentified
  source 1..48: mol_type = unassigned DNA; note = methanogen bacteria
cttatgcttatgggagcatcatcagtaatcggttatgcaacagactat

SEQ ID NO: 23742 - DNA, 30 bp, unidentified
  source 1..30: mol_type = unassigned DNA; note = methanogen bacteria
acaatcgtatccggacctgtggccgtggca

SEQ ID NO: 23743 - DNA, 63 bp, unidentified
  source 1..63: mol_type = unassigned DNA; note = methanogen bacteria
cagatagcagtcatattctcatattccgaaagcagtgcaaaactcgcgccggcaatagctggg

SEQ ID NO: 23744 - DNA, 33 bp, unidentified
  source 1..33: mol_type = unassigned DNA; note = methanogen bacteria
gtgtctggtcttggtgccgatgctcttgcaggt

SEQ ID NO: 23745 - DNA, 54 bp, unidentified
  source 1..54: mol_type = unassigned DNA; note = methanogen bacteria
ccaatattgaatgtgatgggtgccggccaaactataaattatgccacagattat

SEQ ID NO: 23746 - DNA, 36 bp, unidentified
  source 1..36: mol_type = unassigned DNA; note = methanogen bacteria
gtttatgttggatcaactgattctgtggcggtatac

SEQ ID NO: 23747 - DNA, 69 bp, unidentified
  source 1..69: mol_type = unassigned DNA; note = methanogen bacteria
tcagatattgcatcggtctttacatcaagcggaagcagcgcaagaatatctgccgagcttacaagcttc

SEQ ID NO: 23748 - DNA, 30 bp, unidentified
  source 1..30: mol_type = unassigned DNA; note = methanogen bacteria
tcaggtgtgggaccgaatgcattggctgcc

SEQ ID NO: 23749 - DNA, 51 bp, unidentified
  source 1..51: mol_type = unassigned DNA; note = methanogen bacteria
atgtttttgatgatgggtgcagaaaaagtaattgaagagacaatggcatat

SEQ ID NO: 23750 - DNA, 33 bp, unidentified
  source 1..33: mol_type = unassigned DNA; note = methanogen bacteria
tcacttctgtcaggtactgttgctgttgcggca

SEQ ID NO: 23751 - DNA, 60 bp, unidentified
  source 1..60: mol_type = unassigned DNA; note = methanogen bacteria
ctatcttggatgttttcattttcacaaaacagttcgattttggctcctcctattgctgat

SEQ ID NO: 23752 - DNA, 36 bp, unidentified
  source 1..36: mol_type = unassigned DNA; note = methanogen bacteria
gtagcgggactcggtgcagaaccacttgccgcatta

SEQ ID NO: 23753 - DNA, 54 bp, unidentified
  source 1..54: mol_type = unassigned DNA; note = methanogen bacteria
cctatgttcaatatgatgggggcaagcagcgttataaactatgccatggactac

SEQ ID NO: 23754 - DNA, 33 bp, unidentified
  source 1..33: mol_type = unassigned DNA; note = methanogen bacteria
acaatcgtatccggacctgtatccgttgctgtt

SEQ ID NO: 23755 - DNA, 63 bp, unidentified
  source 1..63: mol_type = unassigned DNA; note = methanogen bacteria
caaattgcatttattttctcatattccgaaaacagtgcacagctggaacctctaatagcaagt

SEQ ID NO: 23756 - DNA, 33 bp, unidentified
  source 1..33: mol_type = unassigned DNA; note = methanogen bacteria
gtttcaggcctgggtgctgatgcgcttgcgggt

SEQ ID NO: 23757 - DNA, 48 bp, unidentified
  source 1..48: mol_type = unassigned DNA; note = methanogen bacteria
ttaaatgccatgggtgcaggtgagacaatcggctatgcaacaaactat

SEQ ID NO: 23758 - DNA, 36 bp, unidentified
  source 1..36: mol_type = unassigned DNA; note = methanogen bacteria
gcatatttaggttcaaccgattcagttgcggtttac

SEQ ID NO: 23759 - DNA, 69 bp, unidentified
  source 1..69: mol_type = unassigned DNA; note = methanogen bacteria
ggtgatattgctttaatttttgcttcaagcggaagcagtgtaaggattgcaggggaattgacaagtttt

SEQ ID NO: 23760 - DNA, 36 bp, unidentified
  source 1..36: mol_type = unassigned DNA; note = methanogen bacteria
ccttcaatagccagtgaatttcacatgagcaatatt

SEQ ID NO: 23761 - DNA, 36 bp, unidentified
  source 1..36: mol_type = unassigned DNA; note = methanogen bacteria
tatcacctgcagtatattaaagggttcgattcacag

SEQ ID NO: 23762 - DNA, 54 bp, unidentified
  source 1..54: mol_type = unassigned DNA; note = methanogen bacteria
gtaatgggtaatgttcctatcagtgaggaagtatatcctctattgattagcagc

SEQ ID NO: 23763 - DNA, 36 bp, unidentified
  source 1..36: mol_type = unassigned DNA; note = methanogen bacteria
gttgcaggcattaattctgatgctcttgcggcactc

SEQ ID NO: 23764 - DNA, 54 bp, unidentified
  source 1..54: mol_type = unassigned DNA; note = methanogen bacteria
gatttgattgttttattgggcgcatcaggtgtcatcacatattgcctaagctat

SEQ ID NO: 23765 - DNA, 33 bp, unidentified
  source 1..33: mol_type = unassigned DNA; note = methanogen bacteria
atgattactgcaggagtcaatgaggtcgcatca

SEQ ID NO: 23766 - DNA, 66 bp, unidentified
  source 1..66: mol_type = unassigned DNA; note = methanogen bacteria
catcagatatgtgggatgttcaattattcttcaggcaatttggaattggtcaacagagccgctgaa

SEQ ID NO: 23767 - DNA, 45 bp, unidentified
  source 1..45: mol_type = unassigned DNA; note = methanogen bacteria
acatataacatgttaacttttattccaaatccaactatagtacat

SEQ ID NO: 23768 - DNA, 33 bp, unidentified
  source 1..33: mol_type = unassigned DNA; note = methanogen bacteria
gtagcgggattaggtgcagaacccttggctgca

SEQ ID NO: 23769 - DNA, 57 bp, unidentified
  source 1..57: mol_type = unassigned DNA; note = methanogen bacteria
gaaccgttacttaaaataatgggtgctgtcagcgttattgattatgcaatggattac

SEQ ID NO: 23770 - DNA, 33 bp, unidentified
  source 1..33: mol_type = unassigned DNA; note = methanogen bacteria
actattgtttcaggacctgttgctgttgcagtt

SEQ ID NO: 23771 - DNA, 63 bp, unidentified
  source 1..63: mol_type = unassigned DNA; note = methanogen bacteria
cagattgcatttatattttcctattcggaaaacagtgcacagctggaacccctaatagccagt

SEQ ID NO: 23772 - DNA, 33 bp, unidentified
  source 1..33: mol_type = unassigned DNA; note = methanogen bacteria
gtttcggctcttggagctgatgcattggcggga

SEQ ID NO: 23773 - DNA, 51 bp, unidentified
  source 1..51: mol_type = unassigned DNA; note = methanogen bacteria
aaaatattgctgataatgggtgccggtcagacaattgattttgcaatggat

SEQ ID NO: 23774 - DNA, 36 bp, unidentified
  source 1..36: mol_type = unassigned DNA; note = methanogen bacteria
acatttatatctggtactgactctgttgctgtttat

SEQ ID NO: 23775 - DNA, 66 bp, unidentified
  source 1..66: mol_type = unassigned DNA; note = methanogen bacteria
cagattgcatcacttttttcatattctgccaacagtgcaagattatctggccagttaacagatttt

SEQ ID NO: 23776 - DNA, 33 bp, unidentified
  source 1..33: mol_type = unassigned DNA; note = methanogen bacteria
gtgtctggtcttggtgccgatgcgcttgcagga

SEQ ID NO: 23777 - DNA, 51 bp, unidentified
  source 1..51: mol_type = unassigned DNA; note = methanogen bacteria
attttaaatgcaatgggtgcaggtaaaacaattggttatgctacagattat

SEQ ID NO: 23778 - DNA, 36 bp, unidentified
  source 1..36: mol_type = unassigned DNA; note = methanogen bacteria
acttttgttggatcaactgattctgttgctgtttac

SEQ ID NO: 23779 - DNA, 69 bp, unidentified
  source 1..69: mol_type = unassigned DNA; note = methanogen bacteria
ggagatattgcatctgtatttgcatctagcggaagtagcgtgagaattgcaccagagttaaccagtttt

SEQ ID NO: 23780 - DNA, 30 bp, unidentified
  source 1..30: mol_type = unassigned DNA; note = methanogen bacteria
tccggtttgggtcctgacgctcttgcagca

SEQ ID NO: 23781 - DNA, 48 bp, unidentified
  source 1..48: mol_type = unassigned DNA; note = methanogen bacteria
cttttggtaatgggggccggagaaatcatagatttgacaatgacatat

SEQ ID NO: 23782 - DNA, 36 bp, unidentified
  source 1..36: mol_type = unassigned DNA; note = methanogen bacteria
acaatgctttcaggaacagttgccgttgcggcatat

SEQ ID NO: 23783 - DNA, 66 bp, unidentified
  source 1..66: mol_type = unassigned DNA; note = methanogen bacteria
gagccgttgtcatatattttctcatactctgcagatgcggctgtactgtccgcaagggttatcgat

SEQ ID NO: 23784 - DNA, 36 bp, unidentified
  source 1..36: mol_type = unassigned DNA; note = methanogen bacteria
gtggcaggcataaatgccaatgctcttgcagcttta

SEQ ID NO: 23785 - DNA, 54 bp, unidentified
  source 1..54: mol_type = unassigned DNA; note = methanogen bacteria
gatttagtaatattattgggggcaggtagtgtcagcacatattgcctaagttat

SEQ ID NO: 23786 - DNA, 36 bp, unidentified
  source 1..36: mol_type = unassigned DNA; note = methanogen bacteria
atcgtaactgcaggtgttgcggaagtggccgcattc

SEQ ID NO: 23787 - DNA, 66 bp, unidentified
  source 1..66: mol_type = unassigned DNA; note = methanogen bacteria
tatcctctttgcgatttattcaacttccaggcgggcaatcccgcattggtaaaccgatctgccgaa

SEQ ID NO: 23788 - DNA, 33 bp, unidentified
  source 1..33: mol_type = unassigned DNA; note = methanogen bacteria
gtagccggacttggtgcagaaccgctggctgca

SEQ ID NO: 23789 - DNA, 54 bp, unidentified
  source 1..54: mol_type = unassigned DNA; note = methanogen bacteria
ccgttgctgatttcaatgggggcagcatctgttatagactatgcaatggaatat

SEQ ID NO: 23790 - DNA, 33 bp, unidentified
  source 1..33: mol_type = unassigned DNA; note = methanogen bacteria
acaatcgtgtccggacctgtagcggtggccgta

SEQ ID NO: 23791 - DNA, 63 bp, unidentified
  source 1..63: mol_type = unassigned DNA; note = methanogen bacteria
cagattgcatttatcttctcatattcagaaaacagtgcagatttggcgcccagaatagcaagc

SEQ ID NO: 23792 - DNA, 33 bp, unidentified
  source 1..33: mol_type = unassigned DNA; note = methanogen bacteria
gtgtctggtttgggtgcggatgcacttgcaggc

SEQ ID NO: 23793 - DNA, 51 bp, unidentified
  source 1..51: mol_type = unassigned DNA; note = methanogen bacteria
attttgaacgccatgggtgcaggctctacaattggttatgcaactgactat

SEQ ID NO: 23794 - DNA, 36 bp, unidentified
  source 1..36: mol_type = unassigned DNA; note = methanogen bacteria
gcttatgtcggctcaacggattctgtagcggtttat

SEQ ID NO: 23795 - DNA, 69 bp, unidentified
  source 1..69: mol_type = unassigned DNA; note = methanogen bacteria
ggagaccttgcatcaatatttgcatcatccggaagcagtgtcaggattgcacatgagcttacaggattc

SEQ ID NO: 23796 - DNA, 48 bp, unidentified
  source 1..48: mol_type = unassigned DNA; note = methanogen bacteria
ccaagtgaagcaatacgctttgttgataataaggcttttagctgtatg

SEQ ID NO: 23797 - DNA, 129 bp, unidentified
  source 1..129: mol_type = unassigned DNA; note = methanogen bacteria
ggaagatgtgcttactactgtcctaccagatcaattgaagtgattatccaggatgaaggatactgtgtaggctgtaaggtatgtgaagatgtctgtcctacaggtgcattgaaagacggcgagtatgat

SEQ ID NO: 23798 - DNA, 78 bp, unidentified
  source 1..78: mol_type = unassigned DNA; note = methanogen bacteria
gatgactttaagattaaaagaagcattaaggatgacaccttgtattcaaatgttgaaggaagcattgtaagttgcctc

SEQ ID NO: 23799 - DNA, 126 bp, unidentified
  source 1..126: mol_type = unassigned DNA; note = methanogen bacteria
cctgtttcatcattaacagaaagtgaagacaataagctctttggatactgcgtatcctgtggaaaatgtgtaaatgaatgtaaggaagatgcaagaaacttccaagtaatctcttgggatggagaa

SEQ ID NO: 23800 - DNA, 63 bp, unidentified
  source 1..63: mol_type = unassigned DNA; note = methanogen bacteria
gaactttgtccagaagatgcaataacccttcaaagaggggcaatcaatgttgatttggataaa

SEQ ID NO: 23801 - DNA, 51 bp, unidentified
  source 1..51: mol_type = unassigned DNA; note = methanogen bacteria
attcactgtcctaaggacgcaattccaaaaacaacaagcgtcaagtatgaa

SEQ ID NO: 23802 - DNA, 33 bp, unidentified
  source 1..33: mol_type = unassigned DNA; note = methanogen bacteria
gtatctggacttggtgccgatgcgcttgcaggt

SEQ ID NO: 23803 - DNA, 48 bp, unidentified
  source 1..48: mol_type = unassigned DNA; note = methanogen bacteria
ttgaatgcaatgggtgcaggccaaactatcggttatgctgcagattat

SEQ ID NO: 23804 - DNA, 36 bp, unidentified
  source 1..36: mol_type = unassigned DNA; note = methanogen bacteria
acttttgtaggctcaacagattccgttgccgtttat

SEQ ID NO: 23805 - DNA, 69 bp, unidentified
  source 1..69: mol_type = unassigned DNA; note = methanogen bacteria
ggagatattgcatcagtatttgcatccggcggaagcagtgtcagattatctcaggaattatcttctttt

SEQ ID NO: 23806 - DNA, 36 bp, unidentified
  source 1..36: mol_type = unassigned DNA; note = methanogen bacteria
gtctcaggcatcaatgcagatgctcttgccgattta

SEQ ID NO: 23807 - DNA, 54 bp, unidentified
  source 1..54: mol_type = unassigned DNA; note = methanogen bacteria
gatttggtgatattgttgggtgcaggtagcgtcagcacatattgcctaagttat

SEQ ID NO: 23808 - DNA, 36 bp, unidentified
  source 1..36: mol_type = unassigned DNA; note = methanogen bacteria
atagtgactgcaggagttgctgaagtggctgcattc

SEQ ID NO: 23809 - DNA, 66 bp, unidentified
  source 1..66: mol_type = unassigned DNA; note = methanogen bacteria
taccctctttgcgatttattcaacattcaggcaggcagtcccgcattggtgagccgttctgcggaa

SEQ ID NO: 23810 - DNA, 39 bp, unidentified
  source 1..39: mol_type = unassigned DNA; note = methanogen bacteria
ccttcaatgtcttcgaatttgcatttggattttgaaatg

SEQ ID NO: 23811 - DNA, 33 bp, unidentified
  source 1..33: mol_type = unassigned DNA; note = methanogen bacteria
tatttgcagtatgttttgggatatgatagtcga

SEQ ID NO: 23812 - DNA, 51 bp, unidentified
  source 1..51: mol_type = unassigned DNA; note = methanogen bacteria
ttcatgggatctgccaacacttacgatggcaatgtttctgcattcctactg

SEQ ID NO: 23813 - DNA, 36 bp, unidentified
  source 1..36: mol_type = unassigned DNA; note = methanogen bacteria
gtgtccggccttggggccgatgcgcttgcaggagtt

SEQ ID NO: 23814 - DNA, 54 bp, unidentified
  source 1..54: mol_type = unassigned DNA; note = methanogen bacteria
cctatacttgagattatgggtgcgggccaaaccattggctatgcaacagattat

SEQ ID NO: 23815 - DNA, 36 bp, unidentified
  source 1..36: mol_type = unassigned DNA; note = methanogen bacteria
gcttttgtcggctcaaccgattcagttgcggtttat

SEQ ID NO: 23816 - DNA, 69 bp, unidentified
  source 1..69: mol_type = unassigned DNA; note = methanogen bacteria
gcagacatcgcgtccatttttgcatccagcggcagcagtgtccggattgccggtgaattaaccgctttt

SEQ ID NO: 23817 - DNA, 33 bp, unidentified
  source 1..33: mol_type = unassigned DNA; note = methanogen bacteria
tcaggaatcaatgctgatgctcttgccgcactg

SEQ ID NO: 23818 - DNA, 57 bp, unidentified
  source 1..57: mol_type = unassigned DNA; note = methanogen bacteria
gaggatattgttgttcttttgggagcatctgatgtcaggtcatattgcctaagctac

SEQ ID NO: 23819 - DNA, 36 bp, unidentified
  source 1..36: mol_type = unassigned DNA; note = methanogen bacteria
attttaactgcaggggtaggtgaggttgcggctttt

SEQ ID NO: 23820 - DNA, 66 bp, unidentified
  source 1..66: mol_type = unassigned DNA; note = methanogen bacteria
tatcctttatgtgaaatatttaatttccaggcgggaaaccctgcacttgttcaccgctcagctgaa

SEQ ID NO: 23821 - DNA, 39 bp, unidentified
  source 1..39: mol_type = unassigned DNA; note = methanogen bacteria
attccgtcaattgcagctgaatacggaatgagcaatatt

SEQ ID NO: 23822 - DNA, 36 bp, unidentified
  source 1..36: mol_type = unassigned DNA; note = methanogen bacteria
tatcatctgcagtacatcaagggatttgattcacag

SEQ ID NO: 23823 - DNA, 54 bp, unidentified
  source 1..54: mol_type = unassigned DNA; note = methanogen bacteria
gtgatgggtaacgtgcctatgattgagcaatactatcctctgctgataagcagc

SEQ ID NO: 23824 - DNA, 33 bp, unidentified
  source 1..33: mol_type = unassigned DNA; note = methanogen bacteria
gttgcaggattaggtacaatatctattgctggt

SEQ ID NO: 23825 - DNA, 48 bp, unidentified
  source 1..48: mol_type = unassigned DNA; note = methanogen bacteria
ttaaatctattcactgcttcacctgaggtctataaagaagctattgat

SEQ ID NO: 23826 - DNA, 36 bp, unidentified
  source 1..36: mol_type = unassigned DNA; note = methanogen bacteria
aatattgttggtggagatttgggcgtcagtatctat

SEQ ID NO: 23827 - DNA, 66 bp, unidentified
  source 1..66: mol_type = unassigned DNA; note = methanogen bacteria
caaatatcttatgtatttttattaactaatgatgatccggccttacttcagggaatttcaacattt

SEQ ID NO: 23828 - DNA, 33 bp, unidentified
  source 1..33: mol_type = unassigned DNA; note = methanogen bacteria
gttgcgggtttaggtgcggatgctcttgcagca

SEQ ID NO: 23829 - DNA, 48 bp, unidentified
  source 1..48: mol_type = unassigned DNA; note = methanogen bacteria
ttaattgctatgggtgcaggttctactttaaaatattctcttgattat

SEQ ID NO: 23830 - DNA, 36 bp, unidentified
  source 1..36: mol_type = unassigned DNA; note = methanogen bacteria
gtggctgtgtccggaacaacggctgtagcagtgtat

SEQ ID NO: 23831 - DNA, 69 bp, unidentified
  source 1..69: mol_type = unassigned DNA; note = methanogen bacteria
aatcagattgcatcagtattttcctattctgcttccagtgcaggaatggcttctgatattgcaacagca

SEQ ID NO: 23832 - DNA, 36 bp, unidentified
  source 1..36: mol_type = unassigned DNA; note = methanogen bacteria
ccaacaatagccaatgaatttcatatgagcaatatt

SEQ ID NO: 23833 - DNA, 36 bp, unidentified
  source 1..36: mol_type = unassigned DNA; note = methanogen bacteria
tatcatttacagtacattaaaggatttgattcacaa

SEQ ID NO: 23834 - DNA, 54 bp, unidentified
  source 1..54: mol_type = unassigned DNA; note = methanogen bacteria
gtaatgggtaatgttcctattgtcgagcaatattatcctttattgataaacagt

SEQ ID NO: 23835 - DNA, 36 bp, unidentified
  source 1..36: mol_type = unassigned DNA; note = methanogen bacteria
tgctccgggctgggaggggaggcgctggccgccctg

SEQ ID NO: 23836 - DNA, 57 bp, unidentified
  source 1..57: mol_type = unassigned DNA; note = methanogen bacteria
cccgtggtggattggatgggcagcggcggaagcgtcagcggggaggcctgggagtac

SEQ ID NO: 23837 - DNA, 33 bp, unidentified
  source 1..33: mol_type = unassigned DNA; note = methanogen bacteria
gtgaaggtcggaggcccggacgggtccgccctc

SEQ ID NO: 23838 - DNA, 57 bp, unidentified
  source 1..57: mol_type = unassigned DNA; note = methanogen bacteria
ttcgcggccgtgttcgcatccggggactcggcgtacctgagggcggacctggcccgc

SEQ ID NO: 23839 - DNA, 36 bp, unidentified
  source 1..36: mol_type = unassigned DNA; note = methanogen bacteria
cccacaatagcatcggattttcatttaacggctgaa

SEQ ID NO: 23840 - DNA, 51 bp, unidentified
  source 1..51: mol_type = unassigned DNA; note = methanogen bacteria
ttaggaacctcgaataccctggagggcaatcctcttttgtttttagcctca

SEQ ID NO: 23841 - DNA, 33 bp, unidentified
  source 1..33: mol_type = unassigned DNA; note = methanogen bacteria
gttgcaggtttaggtacaaccgctattgcaggt

SEQ ID NO: 23842 - DNA, 48 bp, unidentified
  source 1..48: mol_type = unassigned DNA; note = methanogen bacteria
ttaaataaatttgataccacccctaaagtctatggtgcagctattgac

SEQ ID NO: 23843 - DNA, 36 bp, unidentified
  source 1..36: mol_type = unassigned DNA; note = methanogen bacteria
aatattcttggtggggatcttgctatcagtatatat

SEQ ID NO: 23844 - DNA, 66 bp, unidentified
  source 1..66: mol_type = unassigned DNA; note = methanogen bacteria
caaatagcttatgtgtttttattagctaacaatgatcctgcattgattcaaggaatttcaaccttt

SEQ ID NO: 23845 - DNA, 30 bp, unidentified
  source 1..30: mol_type = unassigned DNA; note = methanogen bacteria
gttggcctaggacaagccgcaatcgcaggc

SEQ ID NO: 23846 - DNA, 51 bp, unidentified
  source 1..51: mol_type = unassigned DNA; note = methanogen bacteria
ctgattcttttaggtgcaagcggtgcatctttaaatgaaggtctgaaatat

SEQ ID NO: 23847 - DNA, 30 bp, unidentified
  source 1..30: mol_type = unassigned DNA; note = methanogen bacteria
ataattggcggtgattatggagttgcggta

SEQ ID NO: 23848 - DNA, 60 bp, unidentified
  source 1..60: mol_type = unassigned DNA; note = methanogen bacteria
ctggcaagtatacttgcattcactcctgaaacttcacatttgattggaggaattgcaggt

SEQ ID NO: 23849 - DNA, 30 bp, unidentified
  source 1..30: mol_type = unassigned DNA; note = methanogen bacteria
gcgggattaggtcctgaatctctagctgca

SEQ ID NO: 23850 - DNA, 45 bp, unidentified
  source 1..45: mol_type = unassigned DNA; note = methanogen bacteria
cttttgatgatgggcgctggtgaagtgatagattatgccttatct

SEQ ID NO: 23851 - DNA, 36 bp, unidentified
  source 1..36: mol_type = unassigned DNA; note = methanogen bacteria
actttattgtccggaactgtagctgtggcggcctat

SEQ ID NO: 23852 - DNA, 66 bp, unidentified
  source 1..66: mol_type = unassigned DNA; note = methanogen bacteria
gagccgttgtcatttatattttcatattctgcaagcagtgccgtactgtccgatagggttgttgaa

SEQ ID NO: 23853 - DNA, 30 bp, unidentified
  source 1..30: mol_type = unassigned DNA; note = methanogen bacteria
attgacggcctgggcacatccgccatcatc

SEQ ID NO: 23854 - DNA, 54 bp, unidentified
  source 1..54: mol_type = unassigned DNA; note = methanogen bacteria
ccgatctgcctaatggcaggtattcctgaatacaccaacatgatatttgcttat

SEQ ID NO: 23855 - DNA, 33 bp, unidentified
  source 1..33: mol_type = unassigned DNA; note = methanogen bacteria
cttcacatttatgcctcacctattgccgctttt

SEQ ID NO: 23856 - DNA, 54 bp, unidentified
  source 1..54: mol_type = unassigned DNA; note = methanogen bacteria
aatccaatcataagcatcttttctactgaatatgttgtcatgaacgaagtgaga

SEQ ID NO: 23857 - DNA, 36 bp, unidentified
  source 1..36: mol_type = unassigned DNA; note = methanogen bacteria
ccgacaatcgcaacagaatttcacatgagcaatatc

SEQ ID NO: 23858 - DNA, 36 bp, unidentified
  source 1..36: mol_type = unassigned DNA; note = methanogen bacteria
tatcaccttcaatacatcgatggattcgattcacag

SEQ ID NO: 23859 - DNA, 54 bp, unidentified
  source 1..54: mol_type = unassigned DNA; note = methanogen bacteria
gtaatgggaaacgtacctatagttgaggagtattatccgctgctgatgagcagc

SEQ ID NO: 23860 - DNA, 36 bp, unidentified
  source 1..36: mol_type = unassigned DNA; note = methanogen bacteria
ccaagcattgcggctgaatttcacatgagcaatata

SEQ ID NO: 23861 - DNA, 36 bp, unidentified
  source 1..36: mol_type = unassigned DNA; note = methanogen bacteria
tatcacttgcagtacattaagggattcgattcacag

SEQ ID NO: 23862 - DNA, 54 bp, unidentified
  source 1..54: mol_type = unassigned DNA; note = methanogen bacteria
gttatgggtgacgttccgattattgagcaatactatcctatgctggttcaaagc

SEQ ID NO: 23863 - DNA, 153 bp, unidentified
  source 1..153: mol_type = unassigned DNA; note = methanogen bacteria
gactgggcgtccgagaccgtcaccgtgagcagcagcctgctggggaacgcgaccagcgccgattccggcacaggcctcgatgtcgccgggaagaagttcttcaccgagatcgacagcaacgggaacaccgtcgccgtcgacgactggcacgtc

SEQ ID NO: 23864 - DNA, 69 bp, unidentified
  source 1..69: mol_type = unassigned DNA; note = methanogen bacteria
tgggacaggttcggcaccaccgagtacagcatcctcggcgtgaagaccgcgtacgatgtctcccccgag

SEQ ID NO: 23865 - DNA, 33 bp, unidentified
  source 1..33: mol_type = unassigned DNA; note = methanogen bacteria
gttgcaggacttggagctgatgctcttgcagct

SEQ ID NO: 23866 - DNA, 48 bp, unidentified
  source 1..48: mol_type = unassigned DNA; note = methanogen bacteria
ttggaacttatgggtgcaggcagcactatagattacgctttaaattac

SEQ ID NO: 23867 - DNA, 36 bp, unidentified
  source 1..36: mol_type = unassigned DNA; note = methanogen bacteria
gttactgttgcaggcacaaccgctgttgctgtttat

SEQ ID NO: 23868 - DNA, 63 bp, unidentified
  source 1..63: mol_type = unassigned DNA; note = methanogen bacteria
cagattgctgcaatgttttcatacacttcagcaagtgcggaactggctcctcaaatcgcaacg

SEQ ID NO: 23869 - DNA, 36 bp, unidentified
  source 1..36: mol_type = unassigned DNA; note = methanogen bacteria
gtattcttttccgggaccgaggacctcagcaacgtc

SEQ ID NO: 23870 - DNA, 30 bp, unidentified
  source 1..30: mol_type = unassigned DNA; note = methanogen bacteria
gtctgggacggcgaccagactcttgtcacc

SEQ ID NO: 23871 - DNA, 51 bp, unidentified
  source 1..51: mol_type = unassigned DNA; note = methanogen bacteria
accggattattcttcgtgatcgacagcaacgcattgtacgtccgttccgac

SEQ ID NO: 23872 - DNA, 33 bp, unidentified
  source 1..33: mol_type = unassigned DNA; note = methanogen bacteria
gttgcaggattaggttcagatgcacttgcagcc

SEQ ID NO: 23873 - DNA, 54 bp, unidentified
  source 1..54: mol_type = unassigned DNA; note = methanogen bacteria
cagttacttgtgatgatgggtgccggagacactatacagtatgctcttgactac

SEQ ID NO: 23874 - DNA, 36 bp, unidentified
  source 1..36: mol_type = unassigned DNA; note = methanogen bacteria
gtatgggcatccggaactgatgcagttgcagtttat

SEQ ID NO: 23875 - DNA, 66 bp, unidentified
  source 1..66: mol_type = unassigned DNA; note = methanogen bacteria
caaattgcaactttattttcatacacctcatccagtgcggctctggcaccggaaattgcaactgca

SEQ ID NO: 23876 - DNA, 33 bp, unidentified
  source 1..33: mol_type = unassigned DNA; note = methanogen bacteria
gttgcaggaatcggtgctgatgctcttgctgct

SEQ ID NO: 23877 - DNA, 48 bp, unidentified
  source 1..48: mol_type = unassigned DNA; note = methanogen bacteria
ctggaaatgatgggtgcgggagattccttgaagtatgcacttgattat

SEQ ID NO: 23878 - DNA, 36 bp, unidentified
  source 1..36: mol_type = unassigned DNA; note = methanogen bacteria
gttgttgtggcaggaactactgcagtggctgtttat

SEQ ID NO: 23879 - DNA, 63 bp, unidentified
  source 1..63: mol_type = unassigned DNA; note = methanogen bacteria
cagattgctgcagtgttttcatatacctcagccagttcggatttgggtcctcaaattgcaacg

SEQ ID NO: 23880 - DNA, 30 bp, unidentified
  source 1..30: mol_type = unassigned DNA; note = methanogen bacteria
gcgggattaggtcctgatgctcttgcagct

SEQ ID NO: 23881 - DNA, 48 bp, unidentified
  source 1..48: mol_type = unassigned DNA; note = methanogen bacteria
cttctgactatgggagccggagacatcatagatgagacaatgacatat

SEQ ID NO: 23882 - DNA, 36 bp, unidentified
  source 1..36: mol_type = unassigned DNA; note = methanogen bacteria
acaatgctttcaggaacaattgccgttgccgcatac

SEQ ID NO: 23883 - DNA, 66 bp, unidentified
  source 1..66: mol_type = unassigned DNA; note = methanogen bacteria
gagccattatcatacatattttcctattctgcaaatgctgcaatattgtccgctagggttgtagaa

SEQ ID NO: 23884 - DNA, 51 bp, unidentified
  source 1..51: mol_type = unassigned DNA; note = methanogen bacteria
cttaaaagctacggtgcaacaggacaaacattaaacgaggccattgcatat

SEQ ID NO: 23885 - DNA, 33 bp, unidentified
  source 1..33: mol_type = unassigned DNA; note = methanogen bacteria
tccctggtcggaggggactacggaatagcaaca

SEQ ID NO: 23886 - DNA, 66 bp, unidentified
  source 1..66: mol_type = unassigned DNA; note = methanogen bacteria
cctctcgccacaatatttgcatatactcccgaaactgcaaatctggttcctggaattgcacaatac

SEQ ID NO: 23887 - DNA, 90 bp, unidentified
  source 1..90: mol_type = unassigned DNA; note = methanogen bacteria
aatagtttcacattcaattggggaagtgaccctgcagcttattttgtacacaatgttggaggaagcgataatctttcaaacatatggaat

SEQ ID NO: 23888 - DNA, 90 bp, unidentified
  source 1..90: mol_type = unassigned DNA; note = methanogen bacteria
atttcacataaatccattaatcaaggtattggagtggcctctaagattttaatacctaatcctaattggaatgctcttttagatgttaac

SEQ ID NO: 23889 - DNA, 105 bp, unidentified; identical to SEQ ID NO: 22192
  source 1..105: mol_type = unassigned DNA; note = methanogen bacteria

SEQ ID NO: 23890 - DNA, 78 bp, unidentified
  source 1..78: mol_type = unassigned DNA; note = methanogen bacteria
ccattatatggtttaagtgctgctgctgtagatcaattcgctgctttaagggcagttatggctggaaattttggttca

SEQ ID NO: 23891 - DNA, 96 bp, unidentified
  source 1..96: mol_type = unassigned DNA; note = methanogen bacteria
ggtacatttaatttcttccctggtcaagatggtataatgaccggtgcaattcctggatttatccaaactattactatgggatctgctaatttctca

SEQ ID NO: 23892 - DNA, 108 bp, unidentified
  source 1..108: mol_type = unassigned DNA; note = methanogen bacteria
caaaaaataggattccctattttaggtacagttgaaaacggtaaagctgttagcggtattgcatggttattatcaactccaaataaaataagtatgtttattacagaa

SEQ ID NO: 23893 - DNA, 33 bp, unidentified
  source 1..33: mol_type = unassigned DNA; note = methanogen bacteria
gtagcgggcttaggccaagaggccattgcagga

SEQ ID NO: 23894 - DNA, 57 bp, unidentified
  source 1..57: mol_type = unassigned DNA; note = methanogen bacteria
atgattttaagcagttatggcgcttcaggccaaacccttgttgaagcagatgcctat

SEQ ID NO: 23895 - DNA, 33 bp, unidentified
  source 1..33: mol_type = unassigned DNA; note = methanogen bacteria
acacaggtcggaggagactatgccattgcaaca

SEQ ID NO: 23896 - DNA, 66 bp, unidentified
  source 1..66: mol_type = unassigned DNA; note = methanogen bacteria
cctcttgctacaatgtttgcatatacaccagaaaccgccaatttaattccaggaattgcagaatac

SEQ ID NO: 23897 - DNA, 78 bp, unidentified
  source 1..78: mol_type = unassigned DNA; note = methanogen bacteria
ccattatatggattgagttctgctgctgttgaccaattcgctgctttaagagcagttatggctggaagttttggttca

SEQ ID NO: 23898 - DNA, 30 bp, unidentified
  source 1..30: mol_type = unassigned DNA; note = methanogen bacteria
ggtaacttagtaccaatagataattcatat

SEQ ID NO: 23899 - DNA, 96 bp, unidentified
  source 1..96: mol_type = unassigned DNA; note = methanogen bacteria
ggaacatttaatttcttgcctaatagtcagggtgtcttaaccggtgcaattccaggatttatccaatctattactatgggttctgctaatttctca

SEQ ID NO: 23900 - DNA, 108 bp, unidentified
  source 1..108: mol_type = unassigned DNA; note = methanogen bacteria
cagaaaatagggttccctattttaggtactgttgaaaatggtaaggctgtaagtggtgttgcttggttcttatccactcctaataaaatatctatgtttgctacagaa

SEQ ID NO: 23901 - DNA, 57 bp, unidentified
  source 1..57: mol_type = unassigned DNA; note = methanogen bacteria
cccctgcttagaagctacggtgcaagcggccagacattaaatgaagcaatatcctat

SEQ ID NO: 23902 - DNA, 33 bp, unidentified
  source 1..33: mol_type = unassigned DNA; note = methanogen bacteria
gcaatgattggaggcgattacggtatcgcaaca

SEQ ID NO: 23903 - DNA, 66 bp, unidentified
  source 1..66: mol_type = unassigned DNA; note = methanogen bacteria
cccctggccaccatatttgcatacacaccagaaaccgccaatctggttcccggaattgcagaatat

SEQ ID NO: 23904 - DNA, 33 bp, unidentified
  source 1..33: mol_type = unassigned DNA; note = methanogen bacteria
tcaggaatcaatgctgatgcgctggccgctttg

SEQ ID NO: 23905 - DNA, 54 bp, unidentified
  source 1..54: mol_type = unassigned DNA; note = methanogen bacteria
gacttggtcgtgcttttaggtgcatcttcggtaaagtcatattgtttgagctat

SEQ ID NO: 23906 - DNA, 33 bp, unidentified
  source 1..33: mol_type = unassigned DNA; note = methanogen bacteria
atgaaaacggcaggtgtcagtgaagtcgcatcc

SEQ ID NO: 23907 - DNA, 66 bp, unidentified
  source 1..66: mol_type = unassigned DNA; note = methanogen bacteria
tatccgatatgtggtcttttcaacttccagacgtccaatcctgctctggttgagcgtgccgccgaa

SEQ ID NO: 23908 - DNA, 33 bp, unidentified
  source 1..33: mol_type = unassigned DNA; note = methanogen bacteria
gtagcagggcttggtcaagcggcaattgccgga

SEQ ID NO: 23909 - DNA, 57 bp, unidentified
  source 1..57: mol_type = unassigned DNA; note = methanogen bacteria
gagcctatgcttagggcatatggtgcaagcggacaatcattggcagagggaatcaaa

SEQ ID NO: 23910 - DNA, 36 bp, unidentified
  source 1..36: mol_type = unassigned DNA; note = methanogen bacteria
tcaacaatcggaggagaatacggtattgcagcattc

SEQ ID NO: 23911 - DNA, 66 bp, unidentified
  source 1..66: mol_type = unassigned DNA; note = methanogen bacteria
caactttcaacattgtttgcatatactccagaaacatcaatattgattcctgaaataacaagattc

SEQ ID NO: 23912 - DNA, 240 bp, unidentified
  source 1..240: mol_type = unassigned DNA; note = methanogen bacteria
gtcacccatatgggggacacgtccgcatggccgaggataatggcgtccgtcgagagcgggaacgacatctacggggtcatggggaactactacacgcccgtctggggctaccttctgtcgttcctcgatatgctgatccaggcggtcggagccgtgcctctgtttggagattacttcgagggcctgctgcccctggagggtgtcagaagctaccgcccgttcgtcatatcgccggagatg

SEQ ID NO: 23913 - DNA, 84 bp, unidentified
  source 1..84: mol_type = unassigned DNA; note = methanogen bacteria
atgaacggtcagatcgatgatgcgttcgtattcctgaccgacaggcaggaaaccgatttcagctctctctacggggtcgccaca

SEQ ID NO: 23914 - DNA, 84 bp, unidentified
  source 1..84: mol_type = unassigned DNA; note = methanogen bacteria
tgcctgtcctgcgcttactacgggctgatcgattgcgataccttcacatctctgtccgtgtccttcgcagaggacctgcctgta

SEQ ID NO: 23915 - DNA, 36 bp, unidentified
  source 1..36: mol_type = unassigned DNA; note = methanogen bacteria
ccatcaattgcaacagaatttcacatgagcaatatc

SEQ ID NO: 23916 - DNA, 36 bp, unidentified
  source 1..36: mol_type = unassigned DNA; note = methanogen bacteria
tatcatctgcaatacatcaagggattcgattcacag

SEQ ID NO: 23917 - DNA, 54 bp, unidentified
  source 1..54: mol_type = unassigned DNA; note = methanogen bacteria
ataatgggtgatgttccgataatcgagcagtactatccgctgctgattcaaagc

SEQ ID NO: 23918 - DNA, 75 bp, unidentified
  source 1..75: mol_type = unassigned DNA; note = methanogen bacteria
actaacggactgaccagcgggatctcgggctcgtccaccgatctttccgagtatggactgaccatggatcccctc

SEQ ID NO: 23919 - DNA, 105 bp, unidentified
  source 1..105: mol_type = unassigned DNA; note = methanogen bacteria
ttctccagctgggaatccctgcccctcatcggacagatcggtctgttcgccatacccttctcccaccctatgatggccatggacaacctgatgttcggaaacatc

SEQ ID NO: 23920 - DNA, 30 bp, unidentified
  source 1..30: mol_type = unassigned DNA; note = methanogen bacteria
gtcgtcgccaactcggcagaccgcagcacc

SEQ ID NO: 23921 - DNA, 30 bp, unidentified
  source 1..30: mol_type = unassigned DNA; note = methanogen bacteria
gccaaggagatattcaacagcgggtacgtt

SEQ ID NO: 23922 - DNA, 45 bp, unidentified
  source 1..45: mol_type = unassigned DNA; note = methanogen bacteria
acgaacctgatgttcggcatggacggcctggagatatccgtcggt

SEQ ID NO: 23923 - DNA, 30 bp, unidentified
  source 1..30: mol_type = unassigned DNA; note = methanogen bacteria
gtggcaggcctcggacaaaccgcaattgcg

SEQ ID NO: 23924 - DNA, 57 bp, unidentified
  source 1..57: mol_type = unassigned DNA; note = methanogen bacteria
cccctgcttaaaagctatggagctaccggacagacactcaatgaagctgttgcctat

SEQ ID NO: 23925 - DNA, 36 bp, unidentified
  source 1..36: mol_type = unassigned DNA; note = methanogen bacteria
tcattggttggaggagactacggaatagccactttc

SEQ ID NO: 23926 - DNA, 66 bp, unidentified
  source 1..66: mol_type = unassigned DNA; note = methanogen bacteria
ccattggccacaatatttgcatacactcccgaaacggccaatctggttccgggaattgcacagtac

SEQ ID NO: 23927 - DNA, 30 bp, unidentified
  source 1..30: mol_type = unassigned DNA; note = methanogen bacteria
gctggactgggaccggatgcccttgcagca

SEQ ID NO: 23928 - DNA, 54 bp, unidentified
  source 1..54: mol_type = unassigned DNA; note = methanogen bacteria
cccctgcttttgacgatgggagcgggcgagattatagacttgacaatgacttac

SEQ ID NO: 23929 - DNA, 36 bp, unidentified
  source 1..36: mol_type = unassigned DNA; note = methanogen bacteria
acaacgctttcgggaacgattgcagttgcggcatat

SEQ ID NO: 23930 - DNA, 66 bp, unidentified
  source 1..66: mol_type = unassigned DNA; note = methanogen bacteria
gagcctttgtcatacatattctcatactcaacggattctgccgtgctttcacagagggttgtcgac

SEQ ID NO: 23931 - DNA, 33 bp, unidentified
  source 1..33: mol_type = unassigned DNA; note = methanogen bacteria
tcagggattaattcagatgctcttgcggcttta

SEQ ID NO: 23932 - DNA, 57 bp, unidentified
  source 1..57: mol_type = unassigned DNA; note = methanogen bacteria
gaggatttgattgttcttcttggagcttcaagtgttcgttcatattgtctgagctat

SEQ ID NO: 23933 - DNA, 33 bp, unidentified
  source 1..33: mol_type = unassigned DNA; note = methanogen bacteria
atccatactgcaggtgtcagtgaggtcgcatca

SEQ ID NO: 23934 - DNA, 63 bp, unidentified
  source 1..63: mol_type = unassigned DNA; note = methanogen bacteria
ccgatttgtgatgttttcaactttcaggcaggcaatcctgaactggttgaaagggcggctgaa

SEQ ID NO: 23935 - DNA, 33 bp, unidentified
  source 1..33: mol_type = unassigned DNA; note = methanogen bacteria
gtgtcaggacttggtgctgatgcacttgcgggt

SEQ ID NO: 23936 - DNA, 48 bp, unidentified
  source 1..48: mol_type = unassigned DNA; note = methanogen bacteria
ttgaatgcaatgggtgccggtcaaaccataggctatgcaactgattat

SEQ ID NO: 23937 - DNA, 36 bp, unidentified
  source 1..36: mol_type = unassigned DNA; note = methanogen bacteria
gcatatgttgggtcaacagattctgttgctgtttac

SEQ ID NO: 23938 - DNA, 66 bp, unidentified
  source 1..66: mol_type = unassigned DNA; note = methanogen bacteria
ggagacatagcatcagtatttgcttcatcgggaagcagcataaggattgctcaagagcttactagc

SEQ ID NO: 23939 - DNA, 30 bp, unidentified
  source 1..30: mol_type = unassigned DNA; note = methanogen bacteria
gttgcatcgctaggtgaagcagctatttca

SEQ ID NO: 23940 - DNA, 57 bp, unidentified
  source 1..57: mol_type = unassigned DNA; note = methanogen bacteria
ctaatagggatattatttggccaaattgaagcggatgtttgggcaaatgccgatgta

SEQ ID NO: 23941 - DNA, 30 bp, unidentified
  source 1..30: mol_type = unassigned DNA; note = methanogen bacteria
tcaacattcggaacaatggcgatagccgca

SEQ ID NO: 23942 - DNA, 51 bp, unidentified
  source 1..51: mol_type = unassigned DNA; note = methanogen bacteria
ttaggcatttacaacctgtcagctcaaactgcagcaatgaccacggaaatg

SEQ ID NO: 23943 - DNA, 36 bp, unidentified
  source 1..36: mol_type = unassigned DNA; note = methanogen bacteria
gttgcaggaatcaatgctgatgcgttggctgcgctt

SEQ ID NO: 23944 - DNA, 54 bp, unidentified
  source 1..54: mol_type = unassigned DNA; note = methanogen bacteria
gatttgattgtttttttaggtgcgaacagcgttaagtcatattgcctaagttat

SEQ ID NO: 23945 - DNA, 33 bp, unidentified
  source 1..33: mol_type = unassigned DNA; note = methanogen bacteria
atgatgactgctggcgtaagcgaggttgcttcg

SEQ ID NO: 23946 - DNA, 66 bp, unidentified
  source 1..66: mol_type = unassigned DNA; note = methanogen bacteria
tatcctatttgtgaaatatttaatttccaggccggaaacttggctttggtggagaggtctgcagaa

SEQ ID NO: 23947 - DNA, 30 bp, unidentified
  source 1..30: mol_type = unassigned DNA; note = methanogen bacteria
gtggcttcacttggtgaagcagctatttca

SEQ ID NO: 23948 - DNA, 54 bp, unidentified
  source 1..54: mol_type = unassigned DNA; note = methanogen bacteria
atagggttattgtttggtcaaattgaagcggatgtatggaataatgctgacatg

SEQ ID NO: 23949 - DNA, 33 bp, unidentified
  source 1..33: mol_type = unassigned DNA; note = methanogen bacteria
tcaacttttggaacaatggcgatagctgcaaac

SEQ ID NO: 23950 - DNA, 51 bp, unidentified
  source 1..51: mol_type = unassigned DNA; note = methanogen bacteria
ttggggatttataatctgtcagcccatactacagcaatggtaactgaaatg

SEQ ID NO: 23951 - DNA, 33 bp, unidentified
  source 1..33: mol_type = unassigned DNA; note = methanogen bacteria
tcaggcatcaatgctgatgcgctggccgctttg

SEQ ID NO: 23952 - DNA, 51 bp, unidentified
  source 1..51: mol_type = unassigned DNA; note = methanogen bacteria
gacctggtcgtgcttctcggtgcatcttcggtaaagttatattgcgtgagc

SEQ ID NO: 23953 - DNA, 36 bp, unidentified
  source 1..36: mol_type = unassigned DNA; note = methanogen bacteria
atgacaaccgcaggtgtcggggaagtcgcatccttt

SEQ ID NO: 23954 - DNA, 66 bp, unidentified
  source 1..66: mol_type = unassigned DNA; note = methanogen bacteria
tatccgatatgtggtcttttcaacttccagacagccaatcccgctctggttgagcgtgctgccgaa

SEQ ID NO: 23955 - DNA, 33 bp, unidentified
  source 1..33: mol_type = unassigned DNA; note = methanogen bacteria
gtggcaggactgggatcaaacgcccttgctgca

SEQ ID NO: 23956 - DNA, 48 bp, unidentified
  source 1..48: mol_type = unassigned DNA; note = methanogen bacteria
cttctgattatgggtgccggtgaggtaataactgaaacaatgacatac

SEQ ID NO: 23957 - DNA, 36 bp, unidentified
  source 1..36: mol_type = unassigned DNA; note = methanogen bacteria
acattactttcaggaacagtggccgttgcagcatat

SEQ ID NO: 23958 - DNA, 66 bp, unidentified
  source 1..66: mol_type = unassigned DNA; note = methanogen bacteria
gaaccattatcattcatattctcatattccaatgatgctgcggttttatcccaaagagttgttgat

SEQ ID NO: 23959 - DNA, 57 bp, unidentified
  source 1..57: mol_type = unassigned DNA; note = methanogen bacteria
cctttacttagaagttatggtgctactggacaaactttaaatgaaggtatagcttat

SEQ ID NO: 23960 - DNA, 30 bp, unidentified
  source 1..30: mol_type = unassigned DNA; note = methanogen bacteria
ctggttggaggagactatggaatagcagta

SEQ ID NO: 23961 - DNA, 63 bp, unidentified
  source 1..63: mol_type = unassigned DNA; note = methanogen bacteria
cctttatcaacaatatttgcatatactcccgaaacagctaatctagtgcctgggattgcacaa

SEQ ID NO: 23962 - DNA, 33 bp, unidentified
  source 1..33: mol_type = unassigned DNA; note = methanogen bacteria
gtgtcaggccttggagccgatgctcttgcaggt

SEQ ID NO: 23963 - DNA, 54 bp, unidentified
  source 1..54: mol_type = unassigned DNA; note = methanogen bacteria
cctatattgaggataatgggtgccggtcaaacaattagctatgcaattgattac

SEQ ID NO: 23964 - DNA, 36 bp, unidentified
  source 1..36: mol_type = unassigned DNA; note = methanogen bacteria
gtttatgtgggttcaactgattcggttgcggtttac

SEQ ID NO: 23965 - DNA, 69 bp, unidentified
  source 1..69: mol_type = unassigned DNA; note = methanogen bacteria
tcagatattgcatccgttttcgccactagcggaagcagtgctagaatatctgcagagctaacaagcttt

SEQ ID NO: 23966 - DNA, 33 bp, unidentified
  source 1..33: mol_type = unassigned DNA; note = methanogen bacteria
gttgcaggactgggacaggcagctattgcagga

SEQ ID NO: 23967 - DNA, 48 bp, unidentified
  source 1..48: mol_type = unassigned DNA; note = methanogen bacteria
ctcaaggcatacggtgcaagcggccagtcactcgttgaagggataaga

SEQ ID NO: 23968 - DNA, 36 bp, unidentified
  source 1..36: mol_type = unassigned DNA; note = methanogen bacteria
tcctctgtcggtggagagtatggtattgcggcgttc

SEQ ID NO: 23969 - DNA, 63 bp, unidentified
  source 1..63: mol_type = unassigned DNA; note = methanogen bacteria
ttggcaatgatattcgcatacactcccgaaaccgccccattgattccggagataaccaatttc

SEQ ID NO: 23970 - DNA, 33 bp, unidentified
  source 1..33: mol_type = unassigned DNA; note = methanogen bacteria
gtagcagggcttggacaggctgcaatagctgga

SEQ ID NO: 23971 - DNA, 60 bp, unidentified
  source 1..60: mol_type = unassigned DNA; note = methanogen bacteria
gaacctttgcttagagcttatggagcaagtggacaaaaccttgcagaaggtattaaatat

SEQ ID NO: 23972 - DNA, 36 bp, unidentified
  source 1..36: mol_type = unassigned DNA; note = methanogen bacteria
tcaacaattggaggagaatacggtattgcatcattt

SEQ ID NO: 23973 - DNA, 63 bp, unidentified
  source 1..63: mol_type = unassigned DNA; note = methanogen bacteria
cttgcaacattgtttgcatacactaaagaaacatcagttttagtgcctgaaattacaagattc

SEQ ID NO: 23974 - DNA, 33 bp, unidentified
  source 1..33: mol_type = unassigned DNA; note = methanogen bacteria
gtagcgggacttggacaagctgcaattgcagga

SEQ ID NO: 23975 - DNA, 60 bp, unidentified
  source 1..60: mol_type = unassigned DNA; note = methanogen bacteria
gagcctttgcttcgtacctatggagcaagcggacaaaatcttgctgaaggtcttaaatat

SEQ ID NO: 23976 - DNA, 36 bp, unidentified
  source 1..36: mol_type = unassigned DNA; note = methanogen bacteria
tcaacaattggaggggaatacggtattgcatcattc

SEQ ID NO: 23977 - DNA, 66 bp, unidentified
  source 1..66: mol_type = unassigned DNA; note = methanogen bacteria
cagcttgcaactttatttgcatatactgaagagacagctgttttggttcctgaaattaccagattc

SEQ ID NO: 23978 - DNA, 33 bp, unidentified
  source 1..33: mol_type = unassigned DNA; note = methanogen bacteria
gtagcgggtttaggtcaggcagctattgcagga

SEQ ID NO: 23979 - DNA, 57 bp, unidentified
  source 1..57: mol_type = unassigned DNA; note = methanogen bacteria
ccgttgcttaaaggatatggtgctagtggccaatcattggttgaaggaataaaatat

SEQ ID NO: 23980 - DNA, 36 bp, unidentified
  source 1..36: mol_type = unassigned DNA; note = methanogen bacteria
tcatcaattggtggggaatacggaattgctgctttc

SEQ ID NO: 23981 - DNA, 63 bp, unidentified
  source 1..63: mol_type = unassigned DNA; note = methanogen bacteria
ctggctatgatttttgcatatactccggatactgcagctctggtccctgaaattactagcttt

SEQ ID NO: 23982 - DNA, 51 bp, unidentified
  source 1..51: mol_type = unassigned DNA; note = methanogen bacteria
cttaaaagttatggtgctaccggacaaactttaaaagaaggtatagcttat

SEQ ID NO: 23983 - DNA, 30 bp, unidentified
  source 1..30: mol_type = unassigned DNA; note = methanogen bacteria
ctggttggaggggactacggaatagcagta

SEQ ID NO: 23984 - DNA, 66 bp, unidentified
  source 1..66: mol_type = unassigned DNA; note = methanogen bacteria
cctttagcaacaatatttgcatatactcctgaaaccgccaatctagtgccgggaattgcacaatat

SEQ ID NO: 23985 - DNA, 33 bp, unidentified
  source 1..33: mol_type = unassigned DNA; note = methanogen bacteria
gtagcaggtttaggtcaggcagctattgcagga

SEQ ID NO: 23986 - DNA, 57 bp, unidentified
  source 1..57: mol_type = unassigned DNA; note = methanogen bacteria
ccattacttatcagttatggtgcatccggccagtcattagctgaaggacttaaatat

SEQ ID NO: 23987 - DNA, 36 bp, unidentified
  source 1..36: mol_type = unassigned DNA; note = methanogen bacteria
tcatcaatcggcggtgaatatggtattgcagcattt

SEQ ID NO: 23988 - DNA, 63 bp, unidentified
  source 1..63: mol_type = unassigned DNA; note = methanogen bacteria
ccattagctacattatttgcatatactcctgaaacttcctccttagttcctgaaatcgccctt

SEQ ID NO: 23989 - DNA, 81 bp, unidentified
  source 1..81: mol_type = unassigned DNA; note = methanogen bacteria
atacctttatttggtttaagcccggggggtattgaccaatttgctcagttaagagcagttatggcgggaagttttggttca

SEQ ID NO: 23990 - DNA, 99 bp, unidentified
  source 1..99: mol_type = unassigned DNA; note = methanogen bacteria
gtaggatcatttaatttcttacctaatagttatggtgcacttccaggtgcaattccaggatttatccaatcaattattgccggttcagctgacttctca

SEQ ID NO: 23991 - DNA, 108 bp, unidentified
  source 1..108: mol_type = unassigned DNA; note = methanogen bacteria
caaaaaataggttttcctatattcggtgaagttgttaacggtaaatcggttagtggagttgcattttatttatctactccgaatagtgttggtatgtttgtaactgaa

SEQ ID NO: 23992 - DNA, 36 bp, unidentified
  source 1..36: mol_type = unassigned DNA; note = methanogen bacteria
cctacaattgctgctgaatttcatatgagcaatatt

SEQ ID NO: 23993 - DNA, 33 bp, unidentified
  source 1..33: mol_type = unassigned DNA; note = methanogen bacteria
tttcatttgcagtatataaagggttttgattcg

SEQ ID NO: 23994 - DNA, 54 bp, unidentified
  source 1..54: mol_type = unassigned DNA; note = methanogen bacteria
gtaatgggtgatgttccaattgttaaagagtattatcctttattaataacaagc

SEQ ID NO: 23995 - DNA, 33 bp, unidentified
  source 1..33: mol_type = unassigned DNA; note = methanogen bacteria
tcgggtttgaatgccgatgcacttgctgcattg

SEQ ID NO: 23996 - DNA, 57 bp, unidentified
  source 1..57: mol_type = unassigned DNA; note = methanogen bacteria
gaggatatagttattttacttggagcatcaagtgtcaagacatattgcctaagttat

SEQ ID NO: 23997 - DNA, 36 bp, unidentified
  source 1..36: mol_type = unassigned DNA; note = methanogen bacteria
atggtgactgcaggtgtcggtgaggtcgcatcattt

SEQ ID NO: 23998 - DNA, 66 bp, unidentified
  source 1..66: mol_type = unassigned DNA; note = methanogen bacteria
caacctatctgtggtgccttcaacttccaggctaatgaccctgttttagtcaaccgttccgctgaa

SEQ ID NO: 23999 - DNA, 57 bp, unidentified
  source 1..57: mol_type = unassigned DNA; note = methanogen bacteria
cctttgcttaaaagctacggtgctgcagggcaaactttaaacgaagcagtggcttat

SEQ ID NO: 24000 - DNA, 33 bp, unidentified
  source 1..33: mol_type = unassigned DNA; note = methanogen bacteria
tcacaggtaggaggagactacggaatagccaca

SEQ ID NO: 24001 - DNA, 66 bp, unidentified
  source 1..66: mol_type = unassigned DNA; note = methanogen bacteria
cccctagccacaatattcgcatatactcctgagactgcaggtttagttccaggaattgcagaatat

SEQ ID NO: 24002 - DNA, 33 bp, unidentified
  source 1..33: mol_type = unassigned DNA; note = methanogen bacteria
attggaagtataggcacatcagcaatagtctgc

SEQ ID NO: 24003 - DNA, 51 bp, unidentified
  source 1..51: mol_type = unassigned DNA; note = methanogen bacteria
ggcatctgttttgctgtaaatcttgacggctatgcagatttgatattcgca

SEQ ID NO: 24004 - DNA, 30 bp, unidentified
  source 1..30: mol_type = unassigned DNA; note = methanogen bacteria
cacgtttatgcaactcctgtggctgccttt

SEQ ID NO: 24005 - DNA, 57 bp, unidentified
  source 1..57: mol_type = unassigned DNA; note = methanogen bacteria
attgaaattctttcatttttctcatccgaccagatcatttatgaagaggtaagaaac

SEQ ID NO: 24006 - DNA, 30 bp, unidentified
  source 1..30: mol_type = unassigned DNA; note = methanogen bacteria
gtggcgtcattgggtgaagctgcaatttcg

SEQ ID NO: 24007 - DNA, 57 bp, unidentified
  source 1..57: mol_type = unassigned DNA; note = methanogen bacteria
ctgattggaattttattcggccaaattgaagctgatgtatgggccaatgctgatgta

SEQ ID NO: 24008 - DNA, 30 bp, unidentified
  source 1..30: mol_type = unassigned DNA; note = methanogen bacteria
tcaactttcggaactatggcaatagctgcc

SEQ ID NO: 24009 - DNA, 51 bp, unidentified
  source 1..51: mol_type = unassigned DNA; note = methanogen bacteria
ttgggcatttacaatctttcacctcaaacagaggcaatggcggctgaaatg

SEQ ID NO: 24010 - DNA, 81 bp, unidentified
  source 1..81: mol_type = unassigned DNA; note = methanogen bacteria
atacccttatacggattaagtccggctgctgtggataactttgcagctttaagggcagttatggctggaagtttcggttca

SEQ ID NO: 24011 - DNA, 30 bp, unidentified
  source 1..30: mol_type = unassigned DNA; note = methanogen bacteria
ggtaacttagtaccaattgataattcttat

SEQ ID NO: 24012 - DNA, 96 bp, unidentified
  source 1..96: mol_type = unassigned DNA; note = methanogen bacteria
ggaacattcaatttcttaccgggcactgatggaataatgactggtgctattccaggatttatacaatctattgctgctggtgctgctaatttcaca

SEQ ID NO: 24013 - DNA, 108 bp, unidentified
  source 1..108: mol_type = unassigned DNA; note = methanogen bacteria
caaaaaattggtttccctattttaggtcaaatcgaaaacggtaaagctgtaaatggtgctgcatggttattgtcaacaccaaataatattggaatgttcgctacagaa

SEQ ID NO: 24014 - DNA, 36 bp, unidentified
  source 1..36: mol_type = unassigned DNA; note = methanogen bacteria
gttgcgggcattaattccaatgcccttgccgcttta

SEQ ID NO: 24015 - DNA, 54 bp, unidentified
  source 1..54: mol_type = unassigned DNA; note = methanogen bacteria
gatttggtaatattgttaggtgcaggtggtgttaggacatattgcctaagttat

SEQ ID NO: 24016 - DNA, 36 bp, unidentified
  source 1..36: mol_type = unassigned DNA; note = methanogen bacteria
atcgtgacggcaggagttgaggaagtggcggcattc

SEQ ID NO: 24017 - DNA, 66 bp, unidentified
  source 1..66: mol_type = unassigned DNA; note = methanogen bacteria
tatcccctttgcggtttgttcaactttcaggcaggcaattcagcgttggttatccgttcatctgag

SEQ ID NO: 24018 - DNA, 30 bp, unidentified
  source 1..30: mol_type = unassigned DNA; note = methanogen bacteria
tcaggtttgggtcctgacgctcttgcagca

SEQ ID NO: 24019 - DNA, 45 bp, unidentified
  source 1..45: mol_type = unassigned DNA; note = methanogen bacteria
cttttgcttatgggagcaggagaaatcatagatttgacaatgaca

SEQ ID NO: 24020 - DNA, 36 bp, unidentified
  source 1..36: mol_type = unassigned DNA; note = methanogen bacteria
accatgttgtccggaacaattgctgtagctgcatat

SEQ ID NO: 24021 - DNA, 63 bp, unidentified
  source 1..63: mol_type = unassigned DNA; note = methanogen bacteria
cctctgtcatacatcttctcatactctgctgatgcagcagtcctctcagcaagggttgtcgat

SEQ ID NO: 24022 - DNA, 33 bp, unidentified
  source 1..33: mol_type = unassigned DNA; note = methanogen bacteria
gttgcaggtttaggtcaatctgcaatagccgga

SEQ ID NO: 24023 - DNA, 51 bp, unidentified
  source 1..51: mol_type = unassigned DNA; note = methanogen bacteria
cttgtttcatatggtgcgagtggacagtctttaactgaggcaatcaagtat

SEQ ID NO: 24024 - DNA, 36 bp, unidentified
  source 1..36: mol_type = unassigned DNA; note = methanogen bacteria
tcttctatcggcggtgagtatggaatagctgcattc

SEQ ID NO: 24025 - DNA, 63 bp, unidentified
  source 1..63: mol_type = unassigned DNA; note = methanogen bacteria
ctgtctttaatatttgcatatactcccgaaactgtcggtctggttcctgagataaccagattt

SEQ ID NO: 24026 - DNA, 81 bp, unidentified
  source 1..81: mol_type = unassigned DNA; note = methanogen bacteria
ataccgttatatggtttgagtgaagcagctgtcgataattttgctgctttaagggcagttatggccggaagttttggttca

SEQ ID NO: 24027 - DNA, 96 bp, unidentified
  source 1..96: mol_type = unassigned DNA; note = methanogen bacteria
ggtacctttaatttcttacctggtcctgatggtttattgactggtgcaattccaggatttatacaatccatttacatgggagctgcagatttctca

SEQ ID NO: 24028 - DNA, 111 bp, unidentified
  source 1..111: mol_type = unassigned DNA; note = methanogen bacteria
caaaaaattggatttccaatacttggtaagattgagaacggtaaagccgttagcggaatagcgtggttattatcaactccaaataatgttggaatgtttactactgaaccg

SEQ ID NO: 24029 - DNA, 33 bp, unidentified
  source 1..33: mol_type = unassigned DNA; note = methanogen bacteria
gttgcaggattaggtcaggcagccattgcagga

SEQ ID NO: 24030 - DNA, 57 bp, unidentified
  source 1..57: mol_type = unassigned DNA; note = methanogen bacteria
cctctgctggtggcatatggagccagcggtcagtcactggaagaggcaatgaaatat

SEQ ID NO: 24031 - DNA, 36 bp, unidentified
  source 1..36: mol_type = unassigned DNA; note = methanogen bacteria
tcatcaatcagcggcgaatacggtattgcagcattc

SEQ ID NO: 24032 - DNA, 63 bp, unidentified
  source 1..63: mol_type = unassigned DNA; note = methanogen bacteria
ctagcaacactatttgcctacacaccagaaacagcagcacttatacctgaaataaccaggttc

SEQ ID NO: 24033 - DNA, 81 bp, unidentified
  source 1..81: mol_type = unassigned DNA; note = methanogen bacteria
attcctttatatggtttgagtccagctgcagttgaccaatttgcccaattaagagctgttatggcaggtagttttgggtca

SEQ ID NO: 24034 - DNA, 105 bp, unidentified
  source 1..105: mol_type = unassigned DNA; note = methanogen bacteria
actggaacatttaacttcttgccagctactgcggcatctacaactgcttcaggtattcttcctggatttatccaatccattatcggaggatctcctaacttcgct

SEQ ID NO: 24035 - DNA, 111 bp, unidentified
  source 1..111: mol_type = unassigned DNA; note = methanogen bacteria
ttccaaaaacttggtttccctatattaggtcaagtttccggtggtaggccaatcagtggtcttgcattatggttaaccactccaaatagtttaagtgtattgtttacaaat

SEQ ID NO: 24036 - DNA, 45 bp, unidentified
  source 1..45: mol_type = unassigned DNA; note = methanogen bacteria
gttaagaaactcaatattacaggaactgtcagtattgtgctgatg

SEQ ID NO: 24037 - DNA, 30 bp, unidentified
  source 1..30: mol_type = unassigned DNA; note = methanogen bacteria
agcggacaggtttttgaaagtctgtcattc

SEQ ID NO: 24038 - DNA, 120 bp, unidentified
  source 1..120: mol_type = unassigned DNA; note = methanogen bacteria
acatcccttccgcttcatccatatgctcttgcaatggcaagcggtatcggaagcgcaagtatgaatgcagcggctattgcgccattgctaaatattttcccttcaatgtcacatgaaatc

SEQ ID NO: 24039 - DNA, 48 bp, unidentified
  source 1..48: mol_type = unassigned DNA; note = methanogen bacteria
ttccttccaaccgcaggatacatacttccatttgtaaatgccgttgat

SEQ ID NO: 24040 - DNA, 81 bp, unidentified
  source 1..81: mol_type = unassigned DNA; note = methanogen bacteria
attccattatatggtgtatctccaggatcttacgacagttttgctgcattaagggcggttatggctggaagttttggttct

SEQ ID NO: 24041 - DNA, 30 bp, unidentified
  source 1..30: mol_type = unassigned DNA; note = methanogen bacteria
ggaaacatagttcctattgatggttcctat

SEQ ID NO: 24042 - DNA, 99 bp, unidentified
  source 1..99: mol_type = unassigned DNA; note = methanogen bacteria
gtgggtacattcagtatcttgcctggtcaagacggtttacttgcaggtatcattccaaaattcatccaacaagctactgtaggaatgcctgacttttat

SEQ ID NO: 24043 - DNA, 105 bp, unidentified
  source 1..105: mol_type = unassigned DNA; note = methanogen bacteria
caaaagattggtttcccaattcttggacacttggataagggtaaagcggttgatggaattgcctggttattgtcaacacctaaattgcatatgttcatatctgaa

SEQ ID NO: 24044 - DNA, 36 bp, unidentified
  source 1..36: mol_type = unassigned DNA; note = methanogen bacteria
ccctcaattgcaactgaatttcacatgagcaatatt

SEQ ID NO: 24045 - DNA, 36 bp, unidentified
  source 1..36: mol_type = unassigned DNA; note = methanogen bacteria
tatcacctgcaatacattaaaggctttgattcacag

SEQ ID NO: 24046 - DNA, 54 bp, unidentified
  source 1..54: mol_type = unassigned DNA; note = methanogen bacteria
gtaatgggtgacgttcctattattcagcagtattatcctctattgattcaaagc

SEQ ID NO: 24047 - DNA, 36 bp, unidentified
  source 1..36: mol_type = unassigned DNA; note = methanogen bacteria
ccagatatagctgctgatttaaatttttctgctgaa

SEQ ID NO: 24048 - DNA, 33 bp, unidentified; identical to SEQ ID NO: 23688
  source 1..33: mol_type = unassigned DNA; note = methanogen bacteria

SEQ ID NO: 24049 - DNA, 54 bp, unidentified
  source 1..54: mol_type = unassigned DNA; note = methanogen bacteria
attggaggccagcaattgggacttgatcatattggccatttatttattcagtca

SEQ ID NO: 24050 - DNA, 78 bp, unidentified
  source 1..78: mol_type = unassigned DNA; note = methanogen bacteria
ccattatatggtgttgctcctggggcaatagataactttgctcaagtgagagctgtaatggcaggttcattcggttct

SEQ ID NO: 24051 - DNA, 96 bp, unidentified
  source 1..96: mol_type = unassigned DNA; note = methanogen bacteria
ggtacattcagtatattgaacggtaccgatggtttgtttgcaggtattattccaaaattcatacaacaggctactactggagtttatgactttatt

SEQ ID NO: 24052 - DNA, 105 bp, unidentified
  source 1..105: mol_type = unassigned DNA; note = methanogen bacteria
caaaaaattggaattccaatttttggtcacattgatgcgggtaaacctgttgatgggattgcatggttgctttcaacacctaaatggtacatgtttgtaacagaa

SEQ ID NO: 24053 - DNA, 84 bp, unidentified
  source 1..84: mol_type = unassigned DNA; note = methanogen bacteria
ataccgttatatggtttaagttcaggtgctgtagatcaatttgctcagttaagagcagttatggcaggtagttttggttctatt

SEQ ID NO: 24054 - DNA, 96 bp, unidentified
  source 1..96: mol_type = unassigned DNA; note = methanogen bacteria
ggtacttttaactttattcctggggcaagtggtgcccttccaggtattattcctggtttcatacagggtttagttactggtagtcctgatttctca

SEQ ID NO: 24055 - DNA, 117 bp, unidentified
  source 1..117: mol_type = unassigned DNA; note = methanogen bacteria
agtatgttccaaaagttaggatggcctatattgggtaaagttgaaggaggaagagcggttagtggagcagcattatatttatcaactcctaatcaattaagtttgatttatactaat

SEQ ID NO: 24056 - DNA, 33 bp, unidentified
  source 1..33: mol_type = unassigned DNA; note = methanogen bacteria
gttgctggactcggtcaggcggctattgcagga

SEQ ID NO: 24057 - DNA, 48 bp, unidentified
  source 1..48: mol_type = unassigned DNA; note = methanogen bacteria
cttaaggcatatggtgcaagcggacaatctttggttgaaggacttaaa

SEQ ID NO: 24058 - DNA, 36 bp, unidentified
  source 1..36: mol_type = unassigned DNA; note = methanogen bacteria
tcatcagttggtggtgaatatggtattgcagcattt

SEQ ID NO: 24059 - DNA, 63 bp, unidentified
  source 1..63: mol_type = unassigned DNA; note = methanogen bacteria
ttgtctatgatgtttgcatatactccagaaactgctcctctgattcctgaaattacaaacttt

SEQ ID NO: 24060 - DNA, 81 bp, unidentified
  source 1..81: mol_type = unassigned DNA; note = methanogen bacteria
ataccattatatggtttagctcctggagctattgatagttttgctcaattaagagcagttatggctggaagttttggttca

SEQ ID NO: 24061 - DNA, 30 bp, unidentified
  source 1..30: mol_type = unassigned DNA; note = methanogen bacteria
ggtaaccttgtccctattgacggttcatac

SEQ ID NO: 24062 - DNA, 99 bp, unidentified
  source 1..99: mol_type = unassigned DNA; note = methanogen bacteria
gtaggtacattcagtgttttaccaggtaccgatggtttccttgcaggtattattccaaaattaatccaacaaattactgttggaagtgttaattggtat

SEQ ID NO: 24063 - DNA, 114 bp, unidentified
  source 1..114: mol_type = unassigned DNA; note = methanogen bacteria
aatgttttccaaaaagttggagtgccgattttaggccatattcagaatggtaaacctgttgacggtattgcatggttattatcaacacctaaccttacaatgtttattacagaa

SEQ ID NO: 24064 - DNA, 33 bp, unidentified
  source 1..33: mol_type = unassigned DNA; note = methanogen bacteria
tctggattaggtccagaggtattggcagcgatt

SEQ ID NO: 24065 - DNA, 45 bp, unidentified
  source 1..45: mol_type = unassigned DNA; note = methanogen bacteria
ttaatgtttttcggtgcgggtgaagtgattgactatgcaatttca

SEQ ID NO: 24066 - DNA, 30 bp, unidentified
  source 1..30: mol_type = unassigned DNA; note = methanogen bacteria
tcaagcattggtggaatcatcgctgttggg

SEQ ID NO: 24067 - DNA, 57 bp, unidentified
  source 1..57: mol_type = unassigned DNA; note = methanogen bacteria
gccgaattatttgcttatggtgaatcaagtcaaaatattaatgaatatattactcat

SEQ ID NO: 24068 - DNA, 33 bp, unidentified
  source 1..33: mol_type = unassigned DNA; note = methanogen bacteria
attgcaggtttgggtcaggcggcaattgcagga

SEQ ID NO: 24069 - DNA, 54 bp, unidentified
  source 1..54: mol_type = unassigned DNA; note = methanogen bacteria
cctttgcttaaggcatacggggctagtggccagtcactggttgagggaatcaaa

SEQ ID NO: 24070 - DNA, 36 bp, unidentified
  source 1..36: mol_type = unassigned DNA; note = methanogen bacteria
tccatggttggtggtgaatatggtattgcggcattt

SEQ ID NO: 24071 - DNA, 63 bp, unidentified
  source 1..63: mol_type = unassigned DNA; note = methanogen bacteria
ttgtcattgatttttgcatatactccagaaaccgcagcactgattccagaaataaccagcttc

SEQ ID NO: 24072 - DNA, 81 bp, unidentified
  source 1..81: mol_type = unassigned DNA; note = methanogen bacteria
attccattatacggggtatctgccgcatctatagatcagttcgctcagttaagagcagtaatggcaggtagttttggttca

SEQ ID NO: 24073 - DNA, 30 bp, unidentified
  source 1..30: mol_type = unassigned DNA; note = methanogen bacteria
ggaaatgtaataccaattgatggttcttac

SEQ ID NO: 24074 - DNA, 96 bp, unidentified
  source 1..96: mol_type = unassigned DNA; note = methanogen bacteria
ggaacattcagtattctctcaggtactgacggtttatttgcaggaattattcctaaatttattcaattagctacaactggtgtatatgacttctct

SEQ ID NO: 24075 - DNA, 105 bp, unidentified
  source 1..105: mol_type = unassigned DNA; note = methanogen bacteria
caaaaaattggtgtacctattttaggtcacatcgataaaggtaaacctgtggatggtattgcatggttattatcaacacctaaattggaaatgtttattactgaa

SEQ ID NO: 24076 - DNA, 30 bp, unidentified
  source 1..30: mol_type = unassigned DNA; note = methanogen bacteria
ggtggaattggagctaatgcactggcagct

SEQ ID NO: 24077 - DNA, 45 bp, unidentified
  source 1..45: mol_type = unassigned DNA; note = methanogen bacteria
cttttaaaaatgggagctggtgaagtaataaacgatgcggccact

SEQ ID NO: 24078 - DNA, 36 bp, unidentified
  source 1..36: mol_type = unassigned DNA; note = methanogen bacteria
acgttactttcaggaacaatagctgtagcatcatat

SEQ ID NO: 24079 - DNA, 66 bp, unidentified
  source 1..66: mol_type = unassigned DNA; note = methanogen bacteria
gagccattatcccacatctttgcatattcagcaaacagtgctattttatcccaaagaataactgaa

SEQ ID NO: 24080 - DNA, 33 bp, unidentified
  source 1..33: mol_type = unassigned DNA; note = methanogen bacteria
gttgctggacttggagctgatgcactagctgct

SEQ ID NO: 24081 - DNA, 45 bp, unidentified
  source 1..45: mol_type = unassigned DNA; note = methanogen bacteria
ttatatacaatgggagcgggcgaagtaataaacgatgcattcact

SEQ ID NO: 24082 - DNA, 33 bp, unidentified
  source 1..33: mol_type = unassigned DNA; note = methanogen bacteria
acaatactttcaggacctatagctgtagcttcg

SEQ ID NO: 24083 - DNA, 66 bp, unidentified
  source 1..66: mol_type = unassigned DNA; note = methanogen bacteria
gagcctttatcacacatttttgcatattcgtcgaacaatccatatttagtacaaagaatagcagaa

SEQ ID NO: 24084 - DNA, 30 bp, unidentified
  source 1..30: mol_type = unassigned DNA; note = methanogen bacteria
agtcagttaagcatgtttgatgcattagca

SEQ ID NO: 24085 - DNA, 54 bp, unidentified
  source 1..54: mol_type = unassigned DNA; note = methanogen bacteria
gatttgctcaatttaatgaatattgtcaataatcaaatttatattttagactat

SEQ ID NO: 24086 - DNA, 51 bp, unidentified
  source 1..51: mol_type = unassigned DNA; note = methanogen bacteria
gaagaagtatatgcttcatttttaatttttaacatggacacttctattttc

SEQ ID NO: 24087 - DNA, 33 bp, unidentified
  source 1..33: mol_type = unassigned DNA; note = methanogen bacteria
tgctcgtcgctcggcgagaccgctctcgccgcc

SEQ ID NO: 24088 - DNA, 54 bp, unidentified
  source 1..54: mol_type = unassigned DNA; note = methanogen bacteria
cccatactccaactggtcggaggggacgatacctatgccgaaggaagcgactac

SEQ ID NO: 24089 - DNA, 63 bp, unidentified
  source 1..63: mol_type = unassigned DNA; note = methanogen bacteria
tgggcggtgatcctgttcacctacgatgacagcaccatcggcatgcgcggggacatgatccac

SEQ ID NO: 24090 - DNA, 33 bp, unidentified
  source 1..33: mol_type = unassigned DNA; note = methanogen bacteria
gttgtgggattaggtcaggcagctattgcagga

SEQ ID NO: 24091 - DNA, 57 bp, unidentified
  source 1..57: mol_type = unassigned DNA; note = methanogen bacteria
ccgttgattaaaacttatggtgcatcaggccagtctttggctgagggacttaaatat

SEQ ID NO: 24092 - DNA, 36 bp, unidentified
  source 1..36: mol_type = unassigned DNA; note = methanogen bacteria
tcttcaattgctggcgaatacggtattgcagcattc

SEQ ID NO: 24093 - DNA, 63 bp, unidentified
  source 1..63: mol_type = unassigned DNA; note = methanogen bacteria
ttgtcattaatttttgcttacactcccgaaactgctaatttagttcctgaaattactaatttt

SEQ ID NO: 24094 - DNA, 30 bp, unidentified
  source 1..30: mol_type = unassigned DNA; note = methanogen bacteria
tgctcgtcgctcggcgtggatgccatgtcc

SEQ ID NO: 24095 - DNA, 57 bp, unidentified
  source 1..57: mol_type = unassigned DNA; note = methanogen bacteria
gattccctcataatcgcgatgggtgcggaggatgtattagaggagtgcagggattac

SEQ ID NO: 24096 - DNA, 33 bp, unidentified
  source 1..33: mol_type = unassigned DNA; note = methanogen bacteria
ctgcgctgcgggggaaccgagggactcgcggtc

SEQ ID NO: 24097 - DNA, 57 bp, unidentified
  source 1..57: mol_type = unassigned DNA; note = methanogen bacteria
ctgcgggtctacacccacagttcgagcatctcggagtaccacgacgagatggtccat

SEQ ID NO: 24098 - DNA, 36 bp, unidentified
  source 1..36: mol_type = unassigned DNA; note = methanogen bacteria
gtatcgggactcggctccgtggcaagttctgccgtg

SEQ ID NO: 24099 - DNA, 57 bp, unidentified
  source 1..57: mol_type = unassigned DNA; note = methanogen bacteria
gagccggcgatcgtcctgatgggagcggaggacgtcctcacggaatcgatcgaatat

SEQ ID NO: 24100 - DNA, 66 bp, unidentified
  source 1..66: mol_type = unassigned DNA; note = methanogen bacteria
gaaccgctgataaccatactgacgctggaagacagcatggtccctctccgtgaagacctggtctgg

SEQ ID NO: 24101 - DNA, 36 bp, unidentified
  source 1..36: mol_type = unassigned DNA; note = methanogen bacteria
tgcgcgggactcggcaccgcggccatgtccgccgtc

SEQ ID NO: 24102 - DNA, 57 bp, unidentified
  source 1..57: mol_type = unassigned DNA; note = methanogen bacteria
ggaccggttctcgacttcgtcaacaacggcggcgacacctccctgtgcgaggcttat

SEQ ID NO: 24103 - DNA, 36 bp, unidentified
  source 1..36: mol_type = unassigned DNA; note = methanogen bacteria
gtcatgcgtaccggcggggaagagggaatggtcctc

SEQ ID NO: 24104 - DNA, 66 bp, unidentified
  source 1..66: mol_type = unassigned DNA; note = methanogen bacteria
gacccgctcacatgggtgttcacctattcgggggacatggcggacctccatgacaaactggcggag

SEQ ID NO: 24105 - DNA, 36 bp, unidentified
  source 1..36: mol_type = unassigned DNA; note = methanogen bacteria
cccagcattgcaactgaatttggaatgagcaatatt

SEQ ID NO: 24106 - DNA, 36 bp, unidentified
  source 1..36: mol_type = unassigned DNA; note = methanogen bacteria
tatcacctgcaatacatcaagggatttgattcacag

SEQ ID NO: 24107 - DNA, 54 bp, unidentified
  source 1..54: mol_type = unassigned DNA; note = methanogen bacteria
gtaatgggtgatgttccgataattgagcagtactatcctctattgataagcagc

SEQ ID NO: 24108 - DNA, 36 bp, unidentified
  source 1..36: mol_type = unassigned DNA; note = methanogen bacteria
gtatctggccttggagctgatgcacttgcgggtgtt

SEQ ID NO: 24109 - DNA, 54 bp, unidentified
  source 1..54: mol_type = unassigned DNA; note = methanogen bacteria
cctattttaaatgctatgggtgcaggtcaaactattggctatgcaacagattat

SEQ ID NO: 24110 - DNA, 36 bp, unidentified
  source 1..36: mol_type = unassigned DNA; note = methanogen bacteria
gcatatttaggttcaactgattctgttgcggtatat

SEQ ID NO: 24111 - DNA, 69 bp, unidentified
  source 1..69: mol_type = unassigned DNA; note = methanogen bacteria
ggggatgttgcatcggtatttgcatcaagcggcagcagtgtcagaatcgcttcagagctgacaagcttt

SEQ ID NO: 24112 - DNA, 33 bp, unidentified
  source 1..33: mol_type = unassigned DNA; note = methanogen bacteria
gttgcagggctcggtcaggcggctattgcaggt

SEQ ID NO: 24113 - DNA, 57 bp, unidentified
  source 1..57: mol_type = unassigned DNA; note = methanogen bacteria
cctttgcttgagacttacggtgcaaacgaccagtcactggttgaagcaatcaactat

SEQ ID NO: 24114 - DNA, 36 bp, unidentified
  source 1..36: mol_type = unassigned DNA; note = methanogen bacteria
tcatcaatcggcggtgaatatggtattgcggcattc

SEQ ID NO: 24115 - DNA, 63 bp, unidentified
  source 1..63: mol_type = unassigned DNA; note = methanogen bacteria
ttatcaatgatttttgcatatactcctgaaactgctccgttaattccggaaattactaatttc

SEQ ID NO: 24116 - DNA, 33 bp, unidentified
  source 1..33: mol_type = unassigned DNA; note = methanogen bacteria
gttgcaggattgggtcaggcagctattgcagga

SEQ ID NO: 24117 - DNA, 48 bp, unidentified
  source 1..48: mol_type = unassigned DNA; note = methanogen bacteria
cttaaggcttatggtgcaagcggtcagtccttggttgaaggaataaaa

SEQ ID NO: 24118 - DNA, 39 bp, unidentified
  source 1..39: mol_type = unassigned DNA; note = methanogen bacteria
attgcttccgttggtggtgaatatggtatagcagcattt

SEQ ID NO: 24119 - DNA, 57 bp, unidentified
  source 1..57: mol_type = unassigned DNA; note = methanogen bacteria
tccttgatttttgcatatactccggaaaccgctccattgattcctgaaatcacaaac

SEQ ID NO: 24120 - DNA, 81 bp, unidentified
  source 1..81: mol_type = unassigned DNA; note = methanogen bacteria
attccattatacggtttagctccaggagcaatcgacagttttgctcaattaagggctgtaatggctggaagttttggttcc

SEQ ID NO: 24121 - DNA, 30 bp, unidentified
  source 1..30: mol_type = unassigned DNA; note = methanogen bacteria
ggaaatttagtccctattgatggttcatac

SEQ ID NO: 24122 - DNA, 99 bp, unidentified
  source 1..99: mol_type = unassigned DNA; note = methanogen bacteria
gtgggtaccttcagtatcttacctggaactgatggtttactcgcaggtattattccgaaattcatccaacaagctacaatgggaatgcctgacttctca

SEQ ID NO: 24123 - DNA, 108 bp, unidentified
  source 1..108: mol_type = unassigned DNA; note = methanogen bacteria
ttccaaaagattggtgtgccaatcctaggtcatatcgataagggaaaacctgttgatggaattgcatggttattatctacacctagtttgcaaaactttattactgaa

SEQ ID NO: 24124 - DNA, 39 bp, unidentified
  source 1..39: mol_type = unassigned DNA; note = methanogen bacteria
attccaacaatcgcagcggaataccatatgagcaatatc

SEQ ID NO: 24125 - DNA, 36 bp, unidentified
  source 1..36: mol_type = unassigned DNA; note = methanogen bacteria
taccacctgcaatacatcaaggggttcgactcacag

SEQ ID NO: 24126 - DNA, 54 bp, unidentified
  source 1..54: mol_type = unassigned DNA; note = methanogen bacteria
atcatgggtgatgttccaatcatcgaacaatactatccgctgctcatccaaagc

SEQ ID NO: 24127 - DNA, 36 bp, unidentified
  source 1..36: mol_type = unassigned DNA; note = methanogen bacteria
gttgcaggcatcaatgcggatgctctggctgctttg

SEQ ID NO: 24128 - DNA, 54 bp, unidentified
  source 1..54: mol_type = unassigned DNA; note = methanogen bacteria
gatttggttgtattgttgggtgcaggcagtgtcaagacatattgcctaagctat

SEQ ID NO: 24129 - DNA, 36 bp, unidentified
  source 1..36: mol_type = unassigned DNA; note = methanogen bacteria
atgaccactgcaggagtcagtgaagtcgcatcattc

SEQ ID NO: 24130 - DNA, 66 bp, unidentified
  source 1..66: mol_type = unassigned DNA; note = methanogen bacteria
tacccaatatgtgatgtattcaattttcaagcaggaaaccctgcccttgtcaatcgatcagctgaa

SEQ ID NO: 24131 - DNA, 81 bp, unidentified
  source 1..81: mol_type = unassigned DNA; note = methanogen bacteria
attccgttatacggtttagcacctggtgctattgacagtttcgctcaattgagagcagttatggcaggaagttttggttca

SEQ ID NO: 24132 - DNA, 30 bp, unidentified
  source 1..30: mol_type = unassigned DNA; note = methanogen bacteria
ggaaacctagtccctattgacggttcatac

SEQ ID NO: 24133 - DNA, 99 bp, unidentified
  source 1..99: mol_type = unassigned DNA; note = methanogen bacteria
gttggtacattcagtatcttaccgggaactgacggatttttagcaggtatcattcctaaattcatccagcaaatcatggctggaactcctaacttggct

SEQ ID NO: 24134 - DNA, 108 bp, unidentified
  source 1..108: mol_type = unassigned DNA; note = methanogen bacteria
ttccaaaagataggagttcctattttaggtcatatgcaacagggtaaacctgtagacggtattgcatggttattatcaacaccttccttgcagcatttcattactgaa

SEQ ID NO: 24135 - DNA, 33 bp, unidentified
  source 1..33: mol_type = unassigned DNA; note = methanogen bacteria
gtatctggattgggggcggatgcacttgcaggt

SEQ ID NO: 24136 - DNA, 51 bp, unidentified
  source 1..51: mol_type = unassigned DNA; note = methanogen bacteria
cccattttaaacattatgggagccgctcaaacaatagaatatgctacagat

SEQ ID NO: 24137 - DNA, 36 bp, unidentified
  source 1..36: mol_type = unassigned DNA; note = methanogen bacteria
gcatatgttggctcgacggattctgttgcggtttat

SEQ ID NO: 24138 - DNA, 69 bp, unidentified
  source 1..69: mol_type = unassigned DNA; note = methanogen bacteria
ggagatattgcatctatttttacctcaactggaagcagtatgagaattgcctctgaactcacgggattc

SEQ ID NO: 24139 - DNA, 81 bp, unidentified
  source 1..81: mol_type = unassigned DNA; note = methanogen bacteria
attccattgtatggtatagatccaagagcaattgatagttttgctgctttaagagcagttatggcaggaagttttggttca

SEQ ID NO: 24140 - DNA, 93 bp, unidentified
  source 1..93: mol_type = unassigned DNA; note = methanogen bacteria
acattcagtttcttaagaggtagtaatggagactttggtggaattcttccaagattcatcgaacagtgtgtagctggaagacctgattttgct

SEQ ID NO: 24141 - DNA, 108 bp, unidentified
  source 1..108: mol_type = unassigned DNA; note = methanogen bacteria
ttccaaaaaattggtttcccaattttaggtcatactgttaatggtaaggcagttgatggtgttgcatggttattaactactccaaatttatcaatgtttataactgaa

SEQ ID NO: 24142 - DNA, 45 bp, unidentified
  source 1..45: mol_type = unassigned DNA; note = methanogen bacteria
gatgcggctttcaccggcagcgaaccggcttccagcggggacacc

SEQ ID NO: 24143 - DNA, 93 bp, unidentified
  source 1..93: mol_type = unassigned DNA; note = methanogen bacteria
tcgctggccttcggttccacgggaggcatcatagggaacctggacttcgtgttcatgaacggattggacgagggtcagagcgactactccgtc

SEQ ID NO: 24144 - DNA, 57 bp, unidentified
  source 1..57: mol_type = unassigned DNA; note = methanogen bacteria
cactgggtttggagcgggggcttcgagagcatcggactgaccgtactcgatttcgca

SEQ ID NO: 24145 - DNA, 36 bp, unidentified
  source 1..36: mol_type = unassigned DNA; note = methanogen bacteria
aacggcggatcaggtctcttcgccaacgggcaggcc

SEQ ID NO: 24146 - DNA, 60 bp, unidentified
  source 1..60: mol_type = unassigned DNA; note = methanogen bacteria
ttcgcagagagcaagtacaccggagggaccgtcggattgctgttcggaggcacggacctg

SEQ ID NO: 24147 - DNA, 81 bp, unidentified
  source 1..81: mol_type = unassigned DNA; note = methanogen bacteria
ataccattatatggtttagctccaggagctattgatagtttcgctcaattaagggctgttatggctggaagttttggttca

SEQ ID NO: 24148 - DNA, 30 bp, unidentified
  source 1..30: mol_type = unassigned DNA; note = methanogen bacteria
ggaaacttggttcctattgacggttcctat

SEQ ID NO: 24149 - DNA, 99 bp, unidentified
  source 1..99: mol_type = unassigned DNA; note = methanogen bacteria
ggtacattcagtatcctacaaggtacagacggtttacttgcaggtattattcctaaattcatccaacaggctactatgggaactcctgacttttatgct

SEQ ID NO: 24150 - DNA, 105 bp, unidentified
  source 1..105: mol_type = unassigned DNA; note = methanogen bacteria
caaaagatcggtttccctattttaggacacctggaaaagggtaaggctgttgacggtattgcttggttgttaacaacacctaacctgacaatgtttattacagaa

SEQ ID NO: 24151 - DNA, 33 bp, unidentified
  source 1..33: mol_type = unassigned DNA; note = methanogen bacteria
gttgcaggattgggccaggcagctattgcgggg

SEQ ID NO: 24152 - DNA, 60 bp, unidentified
  source 1..60: mol_type = unassigned DNA; note = methanogen bacteria
gagcctttacttatagcttatggggcatcaggccaatctttggctgaaggaattaaatat

SEQ ID NO: 24153 - DNA, 36 bp, unidentified
  source 1..36: mol_type = unassigned DNA; note = methanogen bacteria
tcatcagttggtggtgaatatggtatagcagcattc

SEQ ID NO: 24154 - DNA, 63 bp, unidentified
  source 1..63: mol_type = unassigned DNA; note = methanogen bacteria
ttatcaatgatttttgcatatactcctgaaactgctccgcttattcctgaaatcactaacttt

SEQ ID NO: 24155 - DNA, 36 bp, unidentified
  source 1..36: mol_type = unassigned DNA; note = methanogen bacteria
ccaagtattgccagtgagtatggaatgagcaatatt

SEQ ID NO: 24156 - DNA, 36 bp, unidentified
  source 1..36: mol_type = unassigned DNA; note = methanogen bacteria
tatcatttgcagtatattaagggatttgattcacag

SEQ ID NO: 24157 - DNA, 54 bp, unidentified
  source 1..54: mol_type = unassigned DNA; note = methanogen bacteria
gtaatgggaaatgttcctattattgaacagtattatccattactgataagcagc

SEQ ID NO: 24158 - DNA, 33 bp, unidentified
  source 1..33: mol_type = unassigned DNA; note = methanogen bacteria
gtttccggcattggagctgatgcccttgcaggt

SEQ ID NO: 24159 - DNA, 57 bp, unidentified
  source 1..57: mol_type = unassigned DNA; note = methanogen bacteria
aaagatatcttaatatttatgggcgcatcacaaactttaaattatgcgatggattac

SEQ ID NO: 24160 - DNA, 36 bp, unidentified
  source 1..36: mol_type = unassigned DNA; note = methanogen bacteria
gctttcatatcctcaacagattctgtcgcagtttat

SEQ ID NO: 24161 - DNA, 63 bp, unidentified
  source 1..63: mol_type = unassigned DNA; note = methanogen bacteria
caaattgcctctgtattttcatattcttcaggtagtgctcgaatatctgctgaattgacggca

SEQ ID NO: 24162 - DNA, 78 bp, unidentified
  source 1..78: mol_type = unassigned DNA; note = methanogen bacteria
ccattatacggacttagtcctggtgctattgataacttggctcaattgagagctgttatggctggaagttttggttcc

SEQ ID NO: 24163 - DNA, 30 bp, unidentified
  source 1..30: mol_type = unassigned DNA; note = methanogen bacteria
ggtaacttagtgcctattgatggttcttat

SEQ ID NO: 24164 - DNA, 96 bp, unidentified
  source 1..96: mol_type = unassigned DNA; note = methanogen bacteria
ggtactttcagcttcttacaaggaactgatggtttatttacaggtatacttcctaaattcattcaattagctactactggtgtttatgatgtcaca

SEQ ID NO: 24165 - DNA, 105 bp, unidentified
  source 1..105: mol_type = unassigned DNA; note = methanogen bacteria
caaaaaataggttttccaatttttggtcatattcaagatggtaaaccagttgatggaattgcatggttattatcaactccaaaatggtacatgtttgtaacagaa

SEQ ID NO: 24166 - DNA, 39 bp, unidentified
  source 1..39: mol_type = unassigned DNA; note = methanogen bacteria
gaatattctctaggcattgatacggtaaatattgtcggt

SEQ ID NO: 24167 - DNA, 54 bp, unidentified
  source 1..54: mol_type = unassigned DNA; note = methanogen bacteria
aacattgttaacctctttgccaatgaaaatactgttgttgaaccgggagttata

SEQ ID NO: 24168 - DNA, 30 bp, unidentified
  source 1..30: mol_type = unassigned DNA; note = methanogen bacteria
cttttgataaatggtgaaattcagttaggt

SEQ ID NO: 24169 - DNA, 36 bp, unidentified
  source 1..36: mol_type = unassigned DNA; note = methanogen bacteria
ccatccattgcagcagaatttcatatgagcaatatc

SEQ ID NO: 24170 - DNA, 36 bp, unidentified
  source 1..36: mol_type = unassigned DNA; note = methanogen bacteria
tatcaccttcaatacatcaagggttttgattcacag

SEQ ID NO: 24171 - DNA, 51 bp, unidentified
  source 1..51: mol_type = unassigned DNA; note = methanogen bacteria
atgggaaatgtgcctataatagaacagtactatcctcttttgataaccagc

SEQ ID NO: 24172 - DNA, 33 bp, unidentified
  source 1..33: mol_type = unassigned DNA; note = methanogen bacteria
gttgctggattgggtcaggcggctattgcgggg

SEQ ID NO: 24173 - DNA, 51 bp, unidentified
  source 1..51: mol_type = unassigned DNA; note = methanogen bacteria
cttaaggcttatggtgcaagcggccagtcactggctgaagcaatcaaatat

SEQ ID NO: 24174 - DNA, 36 bp, unidentified
  source 1..36: mol_type = unassigned DNA; note = methanogen bacteria
tcatctgttggcggagaatacggtattgctgcattt

SEQ ID NO: 24175 - DNA, 63 bp, unidentified
  source 1..63: mol_type = unassigned DNA; note = methanogen bacteria
ctgtcattgcttttcgcatatactcctgaaactgcgtctttagttcctgaaattactaacttt

SEQ ID NO: 24176 - DNA, 30 bp, unidentified
  source 1..30: mol_type = unassigned DNA; note = methanogen bacteria
gcatttttaagcccatacattccttacagt

SEQ ID NO: 24177 - DNA, 33 bp, unidentified; identical to SEQ ID NO: 23624
  source 1..33: mol_type = unassigned DNA; note = methanogen bacteria

SEQ ID NO: 24178 - DNA, 51 bp, unidentified; identical to SEQ ID NO: 23625
  source 1..51: mol_type = unassigned DNA; note = methanogen bacteria

SEQ ID NO: 24179 - DNA, 36 bp, unidentified
  source 1..36: mol_type = unassigned DNA; note = methanogen bacteria
gcttatgttggctcaacagattccgttgcggtttac

SEQ ID NO: 24180 - DNA, 69 bp, unidentified
  source 1..69: mol_type = unassigned DNA; note = methanogen bacteria
ggggacattgcatcaattttcgcttcaagcggaagcagcgtgaggattgccggtgaactgacaagtttt

SEQ ID NO: 24181 - DNA, 36 bp, unidentified
  source 1..36: mol_type = unassigned DNA; note = methanogen bacteria
ccttcaatatcttcgaatttacatttggattttgaa

SEQ ID NO: 24182 - DNA, 30 bp, unidentified
  source 1..30: mol_type = unassigned DNA; note = methanogen bacteria
tatttgcaatatgttatgggatatgatgct

SEQ ID NO: 24183 - DNA, 54 bp, unidentified
  source 1..54: mol_type = unassigned DNA; note = methanogen bacteria
actgtaggacctaccaatacttttatggataatccttcttcaatcgtactgcct

SEQ ID NO: 24184 - DNA, 33 bp, unidentified
  source 1..33: mol_type = unassigned DNA; note = methanogen bacteria
ataacaggtattggaaaagctgcaattgccggt

SEQ ID NO: 24185 - DNA, 51 bp, unidentified
  source 1..51: mol_type = unassigned DNA; note = methanogen bacteria
tatctgagtacgttcaatattgatgaaaatgcttttaatcaatccatgatg

SEQ ID NO: 24186 - DNA, 33 bp, unidentified
  source 1..33: mol_type = unassigned DNA; note = methanogen bacteria
tcttcaattggaggtaattacggaactgcaatt

SEQ ID NO: 24187 - DNA, 69 bp, unidentified
  source 1..69: mol_type = unassigned DNA; note = methanogen bacteria
gaacctttaagctttactttcgcatatactgtagaaaccagtgatttattaaatggtttagttgaattt

SEQ ID NO: 24188 - DNA, 84 bp, unidentified
  source 1..84: mol_type = unassigned DNA; note = methanogen bacteria
attccattatacggtttagctcctggagctattgaccagtttgctcaagtaagggcagttatggcgggaagttttggttcaatt

SEQ ID NO: 24189 - DNA, 30 bp, unidentified
  source 1..30: mol_type = unassigned DNA; note = methanogen bacteria
ggtaacttaactcctatagacggttcatat

SEQ ID NO: 24190 - DNA, 96 bp, unidentified
  source 1..96: mol_type = unassigned DNA; note = methanogen bacteria
ggtacattcagtatcttaaacggaactgatggtctgttcgcaggtatcattccaaaattcatccaaaatgcaaccatgggagtttatgacttctct

SEQ ID NO: 24191 - DNA, 108 bp, unidentified
  source 1..108: mol_type = unassigned DNA; note = methanogen bacteria
ttccaaaagataggtgttcctattttaggtcacattgataagggtaaacctgttgacggtattgcatggcttttatcaacacctaaactgcacatgttcattacagaa

SEQ ID NO: 24192 - DNA, 36 bp, unidentified
  source 1..36: mol_type = unassigned DNA; note = methanogen bacteria
ccgtcaatggcttcggatttacatttgaatgttgat

SEQ ID NO: 24193 - DNA, 30 bp, unidentified
  source 1..30: mol_type = unassigned DNA; note = methanogen bacteria
tatttgcagcatgttttgggatatgatgct

SEQ ID NO: 24194 - DNA, 54 bp, unidentified
  source 1..54: mol_type = unassigned DNA; note = methanogen bacteria
gtattagggtctaacagcactcttgacaataatgcgtcttcattcatattgtct

SEQ ID NO: 24195 - DNA, 36 bp, unidentified
  source 1..36: mol_type = unassigned DNA; note = methanogen bacteria
gtttcaggcatcaattccaatgccttggcggcattg

SEQ ID NO: 24196 - DNA, 54 bp, unidentified
  source 1..54: mol_type = unassigned DNA; note = methanogen bacteria
gacttggtaatatttttgggtgcaggtggtgtcagtacatattgcctaagctat

SEQ ID NO: 24197 - DNA, 36 bp, unidentified
  source 1..36: mol_type = unassigned DNA; note = methanogen bacteria
atcacaactgcaggagtcggagaagttgctgcattc

SEQ ID NO: 24198 - DNA, 66 bp, unidentified
  source 1..66: mol_type = unassigned DNA; note = methanogen bacteria
tatcccctttgcgaatttttcaacttccaggcgggaaatcctgcccttgtgcataggtctgtggag

SEQ ID NO: 24199 - DNA, 30 bp, unidentified
  source 1..30: mol_type = unassigned DNA; note = methanogen bacteria
gtggcatcacttggtgaagctgcaatttca

SEQ ID NO: 24200 - DNA, 54 bp, unidentified
  source 1..54: mol_type = unassigned DNA; note = methanogen bacteria
attggaatattatttggccagattgatgctgaagtatggcataatgctgatgta

SEQ ID NO: 24201 - DNA, 30 bp, unidentified
  source 1..30: mol_type = unassigned DNA; note = methanogen bacteria
tcaacattcggaacaatggcaattgctgca

SEQ ID NO: 24202 - DNA, 51 bp, unidentified
  source 1..51: mol_type = unassigned DNA; note = methanogen bacteria
ttaggcatttataatttatctgcccaaactgcagcgatggcaactgaaatg

SEQ ID NO: 24203 - DNA, 78 bp, unidentified
  source 1..78: mol_type = unassigned DNA; note = methanogen bacteria
ccattatatggtttagctcctggagctattgattcatttgctcaattaagagcagttatggctggaagttttggttca

SEQ ID NO: 24204 - DNA, 96 bp, unidentified
  source 1..96: mol_type = unassigned DNA; note = methanogen bacteria
ggtacatttagtattttaaatggatcagacggtttattggcaggtatcattcctaaatttattcaactagctaccaaaggtacttatgatttctca

SEQ ID NO: 24205 - DNA, 105 bp, unidentified
  source 1..105: mol_type = unassigned DNA; note = methanogen bacteria
caaaagattggagttccaattttaggacatatcaataagggtaagccagttgatggtattgcttggttattatccactccaaaattatccatgtttgttacagaa

SEQ ID NO: 24206 - DNA, 30 bp, unidentified
  source 1..30: mol_type = unassigned DNA; note = methanogen bacteria
atgctggctgaaggtggaatgcctgccaat

SEQ ID NO: 24207 - DNA, 54 bp, unidentified
  source 1..54: mol_type = unassigned DNA; note = methanogen bacteria
ggaattattgtaaatgatccgtcaacttatgttacaatgggtaatctgcttgca

SEQ ID NO: 24208 - DNA, 120 bp, unidentified
  source 1..120: mol_type = unassigned DNA; note = methanogen bacteria
ggattcggaactggaaatccgttaatgccgtcaattcctgcacaattcatatctgtcaattttgattttagtctctttggaggatttttgcgaggattcgcacagcttttctcaaatatt

SEQ ID NO: 24209 - DNA, 30 bp, unidentified
  source 1..30: mol_type = unassigned DNA; note = methanogen bacteria
tcccaaatgaatgcagaatcattttttgca

SEQ ID NO: 24210 - DNA, 48 bp, unidentified
  source 1..48: mol_type = unassigned DNA; note = methanogen bacteria
ttaatttatatgggcgccacttcttctatggacatatccatgcaatat

SEQ ID NO: 24211 - DNA, 48 bp, unidentified
  source 1..48: mol_type = unassigned DNA; note = methanogen bacteria
tatggatttgctttattttcagtaactggagcatcaacatccatattt

SEQ ID NO: 24212 - DNA, 36 bp, unidentified
  source 1..36: mol_type = unassigned DNA; note = methanogen bacteria
ccgaccgttgccgctgaatttcacatgagcaatatt

SEQ ID NO: 24213 - DNA, 36 bp, unidentified
  source 1..36: mol_type = unassigned DNA; note = methanogen bacteria
tatcacctgcagtacattaagggattcgattcacag

SEQ ID NO: 24214 - DNA, 54 bp, unidentified
  source 1..54: mol_type = unassigned DNA; note = methanogen bacteria
gtgatgggtaatgtggctattgtttccgatgtttatccgttgttgataagcagc

SEQ ID NO: 24215 - DNA, 39 bp, unidentified
  source 1..39: mol_type = unassigned DNA; note = methanogen bacteria
cctgcaatatctgcggatttgcatttggatgttgagatg

SEQ ID NO: 24216 - DNA, 36 bp, unidentified
  source 1..36: mol_type = unassigned DNA; note = methanogen bacteria
gactatctgcagcatattttaggatatgatgctcgt

SEQ ID NO: 24217 - DNA, 54 bp, unidentified
  source 1..54: mol_type = unassigned DNA; note = methanogen bacteria
ttcatggggtctgctgacacttttgccaataatgcaatgccattcatgatgtct

SEQ ID NO: 24218 - DNA, 30 bp, unidentified
  source 1..30: mol_type = unassigned DNA; note = methanogen bacteria
gttgcatcattgggtgaagcggcaatttcg

SEQ ID NO: 24219 - DNA, 57 bp, unidentified
  source 1..57: mol_type = unassigned DNA; note = methanogen bacteria
ctgattggaatcctcttcggtcaaatcgaagcggacgtgtgggcaaatgcggatatg

SEQ ID NO: 24220 - DNA, 30 bp, unidentified
  source 1..30: mol_type = unassigned DNA; note = methanogen bacteria
tcaacattcggaacaatggcaatagctgca

SEQ ID NO: 24221 - DNA, 54 bp, unidentified
  source 1..54: mol_type = unassigned DNA; note = methanogen bacteria
attttgggcatatacaacctgtcggcccaaactgcagtcatggccagtgaaatg

SEQ ID NO: 24222 - DNA, 30 bp, unidentified
  source 1..30: mol_type = unassigned DNA; note = methanogen bacteria
gcttaccttggaccatatattccatattct

SEQ ID NO: 24223 - DNA, 30 bp, unidentified
  source 1..30: mol_type = unassigned DNA; note = methanogen bacteria
tccatttttgatgccaatgcattttatgcc

SEQ ID NO: 24224 - DNA, 57 bp, unidentified
  source 1..57: mol_type = unassigned DNA; note = methanogen bacteria
gatgatatgattggtgccatgaggattaccaactctgtgaatctggttaagttatat

SEQ ID NO: 24225 - DNA, 48 bp, unidentified
  source 1..48: mol_type = unassigned DNA; note = methanogen bacteria
tctatcttttatgcatttcagattttcggcatgaacgaggcggtaaca

SEQ ID NO: 24226 - DNA, 33 bp, unidentified
  source 1..33: mol_type = unassigned DNA; note = methanogen bacteria
gttgcttcattgggtgaagcagcaatctcagga

SEQ ID NO: 24227 - DNA, 57 bp, unidentified
  source 1..57: mol_type = unassigned DNA; note = methanogen bacteria
ctaattggaatgctttttgggcagattgaaatggatgtgtggcataatgccgaagtc

SEQ ID NO: 24228 - DNA, 33 bp, unidentified
  source 1..33: mol_type = unassigned DNA; note = methanogen bacteria
tcaacattcggaacaatggcaatagctgcaaat

SEQ ID NO: 24229 - DNA, 51 bp, unidentified
  source 1..51: mol_type = unassigned DNA; note = methanogen bacteria
ttaaacatttacgatttatctgctcaaaccgctgaaatgacaactgaaatg

SEQ ID NO: 24230 - DNA, 30 bp, unidentified
  source 1..30: mol_type = unassigned DNA; note = methanogen bacteria
gtagcttcacttggtgaggcagctatttca

SEQ ID NO: 24231 - DNA, 54 bp, unidentified
  source 1..54: mol_type = unassigned DNA; note = methanogen bacteria
atcgggttattgtttggtcaaattgaagcggacgtgtggcacaatgctgatatg

SEQ ID NO: 24232 - DNA, 30 bp, unidentified
  source 1..30: mol_type = unassigned DNA; note = methanogen bacteria
tccacttttggaacaatggcgatagctgca

SEQ ID NO: 24233 - DNA, 54 bp, unidentified
  source 1..54: mol_type = unassigned DNA; note = methanogen bacteria
attttggggatttacaacctgtctgcccaaactgcaacaatggcgagtgaaatg

SEQ ID NO: 24234 - DNA, 30 bp, unidentified
  source 1..30: mol_type = unassigned DNA; note = methanogen bacteria
gttgcatctttgggtgaagctgcaatttca

SEQ ID NO: 24235 - DNA, 57 bp, unidentified
  source 1..57: mol_type = unassigned DNA; note = methanogen bacteria
cttattggcgtacttttcggacaaattgaagccgacgtatggcacaatgcggacata

SEQ ID NO: 24236 - DNA, 30 bp, unidentified
  source 1..30: mol_type = unassigned DNA; note = methanogen bacteria
tcaacatttggaacaatggcaatagcagca

SEQ ID NO: 24237 - DNA, 51 bp, unidentified
  source 1..51: mol_type = unassigned DNA; note = methanogen bacteria
ttaggaatatacaacctctcagaccagactgcggtaatggcgtctgaaatg

SEQ ID NO: 24238 - DNA, 33 bp, unidentified
  source 1..33: mol_type = unassigned DNA; note = methanogen bacteria
gtggcctctttaggagaggctgcaatttcaggt

SEQ ID NO: 24239 - DNA, 57 bp, unidentified
  source 1..57: mol_type = unassigned DNA; note = methanogen bacteria
ctaataacagtcttattcggtcagattgaagctgacgtgtggaatacggctaatatg

SEQ ID NO: 24240 - DNA, 30 bp, unidentified
  source 1..30: mol_type = unassigned DNA; note = methanogen bacteria
tcaacctttggaacgatggccatagctgca

SEQ ID NO: 24241 - DNA, 51 bp, unidentified
  source 1..51: mol_type = unassigned DNA; note = methanogen bacteria
ttagatatttatggtttatccgcaaaaaccgctcagatggcatttgaaatg

SEQ ID NO: 24242 - DNA, 57 bp, unidentified
  source 1..57: mol_type = unassigned DNA; note = methanogen bacteria
ggagatattttaaaattatttattggggcaaaacaggttccctacgtttatatttac

SEQ ID NO: 24243 - DNA, 48 bp, unidentified
  source 1..48: mol_type = unassigned DNA; note = methanogen bacteria
ctatcatatttcacaaatcaggctaatgtcatttccgaagttagaagt

SEQ ID NO: 24244 - DNA, 33 bp, unidentified
  source 1..33: mol_type = unassigned DNA; note = methanogen bacteria
gtagcatctcttggagaagctgcaatttcaggc

SEQ ID NO: 24245 - DNA, 57 bp, unidentified
  source 1..57: mol_type = unassigned DNA; note = methanogen bacteria
ttcatatcagttctctttggccagattgaagctgatgtgtggaataatgccgatatc

SEQ ID NO: 24246 - DNA, 30 bp, unidentified
  source 1..30: mol_type = unassigned DNA; note = methanogen bacteria
tcaacattcggaaccatggcaatagctgca

SEQ ID NO: 24247 - DNA, 51 bp, unidentified
  source 1..51: mol_type = unassigned DNA; note = methanogen bacteria
ttgggtatttataatttgtctgcccagactgcacagatgacaacggaaatg

SEQ ID NO: 24248 - DNA, 42 bp, unidentified
  source 1..42: mol_type = unassigned DNA; note = methanogen bacteria
aactactacggaaagctgattataagcaattcgaaattaatc

SEQ ID NO: 24249 - DNA, 57 bp, unidentified
  source 1..57: mol_type = unassigned DNA; note = methanogen bacteria
ggaaaaatgaccattaaaaattgcataataaataataatgtaggaaaaaaatctgtt

SEQ ID NO: 24250 - DNA, 240 bp, unidentified
  source 1..240: mol_type = unassigned DNA; note = methanogen bacteria
tttacaggggcaataggcaactatggaaaattaactgtaaaaaattccaaattaaataacaattatgtaaaatatgatggcggagcaatcaccaattacgaatcaaaagtaacacttttaaaatgtgcaataaacaacaaccaggcaatgaccgcaggtggggcaatatgcaacgttgcaagtcttaccattagccactgtacactatacaaaaacaaatccccacaaggaggagcgatt

SEQ ID NO: 24251 - DNA, 114 bp, unidentified
  source 1..114: mol_type = unassigned DNA; note = methanogen bacteria
gaccatgggaaaataacaattaaaaacagtaaattaaaattcaataaacccggaggtaaaggaacaataaagattgaaagtggaaaagtaacaattattaagacgacaattaaa

SEQ ID NO: 24252 - DNA, 30 bp, unidentified
  source 1..30: mol_type = unassigned DNA; note = methanogen bacteria
gtggcatcactgggtgaagctgcgatttca

SEQ ID NO: 24253 - DNA, 57 bp, unidentified
  source 1..57: mol_type = unassigned DNA; note = methanogen bacteria
ctgattggaactttatttggccatattgaagctgacgtatggcataatgcagaatta

SEQ ID NO: 24254 - DNA, 30 bp, unidentified; identical to SEQ ID NO: 24220
  source 1..30: mol_type = unassigned DNA; note = methanogen bacteria

SEQ ID NO: 24255 - DNA, 51 bp, unidentified
  source 1..51: mol_type = unassigned DNA; note = methanogen bacteria
ttgggcatttacaacctctctgcccaaactgctcaaatggcaactgaaatg

SEQ ID NO: 24256 - DNA, 69 bp, unidentified
  source 1..69: mol_type = unassigned DNA; note = methanogen bacteria
accaaatggggagcgatggcaggtgcggcgattccaaatccatatctggcatcattcgttcaaaagggt

SEQ ID NO: 24257 - DNA, 108 bp, unidentified
  source 1..108: mol_type = unassigned DNA; note = methanogen bacteria
ttcccgttgggggttccttacggatctcagcaaagccttctgggaatgtttggatctgcaatagcgccggttttcaagcctctgggtttcggaacctggcaggcggca

SEQ ID NO: 24258 - DNA, 75 bp, unidentified
  source 1..75: mol_type = unassigned DNA; note = methanogen bacteria
ggtacgctgggcggacttgaagaggatgacgaagagggaataacaagtctggttcgggatgttttcactcctttg

SEQ ID NO: 24259 - DNA, 33 bp, unidentified
  source 1..33: mol_type = unassigned DNA; note = methanogen bacteria
gtggcatcactcggtgaggtcgcaatttcggga

SEQ ID NO: 24260 - DNA, 57 bp, unidentified
  source 1..57: mol_type = unassigned DNA; note = methanogen bacteria
cttataggattgcttttcggtcagattgaatccgatgtctgggcgatagccgagatg

SEQ ID NO: 24261 - DNA, 33 bp, unidentified
  source 1..33: mol_type = unassigned DNA; note = methanogen bacteria
tcaacattcggaaccatggcgatagcggcaaac

SEQ ID NO: 24262 - DNA, 54 bp, unidentified
  source 1..54: mol_type = unassigned DNA; note = methanogen bacteria
atcataggaatatacaatctctctccagaaacggccgccatggccagcgagatg

SEQ ID NO: 24263 - DNA, 30 bp, unidentified
  source 1..30: mol_type = unassigned DNA; note = methanogen bacteria
tctcaattgagtccagatgcattttttgca

SEQ ID NO: 24264 - DNA, 54 bp, unidentified
  source 1..54: mol_type = unassigned DNA; note = methanogen bacteria
gatattttgagtttaatgaatgttaccacttctgttgatttagcaatagattat

SEQ ID NO: 24265 - DNA, 48 bp, unidentified
  source 1..48: mol_type = unassigned DNA; note = methanogen bacteria
tatggatttgctttattctctgttacaggtgttgaaacatcagtattt

SEQ ID NO: 24266 - DNA, 93 bp, unidentified
  source 1..93: mol_type = unassigned DNA; note = methanogen bacteria
tccagtttaaatttcaactggggaactaattcggcactttattttttagaaaatgttggcggaagctcaaatttatctaatatgactaatttc

SEQ ID NO: 24267 - DNA, 72 bp, unidentified
  source 1..72: mol_type = unassigned DNA; note = methanogen bacteria
acactgccaggtgctaatataggtataaatacactactaaaaccagattggcaaatgcttttaaatgttaat

SEQ ID NO: 24268 - DNA, 48 bp, unidentified
  source 1..48: mol_type = unassigned DNA; note = methanogen bacteria
ggatatatgtcctatacttctggaacacctatgaccaaattggtaagt

SEQ ID NO: 24269 - DNA, 36 bp, unidentified
  source 1..36: mol_type = unassigned DNA; note = methanogen bacteria
atggtggcatcacttggtgaagctgcaatttctgga

SEQ ID NO: 24270 - DNA, 57 bp, unidentified
  source 1..57: mol_type = unassigned DNA; note = methanogen bacteria
attattggattactgttcggacagattgaagctgatgtctgggcaaatgctaacgtt

SEQ ID NO: 24271 - DNA, 33 bp, unidentified
  source 1..33: mol_type = unassigned DNA; note = methanogen bacteria
tccacatttggaacaatggcgattgccgcaaat

SEQ ID NO: 24272 - DNA, 51 bp, unidentified
  source 1..51: mol_type = unassigned DNA; note = methanogen bacteria
ctaggcatgtatggtttatcgacccacacgacttcgatgacggcagaaatg

SEQ ID NO: 24273 - DNA, 30 bp, unidentified
  source 1..30: mol_type = unassigned DNA; note = methanogen bacteria
gttgcatcacttggtgaagcggctatttca

SEQ ID NO: 24274 - DNA, 57 bp, unidentified
  source 1..57: mol_type = unassigned DNA; note = methanogen bacteria
ctcataggtgtcctgttcggccagatcgaggctgacgtatggcacaatgcagacatg

SEQ ID NO: 24275 - DNA, 30 bp, unidentified
  source 1..30: mol_type = unassigned DNA; note = methanogen bacteria
tcaactttcggtacaatggcgatagctgca

SEQ ID NO: 24276 - DNA, 51 bp, unidentified
  source 1..51: mol_type = unassigned DNA; note = methanogen bacteria
cttggcatatacaacctatccgctgagaccgctcgcatgacaactgaaatg

SEQ ID NO: 24277 - DNA, 33 bp, unidentified
  source 1..33: mol_type = unassigned DNA; note = methanogen bacteria
gtggcatcactgggtgaagcagccatcagcggt

SEQ ID NO: 24278 - DNA, 57 bp, unidentified
  source 1..57: mol_type = unassigned DNA; note = methanogen bacteria
atgattggcatattatttggtcatattgaggcggacgtatggaacaatgcagacata

SEQ ID NO: 24279 - DNA, 33 bp, unidentified; identical to SEQ ID NO: 24228
  source 1..33: mol_type = unassigned DNA; note = methanogen bacteria

SEQ ID NO: 24280 - DNA, 51 bp, unidentified
  source 1..51: mol_type = unassigned DNA; note = methanogen bacteria
ttggacatctatcagctgtcagagcaaactgctgcaatgacaactgaaatg

SEQ ID NO: 24281 - DNA, 30 bp, unidentified
  source 1..30: mol_type = unassigned DNA; note = methanogen bacteria
gtggcttcattaggtgaagcggccatatca

SEQ ID NO: 24282 - DNA, 57 bp, unidentified
  source 1..57: mol_type = unassigned DNA; note = methanogen bacteria
ttaattgggctcttgtttggacacattgaggctgacgtttgggcgaacgccgacgta

SEQ ID NO: 24283 - DNA, 30 bp, unidentified
  source 1..30: mol_type = unassigned DNA; note = methanogen bacteria
tcaacattcgggacaatggcaatagctgca

SEQ ID NO: 24284 - DNA, 54 bp, unidentified
  source 1..54: mol_type = unassigned DNA; note = methanogen bacteria
gttttaggcatttacaacctatcggcaaaaacggctgcaatgaccactgagatg

SEQ ID NO: 24285 - DNA, 36 bp, unidentified
  source 1..36: mol_type = unassigned DNA; note = methanogen bacteria
cagttcgaggagggtgatgatctcgccgggatattc

SEQ ID NO: 24286 - DNA, 51 bp, unidentified
  source 1..51: mol_type = unassigned DNA; note = methanogen bacteria
gattggattttcgggacgttctacggcgaggagatggagccgtattcgcgt

SEQ ID NO: 24287 - DNA, 33 bp, unidentified
  source 1..33: mol_type = unassigned DNA; note = methanogen bacteria
tcaggcattaacggagatgcacttgccgcactg

SEQ ID NO: 24288 - DNA, 54 bp, unidentified
  source 1..54: mol_type = unassigned DNA; note = methanogen bacteria
gacatggtgattttattgggggcatcggatgtcagttcatattgcctgagttat

SEQ ID NO: 24289 - DNA, 33 bp, unidentified
  source 1..33: mol_type = unassigned DNA; note = methanogen bacteria
atgcagacctccggtatagcggaagtggcatcc

SEQ ID NO: 24290 - DNA, 66 bp, unidentified
  source 1..66: mol_type = unassigned DNA; note = methanogen bacteria
catccgatatgtgaagtattcaacgtccaggcagcaaacccttcactggttgcaaggtcggctgag

SEQ ID NO: 24291 - DNA, 54 bp, unidentified
  source 1..54: mol_type = unassigned DNA; note = methanogen bacteria
cctaacgatgcaattgtagcaaaacatttagaacttaaaatacaacatccagaa

SEQ ID NO: 24292 - DNA, 60 bp, unidentified
  source 1..60: mol_type = unassigned DNA; note = methanogen bacteria
caaggaatacttgaatttgtacctgattccaagattacacttgaaggattatgtgtagaa

SEQ ID NO: 24293 - DNA, 33 bp, unidentified
  source 1..33: mol_type = unassigned DNA; note = methanogen bacteria
aaagaatgtaaatacggtgcacgtaaattcgct

SEQ ID NO: 24294 - DNA, 30 bp, unidentified
  source 1..30: mol_type = unassigned DNA; note = methanogen bacteria
gtggcttcattaggtgaagcagcgatttcg

SEQ ID NO: 24295 - DNA, 57 bp, unidentified
  source 1..57: mol_type = unassigned DNA; note = methanogen bacteria
ttaataggaactttatttggtcaaattgaagctgatgtttggcagaatgctgaaatg

SEQ ID NO: 24296 - DNA, 30 bp, unidentified
  source 1..30: mol_type = unassigned DNA; note = methanogen bacteria
tcaacattcggaacaatggcgattgctgca

SEQ ID NO: 24297 - DNA, 51 bp, unidentified
  source 1..51: mol_type = unassigned DNA; note = methanogen bacteria
ttgggtatttacaatttatcgtctgaaactgcagcaatgacaactgaaatg

SEQ ID NO: 24298 - DNA, 30 bp, unidentified
  source 1..30: mol_type = unassigned DNA; note = methanogen bacteria
gcaggacttggtgcagatgctttagcagcg

SEQ ID NO: 24299 - DNA, 48 bp, unidentified
  source 1..48: mol_type = unassigned DNA; note = methanogen bacteria
ctcataattatgggcgcaagtagtgttttagatcatgctttagaatat

SEQ ID NO: 24300 - DNA, 33 bp, unidentified
  source 1..33: mol_type = unassigned DNA; note = methanogen bacteria
actattatttcaggtcctgttgcagtagcggtc

SEQ ID NO: 24301 - DNA, 63 bp, unidentified
  source 1..63: mol_type = unassigned DNA; note = methanogen bacteria
caaattgcttatattttctcgtattctaaaagcagtgcacaattagaaccattaatatctaat

SEQ ID NO: 24302 - DNA, 30 bp, unidentified
  source 1..30: mol_type = unassigned DNA; note = methanogen bacteria
gttgcatcacttggtgaggcggcgatttca

SEQ ID NO: 24303 - DNA, 57 bp, unidentified
  source 1..57: mol_type = unassigned DNA; note = methanogen bacteria
ctgatttccgttctctttggacaaatcgaagctgatgtgtggcacaatgcagatatt

SEQ ID NO: 24304 - DNA, 33 bp, unidentified
  source 1..33: mol_type = unassigned DNA; note = methanogen bacteria
tcaacattcggaacaatggcgatagcggccaat

SEQ ID NO: 24305 - DNA, 51 bp, unidentified
  source 1..51: mol_type = unassigned DNA; note = methanogen bacteria
ctgggaatctacaacctctcggcccaaaccgctcaaatggcaactgaaatg

SEQ ID NO: 24306 - DNA, 33 bp, unidentified
  source 1..33: mol_type = unassigned DNA; note = methanogen bacteria
gtggcttctttaggtgaagtggctatcagcgga

SEQ ID NO: 24307 - DNA, 57 bp, unidentified
  source 1..57: mol_type = unassigned DNA; note = methanogen bacteria
ttgataggaattctctttggacagattgaatctgacgtatgggccaatgcagatata

SEQ ID NO: 24308 - DNA, 33 bp, unidentified
  source 1..33: mol_type = unassigned DNA; note = methanogen bacteria
tcaacatttggaacaatggcaattgctgcaaac

SEQ ID NO: 24309 - DNA, 54 bp, unidentified
  source 1..54: mol_type = unassigned DNA; note = methanogen bacteria
attctggatatataccagctgtcagaccagaccgctgcaatggcaagtgaaatg

SEQ ID NO: 24310 - DNA, 105 bp, unidentified
  source 1..105: mol_type = unassigned DNA; note = methanogen bacteria
ggaaattatgttataactgcagagtataatggggtaaaggcttctaattacattaatgtattgcctaccctggaagctaaagacttatctatgaagtatcgtgat

SEQ ID NO: 24311 - DNA, 186 bp, unidentified
  source 1..186: mol_type = unassigned DNA; note = methanogen bacteria
ttggatggcactggtgatgcattaactaatgctaacgttaatttaaatattaatggtgtactttacacacgtatcagtgacgatgaaggtattgcccgtttaaacattaatttaatgcctggtcaatatatcattacttcaagttataatactttaaatatttcaaataaaattactatttcaagt

SEQ ID NO: 24312 - DNA, 30 bp, unidentified
  source 1..30: mol_type = unassigned DNA; note = methanogen bacteria
atgggtgatgtattcgcaaaattccctgga

SEQ ID NO: 24313 - DNA, 39 bp, unidentified
  source 1..39: mol_type = unassigned DNA; note = methanogen bacteria
agtaaactttctttaatattgaataatccatcagtactc

SEQ ID NO: 24314 - DNA, 36 bp, unidentified
  source 1..36: mol_type = unassigned DNA; note = methanogen bacteria
attactctaggaataacttctttaggtttaaataat

SEQ ID NO: 24315 - DNA, 144 bp, unidentified
  source 1..144: mol_type = unassigned DNA; note = methanogen bacteria
atgtcatttataggtgatgatatttggtatgcaaagattttatcaaatcaaccattagtcaattttctatcttttagatactatgaatggtccagtagactacttatagactgcattacagtaattttagctaaagaaaactac

SEQ ID NO: 24316 - DNA, 120 bp, unidentified
  source 1..120: mol_type = unassigned DNA; note = methanogen bacteria
tctccgggtaatgataaaagagttattgctgaaactgcaagattttatgtagaatacgcaaacttcggaataattgaaaaactatacttgggtacaatcccaacaattggaattctatta

SEQ ID NO: 24317 - DNA, 153 bp, unidentified
  source 1..153: mol_type = unassigned DNA; note = methanogen bacteria
attgacattacaagcattccaaactatttaaatattgaattaatgcataaccctattgttgtatcagcattttctacagtggattcaattaccaaaagtatgcccctgataaacgataccatccacttattcacatataaaggactgccaaat

SEQ ID NO: 24318 - DNA, 30 bp, unidentified; identical to SEQ ID NO: 22225
  source 1..30: mol_type = unassigned DNA; note = methanogen bacteria

SEQ ID NO: 24319 - DNA, 30 bp, unidentified
  source 1..30: mol_type = unassigned DNA; note = methanogen bacteria
tccatttatagtgccgatgcattttatgct

SEQ ID NO: 24320 - DNA, 54 bp, unidentified
  source 1..54: mol_type = unassigned DNA; note = methanogen bacteria
aacctgcttcatgttatgaagattacaaaatcagtgcaaatagttaaattatat

SEQ ID NO: 24321 - DNA, 48 bp, unidentified
  source 1..48: mol_type = unassigned DNA; note = methanogen bacteria
tatatttataatgcatttcatatttatggcatggaatctgcagtaaca

SEQ ID NO: 24322 - DNA, 33 bp, unidentified
  source 1..33: mol_type = unassigned DNA; note = methanogen bacteria
attgcaaattatagttatgatgcaattgccgct

SEQ ID NO: 24323 - DNA, 48 bp, unidentified
  source 1..48: mol_type = unassigned DNA; note = methanogen bacteria
ttattattaattggtgccggagaagttattgaagatgcgctgaattat

SEQ ID NO: 24324 - DNA, 36 bp, unidentified
  source 1..36: mol_type = unassigned DNA; note = methanogen bacteria
gaaatactttcgggggcgattgctgtggcggcttat

SEQ ID NO: 24325 - DNA, 57 bp, unidentified
  source 1..57: mol_type = unassigned DNA; note = methanogen bacteria
cctatatctacattatttgcgcctgcgaactctgctttgagtataaaaataataagc

SEQ ID NO: 24326 - DNA, 30 bp, unidentified
  source 1..30: mol_type = unassigned DNA; note = methanogen bacteria
gtggcatctttaggtgaggcagcaatttcc

SEQ ID NO: 24327 - DNA, 57 bp, unidentified
  source 1..57: mol_type = unassigned DNA; note = methanogen bacteria
ttaattggaattctgtttggccatattgaggctgaagtttgggcgaatgcagatgtg

SEQ ID NO: 24328 - DNA, 30 bp, unidentified
  source 1..30: mol_type = unassigned DNA; note = methanogen bacteria
tcaacttttggaactatggctattgcagca

SEQ ID NO: 24329 - DNA, 54 bp, unidentified
  source 1..54: mol_type = unassigned DNA; note = methanogen bacteria
attttgggcatttataatttatcagctcaaactgcagtcatggctggtgaaatg

SEQ ID NO: 24330 - DNA, 45 bp, unidentified
  source 1..45: mol_type = unassigned DNA; note = methanogen bacteria
ctgccttcaatcgagcaaagctttaacctcacaagcagggaatcc

SEQ ID NO: 24331 - DNA, 39 bp, unidentified
  source 1..39: mol_type = unassigned DNA; note = methanogen bacteria
atcgattcaagcagtttcataagcagcctgacatcatta

SEQ ID NO: 24332 - DNA, 36 bp, unidentified
  source 1..36: mol_type = unassigned DNA; note = methanogen bacteria
tcccttgtaatcctttcaatgggattgagtgaccag

SEQ ID NO: 24333 - DNA, 30 bp, unidentified
  source 1..30: mol_type = unassigned DNA; note = methanogen bacteria
tctcaaatggattcaaaatcattttttgca

SEQ ID NO: 24334 - DNA, 54 bp, unidentified
  source 1..54: mol_type = unassigned DNA; note = methanogen bacteria
gaccttttgataatgataaaagcagactcatgtttagacttatcaatggcatat

SEQ ID NO: 24335 - DNA, 33 bp, unidentified
  source 1..33: mol_type = unassigned DNA; note = methanogen bacteria
ttaatagagcaacttggtcaaatcggagtatta

SEQ ID NO: 24336 - DNA, 51 bp, unidentified
  source 1..51: mol_type = unassigned DNA; note = methanogen bacteria
gattatggatttgctttgttttcagtaactggtgctcctgaatctgtattt

SEQ ID NO: 24337 - DNA, 45 bp, unidentified
  source 1..45: mol_type = unassigned DNA; note = methanogen bacteria
actcgaaagatatatctaactaaaaatataattattgtcttaatg

SEQ ID NO: 24338 - DNA, 123 bp, unidentified
  source 1..123: mol_type = unassigned DNA; note = methanogen bacteria
acagctcttccacttcacccttatgcacttgctatggcaagtggaataggtagtgcaagtatgaatgcagcagctctttctccccttctcagtatttatccttccagtatatctgatgatata

SEQ ID NO: 24339 - DNA, 48 bp, unidentified
  source 1..48: mol_type = unassigned DNA; note = methanogen bacteria
atggtaccaagttcccactatattgttccatttgttaaagctatagat

SEQ ID NO: 24340 - DNA, 93 bp, unidentified
  source 1..93: mol_type = unassigned DNA; note = methanogen bacteria
agttttaccaaagcatggggcgcaaaccccgacttatactttgccaataatgttttacattcaacagattctatgacaggaatattcacaata

SEQ ID NO: 24341 - DNA, 75 bp, unidentified
  source 1..75: mol_type = unassigned DNA; note = methanogen bacteria
ctgacattgcctggtgcctcacttggttacagccaaattttcacaccggactggtcggcactgactaatctgaac

SEQ ID NO: 24342 - DNA, 105 bp, unidentified
  source 1..105: mol_type = unassigned DNA; note = methanogen bacteria
tttatggcactgacatctggaattccattcaatgaacttgtaactgaaggaactggacttgcatttgtagttttcccacaggtattcaatattatgggaccatgg

SEQ ID NO: 24343 - DNA, 240 bp, unidentified
  source 1..240: mol_type = unassigned DNA; note = methanogen bacteria
ctcactcacctgggcgatacgtctgcatggccgaggataatggcgtccgtcgagagcgggaacgacatctatggggtcatggggaattattacactccggtctgggggtacatcctgtcgttcctcgatctgatgatccagacggccggggctgtgcccctgttcggggattatttcgagggccttctgcccctggagggggtcaggagctaccgtccgttcgtcatatcccccgagatg

SEQ ID NO: 24344 - DNA, 78 bp, unidentified
  source 1..78: mol_type = unassigned DNA; note = methanogen bacteria
agcggccagatcgatgatgcattcatcttcctgaccgacaggcagaccgcggacttcagctccctctacggggccgcg

SEQ ID NO: 24345 - DNA, 69 bp, unidentified
  source 1..69: mol_type = unassigned DNA; note = methanogen bacteria
tcctgcgcttactacggcctgatcgattacgataccttcatgtccctgtcggtatcattcgccgaagac

SEQ ID NO: 24346 - DNA, 246 bp, unidentified
  source 1..246: mol_type = unassigned DNA; note = methanogen bacteria
ctgaactacggatacgacgtgcatcattgggccataatcatggccaacgcctcctcgggaaacggcctgtacggcctgaccggatacttctacaccccggtctggggttacatattggggttcatgaacctcatacagcaggcctgcctgaccctcggcgagaccgccttccgtgtgcccgaggccctcggtttcgaaggctacgacggctggatatccgccaacaccacatccatgacctacacc

SEQ ID NO: 24347 - DNA, 93 bp, unidentified
  source 1..93: mol_type = unassigned DNA; note = methanogen bacteria
cagaccatggacgggaccctcagctactgcttcaccttcctcaccgcccgtgccggcggcgacggcagccaatgggacgccatcgcagggatg

SEQ ID NO: 24348 - DNA, 72 bp, unidentified
  source 1..72: mol_type = unassigned DNA; note = methanogen bacteria
ctgaccctggcctgcgattccaacctgatcgcggtgaccacggtggtctcctggtccgatgccgctgccccc

SEQ ID NO: 24349 - DNA, 30 bp, unidentified
  source 1..30: mol_type = unassigned DNA; note = methanogen bacteria
atgctttcacaaataggaatgcctataaat

SEQ ID NO: 24350 - DNA, 54 bp, unidentified
  source 1..54: mol_type = unassigned DNA; note = methanogen bacteria
ggaatcattgtaaaaaatagtgctaatattctaactttaggtaatttaacttcc

SEQ ID NO: 24351 - DNA, 123 bp, unidentified
  source 1..123: mol_type = unassigned DNA; note = methanogen bacteria
ggatttggtgtagactctacaatacttatgccaaaaatacctagtgaagttatttcattaaaattggatactactgtttttttcgcatttttaactggatttcatgaattattcacctataat

SEQ ID NO: 24352 - DNA, 45 bp, unidentified
  source 1..45: mol_type = unassigned DNA; note = methanogen bacteria
ttaaaattaatagtacctgaaagttcaattctacctacacatatc

SEQ ID NO: 24353 - DNA, 30 bp, unidentified
  source 1..30: mol_type = unassigned DNA; note = methanogen bacteria
aaacaatttgctccgccaagtacactaatt

SEQ ID NO: 24354 - DNA, 45 bp, unidentified
  source 1..45: mol_type = unassigned DNA; note = methanogen bacteria
ataggattattcacaaaagaccctattgttttaagagagacccaa

SEQ ID NO: 24355 - DNA, 93 bp, unidentified
  source 1..93: mol_type = unassigned DNA; note = methanogen bacteria
acaggcattagcatagaagacagtttgtttgaaagcatgtctgcacttacaggcagtggaattacaatataccaagatgtagaaattttacct

SEQ ID NO: 24356 - DNA, 99 bp, unidentified
  source 1..99: mol_type = unassigned DNA; note = methanogen bacteria
ggaatgcctatttttgattctgtttgcaatacattcaccattatctcaacgggcggtatgagtattaaaaatgcaaatattggattttaccaaaacgat

SEQ ID NO: 24357 - DNA, 99 bp, unidentified
  source 1..99: mol_type = unassigned DNA; note = methanogen bacteria
tcagacattgtcccaattgaaatattatttactgtagtatcagcagttacaacaactggagccagtgtgcaaagttcaacagttatggggaattggcca

SEQ ID NO: 24358 - DNA, 99 bp, unidentified; identical to SEQ ID NO: 22397
  source 1..99: mol_type = unassigned DNA; note = methanogen bacteria

SEQ ID NO: 24359 - DNA, 30 bp, unidentified
  source 1..30: mol_type = unassigned DNA; note = methanogen bacteria
atgcttgcagatgctggaatgcctgcaaca

SEQ ID NO: 24360 - DNA, 54 bp, unidentified
  source 1..54: mol_type = unassigned DNA; note = methanogen bacteria
ggaataatcgttgctgatcctgcaaacctcgtaggccttggaacacttacttcc

SEQ ID NO: 24361 - DNA, 126 bp, unidentified
  source 1..126: mol_type = unassigned DNA; note = methanogen bacteria
ggattcggtgtcggtggagacatcttcatgcctgcaattccaaaggaaataatctcattcagcttcgacaccactgttcttttcggattcgcatcaggatttggagagctcttctcaactaatcct

SEQ ID NO: 24362 - DNA, 84 bp, unidentified
  source 1..84: mol_type = unassigned DNA; note = methanogen bacteria
gtatctttatatggtcttagtccaacagctatagaccaatttgctcagttaagatcagtaatggcaggaagttttggttcaata

SEQ ID NO: 24363 - DNA, 30 bp, unidentified
  source 1..30: mol_type = unassigned DNA; note = methanogen bacteria
ggttcattacctccaattagtggtgattac

SEQ ID NO: 24364 - DNA, 99 bp, unidentified
  source 1..99: mol_type = unassigned DNA; note = methanogen bacteria
ggagcatttaactttttaccatcagcaggatcatcagaacctgcaggtaaaataccagcattcatatattcattaacaagtggacaaccaaactttggt

SEQ ID NO: 24365 - DNA, 117 bp, unidentified
  source 1..117: mol_type = unassigned DNA; note = methanogen bacteria
ggtatcttccaaagtgctggattcccaatacttggtgaagtatcacagggtcaggcaataagtggtatagcttattacttaacaacacctactagtatatcagtattatttacagat

SEQ ID NO: 24366 - DNA, 54 bp, unidentified
  source 1..54: mol_type = unassigned DNA; note = methanogen bacteria
ggaattattattaaaaatcaatcaacttttgtaactatgggtaacttactttct

SEQ ID NO: 24367 - DNA, 117 bp, unidentified
  source 1..117: mol_type = unassigned DNA; note = methanogen bacteria
ggatttggtgttggagagattggaatgcccacactccctacacaaataatttcaactaattttgatactaccttattttgtggatttattcaaggatttaaaggactattttcaaat

SEQ ID NO: 24368 - DNA, 45 bp, unidentified
  source 1..45: mol_type = unassigned DNA; note = methanogen bacteria
atgaaaaaattcaatctgggtggtaatgtaagtattgttattatg

SEQ ID NO: 24369 - DNA, 33 bp, unidentified
  source 1..33: mol_type = unassigned DNA; note = methanogen bacteria
agtggtcaagctttaaagcttttatttgatgta

SEQ ID NO: 24370 - DNA, 123 bp, unidentified
  source 1..123: mol_type = unassigned DNA; note = methanogen bacteria
tctacctctttacctttccacccttatgctcttgcaatggcaagtggtgttggtagtgcaagtatgaatgcagctgcacttgcacctttaactgcaatctttccagatatgaaagataccata

SEQ ID NO: 24371 - DNA, 48 bp, unidentified
  source 1..48: mol_type = unassigned DNA; note = methanogen bacteria
tggtgtccattatctccaatcattgtaacctatgttaataatgttgaa

SEQ ID NO: 24372 - DNA, 84 bp, unidentified
  source 1..84: mol_type = unassigned DNA; note = methanogen bacteria
gtatctttatttggtcttagtccaacggctgtggaccaattcgctcagttaagatcagtaatggcaggtagctttggttctata

SEQ ID NO: 24373 - DNA, 102 bp, unidentified
  source 1..102: mol_type = unassigned DNA; note = methanogen bacteria
gtaggatcattcaatttccttccaacagctgcatcatcagctcctgcaggtagaatacctggatttatatattctttaatgactggacaaccaaacttcagt

SEQ ID NO: 24374 - DNA, 117 bp, unidentified
  source 1..117: mol_type = unassigned DNA; note = methanogen bacteria
ggtttgttccaatctcttggattcccaatcttaggggaagtgtcacagggtcaagcaattagtggtattgcatattacttaagtactccttcaagtatctctgtattatttacagat

SEQ ID NO: 24375 - DNA, 51 bp, unidentified
  source 1..51: mol_type = unassigned DNA; note = methanogen bacteria
gcgtcgaacctgatcagcaccgatgctctctccgcgatcaacatcgatgcc

SEQ ID NO: 24376 - DNA, 63 bp, unidentified
  source 1..63: mol_type = unassigned DNA; note = methanogen bacteria
agggagccgatcatctacgctctcggggcccgcggctcgctgtacgatctctgcgaggattat

SEQ ID NO: 24377 - DNA, 30 bp, unidentified
  source 1..30: mol_type = unassigned DNA; note = methanogen bacteria
atggacctcgccgggtccgatggcgtcgcc

SEQ ID NO: 24378 - DNA, 54 bp, unidentified
  source 1..54: mol_type = unassigned DNA; note = methanogen bacteria
ctggcgtccctgttcgccgccgagaacgcggatgtcctggacctcggggtgaga

SEQ ID NO: 24379 - DNA, 33 bp, unidentified
  source 1..33: mol_type = unassigned DNA; note = methanogen bacteria
gttgcaggcttaggtgcagatgcacttgcaggt

SEQ ID NO: 24380 - DNA, 51 bp, unidentified
  source 1..51: mol_type = unassigned DNA; note = methanogen bacteria
gttttgacaatcatgggtgctgctcacacactgccatatgctcatgagtat

SEQ ID NO: 24381 - DNA, 39 bp, unidentified
  source 1..39: mol_type = unassigned DNA; note = methanogen bacteria
ctagctattgtggcaggcactgatgctgttgccgtttat

SEQ ID NO: 24382 - DNA, 69 bp, unidentified
  source 1..69: mol_type = unassigned DNA; note = methanogen bacteria
cctcaaatagtttatgtattcagctattcagacaacagcgctcatttggctgctccaatggctgcattt

SEQ ID NO: 24383 - DNA, 54 bp, unidentified
  source 1..54: mol_type = unassigned DNA; note = methanogen bacteria
ggaataattataagtcaccctacaaatattgttggtttatctcatttaacttct

SEQ ID NO: 24384 - DNA, 126 bp, unidentified
  source 1..126: mol_type = unassigned DNA; note = methanogen bacteria
accggatttggtgttcactcagcaataaatatgccaatgataccttctgagtttgttaccttgaactttgacacctctgctacatttgcatttatatctggatttaaagaattatttggaaaccta

SEQ ID NO: 24385 - DNA, 36 bp, unidentified
  source 1..36: mol_type = unassigned DNA; note = methanogen bacteria
gcttcacaattaacttccgatgcattttatgcaatt

SEQ ID NO: 24386 - DNA, 57 bp, unidentified
  source 1..57: mol_type = unassigned DNA; note = methanogen bacteria
gacaacatttttgttttactgaaagtggaagaatcaatggatttagcattaatatat

SEQ ID NO: 24387 - DNA, 33 bp, unidentified
  source 1..33: mol_type = unassigned DNA; note = methanogen bacteria
ttaatagaggaactgggcaaaactggaatattg

SEQ ID NO: 24388 - DNA, 39 bp, unidentified
  source 1..39: mol_type = unassigned DNA; note = methanogen bacteria
tataaatcttttaatataatgaatatggaattatcagta

SEQ ID NO: 24389 - DNA, 36 bp, unidentified
  source 1..36: mol_type = unassigned DNA; note = methanogen bacteria
atttctggtttaggtccagattcattggctgctatt

SEQ ID NO: 24390 - DNA, 51 bp, unidentified
  source 1..51: mol_type = unassigned DNA; note = methanogen bacteria
attttaatatttttaggcgcaggcggtgttatcagttatgcaagttcttat

SEQ ID NO: 24391 - DNA, 33 bp, unidentified
  source 1..33: mol_type = unassigned DNA; note = methanogen bacteria
gtaattattggtggaaatatggccgttggagct

SEQ ID NO: 24392 - DNA, 57 bp, unidentified
  source 1..57: mol_type = unassigned DNA; note = methanogen bacteria
aatttagcttcattttttgcttctgatgcaaccaatgatatgaatatttacatcata

SEQ ID NO: 24393 - DNA, 33 bp, unidentified
  source 1..33: mol_type = unassigned DNA; note = methanogen bacteria
gtagggtatatgggtactaatgcattagcagct

SEQ ID NO: 24394 - DNA, 60 bp, unidentified
  source 1..60: mol_type = unassigned DNA; note = methanogen bacteria
aaagaagtattaggaatatttggtgtaactgattctctttataattatgcttcagattat

SEQ ID NO: 24395 - DNA, 33 bp, unidentified
  source 1..33: mol_type = unassigned DNA; note = methanogen bacteria
ttagttgtaggaggatctttagcattagcagca

SEQ ID NO: 24396 - DNA, 48 bp, unidentified
  source 1..48: mol_type = unassigned DNA; note = methanogen bacteria
atggctttactacttacttctgacccaattttgattaataatatatct

SEQ ID NO: 24397 - DNA, 39 bp, unidentified
  source 1..39: mol_type = unassigned DNA; note = methanogen bacteria
gacaacctgttcgcgatgcccatccacaactggaccttc

SEQ ID NO: 24398 - DNA, 39 bp, unidentified
  source 1..39: mol_type = unassigned DNA; note = methanogen bacteria
atcaggtacagcagcctcggtgccgtcggcatccccggc

SEQ ID NO: 24399 - DNA, 144 bp, unidentified
  source 1..144: mol_type = unassigned DNA; note = methanogen bacteria
ttctattacaaatattttgaaggtaagactgccacagaggatccgaacctactttatactttaatgcaggcggctcttgaacctggtaaagacacaatatacaagtgtacattcaccagcaacaaagccaatggccgtggtggt

SEQ ID NO: 24400 - DNA, 285 bp, unidentified
  source 1..285: mol_type = unassigned DNA; note = methanogen bacteria
tataaattagcattgaaaaaatctgccgtgaaaaaatccgccaaaaagcttgtattgaaggccaaattgaaaaaaggcacaaaagttgccaaaggaaaaaccgttgtatttaaattcaaaggcaaaaaatacaaggctaaaaccaataaaaaaggtgttgctaaagtaatcatcaaaaaatccgtactcaaaaagcttaaagtcggcaaaaagattacctataaagcggcatataaagcattttccggaaaagtaattgctaaaaaaacagttaaagttaaaaag

SEQ ID NO: 24401 - DNA, 93 bp, unidentified
  source 1..93: mol_type = unassigned DNA; note = methanogen bacteria
agttttacaaaagcatggggagccaatcccgatttatatttctcaaataatgtattgcatgcgacagattcaatgtccggactgtttacaatc

SEQ ID NO: 24402 - DNA, 72 bp, unidentified
  source 1..72: mol_type = unassigned DNA; note = methanogen bacteria
ctgaccttgcctggcgcatcaaccggatacacacaaatcttcacccccgactggaacgcgttgctcaacctg

SEQ ID NO: 24403 - DNA, 108 bp, unidentified
  source 1..108: mol_type = unassigned DNA; note = methanogen bacteria
gggttcatgacagcaacttcaggaataccgttcaatgaacttgtaactgaaggaacagggcttgcattcgttgttttcccacaagtgttcaataccatgggaagcgtc

SEQ ID NO: 24404 - DNA, 30 bp, unidentified
  source 1..30: mol_type = unassigned DNA; note = methanogen bacteria
gcatcattatctaaagaagctctttatgca

SEQ ID NO: 24405 - DNA, 51 bp, unidentified
  source 1..51: mol_type = unassigned DNA; note = methanogen bacteria
attcttcaaatgatgaaaattacccataatattggattagtgctaacatat

SEQ ID NO: 24406 - DNA, 36 bp, unidentified
  source 1..36: mol_type = unassigned DNA; note = methanogen bacteria
ctaactcaagaattaggtccaaaggggatattactt

SEQ ID NO: 24407 - DNA, 51 bp, unidentified
  source 1..51: mol_type = unassigned DNA; note = methanogen bacteria
tataatatattccatacttttaaaataataaatatgaatgcttctgtaaca

SEQ ID NO: 24408 - DNA, 36 bp, unidentified
  source 1..36: mol_type = unassigned DNA; note = methanogen bacteria
atatctggattaggatcagaaccactagtagctttg

SEQ ID NO: 24409 - DNA, 54 bp, unidentified
  source 1..54: mol_type = unassigned DNA; note = methanogen bacteria
ccaatgttagtatttttaggtgcaggaacatctttgaaatatgcaatggattat

SEQ ID NO: 24410 - DNA, 33 bp, unidentified
  source 1..33: mol_type = unassigned DNA; note = methanogen bacteria
ttaaaagcaggtggtcatacagctgttgcagca

SEQ ID NO: 24411 - DNA, 63 bp, unidentified
  source 1..63: mol_type = unassigned DNA; note = methanogen bacteria
caaatagcctatatgtttagttataatagtcaaaatgctgtattacaacctcatatttcatta

SEQ ID NO: 24412 - DNA, 42 bp, unidentified
  source 1..42: mol_type = unassigned DNA; note = methanogen bacteria
tccgataccctgcaggactcgttcgaggtgggatcctcctcg

SEQ ID NO: 24413 - DNA, 42 bp, unidentified
  source 1..42: mol_type = unassigned DNA; note = methanogen bacteria
ggatcgttctacaagaacatctacgacttctccaacaccgag

SEQ ID NO: 24414 - DNA, 30 bp, unidentified
  source 1..30: mol_type = unassigned DNA; note = methanogen bacteria
gtgatatccgacaagaccctgggcgagttc

SEQ ID NO: 24415 - DNA, 57 bp, unidentified
  source 1..57: mol_type = unassigned DNA; note = methanogen bacteria
aagcaactgacaataaaagtcaacaacaagaactacgctaaaactacaggatcagac

SEQ ID NO: 24416 - DNA, 45 bp, unidentified
  source 1..45: mol_type = unassigned DNA; note = methanogen bacteria
aatgaatttgaaaaaactataaaagttttaattcagcagttcaca

SEQ ID NO: 24417 - DNA, 96 bp, unidentified
  source 1..96: mol_type = unassigned DNA; note = methanogen bacteria
aggatatacttaaagggatctgcagacgtgatttcatataaaaccctgaccatatccgttggagacaaggtttttgtgaaaaaaaccaactccgag

SEQ ID NO: 24418 - DNA, 51 bp, unidentified
  source 1..51: mol_type = unassigned DNA; note = methanogen bacteria
gctgtaaagtatagtggaaatgaaatttccaaaaagattaaatgcattaag

SEQ ID NO: 24419 - DNA, 168 bp, unidentified
  source 1..168: mol_type = unassigned DNA; note = methanogen bacteria
gaacgggcactcaatacaaaactcgttaaaaagaacaaatataactactggccaaaaaccgtcacagcatcacttaaaggcaaatcatacacatacccggaagtccgtgacattcaaaataccgaatatacctgcggaccaacatcatcaagcgtctgtagtcaggcg

SEQ ID NO: 24420 - DNA, 171 bp, unidentified
  source 1..171: mol_type = unassigned DNA; note = methanogen bacteria
aaaaaatacagttctgaaaaatacttccagacaaaaggacatgtcaccaacggaataaatgttgaagtgttaaaaaaagtcctaagcaagaataacttcaaggcaagttatttctactcaatgaatactgctgtaaaacagcttaaaaagggaggaagtgcactgatagct

SEQ ID NO: 24421 - DNA, 99 bp, unidentified
  source 1..99: mol_type = unassigned DNA; note = methanogen bacteria
tcaaaaaacgttaaaaagcaagtcggtaattactataaaagcatgggcactaactgggttgggcaaaacgttaatgaaaggattccggatattggaaag

SEQ ID NO: 24422 - DNA, 279 bp, unidentified
  source 1..279: mol_type = unassigned DNA; note = methanogen bacteria
tatctgaaaaaggacagccaggaagtcaaagtagtctatgaaaacggaaagatcaaaagggaaaagacacagagcataagcattgtctatgacttcgatcttctctcatcagactacttcacatacggcgaggacaacttaattgagataatcctccctgacaccatgaacaacaagctgctgactgtcgaaatcaatggaacaaaatacgctttcaaacgtcctgcctatgcaggaaacaatttcatagaaataaacatatcaaaacttcaagcaggc

SEQ ID NO: 24423 - DNA, 84 bp, unidentified
  source 1..84: mol_type = unassigned DNA; note = methanogen bacteria
ataaatttatatggattaagttcagttgcagtagatcagtttgcatcattaagagcagttttggcaggaaattttggttctatt

SEQ ID NO: 24424 - DNA, 30 bp, unidentified
  source 1..30: mol_type = unassigned DNA; note = methanogen bacteria
ggtgctattgcagcaaaatctgcacaatat

SEQ ID NO: 24425 - DNA, 108 bp, unidentified
  source 1..108: mol_type = unassigned DNA; note = methanogen bacteria
gttggggcatttaacatattaccttcaccatcaactccaggagtatctgcgggtaaaatacctgcattcatacaatcagttgcagcaggtacaccaacatttgataat

SEQ ID NO: 24426 - DNA, 111 bp, unidentified
  source 1..111: mol_type = unassigned DNA; note = methanogen bacteria
caaaaattaggttttcctatacttggaactatagaaaatggaagagcaataaatggtgtggcatatatgttaactgcacctactagtttggacatggtaattaccgatcca

SEQ ID NO: 24427 - DNA, 33 bp, unidentified
  source 1..33: mol_type = unassigned DNA; note = methanogen bacteria
tcacaaatgaatgcggaatcattttttgccata

SEQ ID NO: 24428 - DNA, 54 bp, unidentified
  source 1..54: mol_type = unassigned DNA; note = methanogen bacteria
gatattttaacttttattggtgctacttcatctatggatttatcaatgcaatat

SEQ ID NO: 24429 - DNA, 51 bp, unidentified
  source 1..51: mol_type = unassigned DNA; note = methanogen bacteria
gattatggttttgcattgttttccattacaagtgcaccaatttcagtattt

SEQ ID NO: 24430 - DNA, 48 bp, unidentified
  source 1..48: mol_type = unassigned DNA; note = methanogen bacteria
atttctaatatgcagacatatacacttaacttcgttaatcgtcctatg

SEQ ID NO: 24431 - DNA, 54 bp, unidentified
  source 1..54: mol_type = unassigned DNA; note = methanogen bacteria
gtaggaggattgccaatacttaaatcttccttaaggtattccctaaagcctgct

SEQ ID NO: 24432 - DNA, 261 bp, unidentified
  source 1..261: mol_type = unassigned DNA; note = methanogen bacteria
agatcattaaatgagcttgccatcagttccaacacaaacccatttgcaacattgcaaaatagagcagactttactttaaacgttttaaacttactaaaccaaatttcaggcgattttggaatattgcatggtaagatgattgcaagttcaatgcctggaagtccattaggcccaagaatgatggtgggcaaattaatagcttggagaagtgaagttacagtgacccctacacttcttggacagatgattgtggactttggt

SEQ ID NO: 24433 - DNA, 30 bp, unidentified
  source 1..30: mol_type = unassigned DNA; note = methanogen bacteria
aattttttaagcccatacattccttacagt

SEQ ID NO: 24434 - DNA, 33 bp, unidentified
  source 1..33: mol_type = unassigned DNA; note = methanogen bacteria
atggaattcttcctacagacctatcctggcctt

SEQ ID NO: 24435 - DNA, 39 bp, unidentified
  source 1..39: mol_type = unassigned DNA; note = methanogen bacteria
aactcacttagcacactccttaagaatcaaacattgctt

SEQ ID NO: 24436 - DNA, 33 bp, unidentified
  source 1..33: mol_type = unassigned DNA; note = methanogen bacteria
acaatagctttcaataacattggtgtaggatac

SEQ ID NO: 24437 - DNA, 33 bp, unidentified
  source 1..33: mol_type = unassigned DNA; note = methanogen bacteria
gtagcaggacttggctcagatgcattagctgct

SEQ ID NO: 24438 - DNA, 54 bp, unidentified
  source 1..54: mol_type = unassigned DNA; note = methanogen bacteria
cctatccttattgcaaggggagcaggaaaaaccatgtcatacgcttacagatat

SEQ ID NO: 24439 - DNA, 36 bp, unidentified
  source 1..36: mol_type = unassigned DNA; note = methanogen bacteria
gttatggtaagcggaacagatgcagtagctgcttat

SEQ ID NO: 24440 - DNA, 63 bp, unidentified
  source 1..63: mol_type = unassigned DNA; note = methanogen bacteria
caaatcgcttcaatattcagctatacaagtgcaagtgcaagccttggtcctcaaatagcatat

SEQ ID NO: 24441 - DNA, 33 bp, unidentified
  source 1..33: mol_type = unassigned DNA; note = methanogen bacteria
gtagcaggacttggacaagctgcaatagcaggt

SEQ ID NO: 24442 - DNA, 60 bp, unidentified
  source 1..60: mol_type = unassigned DNA; note = methanogen bacteria
gagcctttgcttagaacctatggagcaagtggccagtccttagcagaaggtataaaatat

SEQ ID NO: 24443 - DNA, 36 bp, unidentified
  source 1..36: mol_type = unassigned DNA; note = methanogen bacteria
tctacaatcggtggagaatatggaatagctgcattt

SEQ ID NO: 24444 - DNA, 63 bp, unidentified
  source 1..63: mol_type = unassigned DNA; note = methanogen bacteria
ctttcaaccatatttgcgtatactcctgaaactgcaccattagttcctgaaattactagattc

SEQ ID NO: 24445 - DNA, 30 bp, unidentified
  source 1..30: mol_type = unassigned DNA; note = methanogen bacteria
aattttttaagcccgtacataccttacagt

SEQ ID NO: 24446 - DNA, 30 bp, unidentified
  source 1..30: mol_type = unassigned DNA; note = methanogen bacteria
tctcaaatgaatcccgagtcattttttgca

SEQ ID NO: 24447 - DNA, 48 bp, unidentified
  source 1..48: mol_type = unassigned DNA; note = methanogen bacteria
ttagaatatatgggggcaacttcttcaatggagttgtcaatgcagtat

SEQ ID NO: 24448 - DNA, 48 bp, unidentified
  source 1..48: mol_type = unassigned DNA; note = methanogen bacteria
tacggtttcgccctgttttcagttacaggcgccccagaatcagtattc

SEQ ID NO: 24449 - DNA, 36 bp, unidentified
  source 1..36: mol_type = unassigned DNA; note = methanogen bacteria
atggaattctttttaaagacctatcctggccttatg

SEQ ID NO: 24450 - DNA, 39 bp, unidentified
  source 1..39: mol_type = unassigned DNA; note = methanogen bacteria
aattcaatcagcacattgcttaagaatcagacattgctt

SEQ ID NO: 24451 - DNA, 39 bp, unidentified
  source 1..39: mol_type = unassigned DNA; note = methanogen bacteria
acattggcctttggaaatgttggtgtaggattccctcaa

SEQ ID NO: 24452 - DNA, 39 bp, unidentified
  source 1..39: mol_type = unassigned DNA; note = methanogen bacteria
tacttcacctacgagggcgcggcggccatgaagtcgtac

SEQ ID NO: 24453 - DNA, 54 bp, unidentified
  source 1..54: mol_type = unassigned DNA; note = methanogen bacteria
cccctggtgtacagctacaccgagaccgacgtcggcgacaacatcttcgacttc

SEQ ID NO: 24454 - DNA, 63 bp, unidentified
  source 1..63: mol_type = unassigned DNA; note = methanogen bacteria
gccctgatccttttcatggtgaaccacgcctccctcgaggagtccacccccttcgtcgtctgg

SEQ ID NO: 24455 - DNA, 30 bp, unidentified
  source 1..30: mol_type = unassigned DNA; note = methanogen bacteria
tctcaaatgaatgcagaatcattttttgca

SEQ ID NO: 24456 - DNA, 48 bp, unidentified
  source 1..48: mol_type = unassigned DNA; note = methanogen bacteria
ttagaatatatgggtgcaacttcttcaatggagttgtcaatgcagtat

SEQ ID NO: 24457 - DNA, 51 bp, unidentified
  source 1..51: mol_type = unassigned DNA; note = methanogen bacteria
gattacggttttgccctattttcaattacaagcgcaccggaatcagtgttc

SEQ ID NO: 24458 - DNA, 39 bp, unidentified
  source 1..39: mol_type = unassigned DNA; note = methanogen bacteria
atcactttccagggcggagtagccaccaaatcctacacc

SEQ ID NO: 24459 - DNA, 54 bp, unidentified
  source 1..54: mol_type = unassigned DNA; note = methanogen bacteria
attctgtacagtttcactgaggatgcggtggcggataccgcattcgatttcatc

SEQ ID NO: 24460 - DNA, 69 bp, unidentified
  source 1..69: mol_type = unassigned DNA; note = methanogen bacteria
gaggagctcatttggttcttcgtcaaccactcgtcattggaggagtcctcgtacgtcggggtttggacc

SEQ ID NO: 24461 - DNA, 72 bp, unidentified
  source 1..72: mol_type = unassigned DNA; note = methanogen bacteria
attattgacagctttgaagttaacatgttcgatgcatcaacaatcaaaactgcagtaatgggagcatatccg

SEQ ID NO: 24462 - DNA, 39 bp, unidentified
  source 1..39: mol_type = unassigned DNA; note = methanogen bacteria
tatggtttaagaaatgtcatggcaaaccatgtagttgcc

SEQ ID NO: 24463 - DNA, 252 bp, unidentified
  source 1..252: mol_type = unassigned DNA; note = methanogen bacteria
atcatggaacagactgcaatgattgaaactggtgatgcttctggtgcatttgaaagaatgcatttattgacattggcgtatcaaggtttaaatgcaaataatttagtgtttgacatcgttaaagaaaatggtaatggaactgttggaacagttatccaatcattggttggaagagcgattgaagacaatgttatcagagttgctaaaaaaatgccatcaggatataacatgtatgagcctgtggattgggca

SEQ ID NO: 24464 - DNA, 75 bp, unidentified
  source 1..75: mol_type = unassigned DNA; note = methanogen bacteria
tcaacagtattgtattataatgacatgctggaatatgagacaggccttcctggtgtagattacggtagaactgag

SEQ ID NO: 24465 - DNA, 48 bp, unidentified
  source 1..48: mol_type = unassigned DNA; note = methanogen bacteria
ccgggtacattccacggaaaccacgtagtgacaagacatgcaaaagga

SEQ ID NO: 24466 - DNA, 75 bp, unidentified
  source 1..75: mol_type = unassigned DNA; note = methanogen bacteria
tatggtactattgataaccttagaaaccctattccaaatgtggccaaggttgcaggagaaattaaagataaaatt

SEQ ID NO: 24467 - DNA, 30 bp, unidentified
  source 1..30: mol_type = unassigned DNA; note = methanogen bacteria
tctcaaatgaatgccgaatcattttttgca

SEQ ID NO: 24468 - DNA, 57 bp, unidentified
  source 1..57: mol_type = unassigned DNA; note = methanogen bacteria
gaagacattttaacttatataggagcaacttcttctatggagctgtcaatacagtat

SEQ ID NO: 24469 - DNA, 45 bp, unidentified
  source 1..45: mol_type = unassigned DNA; note = methanogen bacteria
ggttttgctttgttttcagttacaggagtacctgaatcaatattc

SEQ ID NO: 24470 - DNA, 54 bp, unidentified
  source 1..54: mol_type = unassigned DNA; note = methanogen bacteria
ggaatcatcgttgctgacccatccgctattgttcgcatgggatctcttataact

SEQ ID NO: 24471 - DNA, 120 bp, unidentified
  source 1..120: mol_type = unassigned DNA; note = methanogen bacteria
tgcggatttggtgctggcaacatattgatgccttcccttccgtcacatatcgtatcggccaattttgatttgtcattgttttgcggattcatcagagggttcccacagctgttctcaaac

SEQ ID NO: 24472 - DNA, 30 bp, unidentified
  source 1..30: mol_type = unassigned DNA; note = methanogen bacteria
tctcaaatgaatgcagattcattttttgca

SEQ ID NO: 24473 - DNA, 51 bp, unidentified
  source 1..51: mol_type = unassigned DNA; note = methanogen bacteria
attttaacttatatgggagcaacttcttctatggcgctgtcaatgcagtat

SEQ ID NO: 24474 - DNA, 51 bp, unidentified
  source 1..51: mol_type = unassigned DNA; note = methanogen bacteria
gattatgcttttgccttgttttcagttacaggcgtgccggaatcaatattc

SEQ ID NO: 24475 - DNA, 30 bp, unidentified; identical to SEQ ID NO: 24455
  source 1..30: mol_type = unassigned DNA; note = methanogen bacteria

SEQ ID NO: 24476 - DNA, 57 bp, unidentified
  source 1..57: mol_type = unassigned DNA; note = methanogen bacteria
gacattttaacttatatgggagcaacttcttcaatggagctgtcaatgcagtatttg

SEQ ID NO: 24477 - DNA, 48 bp, unidentified
  source 1..48: mol_type = unassigned DNA; note = methanogen bacteria
tatggttttgctttgttttcagttacaggcgcaccagaatcagtattt

SEQ ID NO: 24478 - DNA, 30 bp, unidentified
  source 1..30: mol_type = unassigned DNA; note = methanogen bacteria
atggaattttacctggaaacattcccaggg

SEQ ID NO: 24479 - DNA, 39 bp, unidentified
  source 1..39: mol_type = unassigned DNA; note = methanogen bacteria
ggctccatcacaactcttcttaaaagccagacattgctt

SEQ ID NO: 24480 - DNA, 33 bp, unidentified
  source 1..33: mol_type = unassigned DNA; note = methanogen bacteria
acaacagtgctgggaaatgccggagtgaattat

SEQ ID NO: 24481 - DNA, 30 bp, unidentified
  source 1..30: mol_type = unassigned DNA; note = methanogen bacteria
atgttggtcgaaggtggaatgcctgctact

SEQ ID NO: 24482 - DNA, 54 bp, unidentified
  source 1..54: mol_type = unassigned DNA; note = methanogen bacteria
ggaattgttgtaagcgactcatcaactttagttgcaatgggcaatctgcttgct

SEQ ID NO: 24483 - DNA, 117 bp, unidentified
  source 1..117: mol_type = unassigned DNA; note = methanogen bacteria
ggatttggaactggaaatccgttaatgccgtcaattccggctcaagttatatctgtcaattttgatatgagcctctttggaggatttttgcgaggattcggacagctgttctcgaat

SEQ ID NO: 24484 - DNA, 30 bp, unidentified
  source 1..30: mol_type = unassigned DNA; note = methanogen bacteria
ctgttatctgaaactggaatgcccgcaaca

SEQ ID NO: 24485 - DNA, 54 bp, unidentified
  source 1..54: mol_type = unassigned DNA; note = methanogen bacteria
ggaataatagaaacggatccagaaacattacttacattaggaaacgtactttca

SEQ ID NO: 24486 - DNA, 120 bp, unidentified
  source 1..120: mol_type = unassigned DNA; note = methanogen bacteria
ggatttggtgctggaaatgaattaatgccaacaatgcccgaacatgcaataacaacaacatttgatttatcattattcggaggatttgcaagaggctttggagaattattctcaaacata

SEQ ID NO: 24487 - DNA, 57 bp, unidentified
  source 1..57: mol_type = unassigned DNA; note = methanogen bacteria
aacattattgttctcgattcaacaacacttaccacaatgggcgatttattccagcct

SEQ ID NO: 24488 - DNA, 117 bp, unidentified
  source 1..117: mol_type = unassigned DNA; note = methanogen bacteria
ggatttggtacgggtgatcctctaatgccaacacttccaacagaatttatatcctttgaatttgatttatccttatttggaggatttctaagaggatttgaacaattattctcaaat

SEQ ID NO: 24489 - DNA, 30 bp, unidentified
  source 1..30: mol_type = unassigned DNA; note = methanogen bacteria
atgttagctgagggaggaatgtcaacatcc

SEQ ID NO: 24490 - DNA, 54 bp, unidentified
  source 1..54: mol_type = unassigned DNA; note = methanogen bacteria
ggaattatcatagatgatttatcaacactagttagtatgggacatcttttatca

SEQ ID NO: 24491 - DNA, 117 bp, unidentified
  source 1..117: mol_type = unassigned DNA; note = methanogen bacteria
ggatttggaacaggaaatgaattaatgccaagtatttcaccagaaataattactacaaatattgacacttcactattccttggatttgttagaggatttcagggacttttctccaat

SEQ ID NO: 24492 - DNA, 54 bp, unidentified
  source 1..54: mol_type = unassigned DNA; note = methanogen bacteria
ggaattatagtttctaatctgacaaccgtagttgcactgggaaacatggcttca

SEQ ID NO: 24493 - DNA, 117 bp, unidentified
  source 1..117: mol_type = unassigned DNA; note = methanogen bacteria
ggatttacatcaccagatgcagcccttccgacaattccaaaaacatggatttcattcaatctgaacttcagcgtatttggaggattcctctccggatttggagaacttttaagtaga

SEQ ID NO: 24494 - DNA, 30 bp, unidentified
  source 1..30: mol_type = unassigned DNA; note = methanogen bacteria
atgcttgctgacggtggaatgcctgcaact

SEQ ID NO: 24495 - DNA, 54 bp, unidentified
  source 1..54: mol_type = unassigned DNA; note = methanogen bacteria
ggaattatcgtagcagatccttccacttttgttgctttaggatctatgacttct

SEQ ID NO: 24496 - DNA, 120 bp, unidentified
  source 1..120: mol_type = unassigned DNA; note = methanogen bacteria
gtaggatatggtactggtaacccaattatgcctactatgccttctcaattcatatcatttaattttgacttcagcttattcggagcattctatactggatttggagagttattcaaaaac

SEQ ID NO: 24497 - DNA, 30 bp, unidentified
  source 1..30: mol_type = unassigned DNA; note = methanogen bacteria
aacttctttagcccgtacataccttacagt

SEQ ID NO: 24498 - DNA, 39 bp, unidentified
  source 1..39: mol_type = unassigned DNA; note = methanogen bacteria
gtcggcgatgacatcatcgacgatgtcgggggatcgaag

SEQ ID NO: 24499 - DNA, 39 bp, unidentified
  source 1..39: mol_type = unassigned DNA; note = methanogen bacteria
gcaacgtatttcgatactgtctacgacttcgccctctcc

SEQ ID NO: 24500 - DNA, 54 bp, unidentified
  source 1..54: mol_type = unassigned DNA; note = methanogen bacteria
ggaattattataggcaactcttctactttagtgggaatgggcaatatatcatct

SEQ ID NO: 24501 - DNA, 117 bp, unidentified
  source 1..117: mol_type = unassigned DNA; note = methanogen bacteria
ggatttggtactggaaatgctttaatgccatctattccgacacactttatttcatttaactttgatgtgtccctagtcggtgcatttacaaaaggatttagccaattattttccaac

SEQ ID NO: 24502 - DNA, 30 bp, unidentified
  source 1..30: mol_type = unassigned DNA; note = methanogen bacteria
atgttggctgatggaggaatgcccgcatca

SEQ ID NO: 24503 - DNA, 54 bp, unidentified
  source 1..54: mol_type = unassigned DNA; note = methanogen bacteria
ggaatcatcatttctaatccatcaacatatgttagtatgggaacacttgcacaa

SEQ ID NO: 24504 - DNA, 120 bp, unidentified
  source 1..120: mol_type = unassigned DNA; note = methanogen bacteria
ggatttggtgttggagatgcattaatgcccactattccggcacatcccataactacaaatatggatacatcattattctgtggatttaccagaggatttggacagctattcacgaacatc

SEQ ID NO: 24505 - DNA, 54 bp, unidentified
  source 1..54: mol_type = unassigned DNA; note = methanogen bacteria
ggaattattgtatctaatcccatgaacattgtttcattaggtaatatttcatct

SEQ ID NO: 24506 - DNA, 117 bp, unidentified
  source 1..117: mol_type = unassigned DNA; note = methanogen bacteria
ggttttactgtccctgatgtggctcttccaactattccaaaaacattcatctcatttaatttggatttcagtgtttttggaggattcgtgcagggatttggagaactctttgaaaac

SEQ ID NO: 24507 - DNA, 30 bp, unidentified
  source 1..30: mol_type = unassigned DNA; note = methanogen bacteria
atcttatcagcagagggaatgcctgtaaat

SEQ ID NO: 24508 - DNA, 54 bp, unidentified
  source 1..54: mol_type = unassigned DNA; note = methanogen bacteria
attgttgtatccaacctattaacaattgtttcattagggaatttgacatcacca

SEQ ID NO: 24509 - DNA, 120 bp, unidentified
  source 1..120: mol_type = unassigned DNA; note = methanogen bacteria
atgggttttactgatccaaatgtggcaatgccatctattccttcacaatgggtgtcatttaatatgaatttcagcctatttggaggattcctacatggatttggagaattgcttaataac

SEQ ID NO: 24510 - DNA, 54 bp, unidentified
  source 1..54: mol_type = unassigned DNA; note = methanogen bacteria
ggaattattgtagctgatccttctactttcgttactatgggatcactcttgtcc

SEQ ID NO: 24511 - DNA, 117 bp, unidentified
  source 1..117: mol_type = unassigned DNA; note = methanogen bacteria
ggatttggtgcaggagacatgttaatgcctgctattccagctcaattcatttcagccgattttgatttatcactatttgcaggattcatgaaaggatttggacagttattctcaaac

SEQ ID NO: 24512 - DNA, 54 bp, unidentified
  source 1..54: mol_type = unassigned DNA; note = methanogen bacteria
ggaattgtagtgtcagatccgtcaaccgtcgtttcattgggaaacatggcttca

SEQ ID NO: 24513 - DNA, 117 bp, unidentified
  source 1..117: mol_type = unassigned DNA; note = methanogen bacteria
ggatttacaacccccgatactgccctgccggcaattccaaaaacatggatttcattcaatctcgacttcagcgtatttggaggattcatctccggatttggagagctgttcaaaaac

SEQ ID NO: 24514 - DNA, 54 bp, unidentified
  source 1..54: mol_type = unassigned DNA; note = methanogen bacteria
ggaatcattgttgcggatccttccacttatgtgacaatgggatctcttatggct

SEQ ID NO: 24515 - DNA, 117 bp, unidentified
  source 1..117: mol_type = unassigned DNA; note = methanogen bacteria
ggatttggagcaggggatgttttaatgccggttgttccgacagaatttttctcaactaatattgattattccttattcggtggatttataaaaggattcggacaattgttctcaaac

SEQ ID NO: 24516 - DNA, 54 bp, unidentified
  source 1..54: mol_type = unassigned DNA; note = methanogen bacteria
ggaatcattgttgctgatccatcaactttcgtttcaatgggagcacttacaacc

SEQ ID NO: 24517 - DNA, 117 bp, unidentified
  source 1..117: mol_type = unassigned DNA; note = methanogen bacteria
ggatacggtgcaggagacatgctgatgccagcggttccggcacaattcataaccaccagttttgacttgtcactggttgcaggatttacaaaaggattcggacaactgttctcaaac

SEQ ID NO: 24518 - DNA, 54 bp, unidentified
  source 1..54: mol_type = unassigned DNA; note = methanogen bacteria
ggaatcatcgttgctgatccttccactttcgtaactttaggtgctatgacttcc

SEQ ID NO: 24519 - DNA, 117 bp, unidentified
  source 1..117: mol_type = unassigned DNA; note = methanogen bacteria
ggattcggtgctggagacccacttatgccaagcgtacctgctgaattcatttcattcagctttgacaccagcttggttggaggattcatatctggatttggagagctgttcaccaat

SEQ ID NO: 24520 - DNA, 30 bp, unidentified
  source 1..30: mol_type = unassigned DNA; note = methanogen bacteria
atgcttgcagaaggtggaatgcctgcaaca

SEQ ID NO: 24521 - DNA, 54 bp, unidentified
  source 1..54: mol_type = unassigned DNA; note = methanogen bacteria
ggaattatcgtagctgaccctgctactttagtaggtatgggttccatcttatcc

SEQ ID NO: 24522 - DNA, 117 bp, unidentified
  source 1..117: mol_type = unassigned DNA; note = methanogen bacteria
ggtttcggtgctggagatcctattatgcctgcaattcctgcagaattcgtatcatttagttttgatacttctgtagtcggtgcatttgcaactggatttacccaattgttctccaac

SEQ ID NO: 24523 - DNA, 33 bp, unidentified
  source 1..33: mol_type = unassigned DNA; note = methanogen bacteria
gaaattttaggaatatcgaatagtgaggaaagt

SEQ ID NO: 24524 - DNA, 54 bp, unidentified
  source 1..54: mol_type = unassigned DNA; note = methanogen bacteria
gaaataattgaatcccacccaacaacattagttacattaggaaacttattttca

SEQ ID NO: 24525 - DNA, 117 bp, unidentified
  source 1..117: mol_type = unassigned DNA; note = methanogen bacteria
ggatttggtgctggaaatgaaattatgccaacattacctaataatccaataaccacttcttttgatttatcaataattggggaatttacaaaaggatttggagaattattttcaaac

SEQ ID NO: 24526 - DNA, 54 bp, unidentified
  source 1..54: mol_type = unassigned DNA; note = methanogen bacteria
ggaattatcgtatctgatccttctacttttgtttctatgggagctcttacagcc

SEQ ID NO: 24527 - DNA, 120 bp, unidentified
  source 1..120: mol_type = unassigned DNA; note = methanogen bacteria
gcaggatatggtactggagacatattgatgcctgccgtaccagcacaattcattaccactagttttgatttatcattattcgctgcatgtttcaatggatttggaacactgttcaacaac

SEQ ID NO: 24528 - DNA, 30 bp, unidentified
  source 1..30: mol_type = unassigned DNA; note = methanogen bacteria
ggagccttggctaatgtgggattggttgcg

SEQ ID NO: 24529 - DNA, 45 bp, unidentified
  source 1..45: mol_type = unassigned DNA; note = methanogen bacteria
tacctattctccgtaagcgacccttcacacatccctattgtaatg

SEQ ID NO: 24530 - DNA, 36 bp, unidentified
  source 1..36: mol_type = unassigned DNA; note = methanogen bacteria
gccgccatcggcaccgactgggacctttccaagtac

SEQ ID NO: 24531 - DNA, 30 bp, unidentified
  source 1..30: mol_type = unassigned DNA; note = methanogen bacteria
ttcctgaccgagcagggattcgacatcgtc

SEQ ID NO: 24532 - DNA, 54 bp, unidentified
  source 1..54: mol_type = unassigned DNA; note = methanogen bacteria
ggaatcatcgtagatgatccatccactttggtttcaatgggaagccttatggct

SEQ ID NO: 24533 - DNA, 117 bp, unidentified
  source 1..117: mol_type = unassigned DNA; note = methanogen bacteria
ggattcggtaaaggagacatgttaatgcctgcagtgccggctcatttcattactactagttttgacctgtcactattcgccggatttatgaaaggatttggacaattgttctctaat

SEQ ID NO: 24534 - DNA, 30 bp, unidentified
  source 1..30: mol_type = unassigned DNA; note = methanogen bacteria
atgttatcacaaactggaatgcctgcaacg

SEQ ID NO: 24535 - DNA, 54 bp, unidentified
  source 1..54: mol_type = unassigned DNA; note = methanogen bacteria
ggaataatagaagcacatccaacaacataccttacattaggaaacttatttaca

SEQ ID NO: 24536 - DNA, 120 bp, unidentified
  source 1..120: mol_type = unassigned DNA; note = methanogen bacteria
ggatttggtgccggcaatgaaatgatgccatcattacccgaacatgcaataaccacaacatttgacctatcattatttggcgggtttgcaagaggctttggagaattattctcagacata

SEQ ID NO: 24537 - DNA, 30 bp, unidentified
  source 1..30: mol_type = unassigned DNA; note = methanogen bacteria
atgttagcagatgggggaatgccagcgtca

SEQ ID NO: 24538 - DNA, 54 bp, unidentified
  source 1..54: mol_type = unassigned DNA; note = methanogen bacteria
ggaataatcacgtcagacccatcaacatttgttacaatgggatcccttttatat

SEQ ID NO: 24539 - DNA, 120 bp, unidentified
  source 1..120: mol_type = unassigned DNA; note = methanogen bacteria
ggatttggtgcaggagatatgttaatgccatccatcccaaaacaaatcataactttaaatatggatacaacattagttggtggattttcaagaggattcggacagctattttcaaatatc

SEQ ID NO: 24540 - DNA, 54 bp, unidentified
  source 1..54: mol_type = unassigned DNA; note = methanogen bacteria
ggaattatcgtttccgacccgtccactattgtccgcatgggatctcttttaacc

SEQ ID NO: 24541 - DNA, 117 bp, unidentified
  source 1..117: mol_type = unassigned DNA; note = methanogen bacteria
ggatttggtacgggtaatgcattgatgccctcctttccggaacatatcatatcggtcaattttgatgtgtcattgtttttaggatttatcaaagggttcggacagctgttttcaaac

SEQ ID NO: 24542 - DNA, 30 bp, unidentified
  source 1..30: mol_type = unassigned DNA; note = methanogen bacteria
atgttatcacagggaggaatgcctgctagt

SEQ ID NO: 24543 - DNA, 54 bp, unidentified
  source 1..54: mol_type = unassigned DNA; note = methanogen bacteria
ggagttatagtagccaacccggcaacaatcattggaatgggaacaatctcatca

SEQ ID NO: 24544 - DNA, 117 bp, unidentified
  source 1..117: mol_type = unassigned DNA; note = methanogen bacteria
ggatttggagccggagatccaacaatgcctgctttaacatcacaagtaatatcatttaattttgatatgagtgtatttggaggcttcttatcaggatttagtgaattatttagtaat

SEQ ID NO: 24545 - DNA, 30 bp, unidentified
  source 1..30: mol_type = unassigned DNA; note = methanogen bacteria
tctcagatgaatcctgaatcatttttcgca

SEQ ID NO: 24546 - DNA, 54 bp, unidentified
  source 1..54: mol_type = unassigned DNA; note = methanogen bacteria
gatattttaacatttgttggcgcagattcttcaatggatttgtcaatgcagtat

SEQ ID NO: 24547 - DNA, 48 bp, unidentified
  source 1..48: mol_type = unassigned DNA; note = methanogen bacteria
tatggttttgcattgttttcagttactggcgtacccgaatcagtattt

SEQ ID NO: 24548 - DNA, 39 bp, unidentified; identical to SEQ ID NO: 23013
  source 1..39: mol_type = unassigned DNA; note = methanogen bacteria

SEQ ID NO: 24549 - DNA, 36 bp, unidentified; identical to SEQ ID NO: 23014
  source 1..36: mol_type = unassigned DNA; note = methanogen bacteria

SEQ ID NO: 24550 - DNA, 90 bp, unidentified
  source 1..90: mol_type = unassigned DNA; note = methanogen bacteria
ttggcaggaggttccagcattcaatcaaacttcactgattctacttattttacatgttatcatgcttattttgacaatcatctttatcaa

SEQ ID NO: 24551 - DNA, 54 bp, unidentified
  source 1..54: mol_type = unassigned DNA; note = methanogen bacteria
ggaatcatcgtttccgacccgtccaccattgttagcatgggatctcttatgact

SEQ ID NO: 24552 - DNA, 117 bp, unidentified
  source 1..117: mol_type = unassigned DNA; note = methanogen bacteria
ggatttggtgcaggcgacatattgatgcctgcatttccgaaacatatcgtatcggccaattttgatatgtcattgttttgcggattcatcaaaggattcggacagctgttttcaaac

SEQ ID NO: 24553 - DNA, 45 bp, unidentified
  source 1..45: mol_type = unassigned DNA; note = methanogen bacteria
gttagagaaattaaaataacagacaacatcagtttcctattactg

SEQ ID NO: 24554 - DNA, 33 bp, unidentified
  source 1..33: mol_type = unassigned DNA; note = methanogen bacteria
agtggtgggtctatctatatgatttttaatgta

SEQ ID NO: 24555 - DNA, 126 bp, unidentified
  source 1..126: mol_type = unassigned DNA; note = methanogen bacteria
gtctcactcctaccattacatccatatgcatatgcaatggcatctggtgtaggaagtgcaagtatgaacgccgcaggattagttccattagtgaatttatacccctccatggctactcagttagaa

SEQ ID NO: 24556 - DNA, 51 bp, unidentified
  source 1..51: mol_type = unassigned DNA; note = methanogen bacteria
ccgggagttccaactgctaattttgtgactcattacgcttctcaagttgat

SEQ ID NO: 24557 - DNA, 30 bp, unidentified
  source 1..30: mol_type = unassigned DNA; note = methanogen bacteria
atgcttgctgatggtggaatgcctgctact

SEQ ID NO: 24558 - DNA, 57 bp, unidentified
  source 1..57: mol_type = unassigned DNA; note = methanogen bacteria
ggaattatcgtagctgatccttcaacctttgttggaatgggatcacttatggctcct

SEQ ID NO: 24559 - DNA, 117 bp, unidentified
  source 1..117: mol_type = unassigned DNA; note = methanogen bacteria
ggatttggtgcaggagacatgttaatgccaacacttccatccacagtaattacaaccaattttgacttgtcactattcggaggatttgcaaaaggatttagccaattgttctccaat

SEQ ID NO: 24560 - DNA, 36 bp, unidentified
  source 1..36: mol_type = unassigned DNA; note = methanogen bacteria
accacaagcctgggaagcaatgttgcctcggccata

SEQ ID NO: 24561 - DNA, 57 bp, unidentified
  source 1..57: mol_type = unassigned DNA; note = methanogen bacteria
gatcccgtcatcactctcatgggtgccggagatatacgttcagaatgcaacgactac

SEQ ID NO: 24562 - DNA, 30 bp, unidentified
  source 1..30: mol_type = unassigned DNA; note = methanogen bacteria
ataatgggtgcggggaccatcggtgtgatg

SEQ ID NO: 24563 - DNA, 66 bp, unidentified
  source 1..66: mol_type = unassigned DNA; note = methanogen bacteria
gagcccctaatgtcccttttcacatattccgactcgatgctggagcagaaggatatgctcgtctgg

SEQ ID NO: 24564 - DNA, 150 bp, unidentified
  source 1..150: mol_type = unassigned DNA; note = methanogen bacteria
ttgcctattattcaagatgatatatactttgcaaaacatgcaagtgaaatatttcttttaaatggtaacaatttcttactatatcgtgtaacacactggacatcacgtattattactgaattttttttaccattacttgctaaaaatcca

SEQ ID NO: 24565 - DNA, 30 bp, unidentified
  source 1..30: mol_type = unassigned DNA; note = methanogen bacteria
ttaatgagtgcagggtttatttcaacaaca

SEQ ID NO: 24566 - DNA, 123 bp, unidentified
  source 1..123: mol_type = unassigned DNA; note = methanogen bacteria
aatccaggtaatcaagaaagatttgcagttgaacttgcagcttatggtggtgatttatttaattctttaagtttatttaataaaattgatattgcttcaacatcaatactctgtatgacactc

SEQ ID NO: 24567 - DNA, 66 bp, unidentified
  source 1..66: mol_type = unassigned DNA; note = methanogen bacteria
tttaacattcatggagaaatattttctatttttacacctgcgggcttattatcaagcactataact

SEQ ID NO: 24568 - DNA, 54 bp, unidentified
  source 1..54: mol_type = unassigned DNA; note = methanogen bacteria
acaccaagcgtgatgattacaggatatccttttgttgatgcacttgggaggtgg

SEQ ID NO: 24569 - DNA, 156 bp, unidentified
  source 1..156: mol_type = unassigned DNA; note = methanogen bacteria
ttaccttctattgaagatgatttgatttattcatcatttttaaatcaaaattcagatatatcttcatatattaacaattactacttgccacatattcatggttggagttcaaggtattttactgatttactaaccccaattatggcaacatatact

SEQ ID NO: 24570 - DNA, 114 bp, unidentified
  source 1..114: mol_type = unassigned DNA; note = methanogen bacteria
aatcctggaaatgattataggtatcattatgaaatagctaattgggttggaaactactctgaggtaactttaattaataaaatcgatttagctacaacatccctatatgttatg

SEQ ID NO: 24571 - DNA, 72 bp, unidentified
  source 1..72: mol_type = unassigned DNA; note = methanogen bacteria
tttgatgggtttaatgcattgtcgctagctcagaattttgctccgaacggtttgatatcacacggactagac

SEQ ID NO: 24572 - DNA, 51 bp, unidentified
  source 1..51: mol_type = unassigned DNA; note = methanogen bacteria
gcaccatctgctcaaatttggtatttcccactacataaatatcctggaaga

SEQ ID NO: 24573 - DNA, 33 bp, unidentified
  source 1..33: mol_type = unassigned DNA; note = methanogen bacteria
gtagcaggtcttggtggagatgcactggctgca

SEQ ID NO: 24574 - DNA, 54 bp, unidentified
  source 1..54: mol_type = unassigned DNA; note = methanogen bacteria
ccaatccttaagttcatgggtgcaggaagtacaataggatacgctatgaactac

SEQ ID NO: 24575 - DNA, 33 bp, unidentified
  source 1..33: mol_type = unassigned DNA; note = methanogen bacteria
gtcattgcatccggaaccgatgctgtagctgtc

SEQ ID NO: 24576 - DNA, 66 bp, unidentified
  source 1..66: mol_type = unassigned DNA; note = methanogen bacteria
caaatcgcagcaatgttttcatataccgaagccagtgcagtattggctcccgaaattgccacagcg

SEQ ID NO: 24577 - DNA, 36 bp, unidentified
  source 1..36: mol_type = unassigned DNA; note = methanogen bacteria
ggatttgcaagaggtgcaacaggtattggtatgctt

SEQ ID NO: 24578 - DNA, 30 bp, unidentified
  source 1..30: mol_type = unassigned DNA; note = methanogen bacteria
ttagaaggtcctggttactcattcaggaac

SEQ ID NO: 24579 - DNA, 48 bp, unidentified
  source 1..48: mol_type = unassigned DNA; note = methanogen bacteria
gctgctacccttaaaaactctttccaagctaccgcattagctagtatc

SEQ ID NO: 24580 - DNA, 84 bp, unidentified
  source 1..84: mol_type = unassigned DNA; note = methanogen bacteria
ggagatgctatcggtgcatttgaaagaatgcatttattaggtttagcttaccaaggtatgaatgcagataacttagttttagga

SEQ ID NO: 24581 - DNA, 72 bp, unidentified
  source 1..72: mol_type = unassigned DNA; note = methanogen bacteria
gacattatgactgatactattgcaaaagctagtgatgatggaattatcagtgttgaaaaagatttaaatgga

SEQ ID NO: 24582 - DNA, 36 bp, unidentified
  source 1..36: mol_type = unassigned DNA; note = methanogen bacteria
caaactgatgatttagctaaatggaacgcttacgta

SEQ ID NO: 24583 - DNA, 45 bp, unidentified
  source 1..45: mol_type = unassigned DNA; note = methanogen bacteria
ccactaaagaattccgcaattcaaaatatgatatatgatatcaaa

SEQ ID NO: 24584 - DNA, 123 bp, unidentified
  source 1..123: mol_type = unassigned DNA; note = methanogen bacteria
ataggcggtaaatcagttttcatacctggtagggagttagatttacctattgttgaaaatgctgaattaattggtgaaaaaattaggaagattcttcaggttaatgaagatgatgatacaact

SEQ ID NO: 24585 - DNA, 108 bp, unidentified
  source 1..108: mol_type = unassigned DNA; note = methanogen bacteria
ggagcagctagagcggctcaagctgtagcatcaacagtattgtattataatgatatgttagaatatgaaactggacttccgggtgttgattacggtaggactgaaggt

SEQ ID NO: 24586 - DNA, 93 bp, unidentified
  source 1..93: mol_type = unassigned DNA; note = methanogen bacteria
ttctcacattcaatttatggtgggggaggtccgggtactttccatggaaaccatgtagtaacaaggcatgccaaaggaactgctattccttgt

SEQ ID NO: 24587 - DNA, 144 bp, unidentified
  source 1..144: mol_type = unassigned DNA; note = methanogen bacteria
gcaatgtgtttggatgcgggaactcagatgttttctgttaaaagaacttctgcattgattggaacagtatatggtactattgacaatcttagaaatccaattccgaatgtagctaatgttgcaggtgaaattaaagataatctt

SEQ ID NO: 24588 - DNA, 33 bp, unidentified
  source 1..33: mol_type = unassigned DNA; note = methanogen bacteria
atgggtgctaacttaaaaaccatgttagacgta

SEQ ID NO: 24589 - DNA, 72 bp, unidentified
  source 1..72: mol_type = unassigned DNA; note = methanogen bacteria
ttagaaggtcctggttactccttaagaaacattaaagcaaacgacttcgtagctgctaccttaaagaacact

SEQ ID NO: 24590 - DNA, 54 bp, unidentified
  source 1..54: mol_type = unassigned DNA; note = methanogen bacteria
gcaagtattttcgaacaaactgctatgtttgaaatgggtgacgcagtaggtgct

SEQ ID NO: 24591 - DNA, 264 bp, unidentified
  source 1..264: mol_type = unassigned DNA; note = methanogen bacteria
caaggtttaaacgctgacaacatggtattaggtctcgtacaagacaacgcaaaagaaggaactgtaggttctatcgtacaagacactattgctaaagctgaagcagatggtgtaatcgctgtagaaaaagaattaactggatacaacatgtacgcaactagtgacgcagctaaatggaacgcatatgctgctgctggatgtactgctgctattatggttaacgtcggtgcagcaagagctgctcaaggtattccatcaactatc

SEQ ID NO: 24592 - DNA, 39 bp, unidentified
  source 1..39: mol_type = unassigned DNA; note = methanogen bacteria
gttcctgctattgcaaatgattttgcaatgaataatgtt

SEQ ID NO: 24593 - DNA, 33 bp, unidentified; identical to SEQ ID NO: 23017
  source 1..33: mol_type = unassigned DNA; note = methanogen bacteria

SEQ ID NO: 24594 - DNA, 96 bp, unidentified
  source 1..96: mol_type = unassigned DNA; note = methanogen bacteria
atgggtaatttagctttatctacccaatatgcagatttaattgttaaatcatctcaaataagtgtcaatttttgcttcattggttggaataaaatc

SEQ ID NO: 24595 - DNA, 156 bp, unidentified
  source 1..156: mol_type = unassigned DNA; note = methanogen bacteria
ttaccgtttcaacgtttaaatgtggctgcggattactccgtttccacaatgcagacaggtgctgcaacaattcaggcaatcattgacagttatgatgttaatatgtttgatgcatctacaattaaaactgctgtaatgggtgcatatccaagatca

SEQ ID NO: 24596 - DNA, 42 bp, unidentified
  source 1..42: mol_type = unassigned DNA; note = methanogen bacteria
ggatatggtttgagaaatgtcatggcaaaccatgtggttgcc

SEQ ID NO: 24597 - DNA, 267 bp, unidentified
  source 1..267: mol_type = unassigned DNA; note = methanogen bacteria
ctatcttcaattatggaacaaactgcaatgatagaaactggtgatgcaacaggggcatttgaaagaatgcatttgttgacattagcatatcagggtttaaatgctgataatttggtatttgatcttgtcaaggaaaacggtaaggggactgtcggtacagtaattcagtctttagtcggaagggctattgaagataatgttatccaggttgccaaaaagatgtcgtccggatatagcatgtatgaacctgttgactgggcattgtgg

SEQ ID NO: 24598 - DNA, 78 bp, unidentified
  source 1..78: mol_type = unassigned DNA; note = methanogen bacteria
tcaacagtattatattataatgatatgttggaatatgaaacaggccttccaggtgtggattatggtagaactgaaggt

SEQ ID NO: 24599 - DNA, 63 bp, unidentified
  source 1..63: mol_type = unassigned DNA; note = methanogen bacteria
ggaccaggtacattccatggaaaccatgtagtaacaagacatgcgaagggaacagcaattcct

SEQ ID NO: 24600 - DNA, 42 bp, unidentified
  source 1..42: mol_type = unassigned DNA; note = methanogen bacteria
atgtgtctggatgcgggaacacaaatgttttcagttcaaaga

SEQ ID NO: 24601 - DNA, 78 bp, unidentified
  source 1..78: mol_type = unassigned DNA; note = methanogen bacteria
gtatatggtactattgataatcttagaaatccaattccaaatgtagccaaagttgcaggagaaattaaagataactta

SEQ ID NO: 24602 - DNA, 240 bp, unidentified
  source 1..240: mol_type = unassigned DNA; note = methanogen bacteria
gaaaaaggtctaaaaaatgcggcaatggggggtaaatctacttacattccgggtcgtgaattggatttagatattattgaaaattctgatattattgcagaaaaaattagaagaattcttcgtgttaacgaagatgatgatactactgttgatattattaataatggtcagcaattattagttcaattaccatatgaaaggttaaaggtagctgcagattatagcgtatcaacattacaa

SEQ ID NO: 24603 - DNA, 93 bp, unidentified
  source 1..93: mol_type = unassigned DNA; note = methanogen bacteria
caggcaattatcgatagttttgaaataaacatgtttgatgcatctacaatcaaaactgctgtaatgggtgcttatccaagaacggttgatctt

SEQ ID NO: 24604 - DNA, 63 bp, unidentified
  source 1..63: mol_type = unassigned DNA; note = methanogen bacteria
ggttatggtttaagaaatgttatggcaaatcatgtggttgcaattacaaataaacaaacatta

SEQ ID NO: 24605 - DNA, 168 bp, unidentified
  source 1..168: mol_type = unassigned DNA; note = methanogen bacteria
gctttatcttctatcatggaacaaactgcaatgtttgaaacaggtgatgcgacaggtgcttttgaaaggatgcatttattgactttagcatttcaaggtttaaatgctaataatcttgtttttgatttagttaaagaaaatgggaaaggaacagtcggtactgttatt

SEQ ID NO: 24606 - DNA, 81 bp, unidentified
  source 1..81: mol_type = unassigned DNA; note = methanogen bacteria
ggaagagcaatagaagacaatgtaataagagtagctaaaaaaatgccttcaggatataatatgtatgacccagttgattgg

SEQ ID NO: 24607 - DNA, 195 bp, unidentified
  source 1..195: mol_type = unassigned DNA; note = methanogen bacteria
gcatctacagtattatattataatgatatgttggaatatgagacaggtcttccgggtgtagattatggtagaactgaaggtgttggtgtaggatttagtttcttttcacactcaatttacggtggtgggggtccaggaacatttcatggaaaccatgttgtaacaagacatgcaaaaggaactgcaataccttgt

SEQ ID NO: 24608 - DNA, 147 bp, unidentified
  source 1..147: mol_type = unassigned DNA; note = methanogen bacteria
gcagcaatgtgtttggatgcaggtactcaaatgttttcagttgagagaacttcagcattaataggaactgtatatggtactatagacaatcttagaaatccaattcctaatgtagctaaagttgcaggtgaggttaaagatatactt

SEQ ID NO: 24609 - DNA, 225 bp, unidentified
  source 1..225: mol_type = unassigned DNA; note = methanogen bacteria
agtccccttaaaaattctgctatacgggagatgatttatgatattaaaagatcagctgctgtaaatttagcaggtattgaaaaaggattaaaaggtgcagcaatgggcggtaaatccacatatattccaggtagggaattagatttgcctattcttgaaaatgcagaaattattgctcaaaaagttaaaaaaatcctaaaagttaacgaagatgacgacacaaca

SEQ ID NO: 24610 - DNA, 132 bp, unidentified
  source 1..132: mol_type = unassigned DNA; note = methanogen bacteria
attcgaagtgtagtcgaaagagcaatcgaagataaggtaatcaaagtagctaaaagaatgccttcaggatacaatatgtatgaacccgtagattgggcacgatggaatggatacgcggctgcaggattaatc

SEQ ID NO: 24611 - DNA, 111 bp, unidentified
  source 1..111: mol_type = unassigned DNA; note = methanogen bacteria
gtaggtgcagcaagagcagctcaaggtgtagcatcaacagtattatactacaatgatatactggaatacgaaacaggactccctggagtagactacggtagaacagaaggt

SEQ ID NO: 24612 - DNA, 249 bp, unidentified
  source 1..249: mol_type = unassigned DNA; note = methanogen bacteria
ttcttctcgcattcaatatatggtggaggaggaccaggtactttccacggaaaccacgtagtaacaaggcatgcaaaaggaacagcaatcccttgtgcatcggcggcaatgtgtttagatgcaggtactcaaatgttttcagttgaaagaacttcagcattaataggaacagtatatggtacaatagacaatcttagaaacccaattccaaatgtagcaaaagttgcatgggaaattaaagacaaaata

SEQ ID NO: 24613 - DNA, 42 bp, unidentified
  source 1..42: mol_type = unassigned DNA; note = methanogen bacteria
gagcacgagtccggactccccggagtcgactacggacgtgca

SEQ ID NO: 24614 - DNA, 72 bp, unidentified
  source 1..72: mol_type = unassigned DNA; note = methanogen bacteria
accattcctcaaatcacctttgaagagtttggaatgctctacagcattcctgaatggcatgtcggatttgac

SEQ ID NO: 24615 - DNA, 48 bp, unidentified
  source 1..48: mol_type = unassigned DNA; note = methanogen bacteria
ctgttcggcactatgggagattcattctacttgcctgtgcacttatcc

SEQ ID NO: 24616 - DNA, 54 bp, unidentified
  source 1..54: mol_type = unassigned DNA; note = methanogen bacteria
actatctctgatttagaagtatattcttttgattcattgagatatccgattgcc

SEQ ID NO: 24617 - DNA, 147 bp, unidentified
  source 1..147: mol_type = unassigned DNA; note = methanogen bacteria
gacgcattcatctattcgaatgataatcaggattacgggcaatttttaaatcgagttaaagacggcgttttaatcggaatccgtgcagccacattaggtatggccatacacaatgttataacttatggctcacatgtgccaaataca

SEQ ID NO: 24618 - DNA, 96 bp, unidentified
  source 1..96: mol_type = unassigned DNA; note = methanogen bacteria
ctaaattcagcagattataatgctgctcaaaaattcctatatgacgaaagagtcagcttcaacgatattgataacataatcgccgctgatgattcc

SEQ ID NO: 24619 - DNA, 36 bp, unidentified
  source 1..36: mol_type = unassigned DNA; note = methanogen bacteria
atggaattcttcttaaagacctatcctggactcatg

SEQ ID NO: 24620 - DNA, 39 bp, unidentified
  source 1..39: mol_type = unassigned DNA; note = methanogen bacteria
gattctcttacaacattgcttaagaatcagacattgtta

SEQ ID NO: 24621 - DNA, 39 bp, unidentified
  source 1..39: mol_type = unassigned DNA; note = methanogen bacteria
actttagcatttggcaatattggaataggctttattgaa

SEQ ID NO: 24622 - DNA, 33 bp, unidentified
  source 1..33: mol_type = unassigned DNA; note = methanogen bacteria
tttttaccgtatattcaagcaatattcggatta

SEQ ID NO: 24623 - DNA, 30 bp, unidentified
  source 1..30: mol_type = unassigned DNA; note = methanogen bacteria
aatgctatttcattcataccttacagcgaa

SEQ ID NO: 24624 - DNA, 30 bp, unidentified
  source 1..30: mol_type = unassigned DNA; note = methanogen bacteria
agaatgatttcttttgtaccttacagtgaa

SEQ ID NO: 24625 - DNA, 30 bp, unidentified
  source 1..30: mol_type = unassigned DNA; note = methanogen bacteria
gcatatctacagccatatattcctaactca

SEQ ID NO: 24626 - DNA, 30 bp, unidentified
  source 1..30: mol_type = unassigned DNA; note = methanogen bacteria
atgagtttaatatattctataactagcaca

SEQ ID NO: 24627 - DNA, 51 bp, unidentified
  source 1..51: mol_type = unassigned DNA; note = methanogen bacteria
gtgggaggattgccaatattgaaatcctctttaagatattcactaaagcct

SEQ ID NO: 24628 - DNA, 261 bp, unidentified
  source 1..261: mol_type = unassigned DNA; note = methanogen bacteria
aggtcattaaatgagcttgcaataagttcaaacaccagcatattctctaccttggaaagtagggcaaactttacaatgcatgtattgaacctattaaatcagatttcaggcaatttcggattattgcacggtaaaatgatagcaagtgctatgccaggaagtgatcttggacctagaatgattgtaggtaaattaatagcttggagaactgaagttactgtaactcctactttattaggccagatgctagttgacttcggt

SEQ ID NO: 24629 - DNA, 96 bp, unidentified
  source 1..96: mol_type = unassigned DNA; note = methanogen bacteria
ggccagatatcagagccaaacaatcctggaatgggcgaagtcagtttcatgttcctgttgaaaattataaggtctggaatgctgatttccaatgac

SEQ ID NO: 24630 - DNA, 36 bp, unidentified
  source 1..36: mol_type = unassigned DNA; note = methanogen bacteria
ttaagtggaggcaatgttgttgttgcagttgccgtt

SEQ ID NO: 24631 - DNA, 87 bp, unidentified
  source 1..87: mol_type = unassigned DNA; note = methanogen bacteria
gcccgtgcaattacttccggccaatataatttagcatatgatagggtaagtacattgataatcctctacaatgctaatgaagctatt

SEQ ID NO: 24632 - DNA, 51 bp, unidentified
  source 1..51: mol_type = unassigned DNA; note = methanogen bacteria
gttggaggggtgcctttactgaaatcctctttaagatattcccttaagcca

SEQ ID NO: 24633 - DNA, 261 bp, unidentified
  source 1..261: mol_type = unassigned DNA; note = methanogen bacteria
agatcattgaatgagcttgcaatcagctcaaacacaaacatgttctccaccttggaatcaagagcaaactttacaatgcatgtattgaacctattgaatcagatttctggcaatttcggaatcctgcatggaaagatgatagcaagttcaatgcctggaagcgaccttggaccaagaatgttggtgggtaagctaatagcttggagaacagaagttacagtaacccctacattattaggccaaatgcttgtggacttcggt

SEQ ID NO: 24634 - DNA, 33 bp, unidentified
  source 1..33: mol_type = unassigned DNA; note = methanogen bacteria
aattctactgttggcgaacctgtgctgtctgtt

SEQ ID NO: 24635 - DNA, 30 bp, unidentified
  source 1..30: mol_type = unassigned DNA; note = methanogen bacteria
gaaattggtcttgatcaggctgttgtgcca

SEQ ID NO: 24636 - DNA, 90 bp, unidentified
  source 1..90: mol_type = unassigned DNA; note = methanogen bacteria
ggaatggttgatttctcaggattctttgcagcaagcatttttgaagttcctgaattctacatgccttttgttaattacagttttaatcct

SEQ ID NO: 24637 - DNA, 45 bp, unidentified
  source 1..45: mol_type = unassigned DNA; note = methanogen bacteria
gctactttatcacttgttcacggtgacatatccatatccatttca

SEQ ID NO: 24638 - DNA, 36 bp, unidentified
  source 1..36: mol_type = unassigned DNA; note = methanogen bacteria
ggattttcaagaggtgcaacaggaataggtatgctt

SEQ ID NO: 24639 - DNA, 36 bp, unidentified
  source 1..36: mol_type = unassigned DNA; note = methanogen bacteria
cgacaaacaatcgcaagcaatataggggaaacagtt

SEQ ID NO: 24640 - DNA, 36 bp, unidentified; identical to SEQ ID NO: 19642
  source 1..36: mol_type = unassigned DNA; note = methanogen bacteria

SEQ ID NO: 24641 - DNA, 60 bp, unidentified; identical to SEQ ID NO: 19643
  source 1..60: mol_type = unassigned DNA; note = methanogen bacteria

SEQ ID NO: 24642 - DNA, 48 bp, unidentified; identical to SEQ ID NO: 19644
  source 1..48: mol_type = unassigned DNA; note = methanogen bacteria

SEQ ID NO: 24643 - DNA, 30 bp, unidentified
  source 1..30: mol_type = unassigned DNA; note = methanogen bacteria
catgttatcgcaccatacattccttacgca

SEQ ID NO: 24644 - DNA, 105 bp, unidentified
  source 1..105: mol_type = unassigned DNA; note = methanogen bacteria
gttgaagacccaaaagaacctgaaagagtttataatcctattcatattaaatatcaacctaatagttacacttgtgggcctacttcattatctatgtgttcacag

SEQ ID NO: 24645 - DNA, 72 bp, unidentified
  source 1..72: mol_type = unassigned DNA; note = methanogen bacteria
gatgaaactagcatcaatgcatttgcaaatgcatgttatactgatagtagtggtacttctccaactaatctt

SEQ ID NO: 24646 - DNA, 48 bp, unidentified
  source 1..48: mol_type = unassigned DNA; note = methanogen bacteria
ccacgtaatgtagatggtgttagcgaagccatagaaaacggcaaacca

SEQ ID NO: 24647 - DNA, 102 bp, unidentified
  source 1..102: mol_type = unassigned DNA; note = methanogen bacteria
attgtaatctacgaatggaatgatgactattactatattgcagacccaacaaaaggtctcggaagatgcagtcatagtatgattgataatgctatgcgtgga

SEQ ID NO: 24648 - DNA, 33 bp, unidentified
  source 1..33: mol_type = unassigned DNA; note = methanogen bacteria
gggtactcccagtgggatatcgatgccacctcc

SEQ ID NO: 24649 - DNA, 51 bp, unidentified
  source 1..51: mol_type = unassigned DNA; note = methanogen bacteria
accaatctgttcttcgaggtcaacgacgcggcggaatacagctacacggaa

SEQ ID NO: 24650 - DNA, 30 bp, unidentified
  source 1..30: mol_type = unassigned DNA; note = methanogen bacteria
aaatacatttcttttattccttacagtgaa

SEQ ID NO: 24651 - DNA, 54 bp, unidentified
  source 1..54: mol_type = unassigned DNA; note = methanogen bacteria
tctgttggaggagttcctctcttaaaatcctctttaagatactcccttaaccct

SEQ ID NO: 24652 - DNA, 261 bp, unidentified
  source 1..261: mol_type = unassigned DNA; note = methanogen bacteria
agatcattgaatgagcttgcaatcagttcaagcacagacccattttccacattggaatcaagagcaaactttacaatgcatgttttaaacctgttaaatcaaatttcaggcaattttggacttttacatggaaagatgctagcaagcgcaatgcctggaagcgaacttggcccaaggatgctggttggaaaactgatagcttggagaacagaagtaaccgtaacaccaacattgcttggacaaatgcttgtggatttcggt

SEQ ID NO: 24653 - DNA, 30 bp, unidentified; identical to SEQ ID NO: 19921
  source 1..30: mol_type = unassigned DNA; note = methanogen bacteria

SEQ ID NO: 24654 - DNA, 48 bp, unidentified
  source 1..48: mol_type = unassigned DNA; note = methanogen bacteria
gcattcagcgttttctcaattactggaatgcaaacagaaatatattgg

SEQ ID NO: 24655 - DNA, 81 bp, unidentified
  source 1..81: mol_type = unassigned DNA; note = methanogen bacteria
atcagcccggaagcgctgtcttcgctttatgcctggagcgtcggctcaatagatattgccggaagcggggtcaacggctgg

SEQ ID NO: 24656 - DNA, 63 bp, unidentified
  source 1..63: mol_type = unassigned DNA; note = methanogen bacteria
ggttacagcgccggtttcgatctctcggacggagccaccgtcttcagcgatttcgtcagctca

SEQ ID NO: 24657 - DNA, 69 bp, unidentified
  source 1..69: mol_type = unassigned DNA; note = methanogen bacteria
accctgccgggtgccggggacggtgtcgcatactacttcgagttccgtctgagcgacgtcgacggacag

SEQ ID NO: 24658 - DNA, 90 bp, unidentified
  source 1..90: mol_type = unassigned DNA; note = methanogen bacteria
gcctacacctccatgggaggggacatctcgggcggtgccggactcgtattcatcaccctgccccacatcttcggaggcatgggcatggga

SEQ ID NO: 24659 - DNA, 39 bp, unidentified
  source 1..39: mol_type = unassigned DNA; note = methanogen bacteria
tacggcccgctggatttcatccagatcgccggcaagaac

SEQ ID NO: 24660 - DNA, 48 bp, unidentified
  source 1..48: mol_type = unassigned DNA; note = methanogen bacteria
tttggacaaagcccaatattccccttcacttcactaaaccttccatta

SEQ ID NO: 24661 - DNA, 60 bp, unidentified
  source 1..60: mol_type = unassigned DNA; note = methanogen bacteria
cctgaaatattaggcggaggatactctatgatgagccttattcaagtgagcatacctcca

SEQ ID NO: 24662 - DNA, 60 bp, unidentified
  source 1..60: mol_type = unassigned DNA; note = methanogen bacteria
ggatatctcgtgggggctgacatggccgaccctgacctgttcggaagtttcaccgcatcc

SEQ ID NO: 24663 - DNA, 69 bp, unidentified
  source 1..69: mol_type = unassigned DNA; note = methanogen bacteria
atgcagcccggttcgatggacggggttatgtattacctctcgttcgacacggaccgtctcagcttctcc

SEQ ID NO: 24664 - DNA, 90 bp, unidentified
  source 1..90: mol_type = unassigned DNA; note = methanogen bacteria
gcctactcccacttctccggcgatatcgaaggcggtgcgtcgctggtcttcatcaccctcccgtacatcttcgccgacatgcccggcggg

SEQ ID NO: 24665 - DNA, 39 bp, unidentified
  source 1..39: mol_type = unassigned DNA; note = methanogen bacteria
tacggaccgctaagtttcgttgagatcgccggcaagaat

SEQ ID NO: 24666 - DNA, 30 bp, unidentified
  source 1..30: mol_type = unassigned DNA; note = methanogen bacteria
tcccaaatgaatccagaatcattttttgca

SEQ ID NO: 24667 - DNA, 48 bp, unidentified
  source 1..48: mol_type = unassigned DNA; note = methanogen bacteria
ctgatttatatgggcgcaacatcttcaatggacttgtcgatgcagtat

SEQ ID NO: 24668 - DNA, 51 bp, unidentified
  source 1..51: mol_type = unassigned DNA; note = methanogen bacteria
tatggttttgcactgttttctgttacaggtgcatccgaatcagtattctac

SEQ ID NO: 24669 - DNA, 36 bp, unidentified
  source 1..36: mol_type = unassigned DNA; note = methanogen bacteria
tcacagcttcaatccagcctacacttttcagccgaa

SEQ ID NO: 24670 - DNA, 39 bp, unidentified
  source 1..39: mol_type = unassigned DNA; note = methanogen bacteria
acttatcttgaacaggaaagaggtttggcattgcttagc

SEQ ID NO: 24671 - DNA, 45 bp, unidentified
  source 1..45: mol_type = unassigned DNA; note = methanogen bacteria
gacatttgtgatgtaagtatctatgatgctaactttgtaaaaggt

SEQ ID NO: 24672 - DNA, 39 bp, unidentified
  source 1..39: mol_type = unassigned DNA; note = methanogen bacteria
tctactttattatacttcaatgataaccttgaattcgca

SEQ ID NO: 24673 - DNA, 57 bp, unidentified
  source 1..57: mol_type = unassigned DNA; note = methanogen bacteria
cctggtctcgactacggtagagcagaaggtgtagctgtaggattctcattcttctct

SEQ ID NO: 24674 - DNA, 30 bp, unidentified
  source 1..30: mol_type = unassigned DNA; note = methanogen bacteria
aaaatgatttcctttattccgtacagcgaa

SEQ ID NO: 24675 - DNA, 33 bp, unidentified; identical to SEQ ID NO: 20100
  source 1..33: mol_type = unassigned DNA; note = methanogen bacteria

SEQ ID NO: 24676 - DNA, 60 bp, unidentified; identical to SEQ ID NO: 20101
  source 1..60: mol_type = unassigned DNA; note = methanogen bacteria

SEQ ID NO: 24677 - DNA, 51 bp, unidentified; identical to SEQ ID NO: 20102
  source 1..51: mol_type = unassigned DNA; note = methanogen bacteria

SEQ ID NO: 24678 - DNA, 39 bp, unidentified
  source 1..39: mol_type = unassigned DNA; note = methanogen bacteria
gtacctgactcatttttaaaaaatactctacttgtggac

SEQ ID NO: 24679 - DNA, 129 bp, unidentified
  source 1..129: mol_type = unassigned DNA; note = methanogen bacteria
atcaaacctggtgttggcttgaatatggccgccgccgcacagtcatcaaatgtcactatcaaccagactatgacaggcacaattctaaacatggttcctgacaatccgctcaatgccctggcaaatggg

SEQ ID NO: 24680 - DNA, 33 bp, unidentified
  source 1..33: mol_type = unassigned DNA; note = methanogen bacteria
gctcaggcatatggtatagatttgggaacaact

SEQ ID NO: 24681 - DNA, 42 bp, unidentified
  source 1..42: mol_type = unassigned DNA; note = methanogen bacteria
atagaggcggcaatgcctggctctgtgccggacgggtacgtc

SEQ ID NO: 24682 - DNA, 42 bp, unidentified
  source 1..42: mol_type = unassigned DNA; note = methanogen bacteria
aacctggggatcccgtgcagggggatcatgggcgacggaacg

SEQ ID NO: 24683 - DNA, 78 bp, unidentified
  source 1..78: mol_type = unassigned DNA; note = methanogen bacteria
tccggcagcgggaggtcggggacggcgctggcactgaaggaggtcataggggattcgctggaaggtttctgctccgag

SEQ ID NO: 24684 - DNA, 39 bp, unidentified
  source 1..39: mol_type = unassigned DNA; note = methanogen bacteria
gtacctgattcattttttaaaaatattattcttgtagat

SEQ ID NO: 24685 - DNA, 129 bp, unidentified
  source 1..129: mol_type = unassigned DNA; note = methanogen bacteria
attaaacctggtgtgggtttaaacatggctgtaacctctcaagcgggaaatgttactcttaatcagacaatgactgatacaattttgaatatggttcctgacaatcctttaaattctcttgcaagtgga

SEQ ID NO: 24686 - DNA, 33 bp, unidentified
  source 1..33: mol_type = unassigned DNA; note = methanogen bacteria
gctcaggcatatggtatggatttaggaacatca

SEQ ID NO: 24687 - DNA, 33 bp, unidentified
  source 1..33: mol_type = unassigned DNA; note = methanogen bacteria
aacaccactgttggcgaacctgtgctatctgtt

SEQ ID NO: 24688 - DNA, 30 bp, unidentified
  source 1..30: mol_type = unassigned DNA; note = methanogen bacteria
gaaatcggtcttgatcaagctgtagttcca

SEQ ID NO: 24689 - DNA, 90 bp, unidentified
  source 1..90: mol_type = unassigned DNA; note = methanogen bacteria
ggtatggttgacttctcaggattctttgcagctagcttatttgaaattcctgatttctatatgccatttataaactatagcttcaatcct

SEQ ID NO: 24690 - DNA, 45 bp, unidentified
  source 1..45: mol_type = unassigned DNA; note = methanogen bacteria
gctaccttatctatcgttcaaggtgacttgtcagtttccatttca

SEQ ID NO: 24691 - DNA, 90 bp, unidentified
  source 1..90: mol_type = unassigned DNA; note = methanogen bacteria
ttttttaaaggatggggatcaaatccaaatgctttctttaatggttcacttttacaagtttcagaatctcctatgggcttgctgacattt

SEQ ID NO: 24692 - DNA, 72 bp, unidentified
  source 1..72: mol_type = unassigned DNA; note = methanogen bacteria
atgctcccaggagcagggattggattgcaggaattgttcagtccagaatgggaatcactatctaactttggc

SEQ ID NO: 24693 - DNA, 108 bp, unidentified
  source 1..108: mol_type = unassigned DNA; note = methanogen bacteria
ggctatatgtcacttcaaacaggcactccagtagagcaattggtaacccaaggagcaggattgatatttgtagtttatcctaccgcatttaatgcattaggcagttgg

SEQ ID NO: 24694 - DNA, 30 bp, unidentified
  source 1..30: mol_type = unassigned DNA; note = methanogen bacteria
gtacccgattcattttttaaaaatatcata

SEQ ID NO: 24695 - DNA, 129 bp, unidentified
  source 1..129: mol_type = unassigned DNA; note = methanogen bacteria
atcaaaccgggtgcaggcttgaatatggtggcagccgcacagtcatcaaatgtcactctcaaccagacaatgactgatacagttctgaatatggttcctgacaatccactcaatgccctgtcaaacgga

SEQ ID NO: 24696 - DNA, 30 bp, unidentified
  source 1..30: mol_type = unassigned DNA; note = methanogen bacteria
gctcaggcatatggtatggatttgggtgta

SEQ ID NO: 24697 - DNA, 33 bp, unidentified
  source 1..33: mol_type = unassigned DNA; note = methanogen bacteria
aacactactgttggcgaacctgtgctatctgtt

SEQ ID NO: 24698 - DNA, 30 bp, unidentified
  source 1..30: mol_type = unassigned DNA; note = methanogen bacteria
gaaattggtcttgaccaagctgttattcca

SEQ ID NO: 24699 - DNA, 90 bp, unidentified
  source 1..90: mol_type = unassigned DNA; note = methanogen bacteria
ggtatggttgacttctcaggattctatgcagctagcctatttgaaattcctgatttctacatgccatttgtaaactacagctttaatcct

SEQ ID NO: 24700 - DNA, 45 bp, unidentified
  source 1..45: mol_type = unassigned DNA; note = methanogen bacteria
gctacattatccattgctcaaggtgatttatccgtatctatttca

SEQ ID NO: 24701 - DNA, 45 bp, unidentified
  source 1..45: mol_type = unassigned DNA; note = methanogen bacteria
tccatcgatgcggcggtttcggacgcggtgcccgaagagtacgtt

SEQ ID NO: 24702 - DNA, 42 bp, unidentified
  source 1..42: mol_type = unassigned DNA; note = methanogen bacteria
aatctggggatcccctgcagggggatcatgggagaaggtacg

SEQ ID NO: 24703 - DNA, 78 bp, unidentified
  source 1..78: mol_type = unassigned DNA; note = methanogen bacteria
tcagggagcgggagatcggggacggcgctggtcctgaaagaggtcattggggattcgctgaacggcttctgctccgag

SEQ ID NO: 24704 - DNA, 42 bp, unidentified
  source 1..42: mol_type = unassigned DNA; note = methanogen bacteria
atatccatattattcggacctgcatatgccagttcaacgacc

SEQ ID NO: 24705 - DNA, 39 bp, unidentified
  source 1..39: mol_type = unassigned DNA; note = methanogen bacteria
cgatattattcagattacgattatccgtccaatcagcca

SEQ ID NO: 24706 - DNA, 33 bp, unidentified
  source 1..33: mol_type = unassigned DNA; note = methanogen bacteria
tatttccttgaaagcttaggatgctcctatgcg

SEQ ID NO: 24707 - DNA, 33 bp, unidentified
  source 1..33: mol_type = unassigned DNA; note = methanogen bacteria
gatatcttccaaaaccttggtggaggcataggt

SEQ ID NO: 24708 - DNA, 30 bp, unidentified
  source 1..30: mol_type = unassigned DNA; note = methanogen bacteria
atcagaagcattaaaagaagaatcagaaga

SEQ ID NO: 24709 - DNA, 42 bp, unidentified
  source 1..42: mol_type = unassigned DNA; note = methanogen bacteria
aattcaggacattattcagattatgattatccgcctaatcaa

SEQ ID NO: 24710 - DNA, 30 bp, unidentified
  source 1..30: mol_type = unassigned DNA; note = methanogen bacteria
gttgatgacccgtatattaaaaatactata

SEQ ID NO: 24711 - DNA, 132 bp, unidentified
  source 1..132: mol_type = unassigned DNA; note = methanogen bacteria
attaaacctggtatgggtttaaatttagttgcaacagggcagtcaactagcgtaacaattaaccagacaatgactgatacgattttaaatgtaattcctgaaaatccgttcacatctcttgcaagtggggat

SEQ ID NO: 24712 - DNA, 33 bp, unidentified
  source 1..33: mol_type = unassigned DNA; note = methanogen bacteria
gctcaggcatatggaatcgacttaggtacctca

SEQ ID NO: 24713 - DNA, 39 bp, unidentified
  source 1..39: mol_type = unassigned DNA; note = methanogen bacteria
gttgaaaacaattttattgaagatgttattcttatggat

SEQ ID NO: 24714 - DNA, 132 bp, unidentified; identical to SEQ ID NO: 18314
  source 1..132: mol_type = unassigned DNA; note = methanogen bacteria

SEQ ID NO: 24715 - DNA, 36 bp, unidentified
  source 1..36: mol_type = unassigned DNA; note = methanogen bacteria
gctcaatgttgtggaatggatttaggtacttcagct

SEQ ID NO: 24716 - DNA, 33 bp, unidentified
  source 1..33: mol_type = unassigned DNA; note = methanogen bacteria
ttggtattcacctcagttggtcttccggttgaa

SEQ ID NO: 24717 - DNA, 81 bp, unidentified
  source 1..81: mol_type = unassigned DNA; note = methanogen bacteria
ttcggggactggtcgctgctcgaggacggcctggaactgatcatgccggagcccggggaggactccacgaacaccaattat

SEQ ID NO: 24718 - DNA, 33 bp, unidentified
  source 1..33: mol_type = unassigned DNA; note = methanogen bacteria
gtcgcagggaccgacgggggcatatccgtcgga

SEQ ID NO: 24719 - DNA, 30 bp, unidentified
  source 1..30: mol_type = unassigned DNA; note = methanogen bacteria
gtcaacatcagcgacttgaaggacaccgag

SEQ ID NO: 24720 - DNA, 39 bp, unidentified
  source 1..39: mol_type = unassigned DNA; note = methanogen bacteria
aacaccatcgtggacggcgcgcctgcgctttccaactcc

SEQ ID NO: 24721 - DNA, 30 bp, unidentified
  source 1..30: mol_type = unassigned DNA; note = methanogen bacteria
gtgaaaaatcctttcattaagaataccctc

SEQ ID NO: 24722 - DNA, 126 bp, unidentified
  source 1..126: mol_type = unassigned DNA; note = methanogen bacteria
atcaaacccggtgcgggattgaacatggttggtcttgcacaagccaacgtcacaacaaacacgaccataacagacacggtgctgaattttattcctgaaaatccgttcagctcccttgcaaacgga

SEQ ID NO: 24723 - DNA, 30 bp, unidentified
  source 1..30: mol_type = unassigned DNA; note = methanogen bacteria
gctcaggcatatggtatggatttaggactg

SEQ ID NO: 24724 - DNA, 42 bp, unidentified
  source 1..42: mol_type = unassigned DNA; note = methanogen bacteria
tccaccacgctgcaggatgccttcggcgtcggaacggcagag

SEQ ID NO: 24725 - DNA, 42 bp, unidentified
  source 1..42: mol_type = unassigned DNA; note = methanogen bacteria
ggatccttctaccagaactgcggaggtttctccaaggacgat

SEQ ID NO: 24726 - DNA, 30 bp, unidentified
  source 1..30: mol_type = unassigned DNA; note = methanogen bacteria
tccggttccgacggaatcgtggacagcttc

SEQ ID NO: 24727 - DNA, 42 bp, unidentified
  source 1..42: mol_type = unassigned DNA; note = methanogen bacteria
atgcttaggagttggaatgattatgaatttgtttatagtgaa

SEQ ID NO: 24728 - DNA, 96 bp, unidentified
  source 1..96: mol_type = unassigned DNA; note = methanogen bacteria
tatattctttatgaaacaactgcgggttcaggttctgaattgatgtctattttccgatctcttgctgattttgttcagtatgatattgtaaagatt

SEQ ID NO: 24729 - DNA, 297 bp, unidentified
  source 1..297: mol_type = unassigned DNA; note = methanogen bacteria
tttacctatgctatgaatcagtatgtttgggaagatcaggaatggtcttatgtcagcaggttttcctatggacaactgattgttgaagggaatggtgctactcttgttggtaatggcgactataattttatgtatataggttctgaagctaatgttaattttttaaatgtcaatatcaaacattttaatcattgttttattaatcatggtactcttatgtgtgagaaatgttttttcagtgataatagggcttataagtttgatgtgaagattagtggttcaggtactattgttcat

SEQ ID NO: 24730 - DNA, 57 bp, unidentified
  source 1..57: mol_type = unassigned DNA; note = methanogen bacteria
tataatactgtatatttcgattggtgtagttttaataataatactgcagagtattgg

SEQ ID NO: 24731 - DNA, 171 bp, unidentified
  source 1..171: mol_type = unassigned DNA; note = methanogen bacteria
catcagttttttcctttgtttgagcagtcatacattagtcaatatacctattttagtttagttaattcaactgctttttcaacaaataggactatggaaattaatgtatctaactcagaagaattgcttgatgcctttttgtatattaataatttccctgatgcgaataat

SEQ ID NO: 24732 - DNA, 129 bp, unidentified
  source 1..129: mol_type = unassigned DNA; note = methanogen bacteria
attaatatgaaaagtggatcctatactgtttctgttaatgattattctcgtgttaggacttatgattggagggcgaaagcttataatccgggtatattgtcttctgctgttattaaagagcgttatttg

SEQ ID NO: 24733 - DNA, 102 bp, unidentified
  source 1..102: mol_type = unassigned DNA; note = methanogen bacteria
actattaatggtaatggtgctcatattattttatctggtaatgatttgaatgatgattatcattttgctaatattgggaagtatggttatttgactttgaat

SEQ ID NO: 24734 - DNA, 39 bp, unidentified
  source 1..39: mol_type = unassigned DNA; note = methanogen bacteria
attccgtcaattgcagccgaatttcacatgagcaatatt

SEQ ID NO: 24735 - DNA, 36 bp, unidentified; identical to SEQ ID NO: 24045
  source 1..36: mol_type = unassigned DNA; note = methanogen bacteria

SEQ ID NO: 24736 - DNA, 75 bp, unidentified
  source 1..75: mol_type = unassigned DNA; note = methanogen bacteria
atgggtgatgttccgattattcagcagtattatcctctattgttggaatcaaatctgatagctagtttaattcat

SEQ ID NO: 24737 - DNA, 78 bp, unidentified
  source 1..78: mol_type = unassigned DNA; note = methanogen bacteria
ggtgcattggccggatgggttggaggcttccttggtgaaggattgctttcatcattaatctgcgatggtgtcatcgga

SEQ ID NO: 24738 - DNA, 144 bp, unidentified
  source 1..144: mol_type = unassigned DNA; note = methanogen bacteria
acatctgttaattcaaatatagttgtaaataaagtatccacttctttaactgttaatgacatcaatatcacttatagcgattcagctaatctaatcattactttaaaggacaggaataatgctgttttgaaaggtaaggatatt

SEQ ID NO: 24739 - DNA, 57 bp, unidentified
  source 1..57: mol_type = unassigned DNA; note = methanogen bacteria
ttgaatggtaaggattatgttgttaaaactggtaatgatggtaaggcaacattgccg

SEQ ID NO: 24740 - DNA, 267 bp, unidentified
  source 1..267: mol_type = unassigned DNA; note = methanogen bacteria
gcttcttctgtcagttcagatgttgttgttgataagctcgctaccgctttaactgccggcaacatcaatatcacctatggcgattcagccaatctaatcattactttaaaggacgctaaaggcaatgcattatctggaaaagtcattctgatcaatataactgacaagatttattctgcaacaactgacaataatggggaggtcacattgccgattgatattctgcctggaaaatacgcatcaaaaatagaatttggagaagatgaa

SEQ ID NO: 24741 - DNA, 51 bp, unidentified
  source 1..51: mol_type = unassigned DNA; note = methanogen bacteria
ttgcaaaataaggacaatctatttaacggtatttatacggatgtttttgtt

SEQ ID NO: 24742 - DNA, 258 bp, unidentified
  source 1..258: mol_type = unassigned DNA; note = methanogen bacteria
ttgaatggtcttgaagtgacctataacggcaccgaaaattacccttctgcaatcggttatcttaacttaactgtttcccaagttaatgtcactgtttccaatgagactggtgaaggtaaggtcggcgatgagattgaagttgagtttactgttactgctagtgatgaaagtgagattaatgaaggtaagttgactgttactgttaagggtactgagtatagtgctgaggttaaggatggcaaggctacctttactttt

SEQ ID NO: 24743 - DNA, 126 bp, unidentified
  source 1..126: mol_type = unassigned DNA; note = methanogen bacteria
aacattaatttagaagctggaaaatatgtcattactgcttatcatccatttaataatcagacacattcaaacaacattactgtattatctagggtaatcgataatgatgatttagtaaaatactac

SEQ ID NO: 24744 - DNA, 123 bp, unidentified
  source 1..123: mol_type = unassigned DNA; note = methanogen bacteria
ggttcccaatatgttgttactattttaggtgctgacggtaaagtggtaggtgctggtgaaaacgtcacattcaacatcaatggtgtaatgtacactcgccaaaccaatgaatcaggtcaggct

SEQ ID NO: 24745 - DNA, 216 bp, unidentified
  source 1..216: mol_type = unassigned DNA; note = methanogen bacteria
acgataacagcaatgtacaatgactgtagagtatctaatagcattgaagtgttgcctgtcctgtttgctgaagacttagttaaaaaatatggtatttccgatcaattcaaagcattattagttgatggtcaaggaaatcctttccctaatcaaaatattactttcaacattaacggagtattctatcaaagaaccactaatgatgaaggttatgct

SEQ ID NO: 24746 - DNA, 57 bp, unidentified
  source 1..57: mol_type = unassigned DNA; note = methanogen bacteria
atcattacttcaagtttcaatggaactaacatatcaaacaaaattactattgtagat

SEQ ID NO: 24747 - DNA, 33 bp, unidentified
  source 1..33: mol_type = unassigned DNA; note = methanogen bacteria
gtttctgctttaggtgctgatgcattggccgga

SEQ ID NO: 24748 - DNA, 48 bp, unidentified
  source 1..48: mol_type = unassigned DNA; note = methanogen bacteria
atattgatagcaatgggtgttggaaatactataaattttgccatggtt

SEQ ID NO: 24749 - DNA, 36 bp, unidentified
  source 1..36: mol_type = unassigned DNA; note = methanogen bacteria
acttatgttgcatcaaccgatgcagtggcggtatac

SEQ ID NO: 24750 - DNA, 63 bp, unidentified
  source 1..63: mol_type = unassigned DNA; note = methanogen bacteria
gaaattgtctatctgtttgcttatgcaggtaccagtattaggttagctccacaacttgtggca

SEQ ID NO: 24751 - DNA, 30 bp, unidentified
  source 1..30: mol_type = unassigned DNA; note = methanogen bacteria
atgacctttttcctacaaacatttccgggt

SEQ ID NO: 24752 - DNA, 33 bp, unidentified
  source 1..33: mol_type = unassigned DNA; note = methanogen bacteria
tctcttgagacattacttaccaatcattcatta

SEQ ID NO: 24753 - DNA, 36 bp, unidentified
  source 1..36: mol_type = unassigned DNA; note = methanogen bacteria
tccactattcttttaggtttaaccggtgtaggtttt

SEQ ID NO: 24754 - DNA, 51 bp, unidentified
  source 1..51: mol_type = unassigned DNA; note = methanogen bacteria
ttaatctacctccaggcttttattttaaattcacaagtttgtgttgtaaaa

SEQ ID NO: 24755 - DNA, 42 bp, unidentified
  source 1..42: mol_type = unassigned DNA; note = methanogen bacteria
ataatttcaatactatttggagaggcatatcataattcaatt

SEQ ID NO: 24756 - DNA, 45 bp, unidentified
  source 1..45: mol_type = unassigned DNA; note = methanogen bacteria
ctgccatccatcgaacaaagctttaaccttaccagcagagaatca

SEQ ID NO: 24757 - DNA, 36 bp, unidentified
  source 1..36: mol_type = unassigned DNA; note = methanogen bacteria
tcgcttgttattctttcaatgggactgaatgaccag

SEQ ID NO: 24758 - DNA, 39 bp, unidentified
  source 1..39: mol_type = unassigned DNA; note = methanogen bacteria
gtctcagatccatttattaaagatactatccttgcaaac

SEQ ID NO: 24759 - DNA, 126 bp, unidentified
  source 1..126: mol_type = unassigned DNA; note = methanogen bacteria
attcagccgggtgcaggtttaaatatggctgcttctcagacaagtattgcatcaaatacgacaataaccgaaacaattttggatatgattccagataatccgttttacgcccttgcaaacggtgat

SEQ ID NO: 24760 - DNA, 36 bp, unidentified
  source 1..36: mol_type = unassigned DNA; note = methanogen bacteria
gcagctcaggcatatggaattgacctgggaactagt

SEQ ID NO: 24761 - DNA, 30 bp, unidentified
  source 1..30: mol_type = unassigned DNA; note = methanogen bacteria
gtattcaattccgtaggccttccggcagat

SEQ ID NO: 24762 - DNA, 39 bp, unidentified
  source 1..39: mol_type = unassigned DNA; note = methanogen bacteria
gtcaaagacccttttatcaaagatatagtacttatagat

SEQ ID NO: 24763 - DNA, 129 bp, unidentified
  source 1..129: mol_type = unassigned DNA; note = methanogen bacteria
attaaaccgggtgaaggcttaaacatggccggccttgcacaagcaaatctcacaactgcacaatccatggcagacactgttataaatatcatcccagataacccaatcaactctcttgcctctggagat

SEQ ID NO: 24764 - DNA, 36 bp, unidentified
  source 1..36: mol_type = unassigned DNA; note = methanogen bacteria
gcagctcaggcttatggaattgacctgggaacatca

SEQ ID NO: 24765 - DNA, 30 bp, unidentified
  source 1..30: mol_type = unassigned DNA; note = methanogen bacteria
gtaactgatccatttattaaaaatatagta

SEQ ID NO: 24766 - DNA, 132 bp, unidentified
  source 1..132: mol_type = unassigned DNA; note = methanogen bacteria
attcaaccaggtattggtttaaatatggcagcaaattctacagcatcatcacaggttgccgttaatcaaacagttgcagatacacttttaaatataatacccgataacccaattaattcacttgctaacgga

SEQ ID NO: 24767 - DNA, 33 bp, unidentified
  source 1..33: mol_type = unassigned DNA; note = methanogen bacteria
acagcccaagcttttggtattgatttgggactt

SEQ ID NO: 24768 - DNA, 231 bp, unidentified
  source 1..231: mol_type = unassigned DNA; note = methanogen bacteria
atattctatttggataatgatactgggtattactctgaatatttcaatgatactgaagatttaatatttaccatatacagaaacttcactgacaatggaatactatattcaaagggatacaatttcaagaatttaaaagaaattgcagaggtattccctttaatgttaaacaacagttattcattagacattgacattacaaaaaacctttatgttaatgacatcgacagt

SEQ ID NO: 24769 - DNA, 153 bp, unidentified
  source 1..153: mol_type = unassigned DNA; note = methanogen bacteria
gaatcatgtttggagcctgtaatgaagtatgctaaacaagatggcttagaaaatatcaagaccaaagtattgactattaatttaaagaaaggaatgacaattgattgcaaaaacacaatcaaaccagattccctggattccatgtattcaatg

SEQ ID NO: 24770 - DNA, 33 bp, unidentified
  source 1..33: mol_type = unassigned DNA; note = methanogen bacteria
gtggacaatccattcattaaaaatgtaatactg

SEQ ID NO: 24771 - DNA, 129 bp, unidentified
  source 1..129: mol_type = unassigned DNA; note = methanogen bacteria
ttcaaaccgggattgggtttgaacatggcaagcgtcgcccagtcatccagtgttgtcatgaatcagacaatgacagacaccatattaaacattatccctgacaatccaatcaactcccttgccaacggg

SEQ ID NO: 24772 - DNA, 33 bp, unidentified
  source 1..33: mol_type = unassigned DNA; note = methanogen bacteria
gcacaggcatacggtatggatcttggaacctcc

SEQ ID NO: 24773 - DNA, 42 bp, unidentified
  source 1..42: mol_type = unassigned DNA; note = methanogen bacteria
tttgtatctgatcagtttattaaagatgttattcttttaaat

SEQ ID NO: 24774 - DNA, 126 bp, unidentified
  source 1..126: mol_type = unassigned DNA; note = methanogen bacteria
attaaacctggtgccggtttaaatatggttggtgttgcacaggccaatgttacaactaatgcatccgcatccaatacagttttaaatatgattccagataatccatttaactcccttgccaatggg

SEQ ID NO: 24775 - DNA, 30 bp, unidentified
  source 1..30: mol_type = unassigned DNA; note = methanogen bacteria
gctcaagcatatggtatggatttaggatta

SEQ ID NO: 24776 - DNA, 30 bp, unidentified
  source 1..30: mol_type = unassigned DNA; note = methanogen bacteria
gtattcacttctgtaggattaccggtggat

SEQ ID NO: 24777 - DNA, 30 bp, unidentified
  source 1..30: mol_type = unassigned DNA; note = methanogen bacteria
gtttcagattctttcatcaagcaaatcata

SEQ ID NO: 24778 - DNA, 129 bp, unidentified
  source 1..129: mol_type = unassigned DNA; note = methanogen bacteria
ataaaacctggtgtcggcttgaatttggctggcgttgcaacttcggccaacgtaacggttaaccagacagtgcctgatgcaatcctgaatatgattccggacaatcctatcgcctcattggccactggg

SEQ ID NO: 24779 - DNA, 33 bp, unidentified
  source 1..33: mol_type = unassigned DNA; note = methanogen bacteria
gccgctcaggcttatggtatggatttgggcatt

SEQ ID NO: 24780 - DNA, 30 bp, unidentified
  source 1..30: mol_type = unassigned DNA; note = methanogen bacteria
gtattctcatccgtaggattgccggttgat

SEQ ID NO: 24781 - DNA, 39 bp, unidentified
  source 1..39: mol_type = unassigned DNA; note = methanogen bacteria
gttacagatccttttataaaaaacattatactgatggac

SEQ ID NO: 24782 - DNA, 132 bp, unidentified
  source 1..132: mol_type = unassigned DNA; note = methanogen bacteria
ataaaaccaggagtgggattgcatatggccagtttaattgagcaatcaaatgtcactgttaatcaaacaatgacagatacactattgaacatgattccggaaaacccaattaattccttagcttcaggagat

SEQ ID NO: 24783 - DNA, 36 bp, unidentified
  source 1..36: mol_type = unassigned DNA; note = methanogen bacteria
gctgcacaggcttacggtatagatttaactacaagt

SEQ ID NO: 24784 - DNA, 39 bp, unidentified
  source 1..39: mol_type = unassigned DNA; note = methanogen bacteria
gttcatgatcattttataaaaaatattgtcttaatggac

SEQ ID NO: 24785 - DNA, 129 bp, unidentified
  source 1..129: mol_type = unassigned DNA; note = methanogen bacteria
cttaaaccgggccttggtttgaatatggccgctgcagctcaaacatctaatgtgactattaaccagacaatgactgatacaattttaaatatcattccggaaaacccgttgaatgcgttggctaacgga

SEQ ID NO: 24786 - DNA, 33 bp, unidentified
  source 1..33: mol_type = unassigned DNA; note = methanogen bacteria
gctcaggcttatggaatagatttaggcacttca

SEQ ID NO: 24787 - DNA, 33 bp, unidentified
  source 1..33: mol_type = unassigned DNA; note = methanogen bacteria
gtaactgatccatttattaaaaatatagtatta

SEQ ID NO: 24788 - DNA, 129 bp, unidentified
  source 1..129: mol_type = unassigned DNA; note = methanogen bacteria
attcagccaggtgccggtttaaatatggtatctaatgctacaacatcaaatgttgcccttaatcagacaacagcagatacacttttaaatataataccagataatccaattaattcacttgctaatgga

SEQ ID NO: 24789 - DNA, 33 bp, unidentified
  source 1..33: mol_type = unassigned DNA; note = methanogen bacteria
acagcccaagctttcggtattgatttgggactt

SEQ ID NO: 24790 - DNA, 39 bp, unidentified
  source 1..39: mol_type = unassigned DNA; note = methanogen bacteria
gtctcagaccacttcattaagaacataatcctaattgac

SEQ ID NO: 24791 - DNA, 129 bp, unidentified
  source 1..129: mol_type = unassigned DNA; note = methanogen bacteria
attcagccgggtgcaggtttgaatatggttgcaagcgcggatgtggcaaacgttactcttaaccagacaatgaccgacaccatcttaaatatggttccggacaatccgttcagctctttggctagcggg

SEQ ID NO: 24792 - DNA, 30 bp, unidentified
  source 1..30: mol_type = unassigned DNA; note = methanogen bacteria
gcacaggcatatggtatggatttgacaatg

SEQ ID NO: 24793 - DNA, 39 bp, unidentified
  source 1..39: mol_type = unassigned DNA; note = methanogen bacteria
gttgataatcattttattaaagatgttattcttatggat

SEQ ID NO: 24794 - DNA, 132 bp, unidentified
  source 1..132: mol_type = unassigned DNA; note = methanogen bacteria
tttaaaccgggtgtcggtgtgaacctctcagcaatcacccaaacatcaaatgtgacccttaatcagacaatgactgaattggttttagatattataccagaaaatcctttaaatgctttagccagtagtgaa

SEQ ID NO: 24795 - DNA, 36 bp, unidentified
  source 1..36: mol_type = unassigned DNA; note = methanogen bacteria
gcccaatactgcggaatggatttaggtacttcggcc

SEQ ID NO: 24796 - DNA, 33 bp, unidentified
  source 1..33: mol_type = unassigned DNA; note = methanogen bacteria
actttagtattcacctctatcggtattccgctt

SEQ ID NO: 24797 - DNA, 54 bp, unidentified
  source 1..54: mol_type = unassigned DNA; note = methanogen bacteria
gttggaggaatacctatcctaaagccttcaattagatatctgctgaaacccgca

SEQ ID NO: 24798 - DNA, 261 bp, unidentified
  source 1..261: mol_type = unassigned DNA; note = methanogen bacteria
cgctcacttggagagttcaccatcacatcctcaacaagtccgatatatacattgcagtcaagagctgatttcacattgcatgttctgaatctgcttgatttcatcggaggcaactttggaataacacacgggaaactattggccagcacaattcccggaagcgatctgggaccaaggatgatggttggaaaactcatagcatggagaacggaagtgactgtcacaccaacccttatcggccagatggtaactgatttcggc

SEQ ID NO: 24799 - DNA, 78 bp, unidentified
  source 1..78: mol_type = unassigned DNA; note = methanogen bacteria
cagctgatgtttgaaatgccaacggtatcgttaattcttccgggagttgatattcctggttctccattatacattcca

SEQ ID NO: 24800 - DNA, 39 bp, unidentified
  source 1..39: mol_type = unassigned DNA; note = methanogen bacteria
gttgataatcattttattatagatattgttcttatggat

SEQ ID NO: 24801 - DNA, 132 bp, unidentified
  source 1..132: mol_type = unassigned DNA; note = methanogen bacteria
tttaaaccgggtgtcggcgtaaacttcacagcaatcactcaaacatcaaatgtgacccttaatcagacaatgactgatttggttttagatattataccggaaaatcctttaaatgctttagccagtactgag

SEQ ID NO: 24802 - DNA, 39 bp, unidentified
  source 1..39: mol_type = unassigned DNA; note = methanogen bacteria
gcagcccaatactgcggaatggatttaggtacttcagcc

SEQ ID NO: 24803 - DNA, 36 bp, unidentified
  source 1..36: mol_type = unassigned DNA; note = methanogen bacteria
actttagtattcacctcagtcggtattccccttgaa

SEQ ID NO: 24804 - DNA, 39 bp, unidentified
  source 1..39: mol_type = unassigned DNA; note = methanogen bacteria
gttgataactattttattgaaaatgttattcttatggat

SEQ ID NO: 24805 - DNA, 132 bp, unidentified
  source 1..132: mol_type = unassigned DNA; note = methanogen bacteria
tttaaaccgggtgtcggtgtaaacctctcagcaatcaatcaaacatcacatgtgacccttaatcagacaatgactgatttggttttaaatattatacctgaaaatcctttaaatgctttagccagtagtgag

SEQ ID NO: 24806 - DNA, 39 bp, unidentified
  source 1..39: mol_type = unassigned DNA; note = methanogen bacteria
gcagcccaatactgtggaatggatttaggtacttcagcc

SEQ ID NO: 24807 - DNA, 36 bp, unidentified
  source 1..36: mol_type = unassigned DNA; note = methanogen bacteria
actttagtattctcctctgtcggtattccccttgaa

SEQ ID NO: 24808 - DNA, 33 bp, unidentified
  source 1..33: mol_type = unassigned DNA; note = methanogen bacteria
gtgaccgacccattcatcaaggacattgtcctt

SEQ ID NO: 24809 - DNA, 129 bp, unidentified
  source 1..129: mol_type = unassigned DNA; note = methanogen bacteria
attcagccgggtgcaggcctgcacatgtcagacattggcggagcatcaaatttaaccatgaatcagacaatgacagacaccatcctgaatttggttcccgacaaccccttcagttcacttgcaaccggg

SEQ ID NO: 24810 - DNA, 33 bp, unidentified
  source 1..33: mol_type = unassigned DNA; note = methanogen bacteria
gcccaggcatacggtatcgatttgggtacctca

SEQ ID NO: 24811 - DNA, 33 bp, unidentified
  source 1..33: mol_type = unassigned DNA; note = methanogen bacteria
aataccacagcaggtgcggatattttatcaatc

SEQ ID NO: 24812 - DNA, 30 bp, unidentified
  source 1..30: mol_type = unassigned DNA; note = methanogen bacteria
gaaattggtttggatttaactgccgttcca

SEQ ID NO: 24813 - DNA, 87 bp, unidentified
  source 1..87: mol_type = unassigned DNA; note = methanogen bacteria
ggtatggttgactttgcacctgtatggtctgctcatttaattgaaatgcctcatttctacatgccgttcgtgcattataacttgaac

SEQ ID NO: 24814 - DNA, 48 bp, unidentified
  source 1..48: mol_type = unassigned DNA; note = methanogen bacteria
gctgcattgtcatttgcatatggagacctgtcaatttcagtatccgga

SEQ ID NO: 24815 - DNA, 39 bp, unidentified
  source 1..39: mol_type = unassigned DNA; note = methanogen bacteria
atcaccgacccattcatcaaggacatcgtccttatgaac

SEQ ID NO: 24816 - DNA, 132 bp, unidentified
  source 1..132: mol_type = unassigned DNA; note = methanogen bacteria
gttcagcccggtgcaggactgcacatggcaggcattgccgatacggccaatgtcacagccaaccagacaatgaccgacaccatcctcaacatggtcccggacaatccgttcagctcgcttgcaagcggggac

SEQ ID NO: 24817 - DNA, 33 bp, unidentified
  source 1..33: mol_type = unassigned DNA; note = methanogen bacteria
gcacaggcatacggaatcgacctcggcacatct

SEQ ID NO: 24818 - DNA, 33 bp, unidentified
  source 1..33: mol_type = unassigned DNA; note = methanogen bacteria
aacaccactgcaggcgcagatattttatcaatt

SEQ ID NO: 24819 - DNA, 30 bp, unidentified
  source 1..30: mol_type = unassigned DNA; note = methanogen bacteria
gagattgggttggatttagtgaccgttcca

SEQ ID NO: 24820 - DNA, 87 bp, unidentified
  source 1..87: mol_type = unassigned DNA; note = methanogen bacteria
ggtatggttgattttgctccggtatggtctgctcatttaattgaagttcctaaattttacttgccatttatgaattataatttaaac

SEQ ID NO: 24821 - DNA, 45 bp, unidentified
  source 1..45: mol_type = unassigned DNA; note = methanogen bacteria
gcagctttatcatttgtatatggtgacttgtcaatatccatttca

SEQ ID NO: 24822 - DNA, 39 bp, unidentified
  source 1..39: mol_type = unassigned DNA; note = methanogen bacteria
gtcaccgactcctacattaaaaaaattatcctgatggat

SEQ ID NO: 24823 - DNA, 132 bp, unidentified
  source 1..132: mol_type = unassigned DNA; note = methanogen bacteria
atacagccgggtgccggattgaacatggccggcgtcgcccagtcatcaaacgtgactgttaatcagacaatgacagatactgttttgagtttggttccggacaatcccttcagttcccttgcaaccggggac

SEQ ID NO: 24824 - DNA, 33 bp, unidentified
  source 1..33: mol_type = unassigned DNA; note = methanogen bacteria
gctcaggcatacggcattgaccttggtacttca

SEQ ID NO: 24825 - DNA, 39 bp, unidentified
  source 1..39: mol_type = unassigned DNA; note = methanogen bacteria
gttaaagacccatttattaaaaacacgattttaatggac

SEQ ID NO: 24826 - DNA, 132 bp, unidentified
  source 1..132: mol_type = unassigned DNA; note = methanogen bacteria
ttgcaaccaggtttaggtttaactttcaccaattccgagtcagttaacaatgcaaccattaaccagacattagcagacacattgttaagtacaattccggaaaatgtcattgaatcattagcgaaaggagaa

SEQ ID NO: 24827 - DNA, 33 bp, unidentified
  source 1..33: mol_type = unassigned DNA; note = methanogen bacteria
acagtaatggcttctgtaggtttaccattagct

SEQ ID NO: 24828 - DNA, 78 bp, unidentified
  source 1..78: mol_type = unassigned DNA; note = methanogen bacteria
cagttaatgtttgaaacacctacagtttcattgatacttccaggagtagatattccagggtcaccgatatacatacca

SEQ ID NO: 24829 - DNA, 57 bp, unidentified
  source 1..57: mol_type = unassigned DNA; note = methanogen bacteria
tctgttggaggaatacctcttttaaaaccgtcaattagatatttattaaaacctgct

SEQ ID NO: 24830 - DNA, 264 bp, unidentified
  source 1..264: mol_type = unassigned DNA; note = methanogen bacteria
cgctcgattggtgagttaacagtaagttctgcaattgacccattctatacattaaagaatagagcagattttactttgcatgtcttaaatttgcttgattttttaggtggaaactttggtgcaacacatggccagatattagcctcatccatacctggaagtgaacttggaccaagaatgatggtaggtaaattaattgcatggagaagcgaagtcacagttacaccaacattaataggacaaatggtagcggattatggaaaa

SEQ ID NO: 24831 - DNA, 33 bp, unidentified
  source 1..33: mol_type = unassigned DNA; note = methanogen bacteria
aacaccacagcaggtgcagatattttatcaatc

SEQ ID NO: 24832 - DNA, 30 bp, unidentified
  source 1..30: mol_type = unassigned DNA; note = methanogen bacteria
gaaatcggattggacttgactgtggttcca

SEQ ID NO: 24833 - DNA, 87 bp, unidentified
  source 1..87: mol_type = unassigned DNA; note = methanogen bacteria
ggtatggtggactttgctccagtatggagcgctcatgtaattgaaattcctaaattctacttgccgataatgcattatgatttaaac

SEQ ID NO: 24834 - DNA, 48 bp, unidentified
  source 1..48: mol_type = unassigned DNA; note = methanogen bacteria
gcagcattatcccttgcatacggagacttgtccatatccatttcaggt

SEQ ID NO: 24835 - DNA, 33 bp, unidentified
  source 1..33: mol_type = unassigned DNA; note = methanogen bacteria
aacaccactgctggtgcggatatcttgtcaatc

SEQ ID NO: 24836 - DNA, 30 bp, unidentified
  source 1..30: mol_type = unassigned DNA; note = methanogen bacteria
tcaatcggtttggatttggaagtcgttcca

SEQ ID NO: 24837 - DNA, 87 bp, unidentified
  source 1..87: mol_type = unassigned DNA; note = methanogen bacteria
ggtatggttgattttgcacctgctatggctgcacatgtggttgaagtgccaaaattctacttgccttttgtgaactataacctaaac

SEQ ID NO: 24838 - DNA, 45 bp, unidentified
  source 1..45: mol_type = unassigned DNA; note = methanogen bacteria
gcagcattgtcactggtttatggagacttgtccatttccatttct

SEQ ID NO: 24839 - DNA, 33 bp, unidentified
  source 1..33: mol_type = unassigned DNA; note = methanogen bacteria
gttcataacccctttataaaagatgtaatttta

SEQ ID NO: 24840 - DNA, 129 bp, unidentified
  source 1..129: mol_type = unassigned DNA; note = methanogen bacteria
attaaacccggtttgggtttggacatgtctcatgtagctcaaactgctgatgtagctattaatcaaacgatggctgatactgttttgaatattgtgccggataatccatttaattcattggctaatggg

SEQ ID NO: 24841 - DNA, 33 bp, unidentified
  source 1..33: mol_type = unassigned DNA; note = methanogen bacteria
gctcaggcatatggtattgatttaggcacttca

SEQ ID NO: 24842 - DNA, 39 bp, unidentified
  source 1..39: mol_type = unassigned DNA; note = methanogen bacteria
gttactgatacatttatcaaggacatagtgctgatgaac

SEQ ID NO: 24843 - DNA, 105 bp, unidentified
  source 1..105: mol_type = unassigned DNA; note = methanogen bacteria
attcaacctggcttaggccttaatatgggaggaatcacagaaaccgccaatttaacagtcaaccagacaatgacagacacaatacttaatataattcccgacaat

SEQ ID NO: 24844 - DNA, 33 bp, unidentified
  source 1..33: mol_type = unassigned DNA; note = methanogen bacteria
gctcaggcatatggtatcgaccttggcacatcc

SEQ ID NO: 24845 - DNA, 39 bp, unidentified
  source 1..39: mol_type = unassigned DNA; note = methanogen bacteria
gtaaccgacccttatatcaagaatattgttctgatggac

SEQ ID NO: 24846 - DNA, 132 bp, unidentified
  source 1..132: mol_type = unassigned DNA; note = methanogen bacteria
ttacagcccggtgcaggcctgcacatgaccggcattgccgaagcgtccaacgtaaccatcaatcagacaatgacagacacaatattgggcatgattccagacaatccattcagttcacttgcaagcggagac

SEQ ID NO: 24847 - DNA, 33 bp, unidentified
  source 1..33: mol_type = unassigned DNA; note = methanogen bacteria
gctcaggcatacggtatcgatcttggaacctca

SEQ ID NO: 24848 - DNA, 57 bp, unidentified
  source 1..57: mol_type = unassigned DNA; note = methanogen bacteria
tatgttaaaggaattcctttatttaccccctcattaagatataaattaatagctgca

SEQ ID NO: 24849 - DNA, 261 bp, unidentified
  source 1..261: mol_type = unassigned DNA; note = methanogen bacteria
aggtcagtaaatgagatgttaattacaacaagtacaaatccattttacacattacaaagtagagcggattttacaatccatgttcttgatttattaaatgcattatcaggaaatcttggattaatgcatggaggatttatacttaaaagtattccaggtagtgactatggtcctagaatgatggtgggaaaattaatttcatggagaagcggagttacaattacaccgacaataatcggacctatgttaatagactttgga

SEQ ID NO: 24850 - DNA, 51 bp, unidentified
  source 1..51: mol_type = unassigned DNA; note = methanogen bacteria
tatataggcatgattcaaaatgtgttcacaacaaatctttctgcagaatcc

SEQ ID NO: 24851 - DNA, 45 bp, unidentified
  source 1..45: mol_type = unassigned DNA; note = methanogen bacteria
tttacgcttcctgaggcagagggacaacggggggctcatagtact

SEQ ID NO: 24852 - DNA, 288 bp, unidentified
  source 1..288: mol_type = unassigned DNA; note = methanogen bacteria
aggggagaattgctgtctggtaatgcagacgtcagctcgattttgtcatcattggcggaaagtggttttgctttggatacggcttattctgcttactatacatcggagtcctttgtttatattattgataaatttactctatttgagataatcgctcttttttgtgaatttgttaagtctatatttttaggggctaatccggatgttttactaacttcgatttcagcccaatatacaatacattatggtggcggaatcttgccgttctactttttcttttatttgggg

SEQ ID NO: 24853 - DNA, 30 bp, unidentified
  source 1..30: mol_type = unassigned DNA; note = methanogen bacteria
tctcaattaaatatggaagccacatttgca

SEQ ID NO: 24854 - DNA, 48 bp, unidentified
  source 1..48: mol_type = unassigned DNA; note = methanogen bacteria
atttatctaatgcaaattgatgaaaatgttgatataattttagcttat

SEQ ID NO: 24855 - DNA, 30 bp, unidentified
  source 1..30: mol_type = unassigned DNA; note = methanogen bacteria
tttttaacagtaggacaagttggattagtg

SEQ ID NO: 24856 - DNA, 48 bp, unidentified
  source 1..48: mol_type = unassigned DNA; note = methanogen bacteria
ctgatttatgcatcatttcaaataataaatatggaaaccccaatattt

SEQ ID NO: 24857 - DNA, 54 bp, unidentified
  source 1..54: mol_type = unassigned DNA; note = methanogen bacteria
tctgttggcggagttcctatattaaaaccatccattagatatttattaaaacct

SEQ ID NO: 24858 - DNA, 261 bp, unidentified
  source 1..261: mol_type = unassigned DNA; note = methanogen bacteria
aggtcaatccatgagttaacaataagtaatgcaatagatccattttacacacttaaaagtagagcagacttcacattgcacgttttagatttacttgacataataggaggaaacttcggtgtaacccatggcaagttacttgcaagtgcaatacctggaagtgaacttggacctagaatgatgataggcaaattgattgcatggagaacagaagtaactattacaccaacattaatcggccagatggtagctgatttcgga

SEQ ID NO: 24859 - DNA, 39 bp, unidentified
  source 1..39: mol_type = unassigned DNA; note = methanogen bacteria
atacacgacccattcattaaggatgtcctgctcatgaac

SEQ ID NO: 24860 - DNA, 129 bp, unidentified
  source 1..129: mol_type = unassigned DNA; note = methanogen bacteria
attcaaccgggtacaggcttaactttgacggacgttgctccatcaaatgtgacaattaaccagtcaatgaccaacactcttttaaatgcaattccggataatcctatcaattcgctggctagcggagac

SEQ ID NO: 24861 - DNA, 33 bp, unidentified
  source 1..33: mol_type = unassigned DNA; note = methanogen bacteria
gctcaagtgtatggtgttgatttgggcacttca

SEQ ID NO: 24862 - DNA, 66 bp, unidentified
  source 1..66: mol_type = unassigned DNA; note = methanogen bacteria
ttaaatcctgcataccacattccagaatttactacaccaggattatacttaactgataagccaata

SEQ ID NO: 24863 - DNA, 93 bp, unidentified
  source 1..93: mol_type = unassigned DNA; note = methanogen bacteria
gcatttttccacgggcagccacaacttgcagcaatgaatgccgcaactccaacagttgcagtgcatgaaatggctacaaaattacttggacca

SEQ ID NO: 24864 - DNA, 33 bp, unidentified
  source 1..33: mol_type = unassigned DNA; note = methanogen bacteria
gttgcagggctcggtgcagatgcattggcagca

SEQ ID NO: 24865 - DNA, 48 bp, unidentified
  source 1..48: mol_type = unassigned DNA; note = methanogen bacteria
cttgagattatgggtgctggagactcaatatcatatgctgcaagctat

SEQ ID NO: 24866 - DNA, 36 bp, unidentified
  source 1..36: mol_type = unassigned DNA; note = methanogen bacteria
gtaatagtggctggaacaagtgctgtagctgtctat

SEQ ID NO: 24867 - DNA, 63 bp, unidentified
  source 1..63: mol_type = unassigned DNA; note = methanogen bacteria
cagatagcaaccgtattcagctatacaagtgcaagttcatctttggcacctcaaattgctact

SEQ ID NO: 24868 - DNA, 33 bp, unidentified
  source 1..33: mol_type = unassigned DNA; note = methanogen bacteria
tttttaataggttccttcaatttggctgcaatt

SEQ ID NO: 24869 - DNA, 75 bp, unidentified
  source 1..75: mol_type = unassigned DNA; note = methanogen bacteria
gatcctattgttggccttttatgttcggcaaatatggaagtcagctcccagttatttccgctcgtaaaggatttc

SEQ ID NO: 24870 - DNA, 51 bp, unidentified; identical to SEQ ID NO: 20399
  source 1..51: mol_type = unassigned DNA; note = methanogen bacteria

SEQ ID NO: 24871 - DNA, 30 bp, unidentified
  source 1..30: mol_type = unassigned DNA; note = methanogen bacteria
atgagcgttatttactctaccttaacttca

SEQ ID NO: 24872 - DNA, 54 bp, unidentified
  source 1..54: mol_type = unassigned DNA; note = methanogen bacteria
tcagttggaggaattcctctcataaagccttcaatcagatacctgctaaaacct

SEQ ID NO: 24873 - DNA, 261 bp, unidentified
  source 1..261: mol_type = unassigned DNA; note = methanogen bacteria
cgttcattaggagagatgacaatcacctcatcaacaagcccattctacacacttcagtccagagcggactttacactgcatgttttgaaccttctcgatttcattggaggaaacttcggccttacacacggacacatgcttgccagctcaattccgggaagcgacctgggaccgaggatgatggttggaaaactcatagcatggagaacagaagtgaccgtgaccccgacacttatcgggcagatggttgtggactttgga

SEQ ID NO: 24874 - DNA, 54 bp, unidentified
  source 1..54: mol_type = unassigned DNA; note = methanogen bacteria
atgagcttcatttattcaaaattaacatcctttttaaatattatcaatgatgaa

SEQ ID NO: 24875 - DNA, 57 bp, unidentified
  source 1..57: mol_type = unassigned DNA; note = methanogen bacteria
tcagttggcggaattcctattttaaaaccatcaatcagatacctattaaaaccagca

SEQ ID NO: 24876 - DNA, 264 bp, unidentified
  source 1..264: mol_type = unassigned DNA; note = methanogen bacteria
agatcaatacatgaattgactgtaagcagtgcaatagacccgttctatacattgaaaagcagggctgactttacattgcatgttttgaatttacttgacataatcggaggaaactttggaaccacacacggacaattgattgcaagcacaatacccggaagcgaacttggaccgagaatgatggtgggcaaattaattgcatggagaactgaagtgactgtcacaccaacattaatcggacaaatggttgcagactttggaaaa

SEQ ID NO: 24877 - DNA, 51 bp, unidentified
  source 1..51: mol_type = unassigned DNA; note = methanogen bacteria
atgagtgcaatttattcaaaagtgagttcatttttaaatttcgtctgtgac

SEQ ID NO: 24878 - DNA, 51 bp, unidentified
  source 1..51: mol_type = unassigned DNA; note = methanogen bacteria
gtcggcggaatacctattttaaaaccttcacttagatatttattgaagcct

SEQ ID NO: 24879 - DNA, 264 bp, unidentified
  source 1..264: mol_type = unassigned DNA; note = methanogen bacteria
tatcgttcaattaatgaatacacaatcagcagtgcaattgaccctttttatacattgagaagcagagctgactttacgctgcatgttttgaatttgcttgacggtattggaggcaattttggcctgactcatggaaaattacttgccagtgcgattcccggaagtgaaaccggacccaggatgatggtgggaagactgatatcatggagaactgaagttacagttacaccttcattaatcggccagatggttgttgattttgga

SEQ ID NO: 24880 - DNA, 36 bp, unidentified
  source 1..36: mol_type = unassigned DNA; note = methanogen bacteria
tctactttaacatccttaataaataaaataagtgat

SEQ ID NO: 24881 - DNA, 54 bp, unidentified
  source 1..54: mol_type = unassigned DNA; note = methanogen bacteria
tcagttggaggaatccctcttttaaaaccttcaattagatatttattaaaacca

SEQ ID NO: 24882 - DNA, 261 bp, unidentified
  source 1..261: mol_type = unassigned DNA; note = methanogen bacteria
cgttcacttggagagatgacaataacatcatcaacaagtccaatatattctcttcagtcaagagcagactttaccctgcatgttttaaacctacttgattttattggaggcaacttcggacttacacatggcaaaatgttggccagttcaattccaggcagcgatcttggaccaagaatgatggtgggaaaacttattgcatggagaactgaagtaacagtaaccccaacacttataggccagatggtggttgacttcggt

SEQ ID NO: 24883 - DNA, 54 bp, unidentified
  source 1..54: mol_type = unassigned DNA; note = methanogen bacteria
atgagtttcatttattcaaaattaacatctcttttaaatataataaatgatgaa

SEQ ID NO: 24884 - DNA, 57 bp, unidentified
  source 1..57: mol_type = unassigned DNA; note = methanogen bacteria
tctgttggaggaattcctattttaaagccatcaattagatatctgttaaaaccagca

SEQ ID NO: 24885 - DNA, 264 bp, unidentified
  source 1..264: mol_type = unassigned DNA; note = methanogen bacteria
agatcaataaatgaattaacggtcagcagtgcaatagatccattttacacattgaaaagcagagccgattttacattgcatgttctgaatttacttgacatcattggcggaaactttggggcgacacatggccaaattcttgcaagttcaattcctggaagtgaactcggacctagaatgatggtcgggaaattaattgcatggagaacagaagtaacaattacaccaacattaataggacaaatggtggctgattttggaaaa

SEQ ID NO: 24886 - DNA, 51 bp, unidentified
  source 1..51: mol_type = unassigned DNA; note = methanogen bacteria
atgagcttgatttattccactttaacttcaataataaacaagataagtgat

SEQ ID NO: 24887 - DNA, 51 bp, unidentified
  source 1..51: mol_type = unassigned DNA; note = methanogen bacteria
gttggaggaattcctcttttaaaaccgtcaatccgttatctgttaaaaccc

SEQ ID NO: 24888 - DNA, 261 bp, unidentified
  source 1..261: mol_type = unassigned DNA; note = methanogen bacteria
cgttcacttggagagctgacaataacatcatcaaccaacccgttctatacactgcaatccagagccgattttacattacatgttcttgaccttcttgactttattggaggaaacttcggcctcacccatggaaaactgcttgccagcgccattcccggaagtgaactggggcctagaatgatggtcggaaaacttatcgcatggagaacagaagtaacagtcaccccaacactgatcggacagatggtggttgatttcgga

SEQ ID NO: 24889 - DNA, 51 bp, unidentified
  source 1..51: mol_type = unassigned DNA; note = methanogen bacteria
atgagcgtgatttattccaccttaacttcactgataaacaggattagtgat

SEQ ID NO: 24890 - DNA, 57 bp, unidentified
  source 1..57: mol_type = unassigned DNA; note = methanogen bacteria
tccgttggaggaattccgcttttaaaaccttcaattcgatatctcttaaaacctgcc

SEQ ID NO: 24891 - DNA, 261 bp, unidentified
  source 1..261: mol_type = unassigned DNA; note = methanogen bacteria
cgttcacttggagagatgacaataacatcctcaaccagtccaatctattcactgcagtcaagagcggacttcacattgcatgtactgaatttgcttgatttcattggaggaaacttcggcatgacccatggacacatgctggcaagctcaattccgggaagcgacctgggcccaagaatgatggttggaaaactgattgcatggagaaccgaagtaacggttacacccaccttaatcggccagatggtggttgacttcgga

SEQ ID NO: 24892 - DNA, 51 bp, unidentified
  source 1..51: mol_type = unassigned DNA; note = methanogen bacteria
gttggaggaatcccacttttaaagccatcaatcagatatttattaaagccc

SEQ ID NO: 24893 - DNA, 261 bp, unidentified
  source 1..261: mol_type = unassigned DNA; note = methanogen bacteria
cgttcacttggcgagctgacaataacatcatcaaccagtccgatttatactctgcaatcaagagcggattttacccttcatgtgctgaacttacttgattttatcggaggaaacttcggcctaactcatggacatatgcttgcaagttcaattccgggaagcgatttagggcctagaatgatggtcggcaaactcattgcatggagaaccgaagtaacagttaccccaacgttaataggtcagatggtagttgacttcggc

SEQ ID NO: 24894 - DNA, 78 bp, unidentified
  source 1..78: mol_type = unassigned DNA; note = methanogen bacteria
tttaatgtaattactattgatggtcatggttctaaaatcacacctgtaaacggttttaataatagctttgattgggct

SEQ ID NO: 24895 - DNA, 120 bp, unidentified
  source 1..120: mol_type = unassigned DNA; note = methanogen bacteria
aatgtttttattgtatcaaatttggtccttgaaggatatgaaactcctgtatataattctggaatatgtattttcaataatgtcacttttaaggataataatggcacaccttgtggaatc

SEQ ID NO: 24896 - DNA, 45 bp, unidentified
  source 1..45: mol_type = unassigned DNA; note = methanogen bacteria
tatcattgtgtttgcaataactgtactttcactagatatcaggca

SEQ ID NO: 24897 - DNA, 60 bp, unidentified
  source 1..60: mol_type = unassigned DNA; note = methanogen bacteria
tataatgaaggaggtttaatattaaacaatgtatcatttaaggatctttttgtaaataac

SEQ ID NO: 24898 - DNA, 75 bp, unidentified
  source 1..75: mol_type = unassigned DNA; note = methanogen bacteria
gagtatatctttgattattgtaaagattatttttcttataaagtagatttcttaggggaaaaaatagatatcatt

SEQ ID NO: 24899 - DNA, 141 bp, unidentified
  source 1..141: mol_type = unassigned DNA; note = methanogen bacteria
agaatttattcattaaaaaatatttcagcaatatatgacattttccctgttttattaaagggaaattatgatgttaatgcatcactatctaaaaatctatacatatctaatcaagttgattatgataatgctttgaattat

SEQ ID NO: 24900 - DNA, 78 bp, unidentified
  source 1..78: mol_type = unassigned DNA; note = methanogen bacteria
gattcttttaacaaggtatatgaatttattaaaacttttggttattcaggttatgttttaaaagtattgaatatcaat

SEQ ID NO: 24901 - DNA, 195 bp, unidentified
  source 1..195: mol_type = unassigned DNA; note = methanogen bacteria
aatggtaatgggtctctaattaatggtttctctgctaagagtgatgaaaataaatggctttacatatatagtacaaattctattgtaacaattaataatttaatgattacggaatttaatcaggctatttataatctgggttgtgcttgtattttaaataatgttacattagataacaataagatggattattat

SEQ ID NO: 24902 - DNA, 45 bp, unidentified
  source 1..45: mol_type = unassigned DNA; note = methanogen bacteria
cttccttcaattgagcaaaccttacatctgacaagtagagaatca

SEQ ID NO: 24903 - DNA, 36 bp, unidentified
  source 1..36: mol_type = unassigned DNA; note = methanogen bacteria
gactcaagcaatttcataaatagcctattctctatg

SEQ ID NO: 24904 - DNA, 39 bp, unidentified
  source 1..39: mol_type = unassigned DNA; note = methanogen bacteria
tcattagttatcctttcaatgggcttaaacgaccagctt

SEQ ID NO: 24905 - DNA, 72 bp, unidentified
  source 1..72: mol_type = unassigned DNA; note = methanogen bacteria
ttgagtttgtcttgggtgttagtgttatcaacgaagcaaaaccatatgaaagagggccaggccaggcaattg

SEQ ID NO: 24906 - DNA, 51 bp, unidentified
  source 1..51: mol_type = unassigned DNA; note = methanogen bacteria
gttagaggaatacctcttttaaagccttcaataagatatttattaaagcca

SEQ ID NO: 24907 - DNA, 261 bp, unidentified
  source 1..261: mol_type = unassigned DNA; note = methanogen bacteria
cgttcattaggcgagatgacaataactgcatcaaccagtccaatctactcactgcaatcccgagccgactttaccttgcatgttctgaatctattggatttcatcggaggcaactttggaatcacccatgggcagctcttggccagttcaattcccggaagcgacttgggcccaagaatgatggttggaaagctgattgcatggagaagcgaagtgacaattacaccgacactcattgggcagatggtaattgatttcgga

SEQ ID NO: 24908 - DNA, 33 bp, unidentified
  source 1..33: mol_type = unassigned DNA; note = methanogen bacteria
atgagtgtgatttattctactttaacttccata

SEQ ID NO: 24909 - DNA, 51 bp, unidentified
  source 1..51: mol_type = unassigned DNA; note = methanogen bacteria
gttggaggcatcccccttttaaaaccgtccattcgatatttattaaagcca

SEQ ID NO: 24910 - DNA, 261 bp, unidentified
  source 1..261: mol_type = unassigned DNA; note = methanogen bacteria
cgatcacttggtgagatgaccataacatcatcaacaagtcccctctactcactgcagtcaagggcagattttacactgcatgtcctgaatctacttgattttattggggagaacttcggactgacacatggacatatgcttgccagttcaattcccggaagtgatttgggacctagaatgatggtgggaaagttaatttcatggcgaaccgaggtaaccgttacaccaactttaatcggccagatggtggttgatttcggg

SEQ ID NO: 24911 - DNA, 42 bp, unidentified
  source 1..42: mol_type = unassigned DNA; note = methanogen bacteria
atgagcgtgatttattctactttaacctcactgataaataaa

SEQ ID NO: 24912 - DNA, 51 bp, unidentified
  source 1..51: mol_type = unassigned DNA; note = methanogen bacteria
gttggaggtattcctctattaaaaccgtcaattcgatatttattaaagcca

SEQ ID NO: 24913 - DNA, 261 bp, unidentified
  source 1..261: mol_type = unassigned DNA; note = methanogen bacteria
cggtcacttggcgagatgaccataacttcatcaacaagtcccctgtactcactgcaatctagggccgattttacactgcatgtcctgaatttacttgattttattggagggaactttggactgacacatggccatatgcttgccagctcaattccaggaagtgatttgggaccgagaatgatggttggaaagttaatttcatggcgcactgaagtaaccgtcacaccaactttaatcggccagatggttgttgatttcgga

SEQ ID NO: 24914 - DNA, 30 bp, unidentified
  source 1..30: mol_type = unassigned DNA; note = methanogen bacteria
acattaatcaaatcattcttcagaagacga

SEQ ID NO: 24915 - DNA, 63 bp, unidentified
  source 1..63: mol_type = unassigned DNA; note = methanogen bacteria
atcggcgacaccacccttctgggccttctcgatatggacttcgggaaccccgagaatccgagt

SEQ ID NO: 24916 - DNA, 30 bp, unidentified
  source 1..30: mol_type = unassigned DNA; note = methanogen bacteria
accgcaggcaccagcggcggcatcaacatc

SEQ ID NO: 24917 - DNA, 30 bp, unidentified
  source 1..30: mol_type = unassigned DNA; note = methanogen bacteria
gtggacctcggatccatgtccagcgccacg

SEQ ID NO: 24918 - DNA, 39 bp, unidentified
  source 1..39: mol_type = unassigned DNA; note = methanogen bacteria
cacctcatagtcgacggcgagcccgcactgtctcccgag

SEQ ID NO: 24919 - DNA, 45 bp, unidentified
  source 1..45: mol_type = unassigned DNA; note = methanogen bacteria
attaagctattcaacattactaatcctcaatacattcaaatcgtt

SEQ ID NO: 24920 - DNA, 39 bp, unidentified
  source 1..39: mol_type = unassigned DNA; note = methanogen bacteria
atgagcgtgatttattccactttaacttccgtgataaat

SEQ ID NO: 24921 - DNA, 57 bp, unidentified
  source 1..57: mol_type = unassigned DNA; note = methanogen bacteria
gttcgaggaattcctcttttaaagccttcaattcgatatttactaaaacctgcattt

SEQ ID NO: 24922 - DNA, 261 bp, unidentified
  source 1..261: mol_type = unassigned DNA; note = methanogen bacteria
cgttcacttggagagatgacaataacatcctcaaccagtccgctgtattccctgcagtcaagagctgatttcacactgcacgtattgaacctgcttgactttatcggaggaaacttcggcttaacccatggacacatgttggccagctcaattcctggaagtgatttgggaccgaggatgatggttggaaagcttattgcatggagaactgaagtgacagtcacacctactttaatcggtcagatggtggttgatttcgga

SEQ ID NO: 24923 - DNA, 39 bp, unidentified
  source 1..39: mol_type = unassigned DNA; note = methanogen bacteria
gacgccatattcggcatgcccatccacaactggacattc

SEQ ID NO: 24924 - DNA, 39 bp, unidentified
  source 1..39: mol_type = unassigned DNA; note = methanogen bacteria
atcaggtacagcagcctcggagcggtacccatccccgga

SEQ ID NO: 24925 - DNA, 51 bp, unidentified
  source 1..51: mol_type = unassigned DNA; note = methanogen bacteria
atgagcgtgatttattccaccttaacttcagtgataaacagaatcagtgat

SEQ ID NO: 24926 - DNA, 57 bp, unidentified
  source 1..57: mol_type = unassigned DNA; note = methanogen bacteria
gttagaggaattccacttttaaaaccatctatccgatatcttctaaaaccagccctg

SEQ ID NO: 24927 - DNA, 261 bp, unidentified
  source 1..261: mol_type = unassigned DNA; note = methanogen bacteria
cgatcacttggagagatgacaataacctcctcaaccagcccgctgtattcactgcaatcaagagcggatttcacaatgcatgtattgaacctgcttgatttcattggaggaaacttcggcctgacccatggacatatgcttgccagttcaattccaggaagcgatttgggtccgagaatgatggttggaaagctcattgcatggagaacagaagtgacagtcacacctacattaatcggccagatggtcgttgatttcgga

SEQ ID NO: 24928 - DNA, 54 bp, unidentified
  source 1..54: mol_type = unassigned DNA; note = methanogen bacteria
gtaggtggaataccaatattgaagccatcaattagatatttattaaaaccagcg

SEQ ID NO: 24929 - DNA, 261 bp, unidentified
  source 1..261: mol_type = unassigned DNA; note = methanogen bacteria
aggtcagttaaggaattcagcataactacagcaaccagcccactaagcacactgcagaacagagcagacttcacattacatgtcctgaatttacttgattttcttggaggcaatttcggcttaacccatggaaaattgcttgcaagtgcaattcccggaagtgaattgggtccaaggatgatggttggcaaactgattgcatggagaagtgaggtaacaattacaccaacactgattggacagatggtgattgattttgga

SEQ ID NO: 24930 - DNA, 54 bp, unidentified
  source 1..54: mol_type = unassigned DNA; note = methanogen bacteria
atgagcttcatttattcaaaattgacatctattataaatttaataaatgatgaa

SEQ ID NO: 24931 - DNA, 57 bp, unidentified
  source 1..57: mol_type = unassigned DNA; note = methanogen bacteria
tctgttggtggaattcctattttaaaaccttcaataagatatttattgaaacctgct

SEQ ID NO: 24932 - DNA, 264 bp, unidentified
  source 1..264: mol_type = unassigned DNA; note = methanogen bacteria
aggtcagttaatgaattgactgtgagtaaagcaattgatcctttctacaccctgaaaagcagagcggattttactttgcatgtgctgaatttacttgatgtcattggaggaaacttcggcacaacccacggccagatacttgcaagttcaatacctggaagcgaactcggacctagaatgatggtaggcaagttaatttcatggagaactgaagttacaataacaccgacattaattggacagatggtggctgattttggaaaa

SEQ ID NO: 24933 - DNA, 54 bp, unidentified
  source 1..54: mol_type = unassigned DNA; note = methanogen bacteria
atgagtgtgatttattctactttaacttcactgataaataaagtaagtgatgaa

SEQ ID NO: 24934 - DNA, 54 bp, unidentified
  source 1..54: mol_type = unassigned DNA; note = methanogen bacteria
tctgtaggaggaataccacttttaaaaccatcaattagatatctcttaaagccc

SEQ ID NO: 24935 - DNA, 261 bp, unidentified
  source 1..261: mol_type = unassigned DNA; note = methanogen bacteria
cgttcacttggagagttgacaataacctcatcaaccagcccgatatatagcctgcagacaagggcggactttacacttcacgtgttgaatttgcttgactttattggaggaaactttggcgtgacccatggccacatgcttgccagttcaattcctggaagtgatttggggccaaggatgatggttggaaagcttattgcatggagaaccgaagtgacaatcacaccaacattaatcggacaaatggtggttgattttgga

SEQ ID NO: 24936 - DNA, 51 bp, unidentified
  source 1..51: mol_type = unassigned DNA; note = methanogen bacteria
atgagcattatctactccactttaacatcagtaataaataagattagtgat

SEQ ID NO: 24937 - DNA, 57 bp, unidentified
  source 1..57: mol_type = unassigned DNA; note = methanogen bacteria
tctgttggaggaattcctttattaaaaccttcaatcagatatttattaaaacctgcc

SEQ ID NO: 24938 - DNA, 261 bp, unidentified
  source 1..261: mol_type = unassigned DNA; note = methanogen bacteria
cgctcactcggagagatgacaataacatcctcaacaagcccaatatattcccttcaatccagagcagattttacactacatgtattaaatctactcgattttattggaggcaattttggtataacacatggaaaattattagctagctcaattccgggcagcgatttaggtcctagaatgatggttggaaaacttatagcatggcgaactgaagttacagtaactccaacacttataggacaaatggtagttgattttggc

SEQ ID NO: 24939 - DNA, 33 bp, unidentified
  source 1..33: mol_type = unassigned DNA; note = methanogen bacteria
cggctgttaaaatcatttaaagatcgtgtttca

SEQ ID NO: 24940 - DNA, 33 bp, unidentified
  source 1..33: mol_type = unassigned DNA; note = methanogen bacteria
agattattgaaatcattcagagaccgtgtttca

SEQ ID NO: 24941 - DNA, 33 bp, unidentified
  source 1..33: mol_type = unassigned DNA; note = methanogen bacteria
agattgcttaagtcatttagggatcgtgtttcc

SEQ ID NO: 24942 - DNA, 39 bp, unidentified
  source 1..39: mol_type = unassigned DNA; note = methanogen bacteria
tcttatttaacttcagtaataaacagaatcagtgatgag

SEQ ID NO: 24943 - DNA, 57 bp, unidentified
  source 1..57: mol_type = unassigned DNA; note = methanogen bacteria
tctgttggaggaattcctcttttaaagccatcaatcaggtatttattgaaacctgca

SEQ ID NO: 24944 - DNA, 261 bp, unidentified
  source 1..261: mol_type = unassigned DNA; note = methanogen bacteria
cgttcattgggagagatgacaatcacttcctcaacaagcccgctgtacaccctgcagtcacgtgcagatttcacattgcatgttttgaacctgcttgattttatcggaggaaacttcggcgtaacacatggccagatgttggccggagccattcccggaagtgacttgggccctaggatgatggttggaaagctcattgcatggagaaccgaagtcactgtcaccccaacccttatcggccagatggttgccgatttcgga

SEQ ID NO: 24945 - DNA, 36 bp, unidentified
  source 1..36: mol_type = unassigned DNA; note = methanogen bacteria
atgacctttttccttgaagcttttccaggattactg

SEQ ID NO: 24946 - DNA, 36 bp, unidentified
  source 1..36: mol_type = unassigned DNA; note = methanogen bacteria
gcagttgaaacattgcttacaaatccaagcctgctt

SEQ ID NO: 24947 - DNA, 36 bp, unidentified
  source 1..36: mol_type = unassigned DNA; note = methanogen bacteria
tcctatgggcttggcgtaaccggtgtaggatttgat

SEQ ID NO: 24948 - DNA, 33 bp, unidentified
  source 1..33: mol_type = unassigned DNA; note = methanogen bacteria
acaagacttttggattcattcaaaggaaagatt

SEQ ID NO: 24949 - DNA, 123 bp, unidentified
  source 1..123: mol_type = unassigned DNA; note = methanogen bacteria
ttccccgttagtatccagttaaatacaacatatacctcaactgctacaacgaatctttgggaagtactgtccaatattgtaattacatctatttctaatccaattgagttagtgtctaatggc

SEQ ID NO: 24950 - DNA, 33 bp, unidentified
  source 1..33: mol_type = unassigned DNA; note = methanogen bacteria
tgctcattatttggaattagttcagatatttct

SEQ ID NO: 24951 - DNA, 120 bp, unidentified
  source 1..120: mol_type = unassigned DNA; note = methanogen bacteria
gataatattactgcacgtactggtggagcaatatatgttgaaggtagctttgacacatctctaatccataatacaaaatttactaataacaaagcattcactgataatcctgattatggt

SEQ ID NO: 24952 - DNA, 72 bp, unidentified
  source 1..72: mol_type = unassigned DNA; note = methanogen bacteria
gttgaaggaaatgctagttcaatccatatatttaacagtgattttattaataacactgctaaaactcatggt

SEQ ID NO: 24953 - DNA, 144 bp, unidentified
  source 1..144: mol_type = unassigned DNA; note = methanogen bacteria
ttcatggctaatgatgaattaaatacttttgatggatgtatcttttataataactatgctccatacggtggtgcagttgctcttggaaacactgattatcttgttatttcagagtccaatttcacaaatcacattggagctgat

SEQ ID NO: 24954 - DNA, 138 bp, unidentified
  source 1..138: mol_type = unassigned DNA; note = methanogen bacteria
aacctcacaaatgctaatatagtggattcattattcgaaaataacagtgcacgtgctggcattgctgtggaagaagatgcaacaaacaacttttttgattcagttacttttgtatcaaatattgctcagactcatggt

SEQ ID NO: 24955 - DNA, 57 bp, unidentified
  source 1..57: mol_type = unassigned DNA; note = methanogen bacteria
gaatataatacttttgatggatgtatcttttataataactatgctccatacggtggt

SEQ ID NO: 24956 - DNA, 54 bp, unidentified
  source 1..54: mol_type = unassigned DNA; note = methanogen bacteria
aatacttatacagtaatagacaagtccaaatttgattcaaattatgctccatac

SEQ ID NO: 24957 - DNA, 36 bp, unidentified
  source 1..36: mol_type = unassigned DNA; note = methanogen bacteria
atgacttttttccttgaaacatttccaggactgttg

SEQ ID NO: 24958 - DNA, 39 bp, unidentified
  source 1..39: mol_type = unassigned DNA; note = methanogen bacteria
agctctgtagagacattacttacaaatcctagcttattg

SEQ ID NO: 24959 - DNA, 36 bp, unidentified
  source 1..36: mol_type = unassigned DNA; note = methanogen bacteria
ttgatgtttggaacaatgggcatcggatttgataag

SEQ ID NO: 24960 - DNA, 48 bp, unidentified
  source 1..48: mol_type = unassigned DNA; note = methanogen bacteria
cctttacactatgttagtgaatatccaaagtattatacatatggtgca

SEQ ID NO: 24961 - DNA, 36 bp, unidentified
  source 1..36: mol_type = unassigned DNA; note = methanogen bacteria
gttcagattatgaatggttttggacttcctgcagca

SEQ ID NO: 24962 - DNA, 33 bp, unidentified
  source 1..33: mol_type = unassigned DNA; note = methanogen bacteria
ctactctcagaattcccattcaattatgataca

SEQ ID NO: 24963 - DNA, 33 bp, unidentified
  source 1..33: mol_type = unassigned DNA; note = methanogen bacteria
aacacaactgttggtgagccagtactttctgtt

SEQ ID NO: 24964 - DNA, 30 bp, unidentified
  source 1..30: mol_type = unassigned DNA; note = methanogen bacteria
gaaattggattgaatttggaagttatacct

SEQ ID NO: 24965 - DNA, 90 bp, unidentified
  source 1..90: mol_type = unassigned DNA; note = methanogen bacteria
ggtatggttgatttttcaggattccttgctgcaaacatattcgaagtaccggaattttatatgccgatagtgaactatgatttcaatgca

SEQ ID NO: 24966 - DNA, 45 bp, unidentified
  source 1..45: mol_type = unassigned DNA; note = methanogen bacteria
gctacactaagtatcatacagggcaacctatcagtttcaatttcg

SEQ ID NO: 24967 - DNA, 36 bp, unidentified
  source 1..36: mol_type = unassigned DNA; note = methanogen bacteria
atgacctttttccttgaaacatttccgggattgctg

SEQ ID NO: 24968 - DNA, 39 bp, unidentified
  source 1..39: mol_type = unassigned DNA; note = methanogen bacteria
tcagcacttgaaacattgcttacaaacgcaagtctactg

SEQ ID NO: 24969 - DNA, 36 bp, unidentified
  source 1..36: mol_type = unassigned DNA; note = methanogen bacteria
ttcgctttgggagtggtcggtgtcggattcgataag

SEQ ID NO: 24970 - DNA, 30 bp, unidentified
  source 1..30: mol_type = unassigned DNA; note = methanogen bacteria
agtagattgttaaaatctttccaaaacagg

SEQ ID NO: 24971 - DNA, 36 bp, unidentified
  source 1..36: mol_type = unassigned DNA; note = methanogen bacteria
atgacatttttccttgaaacatttccgggacttttg

SEQ ID NO: 24972 - DNA, 36 bp, unidentified
  source 1..36: mol_type = unassigned DNA; note = methanogen bacteria
gctgttgaaacactgcttacaaatccgagtttgctt

SEQ ID NO: 24973 - DNA, 36 bp, unidentified
  source 1..36: mol_type = unassigned DNA; note = methanogen bacteria
tatgcattaggtgttgtcggcgtgggattcgacaag

SEQ ID NO: 24974 - DNA, 39 bp, unidentified
  source 1..39: mol_type = unassigned DNA; note = methanogen bacteria
atcctttctcctgctgcgacaggatacgaattcgacgaa

SEQ ID NO: 24975 - DNA, 54 bp, unidentified
  source 1..54: mol_type = unassigned DNA; note = methanogen bacteria
ggcatcatcgtccacggtactgacagtgcgttggctcccggcgacctgagcgac

SEQ ID NO: 24976 - DNA, 123 bp, unidentified
  source 1..123: mol_type = unassigned DNA; note = methanogen bacteria
gcaggaatcgggtccgatgtcggcaccattcccgacggtgaccttctcaccggcctgacggaacccgatttcggactgttcggtaaggtgttcaccgatttcgagatgttcccctccagcatg

SEQ ID NO: 24977 - DNA, 33 bp, unidentified
  source 1..33: mol_type = unassigned DNA; note = methanogen bacteria
agattattgaaatcatttagagatagagtttca

SEQ ID NO: 24978 - DNA, 93 bp, unidentified
  source 1..93: mol_type = unassigned DNA; note = methanogen bacteria
ataagagttccaggtactgaaaatgtttcaagtaatttaggttttttagaattactaaattctatgggtggtggagcatttaaaagattctca

SEQ ID NO: 24979 - DNA, 48 bp, unidentified
  source 1..48: mol_type = unassigned DNA; note = methanogen bacteria
gttacagcatttaaaagtttagtaacattttcaactgcacaagtggca

SEQ ID NO: 24980 - DNA, 54 bp, unidentified
  source 1..54: mol_type = unassigned DNA; note = methanogen bacteria
gtaaataaagaaggtttttcattatttgttcaaaagtatattagttatacaact

SEQ ID NO: 24981 - DNA, 57 bp, unidentified
  source 1..57: mol_type = unassigned DNA; note = methanogen bacteria
tccgttggaggaattccgcttttaaagccttcaatcagatatctcctgaaacctgca

SEQ ID NO: 24982 - DNA, 261 bp, unidentified
  source 1..261: mol_type = unassigned DNA; note = methanogen bacteria
cgttcacttggggagatgacaataacctcatcaacaagtccgttctacacacttcagtcaagggcagatttcacgctgcacgttttgaaccttctcgacttcatcggaggcaacttcggcctgacacacggacacctccttgcaagctcaattccgggcagcgacctgggtccgaggatgatggtcggtaagctcatagcatggagaaccgaggtcacagtaacaccaaccctcatcggccagatggtggttgactttgga

SEQ ID NO: 24983 - DNA, 51 bp, unidentified
  source 1..51: mol_type = unassigned DNA; note = methanogen bacteria
caaggtttaaacgctgataacttagtatatgacatggtaaaagaaaacgct

SEQ ID NO: 24984 - DNA, 30 bp, unidentified
  source 1..30: mol_type = unassigned DNA; note = methanogen bacteria
aacactgatgatgcagctaaatggaacgca

SEQ ID NO: 24985 - DNA, 30 bp, unidentified
  source 1..30: mol_type = unassigned DNA; note = methanogen bacteria
ttgctcaaatctttccaaaatagatcaaga

SEQ ID NO: 24986 - DNA, 36 bp, unidentified; identical to SEQ ID NO: 22879
  source 1..36: mol_type = unassigned DNA; note = methanogen bacteria

SEQ ID NO: 24987 - DNA, 48 bp, unidentified
  source 1..48: mol_type = unassigned DNA; note = methanogen bacteria
aagaataaaaaacatccagttttacaaaatgctttaggatatgatgct

SEQ ID NO: 24988 - DNA, 51 bp, unidentified
  source 1..51: mol_type = unassigned DNA; note = methanogen bacteria
attttaggaacttcaaatactcttgaaagtaatattcctttgtttataata

SEQ ID NO: 24989 - DNA, 69 bp, unidentified
  source 1..69: mol_type = unassigned DNA; note = methanogen bacteria
ttagggcttggctcatcaggttttgcaactcttgcaagttcagttgctaaaagctcacaaagccttgga

SEQ ID NO: 24990 - DNA, 54 bp, unidentified
  source 1..54: mol_type = unassigned DNA; note = methanogen bacteria
gcaaatattggaatgaacctgaatatcgctcaagctattcttcttgctaatctt

SEQ ID NO: 24991 - DNA, 36 bp, unidentified
  source 1..36: mol_type = unassigned DNA; note = methanogen bacteria
atgacctttttccttgagacattcccaggactgctt

SEQ ID NO: 24992 - DNA, 36 bp, unidentified
  source 1..36: mol_type = unassigned DNA; note = methanogen bacteria
gcggtcgaaaccttactgaccaatccaagcctgctc

SEQ ID NO: 24993 - DNA, 36 bp, unidentified
  source 1..36: mol_type = unassigned DNA; note = methanogen bacteria
tacgctttaggcgttgtcggcgtcggattcgataag

SEQ ID NO: 24994 - DNA, 42 bp, unidentified
  source 1..42: mol_type = unassigned DNA; note = methanogen bacteria
tatgttgataatcatttcattaaagattttatcttaatgaat

SEQ ID NO: 24995 - DNA, 129 bp, unidentified
  source 1..129: mol_type = unassigned DNA; note = methanogen bacteria
atcagaccaggtgtgggtttaaatatacctgcatccgaatctgtgtcaaattcaacaagcatgacattatccaacttaattttaaatatttttcctgaaaatccattaaatgcattaactaatggagaa

SEQ ID NO: 24996 - DNA, 36 bp, unidentified
  source 1..36: mol_type = unassigned DNA; note = methanogen bacteria
gcccaggcttatggaattgattttggtgcaaccgct

SEQ ID NO: 24997 - DNA, 36 bp, unidentified
  source 1..36: mol_type = unassigned DNA; note = methanogen bacteria
tctatgatactttccatggtaggtttacctattgcc

SEQ ID NO: 24998 - DNA, 36 bp, unidentified
  source 1..36: mol_type = unassigned DNA; note = methanogen bacteria
atgacctttttccttgaagcatttccaggactttta

SEQ ID NO: 24999 - DNA, 39 bp, unidentified
  source 1..39: mol_type = unassigned DNA; note = methanogen bacteria
agttcagttgaaactctacttacaaatcctagtttacta

SEQ ID NO: 25000 - DNA, 36 bp, unidentified
  source 1..36: mol_type = unassigned DNA; note = methanogen bacteria
tatatattcaattctatcggtgttggctttgataaa

SEQ ID NO: 25001 - DNA, 36 bp, unidentified
  source 1..36: mol_type = unassigned DNA; note = methanogen bacteria
atgacatttttccttgaaacatttccgggactgtta

SEQ ID NO: 25002 - DNA, 36 bp, unidentified
  source 1..36: mol_type = unassigned DNA; note = methanogen bacteria
gcagttgaaacattgctgactaatccaagtctgtta

SEQ ID NO: 25003 - DNA, 36 bp, unidentified
  source 1..36: mol_type = unassigned DNA; note = methanogen bacteria
tatgcattgggtgttgttggtgtaggctttgacaag

SEQ ID NO: 25004 - DNA, 39 bp, unidentified
  source 1..39: mol_type = unassigned DNA; note = methanogen bacteria
gttgccccaatccgctccagcctgaacatatctgctgaa

SEQ ID NO: 25005 - DNA, 36 bp, unidentified
  source 1..36: mol_type = unassigned DNA; note = methanogen bacteria
acatatcttgcagatgaaagaggactgacaattgtt

SEQ ID NO: 25006 - DNA, 51 bp, unidentified
  source 1..51: mol_type = unassigned DNA; note = methanogen bacteria
ttgttcctctttaacattactaatccatcagatattcctattgtaactgaa

SEQ ID NO: 25007 - DNA, 96 bp, unidentified; identical to SEQ ID NO: 20739
  source 1..96: mol_type = unassigned DNA; note = methanogen bacteria

SEQ ID NO: 25008 - DNA, 99 bp, unidentified; identical to SEQ ID NO: 20740
  source 1..99: mol_type = unassigned DNA; note = methanogen bacteria

SEQ ID NO: 25009 - DNA, 105 bp, unidentified; identical to SEQ ID NO: 20741
  source 1..105: mol_type = unassigned DNA; note = methanogen bacteria

SEQ ID NO: 25010 - DNA, 51 bp, unidentified
  source 1..51: mol_type = unassigned DNA; note = methanogen bacteria
tggactcgacccattgaatgcattattcgatgtggtttccatcataagcaa

SEQ ID NO: 25011 - DNA, 39 bp, unidentified
  source 1..39: mol_type = unassigned DNA; note = methanogen bacteria
gttgatgatcctttcattaaaaattttatcctaatggac

SEQ ID NO: 25012 - DNA, 129 bp, unidentified
  source 1..129: mol_type = unassigned DNA; note = methanogen bacteria
gtccaaccaggtgcgggtttaaatttacctgcatccgaaacagtgccaaattcagtgaacatgacattaactgacactattttaaatatttttcccgaaaatcctgtgcatgcattaattaatggagat

SEQ ID NO: 25013 - DNA, 30 bp, unidentified
  source 1..30: mol_type = unassigned DNA; note = methanogen bacteria
gctcaagcttacggaattgattttggtcta

SEQ ID NO: 25014 - DNA, 36 bp, unidentified
  source 1..36: mol_type = unassigned DNA; note = methanogen bacteria
tccatgatacttagtatagtaggtttacctattggc

SEQ ID NO: 25015 - DNA, 42 bp, unidentified
  source 1..42: mol_type = unassigned DNA; note = methanogen bacteria
tatgttaatgaccctttcattaaagattttatcctaatggat

SEQ ID NO: 25016 - DNA, 129 bp, unidentified
  source 1..129: mol_type = unassigned DNA; note = methanogen bacteria
atcagacccggtgcgggtttaaatatacctgcgtctgattccgtgtcaagttcagtgagcatgacattatcagacttaattttaaatatttttcctgaaaatccattaaatgcattgactaatggagaa

SEQ ID NO: 25017 - DNA, 33 bp, unidentified
  source 1..33: mol_type = unassigned DNA; note = methanogen bacteria
gctcaggcttatggaattgattttggcacaact

SEQ ID NO: 25018 - DNA, 36 bp, unidentified
  source 1..36: mol_type = unassigned DNA; note = methanogen bacteria
tccatgatactttctataataggtttacctattgcc

SEQ ID NO: 25019 - DNA, 36 bp, unidentified
  source 1..36: mol_type = unassigned DNA; note = methanogen bacteria
atgacctttttccttgaaacatttccgggattgtta

SEQ ID NO: 25020 - DNA, 36 bp, unidentified
  source 1..36: mol_type = unassigned DNA; note = methanogen bacteria
gcggttgaaacattgctctccaatccaagtctgttg

SEQ ID NO: 25021 - DNA, 33 bp, unidentified
  source 1..33: mol_type = unassigned DNA; note = methanogen bacteria
gtatttggcgttactggagtcggatttgaaaaa

SEQ ID NO: 25022 - DNA, 36 bp, unidentified
  source 1..36: mol_type = unassigned DNA; note = methanogen bacteria
atgacatttttcctcgaaacatttcctggtttattg

SEQ ID NO: 25023 - DNA, 39 bp, unidentified
  source 1..39: mol_type = unassigned DNA; note = methanogen bacteria
agttcagtcgaaacattgcttacaaatccaagcttgtta

SEQ ID NO: 25024 - DNA, 36 bp, unidentified
  source 1..36: mol_type = unassigned DNA; note = methanogen bacteria
ttgatgtttggaacaattggtgttggtttcaacgta

SEQ ID NO: 25025 - DNA, 126 bp, unidentified
  source 1..126: mol_type = unassigned DNA; note = methanogen bacteria
ttccctgtaagtatacatctttcttcaatcagcaatattactccaccgagcggatttgaggaaattgttagtaacatgcttttaaaaatattttcaaatccgttgaaagcattggttgagggcgaa

SEQ ID NO: 25026 - DNA, 30 bp, unidentified
  source 1..30: mol_type = unassigned DNA; note = methanogen bacteria
tgccatacattgggaatcagtgtttcactt

SEQ ID NO: 25027 - DNA, 33 bp, unidentified
  source 1..33: mol_type = unassigned DNA; note = methanogen bacteria
tgttcattattcggaatctcctcagacatttca

SEQ ID NO: 25028 - DNA, 36 bp, unidentified
  source 1..36: mol_type = unassigned DNA; note = methanogen bacteria
atgacctttttccttgaaacatttcctggcctttta

SEQ ID NO: 25029 - DNA, 39 bp, unidentified
  source 1..39: mol_type = unassigned DNA; note = methanogen bacteria
agttcagttgaaacattgctgacaaatcctagtttactt

SEQ ID NO: 25030 - DNA, 36 bp, unidentified
  source 1..36: mol_type = unassigned DNA; note = methanogen bacteria
gtattatttaaggtggctggggtaggctttgataag

SEQ ID NO: 25031 - DNA, 36 bp, unidentified
  source 1..36: mol_type = unassigned DNA; note = methanogen bacteria
atgacatttttccttgaaacttttcctggactttta

SEQ ID NO: 25032 - DNA, 39 bp, unidentified
  source 1..39: mol_type = unassigned DNA; note = methanogen bacteria
agttctcttgaaacattgcttacaaatcctagtttgctt

SEQ ID NO: 25033 - DNA, 36 bp, unidentified
  source 1..36: mol_type = unassigned DNA; note = methanogen bacteria
gtggttcttggaacagtcggtgttggttttgataaa

SEQ ID NO: 25034 - DNA, 126 bp, unidentified
  source 1..126: mol_type = unassigned DNA; note = methanogen bacteria
ttcccagtgtcaatgcatcttacacaagcaggtaaagtaactgctcctggaggtttaggtgaagtcataagcaacatgctattgaatatattcactaatccattgcagtcactttctcaaggggat

SEQ ID NO: 25035 - DNA, 33 bp, unidentified
  source 1..33: mol_type = unassigned DNA; note = methanogen bacteria
gtttgtcatactttgggaattagtgtagacttg

SEQ ID NO: 25036 - DNA, 33 bp, unidentified
  source 1..33: mol_type = unassigned DNA; note = methanogen bacteria
tgttcattgtttggaatacctgcagacatttcc

SEQ ID NO: 25037 - DNA, 183 bp, unidentified
  source 1..183: mol_type = unassigned DNA; note = methanogen bacteria
atcttcgaagccaacactgcatacaatggaaaaggaggagcaatattcacaaacatgtttgatgctgatgtaaacaatgcaactttcaatggaaacagagcgggagatggagcaaccattagtgatgacggaggagcaatatatatcaaaaacaaaaacaatgtcaccttcaaattctgtatc

SEQ ID NO: 25038 - DNA, 30 bp, unidentified
  source 1..30: mol_type = unassigned DNA; note = methanogen bacteria
atgacttttttccttgaagcatttcccggt

SEQ ID NO: 25039 - DNA, 39 bp, unidentified
  source 1..39: mol_type = unassigned DNA; note = methanogen bacteria
agttctgttgaaacattgcttaccaatccaagtctgctc

SEQ ID NO: 25040 - DNA, 33 bp, unidentified
  source 1..33: mol_type = unassigned DNA; note = methanogen bacteria
tcaattattcttaaaacagcaggagtcggattt

SEQ ID NO: 25041 - DNA, 132 bp, unidentified
  source 1..132: mol_type = unassigned DNA; note = methanogen bacteria
ttcccggtatcagtgcctctgacagcttctgttgatccatcctcttcaggtgcgccacttgcaattggaagtgttttctcaaaaatcctgactgacatgatttcaaatccggtgactgcattgatagaagga

SEQ ID NO: 25042 - DNA, 33 bp, unidentified
  source 1..33: mol_type = unassigned DNA; note = methanogen bacteria
acctgccattcaatgggcattgcgattaatttc

SEQ ID NO: 25043 - DNA, 33 bp, unidentified
  source 1..33: mol_type = unassigned DNA; note = methanogen bacteria
tgttcattattcggaatctcacaggacatttcc

SEQ ID NO: 25044 - DNA, 30 bp, unidentified
  source 1..30: mol_type = unassigned DNA; note = methanogen bacteria
atgacctttttccttgaaacatttcctggc

SEQ ID NO: 25045 - DNA, 36 bp, unidentified
  source 1..36: mol_type = unassigned DNA; note = methanogen bacteria
ggttctttagaaacactccttacaaatcatagttta

SEQ ID NO: 25046 - DNA, 39 bp, unidentified
  source 1..39: mol_type = unassigned DNA; note = methanogen bacteria
gattcaaccggtcttatgggattgaccggtgttggcttt

SEQ ID NO: 25047 - DNA, 99 bp, unidentified
  source 1..99: mol_type = unassigned DNA; note = methanogen bacteria
ttgaatggtaaggatttcactgttaaaactggtaatgatggtaaggctgcattaccgattgatctcttgcctggtaaatacgtggcaaaaattaaattc

SEQ ID NO: 25048 - DNA, 246 bp, unidentified
  source 1..246: mol_type = unassigned DNA; note = methanogen bacteria
aacatctatttgagtttttctgttagttcaaatgttgttgttaataagcttgctactggtttaactgttaatgacatcaatatcgtttatggtgattcagctaatctgattatctctttaaaagacaggaataatgctgttttgaaaggtaaagatatttcagttaatttgaatggtaagaatttaactgttaaaactggaaatgacggtcaggtaacattgccgattgatttacttcctggaaaa

SEQ ID NO: 25049 - DNA, 300 bp, unidentified
  source 1..300: mol_type = unassigned DNA; note = methanogen bacteria
acatcaaaaataaagttcagtgaagataacatctatctggcttcttctgttagttcaaatgttgttgttaataagcttgctaccgctttaactgctggtgacatcaatatcacctatggcgattcagctaatctaatcattactttaaaggacggtaatgccaatgcattatctggaaaaatcattatgattaatataaatgacaaggattatttcacaacaaccgacaataatggtgaggcagcattgccgattgatcttctgcctggaaaatacgcagcaaaaatagaatttggagaa

SEQ ID NO: 25050 - DNA, 252 bp, unidentified
  source 1..252: mol_type = unassigned DNA; note = methanogen bacteria
atgtcccttgcgatggtgtacgattccaactactgggcgatagtgatcaggaacatcaacgccggcggcgggctctatgattatcagggatactattacaccccggtctgggggtacatcctgggccttgccaatgcgttccagaacctattcctgggtctgggggagtccgcggtaagggtcgaggacatcttctgtttcgaggacagcgggcaccagaccacggccacggtgacgtatctggcgttcaac

SEQ ID NO: 25051 - DNA, 105 bp, unidentified
  source 1..105: mol_type = unassigned DNA; note = methanogen bacteria
atcatcgacggcaacatcgccgatgcgttccgtttcatcagcgaccgcaccgggtcatcatcgggcagcggctcatcatccgtcctgagcttcgtcatcggccgt

SEQ ID NO: 25052 - DNA, 87 bp, unidentified
  source 1..87: mol_type = unassigned DNA; note = methanogen bacteria
gcggtgagcacgggctggatagaggtctcatcgctcgcccatttcttcgatgtatggaatgccggcggcacctggtcggtatggaac

SEQ ID NO: 25053 - DNA, 30 bp, unidentified
  source 1..30: mol_type = unassigned DNA; note = methanogen bacteria
agcagattgttaaaatctttccagaatagg

SEQ ID NO: 25054 - DNA, 30 bp, unidentified
  source 1..30: mol_type = unassigned DNA; note = methanogen bacteria
atgaccttctttttggaaacgttccctgga

SEQ ID NO: 25055 - DNA, 36 bp, unidentified
  source 1..36: mol_type = unassigned DNA; note = methanogen bacteria
gcagtcgagacattgcttacaaatccaagtctgttg

SEQ ID NO: 25056 - DNA, 36 bp, unidentified
  source 1..36: mol_type = unassigned DNA; note = methanogen bacteria
tttgctttgggagtcgtcggtgtcggatttgacaag

SEQ ID NO: 25057 - DNA, 36 bp, unidentified
  source 1..36: mol_type = unassigned DNA; note = methanogen bacteria
atgacatttttccttgaaacattcccgggattactg

SEQ ID NO: 25058 - DNA, 36 bp, unidentified
  source 1..36: mol_type = unassigned DNA; note = methanogen bacteria
gcaattgaaacattgcttacaaacccaagtttacta

SEQ ID NO: 25059 - DNA, 36 bp, unidentified
  source 1..36: mol_type = unassigned DNA; note = methanogen bacteria
tttgcttcagggttaatcggtgtaggatttgacaag

SEQ ID NO: 25060 - DNA, 63 bp, unidentified
  source 1..63: mol_type = unassigned DNA; note = methanogen bacteria
ggaaacccgagaagcggaatagccgtgtacatgtcttatctgatattcgagatgagtctgaac

SEQ ID NO: 25061 - DNA, 36 bp, unidentified
  source 1..36: mol_type = unassigned DNA; note = methanogen bacteria
gacagcatggaggattacatcctgaccatctcgggg

SEQ ID NO: 25062 - DNA, 42 bp, unidentified
  source 1..42: mol_type = unassigned DNA; note = methanogen bacteria
caggacgaggaggactccctggtgcagtacggcgtcctcatg

SEQ ID NO: 25063 - DNA, 36 bp, unidentified
  source 1..36: mol_type = unassigned DNA; note = methanogen bacteria
atgacttttttccttaaatcttttccaggattatta

SEQ ID NO: 25064 - DNA, 39 bp, unidentified
  source 1..39: mol_type = unassigned DNA; note = methanogen bacteria
agctctattgaaaccttacttactaatccttcattactt

SEQ ID NO: 25065 - DNA, 30 bp, unidentified
  source 1..30: mol_type = unassigned DNA; note = methanogen bacteria
gttattttaggtttagtaggtgttggatat

SEQ ID NO: 25066 - DNA, 39 bp, unidentified
  source 1..39: mol_type = unassigned DNA; note = methanogen bacteria
gaaggcatcgtatccggattctgcgacccttccttcacc

SEQ ID NO: 25067 - DNA, 30 bp, unidentified
  source 1..30: mol_type = unassigned DNA; note = methanogen bacteria
ctccgcggagggtcggagatcatcgactgc

SEQ ID NO: 25068 - DNA, 45 bp, unidentified
  source 1..45: mol_type = unassigned DNA; note = methanogen bacteria
aattccggcacgattcccgttttcggcatcatcggcgggggtacg

SEQ ID NO: 25069 - DNA, 78 bp, unidentified
  source 1..78: mol_type = unassigned DNA; note = methanogen bacteria
tccggcagcgggaggtcggggccgtgcatggcggtgaaacaggtcatcggggaatccctgggagggttctgctccgag

SEQ ID NO: 25070 - DNA, 42 bp, unidentified
  source 1..42: mol_type = unassigned DNA; note = methanogen bacteria
atggaggagatcgtatcaggtttctgcgacccctctttcaca

SEQ ID NO: 25071 - DNA, 30 bp, unidentified
  source 1..30: mol_type = unassigned DNA; note = methanogen bacteria
ctccgcggaggttcggagatcatcgactgc

SEQ ID NO: 25072 - DNA, 45 bp, unidentified
  source 1..45: mol_type = unassigned DNA; note = methanogen bacteria
aactcagaaatcatccctgtgatcggcatcatggaagggggcaca

SEQ ID NO: 25073 - DNA, 78 bp, unidentified
  source 1..78: mol_type = unassigned DNA; note = methanogen bacteria
tccggaagcggaaggtcgggaccgtcgatggccgtcaaacaggtcatcggggattcgctcggcggattctgttccgag

SEQ ID NO: 25074 - DNA, 63 bp, unidentified
  source 1..63: mol_type = unassigned DNA; note = methanogen bacteria
gcaaatccggactggggaagtgtggcctcatctgttgttcctcaaatacactgggaaaaggat

SEQ ID NO: 25075 - DNA, 81 bp, unidentified
  source 1..81: mol_type = unassigned DNA; note = methanogen bacteria
gccacaataaatattgcaggaacacccgtaacagacgtacaggacattgcacatgcactcatacctgtagccggacaatat

SEQ ID NO: 25076 - DNA, 33 bp, unidentified
  source 1..33: mol_type = unassigned DNA; note = methanogen bacteria
aacgttacagatccatttataaaggacacgata

SEQ ID NO: 25077 - DNA, 132 bp, unidentified
  source 1..132: mol_type = unassigned DNA; note = methanogen bacteria
ataaatcccggtgatggactaaacatggtgggaacacaatataccacaaacctgacggagaacataacactgacagacactatactgaacatgataccacaaaatcccatcagctcacttgcaaacggtgaa

SEQ ID NO: 25078 - DNA, 33 bp, unidentified
  source 1..33: mol_type = unassigned DNA; note = methanogen bacteria
gcaacacaggcatacggactcgacctgggatta

SEQ ID NO: 25079 - DNA, 33 bp, unidentified
  source 1..33: mol_type = unassigned DNA; note = methanogen bacteria
atgctctttgtatctgtgggattgcctttggat

SEQ ID NO: 25080 - DNA, 252 bp, unidentified
  source 1..252: mol_type = unassigned DNA; note = methanogen bacteria
aaaatccacactgcaagcaaagaggttccttcatgggacggaaatcactttcaaggatatagaacaataggatcagtccttgattttgcatggaatgatggcaataccgtcttcaatgttgactttgacaataaacccataaatgagtcatatattctttatacatcaagtttcgcccataatccaccttatggatattttgctcaagcatttggagtatttttggccaaattatttgatttgaatgcaatt

SEQ ID NO: 25081 - DNA, 195 bp, unidentified
  source 1..195: mol_type = unassigned DNA; note = methanogen bacteria
ctgtattcagtcccgacatattacaactcattcagaatagatcatgcattaaaaagcaatatcaatatgactaaccagatatccttcatgacaactcatttgccggaaaccatgtttacgcttatacaaatccccaaatcaattgggattcatttcaacacactgtttatttactcattccacccatacgaatat

SEQ ID NO: 25082 - DNA, 48 bp, unidentified
  source 1..48: mol_type = unassigned DNA; note = methanogen bacteria
tggacacctgtaggtgacttcaaagaaattttaggagcagtacaaaga

SEQ ID NO: 25083 - DNA, 57 bp, unidentified
  source 1..57: mol_type = unassigned DNA; note = methanogen bacteria
atcaatgatacctccctcgtcacccttctggatctggaggaacgtaccaacaactat

SEQ ID NO: 25084 - DNA, 30 bp, unidentified
  source 1..30: mol_type = unassigned DNA; note = methanogen bacteria
gtggagataggttcattcgacaacttccat

SEQ ID NO: 25085 - DNA, 96 bp, unidentified
  source 1..96: mol_type = unassigned DNA; note = methanogen bacteria
tcttcatgtattgttgatcatatgaattttattaaagttaatgatactaattccagttttgttgctccggatatagttgacggtgctttaatggat

SEQ ID NO: 25086 - DNA, 126 bp, unidentified
  source 1..126: mol_type = unassigned DNA; note = methanogen bacteria
ttccctatcagcattacacttactaatgccagttcagtatctgcacctggtggattgaaccaaattctttcaaatcttttgttgaatatcttcctaaatccattatactcattgtcagaaggtaat

SEQ ID NO: 25087 - DNA, 33 bp, unidentified
  source 1..33: mol_type = unassigned DNA; note = methanogen bacteria
gtttgtcatacattaggcattcctgtagatgta

SEQ ID NO: 25088 - DNA, 33 bp, unidentified
  source 1..33: mol_type = unassigned DNA; note = methanogen bacteria
tgctcattatttggaataccttcagacatttca

SEQ ID NO: 25089 - DNA, 48 bp, unidentified
  source 1..48: mol_type = unassigned DNA; note = methanogen bacteria
ttacagatatttaatattgttaatcctcatcatgttgaggtggttact

SEQ ID NO: 25090 - DNA, 144 bp, unidentified
  source 1..144: mol_type = unassigned DNA; note = methanogen bacteria
tccacactcaacatcaataacaccgaaaccaactacggaacaaccaccaacatcaacgtaacctacgaaggagcagaaggaataaccgcaaaactaaacgatgaattaataatattcaaaggaaacaccataccaataccaata

SEQ ID NO: 25091 - DNA, 156 bp, unidentified
  source 1..156: mol_type = unassigned DNA; note = methanogen bacteria
tacaccttaacagtaacaacaataccagacaaaaaccacaacagcataacaaaaacagccacaatcacaataaacaaagtggattcaacaataaaagccaataatatcacatacacatacgaatcaacaggaaccacaacagtaaactacaccgga

SEQ ID NO: 25092 - DNA, 99 bp, unidentified
  source 1..99: mol_type = unassigned DNA; note = methanogen bacteria
ttcaccgcaacaatagaaaaaggaaacctgaaaatcgaaaacaacacaataacagtctacaaccaaaaaccaggaacatacaaactaaccataacaaca

SEQ ID NO: 25093 - DNA, 42 bp, unidentified
  source 1..42: mol_type = unassigned DNA; note = methanogen bacteria
acaaacataatggtcacagtaaacaagattgaaacaaaaata

SEQ ID NO: 25094 - DNA, 87 bp, unidentified
  source 1..87: mol_type = unassigned DNA; note = methanogen bacteria
acaataacactaaaagacaacaaaaacaaaccaataacaggagcaaaaataaaaataaacacacaaaaaacatacaccaccaacaaa

SEQ ID NO: 25095 - DNA, 255 bp, unidentified
  source 1..255: mol_type = unassigned DNA; note = methanogen bacteria
aaaataacctataccggaaacgaaacacacaaagccacacaaaaaacaacaaaaataatcatcaaaaaagcaacaccaaaaataaacgcaaaaaacaaaacattcaaatccaacaacaaaaacaaaaaataccaagtctcactcaaagacaaccaaagaaaaccaatgaaaaaagcccaaatccaactaaaaatcggaaaaacaacatacaaaacaacaacaaacaacaaaggaacagcaacattcaaaataaaa

SEQ ID NO: 25096 - DNA, 30 bp, unidentified
  source 1..30: mol_type = unassigned DNA; note = methanogen bacteria
acaaaaacaaccaacgcactcataaaatac

SEQ ID NO: 25097 - DNA, 240 bp, unidentified
  source 1..240: mol_type = unassigned DNA; note = methanogen bacteria
accaaaaaaataaaactgacagtaaaaacaacattccaaaccatatcatacggaagcaaaaaccaccaaatggtcaaaaaaatccaaaaagcacttaaaaacaacggatactacaccacagcctacggacactacctaaaaatagacggaatataccacatctggacacaacaagcagtcaaacaataccaaaaagacaaaaaactaaaaataaccggaagagtagatgaaaagacagct

SEQ ID NO: 25098 - DNA, 66 bp, unidentified
  source 1..66: mol_type = unassigned DNA; note = methanogen bacteria
ataggaaaccccagaagcggaatagccgtctacatgtcctatctgatttttgaaatgggcctgaac

SEQ ID NO: 25099 - DNA, 36 bp, unidentified
  source 1..36: mol_type = unassigned DNA; note = methanogen bacteria
tcctatcttcaggctgatcttcatttttccgctgaa

SEQ ID NO: 25100 - DNA, 39 bp, unidentified
  source 1..39: mol_type = unassigned DNA; note = methanogen bacteria
acctatcttgcacaagaaagaggcttggcagctgtaggc

SEQ ID NO: 25101 - DNA, 126 bp, unidentified
  source 1..126: mol_type = unassigned DNA; note = methanogen bacteria
tatcctgtggatttgcatctttcttcagtgagcaatgcaacagcaccgggcggacttgaggatattgtatcaaacatgcttttgaatgtcttttcaaatcctataaaatcattgtctgaaggtgaa

SEQ ID NO: 25102 - DNA, 30 bp, unidentified
  source 1..30: mol_type = unassigned DNA; note = methanogen bacteria
tctgaaagcggtttgggaatatttacgcag

SEQ ID NO: 25103 - DNA, 33 bp, unidentified
  source 1..33: mol_type = unassigned DNA; note = methanogen bacteria
gtttgccatacggtggggataagtgtttcactt

SEQ ID NO: 25104 - DNA, 33 bp, unidentified
  source 1..33: mol_type = unassigned DNA; note = methanogen bacteria
tgttcattatttggaataactcctgatatttct

SEQ ID NO: 25105 - DNA, 30 bp, unidentified
  source 1..30: mol_type = unassigned DNA; note = methanogen bacteria
tttcagactcccatttcatcgggagtgtct

SEQ ID NO: 25106 - DNA, 66 bp, unidentified
  source 1..66: mol_type = unassigned DNA; note = methanogen bacteria
atcgggaatccgagaagcggaatagccgtttacatgtcttatcttatctcagagatgaatctgaac

SEQ ID NO: 25107 - DNA, 36 bp, unidentified
  source 1..36: mol_type = unassigned DNA; note = methanogen bacteria
atgacctttttcttagaaacatttccgggattactt

SEQ ID NO: 25108 - DNA, 36 bp, unidentified
  source 1..36: mol_type = unassigned DNA; note = methanogen bacteria
agttctgttgaaacattgcttaccaatccttctttg

SEQ ID NO: 25109 - DNA, 39 bp, unidentified
  source 1..39: mol_type = unassigned DNA; note = methanogen bacteria
gattcgactgagatattgggtttggttggtgtaggtttt

SEQ ID NO: 25110 - DNA, 33 bp, unidentified
  source 1..33: mol_type = unassigned DNA; note = methanogen bacteria
acttttcaaacaccgatatcctctggtgtttca

SEQ ID NO: 25111 - DNA, 66 bp, unidentified
  source 1..66: mol_type = unassigned DNA; note = methanogen bacteria
ataggaaatcccagaagtggtattgccgtttacatgtcttatttgattagtgaaatgactttaaat

SEQ ID NO: 25112 - DNA, 30 bp, unidentified
  source 1..30: mol_type = unassigned DNA; note = methanogen bacteria
tttcaaaccccaatttcctcaggagtatcg

SEQ ID NO: 25113 - DNA, 66 bp, unidentified
  source 1..66: mol_type = unassigned DNA; note = methanogen bacteria
atcggaaacccccgaagcggaatagctgtctatatgtcctatctgattagcgagatgaacctgaac

SEQ ID NO: 25114 - DNA, 36 bp, unidentified
  source 1..36: mol_type = unassigned DNA; note = methanogen bacteria
cagttcgaggagggggacgatcttgctgggatattc

SEQ ID NO: 25115 - DNA, 51 bp, unidentified
  source 1..51: mol_type = unassigned DNA; note = methanogen bacteria
gactgggtcttcgggaccttctatggcgaggagatggagccttattcgcag

SEQ ID NO: 25116 - DNA, 264 bp, unidentified
  source 1..264: mol_type = unassigned DNA; note = methanogen bacteria
gtgtatattaccggctctgaattcagtcaaaacaaggcgaaaaatggtggtgcagcctacattaaagatgtatcaatgactattgacggttctgaatttatagctaatgaagcgaaaaatgatggtggagcaatctggtccaataaaaattccagaataattaaaaattcaaaattcattgaaaataaagcattgaatgaagccggtgcaatttatagaggcactcttgaaaaattacagctcaccaacaacacattcattgac

SEQ ID NO: 25117 - DNA, 30 bp, unidentified
  source 1..30: mol_type = unassigned DNA; note = methanogen bacteria
caggaccagatgaccggctatctcttcgcc

SEQ ID NO: 25118 - DNA, 33 bp, unidentified
  source 1..33: mol_type = unassigned DNA; note = methanogen bacteria
ctgcaggtcgacggaggcctcgattacagcgag

SEQ ID NO: 25119 - DNA, 42 bp, unidentified
  source 1..42: mol_type = unassigned DNA; note = methanogen bacteria
cagaatcagcaggattcgctggtggaatacagcgtgctgctc

SEQ ID NO: 25120 - DNA, 30 bp, unidentified
  source 1..30: mol_type = unassigned DNA; note = methanogen bacteria
atcaccggcggaggcagcaacgtatccttc

SEQ ID NO: 25121 - DNA, 66 bp, unidentified
  source 1..66: mol_type = unassigned DNA; note = methanogen bacteria
atcggaaatccaagaagtggaatagctgtttacatgtcttatctaatatctgaaatgaacctgaac

SEQ ID NO: 25122 - DNA, 42 bp, unidentified
  source 1..42: mol_type = unassigned DNA; note = methanogen bacteria
aaggagataaaaataacagaaactatcagtgttttattgttg

SEQ ID NO: 25123 - DNA, 30 bp, unidentified
  source 1..30: mol_type = unassigned DNA; note = methanogen bacteria
gggcaggcaatatccagtatttttcaggta

SEQ ID NO: 25124 - DNA, 126 bp, unidentified
  source 1..126: mol_type = unassigned DNA; note = methanogen bacteria
gcttcactcattcctatgcatccatatgcttacgctatggcctcaggtgtaggtagtgcaagtatgaatgctgcggctcttgctccattgatgcatatgttcccatcaatggccactcatttggag

SEQ ID NO: 25125 - DNA, 51 bp, unidentified
  source 1..51: mol_type = unassigned DNA; note = methanogen bacteria
ccaggtgttccaacatctgacttcctggttcattacgtttcccagattgat

SEQ ID NO: 25126 - DNA, 123 bp, unidentified
  source 1..123: mol_type = unassigned DNA; note = methanogen bacteria
ttcccactaagcgttcagcttaagaatattagccatgcggctgtcccttcaggatttaatgaaataatagttaatatgttgcttaagattttcgaaaatccattatatgcattagctcaaggt

SEQ ID NO: 25127 - DNA, 33 bp, unidentified
  source 1..33: mol_type = unassigned DNA; note = methanogen bacteria
gtatgccatacattaggaatagttgtggattta

SEQ ID NO: 25128 - DNA, 33 bp, unidentified
  source 1..33: mol_type = unassigned DNA; note = methanogen bacteria
tgctctttatttggaataccttcagatatttca

SEQ ID NO: 25129 - DNA, 30 bp, unidentified
  source 1..30: mol_type = unassigned DNA; note = methanogen bacteria
aattttttattgacgaaagtatcgccggaa

SEQ ID NO: 25130 - DNA, 66 bp, unidentified
  source 1..66: mol_type = unassigned DNA; note = methanogen bacteria
atcggcaacccccgaagcggaatagcagtttacatgtcctatctaatttcagagatgagcataaac

SEQ ID NO: 25131 - DNA, 66 bp, unidentified
  source 1..66: mol_type = unassigned DNA; note = methanogen bacteria
atcggaaatccacgaagcggaatagccgtttatatgtcatatttgatttttgaaatgggtctgaat

SEQ ID NO: 25132 - DNA, 126 bp, unidentified
  source 1..126: mol_type = unassigned DNA; note = methanogen bacteria
ttccctataagcattacacttacagatgcaagctctgtatcaccacctggaggattaagtgatgttttgactaatatgttattgaacatatttgcaaatcctttgctttcattgacaaatggtgat

SEQ ID NO: 25133 - DNA, 33 bp, unidentified
  source 1..33: mol_type = unassigned DNA; note = methanogen bacteria
gtatgtcatacattaggaattggaatagatttg

SEQ ID NO: 25134 - DNA, 33 bp, unidentified
  source 1..33: mol_type = unassigned DNA; note = methanogen bacteria
tgtgcactgtttggaatacctaatgacgttgca

SEQ ID NO: 25135 - DNA, 42 bp, unidentified
  source 1..42: mol_type = unassigned DNA; note = methanogen bacteria
aaggaaataaagataaccgataccatcagcattctcttattg

SEQ ID NO: 25136 - DNA, 30 bp, unidentified
  source 1..30: mol_type = unassigned DNA; note = methanogen bacteria
gggcaagcaatatccagtatttttcaggta

SEQ ID NO: 25137 - DNA, 126 bp, unidentified
  source 1..126: mol_type = unassigned DNA; note = methanogen bacteria
gcttcaatcattcctatgcatccatatgcttatgcaatggcatcaggtgtaggaagtgcaagtatgaatgctgcagctcttgctccattgatgcacatgttcccatctatggctactcaattggag

SEQ ID NO: 25138 - DNA, 48 bp, unidentified
  source 1..48: mol_type = unassigned DNA; note = methanogen bacteria
ggtgttccaactgctgacttcctagttcgttatgtttcccaagttgat

SEQ ID NO: 25139 - DNA, 33 bp, unidentified
  source 1..33: mol_type = unassigned DNA; note = methanogen bacteria
catataagtgccgattttactgtaggaccttta

SEQ ID NO: 25140 - DNA, 30 bp, unidentified
  source 1..30: mol_type = unassigned DNA; note = methanogen bacteria
attccaggagtttatgtgggcttttatggg

SEQ ID NO: 25141 - DNA, 30 bp, unidentified
  source 1..30: mol_type = unassigned DNA; note = methanogen bacteria
tcgttcctattgacgttcctatcgccggaa

SEQ ID NO: 25142 - DNA, 63 bp, unidentified
  source 1..63: mol_type = unassigned DNA; note = methanogen bacteria
ggaaacccacgaagcggaatagccgtctacatgtcctaccttatttttgagatgagcgtcaat

SEQ ID NO: 25143 - DNA, 180 bp, unidentified
  source 1..180: mol_type = unassigned DNA; note = methanogen bacteria
gagtcaatagggctaatgtcatcatttttaaaggcaggtggattttcactaggcacaaattcatcagaagttggaaccataatcgtccaaaacttgccagtgaatgtgcaggatatgattcagcctcatattggaagaataaatgcaggaatcagccagttattcagtcttttgcttaat

SEQ ID NO: 25144 - DNA, 30 bp, unidentified
  source 1..30: mol_type = unassigned DNA; note = methanogen bacteria
ggagttcttctgggatttatatcgccagaa

SEQ ID NO: 25145 - DNA, 30 bp, unidentified
  source 1..30: mol_type = unassigned DNA; note = methanogen bacteria
tttcaaacaccaatatcgtctggaatttca

SEQ ID NO: 25146 - DNA, 66 bp, unidentified
  source 1..66: mol_type = unassigned DNA; note = methanogen bacteria
attggtaatcctcgaagcggtattgcagtttatatgtcttatttggttgaacaaatgactttaaat

SEQ ID NO: 25147 - DNA, 30 bp, unidentified
  source 1..30: mol_type = unassigned DNA; note = methanogen bacteria
ttccagacaccaatatcctccggaacaaca

SEQ ID NO: 25148 - DNA, 66 bp, unidentified
  source 1..66: mol_type = unassigned DNA; note = methanogen bacteria
atcggaaatcccagaagcggaatagcggtttacatgtcctatctgatttttgagatgggtttgaac

SEQ ID NO: 25149 - DNA, 30 bp, unidentified
  source 1..30: mol_type = unassigned DNA; note = methanogen bacteria
tcatttctgcttggatttttatctccggaa

SEQ ID NO: 25150 - DNA, 30 bp, unidentified
  source 1..30: mol_type = unassigned DNA; note = methanogen bacteria
tttcagacacctatttcatcaggtatcagt

SEQ ID NO: 25151 - DNA, 66 bp, unidentified
  source 1..66: mol_type = unassigned DNA; note = methanogen bacteria
attggcaatccacgaagcggtattgcagtttacatgtcatatctggttagtgaaatgactctgaat

SEQ ID NO: 25152 - DNA, 30 bp, unidentified
  source 1..30: mol_type = unassigned DNA; note = methanogen bacteria
atgacatttttcctgaaagcattccctgga

SEQ ID NO: 25153 - DNA, 39 bp, unidentified
  source 1..39: mol_type = unassigned DNA; note = methanogen bacteria
agttcaattgaaacactgctgactaatcagactttgctt

SEQ ID NO: 25154 - DNA, 33 bp, unidentified
  source 1..33: mol_type = unassigned DNA; note = methanogen bacteria
acatatctaatgggaggcactggtgtaggtttt

SEQ ID NO: 25155 - DNA, 51 bp, unidentified
  source 1..51: mol_type = unassigned DNA; note = methanogen bacteria
ttagtacaagtaccaactagaagaattgatgttgctgctgaatactctaca

SEQ ID NO: 25156 - DNA, 186 bp, unidentified
  source 1..186: mol_type = unassigned DNA; note = methanogen bacteria
tccgcttccgctttagtacaatctgttattgacatctgtgatgtaagcatctacgatgctaactttgtaaaagctgcagtattaggtagatacccacaatctgtagactacaaaggatctaacattgcaaccatgttagacattccacaaaaactcgaaggtgcaggttacggtttaagaaatgta

SEQ ID NO: 25157 - DNA, 48 bp, unidentified
  source 1..48: mol_type = unassigned DNA; note = methanogen bacteria
atgtttgaaatggctgatgctttaggttcatttgaaagattacactta

SEQ ID NO: 25158 - DNA, 63 bp, unidentified
  source 1..63: mol_type = unassigned DNA; note = methanogen bacteria
taccaaggtttaaacgctaataatttagtatatgaattagtaaaagaaaatgcggctgaaggt

SEQ ID NO: 25159 - DNA, 102 bp, unidentified
  source 1..102: mol_type = unassigned DNA; note = methanogen bacteria
gttggtagtattgtacaagctactattgctcgtgcagaagcagatggtgtaattgctcctcaagaacaattaactgatttcgctatttacaacactgatgac

SEQ ID NO: 25160 - DNA, 129 bp, unidentified
  source 1..129: mol_type = unassigned DNA; note = methanogen bacteria
ggtattccatctactttattatacttcaacgacaacttagaattcgcaactggtttacctggtcttgactatggtagagcagaaggtgtagctgtaggattctcattcttctctcactccatttacggt

SEQ ID NO: 25161 - DNA, 30 bp, unidentified
  source 1..30: mol_type = unassigned DNA; note = methanogen bacteria
ttcaacggtaaccacgttgtaaccagacac

SEQ ID NO: 25162 - DNA, 84 bp, unidentified
  source 1..84: mol_type = unassigned DNA; note = methanogen bacteria
caactcttttcaccagaagcaacttctggtttaattaaagaagtatacagccaaattgatgaattcagagaacctattaaagca

SEQ ID NO: 25163 - DNA, 66 bp, unidentified
  source 1..66: mol_type = unassigned DNA; note = methanogen bacteria
attggaaaccctcgaagcggtattgcagtatatatgtcttatttaatctctgacatgactttaaat

SEQ ID NO: 25164 - DNA, 30 bp, unidentified
  source 1..30: mol_type = unassigned DNA; note = methanogen bacteria
ggctttttattgaactacatatctcctgaa

SEQ ID NO: 25165 - DNA, 30 bp, unidentified
  source 1..30: mol_type = unassigned DNA; note = methanogen bacteria
ctacagactcctatttcttctggaatatct

SEQ ID NO: 25166 - DNA, 63 bp, unidentified
  source 1..63: mol_type = unassigned DNA; note = methanogen bacteria
ataggaaatcctagaagcgggattgcggtttacatgtcctatctcatcagcgaatttacaata

SEQ ID NO: 25167 - DNA, 57 bp, unidentified
  source 1..57: mol_type = unassigned DNA; note = methanogen bacteria
atgcatattgggattttagagattaagatatctgatactgtaagtattttattattg

SEQ ID NO: 25168 - DNA, 30 bp, unidentified
  source 1..30: mol_type = unassigned DNA; note = methanogen bacteria
ggtcaatccatagaaaatatttttgatgtc

SEQ ID NO: 25169 - DNA, 126 bp, unidentified
  source 1..126: mol_type = unassigned DNA; note = methanogen bacteria
gcttcacttataccaatgcacccatatgcttatgctatggcttcaggtgtaggaagtgcaagtatgaatgcagcggcacttgctccattgatgcatttgtacccttcaatggcaactgatttggaa

SEQ ID NO: 25170 - DNA, 48 bp, unidentified
  source 1..48: mol_type = unassigned DNA; note = methanogen bacteria
ggagttccaactgctagctttataagtcattatgtttcccaaatcgat

SEQ ID NO: 25171 - DNA, 66 bp, unidentified
  source 1..66: mol_type = unassigned DNA; note = methanogen bacteria
atcggcaatcccagaagcggtattgcagtttacatgtcttatttaattagtaaaatgagtttaaat

SEQ ID NO: 25172 - DNA, 123 bp, unidentified
  source 1..123: mol_type = unassigned DNA; note = methanogen bacteria
tttcctgttacaattcatcttaccggtgcaagcacacaagccgctccgggaggaattggtgaaatcatgcacgatattattattaccgccttttccaaccctgttgaattggtggctcaaggc

SEQ ID NO: 25173 - DNA, 36 bp, unidentified
  source 1..36: mol_type = unassigned DNA; note = methanogen bacteria
gtctgccataccataggaatatcagttccattgcat

SEQ ID NO: 25174 - DNA, 33 bp, unidentified
  source 1..33: mol_type = unassigned DNA; note = methanogen bacteria
tgttcaatgtttggaataagctccgatgtgtct

SEQ ID NO: 25175 - DNA, 42 bp, unidentified
  source 1..42: mol_type = unassigned DNA; note = methanogen bacteria
aaggagattaaaataaccgatactgtcagtatcttattgctg

SEQ ID NO: 25176 - DNA, 33 bp, unidentified
  source 1..33: mol_type = unassigned DNA; note = methanogen bacteria
agtggtcaatccataagcagcatctttcaagtg

SEQ ID NO: 25177 - DNA, 126 bp, unidentified
  source 1..126: mol_type = unassigned DNA; note = methanogen bacteria
gcttcagtaattcctatgcatccatatgcttatgcgatggcttcaggtgtaggtagtgcaagtatgaatgccgctgctttagctccattaatgcatatgttcccatcaatggctactaaattagaa

SEQ ID NO: 25178 - DNA, 48 bp, unidentified
  source 1..48: mol_type = unassigned DNA; note = methanogen bacteria
ggtatgcctacagcagactttgtttcccattatgtttctcaaattgac

SEQ ID NO: 25179 - DNA, 30 bp, unidentified
  source 1..30: mol_type = unassigned DNA; note = methanogen bacteria
ggatttttgcttagttttttatctccagag

SEQ ID NO: 25180 - DNA, 30 bp, unidentified
  source 1..30: mol_type = unassigned DNA; note = methanogen bacteria
cttcaaactcctatatcttcaggaatctcc

SEQ ID NO: 25181 - DNA, 66 bp, unidentified
  source 1..66: mol_type = unassigned DNA; note = methanogen bacteria
attggaaatccacgtagtggtattgcagtttatatgtcttatttgatttcagaatttacattatct

SEQ ID NO: 25182 - DNA, 63 bp, unidentified
  source 1..63: mol_type = unassigned DNA; note = methanogen bacteria
attggtaatccacggagcggaattgctgtatatatgtcctatttgatttcgcagttcacttta

SEQ ID NO: 25183 - DNA, 30 bp, unidentified
  source 1..30: mol_type = unassigned DNA; note = methanogen bacteria
gcatttttattgaattacatatctgcagaa

SEQ ID NO: 25184 - DNA, 63 bp, unidentified
  source 1..63: mol_type = unassigned DNA; note = methanogen bacteria
attggtaatccgaggagcggaattgctgtatacatgtcatatttaatatctgaattcacttta

SEQ ID NO: 25185 - DNA, 87 bp, unidentified
  source 1..87: mol_type = unassigned DNA; note = methanogen bacteria
ccctttcttgggataaccaagatgggtattacagcaaatatgaccttgatggaaactgccacttccatgtttgtcgataattatgaa

SEQ ID NO: 25186 - DNA, 30 bp, unidentified
  source 1..30: mol_type = unassigned DNA; note = methanogen bacteria
ttagtatccatggttgaactacaaatcgga

SEQ ID NO: 25187 - DNA, 87 bp, unidentified
  source 1..87: mol_type = unassigned DNA; note = methanogen bacteria
ttcccaattatgataactagttcaatgggaaagaactcggctgcaactatctttgaaggcataatatttatgtgggataccggcgcg

SEQ ID NO: 25188 - DNA, 30 bp, unidentified
  source 1..30: mol_type = unassigned DNA; note = methanogen bacteria
gcattcctcatgaattacatatctgcagaa

SEQ ID NO: 25189 - DNA, 63 bp, unidentified
  source 1..63: mol_type = unassigned DNA; note = methanogen bacteria
attggtaatccaaggagcggaattgctgtatatatgtcttacttgatttctgaattcacttta

SEQ ID NO: 25190 - DNA, 42 bp, unidentified
  source 1..42: mol_type = unassigned DNA; note = methanogen bacteria
aaggagtttaaaataactgatgatatcagcattctcttaatg

SEQ ID NO: 25191 - DNA, 33 bp, unidentified
  source 1..33: mol_type = unassigned DNA; note = methanogen bacteria
agtggtcaagctataaacagtatctttcaagta

SEQ ID NO: 25192 - DNA, 123 bp, unidentified
  source 1..123: mol_type = unassigned DNA; note = methanogen bacteria
atttcaggattgcctatccatccatacgcctttgcgatggcttcaggtataggaagtgcaagtatgaatgctgcagctcttgctccattgatgcatatgtatccagctatggctactcaattg

SEQ ID NO: 25193 - DNA, 48 bp, unidentified
  source 1..48: mol_type = unassigned DNA; note = methanogen bacteria
ggtgttcctacatctgatttcatgattcattatgtttccaatattgaa

SEQ ID NO: 25194 - DNA, 222 bp, unidentified
  source 1..222: mol_type = unassigned DNA; note = methanogen bacteria
atggcttacacaagtatcattgactggatcaccggcgtctactcccagcacggatgggctgaccccattcaggccaacccctactatccgttcggagacgcatacaacctgccctatgacctcggaatgaaactgtggaacatcatcggcggtgccatcgcttggctcctcgacctcctgttccccggcaacgacgtctccacctggctcgtctgcgacatg

SEQ ID NO: 25195 - DNA, 39 bp, unidentified
  source 1..39: mol_type = unassigned DNA; note = methanogen bacteria
cccctgtcccccaggtggttcgtcgtcaactacgacgcc

SEQ ID NO: 25196 - DNA, 60 bp, unidentified
  source 1..60: mol_type = unassigned DNA; note = methanogen bacteria
ctcgccggatccctcaacatcggtgacatcgtgatggcccagaccaaacacttctggtac

SEQ ID NO: 25197 - DNA, 84 bp, unidentified
  source 1..84: mol_type = unassigned DNA; note = methanogen bacteria
ggaggctggaaccttcccttcatggagtggacctacttcctcggagacggaatcgcgagcttccaccagaacttcatgtggtgg

SEQ ID NO: 25198 - DNA, 126 bp, unidentified
  source 1..126: mol_type = unassigned DNA; note = methanogen bacteria
ttcccgttgaatatttatttatcatctgccagtgttgcttctgcactgggagggcttggcgaaataatgagagacatgattttgaacatattttcaaatccgataaaatctttagctgaaggggaa

SEQ ID NO: 25199 - DNA, 30 bp, unidentified
  source 1..30: mol_type = unassigned DNA; note = methanogen bacteria
tgctatactttagggatacccgttcctttc

SEQ ID NO: 25200 - DNA, 33 bp, unidentified
  source 1..33: mol_type = unassigned DNA; note = methanogen bacteria
tgttctttgtttggcatcagtcaggacatttcc

SEQ ID NO: 25201 - DNA, 105 bp, unidentified
  source 1..105: mol_type = unassigned DNA; note = methanogen bacteria
cagctttcattttcatcatcaactttgcttggatttataggaataccggaaaatctattaatggaaggaataggagtaaattcactgacagatactataccgaca

SEQ ID NO: 25202 - DNA, 42 bp, unidentified
  source 1..42: mol_type = unassigned DNA; note = methanogen bacteria
tggggtggaggatggctgatgaatatgggtgcaatagatttt

SEQ ID NO: 25203 - DNA, 51 bp, unidentified
  source 1..51: mol_type = unassigned DNA; note = methanogen bacteria
gcttcacctgcaataaatggagttgcaggactattttacggaaatccagga

SEQ ID NO: 25204 - DNA, 42 bp, unidentified
  source 1..42: mol_type = unassigned DNA; note = methanogen bacteria
attgaaattgatttaactgacaacattcaaattgttttattg

SEQ ID NO: 25205 - DNA, 33 bp, unidentified
  source 1..33: mol_type = unassigned DNA; note = methanogen bacteria
agcggtcaatctatggatgatatatttaatgtg

SEQ ID NO: 25206 - DNA, 126 bp, unidentified
  source 1..126: mol_type = unassigned DNA; note = methanogen bacteria
atttcagttttaccaattcatccatatgctttttcaatggcctcaggtataggaagtgcaagtatgaatgcagcgtcattggcttcaatatctcatgtttatccatccatggctactgaatttgaa

SEQ ID NO: 25207 - DNA, 51 bp, unidentified
  source 1..51: mol_type = unassigned DNA; note = methanogen bacteria
cctgttgttccaacatccaattttgtcatgcattatgtttcacaaattaat

SEQ ID NO: 25208 - DNA, 30 bp, unidentified
  source 1..30: mol_type = unassigned DNA; note = methanogen bacteria
ccatacctacttcaatttacaagttccgag

SEQ ID NO: 25209 - DNA, 66 bp, unidentified
  source 1..66: mol_type = unassigned DNA; note = methanogen bacteria
attggaaatccccgaagcggaatagctgtttttatatcatatattattaatgattttacaatattc

SEQ ID NO: 25210 - DNA, 42 bp, unidentified
  source 1..42: mol_type = unassigned DNA; note = methanogen bacteria
ccttcatctgcaattcaagtaggtgataaacaaatcatattt

SEQ ID NO: 25211 - DNA, 54 bp, unidentified
  source 1..54: mol_type = unassigned DNA; note = methanogen bacteria
gtagatgtttgccctccaaaaacacttgaattaaatgattctgctaaaatgcct

SEQ ID NO: 25212 - DNA, 39 bp, unidentified
  source 1..39: mol_type = unassigned DNA; note = methanogen bacteria
attggaatccctggagttattgaaccagctagtagagaa

SEQ ID NO: 25213 - DNA, 33 bp, unidentified
  source 1..33: mol_type = unassigned DNA; note = methanogen bacteria
attactttacctgctgttggtgaatctattact

SEQ ID NO: 25214 - DNA, 126 bp, unidentified
  source 1..126: mol_type = unassigned DNA; note = methanogen bacteria
tttccggttactatgcatttgtctgcagcaagtactgccactactccgggcggacttggagaaatagtatcaaatctgcttttaaacattttccaaaatcctatcaagtctctggctgaaggtgag

SEQ ID NO: 25215 - DNA, 30 bp, unidentified
  source 1..30: mol_type = unassigned DNA; note = methanogen bacteria
tgtaacactataggaatccatgtggcattt

SEQ ID NO: 25216 - DNA, 33 bp, unidentified
  source 1..33: mol_type = unassigned DNA; note = methanogen bacteria
tgttcactgttcggaatatctccagacatttcc

SEQ ID NO: 25217 - DNA, 57 bp, unidentified
  source 1..57: mol_type = unassigned DNA; note = methanogen bacteria
atgtctattggagtaatagagattaaactaactgaaactattcaaattttcttatta

SEQ ID NO: 25218 - DNA, 30 bp, unidentified
  source 1..30: mol_type = unassigned DNA; note = methanogen bacteria
ggtcaatccttgcataacatttataatgtg

SEQ ID NO: 25219 - DNA, 126 bp, unidentified
  source 1..126: mol_type = unassigned DNA; note = methanogen bacteria
gcttcagtcttgcctatacacccatatgcatttgcaatggcatcaggtataggaagtgcaagtatgaatgctgcttcacttgcttcaatatctcatctgttcccagcaatggctactgatttagaa

SEQ ID NO: 25220 - DNA, 48 bp, unidentified
  source 1..48: mol_type = unassigned DNA; note = methanogen bacteria
ggcgttccaacttctggctttatttcccattacgtttcacaagtcaat

SEQ ID NO: 25221 - DNA, 48 bp, unidentified
  source 1..48: mol_type = unassigned DNA; note = methanogen bacteria
tccctcttcggcagcctgttctcgttttcttcggggatcgagtgtgcc

SEQ ID NO: 25222 - DNA, 30 bp, unidentified
  source 1..30: mol_type = unassigned DNA; note = methanogen bacteria
ctctccggaggcaccgggatcgtggaccgc

SEQ ID NO: 25223 - DNA, 42 bp, unidentified
  source 1..42: mol_type = unassigned DNA; note = methanogen bacteria
gattgggggattccgtgcacggggatcctgggtgaatccacc

SEQ ID NO: 25224 - DNA, 78 bp, unidentified
  source 1..78: mol_type = unassigned DNA; note = methanogen bacteria
tcgggaagcgggaggtcggggacagccatggcggtgaaggagataatcggcgattccctgacagggttctgcagcgag

SEQ ID NO: 25225 - DNA, 123 bp, unidentified
  source 1..123: mol_type = unassigned DNA; note = methanogen bacteria
ttcccggtcaccatgcatctgactgctgcaagcacggcagcagcgcctcaggatctgggcaaggttatgtccgacatgattttggcagtcttcactaatccgatagaattgcttgctacaggc

SEQ ID NO: 25226 - DNA, 33 bp, unidentified
  source 1..33: mol_type = unassigned DNA; note = methanogen bacteria
gtctgccacaccatgggcatatccactcccctg

SEQ ID NO: 25227 - DNA, 33 bp, unidentified
  source 1..33: mol_type = unassigned DNA; note = methanogen bacteria
tgctcacttttcggaataagtcctgacgtgtca

SEQ ID NO: 25228 - DNA, 36 bp, unidentified
  source 1..36: mol_type = unassigned DNA; note = methanogen bacteria
cagttcgaggagggggacgatctcgccgggatattt

SEQ ID NO: 25229 - DNA, 51 bp, unidentified
  source 1..51: mol_type = unassigned DNA; note = methanogen bacteria
gattgggtcttcgggacgttttacggcgaggagatggagccgtattcacag

SEQ ID NO: 25230 - DNA, 66 bp, unidentified
  source 1..66: mol_type = unassigned DNA; note = methanogen bacteria
attggtaatcctagaagtggaattgcggtttacatgtcttatcttatttcacagatgactttaaac

SEQ ID NO: 25231 - DNA, 33 bp, unidentified
  source 1..33: mol_type = unassigned DNA; note = methanogen bacteria
accttcaacaacaacctcggaagcactgacaca

SEQ ID NO: 25232 - DNA, 111 bp, unidentified
  source 1..111: mol_type = unassigned DNA; note = methanogen bacteria
cacttcacgggggattcctgccgtaccgcagtcatatcggatctcggcagcatatccgcgggatggcccgtattcggcctcccctccgtcctcaccgacgcatccgcattg

SEQ ID NO: 25233 - DNA, 30 bp, unidentified
  source 1..30: mol_type = unassigned DNA; note = methanogen bacteria
tcttcatttttcataaaaataacaacagca

SEQ ID NO: 25234 - DNA, 66 bp, unidentified
  source 1..66: mol_type = unassigned DNA; note = methanogen bacteria
attggaaatcctaggagtggaatagccgtatatataacacattttttacaagagtttactttttat

SEQ ID NO: 25235 - DNA, 126 bp, unidentified
  source 1..126: mol_type = unassigned DNA; note = methanogen bacteria
ttccctgtaagcattcacttatccgcagcaagcacagcagtttctccgggaggacttgcggacatattgggcgaaatgcttttgaagattttttccaatccaataaaatcattgtctgaaggggaa

SEQ ID NO: 25236 - DNA, 33 bp, unidentified
  source 1..33: mol_type = unassigned DNA; note = methanogen bacteria
gcctgtcacacgatgggaattccggttcatttt

SEQ ID NO: 25237 - DNA, 36 bp, unidentified
  source 1..36: mol_type = unassigned DNA; note = methanogen bacteria
acctgttcactgttcggcatcagtcaggacatttca

SEQ ID NO: 25238 - DNA, 51 bp, unidentified
  source 1..51: mol_type = unassigned DNA; note = methanogen bacteria
cctacatcagctattgaagtaacacctaactcaataattcactgtgacact

SEQ ID NO: 25239 - DNA, 30 bp, unidentified
  source 1..30: mol_type = unassigned DNA; note = methanogen bacteria
aaagtcgaagaattcgaagttgtcgacggt

SEQ ID NO: 25240 - DNA, 51 bp, unidentified
  source 1..51: mol_type = unassigned DNA; note = methanogen bacteria
ggagacttcatctctgcaaacagtgctagtttaactgttgcaattcctagt

SEQ ID NO: 25241 - DNA, 69 bp, unidentified
  source 1..69: mol_type = unassigned DNA; note = methanogen bacteria
cctactgaagctattcgtgtagttaccaaaactggtatgtcctgccctgctttagtagaaactgattca

SEQ ID NO: 25242 - DNA, 42 bp, unidentified
  source 1..42: mol_type = unassigned DNA; note = methanogen bacteria
ttgaaagttgatcagtatgaagtaactattgatggcgaacct

SEQ ID NO: 25243 - DNA, 39 bp, unidentified
  source 1..39: mol_type = unassigned DNA; note = methanogen bacteria
gaagcatgtccttacgacatgattcacaaaacagataat

SEQ ID NO: 25244 - DNA, 126 bp, unidentified
  source 1..126: mol_type = unassigned DNA; note = methanogen bacteria
ttccctgtgtctattcacctttcaggggtagctaatgccactgcagcaccaactggaattgctgaagtaatgtctgatatgattaagacaatattcaccaatccgattgttttgctctcccaaggt

SEQ ID NO: 25245 - DNA, 36 bp, unidentified
  source 1..36: mol_type = unassigned DNA; note = methanogen bacteria
gtctgtcacactatgggaatttcagtcccattgcct

SEQ ID NO: 25246 - DNA, 33 bp, unidentified
  source 1..33: mol_type = unassigned DNA; note = methanogen bacteria
tgttctctatttggaattgctcaggacatttcc

SEQ ID NO: 25247 - DNA, 30 bp, unidentified
  source 1..30: mol_type = unassigned DNA; note = methanogen bacteria
gtcgccttcacggacgctctcgagtacata

SEQ ID NO: 25248 - DNA, 66 bp, unidentified
  source 1..66: mol_type = unassigned DNA; note = methanogen bacteria
agctgcggcatcatcagcgggatagccgatgccttcggcatggacgaccccagcatcgggtcgctg

SEQ ID NO: 25249 - DNA, 105 bp, unidentified
  source 1..105: mol_type = unassigned DNA; note = methanogen bacteria
gtcttcggcctctccggggaatccaggaccatcggggatctgggggacctgaccggcggctggccggggttgggtatccccgcggtcctgtcggatgcatccgcc

SEQ ID NO: 25250 - DNA, 30 bp, unidentified
  source 1..30: mol_type = unassigned DNA; note = methanogen bacteria
atgatattgcttaaagtctatccaagcacc

SEQ ID NO: 25251 - DNA, 123 bp, unidentified
  source 1..123: mol_type = unassigned DNA; note = methanogen bacteria
tttcctgttaccatacatctttcaggtgcaagcacagctgctgccccgggaggtctcggggaagtcatgtccaatatgattttggaagtattttccaaccctatacacctcttggctgaaggc

SEQ ID NO: 25252 - DNA, 33 bp, unidentified
  source 1..33: mol_type = unassigned DNA; note = methanogen bacteria
gtatgccatactatgggaataactgttcctatt

SEQ ID NO: 25253 - DNA, 33 bp, unidentified
  source 1..33: mol_type = unassigned DNA; note = methanogen bacteria
tgttcattatttggaatcggtgcagatgtgtcc

SEQ ID NO: 25254 - DNA, 39 bp, unidentified
  source 1..39: mol_type = unassigned DNA; note = methanogen bacteria
gcaggaatcatggctgactttcatgtttcttcaactact

SEQ ID NO: 25255 - DNA, 36 bp, unidentified
  source 1..36: mol_type = unassigned DNA; note = methanogen bacteria
ttgtttgttcagactgtcacttctcacaatgcaaca

SEQ ID NO: 25256 - DNA, 78 bp, unidentified
  source 1..78: mol_type = unassigned DNA; note = methanogen bacteria
aagacaaatcattggtgcaataggatctgccgttgcggtggtgttaatgactgtttttgcaggaggggcactagctca

SEQ ID NO: 25257 - DNA, 126 bp, unidentified
  source 1..126: mol_type = unassigned DNA; note = methanogen bacteria
tttccagtgtcaattcacctttcaggggcagctaatgccactgcagcaccgactggaattgctgaggtaatgtctgacatgatcaagacaatattcaccaatccgattgatttgatttctgagggt

SEQ ID NO: 25258 - DNA, 33 bp, unidentified
  source 1..33: mol_type = unassigned DNA; note = methanogen bacteria
gtctgtcacaccattggaatttcagttccactg

SEQ ID NO: 25259 - DNA, 33 bp, unidentified
  source 1..33: mol_type = unassigned DNA; note = methanogen bacteria
tgttcattattcggaatcagtccagacatttcc

SEQ ID NO: 25260 - DNA, 126 bp, unidentified
  source 1..126: mol_type = unassigned DNA; note = methanogen bacteria
tttcctgtaaccgttcacttatcccaagccagcactgcaacagcccctaatgctttaggtgatgttatttcagacatgatattgaacatattctctaatcctattcattcattggttgaggctaat

SEQ ID NO: 25261 - DNA, 33 bp, unidentified
  source 1..33: mol_type = unassigned DNA; note = methanogen bacteria
acatgccatactctcggcatttccgttccactg

SEQ ID NO: 25262 - DNA, 33 bp, unidentified
  source 1..33: mol_type = unassigned DNA; note = methanogen bacteria
tgttcaatgtttggaatcagccaggacatctcc

SEQ ID NO: 25263 - DNA, 126 bp, unidentified
  source 1..126: mol_type = unassigned DNA; note = methanogen bacteria
ttccctgtaacaattcatttaaccactgcaagtacagcgacagctcccggtgcgcttcaggatgtcattatgggaatgattttgaaaatattttcaaatccaatcaaatccttggctgaaggggaa

SEQ ID NO: 25264 - DNA, 33 bp, unidentified
  source 1..33: mol_type = unassigned DNA; note = methanogen bacteria
acttgtcacactataggaatatccgttccattg

SEQ ID NO: 25265 - DNA, 33 bp, unidentified
  source 1..33: mol_type = unassigned DNA; note = methanogen bacteria
tgctcattgtttggaataaatcaggacatatcc

SEQ ID NO: 25266 - DNA, 126 bp, unidentified
  source 1..126: mol_type = unassigned DNA; note = methanogen bacteria
ttccctgtaagcattcatttatcctcagccagcgcagcggtttctcctggaggactaggggatatattaggtggaatgcttttgaagattttttccaatccgataaaatcattgtctgaaggggag

SEQ ID NO: 25267 - DNA, 33 bp, unidentified
  source 1..33: mol_type = unassigned DNA; note = methanogen bacteria
gcatgccatacgatgggaattccggttcatttt

SEQ ID NO: 25268 - DNA, 36 bp, unidentified
  source 1..36: mol_type = unassigned DNA; note = methanogen bacteria
acctgttcacttttcggcatcagtcaggacatttca

SEQ ID NO: 25269 - DNA, 42 bp, unidentified
  source 1..42: mol_type = unassigned DNA; note = methanogen bacteria
atcggtcttgaggatgttttatctgcattggcaatgtcaaat

SEQ ID NO: 25270 - DNA, 30 bp, unidentified
  source 1..30: mol_type = unassigned DNA; note = methanogen bacteria
gcctttggagccaatgtttcacttatttca

SEQ ID NO: 25271 - DNA, 30 bp, unidentified
  source 1..30: mol_type = unassigned DNA; note = methanogen bacteria
tatgcgaatgctggaataacagcttctgtc

SEQ ID NO: 25272 - DNA, 123 bp, unidentified
  source 1..123: mol_type = unassigned DNA; note = methanogen bacteria
tttccagtaactattcatttgtcagggtcaaatactgcaaatgcccctggaaatatagctgacttaatgtctaatatgattttaacatctgtttctaatccaattcaattattgtcagaaggt

SEQ ID NO: 25273 - DNA, 30 bp, unidentified
  source 1..30: mol_type = unassigned DNA; note = methanogen bacteria
tgccatactttaggagtatctctttcatta

SEQ ID NO: 25274 - DNA, 36 bp, unidentified
  source 1..36: mol_type = unassigned DNA; note = methanogen bacteria
gcatcttctttatttggtattagttcagatctttca

SEQ ID NO: 25275 - DNA, 30 bp, unidentified
  source 1..30: mol_type = unassigned DNA; note = methanogen bacteria
atgaccttttttattaaaacatatccaggg

SEQ ID NO: 25276 - DNA, 33 bp, unidentified
  source 1..33: mol_type = unassigned DNA; note = methanogen bacteria
gcaagtatccttttaaataatccaactatactt

SEQ ID NO: 25277 - DNA, 108 bp, unidentified
  source 1..108: mol_type = unassigned DNA; note = methanogen bacteria
atcggctcctaccctatatcattcggcgatgtgtacagcaccctctggcaccatctcaagggagatatcgagaactattcttacgataacgttgtctggaaccagcgc

SEQ ID NO: 25278 - DNA, 78 bp, unidentified
  source 1..78: mol_type = unassigned DNA; note = methanogen bacteria
atgctcaccgccgatcccaactcggcatcttcggtgtacacatggagcgtcgggagcatcgggatgaccacttgggaa

SEQ ID NO: 25279 - DNA, 123 bp, unidentified
  source 1..123: mol_type = unassigned DNA; note = methanogen bacteria
ttcccggttacaattcacctttctgatgcaagcactgctgctgcacctggcggccttggtgaagtgatgtctaatatgattttgggtattttctccaatccgatcggattgatttcggaaggt

SEQ ID NO: 25280 - DNA, 36 bp, unidentified
  source 1..36: mol_type = unassigned DNA; note = methanogen bacteria
gtttgtcataccatgggaatatccgttcctttacct

SEQ ID NO: 25281 - DNA, 33 bp, unidentified
  source 1..33: mol_type = unassigned DNA; note = methanogen bacteria
tgttcactatttggtattccagctgatgtatct

SEQ ID NO: 25282 - DNA, 66 bp, unidentified
  source 1..66: mol_type = unassigned DNA; note = methanogen bacteria
ataaacaatccccgtagtgcaatcagtgtatatgttaatgatttaatacagaatattacattaaac

SEQ ID NO: 25283 - DNA, 30 bp, unidentified
  source 1..30: mol_type = unassigned DNA; note = methanogen bacteria
atgacctatttcttggatttgtttcctgga

SEQ ID NO: 25284 - DNA, 36 bp, unidentified
  source 1..36: mol_type = unassigned DNA; note = methanogen bacteria
tgcgaatctactttacttacaaacccaactttatta

SEQ ID NO: 25285 - DNA, 195 bp, unidentified
  source 1..195: mol_type = unassigned DNA; note = methanogen bacteria
ttggagcgcagtgaactgaaaggaaatacaattaatgcagaaacaaaagaaatacctaaaggggaaatatatgaattgcttgttttaatgccattggatgattttaagaatgcaacatatgcaaaacatgtaaatgaaaacggtaaagacaagattatcaaaaatctaaatgacagcattggcggaagaaatttt

SEQ ID NO: 25286 - DNA, 36 bp, unidentified
  source 1..36: mol_type = unassigned DNA; note = methanogen bacteria
actcaacttcaggccgacctgcatttctcagccgaa

SEQ ID NO: 25287 - DNA, 36 bp, unidentified
  source 1..36: mol_type = unassigned DNA; note = methanogen bacteria
acctacctcgagcaggaaagaggtcttgcattatta

SEQ ID NO: 25288 - DNA, 126 bp, unidentified
  source 1..126: mol_type = unassigned DNA; note = methanogen bacteria
tttccggtcggaatgcaccttactgctgcaagtaatgtatcagcaccaagtggccttgaagaaattctaacaaacatactgacaacaatcttttcaaatccaataaagtcattaaccgaaggggaa

SEQ ID NO: 25289 - DNA, 30 bp, unidentified
  source 1..30: mol_type = unassigned DNA; note = methanogen bacteria
tgcaatacactgggaatacacatatcacta

SEQ ID NO: 25290 - DNA, 33 bp, unidentified
  source 1..33: mol_type = unassigned DNA; note = methanogen bacteria
tgctcaatgttcggtatcggtaatgacattgca

SEQ ID NO: 25291 - DNA, 72 bp, unidentified
  source 1..72: mol_type = unassigned DNA; note = methanogen bacteria
gctgttgatgtatcctctctggtttctctttcaaatttatctggtatgacgggaaatacatcggatcttaac

SEQ ID NO: 25292 - DNA, 54 bp, unidentified
  source 1..54: mol_type = unassigned DNA; note = methanogen bacteria
gcaggcattggagcaaacataagcattgcacaggcaatactgattgcaggattg

SEQ ID NO: 25293 - DNA, 36 bp, unidentified
  source 1..36: mol_type = unassigned DNA; note = methanogen bacteria
cttaagcagcttgctcctgatgctccatcagtgtca

SEQ ID NO: 25294 - DNA, 45 bp, unidentified
  source 1..45: mol_type = unassigned DNA; note = methanogen bacteria
ttcggctctgatgccccaattgtgaaaacattcaacatgcatttc

SEQ ID NO: 25295 - DNA, 66 bp, unidentified
  source 1..66: mol_type = unassigned DNA; note = methanogen bacteria
actacaggattgtccagctggatgggtgcgggcataagcaatttaatgggatctaatcctccagag

SEQ ID NO: 25296 - DNA, 33 bp, unidentified
  source 1..33: mol_type = unassigned DNA; note = methanogen bacteria
actactgctatgtcaatgggattcagccctatt

SEQ ID NO: 25297 - DNA, 36 bp, unidentified
  source 1..36: mol_type = unassigned DNA; note = methanogen bacteria
atgacatttttccttgaagcatttcccggactgttg

SEQ ID NO: 25298 - DNA, 39 bp, unidentified
  source 1..39: mol_type = unassigned DNA; note = methanogen bacteria
agttcagttgagacattgcttaccaatccaagcttgctt

SEQ ID NO: 25299 - DNA, 33 bp, unidentified
  source 1..33: mol_type = unassigned DNA; note = methanogen bacteria
attttcggagtggtcggcgttggatttgataaa

SEQ ID NO: 25300 - DNA, 36 bp, unidentified
  source 1..36: mol_type = unassigned DNA; note = methanogen bacteria
acacagcttcaatccagcctgcacttttccgcagaa

SEQ ID NO: 25301 - DNA, 39 bp, unidentified
  source 1..39: mol_type = unassigned DNA; note = methanogen bacteria
acttatcttgaacaggaacgaggattggcattgctcggt

SEQ ID NO: 25302 - DNA, 36 bp, unidentified
  source 1..36: mol_type = unassigned DNA; note = methanogen bacteria
tccgaaattcaagctagtttaaatataactacagaa

SEQ ID NO: 25303 - DNA, 36 bp, unidentified
  source 1..36: mol_type = unassigned DNA; note = methanogen bacteria
acatatcttacaaaagaaagaggtctgacaatggtt

SEQ ID NO: 25304 - DNA, 126 bp, unidentified
  source 1..126: mol_type = unassigned DNA; note = methanogen bacteria
tatcctgtaagcattcatctcaacgctgccggcaatgtcaccgctccgggaggaatcggagacgttgtgggcgatatgattttaaagatattttcaaatccccttaactcattaatggaaggagaa

SEQ ID NO: 25305 - DNA, 30 bp, unidentified
  source 1..30: mol_type = unassigned DNA; note = methanogen bacteria
tcccaaagcggattaagtatcttttcacaa

SEQ ID NO: 25306 - DNA, 33 bp, unidentified
  source 1..33: mol_type = unassigned DNA; note = methanogen bacteria
acatgtcataccattggaatttcagtatcaatt

SEQ ID NO: 25307 - DNA, 36 bp, unidentified
  source 1..36: mol_type = unassigned DNA; note = methanogen bacteria
acctgttcactctttggaatcagtcaggatatttcc

SEQ ID NO: 25308 - DNA, 36 bp, unidentified
  source 1..36: mol_type = unassigned DNA; note = methanogen bacteria
tcccagcttcagtccagcctgcacttttcggcagat

SEQ ID NO: 25309 - DNA, 36 bp, unidentified
  source 1..36: mol_type = unassigned DNA; note = methanogen bacteria
acctatctcgaacaggaaaggggcatggcactgctg

SEQ ID NO: 25310 - DNA, 45 bp, unidentified
  source 1..45: mol_type = unassigned DNA; note = methanogen bacteria
ccggccctgccggtgatggtggacgagctgggcaccaccgaggcg

SEQ ID NO: 25311 - DNA, 33 bp, unidentified
  source 1..33: mol_type = unassigned DNA; note = methanogen bacteria
tacatctacgaggacatgttcgggatgagcgag

SEQ ID NO: 25312 - DNA, 57 bp, unidentified
  source 1..57: mol_type = unassigned DNA; note = methanogen bacteria
tcggtgccttattcgtcagccgattcggccgtgacagaggcggattccggcaacatc

SEQ ID NO: 25313 - DNA, 108 bp, unidentified
  source 1..108: mol_type = unassigned DNA; note = methanogen bacteria
tcgctggcgttcagcggcgacatattcggtatcatcgggaacctggacaaggccctgtcggagaacatcgaatacaatgtgatccccgacgggagtaccgttcccgag

SEQ ID NO: 25314 - DNA, 51 bp, unidentified
  source 1..51: mol_type = unassigned DNA; note = methanogen bacteria
gtctggggaggcggactgttcgaccagtatctgaccgtcctcgatttcgcg

SEQ ID NO: 25315 - DNA, 30 bp, unidentified
  source 1..30: mol_type = unassigned DNA; note = methanogen bacteria
ggttccggactggcggcggacggtatcgcc

SEQ ID NO: 25316 - DNA, 45 bp, unidentified
  source 1..45: mol_type = unassigned DNA; note = methanogen bacteria
cccgccctggcggacatggtcgacgaactggataccaccgaatcg

SEQ ID NO: 25317 - DNA, 33 bp, unidentified
  source 1..33: mol_type = unassigned DNA; note = methanogen bacteria
tacatctacgaggggaccttcggtttcggagct

SEQ ID NO: 25318 - DNA, 33 bp, unidentified
  source 1..33: mol_type = unassigned DNA; note = methanogen bacteria
accgagtatgcaacttccatgggaacaagcgct

SEQ ID NO: 25319 - DNA, 30 bp, unidentified
  source 1..30: mol_type = unassigned DNA; note = methanogen bacteria
ttgtatgctgttgaagttgacttggtaggt

SEQ ID NO: 25320 - DNA, 36 bp, unidentified
  source 1..36: mol_type = unassigned DNA; note = methanogen bacteria
tcacaacttcaatccagtttacatttttctgcagga

SEQ ID NO: 25321 - DNA, 39 bp, unidentified
  source 1..39: mol_type = unassigned DNA; note = methanogen bacteria
acttatcttgaacaggaaagaggtttagcattacttagt

SEQ ID NO: 25322 - DNA, 123 bp, unidentified
  source 1..123: mol_type = unassigned DNA; note = methanogen bacteria
tggcccgccaccgtgaccttcgtctccgtatacgcaccgttctacagcgacgaggcctacgagatcgtcgagatgatcgtctccaagctgatctgcaaccccgtggacgccttcgccggggcc

SEQ ID NO: 25323 - DNA, 30 bp, unidentified
  source 1..30: mol_type = unassigned DNA; note = methanogen bacteria
tccgagaacgggctggacatcttcaccgag

SEQ ID NO: 25324 - DNA, 30 bp, unidentified
  source 1..30: mol_type = unassigned DNA; note = methanogen bacteria
gccaacaccctcggcatcagcatccccctc

SEQ ID NO: 25325 - DNA, 36 bp, unidentified
  source 1..36: mol_type = unassigned DNA; note = methanogen bacteria
gcctgctccatgctgggggtccccggggacgcggcc

SEQ ID NO: 25326 - DNA, 36 bp, unidentified
  source 1..36: mol_type = unassigned DNA; note = methanogen bacteria
tcacaccttcaggcaagcctgcatttttctgcagaa

SEQ ID NO: 25327 - DNA, 36 bp, unidentified
  source 1..36: mol_type = unassigned DNA; note = methanogen bacteria
acataccttgaacaggaacggggtttggcattgctc

SEQ ID NO: 25328 - DNA, 33 bp, unidentified
  source 1..33: mol_type = unassigned DNA; note = methanogen bacteria
tcagacaaaattctgaattatacaacaccaata

SEQ ID NO: 25329 - DNA, 66 bp, unidentified
  source 1..66: mol_type = unassigned DNA; note = methanogen bacteria
ataaacaatccccgaagtgccattagtgtttatatcagtaatattttacctaatattgaatttatg

SEQ ID NO: 25330 - DNA, 39 bp, unidentified
  source 1..39: mol_type = unassigned DNA; note = methanogen bacteria
atatcggaaattcagagtagtttgaatattaatgcagaa

SEQ ID NO: 25331 - DNA, 36 bp, unidentified
  source 1..36: mol_type = unassigned DNA; note = methanogen bacteria
acctaccttgcaaaggagaggggtttggcccttata

SEQ ID NO: 25332 - DNA, 297 bp, unidentified
  source 1..297: mol_type = unassigned DNA; note = methanogen bacteria
atgattgcatcaggagaatacaaaggaaccaataatactgaattaactattgataaaaatttaactatcatgaaatatggtgacggcgaagcaatattcgatgcagaaagccaaagaagaatttggactgttcaagccacatccataaacataaccggtttaacatttaaaaatggaaaaacatcaggaaatggtggtgcaatttactttaaaaattcacttactaattccaatataaatgctacatttattaataacaacgcaaatgacaatggtggtgctgtccgtattaatggt

SEQ ID NO: 25333 - DNA, 54 bp, unidentified
  source 1..54: mol_type = unassigned DNA; note = methanogen bacteria
ataagcggtacttttattaataacacagcaaatcatgctggtgctgtcgattgt

SEQ ID NO: 25334 - DNA, 126 bp, unidentified
  source 1..126: mol_type = unassigned DNA; note = methanogen bacteria
tttattaataacacagcacgttcttatggtggtgctatcgatttttatcatctttctggtaatataagcggtacttttattaataacagcgcgataaataatgttggtggtgccatctatatttac

SEQ ID NO: 25335 - DNA, 39 bp, unidentified
  source 1..39: mol_type = unassigned DNA; note = methanogen bacteria
gtatccgaaattcaggccagtttaaatataaatgcagaa

SEQ ID NO: 25336 - DNA, 36 bp, unidentified
  source 1..36: mol_type = unassigned DNA; note = methanogen bacteria
acctatcttacaaatgaaagaggcttgacaatggtt

SEQ ID NO: 25337 - DNA, 42 bp, unidentified
  source 1..42: mol_type = unassigned DNA; note = methanogen bacteria
cctacatcagctattgatgtaacacctaatgctattattcac

SEQ ID NO: 25338 - DNA, 36 bp, unidentified
  source 1..36: mol_type = unassigned DNA; note = methanogen bacteria
gatttcatcgctgcaaacagtgctagtttaactgtt

SEQ ID NO: 25339 - DNA, 78 bp, unidentified
  source 1..78: mol_type = unassigned DNA; note = methanogen bacteria
ggtacttgccctacatcagctattgaggtaacacctaactctattattcactgtgatacttgtggtgaagaaccaaaa

SEQ ID NO: 25340 - DNA, 51 bp, unidentified
  source 1..51: mol_type = unassigned DNA; note = methanogen bacteria
ccacaaggtgcattaaaagttgaagattatgaagttactgaaggagtaact

SEQ ID NO: 25341 - DNA, 42 bp, unidentified
  source 1..42: mol_type = unassigned DNA; note = methanogen bacteria
ccacaagaaacaattaaagttactggtgaaaaattaaaagaa

SEQ ID NO: 25342 - DNA, 57 bp, unidentified
  source 1..57: mol_type = unassigned DNA; note = methanogen bacteria
cctgttgatgtaattggaattcctggtgtaaaagaacctgtagaatgtgatttagat

SEQ ID NO: 25343 - DNA, 48 bp, unidentified
  source 1..48: mol_type = unassigned DNA; note = methanogen bacteria
cctgtaagtgcaatcactcttgaagaagttggaagtcctgttactgta

SEQ ID NO: 25344 - DNA, 45 bp, unidentified
  source 1..45: mol_type = unassigned DNA; note = methanogen bacteria
ttcattgctgaaaaaataccagtcaaacgttccaaagaaatcaaa

SEQ ID NO: 25345 - DNA, 66 bp, unidentified
  source 1..66: mol_type = unassigned DNA; note = methanogen bacteria
gaagcatgtcctggtgatttcattgctgctaacagtgctagcttaacagtagcaattcctagcgta

SEQ ID NO: 25346 - DNA, 48 bp, unidentified
  source 1..48: mol_type = unassigned DNA; note = methanogen bacteria
gcattagaaattgatgtagaatggggtgaaggtgcacctgttgatgca

SEQ ID NO: 25347 - DNA, 87 bp, unidentified
  source 1..87: mol_type = unassigned DNA; note = methanogen bacteria
aacaaatgtcctactgaagctatccgtgtagttaccaaaactggtatgtcctgcccagctttagtagaaactgatgctgaaccatct

SEQ ID NO: 25348 - DNA, 72 bp, unidentified
  source 1..72: mol_type = unassigned DNA; note = methanogen bacteria
tcagtttgttctaacgatgcattaaaagttgaacaatacgaagtaactattgatggtgaacctgtaaccaga

SEQ ID NO: 25349 - DNA, 87 bp, unidentified
  source 1..87: mol_type = unassigned DNA; note = methanogen bacteria
tcattcaacccatctaaatgtgaccaatgtggtgactgtatcgacgcatgtccatacgatatgcttcataaaacagataatcctaaa

SEQ ID NO: 25350 - DNA, 75 bp, unidentified
  source 1..75: mol_type = unassigned DNA; note = methanogen bacteria
ggaacttgtcctacatccgctattgatgtaacaccagaagctattattcactgtgacacttgtggcggcgagcct

SEQ ID NO: 25351 - DNA, 36 bp, unidentified
  source 1..36: mol_type = unassigned DNA; note = methanogen bacteria
ttaaaagtagaagaatatgaaattgcggatggaatt

SEQ ID NO: 25352 - DNA, 30 bp, unidentified
  source 1..30: mol_type = unassigned DNA; note = methanogen bacteria
actattaaagttactggtgctaaattaaaa

SEQ ID NO: 25353 - DNA, 42 bp, unidentified
  source 1..42: mol_type = unassigned DNA; note = methanogen bacteria
gtaaatgcaattactcttgaagaagtaggaagccctattact

SEQ ID NO: 25354 - DNA, 39 bp, unidentified
  source 1..39: mol_type = unassigned DNA; note = methanogen bacteria
tacatttcagaaaaagtaccaatcaaacgttcaaaagaa

SEQ ID NO: 25355 - DNA, 60 bp, unidentified
  source 1..60: mol_type = unassigned DNA; note = methanogen bacteria
gcatgtcctggagacttcattgctgctaatagcgcaagtttaactgttgcaattcctagc

SEQ ID NO: 25356 - DNA, 75 bp, unidentified
  source 1..75: mol_type = unassigned DNA; note = methanogen bacteria
cctactgaagcaattcgtgtagttaccaaaactggtatgtcctgccctgctttagtagaaactgatgcagaacca

SEQ ID NO: 25357 - DNA, 54 bp, unidentified
  source 1..54: mol_type = unassigned DNA; note = methanogen bacteria
tctaacgacgcattaaaagtagaacaatatgaagtaactatcggtgacgaagct

SEQ ID NO: 25358 - DNA, 63 bp, unidentified
  source 1..63: mol_type = unassigned DNA; note = methanogen bacteria
gaccaatgtggtgactgtatcgaagcttgtccatatgatatgcttcacaaaacagataatcct

SEQ ID NO: 25359 - DNA, 180 bp, unidentified
  source 1..180: mol_type = unassigned DNA; note = methanogen bacteria
actatctttgcaaatattttcttcagctcaagtaacattgtccttggaaacggcatggatttaaatcagacattagttgttttaactcataaattgcctgtagaactgcaaggatttgtaaatccttatctttcttccatttctggcagtttagagaatgttgtctcttatgtattgcac

SEQ ID NO: 25360 - DNA, 123 bp, unidentified
  source 1..123: mol_type = unassigned DNA; note = methanogen bacteria
tggccatcaaccgttactttcgttacgccgctggattcttccgatatagatgatgcctataaactggtggaatcattggtcgctaaactgatctgcaatccagtggatgcgtttgcagagacc

SEQ ID NO: 25361 - DNA, 30 bp, unidentified
  source 1..30: mol_type = unassigned DNA; note = methanogen bacteria
gcatataccctgggaatcggcataccgctc

SEQ ID NO: 25362 - DNA, 33 bp, unidentified
  source 1..33: mol_type = unassigned DNA; note = methanogen bacteria
tgttcgttgttaggcatctctggcgatattgca

SEQ ID NO: 25363 - DNA, 48 bp, unidentified
  source 1..48: mol_type = unassigned DNA; note = methanogen bacteria
acttgccctacatcagctattgaagtaacaccaaatgctattatccac

SEQ ID NO: 25364 - DNA, 30 bp, unidentified
  source 1..30: mol_type = unassigned DNA; note = methanogen bacteria
ttaaaagttgaagattacgaaatcactgat

SEQ ID NO: 25365 - DNA, 51 bp, unidentified
  source 1..51: mol_type = unassigned DNA; note = methanogen bacteria
ggagactttatttctgcaaacagtgctagtttaactgttgctattcctagt

SEQ ID NO: 25366 - DNA, 30 bp, unidentified
  source 1..30: mol_type = unassigned DNA; note = methanogen bacteria
attcgcgtagttaccaaaactggtatgtta

SEQ ID NO: 25367 - DNA, 45 bp, unidentified
  source 1..45: mol_type = unassigned DNA; note = methanogen bacteria
acctgtcctacatcagctattaatgtaacacctgaatctattatt

SEQ ID NO: 25368 - DNA, 51 bp, unidentified
  source 1..51: mol_type = unassigned DNA; note = methanogen bacteria
ggtgatttcatttctgcaaacagttccagtttaactgttgctattcctagt

SEQ ID NO: 25369 - DNA, 123 bp, unidentified
  source 1..123: mol_type = unassigned DNA; note = methanogen bacteria
gcatcgattgtgttaaatcaaaatgttgttttaaatgcatttagcgtagtttcagtcagatcctctgttcaaggagtttcaaggtttgatgcactatttaaaaatatactaatttataataat

SEQ ID NO: 25370 - DNA, 30 bp, unidentified
  source 1..30: mol_type = unassigned DNA; note = methanogen bacteria
agtaatcattcatatattcattattggatg

SEQ ID NO: 25371 - DNA, 60 bp, unidentified
  source 1..60: mol_type = unassigned DNA; note = methanogen bacteria
ggtgcatgcccaacctcagctattgatgtaacacctagcactatcattcactgtgacact

SEQ ID NO: 25372 - DNA, 39 bp, unidentified
  source 1..39: mol_type = unassigned DNA; note = methanogen bacteria
aacgcaatcactcttgaagaagttggaagccctattacc

SEQ ID NO: 25373 - DNA, 66 bp, unidentified
  source 1..66: mol_type = unassigned DNA; note = methanogen bacteria
gaagcatgtcctggagacttcattgctgctaacagtgcaagcttaaccgttgcaattcctagcgtt

SEQ ID NO: 25374 - DNA, 36 bp, unidentified
  source 1..36: mol_type = unassigned DNA; note = methanogen bacteria
cctactgaagctatccgtgtagttaccaaaaccggt

SEQ ID NO: 25375 - DNA, 39 bp, unidentified
  source 1..39: mol_type = unassigned DNA; note = methanogen bacteria
gaagcatgtccatacgatatgctccacaagtcagaaaat

SEQ ID NO: 25376 - DNA, 75 bp, unidentified
  source 1..75: mol_type = unassigned DNA; note = methanogen bacteria
ggtacttgccctacctcagctattgatgtaacacctaatgctattattcactgtgacacttgtggtgaagaacca

SEQ ID NO: 25377 - DNA, 36 bp, unidentified
  source 1..36: mol_type = unassigned DNA; note = methanogen bacteria
caagaaactcttaaagtcactggtgaaaaattaaaa

SEQ ID NO: 25378 - DNA, 36 bp, unidentified
  source 1..36: mol_type = unassigned DNA; note = methanogen bacteria
atcggtattccaggtgtagttgaacctgcagaatac

SEQ ID NO: 25379 - DNA, 42 bp, unidentified
  source 1..42: mol_type = unassigned DNA; note = methanogen bacteria
gtaaacgcaattactcttgatgaagtaggaagccctattact

SEQ ID NO: 25380 - DNA, 57 bp, unidentified
  source 1..57: mol_type = unassigned DNA; note = methanogen bacteria
cctggagacttcatttcagcaaacagtgctactttaacagttgctattcctagtgtc

SEQ ID NO: 25381 - DNA, 57 bp, unidentified
  source 1..57: mol_type = unassigned DNA; note = methanogen bacteria
aaatgtcctacagaagcaattcgcgtagttaccaaaactggtatgttatgccctgct

SEQ ID NO: 25382 - DNA, 57 bp, unidentified
  source 1..57: mol_type = unassigned DNA; note = methanogen bacteria
tcaatgtgttccaacgacgctttaaaagtagaacaatatgagttaacaattgatggc

SEQ ID NO: 25383 - DNA, 63 bp, unidentified
  source 1..63: mol_type = unassigned DNA; note = methanogen bacteria
gaccaatgtggtgactgtatcgaagcatgtccatacgatatgctccacaaatcagacaatcct

SEQ ID NO: 25384 - DNA, 51 bp, unidentified
  source 1..51: mol_type = unassigned DNA; note = methanogen bacteria
ggtacttgtcctacctcagctattgatgtaacacctaacgctattattcac

SEQ ID NO: 25385 - DNA, 51 bp, unidentified
  source 1..51: mol_type = unassigned DNA; note = methanogen bacteria
ggagactttatttctgctaacagtgcaagtttaactgttgcaattcctagt

SEQ ID NO: 25386 - DNA, 30 bp, unidentified
  source 1..30: mol_type = unassigned DNA; note = methanogen bacteria
cctaccgaagctattcgtgtagtttctaaa

SEQ ID NO: 25387 - DNA, 30 bp, unidentified
  source 1..30: mol_type = unassigned DNA; note = methanogen bacteria
ctaaaagttgaaaaatacgaattaactatt

SEQ ID NO: 25388 - DNA, 60 bp, unidentified
  source 1..60: mol_type = unassigned DNA; note = methanogen bacteria
ggtacttgccctacatcagctattgaggtaacacctaatgctattattcactgtgacact

SEQ ID NO: 25389 - DNA, 36 bp, unidentified
  source 1..36: mol_type = unassigned DNA; note = methanogen bacteria
ttaaaagtagaacaatacgaaattgctgatggtatt

SEQ ID NO: 25390 - DNA, 39 bp, unidentified
  source 1..39: mol_type = unassigned DNA; note = methanogen bacteria
agcgcaattactcttgaagaagttggaagcccagttact

SEQ ID NO: 25391 - DNA, 51 bp, unidentified
  source 1..51: mol_type = unassigned DNA; note = methanogen bacteria
ggagactttattgctgcaaacggtgctagtttaaccgttgcaatccctagt

SEQ ID NO: 25392 - DNA, 69 bp, unidentified
  source 1..69: mol_type = unassigned DNA; note = methanogen bacteria
cctactgaagctattcgtgtagttaccaaaactggtatgtcctgccctgctttagtagaaactgatgct

SEQ ID NO: 25393 - DNA, 57 bp, unidentified
  source 1..57: mol_type = unassigned DNA; note = methanogen bacteria
tccaacgatgcattaaaagttgaacaatacgaaattactatcgatggcgaaccggta

SEQ ID NO: 25394 - DNA, 33 bp, unidentified
  source 1..33: mol_type = unassigned DNA; note = methanogen bacteria
atcgaagcatgtccatatgacatgattcacaaa

SEQ ID NO: 25395 - DNA, 45 bp, unidentified
  source 1..45: mol_type = unassigned DNA; note = methanogen bacteria
attcacttcttctgggaatacatacctgaagcaataaatttcaat

SEQ ID NO: 25396 - DNA, 54 bp, unidentified
  source 1..54: mol_type = unassigned DNA; note = methanogen bacteria
actaacactcaaacaggattacattcaattggaacaaccactttaacgaatttg

SEQ ID NO: 25397 - DNA, 66 bp, unidentified
  source 1..66: mol_type = unassigned DNA; note = methanogen bacteria
ccattaaccatgttttcaggagaagaacagatatatctcctgatagataatggtgcacagatagga

SEQ ID NO: 25398 - DNA, 51 bp, unidentified
  source 1..51: mol_type = unassigned DNA; note = methanogen bacteria
ggtacttgccctacatcagctattgaggtaacacctgaatctattattcac

SEQ ID NO: 25399 - DNA, 36 bp, unidentified
  source 1..36: mol_type = unassigned DNA; note = methanogen bacteria
aacgcaattactcttgaagaagttggaagtcctgtt

SEQ ID NO: 25400 - DNA, 54 bp, unidentified
  source 1..54: mol_type = unassigned DNA; note = methanogen bacteria
cctggtgatttcattgctgctaacagtgctagtttaactgttgcaatccctagc

SEQ ID NO: 25401 - DNA, 57 bp, unidentified
  source 1..57: mol_type = unassigned DNA; note = methanogen bacteria
cctactcaagcaattcgtgtagttaccaaaactggtatgtcatgccctgctttagta

SEQ ID NO: 25402 - DNA, 69 bp, unidentified
  source 1..69: mol_type = unassigned DNA; note = methanogen bacteria
tccatgtgttctaacgatgcattgaaagtagaacaatatgaaataactattgatggcgaacctgttgct

SEQ ID NO: 25403 - DNA, 48 bp, unidentified
  source 1..48: mol_type = unassigned DNA; note = methanogen bacteria
gactgtatcgaagcatgtccatacgatatgctccacgaaacagacaat

SEQ ID NO: 25404 - DNA, 39 bp, unidentified
  source 1..39: mol_type = unassigned DNA; note = methanogen bacteria
ggatttgtaagaggtgcaagtggtattggtacaatatct

SEQ ID NO: 25405 - DNA, 90 bp, unidentified
  source 1..90: mol_type = unassigned DNA; note = methanogen bacteria
gaagacggtttttcaatgctttctcaagcagtggcaggtgttattctgaattactacttgacatcattcatatgtgatgctgttattgga

SEQ ID NO: 25406 - DNA, 111 bp, unidentified
  source 1..111: mol_type = unassigned DNA; note = methanogen bacteria
agcttcccattgggtgttaaatatggttctgctgagagtatccttggtatggttggcagttttatagcaccaatttttgctccattaggattcggaacatggcaggcggct

SEQ ID NO: 25407 - DNA, 78 bp, unidentified
  source 1..78: mol_type = unassigned DNA; note = methanogen bacteria
ggtactcttgggggtgtggatgcagatgataaaagtggtgtaactcatttgatacaagatgctttcactccattgtcc

SEQ ID NO: 25408 - DNA, 33 bp, unidentified
  source 1..33: mol_type = unassigned DNA; note = methanogen bacteria
tatcatttacaatatattagaggttgggatgtg

SEQ ID NO: 25409 - DNA, 54 bp, unidentified
  source 1..54: mol_type = unassigned DNA; note = methanogen bacteria
tttatgggtaatgtagagattattccaaaatattatggacttttagctctctct

SEQ ID NO: 25410 - DNA, 48 bp, unidentified
  source 1..48: mol_type = unassigned DNA; note = methanogen bacteria
ggtgaaatgcaggtctatttgatatctcatatcgaacttcccataaca

SEQ ID NO: 25411 - DNA, 33 bp, unidentified
  source 1..33: mol_type = unassigned DNA; note = methanogen bacteria
acagagtatgccacatctatgggaacaagcgca

SEQ ID NO: 25412 - DNA, 33 bp, unidentified
  source 1..33: mol_type = unassigned DNA; note = methanogen bacteria
ctttatgccgttgagactgatttggtaagtgca

SEQ ID NO: 25413 - DNA, 42 bp, unidentified
  source 1..42: mol_type = unassigned DNA; note = methanogen bacteria
ttatattcaaattatcaaagtattttggcaattacaaaggcg

SEQ ID NO: 25414 - DNA, 36 bp, unidentified
  source 1..36: mol_type = unassigned DNA; note = methanogen bacteria
tcaacaattgcacttgatcagttcggtgttaaaaat

SEQ ID NO: 25415 - DNA, 36 bp, unidentified
  source 1..36: mol_type = unassigned DNA; note = methanogen bacteria
ggttttgcaagaggtgctagtggtattggtactatt

SEQ ID NO: 25416 - DNA, 45 bp, unidentified
  source 1..45: mol_type = unassigned DNA; note = methanogen bacteria
aatatgcaggtttatttgatatcttatgttaatctttctttgacc

SEQ ID NO: 25417 - DNA, 39 bp, unidentified
  source 1..39: mol_type = unassigned DNA; note = methanogen bacteria
aacgaactcgtgaacaccgatttcgaggtcaacgccatc

SEQ ID NO: 25418 - DNA, 42 bp, unidentified
  source 1..42: mol_type = unassigned DNA; note = methanogen bacteria
aacgcatttataaatattaaaaatcttgaagcatacctgccg

SEQ ID NO: 25419 - DNA, 111 bp, unidentified
  source 1..111: mol_type = unassigned DNA; note = methanogen bacteria
atcggctcctaccctatatcattcggcgatgtgtacagcaccctctggcaccatctcaagggagatatcgagaactattcttacgataacgttgtctggaaccagcgcatg

SEQ ID NO: 25420 - DNA, 81 bp, unidentified
  source 1..81: mol_type = unassigned DNA; note = methanogen bacteria
atgatgctcaccgccgatcccaactcggcatcttcggtgtacacatggagcgtcgggagcatcgggatgaccacttgggaa

SEQ ID NO: 25421 - DNA, 39 bp, unidentified
  source 1..39: mol_type = unassigned DNA; note = methanogen bacteria
ggattttcaagaggttatactggtattggtatgctttct

SEQ ID NO: 25422 - DNA, 36 bp, unidentified
  source 1..36: mol_type = unassigned DNA; note = methanogen bacteria
taccttacagaaaaaacaggatctgcgatggtcttg

SEQ ID NO: 25423 - DNA, 33 bp, unidentified
  source 1..33: mol_type = unassigned DNA; note = methanogen bacteria
ttaatcactatggaatattttaatggtacaccg

SEQ ID NO: 25424 - DNA, 42 bp, unidentified
  source 1..42: mol_type = unassigned DNA; note = methanogen bacteria
gttggattccaaagaggaagcagcggtatcggtacaatcgca

SEQ ID NO: 25425 - DNA, 42 bp, unidentified
  source 1..42: mol_type = unassigned DNA; note = methanogen bacteria
gtaggatttgctagaggaagcagtggtatcggtacaattgct

SEQ ID NO: 25426 - DNA, 42 bp, unidentified
  source 1..42: mol_type = unassigned DNA; note = methanogen bacteria
gttggatttgtaagaggaagtagtggtattggtacaatcgca

SEQ ID NO: 25427 - DNA, 42 bp, unidentified
  source 1..42: mol_type = unassigned DNA; note = methanogen bacteria
gttggatttgcaagaggaagtagtggtatcggtaccatcgca

SEQ ID NO: 25428 - DNA, 75 bp, unidentified
  source 1..75: mol_type = unassigned DNA; note = methanogen bacteria
gaacctggacagaaagaattatcattagaaaaaacaactaaactgaatgaacttcatgaattatatacaggagcg

SEQ ID NO: 25429 - DNA, 189 bp, unidentified
  source 1..189: mol_type = unassigned DNA; note = methanogen bacteria
gcatcacccaatgaaatggctctagaaaataagattgaaaatggaaaaagcaattcagaagttgagatgatagatattattaatccagccacaaaagattggaaatcgtatcatcaaaaatctataaaatccaacatagataaatataatcgaacaatggcagtttattcaaatgaaagtaaaaacgtg

SEQ ID NO: 25430 - DNA, 66 bp, unidentified
  source 1..66: mol_type = unassigned DNA; note = methanogen bacteria
tcacaaaatgaagcaataaaaatcgtcaatgataatgatgcaagaattttatcaaaaatcaaattt

SEQ ID NO: 25431 - DNA, 30 bp, unidentified
  source 1..30: mol_type = unassigned DNA; note = methanogen bacteria
ccagtattggtttcaaggcttcaagcagga

SEQ ID NO: 25432 - DNA, 84 bp, unidentified
  source 1..84: mol_type = unassigned DNA; note = methanogen bacteria
attgtagatatatattcaaacttgaacgaaagtggcgaaaattttagctcaaacaatacaaatccagacatcagcggatgtact

SEQ ID NO: 25433 - DNA, 240 bp, unidentified
  source 1..240: mol_type = unassigned DNA; note = methanogen bacteria
ataatgagatacgaagaaaacggagaagtggattccgaatattcaaaatcaaaaatgaatgtccacggaaatgtcacaaatccacaggaaaattccaaaaaattttcttcaaatgtattggaaatgataaaaggcagcataatgaacggatatgacgaaaaagaaacatttgaaatgttaaaaaattatggagtaaaactatcaaactatgaaaggcaaataaacttgggcgatttagat

SEQ ID NO: 25434 - DNA, 120 bp, unidentified
  source 1..120: mol_type = unassigned DNA; note = methanogen bacteria
gaaacacctcaagacaaagtgaacttcatactaaacaatatggacaacatcgtattaactattcctacaacaaacgcacctgattggatggtgaatgaaataagttcaacatatgaaaat

SEQ ID NO: 25435 - DNA, 42 bp, unidentified
  source 1..42: mol_type = unassigned DNA; note = methanogen bacteria
gttggatttgcaagaggaagcagtggtatcggtaccatcgca

SEQ ID NO: 25436 - DNA, 36 bp, unidentified
  source 1..36: mol_type = unassigned DNA; note = methanogen bacteria
gtggtagcagaatcgttactaaatacaggtgacact

SEQ ID NO: 25437 - DNA, 105 bp, unidentified
  source 1..105: mol_type = unassigned DNA; note = methanogen bacteria
caatttacatttggagcaacaattggtggattcataggagcaccaacgaactttttcctatctggaatttcactagaaatgattcatccagattcaacaatacct

SEQ ID NO: 25438 - DNA, 42 bp, unidentified
  source 1..42: mol_type = unassigned DNA; note = methanogen bacteria
tggggtggaggttggttataccaactaggagctttagacttc

SEQ ID NO: 25439 - DNA, 51 bp, unidentified
  source 1..51: mol_type = unassigned DNA; note = methanogen bacteria
gcagcaccagctattaacggagcaacaggattattatacggtaaccctagt

SEQ ID NO: 25440 - DNA, 30 bp, unidentified
  source 1..30: mol_type = unassigned DNA; note = methanogen bacteria
accgaaaaccgtcacggttcattcgatact

SEQ ID NO: 25441 - DNA, 51 bp, unidentified
  source 1..51: mol_type = unassigned DNA; note = methanogen bacteria
acgggcgatatttttaccgtgaccaagaatgcgacagtcatctacgggccg

SEQ ID NO: 25442 - DNA, 33 bp, unidentified
  source 1..33: mol_type = unassigned DNA; note = methanogen bacteria
gtggtagcagaatcgttactaaatacaggagac

SEQ ID NO: 25443 - DNA, 102 bp, unidentified
  source 1..102: mol_type = unassigned DNA; note = methanogen bacteria
tttgcatttggagaaacaataagtggatttattggagcaccaacgaatttcttcctagcaggaataggagtggatatgcttcatccagacacaggaatacct

SEQ ID NO: 25444 - DNA, 42 bp, unidentified
  source 1..42: mol_type = unassigned DNA; note = methanogen bacteria
tggggtggaggatggctataccaattaggtgcattggacttc

SEQ ID NO: 25445 - DNA, 51 bp, unidentified
  source 1..51: mol_type = unassigned DNA; note = methanogen bacteria
gcaacaccagcaatcggtggagtagcaggattaatttgtggtaaccctgaa

SEQ ID NO: 25446 - DNA, 33 bp, unidentified
  source 1..33: mol_type = unassigned DNA; note = methanogen bacteria
aggattagaaaatccagaaggaatagaagatct

SEQ ID NO: 25447 - DNA, 51 bp, unidentified
  source 1..51: mol_type = unassigned DNA; note = methanogen bacteria
aaagtatatggagttccgcactgggctataagcataattggaggtataatt

SEQ ID NO: 25448 - DNA, 120 bp, unidentified
  source 1..120: mol_type = unassigned DNA; note = methanogen bacteria
gcaatctactctgaagatcatcaggattatagtagcttttggacttcagtatttgcaggtgttacacaaggtatggatatgactgcatttggtgaggattatgttgattatcgtagagtt

SEQ ID NO: 25449 - DNA, 129 bp, unidentified
  source 1..129: mol_type = unassigned DNA; note = methanogen bacteria
ttggagccaggtttaggattaaattttgcaggtgtcgaatatggaaacaaagctacaatgaaccagacatttgcagacaccatgttaaatataatacctgaaaatctcattgaatcaatggctgacgga

SEQ ID NO: 25450 - DNA, 30 bp, unidentified
  source 1..30: mol_type = unassigned DNA; note = methanogen bacteria
caggcttttggcattcatttcggacctcaa

SEQ ID NO: 25451 - DNA, 45 bp, unidentified
  source 1..45: mol_type = unassigned DNA; note = methanogen bacteria
tcccagcctgcagcaccaaccatgtctgccgtcttgaacttgaac

SEQ ID NO: 25452 - DNA, 39 bp, unidentified
  source 1..39: mol_type = unassigned DNA; note = methanogen bacteria
atggcaagtgcaggcacatgggaggcgctttttgaacgt

SEQ ID NO: 25453 - DNA, 42 bp, unidentified
  source 1..42: mol_type = unassigned DNA; note = methanogen bacteria
attggtatagatgaggtcattgaagcacttaaactatccaat

SEQ ID NO: 25454 - DNA, 30 bp, unidentified
  source 1..30: mol_type = unassigned DNA; note = methanogen bacteria
gcattcggtgcaagagtaagcccaatcatc

SEQ ID NO: 25455 - DNA, 30 bp, unidentified
  source 1..30: mol_type = unassigned DNA; note = methanogen bacteria
tatgctaatgcaggaattactgcatcatta

SEQ ID NO: 25456 - DNA, 114 bp, unidentified
  source 1..114: mol_type = unassigned DNA; note = methanogen bacteria
atctcctcgggaggaattatccccatcaacgaggccatagcctcactcatatccgctatacagaaaggcggacacgaccttgacaccacggaactgtacattttccagtcccgt

SEQ ID NO: 25457 - DNA, 39 bp, unidentified
  source 1..39: mol_type = unassigned DNA; note = methanogen bacteria
atgggtatatccatctccgccctcagcgatttcagcaat

SEQ ID NO: 25458 - DNA, 69 bp, unidentified
  source 1..69: mol_type = unassigned DNA; note = methanogen bacteria
tctctggagaaggacaacctcaccaacgtcatgtggtggctgtacggttcctttgccaatatcacctgg

SEQ ID NO: 25459 - DNA, 96 bp, unidentified
  source 1..96: mol_type = unassigned DNA; note = methanogen bacteria
tttgcatttggaagtgatattaatggattgatcggttcaccaaccaatttcttcttgcagggaattggattggatgacttaaatggaactattcca

SEQ ID NO: 25460 - DNA, 42 bp, unidentified
  source 1..42: mol_type = unassigned DNA; note = methanogen bacteria
tggggcggaggatggctgatgcagatgggcgcacttgatttt

SEQ ID NO: 25461 - DNA, 51 bp, unidentified
  source 1..51: mol_type = unassigned DNA; note = methanogen bacteria
gcagttccatcagttggagaagttgcaggattgattgcaggaaatgccaat

SEQ ID NO: 25462 - DNA, 96 bp, unidentified
  source 1..96: mol_type = unassigned DNA; note = methanogen bacteria
tttgcatttggaagtgatgttaatggattaataggttcaccaacaaatttctttttacagggaatttctttggatgatttaaacggaacaattcca

SEQ ID NO: 25463 - DNA, 42 bp, unidentified
  source 1..42: mol_type = unassigned DNA; note = methanogen bacteria
tggggaggaggatggctaatgcaaatgggagcattggatttt

SEQ ID NO: 25464 - DNA, 54 bp, unidentified
  source 1..54: mol_type = unassigned DNA; note = methanogen bacteria
tttgctgttcctgcaattggcggaactgccggattattatatggaaaccctgac

SEQ ID NO: 25465 - DNA, 45 bp, unidentified
  source 1..45: mol_type = unassigned DNA; note = methanogen bacteria
ccatcccaagttttcatacctctattcatgaaaattttcggaggg

SEQ ID NO: 25466 - DNA, 96 bp, unidentified
  source 1..96: mol_type = unassigned DNA; note = methanogen bacteria
tttgcattcggaacagatataaacggactgataggtgcccctaccaatttcttcttgcagggaattggcctggatgacttaaacggaacaattcct

SEQ ID NO: 25467 - DNA, 42 bp, unidentified
  source 1..42: mol_type = unassigned DNA; note = methanogen bacteria
tggggcggaggatggcttatgcagatgggtgcccttgacttt

SEQ ID NO: 25468 - DNA, 51 bp, unidentified
  source 1..51: mol_type = unassigned DNA; note = methanogen bacteria
gcggtgcctgccattggaggtgttgcaggactgattgcaggaaacccttat

SEQ ID NO: 25469 - DNA, 96 bp, unidentified
  source 1..96: mol_type = unassigned DNA; note = methanogen bacteria
tttgcatttggaagtgacatcaatggacttataggtgcaccgaccaatttcttcctgcagggaatcggtcttgatgaccttaacggtacaatacca

SEQ ID NO: 25470 - DNA, 42 bp, unidentified
  source 1..42: mol_type = unassigned DNA; note = methanogen bacteria
tggggaggaggatggctcatgcagatgggtgcacttgacttt

SEQ ID NO: 25471 - DNA, 54 bp, unidentified
  source 1..54: mol_type = unassigned DNA; note = methanogen bacteria
tttgctgttcctgcaatcggaggaactgcgggactcttatatggaaatccaaat

SEQ ID NO: 25472 - DNA, 102 bp, unidentified
  source 1..102: mol_type = unassigned DNA; note = methanogen bacteria
caatttgcatttggtgagccatcactatatggttttataggttcaccaactaatttcttgttaaaaggaattggattaaatgatttaaccggatcaatacct

SEQ ID NO: 25473 - DNA, 42 bp, unidentified
  source 1..42: mol_type = unassigned DNA; note = methanogen bacteria
tggggtggaggatggctaatgcaaatgaatgctttagatttc

SEQ ID NO: 25474 - DNA, 54 bp, unidentified
  source 1..54: mol_type = unassigned DNA; note = methanogen bacteria
tttgcagtacctgcaattggcggaactgccggtttattgtatggaaatcccggt

SEQ ID NO: 25475 - DNA, 96 bp, unidentified
  source 1..96: mol_type = unassigned DNA; note = methanogen bacteria
tttgcatttggtaacgatataaacggtcttataggagcacccacaaatttcttcttacagggaattgcactggatgatttaaatggaacaattcca

SEQ ID NO: 25476 - DNA, 42 bp, unidentified
  source 1..42: mol_type = unassigned DNA; note = methanogen bacteria
tggggaggaggatggttaatgcaaatgggtgcacttgacttt

SEQ ID NO: 25477 - DNA, 51 bp, unidentified
  source 1..51: mol_type = unassigned DNA; note = methanogen bacteria
gcagtgccgtcagttggtggagttgcaggattaattgcaggaaatccaaac

SEQ ID NO: 25478 - DNA, 30 bp, unidentified
  source 1..30: mol_type = unassigned DNA; note = methanogen bacteria
atgattagtatgttattggatacaggagat

SEQ ID NO: 25479 - DNA, 102 bp, unidentified
  source 1..102: mol_type = unassigned DNA; note = methanogen bacteria
caagtcgcatttgctccttcaagcattgctggatttataggagcaccaacaaacttctttttagagggaataggaattaattcattgactgggacaattcct

SEQ ID NO: 25480 - DNA, 42 bp, unidentified
  source 1..42: mol_type = unassigned DNA; note = methanogen bacteria
tggggtggcggatggctaatgaatatgggagcaatcgatttt

SEQ ID NO: 25481 - DNA, 51 bp, unidentified
  source 1..51: mol_type = unassigned DNA; note = methanogen bacteria
gcttcacctgcaataaatggtgttgctggtttattctatggaaatcctagc

SEQ ID NO: 25482 - DNA, 48 bp, unidentified
  source 1..48: mol_type = unassigned DNA; note = methanogen bacteria
agattaaatggagagtactttagttttattgattcacttttaggatta

SEQ ID NO: 25483 - DNA, 33 bp, unidentified
  source 1..33: mol_type = unassigned DNA; note = methanogen bacteria
gggtactcatcggacgtgctaggcgtcggcagc

SEQ ID NO: 25484 - DNA, 30 bp, unidentified
  source 1..30: mol_type = unassigned DNA; note = methanogen bacteria
ccctattcccgcgagacagggctcaccgat

SEQ ID NO: 25485 - DNA, 210 bp, unidentified
  source 1..210: mol_type = unassigned DNA; note = methanogen bacteria
atgatggcatactcttctattatcgactgggtaaccgccacctggggaacccctctcatggagagaggattctatcccttcgacgattacaacctgccctatcacatctccatggcactgtggaacatcatcggaggagccatcgcatggctcatcaacctcctgttccccgggaactccctttccgagtggctcatcagtccttacaca

SEQ ID NO: 25486 - DNA, 39 bp, unidentified
  source 1..39: mol_type = unassigned DNA; note = methanogen bacteria
cctctctccagtaggtggttcgttgtcaactacgacgcc

SEQ ID NO: 25487 - DNA, 57 bp, unidentified
  source 1..57: mol_type = unassigned DNA; note = methanogen bacteria
ctggcaggctccatgaacatcggtgacatcgtcaacgcacagagcgagatctggttc

SEQ ID NO: 25488 - DNA, 75 bp, unidentified
  source 1..75: mol_type = unassigned DNA; note = methanogen bacteria
ggaggatggaccattcccttcgtcagcctggattacttcctcggacctgacgctgtggacaactgcctctactgg

SEQ ID NO: 25489 - DNA, 96 bp, unidentified
  source 1..96: mol_type = unassigned DNA; note = methanogen bacteria
tttgcttttggaagtgacatcaatggattaataggttcaccaaccaatttcttcctacagggaattggtttggatgatttgaatggaacaattcca

SEQ ID NO: 25490 - DNA, 42 bp, unidentified
  source 1..42: mol_type = unassigned DNA; note = methanogen bacteria
tggggcggaggatggctgatgcagatgggagcactcgatttc

SEQ ID NO: 25491 - DNA, 54 bp, unidentified
  source 1..54: mol_type = unassigned DNA; note = methanogen bacteria
tttgctgttcctgcagtcggcggagcagcaggtttgattgcaggaaatcctaac

SEQ ID NO: 25492 - DNA, 42 bp, unidentified
  source 1..42: mol_type = unassigned DNA; note = methanogen bacteria
attggtatagatgaggtcattgaagcacttaaactatctaat

SEQ ID NO: 25493 - DNA, 96 bp, unidentified
  source 1..96: mol_type = unassigned DNA; note = methanogen bacteria
tttgcatttggaagtgacataaacggattaattggttcaccaaccaatttcttcctgcaagggataggattagatgacttaaacggcacaataccg

SEQ ID NO: 25494 - DNA, 42 bp, unidentified
  source 1..42: mol_type = unassigned DNA; note = methanogen bacteria
tggggaggaggatggctgatgcagatgggagcactggacttc

SEQ ID NO: 25495 - DNA, 51 bp, unidentified
  source 1..51: mol_type = unassigned DNA; note = methanogen bacteria
gcagtcccatcaataggaggagtggcaggattactatacggaaaccctgga

SEQ ID NO: 25496 - DNA, 96 bp, unidentified
  source 1..96: mol_type = unassigned DNA; note = methanogen bacteria
tttgcatttggaagtgacattaacggtttaataggtgcaccgtccaactttttcctgcagggaattggattggatgatttaaacggcacaatacca

SEQ ID NO: 25497 - DNA, 42 bp, unidentified
  source 1..42: mol_type = unassigned DNA; note = methanogen bacteria
tggggcggaggatggctgatgcagatgggtgcccttgacttt

SEQ ID NO: 25498 - DNA, 54 bp, unidentified
  source 1..54: mol_type = unassigned DNA; note = methanogen bacteria
tttgcagttcctgccgtaggcggagttgcaggtttgattgcaggaaatccggag

SEQ ID NO: 25499 - DNA, 96 bp, unidentified
  source 1..96: mol_type = unassigned DNA; note = methanogen bacteria
tttgcatttggaaatgatatttatggattaatcggttcaccaacaaatttctttttacagggaataggtttggatgacttaaacggtacaattccg

SEQ ID NO: 25500 - DNA, 42 bp, unidentified
  source 1..42: mol_type = unassigned DNA; note = methanogen bacteria
tggggaggaggatggttaatgcagatgggtgcacttgacttt

SEQ ID NO: 25501 - DNA, 54 bp, unidentified
  source 1..54: mol_type = unassigned DNA; note = methanogen bacteria
tttgcagtccctgcaatcggaggtgcagcaggattattcacaggaaatcccaat

SEQ ID NO: 25502 - DNA, 102 bp, unidentified
  source 1..102: mol_type = unassigned DNA; note = methanogen bacteria
tcaatttcatttggtgaaccgtcattatatggttttataggttctccatctaatttatttttaaaaggaattggaattagtgatttaaccggttctattcct

SEQ ID NO: 25503 - DNA, 42 bp, unidentified
  source 1..42: mol_type = unassigned DNA; note = methanogen bacteria
tggggtggaggatggttaatgcaaatcaatgccttagatttt

SEQ ID NO: 25504 - DNA, 54 bp, unidentified
  source 1..54: mol_type = unassigned DNA; note = methanogen bacteria
tttgcagtgcctgcaattaatggagctgcaggcttattatatggcaatccaagt

SEQ ID NO: 25505 - DNA, 96 bp, unidentified
  source 1..96: mol_type = unassigned DNA; note = methanogen bacteria
tttgcatttggaagtgatgtctatggtttaatcggttcacctaccaatttctttttaaagggaattgctttggatgatttaactgaaactattcca

SEQ ID NO: 25506 - DNA, 42 bp, unidentified
  source 1..42: mol_type = unassigned DNA; note = methanogen bacteria
tggggaggaggctggttaatgcagatgggagcacttgatttt

SEQ ID NO: 25507 - DNA, 54 bp, unidentified
  source 1..54: mol_type = unassigned DNA; note = methanogen bacteria
tttgcaactccactaattggtgaagcttcaggtttactttatggaaaccctaat

SEQ ID NO: 25508 - DNA, 96 bp, unidentified
  source 1..96: mol_type = unassigned DNA; note = methanogen bacteria
tttgcatttggaagtgatatttacggattaatcggttcaccaaccaatttcttcttgcagggaattgctttggatgacctgaacggtacaattcca

SEQ ID NO: 25509 - DNA, 42 bp, unidentified
  source 1..42: mol_type = unassigned DNA; note = methanogen bacteria
tggggaggaggatggctgatgcagatgggtgcactcgatttc

SEQ ID NO: 25510 - DNA, 51 bp, unidentified
  source 1..51: mol_type = unassigned DNA; note = methanogen bacteria
gcaattccatcaatcggaggagttgcaggactgattgctggaaatcccaat

SEQ ID NO: 25511 - DNA, 99 bp, unidentified
  source 1..99: mol_type = unassigned DNA; note = methanogen bacteria
ttagcatttggtgaaccatcattatatggattcattggtacaccttcccatttcttcttgcagggaattggattggaagatttgacaggatcaatacca

SEQ ID NO: 25512 - DNA, 42 bp, unidentified
  source 1..42: mol_type = unassigned DNA; note = methanogen bacteria
tggggtggaggatggttaatgcaaatgaatgctctggatttt

SEQ ID NO: 25513 - DNA, 54 bp, unidentified
  source 1..54: mol_type = unassigned DNA; note = methanogen bacteria
tttgcagtacctgcaatcggcggaactgccggtttattatatggaaatcctggt

SEQ ID NO: 25514 - DNA, 102 bp, unidentified
  source 1..102: mol_type = unassigned DNA; note = methanogen bacteria
tcattcgcatttggagacaccagtctgcatggactgattgctgcacctgcaaatttcctcatgatgggaataggtattgatgatgttacaggaacaattcct

SEQ ID NO: 25515 - DNA, 42 bp, unidentified
  source 1..42: mol_type = unassigned DNA; note = methanogen bacteria
tggggaggaggatggctcatgcagatgggcgcacttgacttt

SEQ ID NO: 25516 - DNA, 51 bp, unidentified
  source 1..51: mol_type = unassigned DNA; note = methanogen bacteria
gcatctcctgctataaacgaagctgcaggactggttttcggaaatccttcc

SEQ ID NO: 25517 - DNA, 96 bp, unidentified
  source 1..96: mol_type = unassigned DNA; note = methanogen bacteria
tttgcatttggtagcgatataatgggaattataggatcaccaacaaatttcttcttacagggaattggattagatgatttgaatggaacaattcca

SEQ ID NO: 25518 - DNA, 45 bp, unidentified
  source 1..45: mol_type = unassigned DNA; note = methanogen bacteria
gtatggggaggaggatggctaatgcagatgggagcacttgatttt

SEQ ID NO: 25519 - DNA, 51 bp, unidentified
  source 1..51: mol_type = unassigned DNA; note = methanogen bacteria
gcagtgccttccataggtgaagtcagtggattaattgcaggaaatccagaa

SEQ ID NO: 25520 - DNA, 99 bp, unidentified
  source 1..99: mol_type = unassigned DNA; note = methanogen bacteria
tttgcattcggtgaaccgtcattatatggatttattggttccccgtccaatttcttcctacagggaataggattggatgatttgaccggatcaatacca

SEQ ID NO: 25521 - DNA, 42 bp, unidentified
  source 1..42: mol_type = unassigned DNA; note = methanogen bacteria
tggggtggaggatggctgatgcaaatgaatgctctggatttt

SEQ ID NO: 25522 - DNA, 54 bp, unidentified
  source 1..54: mol_type = unassigned DNA; note = methanogen bacteria
tttgcagtgcctgcaatcggcggaactgcaggattgatttatggaaatcccgaa

SEQ ID NO: 25523 - DNA, 96 bp, unidentified
  source 1..96: mol_type = unassigned DNA; note = methanogen bacteria
tttgcatttggagatgacataaatggattgataggcgcacccgccaatttctttttgcagggaattggtctggaggatctcacaggtacaatacca

SEQ ID NO: 25524 - DNA, 42 bp, unidentified
  source 1..42: mol_type = unassigned DNA; note = methanogen bacteria
tggggcggaggatggctcatgcaaatgggtgcacttgatttt

SEQ ID NO: 25525 - DNA, 51 bp, unidentified
  source 1..51: mol_type = unassigned DNA; note = methanogen bacteria
gctgttccggccgttggcggtgttgcaggattaattgcaggtaatcctaat

SEQ ID NO: 25526 - DNA, 96 bp, unidentified
  source 1..96: mol_type = unassigned DNA; note = methanogen bacteria
tttgcatttggaacagatgtaagtggattgatcggttcaccaacaaatttctttttacagggaatggctttggatgacctttccggttcaattcca

SEQ ID NO: 25527 - DNA, 42 bp, unidentified
  source 1..42: mol_type = unassigned DNA; note = methanogen bacteria
tggggaggaggatggctgatgcaaatgggagcgctcgacttt

SEQ ID NO: 25528 - DNA, 54 bp, unidentified
  source 1..54: mol_type = unassigned DNA; note = methanogen bacteria
ttcgctgttccagcaataaacggtgctgcaggattgattgcaggaaacccaaat

SEQ ID NO: 25529 - DNA, 96 bp, unidentified
  source 1..96: mol_type = unassigned DNA; note = methanogen bacteria
ataagtagttttacatctgcatggggtagcgataccacttcattttttgttaataatgttggtggaagttcaaatttaacatcttccgtaggtatt

SEQ ID NO: 25530 - DNA, 69 bp, unidentified; identical to SEQ ID NO: 22108
  source 1..69: mol_type = unassigned DNA; note = methanogen bacteria

SEQ ID NO: 25531 - DNA, 105 bp, unidentified
  source 1..105: mol_type = unassigned DNA; note = methanogen bacteria
ggatacatgtctttaatgtcatccgttccaattaatgaattaatcacaagcggccctagtttaatatttgttgtttttccacagattttcaatgtaatgggtccg

SEQ ID NO: 25532 - DNA, 96 bp, unidentified
  source 1..96: mol_type = unassigned DNA; note = methanogen bacteria
tttgcttttggaagtgatattcacggattgataggatcaccgaccaatttcttcttgcagggaatcggtctggatgatttgaagggaacaattcca

SEQ ID NO: 25533 - DNA, 42 bp, unidentified
  source 1..42: mol_type = unassigned DNA; note = methanogen bacteria
tggggtggaggatggttgatgcagatgggtgcacttgacttt

SEQ ID NO: 25534 - DNA, 54 bp, unidentified
  source 1..54: mol_type = unassigned DNA; note = methanogen bacteria
tttgcagtgcctgctgtcggtggtgttgcaggactattctatggaaatcctaac

SEQ ID NO: 25535 - DNA, 96 bp, unidentified
  source 1..96: mol_type = unassigned DNA; note = methanogen bacteria
ttcgctttcggaagcgacatgtggggtctgataggatctccaaccaatttctttttgcagggaattgctttggatgacttgaacggaacaatacct

SEQ ID NO: 25536 - DNA, 42 bp, unidentified
  source 1..42: mol_type = unassigned DNA; note = methanogen bacteria
tggggtgaaggatggctgatgcagatgggtgctcttgacttt

SEQ ID NO: 25537 - DNA, 54 bp, unidentified
  source 1..54: mol_type = unassigned DNA; note = methanogen bacteria
tttgcagtgcctgcagtcggcggagttgcaggacttatagcaggaaatgccaat

SEQ ID NO: 25538 - DNA, 99 bp, unidentified
  source 1..99: mol_type = unassigned DNA; note = methanogen bacteria
tttgcatttggtgaaccgtcaatatatggatttataggttctccatccaatttcttcctgagaggaatcggattagacagtttaacgggatcaattcca

SEQ ID NO: 25539 - DNA, 42 bp, unidentified
  source 1..42: mol_type = unassigned DNA; note = methanogen bacteria
tggggaggaggatggctgatgcagattaatgcattggacttt

SEQ ID NO: 25540 - DNA, 48 bp, unidentified
  source 1..48: mol_type = unassigned DNA; note = methanogen bacteria
gcagtgcctgcaatcggcggaactgcaggattaatatatggaaacccc

SEQ ID NO: 25541 - DNA, 99 bp, unidentified
  source 1..99: mol_type = unassigned DNA; note = methanogen bacteria
cagtttgcatttggtagtgacataagcggacttataggagcaccaacccatttcttcttgcagggaattgcattggatgatttgaatggaacaattccg

SEQ ID NO: 25542 - DNA, 42 bp, unidentified
  source 1..42: mol_type = unassigned DNA; note = methanogen bacteria
tggggaggaggatggttgatgcagatgggtgcacttgacttc

SEQ ID NO: 25543 - DNA, 51 bp, unidentified
  source 1..51: mol_type = unassigned DNA; note = methanogen bacteria
gcagttccttcaatagggggagttgcaggattaattgcaggaaaccctgga

SEQ ID NO: 25544 - DNA, 45 bp, unidentified
  source 1..45: mol_type = unassigned DNA; note = methanogen bacteria
ccatcccaggtattcataccattgttcatgaagatatttggaatg

SEQ ID NO: 25545 - DNA, 102 bp, unidentified
  source 1..102: mol_type = unassigned DNA; note = methanogen bacteria
ccatttgcatttggagatgtaagtattaacggattaattgctcagcctgcacactttttcttaagtggcattggcattgaagatttgactggaactattcct

SEQ ID NO: 25546 - DNA, 42 bp, unidentified
  source 1..42: mol_type = unassigned DNA; note = methanogen bacteria
tggggcggaggatggttaatgcaaatgggagcgctggatttt

SEQ ID NO: 25547 - DNA, 51 bp, unidentified
  source 1..51: mol_type = unassigned DNA; note = methanogen bacteria
gcttctcctgctgtagggggagtggcaggtttaatatatggaaaccctgga

SEQ ID NO: 25548 - DNA, 102 bp, unidentified
  source 1..102: mol_type = unassigned DNA; note = methanogen bacteria
ccatttgcttttggagatgtaagcattagcggtttaattgctgagccagcacatttctttatgactggcattggtgttaatgatttaactggatccattcct

SEQ ID NO: 25549 - DNA, 42 bp, unidentified
  source 1..42: mol_type = unassigned DNA; note = methanogen bacteria
tggggtggaggatggttaatgcaaatgggagcattagacttt

SEQ ID NO: 25550 - DNA, 54 bp, unidentified
  source 1..54: mol_type = unassigned DNA; note = methanogen bacteria
tttgcttcacctgcaatcaatggagcagcagggttattattcggaaatcctggc

SEQ ID NO: 25551 - DNA, 30 bp, unidentified
  source 1..30: mol_type = unassigned DNA; note = methanogen bacteria
cagcttgcttcctcaacaccaattgattcc

SEQ ID NO: 25552 - DNA, 69 bp, unidentified
  source 1..69: mol_type = unassigned DNA; note = methanogen bacteria
ttaggaggagacatttcaaatgcattgccgattgcatctattgcaagtgcaaattctgcaccgttaagc

SEQ ID NO: 25553 - DNA, 51 bp, unidentified
  source 1..51: mol_type = unassigned DNA; note = methanogen bacteria
gtcggcattggaacaacaagcattgcacaatcaatccttatggcaggtctt

SEQ ID NO: 25554 - DNA, 36 bp, unidentified
  source 1..36: mol_type = unassigned DNA; note = methanogen bacteria
ctctcggagtactacaccccccgcatcacccagaaa

SEQ ID NO: 25555 - DNA, 30 bp, unidentified
  source 1..30: mol_type = unassigned DNA; note = methanogen bacteria
gagtcggtggacatcgtcgacctcagcacc

SEQ ID NO: 25556 - DNA, 39 bp, unidentified
  source 1..39: mol_type = unassigned DNA; note = methanogen bacteria
accgacataaacgtccccttcgaacacgataacaaccac

SEQ ID NO: 25557 - DNA, 45 bp, unidentified
  source 1..45: mol_type = unassigned DNA; note = methanogen bacteria
atgatctcggtcaacgaacccgaggccaacatggactacatgatg

SEQ ID NO: 25558 - DNA, 48 bp, unidentified
  source 1..48: mol_type = unassigned DNA; note = methanogen bacteria
ggtaatatgcaagtatatttgatatctcaaattaatcttgctttaaca

SEQ ID NO: 25559 - DNA, 102 bp, unidentified
  source 1..102: mol_type = unassigned DNA; note = methanogen bacteria
cagatagcattcgctccggaaagtctttctggaataatcggaattcctcaaagtcttttaatggaaggaataggtgtcgattcacttacaggaactattcct

SEQ ID NO: 25560 - DNA, 42 bp, unidentified
  source 1..42: mol_type = unassigned DNA; note = methanogen bacteria
tggggcggaggatggctgatgaatatgggtgcaattgatttt

SEQ ID NO: 25561 - DNA, 51 bp, unidentified
  source 1..51: mol_type = unassigned DNA; note = methanogen bacteria
gcatctccggcaataaatggggttgcaggactcttttacggaaatccgaat

SEQ ID NO: 25562 - DNA, 45 bp, unidentified
  source 1..45: mol_type = unassigned DNA; note = methanogen bacteria
ggaaatatgcaggtttacttaatatcctatattaaattaccttta

SEQ ID NO: 25563 - DNA, 102 bp, unidentified
  source 1..102: mol_type = unassigned DNA; note = methanogen bacteria
cagatagcttttgctcctgaaagttatgcaggtataattggaatccctcaaaacttgtttatggaagggataggtgttgattcattaacaggcactattcct

SEQ ID NO: 25564 - DNA, 39 bp, unidentified
  source 1..39: mol_type = unassigned DNA; note = methanogen bacteria
tggggtggaggatggctgatgaacatgggcgcaattgat

SEQ ID NO: 25565 - DNA, 51 bp, unidentified
  source 1..51: mol_type = unassigned DNA; note = methanogen bacteria
gcatgtcctgccattaatggagtggccgggctattttatggaaatcccaac

SEQ ID NO: 25566 - DNA, 30 bp, unidentified
  source 1..30: mol_type = unassigned DNA; note = methanogen bacteria
caacttgccacttcagctccaattgattcc

SEQ ID NO: 25567 - DNA, 63 bp, unidentified
  source 1..63: mol_type = unassigned DNA; note = methanogen bacteria
ttgggagtccatatatcaaatgccttgcctattgcaggaaagatagactctacagcattaagc

SEQ ID NO: 25568 - DNA, 51 bp, unidentified
  source 1..51: mol_type = unassigned DNA; note = methanogen bacteria
gttggaattggaacaaccagcattgcacaatcaattctcattgcaggcctt

SEQ ID NO: 25569 - DNA, 36 bp, unidentified; identical to SEQ ID NO: 23457
  source 1..36: mol_type = unassigned DNA; note = methanogen bacteria

SEQ ID NO: 25570 - DNA, 48 bp, unidentified
  source 1..48: mol_type = unassigned DNA; note = methanogen bacteria
cttgagataatgcaagctggagatgccatggaatatgcaatgacctac

SEQ ID NO: 25571 - DNA, 39 bp, unidentified
  source 1..39: mol_type = unassigned DNA; note = methanogen bacteria
cttacaatggttgcaggcacaatggctgttggagcatac

SEQ ID NO: 25572 - DNA, 63 bp, unidentified; identical to SEQ ID NO: 23460
  source 1..63: mol_type = unassigned DNA; note = methanogen bacteria

SEQ ID NO: 25573 - DNA, 102 bp, unidentified
  source 1..102: mol_type = unassigned DNA; note = methanogen bacteria
cagctatcattcgccacaacaagcatattcggattaatcggagtgccacaaaacctctttctggaaggaataggagtggattccctgacaggttcaattcca

SEQ ID NO: 25574 - DNA, 42 bp, unidentified
  source 1..42: mol_type = unassigned DNA; note = methanogen bacteria
tggggtggaggatggctcatgaacatgggtgcagtagatttc

SEQ ID NO: 25575 - DNA, 51 bp, unidentified
  source 1..51: mol_type = unassigned DNA; note = methanogen bacteria
gcatcacctgcaataaacggcattgcaggactgttctacggaaaccctgaa

SEQ ID NO: 25576 - DNA, 81 bp, unidentified
  source 1..81: mol_type = unassigned DNA; note = methanogen bacteria
ctgacaacaataactgaagtgagttcagtcagccttgtgcttcctggtgtggaggttccaggatctccgttcttcattcca

SEQ ID NO: 25577 - DNA, 48 bp, unidentified
  source 1..48: mol_type = unassigned DNA; note = methanogen bacteria
acaatcattgtaaagattgcaagccagttcatgacatatttaatggcg

SEQ ID NO: 25578 - DNA, 33 bp, unidentified
  source 1..33: mol_type = unassigned DNA; note = methanogen bacteria
acaatgttggctgatggaggaatgcctgcatca

SEQ ID NO: 25579 - DNA, 54 bp, unidentified
  source 1..54: mol_type = unassigned DNA; note = methanogen bacteria
ggaatcatcatttctgatccatcaacatatgttagtatgggaacacttgcacaa

SEQ ID NO: 25580 - DNA, 120 bp, unidentified
  source 1..120: mol_type = unassigned DNA; note = methanogen bacteria
ggatttggtgttggagatgcattaatgcccactattccagcacatcccataactacaaatatggatacatcattattttgtggatttaccagaggatttggacagctcttcacgaacatc

SEQ ID NO: 25581 - DNA, 69 bp, unidentified
  source 1..69: mol_type = unassigned DNA; note = methanogen bacteria
tgcttcgtcagtattcttaacagtaataatgatgatattaagctattcaatctcaatcggtattgcatg

SEQ ID NO: 25582 - DNA, 36 bp, unidentified
  source 1..36: mol_type = unassigned DNA; note = methanogen bacteria
gtccagataatggatggtttcggtcttcccgcagca

SEQ ID NO: 25583 - DNA, 33 bp, unidentified
  source 1..33: mol_type = unassigned DNA; note = methanogen bacteria
cttctatccgcagagccgtttaactataacacg

SEQ ID NO: 25584 - DNA, 51 bp, unidentified
  source 1..51: mol_type = unassigned DNA; note = methanogen bacteria
gggaatatgcaggtttatttgatatcttatattaatcttgctttaactagg

SEQ ID NO: 25585 - DNA, 36 bp, unidentified
  source 1..36: mol_type = unassigned DNA; note = methanogen bacteria
gtgcaaatcaccaatggttttgggctttctgcagca

SEQ ID NO: 25586 - DNA, 33 bp, unidentified
  source 1..33: mol_type = unassigned DNA; note = methanogen bacteria
cttttgtcagatgccccttttaattacaatact

SEQ ID NO: 25587 - DNA, 276 bp, unidentified
  source 1..276: mol_type = unassigned DNA; note = methanogen bacteria
gtggaaaacaataccataatacgcatgtataggggaatccattccagctatcctcataactatatcataggaaacaagatttatgatataaacggttttgatgaaaacaacggcgtaggtggggattatggtatttatggaggcaatgacactttaattgccaacaactcaatttacaatgcagatgtgattggtgcaggtattcttgtaggttccaatagcgatgtttacggaaactatatccaaattaacagcagtggagacggtattagaata

SEQ ID NO: 25588 - DNA, 102 bp, unidentified
  source 1..102: mol_type = unassigned DNA; note = methanogen bacteria
ccatttgcttttggagatgtaagcatcaatggattaattgcacagccagcacatttctttttgtctggcatctgcatcaatgatttaacaggatcaattcct

SEQ ID NO: 25589 - DNA, 42 bp, unidentified
  source 1..42: mol_type = unassigned DNA; note = methanogen bacteria
tggggaggaggatggcttatgcaaatgggtgctttagacttt

SEQ ID NO: 25590 - DNA, 51 bp, unidentified
  source 1..51: mol_type = unassigned DNA; note = methanogen bacteria
gcttcacctctaatcaatgaggcatctggtttggtctttggaaatcctgga

SEQ ID NO: 25591 - DNA, 36 bp, unidentified
  source 1..36: mol_type = unassigned DNA; note = methanogen bacteria
gtgcaaatcactaacggatttggactttctgcagca

SEQ ID NO: 25592 - DNA, 33 bp, unidentified
  source 1..33: mol_type = unassigned DNA; note = methanogen bacteria
ctattgtctgatgcacctttcaattacaacaca

SEQ ID NO: 25593 - DNA, 36 bp, unidentified
  source 1..36: mol_type = unassigned DNA; note = methanogen bacteria
gtgcaaatcaccaacggctttggactttctgcagca

SEQ ID NO: 25594 - DNA, 33 bp, unidentified
  source 1..33: mol_type = unassigned DNA; note = methanogen bacteria
ctattgtcagctgaacctttcaattacaataca

SEQ ID NO: 25595 - DNA, 42 bp, unidentified
  source 1..42: mol_type = unassigned DNA; note = methanogen bacteria
gttaatgaccctttcattaaagattttatcctaatggataat

SEQ ID NO: 25596 - DNA, 129 bp, unidentified; identical to SEQ ID NO: 25016
  source 1..129: mol_type = unassigned DNA; note = methanogen bacteria

SEQ ID NO: 25597 - DNA, 36 bp, unidentified
  source 1..36: mol_type = unassigned DNA; note = methanogen bacteria
gctcaggcttatggaattgattttggcgcaaccgcc

SEQ ID NO: 25598 - DNA, 36 bp, unidentified
  source 1..36: mol_type = unassigned DNA; note = methanogen bacteria
tccatgatactttccctggtaggtttacctcttgcc

SEQ ID NO: 25599 - DNA, 33 bp, unidentified
  source 1..33: mol_type = unassigned DNA; note = methanogen bacteria
acaaacgttatgaaacaacaacttatacctgat

SEQ ID NO: 25600 - DNA, 129 bp, unidentified
  source 1..129: mol_type = unassigned DNA; note = methanogen bacteria
aaatactacgctacacctaaattattacactcattaatagcaattaaatattttgagtcatcacaacaatttaattacatagttaacaatccaactatgatatttactttttttcagtcaatttttttt

SEQ ID NO: 25601 - DNA, 30 bp, unidentified
  source 1..30: mol_type = unassigned DNA; note = methanogen bacteria
caacatgcaacaactatgggatcaactgca

SEQ ID NO: 25602 - DNA, 30 bp, unidentified
  source 1..30: mol_type = unassigned DNA; note = methanogen bacteria
ttatatgctagtcagcttcatttagaaagt

SEQ ID NO: 25603 - DNA, 42 bp, unidentified
  source 1..42: mol_type = unassigned DNA; note = methanogen bacteria
attggtatagatgaggttatagaagcattaaaattgtctaat

SEQ ID NO: 25604 - DNA, 30 bp, unidentified
  source 1..30: mol_type = unassigned DNA; note = methanogen bacteria
tattcccgtgctggaatcactccttcaatt

SEQ ID NO: 25605 - DNA, 45 bp, unidentified
  source 1..45: mol_type = unassigned DNA; note = methanogen bacteria
catggtatgaaaggccttgagtttattgcttcaaatccaaacact

SEQ ID NO: 25606 - DNA, 72 bp, unidentified
  source 1..72: mol_type = unassigned DNA; note = methanogen bacteria
acttatctatcagatcctttaactatagcagattggggtgtccatcttttgcctattagccatagtgcttac

SEQ ID NO: 25607 - DNA, 54 bp, unidentified
  source 1..54: mol_type = unassigned DNA; note = methanogen bacteria
atatttatgattggtccaatagcaaacaacttcattggatccagtttccaatat

SEQ ID NO: 25608 - DNA, 102 bp, unidentified
  source 1..102: mol_type = unassigned DNA; note = methanogen bacteria
gatattgttcacactcaatccagcagtttgcacatgatatttggtttgcctctagaagcggtttattatgacactttatacttatggcctgctttagaaaat

SEQ ID NO: 25609 - DNA, 69 bp, unidentified
  source 1..69: mol_type = unassigned DNA; note = methanogen bacteria
ttattgattagagcttatatttggcaaaacatattaggtcctatttcctattataattcaccatattta

SEQ ID NO: 25610 - DNA, 42 bp, unidentified
  source 1..42: mol_type = unassigned DNA; note = methanogen bacteria
attggtatagatgaagtccttgaagatcttaaacaatctaat

SEQ ID NO: 25611 - DNA, 30 bp, unidentified
  source 1..30: mol_type = unassigned DNA; note = methanogen bacteria
gcatttggtgcaaccatttctccaattgtc

SEQ ID NO: 25612 - DNA, 33 bp, unidentified
  source 1..33: mol_type = unassigned DNA; note = methanogen bacteria
tattccaatgcaggagttactgcttccatcagt

SEQ ID NO: 25613 - DNA, 51 bp, unidentified
  source 1..51: mol_type = unassigned DNA; note = methanogen bacteria
tttagattaagtggagattacactaatttctttgatgctcttagaggatta

SEQ ID NO: 25614 - DNA, 30 bp, unidentified
  source 1..30: mol_type = unassigned DNA; note = methanogen bacteria
caacttgcttcttcatctccaattgattcc

SEQ ID NO: 25615 - DNA, 69 bp, unidentified
  source 1..69: mol_type = unassigned DNA; note = methanogen bacteria
ttgggaggagacatttcaaatgcattgcctattgcatcaatcacaagtgcaaaatccacagcactgagc

SEQ ID NO: 25616 - DNA, 51 bp, unidentified
  source 1..51: mol_type = unassigned DNA; note = methanogen bacteria
gttggaataggaacaacaagcattgcacaatcaatacttatggcaggtctt

SEQ ID NO: 25617 - DNA, 69 bp, unidentified
  source 1..69: mol_type = unassigned DNA; note = methanogen bacteria
tatgcaaatattcctgcaatgtttgtccttatcttccaggatgcttttgacttccagtccatagcaggg

SEQ ID NO: 25618 - DNA, 78 bp, unidentified
  source 1..78: mol_type = unassigned DNA; note = methanogen bacteria
tcaacaggagttgcaagagatgcagctgtcagtggagccccttatgtgcagaatgcaatttcgactgttttcggatgg

SEQ ID NO: 25619 - DNA, 81 bp, unidentified
  source 1..81: mol_type = unassigned DNA; note = methanogen bacteria
atgggctatggcggatattactatgggagcaatgacattgataaaccttccgacatgtatggcattgggaaggatagcaat

SEQ ID NO: 25620 - DNA, 45 bp, unidentified
  source 1..45: mol_type = unassigned DNA; note = methanogen bacteria
catggaatgggcaatattgattttgttgcttcaaatccgaataat

SEQ ID NO: 25621 - DNA, 72 bp, unidentified
  source 1..72: mol_type = unassigned DNA; note = methanogen bacteria
ttaccccctgtagaaccgattacattggaaaatattggaatttacttattgcctatcagccatagtgcatac

SEQ ID NO: 25622 - DNA, 45 bp, unidentified
  source 1..45: mol_type = unassigned DNA; note = methanogen bacteria
acattcatggacgctggagcaccgatgtttgtaggatacagtttc

SEQ ID NO: 25623 - DNA, 108 bp, unidentified
  source 1..108: mol_type = unassigned DNA; note = methanogen bacteria
tattatgacatcatatatccactgtcccaaaatttacacatgtgggtaggttatccgattgaagctgtagatgacggtattttatacatggctcctgctttggaaaac

SEQ ID NO: 25624 - DNA, 69 bp, unidentified
  source 1..69: mol_type = unassigned DNA; note = methanogen bacteria
cttattgttcgccattatctatggaaaacaatactaaacacttcatcttattataattcatcaaatctc

SEQ ID NO: 25625 - DNA, 45 bp, unidentified; identical to SEQ ID NO: 25544
  source 1..45: mol_type = unassigned DNA; note = methanogen bacteria

SEQ ID NO: 25626 - DNA, 39 bp, unidentified
  source 1..39: mol_type = unassigned DNA; note = methanogen bacteria
tatgcaacatatcaaacattatataacataccaaataat

SEQ ID NO: 25627 - DNA, 33 bp, unidentified
  source 1..33: mol_type = unassigned DNA; note = methanogen bacteria
ataatgtcattaatgcaattcggaacaaatagt

SEQ ID NO: 25628 - DNA, 36 bp, unidentified
  source 1..36: mol_type = unassigned DNA; note = methanogen bacteria
tccacgatggaggacaccctcgtcagcatcgccggt

SEQ ID NO: 25629 - DNA, 33 bp, unidentified
  source 1..33: mol_type = unassigned DNA; note = methanogen bacteria
aaggatgaaatcctgagtctggcacatggcgaa

SEQ ID NO: 25630 - DNA, 42 bp, unidentified
  source 1..42: mol_type = unassigned DNA; note = methanogen bacteria
caggaccagcaggacgccctcatcgagtacgcggtgctcatc

SEQ ID NO: 25631 - DNA, 39 bp, unidentified
  source 1..39: mol_type = unassigned DNA; note = methanogen bacteria
ctgaacggtatcgaagaggagttcggggcaggcaaactg

SEQ ID NO: 25632 - DNA, 33 bp, unidentified
  source 1..33: mol_type = unassigned DNA; note = methanogen bacteria
gactacctcgtagacatgggcgagagcatggcc

SEQ ID NO: 25633 - DNA, 57 bp, unidentified
  source 1..57: mol_type = unassigned DNA; note = methanogen bacteria
gatatttatgatcctgatttgagtaataataatgcttctaatagtacttttattccg

SEQ ID NO: 25634 - DNA, 195 bp, unidentified
  source 1..195: mol_type = unassigned DNA; note = methanogen bacteria
tattggaatgttactgttgttaatcatggtccagatgcagctgttaatgtagttgttgatgatattattcctaaagagttagttgatgttgttgttattagtaagtctgctggtatttttgatagtgatgctggtgtttggaccggtttcagtcttgctagtggtgctaatgctactttaattattagaactaaa

SEQ ID NO: 25635 - DNA, 216 bp, unidentified
  source 1..216: mol_type = unassigned DNA; note = methanogen bacteria
tatggtgctcataaaggtgatgttatttcttgggttattgttgttgttaatcatggtcctgatgctgcagttaatgtggttgttaatgatgtcattcctaaagagttgactaatgttactgtttccattattactgatggtgtgtttgagaataatgtctggtctggttttgaccttaatagtggtgaatttgctgttttaatttttgatactaca

SEQ ID NO: 25636 - DNA, 30 bp, unidentified
  source 1..30: mol_type = unassigned DNA; note = methanogen bacteria
ttgggcagcaaagcatccgaatcaaaagct

SEQ ID NO: 25637 - DNA, 33 bp, unidentified
  source 1..33: mol_type = unassigned DNA; note = methanogen bacteria
acagaatattcaactaaaatgggatcaactgca

SEQ ID NO: 25638 - DNA, 30 bp, unidentified
  source 1..30: mol_type = unassigned DNA; note = methanogen bacteria
ttatatgcaattcaaattaatctacaaagt

SEQ ID NO: 25639 - DNA, 33 bp, unidentified
  source 1..33: mol_type = unassigned DNA; note = methanogen bacteria
gtaattcagctttattttaatgtttcaatttat

SEQ ID NO: 25640 - DNA, 36 bp, unidentified
  source 1..36: mol_type = unassigned DNA; note = methanogen bacteria
acatatttaagacaggtgacaatgatggatcccgaa

SEQ ID NO: 25641 - DNA, 87 bp, unidentified
  source 1..87: mol_type = unassigned DNA; note = methanogen bacteria
atgaagcttgacatagtcgatgcaatatattttacctttgaaacaatagctacaataggctatggggacattgttcctgtgacaaat

SEQ ID NO: 25642 - DNA, 57 bp, unidentified
  source 1..57: mol_type = unassigned DNA; note = methanogen bacteria
ttaactggcacatcagctggaacacatactatctttggcgtttcaaatacactaagc

SEQ ID NO: 25643 - DNA, 51 bp, unidentified
  source 1..51: mol_type = unassigned DNA; note = methanogen bacteria
gttggaatggggtcgaccagcattgcacaatcaatacttctcatgggtctt

SEQ ID NO: 25644 - DNA, 42 bp, unidentified
  source 1..42: mol_type = unassigned DNA; note = methanogen bacteria
tttagattaagtggagattactctggtttcatagaagcactt

SEQ ID NO: 25645 - DNA, 171 bp, unidentified
  source 1..171: mol_type = unassigned DNA; note = methanogen bacteria
gttatgggaggtattaatactgcagtcgatacctatgcgccggaatattcaggaaacgagcaatttcatcaagatgtctatgattacttccaaaaagtaggtaatatagatgaaattaaagcacaggatagtgttattgtaaatactgcagatataattattcagaatgca

SEQ ID NO: 25646 - DNA, 30 bp, unidentified
  source 1..30: mol_type = unassigned DNA; note = methanogen bacteria
cagattgcctccgcatcaccggcaaattca

SEQ ID NO: 25647 - DNA, 57 bp, unidentified
  source 1..57: mol_type = unassigned DNA; note = methanogen bacteria
ttagcaaactctccagttcaggcagctgccatttcaggcatttccaaaccattaagt

SEQ ID NO: 25648 - DNA, 51 bp, unidentified
  source 1..51: mol_type = unassigned DNA; note = methanogen bacteria
gtaggtattggaaccaacaatgttgcacatgccatacttgtgatgggtctt

SEQ ID NO: 25649 - DNA, 72 bp, unidentified
  source 1..72: mol_type = unassigned DNA; note = methanogen bacteria
aaatattgggatgaaatatcggcatttttaagtaaagtaggacaatgggtttatgataatgttataaaacca

SEQ ID NO: 25650 - DNA, 42 bp, unidentified
  source 1..42: mol_type = unassigned DNA; note = methanogen bacteria
gtagatttttttgtaggattatgggaaagcataaaagaaata

SEQ ID NO: 25651 - DNA, 63 bp, unidentified
  source 1..63: mol_type = unassigned DNA; note = methanogen bacteria
catggaatagaccagtttgtaaggcctttcacacagccggttctaatggggtcatcaaaaggt

SEQ ID NO: 25652 - DNA, 183 bp, unidentified
  source 1..183: mol_type = unassigned DNA; note = methanogen bacteria
agactaagcttaggaattgatgtttttacaatattcgtggcaatggatccaagccctaccactacaagcatctaccactcccatttatacaaatcaatattcggtgaaatcctgggagctcttcttatttatattcctgcaggaattcatactggaagttctcttggaacatacactccttca

SEQ ID NO: 25653 - DNA, 249 bp, unidentified
  source 1..249: mol_type = unassigned DNA; note = methanogen bacteria
agcttctatggaagcactcccgattcctatgaattaaccattgagaatgctgaagatatcgatttatcaaattataccatattaaacagtcgagaagatggcaatagaacagtagttgaaatatccaacgagtataatgaaatgggattgctcaaccagttagctgagactttaaagggcaaatgtgattggtattccttaagcatgaacgcttattcctattttgaaaacggcagaatggtttttaac

SEQ ID NO: 25654 - DNA, 33 bp, unidentified
  source 1..33: mol_type = unassigned DNA; note = methanogen bacteria
tttactaataaatctttacttcctagcccttcc

SEQ ID NO: 25655 - DNA, 54 bp, unidentified
  source 1..54: mol_type = unassigned DNA; note = methanogen bacteria
tttttaggaggtattccattattcagtggaatactcaaaggtaaagctgctgga

SEQ ID NO: 25656 - DNA, 252 bp, unidentified
  source 1..252: mol_type = unassigned DNA; note = methanogen bacteria
gttaaatcaattgaatggcaacattggactttaaatcctattgaacttatttcctatagagcagcttttactttaaatattttagataaagttatacctatccaaactactacacatggtaatttattttattctactattacaggatattttactcatacagatcctcgtattttagttggacaagctgttttatctcaaactaaatctattacttctaccatattaggtccatctcttttagattttgga

SEQ ID NO: 25657 - DNA, 30 bp, unidentified
  source 1..30: mol_type = unassigned DNA; note = methanogen bacteria
cagattgcaacatcctcctcttttgattcc

SEQ ID NO: 25658 - DNA, 54 bp, unidentified
  source 1..54: mol_type = unassigned DNA; note = methanogen bacteria
acaggcacaactgacggaacaaataccctttttggcgtttcaaatgcacttagc

SEQ ID NO: 25659 - DNA, 51 bp, unidentified
  source 1..51: mol_type = unassigned DNA; note = methanogen bacteria
gttggaatgggatcagatagcattgcacaatcaatactcctcatggggctt

SEQ ID NO: 25660 - DNA, 30 bp, unidentified
  source 1..30: mol_type = unassigned DNA; note = methanogen bacteria
cagataggaagcgttcccgagccgaattca

SEQ ID NO: 25661 - DNA, 48 bp, unidentified
  source 1..48: mol_type = unassigned DNA; note = methanogen bacteria
atgggatttacctcacacacttacatgacaaatcccacagatttagga

SEQ ID NO: 25662 - DNA, 54 bp, unidentified
  source 1..54: mol_type = unassigned DNA; note = methanogen bacteria
gcaaacattggagccggatacacaatagctcaggcaatacttcttgcaaatctc

SEQ ID NO: 25663 - DNA, 90 bp, unidentified
  source 1..90: mol_type = unassigned DNA; note = methanogen bacteria
ggttcattcgaaagattacacttattaggtttagcttaccaaggtttaaacgctgataatttagtatatgacttagttaaagacaatgct

SEQ ID NO: 25664 - DNA, 120 bp, unidentified
  source 1..120: mol_type = unassigned DNA; note = methanogen bacteria
agtgtagtacaagcaactattgctcgtgcagaagcagacagtattattgctcctgaagaacaattaaccgatttcgctatttacaacactgacgacgcagctaaatggaacgcatacacc

SEQ ID NO: 25665 - DNA, 78 bp, unidentified
  source 1..78: mol_type = unassigned DNA; note = methanogen bacteria
ggtattccatctactttattatacttcaacgacaaccttgaattcgctactggtttacctggtcttgactatggtaga

SEQ ID NO: 25666 - DNA, 207 bp, unidentified
  source 1..207: mol_type = unassigned DNA; note = methanogen bacteria
atggctgattacgtctctatccgcgactggatcaactatccggaccccatgtcgaacgagttctacccgttcggcgatgcctacaacctgccgtacgacatctccctgaagctctgggacatcatcggcggcactctcgcatggctcctcgacctgctgttccccgggaacactgtgtccgagtggctcgtctgcgacggcaccagc

SEQ ID NO: 25667 - DNA, 39 bp, unidentified
  source 1..39: mol_type = unassigned DNA; note = methanogen bacteria
cctctgtccaacaggtggttcgtggtcgactacggcacc

SEQ ID NO: 25668 - DNA, 60 bp, unidentified
  source 1..60: mol_type = unassigned DNA; note = methanogen bacteria
ctcgccggcacgttcaacatcaacgagctggtcgctgcccagtacgacaatgtctggttc

SEQ ID NO: 25669 - DNA, 51 bp, unidentified
  source 1..51: mol_type = unassigned DNA; note = methanogen bacteria
ggaggctggaccctgcccttcatagacctcaacgcatgggacctctggtgg

SEQ ID NO: 25670 - DNA, 153 bp, unidentified
  source 1..153: mol_type = unassigned DNA; note = methanogen bacteria
ttcagctccggtttcggggatgcggaagaatactatcacgtggcagaacgtttcctcagcgggaagttctcctactccgaactcgggacggaccttccgcccctgacggtcctgctgctgatccctcccaagctgttctcgtattcgccagag

SEQ ID NO: 25671 - DNA, 114 bp, unidentified
  source 1..114: mol_type = unassigned DNA; note = methanogen bacteria
cccacccacgcattcggcgagatacccttcatcacactgccagacagggccgcgtcggattcggccctcggatggctgtacggcttgctgaactgggctcccgatgcgagcagt

SEQ ID NO: 25672 - DNA, 30 bp, unidentified
  source 1..30: mol_type = unassigned DNA; note = methanogen bacteria
atgacctttttccttgaaacatttccggga

SEQ ID NO: 25673 - DNA, 39 bp, unidentified
  source 1..39: mol_type = unassigned DNA; note = methanogen bacteria
gcggttgaaacattgctctccaatccaagtctgttgaca

SEQ ID NO: 25674 - DNA, 33 bp, unidentified
  source 1..33: mol_type = unassigned DNA; note = methanogen bacteria
actgaatatgctacatctttaggttcatcagct

SEQ ID NO: 25675 - DNA, 30 bp, unidentified
  source 1..30: mol_type = unassigned DNA; note = methanogen bacteria
ctttatgcatctgaagttaatttgacagaa

SEQ ID NO: 25676 - DNA, 51 bp, unidentified
  source 1..51: mol_type = unassigned DNA; note = methanogen bacteria
ggaataggaggatatcatttaatgcctatcaaaaattcagcaactttgaca

SEQ ID NO: 25677 - DNA, 48 bp, unidentified
  source 1..48: mol_type = unassigned DNA; note = methanogen bacteria
tgcatcggaactgtcgacatttcacaagcaattctcatttcaggactt

SEQ ID NO: 25678 - DNA, 48 bp, unidentified
  source 1..48: mol_type = unassigned DNA; note = methanogen bacteria
acgtccctcgtcgagggcaacttctccgagagccgtgagttcgcctcc

SEQ ID NO: 25679 - DNA, 45 bp, unidentified
  source 1..45: mol_type = unassigned DNA; note = methanogen bacteria
tcgggtctcccgcagatggtcgacgacttcggaaccaacgaggcc

SEQ ID NO: 25680 - DNA, 33 bp, unidentified
  source 1..33: mol_type = unassigned DNA; note = methanogen bacteria
tacatataccaagataagttcgggttctccacc

SEQ ID NO: 25681 - DNA, 36 bp, unidentified
  source 1..36: mol_type = unassigned DNA; note = methanogen bacteria
accagcatcgccgacgatttcggcacctccgaatcg

SEQ ID NO: 25682 - DNA, 33 bp, unidentified
  source 1..33: mol_type = unassigned DNA; note = methanogen bacteria
cccttcctgctcgaagcggcgggactttcggag

SEQ ID NO: 25683 - DNA, 54 bp, unidentified
  source 1..54: mol_type = unassigned DNA; note = methanogen bacteria
tttgcagttaagtcatatcagcccttgcctgtggccaatgcatctgcactgact

SEQ ID NO: 25684 - DNA, 51 bp, unidentified
  source 1..51: mol_type = unassigned DNA; note = methanogen bacteria
gtaggaattggaacactggatatttcccaggccattctcattgcaggtctt

SEQ ID NO: 25685 - DNA, 45 bp, unidentified
  source 1..45: mol_type = unassigned DNA; note = methanogen bacteria
tccggactcccgcagatggtggaggacttcggtaccaacgaatcg

SEQ ID NO: 25686 - DNA, 33 bp, unidentified
  source 1..33: mol_type = unassigned DNA; note = methanogen bacteria
tacatctatcaggagaaattcggattctccacc

SEQ ID NO: 25687 - DNA, 36 bp, unidentified
  source 1..36: mol_type = unassigned DNA; note = methanogen bacteria
accagcatcaccgacgatttcggtacctccgaatcg

SEQ ID NO: 25688 - DNA, 33 bp, unidentified
  source 1..33: mol_type = unassigned DNA; note = methanogen bacteria
cccttcctgcttgatgccgccggattatcggac

SEQ ID NO: 25689 - DNA, 60 bp, unidentified
  source 1..60: mol_type = unassigned DNA; note = methanogen bacteria
gttggtaatgaaacattcaatgctactgtggttaacggtactgcaatcattaatattacc

SEQ ID NO: 25690 - DNA, 33 bp, unidentified
  source 1..33: mol_type = unassigned DNA; note = methanogen bacteria
catgaagttgaagtaatctactccggtgatgct

SEQ ID NO: 25691 - DNA, 36 bp, unidentified
  source 1..36: mol_type = unassigned DNA; note = methanogen bacteria
gtgaatggtactgcggttgttactgtgactgtgcct

SEQ ID NO: 25692 - DNA, 42 bp, unidentified
  source 1..42: mol_type = unassigned DNA; note = methanogen bacteria
ggtatgaattatactgctaagattgatgatggtaaagctaca

SEQ ID NO: 25693 - DNA, 30 bp, unidentified
  source 1..30: mol_type = unassigned DNA; note = methanogen bacteria
gaatatgccagttcaatgggatcgtctgca

SEQ ID NO: 25694 - DNA, 30 bp, unidentified
  source 1..30: mol_type = unassigned DNA; note = methanogen bacteria
ctttatgcagttgaagtggatttggttgat

SEQ ID NO: 25695 - DNA, 33 bp, unidentified
  source 1..33: mol_type = unassigned DNA; note = methanogen bacteria
tttaaatcaaggcctcttcttccatttccctca

SEQ ID NO: 25696 - DNA, 51 bp, unidentified
  source 1..51: mol_type = unassigned DNA; note = methanogen bacteria
aatttaggaggtataccattattcagcggataccttaaaagtaaagctgca

SEQ ID NO: 25697 - DNA, 249 bp, unidentified
  source 1..249: mol_type = unassigned DNA; note = methanogen bacteria
agatcaatagaatggcagcattggacattaaatcccctggagttaatatcttatagggcggcttttaccctaaatgttctggatagaatcacatatcaccaggccattaccggtggaaatctattatactccactttaacaggttatttcacctcaactgatccacgtgtattggtaggtgaggctgttcttttaaaacatcattccattacctccaccatatttggtcccgtgctattggatttcggt

SEQ ID NO: 25698 - DNA, 30 bp, unidentified
  source 1..30: mol_type = unassigned DNA; note = methanogen bacteria
gaatatgcaacatcaatgggttcaacagct

SEQ ID NO: 25699 - DNA, 30 bp, unidentified
  source 1..30: mol_type = unassigned DNA; note = methanogen bacteria
ctgtatgcggttgaagtaaacctgacttca

SEQ ID NO: 25700 - DNA, 54 bp, unidentified
  source 1..54: mol_type = unassigned DNA; note = methanogen bacteria
caccttggaggaataccattattctctgcaacattgaaggctaaggctgcatca

SEQ ID NO: 25701 - DNA, 252 bp, unidentified
  source 1..252: mol_type = unassigned DNA; note = methanogen bacteria
gttcaggccatcagctggcagcattggcatttgaatgctattgaacttgtatcatatagggcagcattcacattgaatgtcttggagcatgccattcgcaatcagttttcaacagcaggcaatctcttctattctacccttaccggattcttcactcatatagatccaagagttcttgttggtcaagctacacttgcaagggaccattcaatcacttctacaatattcggtccggcacttcttgactttgga

SEQ ID NO: 25702 - DNA, 36 bp, unidentified
  source 1..36: mol_type = unassigned DNA; note = methanogen bacteria
acagccatttcggatgatttcagcatctcggaatca

SEQ ID NO: 25703 - DNA, 33 bp, unidentified
  source 1..33: mol_type = unassigned DNA; note = methanogen bacteria
cccttcatgctccagaccgcaggcatgtcggag

SEQ ID NO: 25704 - DNA, 36 bp, unidentified
  source 1..36: mol_type = unassigned DNA; note = methanogen bacteria
tacgaggcggacatcgccgaagtttccttcgacgag

SEQ ID NO: 25705 - DNA, 117 bp, unidentified
  source 1..117: mol_type = unassigned DNA; note = methanogen bacteria
ctgggcatggacccggacatggggctggccctcggctcgataagccttgtcggagggcacgggacggcggggtcgttcggccccgacctggtggacatctacggcgtggagaacgcc

SEQ ID NO: 25706 - DNA, 36 bp, unidentified
  source 1..36: mol_type = unassigned DNA; note = methanogen bacteria
cattacgcggacgtggccgagttccatttcgacgac

SEQ ID NO: 25707 - DNA, 120 bp, unidentified
  source 1..120: mol_type = unassigned DNA; note = methanogen bacteria
tacatgggactggatcccaggataggattgtgcctaggttccatctccctcaccggcggacacgggaccgcagccagttacgggcagctgctggtagaggaatacggtctcaccagcgca

SEQ ID NO: 25708 - DNA, 30 bp, unidentified
  source 1..30: mol_type = unassigned DNA; note = methanogen bacteria
gagatgaagctctggcagctgtccgatctc

SEQ ID NO: 25709 - DNA, 90 bp, unidentified
  source 1..90: mol_type = unassigned DNA; note = methanogen bacteria
tttagattaagtggagattacgcaggattcgttgaagcacttatgggattattccaaaatcctggtgaatttgtcaacaatttattaaat

SEQ ID NO: 25710 - DNA, 63 bp, unidentified
  source 1..63: mol_type = unassigned DNA; note = methanogen bacteria
aatcctgcatacagcattccagagtttacaacacagggattgtatttaaccgacaagagcatt

SEQ ID NO: 25711 - DNA, 90 bp, unidentified
  source 1..90: mol_type = unassigned DNA; note = methanogen bacteria
tttttccacggccagcctcagcttgcagcaatctacggcgcaaccccttcagtgggagtttatgaaatggcaaaaacattggtgggtcct

SEQ ID NO: 25712 - DNA, 36 bp, unidentified
  source 1..36: mol_type = unassigned DNA; note = methanogen bacteria
acggacatcgccgatgatttcggcatctcggaatcg

SEQ ID NO: 25713 - DNA, 33 bp, unidentified
  source 1..33: mol_type = unassigned DNA; note = methanogen bacteria
cccttcctgctccagaccgcgggcatgtccgag

SEQ ID NO: 25714 - DNA, 45 bp, unidentified
  source 1..45: mol_type = unassigned DNA; note = methanogen bacteria
cagggtggagtaattgtatctgcagttcctttttctataaattat

SEQ ID NO: 25715 - DNA, 81 bp, unidentified
  source 1..81: mol_type = unassigned DNA; note = methanogen bacteria
tttccggaccaaattggtttagaacactattggaagtcaattattcctacatttttcactaacggccaatttagtagatac

SEQ ID NO: 25716 - DNA, 30 bp, unidentified
  source 1..30: mol_type = unassigned DNA; note = methanogen bacteria
caaactcaggcatttaacctcaatgatggg

SEQ ID NO: 25717 - DNA, 60 bp, unidentified
  source 1..60: mol_type = unassigned DNA; note = methanogen bacteria
gaatcactacatttgatagaaacgggatttgtaatatcttcatttaactgttatttatct

SEQ ID NO: 25718 - DNA, 60 bp, unidentified
  source 1..60: mol_type = unassigned DNA; note = methanogen bacteria
atgtcatttgcccatttcttccttgataaaaaatttgcatttttagctcaaatggatcct

SEQ ID NO: 25719 - DNA, 30 bp, unidentified
  source 1..30: mol_type = unassigned DNA; note = methanogen bacteria
gaattcgccacatctttaggctcatcagct

SEQ ID NO: 25720 - DNA, 30 bp, unidentified
  source 1..30: mol_type = unassigned DNA; note = methanogen bacteria
ctttatgctgtagaggttaatttaacaact

SEQ ID NO: 25721 - DNA, 36 bp, unidentified
  source 1..36: mol_type = unassigned DNA; note = methanogen bacteria
tcgtactccattaccgtcctcggcaccgatgccacg

SEQ ID NO: 25722 - DNA, 30 bp, unidentified
  source 1..30: mol_type = unassigned DNA; note = methanogen bacteria
ccctacggcatcgaactgggcatggagacc

SEQ ID NO: 25723 - DNA, 33 bp, unidentified
  source 1..33: mol_type = unassigned DNA; note = methanogen bacteria
gccgagtacgccacatctttaggttcatcggca

SEQ ID NO: 25724 - DNA, 30 bp, unidentified
  source 1..30: mol_type = unassigned DNA; note = methanogen bacteria
ctttatgcaattgaagttgatttgactgct

SEQ ID NO: 25725 - DNA, 36 bp, unidentified
  source 1..36: mol_type = unassigned DNA; note = methanogen bacteria
acatataaaataaaaaacttagtttttccatcacca

SEQ ID NO: 25726 - DNA, 51 bp, unidentified
  source 1..51: mol_type = unassigned DNA; note = methanogen bacteria
tctggaggaatacctttatttagtggatatttaaaagcacatgctgtgact

SEQ ID NO: 25727 - DNA, 252 bp, unidentified
  source 1..252: mol_type = unassigned DNA; note = methanogen bacteria
gttaaatcaattgaatggcagcaatggaatttaaatcctttagaactatttttttatagggcaggatatacattatctgtttttgatgaattattaaatttccaagggcaaactcatgggacattgttatactattctataatgggattttttgaatcacaagatcctcgtattattgttggtacgttagtccttggttataaacattcagcaacttcaactatttttggaccatcattattagattttgga

SEQ ID NO: 25728 - DNA, 51 bp, unidentified
  source 1..51: mol_type = unassigned DNA; note = methanogen bacteria
gcagtgagcggatacaatttaatgcctgtcacaaattcagcgacattgaca

SEQ ID NO: 25729 - DNA, 48 bp, unidentified
  source 1..48: mol_type = unassigned DNA; note = methanogen bacteria
tgcatgggaactgtcgacatttcccaggcaattctcatttcaggtctt

SEQ ID NO: 25730 - DNA, 36 bp, unidentified; identical to SEQ ID NO: 25704
  source 1..36: mol_type = unassigned DNA; note = methanogen bacteria

SEQ ID NO: 25731 - DNA, 117 bp, unidentified
  source 1..117: mol_type = unassigned DNA; note = methanogen bacteria
ctgggcatggacccggagatggggctggcgctcgggtccataagcctcgtcggcgggcacggcaccgccgggtccttcggaccggacctggttgacatctacggtgtggagaacgcc

SEQ ID NO: 25732 - DNA, 42 bp, unidentified
  source 1..42: mol_type = unassigned DNA; note = methanogen bacteria
tgcagtaatgtttatgatattaatttttgtaggtggtcttgt

SEQ ID NO: 25733 - DNA, 39 bp, unidentified
  source 1..39: mol_type = unassigned DNA; note = methanogen bacteria
ttgaataatcaactcgcccaacaacaaaatacgtttcta

SEQ ID NO: 25734 - DNA, 246 bp, unidentified
  source 1..246: mol_type = unassigned DNA; note = methanogen bacteria
ggtgcgatattaagttctactgttgtttatgttgattcggatgatgtggataggttattgcctgcagattccaattcaatcctagtggcttctgatttgattcatagcattaaatttgataaggatggggatattcaagtagtcaaagcatttattaatttgactaaatcttttagtgaagatgaagtattggatgctatctcctctatagatttaaaaagagaaggacttgactctatcttatat

SEQ ID NO: 25735 - DNA, 30 bp, unidentified
  source 1..30: mol_type = unassigned DNA; note = methanogen bacteria
tctgtagtgattggcgatttggttcctggt

SEQ ID NO: 25736 - DNA, 51 bp, unidentified
  source 1..51: mol_type = unassigned DNA; note = methanogen bacteria
ttgggattcggttcaaatgcagcaggcacactaaccagcaattccctagga

SEQ ID NO: 25737 - DNA, 54 bp, unidentified
  source 1..54: mol_type = unassigned DNA; note = methanogen bacteria
gcaaacatcggagcaaactacacaattgcacaggcaattctgcttgcaaatctc

SEQ ID NO: 25738 - DNA, 87 bp, unidentified
  source 1..87: mol_type = unassigned DNA; note = methanogen bacteria
atgcagcttgacatagtcgatgcaatatattttacctttgaaacaatagctacaataggctatggggacattgttcctgtgacaaat

SEQ ID NO: 25739 - DNA, 51 bp, unidentified
  source 1..51: mol_type = unassigned DNA; note = methanogen bacteria
gcaatgggcggatacaatctgatgcctgttgcaaactcagagacattgaca

SEQ ID NO: 25740 - DNA, 48 bp, unidentified
  source 1..48: mol_type = unassigned DNA; note = methanogen bacteria
tgcatggcaacacttgacatctcacaggcaattctcatctcaggcctt

SEQ ID NO: 25741 - DNA, 30 bp, unidentified
  source 1..30: mol_type = unassigned DNA; note = methanogen bacteria
cagattgggtctgcagcacctatcgactcc

SEQ ID NO: 25742 - DNA, 51 bp, unidentified
  source 1..51: mol_type = unassigned DNA; note = methanogen bacteria
ggaataaacgggtatcacttaatgcctgtcgctacttcagagaccttgaca

SEQ ID NO: 25743 - DNA, 51 bp, unidentified
  source 1..51: mol_type = unassigned DNA; note = methanogen bacteria
gtaagcattggaactgttgatatttcacaggcaattctcatttcaggcctt

SEQ ID NO: 25744 - DNA, 45 bp, unidentified
  source 1..45: mol_type = unassigned DNA; note = methanogen bacteria
ccatcacaggttttcataccattattcataaaactgtttggcgga

SEQ ID NO: 25745 - DNA, 30 bp, unidentified
  source 1..30: mol_type = unassigned DNA; note = methanogen bacteria
gagtatgcaacttcaatgggatcatctgct

SEQ ID NO: 25746 - DNA, 30 bp, unidentified
  source 1..30: mol_type = unassigned DNA; note = methanogen bacteria
ttgtacgcggtcgaagttaatttggttgat

SEQ ID NO: 25747 - DNA, 45 bp, unidentified
  source 1..45: mol_type = unassigned DNA; note = methanogen bacteria
ccatcaaaagttttcatacccctattcatgaaaatattcggcatg

SEQ ID NO: 25748 - DNA, 33 bp, unidentified
  source 1..33: mol_type = unassigned DNA; note = methanogen bacteria
acagaatatgcaacctcgctcggctcatctgca

SEQ ID NO: 25749 - DNA, 30 bp, unidentified
  source 1..30: mol_type = unassigned DNA; note = methanogen bacteria
ctgtatgctgcagaagtcgatttgactgct

SEQ ID NO: 25750 - DNA, 45 bp, unidentified
  source 1..45: mol_type = unassigned DNA; note = methanogen bacteria
ccgtcaagggtgttcataccattattcatgaaactcttcggagga

SEQ ID NO: 25751 - DNA, 105 bp, unidentified
  source 1..105: mol_type = unassigned DNA; note = methanogen bacteria
ttccctgtatcagtgcctctgacagcttctgttgatccatcaagtgttttttcaaaaatcctgactgacatgatttcaaatccggtgactgcattgatagaagga

SEQ ID NO: 25752 - DNA, 36 bp, unidentified
  source 1..36: mol_type = unassigned DNA; note = methanogen bacteria
acctgccattcaatgggcattgcgattaatttcccg

SEQ ID NO: 25753 - DNA, 33 bp, unidentified; identical to SEQ ID NO: 25043
  source 1..33: mol_type = unassigned DNA; note = methanogen bacteria

SEQ ID NO: 25754 - DNA, 54 bp, unidentified
  source 1..54: mol_type = unassigned DNA; note = methanogen bacteria
cccggtcagtccactctatttattaaaataaattcaaattgtgattataatatg

SEQ ID NO: 25755 - DNA, 42 bp, unidentified
  source 1..42: mol_type = unassigned DNA; note = methanogen bacteria
cttgttgtatcttcgagtcaggcagaatttactcaccctttt

SEQ ID NO: 25756 - DNA, 300 bp, unidentified
  source 1..300: mol_type = unassigned DNA; note = methanogen bacteria
tcaagggttactggaatgacaatcttttcaccaatgttaaggttgggcaggattgaacaatactccacttctagtgtaaaaatggtattgaacaatatccagcttattggacacaatggaaacgcttcatactggggtgcagatggaacagcctttgctgaaggttatatcacgcttccaatgcaattggttttattctttggccttcctttcccaatgttctttggtatattggttaaccaaaaggataccgttgattacatgcttccgggaattttaggttatggatttgattttggt

SEQ ID NO: 25757 - DNA, 30 bp, unidentified; identical to SEQ ID NO: 25646
  source 1..30: mol_type = unassigned DNA; note = methanogen bacteria

SEQ ID NO: 25758 - DNA, 57 bp, unidentified
  source 1..57: mol_type = unassigned DNA; note = methanogen bacteria
ttagcaaactctccggttccgacaactgccctttcaggcatttccaaaaccctgagt

SEQ ID NO: 25759 - DNA, 51 bp, unidentified
  source 1..51: mol_type = unassigned DNA; note = methanogen bacteria
gtaggcattggaacagacaatgttgcacatgccatactcctgatgggtctt

SEQ ID NO: 25760 - DNA, 45 bp, unidentified
  source 1..45: mol_type = unassigned DNA; note = methanogen bacteria
ccatcaaaagttttcataccactattcatcaaaatgtttggtgga

SEQ ID NO: 25761 - DNA, 36 bp, unidentified
  source 1..36: mol_type = unassigned DNA; note = methanogen bacteria
accagcatctgcgacgacctggccgtctccgaatcg

SEQ ID NO: 25762 - DNA, 36 bp, unidentified
  source 1..36: mol_type = unassigned DNA; note = methanogen bacteria
cctttcctcaaacaggtggccggcatatcggacggc

SEQ ID NO: 25763 - DNA, 36 bp, unidentified
  source 1..36: mol_type = unassigned DNA; note = methanogen bacteria
tcgtacaccatggacgtgctgggtgccgactcgacc

SEQ ID NO: 25764 - DNA, 30 bp, unidentified
  source 1..30: mol_type = unassigned DNA; note = methanogen bacteria
ccctacggggaggccaccgggctccactcc

SEQ ID NO: 25765 - DNA, 75 bp, unidentified
  source 1..75: mol_type = unassigned DNA; note = methanogen bacteria
aatcccggtcagtccattctaatttatttaattaatgaaaattgtgatttaaatatgatattaatagctcaaaat

SEQ ID NO: 25766 - DNA, 57 bp, unidentified
  source 1..57: mol_type = unassigned DNA; note = methanogen bacteria
gatattgcattgcttgtagtatcttcaagtcaggcagagtttacgcatccattcggt

SEQ ID NO: 25767 - DNA, 300 bp, unidentified
  source 1..300: mol_type = unassigned DNA; note = methanogen bacteria
gcaagagttagtggaatgacaatcttttcacctatgttgagattgggtaggattgagcagtattcaacatcaagtgtaaaaatggtattgaataatattcagcttataggacacaatggaaacgcttcttactggggagctgaaggaacagcattcgctgaaggttacattacacttcctatgcaattggttttattctttggtctaccgttcccaatgttctttggtatattggttaaccaaaaggatacagtcgattatatgcttccgggtattttaggttatggatttgacttcgga

SEQ ID NO: 25768 - DNA, 39 bp, unidentified
  source 1..39: mol_type = unassigned DNA; note = methanogen bacteria
atgaccagtatctgctccgatctgaacgtctccgaatcc

SEQ ID NO: 25769 - DNA, 36 bp, unidentified
  source 1..36: mol_type = unassigned DNA; note = methanogen bacteria
ccgttcctcaaacaggttgctgggatatccgattcc

SEQ ID NO: 25770 - DNA, 33 bp, unidentified
  source 1..33: mol_type = unassigned DNA; note = methanogen bacteria
tcgttctccatggacgtcctcggtgccgattca

SEQ ID NO: 25771 - DNA, 30 bp, unidentified
  source 1..30: mol_type = unassigned DNA; note = methanogen bacteria
ccatacggagaggccataggcctgcacact

SEQ ID NO: 25772 - DNA, 36 bp, unidentified
  source 1..36: mol_type = unassigned DNA; note = methanogen bacteria
ttatcatttggtcaacatgaatttactcacccattt

SEQ ID NO: 25773 - DNA, 297 bp, unidentified
  source 1..297: mol_type = unassigned DNA; note = methanogen bacteria
tcaaggattacaggtattgagattttctcccctatgctaaggatttcaagacttgaccagaactcattggctagtgtgaaattagttttagacaacacatggttaatcggacatgaccctgcagcatcctattggtctgcaagtactggatttgctgatggatacattagccttcctatgtcattcattctaatgttcggtcttccgtttccgttgttctttggaatgctggttactaaaaaagatgtaatcgactacatgcttcctggaactttcggttatgcatatgacttcgga

SEQ ID NO: 25774 - DNA, 54 bp, unidentified
  source 1..54: mol_type = unassigned DNA; note = methanogen bacteria
ggggtctattcttcttttatgatagagcttgatagatcaagtgccatttgtcaa

SEQ ID NO: 25775 - DNA, 96 bp, unidentified
  source 1..96: mol_type = unassigned DNA; note = methanogen bacteria
tataagtcttatgttaatgatttagggaaggaattagaatctggagagttaaattccttaaataaatcttttgaagacatttcggctaaatttgaa

SEQ ID NO: 25776 - DNA, 30 bp, unidentified
  source 1..30: mol_type = unassigned DNA; note = methanogen bacteria
tctgtagtgataggggatttggtgcctggt

SEQ ID NO: 25777 - DNA, 30 bp, unidentified
  source 1..30: mol_type = unassigned DNA; note = methanogen bacteria
gaatatgctacttcaatgggttcttcggca

SEQ ID NO: 25778 - DNA, 30 bp, unidentified
  source 1..30: mol_type = unassigned DNA; note = methanogen bacteria
ttatatgcagttgaagttgatttgacaggt

SEQ ID NO: 25779 - DNA, 30 bp, unidentified
  source 1..30: mol_type = unassigned DNA; note = methanogen bacteria
cagataggctcactctcagcagtggactca

SEQ ID NO: 25780 - DNA, 54 bp, unidentified
  source 1..54: mol_type = unassigned DNA; note = methanogen bacteria
tttgcaggcaacaccttcgcaactatgcctgcggccacagcttcaaaattgggc

SEQ ID NO: 25781 - DNA, 48 bp, unidentified
  source 1..48: mol_type = unassigned DNA; note = methanogen bacteria
ggacttggaacaacaagcatttcacaggcaatactcatatcaggcctt

SEQ ID NO: 25782 - DNA, 87 bp, unidentified
  source 1..87: mol_type = unassigned DNA; note = methanogen bacteria
agtattattaggcctggttttggtaccagttcaactatcacgttagttattaaaattttttcaaaagaatcactaagtttaagggat

SEQ ID NO: 25783 - DNA, 45 bp, unidentified
  source 1..45: mol_type = unassigned DNA; note = methanogen bacteria
cctacaaatgtatttatcccacttgcaatgaaagtattcggatta

SEQ ID NO: 25784 - DNA, 264 bp, unidentified
  source 1..264: mol_type = unassigned DNA; note = methanogen bacteria
gatgaaagtttttataatttaattggtgaggaaataagtagagaataccttgttgatttaatgataaattattatcagttgaaaaaacaagtaggtgaaactaaagtaaccgattttaatgaaggtagtgaaataaggaatattcttgaagcaatagcagttgcagtatatgctttaatggaagaagaaaatgaattaactaaaattggttttattgatacagcggatggagatttcttggatttgcatggtcgtaatcctttt

SEQ ID NO: 25785 - DNA, 99 bp, unidentified
  source 1..99: mol_type = unassigned DNA; note = methanogen bacteria
gaacgtgatactggtactgaggctcaaggttcagttactttcagtattgctgaagctttaactagtgagatgattattccatctgatactgttgttgtt

SEQ ID NO: 25786 - DNA, 93 bp, unidentified
  source 1..93: mol_type = unassigned DNA; note = methanogen bacteria
acattcatagacactataattgatgctgaaatattagacagtgaaggtaatccattcacagagttaagtgttaatgatgatgaatgtattaaa

SEQ ID NO: 25787 - DNA, 45 bp, unidentified
  source 1..45: mol_type = unassigned DNA; note = methanogen bacteria
ccgtcccaagttttcataccattatttatgaaaatatttggagga

SEQ ID NO: 25788 - DNA, 36 bp, unidentified
  source 1..36: mol_type = unassigned DNA; note = methanogen bacteria
cctcaaattgcgcaatattttaatgtagatatcaca

SEQ ID NO: 25789 - DNA, 36 bp, unidentified
  source 1..36: mol_type = unassigned DNA; note = methanogen bacteria
gaatttctaaattcattaactaacatattcggaact

SEQ ID NO: 25790 - DNA, 51 bp, unidentified
  source 1..51: mol_type = unassigned DNA; note = methanogen bacteria
cctgcaaatgtatttattccgctgtttatgaaagtatttagtcttatatgc

SEQ ID NO: 25791 - DNA, 42 bp, unidentified
  source 1..42: mol_type = unassigned DNA; note = methanogen bacteria
tttgatttggataagtttcattatactttttcaaatccaaat

SEQ ID NO: 25792 - DNA, 69 bp, unidentified
  source 1..69: mol_type = unassigned DNA; note = methanogen bacteria
attacacctgctcatatgagtatttcagattttggtcaaggtcttttgcctattagccatagtgcatat

SEQ ID NO: 25793 - DNA, 45 bp, unidentified
  source 1..45: mol_type = unassigned DNA; note = methanogen bacteria
atgacttcatatcctgttcaaaatatatttgtaggtaataatttt

SEQ ID NO: 25794 - DNA, 96 bp, unidentified
  source 1..96: mol_type = unassigned DNA; note = methanogen bacteria
atgatggattttaatacttctactaattattggtggagtttacctatgttcggtgttatggagggatcaataggattttcattttctttagagaat

SEQ ID NO: 25795 - DNA, 60 bp, unidentified
  source 1..60: mol_type = unassigned DNA; note = methanogen bacteria
tttttccgtcaaatattatgggggcacttaggtataaattctttttataacagtccttat

SEQ ID NO: 25796 - DNA, 30 bp, unidentified
  source 1..30: mol_type = unassigned DNA; note = methanogen bacteria
tcaagtcaggcggaatttacacatccattc

SEQ ID NO: 25797 - DNA, 297 bp, unidentified
  source 1..297: mol_type = unassigned DNA; note = methanogen bacteria
agagtgtcaggaatgacaattttctctccacttttaaggttaggtaggattgagcaatattcattatcaagtattaagacggtattaaataatattcagatgataggccacagtgccaaagcttcttattggggtgctgaaggaacggcttttgctgaaggttatattacgcttcctatgcaacttgtgttattctttggtcttccattcccgatgtttttcggtatacttgttaaccaaaaggatacaatcgattatatgcttccaggtatattcggttacggattcgactttggg

SEQ ID NO: 25798 - DNA, 30 bp, unidentified
  source 1..30: mol_type = unassigned DNA; note = methanogen bacteria
gaatatgcaacatcaatgggatcctctgct

SEQ ID NO: 25799 - DNA, 30 bp, unidentified
  source 1..30: mol_type = unassigned DNA; note = methanogen bacteria
ttatatgctgttgaagtcaatttaacaggt

SEQ ID NO: 25800 - DNA, 45 bp, unidentified
  source 1..45: mol_type = unassigned DNA; note = methanogen bacteria
ccatcaaaagttttcatccccttattcatgaaaatctttggtgga

SEQ ID NO: 25801 - DNA, 33 bp, unidentified
  source 1..33: mol_type = unassigned DNA; note = methanogen bacteria
caaatatctgaatatttcaacactactattgca

SEQ ID NO: 25802 - DNA, 30 bp, unidentified
  source 1..30: mol_type = unassigned DNA; note = methanogen bacteria
tttttgcagactgtatgtcacatttatacc

SEQ ID NO: 25803 - DNA, 33 bp, unidentified
  source 1..33: mol_type = unassigned DNA; note = methanogen bacteria
acagagtatgccagctcccttggaacaagcgcc

SEQ ID NO: 25804 - DNA, 30 bp, unidentified
  source 1..30: mol_type = unassigned DNA; note = methanogen bacteria
ttatatgccgttgaaacagacttgactgct

SEQ ID NO: 25805 - DNA, 45 bp, unidentified
  source 1..45: mol_type = unassigned DNA; note = methanogen bacteria
ccttcaaaggtattcataccgttgttcatgaaaatcttcggcgga

SEQ ID NO: 25806 - DNA, 33 bp, unidentified
  source 1..33: mol_type = unassigned DNA; note = methanogen bacteria
tcgtactccatcaccgtcctcggcaccgatgcc

SEQ ID NO: 25807 - DNA, 30 bp, unidentified
  source 1..30: mol_type = unassigned DNA; note = methanogen bacteria
ccctacggaatcgaactggggatggaaacg

SEQ ID NO: 25808 - DNA, 45 bp, unidentified
  source 1..45: mol_type = unassigned DNA; note = methanogen bacteria
ccatccaaagttttcataccactgttcatgaaaatctttggagga

SEQ ID NO: 25809 - DNA, 237 bp, unidentified
  source 1..237: mol_type = unassigned DNA; note = methanogen bacteria
tcgatgatctacgataccaactactgggccctggtcatcaggaacatcgacagcggcaacggactctacgggctcgacggctacttctacactcctgtctggggatacctcctggcactgggggagtggttcaacgattcgttcctgaacctgggcgaatcggccgtccgcgtctcggagatagtgtacttcgagaacggggaccaccaaacgaccgctatgataacgtccgtggcc

SEQ ID NO: 25810 - DNA, 84 bp, unidentified
  source 1..84: mol_type = unassigned DNA; note = methanogen bacteria
atctcggacggaacggtgggggagtgcttccgcttcatcaccgaccgcatggggatctcgttcggagattccgcagggagccgc

SEQ ID NO: 25811 - DNA, 45 bp, unidentified
  source 1..45: mol_type = unassigned DNA; note = methanogen bacteria
ccttccaaagttttcataccattattcatgaaaatatttggagga

SEQ ID NO: 25812 - DNA, 33 bp, unidentified
  source 1..33: mol_type = unassigned DNA; note = methanogen bacteria
acagaatacgcaacaacaatgggctcaactgca

SEQ ID NO: 25813 - DNA, 30 bp, unidentified
  source 1..30: mol_type = unassigned DNA; note = methanogen bacteria
ctgtatgcagttgaggttaacttgactggg

SEQ ID NO: 25814 - DNA, 36 bp, unidentified
  source 1..36: mol_type = unassigned DNA; note = methanogen bacteria
ccccagatagcccagtattttaatattggtataaac

SEQ ID NO: 25815 - DNA, 33 bp, unidentified
  source 1..33: mol_type = unassigned DNA; note = methanogen bacteria
caatttttacaaacaataacccatattatagat

SEQ ID NO: 25816 - DNA, 39 bp, unidentified
  source 1..39: mol_type = unassigned DNA; note = methanogen bacteria
ggaatgtttggcacggatattgctcttactaattttaat

SEQ ID NO: 25817 - DNA, 69 bp, unidentified
  source 1..69: mol_type = unassigned DNA; note = methanogen bacteria
ttaacaccttccagtatatctgtagaaattcttgggcaaagtctcttaccaattagtcatagtgggtac

SEQ ID NO: 25818 - DNA, 54 bp, unidentified
  source 1..54: mol_type = unassigned DNA; note = methanogen bacteria
cctccaatgacagcttatccagttcaaatggtatattctggtaataatttccaa

SEQ ID NO: 25819 - DNA, 96 bp, unidentified
  source 1..96: mol_type = unassigned DNA; note = methanogen bacteria
tatattgatttaactagtaaggcatatatttggtggagtttaccaatagaaggaattatgaaaaattcattgtttacgggagtttatgctgaaaat

SEQ ID NO: 25820 - DNA, 72 bp, unidentified
  source 1..72: mol_type = unassigned DNA; note = methanogen bacteria
aatacaattgtcagcaacctactactatggaaaacattagatttaccgagttattataactgtccatattta

SEQ ID NO: 25821 - DNA, 51 bp, unidentified
  source 1..51: mol_type = unassigned DNA; note = methanogen bacteria
ggaataaatggaaatcaattaattcctgtctctaattcagctacactgaca

SEQ ID NO: 25822 - DNA, 48 bp, unidentified
  source 1..48: mol_type = unassigned DNA; note = methanogen bacteria
tgcatcggaactgtcgacatttcacaggcaattctcatttcagggctt

SEQ ID NO: 25823 - DNA, 36 bp, unidentified
  source 1..36: mol_type = unassigned DNA; note = methanogen bacteria
accggcatcgccgacgatttcggggtcagcgaatcg

SEQ ID NO: 25824 - DNA, 36 bp, unidentified
  source 1..36: mol_type = unassigned DNA; note = methanogen bacteria
ccgttcatgctcgatgcggtggggatgtctccggaa

SEQ ID NO: 25825 - DNA, 45 bp, unidentified
  source 1..45: mol_type = unassigned DNA; note = methanogen bacteria
ccttcaaaagttttcataccactattcatgaaaatatttggagga

SEQ ID NO: 25826 - DNA, 33 bp, unidentified
  source 1..33: mol_type = unassigned DNA; note = methanogen bacteria
accgagtatgcaacggcaatgggctcaactgca

SEQ ID NO: 25827 - DNA, 30 bp, unidentified
  source 1..30: mol_type = unassigned DNA; note = methanogen bacteria
ctgtatgcagttgaagtcaacctgacagcc

SEQ ID NO: 25828 - DNA, 45 bp, unidentified
  source 1..45: mol_type = unassigned DNA; note = methanogen bacteria
ccatcaaaagttttcataccattattcatgaaaatatttggtgga

SEQ ID NO: 25829 - DNA, 30 bp, unidentified
  source 1..30: mol_type = unassigned DNA; note = methanogen bacteria
cagattgccacagcagcaccccttaattcc

SEQ ID NO: 25830 - DNA, 51 bp, unidentified
  source 1..51: mol_type = unassigned DNA; note = methanogen bacteria
ggattaaacggatatcatttaattccagctaaaaattccgcttcactgaca

SEQ ID NO: 25831 - DNA, 51 bp, unidentified
  source 1..51: mol_type = unassigned DNA; note = methanogen bacteria
gtatccatcggaaccgctgacatttcacaggcaattcttctttcaggtctt

SEQ ID NO: 25832 - DNA, 51 bp, unidentified
  source 1..51: mol_type = unassigned DNA; note = methanogen bacteria
ggaataaatggaaatcatttaattcctgttgcaaattcagctgcactgaca

SEQ ID NO: 25833 - DNA, 48 bp, unidentified
  source 1..48: mol_type = unassigned DNA; note = methanogen bacteria
tgcattggaactgtcgacatttcacaggcgattctgatttcaggcctt

SEQ ID NO: 25834 - DNA, 30 bp, unidentified
  source 1..30: mol_type = unassigned DNA; note = methanogen bacteria
gaatacgccactgcactgggctcaactgca

SEQ ID NO: 25835 - DNA, 30 bp, unidentified
  source 1..30: mol_type = unassigned DNA; note = methanogen bacteria
ctctatgccgttgaggcggatttggtcggt

SEQ ID NO: 25836 - DNA, 30 bp, unidentified; identical to SEQ ID NO: 25776
  source 1..30: mol_type = unassigned DNA; note = methanogen bacteria

SEQ ID NO: 25837 - DNA, 45 bp, unidentified
  source 1..45: mol_type = unassigned DNA; note = methanogen bacteria
ccttcaaaggttttcatacccctcttcatgaaaattttcggaatg

SEQ ID NO: 25838 - DNA, 33 bp, unidentified
  source 1..33: mol_type = unassigned DNA; note = methanogen bacteria
acagaatatgcaaccacaatggggtcaactgca

SEQ ID NO: 25839 - DNA, 30 bp, unidentified
  source 1..30: mol_type = unassigned DNA; note = methanogen bacteria
ctgtatgcagttgaagttaatttaacagct

SEQ ID NO: 25840 - DNA, 36 bp, unidentified
  source 1..36: mol_type = unassigned DNA; note = methanogen bacteria
tcacagatatccgagcattttgccacatccattgcc

SEQ ID NO: 25841 - DNA, 36 bp, unidentified
  source 1..36: mol_type = unassigned DNA; note = methanogen bacteria
tacttcctgcagacagtcagccatgtctatacatac

SEQ ID NO: 25842 - DNA, 45 bp, unidentified
  source 1..45: mol_type = unassigned DNA; note = methanogen bacteria
ccttcccaagtattcataccattattcatgagaatattcggagga

SEQ ID NO: 25843 - DNA, 33 bp, unidentified
  source 1..33: mol_type = unassigned DNA; note = methanogen bacteria
acggagtacgccacatcaatgggttcaaccgcc

SEQ ID NO: 25844 - DNA, 30 bp, unidentified
  source 1..30: mol_type = unassigned DNA; note = methanogen bacteria
ctatatgcagctgaagtaaatatgtccggc

SEQ ID NO: 25845 - DNA, 45 bp, unidentified
  source 1..45: mol_type = unassigned DNA; note = methanogen bacteria
ccatccaaagttttcatacctttattcatgaaaatattcggcgga

SEQ ID NO: 25846 - DNA, 57 bp, unidentified
  source 1..57: mol_type = unassigned DNA; note = methanogen bacteria
ttttacccgtcaatgagtgctacatataagttgcctagttggaatcctgcatggagc

SEQ ID NO: 25847 - DNA, 33 bp, unidentified
  source 1..33: mol_type = unassigned DNA; note = methanogen bacteria
ttctttcttaacagtttaggaattccttatagc

SEQ ID NO: 25848 - DNA, 33 bp, unidentified
  source 1..33: mol_type = unassigned DNA; note = methanogen bacteria
aacattattgaaaatattggaggaaatatatct

SEQ ID NO: 25849 - DNA, 45 bp, unidentified
  source 1..45: mol_type = unassigned DNA; note = methanogen bacteria
ccttctcaagtatttattccattgtttatgaaaatcttcggagga

SEQ ID NO: 25850 - DNA, 30 bp, unidentified
  source 1..30: mol_type = unassigned DNA; note = methanogen bacteria
ttctttcttaaaaatttaggaatttcctat

SEQ ID NO: 25851 - DNA, 33 bp, unidentified
  source 1..33: mol_type = unassigned DNA; note = methanogen bacteria
aacattatggagaatattggtggaaatatatct

SEQ ID NO: 25852 - DNA, 45 bp, unidentified
  source 1..45: mol_type = unassigned DNA; note = methanogen bacteria
ccttcacaagtgtttattccactattcatgaagatttttggaggt

SEQ ID NO: 25853 - DNA, 33 bp, unidentified
  source 1..33: mol_type = unassigned DNA; note = methanogen bacteria
tcgcaaatatctgagtatttcaatacatcaata

SEQ ID NO: 25854 - DNA, 36 bp, unidentified
  source 1..36: mol_type = unassigned DNA; note = methanogen bacteria
ttatttttacaggtggtaagccatgtttatacctat

SEQ ID NO: 25855 - DNA, 45 bp, unidentified
  source 1..45: mol_type = unassigned DNA; note = methanogen bacteria
ccttcaaaggtatttatcccattattcatgaaaatatttggagga

SEQ ID NO: 25856 - DNA, 45 bp, unidentified
  source 1..45: mol_type = unassigned DNA; note = methanogen bacteria
ccatccaaggtatttattccattgttcatgaagatattcggaggc

SEQ ID NO: 25857 - DNA, 33 bp, unidentified
  source 1..33: mol_type = unassigned DNA; note = methanogen bacteria
tatttccttaagaatctgggcctttcatatgtg

SEQ ID NO: 25858 - DNA, 33 bp, unidentified
  source 1..33: mol_type = unassigned DNA; note = methanogen bacteria
aacataattgaaaatgtcggaggaaacatttcc

SEQ ID NO: 25859 - DNA, 30 bp, unidentified
  source 1..30: mol_type = unassigned DNA; note = methanogen bacteria
cagattgcatctgcatcttcattaaactct

SEQ ID NO: 25860 - DNA, 54 bp, unidentified
  source 1..54: mol_type = unassigned DNA; note = methanogen bacteria
ttattagataatacttctggtgtaactatttttagcagttctaaagctcttagt

SEQ ID NO: 25861 - DNA, 51 bp, unidentified
  source 1..51: mol_type = unassigned DNA; note = methanogen bacteria
gttggtattggaaccgataatatatctcattcaatacttttaatgggtctg

SEQ ID NO: 25862 - DNA, 36 bp, unidentified
  source 1..36: mol_type = unassigned DNA; note = methanogen bacteria
cctaaaatattcaatccagatgtcacatcatacacc

SEQ ID NO: 25863 - DNA, 156 bp, unidentified
  source 1..156: mol_type = unassigned DNA; note = methanogen bacteria
ttcgactggctcgggttcggacctgccgcatcgtattatctgcttgcggaccagttcctcgggggcaattgggattacgatacctacggcatgaacctgcctccgctcgtgatccccatccttatgttgataaagtccctgtcgcaggattacaac

SEQ ID NO: 25864 - DNA, 81 bp, unidentified
  source 1..81: mol_type = unassigned DNA; note = methanogen bacteria
ctccatctggaggaggtcaccgcggtcacggcctatttgggcgggatgcaggcgttcggcttcagtccctacgggacatac

SEQ ID NO: 25865 - DNA, 237 bp, unidentified
  source 1..237: mol_type = unassigned DNA; note = methanogen bacteria
ggtagtgatgttaatttcactgtttatgttgataaaactgaggattatattagagaatttaaaggcatttccgagtactttttattatccaaagtatttacgaatggatgggttattggtgatggtggatgggatgaatctgctacaaatgaagcaatagaagcaatagcggcagaaatggtttataatgaacatattgatgaagaatctttaaaatttatattggatttaaaaaag

SEQ ID NO: 25866 - DNA, 162 bp, unidentified
  source 1..162: mol_type = unassigned DNA; note = methanogen bacteria
tgtgttgtaacttataaaggtagtgatatttttgaaatgggagttttagccgatggtgactatattgtctgtcctaatggtgtagactactggagacatggccatttggataatattgatgatgttgttaaaaaaaatgtttacttggcttctagtgaccca

SEQ ID NO: 25867 - DNA, 285 bp, unidentified
  source 1..285: mol_type = unassigned DNA; note = methanogen bacteria
catgttaaacttaatgaaaatggattttcagatgatgtatatgtttctaatgaggatggtagcttggttaatcaaaccaattatatttatgccgattgtgggacatattatgctttaaataaaactattgtctctaaggatgatatattggaatatggaagtgactatatttatactgcccaattcgttaatagggacggggatgttttagcaaataaaatagttcaagtcattgtcaatgggaaatcttatgaatatgttacggataatgatggatttattaat

SEQ ID NO: 25868 - DNA, 249 bp, unidentified
  source 1..249: mol_type = unassigned DNA; note = methanogen bacteria
atagtagtaactaacccaataacgggggatgtagttaaaaacaccattactgttcttccaaattctgttccatcaacggattctaatgaatctgaggatgttggattggttaatgttgtagataaaaatcaagtttcgacatttaagtttgataaacaaacttctccagtcaaaaataattctgttaatatatctgtttcagctattcagattagttcaacactatgggaatttattattgaattatta

SEQ ID NO: 25869 - DNA, 30 bp, unidentified
  source 1..30: mol_type = unassigned DNA; note = methanogen bacteria
cctctattggcaggaatctggattctttca

SEQ ID NO: 25870 - DNA, 36 bp, unidentified
  source 1..36: mol_type = unassigned DNA; note = methanogen bacteria
tcacaaatatccgagtattttaacacttcaattgca

SEQ ID NO: 25871 - DNA, 36 bp, unidentified
  source 1..36: mol_type = unassigned DNA; note = methanogen bacteria
tacttcctgcagaccgttagtcatatatacacttat

SEQ ID NO: 25872 - DNA, 30 bp, unidentified
  source 1..30: mol_type = unassigned DNA; note = methanogen bacteria
tattatggcgaattgccagctcctaattta

SEQ ID NO: 25873 - DNA, 51 bp, unidentified
  source 1..51: mol_type = unassigned DNA; note = methanogen bacteria
ttaggtggcatacctcttttttcagctaccttaaaggctcaggcagcaagc

SEQ ID NO: 25874 - DNA, 252 bp, unidentified
  source 1..252: mol_type = unassigned DNA; note = methanogen bacteria
gttcaggtaataagctggcagcactggcatttgaacccaattgaacttgtatcctatagggctgcatttacattgaatatactggctgcagctattgaaaagcagttttccactatgggcaatctgttttatgccacacttacaggatttttcacacatacagatccaagggttttggttggtgttgcaacaataaacagaaaccattcaataacttcaaccatattcggtccggcattgctcgactttgga

SEQ ID NO: 25875 - DNA, 189 bp, unidentified
  source 1..189: mol_type = unassigned DNA; note = methanogen bacteria
atcgcagtttttgccaatatgtttttcagttctcaaaatctttctttaacttctgggattgatttgaatgcagccatcgctacattgattcaagcattgcctatagaacttcaagggcttgtaaaaccttatgttggtactttaactgagggaatacaccaagccttaacttatgtatttggctatgct

SEQ ID NO: 25876 - DNA, 30 bp, unidentified
  source 1..30: mol_type = unassigned DNA; note = methanogen bacteria
gagtatgccacttcgatgggatcttctgca

SEQ ID NO: 25877 - DNA, 30 bp, unidentified
  source 1..30: mol_type = unassigned DNA; note = methanogen bacteria
ctttatgccagtgaagtaaatttgaccgct

SEQ ID NO: 25878 - DNA, 57 bp, unidentified
  source 1..57: mol_type = unassigned DNA; note = methanogen bacteria
tattatttaggttttccacttaagcctaatgcggttttaaatatgaataaggatgct

SEQ ID NO: 25879 - DNA, 48 bp, unidentified
  source 1..48: mol_type = unassigned DNA; note = methanogen bacteria
ccttcacaggtattctttccactatttgtgcaactttttggtggagga

SEQ ID NO: 25880 - DNA, 57 bp, unidentified
  source 1..57: mol_type = unassigned DNA; note = methanogen bacteria
agaaaggttgtgcttaaattcaacggtaagacctatgaaaagacaagtaataaaaac

SEQ ID NO: 25881 - DNA, 111 bp, unidentified
  source 1..111: mol_type = unassigned DNA; note = methanogen bacteria
ttaagaatctatttaaaggattcaagtaaaaaagccatctctcataaaaagatgacaataaaaattggaagcagaaagtatataaagcgaacaagttcagaagggataata

SEQ ID NO: 25882 - DNA, 54 bp, unidentified
  source 1..54: mol_type = unassigned DNA; note = methanogen bacteria
aagtcatacaagtacagcgaggtcagggacgttcaaaatacaggatacacctgc

SEQ ID NO: 25883 - DNA, 45 bp, unidentified
  source 1..45: mol_type = unassigned DNA; note = methanogen bacteria
gaaagatatctggcgaagctttcacaaacagacaggaaaggaacc

SEQ ID NO: 25884 - DNA, 30 bp, unidentified
  source 1..30: mol_type = unassigned DNA; note = methanogen bacteria
ggagaggtctacacggagcgcaccacccag

SEQ ID NO: 25885 - DNA, 30 bp, unidentified
  source 1..30: mol_type = unassigned DNA; note = methanogen bacteria
gcttacgtgggcctctaccacaccggcaac

SEQ ID NO: 25886 - DNA, 36 bp, unidentified
  source 1..36: mol_type = unassigned DNA; note = methanogen bacteria
tctcaaatatccgagtattttaacacatcgatttct

SEQ ID NO: 25887 - DNA, 33 bp, unidentified
  source 1..33: mol_type = unassigned DNA; note = methanogen bacteria
ttcctgcaggctgttagtcaaatttacacatac

SEQ ID NO: 25888 - DNA, 84 bp, unidentified
  source 1..84: mol_type = unassigned DNA; note = methanogen bacteria
tcacttggaacagttttaaaaaccccctcagtatccatattaattccaggtgttgaggttcctggctctccaatattcatacct

SEQ ID NO: 25889 - DNA, 69 bp, unidentified
  source 1..69: mol_type = unassigned DNA; note = methanogen bacteria
tatcatggagatctaggtcttagcatgtttggtcttaccgcacttttcaagaccttcctacttcagcat

SEQ ID NO: 25890 - DNA, 75 bp, unidentified
  source 1..75: mol_type = unassigned DNA; note = methanogen bacteria
gtcttccaccaaggcttccagaggacactgttcctacaccactacaacttttacacacgttcctatatggatgtg

SEQ ID NO: 25891 - DNA, 36 bp, unidentified
  source 1..36: mol_type = unassigned DNA; note = methanogen bacteria
tcacaaatatccgagtattttcacacatcaatttcc

SEQ ID NO: 25892 - DNA, 36 bp, unidentified
  source 1..36: mol_type = unassigned DNA; note = methanogen bacteria
tatttcctgcagacagtcagtcaaatttacacatac

SEQ ID NO: 25893 - DNA, 54 bp, unidentified
  source 1..54: mol_type = unassigned DNA; note = methanogen bacteria
gatatgtttatccgtcctttttttcagataattttaatgggttcttctaaaggt

SEQ ID NO: 25894 - DNA, 183 bp, unidentified
  source 1..183: mol_type = unassigned DNA; note = methanogen bacteria
attcgtttagttttaaatcttccaattaactctacttttatagtggtaaatccttcaatgacatctactagtataatgcattcccatgtattcaaatctatttttggttttattgcatcttcaattatacacaatattccacatggtattcatgtaggtaatagtttagagcattatatacct

SEQ ID NO: 25895 - DNA, 225 bp, unidentified
  source 1..225: mol_type = unassigned DNA; note = methanogen bacteria
tttgctgtggctcaaactgcatattatgaggttgatattttaaattctcatgattcaattaatttagaagattatggcgttattagtgttgtggatgaaaataatagaagtatttactatttatcttctaatcataatgaaatgattttattaaatagtcttgctaaccgtctacattcgaagtgtgacagtttttccataacatggaatgcatattcgtatttg

SEQ ID NO: 25896 - DNA, 36 bp, unidentified
  source 1..36: mol_type = unassigned DNA; note = methanogen bacteria
tcacagatttctgagtattttaacacatcaattgcc

SEQ ID NO: 25897 - DNA, 36 bp, unidentified
  source 1..36: mol_type = unassigned DNA; note = methanogen bacteria
tacttcctgcagaccgtcagccacatatacactcat

SEQ ID NO: 25898 - DNA, 45 bp, unidentified
  source 1..45: mol_type = unassigned DNA; note = methanogen bacteria
ccttcacaagttttcattccattattcatgcaaatatttggcggc

SEQ ID NO: 25899 - DNA, 45 bp, unidentified
  source 1..45: mol_type = unassigned DNA; note = methanogen bacteria
ccttcacaggtattcttcccattatttatgaagatattcggtgga

SEQ ID NO: 25900 - DNA, 36 bp, unidentified
  source 1..36: mol_type = unassigned DNA; note = methanogen bacteria
tcacaaatttcaacatatttcaacacttcaatcgcc

SEQ ID NO: 25901 - DNA, 36 bp, unidentified
  source 1..36: mol_type = unassigned DNA; note = methanogen bacteria
tattttctccagacagtaagccatatctacacctac

SEQ ID NO: 25902 - DNA, 45 bp, unidentified
  source 1..45: mol_type = unassigned DNA; note = methanogen bacteria
attcctcagccgttgaccccggaatggggagctttctttgcaaat

SEQ ID NO: 25903 - DNA, 45 bp, unidentified
  source 1..45: mol_type = unassigned DNA; note = methanogen bacteria
attccgactgccgtgaacggcgatctggcaagccttctagactta

SEQ ID NO: 25904 - DNA, 33 bp, unidentified
  source 1..33: mol_type = unassigned DNA; note = methanogen bacteria
tcacaaatatcagagtatttcaatacatcaata

SEQ ID NO: 25905 - DNA, 36 bp, unidentified
  source 1..36: mol_type = unassigned DNA; note = methanogen bacteria
ttattcctacagctagtcagccatatctacacatat

SEQ ID NO: 25906 - DNA, 33 bp, unidentified
  source 1..33: mol_type = unassigned DNA; note = methanogen bacteria
caaatagctgagtatttcaatacatcaatagcc

SEQ ID NO: 25907 - DNA, 36 bp, unidentified
  source 1..36: mol_type = unassigned DNA; note = methanogen bacteria
ttattcttacaggtagtcagccatgtctatacctat

SEQ ID NO: 25908 - DNA, 276 bp, unidentified
  source 1..276: mol_type = unassigned DNA; note = methanogen bacteria
tttcacggcttagaacaaggtgttgacttaaaaggaggttcacaagcggaattacagctattaggttctgtaactccaagtgaattggaagacacacttgatgccaaattgaacaccaacaatataaaagtcacaaataatggaaacaataaggttactgtggaattggaaaacaatatcaattcaagtacatttacaagcgccataaatggaaaggcaaaggtaatcggctataatgaaattggtccagtattaagtgaagaagctatgggacaa

SEQ ID NO: 25909 - DNA, 30 bp, unidentified
  source 1..30: mol_type = unassigned DNA; note = methanogen bacteria
atactcatgcctgaagcaactacattaagc

SEQ ID NO: 25910 - DNA, 45 bp, unidentified
  source 1..45: mol_type = unassigned DNA; note = methanogen bacteria
ccatcaaaagtatttattccattatttttacaaatttttggtgga

SEQ ID NO: 25911 - DNA, 36 bp, unidentified
  source 1..36: mol_type = unassigned DNA; note = methanogen bacteria
tctcaaatttccgagtatttcaacacatcaatagca

SEQ ID NO: 25912 - DNA, 36 bp, unidentified
  source 1..36: mol_type = unassigned DNA; note = methanogen bacteria
tattttctgcagagcgtaagtcacatatacacatat

SEQ ID NO: 25913 - DNA, 33 bp, unidentified; identical to SEQ ID NO: 25446
  source 1..33: mol_type = unassigned DNA; note = methanogen bacteria

SEQ ID NO: 25914 - DNA, 54 bp, unidentified
  source 1..54: mol_type = unassigned DNA; note = methanogen bacteria
aaactatcccagcctgcagcaccaaccatgtctgccgtcttgaacttgaacata

SEQ ID NO: 25915 - DNA, 39 bp, unidentified
  source 1..39: mol_type = unassigned DNA; note = methanogen bacteria
atggcaggggccggcacatgggaggggctctttgaacat

SEQ ID NO: 25916 - DNA, 45 bp, unidentified
  source 1..45: mol_type = unassigned DNA; note = methanogen bacteria
ccatctcaggtgtttatcccattgttcatgaagatatttggagga

SEQ ID NO: 25917 - DNA, 36 bp, unidentified
  source 1..36: mol_type = unassigned DNA; note = methanogen bacteria
tctcaaatatccgagtattttaatacatcaatttct

SEQ ID NO: 25918 - DNA, 33 bp, unidentified
  source 1..33: mol_type = unassigned DNA; note = methanogen bacteria
tatttcctccagactgtaagtcaaattcacaca

SEQ ID NO: 25919 - DNA, 39 bp, unidentified
  source 1..39: mol_type = unassigned DNA; note = methanogen bacteria
cctcaagtggctcattacttcaatattactatagaccaa

SEQ ID NO: 25920 - DNA, 36 bp, unidentified
  source 1..36: mol_type = unassigned DNA; note = methanogen bacteria
tcagaatttttacaatcagtaacccatattattaac

SEQ ID NO: 25921 - DNA, 36 bp, unidentified
  source 1..36: mol_type = unassigned DNA; note = methanogen bacteria
tcacagatatcacaatattttagcacatctattgcc

SEQ ID NO: 25922 - DNA, 36 bp, unidentified
  source 1..36: mol_type = unassigned DNA; note = methanogen bacteria
tatttccttcagacagtaagccatatctacacatac

SEQ ID NO: 25923 - DNA, 33 bp, unidentified
  source 1..33: mol_type = unassigned DNA; note = methanogen bacteria
agtggagaggccatctatatgatttttaatgtc

SEQ ID NO: 25924 - DNA, 126 bp, unidentified
  source 1..126: mol_type = unassigned DNA; note = methanogen bacteria
gtctcactcctgccgttacatccatattcatttgcaatggcatccggtgtaggaagtgcaagcatgaacgccgcaggattagttcctttagtgaatttataccccaacatgacaacccagttagaa

SEQ ID NO: 25925 - DNA, 51 bp, unidentified
  source 1..51: mol_type = unassigned DNA; note = methanogen bacteria
ccaggagttccaaccgctgattttgtgacacattacgcttcccaagttgat

SEQ ID NO: 25926 - DNA, 120 bp, unidentified
  source 1..120: mol_type = unassigned DNA; note = methanogen bacteria
atcggggattataagatagacttcttcagatgcttctctgtcgtgtgggaccatctcactgggaatgttggtacttcggaagaggccaggctccaagactatgtcatttggaacctgagg

SEQ ID NO: 25927 - DNA, 72 bp, unidentified
  source 1..72: mol_type = unassigned DNA; note = methanogen bacteria
ctgtggggggacccgaactctctgtcagcgatcttggaatggcaggtcggctccatcggaggcatatcctgg

SEQ ID NO: 25928 - DNA, 36 bp, unidentified
  source 1..36: mol_type = unassigned DNA; note = methanogen bacteria
tatcatctgcagtacatcaagggattcgattcgcag

SEQ ID NO: 25929 - DNA, 57 bp, unidentified
  source 1..57: mol_type = unassigned DNA; note = methanogen bacteria
ttcgtgatgggtgatgtgcctatagtcgagcagtactatcctcttcttataagcagc

SEQ ID NO: 25930 - DNA, 78 bp, unidentified
  source 1..78: mol_type = unassigned DNA; note = methanogen bacteria
aagacattgttggatacacctactgttagcttaatcgttccaggtgttgaagttccaggatcacctatatttattcca

SEQ ID NO: 25931 - DNA, 42 bp, unidentified
  source 1..42: mol_type = unassigned DNA; note = methanogen bacteria
attccgcagccgttaactcctgaatggggagcttttttttca

SEQ ID NO: 25932 - DNA, 45 bp, unidentified
  source 1..45: mol_type = unassigned DNA; note = methanogen bacteria
attccaactgctgtaaatggtgatttggcaagtttattggaatta

SEQ ID NO: 25933 - DNA, 78 bp, unidentified
  source 1..78: mol_type = unassigned DNA; note = methanogen bacteria
aagacacttatggatgctccttcagtaagtttggtagttccaggagttgaagttccagggtctccaatattcattcca

SEQ ID NO: 25934 - DNA, 30 bp, unidentified
  source 1..30: mol_type = unassigned DNA; note = methanogen bacteria
caaatatcagattatttcaatatatcaatt

SEQ ID NO: 25935 - DNA, 36 bp, unidentified
  source 1..36: mol_type = unassigned DNA; note = methanogen bacteria
tactttttacagactgttagtcatgtttacacttat

SEQ ID NO: 25936 - DNA, 78 bp, unidentified
  source 1..78: mol_type = unassigned DNA; note = methanogen bacteria
aaaacacttatggatgcgcctacagtcagtttggttgttccaggtgtggaagttccagggtctccaatattcattcca

SEQ ID NO: 25937 - DNA, 78 bp, unidentified
  source 1..78: mol_type = unassigned DNA; note = methanogen bacteria
aagacattgatggatgctcctacagtcagcttagtcgttccaggagttgaagttccaggatctcccatattcattcca

SEQ ID NO: 25938 - DNA, 36 bp, unidentified
  source 1..36: mol_type = unassigned DNA; note = methanogen bacteria
ccacaaatagctcaatattttaatgttggtattgac

SEQ ID NO: 25939 - DNA, 36 bp, unidentified
  source 1..36: mol_type = unassigned DNA; note = methanogen bacteria
gaattcctacagacagtaacacatattgttggctta

SEQ ID NO: 25940 - DNA, 42 bp, unidentified
  source 1..42: mol_type = unassigned DNA; note = methanogen bacteria
tctcagacgctgcaggacgccttcggcgtcggatcggcgtcc

SEQ ID NO: 25941 - DNA, 39 bp, unidentified
  source 1..39: mol_type = unassigned DNA; note = methanogen bacteria
tcctactatcagaactgctgcggattctccaagagcgac

SEQ ID NO: 25942 - DNA, 69 bp, unidentified
  source 1..69: mol_type = unassigned DNA; note = methanogen bacteria
acttcctgttcggattcttcggcggatggttcgtcgtttcgtacgcacaggtcaaggagctgtatccaa

SEQ ID NO: 25943 - DNA, 90 bp, unidentified
  source 1..90: mol_type = unassigned DNA; note = methanogen bacteria
gggcccgagaccaacggtctcaacagattcatctccggtttctactggttcatcagccgttccggtctggagatcaccctctactccacc

SEQ ID NO: 25944 - DNA, 81 bp, unidentified
  source 1..81: mol_type = unassigned DNA; note = methanogen bacteria
cttgaacaattatttgtaactcctcaagctgctttgattattcctggtgttgatgttccaggttctccaatttatattcca

SEQ ID NO: 25945 - DNA, 30 bp, unidentified
  source 1..30: mol_type = unassigned DNA; note = methanogen bacteria
tccaataagaatacctcatttaatcatgat

SEQ ID NO: 25946 - DNA, 42 bp, unidentified
  source 1..42: mol_type = unassigned DNA; note = methanogen bacteria
attcctcagcctttaagtcctgaatggggagctttcttttca

SEQ ID NO: 25947 - DNA, 45 bp, unidentified
  source 1..45: mol_type = unassigned DNA; note = methanogen bacteria
attccaatagccacaaacggtaatcttgaaagtctatttgaattg

SEQ ID NO: 25948 - DNA, 48 bp, unidentified
  source 1..48: mol_type = unassigned DNA; note = methanogen bacteria
atggcagatggaattgctaccttaataagtgctttgggacttactccg

SEQ ID NO: 25949 - DNA, 36 bp, unidentified
  source 1..36: mol_type = unassigned DNA; note = methanogen bacteria
tctcacattgttgttgatttgaatactgatgtcagt

SEQ ID NO: 25950 - DNA, 42 bp, unidentified
  source 1..42: mol_type = unassigned DNA; note = methanogen bacteria
ttaataatcctggcaatctttatatttaccgccagcatatgt

SEQ ID NO: 25951 - DNA, 51 bp, unidentified
  source 1..51: mol_type = unassigned DNA; note = methanogen bacteria
atggcagatgaaattgctactttaataagttctgttggacttacacatgaa

SEQ ID NO: 25952 - DNA, 48 bp, unidentified
  source 1..48: mol_type = unassigned DNA; note = methanogen bacteria
atggctgatgaaatagctactttaataacacaattaggactttctaat

SEQ ID NO: 25953 - DNA, 51 bp, unidentified
  source 1..51: mol_type = unassigned DNA; note = methanogen bacteria
atggctgatgaaattgctacaattataagttcattaggcctcagcaacgag

SEQ ID NO: 25954 - DNA, 51 bp, unidentified
  source 1..51: mol_type = unassigned DNA; note = methanogen bacteria
atggctgaagacatagctactttaatatcacaactaaatatagatcctcaa

SEQ ID NO: 25955 - DNA, 48 bp, unidentified
  source 1..48: mol_type = unassigned DNA; note = methanogen bacteria
atggcaaatgaaattgctaccttaataagttctatgggacttacacaa

SEQ ID NO: 25956 - DNA, 48 bp, unidentified
  source 1..48: mol_type = unassigned DNA; note = methanogen bacteria
atggcagatggaattgctaccttaataagtgcattaggtcttacacaa

SEQ ID NO: 25957 - DNA, 48 bp, unidentified
  source 1..48: mol_type = unassigned DNA; note = methanogen bacteria
atggcagatgaaattgcatcattattatcatctttaggattatctgac

SEQ ID NO: 25958 - DNA, 57 bp, unidentified
  source 1..57: mol_type = unassigned DNA; note = methanogen bacteria
ggagtggaccaattcataaggccatttacccaaccaattctaatgggatcctcaaaa

SEQ ID NO: 25959 - DNA, 183 bp, unidentified
  source 1..183: mol_type = unassigned DNA; note = methanogen bacteria
cttaggaacaatcttggaattggatggaatactattcttgtggcgatgaatccaacatacacaagcacaagcatacttcactcccatttatacaaatcaatatttggagtgatattaggcatattcctaagccatatacctgcagggattcacactggaagttccttaagcccttatactcct

SEQ ID NO: 25960 - DNA, 231 bp, unidentified
  source 1..231: mol_type = unassigned DNA; note = methanogen bacteria
tcattttatggtgcagccccagattgctatgaattaactgtctataatggacatgacattgacttagaaaataattatactgttatagatactattaaaaatggaaataaaaccattatttacctatctaatgaatataatgaaatggagttgctaaatggattagcaatacagttaaatggcaaatgtgattggtattcattaagttggaatatctattcttatttaaac

SEQ ID NO: 25961 - DNA, 87 bp, unidentified
  source 1..87: mol_type = unassigned DNA; note = methanogen bacteria
agagacgaaaccgatccggaaggattcatatccaatctcttctggttcctggacaccatgggcctcggcctcgatatgtactcggtg

SEQ ID NO: 25962 - DNA, 48 bp, unidentified
  source 1..48: mol_type = unassigned DNA; note = methanogen bacteria
atggcagatgaaattgcaacattaataagttctcttggaattactccg

SEQ ID NO: 25963 - DNA, 48 bp, unidentified
  source 1..48: mol_type = unassigned DNA; note = methanogen bacteria
atggcagatgaacttgcatcattgataacatctttcggatttacacaa

SEQ ID NO: 25964 - DNA, 51 bp, unidentified
  source 1..51: mol_type = unassigned DNA; note = methanogen bacteria
atggctgatgaaattgctacaatcataagttccttaggactttctaatgag

SEQ ID NO: 25965 - DNA, 42 bp, unidentified
  source 1..42: mol_type = unassigned DNA; note = methanogen bacteria
gctcaacctcccgctccaacatgggatggggtcttatcttta

SEQ ID NO: 25966 - DNA, 42 bp, unidentified
  source 1..42: mol_type = unassigned DNA; note = methanogen bacteria
acaatggcttcaggcggtacctggcaggctctgttcgatttg

SEQ ID NO: 25967 - DNA, 33 bp, unidentified
  source 1..33: mol_type = unassigned DNA; note = methanogen bacteria
ggcccacaaataggcattgaaccgttgttcact

SEQ ID NO: 25968 - DNA, 48 bp, unidentified
  source 1..48: mol_type = unassigned DNA; note = methanogen bacteria
atggcagatggaattgcaacattaataagttctgttgggcttacacaa

SEQ ID NO: 25969 - DNA, 48 bp, unidentified
  source 1..48: mol_type = unassigned DNA; note = methanogen bacteria
atggcagatggaattgctaccttaataagttctgttggacttacacaa

SEQ ID NO: 25970 - DNA, 48 bp, unidentified
  source 1..48: mol_type = unassigned DNA; note = methanogen bacteria
atggaagaaagcattacaggattaatttcatctttcggattctctcct

SEQ ID NO: 25971 - DNA, 48 bp, unidentified
  source 1..48: mol_type = unassigned DNA; note = methanogen bacteria
atggcagatggaattgctacattaataagttctgtaggacttacacag

SEQ ID NO: 25972 - DNA, 48 bp, unidentified
  source 1..48: mol_type = unassigned DNA; note = methanogen bacteria
atggcagatgaacttgcatcattaataacagctcttggattaacacaa

SEQ ID NO: 25973 - DNA, 129 bp, unidentified
  source 1..129: mol_type = unassigned DNA; note = methanogen bacteria
aaatacacagtacgggtacttgacgaaactggaaaagcagtgggagccggagaaaatgtaacattcaacataaacggagtactctacacacgcacaacagactccaacggatatgccgcccttaacata

SEQ ID NO: 25974 - DNA, 54 bp, unidentified
  source 1..54: mol_type = unassigned DNA; note = methanogen bacteria
ggaataataagatcagatccaacaacactagtttcattaggaaacttattttca

SEQ ID NO: 25975 - DNA, 120 bp, unidentified
  source 1..120: mol_type = unassigned DNA; note = methanogen bacteria
ggatttggtgcaggaaacgaattaatgccggcattacctaaacaagcaataactaccacctttgatttaacattatttggcggatttacaagaggatttggagaattattctcaaatata

SEQ ID NO: 25976 - DNA, 48 bp, unidentified
  source 1..48: mol_type = unassigned DNA; note = methanogen bacteria
atggcagatgaacttgcatcattaataacatcaatcggatttacacaa

SEQ ID NO: 25977 - DNA, 36 bp, unidentified
  source 1..36: mol_type = unassigned DNA; note = methanogen bacteria
ccaaagatattcaatccggacgtgacatcatacaat

SEQ ID NO: 25978 - DNA, 45 bp, unidentified
  source 1..45: mol_type = unassigned DNA; note = methanogen bacteria
atttcagaacctataaaccctacatggggagggttttttagtaat

SEQ ID NO: 25979 - DNA, 42 bp, unidentified
  source 1..42: mol_type = unassigned DNA; note = methanogen bacteria
ccacttgctgcaaatggtaatctagatgctttatttgaaata

SEQ ID NO: 25980 - DNA, 36 bp, unidentified
  source 1..36: mol_type = unassigned DNA; note = methanogen bacteria
cctcagattgcagagtatttcagcgtagacatcaca

SEQ ID NO: 25981 - DNA, 36 bp, unidentified
  source 1..36: mol_type = unassigned DNA; note = methanogen bacteria
gagtttttaaacagcctgacaaatataatcggaact

SEQ ID NO: 25982 - DNA, 276 bp, unidentified
  source 1..276: mol_type = unassigned DNA; note = methanogen bacteria
tttaatggaattgaacaaggagtggaactgaagggaggatcacttgcagaattgcaattggcagattctataagccaaagtgaccttgaacaacagttaacacaagaattacatacaaacaatataaaagttacaagcaatggtgacaataaggttactgtagaactggaaaataatgttaattcaagtacatttacaagtgccataaatggaaaggccaagataatcagctataacgagattggtcctgttttaagtgaagaggctatgggacaa

SEQ ID NO: 25983 - DNA, 30 bp, unidentified
  source 1..30: mol_type = unassigned DNA; note = methanogen bacteria
ataatcatgcctgaagcaactacattaagt

SEQ ID NO: 25984 - DNA, 45 bp, unidentified
  source 1..45: mol_type = unassigned DNA; note = methanogen bacteria
attccacacccggcaaatccaacctggggaagtttcttttcaaac

SEQ ID NO: 25985 - DNA, 45 bp, unidentified
  source 1..45: mol_type = unassigned DNA; note = methanogen bacteria
attcctcaagcggtaaatggtaatttggcttcattgcttgagttg

SEQ ID NO: 25986 - DNA, 36 bp, unidentified
  source 1..36: mol_type = unassigned DNA; note = methanogen bacteria
cctcaaatcgcacagtactttaacgttgacatcacc

SEQ ID NO: 25987 - DNA, 39 bp, unidentified
  source 1..39: mol_type = unassigned DNA; note = methanogen bacteria
tctgaattcctgaactccataacaagcatattcggaaca

SEQ ID NO: 25988 - DNA, 45 bp, unidentified
  source 1..45: mol_type = unassigned DNA; note = methanogen bacteria
attcctcaacccttaagtccaacttggggtgcagtctttgcaaat

SEQ ID NO: 25989 - DNA, 45 bp, unidentified
  source 1..45: mol_type = unassigned DNA; note = methanogen bacteria
attccacttgctgcaaatggtagcttaggggctcttcttgatttg

SEQ ID NO: 25990 - DNA, 42 bp, unidentified
  source 1..42: mol_type = unassigned DNA; note = methanogen bacteria
attcctcagccattaagtccaaattggggacctttcttttca

SEQ ID NO: 25991 - DNA, 45 bp, unidentified
  source 1..45: mol_type = unassigned DNA; note = methanogen bacteria
attccaattgcagcaaacggtagtttggaaagcctattggaatta

SEQ ID NO: 25992 - DNA, 36 bp, unidentified
  source 1..36: mol_type = unassigned DNA; note = methanogen bacteria
ccccaaattgccgaatattttagcgttgacattacc

SEQ ID NO: 25993 - DNA, 36 bp, unidentified
  source 1..36: mol_type = unassigned DNA; note = methanogen bacteria
gagttcctcaattccattacacagatatttggaaca

SEQ ID NO: 25994 - DNA, 93 bp, unidentified
  source 1..93: mol_type = unassigned DNA; note = methanogen bacteria
aaaagttttacattcggttggggcagcgatacagcggcttattttgtccagaatgttgggggcagcgacaatctatccaatataaacaatttt

SEQ ID NO: 25995 - DNA, 69 bp, unidentified
  source 1..69: mol_type = unassigned DNA; note = methanogen bacteria
accttgcctggagcaattatcggaattaacgcgctgattaatcccaattggaatctgctttttgacatc

SEQ ID NO: 25996 - DNA, 105 bp, unidentified
  source 1..105: mol_type = unassigned DNA; note = methanogen bacteria
cggggttatatgtccgcaacatccggaacgccactggtggatttagttagtgagggcacaggattaatatttgtggtatttccaaaaattttcagtttaatggga

SEQ ID NO: 25997 - DNA, 288 bp, unidentified
  source 1..288: mol_type = unassigned DNA; note = methanogen bacteria
gttcccgcagccgatttaggcggaatccctgctgattataaggcagagtatgtggattcatcaggtcttccttatttcagtgaaatggattcatattataacttaaggttgacagaaaattatattaatcaaggccatgtgggagatgaagtggtaaacgataccgagtgggatatgcacaggtatgcgcctactggtgaaggaattagttatgagatgggaattgtgtatgttacttcatttttacacaatttgtttggtaatcaagctgtaaaagagacagcattc

SEQ ID NO: 25998 - DNA, 33 bp, unidentified; identical to SEQ ID NO: 18130
  source 1..33: mol_type = unassigned DNA; note = methanogen bacteria

SEQ ID NO: 25999 - DNA, 180 bp, unidentified
  source 1..180: mol_type = unassigned DNA; note = methanogen bacteria
aaaggtattagtggagttctcggtatctttggaagcgtaacaggattactttcattgcaatcagcttctgttgtagttggtggattccctaacgtacttatttccgttgcagagatgcaaatgcctaatttacttggaggtggaatgacatccgcatttttagccaatactaatggtgta

SEQ ID NO: 26000 - DNA, 45 bp, unidentified
  source 1..45: mol_type = unassigned DNA; note = methanogen bacteria
attccgcagcccctgactccggagtggggatcttttttttcaaat

SEQ ID NO: 26001 - DNA, 45 bp, unidentified
  source 1..45: mol_type = unassigned DNA; note = methanogen bacteria
attcctattgcggcaaatggtgatctggcaagtttattaaatttg

SEQ ID NO: 26002 - DNA, 33 bp, unidentified; identical to SEQ ID NO: 19401
  source 1..33: mol_type = unassigned DNA; note = methanogen bacteria

SEQ ID NO: 26003 - DNA, 60 bp, unidentified
  source 1..60: mol_type = unassigned DNA; note = methanogen bacteria
gacgtatttaatccaattataagaccaattacatacatttttttaatggggtcctccaaa

SEQ ID NO: 26004 - DNA, 183 bp, unidentified
  source 1..183: mol_type = unassigned DNA; note = methanogen bacteria
agattacagatgggaattaaactcaacactgttttttgctctatgagtaacatgatgagcagtacaagcattttacatactcacttaataaagtccattttaggcgcagctataactcaaataattggacctattattcaaagtgacattaacacaggagttggcctatatgcttacgttcca

SEQ ID NO: 26005 - DNA, 57 bp, unidentified
  source 1..57: mol_type = unassigned DNA; note = methanogen bacteria
ggcatagaccaattcataagaccatttacccaaccgattctaatgggctcctctaag

SEQ ID NO: 26006 - DNA, 180 bp, unidentified
  source 1..180: mol_type = unassigned DNA; note = methanogen bacteria
agaaattcacttggaataggatggaatacaatacttgtaatcatgaatccaagtcttacaagcacaagcatattgcattcccatttgtataaggcaatatttggaacaatcataggaatgtttctaagccatattccaacaggaatacacactggaagctcattaagtgcctatactcca

SEQ ID NO: 26007 - DNA, 228 bp, unidentified
  source 1..228: mol_type = unassigned DNA; note = methanogen bacteria
gcattttatggtgcaagtccagattcctatgaacttaatatatgcaatgcacatgacattgatgcattagatcaatacgatacattaaatttaacagaggatggaaataaaacaacaatctacatttcaaatcaatataatgaaatggaattgttaaataacttggccattagtttagatggaaaatgcgattggtattctcttagctggaacatatattcatacttt

SEQ ID NO: 26008 - DNA, 108 bp, unidentified
  source 1..108: mol_type = unassigned DNA; note = methanogen bacteria
gcattgcgtgcaaaagcagctgcaaatttatataattcctcattctgtaataatgttgcagataattatggtggagcagttgcttcaccagaactaaacatatgggac

SEQ ID NO: 26009 - DNA, 114 bp, unidentified
  source 1..114: mol_type = unassigned DNA; note = methanogen bacteria
gcatacgtctgcttttataataatactatcaaaaaaggtgatcataccaaaatctatgtaacaagtaaatggtgtgcttatacttataatcttgacgtttatacagaaggttta

SEQ ID NO: 26010 - DNA, 294 bp, unidentified
  source 1..294: mol_type = unassigned DNA; note = methanogen bacteria
aaccgcagagttttagttcaaattatggttgattatttcaatgataaatatcctgattctgatataactgattttaatgatggttctcaaataaggaatattttagaatcatttgcagttgatatttatcatttagagaaaaacgatacagatttattgagagctgcatttttatctacaagttatggtcgatatttagatttacacggtgaggatatgaatactccaagagattatggtagtacatcttggggtgtagtattattcactattcctgaacctattgattataat

SEQ ID NO: 26011 - DNA, 90 bp, unidentified
  source 1..90: mol_type = unassigned DNA; note = methanogen bacteria
gaatcagtaaatggtgtaattcaagttactgagctaactagtgataatgaaagttttaatcgtttaattcctgatgaaaatacagtattg

SEQ ID NO: 26012 - DNA, 30 bp, unidentified
  source 1..30: mol_type = unassigned DNA; note = methanogen bacteria
ggagaagtatacacagaacgcaccacgcag

SEQ ID NO: 26013 - DNA, 30 bp, unidentified
  source 1..30: mol_type = unassigned DNA; note = methanogen bacteria
gcctatgtgggtctctatcataccgagaac

SEQ ID NO: 26014 - DNA, 39 bp, unidentified
  source 1..39: mol_type = unassigned DNA; note = methanogen bacteria
gaacaaagtattgaatgcagttatgatattaattttaat

SEQ ID NO: 26015 - DNA, 105 bp, unidentified
  source 1..105: mol_type = unassigned DNA; note = methanogen bacteria
tcttatgcaatctctaacgatttttatatagatgacttattgtctaataatggtgtatctgtatcctctgatgattggactaatcctgaacgcgatatatcattc

SEQ ID NO: 26016 - DNA, 36 bp, unidentified
  source 1..36: mol_type = unassigned DNA; note = methanogen bacteria
cctaagattttcaatcctgacgttacaaattatact

SEQ ID NO: 26017 - DNA, 48 bp, unidentified
  source 1..48: mol_type = unassigned DNA; note = methanogen bacteria
agtttcagatatctagattatttaatccgaagtggcaataaaaacatt

SEQ ID NO: 26018 - DNA, 174 bp, unidentified
  source 1..174: mol_type = unassigned DNA; note = methanogen bacteria
gaagaattgaaatataaaaacggcattgatgtggatgttgaagatattgtaattgacggaaaaaatcacatcatcgacgcatgtaacaaaacccggattttcaacattactgcaaaaaacgttaccataaaaaacttcctcttaagggaaggattttcacaggacggcggtgca

SEQ ID NO: 26019 - DNA, 51 bp, unidentified
  source 1..51: mol_type = unassigned DNA; note = methanogen bacteria
ttaggaggcatacctcttttctcagcaacattaaaggcaaaggcagcaact

SEQ ID NO: 26020 - DNA, 252 bp, unidentified
  source 1..252: mol_type = unassigned DNA; note = methanogen bacteria
gttcaagccatcagctggcaacattggtcattgaatccaattgaattggtctcttatagggcagcatttacattgaatgtgctttccaaggcaattgaaaatcaattcactacaatgggaaatctattctacacaacattgacaggattctttacacattcagatgcaagagtcctagtaggccaagcaacaatcggcagagttcattcaataacctctacaatattcggtcctgcactacttgatttcggt

SEQ ID NO: 26021 - DNA, 48 bp, unidentified
  source 1..48: mol_type = unassigned DNA; note = methanogen bacteria
ttgggtggcataccccttttttcagctacattaaaggcaaaggccgca

SEQ ID NO: 26022 - DNA, 252 bp, unidentified
  source 1..252: mol_type = unassigned DNA; note = methanogen bacteria
gttcaagccatcagctggcagcattggtcattgaatccaattgaattggtctcttatagggctgcatttacattgaatatactttccaaggccattgaaaatcaattcactacaatgggaaatctattctacacaacattgacaggattctttacacattcagatgcaagggttttggttggccaagctacaattggtagagttcattcaataacatctacaattttcggccctgcattacttgattttggt

SEQ ID NO: 26023 - DNA, 114 bp, unidentified
  source 1..114: mol_type = unassigned DNA; note = methanogen bacteria
atctcctcaggcgggataattccggtcaacgaggcgctcggggcgatggtgtcgtcgatcgcgaaaggcggcacgaacctcgacaccaccgaactttacatttacaactcgagg

SEQ ID NO: 26024 - DNA, 36 bp, unidentified
  source 1..36: mol_type = unassigned DNA; note = methanogen bacteria
ggttcggcaatccccttcgtagacagcaacagcatc

SEQ ID NO: 26025 - DNA, 69 bp, unidentified
  source 1..69: mol_type = unassigned DNA; note = methanogen bacteria
acgatggccaaggataacctgacgaacgtcatgtggtggctctacgggtcattcgccgacataacctgg

SEQ ID NO: 26026 - DNA, 45 bp, unidentified
  source 1..45: mol_type = unassigned DNA; note = methanogen bacteria
ataaggcctattttacaaccttttttaatgggttcttcaaagggt

SEQ ID NO: 26027 - DNA, 180 bp, unidentified
  source 1..180: mol_type = unassigned DNA; note = methanogen bacteria
ataagactttcaatgaatctgccattggatacaaccttggtgattgttgaacctaaaatgacatcaacaagtattctacattcacatgttcttaaatccatattcggtgccattgttgtaatgtttattccaaatattccttcaggcattcatgttggaaacagtttagctccttatatt

SEQ ID NO: 26028 - DNA, 228 bp, unidentified
  source 1..228: mol_type = unassigned DNA; note = methanogen bacteria
atatttgcaatagcaaacacggcatattatgaagtaaatatcttagagcctgaggattcaattgatttaaacaattatggtgtaatcagtgttgtacatagtactgaccgtgacatttataggttaaatcctgattataatgagatggtcttattaaatagtcttgatagatcattaaatcaaaaatgtagggcctatactatatcatggaatgcatattcctatctg

SEQ ID NO: 26029 - DNA, 135 bp, unidentified
  source 1..135: mol_type = unassigned DNA; note = methanogen bacteria
aattcatcagaagttggaaccataatcgtccaaaacttgccagtgaatgtgcaggatatgattcagcctcatattggaagaataaatgcaggaatcagccagttattcagtcttttgcttaattatatttttgaa

SEQ ID NO: 26030 - DNA, 207 bp, unidentified
  source 1..207: mol_type = unassigned DNA; note = methanogen bacteria
atgacatggttaggcaattattcaaagggcacaggccctataagttacatgaatgtctttgaagccctggaaaatgatgcaattgcagcggttggaacatatttcaatgacagcaacatcaattatacagttgaaatttatgtcaatgacgaattgaaattaacacaggaaggaatatctccatatgttggttaccacaccatcaaa

SEQ ID NO: 26031 - DNA, 81 bp, unidentified
  source 1..81: mol_type = unassigned DNA; note = methanogen bacteria
gatatcttcaaagcaataatgaccacaaataatatgccgtttattgcaacgaatgaaatgagagtgcattacatcgaaaat

SEQ ID NO: 26032 - DNA, 99 bp, unidentified
  source 1..99: mol_type = unassigned DNA; note = methanogen bacteria
attgatggaaaaacctggaatgactgttataaagaaagaaaaatagcttgtttaaaagtttacactgttgccttacctatctacacagaggatttggtt

SEQ ID NO: 26033 - DNA, 90 bp, unidentified
  source 1..90: mol_type = unassigned DNA; note = methanogen bacteria
tccaagtttgaggcaaatatcggtgaagcaaacaaaacagtaacatttgagataaatggggaaagatataccagaaccagcgatgaaaac

SEQ ID NO: 26034 - DNA, 87 bp, unidentified
  source 1..87: mol_type = unassigned DNA; note = methanogen bacteria
aactacacaatcaaaacaacctacaataacacaagcgttgaaaacaggattacagtattgcctacgttaatagcggacaatttagtc

SEQ ID NO: 26035 - DNA, 54 bp, unidentified
  source 1..54: mol_type = unassigned DNA; note = methanogen bacteria
tacatttcattgattaatggtgaaggtagtccaatatccggcattaacattacc

SEQ ID NO: 26036 - DNA, 36 bp, unidentified
  source 1..36: mol_type = unassigned DNA; note = methanogen bacteria
aacggtgttttctacaacagactaaccaacgaaaac

SEQ ID NO: 26037 - DNA, 63 bp, unidentified
  source 1..63: mol_type = unassigned DNA; note = methanogen bacteria
gagtatatactgacagctattgatccattaacgggccttcagatgtcatataacatcacggtt

SEQ ID NO: 26038 - DNA, 63 bp, unidentified
  source 1..63: mol_type = unassigned DNA; note = methanogen bacteria
gaatacataattacttccgaatttgatgaaatgagaatttcaaatacaattacaataaaggat

SEQ ID NO: 26039 - DNA, 42 bp, unidentified
  source 1..42: mol_type = unassigned DNA; note = methanogen bacteria
atgaatcccctacacttttttacattaggatttttccaggaa

SEQ ID NO: 26040 - DNA, 42 bp, unidentified
  source 1..42: mol_type = unassigned DNA; note = methanogen bacteria
atgaatccgatacatttttttaccttaggatttttaccagaa

SEQ ID NO: 26041 - DNA, 42 bp, unidentified
  source 1..42: mol_type = unassigned DNA; note = methanogen bacteria
atgaatctcatccacttctttacattaggatttttcccagaa

SEQ ID NO: 26042 - DNA, 42 bp, unidentified
  source 1..42: mol_type = unassigned DNA; note = methanogen bacteria
atgtattccataccattttttacattaggattttatccagaa

SEQ ID NO: 26043 - DNA, 45 bp, unidentified
  source 1..45: mol_type = unassigned DNA; note = methanogen bacteria
atgaatccaatagatttttttacattaagttattttggaagatat

SEQ ID NO: 26044 - DNA, 42 bp, unidentified
  source 1..42: mol_type = unassigned DNA; note = methanogen bacteria
atgacacctatacaattttacactttaggatattttgaacaa

SEQ ID NO: 26045 - DNA, 45 bp, unidentified
  source 1..45: mol_type = unassigned DNA; note = methanogen bacteria
atgaacccaatacatttttttacattaggatattatcaagaatac

SEQ ID NO: 26046 - DNA, 42 bp, unidentified
  source 1..42: mol_type = unassigned DNA; note = methanogen bacteria
atgaacccaatacattttttcacattaggatatttacaggag

SEQ ID NO: 26047 - DNA, 87 bp, unidentified
  source 1..87: mol_type = unassigned DNA; note = methanogen bacteria
tcatctcttgaaacggtcacaaccactccatcggtgtcactggtaattcctggtgttgaaatgcccggttcgtcaatttatgttcct

SEQ ID NO: 26048 - DNA, 42 bp, unidentified
  source 1..42: mol_type = unassigned DNA; note = methanogen bacteria
atgaatctcatacaatttttttcattaggatattatccagaa

SEQ ID NO: 26049 - DNA, 57 bp, unidentified
  source 1..57: mol_type = unassigned DNA; note = methanogen bacteria
ggaatagaccaattcataagaccatttacccaaccgcttctaatgggatcatcaaaa

SEQ ID NO: 26050 - DNA, 183 bp, unidentified
  source 1..183: mol_type = unassigned DNA; note = methanogen bacteria
ttaaggaattcacttggaatagactggaacacaattcttgtaatcatgaatccaagtgaaacaagcacaagcattctccattcccatttatacaaaggaatatttggaatgatccttggaatgcttttaacttacattccagcgggaatccataccggaagctccttaagtgcttacactcca

SEQ ID NO: 26051 - DNA, 231 bp, unidentified
  source 1..231: mol_type = unassigned DNA; note = methanogen bacteria
atcgcattttatggcgcttgtccagattcttatgaattagatgtaggctacccacatgatcttgatggattaaatcaatacgatgtattaaatttaacagatcatgaaaataaaacaacagtttatctttcaaatcaatataatgagatggaattgttaaataacttagccattgatttgaatggaaaatgtgattggtactcacttagctggaacatatattcatactta

SEQ ID NO: 26052 - DNA, 33 bp, unidentified
  source 1..33: mol_type = unassigned DNA; note = methanogen bacteria
caggtttatttaatatctcaaattaaattgcca

SEQ ID NO: 26053 - DNA, 42 bp, unidentified
  source 1..42: mol_type = unassigned DNA; note = methanogen bacteria
atgaatcctatccattttttcacattgggctattaccccaag

SEQ ID NO: 26054 - DNA, 51 bp, unidentified; identical to SEQ ID NO: 25584
  source 1..51: mol_type = unassigned DNA; note = methanogen bacteria

SEQ ID NO: 26055 - DNA, 60 bp, unidentified
  source 1..60: mol_type = unassigned DNA; note = methanogen bacteria
atctacgagggagctcacaggatatatctctggggaagctatttcataacattggaagct

SEQ ID NO: 26056 - DNA, 57 bp, unidentified
  source 1..57: mol_type = unassigned DNA; note = methanogen bacteria
cagggctatggttatatcaatgtatatccctcccttgacttttcattccatgacctg

SEQ ID NO: 26057 - DNA, 105 bp, unidentified
  source 1..105: mol_type = unassigned DNA; note = methanogen bacteria
gtccacgttggcgacgtcctgggcatagccgaccgctactcgtacagcatctacgtccccctcggcctcgtgaatgccttctcgatccccctcagagggaacgcc

SEQ ID NO: 26058 - DNA, 69 bp, unidentified
  source 1..69: mol_type = unassigned DNA; note = methanogen bacteria
tcggcgggagcggacgcagactcgtcatggatggacgatttccgcgtctgggacctcaacgccctgctg

SEQ ID NO: 26059 - DNA, 51 bp, unidentified
  source 1..51: mol_type = unassigned DNA; note = methanogen bacteria
ggaaaaaatcacataatatatgcaggtaacaaaacccggattttcaacgtt

SEQ ID NO: 26060 - DNA, 42 bp, unidentified
  source 1..42: mol_type = unassigned DNA; note = methanogen bacteria
atgaacccaatacaatattttacaataggatatcgtcctgaa

SEQ ID NO: 26061 - DNA, 90 bp, unidentified
  source 1..90: mol_type = unassigned DNA; note = methanogen bacteria
ttcggcgacggggaggagtcggtcaacgacttcatcatgatcttcgccgaggccgcggggatggacggcgacatcacctggaacggcgtg

SEQ ID NO: 26062 - DNA, 30 bp, unidentified
  source 1..30: mol_type = unassigned DNA; note = methanogen bacteria
ccggtcttcctggacacgatcgatttcacg

SEQ ID NO: 26063 - DNA, 42 bp, unidentified
  source 1..42: mol_type = unassigned DNA; note = methanogen bacteria
atgaacccgatacattttttcacattgggatattatccggag

SEQ ID NO: 26064 - DNA, 42 bp, unidentified
  source 1..42: mol_type = unassigned DNA; note = methanogen bacteria
atgaatcctatacacttttttacattaggatttttacaggaa

SEQ ID NO: 26065 - DNA, 81 bp, unidentified
  source 1..81: mol_type = unassigned DNA; note = methanogen bacteria
ttggcattcttcaaaacaatatatgataatttaaatagtattgtttatatattattgaatgatgtgataatgatgagttat

SEQ ID NO: 26066 - DNA, 36 bp, unidentified
  source 1..36: mol_type = unassigned DNA; note = methanogen bacteria
ggaattgtaactacattaggtggttttgaattaggt

SEQ ID NO: 26067 - DNA, 42 bp, unidentified
  source 1..42: mol_type = unassigned DNA; note = methanogen bacteria
atgaacccaatacatttcttcacattaggatatttttcagaa

SEQ ID NO: 26068 - DNA, 120 bp, unidentified
  source 1..120: mol_type = unassigned DNA; note = methanogen bacteria
ataggtgcggtcgatatccccttgggggataccgcccgtaccttcctccatgctatcctccctacagtattcgatggcccctccaccccttggtatcctgacatcatcctcaacgcaaga

SEQ ID NO: 26069 - DNA, 54 bp, unidentified
  source 1..54: mol_type = unassigned DNA; note = methanogen bacteria
ggatctggcatcacaggttccgtgctcattctgggccatcagttcttcatcgag

SEQ ID NO: 26070 - DNA, 72 bp, unidentified
  source 1..72: mol_type = unassigned DNA; note = methanogen bacteria
tacttctcgaacgacgatgcgcttagagagatcacgctttggctcatgggcgggatgtggaacgcctcctgg

SEQ ID NO: 26071 - DNA, 36 bp, unidentified
  source 1..36: mol_type = unassigned DNA; note = methanogen bacteria
atttctgaaccggtaggtggaataattccaccacat

SEQ ID NO: 26072 - DNA, 66 bp, unidentified
  source 1..66: mol_type = unassigned DNA; note = methanogen bacteria
gactccaaattttattacagaaatgttaccagaagagctgtaagtacaacatcttttttacgggat

SEQ ID NO: 26073 - DNA, 45 bp, unidentified
  source 1..45: mol_type = unassigned DNA; note = methanogen bacteria
gcattcagctttttttcaattacgggaatgcaaacagaaatatat

SEQ ID NO: 26074 - DNA, 48 bp, unidentified
  source 1..48: mol_type = unassigned DNA; note = methanogen bacteria
ttaacacaacctgtatctcctacatttggtgctgttttagcattgaat

SEQ ID NO: 26075 - DNA, 42 bp, unidentified
  source 1..42: mol_type = unassigned DNA; note = methanogen bacteria
cctatggtggcaaatgggtcttgggatgcattttttgacatt

SEQ ID NO: 26076 - DNA, 42 bp, unidentified
  source 1..42: mol_type = unassigned DNA; note = methanogen bacteria
atgaatccaattcacttttttacattaggttattttcaagaa

SEQ ID NO: 26077 - DNA, 39 bp, unidentified
  source 1..39: mol_type = unassigned DNA; note = methanogen bacteria
ataacaaaagcaaatgacatttccattcataatctggat

SEQ ID NO: 26078 - DNA, 99 bp, unidentified
  source 1..99: mol_type = unassigned DNA; note = methanogen bacteria
ttgggaatcaagacaaacatgatcagcgatttctctataggatacctcttcaagtcaatgataggatttactccaggattccaaaaaggacgtctcttt

SEQ ID NO: 26079 - DNA, 48 bp, unidentified
  source 1..48: mol_type = unassigned DNA; note = methanogen bacteria
acaggattatgcgctgaggcaaacaagtttgtatcagtaaattatttt

SEQ ID NO: 26080 - DNA, 36 bp, unidentified
  source 1..36: mol_type = unassigned DNA; note = methanogen bacteria
atattccactcaatagacatagcaaatcataatcca

SEQ ID NO: 26081 - DNA, 36 bp, unidentified
  source 1..36: mol_type = unassigned DNA; note = methanogen bacteria
cctaaaatattccatccggacgtgactagctataca

SEQ ID NO: 26082 - DNA, 48 bp, unidentified
  source 1..48: mol_type = unassigned DNA; note = methanogen bacteria
cttggaggaatacctcttttctctgcaacattgaaggcaaaggcagca

SEQ ID NO: 26083 - DNA, 252 bp, unidentified
  source 1..252: mol_type = unassigned DNA; note = methanogen bacteria
gttcaagcaatcagctggcaacattggtcattgaatccgatagaactagtatcctatagagctgcatttacattgaacatcctgtctcaggcaatagcaaatcaatttgccacaatgggaaatctgttctacagcacacttacaggattcttcacacatactgacccaagagtattggtgggcattgccactatcggcagaaatcattccatcacttcaaccatctttggtcctgcattgcttgactttggt

SEQ ID NO: 26084 - DNA, 93 bp, unidentified
  source 1..93: mol_type = unassigned DNA; note = methanogen bacteria
aacaacgatgaccgctccgcgtccgaggtggcccgcggattcctgtcgttcagcgatgataccctcatgggacgctacgtctggaacatcgac

SEQ ID NO: 26085 - DNA, 42 bp, unidentified
  source 1..42: mol_type = unassigned DNA; note = methanogen bacteria
tacttcgacgccggcgcggccttcggcggagaattcatgcag

SEQ ID NO: 26086 - DNA, 72 bp, unidentified
  source 1..72: mol_type = unassigned DNA; note = methanogen bacteria
tacatggccgatagcgcccagctgagccagatagtctcttggagcttcgggacgatcaactatgctacctgg

SEQ ID NO: 26087 - DNA, 42 bp, unidentified
  source 1..42: mol_type = unassigned DNA; note = methanogen bacteria
atgaatccaatccatttttttacattaggttattaccctcag

SEQ ID NO: 26088 - DNA, 54 bp, unidentified
  source 1..54: mol_type = unassigned DNA; note = methanogen bacteria
aacccaattattcatccaataacatacttatttttaatgggatcatctaaagga

SEQ ID NO: 26089 - DNA, 189 bp, unidentified
  source 1..189: mol_type = unassigned DNA; note = methanogen bacteria
agataccagatgggaatcggtctcaacaccattttcatgactatcggaaaaagtatttcatcaacaagcattctgcatacacacctgctaaaatctgttttcggaaactttataaccaatttaataggaccatttattggaaaagagattaataccggtattggactatatcaatacattccagaagtt

SEQ ID NO: 26090 - DNA, 294 bp, unidentified
  source 1..294: mol_type = unassigned DNA; note = methanogen bacteria
ataattggagcaaatactgaatattatgaagtgaatgttgttaatcctgcagataatatagaactgaacggattcccaatagaaaatataagccacagcaacaacaaaacaacatacatcatgaattcaaattataatgaaatggaattgctgaatgatttgaaaatgcctctgaataattcatgtgattattataccgtatcgtggaacatagtttcatatttagaacctaatcatccaataaccaatatattaactgaaattataaatctatataaaaatttttatacttat

SEQ ID NO: 26091 - DNA, 36 bp, unidentified
  source 1..36: mol_type = unassigned DNA; note = methanogen bacteria
aaaatacgtagaaaaaatagaagaaataagagatat

SEQ ID NO: 26092 - DNA, 75 bp, unidentified
  source 1..75: mol_type = unassigned DNA; note = methanogen bacteria
gatttaagagatattagtaatttaattacaacatctgaaatgcaaactttttatgatgctcaattaatgacaagt

SEQ ID NO: 26093 - DNA, 66 bp, unidentified
  source 1..66: mol_type = unassigned DNA; note = methanogen bacteria
aactattattatgaagttcaattagaagatggctttttaccagtgtttaaaccaacatataatatt

SEQ ID NO: 26094 - DNA, 51 bp, unidentified
  source 1..51: mol_type = unassigned DNA; note = methanogen bacteria
atggtggaaattgtatttaaagatattgaagtacctgaatattcttttaac

SEQ ID NO: 26095 - DNA, 126 bp, unidentified
  source 1..126: mol_type = unassigned DNA; note = methanogen bacteria
ttccctgttagcatgcaccttagaaatgcaagtgatgtttctgcacctaatggattaagtgaagtaataagtagcatgcttttaaagattttttcaaatccattgatatccttatctcaaggagat

SEQ ID NO: 26096 - DNA, 33 bp, unidentified
  source 1..33: mol_type = unassigned DNA; note = methanogen bacteria
gtgtgtcatacattaggaatttcagtggacttg

SEQ ID NO: 26097 - DNA, 33 bp, unidentified
  source 1..33: mol_type = unassigned DNA; note = methanogen bacteria
tgttcattatttggaatacctgctgatatttca

SEQ ID NO: 26098 - DNA, 54 bp, unidentified
  source 1..54: mol_type = unassigned DNA; note = methanogen bacteria
gcagactcttttaacagttcattcagtccgatttttttccatggtattgatgat

SEQ ID NO: 26099 - DNA, 78 bp, unidentified
  source 1..78: mol_type = unassigned DNA; note = methanogen bacteria
cattttttatcaggttttctgttgaatgactggacaacattccctatatatgggggattgatgctgtttgcagtggat

SEQ ID NO: 26100 - DNA, 78 bp, unidentified
  source 1..78: mol_type = unassigned DNA; note = methanogen bacteria
atgagtgtttttgaatataattatataaatctgctgttgggctatttgattggtacagatgttcagttcacaacattt

SEQ ID NO: 26101 - DNA, 54 bp, unidentified
  source 1..54: mol_type = unassigned DNA; note = methanogen bacteria
ataagtatcccgggggcctttttaattgatgattctcattattacttcatgact

SEQ ID NO: 26102 - DNA, 51 bp, unidentified
  source 1..51: mol_type = unassigned DNA; note = methanogen bacteria
ggggccctgttcacaatagacccagatacgtccgtctacacccgttcggac

SEQ ID NO: 26103 - DNA, 33 bp, unidentified
  source 1..33: mol_type = unassigned DNA; note = methanogen bacteria
tctgttattcaggtttattttgatgtttctatt

SEQ ID NO: 26104 - DNA, 36 bp, unidentified
  source 1..36: mol_type = unassigned DNA; note = methanogen bacteria
acttatttatcccaagtaactcttatgaatcctaaa

SEQ ID NO: 26105 - DNA, 45 bp, unidentified
  source 1..45: mol_type = unassigned DNA; note = methanogen bacteria
ttagtgcagccggcttctccaacattggatgcggttttagtattg

SEQ ID NO: 26106 - DNA, 45 bp, unidentified
  source 1..45: mol_type = unassigned DNA; note = methanogen bacteria
attccaatggtggcaaatggatcttgggatgcattctttgacata

SEQ ID NO: 26107 - DNA, 87 bp, unidentified
  source 1..87: mol_type = unassigned DNA; note = methanogen bacteria
atgggactgaacctgattgattcaatatattattcagttgttacaatggcaacagtgggatatggagattatattccagtgaccgga

SEQ ID NO: 26108 - DNA, 33 bp, unidentified
  source 1..33: mol_type = unassigned DNA; note = methanogen bacteria
tgtcctatgattggtctttcaccattgttcact

SEQ ID NO: 26109 - DNA, 60 bp, unidentified
  source 1..60: mol_type = unassigned DNA; note = methanogen bacteria
attttaaatcccatcgtacatccgataacccaccagtttttgatgggcagttcaaaagga

SEQ ID NO: 26110 - DNA, 186 bp, unidentified
  source 1..186: mol_type = unassigned DNA; note = methanogen bacteria
ttcagatacgaaatgaacattgatcttaacactatcttcatgagtatggaaaatagtgtttcatcgacaagtatattgcatacacatttattaaagtctattttaggtgatgttttaactaatttaattggaccttttatcgataatgaaattaatacaggtgttggtctatatgaatacattcct

SEQ ID NO: 26111 - DNA, 297 bp, unidentified
  source 1..297: mol_type = unassigned DNA; note = methanogen bacteria
gcattcttcggtgccaatactgagcattatgaagttgatttggcaaatccaacagaaaatgtaactttaaatgaatttccagtagaaagcataacatatgaagataacagaacagtttatattattgattccaattataacgaaatggaattgctgaatgacttaaaggtgccgttcaacaatacgtgcaagtattatacgattacatggaatacattctcatacctggaggacggtgattcaacaactgaatttttactggaactgaaagaaaaagttgactcagtgctgtttcat

SEQ ID NO: 26112 - DNA, 45 bp, unidentified
  source 1..45: mol_type = unassigned DNA; note = methanogen bacteria
ctgtcccagccggcagatgcaacatggggttccgttttgatgctg

SEQ ID NO: 26113 - DNA, 39 bp, unidentified
  source 1..39: mol_type = unassigned DNA; note = methanogen bacteria
atggctttcaacgggtcctggcaggctttatttgatttg

SEQ ID NO: 26114 - DNA, 51 bp, unidentified
  source 1..51: mol_type = unassigned DNA; note = methanogen bacteria
ataaggcttatcggcaatgcaaacaatgcattctcacttgcatatcatcct

SEQ ID NO: 26115 - DNA, 87 bp, unidentified
  source 1..87: mol_type = unassigned DNA; note = methanogen bacteria
ttgggtctgggtccaattgattccatctattatgcggtcattacaatgacaactgtaggatatggagattacataccagatacaggt

SEQ ID NO: 26116 - DNA, 87 bp, unidentified
  source 1..87: mol_type = unassigned DNA; note = methanogen bacteria
ttgggcttgaatccaattgattccatctattatgctgttattacaatgacaactgtaggatatggagattatatacctgaaacaggt

SEQ ID NO: 26117 - DNA, 42 bp, unidentified
  source 1..42: mol_type = unassigned DNA; note = methanogen bacteria
gcccaacctgccgctccaacatgggatgcggttttgtcttta

SEQ ID NO: 26118 - DNA, 39 bp, unidentified
  source 1..39: mol_type = unassigned DNA; note = methanogen bacteria
atggcttcaaatggctcatggcaggctttatttgacttg

SEQ ID NO: 26119 - DNA, 90 bp, unidentified
  source 1..90: mol_type = unassigned DNA; note = methanogen bacteria
tcatcacttgagactataaccactaccccatctgtttcactggtaatacctggtgttgaaatgccaggatcatctatttatgttccgtta

SEQ ID NO: 26120 - DNA, 36 bp, unidentified
  source 1..36: mol_type = unassigned DNA; note = methanogen bacteria
atgaacccggtggcgtccgacgacagcatcaccgat

SEQ ID NO: 26121 - DNA, 30 bp, unidentified
  source 1..30: mol_type = unassigned DNA; note = methanogen bacteria
aagatcgacaataccgacgattacagctcc

SEQ ID NO: 26122 - DNA, 132 bp, unidentified
  source 1..132: mol_type = unassigned DNA; note = methanogen bacteria
gtgtggtatgccaaatggcagctgatcgagggcggcgccctgccgtaccgcgatttcaatttctcctaccccccgctggccctggccctcttcatcatcccggggctggcctccggcaccgccgaagggttc

SEQ ID NO: 26123 - DNA, 177 bp, unidentified
  source 1..177: mol_type = unassigned DNA; note = methanogen bacteria
ggcgtcccgatgtccgggctgagcgaggccttcctgagccagaccgggcgcagcttccaggccgagagcgttccggggaacatcacccatctgctgggcctcctgggtatatccgattacggggtggccgagagcgcccacacctacatcatcacgcagggccccctggccggcctc

SEQ ID NO: 26124 - DNA, 51 bp, unidentified; identical to SEQ ID NO: 26114
  source 1..51: mol_type = unassigned DNA; note = methanogen bacteria

SEQ ID NO: 26125 - DNA, 45 bp, unidentified
  source 1..45: mol_type = unassigned DNA; note = methanogen bacteria
ttaactcagcctgccgctccaacattagatgcattcttatctttg

SEQ ID NO: 26126 - DNA, 45 bp, unidentified
  source 1..45: mol_type = unassigned DNA; note = methanogen bacteria
attccaatggttgcaaatggaacttgggatgccttttttgatata

SEQ ID NO: 26127 - DNA, 276 bp, unidentified
  source 1..276: mol_type = unassigned DNA; note = methanogen bacteria
gttaacggcttggaacaaggtgttgacctaaaaggaggttcacaagcagaattacaattattaggttctgtcactccaactgaattagagcaaacccttgatgccaaattaaacacaaacaatataaaagtaacaaataatggaaacaataaggttactgttgaattggaaaataatattaattcaagtacatttacaagcgccataaacggaaaggcgaaagtgatcagctataatgaaattggtcctgttttaagtgaagaggcaatgggacaa

SEQ ID NO: 26128 - DNA, 30 bp, unidentified
  source 1..30: mol_type = unassigned DNA; note = methanogen bacteria
ctcatcatgcctgaagcaactacattaagt

SEQ ID NO: 26129 - DNA, 87 bp, unidentified
  source 1..87: mol_type = unassigned DNA; note = methanogen bacteria
tcgtctttagaaaccataacgacgacaccttcagtatctctggtaatacctggtgttgaaatgcccggctcatctatttatgtacct

SEQ ID NO: 26130 - DNA, 87 bp, unidentified
  source 1..87: mol_type = unassigned DNA; note = methanogen bacteria
tcatcacttgaaaatgttttcacgacaccttcagtttctattgtgattccgggtgttgaaatgcctggttcatcaatttatgtgcct

SEQ ID NO: 26131 - DNA, 114 bp, unidentified
  source 1..114: mol_type = unassigned DNA; note = methanogen bacteria
atgggatcgtacaagatctctttcgcccgcgtctatgaagtgattctcatccatctcaccaatctcggtgacgggctcaccagcctcgacatgaaggtcgtatggaacgagcgt

SEQ ID NO: 26132 - DNA, 78 bp, unidentified
  source 1..78: mol_type = unassigned DNA; note = methanogen bacteria
atgctaatctccagcgatgagaagaccgcgtccgctttaggatggacggtcggaaccctcaacaaggccagctgggac

SEQ ID NO: 26133 - DNA, 36 bp, unidentified
  source 1..36: mol_type = unassigned DNA; note = methanogen bacteria
tccaccatggaggagaccctcgtcagcatctccggt

SEQ ID NO: 26134 - DNA, 42 bp, unidentified; identical to SEQ ID NO: 25062
  source 1..42: mol_type = unassigned DNA; note = methanogen bacteria

SEQ ID NO: 26135 - DNA, 30 bp, unidentified
  source 1..30: mol_type = unassigned DNA; note = methanogen bacteria
ctcgtcaacggcgggagcgggatcggcttc

SEQ ID NO: 26136 - DNA, 90 bp, unidentified
  source 1..90: mol_type = unassigned DNA; note = methanogen bacteria
ttaaacatcacatcaatagacaatattataaattttattccaacagtaatcatggtaacattaagttcaacacaattcattgattggaca

SEQ ID NO: 26137 - DNA, 84 bp, unidentified
  source 1..84: mol_type = unassigned DNA; note = methanogen bacteria
tctcttgaaaatgtttttacaactccgtctgtttcgattgtcatacccggtgttgaggttcccggttctccaatatatgttcct

SEQ ID NO: 26138 - DNA, 33 bp, unidentified
  source 1..33: mol_type = unassigned DNA; note = methanogen bacteria
gtggctggactgggaagtgacgctctggctgca

SEQ ID NO: 26139 - DNA, 48 bp, unidentified
  source 1..48: mol_type = unassigned DNA; note = methanogen bacteria
cttgagctaatgggtgcagcaacagcaatgcaacaggcactggactat

SEQ ID NO: 26140 - DNA, 33 bp, unidentified
  source 1..33: mol_type = unassigned DNA; note = methanogen bacteria
gtactggttgcaggaacaattgcagtagcaaca

SEQ ID NO: 26141 - DNA, 63 bp, unidentified
  source 1..63: mol_type = unassigned DNA; note = methanogen bacteria
cagatcagtatggtattcgcatactcatcaagtgcaagcctcgcaccaagaatagcacagcta

SEQ ID NO: 26142 - DNA, 42 bp, unidentified
  source 1..42: mol_type = unassigned DNA; note = methanogen bacteria
gttctctcaaacataatacctcttctgacacctatttataca

SEQ ID NO: 26143 - DNA, 84 bp, unidentified
  source 1..84: mol_type = unassigned DNA; note = methanogen bacteria
tcactgccttcggtttttgaaacacctgcagtttccatagtcattccgggagttgaaatgcccggttcatcaatttatattccg

SEQ ID NO: 26144 - DNA, 84 bp, unidentified
  source 1..84: mol_type = unassigned DNA; note = methanogen bacteria
acattgccgtcagtttttgattcgccaagcgtttcgattgtgatacccggtgtggatattcccggttcccagatttatgttcca

SEQ ID NO: 26145 - DNA, 81 bp, unidentified
  source 1..81: mol_type = unassigned DNA; note = methanogen bacteria
cttcaaacggttttcgatactcctagtgtttctatcattttaccaggtgtggaaatgccgggttctccgatatatgttcca

SEQ ID NO: 26146 - DNA, 84 bp, unidentified
  source 1..84: mol_type = unassigned DNA; note = methanogen bacteria
acactgccgtcagtatttgacacaccagcagtttccattgtaattccaggtgtggaaatgccgggctcatccatttatgtcccg

SEQ ID NO: 26147 - DNA, 84 bp, unidentified
  source 1..84: mol_type = unassigned DNA; note = methanogen bacteria
tcactgccgtcagtattcgatactcctgcagtttccatagtcattcctggtgtggaaatgccaggctcatcgatttacattcca

SEQ ID NO: 26148 - DNA, 87 bp, unidentified
  source 1..87: mol_type = unassigned DNA; note = methanogen bacteria
atgggattgaatttaattgattcaatttactattccgttattaccatggcaacagtaggttatggagattatatcccttcaacagga

SEQ ID NO: 26149 - DNA, 87 bp, unidentified
  source 1..87: mol_type = unassigned DNA; note = methanogen bacteria
atgaatctaaacatattcgattcaatatattacactataataacaattgctacagtaggatatggggatatcatccctataactcca

SEQ ID NO: 26150 - DNA, 84 bp, unidentified
  source 1..84: mol_type = unassigned DNA; note = methanogen bacteria
acgctaccttccgtttttgaaacgccgagcgtttctattgtgattccgggcgtagatattccgggttcccagatttatgtcccg

SEQ ID NO: 26151 - DNA, 84 bp, unidentified
  source 1..84: mol_type = unassigned DNA; note = methanogen bacteria
tcactgccgtccgtttttgaaacacctgctgtttctatagttattcctggagtggaaatgccgggttcatccatatacattcct

SEQ ID NO: 26152 - DNA, 87 bp, unidentified
  source 1..87: mol_type = unassigned DNA; note = methanogen bacteria
atggaattggacatatacgattcaatatattacactataataacccttgctacagtaggatatggagacattttcccaataactccc

SEQ ID NO: 26153 - DNA, 276 bp, unidentified
  source 1..276: mol_type = unassigned DNA; note = methanogen bacteria
tttaatggactagaacaaggtgttgacctaaaaggaggttctcaagcagaactacagctcttaggatctgtaactcctactgaattagagcaaacccttgactccaaattaaacacaaacaacataaaagtgacaaataatggaaacaaaaaggttactgtggaactagaaaataatgttaattcaagtacatttacgaatgccataagtggaaaggccaaggtaatcagttataatgaaatcggtcctgtcttaagtgaagaagcaatgggccaa

SEQ ID NO: 26154 - DNA, 30 bp, unidentified
  source 1..30: mol_type = unassigned DNA; note = methanogen bacteria
atcatcatgcctgaagcaactacattaagt

SEQ ID NO: 26155 - DNA, 87 bp, unidentified
  source 1..87: mol_type = unassigned DNA; note = methanogen bacteria
atgaagctgaacatatacgattcaatatattacaccataattactattgctactgtaggatacggagacattattcctattactcca

SEQ ID NO: 26156 - DNA, 87 bp, unidentified
  source 1..87: mol_type = unassigned DNA; note = methanogen bacteria
tcaattccatcggtttttgatactcctgcagtttcaattgtaattccaggtgtcgaaatgccgggttcatcaatctatattccattt

SEQ ID NO: 26157 - DNA, 84 bp, unidentified
  source 1..84: mol_type = unassigned DNA; note = methanogen bacteria
acattgccttctgtttttgaaacaccaacggtttccatagtaattccgggtgtggacattccgggctctcagatttacgttcca

SEQ ID NO: 26158 - DNA, 84 bp, unidentified
  source 1..84: mol_type = unassigned DNA; note = methanogen bacteria
acgctgccgacagtcttcgacacgccagcagtttcaatcgtcataccgggggttgaaatgcccggctcatcaatctacataccg

SEQ ID NO: 26159 - DNA, 87 bp, unidentified
  source 1..87: mol_type = unassigned DNA; note = methanogen bacteria
atgaatctgaacatatacgattcaatatattacaccataataactattgctacagtaggatatggagatattatccctataacccca

SEQ ID NO: 26160 - DNA, 123 bp, unidentified
  source 1..123: mol_type = unassigned DNA; note = methanogen bacteria
atcggcgactaccacgtcagtttcgctgatgtttatggatacgtctggaaacacatctccggcaatgtagacgcctcggacatcaacgaggtaagggcagattatgctatctgggacctgagg

SEQ ID NO: 26161 - DNA, 78 bp, unidentified
  source 1..78: mol_type = unassigned DNA; note = methanogen bacteria
aaactgggggccgatcccgatacgctgagcgcaatatacaactggtcggttgggtccatagacgggatttcgtgggat

SEQ ID NO: 26162 - DNA, 78 bp, unidentified
  source 1..78: mol_type = unassigned DNA; note = methanogen bacteria
attccacaaaaactcgaaggtgcaggttacggtttaagaaatgtaaaagcaaacgacttcgctgctgctacattgaaa

SEQ ID NO: 26163 - DNA, 114 bp, unidentified
  source 1..114: mol_type = unassigned DNA; note = methanogen bacteria
atgtttgaaatggctgatgcattaggttcattcgaaagattacacttattaggtttagcttaccaaggtttaaacgctgataacttagtatatgacatggtaaaagaaaacgct

SEQ ID NO: 26164 - DNA, 117 bp, unidentified
  source 1..117: mol_type = unassigned DNA; note = methanogen bacteria
agtattgtacaagcaactatcgctcgtgcagaagctgatggtgtaattgctcctcaagaccaattaactgatttcgctatttacaacactgatgatgcagctaaatggaacgcgtat

SEQ ID NO: 26165 - DNA, 75 bp, unidentified
  source 1..75: mol_type = unassigned DNA; note = methanogen bacteria
ccatctactttattatacttcaatgataaccttgaattcgcaaccggtttacctggtctcgactacggtagagca

SEQ ID NO: 26166 - DNA, 36 bp, unidentified
  source 1..36: mol_type = unassigned DNA; note = methanogen bacteria
tcattcttctctcactccatttatggtggaggaggt

SEQ ID NO: 26167 - DNA, 84 bp, unidentified
  source 1..84: mol_type = unassigned DNA; note = methanogen bacteria
acattaccttctgtttttgaaacacctgcggtttcaattattattccaggtgtagaaatgccaggttcttcaatttatgtgcca

SEQ ID NO: 26168 - DNA, 84 bp, unidentified
  source 1..84: mol_type = unassigned DNA; note = methanogen bacteria
acattgccgagcgtttttgaaacaccatcggtatccatagtgattcccggcgtggaaatgccaggatcatccatatacataccc

SEQ ID NO: 26169 - DNA, 66 bp, unidentified
  source 1..66: mol_type = unassigned DNA; note = methanogen bacteria
atcggcgacaccacccttttgggccttctcgacatggatttcgggaaccccgagaatccgagttac

SEQ ID NO: 26170 - DNA, 30 bp, unidentified; identical to SEQ ID NO: 24916
  source 1..30: mol_type = unassigned DNA; note = methanogen bacteria

SEQ ID NO: 26171 - DNA, 33 bp, unidentified
  source 1..33: mol_type = unassigned DNA; note = methanogen bacteria
caggtggacctcggatccatgtccagcgccacg

SEQ ID NO: 26172 - DNA, 90 bp, unidentified
  source 1..90: mol_type = unassigned DNA; note = methanogen bacteria
gtcctgcacggcgaggaggactggctggattccttcaggatggcatggctgatggtcttcggaggcgacctcgagctgggccacgtcacc

SEQ ID NO: 26173 - DNA, 39 bp, unidentified
  source 1..39: mol_type = unassigned DNA; note = methanogen bacteria
ttcgcatacatcggtatcgtcggcgactcgatgggcaat

SEQ ID NO: 26174 - DNA, 81 bp, unidentified
  source 1..81: mol_type = unassigned DNA; note = methanogen bacteria
ttcaccatgtccgcctggaggaagggtacctccgtcatggccgagaggttcgcggtcagcaagatcatccccgacgacgag

SEQ ID NO: 26175 - DNA, 45 bp, unidentified
  source 1..45: mol_type = unassigned DNA; note = methanogen bacteria
acgctgaacctcatgggacgcaacagacaggtgataccggtcacc

SEQ ID NO: 26176 - DNA, 84 bp, unidentified
  source 1..84: mol_type = unassigned DNA; note = methanogen bacteria
acattgcctacagtttttgaaaccccttccgtttccatagttattcctggtgtggacattccgggctctcaaatctatgttccg

SEQ ID NO: 26177 - DNA, 105 bp, unidentified
  source 1..105: mol_type = unassigned DNA; note = methanogen bacteria
ggaaaccgttttattggcagctttcataagattttaggaagtattggtgattatacaagcgagccctttaatgtcaatatggccagaacgatcatccgcagttct

SEQ ID NO: 26178 - DNA, 57 bp, unidentified
  source 1..57: mol_type = unassigned DNA; note = methanogen bacteria
cagtggccattgatctttaaaatgtactcttacacacttccacaggcaatagcggtg

SEQ ID NO: 26179 - DNA, 72 bp, unidentified
  source 1..72: mol_type = unassigned DNA; note = methanogen bacteria
ggagacgccaaccagcccgccctctgggacggcaagttcctgtggttcacggtgcacatgaccgacgccagt

SEQ ID NO: 26180 - DNA, 48 bp, unidentified
  source 1..48: mol_type = unassigned DNA; note = methanogen bacteria
gcgggatggatcgatatgaccgccatattcgcaccgtacatggggtgg

SEQ ID NO: 26181 - DNA, 84 bp, unidentified
  source 1..84: mol_type = unassigned DNA; note = methanogen bacteria
tcacttgaaacggctttggaaacaccttctgtttcacttgtcattcctggagtggacatgcctggactgtcaatatatgttccg

SEQ ID NO: 26182 - DNA, 30 bp, unidentified
  source 1..30: mol_type = unassigned DNA; note = methanogen bacteria
gaggaactctccggaggttcggagaatgcc

SEQ ID NO: 26183 - DNA, 84 bp, unidentified
  source 1..84: mol_type = unassigned DNA; note = methanogen bacteria
acattgccaactgtttttgaaactccgagcgtttcgatagtgatacccggtgttgatattcctggttcccagatttacgttccc

SEQ ID NO: 26184 - DNA, 84 bp, unidentified
  source 1..84: mol_type = unassigned DNA; note = methanogen bacteria
tctcttcaaacggttttcgatactccaagcgtttcgattgtacttcctggtgtcgaaatacctggatcacccatatatgttccg

SEQ ID NO: 26185 - DNA, 87 bp, unidentified
  source 1..87: mol_type = unassigned DNA; note = methanogen bacteria
actttaagtggagattatgctagtttccaagaagcagttatgggtcttttctctgatccacaaacattcttaaataatttaatgaat

SEQ ID NO: 26186 - DNA, 57 bp, unidentified; identical to SEQ ID NO: 21504
  source 1..57: mol_type = unassigned DNA; note = methanogen bacteria

SEQ ID NO: 26187 - DNA, 192 bp, unidentified
  source 1..192: mol_type = unassigned DNA; note = methanogen bacteria
ttcagacaacaaatgggaattaaacttaacactgttttttgttctatgtctaacacaatgagttctacaagcattttgcatacccacctactaaagtcaattattggagcccttataagtcaaattatgggaccttttgttcaaagtaacatcaatactggcgttggcctatattcatatgttccaagtttt

SEQ ID NO: 26188 - DNA, 291 bp, unidentified
  source 1..291: mol_type = unassigned DNA; note = methanogen bacteria
agcgttggagtggctggtgctgaaaccgattattacacagtagacgttgtaaaccccacagacaacattgatttgggagacattaatttaaaagtcattgaacaaaaaaattataccgattcaaataagaccacatattatatcgaccacaactataatgaaatggaacttataaatgatttgaagcatcctctgaagaattcttgtgaatattatacggtaacctggaatatcttttcttatcttgaagattaccctgaaattaatagatatagttttatattacaaaaa

SEQ ID NO: 26189 - DNA, 30 bp, unidentified
  source 1..30: mol_type = unassigned DNA; note = methanogen bacteria
acatttcttctaaacaccgtttcaccggaa

SEQ ID NO: 26190 - DNA, 30 bp, unidentified
  source 1..30: mol_type = unassigned DNA; note = methanogen bacteria
tttcagacccccatctcatcgggaattaca

SEQ ID NO: 26191 - DNA, 66 bp, unidentified
  source 1..66: mol_type = unassigned DNA; note = methanogen bacteria
attggaaatccgcgaagcggaatagcggtttacatgtcctatctcatctttgaaatgggtccgaat

SEQ ID NO: 26192 - DNA, 33 bp, unidentified
  source 1..33: mol_type = unassigned DNA; note = methanogen bacteria
tctagaattcaaatttatttccatgtttcattt

SEQ ID NO: 26193 - DNA, 36 bp, unidentified
  source 1..36: mol_type = unassigned DNA; note = methanogen bacteria
acatatctttcaagagttacagaaattaatggagaa

SEQ ID NO: 26194 - DNA, 45 bp, unidentified
  source 1..45: mol_type = unassigned DNA; note = methanogen bacteria
caaggaggagtgattgcctctactgttccattttctataaattat

SEQ ID NO: 26195 - DNA, 81 bp, unidentified
  source 1..81: mol_type = unassigned DNA; note = methanogen bacteria
tttcctaatgaaattggtttagaacattattggaaatcaattattccaacgtttttcaccagtggtcaatttagtagatat

SEQ ID NO: 26196 - DNA, 60 bp, unidentified
  source 1..60: mol_type = unassigned DNA; note = methanogen bacteria
gaatcaataggtttaatagaaactggatttgctttatattcatttaactgttattcctct

SEQ ID NO: 26197 - DNA, 60 bp, unidentified
  source 1..60: mol_type = unassigned DNA; note = methanogen bacteria
atgtcattttcctatttctattttgatggtaaatttggatttttatctcaattggatccg

SEQ ID NO: 26198 - DNA, 33 bp, unidentified
  source 1..33: mol_type = unassigned DNA; note = methanogen bacteria
gttatccaaatctactttaatgtttcaatttac

SEQ ID NO: 26199 - DNA, 36 bp, unidentified
  source 1..36: mol_type = unassigned DNA; note = methanogen bacteria
acttatttatctgaagtaactcaaataaatggtgaa

SEQ ID NO: 26200 - DNA, 30 bp, unidentified
  source 1..30: mol_type = unassigned DNA; note = methanogen bacteria
attatacagatttattttaatgtttcaatc

SEQ ID NO: 26201 - DNA, 36 bp, unidentified
  source 1..36: mol_type = unassigned DNA; note = methanogen bacteria
acatatttgtcccaagtaactcagattaatggtgaa

SEQ ID NO: 26202 - DNA, 30 bp, unidentified
  source 1..30: mol_type = unassigned DNA; note = methanogen bacteria
ctagttaaaacagatataggcagtttcaat

SEQ ID NO: 26203 - DNA, 102 bp, unidentified
  source 1..102: mol_type = unassigned DNA; note = methanogen bacteria
agatttggaatcgaagcaaacgtgattaatacatactctctagactatcttatcaattgtctccttggattaagtaaaggaatcactaaaggccgtcatttt

SEQ ID NO: 26204 - DNA, 51 bp, unidentified
  source 1..51: mol_type = unassigned DNA; note = methanogen bacteria
ataactaatttaagtcttatttcaaataaattaacaacattcccttacttt

SEQ ID NO: 26205 - DNA, 42 bp, unidentified
  source 1..42: mol_type = unassigned DNA; note = methanogen bacteria
gatattctgtttggatcaatgaatatattcaacagaagtccg

SEQ ID NO: 26206 - DNA, 72 bp, unidentified
  source 1..72: mol_type = unassigned DNA; note = methanogen bacteria
tacttcattcaggcttataaaaccagcgtttcaatgggtctggatatgatagacttgtcagttgtctcacca

SEQ ID NO: 26207 - DNA, 30 bp, unidentified
  source 1..30: mol_type = unassigned DNA; note = methanogen bacteria
gtaattcagatttatttcaatgtttcaatt

SEQ ID NO: 26208 - DNA, 36 bp, unidentified
  source 1..36: mol_type = unassigned DNA; note = methanogen bacteria
acatatctggaccaggtaactcatttggatgctcac

SEQ ID NO: 26209 - DNA, 78 bp, unidentified
  source 1..78: mol_type = unassigned DNA; note = methanogen bacteria
cctgattttatggatattattccagggtgtttcttgtttaatctcaggttacctttggtttctagtggctttagtata

SEQ ID NO: 26210 - DNA, 36 bp, unidentified
  source 1..36: mol_type = unassigned DNA; note = methanogen bacteria
acaggtattattataataaaattgatggagttgatc

SEQ ID NO: 26211 - DNA, 36 bp, unidentified
  source 1..36: mol_type = unassigned DNA; note = methanogen bacteria
ttgaacgaacgtaccatcatgggtcacctcatcacc

SEQ ID NO: 26212 - DNA, 36 bp, unidentified
  source 1..36: mol_type = unassigned DNA; note = methanogen bacteria
atgaaccccaccttcttcgacgtggagtacaccgcc

SEQ ID NO: 26213 - DNA, 36 bp, unidentified
  source 1..36: mol_type = unassigned DNA; note = methanogen bacteria
ttgaacgatcgtaccgtcctgggtcatgtgataaca

SEQ ID NO: 26214 - DNA, 33 bp, unidentified
  source 1..33: mol_type = unassigned DNA; note = methanogen bacteria
aaccccgccttccttaacctggagtacaccgct

SEQ ID NO: 26215 - DNA, 288 bp, unidentified
  source 1..288: mol_type = unassigned DNA; note = methanogen bacteria
gttgtattgagtgtggataagtctgttgatgtttcttatgttgttgtgggtgatttggtcaaatatattattattgtgcataatgatggtttgtctgatgctactgatgttaaggtttgggatgttttacctgttggtgttatgtatgtgtctggtgctgatgcttatgatgaagctacacataatgctacttggaccattgctaaaattgaagcaggtaaatctgccagtgttgttcttgttgtgaatgagacacatgagggtaacatgataaatagtgtatttgct

SEQ ID NO: 26216 - DNA, 168 bp, unidentified
  source 1..168: mol_type = unassigned DNA; note = methanogen bacteria
gatagtgcatttgcttattgttgtgagaatacgactgttgttaatggaacatgtggtgttgttattatttggaatttggaatatagtggtttgactgatgctaatgatcagtttaagctttctgcagttgattttgcttttggtcaatctaattctatttcccataga

SEQ ID NO: 26217 - DNA, 39 bp, unidentified
  source 1..39: mol_type = unassigned DNA; note = methanogen bacteria
aataatccatctaatgaaacttttaatttcattgtaaaa

SEQ ID NO: 26218 - DNA, 36 bp, unidentified
  source 1..36: mol_type = unassigned DNA; note = methanogen bacteria
cccaaaatattcaatcctgacataacatcatatact

SEQ ID NO: 26219 - DNA, 48 bp, unidentified
  source 1..48: mol_type = unassigned DNA; note = methanogen bacteria
gggcacatgcaggtttatatgatttccagaatcaatctttccctgaca

SEQ ID NO: 26220 - DNA, 87 bp, unidentified
  source 1..87: mol_type = unassigned DNA; note = methanogen bacteria
atggacttggatttaattgattccatttattatgctgtcattaccatggcagcagtgggttatggggatttttacccaacaaccgcg

SEQ ID NO: 26221 - DNA, 42 bp, unidentified
  source 1..42: mol_type = unassigned DNA; note = methanogen bacteria
tccctctcatgggatgtcggggcccaggtggacaacacctgg

SEQ ID NO: 26222 - DNA, 33 bp, unidentified
  source 1..33: mol_type = unassigned DNA; note = methanogen bacteria
ggaagtctgtgtcccatccacaccgaactgcct

SEQ ID NO: 26223 - DNA, 36 bp, unidentified
  source 1..36: mol_type = unassigned DNA; note = methanogen bacteria
aatatcactggtggagatatgacactaacatacaac

SEQ ID NO: 26224 - DNA, 30 bp, unidentified
  source 1..30: mol_type = unassigned DNA; note = methanogen bacteria
gccgagctctccggcggctcctccgatgcc

SEQ ID NO: 26225 - DNA, 93 bp, unidentified
  source 1..93: mol_type = unassigned DNA; note = methanogen bacteria
aacaacgacgaccgttccgcgtccgaggtgatgcgcgggttcctgtctttcagcgacgacaccctcatggggcgctatgtctggaacatcgac

SEQ ID NO: 26226 - DNA, 42 bp, unidentified
  source 1..42: mol_type = unassigned DNA; note = methanogen bacteria
tatttcgacgccggcgcggccttcggcggggagttcatgcag

SEQ ID NO: 26227 - DNA, 75 bp, unidentified
  source 1..75: mol_type = unassigned DNA; note = methanogen bacteria
tacatggccgataccgcccagctgagccagatcgtctcatggagcttcgggacgatcaactacgccacctgggaa

SEQ ID NO: 26228 - DNA, 36 bp, unidentified
  source 1..36: mol_type = unassigned DNA; note = methanogen bacteria
gagaaaatagtaaatcctacagccgcaaattataca

SEQ ID NO: 26229 - DNA, 75 bp, unidentified
  source 1..75: mol_type = unassigned DNA; note = methanogen bacteria
tactacttcgttcaggcttataaaaccagtgtttcaatgggtctggatatgatagacttgtcagttgtctcacca

SEQ ID NO: 26230 - DNA, 33 bp, unidentified
  source 1..33: mol_type = unassigned DNA; note = methanogen bacteria
caaatttcggagtatttcaatacttccattgcc

SEQ ID NO: 26231 - DNA, 36 bp, unidentified
  source 1..36: mol_type = unassigned DNA; note = methanogen bacteria
tactttctgcagactgtcagccatgtatatacatat

SEQ ID NO: 26232 - DNA, 36 bp, unidentified
  source 1..36: mol_type = unassigned DNA; note = methanogen bacteria
cataaaattattagtccaacaaatgtaagttactct

SEQ ID NO: 26233 - DNA, 78 bp, unidentified
  source 1..78: mol_type = unassigned DNA; note = methanogen bacteria
atttgggagatgcctgacttccttcccgcactaggcgataagattgcagcagaaggtttcggaaccgacgccaatgca

SEQ ID NO: 26234 - DNA, 30 bp, unidentified
  source 1..30: mol_type = unassigned DNA; note = methanogen bacteria
accatgatgggttcggaatcacccaacatg

SEQ ID NO: 26235 - DNA, 48 bp, unidentified
  source 1..48: mol_type = unassigned DNA; note = methanogen bacteria
gcaggtgtacccatcttctctaccataagcacagtcatcactgagcct

SEQ ID NO: 26236 - DNA, 39 bp, unidentified
  source 1..39: mol_type = unassigned DNA; note = methanogen bacteria
ttcggaatcgacagagcaatcggtggaagcgacatgggt

SEQ ID NO: 26237 - DNA, 33 bp, unidentified
  source 1..33: mol_type = unassigned DNA; note = methanogen bacteria
tatatgattattgttaagaaggttgacatatca

SEQ ID NO: 26238 - DNA, 69 bp, unidentified
  source 1..69: mol_type = unassigned DNA; note = methanogen bacteria
accatgaatgtcaatggagttcctgccaattcaagaggacttattgtaatgatatccgcattgcttgga

SEQ ID NO: 26239 - DNA, 33 bp, unidentified
  source 1..33: mol_type = unassigned DNA; note = methanogen bacteria
actccacgcccggaaggactttttatagcgaat

SEQ ID NO: 26240 - DNA, 33 bp, unidentified
  source 1..33: mol_type = unassigned DNA; note = methanogen bacteria
tacattactgttttcagacaacttaattttaat

SEQ ID NO: 26241 - DNA, 33 bp, unidentified
  source 1..33: mol_type = unassigned DNA; note = methanogen bacteria
aacaaatctacaaatggagaatcattatgggct

SEQ ID NO: 26242 - DNA, 69 bp, unidentified
  source 1..69: mol_type = unassigned DNA; note = methanogen bacteria
acaatagatgtctttggcgttcctgctaatgcaaggggtttgattgtaatgattgctgcattgtctgga

SEQ ID NO: 26243 - DNA, 30 bp, unidentified
  source 1..30: mol_type = unassigned DNA; note = methanogen bacteria
actcctaaagatggaatcatgattgcaaat

SEQ ID NO: 26244 - DNA, 45 bp, unidentified; identical to SEQ ID NO: 25451
  source 1..45: mol_type = unassigned DNA; note = methanogen bacteria

SEQ ID NO: 26245 - DNA, 39 bp, unidentified
  source 1..39: mol_type = unassigned DNA; note = methanogen bacteria
atggcaagtgcaggcacatgggaggcgctctttgaacat

SEQ ID NO: 26246 - DNA, 45 bp, unidentified
  source 1..45: mol_type = unassigned DNA; note = methanogen bacteria
tttattgttcgtttactagatgatactggatcatatgtgggtgca

SEQ ID NO: 26247 - DNA, 168 bp, unidentified
  source 1..168: mol_type = unassigned DNA; note = methanogen bacteria
tacaccatcacaacagaatatatggattgcatagaaagtaatgtggtttctgtgatatcaattttaaatgcagataatttaacaaagcaatatggtgataattcgcaatttgttgctaacttggttgatggtcagggacatcctcatccaaatcagaatgtcacgttt

SEQ ID NO: 26248 - DNA, 48 bp, unidentified
  source 1..48: mol_type = unassigned DNA; note = methanogen bacteria
aatggggttacctataggagaacaactgataataacggacaagcgaaa

SEQ ID NO: 26249 - DNA, 66 bp, unidentified
  source 1..66: mol_type = unassigned DNA; note = methanogen bacteria
gagtatatcataacctcaacttataatgacctatcaatttcaaataaaattataattttgtctcca

SEQ ID NO: 26250 - DNA, 42 bp, unidentified
  source 1..42: mol_type = unassigned DNA; note = methanogen bacteria
attggtattgaccaaattgtatatgctttatctgcagctaat

SEQ ID NO: 26251 - DNA, 30 bp, unidentified
  source 1..30: mol_type = unassigned DNA; note = methanogen bacteria
tttgcaagtgcaggaataccatccggaatc

SEQ ID NO: 26252 - DNA, 45 bp, unidentified
  source 1..45: mol_type = unassigned DNA; note = methanogen bacteria
cagggcggaatactcactgctgcggttcctttttccatgcaatac

SEQ ID NO: 26253 - DNA, 81 bp, unidentified
  source 1..81: mol_type = unassigned DNA; note = methanogen bacteria
tttcccgccgactttagtttggaaagtgtctggaagggcattctccctacattctatacaaacggccagttcagccgatac

SEQ ID NO: 26254 - DNA, 60 bp, unidentified
  source 1..60: mol_type = unassigned DNA; note = methanogen bacteria
cagtcatggggttttatagaaaccggatttgatatatatgcctttaactgctatctctct

SEQ ID NO: 26255 - DNA, 60 bp, unidentified
  source 1..60: mol_type = unassigned DNA; note = methanogen bacteria
atgtcggttgaccattactttttaagcggaaaattcgcatttctggcgaatatggatccg

SEQ ID NO: 26256 - DNA, 57 bp, unidentified
  source 1..57: mol_type = unassigned DNA; note = methanogen bacteria
acttataatacaagtgggtttaatttcaatataagtaaatttaactatattttcaaa

SEQ ID NO: 26257 - DNA, 51 bp, unidentified
  source 1..51: mol_type = unassigned DNA; note = methanogen bacteria
ataatgccgcttgataagtttgatggagacatacggataatgaccgtgatg

SEQ ID NO: 26258 - DNA, 36 bp, unidentified
  source 1..36: mol_type = unassigned DNA; note = methanogen bacteria
tcacaaatatccgagtattttaacacatcaatttct

SEQ ID NO: 26259 - DNA, 36 bp, unidentified
  source 1..36: mol_type = unassigned DNA; note = methanogen bacteria
tatttcctgcagacagttagccatatttacacatac

SEQ ID NO: 26260 - DNA, 36 bp, unidentified
  source 1..36: mol_type = unassigned DNA; note = methanogen bacteria
ccaaagatattgcatcctgatgtgacaagctatacg

SEQ ID NO: 26261 - DNA, 39 bp, unidentified
  source 1..39: mol_type = unassigned DNA; note = methanogen bacteria
aaccccaccttcatgcagaccggtaccatatccagcgat

SEQ ID NO: 26262 - DNA, 39 bp, unidentified
  source 1..39: mol_type = unassigned DNA; note = methanogen bacteria
ctggtatcagagccggtaaatggtgcaattgcgccatac

SEQ ID NO: 26263 - DNA, 111 bp, unidentified
  source 1..111: mol_type = unassigned DNA; note = methanogen bacteria
gggtacgggacgatgaagatcccgttcgccgaatgctacagcatcctctgggaccacatcacgggggacatcggggacacgcagctcgactacatcgtggtgaaggagcgc

SEQ ID NO: 26264 - DNA, 75 bp, unidentified
  source 1..75: mol_type = unassigned DNA; note = methanogen bacteria
aagctcaacgccgaccccgactccctggctaagatctacgcctggacggtcggaacggtcagcgacgccaaatgg

SEQ ID NO: 26265 - DNA, 45 bp, unidentified
  source 1..45: mol_type = unassigned DNA; note = methanogen bacteria
attattgttattataatgttactatatattaaaatacggaaaaaa

SEQ ID NO: 26266 - DNA, 39 bp, unidentified
  source 1..39: mol_type = unassigned DNA; note = methanogen bacteria
ataacccgaaaccatggccttataatgcagcataaaaca

SEQ ID NO: 26267 - DNA, 75 bp, unidentified
  source 1..75: mol_type = unassigned DNA; note = methanogen bacteria
caggaattggagttcactccccagttggtatttaacatatttttcggagttaagggaggtatgggggccatttta

SEQ ID NO: 26268 - DNA, 42 bp, unidentified
  source 1..42: mol_type = unassigned DNA; note = methanogen bacteria
accagtcttgcaaacggcaagttctattcagccaattatttc

SEQ ID NO: 26269 - DNA, 39 bp, unidentified
  source 1..39: mol_type = unassigned DNA; note = methanogen bacteria
gccaaatatttgtacaggataaagttttacaattcccct

SEQ ID NO: 26270 - DNA, 33 bp, unidentified
  source 1..33: mol_type = unassigned DNA; note = methanogen bacteria
atgatgataaattttatacattatgataatttt

SEQ ID NO: 26271 - DNA, 81 bp, unidentified
  source 1..81: mol_type = unassigned DNA; note = methanogen bacteria
catttatttgacaattcatttcttgtaacaaatttaaatttatttatcttcaataatattgaaattcgtcctaatattata

SEQ ID NO: 26272 - DNA, 36 bp, unidentified
  source 1..36: mol_type = unassigned DNA; note = methanogen bacteria
attaatgaacctgttggaggcatcatacctccatat

SEQ ID NO: 26273 - DNA, 132 bp, unidentified
  source 1..132: mol_type = unassigned DNA; note = methanogen bacteria
atgtacggtacgctcgacctctctgcaggaaaggtgttcgacctcttctgggaccatctctcgggcaggacctatgaccgcatacaggagaacgacgattggttctccgacaggatactctgggagtaccgt

SEQ ID NO: 26274 - DNA, 36 bp, unidentified
  source 1..36: mol_type = unassigned DNA; note = methanogen bacteria
ctgggtctttccgtcggaggcggctccaccggaggc

SEQ ID NO: 26275 - DNA, 75 bp, unidentified
  source 1..75: mol_type = unassigned DNA; note = methanogen bacteria
gtaacctcggattccgccgatctccagaccgtttaccgctggcaggtcggttaccttgcggatatccgcatggat

SEQ ID NO: 26276 - DNA, 45 bp, unidentified
  source 1..45: mol_type = unassigned DNA; note = methanogen bacteria
gttagacttattggaagagagggattctcacttgtttacactccc

SEQ ID NO: 26277 - DNA, 105 bp, unidentified
  source 1..105: mol_type = unassigned DNA; note = methanogen bacteria
ttgggttcctataggatgtcgatgacggaggcctactccgccctgtgggattacatcgccggttccgattccgagtccacagccgttgccgccatccgtctgcgt

SEQ ID NO: 26278 - DNA, 78 bp, unidentified
  source 1..78: mol_type = unassigned DNA; note = methanogen bacteria
atgctcagtgccgatcccaattccgcttccacggtctattcctggagcatcgggagcctggggatgatcgaggagagc

SEQ ID NO: 26279 - DNA, 36 bp, unidentified
  source 1..36: mol_type = unassigned DNA; note = methanogen bacteria
tcattcaactacaggtttgaagacccgctgaaccca

SEQ ID NO: 26280 - DNA, 54 bp, unidentified
  source 1..54: mol_type = unassigned DNA; note = methanogen bacteria
attggtggaatacctcttttcaatagcgttttaaaatcaaatgcaacaacaaac

SEQ ID NO: 26281 - DNA, 240 bp, unidentified
  source 1..240: mol_type = unassigned DNA; note = methanogen bacteria
tcccaatcaattgcaacacagcactggactttgaatcccttggaattggtgttttatagagctgcattcacattggaagtgtttgaaaagatcattcctcttggagcaagcacacatggacatgtcctaagcctaattttctcatcaggcagcccaaggacatttatcggagagcatgtgctgcactatacggtttgcctaacttccacattattcggaccggtttaccttgatttcgga

SEQ ID NO: 26282 - DNA, 36 bp, unidentified
  source 1..36: mol_type = unassigned DNA; note = methanogen bacteria
cctaagatattccatccggacgtaacatcatataca

SEQ ID NO: 26283 - DNA, 117 bp, unidentified
  source 1..117: mol_type = unassigned DNA; note = methanogen bacteria
atcggccctaccatggtcctgtccccgtgggacgccttcggggacctgttctccgccctggggaaggacgaaggagtgatgacggccgccgaatccgccgtcttcgtctcccgcttc

SEQ ID NO: 26284 - DNA, 42 bp, unidentified
  source 1..42: mol_type = unassigned DNA; note = methanogen bacteria
ttcggcttcacgctgttcgggctcctgccgctccactcgccg

SEQ ID NO: 26285 - DNA, 69 bp, unidentified
  source 1..69: mol_type = unassigned DNA; note = methanogen bacteria
gtgttctcgggagactcggtctcgagcgtcctgctgtggctgttcgggtcgttctccgacatcgatatg

SEQ ID NO: 26286 - DNA, 90 bp, unidentified
  source 1..90: mol_type = unassigned DNA; note = methanogen bacteria
ttcggcgacggggaggagtcggtcaacgacttcatcatgatcttcgccgaggccgtcgggatggacggggatatctcctgggaaggggtg

SEQ ID NO: 26287 - DNA, 33 bp, unidentified
  source 1..33: mol_type = unassigned DNA; note = methanogen bacteria
aacgaacctattggaggcatcattcctccatat

SEQ ID NO: 26288 - DNA, 48 bp, unidentified
  source 1..48: mol_type = unassigned DNA; note = methanogen bacteria
gcggcagccatcataatcgccggagtaggattcatgttcctccgcagg

SEQ ID NO: 26289 - DNA, 54 bp, unidentified
  source 1..54: mol_type = unassigned DNA; note = methanogen bacteria
ttaaatccgatagttcacccgataacacatttattcttaatgggatcatctaaa

SEQ ID NO: 26290 - DNA, 186 bp, unidentified
  source 1..186: mol_type = unassigned DNA; note = methanogen bacteria
agatatcaaatggggattggtcttaacacaattttcatgactatcggaaaaagcatttcatcaacaagtattctacatacccacctgctaaagtccatttttggagaggtcataaccaatctgatgggaccattcattgaaagtgaaattaatactggagttggcctatatgcatacatcccagaa

SEQ ID NO: 26291 - DNA, 270 bp, unidentified
  source 1..270: mol_type = unassigned DNA; note = methanogen bacteria
attttaggagcgaatacagattattatgaagtagatgttgcaaatcctgctgacaatattgaactaaagggttttccaatagaaaacgttacccacagccataataaaacaacatatatcatgaattcaaattataatgaaatggaacttttaaacgatttaaaaatacctctgaacaattcatgtgattattatacagtatcctggaacattttttcatatcttgaacctgaccatccaattaccaacctatatgaatcattgaaaaac

SEQ ID NO: 26292 - DNA, 72 bp, unidentified
  source 1..72: mol_type = unassigned DNA; note = methanogen bacteria
tacttcattcaggcttataaaaccagcgtttcaatgggtctggatatgatggacttgtcagttgtctcacca

SEQ ID NO: 26293 - DNA, 54 bp, unidentified
  source 1..54: mol_type = unassigned DNA; note = methanogen bacteria
ttaaatccgataatccatccaataacacatttatttttaatgggatcttctaaa

SEQ ID NO: 26294 - DNA, 189 bp, unidentified
  source 1..189: mol_type = unassigned DNA; note = methanogen bacteria
tttagatggcaaatgggaatcggtcttaacacaatcttcatggttatgggaaaaagcatttcttcaacaagcattctccatacccatctgttgaagtccatttttggagaggttataactaatttaatcggaccatttataggaaatgaaataaacaccggtgttgggctatatcaatacctgccagat

SEQ ID NO: 26295 - DNA, 270 bp, unidentified
  source 1..270: mol_type = unassigned DNA; note = methanogen bacteria
gttattggagctaatacagaatactatgaagtagatgttatgaatccttcagataatattgaattaaacaattttccaatagaaaatgtaacgcatgacggaaataaaaccacatatatcatcaattcaaattataacgaaatggaactgttaaatgacttaaaagggcctctgaataagaagtgtgactattatactgtctcatggaatacattttcatatttagaaccgtcacatccaattaatgaattatatcagaaattgaaaaac

SEQ ID NO: 26296 - DNA, 54 bp, unidentified
  source 1..54: mol_type = unassigned DNA; note = methanogen bacteria
ttaaatccgataattcacccaataacacatttatttttaatgggatcttctaaa

SEQ ID NO: 26297 - DNA, 183 bp, unidentified
  source 1..183: mol_type = unassigned DNA; note = methanogen bacteria
agataccagatgggaattggccttaacactatttttatgactatgggaaaaagcatttcatcaacaagcattctacatacccacctgttaaagtccatttttggagaagccataaccaatttaataggtccgtttattggaagtgaaatcaatacaggtgttggcctatatcaatacattcca

SEQ ID NO: 26298 - DNA, 270 bp, unidentified
  source 1..270: mol_type = unassigned DNA; note = methanogen bacteria
gtaattggagcaaatacagattattatgaagtggaggttgtaaatcctgcagacaacatagaattaaatgattttccaataaaaaatgtgacacatgatggaaataagaccgtttatattgtagattccaattataatgaaatggaattattgaatgatttgaaaaaaccactaaacaatagatgtgactattataccgtttcctggaatactttttcatatttggaaccagaccatccgattacaaatttatattactctttgaaaaac

SEQ ID NO: 26299 - DNA, 96 bp, unidentified
  source 1..96: mol_type = unassigned DNA; note = methanogen bacteria
attttcctgtcggacgacgaggcgtgggtcgaagcggtgaacaccgccacggccttcatcggactgatgaccggccagcacttccccgttgtcgag

SEQ ID NO: 26300 - DNA, 63 bp, unidentified
  source 1..63: mol_type = unassigned DNA; note = methanogen bacteria
ttattctttacagttagtgttttgcatgcatctgattccctttcaggcatcactaccattgtt

SEQ ID NO: 26301 - DNA, 72 bp, unidentified
  source 1..72: mol_type = unassigned DNA; note = methanogen bacteria
ttgactttacctggcgcttcaataggttacactcagatattcactccagactggtctgcgttaaccaattta

SEQ ID NO: 26302 - DNA, 105 bp, unidentified
  source 1..105: mol_type = unassigned DNA; note = methanogen bacteria
tttatggctttaaccagcggaatcccattcaatgaattggttactgaaggaaccggtttggcatttgttgttttcccaaaggtatttaatgtaatgggtccttgg

SEQ ID NO: 26303 - DNA, 57 bp, unidentified
  source 1..57: mol_type = unassigned DNA; note = methanogen bacteria
ggaatagaccaattcataagaccatttgcccaaccgattctaatgggatcctcaaaa

SEQ ID NO: 26304 - DNA, 183 bp, unidentified
  source 1..183: mol_type = unassigned DNA; note = methanogen bacteria
ttaagaagcacacttggactcgattggaatacaatccttgtcataatgaacccaagcatgacaagtaccagcattctccattcccatttgtataaggcaatatttggaatcatcctcggaggcattttaacctatattcctgcaggaatacatactggaagctcattaagtgcatatacacca

SEQ ID NO: 26305 - DNA, 228 bp, unidentified
  source 1..228: mol_type = unassigned DNA; note = methanogen bacteria
gcattttatggtgcttgtcctgattcttatgaagtgaatatatacaatactcatgacattgatgctttaaatcaatacgatacattaaatttaacagagcatcaaaataaaacaacagtttatctttcaaatgaatataatgagatggaattgttaaataacttagccgtcagtttggatggaaaatgtgattggtattccttaagctggaacatctattcatattta

SEQ ID NO: 26306 - DNA, 33 bp, unidentified
  source 1..33: mol_type = unassigned DNA; note = methanogen bacteria
tatatgattattgttaaaaaagtagacatatca

SEQ ID NO: 26307 - DNA, 30 bp, unidentified
  source 1..30: mol_type = unassigned DNA; note = methanogen bacteria
aataaatccgcccatggagaatcattatgg

SEQ ID NO: 26308 - DNA, 69 bp, unidentified
  source 1..69: mol_type = unassigned DNA; note = methanogen bacteria
accatgaacgtcaatggagttcccgccaattcaagaggacttatcgtgatgatatccgcactgcttgga

SEQ ID NO: 26309 - DNA, 33 bp, unidentified
  source 1..33: mol_type = unassigned DNA; note = methanogen bacteria
actccacgcccggacggactccttatcgcaaat

SEQ ID NO: 26310 - DNA, 81 bp, unidentified
  source 1..81: mol_type = unassigned DNA; note = methanogen bacteria
ttaagtaatacatatcctacatttttggatgctgtatttggtcttaaagagcctcaaaccttattcggttctttatttaaa

SEQ ID NO: 26311 - DNA, 42 bp, unidentified
  source 1..42: mol_type = unassigned DNA; note = methanogen bacteria
cggcttattggaactgatggattttcacttgtctacactcca

SEQ ID NO: 26312 - DNA, 33 bp, unidentified
  source 1..33: mol_type = unassigned DNA; note = methanogen bacteria
tatatgattactgttgagcatgtgaatgctgta

SEQ ID NO: 26313 - DNA, 30 bp, unidentified
  source 1..30: mol_type = unassigned DNA; note = methanogen bacteria
aaatccactaatggagaatcattattggcg

SEQ ID NO: 26314 - DNA, 69 bp, unidentified
  source 1..69: mol_type = unassigned DNA; note = methanogen bacteria
actatggatatccatggaattcctgctaattcaagaggattaattgtaatgatatcagcaatgcttgga

SEQ ID NO: 26315 - DNA, 81 bp, unidentified
  source 1..81: mol_type = unassigned DNA; note = methanogen bacteria
cccgaatttttagatgtgttacccaattatatgttttttggcatgtctttaccgttgaatgttttgaatattaatattcca

SEQ ID NO: 26316 - DNA, 39 bp, unidentified
  source 1..39: mol_type = unassigned DNA; note = methanogen bacteria
aatacggtagagttaatcagaatccttttggagttgata

SEQ ID NO: 26317 - DNA, 33 bp, unidentified
  source 1..33: mol_type = unassigned DNA; note = methanogen bacteria
ggtcctcaaatgggaatcgacccgctgttcact

SEQ ID NO: 26318 - DNA, 33 bp, unidentified
  source 1..33: mol_type = unassigned DNA; note = methanogen bacteria
gctccaaaaatgcaaataactccattattcact

SEQ ID NO: 26319 - DNA, 33 bp, unidentified
  source 1..33: mol_type = unassigned DNA; note = methanogen bacteria
ggtccgcagatgggtattgaaccgttatttact

SEQ ID NO: 26320 - DNA, 33 bp, unidentified
  source 1..33: mol_type = unassigned DNA; note = methanogen bacteria
ggtccgcaaatgggaatcgaaccgttgttcact

SEQ ID NO: 26321 - DNA, 36 bp, unidentified
  source 1..36: mol_type = unassigned DNA; note = methanogen bacteria
cttgatcagcttgctcctaatgctccatccgtgtca

SEQ ID NO: 26322 - DNA, 42 bp, unidentified
  source 1..42: mol_type = unassigned DNA; note = methanogen bacteria
tacagccctgatgccccaattgtgaaaacattcaacatgtat

SEQ ID NO: 26323 - DNA, 63 bp, unidentified
  source 1..63: mol_type = unassigned DNA; note = methanogen bacteria
acaggattgtccaactggatgggtgctggcatcaccaatttaatagggtctaatccctcagaa

SEQ ID NO: 26324 - DNA, 33 bp, unidentified
  source 1..33: mol_type = unassigned DNA; note = methanogen bacteria
actacagccatgtcactgggattcagtcctatt

SEQ ID NO: 26325 - DNA, 36 bp, unidentified
  source 1..36: mol_type = unassigned DNA; note = methanogen bacteria
ggacctatgatgaatgtaactccaacattcacgccg

SEQ ID NO: 26326 - DNA, 33 bp, unidentified
  source 1..33: mol_type = unassigned DNA; note = methanogen bacteria
ggtcctcaagtgggaatcagtccgctgtttact

SEQ ID NO: 26327 - DNA, 33 bp, unidentified
  source 1..33: mol_type = unassigned DNA; note = methanogen bacteria
tgtcctatgatgggtcttaatccattgttcact

SEQ ID NO: 26328 - DNA, 33 bp, unidentified
  source 1..33: mol_type = unassigned DNA; note = methanogen bacteria
gcccctcaaatcggaatagacccgctgttcacc

SEQ ID NO: 26329 - DNA, 117 bp, unidentified
  source 1..117: mol_type = unassigned DNA; note = methanogen bacteria
gtgggccccaacggattcatcaatcctgtagaagcatattccagtctgttttccgccataggtaagagcggggaaggcatgacctccacggaggttacggtatacagctcgcgtgcc

SEQ ID NO: 26330 - DNA, 42 bp, unidentified
  source 1..42: mol_type = unassigned DNA; note = methanogen bacteria
tatggattcacgttcttcggtctgatatcggcccattcgcct

SEQ ID NO: 26331 - DNA, 69 bp, unidentified
  source 1..69: mol_type = unassigned DNA; note = methanogen bacteria
atctttgcggggaatgcggtgtccaatgcgatgctgtggttgttcggttctttcgctcagatatcgagg

SEQ ID NO: 26332 - DNA, 33 bp, unidentified
  source 1..33: mol_type = unassigned DNA; note = methanogen bacteria
ggtccgcaaatcggcattgagcctctattcact

SEQ ID NO: 26333 - DNA, 33 bp, unidentified
  source 1..33: mol_type = unassigned DNA; note = methanogen bacteria
ggacctcaaatgggaatcgaaccgctgtttaca

SEQ ID NO: 26334 - DNA, 30 bp, unidentified
  source 1..30: mol_type = unassigned DNA; note = methanogen bacteria
tacgtatctagagatataaatggccctaat

SEQ ID NO: 26335 - DNA, 75 bp, unidentified
  source 1..75: mol_type = unassigned DNA; note = methanogen bacteria
atgagccatggatttaacctagatagtgcacttaagatattctttggaacagcaggaacattaggagttcatttc

SEQ ID NO: 26336 - DNA, 36 bp, unidentified
  source 1..36: mol_type = unassigned DNA; note = methanogen bacteria
gttccaaggtctcatctagtgcatcaattcgttaga

SEQ ID NO: 26337 - DNA, 33 bp, unidentified
  source 1..33: mol_type = unassigned DNA; note = methanogen bacteria
ataaaattcatcaatttcactcaaggcagctca

SEQ ID NO: 26338 - DNA, 60 bp, unidentified
  source 1..60: mol_type = unassigned DNA; note = methanogen bacteria
actaaaagtctcataatagactgtgctaatacatgggacttatcaacacacgctcagttt

SEQ ID NO: 26339 - DNA, 54 bp, unidentified
  source 1..54: mol_type = unassigned DNA; note = methanogen bacteria
gcatggattatttcagagcattatgatgtaaattacaatagacgagacacaata

SEQ ID NO: 26340 - DNA, 171 bp, unidentified
  source 1..171: mol_type = unassigned DNA; note = methanogen bacteria
ttgagttataaaacttttttcaacaataattccgtaacttgttgggacctgaattggggaggtgatggaggtgcaatatatgctaaaggaaatgtggtagcccattattgtgattttaatggaaattctgccactagaaatgctaatgacatatattgttcaaatctttac

SEQ ID NO: 26341 - DNA, 33 bp, unidentified
  source 1..33: mol_type = unassigned DNA; note = methanogen bacteria
ggtcctcaaatgggcattgaaccgttgttcact

SEQ ID NO: 26342 - DNA, 33 bp, unidentified
  source 1..33: mol_type = unassigned DNA; note = methanogen bacteria
gctacacaagtaggttttgagccgcttttcact

SEQ ID NO: 26343 - DNA, 51 bp, unidentified
  source 1..51: mol_type = unassigned DNA; note = methanogen bacteria
aatctggcaggtattgaaaatggtttaaagaatgcggcaatgggtggaaaa

SEQ ID NO: 26344 - DNA, 81 bp, unidentified
  source 1..81: mol_type = unassigned DNA; note = methanogen bacteria
ttagacattgttgaaaatgcagatttaattgctgataaaatcaggaagattttgagagtaaatgatgaggatgatactgtt

SEQ ID NO: 26345 - DNA, 60 bp, unidentified
  source 1..60: mol_type = unassigned DNA; note = methanogen bacteria
ttgccgtttgaacgtttaaatgttgctgcagattattctgtttcaaccatgcagacgggt

SEQ ID NO: 26346 - DNA, 87 bp, unidentified
  source 1..87: mol_type = unassigned DNA; note = methanogen bacteria
attcaagcaattattgatagctttgaagttaacatgttcgatgcatcaacaatcaaaacttcagtaatgggagcatatccgagaact

SEQ ID NO: 26347 - DNA, 39 bp, unidentified
  source 1..39: mol_type = unassigned DNA; note = methanogen bacteria
tatggtttgagaaatgttatggcaaaccatgtggttgcc

SEQ ID NO: 26348 - DNA, 144 bp, unidentified
  source 1..144: mol_type = unassigned DNA; note = methanogen bacteria
tcttcaatcatggaacaaacagcaatgattgaaactggtgatgctactggtgcatttgaaagaatgcatttattgacattagcatatcagggtttaaatgctgataatttagtatttgatattgttaaagaaaatggtaaagga

SEQ ID NO: 26349 - DNA, 69 bp, unidentified
  source 1..69: mol_type = unassigned DNA; note = methanogen bacteria
agagctattgaagataatgtaattagagttgctaaaaagatgccttctggatataacatgtatgaacct

SEQ ID NO: 26350 - DNA, 45 bp, unidentified
  source 1..45: mol_type = unassigned DNA; note = methanogen bacteria
acagtattgtattataatgatatgttggaatatgaaactggtctt

SEQ ID NO: 26351 - DNA, 108 bp, unidentified
  source 1..108: mol_type = unassigned DNA; note = methanogen bacteria
atcggagatttgcatgtaggatttttcaattcttacggagtcatcttcgctcacctcacgggcgatgtaaccgacgataacgctgactacataatctgggaatggagg

SEQ ID NO: 26352 - DNA, 75 bp, unidentified
  source 1..75: mol_type = unassigned DNA; note = methanogen bacteria
ctctgggtggatcctgacaaattggaggagatttacaggtggtcggtcggaacaatcgacggtgccaaatgggac

SEQ ID NO: 26353 - DNA, 33 bp, unidentified
  source 1..33: mol_type = unassigned DNA; note = methanogen bacteria
gtgccgatgatgggtttaacaccagtatttacg

SEQ ID NO: 26354 - DNA, 33 bp, unidentified
  source 1..33: mol_type = unassigned DNA; note = methanogen bacteria
ggtccacaaattggaatagaacctctttttact

SEQ ID NO: 26355 - DNA, 33 bp, unidentified
  source 1..33: mol_type = unassigned DNA; note = methanogen bacteria
ggtccgcagatgggcattgaaccgttgttcact

SEQ ID NO: 26356 - DNA, 33 bp, unidentified
  source 1..33: mol_type = unassigned DNA; note = methanogen bacteria
ggtcctcaaatgggaatagatccgttgttcact

SEQ ID NO: 26357 - DNA, 33 bp, unidentified
  source 1..33: mol_type = unassigned DNA; note = methanogen bacteria
ggtcctatgatgaatattaatgcagttttcacg

SEQ ID NO: 26358 - DNA, 33 bp, unidentified
  source 1..33: mol_type = unassigned DNA; note = methanogen bacteria
gctcctatgatgggtcttaaaccagtatttagt

SEQ ID NO: 26359 - DNA, 51 bp, unidentified
  source 1..51: mol_type = unassigned DNA; note = methanogen bacteria
gcagtatgcagatcctgttcctacggtgaatatgaattagatcctgctaaa

SEQ ID NO: 26360 - DNA, 36 bp, unidentified
  source 1..36: mol_type = unassigned DNA; note = methanogen bacteria
ttatacttccctaaatctaccggaccaggtgacaga

SEQ ID NO: 26361 - DNA, 33 bp, unidentified
  source 1..33: mol_type = unassigned DNA; note = methanogen bacteria
tattatcatattagagaactaataggcgtaaat

SEQ ID NO: 26362 - DNA, 48 bp, unidentified
  source 1..48: mol_type = unassigned DNA; note = methanogen bacteria
ttaggtggtattccattacttagtggtcatttgaaggcacgggctgct

SEQ ID NO: 26363 - DNA, 252 bp, unidentified
  source 1..252: mol_type = unassigned DNA; note = methanogen bacteria
gttaaatcaattgaatggcagacatggacattaaatcctatagaattattattctaccgtgcaggttatacattacaagtacttggaaatgctgttgttttacagggaagtactcatgggcaactactatataatacattaactggtttcatgaaatctacagatccacgtgtaattgtaggttcaacaactctaggatatgctcattcaacaacatcaatgatatttggtccagcattactagattttgga

SEQ ID NO: 26364 - DNA, 36 bp, unidentified
  source 1..36: mol_type = unassigned DNA; note = methanogen bacteria
cattatcatttacataagttaattggcgttgatcaa

SEQ ID NO: 26365 - DNA, 51 bp, unidentified
  source 1..51: mol_type = unassigned DNA; note = methanogen bacteria
ttgggaggaattcccctatttagcggatatcttaaagcccgtgcggcaaca

SEQ ID NO: 26366 - DNA, 252 bp, unidentified
  source 1..252: mol_type = unassigned DNA; note = methanogen bacteria
gtaatatcaattgaatggcaaacctggagctcaactccaattgaactgttattttatagggcaggatacactttacaagtcttagaccatgcagtatttctacagggcagcactcacggccaattgttatataatacattgatgggatttttcaaatcttcagatccaagggtaattgttggctcaacaacattaggttacgcccattcaacaacttcaactatttttggacctgcattgttggatttcgga

SEQ ID NO: 26367 - DNA, 33 bp, unidentified
  source 1..33: mol_type = unassigned DNA; note = methanogen bacteria
cattatcatttaaataagttaatcggtgttaat

SEQ ID NO: 26368 - DNA, 51 bp, unidentified
  source 1..51: mol_type = unassigned DNA; note = methanogen bacteria
ttgggaggaattccattatttagcggttatcttaaagcacgtgccgcaaca

SEQ ID NO: 26369 - DNA, 255 bp, unidentified
  source 1..255: mol_type = unassigned DNA; note = methanogen bacteria
gcagtcaaatcaattgaatggcaaacctggtcaacaactccaatagaattattgttttatagggcgggatatactttacaggtattggaccatgcagcatttatgcagggcagcactcatggtcaattgttatataatacattgatgggattttttaaatcttcagatccaagggtaattgttggctcaacaatattgggtaaagcacattcaacaacctcgacgatttttggacctgcattgttggattttgga

SEQ ID NO: 26370 - DNA, 36 bp, unidentified
  source 1..36: mol_type = unassigned DNA; note = methanogen bacteria
atctatgtctcaagagacataaatagctcaagcctt

SEQ ID NO: 26371 - DNA, 78 bp, unidentified
  source 1..78: mol_type = unassigned DNA; note = methanogen bacteria
ataataagtcccccattcaatttggacaattcaattaaaatattccttggaactggtggaaccttaggagttcatttc

SEQ ID NO: 26372 - DNA, 42 bp, unidentified
  source 1..42: mol_type = unassigned DNA; note = methanogen bacteria
ccaagaactcatatggcacatgtctttgtaacattaggctat

SEQ ID NO: 26373 - DNA, 42 bp, unidentified
  source 1..42: mol_type = unassigned DNA; note = methanogen bacteria
attaacttaattagatatgtcaattttactcaaggcagttcc

SEQ ID NO: 26374 - DNA, 36 bp, unidentified
  source 1..36: mol_type = unassigned DNA; note = methanogen bacteria
gtagtggacaaagaaaccggcgaagaaagcattgta

SEQ ID NO: 26375 - DNA, 63 bp, unidentified
  source 1..63: mol_type = unassigned DNA; note = methanogen bacteria
attaaagcagtatgtagatcctgttcctacggcgaatacgaccttgacccagctaaagcagaa

SEQ ID NO: 26376 - DNA, 57 bp, unidentified
  source 1..57: mol_type = unassigned DNA; note = methanogen bacteria
tgtccatgtaatgttttatccttccctaaagcaactggtcctggagacagaggaact

SEQ ID NO: 26377 - DNA, 147 bp, unidentified
  source 1..147: mol_type = unassigned DNA; note = methanogen bacteria
gggataaacgcctacgacatgaccttctccgaggcctggaacgtgttcatcgaccatctgaggaacgggaggccggagaggatcgccggcgaccatgaaagctacgtcacctggctgaccgactatgtggtggtctacagcaatgct

SEQ ID NO: 26378 - DNA, 36 bp, unidentified
  source 1..36: mol_type = unassigned DNA; note = methanogen bacteria
tacggggtctgcatcctgccgttcgcgtcgggggat

SEQ ID NO: 26379 - DNA, 78 bp, unidentified
  source 1..78: mol_type = unassigned DNA; note = methanogen bacteria
cgtttcaatgcctccgaagaggatctgaagaccatctacgattggacagtcggcagcgtcggcagtgtcacctgggac

SEQ ID NO: 26380 - DNA, 33 bp, unidentified
  source 1..33: mol_type = unassigned DNA; note = methanogen bacteria
tttgttacaagagacatcaatagtccaaatctc

SEQ ID NO: 26381 - DNA, 78 bp, unidentified
  source 1..78: mol_type = unassigned DNA; note = methanogen bacteria
cacatataccatggattcaacttaagcaatgcaatagctatcttttttggaaaatccggaaccattggagtgcattta

SEQ ID NO: 26382 - DNA, 48 bp, unidentified
  source 1..48: mol_type = unassigned DNA; note = methanogen bacteria
gtaccaaggtctcatttggtccataagttcgtagcattaagctatttc

SEQ ID NO: 26383 - DNA, 42 bp, unidentified
  source 1..42: mol_type = unassigned DNA; note = methanogen bacteria
atgaacttgattaaagtgatcaatttttcaaatggacaccca

SEQ ID NO: 26384 - DNA, 147 bp, unidentified
  source 1..147: mol_type = unassigned DNA; note = methanogen bacteria
gggataaacgcctatgacatgaccttctccgatgcctggagcgtgttcatagaccatctgaagaacgggaggccggagagagtcgtcggagatcatgacagctacgtcacctggctgacggactatgtggtggtctacagcaacgct

SEQ ID NO: 26385 - DNA, 39 bp, unidentified
  source 1..39: mol_type = unassigned DNA; note = methanogen bacteria
gtctatgatgtctgcatcctgcctttcgcgtcgggggat

SEQ ID NO: 26386 - DNA, 78 bp, unidentified
  source 1..78: mol_type = unassigned DNA; note = methanogen bacteria
cttgttacggctccatcggagagccttgccgatgcctattcctggcgcgtcggtgacttgggcagggcgaacagcgga

SEQ ID NO: 26387 - DNA, 33 bp, unidentified
  source 1..33: mol_type = unassigned DNA; note = methanogen bacteria
gagtgccccaagtgcggcgcccagttcgacggg

SEQ ID NO: 26388 - DNA, 123 bp, unidentified
  source 1..123: mol_type = unassigned DNA; note = methanogen bacteria
aacgtcgtcacccacaaggacggcacctccgacgtcagcgaggagaccaagacctgtccgaactgcggaaagtccatccccgccaactccgcccgctgccccaactgcggcaagaagttcgag

SEQ ID NO: 26389 - DNA, 69 bp, unidentified
  source 1..69: mol_type = unassigned DNA; note = methanogen bacteria
cctaagctcttctacccatcaatgagctccacatacatattaccgtcatggaatcctgcatggagcatg

SEQ ID NO: 26390 - DNA, 33 bp, unidentified
  source 1..33: mol_type = unassigned DNA; note = methanogen bacteria
gaatgccccaagtgcggcgcacagttcgacgga

SEQ ID NO: 26391 - DNA, 102 bp, unidentified
  source 1..102: mol_type = unassigned DNA; note = methanogen bacteria
ggaacctccgacgtgagcgaggaaaccaagacctgtccgaactgcggaaaagccatcccagccaactccacccgctgcccctactgcggtaagaagttcgag

SEQ ID NO: 26392 - DNA, 126 bp, unidentified
  source 1..126: mol_type = unassigned DNA; note = methanogen bacteria
gcaggcgtttttaatttttcaagtagtaaaaattctgataatacggtaactatagggcatttgccttctgaccataatgcagctttatttgtcgctgataagcaaggtttatttaaagaaaaaata

SEQ ID NO: 26393 - DNA, 39 bp, unidentified
  source 1..39: mol_type = unassigned DNA; note = methanogen bacteria
atgatgctggaaaatacggttagcatgccatatgaggta

SEQ ID NO: 26394 - DNA, 78 bp, unidentified
  source 1..78: mol_type = unassigned DNA; note = methanogen bacteria
cattatctgtcagaatacctttttaatttaggatatctattgccaatatatggcggatgggaaatattttatgtggat

SEQ ID NO: 26395 - DNA, 78 bp, unidentified
  source 1..78: mol_type = unassigned DNA; note = methanogen bacteria
ttcagtgattttggaagtatacctttaaatatactatttggatacttcatcgggacagactatgcatttacagcattt

SEQ ID NO: 26396 - DNA, 42 bp, unidentified
  source 1..42: mol_type = unassigned DNA; note = methanogen bacteria
gacgcccatggtacatttccggaaggatactacttctacatg

SEQ ID NO: 26397 - DNA, 30 bp, unidentified
  source 1..30: mol_type = unassigned DNA; note = methanogen bacteria
tatgcggacaaaagttttgtttttaatgat

SEQ ID NO: 26398 - DNA, 30 bp, unidentified
  source 1..30: mol_type = unassigned DNA; note = methanogen bacteria
tcagctgctgcaagtacaaatgagtacgaa

SEQ ID NO: 26399 - DNA, 60 bp, unidentified
  source 1..60: mol_type = unassigned DNA; note = methanogen bacteria
acatctgctagaaatggtgcatcgagctggtttcaaattggagatattttaattcaacca

SEQ ID NO: 26400 - DNA, 213 bp, unidentified
  source 1..213: mol_type = unassigned DNA; note = methanogen bacteria
acatacgtactaccagagcacgcaaaagcaagaattcaaacattcatgaatccagaaagtgatccaagaggagcaggatataacattgctcaatcaaaactagcaattggttcaggccaattattaggaatgggttacatgaaaggaaatcaaactcaattaggatacttatatccaaaaacatcagacttcatattctcagttatcggagaa

SEQ ID NO: 26401 - DNA, 48 bp, unidentified
  source 1..48: mol_type = unassigned DNA; note = methanogen bacteria
ggattactaccaatcacaggtgttccattaccatttgtaagttatggt

SEQ ID NO: 26402 - DNA, 39 bp, unidentified
  source 1..39: mol_type = unassigned DNA; note = methanogen bacteria
ctctattttaataattcttttagtacgggatataaatta

SEQ ID NO: 26403 - DNA, 78 bp, unidentified
  source 1..78: mol_type = unassigned DNA; note = methanogen bacteria
tggttttatagtggtatattattaggtaactggaatacatttgacatatttggcggattaattatttttgaggtagat

SEQ ID NO: 26404 - DNA, 78 bp, unidentified
  source 1..78: mol_type = unassigned DNA; note = methanogen bacteria
tttattgaatttcataatgtagttttagatatattatttggttatttcataggtacaaatgttgcatttacggcattt

SEQ ID NO: 26405 - DNA, 54 bp, unidentified
  source 1..54: mol_type = unassigned DNA; note = methanogen bacteria
gtggtatttgatattactacttcaagtaatattgatggattttattattatatg

SEQ ID NO: 26406 - DNA, 57 bp, unidentified
  source 1..57: mol_type = unassigned DNA; note = methanogen bacteria
attcttaatccaattattagaccagtcacacagctatttttaatgggttcatccaaa

SEQ ID NO: 26407 - DNA, 192 bp, unidentified
  source 1..192: mol_type = unassigned DNA; note = methanogen bacteria
ttcagagcacaaatgggaattaaactcaacactgtcttttgtgctatgtctaacacaatgacaactacaagcattttgcatactcacctgctaaagtcaattttaggagccattataagtcaaattatgggaccttttgttcaaagtaacattcacactagcgttggtctataccaatatgttccaagtttc

SEQ ID NO: 26408 - DNA, 258 bp, unidentified
  source 1..258: mol_type = unassigned DNA; note = methanogen bacteria
gttggaatggctggtgcggaaaccgattactatactgtagatgttgtaaatcctgcagacaatattgatttgggagatattaattcaaaggtcatagagaaaaaaaatcatcatgattcacatacaatcacatatcatatcgaccacaactataatgaaatggaacttataaatgatttgaaaattccgctagaccactcgtgtgaatattacacagtaacatggaatatctattcttatctcaataatacagccagt

SEQ ID NO: 26409 - DNA, 30 bp, unidentified
  source 1..30: mol_type = unassigned DNA; note = methanogen bacteria
gttggattaggtccagatgcacttgcagct

SEQ ID NO: 26410 - DNA, 54 bp, unidentified
  source 1..54: mol_type = unassigned DNA; note = methanogen bacteria
cctattttaataatgatgggtgtaggccatacaatcaaatatgcaatggattat

SEQ ID NO: 26411 - DNA, 36 bp, unidentified
  source 1..36: mol_type = unassigned DNA; note = methanogen bacteria
ttttttgtttcagatacaaatggagttgcagtatat

SEQ ID NO: 26412 - DNA, 63 bp, unidentified
  source 1..63: mol_type = unassigned DNA; note = methanogen bacteria
atatcttccatatttagttatactgatgcaagttctcatttggcaccacaaatttcacttatt

SEQ ID NO: 26413 - DNA, 36 bp, unidentified
  source 1..36: mol_type = unassigned DNA; note = methanogen bacteria
tcttatatcgtcaatgatatgggaacatttaatttt

SEQ ID NO: 26414 - DNA, 78 bp, unidentified
  source 1..78: mol_type = unassigned DNA; note = methanogen bacteria
tacatccaacagtccattgatatagacaatgcaatagacatatttttaggtcatggaggaacacttggagtgaccttc

SEQ ID NO: 26415 - DNA, 51 bp, unidentified
  source 1..51: mol_type = unassigned DNA; note = methanogen bacteria
gtggttccaacctcacttgccagcaattcattcagatatctgagttacttt

SEQ ID NO: 26416 - DNA, 33 bp, unidentified
  source 1..33: mol_type = unassigned DNA; note = methanogen bacteria
atacagtatattgattttccgcatcagaactca

SEQ ID NO: 26417 - DNA, 36 bp, unidentified
  source 1..36: mol_type = unassigned DNA; note = methanogen bacteria
gtagtagacaaaaccaccggtgaagaaagcattgtt

SEQ ID NO: 26418 - DNA, 69 bp, unidentified
  source 1..69: mol_type = unassigned DNA; note = methanogen bacteria
attaaagcagtatgtagatcctgttcctacggtgaatatgacctcgaccctgctaaagcagctattacc

SEQ ID NO: 26419 - DNA, 45 bp, unidentified
  source 1..45: mol_type = unassigned DNA; note = methanogen bacteria
ccatgtaatgttttatccttccctaaatcatctggtcctggagac

SEQ ID NO: 26420 - DNA, 36 bp, unidentified
  source 1..36: mol_type = unassigned DNA; note = methanogen bacteria
ccaaagatattcaatcctgtcttggcagactatacc

SEQ ID NO: 26421 - DNA, 48 bp, unidentified
  source 1..48: mol_type = unassigned DNA; note = methanogen bacteria
gggatttatatcatctcatcagattcaataatgtattacacaacattc

SEQ ID NO: 26422 - DNA, 66 bp, unidentified
  source 1..66: mol_type = unassigned DNA; note = methanogen bacteria
attactgttggaagtgcccaggttaacataagtgaagccggaaacctatttttcagccatatgtgg

SEQ ID NO: 26423 - DNA, 30 bp, unidentified
  source 1..30: mol_type = unassigned DNA; note = methanogen bacteria
atgcacggaattgaaaatgtcaatatccag

SEQ ID NO: 26424 - DNA, 36 bp, unidentified
  source 1..36: mol_type = unassigned DNA; note = methanogen bacteria
tttacaaaaggatatgacttccatttatggtacgaa

SEQ ID NO: 26425 - DNA, 63 bp, unidentified
  source 1..63: mol_type = unassigned DNA; note = methanogen bacteria
ggagcggatttaggacttttattattgtcatttggtcagcacgaatttactcacccattcggt

SEQ ID NO: 26426 - DNA, 294 bp, unidentified
  source 1..294: mol_type = unassigned DNA; note = methanogen bacteria
aaaatttccggtatggaaattttctctccagtgctcaggatttcaaggcttgcacaaaactccttatcaagtttgaagttagtacttgaaaacacttacttgattgggcatgaccctgcatcctcttattggtccaatagttcaagatttgcagatggatatatcagtttgccaatgcaatttatcttaatgtttggtttaccattccctctcttctttggtctattggtaacaaggaaggatacaatcgattatatgcttccaggtattttcggttacgcttatgactttgga

SEQ ID NO: 26427 - DNA, 33 bp, unidentified
  source 1..33: mol_type = unassigned DNA; note = methanogen bacteria
cattatcatttacataagttaattggtgttgat

SEQ ID NO: 26428 - DNA, 48 bp, unidentified
  source 1..48: mol_type = unassigned DNA; note = methanogen bacteria
ttggggggcattcccctatttagcggttatcttaaagcgcatgccgca

SEQ ID NO: 26429 - DNA, 252 bp, unidentified
  source 1..252: mol_type = unassigned DNA; note = methanogen bacteria
gtcaaatcaattgaatggcaaacctggacatcaactccaattgaactattattttatagggcgggatacactttacaggtcttagaccatgcagtatttctgcagggcagcacccacggtcaattactatataatacattgatgggatttttcaaatcttcagatccaagggtaattgttggctcaacaacattaggttatgcgcattcaacaacttcaacgatttttggacctgcattgttggattttgga

SEQ ID NO: 26430 - DNA, 36 bp, unidentified
  source 1..36: mol_type = unassigned DNA; note = methanogen bacteria
ccaaagatattcaatccagttttggcagattataac

SEQ ID NO: 26431 - DNA, 30 bp, unidentified
  source 1..30: mol_type = unassigned DNA; note = methanogen bacteria
atggttgatttaattagtgcaggggacaca

SEQ ID NO: 26432 - DNA, 105 bp, unidentified
  source 1..105: mol_type = unassigned DNA; note = methanogen bacteria
tcattcgcatttggagacaccagtctgcatggactgattgctgcacctgcaaatttcctcatgatgggaataggtattgatgatgttacaggaacaattcctaca

SEQ ID NO: 26433 - DNA, 45 bp, unidentified
  source 1..45: mol_type = unassigned DNA; note = methanogen bacteria
gtatggggaggaggatggctcatgcagatgggcgcacttgacttt

SEQ ID NO: 26434 - DNA, 138 bp, unidentified
  source 1..138: mol_type = unassigned DNA; note = methanogen bacteria
agctacaggaatattcgcatctcctgctataaacgaagctgcaggactggttttcggaaatccttcccaggttacagtacaaataataagcattattgcaactgcggcttatgctgctgtaatcacatttattttagc

SEQ ID NO: 26435 - DNA, 48 bp, unidentified
  source 1..48: mol_type = unassigned DNA; note = methanogen bacteria
acaaaacaatgtaaacatgaaaattggaaaattggacaaggatcaaat

SEQ ID NO: 26436 - DNA, 51 bp, unidentified
  source 1..51: mol_type = unassigned DNA; note = methanogen bacteria
cctggactattttcatatgacacaatagatggtataaaatacgacagatat

SEQ ID NO: 26437 - DNA, 33 bp, unidentified
  source 1..33: mol_type = unassigned DNA; note = methanogen bacteria
gtgtcatttaataagtatcctgaagtaagacta

SEQ ID NO: 26438 - DNA, 33 bp, unidentified
  source 1..33: mol_type = unassigned DNA; note = methanogen bacteria
aatattttatatcctgtatgggaaaatactagt

SEQ ID NO: 26439 - DNA, 72 bp, unidentified
  source 1..72: mol_type = unassigned DNA; note = methanogen bacteria
aacaataacggatttatactaactacagctacattataccagttctatctaaatttcatgaaacaacactgg

SEQ ID NO: 26440 - DNA, 69 bp, unidentified
  source 1..69: mol_type = unassigned DNA; note = methanogen bacteria
atcaaccactacacattcactatactactacatcattataatttcttcacacactcctacctagacgta

SEQ ID NO: 26441 - DNA, 42 bp, unidentified
  source 1..42: mol_type = unassigned DNA; note = methanogen bacteria
gaatattttaatgctgatttaagctctaattatctttttgtt

SEQ ID NO: 26442 - DNA, 75 bp, unidentified
  source 1..75: mol_type = unassigned DNA; note = methanogen bacteria
tatcttgtactatttcttgctcttgtttcattgccttttgaaggttatgcggaagcactgctttttgtggttgat

SEQ ID NO: 26443 - DNA, 72 bp, unidentified
  source 1..72: mol_type = unassigned DNA; note = methanogen bacteria
ttcactgattttggggatcctgctgtaaacttagttgcaggtaatctaattggaactgattttactgcattt

SEQ ID NO: 26444 - DNA, 45 bp, unidentified
  source 1..45: mol_type = unassigned DNA; note = methanogen bacteria
tggggaggagtattttcagaagatattgtattttattactacttg

SEQ ID NO: 26445 - DNA, 36 bp, unidentified
  source 1..36: mol_type = unassigned DNA; note = methanogen bacteria
ccagtattgtcacatcatgaatttactcaccctctc

SEQ ID NO: 26446 - DNA, 300 bp, unidentified
  source 1..300: mol_type = unassigned DNA; note = methanogen bacteria
tctagaatactaaatgctagtgttttaagtccattattaagaattagtaggttagaacaatattcctattcaagtttaaaaacagtactagttaacaccaacttttggggacatgtacaaggaagttgttattggggaagtaattgtcttggaggatctgatggttatataaccctaccaattacgttaattcaaagttttggactaccctaccacatattctatggagtacttattgttaaaaaagattatattgattatatgttgccaggaatatttgcatttgcatatgatgctgga

SEQ ID NO: 26447 - DNA, 36 bp, unidentified
  source 1..36: mol_type = unassigned DNA; note = methanogen bacteria
gacggtgtaccaatcagtgaaattgaagcatatcct

SEQ ID NO: 26448 - DNA, 30 bp, unidentified
  source 1..30: mol_type = unassigned DNA; note = methanogen bacteria
atcgcaattgacagaacattaccagaccgc

SEQ ID NO: 26449 - DNA, 54 bp, unidentified
  source 1..54: mol_type = unassigned DNA; note = methanogen bacteria
attgttgttgacaaagagaccggtaaagaatctatcgaagtcgacactgacaaa

SEQ ID NO: 26450 - DNA, 99 bp, unidentified
  source 1..99: mol_type = unassigned DNA; note = methanogen bacteria
aaagcattatgtagaatctgctcatatggtgaatatgatattgaccctgcaaaagctgttgttacaggtaactcagttattgacagtgacctttgtgtc

SEQ ID NO: 26451 - DNA, 45 bp, unidentified
  source 1..45: mol_type = unassigned DNA; note = methanogen bacteria
gcagcaaaagtcaaaaaaccatttgaaggtacaattgaagttgac

SEQ ID NO: 26452 - DNA, 78 bp, unidentified
  source 1..78: mol_type = unassigned DNA; note = methanogen bacteria
aaatgtaatgcattagcattcccagtttcaactggtccaggttcaagattagatcacattgttgcacaaactgattac

SEQ ID NO: 26453 - DNA, 57 bp, unidentified
  source 1..57: mol_type = unassigned DNA; note = methanogen bacteria
cctaacggtgcaataactgtaaaaagaactgaagttgatcacactccaaccaattca

SEQ ID NO: 26454 - DNA, 36 bp, unidentified
  source 1..36: mol_type = unassigned DNA; note = methanogen bacteria
tgcagtttcggcaatgtcgattatggaaaaacaact

SEQ ID NO: 26455 - DNA, 54 bp, unidentified
  source 1..54: mol_type = unassigned DNA; note = methanogen bacteria
tatggtgccggcgtgccgctggagtattcattattatcctttttagccaatgac

SEQ ID NO: 26456 - DNA, 84 bp, unidentified
  source 1..84: mol_type = unassigned DNA; note = methanogen bacteria
gatttcactttcagcaatatgtatttaaaccagcttttaggcaatttaattgaaacccatggccagaatattgtcagctgtttt

SEQ ID NO: 26457 - DNA, 57 bp, unidentified
  source 1..57: mol_type = unassigned DNA; note = methanogen bacteria
atgttttcagttactggaggaaccgtacctgaaaagctggagtatctgcatgcatca

SEQ ID NO: 26458 - DNA, 33 bp, unidentified
  source 1..33: mol_type = unassigned DNA; note = methanogen bacteria
tcacaaatttcagagtatttcaatacatcaatt

SEQ ID NO: 26459 - DNA, 33 bp, unidentified
  source 1..33: mol_type = unassigned DNA; note = methanogen bacteria
tatttcctgcagactgttagtcaaatttacaca

SEQ ID NO: 26460 - DNA, 147 bp, unidentified; identical to SEQ ID NO: 26384
  source 1..147: mol_type = unassigned DNA; note = methanogen bacteria

SEQ ID NO: 26461 - DNA, 39 bp, unidentified; identical to SEQ ID NO: 26385
  source 1..39: mol_type = unassigned DNA; note = methanogen bacteria

SEQ ID NO: 26462 - DNA, 78 bp, unidentified
  source 1..78: mol_type = unassigned DNA; note = methanogen bacteria
cgcttcaatgcgtcagaggaggaccttaagaccatctacgattggactgtcgggagtgtcgggagtgtcgattgggac

SEQ ID NO: 26463 - DNA, 39 bp, unidentified
  source 1..39: mol_type = unassigned DNA; note = methanogen bacteria
gtcgttgataaagaaactggaaaagaatccattgtcatt

SEQ ID NO: 26464 - DNA, 57 bp, unidentified
  source 1..57: mol_type = unassigned DNA; note = methanogen bacteria
aaagcagtatgtagatcttgcagctacggagaatacgacttagatcctgctaacgct

SEQ ID NO: 26465 - DNA, 54 bp, unidentified
  source 1..54: mol_type = unassigned DNA; note = methanogen bacteria
ggatgtaacgctttagcattccctgtatcctccggtcctggttcaagaatggaa

SEQ ID NO: 26466 - DNA, 39 bp, unidentified
  source 1..39: mol_type = unassigned DNA; note = methanogen bacteria
gtcgttgataaagaaactggaagagaatctattgtcatt

SEQ ID NO: 26467 - DNA, 48 bp, unidentified
  source 1..48: mol_type = unassigned DNA; note = methanogen bacteria
aaagcaatttgtagagcatgtaactacggtgaatatgatttagaccct

SEQ ID NO: 26468 - DNA, 54 bp, unidentified
  source 1..54: mol_type = unassigned DNA; note = methanogen bacteria
ggatgtaacgcattagcattcccagtatcctcaggtcctggttctagaatggaa

SEQ ID NO: 26469 - DNA, 69 bp, unidentified
  source 1..69: mol_type = unassigned DNA; note = methanogen bacteria
ttgaatccttcatttgttggtcaaaaagcaataaattctgcagttaattctttcttttgtgatagatgg

SEQ ID NO: 26470 - DNA, 69 bp, unidentified
  source 1..69: mol_type = unassigned DNA; note = methanogen bacteria
attgactacctgagtatttcatattcattcagatattatatgtttacagaaaaaagccatttggaaaat

SEQ ID NO: 26471 - DNA, 36 bp, unidentified
  source 1..36: mol_type = unassigned DNA; note = methanogen bacteria
catatatataatatgtcatatacggatatgccgggt

SEQ ID NO: 26472 - DNA, 45 bp, unidentified
  source 1..45: mol_type = unassigned DNA; note = methanogen bacteria
attgttgtagaccaagcaaccggagcagaatctattgttattgat

SEQ ID NO: 26473 - DNA, 51 bp, unidentified
  source 1..51: mol_type = unassigned DNA; note = methanogen bacteria
aaagcaatctgtagagcatgtaactacggtgaatatgacttagatccttcc

SEQ ID NO: 26474 - DNA, 63 bp, unidentified
  source 1..63: mol_type = unassigned DNA; note = methanogen bacteria
ggctgtaatgctttagcattccctgtatcttccggtcctggttcaagaatggatcatgttatt

SEQ ID NO: 26475 - DNA, 45 bp, unidentified
  source 1..45: mol_type = unassigned DNA; note = methanogen bacteria
ttaaccattgatggagtaccaatcagtgaaattgatgcatatcct

SEQ ID NO: 26476 - DNA, 30 bp, unidentified
  source 1..30: mol_type = unassigned DNA; note = methanogen bacteria
attgtaattgacagaacattaccagaccgt

SEQ ID NO: 26477 - DNA, 54 bp, unidentified
  source 1..54: mol_type = unassigned DNA; note = methanogen bacteria
atcgttgttgacaaagaaactggtaaagaatctatcgaagttgatacttccaaa

SEQ ID NO: 26478 - DNA, 105 bp, unidentified
  source 1..105: mol_type = unassigned DNA; note = methanogen bacteria
attaaagcattatgtagactttgttcctacggtgaatatgatattgacccttcaaaagctgctgttaaaggtaactccgtcattgatagtgaactctgtgtttac

SEQ ID NO: 26479 - DNA, 63 bp, unidentified
  source 1..63: mol_type = unassigned DNA; note = methanogen bacteria
ggagtctgcccaactgatgcagcaaaagctaaaaaaccatttgaaggtacaattgaagtcgac

SEQ ID NO: 26480 - DNA, 81 bp, unidentified
  source 1..81: mol_type = unassigned DNA; note = methanogen bacteria
tgtaaatgtaatgcattagcattcccagtttcaactggtccaggttcaagattagattacattgttgcacaacctgattac

SEQ ID NO: 26481 - DNA, 63 bp, unidentified
  source 1..63: mol_type = unassigned DNA; note = methanogen bacteria
cctaacggtgcaattactgtaaaaagaactgatgttgatcacactccaacaaattcagcaact

SEQ ID NO: 26482 - DNA, 57 bp, unidentified
  source 1..57: mol_type = unassigned DNA; note = methanogen bacteria
gacttggcatttttagtattatcatttggtcagcatgagtttactcaccctttcggt

SEQ ID NO: 26483 - DNA, 294 bp, unidentified
  source 1..294: mol_type = unassigned DNA; note = methanogen bacteria
agaattttaagcatggaagttttctctccattgcttaggctttcaagacttgctcaaaactctttggcaagtttaaagttagttattggaaacactaggttgattggacacgatccagcttcttcctactggtctgatagtaatggatttgctgatggttatattagtttaccaatgcagtttattttaatgtttggtttgccattcccattattctttggtcttttggtaactaagaaggatacaattgattacatgcttccaggtatttttggttatgcatatgactttgga

SEQ ID NO: 26484 - DNA, 33 bp, unidentified
  source 1..33: mol_type = unassigned DNA; note = methanogen bacteria
ttttcttatactcgtcctgttggtacattaggc

SEQ ID NO: 26485 - DNA, 57 bp, unidentified
  source 1..57: mol_type = unassigned DNA; note = methanogen bacteria
tttggaagtccatggacattgcatgaatacattgacataatcgctacaaaggaatac

SEQ ID NO: 26486 - DNA, 45 bp, unidentified
  source 1..45: mol_type = unassigned DNA; note = methanogen bacteria
aagatagactttttcactgttctcgtttctgcacattctttaggt

SEQ ID NO: 26487 - DNA, 51 bp, unidentified
  source 1..51: mol_type = unassigned DNA; note = methanogen bacteria
ttcattgctagtccaaaagctcatacactggtttattatggctatagaaga

SEQ ID NO: 26488 - DNA, 48 bp, unidentified
  source 1..48: mol_type = unassigned DNA; note = methanogen bacteria
ttatcctgggtaaataagaatgttactcatgtttactcattaaatccg

SEQ ID NO: 26489 - DNA, 39 bp, unidentified
  source 1..39: mol_type = unassigned DNA; note = methanogen bacteria
gttgttgaccaagcaactggagcagaatctattgttatt

SEQ ID NO: 26490 - DNA, 36 bp, unidentified
  source 1..36: mol_type = unassigned DNA; note = methanogen bacteria
tgtagagcatgtaactacggtgaatacgaattagac

SEQ ID NO: 26491 - DNA, 57 bp, unidentified
  source 1..57: mol_type = unassigned DNA; note = methanogen bacteria
ggttgtaatgctttagcattccctgtatcttcaggtcctggttccagaatggaacat

SEQ ID NO: 26492 - DNA, 39 bp, unidentified
  source 1..39: mol_type = unassigned DNA; note = methanogen bacteria
atgttagaatattttatgtggggtaatatgattaatacg

SEQ ID NO: 26493 - DNA, 36 bp, unidentified
  source 1..36: mol_type = unassigned DNA; note = methanogen bacteria
ggagcaataactactctgggcggttttgaattgggt

SEQ ID NO: 26494 - DNA, 81 bp, unidentified
  source 1..81: mol_type = unassigned DNA; note = methanogen bacteria
ttgaatggtaaggattatgttgttaaaactggtaatgatggtaaggcaacattgcctgttgatttaattcctggaaaatac

SEQ ID NO: 26495 - DNA, 135 bp, unidentified
  source 1..135: mol_type = unassigned DNA; note = methanogen bacteria
gattctgctaatcttatcattgctttaatagatgctaaaagtaatgctttagtaagtaaggatatttcagttaatttgaatggtaaggcttatgttgttaaaaccggtaatgatggtaaggctgcattgccgatt

SEQ ID NO: 26496 - DNA, 96 bp, unidentified
  source 1..96: mol_type = unassigned DNA; note = methanogen bacteria
tctgttaattcaaatatagttgtaaataaagtatccacttctttaacttttaatgacatcaatatcgtttatggtgatttatctaatctgctgttt

SEQ ID NO: 26497 - DNA, 33 bp, unidentified
  source 1..33: mol_type = unassigned DNA; note = methanogen bacteria
gttgcttcattaggtgaagttgcaatttcagga

SEQ ID NO: 26498 - DNA, 60 bp, unidentified
  source 1..60: mol_type = unassigned DNA; note = methanogen bacteria
tttctgattagttttttctttggccaaatagattctgatgtctttgatgttttaagcatt

SEQ ID NO: 26499 - DNA, 30 bp, unidentified
  source 1..30: mol_type = unassigned DNA; note = methanogen bacteria
tccacttttggaaccattgctattgctgca

SEQ ID NO: 26500 - DNA, 45 bp, unidentified
  source 1..45: mol_type = unassigned DNA; note = methanogen bacteria
gcttccagcattgttgcagatatatcaattatctccagaaactgc

SEQ ID NO: 26501 - DNA, 36 bp, unidentified
  source 1..36: mol_type = unassigned DNA; note = methanogen bacteria
gttgttgataatgaaactggtaaagaatccattgtt

SEQ ID NO: 26502 - DNA, 42 bp, unidentified
  source 1..42: mol_type = unassigned DNA; note = methanogen bacteria
gcaatttgtagagcatgtaactacggagaatatgatttagat

SEQ ID NO: 26503 - DNA, 45 bp, unidentified
  source 1..45: mol_type = unassigned DNA; note = methanogen bacteria
tgtaatgctttagcattcccagtatcttccggtccaggttctaga

SEQ ID NO: 26504 - DNA, 66 bp, unidentified
  source 1..66: mol_type = unassigned DNA; note = methanogen bacteria
ataaatccgtcttacacaattcctgaatttacaacacagggattgtatttaactgataaaagtatt

SEQ ID NO: 26505 - DNA, 90 bp, unidentified
  source 1..90: mol_type = unassigned DNA; note = methanogen bacteria
tttttcaatggtcagcctcaacttgcagtaatttacggttctacaccttctgtggcagttaatgagatggcaacagcattgatgggcact

SEQ ID NO: 26506 - DNA, 39 bp, unidentified
  source 1..39: mol_type = unassigned DNA; note = methanogen bacteria
ttgtcatttggtcagcacgaatttactcacccattcgga

SEQ ID NO: 26507 - DNA, 294 bp, unidentified
  source 1..294: mol_type = unassigned DNA; note = methanogen bacteria
agaattactggtatggaggttttctctccaatgctaaggatttcaagattggctcaaaactcagtatccagtttaaaattggtggttgagaacacttggttgatcgggcatgaccctgcttcttcctactggtctaatagttccggatttgcagatggatatatcagtttaccgatgcaatttattttgatgtttggtttaccgttccctctcttctttggtctattggtaactaagaaggatacaatcgattatatgcttccaggtattttcggttatgcttatgactttgga

SEQ ID NO: 26508 - DNA, 39 bp, unidentified
  source 1..39: mol_type = unassigned DNA; note = methanogen bacteria
ttgtcatttggtcagcatgaatttactcacccattcggc

SEQ ID NO: 26509 - DNA, 294 bp, unidentified
  source 1..294: mol_type = unassigned DNA; note = methanogen bacteria
agaatcagtggtatggaggttttctctcctgtacttaggatttcaagacttgcagcaaattcattgtcaagtttgaaactggtagttggaaatacttggttgattgggcatgacccttcatcctcttactggtccaatagttccggatttgctgatgggtatatcagtttgccaatgcaattcatcttattgtttggtttaccgttccctctcttcttcggtctattagtaaccagaaaggatactatcgattatatgcttccaggtatttttggttatgcttatgactttgga

SEQ ID NO: 26510 - DNA, 45 bp, unidentified
  source 1..45: mol_type = unassigned DNA; note = methanogen bacteria
aaaatgcaggtgtatttaatatctcaaattaaattgcctttaact

SEQ ID NO: 26511 - DNA, 39 bp, unidentified
  source 1..39: mol_type = unassigned DNA; note = methanogen bacteria
gttgtagataaagaaactggaaaagaatccattgttatc

SEQ ID NO: 26512 - DNA, 45 bp, unidentified
  source 1..45: mol_type = unassigned DNA; note = methanogen bacteria
ttatgtagagcatgcagctatggtgaatatgatttagacccagct

SEQ ID NO: 26513 - DNA, 48 bp, unidentified
  source 1..48: mol_type = unassigned DNA; note = methanogen bacteria
ggatgtaacgcattagcattccctgtatcctcaggtcctggttctaga

SEQ ID NO: 26514 - DNA, 33 bp, unidentified
  source 1..33: mol_type = unassigned DNA; note = methanogen bacteria
ttttcatatacacaccctgtcggaacatttgac

SEQ ID NO: 26515 - DNA, 57 bp, unidentified
  source 1..57: mol_type = unassigned DNA; note = methanogen bacteria
tatggcaatccctggacattgaccgaatatgtgcgtatcattgctacaagcgaatat

SEQ ID NO: 26516 - DNA, 45 bp, unidentified
  source 1..45: mol_type = unassigned DNA; note = methanogen bacteria
aaaatagactttttcaccaaacttgtttcagcacattctctcggc

SEQ ID NO: 26517 - DNA, 54 bp, unidentified
  source 1..54: mol_type = unassigned DNA; note = methanogen bacteria
actatgattcaaagttctcatgcagataagttaatttattatggttacagaagg

SEQ ID NO: 26518 - DNA, 42 bp, unidentified
  source 1..42: mol_type = unassigned DNA; note = methanogen bacteria
ggatgggtaactaagaatatcacaccgatatactcattaagt

SEQ ID NO: 26519 - DNA, 36 bp, unidentified
  source 1..36: mol_type = unassigned DNA; note = methanogen bacteria
gttgacaaagaaaccggtaaagaatctattgaaatt

SEQ ID NO: 26520 - DNA, 42 bp, unidentified
  source 1..42: mol_type = unassigned DNA; note = methanogen bacteria
ctttgtagaatttgttcatatggggaatatgacattgaccca

SEQ ID NO: 26521 - DNA, 48 bp, unidentified
  source 1..48: mol_type = unassigned DNA; note = methanogen bacteria
tgtaatgcattagcattccctgtttctactggtccgggttcaaggtta

SEQ ID NO: 26522 - DNA, 99 bp, unidentified
  source 1..99: mol_type = unassigned DNA; note = methanogen bacteria
cttgcttttggcggtgacattggtaatattataggaaaccttgactttattatgttaaaaaatgttggattatcaccaaatgagggttcaacaattcca

SEQ ID NO: 26523 - DNA, 39 bp, unidentified
  source 1..39: mol_type = unassigned DNA; note = methanogen bacteria
tggggcggaggttggataagcaaaatcggtggaattgat

SEQ ID NO: 26524 - DNA, 57 bp, unidentified
  source 1..57: mol_type = unassigned DNA; note = methanogen bacteria
gcaacagttttaataaatcctgatggcacaaacggacttttatacggaagctttaag

SEQ ID NO: 26525 - DNA, 39 bp, unidentified
  source 1..39: mol_type = unassigned DNA; note = methanogen bacteria
gtcgtagataaagaaactggtaaagaatccattgttatt

SEQ ID NO: 26526 - DNA, 69 bp, unidentified
  source 1..69: mol_type = unassigned DNA; note = methanogen bacteria
atcaaagctatttgtagagcatgtaactatggagaatacgacttagatccttcaaaagctgttgttaaa

SEQ ID NO: 26527 - DNA, 66 bp, unidentified
  source 1..66: mol_type = unassigned DNA; note = methanogen bacteria
ggttgtaatgctttagcattccctgtatcttcaggtccaggttcaagattagatcacatcattgct

SEQ ID NO: 26528 - DNA, 33 bp, unidentified
  source 1..33: mol_type = unassigned DNA; note = methanogen bacteria
gctatcactgtaaaaagaactgaaattgatcac

SEQ ID NO: 26529 - DNA, 54 bp, unidentified
  source 1..54: mol_type = unassigned DNA; note = methanogen bacteria
attgtcgttgataaagaaactggtaaagaatcaatcgttatcgacaaagatgca

SEQ ID NO: 26530 - DNA, 69 bp, unidentified
  source 1..69: mol_type = unassigned DNA; note = methanogen bacteria
atcaaagcagtatgtagatcatgcagctatggagaatacgacttagatcctgcaaaagctgtagtaaaa

SEQ ID NO: 26531 - DNA, 69 bp, unidentified
  source 1..69: mol_type = unassigned DNA; note = methanogen bacteria
ggttgtaatgctttagcattcccagtatcatccggttctggttccagaatggaacacgttattgcaaac

SEQ ID NO: 26532 - DNA, 54 bp, unidentified
  source 1..54: mol_type = unassigned DNA; note = methanogen bacteria
aaagctatttgtagagcatgtaactatggtgaatatgatttagatccttcaaaa

SEQ ID NO: 26533 - DNA, 63 bp, unidentified
  source 1..63: mol_type = unassigned DNA; note = methanogen bacteria
ggttgtaatgctttagcattccctgtatctacaggccctggttctagaatggaccatgttatt

SEQ ID NO: 26534 - DNA, 36 bp, unidentified
  source 1..36: mol_type = unassigned DNA; note = methanogen bacteria
ttagttgtaaatgtagatattttcaatactaaatta

SEQ ID NO: 26535 - DNA, 75 bp, unidentified
  source 1..75: mol_type = unassigned DNA; note = methanogen bacteria
tggcattatagtaacccatatcaatttattttacaaaccatttcgtttaatccaactggaagtgctgctgctttt

SEQ ID NO: 26536 - DNA, 48 bp, unidentified
  source 1..48: mol_type = unassigned DNA; note = methanogen bacteria
gcaattaattcaattagtttaaataattatactccagtatccccattt

SEQ ID NO: 26537 - DNA, 30 bp, unidentified
  source 1..30: mol_type = unassigned DNA; note = methanogen bacteria
taccatttaaaagagttagttggtgttaat

SEQ ID NO: 26538 - DNA, 51 bp, unidentified
  source 1..51: mol_type = unassigned DNA; note = methanogen bacteria
ttgggaggaataccattacttagtggttatttaaaagcacatgcagctaca

SEQ ID NO: 26539 - DNA, 255 bp, unidentified
  source 1..255: mol_type = unassigned DNA; note = methanogen bacteria
gtcaaatcaatcgaatggcaaacttggactttaagtcctttagaattattattttatagggcaggatacacgttacaagtattggatcgtgcggtagtattacaaggaagcactcatgggcaattattgtataatactcttatgggctttttccattcaactgatccaagggttattgttggttctacaacattggggtatgctcattcaacaacttctatgatatttggtccggcattacttgattttggatta

SEQ ID NO: 26540 - DNA, 39 bp, unidentified
  source 1..39: mol_type = unassigned DNA; note = methanogen bacteria
atgtgggatattatttatatattaaatcagattgacaat

SEQ ID NO: 26541 - DNA, 30 bp, unidentified
  source 1..30: mol_type = unassigned DNA; note = methanogen bacteria
atggattattcattctataatccgaccaca

SEQ ID NO: 26542 - DNA, 75 bp, unidentified
  source 1..75: mol_type = unassigned DNA; note = methanogen bacteria
aactatcaaaacgttccatcaatgttctacctgatattccaggatgcatttgatttccagtcaatagcatgtgga

SEQ ID NO: 26543 - DNA, 138 bp, unidentified
  source 1..138: mol_type = unassigned DNA; note = methanogen bacteria
tccacaggagtggcaagagatgcagcagtttacaggaacaccatacgtacaaaatgcgatttcaacagtatttggaacggcaggaccgattttcataacaattgcaatggtactctttgcattcacaacgcttctggg

SEQ ID NO: 26544 - DNA, 39 bp, unidentified
  source 1..39: mol_type = unassigned DNA; note = methanogen bacteria
atttgtagatcctgttcctacggtgaatatgatttagac

SEQ ID NO: 26545 - DNA, 39 bp, unidentified
  source 1..39: mol_type = unassigned DNA; note = methanogen bacteria
aacgctttagcattcccagtatcttcaggtccaggttct

SEQ ID NO: 26546 - DNA, 33 bp, unidentified
  source 1..33: mol_type = unassigned DNA; note = methanogen bacteria
gttattaaaacagagatatttggaaccaatctt

SEQ ID NO: 26547 - DNA, 90 bp, unidentified
  source 1..90: mol_type = unassigned DNA; note = methanogen bacteria
gggaattacaattttatcatgtttaatttgaatccttttgattatttttttgtagctttaatgggattaaaaggggtatggcactattta

SEQ ID NO: 26548 - DNA, 51 bp, unidentified
  source 1..51: mol_type = unassigned DNA; note = methanogen bacteria
gattttaacttaagtattttaaacgcaaaattttcgcatgtttcttatttc

SEQ ID NO: 26549 - DNA, 42 bp, unidentified
  source 1..42: mol_type = unassigned DNA; note = methanogen bacteria
gtaggtgtagataaggttgtatatgcctttcagtatgctaac

SEQ ID NO: 26550 - DNA, 30 bp, unidentified
  source 1..30: mol_type = unassigned DNA; note = methanogen bacteria
gcatttggttttacagtatctcctattatg

SEQ ID NO: 26551 - DNA, 33 bp, unidentified
  source 1..33: mol_type = unassigned DNA; note = methanogen bacteria
tttgcatcagcaggtataccatctaatattggt

SEQ ID NO: 26552 - DNA, 123 bp, unidentified
  source 1..123: mol_type = unassigned DNA; note = methanogen bacteria
acagtgtcatcttccggcataacagcatctgaggtctaccaggtattcatcaacaagatatggccgggcgacgatccgttcgatatcgaatggaggcggcaggagataatctggagggtgtat

SEQ ID NO: 26553 - DNA, 75 bp, unidentified
  source 1..75: mol_type = unassigned DNA; note = methanogen bacteria
tacttcggcgatgccgatgctgtcaaacaggccatgttctggaccgtgggcgacctagacaacgtcgtcatcggt

SEQ ID NO: 26554 - DNA, 129 bp, unidentified
  source 1..129: mol_type = unassigned DNA; note = methanogen bacteria
tccacatatcccgacatcactctgaaagaaacgtacgagataatctggcaccatttgaccgggaagacgtacgacatcaacgtcgatgcctaccgctggtgggctgacaggcacatctggaacactgct

SEQ ID NO: 26555 - DNA, 36 bp, unidentified
  source 1..36: mol_type = unassigned DNA; note = methanogen bacteria
ggcgcatcattcagcacggttgcgggggagaccggc

SEQ ID NO: 26556 - DNA, 78 bp, unidentified
  source 1..78: mol_type = unassigned DNA; note = methanogen bacteria
atggtgacgaccgatgcggatacactcaaagatgcgtatctgtggcagatcgggcacctggacggaatgacctgggat

SEQ ID NO: 26557 - DNA, 30 bp, unidentified
  source 1..30: mol_type = unassigned DNA; note = methanogen bacteria
agttatgtggtctatactaacggtggagga

SEQ ID NO: 26558 - DNA, 90 bp, unidentified
  source 1..90: mol_type = unassigned DNA; note = methanogen bacteria
agctttacttttaattggggaactgatttaggaaattacttcatcagcaatgtaggtggcagttccaacatcagtgatattggattttta

SEQ ID NO: 26559 - DNA, 72 bp, unidentified
  source 1..72: mol_type = unassigned DNA; note = methanogen bacteria
actttacctggagccagcattggaattaatgctttgcttcatcctaaatggaatatgctttgggatgtgaat

SEQ ID NO: 26560 - DNA, 105 bp, unidentified
  source 1..105: mol_type = unassigned DNA; note = methanogen bacteria
ggatatatgtcctatacaagtggaactgccttgactgaactgatttcagaaggaaccggtttgattttcattgtattccctacaatctttaatataatgggtcct

SEQ ID NO: 26561 - DNA, 36 bp, unidentified
  source 1..36: mol_type = unassigned DNA; note = methanogen bacteria
atgctatttgacaatacgattagcgacccatactat

SEQ ID NO: 26562 - DNA, 69 bp, unidentified
  source 1..69: mol_type = unassigned DNA; note = methanogen bacteria
ttgcaatccatttttaatgcaggtaacctaatgcctatttttggcggattgatactgttttatgtggat

SEQ ID NO: 26563 - DNA, 75 bp, unidentified
  source 1..75: mol_type = unassigned DNA; note = methanogen bacteria
agcgattttggaagcatagctctaaatatattctttggatactttataggaaccttctataaatttacagcattt

SEQ ID NO: 26564 - DNA, 45 bp, unidentified
  source 1..45: mol_type = unassigned DNA; note = methanogen bacteria
tatgatgcctttggtacatttccagaaggatattacttctacatg

SEQ ID NO: 26565 - DNA, 30 bp, unidentified
  source 1..30: mol_type = unassigned DNA; note = methanogen bacteria
tatgtgaataaatccattgtttttaatgat

SEQ ID NO: 26566 - DNA, 111 bp, unidentified
  source 1..111: mol_type = unassigned DNA; note = methanogen bacteria
accgtcggcggataccacatagttttcttcgagacctatcagatcctggtggaccacatacgcggagatgtctccgatccgacgaaggatctgatagtttgggacaccagg

SEQ ID NO: 26567 - DNA, 75 bp, unidentified
  source 1..75: mol_type = unassigned DNA; note = methanogen bacteria
ctcctcgcagacccagaagacctggcagcagtgtacagttggcaggtcgggtcgctcggaaggtccagctgggac

SEQ ID NO: 26568 - DNA, 192 bp, unidentified
  source 1..192: mol_type = unassigned DNA; note = methanogen bacteria
aagtatacttttcctatatcatgggatgtttactatcatattcacatggctgatttatatatgagaaatggattagtattttgggattttgaaacggttgcaccttatggtaggttgataatgtatcctccattatttcatttagtattagcaggtttatctaaagtaacaggaataggattagttagcctt

SEQ ID NO: 26569 - DNA, 66 bp, unidentified
  source 1..66: mol_type = unassigned DNA; note = methanogen bacteria
gtgtacctgaagtataccttagtattcaattcaaaagcaggtaatcttttatcattacctaatttc

SEQ ID NO: 26570 - DNA, 33 bp, unidentified
  source 1..33: mol_type = unassigned DNA; note = methanogen bacteria
acttatttaggagtacaaacagtttctatcaga

SEQ ID NO: 26571 - DNA, 36 bp, unidentified
  source 1..36: mol_type = unassigned DNA; note = methanogen bacteria
gtatatgttgatagttatactccagaggtaatgtgt

SEQ ID NO: 26572 - DNA, 48 bp, unidentified
  source 1..48: mol_type = unassigned DNA; note = methanogen bacteria
aattcaagtggtgtagtttcaaatataggtgtaacaggcattaaagaa

SEQ ID NO: 26573 - DNA, 93 bp, unidentified
  source 1..93: mol_type = unassigned DNA; note = methanogen bacteria
acaaattactatggcgatatatttgcaggaaatggaagtatgattccagttccaattaaatacataatattctctttaattggtattggtcca

SEQ ID NO: 26574 - DNA, 66 bp, unidentified
  source 1..66: mol_type = unassigned DNA; note = methanogen bacteria
gttaattattgtacaggtttcagcattttaagaggatacctaggcaatatacctcttatatataat

SEQ ID NO: 26575 - DNA, 81 bp, unidentified
  source 1..81: mol_type = unassigned DNA; note = methanogen bacteria
tatggctctgtcttgccgatagaatttacaaaaaacaatgttgtagctagaacagaaattcttgcaagctatatggattat

SEQ ID NO: 26576 - DNA, 30 bp, unidentified
  source 1..30: mol_type = unassigned DNA; note = methanogen bacteria
gtaagtggacttgaacttacaggtacacag

SEQ ID NO: 26577 - DNA, 57 bp, unidentified
  source 1..57: mol_type = unassigned DNA; note = methanogen bacteria
ttttatccatcaatgattgcggtatatcaactaccagtgtggagtccttcatggaat

SEQ ID NO: 26578 - DNA, 78 bp, unidentified
  source 1..78: mol_type = unassigned DNA; note = methanogen bacteria
gtctgggagatgcccgatttccttccccaggtgatgattaacatggagaacgccggattcggcggagatgccaactac

SEQ ID NO: 26579 - DNA, 33 bp, unidentified
  source 1..33: mol_type = unassigned DNA; note = methanogen bacteria
accatcttcggaggagcagagtccgccaacatg

SEQ ID NO: 26580 - DNA, 51 bp, unidentified
  source 1..51: mol_type = unassigned DNA; note = methanogen bacteria
tgcggtgtcccaatcttctctaccctcggaagcatcatcgcagacccgtac

SEQ ID NO: 26581 - DNA, 39 bp, unidentified
  source 1..39: mol_type = unassigned DNA; note = methanogen bacteria
ttcggtgtcgacaacgccatcggaggatccgacatggca

SEQ ID NO: 26582 - DNA, 42 bp, unidentified
  source 1..42: mol_type = unassigned DNA; note = methanogen bacteria
tctatccaatcttctgctataaattttatacaattgcctcta

SEQ ID NO: 26583 - DNA, 36 bp, unidentified
  source 1..36: mol_type = unassigned DNA; note = methanogen bacteria
ccaaaaattttcacaccggacgttacaaattacagc

SEQ ID NO: 26584 - DNA, 69 bp, unidentified
  source 1..69: mol_type = unassigned DNA; note = methanogen bacteria
gttggggattttaatcattcaactagttttatatataatattctttttgcagatgttttaggaggacct

SEQ ID NO: 26585 - DNA, 81 bp, unidentified
  source 1..81: mol_type = unassigned DNA; note = methanogen bacteria
ccttactttacaagcggttcactattgggcaggtgggatctttaccatatccatggcggattaatattctttttttgtggg

SEQ ID NO: 26586 - DNA, 78 bp, unidentified
  source 1..78: mol_type = unassigned DNA; note = methanogen bacteria
tgtgttgatttcggcacaccagttttaaatatattcattggttatttcattggaaccaatacagaatatacagcattt

SEQ ID NO: 26587 - DNA, 57 bp, unidentified
  source 1..57: mol_type = unassigned DNA; note = methanogen bacteria
acattatggggaaaagaactattttccagcagaggggtactgtattattacatgaca

SEQ ID NO: 26588 - DNA, 36 bp, unidentified
  source 1..36: mol_type = unassigned DNA; note = methanogen bacteria
ccaaagatattcaatcccgacgtgacttcatacaat

SEQ ID NO: 26589 - DNA, 33 bp, unidentified
  source 1..33: mol_type = unassigned DNA; note = methanogen bacteria
tttgtttcaaaacccaatatggtgaacttgaat

SEQ ID NO: 26590 - DNA, 75 bp, unidentified
  source 1..75: mol_type = unassigned DNA; note = methanogen bacteria
ataaggcattcaatagatcttaactatgcattggatatatttttaggcgcaccagggacattgggcgtggctttc

SEQ ID NO: 26591 - DNA, 45 bp, unidentified
  source 1..45: mol_type = unassigned DNA; note = methanogen bacteria
gttccccattccgtcaatgcaaaccagttcgtaactttaggatat

SEQ ID NO: 26592 - DNA, 42 bp, unidentified
  source 1..42: mol_type = unassigned DNA; note = methanogen bacteria
aacaatatttccacatttgtcaactattctagccaaaatcca

SEQ ID NO: 26593 - DNA, 39 bp, unidentified
  source 1..39: mol_type = unassigned DNA; note = methanogen bacteria
tggccgaaaatatttgcaccggatgtaacgtcttacact

SEQ ID NO: 26594 - DNA, 36 bp, unidentified
  source 1..36: mol_type = unassigned DNA; note = methanogen bacteria
ccgaaaatttttaaccccgacgtaacatcatatact

SEQ ID NO: 26595 - DNA, 33 bp, unidentified
  source 1..33: mol_type = unassigned DNA; note = methanogen bacteria
tgtagagcatgtaactacggagaatatgattta

SEQ ID NO: 26596 - DNA, 39 bp, unidentified
  source 1..39: mol_type = unassigned DNA; note = methanogen bacteria
aatgctttagcattcccagtatcttcaggtcctggttct

SEQ ID NO: 26597 - DNA, 36 bp, unidentified
  source 1..36: mol_type = unassigned DNA; note = methanogen bacteria
ggtgcagtaacaactttaggaggatttgagttaggt

SEQ ID NO: 26598 - DNA, 36 bp, unidentified
  source 1..36: mol_type = unassigned DNA; note = methanogen bacteria
ccaaaaatctttcatccggatgttacaagttacact

SEQ ID NO: 26599 - DNA, 267 bp, unidentified
  source 1..267: mol_type = unassigned DNA; note = methanogen bacteria
atgttgcagcctggagagtatgatgccttcatatactatggaacagactggtttgatgctgaaacaagttccaaaattattgtcaaaaaaacattatttagcgataatttgattgttccacgtggaaacgcttccacttttgatgtatactgtttagatgaaaatggaactgttctagcagaaaattcagagattgatttctatatggatggtgttattagaagtagatacgtcgatgatgaaggcatatgtagtttaaatcttaat

SEQ ID NO: 26600 - DNA, 183 bp, unidentified
  source 1..183: mol_type = unassigned DNA; note = methanogen bacteria
tcatataatgttagaaccaatgaatttgtaaccaattggatttatgttgctgaaatttgcacccaagacttagtcaaaatctataaaaatgactccaagtttgaggcaaaaatcggtgtggccaacgaaacagttacctttgagataaacggcaaaaactatactagaatcagtaatgaaaac

SEQ ID NO: 26601 - DNA, 90 bp, unidentified
  source 1..90: mol_type = unassigned DNA; note = methanogen bacteria
gattacacaattaaaactagctacaataactttacagttgaaaataacattacagtattgcctacattaatagctgaaaacctagttaaa

SEQ ID NO: 26602 - DNA, 57 bp, unidentified
  source 1..57: mol_type = unassigned DNA; note = methanogen bacteria
ttctatattgacttgattgacagtgaaggaaatcctgtagcagatgttaacattacc

SEQ ID NO: 26603 - DNA, 90 bp, unidentified
  source 1..90: mol_type = unassigned DNA; note = methanogen bacteria
acagccactgatccattgaccggccttcagatgtcctataacatcacagtactgcctacattgaatgctgccgatttggaaatgacctat

SEQ ID NO: 26604 - DNA, 45 bp, unidentified
  source 1..45: mol_type = unassigned DNA; note = methanogen bacteria
gtaactgttttagatggtcaaggtaatcctttatccaatgccaaa

SEQ ID NO: 26605 - DNA, 42 bp, unidentified
  source 1..42: mol_type = unassigned DNA; note = methanogen bacteria
aaaattagcgattccaatggaatagctaagctaaacatcaat

SEQ ID NO: 26606 - DNA, 54 bp, unidentified
  source 1..54: mol_type = unassigned DNA; note = methanogen bacteria
atcacctccgaatatgatggattgaaaactgcaaacacaattattattaagggt

SEQ ID NO: 26607 - DNA, 36 bp, unidentified
  source 1..36: mol_type = unassigned DNA; note = methanogen bacteria
cccaagatcttcactccggacgttacgaattacgac

SEQ ID NO: 26608 - DNA, 36 bp, unidentified
  source 1..36: mol_type = unassigned DNA; note = methanogen bacteria
acatatgtcgtgtccgatatggggacagccaacttt

SEQ ID NO: 26609 - DNA, 75 bp, unidentified
  source 1..75: mol_type = unassigned DNA; note = methanogen bacteria
cttaaacattctattgacattgacaatgcaatagccatattttcaggccatggcggaacaatgggagtgacattc

SEQ ID NO: 26610 - DNA, 51 bp, unidentified
  source 1..51: mol_type = unassigned DNA; note = methanogen bacteria
gttgttccaacatcaattttaaataatcattttacatatctgggatatttc

SEQ ID NO: 26611 - DNA, 33 bp, unidentified
  source 1..33: mol_type = unassigned DNA; note = methanogen bacteria
atgaactatatagattatgccagccagaattca

SEQ ID NO: 26612 - DNA, 36 bp, unidentified
  source 1..36: mol_type = unassigned DNA; note = methanogen bacteria
cctaaaatattcacacccgatgttacaaactacact

SEQ ID NO: 26613 - DNA, 36 bp, unidentified
  source 1..36: mol_type = unassigned DNA; note = methanogen bacteria
ccgaagatattccatccggacgtgaccagctacacc

SEQ ID NO: 26614 - DNA, 66 bp, unidentified
  source 1..66: mol_type = unassigned DNA; note = methanogen bacteria
ggagattttaatcattcaattagttttatatataatattctttttgcagatgttttaggaggacct

SEQ ID NO: 26615 - DNA, 78 bp, unidentified
  source 1..78: mol_type = unassigned DNA; note = methanogen bacteria
tattttacaagcggttcactattaggcaggtgggatctttaccacatctatggaggattaatattctttttttgtggg

SEQ ID NO: 26616 - DNA, 78 bp, unidentified
  source 1..78: mol_type = unassigned DNA; note = methanogen bacteria
tgtgctgatttcggaaccccatttttaaatatattcattggttatttcattggaaccgatacaacatatacagcattt

SEQ ID NO: 26617 - DNA, 57 bp, unidentified
  source 1..57: mol_type = unassigned DNA; note = methanogen bacteria
acattatggggaaaaggattattttccggcagaggggtactgtattattacatgaca

SEQ ID NO: 26618 - DNA, 30 bp, unidentified
  source 1..30: mol_type = unassigned DNA; note = methanogen bacteria
gaagatttattgcgtggtaatatgaataat

SEQ ID NO: 26619 - DNA, 39 bp, unidentified
  source 1..39: mol_type = unassigned DNA; note = methanogen bacteria
ggcgcagttacaacattaggaggatttacattaggatgg

SEQ ID NO: 26620 - DNA, 36 bp, unidentified
  source 1..36: mol_type = unassigned DNA; note = methanogen bacteria
ccaaaaatattcacacccgacattacaaattacacc

SEQ ID NO: 26621 - DNA, 36 bp, unidentified
  source 1..36: mol_type = unassigned DNA; note = methanogen bacteria
cctaaaatatttaatccggatgttacttcatataca

SEQ ID NO: 26622 - DNA, 36 bp, unidentified
  source 1..36: mol_type = unassigned DNA; note = methanogen bacteria
cctaaaattctaaatccggacgtaacatcatattca

SEQ ID NO: 26623 - DNA, 54 bp, unidentified
  source 1..54: mol_type = unassigned DNA; note = methanogen bacteria
atcggaatactttttggtcaaattggagctgatgtttggcataatgctgatatt

SEQ ID NO: 26624 - DNA, 33 bp, unidentified
  source 1..33: mol_type = unassigned DNA; note = methanogen bacteria
tctacttttggaacaatggcaattgctgcaaat

SEQ ID NO: 26625 - DNA, 54 bp, unidentified
  source 1..54: mol_type = unassigned DNA; note = methanogen bacteria
atattgggaatttatgatttatctgctcaaactgaagcaatgacaactcaaatg

SEQ ID NO: 26626 - DNA, 36 bp, unidentified
  source 1..36: mol_type = unassigned DNA; note = methanogen bacteria
cctaaaatattcaccccggatgtcacaaattacaca

SEQ ID NO: 26627 - DNA, 39 bp, unidentified
  source 1..39: mol_type = unassigned DNA; note = methanogen bacteria
gttgttgataaagaaactggaaaagaatctattgttatc

SEQ ID NO: 26628 - DNA, 69 bp, unidentified
  source 1..69: mol_type = unassigned DNA; note = methanogen bacteria
attaaagcagtttgcagatcatgttcctatggtgaatacgatttagaccctgctaaagctgcagttaaa

SEQ ID NO: 26629 - DNA, 45 bp, unidentified
  source 1..45: mol_type = unassigned DNA; note = methanogen bacteria
gcagcaaaagttaaaaaaccatttgaaggtagtattgtagttgac

SEQ ID NO: 26630 - DNA, 51 bp, unidentified
  source 1..51: mol_type = unassigned DNA; note = methanogen bacteria
tgtaacgctttagcattcccagtatcatctggtccaggttctagaatggaa

SEQ ID NO: 26631 - DNA, 33 bp, unidentified
  source 1..33: mol_type = unassigned DNA; note = methanogen bacteria
attactgtaacaagaactgcagttgaccacact

SEQ ID NO: 26632 - DNA, 36 bp, unidentified
  source 1..36: mol_type = unassigned DNA; note = methanogen bacteria
cctaaaatattcacacctgacgtaacaaattatact

SEQ ID NO: 26633 - DNA, 36 bp, unidentified
  source 1..36: mol_type = unassigned DNA; note = methanogen bacteria
cccaagatttttacccctgatgctacaaactacacc

SEQ ID NO: 26634 - DNA, 45 bp, unidentified
  source 1..45: mol_type = unassigned DNA; note = methanogen bacteria
gttggaattgacaatgttattaatgctttgaaaattgccgattca

SEQ ID NO: 26635 - DNA, 33 bp, unidentified
  source 1..33: mol_type = unassigned DNA; note = methanogen bacteria
cgggctttcggtgccaatgtcagtccgattata

SEQ ID NO: 26636 - DNA, 30 bp, unidentified
  source 1..30: mol_type = unassigned DNA; note = methanogen bacteria
tattcaactgcaggaatatcctcatctatt

SEQ ID NO: 26637 - DNA, 36 bp, unidentified
  source 1..36: mol_type = unassigned DNA; note = methanogen bacteria
cctaagatattccatccggacgtgacatcatatacc

SEQ ID NO: 26638 - DNA, 51 bp, unidentified
  source 1..51: mol_type = unassigned DNA; note = methanogen bacteria
tctattgatgggaataatgccattagccctatgtataagtttataatggat

SEQ ID NO: 26639 - DNA, 69 bp, unidentified
  source 1..69: mol_type = unassigned DNA; note = methanogen bacteria
agcggtataatattaggcgattggcattatacctacatttatggtggattaataatattatttgttgat

SEQ ID NO: 26640 - DNA, 78 bp, unidentified
  source 1..78: mol_type = unassigned DNA; note = methanogen bacteria
tcaataaattttggcccacttattttaaattttttattcggaaattttataggaactgatgtaaactgtacagcattt

SEQ ID NO: 26641 - DNA, 42 bp, unidentified
  source 1..42: mol_type = unassigned DNA; note = methanogen bacteria
aaaacaatattatacaatgatgcagggtattattatttgaat

SEQ ID NO: 26642 - DNA, 39 bp, unidentified
  source 1..39: mol_type = unassigned DNA; note = methanogen bacteria
gctagtctttttaagtcttcctttaatcagaattttcat

SEQ ID NO: 26643 - DNA, 78 bp, unidentified
  source 1..78: mol_type = unassigned DNA; note = methanogen bacteria
catttcgttgctggagctcttttaggtaaagctgatcttttcccaattgctgggggtttattactcttttgtgttgat

SEQ ID NO: 26644 - DNA, 78 bp, unidentified
  source 1..78: mol_type = unassigned DNA; note = methanogen bacteria
ggtacagattttggtgttcctgttttgaatttatttttcggtaactttattgggactaaaggaggattcacttctttt

SEQ ID NO: 26645 - DNA, 51 bp, unidentified
  source 1..51: mol_type = unassigned DNA; note = methanogen bacteria
atttggggtggtgttgcatcaaatgatgttcataggtattacttcctaaac

SEQ ID NO: 26646 - DNA, 51 bp, unidentified
  source 1..51: mol_type = unassigned DNA; note = methanogen bacteria
gttaaggcatacagtccgggattaagctccgcttatgaatttgtattcggt

SEQ ID NO: 26647 - DNA, 78 bp, unidentified
  source 1..78: mol_type = unassigned DNA; note = methanogen bacteria
cactttcttgccgaatttcttggtatcgatcccactccgtttgctatagatggtggattattgctgttttgtgttgat

SEQ ID NO: 26648 - DNA, 75 bp, unidentified
  source 1..75: mol_type = unassigned DNA; note = methanogen bacteria
ttcaccgatttcgggaatcctgacattaacttgatttgtggtcacttctttggaactaaattcactgcttttcct

SEQ ID NO: 26649 - DNA, 51 bp, unidentified
  source 1..51: mol_type = unassigned DNA; note = methanogen bacteria
ttatggggaggggtcttttcggagaatgttcacttatattacttcttaaac

SEQ ID NO: 26650 - DNA, 90 bp, unidentified
  source 1..90: mol_type = unassigned DNA; note = methanogen bacteria
ggtttattgaatacaaaccacggactttttccgcattttatgcttccgaattggcaggaaacgattcattttccttttgcaagtgcgtct

SEQ ID NO: 26651 - DNA, 126 bp, unidentified
  source 1..126: mol_type = unassigned DNA; note = methanogen bacteria
ttcgatacttatccgggcataagcctgcgcgagagctacgagatcatatggaaccacatcgtcggcaacagctatcccaaaggctccctgtactggtgggccgaccggcagatctggaacagtgcg

SEQ ID NO: 26652 - DNA, 33 bp, unidentified
  source 1..33: mol_type = unassigned DNA; note = methanogen bacteria
atggggatcacgatgaacggcgtcgtaggggag

SEQ ID NO: 26653 - DNA, 78 bp, unidentified
  source 1..78: mol_type = unassigned DNA; note = methanogen bacteria
atgatcaccaccgacgcagatacgctgaagagcgcgtacctgtggcaggtaggaagcctcgacgggatgacctgggac

SEQ ID NO: 26654 - DNA, 33 bp, unidentified
  source 1..33: mol_type = unassigned DNA; note = methanogen bacteria
gtaataaatggtattgacagttctatacttaat

SEQ ID NO: 26655 - DNA, 45 bp, unidentified
  source 1..45: mol_type = unassigned DNA; note = methanogen bacteria
aatatggcttttaatcattcttttagcccagcttatgagttcact

SEQ ID NO: 26656 - DNA, 78 bp, unidentified
  source 1..78: mol_type = unassigned DNA; note = methanogen bacteria
aattttctttcaggaacacttttgggaaattgggacgcttttcctatacagggaggacttttgctcttttgtgtggat

SEQ ID NO: 26657 - DNA, 78 bp, unidentified
  source 1..78: mol_type = unassigned DNA; note = methanogen bacteria
ggcactgattttggagttactttcctaaacctgtttgtttccgattttataggtactcaaggaggatttacagctttt

SEQ ID NO: 26658 - DNA, 51 bp, unidentified
  source 1..51: mol_type = unassigned DNA; note = methanogen bacteria
ctatggggaggaatcctgtctaatgatattcacatgtattacttcatgaat

SEQ ID NO: 26659 - DNA, 90 bp, unidentified
  source 1..90: mol_type = unassigned DNA; note = methanogen bacteria
ggacttccagctttaacccatcaaccagcttcatttaatggatttttaaactatttgatttgttttaaaggttcagattatcctcatatg

SEQ ID NO: 26660 - DNA, 54 bp, unidentified
  source 1..54: mol_type = unassigned DNA; note = methanogen bacteria
ttaactgttgatgctgaatttactgtaaaagattttgtaggtcaattttattta

SEQ ID NO: 26661 - DNA, 51 bp, unidentified
  source 1..51: mol_type = unassigned DNA; note = methanogen bacteria
tatattggagttatgccatcaattagagcatatgtctgtagtggtgctgat

SEQ ID NO: 26662 - DNA, 33 bp, unidentified
  source 1..33: mol_type = unassigned DNA; note = methanogen bacteria
tatccatattcaaaattcgctctacaaatacct

SEQ ID NO: 26663 - DNA, 183 bp, unidentified
  source 1..183: mol_type = unassigned DNA; note = methanogen bacteria
gccatttttgcagatatgtttttcaattctcataatctttctataagctctggcattgatttgaatttagccattaccacatttatccaagcgttgcctgtagagattcaagggttcatcaaaccttatgttggtgccttaaccagtggagtgcatgacattttaacatatatattcaactat

SEQ ID NO: 26664 - DNA, 33 bp, unidentified
  source 1..33: mol_type = unassigned DNA; note = methanogen bacteria
ttaggtttttccaccgccagtggtgatgcattt

SEQ ID NO: 26665 - DNA, 45 bp, unidentified
  source 1..45: mol_type = unassigned DNA; note = methanogen bacteria
gcaacatgggacaatatgtggggacttggaagtgaaacccttgac

SEQ ID NO: 26666 - DNA, 111 bp, unidentified
  source 1..111: mol_type = unassigned DNA; note = methanogen bacteria
gtaggctcctacagcatcagcgcatccgaggtctacgggatcatctgggaccagatcacgggcgggacgccgtcggatacggtgaagcagcacatcgtcatcgatctcagg

SEQ ID NO: 26667 - DNA, 72 bp, unidentified
  source 1..72: mol_type = unassigned DNA; note = methanogen bacteria
ctgctgtcagaccccgacgatctggcgtccgtctatacctggctcgtgggctcggtggacgggatcgactac

SEQ ID NO: 26668 - DNA, 57 bp, unidentified
  source 1..57: mol_type = unassigned DNA; note = methanogen bacteria
attttcaatccggttataagaccagttacatatctgtttttaatgggttcatccaaa

SEQ ID NO: 26669 - DNA, 186 bp, unidentified
  source 1..186: mol_type = unassigned DNA; note = methanogen bacteria
agactgcaaatgggcattggacttaacactgtattatgcagcatgactaatggcatgagttccacaagcatattgcacactcatatgttaaagtccattttgggagaggttataactcagataattggtccttttattcaaggagatatcaataccggtgttggtctatatcagtatgtcccaggt

SEQ ID NO: 26670 - DNA, 246 bp, unidentified
  source 1..246: mol_type = unassigned DNA; note = methanogen bacteria
attgcttttgcaggtgcagaaccggattattatactgtggatgtcgcaaatccaactggagaaatcgatttgggaaacgtaactgacaaaataattgatttaaagcatgacaatactttaaataaaacaacataccacattgactccgactataacgaaatggaactgattaatgatttgaaagttcccctgaacaattcgtgtgaatattacaccgtttcatggaacgtatactcctacctgaac

SEQ ID NO: 26671 - DNA, 39 bp, unidentified
  source 1..39: mol_type = unassigned DNA; note = methanogen bacteria
ctatcatttgggcagaatgagtttactcacccatttggt

SEQ ID NO: 26672 - DNA, 54 bp, unidentified
  source 1..54: mol_type = unassigned DNA; note = methanogen bacteria
ttgaatccgattatccgacctgtcacatacttgtttttgatgggatcatcaaaa

SEQ ID NO: 26673 - DNA, 183 bp, unidentified
  source 1..183: mol_type = unassigned DNA; note = methanogen bacteria
agaatgcagatgggcattaagctcaacacagtattctgctctatgactaacggcatgagttccacaagcatcttgcatactcacctgataaagtccattttgggagcagtgctgactcagataatgggaccgtttatccaaagtggcatcaacacaggcgttggcctatatgcttacgttcca

SEQ ID NO: 26674 - DNA, 243 bp, unidentified
  source 1..243: mol_type = unassigned DNA; note = methanogen bacteria
gcatttgcaggcgcggaacctgactattatacggtggacattgtaaatccaagtgaagacattgatcttggaaacatcagcgttgaagtgattgataatgaacatgacaacaaaacaaacaagaccacctaccacattgacccgcaatacaacgagatgaaactaattaacgacctgagggctcctctggacaattcgtgtgaatattatacagtgtcctggaacatttactcttatttagaa

SEQ ID NO: 26675 - DNA, 108 bp, unidentified
  source 1..108: mol_type = unassigned DNA; note = methanogen bacteria
ggaaggaacatcctcgtcgacgagaacaagtacagcaccggtgacagcgtgaagctctgcctcgagaacaacaagatcgtcgcagactaccccctcgccgagaacgca

SEQ ID NO: 26676 - DNA, 105 bp, unidentified
  source 1..105: mol_type = unassigned DNA; note = methanogen bacteria
cccgcaatattccaatcattaataaccccaacaataaatggtatgaaagaaggtgtccaacagggaactgtacaattagaaaccatttctctgtttaccaacaac

SEQ ID NO: 26677 - DNA, 33 bp, unidentified
  source 1..33: mol_type = unassigned DNA; note = methanogen bacteria
atacccctcggaaaatacatattaagcaatatt

SEQ ID NO: 26678 - DNA, 93 bp, unidentified
  source 1..93: mol_type = unassigned DNA; note = methanogen bacteria
ttacattcaacttatccaacattcatggatgctctattcggactcacaaatccacaaaatgttattaacaacattttaagcggaactccaaaa

SEQ ID NO: 26679 - DNA, 45 bp, unidentified
  source 1..45: mol_type = unassigned DNA; note = methanogen bacteria
ttgattgtgtcgtctagtcaggcggaattcactcacccatttggg

SEQ ID NO: 26680 - DNA, 300 bp, unidentified
  source 1..300: mol_type = unassigned DNA; note = methanogen bacteria
tcaagagtaaccggaatgactatcttttcacctatattgaggttcagcaggattgaacagtactccctgtcaagtatcaagacagtattgcacaacatacaattaattggtcacaatgcaaaggcttcctattggggagcagaaggtactgcatttgcggaaggttacatcacgttgcctatgcagttcgttttattctttggtcttcctttcccaatgtttttcggtatacttgttaaccaaaaggatacaattgactatatgcttccaggtatctttggatatggttttgactttggt

SEQ ID NO: 26681 - DNA, 54 bp, unidentified
  source 1..54: mol_type = unassigned DNA; note = methanogen bacteria
gatattgcactgcttgtaatctcttcaagtcaggcggaatttacgcatccgttc

SEQ ID NO: 26682 - DNA, 297 bp, unidentified
  source 1..297: mol_type = unassigned DNA; note = methanogen bacteria
agaataactggaatgacaattttctcaccacttttaaggttaggtaggattgaacaatactctttaacaagtattaaaacagtattgaataacattcaacttatagggcacaatggtgccgcttcctattggggtgttgagggaactgcatttgctgaaggttatattacattgccgatgcaatttgttttattcttcggtttgccattcccaatgttcttcggtatattagtaaaccagaaggatacaattgactatatgcttccaggtattttcggatatggttttgatttcgga

SEQ ID NO: 26683 - DNA, 63 bp, unidentified
  source 1..63: mol_type = unassigned DNA; note = methanogen bacteria
ggggtttattatgatccaagttacctgaatcagatattcagtttgccattttcatataattgg

SEQ ID NO: 26684 - DNA, 81 bp, unidentified
  source 1..81: mol_type = unassigned DNA; note = methanogen bacteria
ggacaactgcacctgccatataacctgttccatgactatcaggcaactaaaacaaaaattattaaatcttcactcgatttg

SEQ ID NO: 26685 - DNA, 57 bp, unidentified
  source 1..57: mol_type = unassigned DNA; note = methanogen bacteria
gcagatattgcattgttagtaatatcttcgagtcaagcagaattcactcaccctttt

SEQ ID NO: 26686 - DNA, 300 bp, unidentified
  source 1..300: mol_type = unassigned DNA; note = methanogen bacteria
tctcgagtgactggaatgaccattttctctccacttttaagattaggtaggattgaacaatattccttatcaagtattaaaacagtattaaataacattcagttaattggacacagcggtaaggcatcttattggggtattgaaggaacagcatttgccgaaggttatatcaccttgccgatgcaatttgttttattctttggtttgccattccctatgttctttggtatattggttaaccagaaagatacaattgattatatgcttccgggcatatttggatatggttttgactttgga

SEQ ID NO: 26687 - DNA, 42 bp, unidentified
  source 1..42: mol_type = unassigned DNA; note = methanogen bacteria
ataatatcttcgagccaggctgaatttactcacccattcggt

SEQ ID NO: 26688 - DNA, 300 bp, unidentified
  source 1..300: mol_type = unassigned DNA; note = methanogen bacteria
gctagagtaagtggtatgacagttttctcacctcttttaagattaggtaggattgagcaatattcattatcaagtataaagacggtattacataacatccaacttatagggcataacgcaaaagcctcatattggggtgcggaaggaacggcatttgctgaaggttatattaccatgccgatgcagttagttctgttcttcggtttgccattcccgatgtttttcggtattctggtaaaccaaaaggatacaatcgattatatgcttccaggtattttcggttacggttttgacttcgga

SEQ ID NO: 26689 - DNA, 66 bp, unidentified
  source 1..66: mol_type = unassigned DNA; note = methanogen bacteria
ggtgtagatcttttcatgttatttgcatcttttggacaaaatgagtttacacatccatttggtccc

SEQ ID NO: 26690 - DNA, 42 bp, unidentified
  source 1..42: mol_type = unassigned DNA; note = methanogen bacteria
attatttcttcaagtcaagcagaatttactcacccattcgga

SEQ ID NO: 26691 - DNA, 300 bp, unidentified
  source 1..300: mol_type = unassigned DNA; note = methanogen bacteria
gcaagagttacgggtatgacaattttctctcctgtgttgagattgacaaggattgaacagtactccttatcaagtattaaaaccgtattgaataacatccaattgataggacataatgcaaatgcttcttattggggagcagaaggtactgcgtttgctgaaggatatattacgcttccgatgcagttcgtattgttctttggtttgccgttcccgatgtttttcggtatacttgtaaaccagaaagatacaattgattatatgcttccgggtattttcggttatggatttgactttgga

SEQ ID NO: 26692 - DNA, 30 bp, unidentified; identical to SEQ ID NO: 24853
  source 1..30: mol_type = unassigned DNA; note = methanogen bacteria

SEQ ID NO: 26693 - DNA, 48 bp, unidentified; identical to SEQ ID NO: 24854
  source 1..48: mol_type = unassigned DNA; note = methanogen bacteria

SEQ ID NO: 26694 - DNA, 57 bp, unidentified
  source 1..57: mol_type = unassigned DNA; note = methanogen bacteria
atttatgcatcatttcaaataataaatatggaaaccccaatattttatatagggtgc

SEQ ID NO: 26695 - DNA, 69 bp, unidentified
  source 1..69: mol_type = unassigned DNA; note = methanogen bacteria
aatcagattcctttaaattatgatgcactggtgttttatataaatgatttctttaatttaggagtaaat

SEQ ID NO: 26696 - DNA, 75 bp, unidentified
  source 1..75: mol_type = unassigned DNA; note = methanogen bacteria
caaccaattccatataaaatcttatatttattcatgataaacaatacaatccatttagactcatttttagatatt

SEQ ID NO: 26697 - DNA, 30 bp, unidentified
  source 1..30: mol_type = unassigned DNA; note = methanogen bacteria
ttcgatttacttccattatctgggacacaa

SEQ ID NO: 26698 - DNA, 54 bp, unidentified
  source 1..54: mol_type = unassigned DNA; note = methanogen bacteria
gatattgctttgcttgtagtatcttccagtcaggcagagttcactcaccctttc

SEQ ID NO: 26699 - DNA, 300 bp, unidentified
  source 1..300: mol_type = unassigned DNA; note = methanogen bacteria
tcaagaattactggaatgactatcttttcacctatgttgagattaggtaggattgaacagtattcttcatccagtgtaaaaatggtattgaataatatacagctaatagggcataatggaaatgcttcttattggggtgctgaaggtaccgcatttgctgaaggttatatcacccttccgatgcaattggttttattcttcggtcttccgttcccaatgtttttcggtatattagttaaccaaaaggatactgttgattatatgcttccaggtattctcggttatggatttgactttgga

SEQ ID NO: 26700 - DNA, 30 bp, unidentified
  source 1..30: mol_type = unassigned DNA; note = methanogen bacteria
tgcaaaatacggccagcaggatctttagga

SEQ ID NO: 26701 - DNA, 54 bp, unidentified
  source 1..54: mol_type = unassigned DNA; note = methanogen bacteria
atctatccgaaagacccaagcaaatatctgacattgtttctggatgggcaatat

SEQ ID NO: 26702 - DNA, 63 bp, unidentified
  source 1..63: mol_type = unassigned DNA; note = methanogen bacteria
accttaacacatattaaggttggagcaataacagagcacgcattaaaatactacttatatcaa

SEQ ID NO: 26703 - DNA, 42 bp, unidentified
  source 1..42: mol_type = unassigned DNA; note = methanogen bacteria
agatggatcagcaagaatatagttccaatctattcaaaaagc

SEQ ID NO: 26704 - DNA, 45 bp, unidentified
  source 1..45: mol_type = unassigned DNA; note = methanogen bacteria
ttgatactgtcttcgagtcaggcggaattcactcaccccttcggg

SEQ ID NO: 26705 - DNA, 300 bp, unidentified
  source 1..300: mol_type = unassigned DNA; note = methanogen bacteria
tcaagggtaaccggcatgacaatcttttcacctatgctgaggttcagcagaattgagcaatactccctgtcaagtattaaaacggtattgcataatatccagttaataggccacaacgcaaaggcttcctattggggagcagagggcacggcctttgctgagggttacattacattgccgatgcagttcgtattgttcttcggccttcctttcccgatgtttttcggcatacttgtaaaccagaaggataccatcgactatatgcttcctggaatcttcggttatggtttcgacttcggt

SEQ ID NO: 26706 - DNA, 60 bp, unidentified
  source 1..60: mol_type = unassigned DNA; note = methanogen bacteria
gacatcttcaatccaatcataaggccagtcacataccagttcctgatggggtcatccaaa

SEQ ID NO: 26707 - DNA, 186 bp, unidentified
  source 1..186: mol_type = unassigned DNA; note = methanogen bacteria
aggatgcagatgggcattgggctcaacacagttttctgctccatgaccaacggcatgagttccacaagcatattgcatacccatctattaaagtccattttgggagcacttctaacacagattatgggaccgtttatccaaagtgacatcaacacaggagtcggcctatatgcatacattccaagt

SEQ ID NO: 26708 - DNA, 240 bp, unidentified
  source 1..240: mol_type = unassigned DNA; note = methanogen bacteria
gcattcgccggcgccgaaccggactactacactgtagatatcgcaaatccaaccggagacattgatttgggaaacatcagcgttgaagtgatcgaccatgaaaccggctcaaacaagaccacataccatatcgacccaagctacaatgagatgaagctgatcaacgacctgaaggtccccctgaacaactcgtgcgagtactatacggtgacatggaatgcatattcctatctggagcaa

SEQ ID NO: 26709 - DNA, 42 bp, unidentified
  source 1..42: mol_type = unassigned DNA; note = methanogen bacteria
atgctgtttgaaaatacggttagcctaccatactatgtaact

SEQ ID NO: 26710 - DNA, 78 bp, unidentified
  source 1..78: mol_type = unassigned DNA; note = methanogen bacteria
catcatctgtcacaataccttttaaattcaggcaacatattaccaattcttggcggattaaaattgttttatgtagac

SEQ ID NO: 26711 - DNA, 75 bp, unidentified
  source 1..75: mol_type = unassigned DNA; note = methanogen bacteria
agcgattttggaagcgtgcctctgaatatactgtttggatacttcatcggaacatcttatgaatttacagcattt

SEQ ID NO: 26712 - DNA, 48 bp, unidentified
  source 1..48: mol_type = unassigned DNA; note = methanogen bacteria
tatgactcctacggcacgtttccagagggatattacttttatatgtca

SEQ ID NO: 26713 - DNA, 33 bp, unidentified
  source 1..33: mol_type = unassigned DNA; note = methanogen bacteria
aaatatgcaaataaatccattgtttttaatgat

SEQ ID NO: 26714 - DNA, 42 bp, unidentified
  source 1..42: mol_type = unassigned DNA; note = methanogen bacteria
gttatttcttcgagtcaggcagaatttactcacccgttcggt

SEQ ID NO: 26715 - DNA, 300 bp, unidentified
  source 1..300: mol_type = unassigned DNA; note = methanogen bacteria
gctagagtatccggaatgacaattttctctccagtgttaagattgacaagaattgagcaatattcactgtcaagtattaaaactgtattaaataatattcaactgataggtcacagtgccgatgcttcatactggggagctgaaggaacggcatttgctgaaggttatatcacactgccgatgcagttagttctgttcttcggtttacctttcccgatgtttttcggtgtactggttaaccagaaggatacaatcgattatatgcttccgggtatctttggttacggattcgattttgga

SEQ ID NO: 26716 - DNA, 189 bp, unidentified
  source 1..189: mol_type = unassigned DNA; note = methanogen bacteria
gaaacagcagtttttgcgaatatgtttttcgcttcccataatctttctgtaagttccgggattgatttgaatttggctattaacacatttgtccaagcattgcctgtggaacttcaaggattagttaaaccttacttagggctattgactagtggagtgcatgaagccttaacttacatattcaattat

SEQ ID NO: 26717 - DNA, 45 bp, unidentified
  source 1..45: mol_type = unassigned DNA; note = methanogen bacteria
cttgttatatcatctagtcaagcggagtttactcacccatttggt

SEQ ID NO: 26718 - DNA, 300 bp, unidentified
  source 1..300: mol_type = unassigned DNA; note = methanogen bacteria
tcaagaatttctggaatgacaatcttttcaccaatgttaagactaagtaggattgaacagttttcttcttctagtgtaaaaatggtattaaataatattcaacttataggacataatggaaatgcatcttactggggtgctgaaggaacagcatttgctgaaggttatattactcttccaatgcaattggttttattctttggtcttcctttcccaatgtttttcggtatattagttaatcaaaaggatactgtcgattatatgcttccgggtattttgggttatggatttgactttggt

SEQ ID NO: 26719 - DNA, 36 bp, unidentified
  source 1..36: mol_type = unassigned DNA; note = methanogen bacteria
tatactaaaatacgcccaattggttcagttgggtgg

SEQ ID NO: 26720 - DNA, 54 bp, unidentified
  source 1..54: mol_type = unassigned DNA; note = methanogen bacteria
acatacccaactgacccaagcaactatcttacattattccttgattcacaatac

SEQ ID NO: 26721 - DNA, 63 bp, unidentified
  source 1..63: mol_type = unassigned DNA; note = methanogen bacteria
acattaacacatggaaaagttggattgacaggggacaataacctaaaatactaccattatgaa

SEQ ID NO: 26722 - DNA, 45 bp, unidentified
  source 1..45: mol_type = unassigned DNA; note = methanogen bacteria
agatggattgaccataatatgttcccaatatactcagcatcagtg

SEQ ID NO: 26723 - DNA, 42 bp, unidentified
  source 1..42: mol_type = unassigned DNA; note = methanogen bacteria
cttgtaatatcttcaagtcaggcggaatttactcacccattc

SEQ ID NO: 26724 - DNA, 300 bp, unidentified
  source 1..300: mol_type = unassigned DNA; note = methanogen bacteria
gcacgtgtaagtggaatgacaattttctctccactcttgaggatgggtaggattgaacaatactctttatcaagtatcaaaactgtattaaacaacattcaattgattggacataatgcaaaggcttcctattggggtgctgaaggtacggcatttgctgaagggtatattacactgccgatgcaattcgtactgttcttcggtcttccgttcccaatgtttttcggtgtattggttaaccaaaaggatacaatcgattatatgcttccgggtatcttcggttggggattcgacttcggt

SEQ ID NO: 26725 - DNA, 45 bp, unidentified
  source 1..45: mol_type = unassigned DNA; note = methanogen bacteria
ttgccctcaattgagcagggcttccacttgaccagcagggaatca

SEQ ID NO: 26726 - DNA, 39 bp, unidentified
  source 1..39: mol_type = unassigned DNA; note = methanogen bacteria
attgattcaagcaatttcctggcaagtctcacatcattg

SEQ ID NO: 26727 - DNA, 33 bp, unidentified
  source 1..33: mol_type = unassigned DNA; note = methanogen bacteria
ctggttatcctctcgatgggaatgaacaatcag

SEQ ID NO: 26728 - DNA, 45 bp, unidentified
  source 1..45: mol_type = unassigned DNA; note = methanogen bacteria
cttagattgtttgatgttacagattttgcattgggttactctcct

SEQ ID NO: 26729 - DNA, 42 bp, unidentified
  source 1..42: mol_type = unassigned DNA; note = methanogen bacteria
gtattgtcctcgagtcaggcggaatttacgcatccattcgga

SEQ ID NO: 26730 - DNA, 300 bp, unidentified
  source 1..300: mol_type = unassigned DNA; note = methanogen bacteria
gcaagagtgagtggaatgacaattttctcaccattgcttaggttgggaaggattgaacagtactctgcatcaagtattaagacagtattgagcaatattcaattgataggacacaatgccaatgcatcctactggggagcggaaggtacggcatttgcggagggttacattacattacctatgcaactggtattattcttcggtttgcctttcccgatgtttttcggtatattggttaaccaaaaggatacaatcgactatatgcttccaggtatcttcggatacggttttgacttcgga

SEQ ID NO: 26731 - DNA, 75 bp, unidentified
  source 1..75: mol_type = unassigned DNA; note = methanogen bacteria
actttaagtggagattatgctagtttccaagaagccgttatgggtcttttctcagatccgcaaacattcataaat

SEQ ID NO: 26732 - DNA, 123 bp, unidentified
  source 1..123: mol_type = unassigned DNA; note = methanogen bacteria
gttccgggggttcaatacttcggaggacataatccaagccttatcagctcaatgttgcctgcttccttgaatggaactctcgcatccatgtttaatactggtattgtatatgtattctccgat

SEQ ID NO: 26733 - DNA, 69 bp, unidentified
  source 1..69: mol_type = unassigned DNA; note = methanogen bacteria
ggtactatcggttcattgaatattacagacattgtatatgtgcttaatcacaatctggttgatccttta

SEQ ID NO: 26734 - DNA, 57 bp, unidentified
  source 1..57: mol_type = unassigned DNA; note = methanogen bacteria
gacattgctcttttggtaatatcttcgagtcaggcagaatttactcacccttttggt

SEQ ID NO: 26735 - DNA, 297 bp, unidentified
  source 1..297: mol_type = unassigned DNA; note = methanogen bacteria
agagtatccggaatgacaattttctcaccattattaagattaggaaggattgagcagtattctctttcaagtattaaaacggttttaagtaatattcaactaatcggtcacaatgcaaacgcatcctactggggagcagaaggtacggcatttgctgaaggatacattacactgccgatgcagtttgtgttattcttcggacttcctttcccgatgtttttcggtatactggtcaaccagaaggatacaatcgactatatgcttccgggaatattcggatatggttttgactttgga

SEQ ID NO: 26736 - DNA, 39 bp, unidentified
  source 1..39: mol_type = unassigned DNA; note = methanogen bacteria
ggagtattaccaactaatattagtgggtttgaaattggt

SEQ ID NO: 26737 - DNA, 39 bp, unidentified
  source 1..39: mol_type = unassigned DNA; note = methanogen bacteria
atgttgagtcatcatgaatttacccacccatatggtcct

SEQ ID NO: 26738 - DNA, 39 bp, unidentified
  source 1..39: mol_type = unassigned DNA; note = methanogen bacteria
gttatatcttcaagtcaagcagagtttacgcatccattc

SEQ ID NO: 26739 - DNA, 57 bp, unidentified
  source 1..57: mol_type = unassigned DNA; note = methanogen bacteria
gcagatattgctcttttattcatttcatcaagtcaggcagaatttactcacccattc

SEQ ID NO: 26740 - DNA, 45 bp, unidentified
  source 1..45: mol_type = unassigned DNA; note = methanogen bacteria
ttggtaatttcttcaagtcaggcagagtttacacacccgttcggt

SEQ ID NO: 26741 - DNA, 300 bp, unidentified
  source 1..300: mol_type = unassigned DNA; note = methanogen bacteria
gcaagagttaccggaatgacaattttctcacctatgcttaggtttggaaggattgagcaatattccctatcaagtatcaagacagtacttcaaaatattcagttgattggtcacaatgcacaggcatcctattggggagcggaaggtacagcattcgctgaaggttatatcacattgccaatgcagctggtacttttcttcggtcttcctttcccgatgtttttcggtatacttgtaaaccagaaggatacaatcgactatatgcttccaggtatcttcggatacggttttgatttcggt

SEQ ID NO: 26742 - DNA, 57 bp, unidentified
  source 1..57: mol_type = unassigned DNA; note = methanogen bacteria
ttgctcaatccgattataagaccaattacatatctttttttgatgggatcctcaaaa

SEQ ID NO: 26743 - DNA, 186 bp, unidentified
  source 1..186: mol_type = unassigned DNA; note = methanogen bacteria
agactgcagatgggaattggactcaacacagtattttgttctatgactaacacgatgagttccacaagcatattgcatactcacttgataaagtcaattttaggtgaagctttaaaccagattatgggagcattcatacaaagtgacattaacactggcgttggcctatatcaatatcttccaggt

SEQ ID NO: 26744 - DNA, 243 bp, unidentified
  source 1..243: mol_type = unassigned DNA; note = methanogen bacteria
attgcatttgcaggagcagaaccggattactataccgtggatgtggcaaacccaactggcgagattgatcttggaagcatcagcactgacgtcatcagcaccacacatgacaattcaacaaacaaaaccacataccacatcaattcaagttataatgaaatggccctgattaatgatttgaaggttcccctgaataattcctgtgaatactatacggtttcatggaacatttactcctatctc

SEQ ID NO: 26745 - DNA, 42 bp, unidentified
  source 1..42: mol_type = unassigned DNA; note = methanogen bacteria
gttgtttcatcgagtcaggcggaatttactcatccattcggg

SEQ ID NO: 26746 - DNA, 39 bp, unidentified
  source 1..39: mol_type = unassigned DNA; note = methanogen bacteria
ggagttttatctacaacagttagtggatttgaaattggt

SEQ ID NO: 26747 - DNA, 48 bp, unidentified
  source 1..48: mol_type = unassigned DNA; note = methanogen bacteria
cttatcctgcctatgtttaatcatcacgaatttacacacccttatggt

SEQ ID NO: 26748 - DNA, 33 bp, unidentified
  source 1..33: mol_type = unassigned DNA; note = methanogen bacteria
atggaattctatctggagacattcccagggctc

SEQ ID NO: 26749 - DNA, 42 bp, unidentified
  source 1..42: mol_type = unassigned DNA; note = methanogen bacteria
ggctccatcacaactcttcttaaaagccagacattgcttacc

SEQ ID NO: 26750 - DNA, 36 bp, unidentified
  source 1..36: mol_type = unassigned DNA; note = methanogen bacteria
ggagttattacttcattgggcggatttgaattggga

SEQ ID NO: 26751 - DNA, 54 bp, unidentified
  source 1..54: mol_type = unassigned DNA; note = methanogen bacteria
gacattgcattgctggtattatcatcaagtcaggcagaatttactcacccattt

SEQ ID NO: 26752 - DNA, 294 bp, unidentified
  source 1..294: mol_type = unassigned DNA; note = methanogen bacteria
ttaactggaatgacaattttctctccgcttttaagattgggtaggattgagcaatactcactttcaagtattaaaactgtattaaataatattcaattaataggacatagcggtaaggcttcttactggggtattgaaggaacagccttcgctgaaggttatattacattgccaatgcagtttgttttattcttcggattgccgttcccaatgtttttcggtatattggtaaaccaaaaagatacaatcgattatatgcttcctggtcttttcgggtatggttttgactttgga

SEQ ID NO: 26753 - DNA, 36 bp, unidentified
  source 1..36: mol_type = unassigned DNA; note = methanogen bacteria
gtccagataatggatggctttggtcttccagcggca

SEQ ID NO: 26754 - DNA, 60 bp, unidentified
  source 1..60: mol_type = unassigned DNA; note = methanogen bacteria
gacgttttcaatccgattataaggcccgtcacatatcagtttttaatgggatcatcaaaa

SEQ ID NO: 26755 - DNA, 192 bp, unidentified
  source 1..192: mol_type = unassigned DNA; note = methanogen bacteria
ttcagaatgcagatgggcattggaatcaacaccgttttttgctctatgactaacggcatgagttccacaagcatattgcatactcacctcttaaagtccattttaggagcacttataactcaaatcatgggaccatttattcaaagcaatatcaacacaggcgttggcctatatcaatatgttccaagtttc

SEQ ID NO: 26756 - DNA, 240 bp, unidentified
  source 1..240: mol_type = unassigned DNA; note = methanogen bacteria
atagcctttgcaggtgcagaaccggactattataccgtggatattgtaaatccaagtggagacattgatttgggaaacatcactgcaaaagtcattgacaacgtcaccactccaaataaaatcacatgccatattgaccccaactataacgaaatggaactgatcaatgatttgaagataccgctgaacaattcgtgtgaatattataccgttacatggaatgcatactcttatctggaa

SEQ ID NO: 26757 - DNA, 60 bp, unidentified
  source 1..60: mol_type = unassigned DNA; note = methanogen bacteria
gatagtttaaatcctattatcagacctattacatacttatttttaatgggatcctcaaaa

SEQ ID NO: 26758 - DNA, 186 bp, unidentified
  source 1..186: mol_type = unassigned DNA; note = methanogen bacteria
ttcagacttcagatgggcataggacttaacaccgtattctgttccatgacaaacggcatgagttcaacaagcattctgcatacacatcttctaaaggccattttgggacatgttctaacacagattatgggtccatttatccaaagcggcatcaacacaggcgtcggcctatatgcttacgttcca

SEQ ID NO: 26759 - DNA, 243 bp, unidentified
  source 1..243: mol_type = unassigned DNA; note = methanogen bacteria
gcatttgcaggtgcagaacctgactattacactgtggatatagtaaatccaagtgatgacattgatttgggaaatatgagcattgaagtaatagactacagcaaaaacaccgacttaaataaaacaacatatcattttgacccaagttacaatgaaatggaactgattaacgatttaaaggttcccctgaacaattcgtgtgagtattacactgtttcctggaacattttctcatatctggag

SEQ ID NO: 26760 - DNA, 33 bp, unidentified
  source 1..33: mol_type = unassigned DNA; note = methanogen bacteria
tgcagtttcggcagtgtgaattatggaaaaata

SEQ ID NO: 26761 - DNA, 54 bp, unidentified
  source 1..54: mol_type = unassigned DNA; note = methanogen bacteria
tatgctgcaggtgtaccgttggagtattcattattatcattcctggccaatgac

SEQ ID NO: 26762 - DNA, 87 bp, unidentified
  source 1..87: mol_type = unassigned DNA; note = methanogen bacteria
ccggactttactttcagcaacatgtacttgaaccagtttttaggcaacttcattggaacacagggcatgaaaattgtcagctgtttt

SEQ ID NO: 26763 - DNA, 54 bp, unidentified
  source 1..54: mol_type = unassigned DNA; note = methanogen bacteria
ttttcagttaccggaggaaccgttcctcaaaaactgaagtatctccatgcatcc

SEQ ID NO: 26764 - DNA, 60 bp, unidentified
  source 1..60: mol_type = unassigned DNA; note = methanogen bacteria
gatatttttaatccgattgtaagaccgataacctatcaatttcttatgggatcttcaaaa

SEQ ID NO: 26765 - DNA, 192 bp, unidentified
  source 1..192: mol_type = unassigned DNA; note = methanogen bacteria
ttcagactgcagatgggaataaaactcaacaccattttctgttgcatgactaacggcatgagctctacaagcattttgcatacccacctgttaaagtcaattttaggagcagccataacccaaataatcggaccgtttgtccaaagcaacatcaacacaggcgtcggcctatattcatatgttcccagtttc

SEQ ID NO: 26766 - DNA, 246 bp, unidentified
  source 1..246: mol_type = unassigned DNA; note = methanogen bacteria
atgagcgtaggtgttgcaggtgccgaaaccgactgtttcacagtggatgttgtaaatccgacaggagatattgatttaggcaacattagctccatgataatcgacaataccacaggccaaaataaaaccacatatcacattgaccacagatataatgaaatgcagctcatcaatgacttgaaagttcctctgagagattcatgtgagtactatacggtttcatggaacatcttttcgtatttagac

SEQ ID NO: 26767 - DNA, 36 bp, unidentified
  source 1..36: mol_type = unassigned DNA; note = methanogen bacteria
ggtgttgtaactaccttaggaggatatgaattaggt

SEQ ID NO: 26768 - DNA, 57 bp, unidentified
  source 1..57: mol_type = unassigned DNA; note = methanogen bacteria
attttcaatcctattataagacccgttacatatctgtttttaatggggtcatccaaa

SEQ ID NO: 26769 - DNA, 189 bp, unidentified
  source 1..189: mol_type = unassigned DNA; note = methanogen bacteria
ttcagactgcaaatgggcattggactcaacacagtattctgcagtatgaccaactccatgagttccacaagcatattacatactcatctgctaaagtccattttgggagaggttttaactcagattattggtccatttattcaaagtgctatcaatacaggtgttggtctatatcagtatgttccagat

SEQ ID NO: 26770 - DNA, 237 bp, unidentified
  source 1..237: mol_type = unassigned DNA; note = methanogen bacteria
gcttttgcaggtgcagagcctgattgttatacagtagatgttgtaaatccaactggaaaaatcgatttgggaaacattagtgatagtgtgattgattttaaatatgataatgctttaaataaaaccacttatcatattgccccggaatataatgaaatgcaactgattaatgatttgaaagttcctctgaacagttcgtgtgaatattacaccgttacatggaacatatactcctac

SEQ ID NO: 26771 - DNA, 57 bp, unidentified
  source 1..57: mol_type = unassigned DNA; note = methanogen bacteria
gtgctgaaccccattatcaggccagtcacttacctgtttttgatgggttcatccaag

SEQ ID NO: 26772 - DNA, 186 bp, unidentified
  source 1..186: mol_type = unassigned DNA; note = methanogen bacteria
aggctgcagatgggcattggactcaacactgttttctgctccatgactaacggcatgagttccacaagcatattgcatacccatcttctaaagtccgttttaggcgcagttctaagcaatattatgggaccatttatccaaagcggcatcaacactggcgtcggcctatatgcatatcttccaagt

SEQ ID NO: 26773 - DNA, 243 bp, unidentified
  source 1..243: mol_type = unassigned DNA; note = methanogen bacteria
acaatcgcatttgcgggagcggaacccgactatttcactgttgatgttgcaaatccaacccatgaaatcgacttgggaaacgtgagcactgaagtcatcagccaggagcatgatgccggtttgaataagaccacttatcatatagaccctagttataatgaaatgcagctaattaatgacttgaagtatccattgaacaattcgtgtgaatattacacagtctcatggaacatctactcttat

SEQ ID NO: 26774 - DNA, 36 bp, unidentified
  source 1..36: mol_type = unassigned DNA; note = methanogen bacteria
aaattgccgtccgtcaccggatcgagctctcatcct

SEQ ID NO: 26775 - DNA, 39 bp, unidentified
  source 1..39: mol_type = unassigned DNA; note = methanogen bacteria
tgctatcacagcaacggatgggcggcggcgttcactgac

SEQ ID NO: 26776 - DNA, 135 bp, unidentified
  source 1..135: mol_type = unassigned DNA; note = methanogen bacteria
ggggactcccagggcatggacttcggcgggtcggacgatgccggctccggcgatatcgcggacaacaacggcgggagctacgaaccgtggacatccggaatctggggggactacgagctccccggcgagaccgaa

SEQ ID NO: 26777 - DNA, 30 bp, unidentified
  source 1..30: mol_type = unassigned DNA; note = methanogen bacteria
tgcagtttcggcagtgtggattatggaaaa

SEQ ID NO: 26778 - DNA, 54 bp, unidentified
  source 1..54: mol_type = unassigned DNA; note = methanogen bacteria
tatgctgcaggcgtaccgttggagtattcattattatcattcataaccaatgac

SEQ ID NO: 26779 - DNA, 87 bp, unidentified
  source 1..87: mol_type = unassigned DNA; note = methanogen bacteria
ccagactttactttcagcaacatgtacttgaaccagtttttaggccacttcattgaaacatctggcatgaaaattgtcagctgtttt

SEQ ID NO: 26780 - DNA, 57 bp, unidentified
  source 1..57: mol_type = unassigned DNA; note = methanogen bacteria
atgttttcagttaccggaggaaccgttcctgaaaaactgaactatctccatgcaccc

SEQ ID NO: 26781 - DNA, 48 bp, unidentified
  source 1..48: mol_type = unassigned DNA; note = methanogen bacteria
atacctatcattccaaatttcttaaaacaatttgaatatgctcaaata

SEQ ID NO: 26782 - DNA, 33 bp, unidentified
  source 1..33: mol_type = unassigned DNA; note = methanogen bacteria
tatcaaggaatattatcaacaaacatggcaaca

SEQ ID NO: 26783 - DNA, 30 bp, unidentified
  source 1..30: mol_type = unassigned DNA; note = methanogen bacteria
ttaggaatttcaaacatatcaattccatat

SEQ ID NO: 26784 - DNA, 36 bp, unidentified
  source 1..36: mol_type = unassigned DNA; note = methanogen bacteria
ggtgctgtaactacttgcggtggattcaatttaggc

SEQ ID NO: 26785 - DNA, 45 bp, unidentified
  source 1..45: mol_type = unassigned DNA; note = methanogen bacteria
gcaaagttttttaattattcatttgatccaatttattcccgtgca

SEQ ID NO: 26786 - DNA, 81 bp, unidentified
  source 1..81: mol_type = unassigned DNA; note = methanogen bacteria
cctcattttttatcaggttatcttttaaataattggtcacttttccctatatatggaggtttagtcctttttactgttgat

SEQ ID NO: 26787 - DNA, 78 bp, unidentified
  source 1..78: mol_type = unassigned DNA; note = methanogen bacteria
atgtctgtttttgacaataatattataaatctcctgttaggttattttataggtactaatattcattttacaacattt

SEQ ID NO: 26788 - DNA, 54 bp, unidentified
  source 1..54: mol_type = unassigned DNA; note = methanogen bacteria
ttagacatcgatggagcttttctgtgtgatgatactcattattattatatgact

SEQ ID NO: 26789 - DNA, 204 bp, unidentified
  source 1..204: mol_type = unassigned DNA; note = methanogen bacteria
gatttatcccctattgatccagtcaatgcatatttaagacaggctgccgtatcggaaacacaaagacagattcttcaggaatattttggtaccaatgttccaattaccactaaaattttccattggttaatggatttgctgcagggtaatcttggaacctcattgatatatcgtgcaccagtcattgatatcataattgaaaag

SEQ ID NO: 26790 - DNA, 93 bp, unidentified
  source 1..93: mol_type = unassigned DNA; note = methanogen bacteria
gctgtttatttaggatggttcccaataggatttggtgttccgataggtgtaagaagtaccgatgctacatttatggaatgggcatcaagactg

SEQ ID NO: 26791 - DNA, 72 bp, unidentified
  source 1..72: mol_type = unassigned DNA; note = methanogen bacteria
gaacaggtattttcctatccgggtgttggacaaacggccgtagccgcaggtctcagcagtgatgtcccatta

SEQ ID NO: 26792 - DNA, 30 bp, unidentified
  source 1..30: mol_type = unassigned DNA; note = methanogen bacteria
gtgtttcacacagcggacctgattggagac

SEQ ID NO: 26793 - DNA, 63 bp, unidentified
  source 1..63: mol_type = unassigned DNA; note = methanogen bacteria
ggcgtttattatgatccaagctatttgggcaaggtatttaaccttccattttcatacaactgg

SEQ ID NO: 26794 - DNA, 81 bp, unidentified
  source 1..81: mol_type = unassigned DNA; note = methanogen bacteria
ggacagcttcatatgccttataacctgttccatgactatcaggcaaccaaatcaaaaatcattaaatcttctcttgacctg

SEQ ID NO: 26795 - DNA, 30 bp, unidentified
  source 1..30: mol_type = unassigned DNA; note = methanogen bacteria
gctggtgtggtattagccaaaccttcagcg

SEQ ID NO: 26796 - DNA, 57 bp, unidentified
  source 1..57: mol_type = unassigned DNA; note = methanogen bacteria
atcttcaatccgattataaggccgattacatatttattcctgatggggtcatccaaa

SEQ ID NO: 26797 - DNA, 186 bp, unidentified
  source 1..186: mol_type = unassigned DNA; note = methanogen bacteria
agaatgcaaatgggcattggactcaacaccgtattctgctccatgactaacggcatgagttccacaagcattctacatacccacctgttaaagtccattttgggagcggttctaactcaaataatggggccatttatccaaagtaacataaacaccggtgtgggcctataccaatatgtcccaagt

SEQ ID NO: 26798 - DNA, 237 bp, unidentified
  source 1..237: mol_type = unassigned DNA; note = methanogen bacteria
gcttttgcaggtgccgaaccggactactacactgtggatatagtaaatgcaagtgaaaacattgattttggaaacatcagcatggatgtcataaatcatgacagcaattcaaataaaaccacataccacgttgacccaaactataatgagatgcagcttatcaacgatttgaaggttcccctgagaaattcgtgcgagtattacaccatcacatggaatgcatactcatatctggat

SEQ ID NO: 26799 - DNA, 30 bp, unidentified
  source 1..30: mol_type = unassigned DNA; note = methanogen bacteria
ggaaggcagtctgcaattctaggtgttcct

SEQ ID NO: 26800 - DNA, 69 bp, unidentified
  source 1..69: mol_type = unassigned DNA; note = methanogen bacteria
aaccatcttcagtttaactatgacagcctgatattttacattgacagctttttcaatttaggagtaaac

SEQ ID NO: 26801 - DNA, 75 bp, unidentified
  source 1..75: mol_type = unassigned DNA; note = methanogen bacteria
cagcctgttaaaagcgatgcattattcctgtttatggtgaatgatacaatacatttaaattcatttttagatatc

SEQ ID NO: 26802 - DNA, 30 bp, unidentified
  source 1..30: mol_type = unassigned DNA; note = methanogen bacteria
ttcgatttgcttccattaacgggaactcag

SEQ ID NO: 26803 - DNA, 33 bp, unidentified
  source 1..33: mol_type = unassigned DNA; note = methanogen bacteria
tgcagtttcggcagtgtggattatggaaaaata

SEQ ID NO: 26804 - DNA, 54 bp, unidentified
  source 1..54: mol_type = unassigned DNA; note = methanogen bacteria
tatgctgcaggcgtacctatagagtattcattattatcattcatagcaaatgac

SEQ ID NO: 26805 - DNA, 87 bp, unidentified
  source 1..87: mol_type = unassigned DNA; note = methanogen bacteria
ccagacttgactttcagcaacatatacttgaaccagcttttaggccacttcattggaacatatgatatgaataatatcagctgtttt

SEQ ID NO: 26806 - DNA, 54 bp, unidentified
  source 1..54: mol_type = unassigned DNA; note = methanogen bacteria
ttttcagttaccggaggaaccgttcctgaaaaactgaattatctccatgcatcc

SEQ ID NO: 26807 - DNA, 48 bp, unidentified; identical to SEQ ID NO: 25410
  source 1..48: mol_type = unassigned DNA; note = methanogen bacteria

SEQ ID NO: 26808 - DNA, 45 bp, unidentified
  source 1..45: mol_type = unassigned DNA; note = methanogen bacteria
gttcagggttataatgcgggtttaagctccacttatagtttcata

SEQ ID NO: 26809 - DNA, 69 bp, unidentified
  source 1..69: mol_type = unassigned DNA; note = methanogen bacteria
gccggaagtcttggccttgatgccactccttttaatatatatggtggattggtgctctttgtggttgat

SEQ ID NO: 26810 - DNA, 69 bp, unidentified
  source 1..69: mol_type = unassigned DNA; note = methanogen bacteria
acagatttcggcattcctgttgtaaatttaattacaggccacttattcggaactaaatttacagctttt

SEQ ID NO: 26811 - DNA, 48 bp, unidentified
  source 1..48: mol_type = unassigned DNA; note = methanogen bacteria
tggggaggggtcttttcaaaggatgttcacctttattacttcatgaat

SEQ ID NO: 26812 - DNA, 60 bp, unidentified
  source 1..60: mol_type = unassigned DNA; note = methanogen bacteria
aacatatttaatcccattgtaagacctattacccatttatttttaatgggttcgtcaaaa

SEQ ID NO: 26813 - DNA, 186 bp, unidentified
  source 1..186: mol_type = unassigned DNA; note = methanogen bacteria
agaatgcaattgggcattggatggaatactattttcgcatcaatgacacacggcatgagttcaacaagcatactgcatacccatttgttaaaatcaatattaggtgaagttttagtaaacattatgggaccatttatccaatctgacatcaatactggcgtgggattgtatacttatgttcctgat

SEQ ID NO: 26814 - DNA, 234 bp, unidentified
  source 1..234: mol_type = unassigned DNA; note = methanogen bacteria
tttgcaggagctgaaacagaccattataccgtcgaaattgcagacatggatgacaacattaccttcggagagattccgatggaaaaaatcggccaaaagaatgaccggacaatctatcatgtaacttcacaatacaatgaaatggaactgctcaacgatttgaaagtacccctgaacaattcgtgcgagtattataccgttagctggaacatttattcatacttaagattacaa

SEQ ID NO: 26815 - DNA, 36 bp, unidentified
  source 1..36: mol_type = unassigned DNA; note = methanogen bacteria
ttttataacaatgcacctcattctgccaattatatg

SEQ ID NO: 26816 - DNA, 60 bp, unidentified
  source 1..60: mol_type = unassigned DNA; note = methanogen bacteria
ctagacaatcaagccccatccccatccaatatattgaccatgttctttgatgactattgg

SEQ ID NO: 26817 - DNA, 57 bp, unidentified
  source 1..57: mol_type = unassigned DNA; note = methanogen bacteria
cacacagtttcaatcagttatatgaagcatcgtttgagttattacggataccaaagc

SEQ ID NO: 26818 - DNA, 45 bp, unidentified
  source 1..45: mol_type = unassigned DNA; note = methanogen bacteria
aaatggattgacaaatattacttcccggtattttcccataatcca

SEQ ID NO: 26819 - DNA, 81 bp, unidentified
  source 1..81: mol_type = unassigned DNA; note = methanogen bacteria
ttttcatatttgccttcttatgagccaactttacagtattttattgatgtattttttggttttaaaggggtttcttccatt

SEQ ID NO: 26820 - DNA, 48 bp, unidentified
  source 1..48: mol_type = unassigned DNA; note = methanogen bacteria
tattcaattgattatggttcctggagtattaataaattggatttcttc

SEQ ID NO: 26821 - DNA, 42 bp, unidentified
  source 1..42: mol_type = unassigned DNA; note = methanogen bacteria
gcatataatccattttttgagcaattcaaagtaggaaaggca

SEQ ID NO: 26822 - DNA, 36 bp, unidentified
  source 1..36: mol_type = unassigned DNA; note = methanogen bacteria
tctttttctaacctttcaattagtccaggatttgaa

SEQ ID NO: 26823 - DNA, 69 bp, unidentified
  source 1..69: mol_type = unassigned DNA; note = methanogen bacteria
aatgttttagacaatatgttaaacattccaataccccaatttacaatattgtcattgtttaaggtcgat

SEQ ID NO: 26824 - DNA, 81 bp, unidentified
  source 1..81: mol_type = unassigned DNA; note = methanogen bacteria
tttgttgattttaataatatcttcttaaattatttcttcggatattttataggaaccattcttcaccagtgtacagtattt

SEQ ID NO: 26825 - DNA, 51 bp, unidentified
  source 1..51: mol_type = unassigned DNA; note = methanogen bacteria
cccgtacctgcaggatctatctctgataatgcacatgcatattttatcaca

SEQ ID NO: 26826 - DNA, 33 bp, unidentified
  source 1..33: mol_type = unassigned DNA; note = methanogen bacteria
gagtacttttataaaggcattgtattcactgaa

SEQ ID NO: 26827 - DNA, 42 bp, unidentified
  source 1..42: mol_type = unassigned DNA; note = methanogen bacteria
gctagtgcttttcatgcaacatataatcctacttctagtttt

SEQ ID NO: 26828 - DNA, 78 bp, unidentified
  source 1..78: mol_type = unassigned DNA; note = methanogen bacteria
cattttgttgctggggctcttttaggtaaaggcgatgtttttcctattgctggaggattgatgctcttttgtgttgat

SEQ ID NO: 26829 - DNA, 78 bp, unidentified
  source 1..78: mol_type = unassigned DNA; note = methanogen bacteria
gacactgatttcgggaatcctttagtaaacttattcttttcttacttcattggcacattgggaggatttacagcattt

SEQ ID NO: 26830 - DNA, 48 bp, unidentified
  source 1..48: mol_type = unassigned DNA; note = methanogen bacteria
tggggaggcatcgaatcaagtgatgttcacttatattatttcctagac

SEQ ID NO: 26831 - DNA, 42 bp, unidentified
  source 1..42: mol_type = unassigned DNA; note = methanogen bacteria
attggtatagatgaagtcattgatgcccttaaagtatctaac

SEQ ID NO: 26832 - DNA, 30 bp, unidentified
  source 1..30: mol_type = unassigned DNA; note = methanogen bacteria
gcatttggagctagagtctctccaatacta

SEQ ID NO: 26833 - DNA, 30 bp, unidentified
  source 1..30: mol_type = unassigned DNA; note = methanogen bacteria
tattcacgggcaggaattacctcatccata

SEQ ID NO: 26834 - DNA, 30 bp, unidentified
  source 1..30: mol_type = unassigned DNA; note = methanogen bacteria
tttgtattaactggcgtagacaatcccaca

SEQ ID NO: 26835 - DNA, 75 bp, unidentified
  source 1..75: mol_type = unassigned DNA; note = methanogen bacteria
cttaaacactcatttgatatttccaatgcattggacatattcttcggaaaaccaggaacccttggagttgcattc

SEQ ID NO: 26836 - DNA, 48 bp, unidentified
  source 1..48: mol_type = unassigned DNA; note = methanogen bacteria
gttcccaaatcaattcaggcaaatcattttgtctataagggatatttc

SEQ ID NO: 26837 - DNA, 33 bp, unidentified
  source 1..33: mol_type = unassigned DNA; note = methanogen bacteria
aataaatccgctaatggtgaatcattatgggct

SEQ ID NO: 26838 - DNA, 69 bp, unidentified
  source 1..69: mol_type = unassigned DNA; note = methanogen bacteria
actatggatattaatggaattcccgctaattcaagaggattaattgtaatgatagcctcaatgcttgga

SEQ ID NO: 26839 - DNA, 36 bp, unidentified
  source 1..36: mol_type = unassigned DNA; note = methanogen bacteria
acccctcgaccagatggactccttattgccaatact

SEQ ID NO: 26840 - DNA, 60 bp, unidentified
  source 1..60: mol_type = unassigned DNA; note = methanogen bacteria
gatattttcaatccgattgtaagaccgattacctatcaatttctgatggggtcctccaaa

SEQ ID NO: 26841 - DNA, 189 bp, unidentified
  source 1..189: mol_type = unassigned DNA; note = methanogen bacteria
agactgcagatgggaataaagctcaacactgttttctgttgcatggctaacggcatgagctctacaagcattttacatacccacctgttaaagtcaattttaggggcagccataactcaaataatcggaccgtttgtccaaaacatgaacaccggcgttggcctgtattcctatgtaccaagtttcggt

SEQ ID NO: 26842 - DNA, 240 bp, unidentified
  source 1..240: mol_type = unassigned DNA; note = methanogen bacteria
gtaggaattgcgggtgcagagaccgactgttacactgtggatgttgtaaatccgacagacgacattgacttgggcaacatcagcgcaatggtaatcgacaatagcaccggtccaaataaaatcacatatcacattgaccacagatataatgaaatggagctcatcaacgacttgaaagttcctctgatagattcgtgcgagtattataccgtttcatggaacatctattcatatctcagc

SEQ ID NO: 26843 - DNA, 66 bp, unidentified
  source 1..66: mol_type = unassigned DNA; note = methanogen bacteria
ttaaatcctgcatacagcattccagagtttacaacacagggattgtatttaaccgacaagagcatt

SEQ ID NO: 26844 - DNA, 90 bp, unidentified
  source 1..90: mol_type = unassigned DNA; note = methanogen bacteria
tttttccacggccagcctcagcttgcagcaatctacggcgcaagcccctcagttggagtttatgaaatggcaaaaacattggtgggtcct

SEQ ID NO: 26845 - DNA, 57 bp, unidentified
  source 1..57: mol_type = unassigned DNA; note = methanogen bacteria
ttaaatccaattattagacctttaacccacatattcttaatgggatcttcaaaaggc

SEQ ID NO: 26846 - DNA, 177 bp, unidentified
  source 1..177: mol_type = unassigned DNA; note = methanogen bacteria
agataccagcttggaatcggtttaaatacaacatttatgtccgttaaaaatggaatatcttctacaagcatcatacatacacatttattaaaatctatttttggaaatttaatagctagtgttttaggacctgtatctggagatataaatactgggattagcttatattcctacgtt

SEQ ID NO: 26847 - DNA, 237 bp, unidentified
  source 1..237: mol_type = unassigned DNA; note = methanogen bacteria
atacttggagcgcaaccagagtattatacattagaagttacaaatcccatagataacattgaaatgactggaattgatgtagaaaacatcactattaacaataatactacaacttacattataaatccccattacaatgaaatggatttgcttaatagaataaaagttcaactaaacaatagctgtgaatattatacgctttcgtggaatatgatgacatattttaataaaccacaa

SEQ ID NO: 26848 - DNA, 33 bp, unidentified
  source 1..33: mol_type = unassigned DNA; note = methanogen bacteria
tctgtatcaatgataggtccattttcattaggt

SEQ ID NO: 26849 - DNA, 81 bp, unidentified
  source 1..81: mol_type = unassigned DNA; note = methanogen bacteria
ttttcgaattttgcagggtatgaattaagcattaattattttgtaaatgtactctttggttttatgggaatatcaagcata

SEQ ID NO: 26850 - DNA, 42 bp, unidentified
  source 1..42: mol_type = unassigned DNA; note = methanogen bacteria
ctaggctacggaagttggcaaatcaacaagctggatttcttt

SEQ ID NO: 26851 - DNA, 39 bp, unidentified
  source 1..39: mol_type = unassigned DNA; note = methanogen bacteria
tataatccatttttcaatcagtttaaagtaggtaaagcc

SEQ ID NO: 26852 - DNA, 33 bp, unidentified
  source 1..33: mol_type = unassigned DNA; note = methanogen bacteria
tcaatcaccacccttggcggattcaatttagga

SEQ ID NO: 26853 - DNA, 36 bp, unidentified
  source 1..36: mol_type = unassigned DNA; note = methanogen bacteria
ggagtcgtcactgtctgcggaggattcactctgggc

SEQ ID NO: 26854 - DNA, 57 bp, unidentified
  source 1..57: mol_type = unassigned DNA; note = methanogen bacteria
atgttcaatccaatcataagaccagttacataccaattcttaatgggatcctcaaaa

SEQ ID NO: 26855 - DNA, 186 bp, unidentified
  source 1..186: mol_type = unassigned DNA; note = methanogen bacteria
agactgcaaatgggaatatctttaaactccatttttgcatccatgacacatggaatgagttccacaagcattctgcacacccatcttataaaatcaattttgggagaaatcttagcaaatgttatgggaccatttatccaaagcgaaatcaacacaggtgttggcctatactcctatgttcccgac

SEQ ID NO: 26856 - DNA, 234 bp, unidentified
  source 1..234: mol_type = unassigned DNA; note = methanogen bacteria
gtagcttttgcgggtgctgaacctgattattataccgttgaaatcacaaacatggacaagaacgttgattttggagacataccccttgaaaaaatcagccaaacaaacaataccattacctatcatgtaacaccagaatataatgaaatggaacttttaaacgacttaaaaattccgttaactgactcgtgtgaatattatacggtcagttggaacatctattcctatttagat

SEQ ID NO: 26857 - DNA, 33 bp, unidentified
  source 1..33: mol_type = unassigned DNA; note = methanogen bacteria
gttgtcactactcttggaggattcacattaggt

SEQ ID NO: 26858 - DNA, 33 bp, unidentified
  source 1..33: mol_type = unassigned DNA; note = methanogen bacteria
ttcaatattgaaagtggaaatttattaattgga

SEQ ID NO: 26859 - DNA, 42 bp, unidentified
  source 1..42: mol_type = unassigned DNA; note = methanogen bacteria
tattttcactcaattgacgggatagtcattaaaatggaggtc

SEQ ID NO: 26860 - DNA, 36 bp, unidentified
  source 1..36: mol_type = unassigned DNA; note = methanogen bacteria
gacggaaaggtcaacaaggagatgattttcgggccg

SEQ ID NO: 26861 - DNA, 72 bp, unidentified
  source 1..72: mol_type = unassigned DNA; note = methanogen bacteria
tttcacatatacatagacggcgcccccgccaatgtcagatgcatggtggttcttgtaagcggacttttcgga

SEQ ID NO: 26862 - DNA, 54 bp, unidentified
  source 1..54: mol_type = unassigned DNA; note = methanogen bacteria
ttttataaaaatccaagtcctttctggccattaaatgcaggcattgcttcaccg

SEQ ID NO: 26863 - DNA, 90 bp, unidentified
  source 1..90: mol_type = unassigned DNA; note = methanogen bacteria
ttcgatatacctactttgggccgtcctttacatactgattttgtaagtggttttctagcaatgtgtatgggagtttttacggatcattta

SEQ ID NO: 26864 - DNA, 42 bp, unidentified
  source 1..42: mol_type = unassigned DNA; note = methanogen bacteria
aaattctttggaaccaatggattttccctggtatacactcct

SEQ ID NO: 26865 - DNA, 36 bp, unidentified
  source 1..36: mol_type = unassigned DNA; note = methanogen bacteria
ggtgtagtgactacattgggaggatttacattaggt

SEQ ID NO: 26866 - DNA, 36 bp, unidentified
  source 1..36: mol_type = unassigned DNA; note = methanogen bacteria
ggtgtcataaccactttaggtggattcgaattaggc

SEQ ID NO: 26867 - DNA, 42 bp, unidentified
  source 1..42: mol_type = unassigned DNA; note = methanogen bacteria
acatcagtattgtcagcatctcataataatactgtttttagt

SEQ ID NO: 26868 - DNA, 144 bp, unidentified
  source 1..144: mol_type = unassigned DNA; note = methanogen bacteria
caaagtatcaatccttattttctcttaattctgcataaacgaatagctgacttttcttttactgactatttttggattttctgggatattagtaaaataacaggtatgcccgatgatcagtcagcatgtatagtcggtgctttt

SEQ ID NO: 26869 - DNA, 33 bp, unidentified
  source 1..33: mol_type = unassigned DNA; note = methanogen bacteria
agcacaacgacagttccatatatctcgaatgat

SEQ ID NO: 26870 - DNA, 81 bp, unidentified
  source 1..81: mol_type = unassigned DNA; note = methanogen bacteria
aaaataagatttaaccgaaagcaaagaaaaagaatgaaacaatatagaagcttatatggggatgacagatacaggtacaga

SEQ ID NO: 26871 - DNA, 291 bp, unidentified
  source 1..291: mol_type = unassigned DNA; note = methanogen bacteria
gatgaaaatcacacagtatcctatggtattggttgggtatttgttaaaaaggcaggttcagctattaatgtacctgataactttaatattacatatggtgatgtaaaaacaattaatattgctttagagaatgttactgctgataatattaatgcaacatatgttatatctaatggtaagattgttgtatgtaatataacacgtattggaactaatatcacaattagaggtttaggtgtaggtgattatgcaattattgttgaatccagagaaactacaaactataatgca

SEQ ID NO: 26872 - DNA, 39 bp, unidentified
  source 1..39: mol_type = unassigned DNA; note = methanogen bacteria
gcatctttttctaacatttcaattagtccaggatttgaa

SEQ ID NO: 26873 - DNA, 69 bp, unidentified
  source 1..69: mol_type = unassigned DNA; note = methanogen bacteria
aatgttttagacaatatgttaaacatgtccaatactccaattacaatattgtcattgtttaaggtcgat

SEQ ID NO: 26874 - DNA, 81 bp, unidentified
  source 1..81: mol_type = unassigned DNA; note = methanogen bacteria
tttgttgattttaataatatcttcttaaattatttcttcggatattttataggaaccattcttcaccaatgtaccgcattt

SEQ ID NO: 26875 - DNA, 51 bp, unidentified
  source 1..51: mol_type = unassigned DNA; note = methanogen bacteria
ccctcacccgcaggatctatctccgataatgcacatgcatattttatcaca

SEQ ID NO: 26876 - DNA, 30 bp, unidentified
  source 1..30: mol_type = unassigned DNA; note = methanogen bacteria
tacttttataaaggctttgtattcactgat

SEQ ID NO: 26877 - DNA, 30 bp, unidentified
  source 1..30: mol_type = unassigned DNA; note = methanogen bacteria
tatatggtcatcatcaaagagtttgacatt

SEQ ID NO: 26878 - DNA, 30 bp, unidentified
  source 1..30: mol_type = unassigned DNA; note = methanogen bacteria
aataaatcgacaaatggagaatcactgtgg

SEQ ID NO: 26879 - DNA, 69 bp, unidentified
  source 1..69: mol_type = unassigned DNA; note = methanogen bacteria
acaatgaacgttaatggagctcccgccaatgcccgaggactggtcgtgatgatagcctcattgcttgga

SEQ ID NO: 26880 - DNA, 33 bp, unidentified
  source 1..33: mol_type = unassigned DNA; note = methanogen bacteria
accccaaaacccgatgggatcatcattgccaat

SEQ ID NO: 26881 - DNA, 63 bp, unidentified
  source 1..63: mol_type = unassigned DNA; note = methanogen bacteria
gccggaggatacagtttcccgacgatgaccctgaataatctgcatccgacagggatggaatac

SEQ ID NO: 26882 - DNA, 96 bp, unidentified
  source 1..96: mol_type = unassigned DNA; note = methanogen bacteria
gcgttctacggcgacacggcggctctcaccgccgatttaaacagcggcggggcatcgggagtagtttacaatatgtccctcgccctggcgggaccc

SEQ ID NO: 26883 - DNA, 33 bp, unidentified
  source 1..33: mol_type = unassigned DNA; note = methanogen bacteria
aatgttccatatattaactggttgtattttaca

SEQ ID NO: 26884 - DNA, 30 bp, unidentified
  source 1..30: mol_type = unassigned DNA; note = methanogen bacteria
ataatgtttaaatataatatgggacttttt

SEQ ID NO: 26885 - DNA, 51 bp, unidentified
  source 1..51: mol_type = unassigned DNA; note = methanogen bacteria
ttttataaaaatccaagtccttcctggccattaactgcaggcattgtttta

SEQ ID NO: 26886 - DNA, 93 bp, unidentified
  source 1..93: mol_type = unassigned DNA; note = methanogen bacteria
tttttcgatatacctactttgggccgtcctttacatactgattttgtaagtggttttctagcaatgtgtatgggagtttttacggatcattta

SEQ ID NO: 26887 - DNA, 36 bp, unidentified
  source 1..36: mol_type = unassigned DNA; note = methanogen bacteria
ggtgctgttactacactgggaggatttacattagga

SEQ ID NO: 26888 - DNA, 36 bp, unidentified
  source 1..36: mol_type = unassigned DNA; note = methanogen bacteria
ggtatagtaacaactttaggtggttttgaactaggt

SEQ ID NO: 26889 - DNA, 33 bp, unidentified
  source 1..33: mol_type = unassigned DNA; note = methanogen bacteria
cttggattttcaacaacaagcggaggtccattc

SEQ ID NO: 26890 - DNA, 45 bp, unidentified
  source 1..45: mol_type = unassigned DNA; note = methanogen bacteria
gcgacatgggacaatatgtggaatcttggaagccagacactcgac

SEQ ID NO: 26891 - DNA, 36 bp, unidentified
  source 1..36: mol_type = unassigned DNA; note = methanogen bacteria
ggtgctgtaactaccttgggcggatttgaattggga

SEQ ID NO: 26892 - DNA, 36 bp, unidentified
  source 1..36: mol_type = unassigned DNA; note = methanogen bacteria
ggtgcagtcactacattaggtggatttactttaggt

SEQ ID NO: 26893 - DNA, 36 bp, unidentified
  source 1..36: mol_type = unassigned DNA; note = methanogen bacteria
ggtgccattacaactttgggcggttttcaattaggt

SEQ ID NO: 26894 - DNA, 36 bp, unidentified
  source 1..36: mol_type = unassigned DNA; note = methanogen bacteria
ggtactattacttgtttgggaggttttgaattaggc

SEQ ID NO: 26895 - DNA, 36 bp, unidentified
  source 1..36: mol_type = unassigned DNA; note = methanogen bacteria
ggtgcagtcactacattaggcggttttaatttaggt

SEQ ID NO: 26896 - DNA, 90 bp, unidentified
  source 1..90: mol_type = unassigned DNA; note = methanogen bacteria
cagatagtcaaaaagttaagacgtgggcgaagaggcagacaacctcaaagtctgtacagacagaaccaaaataacagacgtttcagacgt

SEQ ID NO: 26897 - DNA, 39 bp, unidentified
  source 1..39: mol_type = unassigned DNA; note = methanogen bacteria
gataagcttttaaatccaaatttaatcactactccagat

SEQ ID NO: 26898 - DNA, 57 bp, unidentified
  source 1..57: mol_type = unassigned DNA; note = methanogen bacteria
tggggagtggaacccctcagtgtactgtacaacttcgaggatcccgacgcaggatac

SEQ ID NO: 26899 - DNA, 48 bp, unidentified
  source 1..48: mol_type = unassigned DNA; note = methanogen bacteria
tccgagatgatcgagaacatcacccaccccgccagcgagggtaacgtc

SEQ ID NO: 26900 - DNA, 54 bp, unidentified
  source 1..54: mol_type = unassigned DNA; note = methanogen bacteria
atcgtcggtcccgacaagttcatcgactgcatggcacagaccttcggatccgct

SEQ ID NO: 26901 - DNA, 51 bp, unidentified
  source 1..51: mol_type = unassigned DNA; note = methanogen bacteria
ggggaaatgcaggtctatctgatttcccaaatcaagctttccttaactagc

SEQ ID NO: 26902 - DNA, 33 bp, unidentified
  source 1..33: mol_type = unassigned DNA; note = methanogen bacteria
gccataacaacattgggtggattcacattggga

SEQ ID NO: 26903 - DNA, 204 bp, unidentified
  source 1..204: mol_type = unassigned DNA; note = methanogen bacteria
gatttatcccctattgatccagttagtgcttatttaaaaggtgctgcagtatctgaagcacaaagacaaatcttagaacaatatttcgggactaatgttccactgactacaaaaatatatcactggcttttggatttaattcaaggtaatttaggaacttcattaatataccgtgctcctgttatggatgttatttttgaaaaa

SEQ ID NO: 26904 - DNA, 90 bp, unidentified
  source 1..90: mol_type = unassigned DNA; note = methanogen bacteria
tcagtttatttaggatggttcccaattggatttggtgtgccaattggtgttaaaagtacggatgcaacatttatggagtgggtaacaaga

SEQ ID NO: 26905 - DNA, 72 bp, unidentified
  source 1..72: mol_type = unassigned DNA; note = methanogen bacteria
gaacaggtattttcctatcctggaattggtcaaacggcagttgcggcaggtcttcaaagtgatgtgccccta

SEQ ID NO: 26906 - DNA, 36 bp, unidentified
  source 1..36: mol_type = unassigned DNA; note = methanogen bacteria
ggtgtaatcactaccatcggtggttttgaattagga

SEQ ID NO: 26907 - DNA, 45 bp, unidentified
  source 1..45: mol_type = unassigned DNA; note = methanogen bacteria
tcagaacatgttttaagagagtatttaaatgtgattaatggtaat

SEQ ID NO: 26908 - DNA, 51 bp, unidentified
  source 1..51: mol_type = unassigned DNA; note = methanogen bacteria
tttggccagtctactgcattgacatttccaattcacaacatccctctagaa

SEQ ID NO: 26909 - DNA, 63 bp, unidentified
  source 1..63: mol_type = unassigned DNA; note = methanogen bacteria
cctgaaataagtgatggaggacactttatgatggacatccttgacattgccatgccgtcactt

SEQ ID NO: 26910 - DNA, 45 bp, unidentified
  source 1..45: mol_type = unassigned DNA; note = methanogen bacteria
ctaaactcaacctatccaacattcgtggatgcattatttgctctt

SEQ ID NO: 26911 - DNA, 87 bp, unidentified
  source 1..87: mol_type = unassigned DNA; note = methanogen bacteria
ttcgtcaaaaagatgagacgtggcagaaggcgcagaggacaacaaagtctttacagacagaaccaaaacaacagacgtttcaaacgt

SEQ ID NO: 26912 - DNA, 30 bp, unidentified
  source 1..30: mol_type = unassigned DNA; note = methanogen bacteria
tttgctaaaagcgagcctgtccattcactg

SEQ ID NO: 26913 - DNA, 63 bp, unidentified
  source 1..63: mol_type = unassigned DNA; note = methanogen bacteria
tacctgaattaccctgctacaattgagggtcttatagacatcatattctttaaaggattcgtt

SEQ ID NO: 26914 - DNA, 33 bp, unidentified
  source 1..33: mol_type = unassigned DNA; note = methanogen bacteria
tatctgcaactgcttgatgaggtttattacctg

SEQ ID NO: 26915 - DNA, 39 bp, unidentified
  source 1..39: mol_type = unassigned DNA; note = methanogen bacteria
ataacaaattatcagacacatattcttttaagaaatcca

SEQ ID NO: 26916 - DNA, 36 bp, unidentified
  source 1..36: mol_type = unassigned DNA; note = methanogen bacteria
ggtgtagtcacaacattaggaggatttacactcggc

SEQ ID NO: 26917 - DNA, 30 bp, unidentified
  source 1..30: mol_type = unassigned DNA; note = methanogen bacteria
tactcatcggacgtgctaggcgtcggcagc

SEQ ID NO: 26918 - DNA, 36 bp, unidentified
  source 1..36: mol_type = unassigned DNA; note = methanogen bacteria
ggtgttgttacaacattgggtggttttgaattaggt

SEQ ID NO: 26919 - DNA, 42 bp, unidentified
  source 1..42: mol_type = unassigned DNA; note = methanogen bacteria
aagcttattggaactaaaggattttcactggtatatactcct

SEQ ID NO: 26920 - DNA, 36 bp, unidentified
  source 1..36: mol_type = unassigned DNA; note = methanogen bacteria
ggtgcagtaacaacattgggtggttttgaattagga

SEQ ID NO: 26921 - DNA, 114 bp, unidentified
  source 1..114: mol_type = unassigned DNA; note = methanogen bacteria
accatcggatccgccaactactccgcctgggacgtctaccgcgatatctggtatcactttgtggaccccggacagaacaatcccaagatggaccatgtgattttcgacatccgc

SEQ ID NO: 26922 - DNA, 33 bp, unidentified
  source 1..33: mol_type = unassigned DNA; note = methanogen bacteria
atggggattaccgtgaccggcatcgggggcacg

SEQ ID NO: 26923 - DNA, 78 bp, unidentified
  source 1..78: mol_type = unassigned DNA; note = methanogen bacteria
aaactctcggtaagcgaacagaccctgtcggcagtcttccaatggtctataggtgacctcagtaccgtgacgtggacc

SEQ ID NO: 26924 - DNA, 39 bp, unidentified
  source 1..39: mol_type = unassigned DNA; note = methanogen bacteria
ggaggagtaacaacattagccggattcccattaggatgg

SEQ ID NO: 26925 - DNA, 42 bp, unidentified
  source 1..42: mol_type = unassigned DNA; note = methanogen bacteria
ccgcagcctgaaaccgcaacatgggcggcaatattaagcttg

SEQ ID NO: 26926 - DNA, 42 bp, unidentified
  source 1..42: mol_type = unassigned DNA; note = methanogen bacteria
ggaatggcttcattaggcacatgggatgcgctctttgacttg

SEQ ID NO: 26927 - DNA, 36 bp, unidentified
  source 1..36: mol_type = unassigned DNA; note = methanogen bacteria
ggttacgttacaacattgggcggatttcaattaggt

SEQ ID NO: 26928 - DNA, 36 bp, unidentified
  source 1..36: mol_type = unassigned DNA; note = methanogen bacteria
ggtgctgtaacaacattgggaggatttcaactggga

SEQ ID NO: 26929 - DNA, 204 bp, unidentified
  source 1..204: mol_type = unassigned DNA; note = methanogen bacteria
gacatgtctcctataaatccggtaaatgcttatatttccaacatggttgttagtcctgaaaagattgcacagctggaagcatactggggagtgaaccagcctattacagagaagatgctgaactggcttggaaatatcctcaccggtgacttcggtacttcactgatttacagggctccggttctgcatgtcatctctgaaaaa

SEQ ID NO: 26930 - DNA, 90 bp, unidentified
  source 1..90: mol_type = unassigned DNA; note = methanogen bacteria
agcgtctatcttggactgttccctgtaagtggaggagttcctatcggagcattgagccaggatgtatcattctgggactggctgaggcat

SEQ ID NO: 26931 - DNA, 72 bp, unidentified
  source 1..72: mol_type = unassigned DNA; note = methanogen bacteria
gaacaggttttcatgtatcccggcataggtcaggctgcagtttccgcaggtttgagaagcgatgttccatta

SEQ ID NO: 26932 - DNA, 42 bp, unidentified
  source 1..42: mol_type = unassigned DNA; note = methanogen bacteria
gttggtattgaccaagttatcgatgctttaaaaatggcaaat

SEQ ID NO: 26933 - DNA, 33 bp, unidentified
  source 1..33: mol_type = unassigned DNA; note = methanogen bacteria
tactctgctgcaggtatttcatcttcagtaagt

SEQ ID NO: 26934 - DNA, 114 bp, unidentified
  source 1..114: mol_type = unassigned DNA; note = methanogen bacteria
accatcggctcctccaacctgtccgccatcgacgtgtacaggaacatctactaccacttcttcgacaccggcaaggtgaacgacgacatcgactgggtgatcttcaccctccgt

SEQ ID NO: 26935 - DNA, 30 bp, unidentified
  source 1..30: mol_type = unassigned DNA; note = methanogen bacteria
ggattcatgctgccgggactgggaggatcg

SEQ ID NO: 26936 - DNA, 78 bp, unidentified
  source 1..78: mol_type = unassigned DNA; note = methanogen bacteria
aagctgaggctctccgacgcgagtctgtcggcggtgttccagtggtccgtaggagatctgtcgacgtccacatgggaa

SEQ ID NO: 26937 - DNA, 69 bp, unidentified
  source 1..69: mol_type = unassigned DNA; note = methanogen bacteria
attaacaattatgcattagataatctgttgccagttgtgtatagttcattttttaattttggcatatta

SEQ ID NO: 26938 - DNA, 90 bp, unidentified
  source 1..90: mol_type = unassigned DNA; note = methanogen bacteria
ttatctgcagattatacaatattctatgcacttaataaccatacttttgtcgaaggaggaaatatattctttgaaacgtatcttgatttg

SEQ ID NO: 26939 - DNA, 30 bp, unidentified
  source 1..30: mol_type = unassigned DNA; note = methanogen bacteria
cttggcaatattcatttaactggaactaaa

SEQ ID NO: 26940 - DNA, 48 bp, unidentified
  source 1..48: mol_type = unassigned DNA; note = methanogen bacteria
gttaatttattgagttccaatatgaattcattcaacgatgctggcgtc

SEQ ID NO: 26941 - DNA, 30 bp, unidentified
  source 1..30: mol_type = unassigned DNA; note = methanogen bacteria
tatactgctgatgtttccttgcttccaagg

SEQ ID NO: 26942 - DNA, 57 bp, unidentified
  source 1..57: mol_type = unassigned DNA; note = methanogen bacteria
cttaatattactggatttgaacatacaattggacttattgaagcggccatgtcctct

SEQ ID NO: 26943 - DNA, 42 bp, unidentified
  source 1..42: mol_type = unassigned DNA; note = methanogen bacteria
ataggtattgatgaggttgtagaggctttaaagttggccaac

SEQ ID NO: 26944 - DNA, 30 bp, unidentified
  source 1..30: mol_type = unassigned DNA; note = methanogen bacteria
tattcagcagcaggaatatccacatccgtc

SEQ ID NO: 26945 - DNA, 30 bp, unidentified
  source 1..30: mol_type = unassigned DNA; note = methanogen bacteria
atgattattgttgagcatgtgaaggtagaa

SEQ ID NO: 26946 - DNA, 33 bp, unidentified
  source 1..33: mol_type = unassigned DNA; note = methanogen bacteria
aataaatcagctaatggggaatcattatgggct

SEQ ID NO: 26947 - DNA, 69 bp, unidentified
  source 1..69: mol_type = unassigned DNA; note = methanogen bacteria
actatggatattaatggaattccagccaattcaagaggattgattgtaatgatatcttcaatgcttgga

SEQ ID NO: 26948 - DNA, 36 bp, unidentified
  source 1..36: mol_type = unassigned DNA; note = methanogen bacteria
actccccgacctgatggagtcatcattgccaactcc

SEQ ID NO: 26949 - DNA, 33 bp, unidentified
  source 1..33: mol_type = unassigned DNA; note = methanogen bacteria
gctatcactactttgggtggttttaatttaggt

SEQ ID NO: 26950 - DNA, 45 bp, unidentified
  source 1..45: mol_type = unassigned DNA; note = methanogen bacteria
gtgggcatagacaaagttattgaagctttaaagatcgccaaatgg

SEQ ID NO: 26951 - DNA, 30 bp, unidentified
  source 1..30: mol_type = unassigned DNA; note = methanogen bacteria
tattcagctgcaggagtaacagcatcaatt

SEQ ID NO: 26952 - DNA, 42 bp, unidentified
  source 1..42: mol_type = unassigned DNA; note = methanogen bacteria
atcggtattgaccaggtaatcgatgcattgaaaattgctaaa

SEQ ID NO: 26953 - DNA, 30 bp, unidentified
  source 1..30: mol_type = unassigned DNA; note = methanogen bacteria
tattcagcagcgggaataactgcttccata

SEQ ID NO: 26954 - DNA, 42 bp, unidentified
  source 1..42: mol_type = unassigned DNA; note = methanogen bacteria
gttggcattgaccaggttattgatgctttaaagatggcaaat

SEQ ID NO: 26955 - DNA, 33 bp, unidentified; identical to SEQ ID NO: 26933
  source 1..33: mol_type = unassigned DNA; note = methanogen bacteria

SEQ ID NO: 26956 - DNA, 36 bp, unidentified
  source 1..36: mol_type = unassigned DNA; note = methanogen bacteria
cagagattttatgactgctatccttcactagaatgg

SEQ ID NO: 26957 - DNA, 69 bp, unidentified
  source 1..69: mol_type = unassigned DNA; note = methanogen bacteria
actggtcttggggagaagggcattattggtttgttcgaaaggatgattcaaggcccatttcatttttgg

SEQ ID NO: 26958 - DNA, 36 bp, unidentified
  source 1..36: mol_type = unassigned DNA; note = methanogen bacteria
tacattagtgatgtcgccagagacttttcagaaaaa

SEQ ID NO: 26959 - DNA, 48 bp, unidentified
  source 1..48: mol_type = unassigned DNA; note = methanogen bacteria
gcttcaaatcgtgctggtgcgccccatttgcttttatatgggaatatt

SEQ ID NO: 26960 - DNA, 33 bp, unidentified
  source 1..33: mol_type = unassigned DNA; note = methanogen bacteria
tgtaatattgattcagcttacctaaatccaatt

SEQ ID NO: 26961 - DNA, 45 bp, unidentified
  source 1..45: mol_type = unassigned DNA; note = methanogen bacteria
gttggaatagacaaggtaatcgatgctttaaaggttgccaaaaca

SEQ ID NO: 26962 - DNA, 30 bp, unidentified
  source 1..30: mol_type = unassigned DNA; note = methanogen bacteria
tactcagctgccggaattaccgcatcaatc

SEQ ID NO: 26963 - DNA, 72 bp, unidentified
  source 1..72: mol_type = unassigned DNA; note = methanogen bacteria
tggcaatatcagcctacaataacttattttattgatactgcatttggtgtacaggactattcaagaccattc

SEQ ID NO: 26964 - DNA, 48 bp, unidentified
  source 1..48: mol_type = unassigned DNA; note = methanogen bacteria
tatctaaagggacttggaagtattgcacttgctcctatcgacttcttt

SEQ ID NO: 26965 - DNA, 42 bp, unidentified
  source 1..42: mol_type = unassigned DNA; note = methanogen bacteria
acaaccagaagctttttagctccaataataaaaaccaacgct

SEQ ID NO: 26966 - DNA, 48 bp, unidentified
  source 1..48: mol_type = unassigned DNA; note = methanogen bacteria
accgtgtatgttggaggtaagaaattcgctcttaagaccagttcagag

SEQ ID NO: 26967 - DNA, 57 bp, unidentified
  source 1..57: mol_type = unassigned DNA; note = methanogen bacteria
gaaagataccttgcaaaactatccaaaactgaccgttacggaaccagctgtgacgcc

SEQ ID NO: 26968 - DNA, 30 bp, unidentified
  source 1..30: mol_type = unassigned DNA; note = methanogen bacteria
aaggcattgaatgaagtcaaaaagggcggt

SEQ ID NO: 26969 - DNA, 72 bp, unidentified
  source 1..72: mol_type = unassigned DNA; note = methanogen bacteria
tggcattatcagcctacaataacttattttatagacactgcatttggtgtacaggattattcaagaccattc

SEQ ID NO: 26970 - DNA, 48 bp, unidentified
  source 1..48: mol_type = unassigned DNA; note = methanogen bacteria
tacctaaagggacttggaggaactgcccttatgccaatagacttcttt

SEQ ID NO: 26971 - DNA, 42 bp, unidentified
  source 1..42: mol_type = unassigned DNA; note = methanogen bacteria
acaaccagaggattcctggctccaaaagtaaagacaaatgct

SEQ ID NO: 26972 - DNA, 42 bp, unidentified
  source 1..42: mol_type = unassigned DNA; note = methanogen bacteria
gttggaattgagcaagttattgcagctttaaagatagcgaat

SEQ ID NO: 26973 - DNA, 72 bp, unidentified
  source 1..72: mol_type = unassigned DNA; note = methanogen bacteria
tggcattgcaaacccactctggaatatttctttgcgataatattcggagctcatgacttatcatcattattc

SEQ ID NO: 26974 - DNA, 48 bp, unidentified
  source 1..48: mol_type = unassigned DNA; note = methanogen bacteria
tattataaaggtcttggaggttgggggcttgttccggttgactttttt

SEQ ID NO: 26975 - DNA, 42 bp, unidentified
  source 1..42: mol_type = unassigned DNA; note = methanogen bacteria
attgattgcggattcatgcatgaatgggttaatgaaaacttg

SEQ ID NO: 26976 - DNA, 69 bp, unidentified
  source 1..69: mol_type = unassigned DNA; note = methanogen bacteria
tggcattgcaaacctacttcggaatatttctttgcagtaatatttggatctcatgacctgtcatcatta

SEQ ID NO: 26977 - DNA, 48 bp, unidentified
  source 1..48: mol_type = unassigned DNA; note = methanogen bacteria
tattataatggtcttggaggattgggtcttgttccggttgactttttt

SEQ ID NO: 26978 - DNA, 42 bp, unidentified
  source 1..42: mol_type = unassigned DNA; note = methanogen bacteria
tttgatttcggatttatgcatgaatgggcttatgaaaacctg

SEQ ID NO: 26979 - DNA, 42 bp, unidentified
  source 1..42: mol_type = unassigned DNA; note = methanogen bacteria
ataggaatagattctgtaattgatgcattacaaatggctaat

SEQ ID NO: 26980 - DNA, 30 bp, unidentified
  source 1..30: mol_type = unassigned DNA; note = methanogen bacteria
tatgcagtagctggtatatcaacatctatt

SEQ ID NO: 26981 - DNA, 51 bp, unidentified
  source 1..51: mol_type = unassigned DNA; note = methanogen bacteria
atactttcaagaaaagaggaagaaaaagcagcagaaagtgatacaacagat

SEQ ID NO: 26982 - DNA, 42 bp, unidentified
  source 1..42: mol_type = unassigned DNA; note = methanogen bacteria
gtgggcattgatcaggttattggtgctttaaaaatggctaat

SEQ ID NO: 26983 - DNA, 30 bp, unidentified
  source 1..30: mol_type = unassigned DNA; note = methanogen bacteria
tactctgcagcgggtatttcctcatcaatc

SEQ ID NO: 26984 - DNA, 39 bp, unidentified
  source 1..39: mol_type = unassigned DNA; note = methanogen bacteria
attaaagcagtctgcagtggatgcatgtacagcgacacc

SEQ ID NO: 26985 - DNA, 36 bp, unidentified
  source 1..36: mol_type = unassigned DNA; note = methanogen bacteria
gcaaaagtcactaaaccgtttgaaggtagtttgact

SEQ ID NO: 26986 - DNA, 72 bp, unidentified
  source 1..72: mol_type = unassigned DNA; note = methanogen bacteria
tggcaatatcatcctacaataacttattttattgatactgcatttggtgtacaggactattcaagaccattc

SEQ ID NO: 26987 - DNA, 48 bp, unidentified
  source 1..48: mol_type = unassigned DNA; note = methanogen bacteria
tacctaaaaggacttggaggaattgcacttgctccaatagacttcttt

SEQ ID NO: 26988 - DNA, 42 bp, unidentified
  source 1..42: mol_type = unassigned DNA; note = methanogen bacteria
atgtttgatggattcctatccccaataattaaaaccaatgct

SEQ ID NO: 26989 - DNA, 42 bp, unidentified
  source 1..42: mol_type = unassigned DNA; note = methanogen bacteria
gtaggtattgatcaggttatcagtgctttaaaaatggctaat

SEQ ID NO: 26990 - DNA, 30 bp, unidentified
  source 1..30: mol_type = unassigned DNA; note = methanogen bacteria
tactcagcagcaggtatttcagcttctgta

SEQ ID NO: 26991 - DNA, 36 bp, unidentified
  source 1..36: mol_type = unassigned DNA; note = methanogen bacteria
tcattcaattacagatttgaagacccgttgaaaccg

SEQ ID NO: 26992 - DNA, 54 bp, unidentified
  source 1..54: mol_type = unassigned DNA; note = methanogen bacteria
cttggaggaattcccctattcaatagcgtattgaaatcaaatgccacaaccaat

SEQ ID NO: 26993 - DNA, 240 bp, unidentified
  source 1..240: mol_type = unassigned DNA; note = methanogen bacteria
tcacaatcaattgcgaaccaacattggacattaaacccattagaacttgttttttacagagctgcattcactttagaagtatttgaaaaaataatacctttaggcggaagcacacacggacatatattaagcatgattttttcatcaggaagtccaagaacatttatcggccaatatgtacttcattatgacgtatgcttaacatccacattgtttggtcccgtatatcttgatttcgga

SEQ ID NO: 26994 - DNA, 33 bp, unidentified
  source 1..33: mol_type = unassigned DNA; note = methanogen bacteria
tcattcaattacagatttgaagatcctctaaaa

SEQ ID NO: 26995 - DNA, 54 bp, unidentified
  source 1..54: mol_type = unassigned DNA; note = methanogen bacteria
ctcggaggaattcccctattcaatagcgtattgaaatccaatgcaacaacaaac

SEQ ID NO: 26996 - DNA, 240 bp, unidentified
  source 1..240: mol_type = unassigned DNA; note = methanogen bacteria
tcacaatcaattgcaaatcaacattggacattgaatccattggaacttcttttctatagggcagcattcacactggaagtatttgaaaaaataatcccattgggcggaaccacacacggacatattctaagcatgattttttcatcagggagccctagaacatttattggacagtatgtactgcattacgatgtttgcttaacttccacaatgtttggacccgtttaccttgattttgga

SEQ ID NO: 26997 - DNA, 45 bp, unidentified
  source 1..45: mol_type = unassigned DNA; note = methanogen bacteria
atcggggtcgacaagataattgaagccttaaaaacagctgatatg

SEQ ID NO: 26998 - DNA, 36 bp, unidentified
  source 1..36: mol_type = unassigned DNA; note = methanogen bacteria
ttaggatttggagctgaagccagctacggccttatc

SEQ ID NO: 26999 - DNA, 36 bp, unidentified
  source 1..36: mol_type = unassigned DNA; note = methanogen bacteria
ctatactcaacttcaggaattacaactgcaataaca

SEQ ID NO: 27000 - DNA, 33 bp, unidentified
  source 1..33: mol_type = unassigned DNA; note = methanogen bacteria
tcatttaactaccggtttgaagacccgctggat

SEQ ID NO: 27001 - DNA, 54 bp, unidentified
  source 1..54: mol_type = unassigned DNA; note = methanogen bacteria
atgggaggaatacctctttttaacagtgttctaaaatcaaatgcaactacaaac

SEQ ID NO: 27002 - DNA, 240 bp, unidentified
  source 1..240: mol_type = unassigned DNA; note = methanogen bacteria
tcccagtcaatagccaatcagcactggacacttaatcctttagagctgatcttttacagagcaggatttactctagaagtctttgaaagaattttaagactgggcggaactacacacggacacatattaagcatgatattttcatcaggaagtccaagaacattcgttggccaatatgtactcacagacaatgtatgtcttacatcaacattattcgggccggtctatcttgatttcgga

SEQ ID NO: 27003 - DNA, 42 bp, unidentified
  source 1..42: mol_type = unassigned DNA; note = methanogen bacteria
gtagggattgataatgttatcaatgctttaaagattgcaaac

SEQ ID NO: 27004 - DNA, 30 bp, unidentified
  source 1..30: mol_type = unassigned DNA; note = methanogen bacteria
tactctgctgcaggaataactgcttcaatc

SEQ ID NO: 27005 - DNA, 75 bp, unidentified; identical to SEQ ID NO: 26092
  source 1..75: mol_type = unassigned DNA; note = methanogen bacteria

SEQ ID NO: 27006 - DNA, 66 bp, unidentified; identical to SEQ ID NO: 26093
  source 1..66: mol_type = unassigned DNA; note = methanogen bacteria

SEQ ID NO: 27007 - DNA, 48 bp, unidentified
  source 1..48: mol_type = unassigned DNA; note = methanogen bacteria
gtggaaattgtatttaaagatattgaagtacctgaatattcttttaac

SEQ ID NO: 27008 - DNA, 69 bp, unidentified
  source 1..69: mol_type = unassigned DNA; note = methanogen bacteria
agaataagatatgccagaaagagaaaacgacaatcccacagcctgtatcctgaaaatagaagatataga

SEQ ID NO: 27009 - DNA, 33 bp, unidentified
  source 1..33: mol_type = unassigned DNA; note = methanogen bacteria
tcattcaactaccggttcgaagacccgattaac

SEQ ID NO: 27010 - DNA, 54 bp, unidentified
  source 1..54: mol_type = unassigned DNA; note = methanogen bacteria
attggaggaattccacttttaagcagtaccctgaaagcaaacgcaacaacaaac

SEQ ID NO: 27011 - DNA, 240 bp, unidentified
  source 1..240: mol_type = unassigned DNA; note = methanogen bacteria
tccaaatctattgcaacccaaagctggacattaaatccattggaacttattttctacagggcagcatttaccttggaactgtttgaaaaaatcattcctcttgccggaactacacacggccatatcttaagcatgatattctcatccggaagtcctagaacctttgtcggagaatatgtgatgaaatataccttctgtgcaacttcaacaatgtttggacccgttatgctagactttggt

SEQ ID NO: 27012 - DNA, 42 bp, unidentified
  source 1..42: mol_type = unassigned DNA; note = methanogen bacteria
gtaggaatcgaccaggtaattgatgctttaaaaatggctaat

SEQ ID NO: 27013 - DNA, 30 bp, unidentified
  source 1..30: mol_type = unassigned DNA; note = methanogen bacteria
tattcagctgcagggattcctgcttcagta

SEQ ID NO: 27014 - DNA, 30 bp, unidentified
  source 1..30: mol_type = unassigned DNA; note = methanogen bacteria
tttaactacagatttgatgatccgcttgat

SEQ ID NO: 27015 - DNA, 54 bp, unidentified
  source 1..54: mol_type = unassigned DNA; note = methanogen bacteria
atgggcggaattcctcttttcaatagcgtattgaaatcgaatgccactacaaat

SEQ ID NO: 27016 - DNA, 240 bp, unidentified
  source 1..240: mol_type = unassigned DNA; note = methanogen bacteria
tcacaatcaatagcaaaccagcactggacactgaatccattggaactgatattctatagagcggcatttactttagaagtctttgaaaaaatactgccgttaggcggaacaacacatggccatatattaagcatgattttttcatcaggaagtccgagaacatttattggccagtatgtactttcatacgatgtttgtttaacatcaacattgttcggacctgtttatcttgatttcggc

SEQ ID NO: 27017 - DNA, 54 bp, unidentified
  source 1..54: mol_type = unassigned DNA; note = methanogen bacteria
ttaaatccgattataagacctataacctatttatttttaatgggatcctcaaaa

SEQ ID NO: 27018 - DNA, 189 bp, unidentified
  source 1..189: mol_type = unassigned DNA; note = methanogen bacteria
agactgcagatgggcattaaactcaacaccgtattctgcgccatgtctaacacaatgagctctacaagcattttgcatacccatttgttaaagtccattttgggagcacttctaagtcaaataattggaccgttcattcaaagcgacatcaacacaggcgttggactatattcatacattccaagtgcc

SEQ ID NO: 27019 - DNA, 219 bp, unidentified
  source 1..219: mol_type = unassigned DNA; note = methanogen bacteria
gctcttgcaggtgcagagcctgactactatactgttgaaatcgcaaatatcacagatgacgtcgatttcgcagacatcccaattgaaaaaataagcaacggcacatatcacgtagattcatcatacaacgaaatggaactgctcaacgatttaagagtgccattgaataattcctgtgactactacacggtttcatggaatgcatattcctatttaaag

SEQ ID NO: 27020 - DNA, 81 bp, unidentified
  source 1..81: mol_type = unassigned DNA; note = methanogen bacteria
aaaataagatttaaccgaaagcaaagaaaaagaaagaatcaatatagaagcttatatagtgatgacagatacaggtacaga

SEQ ID NO: 27021 - DNA, 33 bp, unidentified
  source 1..33: mol_type = unassigned DNA; note = methanogen bacteria
tcatttaactaccggttcgaagacccccttaac

SEQ ID NO: 27022 - DNA, 54 bp, unidentified
  source 1..54: mol_type = unassigned DNA; note = methanogen bacteria
attggaggaattccacttttcaacagtaccctgaaagcaaatgcaacaacaaac

SEQ ID NO: 27023 - DNA, 240 bp, unidentified
  source 1..240: mol_type = unassigned DNA; note = methanogen bacteria
tccaaatcaattgcaacccaaacctggacattgaatcccctggaacttattttctacagagcggcatttacattggaactgtttgaaaaaatcattccgttggccggaactacacatggccacatcctaagcatgatattctcatccggaagtccgagaacatttgtcggagaatatgtgatgaaatatacgttctgtgcaacatccacactgttcggacctgtaatgcttgactttggc

SEQ ID NO: 27024 - DNA, 42 bp, unidentified
  source 1..42: mol_type = unassigned DNA; note = methanogen bacteria
gtcggcatagaacaggtgttggaggctcttagaatagccaat

SEQ ID NO: 27025 - DNA, 30 bp, unidentified
  source 1..30: mol_type = unassigned DNA; note = methanogen bacteria
tactcctcagccggaatatcctcatctgtc

SEQ ID NO: 27026 - DNA, 42 bp, unidentified
  source 1..42: mol_type = unassigned DNA; note = methanogen bacteria
gtaggtattgacaatgttattgatgctttaaagatagctaaa

SEQ ID NO: 27027 - DNA, 30 bp, unidentified
  source 1..30: mol_type = unassigned DNA; note = methanogen bacteria
tattcagcagcgggtgtaacagcttctatt

SEQ ID NO: 27028 - DNA, 54 bp, unidentified
  source 1..54: mol_type = unassigned DNA; note = methanogen bacteria
gtgtataccaaaaggacaaattcagagggaattatagtctttaaaccgaaactg

SEQ ID NO: 27029 - DNA, 90 bp, unidentified
  source 1..90: mol_type = unassigned DNA; note = methanogen bacteria
gaaccgaaacttagccatatcatcaaaagggaaaagtggaatgtgattgaaagggccatcaacaccaagattgttaagaaaaacaagaat

SEQ ID NO: 27030 - DNA, 33 bp, unidentified
  source 1..33: mol_type = unassigned DNA; note = methanogen bacteria
gaggtgagggatgtgcagaataccggttacacc

SEQ ID NO: 27031 - DNA, 54 bp, unidentified
  source 1..54: mol_type = unassigned DNA; note = methanogen bacteria
gaaaagtatcttgcccagaatggggatgcaactccttccgaaggatccagtacc

SEQ ID NO: 27032 - DNA, 45 bp, unidentified
  source 1..45: mol_type = unassigned DNA; note = methanogen bacteria
tcattcaataaagccttaaaacagcttaagaaaggtggcagcgct

SEQ ID NO: 27033 - DNA, 30 bp, unidentified
  source 1..30: mol_type = unassigned DNA; note = methanogen bacteria
aaaaagaatgtcaataatttctattacagt

SEQ ID NO: 27034 - DNA, 36 bp, unidentified
  source 1..36: mol_type = unassigned DNA; note = methanogen bacteria
tcatttaactacagatttgaggatccgctaaaaccc

SEQ ID NO: 27035 - DNA, 54 bp, unidentified
  source 1..54: mol_type = unassigned DNA; note = methanogen bacteria
cttggaggaattcctcttttcaacagtgttttaaaatcaaatgcaacaacaaat

SEQ ID NO: 27036 - DNA, 243 bp, unidentified
  source 1..243: mol_type = unassigned DNA; note = methanogen bacteria
gcatcccaatcaatagccaatcagcactggactttaaatcccgtcgaacttgttttctacagggcggcattcacattggaagtatttgaaaaaattattccattaggcggaaccacacacgggcatatattaagtatgattttttcatcaggaagcccaagaacatttattggaaactacgtccttcattatgatgtgtgtttgacatcaactctatttgggcctgtttatcttgatttcgga

SEQ ID NO: 27037 - DNA, 171 bp, unidentified
  source 1..171: mol_type = unassigned DNA; note = methanogen bacteria
accatgtcaggttgtattcttgacccggacattgccatttatttgcttagcgctcttaaatatgctggtctggatttttatggtgttgcttatcctcaggacctgttttatactccaaccatatcctttttaacttcattaatttttagaatgggatatgtggataaaaat

SEQ ID NO: 27038 - DNA, 150 bp, unidentified
  source 1..150: mol_type = unassigned DNA; note = methanogen bacteria
atcttggattttggaggttccctatccttttttgatcagtcagtaaacactttcaacggccatggcatttcaaaaacaagcattgattatgtaagcgacaaatcctattatctggacaggcttactgatatgcttttcggatcccgggac

SEQ ID NO: 27039 - DNA, 42 bp, unidentified
  source 1..42: mol_type = unassigned DNA; note = methanogen bacteria
gtaggaatcgatcaggttatagatgctttaaaaattgctaat

SEQ ID NO: 27040 - DNA, 30 bp, unidentified
  source 1..30: mol_type = unassigned DNA; note = methanogen bacteria
tattctgctgctggtgttcctgcatcaatc

SEQ ID NO: 27041 - DNA, 51 bp, unidentified
  source 1..51: mol_type = unassigned DNA; note = methanogen bacteria
caatatatacggccaataacatctatttttttaatgggatcatccaaaggc

SEQ ID NO: 27042 - DNA, 183 bp, unidentified
  source 1..183: mol_type = unassigned DNA; note = methanogen bacteria
ctaagactcaaatataatgttccaataaatacaacatttataagtatggatggaacaaacattaatacaagcagtataatacattcacatctttttaaatcagttataggagaattaataactaaaataattgatattccaagtggaatacatattggtacaagtttactaacttacacacca

SEQ ID NO: 27043 - DNA, 270 bp, unidentified
  source 1..270: mol_type = unassigned DNA; note = methanogen bacteria
ttaagctttggaactaatacatattatgatatttacttgttaaatccagattcaaatataaatataaccgattcaattgataacctggaagaaatatcaaatgaaagtgattatttagttttaagaattaattctagtttagattataatgaaatggatcttacagattctttgactaaaaaattaaatggtaaatgtgatggtttttttatcacagtaaatacaatatcataccttaaaaaagaacgtattctagataaaatatttaat

SEQ ID NO: 27044 - DNA, 48 bp, unidentified
  source 1..48: mol_type = unassigned DNA; note = methanogen bacteria
attgggcaaaaaggaagtattttatttattaatccgggttactcatta

SEQ ID NO: 27045 - DNA, 45 bp, unidentified
  source 1..45: mol_type = unassigned DNA; note = methanogen bacteria
tcaagaaatattatagaatttaaaatattcacaacatttgattca

SEQ ID NO: 27046 - DNA, 33 bp, unidentified
  source 1..33: mol_type = unassigned DNA; note = methanogen bacteria
tcattcaactacaggtttgaagatccgttgaat

SEQ ID NO: 27047 - DNA, 54 bp, unidentified
  source 1..54: mol_type = unassigned DNA; note = methanogen bacteria
attggaggcattcctcttttcaacagcgttttaaagtccaatgcaacaaccaac

SEQ ID NO: 27048 - DNA, 240 bp, unidentified
  source 1..240: mol_type = unassigned DNA; note = methanogen bacteria
tcacagtcaatcgcaaaccagcactggactttaaatcctatagaacttgttttttacagagccgcattcacattggaagtatttgaaaagataataccattgggcggaagtacacatggacacatattaagcatgattttctcatccggaagtcccagaacattcatcggccaatatgtgctgcattatgacgtgtgcttaacatccacattgtttggaccggcatatcttgatttcgga

SEQ ID NO: 27049 - DNA, 123 bp, unidentified
  source 1..123: mol_type = unassigned DNA; note = methanogen bacteria
tgcatctcgcagtacgctgtaagcttcagcgaggccttggacgtcatcgcgaagaatctcagcggcgggacgttcgacacttaccacgacaggctcgtcaaccacatcgtatgggagggatat

SEQ ID NO: 27050 - DNA, 33 bp, unidentified
  source 1..33: mol_type = unassigned DNA; note = methanogen bacteria
ctggacttccagattgctgggccatcaatggac

SEQ ID NO: 27051 - DNA, 78 bp, unidentified
  source 1..78: mol_type = unassigned DNA; note = methanogen bacteria
cgctatactgcgagcgaggaggacatcgcatccatctattcatggactgtcggcacgctcgcagggatcggctggaac

SEQ ID NO: 27052 - DNA, 33 bp, unidentified
  source 1..33: mol_type = unassigned DNA; note = methanogen bacteria
tcattcaactacagatttgaagatcctcttgat

SEQ ID NO: 27053 - DNA, 54 bp, unidentified
  source 1..54: mol_type = unassigned DNA; note = methanogen bacteria
ttaggaggaatcccactattcaattcaactctcaaggcaaatgcaaccacaaac

SEQ ID NO: 27054 - DNA, 240 bp, unidentified
  source 1..240: mol_type = unassigned DNA; note = methanogen bacteria
tcccagtccatttcaaatcagcactggacgctcaacccactggaactcatattttatcgtgcagcattcacactggaagtctttgaaaggattctgccccttgcaggcacaacaggaggaaagatactggcgatgatattctcatccggaagcccgagaactttcatcggagaatatgtccttcactacaatgtctgtctgacatcaaccctcttcggtcctgtgatgcttgatttcgga

SEQ ID NO: 27055 - DNA, 72 bp, unidentified
  source 1..72: mol_type = unassigned DNA; note = methanogen bacteria
atgcctggagtgactcataatcaaacttttgcacagtttatacatttaaaggattatttctattatttgggt

SEQ ID NO: 27056 - DNA, 33 bp, unidentified
  source 1..33: mol_type = unassigned DNA; note = methanogen bacteria
tggcgaaatggtgcgcaggtcttcggtttcgac

SEQ ID NO: 27057 - DNA, 42 bp, unidentified
  source 1..42: mol_type = unassigned DNA; note = methanogen bacteria
gccttgagcaatccggtctcctataacatcttttcccactac

SEQ ID NO: 27058 - DNA, 78 bp, unidentified
  source 1..78: mol_type = unassigned DNA; note = methanogen bacteria
ggcggcgtgattccatatgattttgttttcgatttcaatgcaacccagtctaaaattctaggctcttggctagatgta

SEQ ID NO: 27059 - DNA, 36 bp, unidentified
  source 1..36: mol_type = unassigned DNA; note = methanogen bacteria
ccctttttcgttgggattccacattcaggtacagga

SEQ ID NO: 27060 - DNA, 48 bp, unidentified
  source 1..48: mol_type = unassigned DNA; note = methanogen bacteria
atttatcatattatggacccccataatgtatactccctgtcaattaca

SEQ ID NO: 27061 - DNA, 75 bp, unidentified
  source 1..75: mol_type = unassigned DNA; note = methanogen bacteria
atgaaaaatgattttaatctaatttcagtgatagcagacatattattattaagacctattgaaattagtcacttt

SEQ ID NO: 27062 - DNA, 30 bp, unidentified
  source 1..30: mol_type = unassigned DNA; note = methanogen bacteria
tttggcattaaaggattatctgcacaaatt

SEQ ID NO: 27063 - DNA, 36 bp, unidentified
  source 1..36: mol_type = unassigned DNA; note = methanogen bacteria
tttaaccataaatatacatacattttatggtatgat

SEQ ID NO: 27064 - DNA, 36 bp, unidentified
  source 1..36: mol_type = unassigned DNA; note = methanogen bacteria
tcgttcaactaccgctttgaagatccccttgacgga

SEQ ID NO: 27065 - DNA, 54 bp, unidentified
  source 1..54: mol_type = unassigned DNA; note = methanogen bacteria
ttgggaggcattccactttttaactccacgctaaaggcgaatgcaacgacaaac

SEQ ID NO: 27066 - DNA, 240 bp, unidentified
  source 1..240: mol_type = unassigned DNA; note = methanogen bacteria
tcacaatccattgcaggacagacctggacactgaacccattggagctgatattctaccgtgcagcattcacgctggaggtctttgaaagaatcctgccgcttgcaggaacgacaggcggaaagatactggcgatgatattctcgtctggaagcccaaggacattcatcggtgaatacgtccttcactacaacgtctgcctgacatcaacgcttttcggtccggtgatgcttgatttcgga

SEQ ID NO: 27067 - DNA, 204 bp, unidentified
  source 1..204: mol_type = unassigned DNA; note = methanogen bacteria
caattatctcctatcgatccagttaaagcttatcttggtcaaagaattgttagtcaagaacaattagccattatgggcgaatattggggaacgaatttaactttaggtgagagagtattaggttggcttcaaactttagcatccggaagcatgggtttttcattaatttatcgtgctcccgtaactgaagtaattgcacagaaa

SEQ ID NO: 27068 - DNA, 87 bp, unidentified
  source 1..87: mol_type = unassigned DNA; note = methanogen bacteria
gtatatttaggttggttccctataggactttcagttcctattggacaactatcagacacagtaacattttggcaatggctatataga

SEQ ID NO: 27069 - DNA, 72 bp, unidentified
  source 1..72: mol_type = unassigned DNA; note = methanogen bacteria
gaacaggtattcgcatatcccggaattggtcaagccactgttgctgctggattaaggtctgatgtcccatta

SEQ ID NO: 27070 - DNA, 54 bp, unidentified
  source 1..54: mol_type = unassigned DNA; note = methanogen bacteria
tttaaaaccactttgtttggccctattggtggaactctgccgctatggaattat

SEQ ID NO: 27071 - DNA, 108 bp, unidentified
  source 1..108: mol_type = unassigned DNA; note = methanogen bacteria
ttcgggacctacaatatctcggtgggcgatgcgataggctgtttcatcgaccatctgtccggaaatgtgaaggacccgaccggggaccattatatctgggacgtccgc

SEQ ID NO: 27072 - DNA, 33 bp, unidentified
  source 1..33: mol_type = unassigned DNA; note = methanogen bacteria
ggaatctccatagtgccgttcctcacgaaccaa

SEQ ID NO: 27073 - DNA, 78 bp, unidentified
  source 1..78: mol_type = unassigned DNA; note = methanogen bacteria
atggtcacttctccctcggaatccatggcggaagcatatgcctggagggtcggggacctcgggaccgtggggtgggcg

SEQ ID NO: 27074 - DNA, 66 bp, unidentified
  source 1..66: mol_type = unassigned DNA; note = methanogen bacteria
ttaggtcatgaaaacttgtccctgtccggattttggtattacttaagtttaggtgtttttgaaggg

SEQ ID NO: 27075 - DNA, 30 bp, unidentified
  source 1..30: mol_type = unassigned DNA; note = methanogen bacteria
ctttttggccgaggatggtgcggctatgcc

SEQ ID NO: 27076 - DNA, 54 bp, unidentified
  source 1..54: mol_type = unassigned DNA; note = methanogen bacteria
ttaatttgaaaaattaagtttttccagtcatcatatgatcttttgaataaaaac

SEQ ID NO: 27077 - DNA, 60 bp, unidentified
  source 1..60: mol_type = unassigned DNA; note = methanogen bacteria
gatacattaaacccaataataaggccaattacctatttattcttaatgggttcttcaaaa

SEQ ID NO: 27078 - DNA, 186 bp, unidentified
  source 1..186: mol_type = unassigned DNA; note = methanogen bacteria
agattgcaaatgggcattaaactcaatacagtattttgttccatgacaaataccatgagttcaacaagtattttacacacccacctcctaaaatcaattttaggacaaattttgtcatttataatgggaccatttattcaaagtgacattaacaccggagttggactatatcaatatttaccccca

SEQ ID NO: 27079 - DNA, 216 bp, unidentified
  source 1..216: mol_type = unassigned DNA; note = methanogen bacteria
gcttttgctggtgcagaaccggattattatacagtgactattgaagacatagatgaacatgttgattttggaaatattcctatagaaaaaatcaataacacaacttaccatgtagattcaaaatataatgaaatgcttttaattaatgatttaaaagttcctttaaacaattcctgcaaatattacacagtaacgtggaacatatattcatatcta

SEQ ID NO: 27080 - DNA, 33 bp, unidentified
  source 1..33: mol_type = unassigned DNA; note = methanogen bacteria
tcattcaattaccgatttgaagatcccctagat

SEQ ID NO: 27081 - DNA, 57 bp, unidentified
  source 1..57: mol_type = unassigned DNA; note = methanogen bacteria
ttacttggaggaattccattatttaatagtgttttaaaatcaaatgctacaacaaat

SEQ ID NO: 27082 - DNA, 240 bp, unidentified
  source 1..240: mol_type = unassigned DNA; note = methanogen bacteria
tcacaatcaattgcaaatcaaacttggacattgaatcctttagaattaatattttacagagcagcatttacattagaagtatttgaaagaatccttccacttgcaggtaccacacacggacatattttaagtatgattttttcatcaggcagtcctagaacatttattggagaatatgtcctgcattataatgtctgtttaacttcaacattatttggaccagtaatgcttgatttcgga

SEQ ID NO: 27083 - DNA, 84 bp, unidentified
  source 1..84: mol_type = unassigned DNA; note = methanogen bacteria
atctacgagggagctcacaggatatatctctggggagctcacaggatatatctctggggaagctatttcataacattggaagct

SEQ ID NO: 27084 - DNA, 57 bp, unidentified
  source 1..57: mol_type = unassigned DNA; note = methanogen bacteria
caaggatatggttatatcaatgtatatccatcccttgacttctcattccatgacctg

SEQ ID NO: 27085 - DNA, 87 bp, unidentified
  source 1..87: mol_type = unassigned DNA; note = methanogen bacteria
gcattcggttcttcgggaggcatcataggcaatctcgacttcgtgttcatgaacggattggacgagggtcagagcgattattcggtc

SEQ ID NO: 27086 - DNA, 42 bp, unidentified
  source 1..42: mol_type = unassigned DNA; note = methanogen bacteria
tggagcgggggcttcgagagcatcggactgaccgtactggat

SEQ ID NO: 27087 - DNA, 54 bp, unidentified
  source 1..54: mol_type = unassigned DNA; note = methanogen bacteria
gccgagagcaagtacaccggagggacggtaggattgctgttcggcagtaccgat

SEQ ID NO: 27088 - DNA, 33 bp, unidentified
  source 1..33: mol_type = unassigned DNA; note = methanogen bacteria
tctttcaattaccgttttgaaaatcccctgaat

SEQ ID NO: 27089 - DNA, 54 bp, unidentified
  source 1..54: mol_type = unassigned DNA; note = methanogen bacteria
cttggagggattcctctttttgacagtgttttaaaatcacaggcaacaacaaat

SEQ ID NO: 27090 - DNA, 246 bp, unidentified
  source 1..246: mol_type = unassigned DNA; note = methanogen bacteria
gcatcaaaatcaattgcaaatcagaactggactttaaatcccgttgaactgatttttttcagggctgcctttacactggaagttcttgaaaaaatcatacctctgaacagtacaacacagggccatattttatccatgattttctcatcgggaagcccgcggacttttatcggaaattatgttatgcattatgaagtctgtctgacttcaactattttcggtccggtactgcttgatttcggatat

SEQ ID NO: 27091 - DNA, 33 bp, unidentified
  source 1..33: mol_type = unassigned DNA; note = methanogen bacteria
tcattcaactacagatttgaagaccctcttgat

SEQ ID NO: 27092 - DNA, 54 bp, unidentified
  source 1..54: mol_type = unassigned DNA; note = methanogen bacteria
ttaggcggaattccgctttttaactcaactctaaaagcaaatgcaactacaaac

SEQ ID NO: 27093 - DNA, 240 bp, unidentified
  source 1..240: mol_type = unassigned DNA; note = methanogen bacteria
tcccagtcaattgcaggccagcactggacattgaacccgatggaactcatattttatcgtgcggcctttacattagaagtctttgaaagaatcatccctcttgcaggcacaacacacggcaagatattggcgatgatattctcatcaggaagccctagaacatttatcggcgaatatgtcctgcactacaacgtgtgcctgacatcaacacttttcggtccggtaatgcttgatttcgga

SEQ ID NO: 27094 - DNA, 204 bp, unidentified
  source 1..204: mol_type = unassigned DNA; note = methanogen bacteria
caattatctccaattgatcctgttaaagcttatcttggtcaaagaatagtaagtcaagaacaattagctattataggaaactattggggtacgaatttgtctttaggcgaaagagttttaggttggcttcaaactttagcatccggaagtatgggtttttcattgatatatagagtgcctgtaaccgaagtaatcattcaaaaa

SEQ ID NO: 27095 - DNA, 87 bp, unidentified
  source 1..87: mol_type = unassigned DNA; note = methanogen bacteria
gtatatttaggctggttccctataggactttcagttcctattggacaattatcagacacagttaccttttggcaatggttatataga

SEQ ID NO: 27096 - DNA, 72 bp, unidentified
  source 1..72: mol_type = unassigned DNA; note = methanogen bacteria
gaacaggtatttgcatacccaggaattggtcaggcaactgttgctgcaggattaagatcagatgttccatta

SEQ ID NO: 27097 - DNA, 42 bp, unidentified
  source 1..42: mol_type = unassigned DNA; note = methanogen bacteria
attggaatagaaaatattatagatgctttaaaaaccgctaac

SEQ ID NO: 27098 - DNA, 33 bp, unidentified
  source 1..33: mol_type = unassigned DNA; note = methanogen bacteria
gcattcggagcttccctgaacgtgattgtcata

SEQ ID NO: 27099 - DNA, 33 bp, unidentified
  source 1..33: mol_type = unassigned DNA; note = methanogen bacteria
tactcaaaagcaggtatttcactttcacttgca

SEQ ID NO: 27100 - DNA, 30 bp, unidentified
  source 1..30: mol_type = unassigned DNA; note = methanogen bacteria
ttcaactatagatttgaagacccacttaac

SEQ ID NO: 27101 - DNA, 54 bp, unidentified
  source 1..54: mol_type = unassigned DNA; note = methanogen bacteria
cttggcggcattccattattcaatagtgttttaaaatcaaatgcaacaactaac

SEQ ID NO: 27102 - DNA, 240 bp, unidentified
  source 1..240: mol_type = unassigned DNA; note = methanogen bacteria
tcacagtctattgcaacgcaacactggacactgaatcctatcgagctaatattttatagagcagcatttacccaggaagtattcgaaaaaatcattccactggcaggaactacacacggtcacatattatcaatgattttttcatcaggaagtccaagatcatttataggaaattatgtccttcactatgatgtctgtctgacttcaacaatgtttggtcctgtaatgcttgattttggc

SEQ ID NO: 27103 - DNA, 30 bp, unidentified
  source 1..30: mol_type = unassigned DNA; note = methanogen bacteria
tttaactataggtttgaaaacccgcttaat

SEQ ID NO: 27104 - DNA, 54 bp, unidentified
  source 1..54: mol_type = unassigned DNA; note = methanogen bacteria
cttggaggaataccattattcaatagtgttttaaaagcaaatgcaaccaccaat

SEQ ID NO: 27105 - DNA, 243 bp, unidentified
  source 1..243: mol_type = unassigned DNA; note = methanogen bacteria
gcatcacaatctattgcaacacaaacctggacactcaacccagtggaattggtattttacagagcggcatttacacaggaagtatttgaaaaaatcattccattagccggaacaacccacggacatatattatctatgattttttcatccggaagtccaagatcatttataggaaattatgttcttcactatgatgtctgtttaacctccacactattcggaccggtgatgcttgatttcgga

SEQ ID NO: 27106 - DNA, 96 bp, unidentified
  source 1..96: mol_type = unassigned DNA; note = methanogen bacteria
ggtgcaatatatgcaacatacaattccactgtcaatgcagccaacaccaaattttatcacaacaatgccgattgcggaggagcaatctttgctttt

SEQ ID NO: 27107 - DNA, 171 bp, unidentified
  source 1..171: mol_type = unassigned DNA; note = methanogen bacteria
acagatttaaatataaatcattgtgatttctttgaaaacattgcaaactattacggcggatccatatactctgattcagtgataaacattagttattcaaatttttacagcaataaagcaaaattaaaaggcggagcaattcattcatccaacagcccttatttctgtaat

SEQ ID NO: 27108 - DNA, 42 bp, unidentified
  source 1..42: mol_type = unassigned DNA; note = methanogen bacteria
attggaattgaaaatattatagatgctttaaaaaccgctaac

SEQ ID NO: 27109 - DNA, 30 bp, unidentified
  source 1..30: mol_type = unassigned DNA; note = methanogen bacteria
gcattcggagcttctttgaatgttattgtc

SEQ ID NO: 27110 - DNA, 36 bp, unidentified
  source 1..36: mol_type = unassigned DNA; note = methanogen bacteria
ctttattcaaaggcaggagcttcaacatcactggta

SEQ ID NO: 27111 - DNA, 204 bp, unidentified
  source 1..204: mol_type = unassigned DNA; note = methanogen bacteria
caattatctcctattgatcctgttagggcttatttaggtcagcgaattgttagtgaggagcaattggctatcatgggacaatactggggaactaatttatcattaggcgaacgagtaatgggatggcttcaaacattggcaagtggaagcatgggattctcattgatttttagggttcctgtaactgaagtgattgtacagaaa

SEQ ID NO: 27112 - DNA, 90 bp, unidentified
  source 1..90: mol_type = unassigned DNA; note = methanogen bacteria
tcagtatacttaggctggttcccaatcggactttcagttcctattggccaattatccgacactgtaaccttctggcaatggttatataga

SEQ ID NO: 27113 - DNA, 72 bp, unidentified
  source 1..72: mol_type = unassigned DNA; note = methanogen bacteria
gaacaggtatttgcatatcctggtataggacaggctactgtagctgctggtttaaggtcagacgttccatta

SEQ ID NO: 27114 - DNA, 42 bp, unidentified; identical to SEQ ID NO: 25424
  source 1..42: mol_type = unassigned DNA; note = methanogen bacteria

SEQ ID NO: 27115 - DNA, 30 bp, unidentified
  source 1..30: mol_type = unassigned DNA; note = methanogen bacteria
tttaactacaggtttcaagaccctctgaat

SEQ ID NO: 27116 - DNA, 54 bp, unidentified
  source 1..54: mol_type = unassigned DNA; note = methanogen bacteria
cttggtggaatacctttatttaatagtgttttaaaatcaaatgcaacaacaaat

SEQ ID NO: 27117 - DNA, 240 bp, unidentified
  source 1..240: mol_type = unassigned DNA; note = methanogen bacteria
tcacaatccatagcaaatcagacatggacacttaacccaatcgaactggtgttttataggttagcatttacccttgaagtatttgaaaaaatcatacccttagccggaacaacacacggacatattttatccatgattttttcatcaggaagtccccgatcatttataggcaattatgtgcttcactatgacgtatgtttaacgtcaacgctatttggtccggtaatgcttgatttcgga

SEQ ID NO: 27118 - DNA, 36 bp, unidentified
  source 1..36: mol_type = unassigned DNA; note = methanogen bacteria
aagctgccgtccgtcaccggatcgagctcccatccg

SEQ ID NO: 27119 - DNA, 39 bp, unidentified
  source 1..39: mol_type = unassigned DNA; note = methanogen bacteria
tgctaccacagcagcggatggggggaggcgttcgccgac

SEQ ID NO: 27120 - DNA, 132 bp, unidentified
  source 1..132: mol_type = unassigned DNA; note = methanogen bacteria
ggagattcccagggcatggacttcggcgggtccgacgatgccggttccggcgatatcgcagacaacaacggcggcagctacgaaccgtggacctccggtatctggggcgattatgagcttcccggcgagacg

SEQ ID NO: 27121 - DNA, 102 bp, unidentified
  source 1..102: mol_type = unassigned DNA; note = methanogen bacteria
ccatcagtattccagcaattagtaatgccagctcttcaaggaatgaatgaaggagtaaacaatggaacagtacaactatcaacagtaccattatttaccaat

SEQ ID NO: 27122 - DNA, 30 bp, unidentified
  source 1..30: mol_type = unassigned DNA; note = methanogen bacteria
acaggatcaacactaccaatagtatactac

SEQ ID NO: 27123 - DNA, 33 bp, unidentified
  source 1..33: mol_type = unassigned DNA; note = methanogen bacteria
atacctcttggaacaacaatattaggacttata

SEQ ID NO: 27124 - DNA, 33 bp, unidentified
  source 1..33: mol_type = unassigned DNA; note = methanogen bacteria
tttaattatcggtttgaaaatcctttaaataca

SEQ ID NO: 27125 - DNA, 54 bp, unidentified
  source 1..54: mol_type = unassigned DNA; note = methanogen bacteria
cttggaggaatacctctttttgatagtgttttaaaagcaaatgctacaacaaat

SEQ ID NO: 27126 - DNA, 243 bp, unidentified
  source 1..243: mol_type = unassigned DNA; note = methanogen bacteria
gcatctcaatcgatttcaaaccaacattggacattaaatcctttagaattaatattttatagagctgcttttacactagaagtctttcaaaaaatcattccgctagcaggtacaacccacggtcatattttaagcatgatattttcatcaggaagtcccagaacatttattggagaatatgtgctgcattataatgtttgtttaacatctaccatttttggaccggtaatgcttgattttgga

SEQ ID NO: 27127 - DNA, 30 bp, unidentified
  source 1..30: mol_type = unassigned DNA; note = methanogen bacteria
tttaattataggtttaaagaccctttgaac

SEQ ID NO: 27128 - DNA, 54 bp, unidentified
  source 1..54: mol_type = unassigned DNA; note = methanogen bacteria
ttaggtggaataccattattcaacagcgtgctaaaagcaaatgcaacaacaaac

SEQ ID NO: 27129 - DNA, 240 bp, unidentified
  source 1..240: mol_type = unassigned DNA; note = methanogen bacteria
tcacagtccattgccacacaaacctggacattgaaccctgttgagttaatattttacagggcggcatttacacaggaagtatttgaaaaaatcattcctcttgcaggcacaacccacggacacatattatcaatgattttttcatcaggaagcccaagatcatttataggaaattatgtccttcactatgacgtatgtctaacctcaacaatgttcggaccagtgatgcttgattttggt

SEQ ID NO: 27130 - DNA, 42 bp, unidentified
  source 1..42: mol_type = unassigned DNA; note = methanogen bacteria
attggaattgaaaatgttttggatgctttaaagacagccaac

SEQ ID NO: 27131 - DNA, 33 bp, unidentified
  source 1..33: mol_type = unassigned DNA; note = methanogen bacteria
gcatttggagcctctttgaatgtgattgtcatc

SEQ ID NO: 27132 - DNA, 33 bp, unidentified
  source 1..33: mol_type = unassigned DNA; note = methanogen bacteria
tattcaaaagcgggcatttcactttcacttgca

SEQ ID NO: 27133 - DNA, 108 bp, unidentified
  source 1..108: mol_type = unassigned DNA; note = methanogen bacteria
tgcattgtgaatttcggagggattgcggacgatatctcgaacctcagaatatccgtctatatcccgtacggaatcgacgatctggtccttacccgcgtcggaggttct

SEQ ID NO: 27134 - DNA, 69 bp, unidentified
  source 1..69: mol_type = unassigned DNA; note = methanogen bacteria
gcaaccaacaacactcctagtacggattggatgtctgacttcacacgcttcgagatggtcttcctgctt

SEQ ID NO: 27135 - DNA, 204 bp, unidentified
  source 1..204: mol_type = unassigned DNA; note = methanogen bacteria
caattgtctccaattgatcctgtaaaagcttatcttgggcaaagaattgtcagtcaagaacagttggcaattatgggcgagtattggggaacaaatttgtcattaggtgaacgagtatttggctggctttcaacattggcctctggaagcatgggcttttcactgatttatagggtgcctgtaactgaagtgattgtacaaaag

SEQ ID NO: 27136 - DNA, 87 bp, unidentified
  source 1..87: mol_type = unassigned DNA; note = methanogen bacteria
gtttatttaggctggttccctattggactttcagttcctattgggcagttgtctgataccgtaacattttggcagtggctatacaga

SEQ ID NO: 27137 - DNA, 72 bp, unidentified
  source 1..72: mol_type = unassigned DNA; note = methanogen bacteria
gaacaggtattcgcatatccaggcataggtcaggcaacagtggctgcaggattgaggtctgatgttccgttg

SEQ ID NO: 27138 - DNA, 42 bp, unidentified
  source 1..42: mol_type = unassigned DNA; note = methanogen bacteria
attggaattgaaaatgttcttgatgctttaaaaacagctaac

SEQ ID NO: 27139 - DNA, 33 bp, unidentified
  source 1..33: mol_type = unassigned DNA; note = methanogen bacteria
gcatttggagcatctttgaatgtgattgtcatc

SEQ ID NO: 27140 - DNA, 33 bp, unidentified
  source 1..33: mol_type = unassigned DNA; note = methanogen bacteria
tattcaaaagcaggcgtttcactttcacttgca

SEQ ID NO: 27141 - DNA, 162 bp, unidentified
  source 1..162: mol_type = unassigned DNA; note = methanogen bacteria
gttatgggaggcattagtactgcagtcgatacctacgcacctaattattccggagatgaacaattccatcaagaggtctatgattacttccaaaaattagataccatagatggacaagatagtattgttgtaaatactgcagatataattattcaaaatgca

SEQ ID NO: 27142 - DNA, 42 bp, unidentified
  source 1..42: mol_type = unassigned DNA; note = methanogen bacteria
attggaattgaaaatattataagcgctttaaaaaccgctaac

SEQ ID NO: 27143 - DNA, 30 bp, unidentified
  source 1..30: mol_type = unassigned DNA; note = methanogen bacteria
gcatttggggcttctttgaacgtgattgtc

SEQ ID NO: 27144 - DNA, 33 bp, unidentified; identical to SEQ ID NO: 27140
  source 1..33: mol_type = unassigned DNA; note = methanogen bacteria

SEQ ID NO: 27145 - DNA, 42 bp, unidentified
  source 1..42: mol_type = unassigned DNA; note = methanogen bacteria
ataggaattgacaagctaattgatgcaattgaagatgccaat

SEQ ID NO: 27146 - DNA, 30 bp, unidentified
  source 1..30: mol_type = unassigned DNA; note = methanogen bacteria
gcattcggtgcaacactcaatgtaatcgtc

SEQ ID NO: 27147 - DNA, 33 bp, unidentified
  source 1..33: mol_type = unassigned DNA; note = methanogen bacteria
tattcaagggcaggctgtcctcagggtcttgca

SEQ ID NO: 27148 - DNA, 42 bp, unidentified
  source 1..42: mol_type = unassigned DNA; note = methanogen bacteria
gttggtattgatgatgttataaatgctttaaaaattgcaaat

SEQ ID NO: 27149 - DNA, 33 bp, unidentified
  source 1..33: mol_type = unassigned DNA; note = methanogen bacteria
tatgctgctgcaggcatcaatgcttctatttca

SEQ ID NO: 27150 - DNA, 42 bp, unidentified
  source 1..42: mol_type = unassigned DNA; note = methanogen bacteria
gtaggtattgatgatgttataaatgctttaaaaattgcaaat

SEQ ID NO: 27151 - DNA, 30 bp, unidentified
  source 1..30: mol_type = unassigned DNA; note = methanogen bacteria
actgctgcaggtattactgcatctatttca

SEQ ID NO: 27152 - DNA, 33 bp, unidentified
  source 1..33: mol_type = unassigned DNA; note = methanogen bacteria
caggtttatttaatatctcaaattaaattacca

SEQ ID NO: 27153 - DNA, 42 bp, unidentified
  source 1..42: mol_type = unassigned DNA; note = methanogen bacteria
gtcggtattgacaaggtgattgccgctttgaagattgcaaaa

SEQ ID NO: 27154 - DNA, 30 bp, unidentified
  source 1..30: mol_type = unassigned DNA; note = methanogen bacteria
gcctttggcgcttcagtcagtcctgtagtc

SEQ ID NO: 27155 - DNA, 30 bp, unidentified
  source 1..30: mol_type = unassigned DNA; note = methanogen bacteria
tactccgcagcaggcataaccgcatcaatc

SEQ ID NO: 27156 - DNA, 42 bp, unidentified
  source 1..42: mol_type = unassigned DNA; note = methanogen bacteria
aaaatgcaagtttatttaatttctcaaatacaattgccactg

SEQ ID NO: 27157 - DNA, 39 bp, unidentified
  source 1..39: mol_type = unassigned DNA; note = methanogen bacteria
tatagaaaaagaagaagaaaaagaaacagaagatataga

SEQ ID NO: 27158 - DNA, 81 bp, unidentified
  source 1..81: mol_type = unassigned DNA; note = methanogen bacteria
gatgattctttttttatcgattcattctcactattgtccggcgaggcagtttatatggatccaaaccgtaaaaactgcagc

SEQ ID NO: 27159 - DNA, 243 bp, unidentified
  source 1..243: mol_type = unassigned DNA; note = methanogen bacteria
actgatgttattgatggccatatgattaattttgatcccgaatatatgtattatagacacttcataaatcttgccgataaaaaaattgacattgttcttttattgtattctgctataatgaatagggttgaaaggaatttatgtaatggtgtggaatattctggtgaatttagaattaatgagtatgttttaactttaagccgatcttttgatgatggagttacttttgaaaaggcatatcat

SEQ ID NO: 27160 - DNA, 45 bp, unidentified
  source 1..45: mol_type = unassigned DNA; note = methanogen bacteria
aatgatattttctataaattaaaaaacaatgattataaatatgat

SEQ ID NO: 27161 - DNA, 39 bp, unidentified
  source 1..39: mol_type = unassigned DNA; note = methanogen bacteria
tatgaattatatcctaccttgaaaaatattaccgatgat

SEQ ID NO: 27162 - DNA, 42 bp, unidentified
  source 1..42: mol_type = unassigned DNA; note = methanogen bacteria
gtaggtatagataaagtaataggggctttgaaattagctaaa

SEQ ID NO: 27163 - DNA, 33 bp, unidentified
  source 1..33: mol_type = unassigned DNA; note = methanogen bacteria
cttgcattcggcgccagtgttaacccggtgata

SEQ ID NO: 27164 - DNA, 33 bp, unidentified
  source 1..33: mol_type = unassigned DNA; note = methanogen bacteria
tactcagcagccggaataactgcttcagtcagt

SEQ ID NO: 27165 - DNA, 33 bp, unidentified
  source 1..33: mol_type = unassigned DNA; note = methanogen bacteria
cagactgctgtgcagtcaagtaagattcttgac

SEQ ID NO: 27166 - DNA, 36 bp, unidentified
  source 1..36: mol_type = unassigned DNA; note = methanogen bacteria
acacctcttacttttagtaatgtgtttcctctgaat

SEQ ID NO: 27167 - DNA, 84 bp, unidentified
  source 1..84: mol_type = unassigned DNA; note = methanogen bacteria
tggtttggaagtaattctgcctatggtttcctctctacgcccaatcgttttgatggcgcaactcataatgtagtacgtggaact

SEQ ID NO: 27168 - DNA, 45 bp, unidentified
  source 1..45: mol_type = unassigned DNA; note = methanogen bacteria
gtgcatacttttattcccaatgtagaagataagtatcataattat

SEQ ID NO: 27169 - DNA, 57 bp, unidentified
  source 1..57: mol_type = unassigned DNA; note = methanogen bacteria
aatgtgtcgcagcctggtaattcagtaaatggtcttgcatttaataagcttggcgca

SEQ ID NO: 27170 - DNA, 42 bp, unidentified
  source 1..42: mol_type = unassigned DNA; note = methanogen bacteria
gttggtattgatgaggttttaaatgctttaaaagatgctaat

SEQ ID NO: 27171 - DNA, 30 bp, unidentified
  source 1..30: mol_type = unassigned DNA; note = methanogen bacteria
gcctttggagcttccgtcagtccggttgtc

SEQ ID NO: 27172 - DNA, 30 bp, unidentified
  source 1..30: mol_type = unassigned DNA; note = methanogen bacteria
tattctgctgcaggtatatctgcctctatt

SEQ ID NO: 27173 - DNA, 42 bp, unidentified
  source 1..42: mol_type = unassigned DNA; note = methanogen bacteria
gtagggattgataagataatcgaaacattgaaaaacgctaat

SEQ ID NO: 27174 - DNA, 30 bp, unidentified
  source 1..30: mol_type = unassigned DNA; note = methanogen bacteria
gccttcggagccactttgaacgtcgtcgta

SEQ ID NO: 27175 - DNA, 36 bp, unidentified
  source 1..36: mol_type = unassigned DNA; note = methanogen bacteria
ttctactcaaaggcaggggtttccatgtcacttgcg

SEQ ID NO: 27176 - DNA, 42 bp, unidentified
  source 1..42: mol_type = unassigned DNA; note = methanogen bacteria
gtaggcatagataaagtaattgaagctttaaaggtagctaaa

SEQ ID NO: 27177 - DNA, 30 bp, unidentified
  source 1..30: mol_type = unassigned DNA; note = methanogen bacteria
gcattcggcgccagtgtcaacccggtggta

SEQ ID NO: 27178 - DNA, 30 bp, unidentified
  source 1..30: mol_type = unassigned DNA; note = methanogen bacteria
tcagtagcaggagtaactgcttcagtaagt

SEQ ID NO: 27179 - DNA, 33 bp, unidentified
  source 1..33: mol_type = unassigned DNA; note = methanogen bacteria
tcattcaactacaggtttgaagatcccctaaag

SEQ ID NO: 27180 - DNA, 54 bp, unidentified
  source 1..54: mol_type = unassigned DNA; note = methanogen bacteria
ttaggaggcatccctctttttgacagcactctaaaggtaaatgcgacaacaaac

SEQ ID NO: 27181 - DNA, 240 bp, unidentified
  source 1..240: mol_type = unassigned DNA; note = methanogen bacteria
tcacagtcaatcgcaacacagcactggacactcaacccattggaactgatattctaccgtgcggcatttactctggaagtccttgaaaagataatcccgttggcaggaacaacaaacggcaagatactgtcgatgattttctcatcaggaagcccaagaacattcataggaaattatgtgcttcactatgacgtctgcctgacatccacactgttcggacccgtcatgctcgatttcggc

SEQ ID NO: 27182 - DNA, 42 bp, unidentified
  source 1..42: mol_type = unassigned DNA; note = methanogen bacteria
gtaggaataaatgatgttataaatgctttgaaagtagcggat

SEQ ID NO: 27183 - DNA, 30 bp, unidentified
  source 1..30: mol_type = unassigned DNA; note = methanogen bacteria
tataccgcagcaggtatcactgcatccatt

SEQ ID NO: 27184 - DNA, 42 bp, unidentified
  source 1..42: mol_type = unassigned DNA; note = methanogen bacteria
gtaggtatagatcaggtaatatccgctttaaaggttgctaaa

SEQ ID NO: 27185 - DNA, 33 bp, unidentified
  source 1..33: mol_type = unassigned DNA; note = methanogen bacteria
ctcgcatttggagcttccgtcaatcctgtagta

SEQ ID NO: 27186 - DNA, 30 bp, unidentified
  source 1..30: mol_type = unassigned DNA; note = methanogen bacteria
tactcagccgcaggaatcactgcttcaatc

SEQ ID NO: 27187 - DNA, 84 bp, unidentified
  source 1..84: mol_type = unassigned DNA; note = methanogen bacteria
ttacattctacatatccaacatttatggatgcactttatggacttaaaaatccacagaatgttattaacagtgctctaagcaaa

SEQ ID NO: 27188 - DNA, 45 bp, unidentified; identical to SEQ ID NO: 24036
  source 1..45: mol_type = unassigned DNA; note = methanogen bacteria

SEQ ID NO: 27189 - DNA, 30 bp, unidentified; identical to SEQ ID NO: 24037
  source 1..30: mol_type = unassigned DNA; note = methanogen bacteria

SEQ ID NO: 27190 - DNA, 120 bp, unidentified
  source 1..120: mol_type = unassigned DNA; note = methanogen bacteria
actgctcttccccttcacccttatgctcttgcaatggcaagcggtatcggaagcgcaagtatgaatgcagctgccattacacccctgcttaatatattcccttccatgtctcatgaaatt

SEQ ID NO: 27191 - DNA, 51 bp, unidentified
  source 1..51: mol_type = unassigned DNA; note = methanogen bacteria
cggcgaaccatggcaaacaacacttattggaatgcttatattgtcagccat

SEQ ID NO: 27192 - DNA, 45 bp, unidentified
  source 1..45: mol_type = unassigned DNA; note = methanogen bacteria
ccaattaaaattccattgtctgaaagtgttgaagtttcaataatg

SEQ ID NO: 27193 - DNA, 30 bp, unidentified
  source 1..30: mol_type = unassigned DNA; note = methanogen bacteria
ggtcaatcaattcatttgatttttgaaatg

SEQ ID NO: 27194 - DNA, 123 bp, unidentified
  source 1..123: mol_type = unassigned DNA; note = methanogen bacteria
tcactattacctttgcatccttatgcttttgctatggccagtggtgttggaagcgccagtatgaatgcggctgctttaggtccaactcttgctgcatttccagcattggaaaccaatattgag

SEQ ID NO: 27195 - DNA, 33 bp, unidentified
  source 1..33: mol_type = unassigned DNA; note = methanogen bacteria
gcacttgatgtaaatcctttattttcggctaac

SEQ ID NO: 27196 - DNA, 90 bp, unidentified
  source 1..90: mol_type = unassigned DNA; note = methanogen bacteria
cgccaaggtttaggctcaaattggcaaatcttagatttatttaaatattttattacaggatttttggatccgacactaatatcagttcaa

SEQ ID NO: 27197 - DNA, 48 bp, unidentified
  source 1..48: mol_type = unassigned DNA; note = methanogen bacteria
ataacaaatcaacaatccttattcttcataagattaggagatattact

SEQ ID NO: 27198 - DNA, 30 bp, unidentified
  source 1..30: mol_type = unassigned DNA; note = methanogen bacteria
gttcatataatcaatttaactggctttgca

SEQ ID NO: 27199 - DNA, 33 bp, unidentified
  source 1..33: mol_type = unassigned DNA; note = methanogen bacteria
atacgctttagtagtgcatgtccttctaaattt

SEQ ID NO: 27200 - DNA, 69 bp, unidentified
  source 1..69: mol_type = unassigned DNA; note = methanogen bacteria
atgaaaatacctgtagaaggaaatattttattgtttctttataatgactgcatagaaggaagtataatg

SEQ ID NO: 27201 - DNA, 54 bp, unidentified
  source 1..54: mol_type = unassigned DNA; note = methanogen bacteria
tcagtttatgataccactcatcaatcaacttatctgtttaaatcatattcttat

SEQ ID NO: 27202 - DNA, 33 bp, unidentified
  source 1..33: mol_type = unassigned DNA; note = methanogen bacteria
acacttgatgtaaatcctttattttcggctaat

SEQ ID NO: 27203 - DNA, 90 bp, unidentified
  source 1..90: mol_type = unassigned DNA; note = methanogen bacteria
cgccaagctttaggcccaaattggcaaatcttagatttatttaaatatatttttacaggatttttggatccgacactaatatcagttcaa

SEQ ID NO: 27204 - DNA, 48 bp, unidentified
  source 1..48: mol_type = unassigned DNA; note = methanogen bacteria
ataacaaatcaacaatttctattcttcataagattaggagatattact

SEQ ID NO: 27205 - DNA, 33 bp, unidentified
  source 1..33: mol_type = unassigned DNA; note = methanogen bacteria
aaagttcatataatcaatttaactggctttaca

SEQ ID NO: 27206 - DNA, 42 bp, unidentified
  source 1..42: mol_type = unassigned DNA; note = methanogen bacteria
aatgtaataatgtcaattagtacaaacaacattagccaaaca

SEQ ID NO: 27207 - DNA, 33 bp, unidentified
  source 1..33: mol_type = unassigned DNA; note = methanogen bacteria
tatataacacactatactctaaattctagttta

SEQ ID NO: 27208 - DNA, 84 bp, unidentified
  source 1..84: mol_type = unassigned DNA; note = methanogen bacteria
aagtattcattaacttatattatttcaaatatttttaatctattaattatatcaattcttgaccctactatactaactgtagaa

SEQ ID NO: 27209 - DNA, 51 bp, unidentified
  source 1..51: mol_type = unassigned DNA; note = methanogen bacteria
aattttataggagaacttgaattaacattcatgcctcttggtgatcttact

SEQ ID NO: 27210 - DNA, 33 bp, unidentified
  source 1..33: mol_type = unassigned DNA; note = methanogen bacteria
aaaataggaatttatgacattagtattagtccc

SEQ ID NO: 27211 - DNA, 45 bp, unidentified
  source 1..45: mol_type = unassigned DNA; note = methanogen bacteria
ttaaattctacacataatcaagtgactaatatctttgcatttcgt

SEQ ID NO: 27212 - DNA, 69 bp, unidentified
  source 1..69: mol_type = unassigned DNA; note = methanogen bacteria
ggttggatacctctaattgatgattttgcagctaatacatctccaatattatcttcttggttggatgta

SEQ ID NO: 27213 - DNA, 30 bp, unidentified
  source 1..30: mol_type = unassigned DNA; note = methanogen bacteria
ttacagccatttaaatttactggaacccaa

SEQ ID NO: 27214 - DNA, 42 bp, unidentified
  source 1..42: mol_type = unassigned DNA; note = methanogen bacteria
gttggtatagataacctcatcgaaactttaaaggatgctgat

SEQ ID NO: 27215 - DNA, 33 bp, unidentified
  source 1..33: mol_type = unassigned DNA; note = methanogen bacteria
gcatttggtgcaacattaaatgtcattgtaatc

SEQ ID NO: 27216 - DNA, 33 bp, unidentified
  source 1..33: mol_type = unassigned DNA; note = methanogen bacteria
tattcaaaggcgggcgttgcatattcacttgct

SEQ ID NO: 27217 - DNA, 42 bp, unidentified
  source 1..42: mol_type = unassigned DNA; note = methanogen bacteria
gctcagcctcccgctccaacatgggatggagtcctatcttta

SEQ ID NO: 27218 - DNA, 42 bp, unidentified
  source 1..42: mol_type = unassigned DNA; note = methanogen bacteria
tccctgcatccgcagtctgttcctgcccaaacgatgtttgga

SEQ ID NO: 27219 - DNA, 42 bp, unidentified
  source 1..42: mol_type = unassigned DNA; note = methanogen bacteria
acaatggcttcaggtgggacctggcaggacctcttcgatttg

SEQ ID NO: 27220 - DNA, 45 bp, unidentified
  source 1..45: mol_type = unassigned DNA; note = methanogen bacteria
atgcataaaactcatgatcagatgcaaatatttgcatttagatgg

SEQ ID NO: 27221 - DNA, 75 bp, unidentified
  source 1..75: mol_type = unassigned DNA; note = methanogen bacteria
gaattacatctaattccattggtggataattttattgcaaatcaatctaaaatgttacattcttgggtagatgtg

SEQ ID NO: 27222 - DNA, 33 bp, unidentified
  source 1..33: mol_type = unassigned DNA; note = methanogen bacteria
tcattcaattaccgttttgaaaatccattgagt

SEQ ID NO: 27223 - DNA, 54 bp, unidentified
  source 1..54: mol_type = unassigned DNA; note = methanogen bacteria
cttggcggaattcctctttttaactccactctaaaagcaaatgccaccacaaat

SEQ ID NO: 27224 - DNA, 240 bp, unidentified
  source 1..240: mol_type = unassigned DNA; note = methanogen bacteria
tcccagtcaattgcaacacagcactggaccttaaatcctctggaactgattttttacagagcaggatttacccttgaagtttttgaaaaaataatacctcttgcaggtacaacaaacggccacatcctgagcatgattttttcttcaggaagcccaagaacatttatcggcgagtatgttttaaaatatacagtctgtctgacttcaacactgttcggtccggtgatgcttgatttcggt

SEQ ID NO: 27225 - DNA, 33 bp, unidentified
  source 1..33: mol_type = unassigned DNA; note = methanogen bacteria
ttgcttagcgaggatatcttattttccctaaac

SEQ ID NO: 27226 - DNA, 87 bp, unidentified
  source 1..87: mol_type = unassigned DNA; note = methanogen bacteria
ggggagctgggagactcctggaatctctttgacctgatagaatacattttcatgggatttttaaatccgaccaatatctccattcag

SEQ ID NO: 27227 - DNA, 51 bp, unidentified
  source 1..51: mol_type = unassigned DNA; note = methanogen bacteria
tatatgttggctgaccagtcactgtttttcatacaactgggcgacatcact

SEQ ID NO: 27228 - DNA, 30 bp, unidentified
  source 1..30: mol_type = unassigned DNA; note = methanogen bacteria
tatggaataatcaatttcaacggctttgca

SEQ ID NO: 27229 - DNA, 60 bp, unidentified
  source 1..60: mol_type = unassigned DNA; note = methanogen bacteria
aataggactggtgctcataagatttaccttatgcaaaacttctttgtgacttatgaggct

SEQ ID NO: 27230 - DNA, 57 bp, unidentified
  source 1..57: mol_type = unassigned DNA; note = methanogen bacteria
caaggatatggcataataaacatctatccatcaatagacttttctttcagcgatttg

SEQ ID NO: 27231 - DNA, 144 bp, unidentified
  source 1..144: mol_type = unassigned DNA; note = methanogen bacteria
tgtggaagtgaagctgtttatgaaaccggaggacattataagtgtgctgaatgtggtaattcaatttataatcctgatgatttggaattagcatatgatgatggatatattgatttgttaagtccaattttcttattcatttct

SEQ ID NO: 27232 - DNA, 63 bp, unidentified
  source 1..63: mol_type = unassigned DNA; note = methanogen bacteria
tactacttcgttcaggcatatagaaccagcgtttcaatgggtctggatatgatagactggtca

SEQ ID NO: 27233 - DNA, 30 bp, unidentified
  source 1..30: mol_type = unassigned DNA; note = methanogen bacteria
gttaatgataatgtaggtgcagttgtaaat

SEQ ID NO: 27234 - DNA, 33 bp, unidentified
  source 1..33: mol_type = unassigned DNA; note = methanogen bacteria
acacatcattcagttcttaatgagattgatatt

SEQ ID NO: 27235 - DNA, 33 bp, unidentified
  source 1..33: mol_type = unassigned DNA; note = methanogen bacteria
aacaaatccacaaatggagaatcaatatggggt

SEQ ID NO: 27236 - DNA, 69 bp, unidentified
  source 1..69: mol_type = unassigned DNA; note = methanogen bacteria
acattggacgttaatggcgcccctgcaaatgcaagaggaccacttgtggtaatatccgcattttttgct

SEQ ID NO: 27237 - DNA, 42 bp, unidentified
  source 1..42: mol_type = unassigned DNA; note = methanogen bacteria
ttgctaaacatgtccaagcctaagattttagtttgtgataac

SEQ ID NO: 27238 - DNA, 69 bp, unidentified
  source 1..69: mol_type = unassigned DNA; note = methanogen bacteria
ttaaaaacaggctcaatgaatattgcagatgtcattgcataccagtcagctaatggtcctttgataatg

SEQ ID NO: 27239 - DNA, 93 bp, unidentified
  source 1..93: mol_type = unassigned DNA; note = methanogen bacteria
ctcggatctgtgaggatcgctctcgccgacgtatggggatccctcttcagcggcgatgactgggggaaccgcgtgatcgtccgcgacatccgc

SEQ ID NO: 27240 - DNA, 72 bp, unidentified
  source 1..72: mol_type = unassigned DNA; note = methanogen bacteria
ttcttctccgacgaggacaccgtcacctccatcgtgttctggatgctgggaagcttcgacggatgcggatgg

SEQ ID NO: 27241 - DNA, 45 bp, unidentified
  source 1..45: mol_type = unassigned DNA; note = methanogen bacteria
ctaatatatttaattttaatgataactgaactttactcaaattca

SEQ ID NO: 27242 - DNA, 54 bp, unidentified
  source 1..54: mol_type = unassigned DNA; note = methanogen bacteria
aagctaaatgctacatatccaacatttatcgatgcaatgttaggcttaagacat

SEQ ID NO: 27243 - DNA, 51 bp, unidentified
  source 1..51: mol_type = unassigned DNA; note = methanogen bacteria
ggaatttatataatcacttcagacatgatagttaattatactttaccttca

SEQ ID NO: 27244 - DNA, 69 bp, unidentified
  source 1..69: mol_type = unassigned DNA; note = methanogen bacteria
tttgttactgtattttatgatgtcgtgaatgtttcagaagcgggaacattgtttttctctcacatgtgg

SEQ ID NO: 27245 - DNA, 30 bp, unidentified
  source 1..30: mol_type = unassigned DNA; note = methanogen bacteria
tttggaattcaggatgtaaatatacagtat

SEQ ID NO: 27246 - DNA, 33 bp, unidentified
  source 1..33: mol_type = unassigned DNA; note = methanogen bacteria
ttaagaggatatgatttcttcttatggtatgaa

SEQ ID NO: 27247 - DNA, 30 bp, unidentified
  source 1..30: mol_type = unassigned DNA; note = methanogen bacteria
ccatttgttgtgtatttaccattttcagaa

SEQ ID NO: 27248 - DNA, 30 bp, unidentified
  source 1..30: mol_type = unassigned DNA; note = methanogen bacteria
tgcttttggcaattcagcactggaagatac

SEQ ID NO: 27249 - DNA, 81 bp, unidentified
  source 1..81: mol_type = unassigned DNA; note = methanogen bacteria
attcagacaattgcattaaatgatgtcagtttaacttacattgttaatggcttgcttgcaggaaatttagttcagatatat

SEQ ID NO: 27250 - DNA, 48 bp, unidentified
  source 1..48: mol_type = unassigned DNA; note = methanogen bacteria
ctttcaatggctgcaggggaaattataaaaacttataaaggattcttt

SEQ ID NO: 27251 - DNA, 45 bp, unidentified
  source 1..45: mol_type = unassigned DNA; note = methanogen bacteria
ggtatttacataatatcatccgatgcgataatgaattataccatt

SEQ ID NO: 27252 - DNA, 69 bp, unidentified
  source 1..69: mol_type = unassigned DNA; note = methanogen bacteria
tttattaccattggaagcagtcagattaacgtttctgaagctggaaatttattctttagccatatgtgg

SEQ ID NO: 27253 - DNA, 30 bp, unidentified
  source 1..30: mol_type = unassigned DNA; note = methanogen bacteria
atgcatggcatccaaaatgtcaatatccaa

SEQ ID NO: 27254 - DNA, 36 bp, unidentified
  source 1..36: mol_type = unassigned DNA; note = methanogen bacteria
ttcacaaaaggatatgaattcttcttatggtatgaa

SEQ ID NO: 27255 - DNA, 30 bp, unidentified
  source 1..30: mol_type = unassigned DNA; note = methanogen bacteria
ccaattgttgttgaactaccatttacagaa

SEQ ID NO: 27256 - DNA, 33 bp, unidentified
  source 1..33: mol_type = unassigned DNA; note = methanogen bacteria
aggtggagtgctgaattacaatcttggatggag

SEQ ID NO: 27257 - DNA, 36 bp, unidentified
  source 1..36: mol_type = unassigned DNA; note = methanogen bacteria
taccatctgcagtacattaagggattggattcacag

SEQ ID NO: 27258 - DNA, 54 bp, unidentified
  source 1..54: mol_type = unassigned DNA; note = methanogen bacteria
gttatgggcaatgttccgataattgagaagtattatcctttgcttataagcagc

SEQ ID NO: 27259 - DNA, 45 bp, unidentified
  source 1..45: mol_type = unassigned DNA; note = methanogen bacteria
ggaatttatattatctcttcaaatactattttgaattatactata

SEQ ID NO: 27260 - DNA, 63 bp, unidentified
  source 1..63: mol_type = unassigned DNA; note = methanogen bacteria
acggttaacagtcatcaaattagtttaaatgaatctggaactttattcttcagtcatatgtgg

SEQ ID NO: 27261 - DNA, 30 bp, unidentified
  source 1..30: mol_type = unassigned DNA; note = methanogen bacteria
atgaatggaattaaaaatgtaaatattcaa

SEQ ID NO: 27262 - DNA, 33 bp, unidentified
  source 1..33: mol_type = unassigned DNA; note = methanogen bacteria
attaaaggatatgacttttacttatggtatgaa

SEQ ID NO: 27263 - DNA, 30 bp, unidentified
  source 1..30: mol_type = unassigned DNA; note = methanogen bacteria
ccattaatagttgacttacccttttccgaa

SEQ ID NO: 27264 - DNA, 174 bp, unidentified
  source 1..174: mol_type = unassigned DNA; note = methanogen bacteria
gtagatataatttcatcatttttaattaatactggtggtatttcatcatttaatctgaatagtttaaataatattattttttcccatttaccttctcaatataatggtttaagtcagacaatatcaaatattattttaaattcatctaacactcttttaaaaggtgtattaaat

SEQ ID NO: 27265 - DNA, 69 bp, unidentified
  source 1..69: mol_type = unassigned DNA; note = methanogen bacteria
ttacattccagctatccaacatttatggatgcactttacggacttacaaatccacagaatgtaattaac

SEQ ID NO: 27266 - DNA, 45 bp, unidentified
  source 1..45: mol_type = unassigned DNA; note = methanogen bacteria
atttttataatatcttcagacgctattttaaattttacatttact

SEQ ID NO: 27267 - DNA, 63 bp, unidentified
  source 1..63: mol_type = unassigned DNA; note = methanogen bacteria
attacagtattctatgatgttgtaaatccaggtgaagccggaaacctgttctattctcacatg

SEQ ID NO: 27268 - DNA, 30 bp, unidentified
  source 1..30: mol_type = unassigned DNA; note = methanogen bacteria
atgaacggtattcaaaacgtaaatattcaa

SEQ ID NO: 27269 - DNA, 33 bp, unidentified
  source 1..33: mol_type = unassigned DNA; note = methanogen bacteria
ttaaaaggatataactttttcctctggtatgaa

SEQ ID NO: 27270 - DNA, 48 bp, unidentified
  source 1..48: mol_type = unassigned DNA; note = methanogen bacteria
aaattaaatgctacttacccaacatttattgatgctattttaggcata

SEQ ID NO: 27271 - DNA, 45 bp, unidentified
  source 1..45: mol_type = unassigned DNA; note = methanogen bacteria
ggaatttatattatttcatctgatgctatcttaaattatacttta

SEQ ID NO: 27272 - DNA, 66 bp, unidentified
  source 1..66: mol_type = unassigned DNA; note = methanogen bacteria
ataactgtttccagtcctgctgtcaacccgatagaagctggaactttatttttcagccatatgtgg

SEQ ID NO: 27273 - DNA, 33 bp, unidentified
  source 1..33: mol_type = unassigned DNA; note = methanogen bacteria
ataagaggacatgatttcttcctgtggtatgaa

SEQ ID NO: 27274 - DNA, 48 bp, unidentified
  source 1..48: mol_type = unassigned DNA; note = methanogen bacteria
ggaatctacatcatatcctcagatgcaatattgaattatactatttat

SEQ ID NO: 27275 - DNA, 69 bp, unidentified
  source 1..69: mol_type = unassigned DNA; note = methanogen bacteria
ttcgtaactgtaagcactcctagaatcaactatgcagaagctggaacacttttcttctctcatatgtgg

SEQ ID NO: 27276 - DNA, 33 bp, unidentified
  source 1..33: mol_type = unassigned DNA; note = methanogen bacteria
gaaatgcatggaatcaatggaatagctctccaa

SEQ ID NO: 27277 - DNA, 36 bp, unidentified
  source 1..36: mol_type = unassigned DNA; note = methanogen bacteria
tacacattgcattatgactttgcattatggtatgag

SEQ ID NO: 27278 - DNA, 114 bp, unidentified
  source 1..114: mol_type = unassigned DNA; note = methanogen bacteria
acggtcgggtcatcgggcatctcgatgggcgaggtctaccgcgatatctggtaccacatcttcgatccggataaatgcgacgagatgacggactgggcggtgttcacgataagg

SEQ ID NO: 27279 - DNA, 30 bp, unidentified
  source 1..30: mol_type = unassigned DNA; note = methanogen bacteria
gggttcacgttcgccggtatcggcgggtcg

SEQ ID NO: 27280 - DNA, 78 bp, unidentified
  source 1..78: mol_type = unassigned DNA; note = methanogen bacteria
aagctgagcatctccgagcagtcgctctccgccgtctaccaatggtccatcggggacctgagcggggcgacgtggact

SEQ ID NO: 27281 - DNA, 36 bp, unidentified
  source 1..36: mol_type = unassigned DNA; note = methanogen bacteria
gtttctggacttaatgctgacgcacttaccgcaatt

SEQ ID NO: 27282 - DNA, 57 bp, unidentified
  source 1..57: mol_type = unassigned DNA; note = methanogen bacteria
gacactttgatagtatgggttggtggtgaaagtgtattgcctctttgtagggcttat

SEQ ID NO: 27283 - DNA, 33 bp, unidentified
  source 1..33: mol_type = unassigned DNA; note = methanogen bacteria
tttacagcaggcattggcgaaattgcatcttat

SEQ ID NO: 27284 - DNA, 63 bp, unidentified
  source 1..63: mol_type = unassigned DNA; note = methanogen bacteria
catcaattctgcggaatattcagtctaacattatcagatacaaatgtgattgacagagctgct

SEQ ID NO: 27285 - DNA, 30 bp, unidentified
  source 1..30: mol_type = unassigned DNA; note = methanogen bacteria
ttttcaagcggcaattcaatgaattatatt

SEQ ID NO: 27286 - DNA, 30 bp, unidentified
  source 1..30: mol_type = unassigned DNA; note = methanogen bacteria
gaaggaaatttactgtttaaaaacttaaat

SEQ ID NO: 27287 - DNA, 51 bp, unidentified
  source 1..51: mol_type = unassigned DNA; note = methanogen bacteria
ttaggaactacatacccaacatttatggatgcagtatttgctcttaaaaac

SEQ ID NO: 27288 - DNA, 48 bp, unidentified
  source 1..48: mol_type = unassigned DNA; note = methanogen bacteria
ggaatttatattatctcatctgatgctatactgaattatacaatatac

SEQ ID NO: 27289 - DNA, 69 bp, unidentified
  source 1..69: mol_type = unassigned DNA; note = methanogen bacteria
tatattagttttggatatgagcaggttaatttcagcgaagccggaaacctattttttagccatatgtgg

SEQ ID NO: 27290 - DNA, 30 bp, unidentified
  source 1..30: mol_type = unassigned DNA; note = methanogen bacteria
atgcacggcattaaaaatgtaaatatccaa

SEQ ID NO: 27291 - DNA, 33 bp, unidentified
  source 1..33: mol_type = unassigned DNA; note = methanogen bacteria
ataaaaggctacgactttttcctatggtatgaa

SEQ ID NO: 27292 - DNA, 30 bp, unidentified
  source 1..30: mol_type = unassigned DNA; note = methanogen bacteria
ccagtaattgttgatttgccattcacagaa

SEQ ID NO: 27293 - DNA, 42 bp, unidentified
  source 1..42: mol_type = unassigned DNA; note = methanogen bacteria
atcttcatcatttcatctgatgcaataatgaattatacaatt

SEQ ID NO: 27294 - DNA, 66 bp, unidentified
  source 1..66: mol_type = unassigned DNA; note = methanogen bacteria
gttactgttaaaagcggccaagttaacttttcagaagctggaaacttatttttcagccatatgtgg

SEQ ID NO: 27295 - DNA, 30 bp, unidentified
  source 1..30: mol_type = unassigned DNA; note = methanogen bacteria
atgcagggtattgaaaatgttaacatccaa

SEQ ID NO: 27296 - DNA, 33 bp, unidentified
  source 1..33: mol_type = unassigned DNA; note = methanogen bacteria
gtcagaggatacaacttcttcttatggtatgaa

SEQ ID NO: 27297 - DNA, 33 bp, unidentified
  source 1..33: mol_type = unassigned DNA; note = methanogen bacteria
tcattcaattacaggttcgaagatcctcttgac

SEQ ID NO: 27298 - DNA, 54 bp, unidentified
  source 1..54: mol_type = unassigned DNA; note = methanogen bacteria
ttgggaggtattcctctttttgattctgccctgaaagcaagtgcaacaaccaat

SEQ ID NO: 27299 - DNA, 240 bp, unidentified
  source 1..240: mol_type = unassigned DNA; note = methanogen bacteria
tcccagtcaattgcaaatcagcactggactttaaatccgctggaattaattttttacagggccgcatttactttggaggtttttgaaagaattcttcctcttgcaggtacaaccagtggtaaaatactggcaatgattttttcatcaggaagcccaagaacctttattggaaattatgttctcacagacaatgtgtgtttaacatccaccctttttggacctgtactgcttgatttcgga

SEQ ID NO: 27300 - DNA, 48 bp, unidentified
  source 1..48: mol_type = unassigned DNA; note = methanogen bacteria
gggatttatatcatctcttcggatgcgatactgaactatacattatat

SEQ ID NO: 27301 - DNA, 66 bp, unidentified
  source 1..66: mol_type = unassigned DNA; note = methanogen bacteria
gttacactcaacagcggccaggttaacttcactgaagctggaaacctgtttttcagccacatgtgg

SEQ ID NO: 27302 - DNA, 33 bp, unidentified
  source 1..33: mol_type = unassigned DNA; note = methanogen bacteria
atgaacggtattaaaaatgtaacaatccagtac

SEQ ID NO: 27303 - DNA, 33 bp, unidentified
  source 1..33: mol_type = unassigned DNA; note = methanogen bacteria
atcatgggatatgacttctttttatggtatgag

SEQ ID NO: 27304 - DNA, 30 bp, unidentified
  source 1..30: mol_type = unassigned DNA; note = methanogen bacteria
ccagttgtcgttcagcttccagtttcagaa

SEQ ID NO: 27305 - DNA, 48 bp, unidentified
  source 1..48: mol_type = unassigned DNA; note = methanogen bacteria
ggaatatacatcatatcctccgatgcgataatgaactacactctattt

SEQ ID NO: 27306 - DNA, 69 bp, unidentified
  source 1..69: mol_type = unassigned DNA; note = methanogen bacteria
ttcgtaacggtgggaagctcacatgttaatttctcagaggcaggaaacctcttcttcagccacatgtgg

SEQ ID NO: 27307 - DNA, 36 bp, unidentified
  source 1..36: mol_type = unassigned DNA; note = methanogen bacteria
gacatgaacggaatatccggagtgaccctgcagtac

SEQ ID NO: 27308 - DNA, 33 bp, unidentified
  source 1..33: mol_type = unassigned DNA; note = methanogen bacteria
atcagaggatacaatttcttcctatggtatgag

SEQ ID NO: 27309 - DNA, 30 bp, unidentified
  source 1..30: mol_type = unassigned DNA; note = methanogen bacteria
ccggtcgtggtgcagttgccgttcacagaa

SEQ ID NO: 27310 - DNA, 48 bp, unidentified
  source 1..48: mol_type = unassigned DNA; note = methanogen bacteria
gggatttatatcatttcttcagatgcaattatgaattatacattgtat

SEQ ID NO: 27311 - DNA, 66 bp, unidentified
  source 1..66: mol_type = unassigned DNA; note = methanogen bacteria
gttacagttaaaagtgggcaagtgaattttgctgaagctggatctttattcttcagccatatgtgg

SEQ ID NO: 27312 - DNA, 30 bp, unidentified
  source 1..30: mol_type = unassigned DNA; note = methanogen bacteria
atgcatggaattcataatgtgactatccaa

SEQ ID NO: 27313 - DNA, 33 bp, unidentified
  source 1..33: mol_type = unassigned DNA; note = methanogen bacteria
attagaggatatgatttcttcttatggtatgaa

SEQ ID NO: 27314 - DNA, 114 bp, unidentified
  source 1..114: mol_type = unassigned DNA; note = methanogen bacteria
accgtgggctcatcgcatatcagcatggcggatgtgtaccgcgacatctggtatcacgtgttcgatccggacagatgcgacgagatgacggactgggctgtgttcaccatcagg

SEQ ID NO: 27315 - DNA, 30 bp, unidentified
  source 1..30: mol_type = unassigned DNA; note = methanogen bacteria
ggtatcacggtcgccggcttcggcgggtcc

SEQ ID NO: 27316 - DNA, 78 bp, unidentified
  source 1..78: mol_type = unassigned DNA; note = methanogen bacteria
aagctcagcatctccgagcagtcgctctcagcggtctaccaatggtccatcggcgacctgagcgggtccacctggaca

SEQ ID NO: 27317 - DNA, 48 bp, unidentified
  source 1..48: mol_type = unassigned DNA; note = methanogen bacteria
ggaatctacatcatttcatcagatatgataatagattatacatgggga

SEQ ID NO: 27318 - DNA, 66 bp, unidentified
  source 1..66: mol_type = unassigned DNA; note = methanogen bacteria
gtatttacaaacagcagcgaaataaatccggttgaggcgggaaacctcttcttcagccatatgtgg

SEQ ID NO: 27319 - DNA, 33 bp, unidentified
  source 1..33: mol_type = unassigned DNA; note = methanogen bacteria
attcagggaattaaaaatgtaacaatacaatat

SEQ ID NO: 27320 - DNA, 36 bp, unidentified
  source 1..36: mol_type = unassigned DNA; note = methanogen bacteria
ttcagcgtagcatacaatttcgcattatggtatgaa

SEQ ID NO: 27321 - DNA, 30 bp, unidentified
  source 1..30: mol_type = unassigned DNA; note = methanogen bacteria
ccattcgtagtcatgattccagttacagaa

SEQ ID NO: 27322 - DNA, 48 bp, unidentified
  source 1..48: mol_type = unassigned DNA; note = methanogen bacteria
gggatttatatcatctcttccgatgctatactgaactatacaatatat

SEQ ID NO: 27323 - DNA, 66 bp, unidentified
  source 1..66: mol_type = unassigned DNA; note = methanogen bacteria
gttacactcagcagcaaccaggttaacctcactgaagcaggaaacctgtttttcagccacatgtgg

SEQ ID NO: 27324 - DNA, 33 bp, unidentified
  source 1..33: mol_type = unassigned DNA; note = methanogen bacteria
ataaacggcattgaaaatgtgaccatccagtat

SEQ ID NO: 27325 - DNA, 33 bp, unidentified
  source 1..33: mol_type = unassigned DNA; note = methanogen bacteria
atcaagggatataacttctttttatggtatgaa

SEQ ID NO: 27326 - DNA, 30 bp, unidentified
  source 1..30: mol_type = unassigned DNA; note = methanogen bacteria
ccagttgtcgttcaacttccagttccagaa

SEQ ID NO: 27327 - DNA, 60 bp, unidentified
  source 1..60: mol_type = unassigned DNA; note = methanogen bacteria
tatcttgatagttttgttacttcattactatggcctattcttgagggttcgtctgaagga

SEQ ID NO: 27328 - DNA, 168 bp, unidentified
  source 1..168: mol_type = unassigned DNA; note = methanogen bacteria
gaggcacttattagaaatcggttcggagtatcttttttcacaattttaacagcaatggatcctaatactagtactactagtcctatacattcacatgcatataagtcaattctgggttacttagcatataactttgttccagctcatgttaatactgcttcatcaatt

SEQ ID NO: 27329 - DNA, 261 bp, unidentified
  source 1..261: mol_type = unassigned DNA; note = methanogen bacteria
gaagttggaggcagtgacatgtcagatcatactttaactgtggtaaatcagacagaacctgttgatatgacacaatataatgttactgatgtacaggttcatggtgatcttacaatttatacattaaacactactactccagataaacaattaataagggatgtgttccaaacatttgagggaaaagctgatgtaacatttatgtcgtggaatttctacacatacttggataatccaactatggaagcacgtctgcacgct

SEQ ID NO: 27330 - DNA, 48 bp, unidentified
  source 1..48: mol_type = unassigned DNA; note = methanogen bacteria
ggaatttatattatctcatctgattcaatactgaactatacacttttt

SEQ ID NO: 27331 - DNA, 66 bp, unidentified
  source 1..66: mol_type = unassigned DNA; note = methanogen bacteria
attactgttaacgctacccaagtcaatattggagaagctggaaatctattctttagtcatatgtgg

SEQ ID NO: 27332 - DNA, 33 bp, unidentified
  source 1..33: mol_type = unassigned DNA; note = methanogen bacteria
atgcatggtattaaaaatataaatatccagtac

SEQ ID NO: 27333 - DNA, 33 bp, unidentified
  source 1..33: mol_type = unassigned DNA; note = methanogen bacteria
atcataggatatgactttttcttatggtatgaa

SEQ ID NO: 27334 - DNA, 51 bp, unidentified
  source 1..51: mol_type = unassigned DNA; note = methanogen bacteria
gggatttatattatattttcggaagcttttctggattatccattcgtttct

SEQ ID NO: 27335 - DNA, 63 bp, unidentified
  source 1..63: mol_type = unassigned DNA; note = methanogen bacteria
acttttaattctccggatattgatactgtggatatgggaaatttattttttagtcatatgtgg

SEQ ID NO: 27336 - DNA, 36 bp, unidentified
  source 1..36: mol_type = unassigned DNA; note = methanogen bacteria
gatataaacggtattcaaaatgttagtatccagtat

SEQ ID NO: 27337 - DNA, 36 bp, unidentified
  source 1..36: mol_type = unassigned DNA; note = methanogen bacteria
tttagtaaaggatatccttttgtattatggtatgag

SEQ ID NO: 27338 - DNA, 48 bp, unidentified
  source 1..48: mol_type = unassigned DNA; note = methanogen bacteria
ggagaaatgcaggtttatttaatttcatacattaaaatttcattaaca

SEQ ID NO: 27339 - DNA, 33 bp, unidentified
  source 1..33: mol_type = unassigned DNA; note = methanogen bacteria
aatgcattatcattccctaaagtagatgcacca

SEQ ID NO: 27340 - DNA, 45 bp, unidentified
  source 1..45: mol_type = unassigned DNA; note = methanogen bacteria
ggaatatatattatttcatctgatgcgatattgaattatacacta

SEQ ID NO: 27341 - DNA, 66 bp, unidentified
  source 1..66: mol_type = unassigned DNA; note = methanogen bacteria
gtcactgttaaaagtgggcaggttaattttggagaagcaggtactctcttcttcagtcacatgtgg

SEQ ID NO: 27342 - DNA, 36 bp, unidentified
  source 1..36: mol_type = unassigned DNA; note = methanogen bacteria
tttacaaaaggatataacttccagttatggtatgaa

SEQ ID NO: 27343 - DNA, 45 bp, unidentified
  source 1..45: mol_type = unassigned DNA; note = methanogen bacteria
ggaatttatatcatctcatctgattccatgatgcattttggtgta

SEQ ID NO: 27344 - DNA, 63 bp, unidentified
  source 1..63: mol_type = unassigned DNA; note = methanogen bacteria
gttgttaccggaagtagccaggtcaattttactgaagggggaaacttattctttagccatatg

SEQ ID NO: 27345 - DNA, 30 bp, unidentified
  source 1..30: mol_type = unassigned DNA; note = methanogen bacteria
atgcaaggcattaaaaatgtttccatacag

SEQ ID NO: 27346 - DNA, 33 bp, unidentified
  source 1..33: mol_type = unassigned DNA; note = methanogen bacteria
actcgcggatatgatttcttcttatggtatgag

SEQ ID NO: 27347 - DNA, 30 bp, unidentified
  source 1..30: mol_type = unassigned DNA; note = methanogen bacteria
ccggttatcgtccaactgccactgacagaa

SEQ ID NO: 27348 - DNA, 48 bp, unidentified
  source 1..48: mol_type = unassigned DNA; note = methanogen bacteria
gggatttacatcatttcatcagatgcaatactaaaccatacattagca

SEQ ID NO: 27349 - DNA, 63 bp, unidentified
  source 1..63: mol_type = unassigned DNA; note = methanogen bacteria
gtaacggttgggtcctctgcagttaatacagtagaggccggaaatctattttttagccacatg

SEQ ID NO: 27350 - DNA, 36 bp, unidentified
  source 1..36: mol_type = unassigned DNA; note = methanogen bacteria
gatatgcaaggaattaaaaatgtaactattcagtat

SEQ ID NO: 27351 - DNA, 36 bp, unidentified
  source 1..36: mol_type = unassigned DNA; note = methanogen bacteria
ttcaccaaagattataatttcttcctgtggtatgaa

SEQ ID NO: 27352 - DNA, 48 bp, unidentified
  source 1..48: mol_type = unassigned DNA; note = methanogen bacteria
gggatttatatcatctcatccgatgcaatcatgaattacacaacattt

SEQ ID NO: 27353 - DNA, 63 bp, unidentified
  source 1..63: mol_type = unassigned DNA; note = methanogen bacteria
atttcgtttggaagcagtcaagtcaactttagtgaatccggaaacttattcttcagccacatg

SEQ ID NO: 27354 - DNA, 30 bp, unidentified
  source 1..30: mol_type = unassigned DNA; note = methanogen bacteria
atgaatggaattgaaaatgtcagtatccag

SEQ ID NO: 27355 - DNA, 36 bp, unidentified
  source 1..36: mol_type = unassigned DNA; note = methanogen bacteria
ttcacaaagggatatgattttcagttatggtatgaa

SEQ ID NO: 27356 - DNA, 30 bp, unidentified
  source 1..30: mol_type = unassigned DNA; note = methanogen bacteria
cctgttgttgtccaactacctttcacagaa

SEQ ID NO: 27357 - DNA, 48 bp, unidentified
  source 1..48: mol_type = unassigned DNA; note = methanogen bacteria
caaatgcaggtttatttaatctctagaatcaacctttcattaacaagt

SEQ ID NO: 27358 - DNA, 45 bp, unidentified
  source 1..45: mol_type = unassigned DNA; note = methanogen bacteria
ccagcaataccggaatttctaaacaaattcgaatacgcacagata

SEQ ID NO: 27359 - DNA, 36 bp, unidentified
  source 1..36: mol_type = unassigned DNA; note = methanogen bacteria
taccagggaatcatgacacctgaactatcaacacaa

SEQ ID NO: 27360 - DNA, 30 bp, unidentified
  source 1..30: mol_type = unassigned DNA; note = methanogen bacteria
ctgggaatatcaaatatttccatcccatat

SEQ ID NO: 27361 - DNA, 33 bp, unidentified
  source 1..33: mol_type = unassigned DNA; note = methanogen bacteria
tacctttcaaaaacagcattattttcaggaata

SEQ ID NO: 27362 - DNA, 93 bp, unidentified
  source 1..93: mol_type = unassigned DNA; note = methanogen bacteria
atcgataaaaccattgccgttacatcggcttatgagttcttagttcaatttgttaattgtatattgaatccaagcattatttctgaggaattc

SEQ ID NO: 27363 - DNA, 54 bp, unidentified
  source 1..54: mol_type = unassigned DNA; note = methanogen bacteria
acactaatgagcaatcaattaaatctaaattacataggaatagagaaccttgct

SEQ ID NO: 27364 - DNA, 39 bp, unidentified
  source 1..39: mol_type = unassigned DNA; note = methanogen bacteria
cctattcgtatgatttacaatgtcaatatcagcccattc

SEQ ID NO: 27365 - DNA, 48 bp, unidentified
  source 1..48: mol_type = unassigned DNA; note = methanogen bacteria
gggatttatatcatctcatccgatgcaataacctattacacagctttt

SEQ ID NO: 27366 - DNA, 63 bp, unidentified
  source 1..63: mol_type = unassigned DNA; note = methanogen bacteria
attgctgttggaagcgctcaagtcaacttcagtgaagctggaaacctattcttcagccacatg

SEQ ID NO: 27367 - DNA, 36 bp, unidentified
  source 1..36: mol_type = unassigned DNA; note = methanogen bacteria
tttacaaaaggatatgattttcatttatggtatgaa

SEQ ID NO: 27368 - DNA, 48 bp, unidentified
  source 1..48: mol_type = unassigned DNA; note = methanogen bacteria
ggaatttatatcatcacttcaagtgagatagtgcattatacaatatat

SEQ ID NO: 27369 - DNA, 66 bp, unidentified
  source 1..66: mol_type = unassigned DNA; note = methanogen bacteria
tacattaccgtttggtatgatgtggttaacgttaatgaagccggaaacttattctttagccacatg

SEQ ID NO: 27370 - DNA, 30 bp, unidentified
  source 1..30: mol_type = unassigned DNA; note = methanogen bacteria
atgcacggcattcaaaacgtgaatattcaa

SEQ ID NO: 27371 - DNA, 36 bp, unidentified
  source 1..36: mol_type = unassigned DNA; note = methanogen bacteria
tttactaaaggatatgactttttcttatggtatgat

SEQ ID NO: 27372 - DNA, 33 bp, unidentified
  source 1..33: mol_type = unassigned DNA; note = methanogen bacteria
ctgcctactattgtgatgctgccttattcagaa

SEQ ID NO: 27373 - DNA, 63 bp, unidentified
  source 1..63: mol_type = unassigned DNA; note = methanogen bacteria
atgattgaatataataaatttattaatgatattgttttttctaatggaggaaatattaattca

SEQ ID NO: 27374 - DNA, 81 bp, unidentified
  source 1..81: mol_type = unassigned DNA; note = methanogen bacteria
atgaacttgtccagtattttatttgaaaatgtttcttccatttcagatttattgattttgataaatgcaaataatctctcc

SEQ ID NO: 27375 - DNA, 111 bp, unidentified
  source 1..111: mol_type = unassigned DNA; note = methanogen bacteria
tcgaaggattttattttaaatcattttgcaaattcccatatgctggattgttatggcgcttcatatattgtcaataatttgactatattccatcagtttacgctctatcct

SEQ ID NO: 27376 - DNA, 30 bp, unidentified
  source 1..30: mol_type = unassigned DNA; note = methanogen bacteria
gatttgatatctcttatttcatcacttgtt

SEQ ID NO: 27377 - DNA, 33 bp, unidentified
  source 1..33: mol_type = unassigned DNA; note = methanogen bacteria
atcaatacacatataataattatgcatcataat

SEQ ID NO: 27378 - DNA, 33 bp, unidentified
  source 1..33: mol_type = unassigned DNA; note = methanogen bacteria
ggtttgtttaccaattttttaactttttattgg

SEQ ID NO: 27379 - DNA, 57 bp, unidentified
  source 1..57: mol_type = unassigned DNA; note = methanogen bacteria
gttggtcttttaaatagtatttatcctcattatcatttattttctggaatagattta

SEQ ID NO: 27380 - DNA, 39 bp, unidentified
  source 1..39: mol_type = unassigned DNA; note = methanogen bacteria
tatccagtatggggattgatgggttttaaaggaatatct

SEQ ID NO: 27381 - DNA, 51 bp, unidentified
  source 1..51: mol_type = unassigned DNA; note = methanogen bacteria
aggggcctggagggcgtgatggagttcagcatcttcgggatcgagggagac

SEQ ID NO: 27382 - DNA, 57 bp, unidentified
  source 1..57: mol_type = unassigned DNA; note = methanogen bacteria
ggcgtgcatgtgcaggttttcgcagaggacttcatcctcgatctgctaggggtgttc

SEQ ID NO: 27383 - DNA, 45 bp, unidentified
  source 1..45: mol_type = unassigned DNA; note = methanogen bacteria
atgggcgatgcctatcccttcgatgtgttgggtgtggacctcagc

SEQ ID NO: 27384 - DNA, 51 bp, unidentified
  source 1..51: mol_type = unassigned DNA; note = methanogen bacteria
cacgttcagattatattcgaggacttcatctaccgtatcattggtgtacta

SEQ ID NO: 27385 - DNA, 81 bp, unidentified
  source 1..81: mol_type = unassigned DNA; note = methanogen bacteria
atgaacttgtccagtattttatttgaaaatgtttcttccatttcagatttattgattttgataaatgcaaatgatttctcc

SEQ ID NO: 27386 - DNA, 111 bp, unidentified
  source 1..111: mol_type = unassigned DNA; note = methanogen bacteria
tcgaaggattttattttaaatcattttgcaaattcccatatgctggcttgttatggctcttcatatattgtcaataatttgactatattcagtcagtttacgctctatcct

SEQ ID NO: 27387 - DNA, 30 bp, unidentified
  source 1..30: mol_type = unassigned DNA; note = methanogen bacteria
gatttgatatctcttatttcatcccttgtt

SEQ ID NO: 27388 - DNA, 30 bp, unidentified
  source 1..30: mol_type = unassigned DNA; note = methanogen bacteria
tgtttttggcagttctcaaccgcaagatat

SEQ ID NO: 27389 - DNA, 81 bp, unidentified
  source 1..81: mol_type = unassigned DNA; note = methanogen bacteria
atgcatacaataaaaataagctcaattgatttgacttatattattaatggattgcttaatggtagcttagtgcaggtttat

SEQ ID NO: 27390 - DNA, 45 bp, unidentified
  source 1..45: mol_type = unassigned DNA; note = methanogen bacteria
tccacatccgctggagaagttattaaaacatataaaggatttaca

SEQ ID NO: 27391 - DNA, 30 bp, unidentified
  source 1..30: mol_type = unassigned DNA; note = methanogen bacteria
agaacctttaatattaacaatacctcaatt

SEQ ID NO: 27392 - DNA, 30 bp, unidentified
  source 1..30: mol_type = unassigned DNA; note = methanogen bacteria
tgtttttgggatttttcaacttcaagatat

SEQ ID NO: 27393 - DNA, 81 bp, unidentified
  source 1..81: mol_type = unassigned DNA; note = methanogen bacteria
attaaatccgttaatttaagttcagtgaatataacctatataattaatgggttaatcaatggaaatctggttcaggtttac

SEQ ID NO: 27394 - DNA, 48 bp, unidentified
  source 1..48: mol_type = unassigned DNA; note = methanogen bacteria
tccatacaagctggagagattataaaaacatttaaaggatttacaagt

SEQ ID NO: 27395 - DNA, 30 bp, unidentified
  source 1..30: mol_type = unassigned DNA; note = methanogen bacteria
atgacatttaatatcaacaatacatctata

SEQ ID NO: 27396 - DNA, 36 bp, unidentified
  source 1..36: mol_type = unassigned DNA; note = methanogen bacteria
gaatatcatgcgacaattggaataaatattgattta

SEQ ID NO: 27397 - DNA, 39 bp, unidentified
  source 1..39: mol_type = unassigned DNA; note = methanogen bacteria
tttgatgctaaaattgatgttgcaatgcattttggtcca

SEQ ID NO: 27398 - DNA, 69 bp, unidentified
  source 1..69: mol_type = unassigned DNA; note = methanogen bacteria
tgtgtaatgattaatggtactcctgcaaacatcagatctttgatagttatgattagtggtttatttgga

SEQ ID NO: 27399 - DNA, 30 bp, unidentified
  source 1..30: mol_type = unassigned DNA; note = methanogen bacteria
actccatcagatatttcattcccatttatt

SEQ ID NO: 27400 - DNA, 51 bp, unidentified
  source 1..51: mol_type = unassigned DNA; note = methanogen bacteria
aggggcctggaaggcgtgatggagttcgacgtcctaggggtcgagggcgac

SEQ ID NO: 27401 - DNA, 57 bp, unidentified
  source 1..57: mol_type = unassigned DNA; note = methanogen bacteria
ggcgtgcatgtccaggttctcgccgaggatttcatcctcggtcttctaggggtgttc

SEQ ID NO: 27402 - DNA, 81 bp, unidentified
  source 1..81: mol_type = unassigned DNA; note = methanogen bacteria
atgaacttgtccagtattttatttgaaaatcttttttccatttcagatttattgattttgataaatgtgaatgatctatcc

SEQ ID NO: 27403 - DNA, 105 bp, unidentified
  source 1..105: mol_type = unassigned DNA; note = methanogen bacteria
gattttattttaaatcattttgcaaattccaatatgctggattgttatggctcttcatatattgtcaataatttggttatattcaaccagtttacgctttatccc

SEQ ID NO: 27404 - DNA, 30 bp, unidentified
  source 1..30: mol_type = unassigned DNA; note = methanogen bacteria
gatttggtatctcttatttcatcccttgtt

SEQ ID NO: 27405 - DNA, 51 bp, unidentified
  source 1..51: mol_type = unassigned DNA; note = methanogen bacteria
tttaattatggtatgtttaatttttatttaggcaaaaacaacgttttcaat

SEQ ID NO: 27406 - DNA, 57 bp, unidentified
  source 1..57: mol_type = unassigned DNA; note = methanogen bacteria
atgatgcatatcaatgaattaattaagtgtgacatacggattatggtcgttatggtt

SEQ ID NO: 27407 - DNA, 42 bp, unidentified
  source 1..42: mol_type = unassigned DNA; note = methanogen bacteria
ggttcgatgcaagtatatttaatttcttatattaaagtttca

SEQ ID NO: 27408 - DNA, 36 bp, unidentified
  source 1..36: mol_type = unassigned DNA; note = methanogen bacteria
tttttatccgacgagtttttattttcatctacctgg

SEQ ID NO: 27409 - DNA, 81 bp, unidentified
  source 1..81: mol_type = unassigned DNA; note = methanogen bacteria
ggcgcttcaggatcaaatgtttctgattcatttgtttatatagctaatggatttttaaatcccactattgtttcaatacag

SEQ ID NO: 27410 - DNA, 42 bp, unidentified
  source 1..42: mol_type = unassigned DNA; note = methanogen bacteria
agcggtacccaatcattattcttcattaaactaggtgaaatt

SEQ ID NO: 27411 - DNA, 30 bp, unidentified
  source 1..30: mol_type = unassigned DNA; note = methanogen bacteria
attcatttagttaatggaagcggttttaca

SEQ ID NO: 27412 - DNA, 45 bp, unidentified
  source 1..45: mol_type = unassigned DNA; note = methanogen bacteria
ctcggcggccaggtccccttcgatatcgccgggatccatgtcacc

SEQ ID NO: 27413 - DNA, 48 bp, unidentified
  source 1..48: mol_type = unassigned DNA; note = methanogen bacteria
gtgcagattatatgcgaggactcggttatgggattaataagagggttc

SEQ ID NO: 27414 - DNA, 207 bp, unidentified
  source 1..207: mol_type = unassigned DNA; note = methanogen bacteria
acaatgaatttaaatgaatacaatgaatttagaatacatattggaagagttgtttatgtaaaagaaatattaaaaaatggaatttttccaccatttatcagtcataaaaatatgctaacatttggttatgcattaaatattttttatggtgtgcttacaacatatattcctatactaatttctttaataaccggttcttctataatg

SEQ ID NO: 27415 - DNA, 177 bp, unidentified
  source 1..177: mol_type = unassigned DNA; note = methanogen bacteria
atagagcacaaaacatatggagactatacaatatttaatcaaaatatgatgaacagctcatctattgacgtatataatgaaacaaataaaattactgattggtttgtatataatgaaacaaataaaattactgattggttttcacttgagacaaaaacagggttaaactattcattt

SEQ ID NO: 27416 - DNA, 54 bp, unidentified
  source 1..54: mol_type = unassigned DNA; note = methanogen bacteria
aaattatttccatggctcataatgccaagttttttaacaataatacaatttgca

SEQ ID NO: 27417 - DNA, 33 bp, unidentified
  source 1..33: mol_type = unassigned DNA; note = methanogen bacteria
gtaaagccaaatgctaattatttcaattatatt

SEQ ID NO: 27418 - DNA, 51 bp, unidentified
  source 1..51: mol_type = unassigned DNA; note = methanogen bacteria
aacatttcatttttaaattcattattcaggcattggattgtcggcaatgaa

SEQ ID NO: 27419 - DNA, 51 bp, unidentified
  source 1..51: mol_type = unassigned DNA; note = methanogen bacteria
cacttcctcggcgatcagattcccttcgatatagcgggcgtgcacatcacc

SEQ ID NO: 27420 - DNA, 54 bp, unidentified
  source 1..54: mol_type = unassigned DNA; note = methanogen bacteria
atacacattcaggttatattcgaggacgctcttatcagattatttggagtgttc

SEQ ID NO: 27421 - DNA, 90 bp, unidentified
  source 1..90: mol_type = unassigned DNA; note = methanogen bacteria
tcatctcttgaaacggtcacaaccactccgtcggtgtcactggtaattcctggtgttgaaatgcccggttcgtcaatttatgttccttta

SEQ ID NO: 27422 - DNA, 276 bp, unidentified
  source 1..276: mol_type = unassigned DNA; note = methanogen bacteria
attaatggtttggatcaaggcgttgaacttaagggaggttcccaggcagtattgcagttaaatgacaacataagttcaattgaccttcaaaaccaactctcacatgatttaggtacaagcgatgtaaaagtaaccaacaatggagacaatcaggttacagttgatttggaaagcagtgtaaattcaaccgcttttgcaaatgcaatcaagggggaaggcaaggttattagctttaactccatcggacctgttttaagcgaagaagcaatgggtcag

SEQ ID NO: 27423 - DNA, 30 bp, unidentified
  source 1..30: mol_type = unassigned DNA; note = methanogen bacteria
atcataatgcctgaagcaactacattaagt

SEQ ID NO: 27424 - DNA, 66 bp, unidentified
  source 1..66: mol_type = unassigned DNA; note = methanogen bacteria
atgatagattttaataatttgattaatgatataataacaacaaaaataagctgcattacatcatta

SEQ ID NO: 27425 - DNA, 72 bp, unidentified
  source 1..72: mol_type = unassigned DNA; note = methanogen bacteria
ttacattcaagctatccaacattcatggatgcagtatttggactttcaaatccacaaaatgtaattaacaat

SEQ ID NO: 27426 - DNA, 66 bp, unidentified
  source 1..66: mol_type = unassigned DNA; note = methanogen bacteria
atgattgaatataataaattaattaatgatattgttttttcaaatggaggaaatattaattcatta

SEQ ID NO: 27427 - DNA, 30 bp, unidentified
  source 1..30: mol_type = unassigned DNA; note = methanogen bacteria
ttttcaagcggaaattccatggattatacg

SEQ ID NO: 27428 - DNA, 30 bp, unidentified
  source 1..30: mol_type = unassigned DNA; note = methanogen bacteria
ggagaactgctatttgaaaatctggattca

SEQ ID NO: 27429 - DNA, 57 bp, unidentified
  source 1..57: mol_type = unassigned DNA; note = methanogen bacteria
atgttacaatcaacttatccaacatttatggatgcagtatttgcacttaaaaatcct

SEQ ID NO: 27430 - DNA, 54 bp, unidentified
  source 1..54: mol_type = unassigned DNA; note = methanogen bacteria
ggagtgagggcgggatggacgttgtgggacggcggatgggatgcgtatgaggtc

SEQ ID NO: 27431 - DNA, 57 bp, unidentified
  source 1..57: mol_type = unassigned DNA; note = methanogen bacteria
aagctgcagacattcagcctcagcattttcattgagcccgccaacatgccgctatgg

SEQ ID NO: 27432 - DNA, 36 bp, unidentified
  source 1..36: mol_type = unassigned DNA; note = methanogen bacteria
ttcttctcgttattcggcacctctaccgccagcctt

SEQ ID NO: 27433 - DNA, 33 bp, unidentified
  source 1..33: mol_type = unassigned DNA; note = methanogen bacteria
atagatgcgcatggacatcttaacttttttcaa

SEQ ID NO: 27434 - DNA, 126 bp, unidentified
  source 1..126: mol_type = unassigned DNA; note = methanogen bacteria
atgggaaagcctatgataatcatgggcaagtctattgctgactatgacttggtagattttctgagggcgtttatagatagaggtagttgggactcgggaaatggtgttccgatgctttgcccatat

SEQ ID NO: 27435 - DNA, 30 bp, unidentified
  source 1..30: mol_type = unassigned DNA; note = methanogen bacteria
gcaaagtatttaatagaggctccagactgg

SEQ ID NO: 27436 - DNA, 63 bp, unidentified
  source 1..63: mol_type = unassigned DNA; note = methanogen bacteria
atgatagaatataataccttacttaatgatataatacatacaaaaataaacagtattacgtca

SEQ ID NO: 27437 - DNA, 45 bp, unidentified
  source 1..45: mol_type = unassigned DNA; note = methanogen bacteria
ttgagtgcaacatatccaacatttattgatgcactgttcggttta

SEQ ID NO: 27438 - DNA, 66 bp, unidentified
  source 1..66: mol_type = unassigned DNA; note = methanogen bacteria
atgattgaatataatgaactgataaataaattaatgtttacaaatgtcaatgatatcgtttcatta

SEQ ID NO: 27439 - DNA, 66 bp, unidentified
  source 1..66: mol_type = unassigned DNA; note = methanogen bacteria
attgaatataattatttacttaatgatataatattagttaaaacaagcaatattgtttcattaaat

SEQ ID NO: 27440 - DNA, 33 bp, unidentified
  source 1..33: mol_type = unassigned DNA; note = methanogen bacteria
tctttcaactaccgatttgaagacccattgagc

SEQ ID NO: 27441 - DNA, 54 bp, unidentified
  source 1..54: mol_type = unassigned DNA; note = methanogen bacteria
cttggaggcataccattattcaacagcacactgaaggcaaacgccaccaccaac

SEQ ID NO: 27442 - DNA, 240 bp, unidentified
  source 1..240: mol_type = unassigned DNA; note = methanogen bacteria
tcccagtcaatagcaaaccaacactggacgctgaacccgttggagctaatattctaccgcgccggattcacattggaagttttcgagaaaataatccccctggcaggcaccacccacgggcatattctgggtatgatcttttcatccggaagcccaaggacattcataggagagtacgtcctcaaatacactgtttgcctgacatcaacactattcggaccggtgatgcttgatttcgga

SEQ ID NO: 27443 - DNA, 57 bp, unidentified
  source 1..57: mol_type = unassigned DNA; note = methanogen bacteria
attccttattttcagttatcttattatccaatatttatttatcctgaatatggatta

SEQ ID NO: 27444 - DNA, 54 bp, unidentified
  source 1..54: mol_type = unassigned DNA; note = methanogen bacteria
tatcagttagaatttattaaatttaataaagcctactcttttaacggaattgac

SEQ ID NO: 27445 - DNA, 33 bp, unidentified
  source 1..33: mol_type = unassigned DNA; note = methanogen bacteria
tcattcaattaccggttcgaagacccccttgac

SEQ ID NO: 27446 - DNA, 54 bp, unidentified
  source 1..54: mol_type = unassigned DNA; note = methanogen bacteria
ttaggaggcattccgctttttgattccgccctaaaagcaagtgcaacaaccaat

SEQ ID NO: 27447 - DNA, 240 bp, unidentified
  source 1..240: mol_type = unassigned DNA; note = methanogen bacteria
tcccagtctattgcaggtcagcactggactttaaatcctctggaattaatcttttacagagcagcatttacattggaagtttttgaaagaatactttctcttgcaggtacaaccaacggcaaaatactggcaatgattttctcatccggaagtcccaggacattcattggaaattatgttctcacagacaacgtgtgtttaacatcaactctctttggaccggtgatgcttgatttcgga

SEQ ID NO: 27448 - DNA, 51 bp, unidentified
  source 1..51: mol_type = unassigned DNA; note = methanogen bacteria
atgggaacaattaattccacaatagaatattttaaaaatattacaactgaa

SEQ ID NO: 27449 - DNA, 66 bp, unidentified
  source 1..66: mol_type = unassigned DNA; note = methanogen bacteria
atgattgaatataattatttgattaatgacgtattgacaaaaaatgtgaatgctcttgactcattt

SEQ ID NO: 27450 - DNA, 87 bp, unidentified
  source 1..87: mol_type = unassigned DNA; note = methanogen bacteria
ttaaatgctacatacccaacattcatggatgcagtatatgcactttcaaacccacaaaatgttataaatagtatgttaaatccgcct

SEQ ID NO: 27451 - DNA, 36 bp, unidentified
  source 1..36: mol_type = unassigned DNA; note = methanogen bacteria
tatttaagatatctttatttcagaaaaggaagaaga

SEQ ID NO: 27452 - DNA, 66 bp, unidentified
  source 1..66: mol_type = unassigned DNA; note = methanogen bacteria
atgattgagtataataatttgattaatgatataataacaactaaaataagcactattacatcatta

SEQ ID NO: 27453 - DNA, 96 bp, unidentified
  source 1..96: mol_type = unassigned DNA; note = methanogen bacteria
ttacacgctgcttatccaacatttatggatgcaatatatggactttcaaatccacagaatgtaataaacaatgttttaagtccgcctccaaccata

SEQ ID NO: 27454 - DNA, 69 bp, unidentified
  source 1..69: mol_type = unassigned DNA; note = methanogen bacteria
atgattgaatataataatttgattaatggtataattacaacaaaaataagcaatattatatcattaaat

SEQ ID NO: 27455 - DNA, 66 bp, unidentified
  source 1..66: mol_type = unassigned DNA; note = methanogen bacteria
atgattgaatataataatctaattaatgatattatttttacccaaacaggaaatattaattcatta

SEQ ID NO: 27456 - DNA, 42 bp, unidentified
  source 1..42: mol_type = unassigned DNA; note = methanogen bacteria
gaattaacaagaacttcaatgaacttaactaatattaattct

SEQ ID NO: 27457 - DNA, 42 bp, unidentified
  source 1..42: mol_type = unassigned DNA; note = methanogen bacteria
caagtttatctgatatcacatattcagttgcccttaaccaga

SEQ ID NO: 27458 - DNA, 63 bp, unidentified
  source 1..63: mol_type = unassigned DNA; note = methanogen bacteria
aacgagatctacggagccaattccgtattcaacagcgacaacttcggtaacgacgcgctcaac

SEQ ID NO: 27459 - DNA, 66 bp, unidentified
  source 1..66: mol_type = unassigned DNA; note = methanogen bacteria
atgattgaatataataatataataaataatataatatcaatcgatacaactaatattgtttctttg

SEQ ID NO: 27460 - DNA, 51 bp, unidentified
  source 1..51: mol_type = unassigned DNA; note = methanogen bacteria
atggcagatgaaattgctaccttaataagttctgtaggacttacatcagaa

SEQ ID NO: 27461 - DNA, 30 bp, unidentified
  source 1..30: mol_type = unassigned DNA; note = methanogen bacteria
cttggaaatatgtcacaggtcaaaggcatt

SEQ ID NO: 27462 - DNA, 69 bp, unidentified
  source 1..69: mol_type = unassigned DNA; note = methanogen bacteria
tctttaataaaccatagggcaatacacataagcaccatatacacaaactttttcatgtttccgctgaca

SEQ ID NO: 27463 - DNA, 69 bp, unidentified
  source 1..69: mol_type = unassigned DNA; note = methanogen bacteria
ggccaatcccctgaagtaacacttatctttgcaaatattcctttaggtcaagcatcatttattgatgtc

SEQ ID NO: 27464 - DNA, 33 bp, unidentified
  source 1..33: mol_type = unassigned DNA; note = methanogen bacteria
tatactccagttcagggaagcggtacacatgta

SEQ ID NO: 27465 - DNA, 45 bp, unidentified
  source 1..45: mol_type = unassigned DNA; note = methanogen bacteria
atgaatgtcataaatttaatcatgacaattttaccacaacttcca

SEQ ID NO: 27466 - DNA, 66 bp, unidentified
  source 1..66: mol_type = unassigned DNA; note = methanogen bacteria
cctggtgtgattgaaaacaaaactctgatgaactttttacatattaaagaaatgttttatcatgtt

SEQ ID NO: 27467 - DNA, 87 bp, unidentified
  source 1..87: mol_type = unassigned DNA; note = methanogen bacteria
ttacatgcaagttatccaacatttatggatgcgatttatggactttcaaatccacaaaatgttattaacaatattttaagtcctcaa

SEQ ID NO: 27468 - DNA, 33 bp, unidentified
  source 1..33: mol_type = unassigned DNA; note = methanogen bacteria
tcattcaactaccgatttgaagaccctctaaaa

SEQ ID NO: 27469 - DNA, 54 bp, unidentified
  source 1..54: mol_type = unassigned DNA; note = methanogen bacteria
cttggaggaataccactattcaactccactctaaaggcaaatgcaacaacaaac

SEQ ID NO: 27470 - DNA, 240 bp, unidentified
  source 1..240: mol_type = unassigned DNA; note = methanogen bacteria
tcccaatcaattgcaagccagcactggacactgaacccgctggagcttgtattctatcgtgccgcattcacacttgaggtctttgaaaagatcatacctcttgcaggcacaacacatggaaaaatcctatcaatgatattctcatcaggaagtccgagaacattcatcggagaatatgtcctgcactacaacgtgtgtctgacttcaacaattttcggaccggtgatgcttgactttgga

SEQ ID NO: 27471 - DNA, 39 bp, unidentified
  source 1..39: mol_type = unassigned DNA; note = methanogen bacteria
tttttcaaatatgctgttactcatgatgtattccatatt

SEQ ID NO: 27472 - DNA, 57 bp, unidentified
  source 1..57: mol_type = unassigned DNA; note = methanogen bacteria
tataccattccggttaaaaattcctttgccaatgtcagaaatctgattatcctgatt

SEQ ID NO: 27473 - DNA, 30 bp, unidentified
  source 1..30: mol_type = unassigned DNA; note = methanogen bacteria
actcctccgaacatttcaatcacatacatc

SEQ ID NO: 27474 - DNA, 138 bp, unidentified
  source 1..138: mol_type = unassigned DNA; note = methanogen bacteria
acaaatcttttcgccaatgcaatagctgtcattcaggaagttatttaccaaacattcaacgtttactttatgggcagttccacatatcttgcagccactgcaataacttatgcatttgaaaaatttgttggatcttta

SEQ ID NO: 27475 - DNA, 99 bp, unidentified
  source 1..99: mol_type = unassigned DNA; note = methanogen bacteria
ggattgcctatttttgatgctgtaaacctaacattcaccagcatttcaactggaggaatgtcaattaaaaatgccaacataggattttatcaaaataat

SEQ ID NO: 27476 - DNA, 102 bp, unidentified
  source 1..102: mol_type = unassigned DNA; note = methanogen bacteria
aacaatatagttcctattgaaggaatattcactgttgtttcagctgtgacaactacaggagcaaatattgtacctccacaagagcttgctgtttggaatgga

SEQ ID NO: 27477 - DNA, 96 bp, unidentified
  source 1..96: mol_type = unassigned DNA; note = methanogen bacteria
tatggattcgacccatttacagcattgtttgatgtaatttctgttacaagcaataacggattaagtacaggaatagtctatggtggtctcccatta

SEQ ID NO: 27478 - DNA, 45 bp, unidentified
  source 1..45: mol_type = unassigned DNA; note = methanogen bacteria
attggatatcatctggaaaatcatacattcgccatatcttttcca

SEQ ID NO: 27479 - DNA, 33 bp, unidentified
  source 1..33: mol_type = unassigned DNA; note = methanogen bacteria
aatgcgagtacaaaaaccggagaattcattgca

SEQ ID NO: 27480 - DNA, 57 bp, unidentified
  source 1..57: mol_type = unassigned DNA; note = methanogen bacteria
tataccattccggtcgacaattcatatgctaacgtcagaaatctgatcattctcatt

SEQ ID NO: 27481 - DNA, 36 bp, unidentified
  source 1..36: mol_type = unassigned DNA; note = methanogen bacteria
acgcctccaaacatttccatcccttacataaacgac

SEQ ID NO: 27482 - DNA, 39 bp, unidentified
  source 1..39: mol_type = unassigned DNA; note = methanogen bacteria
tggcaggccggcgtaagcgtccaccttgaaacctacgac

SEQ ID NO: 27483 - DNA, 33 bp, unidentified
  source 1..33: mol_type = unassigned DNA; note = methanogen bacteria
ggaaaatcaaacacagcggtgattttcggaccg

SEQ ID NO: 27484 - DNA, 60 bp, unidentified
  source 1..60: mol_type = unassigned DNA; note = methanogen bacteria
cgcttccacatacgtgtaaacggcgctcccgccaacgtcaggtgcatggttgtcatgttg

SEQ ID NO: 27485 - DNA, 33 bp, unidentified
  source 1..33: mol_type = unassigned DNA; note = methanogen bacteria
gcaaccccttcagacatctcgtttcagtatgtc

SEQ ID NO: 27486 - DNA, 72 bp, unidentified
  source 1..72: mol_type = unassigned DNA; note = methanogen bacteria
atgataatagaaaactttgttaataatttgcctataactgaaagtggggcagttgcttcaagttcactatca

SEQ ID NO: 27487 - DNA, 30 bp, unidentified
  source 1..30: mol_type = unassigned DNA; note = methanogen bacteria
gctggaccaacattagaatttagtcaaatc

SEQ ID NO: 27488 - DNA, 81 bp, unidentified
  source 1..81: mol_type = unassigned DNA; note = methanogen bacteria
ttgcatgcaacctatccaacattcatggatgcgatttatgcaatgtcaaaccctcaaaacgtaattaataacgtattaact

SEQ ID NO: 27489 - DNA, 30 bp, unidentified
  source 1..30: mol_type = unassigned DNA; note = methanogen bacteria
ttttatggtcccttgaacactcctttgcag

SEQ ID NO: 27490 - DNA, 54 bp, unidentified
  source 1..54: mol_type = unassigned DNA; note = methanogen bacteria
ttccatgagtattcaatgataatacctgttattattggagatttttcagttaca

SEQ ID NO: 27491 - DNA, 39 bp, unidentified
  source 1..39: mol_type = unassigned DNA; note = methanogen bacteria
gattatgctaacctgggattgatccaattgatctatcag

SEQ ID NO: 27492 - DNA, 36 bp, unidentified
  source 1..36: mol_type = unassigned DNA; note = methanogen bacteria
aggatcctgcgcaacgactataccctccgttccctg

SEQ ID NO: 27493 - DNA, 39 bp, unidentified
  source 1..39: mol_type = unassigned DNA; note = methanogen bacteria
accgacaagggattttcatataatatattttcgcacagc

SEQ ID NO: 27494 - DNA, 81 bp, unidentified
  source 1..81: mol_type = unassigned DNA; note = methanogen bacteria
acaggggccataatgcccaaaagctttgctcttaattatgaggcgacacagtcacaggtgcttaactcatgggttgacgtg

SEQ ID NO: 27495 - DNA, 30 bp, unidentified
  source 1..30: mol_type = unassigned DNA; note = methanogen bacteria
cctttctttaccagtttgccgagaaatggc

SEQ ID NO: 27496 - DNA, 30 bp, unidentified
  source 1..30: mol_type = unassigned DNA; note = methanogen bacteria
gtaatgggggatttcgagatacgttcgctt

SEQ ID NO: 27497 - DNA, 33 bp, unidentified
  source 1..33: mol_type = unassigned DNA; note = methanogen bacteria
gttaaaccaaatccactttatttagattatatt

SEQ ID NO: 27498 - DNA, 51 bp, unidentified
  source 1..51: mol_type = unassigned DNA; note = methanogen bacteria
aatatcttattttttagtatgttatttaaaaagtggattagtggtaatgag

SEQ ID NO: 27499 - DNA, 42 bp, unidentified
  source 1..42: mol_type = unassigned DNA; note = methanogen bacteria
atggatttgatgattacaatgatgatattgcctcaactaccc

SEQ ID NO: 27500 - DNA, 69 bp, unidentified
  source 1..69: mol_type = unassigned DNA; note = methanogen bacteria
atgcctggtgttataggcaatcagactttaatgaatttcctgcagataaaagagatgttttatcatata

SEQ ID NO: 27501 - DNA, 30 bp, unidentified
  source 1..30: mol_type = unassigned DNA; note = methanogen bacteria
acacattattttgcccatcatgaattaaag

SEQ ID NO: 27502 - DNA, 30 bp, unidentified
  source 1..30: mol_type = unassigned DNA; note = methanogen bacteria
cagagtactcataccactggcttttttacg

SEQ ID NO: 27503 - DNA, 72 bp, unidentified
  source 1..72: mol_type = unassigned DNA; note = methanogen bacteria
tacaccattcctgtaaacaactcctttgccaatgtcagaaatttgattatcatgattgctggtttggttgga

SEQ ID NO: 27504 - DNA, 33 bp, unidentified
  source 1..33: mol_type = unassigned DNA; note = methanogen bacteria
actcctccgaatatctcaatcacatacattaat

SEQ ID NO: 27505 - DNA, 42 bp, unidentified
  source 1..42: mol_type = unassigned DNA; note = methanogen bacteria
ttggatgctgattcatacggtgccgttgtgactttcacaggt

SEQ ID NO: 27506 - DNA, 198 bp, unidentified
  source 1..198: mol_type = unassigned DNA; note = methanogen bacteria
aaaaactataattcagctagtaagaacactgattttatagtttctaaaaatgatgtgaaaatggatttatctgtttttaatagtacttatggtgaaaaaactattgttaatgcacttttaagtgatttgaaaggtaatttaatcaacgaaaagattaaacttgaaattgcaggtaatttatatgaaatcacatctaat

SEQ ID NO: 27507 - DNA, 60 bp, unidentified
  source 1..60: mol_type = unassigned DNA; note = methanogen bacteria
tttacagtgccggttattttaaatgcatccaaatatgatgtaaaagcctcttttgaagga

SEQ ID NO: 27508 - DNA, 174 bp, unidentified
  source 1..174: mol_type = unassigned DNA; note = methanogen bacteria
aattataacaaaaataatgcggttaaatcttttacaataagtaaggcaaagttggatttaagcttgactatggataatgcgacttatggaagttatttggttttaaacaataagttaaagcatgatttgattttaaacattaataataaaaactattcagtcaaagcattttcc

SEQ ID NO: 27509 - DNA, 30 bp, unidentified
  source 1..30: mol_type = unassigned DNA; note = methanogen bacteria
ggaggttatgaggctaagataattttcaat

SEQ ID NO: 27510 - DNA, 171 bp, unidentified
  source 1..171: mol_type = unassigned DNA; note = methanogen bacteria
aatagtcaaatcattaaagtctcagttaatagggcaacacctgaacttatcgttaatattcctgatattagttatggaagttatattaatgctgatgttaagttaattggtattaaattggatgaaaatcttgttttaactatcaataataaggattatacttttaaagca

SEQ ID NO: 27511 - DNA, 117 bp, unidentified
  source 1..117: mol_type = unassigned DNA; note = methanogen bacteria
aattcaatttcaaaagatgtgaacgttaatgtgggtaaaattgatcctaaattagtgattgacatatcagatagtaaatatggtgaaaatccaattgctgatgttaagttaactggt

SEQ ID NO: 27512 - DNA, 54 bp, unidentified
  source 1..54: mol_type = unassigned DNA; note = methanogen bacteria
ttaaatgaaaatgttgtattaactgttaataataaaaaatatacatttaaggcg

SEQ ID NO: 27513 - DNA, 108 bp, unidentified
  source 1..108: mol_type = unassigned DNA; note = methanogen bacteria
ggcaggtatcctgttgcacctgtggatgtgataaagaccatactgagtccattcatcccgtcccttgctgtatctcctcaagtgacatctattgtattcaacatccga

SEQ ID NO: 27514 - DNA, 72 bp, unidentified
  source 1..72: mol_type = unassigned DNA; note = methanogen bacteria
atggcagacccttatgataaactgcctcagattgtttactggctgatgggaagtctctcttctgtcaatttt

SEQ ID NO: 27515 - DNA, 54 bp, unidentified
  source 1..54: mol_type = unassigned DNA; note = methanogen bacteria
tctgttggaggaattccaattctaaagccttcaattagatatttactcaaacca

SEQ ID NO: 27516 - DNA, 261 bp, unidentified
  source 1..261: mol_type = unassigned DNA; note = methanogen bacteria
agatcagttaaggagttcagcataacaactgcaacaaaccccttgagcacactccaaaacagggcggacttcacactgcatgttttaaacttgcttgattttcttggaggagatttcggtttaacacacggtaaattattggccagtgcaattcctggaagcgaactgggaccaagaatgactgtaggaaagctaattgcatggagaagtgaagttacaataacacccacacttatagggcagatggtaatcgattttgga

SEQ ID NO: 27517 - DNA, 30 bp, unidentified
  source 1..30: mol_type = unassigned DNA; note = methanogen bacteria
ctgagcggggattatactctccgttctctc

SEQ ID NO: 27518 - DNA, 96 bp, unidentified
  source 1..96: mol_type = unassigned DNA; note = methanogen bacteria
aacttcgcaagcatctgcggcgagttcggcggtatctacgccagactttccttcggattgtgggatttcgacctgtggacgtatcgcggcatctgg

SEQ ID NO: 27519 - DNA, 69 bp, unidentified
  source 1..69: mol_type = unassigned DNA; note = methanogen bacteria
ctggtggaccaggtccccagcaccgactggctcgataactattcgacttatgaactggcgttccttttc

SEQ ID NO: 27520 - DNA, 48 bp, unidentified
  source 1..48: mol_type = unassigned DNA; note = methanogen bacteria
tatgcgggatttatggaaagttttggccatgtcactgaattggtttct

SEQ ID NO: 27521 - DNA, 66 bp, unidentified
  source 1..66: mol_type = unassigned DNA; note = methanogen bacteria
gcttcaatgcttactggtgggttttgaaatctttatcctgaacaggagaatattattaaaaaaata

SEQ ID NO: 27522 - DNA, 33 bp, unidentified
  source 1..33: mol_type = unassigned DNA; note = methanogen bacteria
gtgtccggtttaggagctgatgcccttgcaggt

SEQ ID NO: 27523 - DNA, 57 bp, unidentified
  source 1..57: mol_type = unassigned DNA; note = methanogen bacteria
gaaccgatattgaacgctatgggtgcggcccaaaccatctcatatgcaactgattat

SEQ ID NO: 27524 - DNA, 36 bp, unidentified
  source 1..36: mol_type = unassigned DNA; note = methanogen bacteria
gcatttttaggttcaacggattccgttgcggtttat

SEQ ID NO: 27525 - DNA, 33 bp, unidentified
  source 1..33: mol_type = unassigned DNA; note = methanogen bacteria
tttccagtgaatatgaactatttaacatctcct

SEQ ID NO: 27526 - DNA, 63 bp, unidentified
  source 1..63: mol_type = unassigned DNA; note = methanogen bacteria
gcatatgttaattcattcaactttgatttaatgtatctctggatttatgatgcaccatttcca

SEQ ID NO: 27527 - DNA, 33 bp, unidentified
  source 1..33: mol_type = unassigned DNA; note = methanogen bacteria
gccttgaactttgcagcaattgtatacattgaa

SEQ ID NO: 27528 - DNA, 33 bp, unidentified
  source 1..33: mol_type = unassigned DNA; note = methanogen bacteria
ttacaatattatccgatttcaacatttgacctt

SEQ ID NO: 27529 - DNA, 168 bp, unidentified
  source 1..168: mol_type = unassigned DNA; note = methanogen bacteria
atagaactatcaggacttatttcaggtattcttgcctcaaacacatacacggacatcagttccgcactgaacgcagtgactgcatacttgccatttgattttgatattaattcaatatcctcatcaataaactcttcccttcatgaagtcggaagatacgtccttaac

SEQ ID NO: 27530 - DNA, 39 bp, unidentified
  source 1..39: mol_type = unassigned DNA; note = methanogen bacteria
ttagtaatgtcactgaatttaaacagtattaaccagaca

SEQ ID NO: 27531 - DNA, 171 bp, unidentified
  source 1..171: mol_type = unassigned DNA; note = methanogen bacteria
atagagctcacaggtctcatatcaggcattcttgcgtcaaacacatacactgacatcaactcttccctgaatgcagtgacatcatacctgccgtttaacttcgatgtcaattcagtatcttcatcaataaactcatcccttcatgaagtcggcagttacatcctaaactac

SEQ ID NO: 27532 - DNA, 45 bp, unidentified
  source 1..45: mol_type = unassigned DNA; note = methanogen bacteria
ctgattaaattttattatgttaatcatgtatttaaggttagctgg

SEQ ID NO: 27533 - DNA, 30 bp, unidentified
  source 1..30: mol_type = unassigned DNA; note = methanogen bacteria
aataagagtaccaatactgaagcctttttc

SEQ ID NO: 27534 - DNA, 60 bp, unidentified
  source 1..60: mol_type = unassigned DNA; note = methanogen bacteria
aaatacactatcccggttaacagttcctatgccaatgtcagaaatttaatcattttaatt

SEQ ID NO: 27535 - DNA, 33 bp, unidentified
  source 1..33: mol_type = unassigned DNA; note = methanogen bacteria
actccgcctaatatttctgttccgtatataaac

SEQ ID NO: 27536 - DNA, 48 bp, unidentified
  source 1..48: mol_type = unassigned DNA; note = methanogen bacteria
ccaagaaatatatcaatatctgataaaaatgaattttatgctacagga

SEQ ID NO: 27537 - DNA, 39 bp, unidentified
  source 1..39: mol_type = unassigned DNA; note = methanogen bacteria
aacaatttatatcatgatagcaatttcaatattcctttt

SEQ ID NO: 27538 - DNA, 36 bp, unidentified
  source 1..36: mol_type = unassigned DNA; note = methanogen bacteria
aataagacatcgaatactgaaatgttcattgctcct

SEQ ID NO: 27539 - DNA, 72 bp, unidentified
  source 1..72: mol_type = unassigned DNA; note = methanogen bacteria
tatcatgtatatgtcaataacactccggcaaacgttagaactttaataatcatgattgggggattgtttgga

SEQ ID NO: 27540 - DNA, 33 bp, unidentified
  source 1..33: mol_type = unassigned DNA; note = methanogen bacteria
actcccaataatatttcttttcattttgtggaa

SEQ ID NO: 27541 - DNA, 33 bp, unidentified
  source 1..33: mol_type = unassigned DNA; note = methanogen bacteria
tacaggccatttatttataataatttaaaactt

SEQ ID NO: 27542 - DNA, 60 bp, unidentified
  source 1..60: mol_type = unassigned DNA; note = methanogen bacteria
gttttaggttcaaatactaaacaattaatcaaaatattttttggagatgaaagatatact

SEQ ID NO: 27543 - DNA, 33 bp, unidentified
  source 1..33: mol_type = unassigned DNA; note = methanogen bacteria
aagtataatatgatagctaatagttcctattta

SEQ ID NO: 27544 - DNA, 42 bp, unidentified
  source 1..42: mol_type = unassigned DNA; note = methanogen bacteria
aacaatttctattctgacaaaaatttccagattccttttgga

SEQ ID NO: 27545 - DNA, 36 bp, unidentified
  source 1..36: mol_type = unassigned DNA; note = methanogen bacteria
aataagtcatcaaatactgaagccatcattgctcca

SEQ ID NO: 27546 - DNA, 72 bp, unidentified
  source 1..72: mol_type = unassigned DNA; note = methanogen bacteria
tatcatgtatatgtcggtgaaactccagcaaatgttaggactttaataatcatgattggcggattgtttgga

SEQ ID NO: 27547 - DNA, 36 bp, unidentified
  source 1..36: mol_type = unassigned DNA; note = methanogen bacteria
actccaaacgaaatttcttttcaatatgtggaagat

SEQ ID NO: 27548 - DNA, 117 bp, unidentified
  source 1..117: mol_type = unassigned DNA; note = methanogen bacteria
accaagttctatctaactaaccagcacatgccaaatatgacagaagcattaaagcctatagttggcgtttttcttttgcaaacagaaactagcatatcatgtggtttgaattccgtc

SEQ ID NO: 27549 - DNA, 30 bp, unidentified
  source 1..30: mol_type = unassigned DNA; note = methanogen bacteria
catgctaacgagacaaacttttctctacac

SEQ ID NO: 27550 - DNA, 45 bp, unidentified
  source 1..45: mol_type = unassigned DNA; note = methanogen bacteria
ttgaaacctatattccatgtccctgctgattatgtttactcatct

SEQ ID NO: 27551 - DNA, 30 bp, unidentified
  source 1..30: mol_type = unassigned DNA; note = methanogen bacteria
atgtcaagtttaatttcaattcccacattg

SEQ ID NO: 27552 - DNA, 69 bp, unidentified
  source 1..69: mol_type = unassigned DNA; note = methanogen bacteria
cctggagttactcacaatcaaacatttgcacaattcattcatctaaaagatattttctattatttagga

SEQ ID NO: 27553 - DNA, 108 bp, unidentified
  source 1..108: mol_type = unassigned DNA; note = methanogen bacteria
ggcagatatccggtagctccaattgatgtgataaagactattcttagtcctatttttccatctttagctgtatctccagagttgaattctattgttttcacaattaga

SEQ ID NO: 27554 - DNA, 72 bp, unidentified
  source 1..72: mol_type = unassigned DNA; note = methanogen bacteria
atggcagacccttatgataagcttcctcaaattacctattggcttatgggcagcttatctgcagttaatttc

SEQ ID NO: 27555 - DNA, 45 bp, unidentified
  source 1..45: mol_type = unassigned DNA; note = methanogen bacteria
atgctgcttttcggagcaactcccgaagtgttggaatatgctatg

SEQ ID NO: 27556 - DNA, 48 bp, unidentified
  source 1..48: mol_type = unassigned DNA; note = methanogen bacteria
aacatttacggtgctgcaagcatatacggaaacaatatcccaattgca

SEQ ID NO: 27557 - DNA, 60 bp, unidentified
  source 1..60: mol_type = unassigned DNA; note = methanogen bacteria
agtcagattatttcgctttttggaagcgggaacgaactttatatggagtttgcagtaaaa

SEQ ID NO: 27558 - DNA, 30 bp, unidentified
  source 1..30: mol_type = unassigned DNA; note = methanogen bacteria
atgtcaagtttaatttcaattcctacaatg

SEQ ID NO: 27559 - DNA, 69 bp, unidentified
  source 1..69: mol_type = unassigned DNA; note = methanogen bacteria
ccatctgtaacccataaccaaacatttgcccaattcatacatttaaaggattatttctattatttaggc

SEQ ID NO: 27560 - DNA, 30 bp, unidentified
  source 1..30: mol_type = unassigned DNA; note = methanogen bacteria
atgtctagtttaatttcaattcccacattg

SEQ ID NO: 27561 - DNA, 69 bp, unidentified
  source 1..69: mol_type = unassigned DNA; note = methanogen bacteria
ccgggtgtaactcatgatcaaacatttgctcagttcatccatctaaaagattatttctattatttaggt

SEQ ID NO: 27562 - DNA, 78 bp, unidentified
  source 1..78: mol_type = unassigned DNA; note = methanogen bacteria
cctggaatgcttgaaaacaagactttagtgaacttccttcagattaaggaaatgttctatcatataggattgatacaa

SEQ ID NO: 27563 - DNA, 57 bp, unidentified
  source 1..57: mol_type = unassigned DNA; note = methanogen bacteria
atgattaatattaatgacattatattttttaattttaatacaataaattcatttaat

SEQ ID NO: 27564 - DNA, 30 bp, unidentified
  source 1..30: mol_type = unassigned DNA; note = methanogen bacteria
ttctcggctgcaaattcaatggactactct

SEQ ID NO: 27565 - DNA, 30 bp, unidentified
  source 1..30: mol_type = unassigned DNA; note = methanogen bacteria
ggcaatcttctctttgaaaacataacctca

SEQ ID NO: 27566 - DNA, 42 bp, unidentified
  source 1..42: mol_type = unassigned DNA; note = methanogen bacteria
gtagggcctgaagaaattattaatgcattaaaaaatgcagac

SEQ ID NO: 27567 - DNA, 30 bp, unidentified
  source 1..30: mol_type = unassigned DNA; note = methanogen bacteria
tattctgcagcaggaataacatcatccatc

SEQ ID NO: 27568 - DNA, 51 bp, unidentified
  source 1..51: mol_type = unassigned DNA; note = methanogen bacteria
agccagtgggtaggttcattcataacaaatccgacagcatcttcacttgtt

SEQ ID NO: 27569 - DNA, 108 bp, unidentified
  source 1..108: mol_type = unassigned DNA; note = methanogen bacteria
ggacgatatcaagtagcacccatagatgttataaaaactattttaagtccaatttttccatcgctaagtgttagtcctgaaattaattccattgtttttactattcgt

SEQ ID NO: 27570 - DNA, 72 bp, unidentified
  source 1..72: mol_type = unassigned DNA; note = methanogen bacteria
atggctgatccttatgataagttacctcaaattacttattggcttatgggtagtttatctgcagttaacttt

SEQ ID NO: 27571 - DNA, 54 bp, unidentified
  source 1..54: mol_type = unassigned DNA; note = methanogen bacteria
atgattgattataatacaataatatcattgaatacaaatgatattgtttcattg

SEQ ID NO: 27572 - DNA, 159 bp, unidentified
  source 1..159: mol_type = unassigned DNA; note = methanogen bacteria
atagcgatattgtccggagcatcgtcttccgccacatacgctgatatcaatggagtattgtcatcgctatcctcttatctgccgtggagttttgatgtaaattcaatctcatcatcacttaactcatcggttcaggagattggaaaatttctgctgaat

SEQ ID NO: 27573 - DNA, 174 bp, unidentified
  source 1..174: mol_type = unassigned DNA; note = methanogen bacteria
ctgtcgacttttgtcacttggattttagccaataatcctgatgctaatgtaaatagtgcaatgtatcaaatttctgcatatttgcctgcgggagttgatattaattctattaattcatatctggactcagtaattaataatgttggaagttatattcttaattatagcgttaaa

SEQ ID NO: 27574 - DNA, 33 bp, unidentified
  source 1..33: mol_type = unassigned DNA; note = methanogen bacteria
ctcggattttcaacagtcagtggagatccattc

SEQ ID NO: 27575 - DNA, 42 bp, unidentified
  source 1..42: mol_type = unassigned DNA; note = methanogen bacteria
gcaacatgggacaacatgtggggtcttggaagccagacactt

SEQ ID NO: 27576 - DNA, 177 bp, unidentified
  source 1..177: mol_type = unassigned DNA; note = methanogen bacteria
gaattatcgatatttgtcagctggattttggccaataatccgaatactgatgtcaattcagtgatgtctcaaatttcatcttatctaccctcttatgtcgatgtcaattctctgaattcatatattgattctgtaattagtaatgttggaagttatcttctaaattattctgtcaag

SEQ ID NO: 27577 - DNA, 33 bp, unidentified
  source 1..33: mol_type = unassigned DNA; note = methanogen bacteria
ggtccgcagatgggaatcgatccgctttttaca

SEQ ID NO: 27578 - DNA, 177 bp, unidentified
  source 1..177: mol_type = unassigned DNA; note = methanogen bacteria
gaagtatcgacttttgtcacttggattttagccaataatccggatactgatataaatagtgcaatgtatcaaatttcagggtatttgccgccaggagttgatgttaattcaattaattcttatttggactcagcaattaatgatattggaagttatattcttaattattctgttaaa

SEQ ID NO: 27579 - DNA, 69 bp, unidentified
  source 1..69: mol_type = unassigned DNA; note = methanogen bacteria
atgacagatatattcaatccaattgtaaggccaatcacacacatatttctgatgggatcatccaaaggc

SEQ ID NO: 27580 - DNA, 183 bp, unidentified
  source 1..183: mol_type = unassigned DNA; note = methanogen bacteria
agacttcagatgggaattaaactcaacaccattttctgttccatgacaggtacaatgagttcaacaagcattttgcacacccacttgttaaagtcaattttaggagcagtcataacaccaattatggggccgtttgtgcaaagcggcatcaacacgggcgtcggtttatatgcatatgttccg

SEQ ID NO: 27581 - DNA, 249 bp, unidentified
  source 1..249: mol_type = unassigned DNA; note = methanogen bacteria
actgtagcctttgcaggtgcggaagccgactgctacacagtcgatgttgtaaatccaacagacaatattgacttaggaaacatcagcacacacgtccttgacgttcaaaacagcacaaataaaatcacatactacattgaacctaattacaatgagatgcaacttttaaatgatttaaaggttcctctgaataactcgtgtgagtattatacggtttcatggaacatatattcatatttacaggatgat

SEQ ID NO: 27582 - DNA, 162 bp, unidentified
  source 1..162: mol_type = unassigned DNA; note = methanogen bacteria
atggctatattttccggcgcttcatcctcctccacttatgtggacatcaacgcggcgttgtcatcaatatctacatatctgccgtggagatttgatgtgaattcaatctcaacatcaatcaactcatcccttcaggagattggaaggtatgtcctcaactac

SEQ ID NO: 27583 - DNA, 48 bp, unidentified
  source 1..48: mol_type = unassigned DNA; note = methanogen bacteria
acaggtcagatcgacatcacgccggattatacggtccggttcggtcaa

SEQ ID NO: 27584 - DNA, 48 bp, unidentified
  source 1..48: mol_type = unassigned DNA; note = methanogen bacteria
aatatgatatgggcgaggagcctgaggcttggattatcgcttaaatca

SEQ ID NO: 27585 - DNA, 102 bp, unidentified
  source 1..102: mol_type = unassigned DNA; note = methanogen bacteria
gatttccttctggagcacaagtatcactggaaagatttctccctcaattacctgttccccgcaaggatccttgagaaggttgggatggatgcaagcggaaag

SEQ ID NO: 27586 - DNA, 36 bp, unidentified
  source 1..36: mol_type = unassigned DNA; note = methanogen bacteria
aacaaattgagtaagaaagttcaaattacagtcaag

SEQ ID NO: 27587 - DNA, 183 bp, unidentified
  source 1..183: mol_type = unassigned DNA; note = methanogen bacteria
tatgaaatgtcatcactcataacatcaatgcttgcaagcagctcatacatggaattcaatgcctccctatctcaatttataacctatttgcctgtagaaggtgatcctacttctgtttccacatatttaaataattcattcgagtccatttcaggattcttattgaattattctgcaacagcc

SEQ ID NO: 27588 - DNA, 48 bp, unidentified
  source 1..48: mol_type = unassigned DNA; note = methanogen bacteria
ggtcatatgcaggtttatatgatatcccagatcaagcttcctttgacc

SEQ ID NO: 27589 - DNA, 42 bp, unidentified
  source 1..42: mol_type = unassigned DNA; note = methanogen bacteria
attaaattttattatgttaataatgtatttaaaattagctgg

SEQ ID NO: 27590 - DNA, 33 bp, unidentified
  source 1..33: mol_type = unassigned DNA; note = methanogen bacteria
aataagagtactaatactgaagcttttttcacg

SEQ ID NO: 27591 - DNA, 60 bp, unidentified
  source 1..60: mol_type = unassigned DNA; note = methanogen bacteria
aaatacactattccagttaacagttcctatgccaatgttagagatttaatcattttaatt

SEQ ID NO: 27592 - DNA, 33 bp, unidentified
  source 1..33: mol_type = unassigned DNA; note = methanogen bacteria
actcctccgaatatttctgttccatatataaat

SEQ ID NO: 27593 - DNA, 171 bp, unidentified
  source 1..171: mol_type = unassigned DNA; note = methanogen bacteria
ttcgaattgtcaggaatgctgtcaggttttctggcaacaaactcagcaacggacatcaacgcaacgctgtcatcggtaagcgcgtacctgccatggagcatcgacatcaactcaatatcatctcagatcaactcatccatgcatgaaatcggcagatacctactgaactac

SEQ ID NO: 27594 - DNA, 171 bp, unidentified
  source 1..171: mol_type = unassigned DNA; note = methanogen bacteria
atggaagtcacaggcatactgactggttttttagccactaattctgatgcgggagtaaatgcggcaatctcatccttatcccagtatatacctggtggtttggacataaattcaatttctgcatccatttattcttcagctcgcgaaataggaacctatgttctaaattat

SEQ ID NO: 27595 - DNA, 33 bp, unidentified
  source 1..33: mol_type = unassigned DNA; note = methanogen bacteria
gtcactccaaatatcatctatctggattacatt

SEQ ID NO: 27596 - DNA, 57 bp, unidentified
  source 1..57: mol_type = unassigned DNA; note = methanogen bacteria
ataggagcgccacacaatattgtcatgtacactgtatctaaaatcccgttcgaatca

SEQ ID NO: 27597 - DNA, 51 bp, unidentified
  source 1..51: mol_type = unassigned DNA; note = methanogen bacteria
aacattgattttttcacacggatatttgagagatggatcattggaaatgag

SEQ ID NO: 27598 - DNA, 45 bp, unidentified
  source 1..45: mol_type = unassigned DNA; note = methanogen bacteria
aaattgagtgcaacttacccaacatttattgatgctatattcggt

SEQ ID NO: 27599 - DNA, 165 bp, unidentified
  source 1..165: mol_type = unassigned DNA; note = methanogen bacteria
gagctttcaggtatgatttcaggatttttagcttcaaattcatatagggacatcaacaattccctgacaatggtttcaacatatcttccatggaaatttgatataaattccatttcagcatccatgaattcatcccttcagcaggttggaagttatgttttaaat

SEQ ID NO: 27600 - DNA, 105 bp, unidentified
  source 1..105: mol_type = unassigned DNA; note = methanogen bacteria
gtcacaggcaattataatgtcctggcaaaattaatagagatgttcagcgtttccaactgctataaatatctaatttttaatgtttcgccaacatatgctcatctg

SEQ ID NO: 27601 - DNA, 33 bp, unidentified
  source 1..33: mol_type = unassigned DNA; note = methanogen bacteria
ggattcaaattcagttattacttctataggaac

SEQ ID NO: 27602 - DNA, 36 bp, unidentified
  source 1..36: mol_type = unassigned DNA; note = methanogen bacteria
aacattacttttattcacctgcatggagatcttggc

SEQ ID NO: 27603 - DNA, 168 bp, unidentified
  source 1..168: mol_type = unassigned DNA; note = methanogen bacteria
gagattatgacgatattatccggcacattatcttcaagtatgtatgttgacatcaattccttactgtcatcattatccacttacttgccatggaattttgatataaattccatttcagcttcaataacttcatcgctccaggatattggaaaatatgtcctggattat

SEQ ID NO: 27604 - DNA, 48 bp, unidentified
  source 1..48: mol_type = unassigned DNA; note = methanogen bacteria
tcatatacaaaggttacaacatccatctttttaattcctctgtttgga

SEQ ID NO: 27605 - DNA, 45 bp, unidentified
  source 1..45: mol_type = unassigned DNA; note = methanogen bacteria
ttatcatttacctccatcatgatgagatcgtattataaaaaccat

SEQ ID NO: 27606 - DNA, 36 bp, unidentified
  source 1..36: mol_type = unassigned DNA; note = methanogen bacteria
agatttgtcaaagtatttataaattccaatggagga

SEQ ID NO: 27607 - DNA, 159 bp, unidentified
  source 1..159: mol_type = unassigned DNA; note = methanogen bacteria
atagcgatattgtccggtgcatcatcctccagcacatatgcagatatcaatgcattgttctcatccatatcagcttatcttccatggagttttgatgtaaattcaatctcaacatcagtcaattcatctatccaggaaatcggaagatatgtcctgaat

SEQ ID NO: 27608 - DNA, 45 bp, unidentified
  source 1..45: mol_type = unassigned DNA; note = methanogen bacteria
atcaaacactatctctatgatagtgatattctcatttccgttaca

SEQ ID NO: 27609 - DNA, 33 bp, unidentified
  source 1..33: mol_type = unassigned DNA; note = methanogen bacteria
aacaggtccgcaaataccgaagcgattataaat

SEQ ID NO: 27610 - DNA, 72 bp, unidentified
  source 1..72: mol_type = unassigned DNA; note = methanogen bacteria
tatcatgtatatgtcaatggcgctcctgccaatgtaagatgtctgattattatgataggaggtcttattgga

SEQ ID NO: 27611 - DNA, 33 bp, unidentified
  source 1..33: mol_type = unassigned DNA; note = methanogen bacteria
actccaaaagcaatttcttttccgtttgctcaa

SEQ ID NO: 27612 - DNA, 177 bp, unidentified
  source 1..177: mol_type = unassigned DNA; note = methanogen bacteria
gaaatatcgatttttgccagttgggttttagcaaacaattacaatactgacgtgactagcgcaatatctcagatatcagcgtatctgccatctggagttgatgttaattctcttaattcatttatagactcaacaattaaaaatgtagggagctatgttctaaattattcagttaaa

SEQ ID NO: 27613 - DNA, 84 bp, unidentified
  source 1..84: mol_type = unassigned DNA; note = methanogen bacteria
atggaattgaatttagttgattccatctattattctgtcattacaatggctactgtaggatatggagattatatacctcataca

SEQ ID NO: 27614 - DNA, 33 bp, unidentified
  source 1..33: mol_type = unassigned DNA; note = methanogen bacteria
tattatttcactaattatgattttgacatatcc

SEQ ID NO: 27615 - DNA, 36 bp, unidentified
  source 1..36: mol_type = unassigned DNA; note = methanogen bacteria
aacaaaagtacaaatacagaaacttttttcgctccg

SEQ ID NO: 27616 - DNA, 57 bp, unidentified
  source 1..57: mol_type = unassigned DNA; note = methanogen bacteria
aaataccatgtttatgtcggagatactccagccaatgtaaggtgtctgatcatcatg

SEQ ID NO: 27617 - DNA, 30 bp, unidentified
  source 1..30: mol_type = unassigned DNA; note = methanogen bacteria
actccagattacatttccttccctttcatt

SEQ ID NO: 27618 - DNA, 69 bp, unidentified
  source 1..69: mol_type = unassigned DNA; note = methanogen bacteria
ccaataattacaggtaatgcatctatagaacgtattttaatgttaaaagatcatttatattataatatt

SEQ ID NO: 27619 - DNA, 33 bp, unidentified
  source 1..33: mol_type = unassigned DNA; note = methanogen bacteria
gttaagccgggcattaattatttaagttatata

SEQ ID NO: 27620 - DNA, 51 bp, unidentified
  source 1..51: mol_type = unassigned DNA; note = methanogen bacteria
aacatttcatttttcaatttgctatttaggaaatggattgttggcaatgaa

SEQ ID NO: 27621 - DNA, 48 bp, unidentified
  source 1..48: mol_type = unassigned DNA; note = methanogen bacteria
gggcaaatgcaggtttatatgatatctcaggttaaacttccattgacc

SEQ ID NO: 27622 - DNA, 39 bp, unidentified
  source 1..39: mol_type = unassigned DNA; note = methanogen bacteria
agggtcttgagtgtagataattttgctttaggatactct

SEQ ID NO: 27623 - DNA, 66 bp, unidentified
  source 1..66: mol_type = unassigned DNA; note = methanogen bacteria
ttaaatccatcatactccattccggagtttacaacacaaggcatgtatttcactgacaaaagcatt

SEQ ID NO: 27624 - DNA, 90 bp, unidentified
  source 1..90: mol_type = unassigned DNA; note = methanogen bacteria
tttttccacggccagccacagcttgcagcaatttatggtgcggcacctgcagtagcagtcaatgaaatggcaacagtattggtaggacct

SEQ ID NO: 27625 - DNA, 84 bp, unidentified
  source 1..84: mol_type = unassigned DNA; note = methanogen bacteria
atcacaaattctggcggagcatatccctataactataaaactgtattgagcagctttctgcttttaaacggtatcggttacgtt

SEQ ID NO: 27626 - DNA, 45 bp, unidentified
  source 1..45: mol_type = unassigned DNA; note = methanogen bacteria
tttaacggatttcagccgacacagataatgaaatatcctccgaca

SEQ ID NO: 27627 - DNA, 30 bp, unidentified
  source 1..30: mol_type = unassigned DNA; note = methanogen bacteria
ttctatccatacgttacaaccagtcttaaa

SEQ ID NO: 27628 - DNA, 60 bp, unidentified
  source 1..60: mol_type = unassigned DNA; note = methanogen bacteria
gtcctcaagacaaatcctgtgggtgttcttgactgggcattgggaaaaggcgttacatgg

SEQ ID NO: 27629 - DNA, 39 bp, unidentified
  source 1..39: mol_type = unassigned DNA; note = methanogen bacteria
aatacattttatactacatcttctttttcttatcattca

SEQ ID NO: 27630 - DNA, 78 bp, unidentified
  source 1..78: mol_type = unassigned DNA; note = methanogen bacteria
atcacaaaaggaaattatccatattcattttcaactattctgagaagctttttattattggatggaatagggtatgtc

SEQ ID NO: 27631 - DNA, 45 bp, unidentified
  source 1..45: mol_type = unassigned DNA; note = methanogen bacteria
tacaatcaaatacaagcgactcagattatgaaatatcctccaacc

SEQ ID NO: 27632 - DNA, 33 bp, unidentified
  source 1..33: mol_type = unassigned DNA; note = methanogen bacteria
tacattaatgtaggattcggcattgatattaat

SEQ ID NO: 27633 - DNA, 33 bp, unidentified
  source 1..33: mol_type = unassigned DNA; note = methanogen bacteria
cacaagctgaatatgccgactcttctcgatccc

SEQ ID NO: 27634 - DNA, 72 bp, unidentified
  source 1..72: mol_type = unassigned DNA; note = methanogen bacteria
gtccacatgaacgtaaacaacgctcccgccaacatcagatgccttgtggtcatgataagcggccttttcgga

SEQ ID NO: 27635 - DNA, 30 bp, unidentified
  source 1..30: mol_type = unassigned DNA; note = methanogen bacteria
aatatcgtattcggcattgatttcaagcct

SEQ ID NO: 27636 - DNA, 36 bp, unidentified
  source 1..36: mol_type = unassigned DNA; note = methanogen bacteria
agccacaagctgaatatgccgacgcttctggaccca

SEQ ID NO: 27637 - DNA, 72 bp, unidentified
  source 1..72: mol_type = unassigned DNA; note = methanogen bacteria
gtccacatgaacgtcaacaacgctcccgccaacatcagatgccttgtggtcatgataagcggccttttcgga

SEQ ID NO: 27638 - DNA, 30 bp, unidentified
  source 1..30: mol_type = unassigned DNA; note = methanogen bacteria
actccccctgacatttcatttccatttgtc

SEQ ID NO: 27639 - DNA, 93 bp, unidentified
  source 1..93: mol_type = unassigned DNA; note = methanogen bacteria
tatgctccggacccgataccttttcacagggtgtgggacgtcatctgcgggcgcggcacctgggccgacggcctcatcgtcccgatgaacgcc

SEQ ID NO: 27640 - DNA, 69 bp, unidentified
  source 1..69: mol_type = unassigned DNA; note = methanogen bacteria
atatcgggcgacaagatggaggacatcgtgttctggaccatgggcagcctgtcccgcgcggacttcggg

SEQ ID NO: 27641 - DNA, 87 bp, unidentified
  source 1..87: mol_type = unassigned DNA; note = methanogen bacteria
ttaagtacattctacccaacatttattgatgcaatatatggactcagcaatccgcaaaatgtaattaataatattttagcccctaaa

SEQ ID NO: 27642 - DNA, 42 bp, unidentified
  source 1..42: mol_type = unassigned DNA; note = methanogen bacteria
attggtccaggtgaagtattaaatgctttgcaaacagctgat

SEQ ID NO: 27643 - DNA, 33 bp, unidentified
  source 1..33: mol_type = unassigned DNA; note = methanogen bacteria
tattctatggcgggagtaccatcatccatatcc

SEQ ID NO: 27644 - DNA, 165 bp, unidentified
  source 1..165: mol_type = unassigned DNA; note = methanogen bacteria
gaaacttcaactctcgtatcatgggttttagctaataattcctactctgatgttaatcagattatttcggatatttccaaatatctgcctggaattaatgtaactgaagttaattcatacattgattcagcaattcaaaatatagcaagttatattttaaactat

SEQ ID NO: 27645 - DNA, 42 bp, unidentified
  source 1..42: mol_type = unassigned DNA; note = methanogen bacteria
agatattattatatcgagggcattttcaaaatttcctttgat

SEQ ID NO: 27646 - DNA, 33 bp, unidentified
  source 1..33: mol_type = unassigned DNA; note = methanogen bacteria
aataaaagtacaaactccgatgctttcatttca

SEQ ID NO: 27647 - DNA, 72 bp, unidentified
  source 1..72: mol_type = unassigned DNA; note = methanogen bacteria
tatatccttttcataaatgactcttatgtaaatgttagaagtatggttgttatgactgccggtttgtttgga

SEQ ID NO: 27648 - DNA, 30 bp, unidentified
  source 1..30: mol_type = unassigned DNA; note = methanogen bacteria
tcacctcaaaacatttccattccatatgtg

SEQ ID NO: 27649 - DNA, 99 bp, unidentified
  source 1..99: mol_type = unassigned DNA; note = methanogen bacteria
tggatcgatgccggccacagctattcgttctcccaggtgattgacaccctcctcggagggggcacctggggatccaggatcatcatcctggacaccaac

SEQ ID NO: 27650 - DNA, 30 bp, unidentified
  source 1..30: mol_type = unassigned DNA; note = methanogen bacteria
ctcttcaccatccccttcatacccgggacc

SEQ ID NO: 27651 - DNA, 66 bp, unidentified
  source 1..66: mol_type = unassigned DNA; note = methanogen bacteria
atcgcaggggacaggatggaaggaatcgtcttctggactgtgggcaacctcggcaacgccaactgg

SEQ ID NO: 27652 - DNA, 33 bp, unidentified
  source 1..33: mol_type = unassigned DNA; note = methanogen bacteria
ttaaaaaaaaatattgaaatttttcactttaac

SEQ ID NO: 27653 - DNA, 30 bp, unidentified
  source 1..30: mol_type = unassigned DNA; note = methanogen bacteria
aatatatatagacacccattaacttcattt

SEQ ID NO: 27654 - DNA, 54 bp, unidentified
  source 1..54: mol_type = unassigned DNA; note = methanogen bacteria
ggaaatttctttgatatttatccaaaaatgaatctgtcatctacacttgattta

SEQ ID NO: 27655 - DNA, 39 bp, unidentified
  source 1..39: mol_type = unassigned DNA; note = methanogen bacteria
ccatttttcaaaacactaaattttaacagtacaaatatg

SEQ ID NO: 27656 - DNA, 30 bp, unidentified
  source 1..30: mol_type = unassigned DNA; note = methanogen bacteria
tctacagttttaggcgatgtttttccatct

SEQ ID NO: 27657 - DNA, 42 bp, unidentified
  source 1..42: mol_type = unassigned DNA; note = methanogen bacteria
tatggggcggtaagatctgtaagacatagaggtcgtaggcgc

SEQ ID NO: 27658 - DNA, 93 bp, unidentified
  source 1..93: mol_type = unassigned DNA; note = methanogen bacteria
atcccttctggagaaataacctcatatacactcagttattccttaaataatctgcaacattggggaataatggtcggactgacaccaaccgac

SEQ ID NO: 27659 - DNA, 69 bp, unidentified
  source 1..69: mol_type = unassigned DNA; note = methanogen bacteria
cctggaatgcttgaaaaccagacattgatgaatttcctccagattaaggaaatgctttatcatgtagga

SEQ ID NO: 27660 - DNA, 30 bp, unidentified
  source 1..30: mol_type = unassigned DNA; note = methanogen bacteria
aaatttattaaattcagaaaacgtcgacga

SEQ ID NO: 27661 - DNA, 33 bp, unidentified
  source 1..33: mol_type = unassigned DNA; note = methanogen bacteria
ctaaaacccagtttcgattactttaactacatc

SEQ ID NO: 27662 - DNA, 54 bp, unidentified
  source 1..54: mol_type = unassigned DNA; note = methanogen bacteria
attggagcgcctcataatattgtaatgtatacagtttcaaatgtctcatttgaa

SEQ ID NO: 27663 - DNA, 51 bp, unidentified
  source 1..51: mol_type = unassigned DNA; note = methanogen bacteria
aatatctcatttttcacatcactctttgaaaggtatattgctggcaatgaa

SEQ ID NO: 27664 - DNA, 69 bp, unidentified
  source 1..69: mol_type = unassigned DNA; note = methanogen bacteria
cctggaatgcttgaaaaccagactttaatgaacttcctccagataaaggaaatgttctatcacatggga

SEQ ID NO: 27665 - DNA, 36 bp, unidentified
  source 1..36: mol_type = unassigned DNA; note = methanogen bacteria
ctgaaggaaaacattctaattataaatttcaatata

SEQ ID NO: 27666 - DNA, 30 bp, unidentified
  source 1..30: mol_type = unassigned DNA; note = methanogen bacteria
aatatatatgctcgcccattagtcgcattc

SEQ ID NO: 27667 - DNA, 57 bp, unidentified
  source 1..57: mol_type = unassigned DNA; note = methanogen bacteria
tttggaaatttctttgacatatatccgaaaatgaacctgtcttctactctggatttg

SEQ ID NO: 27668 - DNA, 39 bp, unidentified
  source 1..39: mol_type = unassigned DNA; note = methanogen bacteria
ccgtttttcaaaaccttgacactgagcagcacaaatatg

SEQ ID NO: 27669 - DNA, 33 bp, unidentified
  source 1..33: mol_type = unassigned DNA; note = methanogen bacteria
gttaagccaagcattaattacttaaattatatt

SEQ ID NO: 27670 - DNA, 51 bp, unidentified
  source 1..51: mol_type = unassigned DNA; note = methanogen bacteria
aatatagggttctttagggagctcttcaccagatatattattggcaatgag

SEQ ID NO: 27671 - DNA, 57 bp, unidentified
  source 1..57: mol_type = unassigned DNA; note = methanogen bacteria
tatttctttgacatggaagaagcaatacgcataataactgcaaatgaaagatttacc

SEQ ID NO: 27672 - DNA, 36 bp, unidentified
  source 1..36: mol_type = unassigned DNA; note = methanogen bacteria
agattcgctaaattccacattaactgcggatatgaa

SEQ ID NO: 27673 - DNA, 33 bp, unidentified
  source 1..33: mol_type = unassigned DNA; note = methanogen bacteria
gttttaccaaatagggattatttgaattacatc

SEQ ID NO: 27674 - DNA, 54 bp, unidentified
  source 1..54: mol_type = unassigned DNA; note = methanogen bacteria
attggtgctccgcacaatattgtaatgtatactgtgtcccatattccatttcaa

SEQ ID NO: 27675 - DNA, 51 bp, unidentified
  source 1..51: mol_type = unassigned DNA; note = methanogen bacteria
agcattcctttcttcaattccctatttaagcaatggattataggtaatgag

SEQ ID NO: 27676 - DNA, 33 bp, unidentified
  source 1..33: mol_type = unassigned DNA; note = methanogen bacteria
atcaagccaagcattgcttatttggattatatc

SEQ ID NO: 27677 - DNA, 51 bp, unidentified
  source 1..51: mol_type = unassigned DNA; note = methanogen bacteria
aacattcctttctttaatttattgtttaaaaaatggatcattggcaatgag

SEQ ID NO: 27678 - DNA, 33 bp, unidentified
  source 1..33: mol_type = unassigned DNA; note = methanogen bacteria
ataaaatatattagatataggcgtcatcgcaaa

SEQ ID NO: 27679 - DNA, 33 bp, unidentified
  source 1..33: mol_type = unassigned DNA; note = methanogen bacteria
gttaaaccaagcttggattatttaaattatata

SEQ ID NO: 27680 - DNA, 51 bp, unidentified
  source 1..51: mol_type = unassigned DNA; note = methanogen bacteria
aatattccatttttcaatgaattgtttaagacttggattgttggaaatgag

SEQ ID NO: 27681 - DNA, 90 bp, unidentified
  source 1..90: mol_type = unassigned DNA; note = methanogen bacteria
acgcctggagagatacactacaatctgctggctccggtcttgaaaacattgaatgactggggaataatgctttcctattcccagacagaa

SEQ ID NO: 27682 - DNA, 30 bp, unidentified
  source 1..30: mol_type = unassigned DNA; note = methanogen bacteria
tttcaaactccaatttcgtcaggagtatca

SEQ ID NO: 27683 - DNA, 63 bp, unidentified
  source 1..63: mol_type = unassigned DNA; note = methanogen bacteria
ataggcaatccccgaagcggaattgcagtttatatgtcatatttaatatctgaaatgtcaata

SEQ ID NO: 27684 - DNA, 66 bp, unidentified
  source 1..66: mol_type = unassigned DNA; note = methanogen bacteria
cctataatgacaggaaacgaatcattagaacatatattaatattaaaagatcatttatattatata

SEQ ID NO: 27685 - DNA, 39 bp, unidentified
  source 1..39: mol_type = unassigned DNA; note = methanogen bacteria
ggaatattcattggaggttcacagctggccccaataaat

SEQ ID NO: 27686 - DNA, 60 bp, unidentified
  source 1..60: mol_type = unassigned DNA; note = methanogen bacteria
gacaatatactgcagcttttaaacattccttcaaatattttctatcaggctaaaagctat

SEQ ID NO: 27687 - DNA, 45 bp, unidentified
  source 1..45: mol_type = unassigned DNA; note = methanogen bacteria
gttggaccccaacagattatcggtgctctgcaaactgccgatata

SEQ ID NO: 27688 - DNA, 33 bp, unidentified
  source 1..33: mol_type = unassigned DNA; note = methanogen bacteria
tattccatggccggaattacggcttcggtcagt

SEQ ID NO: 27689 - DNA, 33 bp, unidentified
  source 1..33: mol_type = unassigned DNA; note = methanogen bacteria
gtaagatcagtcagaaccaggcgtcgcagacgc

SEQ ID NO: 27690 - DNA, 33 bp, unidentified
  source 1..33: mol_type = unassigned DNA; note = methanogen bacteria
gtaaagccaagcatggattatattgattatatc

SEQ ID NO: 27691 - DNA, 57 bp, unidentified
  source 1..57: mol_type = unassigned DNA; note = methanogen bacteria
attggtgctccccataatattgttctctacactgcatccaatattccatttgattca

SEQ ID NO: 27692 - DNA, 51 bp, unidentified
  source 1..51: mol_type = unassigned DNA; note = methanogen bacteria
tgcattccatttttcaatacctttttcaagagccatatcatgggaaacgaa

SEQ ID NO: 27693 - DNA, 108 bp, unidentified
  source 1..108: mol_type = unassigned DNA; note = methanogen bacteria
ggaagatatccgatcagtccgattgatgtggtcaatacaatattgtgccctatttttccgcaattggaggtaaatcccacaataaccacaatcgtatttgaaataagg

SEQ ID NO: 27694 - DNA, 72 bp, unidentified
  source 1..72: mol_type = unassigned DNA; note = methanogen bacteria
atcgcagaccctgacgataaactgcctgaaattgtctattggctgatggggtcacttgcttccatcaatgcc

SEQ ID NO: 27695 - DNA, 33 bp, unidentified
  source 1..33: mol_type = unassigned DNA; note = methanogen bacteria
gttaaacccactctaaattattcaacttatatt

SEQ ID NO: 27696 - DNA, 54 bp, unidentified
  source 1..54: mol_type = unassigned DNA; note = methanogen bacteria
atcggagcgccccacaatattgtgatgtatacggtatccaggatcccattcgaa

SEQ ID NO: 27697 - DNA, 51 bp, unidentified
  source 1..51: mol_type = unassigned DNA; note = methanogen bacteria
aacatcccatttttcaatgcgcttttcaccaaatggatcactggaaacgag

SEQ ID NO: 27698 - DNA, 69 bp, unidentified
  source 1..69: mol_type = unassigned DNA; note = methanogen bacteria
atgcctggcgtgattgaaaatcagacactgatgaactttttgcatataaaagagatgttctatcatatt

SEQ ID NO: 27699 - DNA, 66 bp, unidentified
  source 1..66: mol_type = unassigned DNA; note = methanogen bacteria
ccaggaatgcttgaaagcaaaactttaatgaactttttacaaatcaaagagatgttctatcatatt

SEQ ID NO: 27700 - DNA, 108 bp, unidentified
  source 1..108: mol_type = unassigned DNA; note = methanogen bacteria
ggaagatatccaataagtcccattgatgtagtcaatacaatattgtgcccaatatttcctcaattggaagtgaactctacaataacaacaattgtttatgaaataagg

SEQ ID NO: 27701 - DNA, 72 bp, unidentified
  source 1..72: mol_type = unassigned DNA; note = methanogen bacteria
atagcagatcctgatgataaactgcctgaaattgtatattggctaatgggctctttggcttccataaacgct

SEQ ID NO: 27702 - DNA, 93 bp, unidentified
  source 1..93: mol_type = unassigned DNA; note = methanogen bacteria
cattcatattatccaacattcatggaagctatttacgggctttcaaacccacagaatgtaatcaacaatatggtaagtccgcctccatcagta

SEQ ID NO: 27703 - DNA, 33 bp, unidentified
  source 1..33: mol_type = unassigned DNA; note = methanogen bacteria
gttgcaggacttggtcagacagctattgcggga

SEQ ID NO: 27704 - DNA, 57 bp, unidentified
  source 1..57: mol_type = unassigned DNA; note = methanogen bacteria
gaacctctgctcagaacatatggtgccagcggtcaggcattggctgaggcaatgaaa

SEQ ID NO: 27705 - DNA, 36 bp, unidentified
  source 1..36: mol_type = unassigned DNA; note = methanogen bacteria
tcatcaatcggtggtgaatacggtattgcagcattc

SEQ ID NO: 27706 - DNA, 108 bp, unidentified
  source 1..108: mol_type = unassigned DNA; note = methanogen bacteria
ggaagatatccaatcagcccagtagatgtggttaaaacaattttatctccaatatttccacaattgaaagtttcacaaactattactactatagtttttgaaatacga

SEQ ID NO: 27707 - DNA, 72 bp, unidentified
  source 1..72: mol_type = unassigned DNA; note = methanogen bacteria
gtagcggatcctcaggataaacttcctgagattatttactggttaatgggaagtttatcttctgtaacaatt

SEQ ID NO: 27708 - DNA, 108 bp, unidentified
  source 1..108: mol_type = unassigned DNA; note = methanogen bacteria
ggacgatatcctgtcagtcctgttgatgtggtaaagacactgctgtgtccgatatttccgcaaatggaagtttcatcaacaattacaacaattgtttatgagataagg

SEQ ID NO: 27709 - DNA, 72 bp, unidentified
  source 1..72: mol_type = unassigned DNA; note = methanogen bacteria
atagcagatcctgatgacaagttgcctgaaatcgtatactggcttatgggatcactggcttccataaatatg

SEQ ID NO: 27710 - DNA, 45 bp, unidentified
  source 1..45: mol_type = unassigned DNA; note = methanogen bacteria
atgattaattattataatataattaataatataaattctatggaa

SEQ ID NO: 27711 - DNA, 66 bp, unidentified
  source 1..66: mol_type = unassigned DNA; note = methanogen bacteria
cctgatgtaataggtaatcaaacattggctaatttcttacagattaaagagatgttttatcatatc

SEQ ID NO: 27712 - DNA, 171 bp, unidentified
  source 1..171: mol_type = unassigned DNA; note = methanogen bacteria
tttataatatctggattcctggttggtttcttcagttcaaaccctaatttggatatagatagtgtaatatctcaattatcaacatatattccacaaaatccatttttagataagaatagtattgttccagcaattcaaagtgcaggtaaatctgtgttgacttatttggtt

SEQ ID NO: 27713 - DNA, 108 bp, unidentified
  source 1..108: mol_type = unassigned DNA; note = methanogen bacteria
ggaagatatccggtaagtccggttgatgttgtaaagacaattttaagtccaatttttccacagttaactgtttcatcaacaataaatactattgtttggcaaattagg

SEQ ID NO: 27714 - DNA, 72 bp, unidentified
  source 1..72: mol_type = unassigned DNA; note = methanogen bacteria
gttgctgatcctgaagataagttgcctgaaattgtttattggttaatgggtagtttggcttcaattacaatg

SEQ ID NO: 27715 - DNA, 69 bp, unidentified
  source 1..69: mol_type = unassigned DNA; note = methanogen bacteria
atgcctggcgtaataggtaatcaaacattagcaaacttccttcaaattaaagagatgttttatcatata

SEQ ID NO: 27716 - DNA, 168 bp, unidentified
  source 1..168: mol_type = unassigned DNA; note = methanogen bacteria
atttccggatttttgtctacattttacgtttcaaatcaaaattttgatgtaaacactgtactatctcaaatatcatattacattccggataatccctttttaaatgagaataattttgttcaaacaattgaaagtgcaggtaaatatgtactaaattatctggtaagt

SEQ ID NO: 27717 - DNA, 93 bp, unidentified
  source 1..93: mol_type = unassigned DNA; note = methanogen bacteria
attccttccggagagataacatcagacatgctcagttcttttttaaaaagtctgcaggattggggaataatggtcggatttacaccaaccgac

SEQ ID NO: 27718 - DNA, 33 bp, unidentified
  source 1..33: mol_type = unassigned DNA; note = methanogen bacteria
gtccaaccaactatcaattatttgaattatatt

SEQ ID NO: 27719 - DNA, 54 bp, unidentified
  source 1..54: mol_type = unassigned DNA; note = methanogen bacteria
attggggctccgcacaatatcgtgatgtttacagtgtctcatattccgtttgaa

SEQ ID NO: 27720 - DNA, 51 bp, unidentified
  source 1..51: mol_type = unassigned DNA; note = methanogen bacteria
aacattccatttttcaattccttatttagacagtttatcacaggcaatgaa

SEQ ID NO: 27721 - DNA, 108 bp, unidentified
  source 1..108: mol_type = unassigned DNA; note = methanogen bacteria
ggcagatatccgataagtccgattgatgttataaacacattgctgtgcccaatatttcctcaatgtgaagtaaattcaacaataacaactgttgtttttgaaatcaga

SEQ ID NO: 27722 - DNA, 75 bp, unidentified
  source 1..75: mol_type = unassigned DNA; note = methanogen bacteria
attgcagaccctgatgataagcttcctgaaattgtatactggttaatgggaagtttggcatccatcaatgatgat

SEQ ID NO: 27723 - DNA, 33 bp, unidentified
  source 1..33: mol_type = unassigned DNA; note = methanogen bacteria
gtaaggccaagcattaactatttaaattatatt

SEQ ID NO: 27724 - DNA, 54 bp, unidentified
  source 1..54: mol_type = unassigned DNA; note = methanogen bacteria
atcggtgcgccccacaatatcgtgatgtatacggtatctaaaattccatttgaa

SEQ ID NO: 27725 - DNA, 51 bp, unidentified; identical to SEQ ID NO: 27697
  source 1..51: mol_type = unassigned DNA; note = methanogen bacteria

SEQ ID NO: 27726 - DNA, 54 bp, unidentified
  source 1..54: mol_type = unassigned DNA; note = methanogen bacteria
gacttcatcaccggactgttccctgatttcctcgcgggaaaggataacgcgggt

SEQ ID NO: 27727 - DNA, 108 bp, unidentified
  source 1..108: mol_type = unassigned DNA; note = methanogen bacteria
ggaagatatccaattagtccggttgatgttataaaaactatactaagcccaatattcccgcaattaacagtttcatcaacggttaatacaattgtttggcagataagg

SEQ ID NO: 27728 - DNA, 72 bp, unidentified
  source 1..72: mol_type = unassigned DNA; note = methanogen bacteria
atcgcggatcctgatgataaattacctgaaatagtttattggttaatgggaagtttagcttctgttacaatg

SEQ ID NO: 27729 - DNA, 66 bp, unidentified
  source 1..66: mol_type = unassigned DNA; note = methanogen bacteria
cctggaatgcttgaaagtaagacattgatgaacttcctgcaaatcaaggaaatgttctatcatgta

SEQ ID NO: 27730 - DNA, 33 bp, unidentified
  source 1..33: mol_type = unassigned DNA; note = methanogen bacteria
gtcaaacccagttttaattatttaaattacatt

SEQ ID NO: 27731 - DNA, 54 bp, unidentified
  source 1..54: mol_type = unassigned DNA; note = methanogen bacteria
attggagctcctcataatattgttttgtacacatcatcaaatattccattcgaa

SEQ ID NO: 27732 - DNA, 51 bp, unidentified
  source 1..51: mol_type = unassigned DNA; note = methanogen bacteria
aacattgcattttttaatttgttttttaaacagtggataacgggcaatgaa

SEQ ID NO: 27733 - DNA, 66 bp, unidentified
  source 1..66: mol_type = unassigned DNA; note = methanogen bacteria
cctggagtccttgaaaaccagacccttgcaaacttcctgcacatcaaggagatgttctatcacata

SEQ ID NO: 27734 - DNA, 108 bp, unidentified
  source 1..108: mol_type = unassigned DNA; note = methanogen bacteria
ggaagatatccaataagtccaatcgatgtgataaatacgatattatgcccaatatttccgcaattggaggtttctccaacaataacaacaatcgtttttgaaataagg

SEQ ID NO: 27735 - DNA, 72 bp, unidentified
  source 1..72: mol_type = unassigned DNA; note = methanogen bacteria
gtagcagaccctgacgacaagctgccggagattgtttattggcttatgggcagtttggcttctgtaacggcg

SEQ ID NO: 27736 - DNA, 54 bp, unidentified
  source 1..54: mol_type = unassigned DNA; note = methanogen bacteria
ttacaggcaacctacccaacatttatggatgcagtatttgcacttaaaaaccct

SEQ ID NO: 27737 - DNA, 87 bp, unidentified
  source 1..87: mol_type = unassigned DNA; note = methanogen bacteria
ttaactacattctatccaacatttatggatgccatatatgggcttagcaatccgcaaaatgtaattaataatattttaactcccaaa

SEQ ID NO: 27738 - DNA, 66 bp, unidentified
  source 1..66: mol_type = unassigned DNA; note = methanogen bacteria
ccaggaatgcttgaaaaccagacactcatgaacttcctgcacatcaaggaaatgttttatcatata

SEQ ID NO: 27739 - DNA, 66 bp, unidentified
  source 1..66: mol_type = unassigned DNA; note = methanogen bacteria
ccgggaatgcttgaaaaccagacactaatgaatttcctgcaaatcaaggaaatgttctaccatata

SEQ ID NO: 27740 - DNA, 171 bp, unidentified
  source 1..171: mol_type = unassigned DNA; note = methanogen bacteria
gtaatatctggagttttaacggacttttttgctgcaaatcctaatttggacattaattctacaatgtctcaattatccgcatatgttccccaaaacccatttttcgatgcaaacaatttagttccaactattcaaagcgctggaaaatatgtattgtcttatctggttgga

SEQ ID NO: 27741 - DNA, 66 bp, unidentified
  source 1..66: mol_type = unassigned DNA; note = methanogen bacteria
cctggcgttcttgaaaataaggtattgggtaactttttacattttaaagagacgttttatcatata

SEQ ID NO: 27742 - DNA, 108 bp, unidentified
  source 1..108: mol_type = unassigned DNA; note = methanogen bacteria
gggagatatccaattagtccaattgatgtaattagtactattttatctccaatatttcctcaattagaagtatcatctacagttacaacaattgtttttgaaattagg

SEQ ID NO: 27743 - DNA, 72 bp, unidentified
  source 1..72: mol_type = unassigned DNA; note = methanogen bacteria
atcgcagatcctgacgataaacttcccgaaattgtttactggttaatgggttctttagcgtcaattaatgca

SEQ ID NO: 27744 - DNA, 204 bp, unidentified
  source 1..204: mol_type = unassigned DNA; note = methanogen bacteria
gatttgtcccctattgatcctgtaagtgtttatttaaaaggtgctgcagtttctgaagcccaaagaactattcttgaacaatattttggtgttaatgttccattacacacaaaaattttccattggttagttgatttattccagggaaatcttggaacatctttaatttttagagctccagttttagatgttattattcaaaaa

SEQ ID NO: 27745 - DNA, 93 bp, unidentified
  source 1..93: mol_type = unassigned DNA; note = methanogen bacteria
gctgtatatcttggatggttccctattggatttggtgttccaattggggttagtagtaatgatgctacttttgctcaatgggcatcaagactg

SEQ ID NO: 27746 - DNA, 72 bp, unidentified
  source 1..72: mol_type = unassigned DNA; note = methanogen bacteria
gaacaggtattttcctatcctggaataggccaaactgctgttgctgcaggtcttcaaagtgatgttcctttg

SEQ ID NO: 27747 - DNA, 108 bp, unidentified
  source 1..108: mol_type = unassigned DNA; note = methanogen bacteria
ggaaggtatccgataagtccagtcgatgttgtaagcacattgctctcaccgatatttccgcagatggaagtttcatccacaataacgacaatagtctttgagataagg

SEQ ID NO: 27748 - DNA, 72 bp, unidentified
  source 1..72: mol_type = unassigned DNA; note = methanogen bacteria
atagcagatcctgacgacaagctccctgaaatcgtttactggctcatgggatcattggcatcaatcaatgcc

SEQ ID NO: 27749 - DNA, 33 bp, unidentified
  source 1..33: mol_type = unassigned DNA; note = methanogen bacteria
gttcagccaaatgtaaattatttgaattatatc

SEQ ID NO: 27750 - DNA, 57 bp, unidentified
  source 1..57: mol_type = unassigned DNA; note = methanogen bacteria
atcggagctccccacaatattgtaatgtacactgtctccaaaattccctttgacaca

SEQ ID NO: 27751 - DNA, 51 bp, unidentified
  source 1..51: mol_type = unassigned DNA; note = methanogen bacteria
aatatttcatttttcaattcattgtttacaaggtggattgctggaaatgaa

SEQ ID NO: 27752 - DNA, 66 bp, unidentified
  source 1..66: mol_type = unassigned DNA; note = methanogen bacteria
cctggaatgattgaaaaccaaactttaatgaatttccttaagattaaggagatgttctatcatatt

SEQ ID NO: 27753 - DNA, 165 bp, unidentified
  source 1..165: mol_type = unassigned DNA; note = methanogen bacteria
tctggcatgttgaatgattttttcatgtcaaatccaaatctggatataaactatgcaatatctcagatatcaatgtatattccacaaaatccattttttgatggaaacaatattgttccggctattggtgatggtgcaaaatatgtgcttaattatctggtttct

SEQ ID NO: 27754 - DNA, 69 bp, unidentified
  source 1..69: mol_type = unassigned DNA; note = methanogen bacteria
atgcctggcgtaataggtaatcagacattagcaaacttccttcaaattaaagagatgttttatcatgta

SEQ ID NO: 27755 - DNA, 33 bp, unidentified
  source 1..33: mol_type = unassigned DNA; note = methanogen bacteria
gtaagaccaagcattaactatttaaattatatc

SEQ ID NO: 27756 - DNA, 51 bp, unidentified
  source 1..51: mol_type = unassigned DNA; note = methanogen bacteria
aatatcccatttttcaatgcgcttttcaccaaatggattggcggaaacgag

SEQ ID NO: 27757 - DNA, 69 bp, unidentified
  source 1..69: mol_type = unassigned DNA; note = methanogen bacteria
atgcctggaacacttgaaaataagacacttatgaacttcctgcaaatcaaggaaatgttctatcacata

SEQ ID NO: 27758 - DNA, 33 bp, unidentified
  source 1..33: mol_type = unassigned DNA; note = methanogen bacteria
gtcagacctagtcttgattatttgaattatatt

SEQ ID NO: 27759 - DNA, 54 bp, unidentified
  source 1..54: mol_type = unassigned DNA; note = methanogen bacteria
atcggggcgccccacaatatcgtgatgtatacggtatccaaaattccatttgaa

SEQ ID NO: 27760 - DNA, 51 bp, unidentified
  source 1..51: mol_type = unassigned DNA; note = methanogen bacteria
aacattccatttttcaatgcgcttttcaccagatggattgtaggcaatgag

SEQ ID NO: 27761 - DNA, 108 bp, unidentified
  source 1..108: mol_type = unassigned DNA; note = methanogen bacteria
ggaagatatccaatcagtcctgttgatgtaattaaaacaatattgtctcctatatttcctcagttggaaatcaacccaacaattacgacaattgtatttgaaatcagg

SEQ ID NO: 27762 - DNA, 72 bp, unidentified
  source 1..72: mol_type = unassigned DNA; note = methanogen bacteria
atcgcagatcctgacgataagttgcctgaaattgtatattggctaatgggatcattagcttctatcaatgct

SEQ ID NO: 27763 - DNA, 33 bp, unidentified
  source 1..33: mol_type = unassigned DNA; note = methanogen bacteria
gtccctgtgaatatggattatttcaattacatc

SEQ ID NO: 27764 - DNA, 54 bp, unidentified
  source 1..54: mol_type = unassigned DNA; note = methanogen bacteria
attggagcccctcacaatatcgtattgtatacagccgccgacattcctttcgaa

SEQ ID NO: 27765 - DNA, 51 bp, unidentified
  source 1..51: mol_type = unassigned DNA; note = methanogen bacteria
aatatcgcctttttcagttcactttttggaaagtggattgttggcaatgag

SEQ ID NO: 27766 - DNA, 93 bp, unidentified
  source 1..93: mol_type = unassigned DNA; note = methanogen bacteria
aatgcatccggagaaataaatattgatatttttggtgcagttttaaatgtgtttcagagtgtaggggcaatggtcggctatgaccaggtcgac

SEQ ID NO: 27767 - DNA, 108 bp, unidentified
  source 1..108: mol_type = unassigned DNA; note = methanogen bacteria
ggaagatatcctgttagtcctgtggatgtagttaaaactattttaagcccgatttttccacaattgtctgtttcatctactgtaaatactattgtttggcagattagg

SEQ ID NO: 27768 - DNA, 72 bp, unidentified
  source 1..72: mol_type = unassigned DNA; note = methanogen bacteria
atagcagaccctgaagataagctgcctgaaatcgtatactggttgatgggaagtttggcatctgttacaatg

SEQ ID NO: 27769 - DNA, 90 bp, unidentified
  source 1..90: mol_type = unassigned DNA; note = methanogen bacteria
aatgcatccggacaaataaatatagatattctcggattgattttaaaaacatttcaggattggggaataatggttggatataatcaagtt

SEQ ID NO: 27770 - DNA, 36 bp, unidentified
  source 1..36: mol_type = unassigned DNA; note = methanogen bacteria
atttggtccaatactgaaatattaaattataaaatt

SEQ ID NO: 27771 - DNA, 33 bp, unidentified
  source 1..33: mol_type = unassigned DNA; note = methanogen bacteria
gtatactctcctagccaaccattatcaaaattt

SEQ ID NO: 27772 - DNA, 57 bp, unidentified
  source 1..57: mol_type = unassigned DNA; note = methanogen bacteria
aattatgaaacattttatttatatgataatctaatgttaacttcaaaattaagttta

SEQ ID NO: 27773 - DNA, 30 bp, unidentified
  source 1..30: mol_type = unassigned DNA; note = methanogen bacteria
tactttaaaggagtacactattctggtact

SEQ ID NO: 27774 - DNA, 36 bp, unidentified
  source 1..36: mol_type = unassigned DNA; note = methanogen bacteria
tcttcaaaaaatgtttttcaattttctatttctgat

SEQ ID NO: 27775 - DNA, 36 bp, unidentified
  source 1..36: mol_type = unassigned DNA; note = methanogen bacteria
aattcaatagctaatgattttctctctttggaacct

SEQ ID NO: 27776 - DNA, 69 bp, unidentified
  source 1..69: mol_type = unassigned DNA; note = methanogen bacteria
tctctggattatggaagttattcatctaatgtgaggactatgactgtaatgatggcaggaatgttcgga

SEQ ID NO: 27777 - DNA, 96 bp, unidentified
  source 1..96: mol_type = unassigned DNA; note = methanogen bacteria
agatatcacagtttttatgattcaatatattcaattactcttggacagatatttaatgcgcttattttcaatgcatatacatatggacctcattta

SEQ ID NO: 27778 - DNA, 42 bp, unidentified
  source 1..42: mol_type = unassigned DNA; note = methanogen bacteria
tttattggattcaaacatatccctataacatattataggaac

SEQ ID NO: 27779 - DNA, 36 bp, unidentified
  source 1..36: mol_type = unassigned DNA; note = methanogen bacteria
ctatttgttcaaggtgtctgtaatcaaactgcaacc

SEQ ID NO: 27780 - DNA, 51 bp, unidentified
  source 1..51: mol_type = unassigned DNA; note = methanogen bacteria
gtattcactggaggttacgtagcacacgataagattacagtaagtgctttc

SEQ ID NO: 27781 - DNA, 33 bp, unidentified
  source 1..33: mol_type = unassigned DNA; note = methanogen bacteria
gttaaaccatctattaattatcttggttatatt

SEQ ID NO: 27782 - DNA, 57 bp, unidentified
  source 1..57: mol_type = unassigned DNA; note = methanogen bacteria
attggcgctccacataatattgtgatgtatactgtttcaaatattccctttgaatcg

SEQ ID NO: 27783 - DNA, 51 bp, unidentified
  source 1..51: mol_type = unassigned DNA; note = methanogen bacteria
aacattccatttttcaattcgctgtttacaaaatggattgttggcaatgag

SEQ ID NO: 27784 - DNA, 51 bp, unidentified
  source 1..51: mol_type = unassigned DNA; note = methanogen bacteria
atcatgtgggagtcttcgggagattcattttacatcctgccttcagtatcc

SEQ ID NO: 27785 - DNA, 156 bp, unidentified
  source 1..156: mol_type = unassigned DNA; note = methanogen bacteria
gttgctagtgttttatctgatttcttattaaatcaaaacattgattttaatttaattttaacacaaataaattcatatatcccgcaaaattcatttattgattccacatctattaatggaattattaaaagtgcaggaagttatgttttaaattat

SEQ ID NO: 27786 - DNA, 48 bp, unidentified
  source 1..48: mol_type = unassigned DNA; note = methanogen bacteria
aaaatgcaggtttatctgatttctagaatcaaactttccctgacaagt

SEQ ID NO: 27787 - DNA, 33 bp, unidentified
  source 1..33: mol_type = unassigned DNA; note = methanogen bacteria
gttattccaagctgggattatttgggatatatc

SEQ ID NO: 27788 - DNA, 54 bp, unidentified
  source 1..54: mol_type = unassigned DNA; note = methanogen bacteria
attggagctcctcacaatattgtaatgtatactgtgtcaaatattccatttcag

SEQ ID NO: 27789 - DNA, 51 bp, unidentified
  source 1..51: mol_type = unassigned DNA; note = methanogen bacteria
aacattccatatttgagcttattgctgaaaaaatggatcatcggcaatgag

SEQ ID NO: 27790 - DNA, 159 bp, unidentified
  source 1..159: mol_type = unassigned DNA; note = methanogen bacteria
atgtacaacttcgtcacatggattttggctaatgatgtaagtataaataatgctcttgaccaagtttcaatgtatttgccggcaaatgcaagttcaattaactcatatattgaaggttcactcaatgatgtggggaactatattttaaattattcagtt

SEQ ID NO: 27791 - DNA, 90 bp, unidentified
  source 1..90: mol_type = unassigned DNA; note = methanogen bacteria
agcgcttcaggagaaataaatatagatatcctcggattgattttaaaaacattccaggattggggaataatggtcgggtatgagcaagtt

SEQ ID NO: 27792 - DNA, 42 bp, unidentified
  source 1..42: mol_type = unassigned DNA; note = methanogen bacteria
ttagattttacttttgaaaaagttttaagatttaatattaat

SEQ ID NO: 27793 - DNA, 30 bp, unidentified
  source 1..30: mol_type = unassigned DNA; note = methanogen bacteria
ggtgttgttaatgacaattttgtattggag

SEQ ID NO: 27794 - DNA, 69 bp, unidentified
  source 1..69: mol_type = unassigned DNA; note = methanogen bacteria
actaagaatttaggtcattcttcagctaatgtgaggacaatgactgttatgattgcaggaatgtttgga

SEQ ID NO: 27795 - DNA, 51 bp, unidentified
  source 1..51: mol_type = unassigned DNA; note = methanogen bacteria
agtatttcagttttcagggcatttttcaaacagtgtactgtcggaaacgag

SEQ ID NO: 27796 - DNA, 54 bp, unidentified
  source 1..54: mol_type = unassigned DNA; note = methanogen bacteria
gtctattcaacattcatgattgaattaggcaaaggaggagccatttgtgaagtt

SEQ ID NO: 27797 - DNA, 51 bp, unidentified
  source 1..51: mol_type = unassigned DNA; note = methanogen bacteria
aatatttcagttttcaaggcattattcaaacagtgtattgtcggaaacgag

SEQ ID NO: 27798 - DNA, 93 bp, unidentified
  source 1..93: mol_type = unassigned DNA; note = methanogen bacteria
aactatggtcttcattactttggtggatatgaacctatgttggacaatgtcacaaatgtgatgttccatccggcaattacctattcattcaca

SEQ ID NO: 27799 - DNA, 78 bp, unidentified
  source 1..78: mol_type = unassigned DNA; note = methanogen bacteria
gcaatgactggtagcgtaaatattaccgatatcgctgctgctgttcacaatggtttggttgatgttacttctccagta

SEQ ID NO: 27800 - DNA, 99 bp, unidentified
  source 1..99: mol_type = unassigned DNA; note = methanogen bacteria
gattggatttttagctgttggagaattaggtttcattggtctgggtattggtcttggtactcaatattcaataactgcaggtcttttccaggctttgaa

SEQ ID NO: 27801 - DNA, 45 bp, unidentified
  source 1..45: mol_type = unassigned DNA; note = methanogen bacteria
ttcgtcaccggcgtctacccggacttcctggccaaggacagcgga

SEQ ID NO: 27802 - DNA, 33 bp, unidentified
  source 1..33: mol_type = unassigned DNA; note = methanogen bacteria
gttaaaccgagcgttaattatttaaactatatt

SEQ ID NO: 27803 - DNA, 54 bp, unidentified
  source 1..54: mol_type = unassigned DNA; note = methanogen bacteria
ataggtgctcctcacaatattgtaatgtatacggtgtctaaaattccttttgaa

SEQ ID NO: 27804 - DNA, 51 bp, unidentified
  source 1..51: mol_type = unassigned DNA; note = methanogen bacteria
aatattccgtttttcacatccctttttgagaggtggattgtcggaaatgaa

SEQ ID NO: 27805 - DNA, 72 bp, unidentified
  source 1..72: mol_type = unassigned DNA; note = methanogen bacteria
gtttcagctaaaagtttatatttgtccgatattattaaatatcaaatggcaaatggtcctttattatttaca

SEQ ID NO: 27806 - DNA, 39 bp, unidentified
  source 1..39: mol_type = unassigned DNA; note = methanogen bacteria
atgattgaatataacagtattttatttacaaacatcaat

SEQ ID NO: 27807 - DNA, 33 bp, unidentified
  source 1..33: mol_type = unassigned DNA; note = methanogen bacteria
gtaaaaccgacaataaattatttggactatatt

SEQ ID NO: 27808 - DNA, 51 bp, unidentified
  source 1..51: mol_type = unassigned DNA; note = methanogen bacteria
aatatttcatatttcaatgaattgtttaagacatggatttcgggaaatgag

SEQ ID NO: 27809 - DNA, 33 bp, unidentified
  source 1..33: mol_type = unassigned DNA; note = methanogen bacteria
gttaaaccgagtagtaattatttaaattatatt

SEQ ID NO: 27810 - DNA, 54 bp, unidentified
  source 1..54: mol_type = unassigned DNA; note = methanogen bacteria
ataggtgctcctcacaatattgtaatgtatactgtgtctaaaattccatttgga

SEQ ID NO: 27811 - DNA, 51 bp, unidentified
  source 1..51: mol_type = unassigned DNA; note = methanogen bacteria
aatattccgtttttcacatctctatttgagaggtgggttgccggaaatgag

SEQ ID NO: 27812 - DNA, 162 bp, unidentified
  source 1..162: mol_type = unassigned DNA; note = methanogen bacteria
tatgaagtctattccgttgcagcatcatttatggcaagcaactattatgtgaatctggaccagtttatctcacagctgccaatagatatgggttctgtaaataacacagtcaattcatctattaatgaaattgcaaaatatctgttgagttattctgtttca

SEQ ID NO: 27813 - DNA, 39 bp, unidentified
  source 1..39: mol_type = unassigned DNA; note = methanogen bacteria
actgataaaggattttcattcaatatattctctcaatac

SEQ ID NO: 27814 - DNA, 75 bp, unidentified
  source 1..75: mol_type = unassigned DNA; note = methanogen bacteria
gccataatgcctaaaaattttgctcttgactattctgctacacaatcagcagttcttgcttcatgggttgatgta

SEQ ID NO: 27815 - DNA, 33 bp, unidentified
  source 1..33: mol_type = unassigned DNA; note = methanogen bacteria
aatccattttttacaagtctaccgagaaacggt

SEQ ID NO: 27816 - DNA, 39 bp, unidentified
  source 1..39: mol_type = unassigned DNA; note = methanogen bacteria
acggataagggattttcatataatatattttcccagtac

SEQ ID NO: 27817 - DNA, 81 bp, unidentified
  source 1..81: mol_type = unassigned DNA; note = methanogen bacteria
acaggggctattatgcccaaaaactttgctcttgattatgaagcaacccaatccgtagttctagattcatgggttgatata

SEQ ID NO: 27818 - DNA, 30 bp, unidentified
  source 1..30: mol_type = unassigned DNA; note = methanogen bacteria
ccattctttacaagtcttcctagaaatgct

SEQ ID NO: 27819 - DNA, 156 bp, unidentified
  source 1..156: mol_type = unassigned DNA; note = methanogen bacteria
gaaatctcatcggtcatcacttcatttttggcgagcaattattatctcgatctcaatcaatttatttcacagctgccggttgatataaattccattaattcatcaataaattcatcagcatcagaaatcggaaagtatctgttgcagtatacagtt

SEQ ID NO: 27820 - DNA, 33 bp, unidentified
  source 1..33: mol_type = unassigned DNA; note = methanogen bacteria
ctcgggacctattccgatccggtgaattccacc

SEQ ID NO: 27821 - DNA, 30 bp, unidentified
  source 1..30: mol_type = unassigned DNA; note = methanogen bacteria
atcttccacgacctcgcggcggctgaggag

SEQ ID NO: 27822 - DNA, 84 bp, unidentified
  source 1..84: mol_type = unassigned DNA; note = methanogen bacteria
ttggctgcagcttatccaaccttcatggatgcgatatatgcgctttcaaaccctcaaaatgtaattaataatattttaactccg

SEQ ID NO: 27823 - DNA, 33 bp, unidentified
  source 1..33: mol_type = unassigned DNA; note = methanogen bacteria
gtaaggccaagcctagactatttaaattacata

SEQ ID NO: 27824 - DNA, 51 bp, unidentified
  source 1..51: mol_type = unassigned DNA; note = methanogen bacteria
attggcgcaccgcacaatattgtgatgtatacggtatctaaaattcccttt

SEQ ID NO: 27825 - DNA, 51 bp, unidentified
  source 1..51: mol_type = unassigned DNA; note = methanogen bacteria
aacattccgtttttcaatgtgcttttcaccaaatcaatcgccggcaatgag

SEQ ID NO: 27826 - DNA, 48 bp, unidentified
  source 1..48: mol_type = unassigned DNA; note = methanogen bacteria
ttgtcaatatttaatattgccaatccgtatcatgtgaaagttgttact

SEQ ID NO: 27827 - DNA, 30 bp, unidentified
  source 1..30: mol_type = unassigned DNA; note = methanogen bacteria
tggcaacacggagaacaggtaaatggtgtg

SEQ ID NO: 27828 - DNA, 39 bp, unidentified
  source 1..39: mol_type = unassigned DNA; note = methanogen bacteria
acggatataggtttttcattcaatatattttcccagtac

SEQ ID NO: 27829 - DNA, 81 bp, unidentified
  source 1..81: mol_type = unassigned DNA; note = methanogen bacteria
acaggcgccataatgcctaaaagctttgctcttgattttgaggcaacccaatccgtagttttggattcatgggttgatata

SEQ ID NO: 27830 - DNA, 36 bp, unidentified
  source 1..36: mol_type = unassigned DNA; note = methanogen bacteria
gatccgttttttataggttggcgtagaacaggtatt

SEQ ID NO: 27831 - DNA, 162 bp, unidentified
  source 1..162: mol_type = unassigned DNA; note = methanogen bacteria
tatgaactttcatctgtaatcacatcaatgatggcaaataactattatgccgacattgataaatttatttcacaattgcctatagatatgggatctatcaattcctcaatcaattcttcattaaacgaaataggaaaatatgttctgcaatatgcagttact

SEQ ID NO: 27832 - DNA, 60 bp, unidentified
  source 1..60: mol_type = unassigned DNA; note = methanogen bacteria
aataggactggcgctcataagattttcctttggaataattttttcataacttttgaagct

SEQ ID NO: 27833 - DNA, 60 bp, unidentified
  source 1..60: mol_type = unassigned DNA; note = methanogen bacteria
aaaggagttggaatgattaacatttgtccatctattgacttttcattcagcaatttgcct

SEQ ID NO: 27834 - DNA, 159 bp, unidentified
  source 1..159: mol_type = unassigned DNA; note = methanogen bacteria
tatgaaatctcatcggttatcactacatttttggcaagcaattattatttcgatctcagtcactttatttcacagctgccgattgatacaaattcaattaattcatcaatcaattcatcagcaaccgaaatagggaaatatctgttgcagtatacagtt

SEQ ID NO: 27835 - DNA, 33 bp, unidentified
  source 1..33: mol_type = unassigned DNA; note = methanogen bacteria
gcaggctccgtacttgattatgcaatggattat

SEQ ID NO: 27836 - DNA, 30 bp, unidentified
  source 1..30: mol_type = unassigned DNA; note = methanogen bacteria
atgatgactgcaggaactatggaagttgct

SEQ ID NO: 27837 - DNA, 63 bp, unidentified
  source 1..63: mol_type = unassigned DNA; note = methanogen bacteria
cctatatcccatgcatttaattttatttccggaaatcctgaaatgatagcaagaactgctgaa

SEQ ID NO: 27838 - DNA, 33 bp, unidentified
  source 1..33: mol_type = unassigned DNA; note = methanogen bacteria
gtaaaacccagttttgattatttcagttatatt

SEQ ID NO: 27839 - DNA, 51 bp, unidentified
  source 1..51: mol_type = unassigned DNA; note = methanogen bacteria
aatattcctttttttaacgaactattcaccaaatggattgtaggcaatgaa

SEQ ID NO: 27840 - DNA, 120 bp, unidentified
  source 1..120: mol_type = unassigned DNA; note = methanogen bacteria
gtcggcgcatacagcgtgggtttcgttgaatcatatgaagcactgattgaccaccttttaggaaatgtgcccgccgatgagctcggaaagggcgtggacatgatcgtctgggacaaacgc

SEQ ID NO: 27841 - DNA, 36 bp, unidentified
  source 1..36: mol_type = unassigned DNA; note = methanogen bacteria
tccggattcagtatcgtatccggaacttacggtgag

SEQ ID NO: 27842 - DNA, 78 bp, unidentified
  source 1..78: mol_type = unassigned DNA; note = methanogen bacteria
aaattgacggcttcagaggagtccctggccgaaatctacatgtggaacatagggaccctcggaaaatcttcttgggac

SEQ ID NO: 27843 - DNA, 51 bp, unidentified
  source 1..51: mol_type = unassigned DNA; note = methanogen bacteria
tgcattccatttttcaatatctttttcaagagccatataatgggaaatgaa

SEQ ID NO: 27844 - DNA, 54 bp, unidentified
  source 1..54: mol_type = unassigned DNA; note = methanogen bacteria
atcggcgctccccacaatatcgtaatgtatacaatatcaaagattccattccag

SEQ ID NO: 27845 - DNA, 51 bp, unidentified
  source 1..51: mol_type = unassigned DNA; note = methanogen bacteria
agcattccatttttcaatgcgctttttacaaagtggatttcaggcaatgaa

SEQ ID NO: 27846 - DNA, 60 bp, unidentified
  source 1..60: mol_type = unassigned DNA; note = methanogen bacteria
aacagaactggagcccataagatttacctttggtccaacttctttgtaacttatgaagcc

SEQ ID NO: 27847 - DNA, 60 bp, unidentified
  source 1..60: mol_type = unassigned DNA; note = methanogen bacteria
catggagtgggaatgattaacatttacccttcaattgactttagattcagcaatttgcca

SEQ ID NO: 27848 - DNA, 36 bp, unidentified
  source 1..36: mol_type = unassigned DNA; note = methanogen bacteria
ccgaaaatattcaatccggacgttacaaactataca

SEQ ID NO: 27849 - DNA, 69 bp, unidentified
  source 1..69: mol_type = unassigned DNA; note = methanogen bacteria
acttgtaactggacctgtgataattcctcagatgttttatccgtcaatgcagaccaattacagtatgcc

SEQ ID NO: 27850 - DNA, 30 bp, unidentified
  source 1..30: mol_type = unassigned DNA; note = methanogen bacteria
ttttttggttcattaaatactcctttacag

SEQ ID NO: 27851 - DNA, 60 bp, unidentified
  source 1..60: mol_type = unassigned DNA; note = methanogen bacteria
acaatgaaaagttacacatttgcctggaatacattcattggaactccctcaattacctgg

SEQ ID NO: 27852 - DNA, 45 bp, unidentified
  source 1..45: mol_type = unassigned DNA; note = methanogen bacteria
ttcgactataataaaattaatctaatcaaattaatctatctaaat

SEQ ID NO: 27853 - DNA, 144 bp, unidentified
  source 1..144: mol_type = unassigned DNA; note = methanogen bacteria
tttgctactgttgatggtggtgcaatctatagtgagaataattcggatgttgtagattcactatttaaatttaattctgcttatgttgatggtggtgcaatctacagtaaaaagaatgttgctgttaaaaagtccatttttgat

SEQ ID NO: 27854 - DNA, 48 bp, unidentified
  source 1..48: mol_type = unassigned DNA; note = methanogen bacteria
acatgtgataaatttagtggaatttatttaatcggatctttaaaatgg

SEQ ID NO: 27855 - DNA, 51 bp, unidentified
  source 1..51: mol_type = unassigned DNA; note = methanogen bacteria
acattttttgctagtcaaattgcagaaaaacattcctggattacttattta

SEQ ID NO: 27856 - DNA, 42 bp, unidentified
  source 1..42: mol_type = unassigned DNA; note = methanogen bacteria
ttaggattagctataattaaagagttatatattttaaatcca

SEQ ID NO: 27857 - DNA, 72 bp, unidentified
  source 1..72: mol_type = unassigned DNA; note = methanogen bacteria
gtccagagcggaagcatttatcttggagatattgttgcataccagcaggctcacggacctgtcattttcact

SEQ ID NO: 27858 - DNA, 33 bp, unidentified
  source 1..33: mol_type = unassigned DNA; note = methanogen bacteria
tattttggcccagttgctcttccaactgaagaa

SEQ ID NO: 27859 - DNA, 57 bp, unidentified
  source 1..57: mol_type = unassigned DNA; note = methanogen bacteria
ttccacaaaccttattcttatatgtggaacgtatttattggaaatccctccataatg

SEQ ID NO: 27860 - DNA, 42 bp, unidentified
  source 1..42: mol_type = unassigned DNA; note = methanogen bacteria
gatagaacctacggattttcaacacttaccctgatgtatcag

SEQ ID NO: 27861 - DNA, 69 bp, unidentified
  source 1..69: mol_type = unassigned DNA; note = methanogen bacteria
gttggggattttaatcattcaattagttttatatataatattctttttgcagatgttttaggaggacct

SEQ ID NO: 27862 - DNA, 81 bp, unidentified
  source 1..81: mol_type = unassigned DNA; note = methanogen bacteria
cccttctttacaagcggttcactattgggcaggtgggatctttaccatatctatggcggattaatattctttttttgtggg

SEQ ID NO: 27863 - DNA, 78 bp, unidentified
  source 1..78: mol_type = unassigned DNA; note = methanogen bacteria
ggtgctgatttcggcacaccggttttaaatatattcattggttatttcattggaaccaatacatcatatacagcattt

SEQ ID NO: 27864 - DNA, 33 bp, unidentified
  source 1..33: mol_type = unassigned DNA; note = methanogen bacteria
ttatggggaaaaggattattttccggcagagga

SEQ ID NO: 27865 - DNA, 72 bp, unidentified
  source 1..72: mol_type = unassigned DNA; note = methanogen bacteria
gtcactgcaagaagcatctttttgcaggatattgtggcttatcagcaagtccatggaccgttcctgtttaca

SEQ ID NO: 27866 - DNA, 30 bp, unidentified
  source 1..30: mol_type = unassigned DNA; note = methanogen bacteria
aggccaagcattggctatttaaactatatc

SEQ ID NO: 27867 - DNA, 51 bp, unidentified
  source 1..51: mol_type = unassigned DNA; note = methanogen bacteria
aacatcccatttttcacattgatttttaagaaatggattgtcggcaatgag

SEQ ID NO: 27868 - DNA, 42 bp, unidentified
  source 1..42: mol_type = unassigned DNA; note = methanogen bacteria
cattatggattcgaaatgatctttggttttttagaatctgca

SEQ ID NO: 27869 - DNA, 42 bp, unidentified
  source 1..42: mol_type = unassigned DNA; note = methanogen bacteria
gtaactgacatcacttcaaaaatattctatatgatatttgca

SEQ ID NO: 27870 - DNA, 132 bp, unidentified
  source 1..132: mol_type = unassigned DNA; note = methanogen bacteria
gaatactacaagagtaacagcacctatcttgatgccttggctgagggcggcttctcgccaagcatcttacagattagcgcctttgccaacaagaaggatgcaagtggctatgagtcagcttacaatgtagag

SEQ ID NO: 27871 - DNA, 45 bp, unidentified
  source 1..45: mol_type = unassigned DNA; note = methanogen bacteria
cgtgatgcttcttcacgctttgccaaggagaaccgttggggtagc

SEQ ID NO: 27872 - DNA, 132 bp, unidentified
  source 1..132: mol_type = unassigned DNA; note = methanogen bacteria
cagcagggtaacgataacatcggcaactgggcttacaccgacctctataccttgtctcaggtttcagatacagagatgtctgcatctttcgcacgcttgggtaacaagaatatcacttgggaaactaccacc

SEQ ID NO: 27873 - DNA, 96 bp, unidentified
  source 1..96: mol_type = unassigned DNA; note = methanogen bacteria
accaagaagactaccgacttgctcttctggttgcgtgtaccagagtcacagggtactcgtggctactatagcaatgtgggcgatctccgcaacacg

SEQ ID NO: 27874 - DNA, 294 bp, unidentified
  source 1..294: mol_type = unassigned DNA; note = methanogen bacteria
aacaagaccgaaatattgaagcttgactctacttcaaagaaccagtttggtggtttctcacaggcaagtgacatgagctacaccatgtattggtacaaggagggtggacctctctacaatggtttcctgcctaagtatgctggtgtcaacgaaaagggtgaggcgctctattgggtagatgaggatatctcagacagtgaaagaacaggtcgccctgcccctcgacaagaagatcgctgtcgggaagcccgcgtccatgaccgacctgaagaagaggaccaccatcttcagggc

SEQ ID NO: 27875 - DNA, 36 bp, unidentified; identical to SEQ ID NO: 20543
  source 1..36: mol_type = unassigned DNA; note = methanogen bacteria

SEQ ID NO: 27876 - DNA, 57 bp, unidentified
  source 1..57: mol_type = unassigned DNA; note = methanogen bacteria
ctccgcactgcttgcagaaaggctttccaggatatacagtcacaagattctgatgtc

SEQ ID NO: 27877 - DNA, 78 bp, unidentified
  source 1..78: mol_type = unassigned DNA; note = methanogen bacteria
aacgaccagatatacggagcggattccgtattctatcagaacaacttcggcaactccgccctcaacacggccgtcagc

SEQ ID NO: 27878 - DNA, 75 bp, unidentified
  source 1..75: mol_type = unassigned DNA; note = methanogen bacteria
gtagttaaaagtagtagtttacttttatcagatataattatttatcaacaaataaatggtccaatattattcagt

SEQ ID NO: 27879 - DNA, 69 bp, unidentified
  source 1..69: mol_type = unassigned DNA; note = methanogen bacteria
atggctggtagtatagacttagctgagattgtaaaatatcaggtagcttcaggacctatattattcaca

SEQ ID NO: 27880 - DNA, 96 bp, unidentified
  source 1..96: mol_type = unassigned DNA; note = methanogen bacteria
ttacatgcaacatatccaacatttatggaagcaatttatgcgctttcaaacccacagaatgtaataaataatattttaagtccgcctccatcagta

SEQ ID NO: 27881 - DNA, 57 bp, unidentified
  source 1..57: mol_type = unassigned DNA; note = methanogen bacteria
gatttgcattacagttttgcaaaggcattcaatcttttggagatggctactgataac

SEQ ID NO: 27882 - DNA, 57 bp, unidentified
  source 1..57: mol_type = unassigned DNA; note = methanogen bacteria
ggagatatgacctccatattctatattctatacgataggataatcagcgtattggat

SEQ ID NO: 27883 - DNA, 72 bp, unidentified
  source 1..72: mol_type = unassigned DNA; note = methanogen bacteria
actgctgctagaagcattttcttatctgacattgccgcatatcaacatgctaatggttcgtttttatttaca

SEQ ID NO: 27884 - DNA, 57 bp, unidentified; identical to SEQ ID NO: 27881
  source 1..57: mol_type = unassigned DNA; note = methanogen bacteria

SEQ ID NO: 27885 - DNA, 57 bp, unidentified
  source 1..57: mol_type = unassigned DNA; note = methanogen bacteria
ggagatatgacctccatattctatattttatacgataggataatcagcgtattggat

SEQ ID NO: 27886 - DNA, 72 bp, unidentified
  source 1..72: mol_type = unassigned DNA; note = methanogen bacteria
actgctgccggaagtattttcctgtctgatattgttgcatatcaacaggcaaacggtccgttcttattcaca

SEQ ID NO: 27887 - DNA, 72 bp, unidentified
  source 1..72: mol_type = unassigned DNA; note = methanogen bacteria
accgctgcaagaagcattttcctatcagatattgtatcatatcagcaaatccatggcccgttcctgttcact

SEQ ID NO: 27888 - DNA, 72 bp, unidentified
  source 1..72: mol_type = unassigned DNA; note = methanogen bacteria
ttaggtacagtatacccaacattcatagatgcaatatttgcacttaaaaacccacagaatgtaattaaccac

SEQ ID NO: 27889 - DNA, 72 bp, unidentified
  source 1..72: mol_type = unassigned DNA; note = methanogen bacteria
actgcttcaagaagcatatttttacctgatattgtagcttatcagcacgcacatgggccattcctattcact

SEQ ID NO: 27890 - DNA, 72 bp, unidentified
  source 1..72: mol_type = unassigned DNA; note = methanogen bacteria
actgctgcaaaaagtattttccttcaagatattgttgcatatcagcaagctaatggtccattcttatttaca

SEQ ID NO: 27891 - DNA, 30 bp, unidentified
  source 1..30: mol_type = unassigned DNA; note = methanogen bacteria
ggagttcctgcaacattattctctccaaca

SEQ ID NO: 27892 - DNA, 72 bp, unidentified
  source 1..72: mol_type = unassigned DNA; note = methanogen bacteria
actgctgcaagaagtattttccttaatgatattgtatcatatcagcaagcacacgggccattcctgtttaca

SEQ ID NO: 27893 - DNA, 30 bp, unidentified
  source 1..30: mol_type = unassigned DNA; note = methanogen bacteria
cctcaggcttttgcaattccggcactttca

SEQ ID NO: 27894 - DNA, 75 bp, unidentified
  source 1..75: mol_type = unassigned DNA; note = methanogen bacteria
ataactcaagcaagaagcattttcctgccggatattgttgcatatcaacaggcacacggaccaatcttatttaca

SEQ ID NO: 27895 - DNA, 30 bp, unidentified
  source 1..30: mol_type = unassigned DNA; note = methanogen bacteria
ccatataactatcaatttatggctttttca

SEQ ID NO: 27896 - DNA, 66 bp, unidentified
  source 1..66: mol_type = unassigned DNA; note = methanogen bacteria
ttgagcaaaagcatttacttatctgatatcgttgcttatcaacaagctcatggaccgttcctattc

SEQ ID NO: 27897 - DNA, 30 bp, unidentified
  source 1..30: mol_type = unassigned DNA; note = methanogen bacteria
cctgaagcctataagattcctgcactttca

SEQ ID NO: 27898 - DNA, 75 bp, unidentified
  source 1..75: mol_type = unassigned DNA; note = methanogen bacteria
accgctgcaagaagcatctttttgcaggatatagttgcatatcagcagatgaacggaccgttcctgtttactgta

SEQ ID NO: 27899 - DNA, 72 bp, unidentified
  source 1..72: mol_type = unassigned DNA; note = methanogen bacteria
actgctgccagaagcatattcttgcccgacattgtagcatatcagcatgctcacggaccattcctgtttact

SEQ ID NO: 27900 - DNA, 30 bp, unidentified
  source 1..30: mol_type = unassigned DNA; note = methanogen bacteria
tttggaccattaaataccacatcaggaatc

SEQ ID NO: 27901 - DNA, 57 bp, unidentified
  source 1..57: mol_type = unassigned DNA; note = methanogen bacteria
ttccacaaaccctattcatacatgtggaacgtatttattggaaatccttccatcgca

SEQ ID NO: 27902 - DNA, 42 bp, unidentified
  source 1..42: mol_type = unassigned DNA; note = methanogen bacteria
ccaataggagataattttaataccgttgaattaatgtatcaa

SEQ ID NO: 27903 - DNA, 66 bp, unidentified
  source 1..66: mol_type = unassigned DNA; note = methanogen bacteria
ttatccaaaagcattttcttggcagacattgtagcttatcagcaagctaacggaccgtttttattc

SEQ ID NO: 27904 - DNA, 66 bp, unidentified
  source 1..66: mol_type = unassigned DNA; note = methanogen bacteria
gttgaaggttctaaggcagaaatgtctggttgtgtttttgaaaataactctgcagaagacgatggt

SEQ ID NO: 27905 - DNA, 66 bp, unidentified
  source 1..66: mol_type = unassigned DNA; note = methanogen bacteria
ttatccaaaagcatttacttatctgaaattgttgcatatcaacatgctcacggaccagtattgttt

SEQ ID NO: 27906 - DNA, 204 bp, unidentified
  source 1..204: mol_type = unassigned DNA; note = methanogen bacteria
atgtctcctataaatcctgtaaaaacatacatcgctaacctaggtgttgtttcacctgaaaaaattgccattctggaatcatattggggtgtgaatgaaccaattacaactaaaatgttcaattggcttgcaaatattatacatcttgatttcggaacctctttgatttacagagcacctgtacttgatgtaatcaaagaaaaa

SEQ ID NO: 27907 - DNA, 87 bp, unidentified
  source 1..87: mol_type = unassigned DNA; note = methanogen bacteria
gtatatcttggatggttcccaacaggattgggtgttcctgtcggaacattaagtgaaaatgtgtccttctgggactggctgcacaga

SEQ ID NO: 27908 - DNA, 72 bp, unidentified
  source 1..72: mol_type = unassigned DNA; note = methanogen bacteria
gagcaaatattcacttaccctggtatcggacaggcagcagtatccgctggactcagaagtgatgttccattg

SEQ ID NO: 27909 - DNA, 30 bp, unidentified
  source 1..30: mol_type = unassigned DNA; note = methanogen bacteria
ccacaagcttataaaatacctgcgctttca

SEQ ID NO: 27910 - DNA, 72 bp, unidentified
  source 1..72: mol_type = unassigned DNA; note = methanogen bacteria
accgctgctagaagtatcttcttgcaggatattgtagcataccagcaagctaacggaccattcttattcaca

SEQ ID NO: 27911 - DNA, 72 bp, unidentified
  source 1..72: mol_type = unassigned DNA; note = methanogen bacteria
acagcagcacgaagcatatttcttggagatattgtggcctatcagcagactcacggaccgtttctctttaca

SEQ ID NO: 27912 - DNA, 30 bp, unidentified
  source 1..30: mol_type = unassigned DNA; note = methanogen bacteria
atcggagtgcctccgacaatattttcatgg

SEQ ID NO: 27913 - DNA, 123 bp, unidentified
  source 1..123: mol_type = unassigned DNA; note = methanogen bacteria
atgaagaaatatataaatgaggtgatttatatttttacaaccgcttttttattattcctacagggattgcgtgaagcttcaggaggtattttagataacttttttgcatgcattacaaacttc

SEQ ID NO: 27914 - DNA, 108 bp, unidentified
  source 1..108: mol_type = unassigned DNA; note = methanogen bacteria
cttactgcatgcatatatcgtccatgggtggccgattcaaatatcaaaccttatgaaggagttctggatgatgctacaggctattcgtttccaagtggacatgcaact

SEQ ID NO: 27915 - DNA, 66 bp, unidentified
  source 1..66: mol_type = unassigned DNA; note = methanogen bacteria
ttcaaatcatatccaatggattatgatactgcagggaaattaattgttgatcctgtgaaaatggct

SEQ ID NO: 27916 - DNA, 72 bp, unidentified
  source 1..72: mol_type = unassigned DNA; note = methanogen bacteria
actgctgcaagaagcatattcctgcaggacatcgttgctttccagcaaacccatggaccgttcctcttcaca

SEQ ID NO: 27917 - DNA, 60 bp, unidentified
  source 1..60: mol_type = unassigned DNA; note = methanogen bacteria
aataggacaggggctcataagatatacctttggtcaaactttttcataacttatgaggcc

SEQ ID NO: 27918 - DNA, 60 bp, unidentified
  source 1..60: mol_type = unassigned DNA; note = methanogen bacteria
aaaggggttggaatgattaacatttacccatccattgacttttcattcagcaatttgcca

SEQ ID NO: 27919 - DNA, 240 bp, unidentified
  source 1..240: mol_type = unassigned DNA; note = methanogen bacteria
ggcagcaggaagcggaagggatatctggcgaaggcctgtgatatcctgctcgcttacagggatcccggaacgatatgcggtatcgtccgcaatatcggaagagagggagaagaagcgatggtgctttcgctcgaacagctccgcagcacggaacctgatatgttcacaacggtattcatcggtaattcgaccacgctggaaatcgccggcaggatggtgacaccaaggggatatcaactc

SEQ ID NO: 27920 - DNA, 72 bp, unidentified
  source 1..72: mol_type = unassigned DNA; note = methanogen bacteria
actgcagcaagaagtattttccttcaagatattgttttatatcaacaggctaacggaccgttcttatttacg

SEQ ID NO: 27921 - DNA, 33 bp, unidentified
  source 1..33: mol_type = unassigned DNA; note = methanogen bacteria
attggagttccggcaacaattatgtctccatcc

SEQ ID NO: 27922 - DNA, 72 bp, unidentified
  source 1..72: mol_type = unassigned DNA; note = methanogen bacteria
accgctgcaagaagcatcttcctgcaggacattgtgacctatcagcaaattcacggaccgttcctctttaca

SEQ ID NO: 27923 - DNA, 30 bp, unidentified
  source 1..30: mol_type = unassigned DNA; note = methanogen bacteria
ttttttggtcccctaaccacaccagcacaa

SEQ ID NO: 27924 - DNA, 60 bp, unidentified
  source 1..60: mol_type = unassigned DNA; note = methanogen bacteria
cttcacggatacaactccagattcatatggagcgtctttataggtgagccgtcaatcaca

SEQ ID NO: 27925 - DNA, 42 bp, unidentified
  source 1..42: mol_type = unassigned DNA; note = methanogen bacteria
ggatactcaaagcttgactttttatcaccgagatacttaaac

SEQ ID NO: 27926 - DNA, 105 bp, unidentified
  source 1..105: mol_type = unassigned DNA; note = methanogen bacteria
atggtctgggattttattcagaatcagcttcttggaatgaagtggctttcggttttaattcaaaaactggtgactgcctgtggtcttgatgcaacatcccgtctt

SEQ ID NO: 27927 - DNA, 42 bp, unidentified
  source 1..42: mol_type = unassigned DNA; note = methanogen bacteria
ccggaacaatggattgaaactgcccttggaaataagaatcca

SEQ ID NO: 27928 - DNA, 30 bp, unidentified
  source 1..30: mol_type = unassigned DNA; note = methanogen bacteria
agtgaagcattacttgcaaaaggtgcgctg

SEQ ID NO: 27929 - DNA, 99 bp, unidentified
  source 1..99: mol_type = unassigned DNA; note = methanogen bacteria
ataagatggtatagcgtagaaaaaatcatatcattgttttatatagataatatattcgaatacataatttttaatgtgtcccctactggaggtcattta

SEQ ID NO: 27930 - DNA, 42 bp, unidentified
  source 1..42: mol_type = unassigned DNA; note = methanogen bacteria
cttacagcaaatccttatccctactatttcaatagaagcttt

SEQ ID NO: 27931 - DNA, 72 bp, unidentified
  source 1..72: mol_type = unassigned DNA; note = methanogen bacteria
actgcagctagaagtattttcttacaagacattgtccaatatcagcatgttcacggaccattcttgtttacc

SEQ ID NO: 27932 - DNA, 33 bp, unidentified
  source 1..33: mol_type = unassigned DNA; note = methanogen bacteria
ttctttggaccgctaacaagccaaacacaggtc

SEQ ID NO: 27933 - DNA, 60 bp, unidentified
  source 1..60: mol_type = unassigned DNA; note = methanogen bacteria
ctttatcaatacaattcaacacacttatggaaagtatttattggcgaaccgtcaatcaca

SEQ ID NO: 27934 - DNA, 39 bp, unidentified
  source 1..39: mol_type = unassigned DNA; note = methanogen bacteria
aactatattggaagcgattggattagtctgatttatcaa

SEQ ID NO: 27935 - DNA, 72 bp, unidentified
  source 1..72: mol_type = unassigned DNA; note = methanogen bacteria
actgcagcgggaagcatattcctgaaggatatcgttgcataccagcaggcacacggaccattcctatttact

SEQ ID NO: 27936 - DNA, 75 bp, unidentified
  source 1..75: mol_type = unassigned DNA; note = methanogen bacteria
gtgactcaggcaagaagcattttccttgaggaaattgtcgcatatcagcaggttcatgggccattcctgtttaca

SEQ ID NO: 27937 - DNA, 72 bp, unidentified
  source 1..72: mol_type = unassigned DNA; note = methanogen bacteria
actgctgcaagaagtatttttctttatgatatcgtagcataccagcaagctcacggaccattcttattcaca

SEQ ID NO: 27938 - DNA, 30 bp, unidentified
  source 1..30: mol_type = unassigned DNA; note = methanogen bacteria
ggtgttccggcaacaatattctctccaaca

SEQ ID NO: 27939 - DNA, 72 bp, unidentified
  source 1..72: mol_type = unassigned DNA; note = methanogen bacteria
actgctgcaggaagcatctttttgcaggatattgtggcatatcagcaagccaatgggccgttcctgtttaca

SEQ ID NO: 27940 - DNA, 72 bp, unidentified
  source 1..72: mol_type = unassigned DNA; note = methanogen bacteria
actgcggcaggcagtattttcctgtctgatattgtggcataccaacaggcaaacggaccatttttatttaca

SEQ ID NO: 27941 - DNA, 201 bp, unidentified
  source 1..201: mol_type = unassigned DNA; note = methanogen bacteria
ttatctccaatcgaccctgtcaaagcatatctcgggcaaagaattgtcagtcaggaacaattggcaattatgggagaatattggggaacaaatctgtctttaggcgatcgggtatttggttggctttcaactttagcttccggaagcatgggcttttcattaatttatagagtgcccgtaactgaagttatcatgcaaaaa

SEQ ID NO: 27942 - DNA, 87 bp, unidentified
  source 1..87: mol_type = unassigned DNA; note = methanogen bacteria
gtatatttgggatggttccctattggactttcagttccaatcggccagttgtccgatacggtaacattttggcaatggttatataga

SEQ ID NO: 27943 - DNA, 72 bp, unidentified
  source 1..72: mol_type = unassigned DNA; note = methanogen bacteria
gaacaggtatttgcctatcctggtatcggtcaggcaaccgtagcagcgggactgaggtctgacgttccactg

SEQ ID NO: 27944 - DNA, 33 bp, unidentified
  source 1..33: mol_type = unassigned DNA; note = methanogen bacteria
ttcatacagggagtggctaatcattccgcaatc

SEQ ID NO: 27945 - DNA, 204 bp, unidentified
  source 1..204: mol_type = unassigned DNA; note = methanogen bacteria
cagttatcacctattgaccctgttagagcatatcttggtcagagaattgtaagtgaagaacagctagcaattataggacattactggggtacagaattatcattaggtgaaagagtattaggatggcttcaaactttagcaacaggaagtatgggtttttcacttatttatcgtgttccagttactgaagtaattatttcaaaa

SEQ ID NO: 27946 - DNA, 90 bp, unidentified
  source 1..90: mol_type = unassigned DNA; note = methanogen bacteria
gtttatttaggttggttccctattggactttcagtacctattggtcaattatctgatactgttacaatctgggaatggttagatagatta

SEQ ID NO: 27947 - DNA, 72 bp, unidentified
  source 1..72: mol_type = unassigned DNA; note = methanogen bacteria
gaacaggtatttgcataccctggaattggtcaagctactgtagctgctggtttaaggtcagatgttccatta

SEQ ID NO: 27948 - DNA, 108 bp, unidentified
  source 1..108: mol_type = unassigned DNA; note = methanogen bacteria
ttcggagtctacgacatctctatttccgacgctatcggcgtattcttcggccatctggcaggagatgaggtagacccagatgatgatttttacatctgggacacccgt

SEQ ID NO: 27949 - DNA, 36 bp, unidentified
  source 1..36: mol_type = unassigned DNA; note = methanogen bacteria
tccgggatatcagtaatcccgggccttaccgggtcc

SEQ ID NO: 27950 - DNA, 78 bp, unidentified; identical to SEQ ID NO: 26386
  source 1..78: mol_type = unassigned DNA; note = methanogen bacteria

SEQ ID NO: 27951 - DNA, 30 bp, unidentified
  source 1..30: mol_type = unassigned DNA; note = methanogen bacteria
attcctaaatttgagtataatctaccacaa

SEQ ID NO: 27952 - DNA, 153 bp, unidentified
  source 1..153: mol_type = unassigned DNA; note = methanogen bacteria
tatgcaataatctataatggattcagtataaatggttatttatctttaaatccttcaccatttgattatttgattaatggtattttttataatatatttactccaataggagatatgttagtaaaattacaaattaatggatggaatacttca

SEQ ID NO: 27953 - DNA, 39 bp, unidentified
  source 1..39: mol_type = unassigned DNA; note = methanogen bacteria
attccaagacctgttaatcctccagagacagaattagat

SEQ ID NO: 27954 - DNA, 36 bp, unidentified
  source 1..36: mol_type = unassigned DNA; note = methanogen bacteria
ggttattataaattttataatccaaatatgaatgtt

SEQ ID NO: 27955 - DNA, 204 bp, unidentified
  source 1..204: mol_type = unassigned DNA; note = methanogen bacteria
caattatctcctattgatcctgtaaaagcatatcttggtcaaagaattgtttctcaagaacaattagccattataggcgaatattggggaacaaatctatctttaggtgaaagagtattaggatggcttcagactttggcatcaggaagtatgggattttcattaatttatagagcacccgtaacagaagtaattatgcaaaaa

SEQ ID NO: 27956 - DNA, 90 bp, unidentified
  source 1..90: mol_type = unassigned DNA; note = methanogen bacteria
tcagtgcatttaggttggttccctatagggctttcagttcctattggacaattatcagacacagttacattttggcaatggctatataga

SEQ ID NO: 27957 - DNA, 72 bp, unidentified
  source 1..72: mol_type = unassigned DNA; note = methanogen bacteria
gaacaagtatttgcatatcctggaatcggacaggccaccgttgctgcaggattaagatctgacgttccatta

SEQ ID NO: 27958 - DNA, 45 bp, unidentified
  source 1..45: mol_type = unassigned DNA; note = methanogen bacteria
acacgcagtgatagagtaatagacaatgtcatatctggtgaaagc

SEQ ID NO: 27959 - DNA, 204 bp, unidentified
  source 1..204: mol_type = unassigned DNA; note = methanogen bacteria
caattatctccaattgatcctgtaaaagcttatcttggacaaagaattgtcagtcaagaacaattagccattattggagaatattggggaacaaatttatcgttagcagaaagagttgtgggatggcttcaaacattggcatctggaagcatgggtttttcattgatttatagggttcctgtgactgaagttattgcacaaaaa

SEQ ID NO: 27960 - DNA, 87 bp, unidentified
  source 1..87: mol_type = unassigned DNA; note = methanogen bacteria
gtgtatttgggatggttcccaataggactttcggttccaatcgggcaactgtctgatacggtgacattttggcaatggttatatagg

SEQ ID NO: 27961 - DNA, 72 bp, unidentified
  source 1..72: mol_type = unassigned DNA; note = methanogen bacteria
gaacaggtatttgcttaccctggaattggtcaggcaacagtagctgcaggactaaggtcagatgttccttta

SEQ ID NO: 27962 - DNA, 204 bp, unidentified
  source 1..204: mol_type = unassigned DNA; note = methanogen bacteria
caattgtctcctatcgaccctgttaaagcttatcttggacaaagaattgtcagtcaagaacaaatagcaattgtaggggaatattggggaacaaacttatctttaggtgaaagggtaataggttggcttcaaactttggcatcaggtagcatgggattctctttaatctacagggttcccgttactgaagtgatagttcaaaaa

SEQ ID NO: 27963 - DNA, 87 bp, unidentified
  source 1..87: mol_type = unassigned DNA; note = methanogen bacteria
gtgtatctgggctggttcccaatcggcctttcagttccgattggacagttgtccgatactgtaacattttggcaatggttatatagg

SEQ ID NO: 27964 - DNA, 72 bp, unidentified
  source 1..72: mol_type = unassigned DNA; note = methanogen bacteria
gaacaggtattcgcataccctggaatcggccaggcaacagtggctgccggattaaggtctgacgttccatta

SEQ ID NO: 27965 - DNA, 204 bp, unidentified
  source 1..204: mol_type = unassigned DNA; note = methanogen bacteria
caaatgtctccaattgaccccgttaaagcatatcttggccaaagaattgtcagtcaggaacaaatggcaatcataggaaattactggggaacaaatctgacgttaggtgagcgagtattaggctggcttcagacattagctacaggaagcatgggcttttcattaatctacagagtgcctgtaaccgaagtaataatgcagaaa

SEQ ID NO: 27966 - DNA, 87 bp, unidentified
  source 1..87: mol_type = unassigned DNA; note = methanogen bacteria
gtgtatttaggctggttccctataggtctttcagttcctatcggacagctttcagacactgtcacattttggcaatggctgtacaga

SEQ ID NO: 27967 - DNA, 72 bp, unidentified
  source 1..72: mol_type = unassigned DNA; note = methanogen bacteria
gaacaggtatttgcatacccaggtattggtcaagccacagtagctgccggattaaggtcagacgtcccactg

SEQ ID NO: 27968 - DNA, 30 bp, unidentified
  source 1..30: mol_type = unassigned DNA; note = methanogen bacteria
ttaactttcggagtggacaatgctgatttt

SEQ ID NO: 27969 - DNA, 72 bp, unidentified
  source 1..72: mol_type = unassigned DNA; note = methanogen bacteria
tcacacaactacaccttttccaacatctgcaacataatcttcggtcattccggcggtctgggagttacattc

SEQ ID NO: 27970 - DNA, 48 bp, unidentified
  source 1..48: mol_type = unassigned DNA; note = methanogen bacteria
gttccaaggtcacagctcagcggaagattaatatgcttgggctatttc

SEQ ID NO: 27971 - DNA, 36 bp, unidentified
  source 1..36: mol_type = unassigned DNA; note = methanogen bacteria
gtaaattttttagcttatattcatcattacaattcc

SEQ ID NO: 27972 - DNA, 36 bp, unidentified
  source 1..36: mol_type = unassigned DNA; note = methanogen bacteria
gagcgtttatactatggaacatattcagttccagat

SEQ ID NO: 27973 - DNA, 204 bp, unidentified
  source 1..204: mol_type = unassigned DNA; note = methanogen bacteria
caattatctccaattgatccagtcaaagcatatcttggtcaaagaattgttagtcaacaacaattatctattattggtgaatattggggtacaaatctgtctttaggtgaaagagtattgggttggcttcaaactttagcatctggaagtatgggattttcattaatttatagagttcctgtaactgaagttattgttcagaaa

SEQ ID NO: 27974 - DNA, 87 bp, unidentified
  source 1..87: mol_type = unassigned DNA; note = methanogen bacteria
gtgtatttgggttggttcccaataggactttcagttccgattggacaactgtcagatacagttacattttggcagtggttatatagg

SEQ ID NO: 27975 - DNA, 72 bp, unidentified
  source 1..72: mol_type = unassigned DNA; note = methanogen bacteria
gaacaggtatttgcatatcctggtattggtcaggcaacagtagctgcaggacttaggtcagatgtacctttg

SEQ ID NO: 27976 - DNA, 204 bp, unidentified
  source 1..204: mol_type = unassigned DNA; note = methanogen bacteria
caattatctccaattgatccggttaaagcgtatcttggtcaaagaatcgttagccaggaacaattggcaattgttggagaatattggggaacaaatctgtctttaggcgaaagagttatgggttggcttacaacattggcatctggaagcatgggtttctcattgattttcagagttcctgttactgaagtaatcgtacagaaa

SEQ ID NO: 27977 - DNA, 87 bp, unidentified
  source 1..87: mol_type = unassigned DNA; note = methanogen bacteria
gtatatttaggatggttcccaatcggtctttcagtgcctattggccagttatccgacacggtcactttctggcagtggttgtataga

SEQ ID NO: 27978 - DNA, 72 bp, unidentified
  source 1..72: mol_type = unassigned DNA; note = methanogen bacteria
gaacaggtatttgcctatccgggtatcggtcaggcaacagttgcggcaggattaaggtcagacgttccctta

SEQ ID NO: 27979 - DNA, 33 bp, unidentified
  source 1..33: mol_type = unassigned DNA; note = methanogen bacteria
ctggacctacctgtccccctgaaggacgactgc

SEQ ID NO: 27980 - DNA, 36 bp, unidentified; identical to SEQ ID NO: 18630
  source 1..36: mol_type = unassigned DNA; note = methanogen bacteria

SEQ ID NO: 27981 - DNA, 33 bp, unidentified
  source 1..33: mol_type = unassigned DNA; note = methanogen bacteria
ttttttggtcctttaaatactcctatcaaaatt

SEQ ID NO: 27982 - DNA, 60 bp, unidentified
  source 1..60: mol_type = unassigned DNA; note = methanogen bacteria
tatcttaacggaagctattctaaagtttggaatacattcattggaaacccttcaatcaca

SEQ ID NO: 27983 - DNA, 42 bp, unidentified
  source 1..42: mol_type = unassigned DNA; note = methanogen bacteria
gattacaacaatatcaattacatctcaaagatttatcagaat

SEQ ID NO: 27984 - DNA, 36 bp, unidentified
  source 1..36: mol_type = unassigned DNA; note = methanogen bacteria
cttacaaatatggttggaagttatgcaaccggtatt

SEQ ID NO: 27985 - DNA, 51 bp, unidentified
  source 1..51: mol_type = unassigned DNA; note = methanogen bacteria
acagatatcatccatttgatttatggacatcaatacgatgcatcatcttca

SEQ ID NO: 27986 - DNA, 33 bp, unidentified
  source 1..33: mol_type = unassigned DNA; note = methanogen bacteria
ttttttggaccattaacaacccaaactcaggta

SEQ ID NO: 27987 - DNA, 60 bp, unidentified
  source 1..60: mol_type = unassigned DNA; note = methanogen bacteria
tatatgcatgggaattatacacaagtttggaacacatttattggaaatccgtccattaca

SEQ ID NO: 27988 - DNA, 39 bp, unidentified
  source 1..39: mol_type = unassigned DNA; note = methanogen bacteria
gattacaacaacattaatttcatttctgaaatttaccag

SEQ ID NO: 27989 - DNA, 201 bp, unidentified
  source 1..201: mol_type = unassigned DNA; note = methanogen bacteria
atgtcacctataaatcctgtaaaaacatacatcagcaacgtaataatatcccaagaacaaattgcaacattggaagcatattggggagtaaacgaaccgataacaactaagatgataaattggcttggaaatatcatccatggagatttcggaacatcactgattttcagaattcctgtcatagacgttattaaggaaaga

SEQ ID NO: 27990 - DNA, 87 bp, unidentified
  source 1..87: mol_type = unassigned DNA; note = methanogen bacteria
atttatcttggatggttcccaagcggattgggagttccgattggaagcttaagtgaaaacgtgaccttctgggaatggttaaaccgt

SEQ ID NO: 27991 - DNA, 72 bp, unidentified
  source 1..72: mol_type = unassigned DNA; note = methanogen bacteria
gagcaaatattcacatatcctggaataggtcaggctgcagtatcggcaggtttaagaagcgatgtgccatta

SEQ ID NO: 27992 - DNA, 204 bp, unidentified
  source 1..204: mol_type = unassigned DNA; note = methanogen bacteria
gatttatctcctatagaccccgttaatgcatatttacaaaatgttccagttagtagcgctcaaagagccgcattagaaagttattggggcgtaggacagccaatgtatgttaaagtttggaattggttaataaacttattgcagggaaatttaggaacctctttaatttatcgtatacctgttattgatgtaatccttgagaaa

SEQ ID NO: 27993 - DNA, 90 bp, unidentified
  source 1..90: mol_type = unassigned DNA; note = methanogen bacteria
ggtgtagaattaggatggttcccaattggacttggaacaccaataggaaccttaagtaatgatgtgagtatttgggattggatatcaagt

SEQ ID NO: 27994 - DNA, 72 bp, unidentified
  source 1..72: mol_type = unassigned DNA; note = methanogen bacteria
gagcaagtattttcctatcctggaatcggacagactgcagtagcggcaggactccaaagtgatgtaccatta

SEQ ID NO: 27995 - DNA, 33 bp, unidentified
  source 1..33: mol_type = unassigned DNA; note = methanogen bacteria
ataaacatgtatgattatgggatttatcggatc

SEQ ID NO: 27996 - DNA, 48 bp, unidentified
  source 1..48: mol_type = unassigned DNA; note = methanogen bacteria
aattcacgtagtgagaaaatcgttgataatgttatttccggagaaagc

SEQ ID NO: 27997 - DNA, 201 bp, unidentified
  source 1..201: mol_type = unassigned DNA; note = methanogen bacteria
ttatcaccaataaatcctgttaaaacatacataagcaatgtagtaatatctcaagcccaaattgctaatctagaagcatattggggcgtcaatgaaccgataacaagtaagatggctaattggttgggaaatgttttacaaggaaatctaggaacctctttaatattcagagttcctgtaatggatgttattcttgaaaga

SEQ ID NO: 27998 - DNA, 87 bp, unidentified
  source 1..87: mol_type = unassigned DNA; note = methanogen bacteria
atttacttaggatggttcccaacaggactcggtgtcccaattggaactttaagtgaaaatgtatcattttgggactggttaaaccgt

SEQ ID NO: 27999 - DNA, 72 bp, unidentified
  source 1..72: mol_type = unassigned DNA; note = methanogen bacteria
gaacaaatatttacttatcctggaataggacaggctgcagtttcagcaggtcttagaagtgacgttccactt

SEQ ID NO: 28000 - DNA, 51 bp, unidentified
  source 1..51: mol_type = unassigned DNA; note = methanogen bacteria
agcattccagttttcaagttactgtttaagaaattgattgttggaaatgag

SEQ ID NO: 28001 - DNA, 33 bp, unidentified
  source 1..33: mol_type = unassigned DNA; note = methanogen bacteria
tatactggtggagcagaagtattaaattttaaa

SEQ ID NO: 28002 - DNA, 33 bp, unidentified
  source 1..33: mol_type = unassigned DNA; note = methanogen bacteria
ggaatttcaaatcatatactatattattattgg

SEQ ID NO: 28003 - DNA, 48 bp, unidentified
  source 1..48: mol_type = unassigned DNA; note = methanogen bacteria
ataggtgtttttgcttattcacatgaattccaaacatatttagattta

SEQ ID NO: 28004 - DNA, 36 bp, unidentified
  source 1..36: mol_type = unassigned DNA; note = methanogen bacteria
cctcattttataaaaccaatgaaattatcagggact

SEQ ID NO: 28005 - DNA, 33 bp, unidentified
  source 1..33: mol_type = unassigned DNA; note = methanogen bacteria
tttttcggcccactgacaacacctacacaagtt

SEQ ID NO: 28006 - DNA, 60 bp, unidentified
  source 1..60: mol_type = unassigned DNA; note = methanogen bacteria
tatcacggatacaattcaaagttcatctggaatgtattcattggagaaccttcaatcaca

SEQ ID NO: 28007 - DNA, 36 bp, unidentified
  source 1..36: mol_type = unassigned DNA; note = methanogen bacteria
ggatatgcaaaaatcgatttaataagatatgaaaac

SEQ ID NO: 28008 - DNA, 33 bp, unidentified
  source 1..33: mol_type = unassigned DNA; note = methanogen bacteria
ttttttggcccactaacaacaccaacacagatt

SEQ ID NO: 28009 - DNA, 60 bp, unidentified
  source 1..60: mol_type = unassigned DNA; note = methanogen bacteria
ttacacggatacaattcaaaattcatctggaatgtctttatcggcgagccgtcaattaca

SEQ ID NO: 28010 - DNA, 36 bp, unidentified
  source 1..36: mol_type = unassigned DNA; note = methanogen bacteria
ggctacacaaaggtcagtctgataagatatgaaaac

SEQ ID NO: 28011 - DNA, 204 bp, unidentified
  source 1..204: mol_type = unassigned DNA; note = methanogen bacteria
gatatgtctcctattaatccagtaaacgcttatatttccaatatggttgtcggtcctgaaaagattgctaaattagaggcttattggggtgtaaatcagccgataactgttaaattaatgaattggttaggaaatatacttactggtgactttggaacttctttaatatataggactcctgttttacaggtaatttctgaaaag

SEQ ID NO: 28012 - DNA, 87 bp, unidentified
  source 1..87: mol_type = unassigned DNA; note = methanogen bacteria
atatggttaggatggttccctgtaagtggaggggttccgattggtgcattaagcaatacggtatcgttttgggattggttaaggcat

SEQ ID NO: 28013 - DNA, 72 bp, unidentified
  source 1..72: mol_type = unassigned DNA; note = methanogen bacteria
gaacaggtattcatgtatcccggcattggtcaggcagcagtttctgcaggcctaaggagtgacgttcctttg

SEQ ID NO: 28014 - DNA, 66 bp, unidentified
  source 1..66: mol_type = unassigned DNA; note = methanogen bacteria
ttaaggaatattgagatttttggaaataagatggagtatattgttgactgtgattatggtgctggt

SEQ ID NO: 28015 - DNA, 129 bp, unidentified
  source 1..129: mol_type = unassigned DNA; note = methanogen bacteria
actggggttgtatattgcatgaattgcacattccatgataataaggctaaatatggtggtgcaatctataatcaaggattgttggtagttaccaacagttctttttattccaataatggatatggcaaa

SEQ ID NO: 28016 - DNA, 57 bp, unidentified
  source 1..57: mol_type = unassigned DNA; note = methanogen bacteria
ggcggtaagaacattgtgtatcttgagggtttgagttctgcatggcagactggtatt

SEQ ID NO: 28017 - DNA, 48 bp, unidentified
  source 1..48: mol_type = unassigned DNA; note = methanogen bacteria
agtaatgtttatgatattaacttttgcaggtggtcttgtgcattgaca

SEQ ID NO: 28018 - DNA, 57 bp, unidentified
  source 1..57: mol_type = unassigned DNA; note = methanogen bacteria
cctgatgatttaaaaaaggtattgtcttcagattccaatactatcattgtgtcttct

SEQ ID NO: 28019 - DNA, 60 bp, unidentified
  source 1..60: mol_type = unassigned DNA; note = methanogen bacteria
attcatagcattaaattggataaggataatggtattcaagtagtgaatgcttttattaat

SEQ ID NO: 28020 - DNA, 81 bp, unidentified
  source 1..81: mol_type = unassigned DNA; note = methanogen bacteria
tcttcttttagtgaagatgaagtattggatgtaatctccacaatagattcaaagaaagaaggacttgattctatcttgtat

SEQ ID NO: 28021 - DNA, 30 bp, unidentified
  source 1..30: mol_type = unassigned DNA; note = methanogen bacteria
ctcaattgggattcctacgccttcacagat

SEQ ID NO: 28022 - DNA, 57 bp, unidentified
  source 1..57: mol_type = unassigned DNA; note = methanogen bacteria
agtggttctaattaccatatgatttgggatgtaatagtgggtaatttttcagtaaca

SEQ ID NO: 28023 - DNA, 39 bp, unidentified
  source 1..39: mol_type = unassigned DNA; note = methanogen bacteria
gattacaacaaattaaatttgattaacttaatttatcag

SEQ ID NO: 28024 - DNA, 45 bp, unidentified
  source 1..45: mol_type = unassigned DNA; note = methanogen bacteria
ggtgatatgcaggtttatttaatttcccatattaaacttccactt

SEQ ID NO: 28025 - DNA, 204 bp, unidentified
  source 1..204: mol_type = unassigned DNA; note = methanogen bacteria
gatttatctcctattgacccagtaaatgcatatcttcaacaaacagcagtgtcagctgctcaaagagcttcactagaacagtattggggtgttggtgaaccattaactactaaaattggtaaatggttactcatgttattacaaggaaatcttggaacatcactcatataccgtattccagtagtagatgttattgcacagaaa

SEQ ID NO: 28026 - DNA, 87 bp, unidentified
  source 1..87: mol_type = unassigned DNA; note = methanogen bacteria
gtatatctgggatggttcccgataggattaggagttcccattggaacagttgaatcagatgtaacaatatggcagtggattgcaaga

SEQ ID NO: 28027 - DNA, 72 bp, unidentified
  source 1..72: mol_type = unassigned DNA; note = methanogen bacteria
gaacaagtattccagtatcctggaatcggacagacagcagtagcagcaggacttcaaagtgatgtgccacta

SEQ ID NO: 28028 - DNA, 30 bp, unidentified
  source 1..30: mol_type = unassigned DNA; note = methanogen bacteria
atgattgaatatattaatttaatgtcatta

SEQ ID NO: 28029 - DNA, 201 bp, unidentified
  source 1..201: mol_type = unassigned DNA; note = methanogen bacteria
atgtcgccaatcaatcctgttaaaacatatatcagcaacatggtcgtttcaccagaacaagtcgccgccctggaatcctattggggagttaatgaaccgattacttccaaaatggcaaactggtttggaaacatcatacacggagattttggaaattctcttattttcagaatgcccgtaattgacgttattaaagaaagg

SEQ ID NO: 28030 - DNA, 87 bp, unidentified
  source 1..87: mol_type = unassigned DNA; note = methanogen bacteria
gtatatctaggttggttcccaacaggtttgggagttccaattggtacattaagtgaaaatgtatctttctgggattggctaaacaga

SEQ ID NO: 28031 - DNA, 72 bp, unidentified
  source 1..72: mol_type = unassigned DNA; note = methanogen bacteria
gagcaaattttcacatatcctggaattgggcaggcagcagtatcagcaggtctgagaagcgatgttccgctt

SEQ ID NO: 28032 - DNA, 39 bp, unidentified
  source 1..39: mol_type = unassigned DNA; note = methanogen bacteria
aatctgcaggtttatctgatttctcatatcaatcttcca

SEQ ID NO: 28033 - DNA, 201 bp, unidentified
  source 1..201: mol_type = unassigned DNA; note = methanogen bacteria
ttgtcccctattaaccctgtaaaaacctatatcagtaacgtaatcatatctgctgaccaaattgcaaaattagaagcgtattggggcgtaaacgagccaattacaagcaaaatggttaattggttaggaaatgttgtaaaaggagatttaggaacttcattaatttttagaattccagtaatcgatgtaattaaagaaaga

SEQ ID NO: 28034 - DNA, 87 bp, unidentified
  source 1..87: mol_type = unassigned DNA; note = methanogen bacteria
atatatctgggatggttcccaagcggattaggagttccaatcggaagtttaagtgaaaacgtgacattctgggaatggttaaatcgt

SEQ ID NO: 28035 - DNA, 72 bp, unidentified
  source 1..72: mol_type = unassigned DNA; note = methanogen bacteria
gagcaaatatttacttaccctggaatcggacaggctgcagtgtcagcaggtcttagaagcgatgtgccgcta

SEQ ID NO: 28036 - DNA, 201 bp, unidentified
  source 1..201: mol_type = unassigned DNA; note = methanogen bacteria
ttgtctcctattaatcctgtaaaaacttatgttagtaatatgattgtttctcaagaacaaatagctgcattagaagcttattggggtgtaaatcaaccaattacaactaaattagtgaattggttaggaaatattattcatggtgatttaggaacatctttaattttcagaatgcctgtagttgatgttattaaagaaaga

SEQ ID NO: 28037 - DNA, 87 bp, unidentified
  source 1..87: mol_type = unassigned DNA; note = methanogen bacteria
gtttatcttggttggttccctacaggtttaggagttccaattggtactttaagtgaagatgtatcatttttagattggttaaaacgt

SEQ ID NO: 28038 - DNA, 72 bp, unidentified
  source 1..72: mol_type = unassigned DNA; note = methanogen bacteria
gaacaagtattcacttatcctggtattggacaagctgcagtatcagcaggtcttagaagtgatgttccccta

SEQ ID NO: 28039 - DNA, 51 bp, unidentified
  source 1..51: mol_type = unassigned DNA; note = methanogen bacteria
tttaaagatcaaaatatgaatgagttacttgaaattattaaatcttctaat

SEQ ID NO: 28040 - DNA, 201 bp, unidentified
  source 1..201: mol_type = unassigned DNA; note = methanogen bacteria
ttatctcctattgatcctgtaaatgcataccttaaacaggcagtaatatccccagagcaaagattgattcttgaacagtattggggagtaaatcaaccactaaccacaaagatatggggttggttaagtaatttactacaaggtaacttgggaaattcattaatataccgtgtacctgttatcgacgtaatatatgaaaga

SEQ ID NO: 28041 - DNA, 90 bp, unidentified
  source 1..90: mol_type = unassigned DNA; note = methanogen bacteria
tcggtagagctgggatggttcccaataggtatgagtgtggccataggaacactaagttcggatgctacaatatggcaatggcttgcaaga

SEQ ID NO: 28042 - DNA, 72 bp, unidentified
  source 1..72: mol_type = unassigned DNA; note = methanogen bacteria
gaacaagtattttcttatccgggaataggacaaacagctgtagctgcaggacttcaaagtgacgttacttta

SEQ ID NO: 28043 - DNA, 57 bp, unidentified
  source 1..57: mol_type = unassigned DNA; note = methanogen bacteria
attggcgctcctcacaatatcgtaatgtatacggtatcccatattccatttgaatca

SEQ ID NO: 28044 - DNA, 51 bp, unidentified
  source 1..51: mol_type = unassigned DNA; note = methanogen bacteria
agcattccagttttcaacttgctatttaagaaattgattgttggaaatgag

SEQ ID NO: 28045 - DNA, 45 bp, unidentified
  source 1..45: mol_type = unassigned DNA; note = methanogen bacteria
tcacgcagtgatagaattgtggacaatgttatttcaggagaaaat

SEQ ID NO: 28046 - DNA, 204 bp, unidentified
  source 1..204: mol_type = unassigned DNA; note = methanogen bacteria
gatttatcccctattgaccctgttaatgcttatttgcatggtgcagcagtatcagaagctcaaagagcgattttagagcagtatttcggaaccaacactccaatgaccgaaaagatcttccactggcttatggatttgattcgtggagatcttggtacatctttgatattcagaagacctgttattgatgttatcattgaaaag

SEQ ID NO: 28047 - DNA, 87 bp, unidentified
  source 1..87: mol_type = unassigned DNA; note = methanogen bacteria
gtttatctgggctggttccctataggattcggagttccaatcggtgtgcgaagtacagacgcaacattcatggagtgggctgtaagg

SEQ ID NO: 28048 - DNA, 72 bp, unidentified
  source 1..72: mol_type = unassigned DNA; note = methanogen bacteria
gagcaggtcttttcataccctggaataggtcagacagctgttgcagcaggccttcaaaacgatgttcccctg

SEQ ID NO: 28049 - DNA, 204 bp, unidentified
  source 1..204: mol_type = unassigned DNA; note = methanogen bacteria
gatttatcccctattgatccggttaatgcttatttgaagggagctgcagtatcagaagcacaaagacaaattttacatcaatattttggcactaatgttccattaactacaaaaatttatcactggctaattgatttggctcaaggaaatcttggaacttccttaatttatcgtatgccggtgatggatgtcatcattgataaa

SEQ ID NO: 28050 - DNA, 90 bp, unidentified
  source 1..90: mol_type = unassigned DNA; note = methanogen bacteria
gctgtttatttaggattgttcccgattggattcggtgttcctattggagttaaaagtactgatgcaacatttatggaatgggcatctaga

SEQ ID NO: 28051 - DNA, 72 bp, unidentified
  source 1..72: mol_type = unassigned DNA; note = methanogen bacteria
gaacaggtattttcatatcctggaatcggtcaaacggctgtagctgccggtcttcaaaatgatgttcctctg

SEQ ID NO: 28052 - DNA, 204 bp, unidentified
  source 1..204: mol_type = unassigned DNA; note = methanogen bacteria
gacttatccccaattgatcctgtaagtgcttatttaaaaggtgctgcagtatctgaatctcaaagagcaatactagaaagttattttggtgtaaatgttccactgacaacaaaaatatatcattggttagttcagttaatacagggaaaccttggaacttctttaatatatcgtgctccagtaacagacattattcttgaaaaa

SEQ ID NO: 28053 - DNA, 87 bp, unidentified
  source 1..87: mol_type = unassigned DNA; note = methanogen bacteria
atatatttaggatggttcccaattggatttggtgttcctataggtgttaaaagtactgatgttacctttatagattgggcttccaga

SEQ ID NO: 28054 - DNA, 72 bp, unidentified
  source 1..72: mol_type = unassigned DNA; note = methanogen bacteria
gaacaggtattttcatatcctggaatagggcagacagctgttgctgccggattacaaaacgatgttccacta

SEQ ID NO: 28055 - DNA, 45 bp, unidentified
  source 1..45: mol_type = unassigned DNA; note = methanogen bacteria
tcccgtagtgagaaaattgtggacaatgttatttccggagaaact

SEQ ID NO: 28056 - DNA, 204 bp, unidentified
  source 1..204: mol_type = unassigned DNA; note = methanogen bacteria
gatttatcccctatcaatccagtttctgtttatttaaaaggtgctgctgtatctgaaagtcaacgtgctattcttaatgaatactttggtgtgggagttccgcttcaaactaaaatttatcattggttactaaatttgattcaaggaaacttaggaacttcacttatatatcgtgctcctgtgttggatgtaattattgataag

SEQ ID NO: 28057 - DNA, 93 bp, unidentified
  source 1..93: mol_type = unassigned DNA; note = methanogen bacteria
gcagtttatttaaaattattcccaataggatttggtgttcctattggtgttagaagtactgatgcttcttttatagattgggcatcaagactt

SEQ ID NO: 28058 - DNA, 72 bp, unidentified
  source 1..72: mol_type = unassigned DNA; note = methanogen bacteria
gaacaagtattttcatatcctggaataggtcaaactgctgttactgcaggtcttcaaagtgatgttccttta

SEQ ID NO: 28059 - DNA, 204 bp, unidentified
  source 1..204: mol_type = unassigned DNA; note = methanogen bacteria
gatttatcccctattaatccggtttctgtttatttaaaaggtgctgcagtatctgaagctcaacgtcaaattcttaaccaatactttggtgtgggtgtacctcttcctactaaaatttatcactggttgctggatttgattcaaggaaatttaggtacttcattgatttatcgtgctccggttatagatgttattgtggataaa

SEQ ID NO: 28060 - DNA, 93 bp, unidentified
  source 1..93: mol_type = unassigned DNA; note = methanogen bacteria
gcagtttatttaaaattattcccaattggttttggtgttcctataggtgttaaaagtacggatgctacatttattgaatgggcatcaagactc

SEQ ID NO: 28061 - DNA, 72 bp, unidentified
  source 1..72: mol_type = unassigned DNA; note = methanogen bacteria
gaacaagtattttcatatcctggaattgggcaaacggcagtagctgcgggacttcagagtgatgttccacta

SEQ ID NO: 28062 - DNA, 204 bp, unidentified
  source 1..204: mol_type = unassigned DNA; note = methanogen bacteria
gatttatcccctattgatccggttagtgcttatctaaaaggtgctgcagtatcagaagcacaaagacaaattttacagcagtatttcggcactaatgttcctctgccgacaaaaatctatcactggctattggatttgattcagggcaatttaggaacttccttaatatatcgtgctcctgttattgatgttatctttgaaaaa

SEQ ID NO: 28063 - DNA, 87 bp, unidentified
  source 1..87: mol_type = unassigned DNA; note = methanogen bacteria
gtttatttaggatggttcccaataggattcggagttcctattggtgttagaagtacagatgcaacatttatggagtgggcaacaagg

SEQ ID NO: 28064 - DNA, 72 bp, unidentified
  source 1..72: mol_type = unassigned DNA; note = methanogen bacteria
gaacaggtattttcctatccgggtatcggtcaaacggcagtagctgcaggtcttcaaaatgatgtgcccctg

SEQ ID NO: 28065 - DNA, 45 bp, unidentified
  source 1..45: mol_type = unassigned DNA; note = methanogen bacteria
aactacggcggcctcttccccggagatgtcctgacctccgaccgc

SEQ ID NO: 28066 - DNA, 66 bp, unidentified
  source 1..66: mol_type = unassigned DNA; note = methanogen bacteria
gacggcaccgaggcctacggccgctacgccgagggactggtcttcatcgccgccgcgcctttcgca

SEQ ID NO: 28067 - DNA, 30 bp, unidentified
  source 1..30: mol_type = unassigned DNA; note = methanogen bacteria
tcggtcatggaagggccggcgatcggggac

SEQ ID NO: 28068 - DNA, 30 bp, unidentified
  source 1..30: mol_type = unassigned DNA; note = methanogen bacteria
atatatatgggatctgttggtttggtttca

SEQ ID NO: 28069 - DNA, 48 bp, unidentified
  source 1..48: mol_type = unassigned DNA; note = methanogen bacteria
ttggttttatacaacctccatacctctccccatgtagaaacattcaga

SEQ ID NO: 28070 - DNA, 204 bp, unidentified
  source 1..204: mol_type = unassigned DNA; note = methanogen bacteria
gatttatcccctatcgacccagttaatgcttatttaaatggtgctgctgtttcagaagctcaacgtcaaattctgcagcaatacttcggcaccaatgttccgatgcagacgaaaatctaccactggctattggatttgctccagggaaatcttggaacttccttgatatacagggcacctgttattgatgttattctcgataaa

SEQ ID NO: 28071 - DNA, 90 bp, unidentified
  source 1..90: mol_type = unassigned DNA; note = methanogen bacteria
gccgtttatctgggatggttcccagtgggattcggtgttccgataggcgtcaagagtactgatgcaacgtttatggaatgggcatcaagg

SEQ ID NO: 28072 - DNA, 72 bp, unidentified
  source 1..72: mol_type = unassigned DNA; note = methanogen bacteria
gaacaggtgttcacctatccaggcataggacaaacggctgtagcggcgggccttcaaagcgatgtgcctctg

SEQ ID NO: 28073 - DNA, 204 bp, unidentified
  source 1..204: mol_type = unassigned DNA; note = methanogen bacteria
gatttatcccctattgacccagttaatgcttatttacatggtgctgcagtatcagaagctcaaagacaaattttacaacagtatttcggtacaaatgttccattgcctgaaaagattttccattggcttatggatttgattcaaggaaatttgggaacttccttaatatatcgtagacctgttatggatgtaataatcgataaa

SEQ ID NO: 28074 - DNA, 90 bp, unidentified
  source 1..90: mol_type = unassigned DNA; note = methanogen bacteria
tcagtttatcttggattgttccctattggattcggtgttcctattggagttagaagtactgatgcaacatttttagagtgggctactagg

SEQ ID NO: 28075 - DNA, 72 bp, unidentified
  source 1..72: mol_type = unassigned DNA; note = methanogen bacteria
gagcaggttttctcatatcctggaattggacagactgcagttgctgcaggtcttcagaatgatgttccactg

SEQ ID NO: 28076 - DNA, 204 bp, unidentified
  source 1..204: mol_type = unassigned DNA; note = methanogen bacteria
gatttatcccctattgatccagttaatgcttatttaagacaagctgcggtgtcagaagcacaaaggcaaattcttgaaaattattttggcacaaatgttccattgacaaccaagatctttcattggctaatggatttaatccatttagacttaggaacttctttgatatatcgtgcacctgtcattgatatcataattgataag

SEQ ID NO: 28077 - DNA, 90 bp, unidentified
  source 1..90: mol_type = unassigned DNA; note = methanogen bacteria
gctgtctatttaggatggttcccaataggatttggtgttccaataggtgtaaagagtacagatgccacatttatggagtgggcatcaagg

SEQ ID NO: 28078 - DNA, 72 bp, unidentified
  source 1..72: mol_type = unassigned DNA; note = methanogen bacteria
gaacaggtattttcatatccaggtgttggacaaactgccgtagcagcgggtctaaacagtgatgttccgcta

SEQ ID NO: 28079 - DNA, 45 bp, unidentified
  source 1..45: mol_type = unassigned DNA; note = methanogen bacteria
tcacgtagtgataaaatcgtagacaatgttatttcaggagaaagc

SEQ ID NO: 28080 - DNA, 204 bp, unidentified
  source 1..204: mol_type = unassigned DNA; note = methanogen bacteria
gatttatcccctattgacccagtaaatgcttatttgagacaagctgcggtatctgaagcacaaaggcaaatccttgaaaattattttggtactaatgttcctttgactactaaaatttttcattggttattggatttagtacatcttgatttaggaacttctttaatatatcgtgcaccagttattgatattatatgggataaa

SEQ ID NO: 28081 - DNA, 93 bp, unidentified
  source 1..93: mol_type = unassigned DNA; note = methanogen bacteria
gcagtttatttaggatggttcccaataggatttggtgttccaattggtgtaaaaagtacggatgctacatttatggaatgggcatcaagactg

SEQ ID NO: 28082 - DNA, 72 bp, unidentified
  source 1..72: mol_type = unassigned DNA; note = methanogen bacteria
gaacaagtattttcatatcccggtattggacagacggctgtagctgcgggtcttaatagtgatgttccatta

SEQ ID NO: 28083 - DNA, 204 bp, unidentified
  source 1..204: mol_type = unassigned DNA; note = methanogen bacteria
gatttatcccctatcaatccggttactgcttatttgaagggtgctgcagtatctgaatctcaacgtgcaatacttgaaagttattttggcgttaatgttccattgcctactaaaatttaccattggttgcttgatttagctcaaggaaatcttggaacttccttaatatatcgtgcaccggttatggatgttatcatagataaa

SEQ ID NO: 28084 - DNA, 90 bp, unidentified
  source 1..90: mol_type = unassigned DNA; note = methanogen bacteria
gcagtttatctgggttggttcccaataggtttcggtgttccgataggtgtgaaaagtacagatgccacatttatggaatgggcttcaagg

SEQ ID NO: 28085 - DNA, 72 bp, unidentified
  source 1..72: mol_type = unassigned DNA; note = methanogen bacteria
gaacaggtattctcctatccggggattgggcaaacggctgtggcagcgggtcttcaaaatgatgttccattg

SEQ ID NO: 28086 - DNA, 204 bp, unidentified
  source 1..204: mol_type = unassigned DNA; note = methanogen bacteria
gatttatcccctattgacccagttaatgcttatttacatggtgctgcagtatcagaaactcaaaggcaaattttacaacagtatttcggtactaatgtcccaatgactgaaaagatttttcattggcttatggacttgattcaaggaaatttgggaacttctctaatatatcgtaggcctgttatcgatgttatcattgataaa

SEQ ID NO: 28087 - DNA, 87 bp, unidentified
  source 1..87: mol_type = unassigned DNA; note = methanogen bacteria
gtttatctaggatggttcccaataggatttggtgttcctattggtgttagaagtactgatgcaacatttatagagtgggcaacaagg

SEQ ID NO: 28088 - DNA, 72 bp, unidentified
  source 1..72: mol_type = unassigned DNA; note = methanogen bacteria
gagcaggtattttcatatcctggaattggacagactgcagttgcagctggtctgcaaaatgacgttcctctg

SEQ ID NO: 28089 - DNA, 54 bp, unidentified
  source 1..54: mol_type = unassigned DNA; note = methanogen bacteria
ataaacaataatttaattgttaatatttataaaagtgatgtcatgtttccaata

SEQ ID NO: 28090 - DNA, 33 bp, unidentified
  source 1..33: mol_type = unassigned DNA; note = methanogen bacteria
tacataggtgttgaacctgatttggcgatatta

SEQ ID NO: 28091 - DNA, 42 bp, unidentified
  source 1..42: mol_type = unassigned DNA; note = methanogen bacteria
ggatggggtgtaagcacatttccatactcaataggttatgtg

SEQ ID NO: 28092 - DNA, 204 bp, unidentified
  source 1..204: mol_type = unassigned DNA; note = methanogen bacteria
gatttatcccctattgatccagttaacgcttatttaagacaagcagcagtatcagaagcacaaagacaaatacttgagaattatttcggtacaaatgttcctttgactacgaaaatttaccattggctattagatttaatacagcttaatttgggaacttctttaatatatcgtgcacctgttattgatatcatttgggaaaag

SEQ ID NO: 28093 - DNA, 90 bp, unidentified
  source 1..90: mol_type = unassigned DNA; note = methanogen bacteria
gctgtttatttgggatggttcccaattggatttggtgttccaattggtgttaggagtactgatgctacgtttttagaatgggcatcaagg

SEQ ID NO: 28094 - DNA, 72 bp, unidentified
  source 1..72: mol_type = unassigned DNA; note = methanogen bacteria
gagcaagtattctcatatcctggtattgggcaaacggcagtagcggcgggtctcagcagtgatgttccgtta

SEQ ID NO: 28095 - DNA, 72 bp, unidentified
  source 1..72: mol_type = unassigned DNA; note = methanogen bacteria
actgcggccagaagtatatttttatctgatattgttacatatcagcaaactcatggtccgttcttatttact

SEQ ID NO: 28096 - DNA, 33 bp, unidentified
  source 1..33: mol_type = unassigned DNA; note = methanogen bacteria
ttgagagtctccccatttatggaaattcctgct

SEQ ID NO: 28097 - DNA, 204 bp, unidentified
  source 1..204: mol_type = unassigned DNA; note = methanogen bacteria
gatttatctcctattaatccagttactgtttatttaaaaggtgcggcagtatcccctgcacaaagagctattcttgaacaatatttcggtgttggtgttcctttacctacaaaaatttatcattggctatgtgatttggctcagggaaatcttggaacatcattaatctatagagttccggtaattgatgttatttgggataaa

SEQ ID NO: 28098 - DNA, 90 bp, unidentified
  source 1..90: mol_type = unassigned DNA; note = methanogen bacteria
gcggtgtatctgggttggttcccaataggatttggagttccaatcggagttaagagtactgatgcaacgttcatggaatgggcatcaaga

SEQ ID NO: 28099 - DNA, 72 bp, unidentified
  source 1..72: mol_type = unassigned DNA; note = methanogen bacteria
gaacaggtattttcatatcctggaataggtcaaactgcagtagctgcaggtcttcaaagtgatgtgccattg

SEQ ID NO: 28100 - DNA, 204 bp, unidentified
  source 1..204: mol_type = unassigned DNA; note = methanogen bacteria
gatttatcccctattgatccggttaatgcatatttaagacaggctgcggtatctgaagcacaaaggcagattcttcaaaactatttcggtactaatgttcccttaactactaaaattttccattggttgatggatttgtttcagggcaatttgggaacttcattaatatatcgagcgcctgttattgatatcatacttgataag

SEQ ID NO: 28101 - DNA, 93 bp, unidentified
  source 1..93: mol_type = unassigned DNA; note = methanogen bacteria
gcagtttatctaggctggttcccaattggttttggtgttccgattggtgtaaagagtacggatgccacatttttcgaatgggcatctaggtta

SEQ ID NO: 28102 - DNA, 72 bp, unidentified
  source 1..72: mol_type = unassigned DNA; note = methanogen bacteria
gaacaggtattttcatatcctggtgttggacaaaccgctgtagctgcaggtctcaatagtgatgttccttta

SEQ ID NO: 28103 - DNA, 87 bp, unidentified
  source 1..87: mol_type = unassigned DNA; note = methanogen bacteria
aatgcttactatcctacattcatggatgcaatatacggtttaaccaaccctcaaaatgttattaataatattttaaccccacaacaa

SEQ ID NO: 28104 - DNA, 45 bp, unidentified
  source 1..45: mol_type = unassigned DNA; note = methanogen bacteria
tcacgtagtgacagagttattgataacgttgttgccggtgaatca

SEQ ID NO: 28105 - DNA, 48 bp, unidentified
  source 1..48: mol_type = unassigned DNA; note = methanogen bacteria
tttgatggatctaattcgtttatacctaaattattcaaaacaaattgg

SEQ ID NO: 28106 - DNA, 72 bp, unidentified
  source 1..72: mol_type = unassigned DNA; note = methanogen bacteria
acctcagcaactaccagctggactgcatttttcattaatatttatggtactacgtttcatataagcgtggat

SEQ ID NO: 28107 - DNA, 75 bp, unidentified
  source 1..75: mol_type = unassigned DNA; note = methanogen bacteria
atgagacgatgtccgcaatgcggttccgcaggtgacgatatatatggattttgtataaaatgtggatatgagttt

SEQ ID NO: 28108 - DNA, 57 bp, unidentified
  source 1..57: mol_type = unassigned DNA; note = methanogen bacteria
tttacaaatcctgatgaagcggattactgcgtcaaatgcggcagccctttaattttt

SEQ ID NO: 28109 - DNA, 93 bp, unidentified
  source 1..93: mol_type = unassigned DNA; note = methanogen bacteria
attgcagtgctatacatgacaggttcaatcccgccggaagttctaacagactacaaaagcttacttataggcaactttacccctttccatagg

SEQ ID NO: 28110 - DNA, 45 bp, unidentified
  source 1..45: mol_type = unassigned DNA; note = methanogen bacteria
tcacgcagcgatagagtgattgacaatgtggtagctggagaaacc

SEQ ID NO: 28111 - DNA, 39 bp, unidentified
  source 1..39: mol_type = unassigned DNA; note = methanogen bacteria
gtttcaaatttaaagcttacaaatgattctctttatgat

SEQ ID NO: 28112 - DNA, 30 bp, unidentified
  source 1..30: mol_type = unassigned DNA; note = methanogen bacteria
tcagttatcaataccttcatgagcctcggc

SEQ ID NO: 28113 - DNA, 69 bp, unidentified
  source 1..69: mol_type = unassigned DNA; note = methanogen bacteria
tccatattcattgataagtcaccggcaaatgtcagaacaatgacaattcttattggatcaatgcttggg

SEQ ID NO: 28114 - DNA, 30 bp, unidentified
  source 1..30: mol_type = unassigned DNA; note = methanogen bacteria
gttccttccagtatggatgttcagctggtc

SEQ ID NO: 28115 - DNA, 30 bp, unidentified
  source 1..30: mol_type = unassigned DNA; note = methanogen bacteria
tggatggatggtcagcaaatcttacatttt

SEQ ID NO: 28116 - DNA, 39 bp, unidentified
  source 1..39: mol_type = unassigned DNA; note = methanogen bacteria
ttaagagacggggattttaatgttttaggttataactgg

SEQ ID NO: 28117 - DNA, 81 bp, unidentified
  source 1..81: mol_type = unassigned DNA; note = methanogen bacteria
gttttaaattatattcctcatgagtttatatcaaatttcgtttgctataataataatctccattcaagttggatacgtgtt

SEQ ID NO: 28118 - DNA, 42 bp, unidentified
  source 1..42: mol_type = unassigned DNA; note = methanogen bacteria
gattggtatattcatggtttaccattaactggaaaagaaatg

SEQ ID NO: 28119 - DNA, 69 bp, unidentified
  source 1..69: mol_type = unassigned DNA; note = methanogen bacteria
atggctcgtagtataaacttactagatattgttgtatatcaacaagtagctggtcctatactattcaca

SEQ ID NO: 28120 - DNA, 36 bp, unidentified
  source 1..36: mol_type = unassigned DNA; note = methanogen bacteria
aatatagttaatgaatatggtgttctaccttcccct

SEQ ID NO: 28121 - DNA, 93 bp, unidentified
  source 1..93: mol_type = unassigned DNA; note = methanogen bacteria
ttccatattggatggattaaaacattcgatataatgagtatattagattatatttataatgcatatttatgccattcaaaaggtttttaccaa

SEQ ID NO: 28122 - DNA, 36 bp, unidentified
  source 1..36: mol_type = unassigned DNA; note = methanogen bacteria
tcaactccaaaagacatatatacatttaatagatat

SEQ ID NO: 28123 - DNA, 48 bp, unidentified; identical to SEQ ID NO: 20927
  source 1..48: mol_type = unassigned DNA; note = methanogen bacteria

SEQ ID NO: 28124 - DNA, 60 bp, unidentified
  source 1..60: mol_type = unassigned DNA; note = methanogen bacteria
ccagaaataagtgatggtggacactttatgatggatatgctgggtgttgcaattccatct

SEQ ID NO: 28125 - DNA, 45 bp, unidentified
  source 1..45: mol_type = unassigned DNA; note = methanogen bacteria
gaatcacgtagcgaaagaattgtagacaatgttacttccggcgaa

SEQ ID NO: 28126 - DNA, 138 bp, unidentified
  source 1..138: mol_type = unassigned DNA; note = methanogen bacteria
atagggtttatatcagattatatgcttgtgacaaatttcgatttcaatcagatttcaacggcggttcctaatagtttgcctatggattttgattttaattctgttattaaggatgtaagtaaagttgtcctcaacttt

SEQ ID NO: 28127 - DNA, 45 bp, unidentified
  source 1..45: mol_type = unassigned DNA; note = methanogen bacteria
cctattgaaatccatttaactaacagtatagaaatttccataatg

SEQ ID NO: 28128 - DNA, 30 bp, unidentified
  source 1..30: mol_type = unassigned DNA; note = methanogen bacteria
ggacaatctattcatctgatttttgagatg

SEQ ID NO: 28129 - DNA, 123 bp, unidentified
  source 1..123: mol_type = unassigned DNA; note = methanogen bacteria
tccacactgcctttacatccatttgcatttgctatggctagcggtgtaggcagtgccagtatgaatgccgcttctttaggccctactcttgccgaatttcctgcactagaaactagtatagaa

SEQ ID NO: 28130 - DNA, 51 bp, unidentified
  source 1..51: mol_type = unassigned DNA; note = methanogen bacteria
tatgataggtctgctagagtagtagatagtgttgcttcaggtgaatcatca

SEQ ID NO: 28131 - DNA, 273 bp, unidentified
  source 1..273: mol_type = unassigned DNA; note = methanogen bacteria
ttgaaattaacccaaaacggaagtgtaaccttttcaggtttccatacaataaaactggaaaatgaaatccctattaaaaaaggagataattttactgtaataatgactaaaaactccgcaccgttattaaacttttcacaaatctattttaaagaaaatgtttcattttacaataatggcaacgggtggatagatgcatcactgaaaaatcaaaccgcaatattaaaagtatatacaaaagatttagccatttacacagaagacctggttaaa

SEQ ID NO: 28132 - DNA, 219 bp, unidentified
  source 1..219: mol_type = unassigned DNA; note = methanogen bacteria
tccaaatttgaggcagaaataggcattgcaaacgaaaccgtaatctttgaaattaatggtgagacatataacagaaccagtgatgaaaacggaactgcaagattggctatcaacttaaatccgggcaattacaccattaagactactttcaacggcacaacagttgaaaacatgattacagtattgcctacgttaatagcagacaatttagtcaaatac

SEQ ID NO: 28133 - DNA, 57 bp, unidentified
  source 1..57: mol_type = unassigned DNA; note = methanogen bacteria
ttctttatttcattaattgatggtgaaggtaaagctataagtggcattaacattacc

SEQ ID NO: 28134 - DNA, 66 bp, unidentified
  source 1..66: mol_type = unassigned DNA; note = methanogen bacteria
aacggcgttttctataacagattaaccaatgaaaatggaacagcaaagctaaacattaacctggag

SEQ ID NO: 28135 - DNA, 66 bp, unidentified
  source 1..66: mol_type = unassigned DNA; note = methanogen bacteria
ggagagtacatattgacagctactgatccgttaaccggtcttcagatgtcctataacatcacagtt

SEQ ID NO: 28136 - DNA, 33 bp, unidentified
  source 1..33: mol_type = unassigned DNA; note = methanogen bacteria
ccagtgctatttgccgacaatctggaaatgaaa

SEQ ID NO: 28137 - DNA, 51 bp, unidentified
  source 1..51: mol_type = unassigned DNA; note = methanogen bacteria
aacgcattagtcctaaacggcgaaggaaagcctttggcaaatgctaaagta

SEQ ID NO: 28138 - DNA, 132 bp, unidentified
  source 1..132: mol_type = unassigned DNA; note = methanogen bacteria
ggagtattctacacaaaatattccaactcttcaggaatagctaaactaaacattaaccttatggccggcgaatatatcatcacctccgaatatgatggaatgagaatttcaaataccattacaatcaaggat

SEQ ID NO: 28139 - DNA, 51 bp, unidentified
  source 1..51: mol_type = unassigned DNA; note = methanogen bacteria
aaggccgtcaagttcggccccggcgacaccagctacaccaacaacgacacg

SEQ ID NO: 28140 - DNA, 48 bp, unidentified
  source 1..48: mol_type = unassigned DNA; note = methanogen bacteria
ggtgacatgcaggtttatttaatttctaggtttaatctctctttaacc

SEQ ID NO: 28141 - DNA, 45 bp, unidentified
  source 1..45: mol_type = unassigned DNA; note = methanogen bacteria
ttacactctcagttggtaagcaactttcatatttcaattgataat

SEQ ID NO: 28142 - DNA, 30 bp, unidentified
  source 1..30: mol_type = unassigned DNA; note = methanogen bacteria
tgcggttccggggcggatttcgatgccgcc

SEQ ID NO: 28143 - DNA, 30 bp, unidentified
  source 1..30: mol_type = unassigned DNA; note = methanogen bacteria
tcccacagcaccgtgacggacaatctgggt

SEQ ID NO: 28144 - DNA, 60 bp, unidentified
  source 1..60: mol_type = unassigned DNA; note = methanogen bacteria
cagaaaaggggagttcataggatatatttaatgaaaaatttttttataacctatgaagca

SEQ ID NO: 28145 - DNA, 57 bp, unidentified
  source 1..57: mol_type = unassigned DNA; note = methanogen bacteria
ggttatggattgacaaatatttatccttcattagactttgcattgactgatttacca

SEQ ID NO: 28146 - DNA, 42 bp, unidentified
  source 1..42: mol_type = unassigned DNA; note = methanogen bacteria
gaagatattatcaaaattattgctaatttatcaaaatacaat

SEQ ID NO: 28147 - DNA, 60 bp, unidentified
  source 1..60: mol_type = unassigned DNA; note = methanogen bacteria
aattcagtggatttatcctcattagacaatataaacatatttaatagagaatatttcaca

SEQ ID NO: 28148 - DNA, 33 bp, unidentified
  source 1..33: mol_type = unassigned DNA; note = methanogen bacteria
caggtttacttggtttcacatatcaatctcgct

SEQ ID NO: 28149 - DNA, 96 bp, unidentified
  source 1..96: mol_type = unassigned DNA; note = methanogen bacteria
ttacattcaacctatccaactttcattgatgcgatatatgcacttggaaacccacagaatgtaataaataatattttaacccctcaacctgaaatt

SEQ ID NO: 28150 - DNA, 105 bp, unidentified
  source 1..105: mol_type = unassigned DNA; note = methanogen bacteria
gtgataaaaatttttactactatgtttttgttattccttcagggaatacgtgaatcagtaggaggttccttaaatacattctttatgaattgtaccgactttgga

SEQ ID NO: 28151 - DNA, 108 bp, unidentified
  source 1..108: mol_type = unassigned DNA; note = methanogen bacteria
cttacggcttgtgtttatcgtccatgggtggctgatccaaatgttcatccatatgaaaaggctttagaaacagctacgggatattctttcccaagtggacatattaca

SEQ ID NO: 28152 - DNA, 63 bp, unidentified
  source 1..63: mol_type = unassigned DNA; note = methanogen bacteria
aaatcttatcctatggattacgacagtgcaggtaaattaatagttgatcctgcaaaaatggct

SEQ ID NO: 28153 - DNA, 30 bp, unidentified
  source 1..30: mol_type = unassigned DNA; note = methanogen bacteria
ttctcaagcggaaatacaatagattacaca

SEQ ID NO: 28154 - DNA, 222 bp, unidentified
  source 1..222: mol_type = unassigned DNA; note = methanogen bacteria
ggtttgggaggtgcaatatgcattgttggagcagctgaaaattccatgttcacaggtgattatgtattgaactccgctttggcaggaggtgcaatatttgtatatggaattgagattcctaaacttaaaatgactaggcctttcaataacaatgctatttattcccgtttcgtatataatggcgcttatgaaggcggtgcgattttaattaatgcaacatca

SEQ ID NO: 28155 - DNA, 45 bp, unidentified
  source 1..45: mol_type = unassigned DNA; note = methanogen bacteria
tcacgtagtgatagagtaatcgataatgttgtttctggtgaaagc

SEQ ID NO: 28156 - DNA, 51 bp, unidentified
  source 1..51: mol_type = unassigned DNA; note = methanogen bacteria
gtcgcaggatggacgggaggagtattatttttaaagcccggaagagcatta

SEQ ID NO: 28157 - DNA, 48 bp, unidentified
  source 1..48: mol_type = unassigned DNA; note = methanogen bacteria
ataccgtcaagagttattttattacaacatccataccacaaacatttt

SEQ ID NO: 28158 - DNA, 54 bp, unidentified
  source 1..54: mol_type = unassigned DNA; note = methanogen bacteria
ggcgaagacgtaaaagaactacaaacaatcctacaaaacaaaggatactacgta

SEQ ID NO: 28159 - DNA, 129 bp, unidentified
  source 1..129: mol_type = unassigned DNA; note = methanogen bacteria
cagacaagcggagcaagtaaaaccgtaacaaaaacaagtacaaatagtaataattgtgcaggacaaaaattcagtaaaacagaactatacaaggcaggacaaacactcaaaaaacatataggaaacaat

SEQ ID NO: 28160 - DNA, 117 bp, unidentified
  source 1..117: mol_type = unassigned DNA; note = methanogen bacteria
gaccatcaaaataacgcatataattgtggtcctactagtttatctatgtgtatgcaaatgatgggtgaatatataccagaaaatcagcttgcacgagaagctggtactacaagggat

SEQ ID NO: 28161 - DNA, 45 bp, unidentified
  source 1..45: mol_type = unassigned DNA; note = methanogen bacteria
tccggaactgacagaattgtagataatgtagtttccggtgaaaat

SEQ ID NO: 28162 - DNA, 48 bp, unidentified
  source 1..48: mol_type = unassigned DNA; note = methanogen bacteria
gcaggaacggataggctagtagatcatgttgtttctggtgaaaataac

SEQ ID NO: 28163 - DNA, 30 bp, unidentified
  source 1..30: mol_type = unassigned DNA; note = methanogen bacteria
gtggcgtcccttggggaagcggcaatttca

SEQ ID NO: 28164 - DNA, 57 bp, unidentified
  source 1..57: mol_type = unassigned DNA; note = methanogen bacteria
ctaattggaattctttttggccaaatagaagctgatgtgtggcataatgccgatgta

SEQ ID NO: 28165 - DNA, 30 bp, unidentified
  source 1..30: mol_type = unassigned DNA; note = methanogen bacteria
tcaactttcggtacaatggcaattgccgca

SEQ ID NO: 28166 - DNA, 45 bp, unidentified
  source 1..45: mol_type = unassigned DNA; note = methanogen bacteria
tcacgcagtgaccgtgttatagataatgttgtttcaggtgaaacc

SEQ ID NO: 28167 - DNA, 36 bp, unidentified
  source 1..36: mol_type = unassigned DNA; note = methanogen bacteria
atgttaatagcgactaccggtgagataagaccaata

SEQ ID NO: 28168 - DNA, 45 bp, unidentified
  source 1..45: mol_type = unassigned DNA; note = methanogen bacteria
gcatttagtttattttccattaatggaatgggaacagaagtattt

SEQ ID NO: 28169 - DNA, 60 bp, unidentified
  source 1..60: mol_type = unassigned DNA; note = methanogen bacteria
taccctcttattagtcagttcattggcaatgctttcttctctggattctcatacataaga

SEQ ID NO: 28170 - DNA, 66 bp, unidentified
  source 1..66: mol_type = unassigned DNA; note = methanogen bacteria
ttaagaatactgtatttgaaaataactatgctgctgaaaatggtggagcaatacaggcaggagcat

SEQ ID NO: 28171 - DNA, 42 bp, unidentified
  source 1..42: mol_type = unassigned DNA; note = methanogen bacteria
aaaatgcaagtatatcttatctcacaaataaaacttcctttg

SEQ ID NO: 28172 - DNA, 42 bp, unidentified
  source 1..42: mol_type = unassigned DNA; note = methanogen bacteria
cgtactgacagaattatagataacgttgtagccggtgagaca

SEQ ID NO: 28173 - DNA, 39 bp, unidentified
  source 1..39: mol_type = unassigned DNA; note = methanogen bacteria
gcagcattagctaaaacagtgacagcaactgctttctat

SEQ ID NO: 28174 - DNA, 45 bp, unidentified
  source 1..45: mol_type = unassigned DNA; note = methanogen bacteria
gcagctttaactaaagtaatcgcaccagcatcaatgttctatcca

SEQ ID NO: 28175 - DNA, 30 bp, unidentified
  source 1..30: mol_type = unassigned DNA; note = methanogen bacteria
gcattaaattataaaccaaatactatagag

SEQ ID NO: 28176 - DNA, 90 bp, unidentified
  source 1..90: mol_type = unassigned DNA; note = methanogen bacteria
gggttacctgctttaactcatcagccagcttcatttaatggatttttaaattatttaatttgttttaaaggttcagattatccgcatatg

SEQ ID NO: 28177 - DNA, 54 bp, unidentified
  source 1..54: mol_type = unassigned DNA; note = methanogen bacteria
ttaactattgatgctgaatttacagtaaaggattttgtagctcaattttattta

SEQ ID NO: 28178 - DNA, 51 bp, unidentified
  source 1..51: mol_type = unassigned DNA; note = methanogen bacteria
tatattggagttattccttcaataagagcatatgtctgtagtggtgccgat

SEQ ID NO: 28179 - DNA, 45 bp, unidentified
  source 1..45: mol_type = unassigned DNA; note = methanogen bacteria
gcacaacccaaaaattatccatcgatttatgatttatttttaatt

SEQ ID NO: 28180 - DNA, 39 bp, unidentified; identical to SEQ ID NO: 20874
  source 1..39: mol_type = unassigned DNA; note = methanogen bacteria

SEQ ID NO: 28181 - DNA, 33 bp, unidentified; identical to SEQ ID NO: 20931
  source 1..33: mol_type = unassigned DNA; note = methanogen bacteria

SEQ ID NO: 28182 - DNA, 108 bp, unidentified
  source 1..108: mol_type = unassigned DNA; note = methanogen bacteria
atggaaaaaatgtttacgacggcttttttattatttttgcaggggattcgtgaatctgcaggaggaccattaaactcatttttcatgagttgcactgattttggaaat

SEQ ID NO: 28183 - DNA, 108 bp, unidentified
  source 1..108: mol_type = unassigned DNA; note = methanogen bacteria
cttactgcatgcgtataccgcccttgggtggctgattcaaacatccatccttatgaaaaggctttggaagcagctaccggatattcatttccaagcggacacgtagca

SEQ ID NO: 28184 - DNA, 63 bp, unidentified
  source 1..63: mol_type = unassigned DNA; note = methanogen bacteria
aaatcatatccgatggattatgacagtgcgggcaaattgttagttaatcctgcaaaaatggct

SEQ ID NO: 28185 - DNA, 45 bp, unidentified
  source 1..45: mol_type = unassigned DNA; note = methanogen bacteria
tccggaactgatagacttatagataatgtagtttctggtgaaaac

SEQ ID NO: 28186 - DNA, 33 bp, unidentified
  source 1..33: mol_type = unassigned DNA; note = methanogen bacteria
acaagacttttcattgcagaaagtcctgatgcg

SEQ ID NO: 28187 - DNA, 174 bp, unidentified
  source 1..174: mol_type = unassigned DNA; note = methanogen bacteria
ggaacggttatgaataatacttcgtctgatttgcagggcacaagtcaggtaagcagcagttcaggtgatagtgctcaagtttcaagttctgtcaataattctagtgagaaagtgacaggcagttcaaatgctaagagtggaactgtttactgggctagtgtaaaaacgaatagt

SEQ ID NO: 28188 - DNA, 114 bp, unidentified
  source 1..114: mol_type = unassigned DNA; note = methanogen bacteria
cataagccaaattgtgaatgggctcagaaaatcagtgacgacaataaaatagttttccatagccgtcaggacgcattaaactccggaagacaaccttgtgaagtttgtaatcct

SEQ ID NO: 28189 - DNA, 42 bp, unidentified
  source 1..42: mol_type = unassigned DNA; note = methanogen bacteria
tccagtaccgatagaatcgttgataatgttgtatctggagaa

SEQ ID NO: 28190 - DNA, 45 bp, unidentified
  source 1..45: mol_type = unassigned DNA; note = methanogen bacteria
tctcgcagtgacagagtaattgacaatgttatttctggagaaaac

SEQ ID NO: 28191 - DNA, 63 bp, unidentified
  source 1..63: mol_type = unassigned DNA; note = methanogen bacteria
gaatttggaattctaccgagtaccttcttgaatgcttatctctcccttcaagattttgctaat

SEQ ID NO: 28192 - DNA, 54 bp, unidentified
  source 1..54: mol_type = unassigned DNA; note = methanogen bacteria
gatatgggaaatcaaatcactgatttgtatcacccgatattcgcagtttttgat

SEQ ID NO: 28193 - DNA, 63 bp, unidentified
  source 1..63: mol_type = unassigned DNA; note = methanogen bacteria
gaatttggaattctaccgagtaccttcctgaatgcttatctctcccttcaagattttgctaat

SEQ ID NO: 28194 - DNA, 51 bp, unidentified
  source 1..51: mol_type = unassigned DNA; note = methanogen bacteria
gatatgggaaatcaaatcactgatttgtatcacccgatattcgcagttttt

SEQ ID NO: 28195 - DNA, 33 bp, unidentified
  source 1..33: mol_type = unassigned DNA; note = methanogen bacteria
atttataatgcatgggtaggtcccacacttagc

SEQ ID NO: 28196 - DNA, 96 bp, unidentified
  source 1..96: mol_type = unassigned DNA; note = methanogen bacteria
ggcatcagtcatgttgtcaagggtttcgatttggtttcccttggtaattttgtagtcggtgcatttatgggtgaagtctacggttttaatgcaaac

SEQ ID NO: 28197 - DNA, 42 bp, unidentified
  source 1..42: mol_type = unassigned DNA; note = methanogen bacteria
aggtcatctccgaccaatatttcatgtttccaaagatattca

SEQ ID NO: 28198 - DNA, 204 bp, unidentified
  source 1..204: mol_type = unassigned DNA; note = methanogen bacteria
caattgtctcctattgaccctgtaagagcatatcttggtcaaagaattgtgagtcaggaacagctggctattgtgggtcaatactggggtacagatttaaccttgggtgaaagagtattgggatggcttcaaactttagcatcaggaagcatgggtttttcattaatctatagggttcctgtaactgaagttattgttcagaaa

SEQ ID NO: 28199 - DNA, 87 bp, unidentified
  source 1..87: mol_type = unassigned DNA; note = methanogen bacteria
gtatatttaggctggttcccaatcggactttcagttcctatcggtcagctatcagatacggtaacattctggcaatggttatacaga

SEQ ID NO: 28200 - DNA, 72 bp, unidentified
  source 1..72: mol_type = unassigned DNA; note = methanogen bacteria
gagcaggtatttgcatatcctggaatcggtcaggctactgtagctgcaggattgcggtctgatgttccatta

SEQ ID NO: 28201 - DNA, 63 bp, unidentified
  source 1..63: mol_type = unassigned DNA; note = methanogen bacteria
gaatttggaattttgccaggtactttcattcatgcttatctttcccttcaagattttgctaat

SEQ ID NO: 28202 - DNA, 51 bp, unidentified
  source 1..51: mol_type = unassigned DNA; note = methanogen bacteria
gatatgggaactcaaatcacaaatttatatcatccgatatttgcaattttt

SEQ ID NO: 28203 - DNA, 42 bp, unidentified
  source 1..42: mol_type = unassigned DNA; note = methanogen bacteria
ggactgaccagtttcgacggcaccgagacgggattggacgga

SEQ ID NO: 28204 - DNA, 57 bp, unidentified
  source 1..57: mol_type = unassigned DNA; note = methanogen bacteria
cttctggtattcgctccgtcggagtaccatacactcgatgagggagaggatgccgtc

SEQ ID NO: 28205 - DNA, 66 bp, unidentified
  source 1..66: mol_type = unassigned DNA; note = methanogen bacteria
attggcgaggagatcagcgaggacttcaccgataaaatgagcaattacgagatcatggccagcatg

SEQ ID NO: 28206 - DNA, 66 bp, unidentified
  source 1..66: mol_type = unassigned DNA; note = methanogen bacteria
gaaggcaatttgattcttgaaaactcaacacttaaagacaacagtgctgatgactgcagcggagct

SEQ ID NO: 28207 - DNA, 102 bp, unidentified
  source 1..102: mol_type = unassigned DNA; note = methanogen bacteria
gttgaaggatccaaagcagaaatatacggctgcacatttgaaaataaccatgcaaaagacgatgaaggagcactatgggccaaggacaatcttattgctaag

SEQ ID NO: 28208 - DNA, 90 bp, unidentified
  source 1..90: mol_type = unassigned DNA; note = methanogen bacteria
aaagcagaaatatacggctgcacatttgaaaataaccatgcaaaagatgatggaggagcactatgggccaagggcaatgcaaacatccaa

SEQ ID NO: 28209 - DNA, 42 bp, unidentified
  source 1..42: mol_type = unassigned DNA; note = methanogen bacteria
cgtagtgatcgtgtgatagacaatgttgtttctggtgaaaca

SEQ ID NO: 28210 - DNA, 30 bp, unidentified
  source 1..30: mol_type = unassigned DNA; note = methanogen bacteria
ttctcaagcggaaatacaatggattatgtg

SEQ ID NO: 28211 - DNA, 42 bp, unidentified
  source 1..42: mol_type = unassigned DNA; note = methanogen bacteria
ggggaaatgcaggtttacctaatctcccatatcaagctttca

SEQ ID NO: 28212 - DNA, 63 bp, unidentified
  source 1..63: mol_type = unassigned DNA; note = methanogen bacteria
tccgacggtttaaccctcgaggaaggcgtcaggctgagcgcattcttagcaaacgacaagttc

SEQ ID NO: 28213 - DNA, 30 bp, unidentified
  source 1..30: mol_type = unassigned DNA; note = methanogen bacteria
gtcaccggaatcaccgagaggagcatcgag

SEQ ID NO: 28214 - DNA, 30 bp, unidentified
  source 1..30: mol_type = unassigned DNA; note = methanogen bacteria
ttttcaagcaacaactcaatgagttatatt

SEQ ID NO: 28215 - DNA, 45 bp, unidentified
  source 1..45: mol_type = unassigned DNA; note = methanogen bacteria
tcaggtactgaaagaatagtggataatgttgtttcaggagaaaat

SEQ ID NO: 28216 - DNA, 30 bp, unidentified
  source 1..30: mol_type = unassigned DNA; note = methanogen bacteria
acagtattccatccacataattacgaccga

SEQ ID NO: 28217 - DNA, 36 bp, unidentified
  source 1..36: mol_type = unassigned DNA; note = methanogen bacteria
ggacaatacgaaataatttcaataaatttatcttca

SEQ ID NO: 28218 - DNA, 96 bp, unidentified
  source 1..96: mol_type = unassigned DNA; note = methanogen bacteria
atgggatttaatgtaagtggacaggaagaaataacatccttaatcaatttcaaccaagtgcactattccattttgggtggaaataattttggaccg

SEQ ID NO: 28219 - DNA, 33 bp, unidentified
  source 1..33: mol_type = unassigned DNA; note = methanogen bacteria
ttttcaggaggaagcagggatgataatggtgca

SEQ ID NO: 28220 - DNA, 30 bp, unidentified
  source 1..30: mol_type = unassigned DNA; note = methanogen bacteria
ttttcaaacggaatcagcctggattatccg

SEQ ID NO: 28221 - DNA, 66 bp, unidentified
  source 1..66: mol_type = unassigned DNA; note = methanogen bacteria
gagtggggaatattgcctggaactttcttaaatgtttatctttcacttcaggattttgctgataat

SEQ ID NO: 28222 - DNA, 54 bp, unidentified
  source 1..54: mol_type = unassigned DNA; note = methanogen bacteria
gtggattttggaaatcccgtcactaatctctaccaccctatattcgaagtattc

SEQ ID NO: 28223 - DNA, 30 bp, unidentified
  source 1..30: mol_type = unassigned DNA; note = methanogen bacteria
ggaaatcaattatttgggcatttgaattct

SEQ ID NO: 28224 - DNA, 36 bp, unidentified
  source 1..36: mol_type = unassigned DNA; note = methanogen bacteria
ttttcaggaggtgggggcgataatgacaatggaggc

SEQ ID NO: 28225 - DNA, 30 bp, unidentified
  source 1..30: mol_type = unassigned DNA; note = methanogen bacteria
ttttcaagcggaaatgcaatggactacacc

SEQ ID NO: 28226 - DNA, 102 bp, unidentified
  source 1..102: mol_type = unassigned DNA; note = methanogen bacteria
acaagtttctttgaaaatgaggcatatagttattacgatgatgaagatgaaataaatattgctggcttcggtggtgcaataatgcactttggtgagtttgac

SEQ ID NO: 28227 - DNA, 273 bp, unidentified
  source 1..273: mol_type = unassigned DNA; note = methanogen bacteria
gtgagttttttaggaaataaagtttctggatatggtcatggtggtgcgatagctgttgttggtacaaccaggcctaaatcattaattgaaaacgcatttttttcacaaaatatatgtgaaggtgctggtggaggagccatttacacagttcatgaccttgttgtagctaattgcatattcataagaaattatgctgtgggtaagaaagaggttcaatttggacctgataaggatattgacttagctgggggaacaatttactgtcgtgatgaa

SEQ ID NO: 28228 - DNA, 30 bp, unidentified
  source 1..30: mol_type = unassigned DNA; note = methanogen bacteria
taccacccatatgatatatcaaccgcaaat

SEQ ID NO: 28229 - DNA, 30 bp, unidentified
  source 1..30: mol_type = unassigned DNA; note = methanogen bacteria
ttttcaagcgcaaacacaattgactacgcc

SEQ ID NO: 28230 - DNA, 30 bp, unidentified
  source 1..30: mol_type = unassigned DNA; note = methanogen bacteria
ttttcaaatgggaatgcaatggactatgca

SEQ ID NO: 28231 - DNA, 45 bp, unidentified
  source 1..45: mol_type = unassigned DNA; note = methanogen bacteria
tcacgtactgacaggattatagacaatgttgtagccggtgaaaca

SEQ ID NO: 28232 - DNA, 30 bp, unidentified
  source 1..30: mol_type = unassigned DNA; note = methanogen bacteria
atacataacacagaagtcatatttccagaa

SEQ ID NO: 28233 - DNA, 63 bp, unidentified
  source 1..63: mol_type = unassigned DNA; note = methanogen bacteria
tggggaatcatgcctgcatctttcttaaatttctatctttctattcaaaatattgcagataat

SEQ ID NO: 28234 - DNA, 54 bp, unidentified
  source 1..54: mol_type = unassigned DNA; note = methanogen bacteria
gatttacatattcctgtaactgatatgtatggtccaatttttgccacttttgat

SEQ ID NO: 28235 - DNA, 30 bp, unidentified
  source 1..30: mol_type = unassigned DNA; note = methanogen bacteria
gagagccaggtgctgttcgacaacctcgtg

SEQ ID NO: 28236 - DNA, 60 bp, unidentified
  source 1..60: mol_type = unassigned DNA; note = methanogen bacteria
atggatcccagtttctccgggagaccgctgttcgaggagggcaggagcgtgaacgaaatg

SEQ ID NO: 28237 - DNA, 36 bp, unidentified
  source 1..36: mol_type = unassigned DNA; note = methanogen bacteria
ttcacaaattccggagccgtttacgcgcacggaata

SEQ ID NO: 28238 - DNA, 183 bp, unidentified
  source 1..183: mol_type = unassigned DNA; note = methanogen bacteria
aacgaggccgatgccccgaaccttatacagtacgtgggttacatgccttgcttcgcgcccgacatggcactgaattcgttggggaacaacatctcgctggaacatttcgggaccaatttcgttccctcggcatggatgaccttgggcggattgctgccgtatcccgtgaggctgggaagcgac

SEQ ID NO: 28239 - DNA, 42 bp, unidentified
  source 1..42: mol_type = unassigned DNA; note = methanogen bacteria
ccaaattcatttaaatgggttttaagtgagtataatggcatc

SEQ ID NO: 28240 - DNA, 30 bp, unidentified
  source 1..30: mol_type = unassigned DNA; note = methanogen bacteria
gagagtcaggtgctgttcgacaacctggtg

SEQ ID NO: 28241 - DNA, 30 bp, unidentified
  source 1..30: mol_type = unassigned DNA; note = methanogen bacteria
ggaggacagttatttgcaaatctagactcc

SEQ ID NO: 28242 - DNA, 45 bp, unidentified
  source 1..45: mol_type = unassigned DNA; note = methanogen bacteria
cctattaaaattcccttggcaaaaggtgttgaagtttcaataatg

SEQ ID NO: 28243 - DNA, 30 bp, unidentified
  source 1..30: mol_type = unassigned DNA; note = methanogen bacteria
ggtcaatcaatgcatttgatttttgaaatg

SEQ ID NO: 28244 - DNA, 123 bp, unidentified
  source 1..123: mol_type = unassigned DNA; note = methanogen bacteria
tctttattgcctttgcatccttatgcatttgctatggctagtggtgtaggtagtgcaagtatgaatgcagctgctttaggtccaactcttgcggcattccctacattggaaacaaatatcgaa

SEQ ID NO: 28245 - DNA, 30 bp, unidentified
  source 1..30: mol_type = unassigned DNA; note = methanogen bacteria
ttttcaagtggaaatacaatggattataca

SEQ ID NO: 28246 - DNA, 30 bp, unidentified
  source 1..30: mol_type = unassigned DNA; note = methanogen bacteria
ggagaactgctatttgcgaatctggattcc

SEQ ID NO: 28247 - DNA, 45 bp, unidentified
  source 1..45: mol_type = unassigned DNA; note = methanogen bacteria
tcacgtagtgatagagtaattgataatgttgtttcaggtgaaagc

SEQ ID NO: 28248 - DNA, 33 bp, unidentified
  source 1..33: mol_type = unassigned DNA; note = methanogen bacteria
ttttcaggtggtggagacaacgataatggcgga

SEQ ID NO: 28249 - DNA, 33 bp, unidentified
  source 1..33: mol_type = unassigned DNA; note = methanogen bacteria
ttttcaggtggaggagataacgacaatggtggt

SEQ ID NO: 28250 - DNA, 45 bp, unidentified
  source 1..45: mol_type = unassigned DNA; note = methanogen bacteria
aagggtcttcaagagcaaatcaatgatgctcgtgctgggtcaaca

SEQ ID NO: 28251 - DNA, 159 bp, unidentified
  source 1..159: mol_type = unassigned DNA; note = methanogen bacteria
aagatttctaaggatatggttattgatggtcatggccatacaattgatttagctggaagcagtggacatgatcactattttaaggttactgatgggtctgttacctttaaaaacatcagatttatcaatggatacaataaggatgatgatactgatgga

SEQ ID NO: 28252 - DNA, 90 bp, unidentified
  source 1..90: mol_type = unassigned DNA; note = methanogen bacteria
atctgtacaattataaattgtacttttgaaaactgttgggctgaaagtaaggctggcgctattttttctataggagaattgcgcatattt

SEQ ID NO: 28253 - DNA, 36 bp, unidentified
  source 1..36: mol_type = unassigned DNA; note = methanogen bacteria
tctacatttcttaacaatagagttggtgatgatgga

SEQ ID NO: 28254 - DNA, 102 bp, unidentified
  source 1..102: mol_type = unassigned DNA; note = methanogen bacteria
ccatttgcttttggggatgtaagtataggtggactgattgctcagccggcacacttcttaatgtccggcataggaattgatgatttgactggatccattcct

SEQ ID NO: 28255 - DNA, 48 bp, unidentified
  source 1..48: mol_type = unassigned DNA; note = methanogen bacteria
gtatggggaggcggatggctgatgcaaatgggtgcattggactttgca

SEQ ID NO: 28256 - DNA, 30 bp, unidentified
  source 1..30: mol_type = unassigned DNA; note = methanogen bacteria
ggaggatctgctcttgcagctaatggactt

SEQ ID NO: 28257 - DNA, 51 bp, unidentified
  source 1..51: mol_type = unassigned DNA; note = methanogen bacteria
gcttcacctcttattaatgaggcatctggtttgttatttggaaatcctggt

SEQ ID NO: 28258 - DNA, 45 bp, unidentified
  source 1..45: mol_type = unassigned DNA; note = methanogen bacteria
ggaatctacatcatatcctctgatgcaatcatgaactatacccta

SEQ ID NO: 28259 - DNA, 66 bp, unidentified
  source 1..66: mol_type = unassigned DNA; note = methanogen bacteria
tttgtatctttttcaagcatacaagtcaatacaatagaagcgggaacccttttctttagccatatg

SEQ ID NO: 28260 - DNA, 30 bp, unidentified
  source 1..30: mol_type = unassigned DNA; note = methanogen bacteria
atgcaagggcttcagaatgtaaacatacaa

SEQ ID NO: 28261 - DNA, 36 bp, unidentified
  source 1..36: mol_type = unassigned DNA; note = methanogen bacteria
tttactataggatatgaattcaatttatggtatgaa

SEQ ID NO: 28262 - DNA, 42 bp, unidentified
  source 1..42: mol_type = unassigned DNA; note = methanogen bacteria
cgcagtgacagagtaattgataatgtagtagctggagaaacc

SEQ ID NO: 28263 - DNA, 30 bp, unidentified
  source 1..30: mol_type = unassigned DNA; note = methanogen bacteria
attggaactcttccgattgatgaactacct

SEQ ID NO: 28264 - DNA, 33 bp, unidentified
  source 1..33: mol_type = unassigned DNA; note = methanogen bacteria
ttaggatctcctatttttgaaggacttccggct

SEQ ID NO: 28265 - DNA, 42 bp, unidentified
  source 1..42: mol_type = unassigned DNA; note = methanogen bacteria
cctaaattgttcaattgggttttgagtgaagtaaacggcata

SEQ ID NO: 28266 - DNA, 36 bp, unidentified
  source 1..36: mol_type = unassigned DNA; note = methanogen bacteria
gagtttctaaatgcaataacaaacatattcggaagc

SEQ ID NO: 28267 - DNA, 33 bp, unidentified
  source 1..33: mol_type = unassigned DNA; note = methanogen bacteria
gctggaacagctcctgttcatgaacttcctgct

SEQ ID NO: 28268 - DNA, 129 bp, unidentified
  source 1..129: mol_type = unassigned DNA; note = methanogen bacteria
accgacggaacgccgctgatcctcctggacaccatattcgaccacacatccaatgtagcaggcagcaacgggctggtcaacatcggcgattggaccgacctgatcttcggcacattcgtatcggaaagc

SEQ ID NO: 28269 - DNA, 45 bp, unidentified
  source 1..45: mol_type = unassigned DNA; note = methanogen bacteria
tctggaactgagagaatagttgataatgttgtttctggtgaaaat

SEQ ID NO: 28270 - DNA, 33 bp, unidentified
  source 1..33: mol_type = unassigned DNA; note = methanogen bacteria
ataggaaccgctccaatagatgagcttccagca

SEQ ID NO: 28271 - DNA, 33 bp, unidentified
  source 1..33: mol_type = unassigned DNA; note = methanogen bacteria
ataggttcacctactgtaaatgagcttccagca

SEQ ID NO: 28272 - DNA, 33 bp, unidentified
  source 1..33: mol_type = unassigned DNA; note = methanogen bacteria
atccctcaaattaatttaatccaatatacaggt

SEQ ID NO: 28273 - DNA, 36 bp, unidentified
  source 1..36: mol_type = unassigned DNA; note = methanogen bacteria
tatacattaggaggttcactttctggaatctttaat

SEQ ID NO: 28274 - DNA, 90 bp, unidentified
  source 1..90: mol_type = unassigned DNA; note = methanogen bacteria
gatgaatctcctaatctatttgatagtttatattttgttataattactttaacaacagtaggttatggggatatgggattcacttcacca

SEQ ID NO: 28275 - DNA, 63 bp, unidentified
  source 1..63: mol_type = unassigned DNA; note = methanogen bacteria
atgcctactgtagacacttttcttccagatattatacaaactacttttttctctggatacact

SEQ ID NO: 28276 - DNA, 45 bp, unidentified
  source 1..45: mol_type = unassigned DNA; note = methanogen bacteria
gtggataatggaattcttccaaaaactgtttttctaatcacccct

SEQ ID NO: 28277 - DNA, 72 bp, unidentified
  source 1..72: mol_type = unassigned DNA; note = methanogen bacteria
gctgtagaatacttcaattatgtggaacagcatgttttaccaaatgctataaatcagctattcgatacatat

SEQ ID NO: 28278 - DNA, 72 bp, unidentified
  source 1..72: mol_type = unassigned DNA; note = methanogen bacteria
ggtactgtatgattgaaattttatgaaaatttaaaaaatttttcttcaagtttcgaaaaatattttttttca

SEQ ID NO: 28279 - DNA, 57 bp, unidentified
  source 1..57: mol_type = unassigned DNA; note = methanogen bacteria
gggaatattctggatttattgacaaatcattcatttagcggttctcatcttttaatc

SEQ ID NO: 28280 - DNA, 72 bp, unidentified
  source 1..72: mol_type = unassigned DNA; note = methanogen bacteria
ttgaatcgcttcaatataaattacttcacaagtccgaatatagcaatccttaatcaattgactttttatcct

SEQ ID NO: 28281 - DNA, 45 bp, unidentified
  source 1..45: mol_type = unassigned DNA; note = methanogen bacteria
gattttatagccattatttcatctttaataaataatgttttagta

SEQ ID NO: 28282 - DNA, 36 bp, unidentified
  source 1..36: mol_type = unassigned DNA; note = methanogen bacteria
gcaggaaccactcctatttcagagcttccgcctaca

SEQ ID NO: 28283 - DNA, 39 bp, unidentified
  source 1..39: mol_type = unassigned DNA; note = methanogen bacteria
attacttctattgtgactgctatacctgacaatccaaat

SEQ ID NO: 28284 - DNA, 54 bp, unidentified
  source 1..54: mol_type = unassigned DNA; note = methanogen bacteria
aaaatttctgatatattgtcttttgatgcaataaatgttttagacccatatata

SEQ ID NO: 28285 - DNA, 36 bp, unidentified
  source 1..36: mol_type = unassigned DNA; note = methanogen bacteria
ggctattttaacaaagaattattatccaatatcaat

SEQ ID NO: 28286 - DNA, 66 bp, unidentified
  source 1..66: mol_type = unassigned DNA; note = methanogen bacteria
cttggaagttttatgcaacataacatttcaaatcccatccaaactcttttaacatcatcagatatg

SEQ ID NO: 28287 - DNA, 54 bp, unidentified
  source 1..54: mol_type = unassigned DNA; note = methanogen bacteria
tttgcagcgaatagtatgcaattggtagaatctggaaccggttcaattggagat

SEQ ID NO: 28288 - DNA, 30 bp, unidentified
  source 1..30: mol_type = unassigned DNA; note = methanogen bacteria
ttttcaagcggaaatacaatggactattcc

SEQ ID NO: 28289 - DNA, 30 bp, unidentified
  source 1..30: mol_type = unassigned DNA; note = methanogen bacteria
ccgggagaattgcttttcgacaatctgaat

SEQ ID NO: 28290 - DNA, 33 bp, unidentified
  source 1..33: mol_type = unassigned DNA; note = methanogen bacteria
gcaggatcacatcccgttgcagagcttccggca

SEQ ID NO: 28291 - DNA, 51 bp, unidentified
  source 1..51: mol_type = unassigned DNA; note = methanogen bacteria
gtgaccttttcaggtttccatacaataaaactggaaaatgaaattcctatt

SEQ ID NO: 28292 - DNA, 201 bp, unidentified
  source 1..201: mol_type = unassigned DNA; note = methanogen bacteria
aaaggagataatttcactgtaataatgactaaaaactccgcaccgttattaaacttttcacaaatctattttaaagaaaatgtttcattttacaataatggcaacggatggatagatgcatcactgacaaatcaaaccgcaatattaaaagtatatacaaaagatttagccatttacacagaggacctggttaaaatctat

SEQ ID NO: 28293 - DNA, 225 bp, unidentified
  source 1..225: mol_type = unassigned DNA; note = methanogen bacteria
aacgcttccaaatttgaggcggaaattggtattgccaataaaacagtaacatttgaaattaatggtggaaaatataatagaaccagtgatgagaacggaaccgcaagaatgacaattaacctggaacctggcaactacacaatcaaaacaacattcaacggcacaacagtcgaaaacacagttacagtattgcctacattaatagcggacaatttagtcaaatac

SEQ ID NO: 28294 - DNA, 57 bp, unidentified
  source 1..57: mol_type = unassigned DNA; note = methanogen bacteria
ttctttatttcattaattgacggtgaaggaaatcccgtggcaggtgttaacattacc

SEQ ID NO: 28295 - DNA, 174 bp, unidentified
  source 1..174: mol_type = unassigned DNA; note = methanogen bacteria
aacggagttttctataacagactaaccaatgaaaacggaacagcaaagctaaacattaacctggaacctggagagtacatattgacagccactgatccgttaaccggtcttcagatgtcatataacatcacagttttaccagtgctatttgccgacaatctggaaatgaaatat

SEQ ID NO: 28296 - DNA, 57 bp, unidentified
  source 1..57: mol_type = unassigned DNA; note = methanogen bacteria
ttcaacgcattagtcctaaacggcgaaggaaagcctttggcaaatgctaaagtaaca

SEQ ID NO: 28297 - DNA, 135 bp, unidentified
  source 1..135: mol_type = unassigned DNA; note = methanogen bacteria
aacggagtattctacacaagatatgccaactcttcaggaatagccaagctaaacattaacctcatggccggagaatacatcatcacctccgaatatgatggaatgagaatttcaaataccattacaatcaaggat

SEQ ID NO: 28298 - DNA, 111 bp, unidentified
  source 1..111: mol_type = unassigned DNA; note = methanogen bacteria
tccatcggcgaatactccatttctttcacggagacctatgtgcgcatctgggagcatatcacggggagcataacccatccaatcgatgatgcggtcgtatggaacatgcgt

SEQ ID NO: 28299 - DNA, 30 bp, unidentified
  source 1..30: mol_type = unassigned DNA; note = methanogen bacteria
gcaggcgtgaccgtcatcggtggcgattat

SEQ ID NO: 28300 - DNA, 78 bp, unidentified
  source 1..78: mol_type = unassigned DNA; note = methanogen bacteria
aaactttgggctacggacgaggcccttgccaatgtctatgcgtggtctgtcggctcgctcaccgggctttcatgggac

SEQ ID NO: 28301 - DNA, 33 bp, unidentified
  source 1..33: mol_type = unassigned DNA; note = methanogen bacteria
ttaggagtaggtcctgttaatgagatacctgca

SEQ ID NO: 28302 - DNA, 33 bp, unidentified
  source 1..33: mol_type = unassigned DNA; note = methanogen bacteria
accgaactcgcacatatgatcggcatctccgac

SEQ ID NO: 28303 - DNA, 33 bp, unidentified
  source 1..33: mol_type = unassigned DNA; note = methanogen bacteria
ataggtgttgctcctatcacacagattcctgca

SEQ ID NO: 28304 - DNA, 57 bp, unidentified
  source 1..57: mol_type = unassigned DNA; note = methanogen bacteria
ggaattattacagggaatgctaagttggaatctttattaaccccagcatatacatta

SEQ ID NO: 28305 - DNA, 54 bp, unidentified
  source 1..54: mol_type = unassigned DNA; note = methanogen bacteria
caagacaaatctctctatccaatcctaacaggttcacttcactatagccatcct

SEQ ID NO: 28306 - DNA, 33 bp, unidentified
  source 1..33: mol_type = unassigned DNA; note = methanogen bacteria
ttttctcatcaacacattataaacatagacaca

SEQ ID NO: 28307 - DNA, 45 bp, unidentified
  source 1..45: mol_type = unassigned DNA; note = methanogen bacteria
agcagcggaactccttttacaagcagcttcagctttaactggagc

SEQ ID NO: 28308 - DNA, 36 bp, unidentified
  source 1..36: mol_type = unassigned DNA; note = methanogen bacteria
ttgaatcttcctgtaagcaatctcgtcccattagga

SEQ ID NO: 28309 - DNA, 33 bp, unidentified
  source 1..33: mol_type = unassigned DNA; note = methanogen bacteria
ataggtgttcaacctgtagcgcagatacctgca

SEQ ID NO: 28310 - DNA, 33 bp, unidentified
  source 1..33: mol_type = unassigned DNA; note = methanogen bacteria
ataggtgcagcccctgttgcacagattcctgca

SEQ ID NO: 28311 - DNA, 36 bp, unidentified
  source 1..36: mol_type = unassigned DNA; note = methanogen bacteria
tcattaataaatcattcatttaacagttcacatctt

SEQ ID NO: 28312 - DNA, 75 bp, unidentified
  source 1..75: mol_type = unassigned DNA; note = methanogen bacteria
gacttgaatcatttcaatataaattatttccacaatttggatttagcaatcctaaatcaattcatcttttatcca

SEQ ID NO: 28313 - DNA, 42 bp, unidentified
  source 1..42: mol_type = unassigned DNA; note = methanogen bacteria
gatttcatatccattatttcaggatttataaagataatgctt

SEQ ID NO: 28314 - DNA, 102 bp, unidentified
  source 1..102: mol_type = unassigned DNA; note = methanogen bacteria
ttagcgtttaagaaatataatgtaaaatctggcatttttgggagcccttggaacggttttattaattttggatttcttctgaaaaataagaccctcccgatt

SEQ ID NO: 28315 - DNA, 90 bp, unidentified
  source 1..90: mol_type = unassigned DNA; note = methanogen bacteria
tttttggatcctgaggcaggcttgattaatcatattattcaatactttggcggtaaaaaaataatgtggtacgataccccaaaatattgg

SEQ ID NO: 28316 - DNA, 114 bp, unidentified
  source 1..114: mol_type = unassigned DNA; note = methanogen bacteria
gactttggcttattttatcaagtgccacaaaattcagggttgatacaaaatgttacgcaaacaattgatactttcgtatatagatcattgcttgtacaaaataatatcggtttg

SEQ ID NO: 28317 - DNA, 60 bp, unidentified
  source 1..60: mol_type = unassigned DNA; note = methanogen bacteria
ataaaattacctgatgttccacttagaacagttgcagatttcacagtatttctacagcaa

SEQ ID NO: 28318 - DNA, 36 bp, unidentified
  source 1..36: mol_type = unassigned DNA; note = methanogen bacteria
gtcgagctagctcacatgattggcatctccgacctc

SEQ ID NO: 28319 - DNA, 45 bp, unidentified
  source 1..45: mol_type = unassigned DNA; note = methanogen bacteria
tcacgtagtgatagagtagtggataatgttgtcgctggggaaacc

SEQ ID NO: 28320 - DNA, 33 bp, unidentified
  source 1..33: mol_type = unassigned DNA; note = methanogen bacteria
gagctcgcccacatgatcggaatctccgacctg

SEQ ID NO: 28321 - DNA, 36 bp, unidentified; identical to SEQ ID NO: 26893
  source 1..36: mol_type = unassigned DNA; note = methanogen bacteria

SEQ ID NO: 28322 - DNA, 33 bp, unidentified
  source 1..33: mol_type = unassigned DNA; note = methanogen bacteria
ttgagaatcgatccatttatggaaattcctgct

SEQ ID NO: 28323 - DNA, 45 bp, unidentified
  source 1..45: mol_type = unassigned DNA; note = methanogen bacteria
tcacgtagtgatagagtcatagacaatgttgttgccggtgaaagc

SEQ ID NO: 28324 - DNA, 81 bp, unidentified
  source 1..81: mol_type = unassigned DNA; note = methanogen bacteria
ttccctactgaattcggttttgaagatgtctggaagaatattattcctacattttatacaaaaggtcaatttagtcgatat

SEQ ID NO: 28325 - DNA, 57 bp, unidentified
  source 1..57: mol_type = unassigned DNA; note = methanogen bacteria
tctttaggtttaatagaaactggatttggattatattcatttaattgttatttgtct

SEQ ID NO: 28326 - DNA, 60 bp, unidentified
  source 1..60: mol_type = unassigned DNA; note = methanogen bacteria
atgatagttgacaagtatgtcttggccaaaaaattcgcatttttagcaaatatggatcca

SEQ ID NO: 28327 - DNA, 45 bp, unidentified
  source 1..45: mol_type = unassigned DNA; note = methanogen bacteria
tcacgcagtgatagagttatagacaatgttgttgctggtgaaagc

SEQ ID NO: 28328 - DNA, 102 bp, unidentified
  source 1..102: mol_type = unassigned DNA; note = methanogen bacteria
atgaatatttttatagaccctttattgtttattcaatttttaagacaatcaattggaggaatctttgactccttttttatttcctgctctttttatggagaa

SEQ ID NO: 28329 - DNA, 105 bp, unidentified
  source 1..105: mol_type = unassigned DNA; note = methanogen bacteria
accttatgcatataccgtccctggatacttgattcacgagtaaaacccgtaaccgaagctttagcaactgcaacaggatattcctttccaagcggacatacatca

SEQ ID NO: 28330 - DNA, 66 bp, unidentified
  source 1..66: mol_type = unassigned DNA; note = methanogen bacteria
gcaaaaggttatcccatggattatgattcagcaggtaaattaattgttgatccggcaataatgact

SEQ ID NO: 28331 - DNA, 30 bp, unidentified
  source 1..30: mol_type = unassigned DNA; note = methanogen bacteria
ttttcaactgcaaattctatggattattca

SEQ ID NO: 28332 - DNA, 30 bp, unidentified
  source 1..30: mol_type = unassigned DNA; note = methanogen bacteria
ggagtattactgtttgaaaattttaactcc

SEQ ID NO: 28333 - DNA, 36 bp, unidentified
  source 1..36: mol_type = unassigned DNA; note = methanogen bacteria
gtcttctcgggcggggacagggacaacaggaacagc

SEQ ID NO: 28334 - DNA, 45 bp, unidentified
  source 1..45: mol_type = unassigned DNA; note = methanogen bacteria
tcacgcagtgatagagttatagacaacgttgttgccggtgaaaac

SEQ ID NO: 28335 - DNA, 102 bp, unidentified
  source 1..102: mol_type = unassigned DNA; note = methanogen bacteria
atgaatatttttatagacccaatattgttcatacaatttttaagacaatcaattggaggaatctttgactccttttttatttcatgctctttttatggagaa

SEQ ID NO: 28336 - DNA, 105 bp, unidentified
  source 1..105: mol_type = unassigned DNA; note = methanogen bacteria
gctttatgcatataccgtccctggatacttgattcacgagtaaaacccgtaaccgaagctttagcaactgcaacaggatattcctttccaagcggacatgcatca

SEQ ID NO: 28337 - DNA, 66 bp, unidentified
  source 1..66: mol_type = unassigned DNA; note = methanogen bacteria
gcaaaaggttatcctatggattatgattcagcaggtaaattaattgttgatccggtaataatgaat

SEQ ID NO: 28338 - DNA, 30 bp, unidentified
  source 1..30: mol_type = unassigned DNA; note = methanogen bacteria
ttttcaactgcaaattcactagattattca

SEQ ID NO: 28339 - DNA, 42 bp, unidentified
  source 1..42: mol_type = unassigned DNA; note = methanogen bacteria
cattacagatttgatatgctatttgatattttggaatctgct

SEQ ID NO: 28340 - DNA, 54 bp, unidentified
  source 1..54: mol_type = unassigned DNA; note = methanogen bacteria
gttgatatcactagtataaccgctaaaatattctatgcattattctaccgtttt

SEQ ID NO: 28341 - DNA, 51 bp, unidentified
  source 1..51: mol_type = unassigned DNA; note = methanogen bacteria
aattatattctcagcaatctttatttgcatatcagatcactattagttgtc

SEQ ID NO: 28342 - DNA, 93 bp, unidentified
  source 1..93: mol_type = unassigned DNA; note = methanogen bacteria
gatttaaatcatttgaatttagaaaacatttattttaatgaagctttggatagtctgaatttggctatttcaaatcagatggttttctatcct

SEQ ID NO: 28343 - DNA, 36 bp, unidentified
  source 1..36: mol_type = unassigned DNA; note = methanogen bacteria
atagctattgtttcaagttatataaaaatattattt

SEQ ID NO: 28344 - DNA, 48 bp, unidentified
  source 1..48: mol_type = unassigned DNA; note = methanogen bacteria
aagacgttgaaatcctcggacatctcatgaaagatactccaatcgacg

SEQ ID NO: 28345 - DNA, 36 bp, unidentified
  source 1..36: mol_type = unassigned DNA; note = methanogen bacteria
gcattatgggatgtgaccttaataagaaacaccaat

SEQ ID NO: 28346 - DNA, 66 bp, unidentified
  source 1..66: mol_type = unassigned DNA; note = methanogen bacteria
ataggaaacacacttacaaatgatgtgattaatcccatagaacaaataattcaaaattcaagtatt

SEQ ID NO: 28347 - DNA, 57 bp, unidentified
  source 1..57: mol_type = unassigned DNA; note = methanogen bacteria
ttctccacatcactaagcaacataacacaaaacataaattcagcaaacattggagac

SEQ ID NO: 28348 - DNA, 51 bp, unidentified
  source 1..51: mol_type = unassigned DNA; note = methanogen bacteria
gtctattcatcattcatgatgaatcttggaagggcgagtacgacgtgccag

SEQ ID NO: 28349 - DNA, 57 bp, unidentified
  source 1..57: mol_type = unassigned DNA; note = methanogen bacteria
gaactgcctgagaccaatttcacatcaggatattccctatatgcattcatgcattca

SEQ ID NO: 28350 - DNA, 102 bp, unidentified
  source 1..102: mol_type = unassigned DNA; note = methanogen bacteria
atgaatattttgattgatcctttattgtttttacaacatttacgggaaatgagtggggggctttttgatacattttttacatcatgttccttttacgctgaa

SEQ ID NO: 28351 - DNA, 105 bp, unidentified
  source 1..105: mol_type = unassigned DNA; note = methanogen bacteria
ttaacatgtatttatagaccttggatacttgattcaagaattaaacctgttaaagatgctatacctggagcaacaggttattcatttccaagtggacattcagca

SEQ ID NO: 28352 - DNA, 66 bp, unidentified
  source 1..66: mol_type = unassigned DNA; note = methanogen bacteria
acaaaatcttatccaatggattataatgctgcaggtaaattaattgttaaccctgaaactatgatt

SEQ ID NO: 28353 - DNA, 42 bp, unidentified
  source 1..42: mol_type = unassigned DNA; note = methanogen bacteria
cctaatacctttaattgggtattggaaaagtttatgggaata

SEQ ID NO: 28354 - DNA, 81 bp, unidentified
  source 1..81: mol_type = unassigned DNA; note = methanogen bacteria
ttgttatttttacaaggattacgtgaagcctcaggaggcttttttgaccaatttttcatgagatgtactgaatttggaaat

SEQ ID NO: 28355 - DNA, 105 bp, unidentified
  source 1..105: mol_type = unassigned DNA; note = methanogen bacteria
acagcatgtgtatatcgtccttggattgaagatcctaaaattcatccttatgaaggagctttaaaagatgcaactggatattcacttcctagtggacattcaaca

SEQ ID NO: 28356 - DNA, 66 bp, unidentified
  source 1..66: mol_type = unassigned DNA; note = methanogen bacteria
tttaaatcatacccaatggattataatgctgcaggcaaattaattgttgaacctgccaaaatggct

SEQ ID NO: 28357 - DNA, 42 bp, unidentified
  source 1..42: mol_type = unassigned DNA; note = methanogen bacteria
gcattatgggatgttaattttataaaaaacataaataatcaa

SEQ ID NO: 28358 - DNA, 60 bp, unidentified
  source 1..60: mol_type = unassigned DNA; note = methanogen bacteria
ggaaatgccattacaaacgaaatagtaaatccaatagaagaattaattcaaaattcaagt

SEQ ID NO: 28359 - DNA, 57 bp, unidentified
  source 1..57: mol_type = unassigned DNA; note = methanogen bacteria
ttttttaatttagcaaaggaaaatatagtacatggaataacaatggcaaatattgga

SEQ ID NO: 28360 - DNA, 30 bp, unidentified
  source 1..30: mol_type = unassigned DNA; note = methanogen bacteria
cacgttcccattgatttcgttgatgcacat

SEQ ID NO: 28361 - DNA, 42 bp, unidentified
  source 1..42: mol_type = unassigned DNA; note = methanogen bacteria
tgtgatggaactccatttacaagcggattcagctttaattgg

SEQ ID NO: 28362 - DNA, 39 bp, unidentified
  source 1..39: mol_type = unassigned DNA; note = methanogen bacteria
cttaataagccagtttacaatttagttccattaggagaa

SEQ ID NO: 28363 - DNA, 33 bp, unidentified
  source 1..33: mol_type = unassigned DNA; note = methanogen bacteria
ggagagaatttcagttggtttagagcaattcaa

SEQ ID NO: 28364 - DNA, 45 bp, unidentified
  source 1..45: mol_type = unassigned DNA; note = methanogen bacteria
agtagcggaactccttttacaagcagctttaattttaattggagc

SEQ ID NO: 28365 - DNA, 39 bp, unidentified
  source 1..39: mol_type = unassigned DNA; note = methanogen bacteria
ttgaatttgccagtctacaatctagttccattaaatgag

SEQ ID NO: 28366 - DNA, 30 bp, unidentified
  source 1..30: mol_type = unassigned DNA; note = methanogen bacteria
ggagaaaactttagctggtttagagcaatt

SEQ ID NO: 28367 - DNA, 36 bp, unidentified
  source 1..36: mol_type = unassigned DNA; note = methanogen bacteria
tctttaataaacccccagtatttaggtgacatgaat

SEQ ID NO: 28368 - DNA, 66 bp, unidentified
  source 1..66: mol_type = unassigned DNA; note = methanogen bacteria
ttaagcggcgcaatacagacagacattgcaaatcccgttcagcagttaatcaacagtaccgacata

SEQ ID NO: 28369 - DNA, 45 bp, unidentified
  source 1..45: mol_type = unassigned DNA; note = methanogen bacteria
cttgcagattccattatgaatttccaactaaatctaaatcctgtt

SEQ ID NO: 28370 - DNA, 36 bp, unidentified
  source 1..36: mol_type = unassigned DNA; note = methanogen bacteria
tctgcaatcggattaagagcaggattaagtgcagct

SEQ ID NO: 28371 - DNA, 42 bp, unidentified
  source 1..42: mol_type = unassigned DNA; note = methanogen bacteria
ccaagatctttcaattgggttttagaagagttcatgggaata

SEQ ID NO: 28372 - DNA, 42 bp, unidentified
  source 1..42: mol_type = unassigned DNA; note = methanogen bacteria
ccaaattcattcaattgggttatggaagagtttatgggaata

SEQ ID NO: 28373 - DNA, 48 bp, unidentified
  source 1..48: mol_type = unassigned DNA; note = methanogen bacteria
aattctaattcagttgctgtgattataggagcaatgttaatatcacca

SEQ ID NO: 28374 - DNA, 57 bp, unidentified
  source 1..57: mol_type = unassigned DNA; note = methanogen bacteria
tcattgataactacaaccattccaacagaacaattattagcacgtacagaacctaca

SEQ ID NO: 28375 - DNA, 195 bp, unidentified
  source 1..195: mol_type = unassigned DNA; note = methanogen bacteria
gtttatatggaacatgtagaagagggtaatgctaatactatgtatagtgctaatgattcttctagtataaagatggatacaggtaatggtattcagaaatcaatagatgagaaatcacatattaaagtgttaaattacttttctaattcatttataagttatgaatataataatttgatttcggcgagtttagtt

SEQ ID NO: 28376 - DNA, 57 bp, unidentified
  source 1..57: mol_type = unassigned DNA; note = methanogen bacteria
atcgacaatactgctctgtggtacggttgggtcatgctcgcggcggtccccgcggga

SEQ ID NO: 28377 - DNA, 81 bp, unidentified
  source 1..81: mol_type = unassigned DNA; note = methanogen bacteria
ttgttatttttacagggattgcgtggagcctcaggaggctttttcgaccagttcttcatgagctgtactgaatttggaaat

SEQ ID NO: 28378 - DNA, 105 bp, unidentified
  source 1..105: mol_type = unassigned DNA; note = methanogen bacteria
acagcatgcgtataccgtccatggatagaggatccaaaaattcatcctttcgagggtgctttaaaggatgcgacaggatactcacttccaagcggacatgcaaca

SEQ ID NO: 28379 - DNA, 63 bp, unidentified
  source 1..63: mol_type = unassigned DNA; note = methanogen bacteria
aaatcatatccgatggattataattccgcaggcaaattagttgttgaaccggctaaaatggct

SEQ ID NO: 28380 - DNA, 42 bp, unidentified
  source 1..42: mol_type = unassigned DNA; note = methanogen bacteria
ccaaattcatttaattgggttatggaagagtttatgggagta

SEQ ID NO: 28381 - DNA, 39 bp, unidentified
  source 1..39: mol_type = unassigned DNA; note = methanogen bacteria
agatcaataaatcctcacttattagatgatgcgctgaca

SEQ ID NO: 28382 - DNA, 72 bp, unidentified
  source 1..72: mol_type = unassigned DNA; note = methanogen bacteria
tccctgattggaggagtattgcagagtgaaattataaatcctgtaggagaactgataaacaatggcggaatc

SEQ ID NO: 28383 - DNA, 60 bp, unidentified
  source 1..60: mol_type = unassigned DNA; note = methanogen bacteria
atgtttacagaatcagcaaacaaagtaatgcaaggcgtaagcggtgcagctcctacagac

SEQ ID NO: 28384 - DNA, 33 bp, unidentified
  source 1..33: mol_type = unassigned DNA; note = methanogen bacteria
ttcttttcaagttcaaacactatcgaattagtc

SEQ ID NO: 28385 - DNA, 33 bp, unidentified
  source 1..33: mol_type = unassigned DNA; note = methanogen bacteria
gaatcccatagtctattaaacaatttagattcc

SEQ ID NO: 28386 - DNA, 204 bp, unidentified
  source 1..204: mol_type = unassigned DNA; note = methanogen bacteria
gatttatcccctatcaacccagtttctgtttatttaaaaggtgctgctgtatctgaaagtcaacgtgctattcttaatgaatactttggtgtgggagttccgcttcaaactaaaatttatcattggttactaaatttgattcaaggaaacttaggaacttcactgatatatcgtgctcctgtgttggatgtaattattgataag

SEQ ID NO: 28387 - DNA, 120 bp, unidentified
  source 1..120: mol_type = unassigned DNA; note = methanogen bacteria
gcagtttatttaaaattattcccaataggatttggtgttcctattggtgttagaagtactgatgcttcttttattattggtgttagaagtactgatgcttcttttatagattgggcatca

SEQ ID NO: 28388 - DNA, 111 bp, unidentified
  source 1..111: mol_type = unassigned DNA; note = methanogen bacteria
gaacaagtattttcatatccgggaataggtcaaactgctgttactgcaggtcttcaaagtgatgttcctttatggaataggtcaaactgctgttactgcaggtcttcaaag

SEQ ID NO: 28389 - DNA, 30 bp, unidentified
  source 1..30: mol_type = unassigned DNA; note = methanogen bacteria
tacgccccttttgatgtagaaactgcacat

SEQ ID NO: 28390 - DNA, 36 bp, unidentified
  source 1..36: mol_type = unassigned DNA; note = methanogen bacteria
tccgtgataaatccggaatatctgcacgacataaac

SEQ ID NO: 28391 - DNA, 66 bp, unidentified
  source 1..66: mol_type = unassigned DNA; note = methanogen bacteria
ttaagcggcgcaatgcaaagcgatattgcaaatccggttcagcaattaatcaacagcgccgacatt

SEQ ID NO: 28392 - DNA, 48 bp, unidentified
  source 1..48: mol_type = unassigned DNA; note = methanogen bacteria
atccttgccaattcagtttcaaatatccaaataaacccaaatcctgtt

SEQ ID NO: 28393 - DNA, 72 bp, unidentified
  source 1..72: mol_type = unassigned DNA; note = methanogen bacteria
acacttccgggggcatacattggaataaatgcactgctgacacctgaatgggacctgctttttgatgtaaac

SEQ ID NO: 28394 - DNA, 105 bp, unidentified
  source 1..105: mol_type = unassigned DNA; note = methanogen bacteria
ggatacatgacctatacttcaggaacaccattgaccccactcgtcagcgaaggaacaggactggtatttgtagtgcttccaaggattttcgaagccatgggtcca

SEQ ID NO: 28395 - DNA, 33 bp, unidentified
  source 1..33: mol_type = unassigned DNA; note = methanogen bacteria
cactcatccccatttgatcctgtgactgcaaat

SEQ ID NO: 28396 - DNA, 33 bp, unidentified
  source 1..33: mol_type = unassigned DNA; note = methanogen bacteria
cagtattttattaatttaggaacaaagatttat

SEQ ID NO: 28397 - DNA, 30 bp, unidentified
  source 1..30: mol_type = unassigned DNA; note = methanogen bacteria
tcatccccatttgatccaatgactgcaaac

SEQ ID NO: 28398 - DNA, 48 bp, unidentified
  source 1..48: mol_type = unassigned DNA; note = methanogen bacteria
tatggatttgctttattctcagttactggtgcagaaacttctatattc

SEQ ID NO: 28399 - DNA, 33 bp, unidentified
  source 1..33: mol_type = unassigned DNA; note = methanogen bacteria
tatatagcattagcatttggaatgagtgaaaca

SEQ ID NO: 28400 - DNA, 33 bp, unidentified
  source 1..33: mol_type = unassigned DNA; note = methanogen bacteria
gttgcaggacttggacagactgcaattgcggga

SEQ ID NO: 28401 - DNA, 60 bp, unidentified; identical to SEQ ID NO: 19650
  source 1..60: mol_type = unassigned DNA; note = methanogen bacteria

SEQ ID NO: 28402 - DNA, 33 bp, unidentified; identical to SEQ ID NO: 19651
  source 1..33: mol_type = unassigned DNA; note = methanogen bacteria

SEQ ID NO: 28403 - DNA, 36 bp, unidentified
  source 1..36: mol_type = unassigned DNA; note = methanogen bacteria
tcatatatagcaatggcatttggaatgagtgaaaca

SEQ ID NO: 28404 - DNA, 33 bp, unidentified
  source 1..33: mol_type = unassigned DNA; note = methanogen bacteria
atcaccgaggtctatgtggagagggaatcccag

SEQ ID NO: 28405 - DNA, 33 bp, unidentified
  source 1..33: mol_type = unassigned DNA; note = methanogen bacteria
atggattatgtcggactgtacagcagccagccc

SEQ ID NO: 28406 - DNA, 39 bp, unidentified
  source 1..39: mol_type = unassigned DNA; note = methanogen bacteria
atgaatatgacaaatccggaatatctctcagacatgaac

SEQ ID NO: 28407 - DNA, 66 bp, unidentified
  source 1..66: mol_type = unassigned DNA; note = methanogen bacteria
ttgggcggcgccatgcagacaaatatcgataatcccgtccagcagctcatcaacaacacagaccta

SEQ ID NO: 28408 - DNA, 48 bp, unidentified
  source 1..48: mol_type = unassigned DNA; note = methanogen bacteria
cttgcaaactcagtcatgaacatccaggcaagcatgaatacagtggac

SEQ ID NO: 28409 - DNA, 30 bp, unidentified; identical to SEQ ID NO: 28331
  source 1..30: mol_type = unassigned DNA; note = methanogen bacteria

SEQ ID NO: 28410 - DNA, 30 bp, unidentified
  source 1..30: mol_type = unassigned DNA; note = methanogen bacteria
ggtgaattactgtttgaaaatttaaactcc

SEQ ID NO: 28411 - DNA, 36 bp, unidentified
  source 1..36: mol_type = unassigned DNA; note = methanogen bacteria
tcatatatagcaatcgcattcggaatgagtgaaaca

SEQ ID NO: 28412 - DNA, 36 bp, unidentified
  source 1..36: mol_type = unassigned DNA; note = methanogen bacteria
tctttaataaatccccagtatttaagtgacatgaat

SEQ ID NO: 28413 - DNA, 66 bp, unidentified
  source 1..66: mol_type = unassigned DNA; note = methanogen bacteria
ttaagcggcgtgatgcagaccgacattgcaaatcccgttcagcagttaatcaacaatacagacata

SEQ ID NO: 28414 - DNA, 48 bp, unidentified
  source 1..48: mol_type = unassigned DNA; note = methanogen bacteria
cttgcagattccattatgaatttccagatgaatttaaatccggttgat

SEQ ID NO: 28415 - DNA, 36 bp, unidentified
  source 1..36: mol_type = unassigned DNA; note = methanogen bacteria
tcatatatagcaattacatttggaatgagtgaaaca

SEQ ID NO: 28416 - DNA, 30 bp, unidentified
  source 1..30: mol_type = unassigned DNA; note = methanogen bacteria
ttcaacaacaacctcggggacaccgatacc

SEQ ID NO: 28417 - DNA, 105 bp, unidentified
  source 1..105: mol_type = unassigned DNA; note = methanogen bacteria
gcgggggattccttccagaccgcggtgatatccgacctcggcagcatatccgccggctggccgggattcaaccttccctcggtgcttaccgacacctccgccctg

SEQ ID NO: 28418 - DNA, 60 bp, unidentified
  source 1..60: mol_type = unassigned DNA; note = methanogen bacteria
atctgggaaaatttcggaccggttgtacaggaagcatgggaaaaaatcaaggggattgtt

SEQ ID NO: 28419 - DNA, 51 bp, unidentified
  source 1..51: mol_type = unassigned DNA; note = methanogen bacteria
aagaacgtgatctccacggtgtggacagcgatcaagggcgtcatcgagccg

SEQ ID NO: 28420 - DNA, 48 bp, unidentified
  source 1..48: mol_type = unassigned DNA; note = methanogen bacteria
aagaataccctgacgacgatctggaatggcatcaaatcaacgatcact

SEQ ID NO: 28421 - DNA, 231 bp, unidentified
  source 1..231: mol_type = unassigned DNA; note = methanogen bacteria
aaaggcacggcaacttctgtgtggaacggaatcaaatccgcgatcgtccgtccggtggaggcagcacgggatgccgtgaggaatgccatcgaccggatgcggtccttctttcatttttcatggagtctgccgagactgaaacttccgcacttgagcatttccggacatttttcccttgatccgccctccgttccgcacttctccatcagctggtacaagaaggcgatggaa

SEQ ID NO: 28422 - DNA, 48 bp, unidentified
  source 1..48: mol_type = unassigned DNA; note = methanogen bacteria
aatggagcgacgattttcggcgcaaaagggaatcagcttcttgccggt

SEQ ID NO: 28423 - DNA, 45 bp, unidentified
  source 1..45: mol_type = unassigned DNA; note = methanogen bacteria
aacagctatcctacatttatggatgcagtatatggacttaaaaat

SEQ ID NO: 28424 - DNA, 33 bp, unidentified
  source 1..33: mol_type = unassigned DNA; note = methanogen bacteria
tatattgcaatagctttcggaatgagtgaaaca

SEQ ID NO: 28425 - DNA, 54 bp, unidentified; identical to SEQ ID NO: 18110
  source 1..54: mol_type = unassigned DNA; note = methanogen bacteria

SEQ ID NO: 28426 - DNA, 33 bp, unidentified
  source 1..33: mol_type = unassigned DNA; note = methanogen bacteria
ggcaggctgtttgtggctcaagcacctgatgca

SEQ ID NO: 28427 - DNA, 36 bp, unidentified
  source 1..36: mol_type = unassigned DNA; note = methanogen bacteria
tccataataaatccggaatatctgcataacataaac

SEQ ID NO: 28428 - DNA, 66 bp, unidentified
  source 1..66: mol_type = unassigned DNA; note = methanogen bacteria
ttaagcggtgcgatgcaaaacgatattgcaaatccagttcatcaattaatcaacagctcagacatt

SEQ ID NO: 28429 - DNA, 45 bp, unidentified
  source 1..45: mol_type = unassigned DNA; note = methanogen bacteria
cttgcaaattcagttacaaatattcagataaccccaaatcctgtt

SEQ ID NO: 28430 - DNA, 36 bp, unidentified
  source 1..36: mol_type = unassigned DNA; note = methanogen bacteria
tcagcaatagcaatagcattcggaatgagcgaaaca

SEQ ID NO: 28431 - DNA, 36 bp, unidentified
  source 1..36: mol_type = unassigned DNA; note = methanogen bacteria
tcagatatagcaattgcatttggaatgagtgaaaca

SEQ ID NO: 28432 - DNA, 36 bp, unidentified
  source 1..36: mol_type = unassigned DNA; note = methanogen bacteria
agttatattgcctcattattcggattaagccaagcg

SEQ ID NO: 28433 - DNA, 42 bp, unidentified
  source 1..42: mol_type = unassigned DNA; note = methanogen bacteria
ccaaattcattcaactgggttttaagcaaatataatgggata

SEQ ID NO: 28434 - DNA, 33 bp, unidentified
  source 1..33: mol_type = unassigned DNA; note = methanogen bacteria
tatactaattattccggcaatcttgattgcgaa

SEQ ID NO: 28435 - DNA, 33 bp, unidentified
  source 1..33: mol_type = unassigned DNA; note = methanogen bacteria
tctatagcaatggcattaggaatgagtgaaaca

SEQ ID NO: 28436 - DNA, 36 bp, unidentified
  source 1..36: mol_type = unassigned DNA; note = methanogen bacteria
gcattaatcgacgttaatttaataaaaaacattaat

SEQ ID NO: 28437 - DNA, 63 bp, unidentified
  source 1..63: mol_type = unassigned DNA; note = methanogen bacteria
ggaaataccgttacagataacatagtaaaccctatagaaaagttaattgaaaattcaagcatt

SEQ ID NO: 28438 - DNA, 57 bp, unidentified
  source 1..57: mol_type = unassigned DNA; note = methanogen bacteria
tttttcaattcagcaattcataacataaataaccaaataagcatggcaaatgcggga

SEQ ID NO: 28439 - DNA, 36 bp, unidentified
  source 1..36: mol_type = unassigned DNA; note = methanogen bacteria
tcagctatagcaattgcattcggaatgagtgaaaca

SEQ ID NO: 28440 - DNA, 60 bp, unidentified
  source 1..60: mol_type = unassigned DNA; note = methanogen bacteria
atcccgtcctacaaggacctctggtacggctgggtcatgctcgcctcggtacccgccggg

SEQ ID NO: 28441 - DNA, 33 bp, unidentified
  source 1..33: mol_type = unassigned DNA; note = methanogen bacteria
gctatagcaatagcattcggaatgagtgaaaca

SEQ ID NO: 28442 - DNA, 87 bp, unidentified
  source 1..87: mol_type = unassigned DNA; note = methanogen bacteria
agttccataccttcagtttttgatacgcctgcggtttctataataattccaggtgttgaaatgcctggctcatcaatttacattcca

SEQ ID NO: 28443 - DNA, 75 bp, unidentified
  source 1..75: mol_type = unassigned DNA; note = methanogen bacteria
ttgtatatacagtttttacgtgaggcaagtggaggtctctttaatgactttttcatgactatcacatactttgga

SEQ ID NO: 28444 - DNA, 105 bp, unidentified
  source 1..105: mol_type = unassigned DNA; note = methanogen bacteria
gtagcttgcgtttataggccatgggtggttgatccaaatatccctcctttggaagatgcattgcctgatgcaacaggatattcatttccaagtggacatgcaaca

SEQ ID NO: 28445 - DNA, 63 bp, unidentified
  source 1..63: mol_type = unassigned DNA; note = methanogen bacteria
tataaggcttacccaatggattatgatgcagcaggcaaattaattgtagaccctgctaaaatg

SEQ ID NO: 28446 - DNA, 33 bp, unidentified
  source 1..33: mol_type = unassigned DNA; note = methanogen bacteria
gctatagcaatcgctcttggaatgagtgaaaca

SEQ ID NO: 28447 - DNA, 33 bp, unidentified
  source 1..33: mol_type = unassigned DNA; note = methanogen bacteria
aatatagcaatggcactcggaatgagtgaaaca

SEQ ID NO: 28448 - DNA, 36 bp, unidentified
  source 1..36: mol_type = unassigned DNA; note = methanogen bacteria
tcatctatagcaatggctctcggaatgagtgaaaca

SEQ ID NO: 28449 - DNA, 30 bp, unidentified
  source 1..30: mol_type = unassigned DNA; note = methanogen bacteria
actcaaaatcccggaaatgttgatgtcaat

SEQ ID NO: 28450 - DNA, 204 bp, unidentified
  source 1..204: mol_type = unassigned DNA; note = methanogen bacteria
caattatctccaattgatccagtaagagcttatcttggccaaagaattgtcagtcaagagcaattagctattatgggcgaatattggggaactaatttatctttaggagaaagggtaatgggttggatttcaactttagcctctggaagtatgggattctcattgatttatagagttcctgtaacagaagttattgtacagaaa

SEQ ID NO: 28451 - DNA, 87 bp, unidentified
  source 1..87: mol_type = unassigned DNA; note = methanogen bacteria
gtataccttggctggttcccaatcggtctttcagttcctataggacaattggcagatactgtaacattctggcaatggttgcatagg

SEQ ID NO: 28452 - DNA, 72 bp, unidentified
  source 1..72: mol_type = unassigned DNA; note = methanogen bacteria
gaacaggtatttgcataccctggaattggacaagctactgtagctgcaggtttaaggtcagatgttccatta

SEQ ID NO: 28453 - DNA, 204 bp, unidentified
  source 1..204: mol_type = unassigned DNA; note = methanogen bacteria
caaatgtcccctattgatcctgttagagcttatttaggacaacggattgttagtcaagagcaattagccattatgggagaatattggggaactaatttgtctttaggtgaaagagtagttggttggctttcaactttagctactggaagcatgggattttcattgatttatcgagtccctgtaacagaagttattgtacagaaa

SEQ ID NO: 28454 - DNA, 90 bp, unidentified
  source 1..90: mol_type = unassigned DNA; note = methanogen bacteria
tcagtttacttgggttggttcccaataggtctttctgtacctattggtcaattgtctgatactgtaaccttctggcaatggttataccgg

SEQ ID NO: 28455 - DNA, 72 bp, unidentified
  source 1..72: mol_type = unassigned DNA; note = methanogen bacteria
gaacaagtattcgcatatccaggaatcggacaggcaactgtcgctgctggtttaaggtctgatgttccatta

SEQ ID NO: 28456 - DNA, 30 bp, unidentified
  source 1..30: mol_type = unassigned DNA; note = methanogen bacteria
ttctcaaatagcaatacactaaatatatta

SEQ ID NO: 28457 - DNA, 33 bp, unidentified
  source 1..33: mol_type = unassigned DNA; note = methanogen bacteria
gaggcaagtaatctttttgataacattaatatt

SEQ ID NO: 28458 - DNA, 36 bp, unidentified
  source 1..36: mol_type = unassigned DNA; note = methanogen bacteria
tcatccatagcaataacacttggaatgagtgaaaca

SEQ ID NO: 28459 - DNA, 36 bp, unidentified
  source 1..36: mol_type = unassigned DNA; note = methanogen bacteria
tcagctatagcaatcgcactcggaatgagtgaaaca

SEQ ID NO: 28460 - DNA, 36 bp, unidentified
  source 1..36: mol_type = unassigned DNA; note = methanogen bacteria
ctcttcggaggaggaaggagggacgagaacaacggg

SEQ ID NO: 28461 - DNA, 33 bp, unidentified
  source 1..33: mol_type = unassigned DNA; note = methanogen bacteria
gcaatagcaatcgcccttggaatgagtgaaacc

SEQ ID NO: 28462 - DNA, 30 bp, unidentified
  source 1..30: mol_type = unassigned DNA; note = methanogen bacteria
acccaaactccgggaaaccttaacatcaat

SEQ ID NO: 28463 - DNA, 36 bp, unidentified
  source 1..36: mol_type = unassigned DNA; note = methanogen bacteria
tcggctatagcaattgcactcggaatgagtgaaact

SEQ ID NO: 28464 - DNA, 48 bp, unidentified
  source 1..48: mol_type = unassigned DNA; note = methanogen bacteria
tctaattttattatttctatgggacaaaataatcctatactttcatct

SEQ ID NO: 28465 - DNA, 87 bp, unidentified
  source 1..87: mol_type = unassigned DNA; note = methanogen bacteria
tctacattgccgtctgtttttgaatcgccaagcgtttcgatagtaatacctggggttgatattccaggttcccagatttatgttccc

SEQ ID NO: 28466 - DNA, 36 bp, unidentified
  source 1..36: mol_type = unassigned DNA; note = methanogen bacteria
tcagctatagcaatagcattcggaatgagtgaaaca

SEQ ID NO: 28467 - DNA, 36 bp, unidentified
  source 1..36: mol_type = unassigned DNA; note = methanogen bacteria
ctgttcggaggcggcaggagggacgagaacaacgga

SEQ ID NO: 28468 - DNA, 33 bp, unidentified
  source 1..33: mol_type = unassigned DNA; note = methanogen bacteria
tataattcatcgtccattgattttgatacaaat

SEQ ID NO: 28469 - DNA, 114 bp, unidentified
  source 1..114: mol_type = unassigned DNA; note = methanogen bacteria
ggtgaaggaaatcctgttagcggtgctataattagcatgaatattaacggtattatttataaccgtacaactaatgagaatggtactgctaagttaaacattaatttaccacag

SEQ ID NO: 28470 - DNA, 264 bp, unidentified
  source 1..264: mol_type = unassigned DNA; note = methanogen bacteria
attacagttttacctactctaaacgctactgatttggagatgaaatataaagacggttcaacatttaatgtaacagtcttagacaatcagggaaatccattggctgatgcagttgtaaccttcaacatcaacggagaattctacaacagaacaagcgattcttccggaatagccagattaaacatcaatctaatggccggcgaatacatcatcacttccgagtatgatggcttaagaatttcaaacacagttacaataaaggat

SEQ ID NO: 28471 - DNA, 207 bp, unidentified
  source 1..207: mol_type = unassigned DNA; note = methanogen bacteria
tcaacattcaatgttactgttcttgatggtcaaggtaatccattgaaagaagctgcagtcacatttaatatcaatggagtattttacacaagatattcagattccaatggaattgccaagttaaacattaatctgatggctggtgaatacatcatcacttcagagtatgatggaatgagaatcgcaaatacaataactatcaaggat

SEQ ID NO: 28472 - DNA, 36 bp, unidentified
  source 1..36: mol_type = unassigned DNA; note = methanogen bacteria
tcagctatagcgatagcattcggaatgagtgaaact

SEQ ID NO: 28473 - DNA, 36 bp, unidentified
  source 1..36: mol_type = unassigned DNA; note = methanogen bacteria
tcagatatagcaattgcgtttggtatgagtgaaact

SEQ ID NO: 28474 - DNA, 39 bp, unidentified
  source 1..39: mol_type = unassigned DNA; note = methanogen bacteria
gcacttttggacatccgcataataaataacgttaacagc

SEQ ID NO: 28475 - DNA, 63 bp, unidentified
  source 1..63: mol_type = unassigned DNA; note = methanogen bacteria
ggacatacaatgacaaccaaggtaataaatcctatagaacaactgattaatagcacaaacata

SEQ ID NO: 28476 - DNA, 57 bp, unidentified
  source 1..57: mol_type = unassigned DNA; note = methanogen bacteria
gtcacttcatcagtacacaatctaacgaacggaataacaatggccaatatgggagat

SEQ ID NO: 28477 - DNA, 42 bp, unidentified
  source 1..42: mol_type = unassigned DNA; note = methanogen bacteria
ccaaattcgtttaaatgggttttaagtgaatataatggcatt

SEQ ID NO: 28478 - DNA, 42 bp, unidentified
  source 1..42: mol_type = unassigned DNA; note = methanogen bacteria
ccaaattcatttaaatgggttttgaatacttataatggaatt

SEQ ID NO: 28479 - DNA, 42 bp, unidentified
  source 1..42: mol_type = unassigned DNA; note = methanogen bacteria
ccaaagtcatttcaatgggttttaagcaactataatggcatt

SEQ ID NO: 28480 - DNA, 42 bp, unidentified
  source 1..42: mol_type = unassigned DNA; note = methanogen bacteria
cctgtaacttttaattgggtattaggtgaaatttcaggtttt

SEQ ID NO: 28481 - DNA, 33 bp, unidentified
  source 1..33: mol_type = unassigned DNA; note = methanogen bacteria
ttcattgctagtgcattcggattaagtgatgcg

SEQ ID NO: 28482 - DNA, 36 bp, unidentified
  source 1..36: mol_type = unassigned DNA; note = methanogen bacteria
gatggtaatttaatcgctgaaaataccatatttgaa

SEQ ID NO: 28483 - DNA, 132 bp, unidentified
  source 1..132: mol_type = unassigned DNA; note = methanogen bacteria
aaagtccaaaacacaacattcgaaaataacaatgctcctaatgcaggaacaatttatactggtggagacttgactttagttaaatccaatgttcaatacagtactagagaagacaataaagcaattgtatgt

SEQ ID NO: 28484 - DNA, 54 bp, unidentified
  source 1..54: mol_type = unassigned DNA; note = methanogen bacteria
ggaattatcgttgcagacccttccactttcgtttcattaggtgctatgacttcc

SEQ ID NO: 28485 - DNA, 117 bp, unidentified
  source 1..117: mol_type = unassigned DNA; note = methanogen bacteria
ggatttggtgctggagatcctcttatgcctagcataccttctcaagtaatctcgttcaactttgatacaagtttggttggaggattcctggctggatttggagagctgttcaagaat

SEQ ID NO: 28486 - DNA, 33 bp, unidentified
  source 1..33: mol_type = unassigned DNA; note = methanogen bacteria
tttattgcaagtgcatttggattaagtgatgtc

SEQ ID NO: 28487 - DNA, 39 bp, unidentified
  source 1..39: mol_type = unassigned DNA; note = methanogen bacteria
ccggtggctttcaattgggttttaagtgaagtcaatggg

SEQ ID NO: 28488 - DNA, 30 bp, unidentified
  source 1..30: mol_type = unassigned DNA; note = methanogen bacteria
tatgttgctaggacttccttgtttgcaagt

SEQ ID NO: 28489 - DNA, 54 bp, unidentified
  source 1..54: mol_type = unassigned DNA; note = methanogen bacteria
agattaaatgattcatcccttgcatgtcctgttgaaattgtaaatggtaaaggc

SEQ ID NO: 28490 - DNA, 93 bp, unidentified
  source 1..93: mol_type = unassigned DNA; note = methanogen bacteria
actgccactgtttgctatgaaggtgacgatacttttacaccaagcaacaaatcaacaacattcactgtaaaagaaagaataaatcctaactta

SEQ ID NO: 28491 - DNA, 63 bp, unidentified
  source 1..63: mol_type = unassigned DNA; note = methanogen bacteria
atggaagtcaaactaaacgaatcatccgctacatatcctgttgaaattgtaaatggtaaaggc

SEQ ID NO: 28492 - DNA, 39 bp, unidentified
  source 1..39: mol_type = unassigned DNA; note = methanogen bacteria
ccaaattcatttaaatgggttttaagtaattttaaagga

SEQ ID NO: 28493 - DNA, 39 bp, unidentified
  source 1..39: mol_type = unassigned DNA; note = methanogen bacteria
gaaaaattactccatccaacattaattacccaacctact

SEQ ID NO: 28494 - DNA, 30 bp, unidentified
  source 1..30: mol_type = unassigned DNA; note = methanogen bacteria
gtggacctgggagcaatgtctgacacggcc

SEQ ID NO: 28495 - DNA, 39 bp, unidentified
  source 1..39: mol_type = unassigned DNA; note = methanogen bacteria
cacctgatcgtcgacggagaacccgcactgtccgctgaa

SEQ ID NO: 28496 - DNA, 39 bp, unidentified
  source 1..39: mol_type = unassigned DNA; note = methanogen bacteria
aattcatttcaatgggttttaagtaattatggtggggta

SEQ ID NO: 28497 - DNA, 42 bp, unidentified
  source 1..42: mol_type = unassigned DNA; note = methanogen bacteria
cctaaatcatttcaatgggttttaagtaactataatggcata

SEQ ID NO: 28498 - DNA, 39 bp, unidentified
  source 1..39: mol_type = unassigned DNA; note = methanogen bacteria
aatgcatttctatgggttttaggtaatttcaatggcata

SEQ ID NO: 28499 - DNA, 33 bp, unidentified
  source 1..33: mol_type = unassigned DNA; note = methanogen bacteria
ttaaatacaggtccaatttccgagatacctgca

SEQ ID NO: 28500 - DNA, 42 bp, unidentified
  source 1..42: mol_type = unassigned DNA; note = methanogen bacteria
cccaaatcgtttgaatgggtgctaagcaattacaatggcata

SEQ ID NO: 28501 - DNA, 42 bp, unidentified
  source 1..42: mol_type = unassigned DNA; note = methanogen bacteria
ccaaactcatttcaatgggttttaagtaattataatggcata

SEQ ID NO: 28502 - DNA, 108 bp, unidentified; identical to SEQ ID NO: 27706
  source 1..108: mol_type = unassigned DNA; note = methanogen bacteria

SEQ ID NO: 28503 - DNA, 69 bp, unidentified
  source 1..69: mol_type = unassigned DNA; note = methanogen bacteria
gtagcggatcctcaggataaacttcctgagattatttactggttaatgggaagtttatcttctgtaaca

SEQ ID NO: 28504 - DNA, 39 bp, unidentified
  source 1..39: mol_type = unassigned DNA; note = methanogen bacteria
agcttatttaattgggttttaagcgaatataatggaata

SEQ ID NO: 28505 - DNA, 42 bp, unidentified
  source 1..42: mol_type = unassigned DNA; note = methanogen bacteria
ccaaactcatttcaatgggttttaagcaactataacggcata

SEQ ID NO: 28506 - DNA, 42 bp, unidentified
  source 1..42: mol_type = unassigned DNA; note = methanogen bacteria
ccagattcatttaaatgggttttaagtcaatatagtggcatt

SEQ ID NO: 28507 - DNA, 42 bp, unidentified
  source 1..42: mol_type = unassigned DNA; note = methanogen bacteria
ccaaatgcatttcaatgggtcttaagtaatttttacggcata

SEQ ID NO: 28508 - DNA, 42 bp, unidentified
  source 1..42: mol_type = unassigned DNA; note = methanogen bacteria
ccgaattcattcgcatgggtattgagcgaatacagcggcatc

SEQ ID NO: 28509 - DNA, 42 bp, unidentified
  source 1..42: mol_type = unassigned DNA; note = methanogen bacteria
ccaaactcgttcaaatgggttttaagcaattataatggcata

SEQ ID NO: 28510 - DNA, 39 bp, unidentified
  source 1..39: mol_type = unassigned DNA; note = methanogen bacteria
cctaaatcatttcagtgggttttaagcaataataatggc

SEQ ID NO: 28511 - DNA, 42 bp, unidentified
  source 1..42: mol_type = unassigned DNA; note = methanogen bacteria
gtagacctcggacatactgtatcggtcgtcgccactctcgac

SEQ ID NO: 28512 - DNA, 45 bp, unidentified
  source 1..45: mol_type = unassigned DNA; note = methanogen bacteria
ttgcattacagatttgatatgatttttgacattttggaatctgct

SEQ ID NO: 28513 - DNA, 54 bp, unidentified
  source 1..54: mol_type = unassigned DNA; note = methanogen bacteria
gacatttcaagcatcacttccaagatattctatgctgtatttgctccatttgat

SEQ ID NO: 28514 - DNA, 42 bp, unidentified
  source 1..42: mol_type = unassigned DNA; note = methanogen bacteria
ccgaattcatttaaatgggttttaggtaaatataacggtata

SEQ ID NO: 28515 - DNA, 42 bp, unidentified
  source 1..42: mol_type = unassigned DNA; note = methanogen bacteria
cccaactcatttcaatgggtattgagtcagtataacggcata

SEQ ID NO: 28516 - DNA, 42 bp, unidentified
  source 1..42: mol_type = unassigned DNA; note = methanogen bacteria
cccaattcgtttaaatgggtattaagtaaatatggtgacata

SEQ ID NO: 28517 - DNA, 30 bp, unidentified
  source 1..30: mol_type = unassigned DNA; note = methanogen bacteria
ctcaactgggactcctacgccctcaccgac

SEQ ID NO: 28518 - DNA, 33 bp, unidentified
  source 1..33: mol_type = unassigned DNA; note = methanogen bacteria
tccatgttcgccgataggcgcgagaacaacggg

SEQ ID NO: 28519 - DNA, 45 bp, unidentified
  source 1..45: mol_type = unassigned DNA; note = methanogen bacteria
tcacgcagtgatagagtcgtagataatgttgttgctggtgaaagc

SEQ ID NO: 28520 - DNA, 39 bp, unidentified
  source 1..39: mol_type = unassigned DNA; note = methanogen bacteria
aacccaactttaggattcaatgtcattacagcaggaagc

SEQ ID NO: 28521 - DNA, 36 bp, unidentified
  source 1..36: mol_type = unassigned DNA; note = methanogen bacteria
ctaacaaacattattggagattatgctacagggatt

SEQ ID NO: 28522 - DNA, 48 bp, unidentified
  source 1..48: mol_type = unassigned DNA; note = methanogen bacteria
gatgaaatcatctttttaatctatgggcatgaatatgatgctgcatca

SEQ ID NO: 28523 - DNA, 33 bp, unidentified
  source 1..33: mol_type = unassigned DNA; note = methanogen bacteria
gtggatccttctctcagccattttaatgaaagt

SEQ ID NO: 28524 - DNA, 147 bp, unidentified
  source 1..147: mol_type = unassigned DNA; note = methanogen bacteria
attttcattaacttcactttaattggaggcaataatattgcaaatgcaatatataataccgcttcaaccaaagacatatatttctataatgtaagctacgtgtcttcaaaaggtccaaaattcactggagaagatgaaatccatccg

SEQ ID NO: 28525 - DNA, 30 bp, unidentified
  source 1..30: mol_type = unassigned DNA; note = methanogen bacteria
atggaattctatctggagacattcccaggg

SEQ ID NO: 28526 - DNA, 63 bp, unidentified
  source 1..63: mol_type = unassigned DNA; note = methanogen bacteria
ggctccaattgcttaccctggtacctcttttctcaggtgaaagtggaggattggtcagcgttt

SEQ ID NO: 28527 - DNA, 87 bp, unidentified
  source 1..87: mol_type = unassigned DNA; note = methanogen bacteria
ttaagtggagattatgctagtttccaagaagcagttatgggtcttttctctgatccacaaacattcttaaataatttaatgaatttc

SEQ ID NO: 28528 - DNA, 33 bp, unidentified
  source 1..33: mol_type = unassigned DNA; note = methanogen bacteria
ttaggtgcttcccctgcattacatgtattccca

SEQ ID NO: 28529 - DNA, 45 bp, unidentified
  source 1..45: mol_type = unassigned DNA; note = methanogen bacteria
acaataaaaattccaataacaaaggacgttgcaataaccataatg

SEQ ID NO: 28530 - DNA, 30 bp, unidentified
  source 1..30: mol_type = unassigned DNA; note = methanogen bacteria
ggccagtccattagtttgatttttgatatg

SEQ ID NO: 28531 - DNA, 123 bp, unidentified
  source 1..123: mol_type = unassigned DNA; note = methanogen bacteria
tcattcttgccgctacacccatatgcatttgcaatggcaagtggagtgggaagtgcaagtatgaatgcggcggcaatcggaccgacccttgcggcatttccaggaatggaaactcaaattgag

SEQ ID NO: 28532 - DNA, 33 bp, unidentified
  source 1..33: mol_type = unassigned DNA; note = methanogen bacteria
ttaggattcagtctgacaacaagcataggcatg

SEQ ID NO: 28533 - DNA, 78 bp, unidentified
  source 1..78: mol_type = unassigned DNA; note = methanogen bacteria
ctggtagggaccagcgcagaaaagctgcaagatgcttacttatggcagatcggaacgttggagaacgtcacctgggac

SEQ ID NO: 28534 - DNA, 36 bp, unidentified; identical to SEQ ID NO: 23245
  source 1..36: mol_type = unassigned DNA; note = methanogen bacteria

SEQ ID NO: 28535 - DNA, 63 bp, unidentified
  source 1..63: mol_type = unassigned DNA; note = methanogen bacteria
cagattgcagggattttcacatattccggaactagcgcaaggctgactccaagcttagttgca

SEQ ID NO: 28536 - DNA, 39 bp, unidentified
  source 1..39: mol_type = unassigned DNA; note = methanogen bacteria
aaagatattgctttaagcctaggaatgtctgaaacatta

SEQ ID NO: 28537 - DNA, 42 bp, unidentified
  source 1..42: mol_type = unassigned DNA; note = methanogen bacteria
tcacgtgctgataggttaattgataacgtttcttcaggtgaa

SEQ ID NO: 28538 - DNA, 33 bp, unidentified
  source 1..33: mol_type = unassigned DNA; note = methanogen bacteria
gctttggctttggctgtaggtatgtctgaaaca

SEQ ID NO: 28539 - DNA, 57 bp, unidentified
  source 1..57: mol_type = unassigned DNA; note = methanogen bacteria
caaggattcttagccctttacaacttcaacagaacagacattgcagactttgtgatt

SEQ ID NO: 28540 - DNA, 99 bp, unidentified
  source 1..99: mol_type = unassigned DNA; note = methanogen bacteria
atggctgtgggaaactatcatgtttccttgccgaatgttttctgggccataatcggcaaaggcgattctggagccgtgagcgttatccaggatacgcgc

SEQ ID NO: 28541 - DNA, 30 bp, unidentified
  source 1..30: mol_type = unassigned DNA; note = methanogen bacteria
ttcggagtgggggaggccctgttcggcaat

SEQ ID NO: 28542 - DNA, 75 bp, unidentified
  source 1..75: mol_type = unassigned DNA; note = methanogen bacteria
tatgtcgcagacgatgacacgcttggatctatcgtttactggactatgggaagtttcaataaggtcacgtggacg

SEQ ID NO: 28543 - DNA, 30 bp, unidentified
  source 1..30: mol_type = unassigned DNA; note = methanogen bacteria
tactacagcacaggccttgtcttgaagata

SEQ ID NO: 28544 - DNA, 30 bp, unidentified
  source 1..30: mol_type = unassigned DNA; note = methanogen bacteria
tttaatgttggtatggttaatgaggtagct

SEQ ID NO: 28545 - DNA, 36 bp, unidentified
  source 1..36: mol_type = unassigned DNA; note = methanogen bacteria
ggcatgacaaacagaagtttgcttaataatttcaat

SEQ ID NO: 28546 - DNA, 75 bp, unidentified
  source 1..75: mol_type = unassigned DNA; note = methanogen bacteria
accacagcaataggaggcattttccacacagacatctcaaatcctgttcaaaacctgataaattcatcagacatc

SEQ ID NO: 28547 - DNA, 51 bp, unidentified
  source 1..51: mol_type = unassigned DNA; note = methanogen bacteria
tttgtagctgaaagtgctcaagcattactttcaaatacattcacagcaacc

SEQ ID NO: 28548 - DNA, 57 bp, unidentified
  source 1..57: mol_type = unassigned DNA; note = methanogen bacteria
ggagtctattcctctttcatgattgaacttgggaaaggtggtgcaatatgtgaagtt

SEQ ID NO: 28549 - DNA, 66 bp, unidentified
  source 1..66: mol_type = unassigned DNA; note = methanogen bacteria
ataaccgtcaacagcgctgccgtcaatactgtggaagctggaaacttattttttagccatatgtgg

SEQ ID NO: 28550 - DNA, 33 bp, unidentified
  source 1..33: mol_type = unassigned DNA; note = methanogen bacteria
gacatagaaggaattaaaaatgtaagcatacag

SEQ ID NO: 28551 - DNA, 36 bp, unidentified
  source 1..36: mol_type = unassigned DNA; note = methanogen bacteria
tttactaaaggatataatttcttcctgtggtatgaa

SEQ ID NO: 28552 - DNA, 36 bp, unidentified
  source 1..36: mol_type = unassigned DNA; note = methanogen bacteria
ggctttacaaatcacaatatattaaacaatttcaat

SEQ ID NO: 28553 - DNA, 72 bp, unidentified
  source 1..72: mol_type = unassigned DNA; note = methanogen bacteria
tcagcaatcggcagcctgttccacacggaaatcacaaatccagttcagactctgattggctcaacagacatc

SEQ ID NO: 28554 - DNA, 51 bp, unidentified
  source 1..51: mol_type = unassigned DNA; note = methanogen bacteria
gtggttcaaagcgttcaggcatttacttcaaatacttacgcaacaatggat

SEQ ID NO: 28555 - DNA, 33 bp, unidentified; identical to SEQ ID NO: 24634
  source 1..33: mol_type = unassigned DNA; note = methanogen bacteria

SEQ ID NO: 28556 - DNA, 30 bp, unidentified; identical to SEQ ID NO: 24635
  source 1..30: mol_type = unassigned DNA; note = methanogen bacteria

SEQ ID NO: 28557 - DNA, 90 bp, unidentified
  source 1..90: mol_type = unassigned DNA; note = methanogen bacteria
ggaatggttgatttctcaggattctttgcagcaagcatttttgaagttcctgaattctacatgccttttgttaactacagttttaatcct

SEQ ID NO: 28558 - DNA, 30 bp, unidentified
  source 1..30: mol_type = unassigned DNA; note = methanogen bacteria
tatttcagctcaggttatgttttaaaaata

SEQ ID NO: 28559 - DNA, 51 bp, unidentified
  source 1..51: mol_type = unassigned DNA; note = methanogen bacteria
ggtacttgccctacatcagctattgatgtaacacctaacgcaattattcac

SEQ ID NO: 28560 - DNA, 42 bp, unidentified
  source 1..42: mol_type = unassigned DNA; note = methanogen bacteria
atttctgctaatagtgcaagtttaactgttgcaattccaagt

SEQ ID NO: 28561 - DNA, 30 bp, unidentified
  source 1..30: mol_type = unassigned DNA; note = methanogen bacteria
ttcttcagtacaggtgtggtcgttcagatt

SEQ ID NO: 28562 - DNA, 30 bp, unidentified
  source 1..30: mol_type = unassigned DNA; note = methanogen bacteria
tttttcagtacaggttacgttttaaagata

SEQ ID NO: 28563 - DNA, 42 bp, unidentified
  source 1..42: mol_type = unassigned DNA; note = methanogen bacteria
ataacaattcctattgccaaaaatgttgctatcacaataatg

SEQ ID NO: 28564 - DNA, 30 bp, unidentified
  source 1..30: mol_type = unassigned DNA; note = methanogen bacteria
gggcagtctatcaacctgattttcgatatg

SEQ ID NO: 28565 - DNA, 123 bp, unidentified
  source 1..123: mol_type = unassigned DNA; note = methanogen bacteria
tcattcctgcctttgcacccctatgcttttgctatggccagtggtgtaggcagtgcaagtatgaatgcggctgctatcggaccaactcttgccgcttttcctggtttggaaacaagtattgag

SEQ ID NO: 28566 - DNA, 57 bp, unidentified
  source 1..57: mol_type = unassigned DNA; note = methanogen bacteria
tcattgcccgatattacaataacaagttctgcagactttacgctctttatacaagaa

SEQ ID NO: 28567 - DNA, 51 bp, unidentified
  source 1..51: mol_type = unassigned DNA; note = methanogen bacteria
gtttattctgattttgttgcatctttaggaaaatctaatagtttaatcatg

SEQ ID NO: 28568 - DNA, 204 bp, unidentified
  source 1..204: mol_type = unassigned DNA; note = methanogen bacteria
gatttatcccctattgatccagtcagtacttatttaaaaggagcagctgtttctgaagctcaaagaacaatattggaaggttattttggtactaatgttccattgcctacaaaaattttcaattggttgatggatttggttcagggcaatctcggtacttctttaatttatcgtgctcctgttcttgatgtaattattgataaa

SEQ ID NO: 28569 - DNA, 90 bp, unidentified
  source 1..90: mol_type = unassigned DNA; note = methanogen bacteria
gtttacttgaaatggttcccgattggtttcggtgtacctattggtgttagcagtactgatgcaacatttgcggaatgggcatccagactg

SEQ ID NO: 28570 - DNA, 72 bp, unidentified
  source 1..72: mol_type = unassigned DNA; note = methanogen bacteria
gaacaggttttctcttatcctggaattggtcaaacggctgttgctgcgggtcttcaaagtgatgttccattg

SEQ ID NO: 28571 - DNA, 45 bp, unidentified
  source 1..45: mol_type = unassigned DNA; note = methanogen bacteria
actattaaaatccctctcacaaaagatgttgcaattacaataatg

SEQ ID NO: 28572 - DNA, 30 bp, unidentified
  source 1..30: mol_type = unassigned DNA; note = methanogen bacteria
ggtcagtcaataggtttaatctttgacatg

SEQ ID NO: 28573 - DNA, 123 bp, unidentified
  source 1..123: mol_type = unassigned DNA; note = methanogen bacteria
tccttcttgccactacatccttatgcatttgcaatggccagtggtgttggaagtgcaagtatgaatgctgcagcaataggaccaactcttgcggcatttccgggaatggaaactcaaattgaa

SEQ ID NO: 28574 - DNA, 36 bp, unidentified
  source 1..36: mol_type = unassigned DNA; note = methanogen bacteria
aatgtgattaatccgatttatctaaatgattttaac

SEQ ID NO: 28575 - DNA, 72 bp, unidentified
  source 1..72: mol_type = unassigned DNA; note = methanogen bacteria
actgcaattttaagcggcgccattcaaagcgagattacaaatccggttcatcagctaatcaacaataacaat

SEQ ID NO: 28576 - DNA, 48 bp, unidentified
  source 1..48: mol_type = unassigned DNA; note = methanogen bacteria
attcaaagctcaatatccaaccttaaaactgcaatcaaccctatggat

SEQ ID NO: 28577 - DNA, 204 bp, unidentified
  source 1..204: mol_type = unassigned DNA; note = methanogen bacteria
gatttatcccctattaattcggttaacacttatttaagaggagcagctgtttcagaagctcaaagagcaatattggaaagttattttggtatgaatgttccattgcctactaaaatatttcattggctgatggatttagttcaggggaatttaggaacttccttgatttatcgtgctccggttattgatgttattattgataaa

SEQ ID NO: 28578 - DNA, 93 bp, unidentified
  source 1..93: mol_type = unassigned DNA; note = methanogen bacteria
gctgtttatttaggatggttcccaattggttttggtgtacctatcggtgtcagcagtactgatgccacatttactgaatgggcatcccggctg

SEQ ID NO: 28579 - DNA, 72 bp, unidentified
  source 1..72: mol_type = unassigned DNA; note = methanogen bacteria
gaacaggtattttcttatcctggaataggtcagacagctgttgcagcaggtcttcaaagtgatgtgccgtta

SEQ ID NO: 28580 - DNA, 30 bp, unidentified
  source 1..30: mol_type = unassigned DNA; note = methanogen bacteria
tttttcagtaccggttacgtgcttcagatt

SEQ ID NO: 28581 - DNA, 30 bp, unidentified
  source 1..30: mol_type = unassigned DNA; note = methanogen bacteria
tacttctctacaggttacgttttaaaaatt

SEQ ID NO: 28582 - DNA, 30 bp, unidentified
  source 1..30: mol_type = unassigned DNA; note = methanogen bacteria
tttttctctacaggttatgtatttaaaatt

SEQ ID NO: 28583 - DNA, 30 bp, unidentified
  source 1..30: mol_type = unassigned DNA; note = methanogen bacteria
tacttctctacaggatatgttttaaaaatc

SEQ ID NO: 28584 - DNA, 114 bp, unidentified
  source 1..114: mol_type = unassigned DNA; note = methanogen bacteria
atgtttgaaacagttttttattttccatgggaggtttctctgatagtattcctccaaagttctcttccaggttttgtattaggattctttggagttatttcagaggttgtctct

SEQ ID NO: 28585 - DNA, 129 bp, unidentified
  source 1..129: mol_type = unassigned DNA; note = methanogen bacteria
gtgaccgttgcacgtttaaggccatatgcagttgttgataaaatcaagtgcattcatgccaatgtggctgaccagaatcctcttgactttaaaatccaaggatattcgttcccaagcggacatacgatg

SEQ ID NO: 28586 - DNA, 57 bp, unidentified
  source 1..57: mol_type = unassigned DNA; note = methanogen bacteria
ggagtctattcctcatttatgattgaattgggaaaaggaggagctatttgtgaagtt

SEQ ID NO: 28587 - DNA, 108 bp, unidentified
  source 1..108: mol_type = unassigned DNA; note = methanogen bacteria
aactgtactttcattgccaacacagcaaattttggtggagcgatgtatggatgtactgtaaaaaattctgttttcattaacaacaatgcaaaatatgatggaggggct

SEQ ID NO: 28588 - DNA, 54 bp, unidentified
  source 1..54: mol_type = unassigned DNA; note = methanogen bacteria
aacacagcatatattggtggagcgatgtatggatgtactgtaaaaaattctgtt

SEQ ID NO: 28589 - DNA, 123 bp, unidentified
  source 1..123: mol_type = unassigned DNA; note = methanogen bacteria
attactttcagtggcaacaaagcagattatggaggagcaatggcggaatgcactgcatacaattgtattttctctggaaacactgcaaatatcaatggtggtgctttatataagtgcattgct

SEQ ID NO: 28590 - DNA, 30 bp, unidentified
  source 1..30: mol_type = unassigned DNA; note = methanogen bacteria
aattcgttccattctgggtggtgctttata

SEQ ID NO: 28591 - DNA, 30 bp, unidentified
  source 1..30: mol_type = unassigned DNA; note = methanogen bacteria
ttcttcagcaccggcttcgtgttgaagatt

SEQ ID NO: 28592 - DNA, 30 bp, unidentified
  source 1..30: mol_type = unassigned DNA; note = methanogen bacteria
cctaatgtcctgtatgccaacggtggtgga

SEQ ID NO: 28593 - DNA, 72 bp, unidentified
  source 1..72: mol_type = unassigned DNA; note = methanogen bacteria
agttttacaaagggctggggtgctaatccggatgtattcttttcaagcaatgtcctgcaggcaagtgattca

SEQ ID NO: 28594 - DNA, 75 bp, unidentified; identical to SEQ ID NO: 20772
  source 1..75: mol_type = unassigned DNA; note = methanogen bacteria

SEQ ID NO: 28595 - DNA, 48 bp, unidentified
  source 1..48: mol_type = unassigned DNA; note = methanogen bacteria
atgaccttcactactggaattccattcaatgatttggtaactgaaggt

SEQ ID NO: 28596 - DNA, 45 bp, unidentified
  source 1..45: mol_type = unassigned DNA; note = methanogen bacteria
tctgaatttctagaacaaattggaagaaataatccattaacaaca

SEQ ID NO: 28597 - DNA, 36 bp, unidentified
  source 1..36: mol_type = unassigned DNA; note = methanogen bacteria
ggattctatgatgagaaattacttggcaatgttaat

SEQ ID NO: 28598 - DNA, 69 bp, unidentified
  source 1..69: mol_type = unassigned DNA; note = methanogen bacteria
tcattacttagtgcagccacacattcagacatctcaaatcctgttgttgagctaataaattcttcaaac

SEQ ID NO: 28599 - DNA, 51 bp, unidentified
  source 1..51: mol_type = unassigned DNA; note = methanogen bacteria
tttgtaggtgaagcaggccaggcaattgctcaaaactcattcaacatgttc

SEQ ID NO: 28600 - DNA, 39 bp, unidentified
  source 1..39: mol_type = unassigned DNA; note = methanogen bacteria
attaatttgacaaatccccaatacttaactgacattaac

SEQ ID NO: 28601 - DNA, 72 bp, unidentified
  source 1..72: mol_type = unassigned DNA; note = methanogen bacteria
acatcattgctcagttcaacaatgcaaagcgacatcacaaatcctgtccaagagctaatcaacaatgcaggc

SEQ ID NO: 28602 - DNA, 45 bp, unidentified
  source 1..45: mol_type = unassigned DNA; note = methanogen bacteria
gtcgcaaattcggttaataacctgatgtccggttttaattctctt

SEQ ID NO: 28603 - DNA, 141 bp, unidentified
  source 1..141: mol_type = unassigned DNA; note = methanogen bacteria
gggatgggccacgtgaacgccgccctcgagaccgaccacctccacgtggacgcgatcatggtgaatgagaacatcgcttacactgacatcgacaatgccgagctccgcgagaacttggattacggctcccgcataggaggt

SEQ ID NO: 28604 - DNA, 129 bp, unidentified
  source 1..129: mol_type = unassigned DNA; note = methanogen bacteria
tatcgtttggcggtccacaaggacgtctccgaatgcatagtggttcatcatcacggcggtgtgctggtgttcaacctgggcagcaacgccgcgacggaagccttcctgacggacctgcagtcccgcctc

SEQ ID NO: 28605 - DNA, 30 bp, unidentified
  source 1..30: mol_type = unassigned DNA; note = methanogen bacteria
tttttcagcaccggccaggtgcttaagatt

SEQ ID NO: 28606 - DNA, 36 bp, unidentified
  source 1..36: mol_type = unassigned DNA; note = methanogen bacteria
catttaacaaatccgactgtcctacaggacatcaac

SEQ ID NO: 28607 - DNA, 75 bp, unidentified
  source 1..75: mol_type = unassigned DNA; note = methanogen bacteria
acagacctgttaagtggtgcaatccacaataacattgcaaatccagttcaaaatctcataaacaatactaacatc

SEQ ID NO: 28608 - DNA, 48 bp, unidentified
  source 1..48: mol_type = unassigned DNA; note = methanogen bacteria
gttggacaatccgcaatgcacctgcaaacaggaggcacactcttagac

SEQ ID NO: 28609 - DNA, 39 bp, unidentified
  source 1..39: mol_type = unassigned DNA; note = methanogen bacteria
ttctataaggacataattaatggaattacaaatttcgga

SEQ ID NO: 28610 - DNA, 42 bp, unidentified
  source 1..42: mol_type = unassigned DNA; note = methanogen bacteria
tactatgttaatgtagatggaaccccttctgatgtgagaaat

SEQ ID NO: 28611 - DNA, 201 bp, unidentified
  source 1..201: mol_type = unassigned DNA; note = methanogen bacteria
ttatcccctattaatccagtaactgtttatttgaaaggtgctgccgtatctgaagctcaaaggactattttaaaccaatattttggtgtgggtgttccattacatattaaaatttatcattggttattaaatttaatgcaaggagacttaggaacatctttaatatatcgtgcaccggtcattgatgtaatcactcagaaa

SEQ ID NO: 28612 - DNA, 93 bp, unidentified
  source 1..93: mol_type = unassigned DNA; note = methanogen bacteria
gcagtatatttgggattattcccaattgggtttggagttccgattggtgtaagcagtactgatgcatcatttatggattgggcatcaaggctt

SEQ ID NO: 28613 - DNA, 72 bp, unidentified
  source 1..72: mol_type = unassigned DNA; note = methanogen bacteria
gaacaagtattttcatatcctggaattggacaaacagctgttgcagcaggtcttcaaagtgatgttccacta

SEQ ID NO: 28614 - DNA, 30 bp, unidentified
  source 1..30: mol_type = unassigned DNA; note = methanogen bacteria
taccgctattacggttatgttttaaagatt

SEQ ID NO: 28615 - DNA, 57 bp, unidentified
  source 1..57: mol_type = unassigned DNA; note = methanogen bacteria
ggtatctataatggatttatggaatcagcaggatcagttaaccctatggcagaatca

SEQ ID NO: 28616 - DNA, 63 bp, unidentified
  source 1..63: mol_type = unassigned DNA; note = methanogen bacteria
ttattatctgcaagtttatccgataggagttatggggctcttttaaatcctataagaactggt

SEQ ID NO: 28617 - DNA, 57 bp, unidentified
  source 1..57: mol_type = unassigned DNA; note = methanogen bacteria
tggggcatattacctgatttatttttagatgcgtatttgtcagttcaggatttagca

SEQ ID NO: 28618 - DNA, 51 bp, unidentified
  source 1..51: mol_type = unassigned DNA; note = methanogen bacteria
gatattggaggagttttctctttattttacgatcaggttttacactacttt

SEQ ID NO: 28619 - DNA, 66 bp, unidentified
  source 1..66: mol_type = unassigned DNA; note = methanogen bacteria
gagtggggaatattacctccttctttcatgaatgctttcctttcacttcaaaatttggccagcaat

SEQ ID NO: 28620 - DNA, 57 bp, unidentified
  source 1..57: mol_type = unassigned DNA; note = methanogen bacteria
gtagaccttcacaatcctgttacagatatctacgatgtggtatttgcagtttttgat

SEQ ID NO: 28621 - DNA, 36 bp, unidentified
  source 1..36: mol_type = unassigned DNA; note = methanogen bacteria
ggaacatttaacgcaaagttacttagtgatattaat

SEQ ID NO: 28622 - DNA, 60 bp, unidentified
  source 1..60: mol_type = unassigned DNA; note = methanogen bacteria
ggtggaaccatcaataaagaaatagcaaatcccgtttcagaactgattggttcatcaaat

SEQ ID NO: 28623 - DNA, 48 bp, unidentified
  source 1..48: mol_type = unassigned DNA; note = methanogen bacteria
ggcagagcagtccaatcactcattcataactcattcaattttgctgat

SEQ ID NO: 28624 - DNA, 84 bp, unidentified
  source 1..84: mol_type = unassigned DNA; note = methanogen bacteria
aaattgagcgcaacatatccaacatttatggatgcgatattcggcttgaaaaatccgggccaatttattaatgcattaactcac

SEQ ID NO: 28625 - DNA, 42 bp, unidentified
  source 1..42: mol_type = unassigned DNA; note = methanogen bacteria
tcttcaagcttcaatccatctttcagcgttgattggggaaaa

SEQ ID NO: 28626 - DNA, 39 bp, unidentified
  source 1..39: mol_type = unassigned DNA; note = methanogen bacteria
tttaatcttccagtagtcgaaatttatacccctatcgaa

SEQ ID NO: 28627 - DNA, 54 bp, unidentified
  source 1..54: mol_type = unassigned DNA; note = methanogen bacteria
gtttattctgggtttatgcaaaattatggtatggaatcagaaattgttttgact

SEQ ID NO: 28628 - DNA, 48 bp, unidentified
  source 1..48: mol_type = unassigned DNA; note = methanogen bacteria
tactccagcttcatgcagggatacgggatggagtcggaaatcatcctg

SEQ ID NO: 28629 - DNA, 48 bp, unidentified
  source 1..48: mol_type = unassigned DNA; note = methanogen bacteria
tattcacaattcatgcaaaattatggcatggagtccgaaatcatttta

SEQ ID NO: 28630 - DNA, 45 bp, unidentified
  source 1..45: mol_type = unassigned DNA; note = methanogen bacteria
cctattaaaattcctttgtcagagagtgttcaagtttcaataatg

SEQ ID NO: 28631 - DNA, 30 bp, unidentified; identical to SEQ ID NO: 28243
  source 1..30: mol_type = unassigned DNA; note = methanogen bacteria

SEQ ID NO: 28632 - DNA, 123 bp, unidentified
  source 1..123: mol_type = unassigned DNA; note = methanogen bacteria
tctttattgccgttgcatccttatgcatttgctatggctagtggtgttggtagtgcgagtatgaatgcggccgctttaggtccgactcttgcagcatttcctgcattggaaacaaatatcgaa

SEQ ID NO: 28633 - DNA, 30 bp, unidentified
  source 1..30: mol_type = unassigned DNA; note = methanogen bacteria
tacttctcaacaggttatgttttacgaata

SEQ ID NO: 28634 - DNA, 54 bp, unidentified
  source 1..54: mol_type = unassigned DNA; note = methanogen bacteria
gtttactcagggtttatgcaaaactatgggatggaatctgaaattgttttgacc

SEQ ID NO: 28635 - DNA, 51 bp, unidentified
  source 1..51: mol_type = unassigned DNA; note = methanogen bacteria
tattcaggatttatgcagaactatggaatggattctgaaattattttgacg

SEQ ID NO: 28636 - DNA, 30 bp, unidentified
  source 1..30: mol_type = unassigned DNA; note = methanogen bacteria
tacttctcaacaggttatgtgctaaaaatc

SEQ ID NO: 28637 - DNA, 78 bp, unidentified
  source 1..78: mol_type = unassigned DNA; note = methanogen bacteria
ttgtttttacaatatcttagggaaataagtggaggaatatttaatacattttttacttcatgttcattttatggtgaa

SEQ ID NO: 28638 - DNA, 105 bp, unidentified
  source 1..105: mol_type = unassigned DNA; note = methanogen bacteria
ttatttagtatatatcgtccatgggtacttgattcaaaagttaaacctgttaaagaagccttaccccatgcaggaggctattcatttccaagtggacattcagca

SEQ ID NO: 28639 - DNA, 63 bp, unidentified
  source 1..63: mol_type = unassigned DNA; note = methanogen bacteria
acaaaatcttatccaatagattacgattctgcaggtaaaataattgttgaacctattaagaac

SEQ ID NO: 28640 - DNA, 54 bp, unidentified
  source 1..54: mol_type = unassigned DNA; note = methanogen bacteria
gtttattccgggtttatgcaaagatatggtatggaatctgaaattgttctgact

SEQ ID NO: 28641 - DNA, 84 bp, unidentified
  source 1..84: mol_type = unassigned DNA; note = methanogen bacteria
atctcggacggaacggtgggagagtgcttccgcttcatcaccgaccgcatggggatctcgttcggagattccgcagggagccgc

SEQ ID NO: 28642 - DNA, 99 bp, unidentified
  source 1..99: mol_type = unassigned DNA; note = methanogen bacteria
atgccgatcgccgtctggaccgatctcctggacgtttcctccctggcccattggtacgatgtatggaacgcagggcccggggtgctgagcatatggaac

SEQ ID NO: 28643 - DNA, 54 bp, unidentified
  source 1..54: mol_type = unassigned DNA; note = methanogen bacteria
gtttattcggaatttatgcaaaactatgggatggaatccgaaattattatgacg

SEQ ID NO: 28644 - DNA, 36 bp, unidentified
  source 1..36: mol_type = unassigned DNA; note = methanogen bacteria
tcaagtttcaatccctctttcagctttgattgggga

SEQ ID NO: 28645 - DNA, 42 bp, unidentified
  source 1..42: mol_type = unassigned DNA; note = methanogen bacteria
ttcaatcttccagttattgcaattcatcctccaattgaatcc

SEQ ID NO: 28646 - DNA, 51 bp, unidentified
  source 1..51: mol_type = unassigned DNA; note = methanogen bacteria
tattccggatttatgcaaagctatggaatggaatcggagattatcataaca

SEQ ID NO: 28647 - DNA, 30 bp, unidentified
  source 1..30: mol_type = unassigned DNA; note = methanogen bacteria
tacttctcaacaggtacagttttaaaaatt

SEQ ID NO: 28648 - DNA, 54 bp, unidentified
  source 1..54: mol_type = unassigned DNA; note = methanogen bacteria
gtttattctgggtttatgcaaagctatggaatggaatcggaaattgttctgact

SEQ ID NO: 28649 - DNA, 51 bp, unidentified
  source 1..51: mol_type = unassigned DNA; note = methanogen bacteria
tattccggatttatgcaggactatggaatggaatctgagataattttaacg

SEQ ID NO: 28650 - DNA, 51 bp, unidentified
  source 1..51: mol_type = unassigned DNA; note = methanogen bacteria
tattcaagcttcatgcagggattcggcatggaatcggaaatcatcatgacc

SEQ ID NO: 28651 - DNA, 51 bp, unidentified
  source 1..51: mol_type = unassigned DNA; note = methanogen bacteria
tattcttctttcatgcaaagctacggcatcgagtcggaaatcatcatgacc

SEQ ID NO: 28652 - DNA, 51 bp, unidentified
  source 1..51: mol_type = unassigned DNA; note = methanogen bacteria
tatgcaggtttcatggagagttttggtcaggtgtctgatttggtggcaact

SEQ ID NO: 28653 - DNA, 36 bp, unidentified
  source 1..36: mol_type = unassigned DNA; note = methanogen bacteria
gctgtttatgatattaaaatactaaataattacaac

SEQ ID NO: 28654 - DNA, 63 bp, unidentified
  source 1..63: mol_type = unassigned DNA; note = methanogen bacteria
agtcaactaatctccagtgaaattataaatccaataaaacaaataataaatcaccaaagcata

SEQ ID NO: 28655 - DNA, 48 bp, unidentified
  source 1..48: mol_type = unassigned DNA; note = methanogen bacteria
tttataaactccataaaccatctaatttcatcaacaggaaccccatta

SEQ ID NO: 28656 - DNA, 48 bp, unidentified
  source 1..48: mol_type = unassigned DNA; note = methanogen bacteria
tactcggggttcatgcaaggctatggtatggagtcacagattattttg

SEQ ID NO: 28657 - DNA, 51 bp, unidentified
  source 1..51: mol_type = unassigned DNA; note = methanogen bacteria
gtctattccggattcatggaaagtttcggtcaggtaactgatttggtagct

SEQ ID NO: 28658 - DNA, 48 bp, unidentified
  source 1..48: mol_type = unassigned DNA; note = methanogen bacteria
tatggaaactttattcaggaattttcccataattcagaattaatagct

SEQ ID NO: 28659 - DNA, 48 bp, unidentified
  source 1..48: mol_type = unassigned DNA; note = methanogen bacteria
tatgcacaatttatggagagcttcggtcaggttactgatttggttgcc

SEQ ID NO: 28660 - DNA, 48 bp, unidentified
  source 1..48: mol_type = unassigned DNA; note = methanogen bacteria
tatgcgcaattcatggaaagttttggtcatgttactgatttggttgcc

SEQ ID NO: 28661 - DNA, 48 bp, unidentified
  source 1..48: mol_type = unassigned DNA; note = methanogen bacteria
tactccagcttcatgcagggatacgggatggagtcggaaatcatttta

SEQ ID NO: 28662 - DNA, 51 bp, unidentified
  source 1..51: mol_type = unassigned DNA; note = methanogen bacteria
gtttattcgggatttatgcaaaattatgggatggaatcggagattatttta

SEQ ID NO: 28663 - DNA, 42 bp, unidentified
  source 1..42: mol_type = unassigned DNA; note = methanogen bacteria
acaaattttagccaaattacaagcttcatatcaattaatcca

SEQ ID NO: 28664 - DNA, 36 bp, unidentified
  source 1..36: mol_type = unassigned DNA; note = methanogen bacteria
acatatctaaaccaaataacccatctcgatgctaat

SEQ ID NO: 28665 - DNA, 39 bp, unidentified
  source 1..39: mol_type = unassigned DNA; note = methanogen bacteria
aaccttccctccattcccgggaagatcgtgggctggaag

SEQ ID NO: 28666 - DNA, 60 bp, unidentified
  source 1..60: mol_type = unassigned DNA; note = methanogen bacteria
aatccaactttaggatttaatgtgattaccgcaggaagcatagtcataatcatccaagcg

SEQ ID NO: 28667 - DNA, 51 bp, unidentified
  source 1..51: mol_type = unassigned DNA; note = methanogen bacteria
aagaatcctacattgggattcaatctcattacaataggatcaatagccgtg

SEQ ID NO: 28668 - DNA, 42 bp, unidentified
  source 1..42: mol_type = unassigned DNA; note = methanogen bacteria
agtagttttggacaaatcagcagttttatcagtaccaatccc

SEQ ID NO: 28669 - DNA, 246 bp, unidentified
  source 1..246: mol_type = unassigned DNA; note = methanogen bacteria
ggaacaacccatctgaaattttcatccaaatcattaaccgtaaatcataactccaaaaaaacattaaacatcaaagccaccaattactttacaaaacatgtcatgaaaaatattaagcttgcattaaaggtatataccggaaaaaaatataaaacagttgttctaaaaaccgataaaaacggaattgcaaaatacgatgcttcaaaattaagcatcggagctcacaaaataatcatcagacatggt

SEQ ID NO: 28670 - DNA, 48 bp, unidentified
  source 1..48: mol_type = unassigned DNA; note = methanogen bacteria
aattatttaaactccgattctaaaaaagttaccgttaaagtaacaaga

SEQ ID NO: 28671 - DNA, 45 bp, unidentified
  source 1..45: mol_type = unassigned DNA; note = methanogen bacteria
cctattaaaataccgataaccaatggtgtagaagtttcaataatg

SEQ ID NO: 28672 - DNA, 30 bp, unidentified
  source 1..30: mol_type = unassigned DNA; note = methanogen bacteria
ggacaatcaatgcatttgatttttgaaatg

SEQ ID NO: 28673 - DNA, 123 bp, unidentified
  source 1..123: mol_type = unassigned DNA; note = methanogen bacteria
acattgctgccattacatccatatgcatttgctatggccagtggtgttggtagcgccagtatgaacgccgctgctttaggccctactttagcagcattcccggcattggaaacaaacattgaa

SEQ ID NO: 28674 - DNA, 48 bp, unidentified
  source 1..48: mol_type = unassigned DNA; note = methanogen bacteria
tttgctccatcaattactaatcctttacaatcctttgatcaatcaaat

SEQ ID NO: 28675 - DNA, 36 bp, unidentified
  source 1..36: mol_type = unassigned DNA; note = methanogen bacteria
aaactattttttacacacaatatggtctccccttca

SEQ ID NO: 28676 - DNA, 60 bp, unidentified
  source 1..60: mol_type = unassigned DNA; note = methanogen bacteria
aaaggtgcatatcccggaatgtggtacggatgggtcatgctcgccgccgtcccctcgggg

SEQ ID NO: 28677 - DNA, 45 bp, unidentified
  source 1..45: mol_type = unassigned DNA; note = methanogen bacteria
ggggttaattttttaggccaacatgcctttaagtcccattccaca

SEQ ID NO: 28678 - DNA, 282 bp, unidentified
  source 1..282: mol_type = unassigned DNA; note = methanogen bacteria
ggtaacaattcaagcattattggtgacgctggtgatagggatgagtattcatgggcttatttagaagataattgtatcttggctgctgataacttaaacatcactaagtttaatcatgccatttacaatgatggtgggtcttgcatattgaataatgtgattttctatcataaccgcatggattacagaattgaacgtgattggggtgcagctattctcaatgcaggtatatgcatgtgcacaaattgtactttcatggaaaattattgcagcaatgggggg

SEQ ID NO: 28679 - DNA, 48 bp, unidentified
  source 1..48: mol_type = unassigned DNA; note = methanogen bacteria
atgtgggaatcatcaggagattcattttacatattgccttcaatatca

SEQ ID NO: 28680 - DNA, 51 bp, unidentified
  source 1..51: mol_type = unassigned DNA; note = methanogen bacteria
gtttattcggattttatgcagaattttggaaaatcgggggatttgatttta

SEQ ID NO: 28681 - DNA, 33 bp, unidentified
  source 1..33: mol_type = unassigned DNA; note = methanogen bacteria
ggatcaactgttatgggtgatgtaatatcagga

SEQ ID NO: 28682 - DNA, 39 bp, unidentified
  source 1..39: mol_type = unassigned DNA; note = methanogen bacteria
gacgtcttatccattcccggcaaggtcgtatcgaaccag

SEQ ID NO: 28683 - DNA, 45 bp, unidentified
  source 1..45: mol_type = unassigned DNA; note = methanogen bacteria
tcacgcagtgacagagtcgtagacaatgttgttgctggtgaaagt

SEQ ID NO: 28684 - DNA, 42 bp, unidentified
  source 1..42: mol_type = unassigned DNA; note = methanogen bacteria
gatgtgttctccatacccggcaaggtcgtttccgaccatgtg

SEQ ID NO: 28685 - DNA, 51 bp, unidentified
  source 1..51: mol_type = unassigned DNA; note = methanogen bacteria
tactcagaatttatcggtcaaattggtagagaaaatccattggccacagca

SEQ ID NO: 28686 - DNA, 174 bp, unidentified
  source 1..174: mol_type = unassigned DNA; note = methanogen bacteria
aaagacgatgaacattactggagacttagttccaaggacggttttgaatgggtagttacttttgatgatcgttccagagttattaacggcgaagttattaacaactccggaaaatgcggatatacctatcttaagagtgattcattagtaaaaaaatccattatggcatctgct

SEQ ID NO: 28687 - DNA, 60 bp, unidentified
  source 1..60: mol_type = unassigned DNA; note = methanogen bacteria
tggtatgtgggcgaacataattatgaccctgattatcaggcatggaaaacctatgcaatt

SEQ ID NO: 28688 - DNA, 60 bp, unidentified
  source 1..60: mol_type = unassigned DNA; note = methanogen bacteria
actgcatcagttgcttcttataatccataccctgtagaggattttattttcactacattt

SEQ ID NO: 28689 - DNA, 30 bp, unidentified
  source 1..30: mol_type = unassigned DNA; note = methanogen bacteria
cctcaaatgggaatcgatccgctttttact

SEQ ID NO: 28690 - DNA, 57 bp, unidentified
  source 1..57: mol_type = unassigned DNA; note = methanogen bacteria
aacatcgcagtgtcgatgacgaactacaatgccggtatggggtccatgtacagccgg

SEQ ID NO: 28691 - DNA, 33 bp, unidentified
  source 1..33: mol_type = unassigned DNA; note = methanogen bacteria
aagaacggggacctggacgggtatgcgttcctt

SEQ ID NO: 28692 - DNA, 132 bp, unidentified
  source 1..132: mol_type = unassigned DNA; note = methanogen bacteria
ctcagtttcccgacgatggtaatggcaggagcaggcacggattggtgcgattacttctactgcttctcgctgacgggattcgtggacatagactccctgaccagcatagggacatcttccccggattacgga

SEQ ID NO: 28693 - DNA, 75 bp, unidentified
  source 1..75: mol_type = unassigned DNA; note = methanogen bacteria
gccgttgaaggaaattcaaatgtgttgattctaactgaatgtaattttataaataattctgcgacaattcatggt

SEQ ID NO: 28694 - DNA, 69 bp, unidentified
  source 1..69: mol_type = unassigned DNA; note = methanogen bacteria
cttcaaggaaacaatacttatacagtaatagacaagtccaaatttgattcaaattatgctccatacggt

SEQ ID NO: 28695 - DNA, 72 bp, unidentified
  source 1..72: mol_type = unassigned DNA; note = methanogen bacteria
gctcttggaaacactgattatcttgttatttcagagtccagtttcacaaatcacattggagctgaggatgat

SEQ ID NO: 28696 - DNA, 72 bp, unidentified
  source 1..72: mol_type = unassigned DNA; note = methanogen bacteria
atatatgtaataggaaacctcacaaatgctaatatagtggattcattattcgaaaataacagtgcacgtgct

SEQ ID NO: 28697 - DNA, 45 bp, unidentified
  source 1..45: mol_type = unassigned DNA; note = methanogen bacteria
accattgaaatcccgattgcaaaggacgttgcaataaccataatg

SEQ ID NO: 28698 - DNA, 30 bp, unidentified
  source 1..30: mol_type = unassigned DNA; note = methanogen bacteria
ggccagtccattaatctgattttccaaatg

SEQ ID NO: 28699 - DNA, 123 bp, unidentified
  source 1..123: mol_type = unassigned DNA; note = methanogen bacteria
tcattcctgccgcttcacccatatgcatttgcaatggcaagcggggttggaagcgcaagtatgaatgctgcagcaataggtccgacccttgcggcatttccgggaatggaaacgcagattgaa

SEQ ID NO: 28700 - DNA, 45 bp, unidentified
  source 1..45: mol_type = unassigned DNA; note = methanogen bacteria
actgactttggtgaaatttcaggcttcgtttccatcgatccggcg

SEQ ID NO: 28701 - DNA, 33 bp, unidentified
  source 1..33: mol_type = unassigned DNA; note = methanogen bacteria
ggttcaacagtgatgggagacgtcatatcttcg

SEQ ID NO: 28702 - DNA, 54 bp, unidentified
  source 1..54: mol_type = unassigned DNA; note = methanogen bacteria
gatttgcattacagttttgcaaaggcattcaatcttttggagatggctactgat

SEQ ID NO: 28703 - DNA, 42 bp, unidentified
  source 1..42: mol_type = unassigned DNA; note = methanogen bacteria
gatatgacctccatattctatattctatacgataggataatc

SEQ ID NO: 28704 - DNA, 36 bp, unidentified
  source 1..36: mol_type = unassigned DNA; note = methanogen bacteria
atgaactttaaatacatgcccgaactaaatatgccc

SEQ ID NO: 28705 - DNA, 51 bp, unidentified
  source 1..51: mol_type = unassigned DNA; note = methanogen bacteria
ttaagttcaacttatactacatttttagatgcagtccgtgcacttgcaaac

SEQ ID NO: 28706 - DNA, 75 bp, unidentified
  source 1..75: mol_type = unassigned DNA; note = methanogen bacteria
ataggtttttcaggttttgatgtgcaacaattaggtcaagtattatccggaacttctacagatggtgcaattaca

SEQ ID NO: 28707 - DNA, 30 bp, unidentified
  source 1..30: mol_type = unassigned DNA; note = methanogen bacteria
atgaaagaaccaatacataattcttttaca

SEQ ID NO: 28708 - DNA, 30 bp, unidentified
  source 1..30: mol_type = unassigned DNA; note = methanogen bacteria
ggacttacaacagtgactcatgatgtttca

SEQ ID NO: 28709 - DNA, 51 bp, unidentified
  source 1..51: mol_type = unassigned DNA; note = methanogen bacteria
attggcaaccctgataataatgtactgtttttaactccaacttatgcatta

SEQ ID NO: 28710 - DNA, 48 bp, unidentified
  source 1..48: mol_type = unassigned DNA; note = methanogen bacteria
aaattcccatttaaagtcataaattttacaataaattatggtaataat

SEQ ID NO: 28711 - DNA, 201 bp, unidentified
  source 1..201: mol_type = unassigned DNA; note = methanogen bacteria
ttgtctccaattgatccggttaagtcatatgctgctgaaatgggagctagtgttcaacaaatagctgcattaagatcatattggcaggtagacgtaccaacatatcaaaaattaattgattggctacttgatttattacaattaaatctgggcgtatcattaatttacagaattccagtaatcaaagttatagctgataaa

SEQ ID NO: 28712 - DNA, 87 bp, unidentified
  source 1..87: mol_type = unassigned DNA; note = methanogen bacteria
gtatatctaaaatggttcccaattggattggcggttccagtaggtactcttgcaagtgatgttaccttctttgactggttatatagg

SEQ ID NO: 28713 - DNA, 72 bp, unidentified
  source 1..72: mol_type = unassigned DNA; note = methanogen bacteria
gaacagatattttcatatccgggtatcggtcaggcaactgtggctgcaggattaagatctgatgtaccatta

SEQ ID NO: 28714 - DNA, 36 bp, unidentified
  source 1..36: mol_type = unassigned DNA; note = methanogen bacteria
atgaacttcaattacatgccagaactgaactaccaa

SEQ ID NO: 28715 - DNA, 39 bp, unidentified
  source 1..39: mol_type = unassigned DNA; note = methanogen bacteria
gacaaattattcttcgcacaagccgttactgctccttca

SEQ ID NO: 28716 - DNA, 36 bp, unidentified
  source 1..36: mol_type = unassigned DNA; note = methanogen bacteria
atgaacttcaagtacatgcctgaattggagtatgca

SEQ ID NO: 28717 - DNA, 135 bp, unidentified
  source 1..135: mol_type = unassigned DNA; note = methanogen bacteria
atgttaaatagatttaataatatgtttggaacagttttttattttccatgggaagtttctctgatattattcctgcaaagttctcttccagatttcgtatttggggtctttggagttattgcagatgtcgtctct

SEQ ID NO: 28718 - DNA, 129 bp, unidentified
  source 1..129: mol_type = unassigned DNA; note = methanogen bacteria
gtgtctgttgcacgtttaaggccatatgcagttatggataatatcaagtgtatttatgcccctacggctgaccagaatctttttgactttaaaatccagggatattcgttcccaagtggtcatgcgatg

SEQ ID NO: 28719 - DNA, 33 bp, unidentified
  source 1..33: mol_type = unassigned DNA; note = methanogen bacteria
tcatttgaaaatggggagttcaacatgtccaaa

SEQ ID NO: 28720 - DNA, 36 bp, unidentified
  source 1..36: mol_type = unassigned DNA; note = methanogen bacteria
ctgaaactgccgttaggtgaaataataagcctggaa

SEQ ID NO: 28721 - DNA, 33 bp, unidentified
  source 1..33: mol_type = unassigned DNA; note = methanogen bacteria
ggttcaactgtaatgggagatataattccatcc

SEQ ID NO: 28722 - DNA, 135 bp, unidentified
  source 1..135: mol_type = unassigned DNA; note = methanogen bacteria
atgtcaaatatattcaatagtatgtttgaaacagttttttattttccgtgggaagtttttctgataatattcctgcaaagtactcttccaggtttagtattaggattttttgaagttattgcagaggtggtctct

SEQ ID NO: 28723 - DNA, 129 bp, unidentified
  source 1..129: mol_type = unassigned DNA; note = methanogen bacteria
gtgactgttgcacgtttaaggccatatgccgctgttgatacaatcaagtgcattcgtgccgatgtggctgaccagaatccttttgactttaaaatccagggatattcgtttccaagtggacatacgatg

SEQ ID NO: 28724 - DNA, 45 bp, unidentified
  source 1..45: mol_type = unassigned DNA; note = methanogen bacteria
cctattgaaattcctattgccaaaggtgttgaagttataattatg

SEQ ID NO: 28725 - DNA, 30 bp, unidentified
  source 1..30: mol_type = unassigned DNA; note = methanogen bacteria
ggtcagtctatacatctgatttttgaaatg

SEQ ID NO: 28726 - DNA, 123 bp, unidentified
  source 1..123: mol_type = unassigned DNA; note = methanogen bacteria
tccattattcctctacatccatttgcatttgctatggctagtggtgtaggtagtgccagtatgaatgctgcttcattgggtcctactttagctgcatttcctaatttggaaactagtattgag

SEQ ID NO: 28727 - DNA, 48 bp, unidentified
  source 1..48: mol_type = unassigned DNA; note = methanogen bacteria
gggccaattgaaataaatctgacaaaaggtgttacagtttcaataatg

SEQ ID NO: 28728 - DNA, 30 bp, unidentified
  source 1..30: mol_type = unassigned DNA; note = methanogen bacteria
ggacaatcaatacatttgatttttgaaatg

SEQ ID NO: 28729 - DNA, 123 bp, unidentified
  source 1..123: mol_type = unassigned DNA; note = methanogen bacteria
tctgttttgcctttgcatccttatgcttttgccatggcaagtggtgtaggcagtgccagtatgaatgcagcatctttagggcctactcttgcggcatttcctagtttggaaacaagcattgaa

SEQ ID NO: 28730 - DNA, 201 bp, unidentified
  source 1..201: mol_type = unassigned DNA; note = methanogen bacteria
tctaaatttattaataactctgcttcaagagatggtggtgctgtttattccatagcaaatcttttattaaacaattctgatttgaaatataataatgcttattgtggcggtgcggtttatagtgttaatactcaattgatattgcttaattcaaatttcacgaataattatgcgacatcctatggtggagcaataatttct

SEQ ID NO: 28731 - DNA, 138 bp, unidentified
  source 1..138: mol_type = unassigned DNA; note = methanogen bacteria
ccatatttctatataatgggagctagatttgttaatgatatttctaattcctctgctggtgcgatttattcaatgtattcaaaaaatcatttttatgattcagtatttgtaaactgcagttcgttaatcggtggtgca

SEQ ID NO: 28732 - DNA, 150 bp, unidentified
  source 1..150: mol_type = unassigned DNA; note = methanogen bacteria
gatttacattcttcatccatatattcaaatctaaatttcacgaataatatggcaattaaaggcggtgcagtttataaaatgtacaatactacttcaatcagtggttcaacatttaattcaaatcatgcaattgagggtggcggtttatat

SEQ ID NO: 28733 - DNA, 87 bp, unidentified
  source 1..87: mol_type = unassigned DNA; note = methanogen bacteria
gaccaaatttcttcagctattttaactaatttgacttttaataagaatattgctgaatatggtggagatatttattgtttgggtgat

SEQ ID NO: 28734 - DNA, 276 bp, unidentified
  source 1..276: mol_type = unassigned DNA; note = methanogen bacteria
ggttcacatgacgcatttaatttggcatttttaaatttgaatcaaaaagcaggagactataagatttttgaaattgatgatgttgcaccggtttttgatagtatgtatgatatgagggattattataatctcactgaagtcaaaaatcaacttgaacggggtaattgttgggcttttgcagcgatggctgctttagaatcatgtatattaaaagctaatggtactgcttatgatttttcagaagaaaatttaaagaatatggttgccagatttttc

SEQ ID NO: 28735 - DNA, 33 bp, unidentified
  source 1..33: mol_type = unassigned DNA; note = methanogen bacteria
agttctacagttatgggcgatttaatttcatcc

SEQ ID NO: 28736 - DNA, 36 bp, unidentified
  source 1..36: mol_type = unassigned DNA; note = methanogen bacteria
agattgttcgttaaaaaaagccttgctgttcctgat

SEQ ID NO: 28737 - DNA, 30 bp, unidentified
  source 1..30: mol_type = unassigned DNA; note = methanogen bacteria
aatcttattggaggcgtggatttcactaat

SEQ ID NO: 28738 - DNA, 51 bp, unidentified
  source 1..51: mol_type = unassigned DNA; note = methanogen bacteria
gtagacatctatgacgcaaacttcgtaaaagctgcagtattaggaagatac

SEQ ID NO: 28739 - DNA, 102 bp, unidentified
  source 1..102: mol_type = unassigned DNA; note = methanogen bacteria
caaggtttaaacgctgataacatggtatatgacttagtaaaagaaaacggtgcagaaggtactgttggtagtgtagtacaaggaactatcgcacgtgctgaa

SEQ ID NO: 28740 - DNA, 48 bp, unidentified
  source 1..48: mol_type = unassigned DNA; note = methanogen bacteria
actgatttcgctatttacaacactgacgacgcagctaaatggaacgca

SEQ ID NO: 28741 - DNA, 45 bp, unidentified
  source 1..45: mol_type = unassigned DNA; note = methanogen bacteria
attcaagatacactattaacatcatttcaaatgaatttcacaaat

SEQ ID NO: 28742 - DNA, 57 bp, unidentified
  source 1..57: mol_type = unassigned DNA; note = methanogen bacteria
ttaggagaagaagtttcatttgaaaactatattgatttgttctttttaaagcaatac

SEQ ID NO: 28743 - DNA, 45 bp, unidentified
  source 1..45: mol_type = unassigned DNA; note = methanogen bacteria
aatggaggtttccttggaacttttgaagaagttcatccttatgga

SEQ ID NO: 28744 - DNA, 57 bp, unidentified
  source 1..57: mol_type = unassigned DNA; note = methanogen bacteria
catacaataactgatactcataccagttccacattagtttattatggatatagaaga

SEQ ID NO: 28745 - DNA, 48 bp, unidentified
  source 1..48: mol_type = unassigned DNA; note = methanogen bacteria
atcaactatttggaaagcattgggataaatgtatatgttttaaatcct

SEQ ID NO: 28746 - DNA, 51 bp, unidentified
  source 1..51: mol_type = unassigned DNA; note = methanogen bacteria
aatataaatggaatggtgttcaacatagcaatccttgaagcgggaatgtca

SEQ ID NO: 28747 - DNA, 45 bp, unidentified
  source 1..45: mol_type = unassigned DNA; note = methanogen bacteria
tcacgtgcagacagactagtggacaatgttgtttctggagaaaca

SEQ ID NO: 28748 - DNA, 48 bp, unidentified
  source 1..48: mol_type = unassigned DNA; note = methanogen bacteria
atgtgggattcatcaggagactcattttatattctcccttcaatatct

SEQ ID NO: 28749 - DNA, 39 bp, unidentified
  source 1..39: mol_type = unassigned DNA; note = methanogen bacteria
gataaattattttttggaggagccataacaatacctagc

SEQ ID NO: 28750 - DNA, 36 bp, unidentified
  source 1..36: mol_type = unassigned DNA; note = methanogen bacteria
aagatcttctttggcgctccaatcaccactcccagt

SEQ ID NO: 28751 - DNA, 48 bp, unidentified
  source 1..48: mol_type = unassigned DNA; note = methanogen bacteria
acagattttggaaaatttggatattttattaatgcagatccgattatg

SEQ ID NO: 28752 - DNA, 51 bp, unidentified
  source 1..51: mol_type = unassigned DNA; note = methanogen bacteria
ttttcagtttcaggagagactgtgttttcaaatcttgaagatgcaacccat

SEQ ID NO: 28753 - DNA, 54 bp, unidentified
  source 1..54: mol_type = unassigned DNA; note = methanogen bacteria
gatgagtttaaattttcctttggaaatatggtagatacttttgttagtatgtat

SEQ ID NO: 28754 - DNA, 45 bp, unidentified
  source 1..45: mol_type = unassigned DNA; note = methanogen bacteria
actattaacattcccatcacaaaagatgttgttattacaatcatg

SEQ ID NO: 28755 - DNA, 30 bp, unidentified
  source 1..30: mol_type = unassigned DNA; note = methanogen bacteria
ggtcaatctattcatttgatttttgagatg

SEQ ID NO: 28756 - DNA, 123 bp, unidentified
  source 1..123: mol_type = unassigned DNA; note = methanogen bacteria
tcttttatacctctgcatccttatgcatatgctatggctagtggtgtaggtagcgctagtatgaatgcagcagccattggaccaacccttgcagcattccctacaatggaaacgaatattgag

SEQ ID NO: 28757 - DNA, 63 bp, unidentified
  source 1..63: mol_type = unassigned DNA; note = methanogen bacteria
ggaatatatggatgggacattataatatctattttaaatggaggatatgaagttttaaataca

SEQ ID NO: 28758 - DNA, 33 bp, unidentified
  source 1..33: mol_type = unassigned DNA; note = methanogen bacteria
attaaaggaccggaaggcactgcacatttttca

SEQ ID NO: 28759 - DNA, 30 bp, unidentified
  source 1..30: mol_type = unassigned DNA; note = methanogen bacteria
ggaattcaatcatcaacttcatcaccaaca

SEQ ID NO: 28760 - DNA, 30 bp, unidentified
  source 1..30: mol_type = unassigned DNA; note = methanogen bacteria
tctgaaaataaaccatctgaaaataaacca

SEQ ID NO: 28761 - DNA, 33 bp, unidentified
  source 1..33: mol_type = unassigned DNA; note = methanogen bacteria
ttcttcggtgcttccctgtccttcgacatcgtc

SEQ ID NO: 28762 - DNA, 30 bp, unidentified
  source 1..30: mol_type = unassigned DNA; note = methanogen bacteria
ggaggagacgatcgtactgctcatactggc

SEQ ID NO: 28763 - DNA, 54 bp, unidentified
  source 1..54: mol_type = unassigned DNA; note = methanogen bacteria
ggaattatcgtagatgatttatcaaccctagttagtatgggacatcttttatca

SEQ ID NO: 28764 - DNA, 117 bp, unidentified
  source 1..117: mol_type = unassigned DNA; note = methanogen bacteria
ggatttggaacaggaaatgaattaatgccaagtatttccccagaaataattactacaaatattgacacttcactattccttggatttgttagaggatttcaaggacttttctccaat

SEQ ID NO: 28765 - DNA, 39 bp, unidentified
  source 1..39: mol_type = unassigned DNA; note = methanogen bacteria
acaagtccccctaaccacttatttggaaagttccgcagg

SEQ ID NO: 28766 - DNA, 54 bp, unidentified
  source 1..54: mol_type = unassigned DNA; note = methanogen bacteria
ctttgctcccactgtattatcattatttactccttcagtgacagttgttgcctt

SEQ ID NO: 28767 - DNA, 57 bp, unidentified
  source 1..57: mol_type = unassigned DNA; note = methanogen bacteria
gctaatattgtcgatatatgtattaaaaatgcagatatgccttatatttatgatgct

SEQ ID NO: 28768 - DNA, 36 bp, unidentified
  source 1..36: mol_type = unassigned DNA; note = methanogen bacteria
tttgaagtccaaaatggaaccttattaacgggagtt

SEQ ID NO: 28769 - DNA, 33 bp, unidentified
  source 1..33: mol_type = unassigned DNA; note = methanogen bacteria
ggttcgaccgttattggcgatgtggtttcatcg

SEQ ID NO: 28770 - DNA, 33 bp, unidentified
  source 1..33: mol_type = unassigned DNA; note = methanogen bacteria
ggttcaaccgtcatgggcgacatcatatcttca

SEQ ID NO: 28771 - DNA, 36 bp, unidentified
  source 1..36: mol_type = unassigned DNA; note = methanogen bacteria
tacgaatatatgctgacagcacttcatgagctgcat

SEQ ID NO: 28772 - DNA, 36 bp, unidentified
  source 1..36: mol_type = unassigned DNA; note = methanogen bacteria
aggctattaaatccatcattaattacaacaccagac

SEQ ID NO: 28773 - DNA, 39 bp, unidentified
  source 1..39: mol_type = unassigned DNA; note = methanogen bacteria
gaaagactggtcaatccttcattaatcactatgcccagt

SEQ ID NO: 28774 - DNA, 36 bp, unidentified
  source 1..36: mol_type = unassigned DNA; note = methanogen bacteria
cagatatttttcagtcagtctttaaccgttccggat

SEQ ID NO: 28775 - DNA, 36 bp, unidentified
  source 1..36: mol_type = unassigned DNA; note = methanogen bacteria
aggttattaaatccttcattgattacaacaccagat

SEQ ID NO: 28776 - DNA, 42 bp, unidentified
  source 1..42: mol_type = unassigned DNA; note = methanogen bacteria
acagttaatattccaattacaaaaaatgttgcaattacaatc

SEQ ID NO: 28777 - DNA, 30 bp, unidentified
  source 1..30: mol_type = unassigned DNA; note = methanogen bacteria
ggtcaatctattcatttaatttttgaaatg

SEQ ID NO: 28778 - DNA, 123 bp, unidentified
  source 1..123: mol_type = unassigned DNA; note = methanogen bacteria
tcatttttacctttacatccttatgcatttgctatggctagtggtgtaggtagtgccagtatgaatgcggcggctattggaccgactttagcagcatttcctggattggaaagtagtattgaa

SEQ ID NO: 28779 - DNA, 90 bp, unidentified
  source 1..90: mol_type = unassigned DNA; note = methanogen bacteria
actgaacatgtaaatcctcttgactctcttgtaatggtttctaatgcttttacaagtaacggatatacagttttaggcaattctatagtt

SEQ ID NO: 28780 - DNA, 39 bp, unidentified
  source 1..39: mol_type = unassigned DNA; note = methanogen bacteria
gaaagattgttctttggaggcacacctgcaattccagaa

SEQ ID NO: 28781 - DNA, 39 bp, unidentified
  source 1..39: mol_type = unassigned DNA; note = methanogen bacteria
gaaaaaatattgaatccaactttaattacaacccctgat

SEQ ID NO: 28782 - DNA, 36 bp, unidentified
  source 1..36: mol_type = unassigned DNA; note = methanogen bacteria
aggctattaaatccatcattaattacaacacctgac

SEQ ID NO: 28783 - DNA, 69 bp, unidentified
  source 1..69: mol_type = unassigned DNA; note = methanogen bacteria
aatcctaccttaggattcaatgtcatcactgcaggaagtatagtcatcatactccaagcagcattccct

SEQ ID NO: 28784 - DNA, 33 bp, unidentified
  source 1..33: mol_type = unassigned DNA; note = methanogen bacteria
ggttccactgtaatgggagacattatttcttca

SEQ ID NO: 28785 - DNA, 42 bp, unidentified
  source 1..42: mol_type = unassigned DNA; note = methanogen bacteria
actattgaaattcccataactaaagatgttgccatcacaata

SEQ ID NO: 28786 - DNA, 30 bp, unidentified
  source 1..30: mol_type = unassigned DNA; note = methanogen bacteria
ggtcaatctattggtttgatttttgaaatg

SEQ ID NO: 28787 - DNA, 123 bp, unidentified
  source 1..123: mol_type = unassigned DNA; note = methanogen bacteria
tcatttttacctctacatccttatgcatttgcaatggctagtggtgtaggtagtgcaagtatgaatgctgcagctattggtccgacccttgcggcttttccgggtttggaaactcaaattgaa

SEQ ID NO: 28788 - DNA, 45 bp, unidentified
  source 1..45: mol_type = unassigned DNA; note = methanogen bacteria
acaaactttagccaaattacaggttttatctcaattaatccccta

SEQ ID NO: 28789 - DNA, 36 bp, unidentified
  source 1..36: mol_type = unassigned DNA; note = methanogen bacteria
aaattcctaaatccttccacaatcaccgttccggat

SEQ ID NO: 28790 - DNA, 39 bp, unidentified
  source 1..39: mol_type = unassigned DNA; note = methanogen bacteria
gacaaacttttggatcccagtttaattactacaccggac

SEQ ID NO: 28791 - DNA, 54 bp, unidentified
  source 1..54: mol_type = unassigned DNA; note = methanogen bacteria
ccgctgatgggcattgtacactcaatcaaccattcaaccggtttgaatatatct

SEQ ID NO: 28792 - DNA, 30 bp, unidentified
  source 1..30: mol_type = unassigned DNA; note = methanogen bacteria
aatcttgatttgtctactttatctacttta

SEQ ID NO: 28793 - DNA, 51 bp, unidentified
  source 1..51: mol_type = unassigned DNA; note = methanogen bacteria
tttgcttttgagggtttagatcggattgtacttattgttgatagtgcttta

SEQ ID NO: 28794 - DNA, 36 bp, unidentified
  source 1..36: mol_type = unassigned DNA; note = methanogen bacteria
aagctaatcaatccatcaacaattacagtacccgaa

SEQ ID NO: 28795 - DNA, 33 bp, unidentified
  source 1..33: mol_type = unassigned DNA; note = methanogen bacteria
tattcttcagatttatcattaattcccaaatta

SEQ ID NO: 28796 - DNA, 51 bp, unidentified
  source 1..51: mol_type = unassigned DNA; note = methanogen bacteria
gggctttcagatctgcagtatacagttgcaattgttgaggccgcaatgcct

SEQ ID NO: 28797 - DNA, 30 bp, unidentified; identical to SEQ ID NO: 28488
  source 1..30: mol_type = unassigned DNA; note = methanogen bacteria

SEQ ID NO: 28798 - DNA, 51 bp, unidentified
  source 1..51: mol_type = unassigned DNA; note = methanogen bacteria
ggtattaccgggctgaatcacactatcggacttattgaggcggctatgtct

SEQ ID NO: 28799 - DNA, 33 bp, unidentified
  source 1..33: mol_type = unassigned DNA; note = methanogen bacteria
tactctgcagatttatccttaatttcccaactg

SEQ ID NO: 28800 - DNA, 54 bp, unidentified
  source 1..54: mol_type = unassigned DNA; note = methanogen bacteria
ctgggcctgatagatcttcagtttaagatttccattgtcgaagccgccatgcct

SEQ ID NO: 28801 - DNA, 39 bp, unidentified
  source 1..39: mol_type = unassigned DNA; note = methanogen bacteria
gacaagataatacatcccgaattgattacagttcccgat

SEQ ID NO: 28802 - DNA, 30 bp, unidentified
  source 1..30: mol_type = unassigned DNA; note = methanogen bacteria
ccctatgtactttactccaatggtggggga

SEQ ID NO: 28803 - DNA, 96 bp, unidentified
  source 1..96: mol_type = unassigned DNA; note = methanogen bacteria
ttgagtttcaccaagggttggggcgcaaacccggacactttctttgcaaccacccttcttcaatcctcagagtcaatgtctggtttgacccatttc

SEQ ID NO: 28804 - DNA, 78 bp, unidentified
  source 1..78: mol_type = unassigned DNA; note = methanogen bacteria
ctgactttgcctggtgcttcaataggtcttgcagaacttttcaaccctgactggtcacttttgacacactttgaaata

SEQ ID NO: 28805 - DNA, 84 bp, unidentified
  source 1..84: mol_type = unassigned DNA; note = methanogen bacteria
catgtcacttcagtcaggaacagcggttgcagaccttgtaactcagggaacaggccttgtatttgtagtgtatcctaccgtatt

SEQ ID NO: 28806 - DNA, 48 bp, unidentified
  source 1..48: mol_type = unassigned DNA; note = methanogen bacteria
ggtcctattgaaattaaactcactgatagtgtggaaattgcagtaatg

SEQ ID NO: 28807 - DNA, 30 bp, unidentified
  source 1..30: mol_type = unassigned DNA; note = methanogen bacteria
ggtcagtcaatgcatttattgtttgaaatg

SEQ ID NO: 28808 - DNA, 123 bp, unidentified
  source 1..123: mol_type = unassigned DNA; note = methanogen bacteria
tctattttgccattgcatccttatgcttttgccatggcaagcggagttggtagtgcaagtatgaatgctgcttctttaggacctactcttgcggcgtttccggcattggaaacaaatatcgaa

SEQ ID NO: 28809 - DNA, 33 bp, unidentified
  source 1..33: mol_type = unassigned DNA; note = methanogen bacteria
tattctgcagacttatcgcttctttccaaattg

SEQ ID NO: 28810 - DNA, 51 bp, unidentified
  source 1..51: mol_type = unassigned DNA; note = methanogen bacteria
ggtttggtcgaccttcagtataaagtgtcaattgttgaggcagccatgcct

SEQ ID NO: 28811 - DNA, 33 bp, unidentified
  source 1..33: mol_type = unassigned DNA; note = methanogen bacteria
tattcttcggatttatcattaattcctaaattg

SEQ ID NO: 28812 - DNA, 51 bp, unidentified
  source 1..51: mol_type = unassigned DNA; note = methanogen bacteria
ttaggactttcagatcttcagtatacagttgcagttgttgaggccgcaatg

SEQ ID NO: 28813 - DNA, 39 bp, unidentified
  source 1..39: mol_type = unassigned DNA; note = methanogen bacteria
attaatattttaaatccaggacaaatcactgttccaaac

SEQ ID NO: 28814 - DNA, 33 bp, unidentified
  source 1..33: mol_type = unassigned DNA; note = methanogen bacteria
tatacggcagatttgaattccatttcaaatatg

SEQ ID NO: 28815 - DNA, 51 bp, unidentified
  source 1..51: mol_type = unassigned DNA; note = methanogen bacteria
ggacttgttaatcttgaacacacagtatctgtcattgaagccgcaatgccg

SEQ ID NO: 28816 - DNA, 33 bp, unidentified
  source 1..33: mol_type = unassigned DNA; note = methanogen bacteria
tattctgctgatttatcatcaatttctaaatta

SEQ ID NO: 28817 - DNA, 51 bp, unidentified
  source 1..51: mol_type = unassigned DNA; note = methanogen bacteria
gggttagttgatttacagtataatgtttccatagttgaagctgctatgcca

SEQ ID NO: 28818 - DNA, 30 bp, unidentified
  source 1..30: mol_type = unassigned DNA; note = methanogen bacteria
tcatcagatctaacattaattcctaaattg

SEQ ID NO: 28819 - DNA, 51 bp, unidentified
  source 1..51: mol_type = unassigned DNA; note = methanogen bacteria
ggtcttttgaatttggagtttacagtttctatagtggaggccgcaatgcct

SEQ ID NO: 28820 - DNA, 75 bp, unidentified
  source 1..75: mol_type = unassigned DNA; note = methanogen bacteria
agtgcaatatatggcagtgctgttattgataggattgtaaatggaggatatgagactttaaatacatctgactcc

SEQ ID NO: 28821 - DNA, 36 bp, unidentified
  source 1..36: mol_type = unassigned DNA; note = methanogen bacteria
acgggcaaagaatctggaagcagtacgcaagtttct

SEQ ID NO: 28822 - DNA, 33 bp, unidentified
  source 1..33: mol_type = unassigned DNA; note = methanogen bacteria
ttaggattaggttcactttcatcaacagtctct

SEQ ID NO: 28823 - DNA, 30 bp, unidentified
  source 1..30: mol_type = unassigned DNA; note = methanogen bacteria
accgctgacatatctttaattccaaaattg

SEQ ID NO: 28824 - DNA, 51 bp, unidentified
  source 1..51: mol_type = unassigned DNA; note = methanogen bacteria
gggcttgtggacttacagtatcaggtgtcaattgttgaggctgcaatgcct

SEQ ID NO: 28825 - DNA, 39 bp, unidentified
  source 1..39: mol_type = unassigned DNA; note = methanogen bacteria
gaaaaaatattgaatccttcattgataatcattccggaa

SEQ ID NO: 28826 - DNA, 45 bp, unidentified
  source 1..45: mol_type = unassigned DNA; note = methanogen bacteria
tcttttaaccagattacaacatttgtcaatgcagatatattagga

SEQ ID NO: 28827 - DNA, 33 bp, unidentified
  source 1..33: mol_type = unassigned DNA; note = methanogen bacteria
tattcggctgatttgtcgcttctttctaaattg

SEQ ID NO: 28828 - DNA, 54 bp, unidentified
  source 1..54: mol_type = unassigned DNA; note = methanogen bacteria
ataggtcttgttgaccttcagttcaagatttccgttgttgaggccgcaatgccg

SEQ ID NO: 28829 - DNA, 39 bp, unidentified
  source 1..39: mol_type = unassigned DNA; note = methanogen bacteria
tacagaataacccatccaaatatgattacctcaccagac

SEQ ID NO: 28830 - DNA, 33 bp, unidentified
  source 1..33: mol_type = unassigned DNA; note = methanogen bacteria
tactctgctgatttatcattaatctctaaactg

SEQ ID NO: 28831 - DNA, 51 bp, unidentified
  source 1..51: mol_type = unassigned DNA; note = methanogen bacteria
gggctggttgaccttcagtttaaaatttccattgttgaggccgcaatgccc

SEQ ID NO: 28832 - DNA, 33 bp, unidentified
  source 1..33: mol_type = unassigned DNA; note = methanogen bacteria
tatactgcagatttatcattaatgcctcaattg

SEQ ID NO: 28833 - DNA, 51 bp, unidentified
  source 1..51: mol_type = unassigned DNA; note = methanogen bacteria
gggcttgttgatcttcaatacagtgtctctattgttgaagctgcaatgccg

SEQ ID NO: 28834 - DNA, 36 bp, unidentified
  source 1..36: mol_type = unassigned DNA; note = methanogen bacteria
aaaatattatacccctcaacaataaccgttccggac

SEQ ID NO: 28835 - DNA, 33 bp, unidentified
  source 1..33: mol_type = unassigned DNA; note = methanogen bacteria
tataatgcagatttgtcattgattccgaaattg

SEQ ID NO: 28836 - DNA, 51 bp, unidentified
  source 1..51: mol_type = unassigned DNA; note = methanogen bacteria
ggtcttataaatcttgaatatagtgtatcaattgttgaagctgcaatgccg

SEQ ID NO: 28837 - DNA, 42 bp, unidentified
  source 1..42: mol_type = unassigned DNA; note = methanogen bacteria
catcataaacttgaacatccaaattctattgcagtgccagat

SEQ ID NO: 28838 - DNA, 99 bp, unidentified
  source 1..99: mol_type = unassigned DNA; note = methanogen bacteria
gcaccttcctttattcatgtaatcaaggcatttacgtttgaaaatattataaattacatagtgggtgcctggagggcccaatccatatttacatcatac

SEQ ID NO: 28839 - DNA, 42 bp, unidentified
  source 1..42: mol_type = unassigned DNA; note = methanogen bacteria
tgtttttcatcaacacaatcaattcactactttgacagatat

SEQ ID NO: 28840 - DNA, 57 bp, unidentified
  source 1..57: mol_type = unassigned DNA; note = methanogen bacteria
tttaaaataaatggaatggcctttaatattggaattttggaagcggctatgtcaact

SEQ ID NO: 28841 - DNA, 30 bp, unidentified
  source 1..30: mol_type = unassigned DNA; note = methanogen bacteria
attattgaagaaaatatcgaaccagtgtca

SEQ ID NO: 28842 - DNA, 39 bp, unidentified
  source 1..39: mol_type = unassigned DNA; note = methanogen bacteria
aattttggacagataacacacttcgttaacataaatatt

SEQ ID NO: 28843 - DNA, 33 bp, unidentified
  source 1..33: mol_type = unassigned DNA; note = methanogen bacteria
tattctgctgatttgtcattgcttcctaaactg

SEQ ID NO: 28844 - DNA, 51 bp, unidentified
  source 1..51: mol_type = unassigned DNA; note = methanogen bacteria
ggtttggtggatcttcagtataatgtttcaattattgaagctgcaatgcca

SEQ ID NO: 28845 - DNA, 36 bp, unidentified
  source 1..36: mol_type = unassigned DNA; note = methanogen bacteria
aagattttcttcggtgctccaatcacaactcccagt

SEQ ID NO: 28846 - DNA, 39 bp, unidentified
  source 1..39: mol_type = unassigned DNA; note = methanogen bacteria
gaaaaactactgaacccttcattgataaccgttcccgaa

SEQ ID NO: 28847 - DNA, 30 bp, unidentified
  source 1..30: mol_type = unassigned DNA; note = methanogen bacteria
actgctgatatatcattaattccaaaattg

SEQ ID NO: 28848 - DNA, 51 bp, unidentified
  source 1..51: mol_type = unassigned DNA; note = methanogen bacteria
ggcttggttaatctggaatatcagatatcggttgttgaggcggcaatgcct

SEQ ID NO: 28849 - DNA, 33 bp, unidentified
  source 1..33: mol_type = unassigned DNA; note = methanogen bacteria
tattccgctgatttgtctttactttccaaattg

SEQ ID NO: 28850 - DNA, 54 bp, unidentified
  source 1..54: mol_type = unassigned DNA; note = methanogen bacteria
atggggttaagtgatcttcagtttaccatttctgttgttgaggctgcaatgcca

SEQ ID NO: 28851 - DNA, 39 bp, unidentified
  source 1..39: mol_type = unassigned DNA; note = methanogen bacteria
gataaaatattgaatccaaaattaataaccgttcccgac

SEQ ID NO: 28852 - DNA, 33 bp, unidentified
  source 1..33: mol_type = unassigned DNA; note = methanogen bacteria
tatgctgcagatctatctcagattccaaagttg

SEQ ID NO: 28853 - DNA, 51 bp, unidentified
  source 1..51: mol_type = unassigned DNA; note = methanogen bacteria
ggtttggttaatcttgagcatagcgtcagcattgttgaggctgccatgcct

SEQ ID NO: 28854 - DNA, 39 bp, unidentified
  source 1..39: mol_type = unassigned DNA; note = methanogen bacteria
gataaaatactgcatccttcattaatcaccattccagac

SEQ ID NO: 28855 - DNA, 48 bp, unidentified
  source 1..48: mol_type = unassigned DNA; note = methanogen bacteria
ggtccgattaaaatcccaattaccagtggggtagaagtatccataatg

SEQ ID NO: 28856 - DNA, 30 bp, unidentified
  source 1..30: mol_type = unassigned DNA; note = methanogen bacteria
ggacaatcaatgcacctattgtttgaaatg

SEQ ID NO: 28857 - DNA, 123 bp, unidentified
  source 1..123: mol_type = unassigned DNA; note = methanogen bacteria
tcactaattccgttccacccatatgcattcgctatggcaagtggagtgggcagtgcaagtatgaatgcggcttccttaggacctactcttgcggcatttccaggattggaaacccaaatcgag

SEQ ID NO: 28858 - DNA, 42 bp, unidentified
  source 1..42: mol_type = unassigned DNA; note = methanogen bacteria
aatttcactcaaataacaaacttcgtttacttgaatacaatt

SEQ ID NO: 28859 - DNA, 33 bp, unidentified
  source 1..33: mol_type = unassigned DNA; note = methanogen bacteria
tataatgctgatgtttccttgcttccaagatta

SEQ ID NO: 28860 - DNA, 57 bp, unidentified
  source 1..57: mol_type = unassigned DNA; note = methanogen bacteria
cttcacattacaggattcaatcacactatcggattcattgaagctacaatgtcttca

SEQ ID NO: 28861 - DNA, 33 bp, unidentified
  source 1..33: mol_type = unassigned DNA; note = methanogen bacteria
tattcggcagatttatccttgattaatcaactg

SEQ ID NO: 28862 - DNA, 51 bp, unidentified
  source 1..51: mol_type = unassigned DNA; note = methanogen bacteria
ggccttgttgatttacaatataatgtttctataattgaagccgccatgcct

SEQ ID NO: 28863 - DNA, 39 bp, unidentified
  source 1..39: mol_type = unassigned DNA; note = methanogen bacteria
gacaagatattccatcctaatctgataacaatacctgat

SEQ ID NO: 28864 - DNA, 39 bp, unidentified
  source 1..39: mol_type = unassigned DNA; note = methanogen bacteria
gataaaatattaaatcccgaattaataactgttcccgat

SEQ ID NO: 28865 - DNA, 99 bp, unidentified
  source 1..99: mol_type = unassigned DNA; note = methanogen bacteria
attgacccagcatttacgtcaatatttgattccttttggtataatattgttacattaactggtgttggatatggggatattactccaatttcatatcct

SEQ ID NO: 28866 - DNA, 57 bp, unidentified
  source 1..57: mol_type = unassigned DNA; note = methanogen bacteria
gcaattggaattataccttatgatatattctatggtttagagtcaattactaattgg

SEQ ID NO: 28867 - DNA, 42 bp, unidentified
  source 1..42: mol_type = unassigned DNA; note = methanogen bacteria
gatacaagtacacaagcttcactgttattctcattatttgca

SEQ ID NO: 28868 - DNA, 33 bp, unidentified
  source 1..33: mol_type = unassigned DNA; note = methanogen bacteria
tattctgcagatttgtcgcttattccagtttta

SEQ ID NO: 28869 - DNA, 54 bp, unidentified
  source 1..54: mol_type = unassigned DNA; note = methanogen bacteria
tttggtcttgttgatttgcaatatagtgtatcgattgttgaagctgcaatgcct

SEQ ID NO: 28870 - DNA, 30 bp, unidentified
  source 1..30: mol_type = unassigned DNA; note = methanogen bacteria
tcagctgatttatcactaatttctaagtta

SEQ ID NO: 28871 - DNA, 54 bp, unidentified
  source 1..54: mol_type = unassigned DNA; note = methanogen bacteria
attgggtttacaaatcttgaatttaatgtttctattattgaggctgcaatgcct

SEQ ID NO: 28872 - DNA, 33 bp, unidentified
  source 1..33: mol_type = unassigned DNA; note = methanogen bacteria
tattccgctgacctgtcaatgctctccaagctg

SEQ ID NO: 28873 - DNA, 54 bp, unidentified
  source 1..54: mol_type = unassigned DNA; note = methanogen bacteria
ataggtttggttgacctgcagtatacaatatcaatcgtcgaagctgcaatgcct

SEQ ID NO: 28874 - DNA, 60 bp, unidentified
  source 1..60: mol_type = unassigned DNA; note = methanogen bacteria
ttcatcgccctggccccttcggaggcccataccctcaacgagggcaccgaccccgtgggt

SEQ ID NO: 28875 - DNA, 63 bp, unidentified
  source 1..63: mol_type = unassigned DNA; note = methanogen bacteria
gtgggggagccgatcagcgagagcttcctcagcaagtacagcacctatgcagtgatggcgctc

SEQ ID NO: 28876 - DNA, 30 bp, unidentified
  source 1..30: mol_type = unassigned DNA; note = methanogen bacteria
actgccgatttatcgtatctgtcaaaattg

SEQ ID NO: 28877 - DNA, 51 bp, unidentified
  source 1..51: mol_type = unassigned DNA; note = methanogen bacteria
ggtctggtagatcttcagttcaaaatttccattattgaggccgcaatgcca

SEQ ID NO: 28878 - DNA, 39 bp, unidentified
  source 1..39: mol_type = unassigned DNA; note = methanogen bacteria
gaaaaaatactgcatcctgaattgatagtcataccaagc

SEQ ID NO: 28879 - DNA, 30 bp, unidentified
  source 1..30: mol_type = unassigned DNA; note = methanogen bacteria
tatgctgccaagacttccttgtttgcaagt

SEQ ID NO: 28880 - DNA, 51 bp, unidentified
  source 1..51: mol_type = unassigned DNA; note = methanogen bacteria
ggcataacaggattgaatcatactatcggacttatcgaggcggcaatgtct

SEQ ID NO: 28881 - DNA, 33 bp, unidentified
  source 1..33: mol_type = unassigned DNA; note = methanogen bacteria
tattcggctgatttatcaatgctttcgaaattg

SEQ ID NO: 28882 - DNA, 51 bp, unidentified
  source 1..51: mol_type = unassigned DNA; note = methanogen bacteria
ggactggttgaccttcagtttaaaatttcagttgttgaggccgccatgcct

SEQ ID NO: 28883 - DNA, 54 bp, unidentified
  source 1..54: mol_type = unassigned DNA; note = methanogen bacteria
gtggaagcgccgtctcagttccatactctgtatgagggctcggaacctcccgga

SEQ ID NO: 28884 - DNA, 54 bp, unidentified
  source 1..54: mol_type = unassigned DNA; note = methanogen bacteria
atcggcgaggagatcactcagagcttcctcgatgagtacagcacctatgccatg

SEQ ID NO: 28885 - DNA, 33 bp, unidentified
  source 1..33: mol_type = unassigned DNA; note = methanogen bacteria
tatagtgctgatttatcattattgcccagtttg

SEQ ID NO: 28886 - DNA, 51 bp, unidentified
  source 1..51: mol_type = unassigned DNA; note = methanogen bacteria
ggtttagttaatctggagtttaatgttacagttattgaagctgcaatgcct

SEQ ID NO: 28887 - DNA, 33 bp, unidentified
  source 1..33: mol_type = unassigned DNA; note = methanogen bacteria
tattccgctgatttatcattgatttcaaaattg

SEQ ID NO: 28888 - DNA, 54 bp, unidentified
  source 1..54: mol_type = unassigned DNA; note = methanogen bacteria
ctgggattaatcgatcttcagtttaagatttccatagttgaggccgccatgcct

SEQ ID NO: 28889 - DNA, 39 bp, unidentified
  source 1..39: mol_type = unassigned DNA; note = methanogen bacteria
gataaactgatacacccaggattgattagagttccagac

SEQ ID NO: 28890 - DNA, 42 bp, unidentified
  source 1..42: mol_type = unassigned DNA; note = methanogen bacteria
cagaaaattcctttaactggtgatgttgctatcactatcatg

SEQ ID NO: 28891 - DNA, 30 bp, unidentified
  source 1..30: mol_type = unassigned DNA; note = methanogen bacteria
ggccaatccatttctttgatttttgatatg

SEQ ID NO: 28892 - DNA, 123 bp, unidentified
  source 1..123: mol_type = unassigned DNA; note = methanogen bacteria
tctttcctgccgttgcacccttatgcatttgctatggccagtggtgtaggaagtgccagtatgaatgcggctgctatcggtccgactcttgcggcatttccaggtttggaatcccaaatagaa

SEQ ID NO: 28893 - DNA, 33 bp, unidentified
  source 1..33: mol_type = unassigned DNA; note = methanogen bacteria
tactcatcagatttatcattgattccaaaatta

SEQ ID NO: 28894 - DNA, 51 bp, unidentified
  source 1..51: mol_type = unassigned DNA; note = methanogen bacteria
ggtcttgtggatttgcagtacacagtcactgttattgaggcggcaatgcca

SEQ ID NO: 28895 - DNA, 54 bp, unidentified
  source 1..54: mol_type = unassigned DNA; note = methanogen bacteria
ttcaagatatcaggtatggcttttaacattgcaattcttgaagcaggaatgtca

SEQ ID NO: 28896 - DNA, 33 bp, unidentified
  source 1..33: mol_type = unassigned DNA; note = methanogen bacteria
tattctgagaatatgtctcttttaccagtactg

SEQ ID NO: 28897 - DNA, 51 bp, unidentified
  source 1..51: mol_type = unassigned DNA; note = methanogen bacteria
ggattaacaggttttaatagtacaattgctcttgtagaatctgccatgcct

SEQ ID NO: 28898 - DNA, 33 bp, unidentified
  source 1..33: mol_type = unassigned DNA; note = methanogen bacteria
tataatgctgatttatcacttattccaaaaata

SEQ ID NO: 28899 - DNA, 54 bp, unidentified
  source 1..54: mol_type = unassigned DNA; note = methanogen bacteria
ataaatttaggaactttagaagaaactattgctatttgtgaagctgcaatgccc

SEQ ID NO: 28900 - DNA, 39 bp, unidentified
  source 1..39: mol_type = unassigned DNA; note = methanogen bacteria
gataaacttttaaatccaaatttaatcactactccagat

SEQ ID NO: 28901 - DNA, 42 bp, unidentified
  source 1..42: mol_type = unassigned DNA; note = methanogen bacteria
catcataaacttaaacatcctcattctattgtagtaccggat

SEQ ID NO: 28902 - DNA, 54 bp, unidentified
  source 1..54: mol_type = unassigned DNA; note = methanogen bacteria
ttgaatataggtggaacggctttgaatatagctgttcttgaagcaggaatgtca

SEQ ID NO: 28903 - DNA, 33 bp, unidentified
  source 1..33: mol_type = unassigned DNA; note = methanogen bacteria
ggttccacggttatgggtgatgtgatatcctcg

SEQ ID NO: 28904 - DNA, 36 bp, unidentified
  source 1..36: mol_type = unassigned DNA; note = methanogen bacteria
tcagctatagcaatcgcattcggaatgagcgaaaca

SEQ ID NO: 28905 - DNA, 54 bp, unidentified
  source 1..54: mol_type = unassigned DNA; note = methanogen bacteria
tttaagatatctggtatggcatttaatattgcaattcttgaagcaggtatgtca

SEQ ID NO: 28906 - DNA, 189 bp, unidentified
  source 1..189: mol_type = unassigned DNA; note = methanogen bacteria
ggtaatggagcaataattaaaaccagttccgatgatagagatgagaacacatgggttaaaatggaaaatgatggcataacattctcagcaaataacttgactgtcactggattcaatactggattagaaaacatggcaggaacctgcatatttaaccgtgtaacatttaaagacaatcaaaaggattac

SEQ ID NO: 28907 - DNA, 258 bp, unidentified
  source 1..258: mol_type = unassigned DNA; note = methanogen bacteria
ggtattaccatgtgctataactgtcattttgaaaacaatgaagcaaagcatggaggcgcaatcttcaaccaaggatatttgcatttggataattgttcatttgtaaacaacgatgcagaaaacggtgaaggtgatgacatctgcattggagacaatggagaattaatatatgatggtcaaaacatcccatcaaatataagcaacaatgaactccatgttaccgttgctaaaagtatgtctcttgcagaaactacttta

SEQ ID NO: 28908 - DNA, 78 bp, unidentified
  source 1..78: mol_type = unassigned DNA; note = methanogen bacteria
tattatctttatgggtatctgtttaacgattggagcctttttacaatagctgatggtttattgctattttgcgtagac

SEQ ID NO: 28909 - DNA, 78 bp, unidentified
  source 1..78: mol_type = unassigned DNA; note = methanogen bacteria
tacactgactttggagtccccgtactgaatctattcttcggttacttcataggaactaaaggaggatttacagcattc

SEQ ID NO: 28910 - DNA, 48 bp, unidentified
  source 1..48: mol_type = unassigned DNA; note = methanogen bacteria
atagaaaacggattccttacagacattcaccaatattacttcatgaca

SEQ ID NO: 28911 - DNA, 36 bp, unidentified
  source 1..36: mol_type = unassigned DNA; note = methanogen bacteria
atcggcaataattcggaaatagtgggcaatatcaat

SEQ ID NO: 28912 - DNA, 72 bp, unidentified
  source 1..72: mol_type = unassigned DNA; note = methanogen bacteria
gcacttatcggaacagcaatccaaagcgacattgcaaatccgattcagaacctgataaactcatcagacata

SEQ ID NO: 28913 - DNA, 54 bp, unidentified
  source 1..54: mol_type = unassigned DNA; note = methanogen bacteria
ttcgtgattgaaagcgcagatgcactcactcagggagcctatacctcattcgac

SEQ ID NO: 28914 - DNA, 57 bp, unidentified
  source 1..57: mol_type = unassigned DNA; note = methanogen bacteria
gcgctgatgtggacatcatcaagcaaaagattttatcaggtagctacactgtcacct

SEQ ID NO: 28915 - DNA, 42 bp, unidentified
  source 1..42: mol_type = unassigned DNA; note = methanogen bacteria
aaagacaaactccttgatccaagtttaatacatgtccctaca

SEQ ID NO: 28916 - DNA, 54 bp, unidentified
  source 1..54: mol_type = unassigned DNA; note = methanogen bacteria
ttaaatgttacaggattaatatttaaagttgctgtattagaatcaggtatgtct

SEQ ID NO: 28917 - DNA, 39 bp, unidentified
  source 1..39: mol_type = unassigned DNA; note = methanogen bacteria
gaaaaactaatgaatcctgcattaataaccagcccagat

SEQ ID NO: 28918 - DNA, 33 bp, unidentified
  source 1..33: mol_type = unassigned DNA; note = methanogen bacteria
gggtccactgtccttggtgatgtgatatcttcg

SEQ ID NO: 28919 - DNA, 33 bp, unidentified
  source 1..33: mol_type = unassigned DNA; note = methanogen bacteria
ttcttaaatccggatttaattacagtgccaagt

SEQ ID NO: 28920 - DNA, 54 bp, unidentified
  source 1..54: mol_type = unassigned DNA; note = methanogen bacteria
attggatttggcggtttaagtttcaaagttgcagttttggaggcaggaatgact

SEQ ID NO: 28921 - DNA, 51 bp, unidentified
  source 1..51: mol_type = unassigned DNA; note = methanogen bacteria
attggatgtggtggattgttgttacaggtatccgttctggagtctgcaatg

SEQ ID NO: 28922 - DNA, 30 bp, unidentified
  source 1..30: mol_type = unassigned DNA; note = methanogen bacteria
tcgacggttatgggtgatgtgatatcctca

SEQ ID NO: 28923 - DNA, 66 bp, unidentified
  source 1..66: mol_type = unassigned DNA; note = methanogen bacteria
gagagtggactgttaccttatggatttgtaaatttctatatgattattcagaatttagtaaataat

SEQ ID NO: 28924 - DNA, 51 bp, unidentified
  source 1..51: mol_type = unassigned DNA; note = methanogen bacteria
gttgatgcgggcaatgttataacaaatctctatgatgtagtattcagatac

SEQ ID NO: 28925 - DNA, 36 bp, unidentified
  source 1..36: mol_type = unassigned DNA; note = methanogen bacteria
aaaattataaacccaaacttaattaccgttccagat

SEQ ID NO: 28926 - DNA, 45 bp, unidentified
  source 1..45: mol_type = unassigned DNA; note = methanogen bacteria
acaatcaggattccaattactaaagatgttgccatcacaataatg

SEQ ID NO: 28927 - DNA, 30 bp, unidentified
  source 1..30: mol_type = unassigned DNA; note = methanogen bacteria
ggccagtcaataagcttgatttttgaaatg

SEQ ID NO: 28928 - DNA, 123 bp, unidentified
  source 1..123: mol_type = unassigned DNA; note = methanogen bacteria
tccttcatacctctgcatccatatgcatatgctatggcaagtggtgtgggcagtgccagtatgaatgcggcagctattggaccaacccttgcggcatttcctggtttggaaacacaaatcgaa

SEQ ID NO: 28929 - DNA, 57 bp, unidentified
  source 1..57: mol_type = unassigned DNA; note = methanogen bacteria
gcattgcctgagacagcaatagcgaatcatatagatttcaccaattttatcatatcc

SEQ ID NO: 28930 - DNA, 39 bp, unidentified
  source 1..39: mol_type = unassigned DNA; note = methanogen bacteria
gataggctattctttggcggaaccttagcagtgcctggc

SEQ ID NO: 28931 - DNA, 30 bp, unidentified
  source 1..30: mol_type = unassigned DNA; note = methanogen bacteria
taccttgatgggggttcaactgtcttctct

SEQ ID NO: 28932 - DNA, 45 bp, unidentified
  source 1..45: mol_type = unassigned DNA; note = methanogen bacteria
gactggggaatatttgcagaatatctaactacaaacagctcattc

SEQ ID NO: 28933 - DNA, 42 bp, unidentified
  source 1..42: mol_type = unassigned DNA; note = methanogen bacteria
atcaccattccaatcgcaaaggacgtggaaatcacgataatg

SEQ ID NO: 28934 - DNA, 30 bp, unidentified
  source 1..30: mol_type = unassigned DNA; note = methanogen bacteria
ggacaatccataagcctcatctttgacatg

SEQ ID NO: 28935 - DNA, 123 bp, unidentified
  source 1..123: mol_type = unassigned DNA; note = methanogen bacteria
tcattcctgccgctgcacccatatgcgttcgcaatggctagtggagtgggcagcgcaagcatgaatgcagctgccataggacctaccttggcggcatttccgggaatggagactcaaatcgag

SEQ ID NO: 28936 - DNA, 54 bp, unidentified
  source 1..54: mol_type = unassigned DNA; note = methanogen bacteria
ggaatctattcatcattcatgatgaatcttggaagggcgagtacgacatgccag

SEQ ID NO: 28937 - DNA, 30 bp, unidentified; identical to SEQ ID NO: 28488
  source 1..30: mol_type = unassigned DNA; note = methanogen bacteria

SEQ ID NO: 28938 - DNA, 51 bp, unidentified; identical to SEQ ID NO: 28798
  source 1..51: mol_type = unassigned DNA; note = methanogen bacteria

SEQ ID NO: 28939 - DNA, 30 bp, unidentified
  source 1..30: mol_type = unassigned DNA; note = methanogen bacteria
cttggtggagcagaaattgaatttcatacg

SEQ ID NO: 28940 - DNA, 123 bp, unidentified
  source 1..123: mol_type = unassigned DNA; note = methanogen bacteria
atgaaaaaatatattaatcttataaatgattattttgatataaattatatgaggaaaaatatggttgtagagtatatttcgccaatctttgatgggataatggatatttttactcaaggagga

SEQ ID NO: 28941 - DNA, 48 bp, unidentified
  source 1..48: mol_type = unassigned DNA; note = methanogen bacteria
ttcaagtctttaggtgttaatcctaattcagccgcaatggctgaaggt

SEQ ID NO: 28942 - DNA, 60 bp, unidentified
  source 1..60: mol_type = unassigned DNA; note = methanogen bacteria
actcataatcaaacttttgcacaattcatccatttaaaagatattttctattatttagga

SEQ ID NO: 28943 - DNA, 36 bp, unidentified
  source 1..36: mol_type = unassigned DNA; note = methanogen bacteria
gatagattcaatggtgttggaattccaagtgtaaca

SEQ ID NO: 28944 - DNA, 36 bp, unidentified
  source 1..36: mol_type = unassigned DNA; note = methanogen bacteria
tatgagtatatgttgactgctcttcatgagatgcat

SEQ ID NO: 28945 - DNA, 33 bp, unidentified
  source 1..33: mol_type = unassigned DNA; note = methanogen bacteria
catattgcgtccagtatttcatttaatttttca

SEQ ID NO: 28946 - DNA, 36 bp, unidentified
  source 1..36: mol_type = unassigned DNA; note = methanogen bacteria
ggccaatacaaatataatggatttgatttatcttca

SEQ ID NO: 28947 - DNA, 93 bp, unidentified
  source 1..93: mol_type = unassigned DNA; note = methanogen bacteria
tttggatttaatgtaagtggtactgttacaccatcattgttaaaatttagtcagacaagttcaaatttaattggtggtggggaatttggacct

SEQ ID NO: 28948 - DNA, 69 bp, unidentified
  source 1..69: mol_type = unassigned DNA; note = methanogen bacteria
tttaatggtagctttacattaaataattttttaagtatattatttgttaaaccattatcaacttcacat

SEQ ID NO: 28949 - DNA, 51 bp, unidentified
  source 1..51: mol_type = unassigned DNA; note = methanogen bacteria
actactagtaatcatggttttggttttccaccagcgaaattcttattaaat

SEQ ID NO: 28950 - DNA, 42 bp, unidentified
  source 1..42: mol_type = unassigned DNA; note = methanogen bacteria
gaaaaaggacatttgttctaccaatttactgttggtaaggca

SEQ ID NO: 28951 - DNA, 33 bp, unidentified
  source 1..33: mol_type = unassigned DNA; note = methanogen bacteria
ggatcaactgttatgggagacataatatcttca

SEQ ID NO: 28952 - DNA, 45 bp, unidentified
  source 1..45: mol_type = unassigned DNA; note = methanogen bacteria
accatcaaaatcccaatcaccaaagatgttgcaatcaccataatg

SEQ ID NO: 28953 - DNA, 30 bp, unidentified
  source 1..30: mol_type = unassigned DNA; note = methanogen bacteria
ggtcaatccatcggtttgatttttaaaatg

SEQ ID NO: 28954 - DNA, 123 bp, unidentified
  source 1..123: mol_type = unassigned DNA; note = methanogen bacteria
tcattccttccactgcatccgtacgcatttgcaatggcaagtggggtgggaagtgcaagtatgaacgctgcggcaataggtccgacccttgcggcatttccaggattggaaactcagattgag

SEQ ID NO: 28955 - DNA, 63 bp, unidentified
  source 1..63: mol_type = unassigned DNA; note = methanogen bacteria
ttatataattattttggtggaaaattatttacagatttaattaaattagttaaaccagaacca

SEQ ID NO: 28956 - DNA, 45 bp, unidentified
  source 1..45: mol_type = unassigned DNA; note = methanogen bacteria
cctattgaaattgaacttactaaaggtatgaccgtttcaatcatg

SEQ ID NO: 28957 - DNA, 30 bp, unidentified
  source 1..30: mol_type = unassigned DNA; note = methanogen bacteria
ggacagtcaatgcacctgttgtttgaaatg

SEQ ID NO: 28958 - DNA, 123 bp, unidentified
  source 1..123: mol_type = unassigned DNA; note = methanogen bacteria
tccgttttgcctctgcatccattcgcttttgcaatggcaagtggagtgggaagcgcaagcatgaatgctgcttcaatcggtccaactttggcggcatttcctgcattggaaactcagattgaa

SEQ ID NO: 28959 - DNA, 36 bp, unidentified
  source 1..36: mol_type = unassigned DNA; note = methanogen bacteria
cagatatttttcaaccagactttaactgttccggat

SEQ ID NO: 28960 - DNA, 30 bp, unidentified
  source 1..30: mol_type = unassigned DNA; note = methanogen bacteria
ttggaaacaagcctctcaagcattccgaca

SEQ ID NO: 28961 - DNA, 45 bp, unidentified
  source 1..45: mol_type = unassigned DNA; note = methanogen bacteria
acaagttttaaccaggtttcaacatttgttgcaatcaatcctaca

SEQ ID NO: 28962 - DNA, 36 bp, unidentified
  source 1..36: mol_type = unassigned DNA; note = methanogen bacteria
ggacaatacaagttcaacggatttggttcttcatcc

SEQ ID NO: 28963 - DNA, 96 bp, unidentified
  source 1..96: mol_type = unassigned DNA; note = methanogen bacteria
ttcggatttgctgtaagtggaaaaactgcttatcccacgatattgtcatttagccagaaaaatttttcgattttaggcggaggttcatttggaccc

SEQ ID NO: 28964 - DNA, 114 bp, unidentified
  source 1..114: mol_type = unassigned DNA; note = methanogen bacteria
atgtataatctattattctcttattcatgggaagtttcatttatagtatttttacaaacatttatgaaaggatttgtattgagttttttcaaatttttatctgattttgccaca

SEQ ID NO: 28965 - DNA, 132 bp, unidentified
  source 1..132: mol_type = unassigned DNA; note = methanogen bacteria
ggatttgttggacgtatgagaccgtatgctacgcatacacagattaaatgtttacatcctcctgcacctgatgttagtataaatgatccaactgcacgtggtttctcttttccgagtggtgatgcttcagca

SEQ ID NO: 28966 - DNA, 36 bp, unidentified
  source 1..36: mol_type = unassigned DNA; note = methanogen bacteria
agcgcaggatttgcattctcctatcagatgttttcc

SEQ ID NO: 28967 - DNA, 72 bp, unidentified
  source 1..72: mol_type = unassigned DNA; note = methanogen bacteria
aactcaaataagtatgatgtaaatttcaacaggcttaaaatggcattgacatgtattgtaggatcagttgta

SEQ ID NO: 28968 - DNA, 105 bp, unidentified
  source 1..105: mol_type = unassigned DNA; note = methanogen bacteria
gatatggcttgggaaatggcaaattctcctactatacctattgacaatattatagataggccctcagattattgtcattatgaattgctttcatttacacatgat

SEQ ID NO: 28969 - DNA, 45 bp, unidentified
  source 1..45: mol_type = unassigned DNA; note = methanogen bacteria
acaattaaaattcctctgactaaagatgttgctattactataatg

SEQ ID NO: 28970 - DNA, 30 bp, unidentified
  source 1..30: mol_type = unassigned DNA; note = methanogen bacteria
ggtcaatcaatcagtttaatttttactatg

SEQ ID NO: 28971 - DNA, 123 bp, unidentified
  source 1..123: mol_type = unassigned DNA; note = methanogen bacteria
tcattcctgccgctgcatccatatgcatttgcaatggctagtggtgttggaagtgcaagtatgaatgcggcagctattggacctactcttgcagcatttcctggattggaaactcaaattgaa

SEQ ID NO: 28972 - DNA, 42 bp, unidentified
  source 1..42: mol_type = unassigned DNA; note = methanogen bacteria
agcagtttcagtcaaatcagcagtttcatcactatcagtccc

SEQ ID NO: 28973 - DNA, 33 bp, unidentified
  source 1..33: mol_type = unassigned DNA; note = methanogen bacteria
ggttccactgtaatgggagacgttatttcttca

SEQ ID NO: 28974 - DNA, 42 bp, unidentified
  source 1..42: mol_type = unassigned DNA; note = methanogen bacteria
ataacaattcctgtcacaaaagatgttgccataaccatcatg

SEQ ID NO: 28975 - DNA, 30 bp, unidentified
  source 1..30: mol_type = unassigned DNA; note = methanogen bacteria
ggtcagtcaataagtctgatttttgaaatg

SEQ ID NO: 28976 - DNA, 123 bp, unidentified
  source 1..123: mol_type = unassigned DNA; note = methanogen bacteria
tccttcctgcctctgcatccatatgcgtatgctatggccagtggtgtcggtagtgccagtatgaatgcagcagctatcggaccgactttggctgcatttcctggtttggagactcaaattgaa

SEQ ID NO: 28977 - DNA, 42 bp, unidentified
  source 1..42: mol_type = unassigned DNA; note = methanogen bacteria
accgacttcaatcaaatcggcaatttcgtaggcatagatccc

SEQ ID NO: 28978 - DNA, 45 bp, unidentified
  source 1..45: mol_type = unassigned DNA; note = methanogen bacteria
ccgattgaaattgagattgcaaaaggggtgaccgtttcaataatg

SEQ ID NO: 28979 - DNA, 30 bp, unidentified
  source 1..30: mol_type = unassigned DNA; note = methanogen bacteria
ggtcagtcaatgcatcttctctttgaaatg

SEQ ID NO: 28980 - DNA, 123 bp, unidentified
  source 1..123: mol_type = unassigned DNA; note = methanogen bacteria
tccatattgccgctgcatccttatgcgtttgcaatggcaagtggtgttggaagtgcaagtatgaacgctgcggcaatcgggccgacccttgcggcatttccaggatttgaaactcaaatcgag

SEQ ID NO: 28981 - DNA, 33 bp, unidentified; identical to SEQ ID NO: 23501
  source 1..33: mol_type = unassigned DNA; note = methanogen bacteria

SEQ ID NO: 28982 - DNA, 54 bp, unidentified
  source 1..54: mol_type = unassigned DNA; note = methanogen bacteria
aaggatattctacttggaatgggtgcaggaagcacaattgattatgcaatggat

SEQ ID NO: 28983 - DNA, 54 bp, unidentified
  source 1..54: mol_type = unassigned DNA; note = methanogen bacteria
gttgttgtggcttcaactgatgctgttgcagtatattcacattgcaatagctac

SEQ ID NO: 28984 - DNA, 210 bp, unidentified
  source 1..210: mol_type = unassigned DNA; note = methanogen bacteria
atgattcaattatctccgatagatcccgtcagagcctatttaggccagagaattgtaagtcaggaacaactggccatcataggcaggtactggggaacagatttgtctttaactgaaagggtattcggatggcttcagactctggccagcggaagtatgggtttttcattaatctatagagtacctgtaactgaagttattgttcagaaa

SEQ ID NO: 28985 - DNA, 90 bp, unidentified
  source 1..90: mol_type = unassigned DNA; note = methanogen bacteria
tcagtgtatttgggatggttccctataggactttcagtgccaatcggacagctgtctgatacggtcacattctggcaatggctgcacagg

SEQ ID NO: 28986 - DNA, 72 bp, unidentified
  source 1..72: mol_type = unassigned DNA; note = methanogen bacteria
gaacaggtatttgcatatcccggtatcggtcaggcaactgttgcagcaggtttaagatccgatgttccattg

SEQ ID NO: 28987 - DNA, 30 bp, unidentified; identical to SEQ ID NO: 28922
  source 1..30: mol_type = unassigned DNA; note = methanogen bacteria

SEQ ID NO: 28988 - DNA, 45 bp, unidentified
  source 1..45: mol_type = unassigned DNA; note = methanogen bacteria
cctattgatattaaactcagtaaagatgtgactgtttctattatg

SEQ ID NO: 28989 - DNA, 30 bp, unidentified
  source 1..30: mol_type = unassigned DNA; note = methanogen bacteria
ggtcagtcaatggatttgttgtttaagatg

SEQ ID NO: 28990 - DNA, 123 bp, unidentified
  source 1..123: mol_type = unassigned DNA; note = methanogen bacteria
tcaattttgcctttacatccttttgcctttgcaatggcaagtggggtgggtagtgcaagtatgaatgctgcggcattaggtccgactcttgcggcatttccgggattggaaactcaagttgaa

SEQ ID NO: 28991 - DNA, 150 bp, unidentified
  source 1..150: mol_type = unassigned DNA; note = methanogen bacteria
ggtaatccattgtatggtacagcagattctgtacgtaaagaaactgcaatgaatattggtaaaatgattagggacggttatccagcaaccactatattatcagaggcaatgggtcaagtggctaatgaatctggtgaaaaatacggtggt

SEQ ID NO: 28992 - DNA, 63 bp, unidentified
  source 1..63: mol_type = unassigned DNA; note = methanogen bacteria
aatctagtttctggaatttcaactgaagacatgtttactcctcaggaaatgaatcaaacgggt

SEQ ID NO: 28993 - DNA, 33 bp, unidentified
  source 1..33: mol_type = unassigned DNA; note = methanogen bacteria
gaattaaaaacaatatatgcatatcatctgaaa

SEQ ID NO: 28994 - DNA, 114 bp, unidentified
  source 1..114: mol_type = unassigned DNA; note = methanogen bacteria
atgtttgaaacagttttttattttccgtgggaagtttctttgataatatttctacaaagtactcttccaggtttcgtattaggtttctttgaagttattgcagaggtggtctct

SEQ ID NO: 28995 - DNA, 129 bp, unidentified
  source 1..129: mol_type = unassigned DNA; note = methanogen bacteria
gtgacagttgcacgtttaaggccatatgccgctgttgatacaatcaagtgcattcgtgccgatgtggctgaccagaatcctcttgactttaaaatccagggatattcgtttccaagcggacatacgatg

SEQ ID NO: 28996 - DNA, 114 bp, unidentified
  source 1..114: mol_type = unassigned DNA; note = methanogen bacteria
atgattgaaacagttttttattttccatgggaggttcaactgatactattcctgcagagttcccttccgagtttcgtattagggttttttgaaattatagcgaatgtcgtttcc

SEQ ID NO: 28997 - DNA, 129 bp, unidentified
  source 1..129: mol_type = unassigned DNA; note = methanogen bacteria
atgactgtcgcacgcttaaggccatatgccgttgtggataaggtcaagtgtatttatgccaatgtgcccgatcaaaatcctttggactttaagattcagggatattcatttccaagcggtcattcgatg

SEQ ID NO: 28998 - DNA, 60 bp, unidentified
  source 1..60: mol_type = unassigned DNA; note = methanogen bacteria
ttcccggaactctttagcaattctcttttgtacgacccaaattcaagtcccggtttggaa

SEQ ID NO: 28999 - DNA, 30 bp, unidentified
  source 1..30: mol_type = unassigned DNA; note = methanogen bacteria
tttggtgtggaattcgacaataaattcaca

SEQ ID NO: 29000 - DNA, 39 bp, unidentified
  source 1..39: mol_type = unassigned DNA; note = methanogen bacteria
ggattaacagctactgaactttcaaataatattacaatt

SEQ ID NO: 29001 - DNA, 114 bp, unidentified
  source 1..114: mol_type = unassigned DNA; note = methanogen bacteria
atgattggaacagttttttatttcccatgggaagtttctctgatattattcctacaaagttcgcttccggattttgcatttgggttttttaaagttattgcagaggtcgtttct

SEQ ID NO: 29002 - DNA, 129 bp, unidentified
  source 1..129: mol_type = unassigned DNA; note = methanogen bacteria
gtgagtgttgcacgtttaaggccatatgctgttgtggataaaatcaagtgtctttatcccaattcgcctggtcagaatcctatggactttaaaatccagggatattcccttccaagcggacattctatg

SEQ ID NO: 29003 - DNA, 36 bp, unidentified
  source 1..36: mol_type = unassigned DNA; note = methanogen bacteria
ttaggtacttctggcccattacacgtattcccatta

SEQ ID NO: 29004 - DNA, 30 bp, unidentified
  source 1..30: mol_type = unassigned DNA; note = methanogen bacteria
aacaaagcaactaatggtggtgcagtttac

SEQ ID NO: 29005 - DNA, 288 bp, unidentified
  source 1..288: mol_type = unassigned DNA; note = methanogen bacteria
gaagatggtagtaaagtgacaaattgtagttttactggcaataaagcagttattggctctgcaatttatttctataaatttcttcctacagatacattaactatttctaattctattttcttaaataacagggcaaatgcaaaagatttacaagtaactagaaatgaaaagattattacaattactttcacaggccagaataaccttttaaatgcaatctattcaagagatgatgctgaagttacatttaccaatgtgacctattggggtgcaaatggaatcagcaac

SEQ ID NO: 29006 - DNA, 114 bp, unidentified
  source 1..114: mol_type = unassigned DNA; note = methanogen bacteria
atgttagaaactgtattttattttccatgggaagttaatctgatattattcatgcaaagttcctttccaggttttgtatttagattctttgaaattatagcaagtgttgtttct

SEQ ID NO: 29007 - DNA, 129 bp, unidentified
  source 1..129: mol_type = unassigned DNA; note = methanogen bacteria
gtaactgttgcacgtttaagaccatatgctgttgtggataagatcaagtgtattcatccaaatgtgcctggggagaatcccttaaactttaaaattcagggatattcattacctagtggacattcaatg

SEQ ID NO: 29008 - DNA, 63 bp, unidentified
  source 1..63: mol_type = unassigned DNA; note = methanogen bacteria
ttcccggaactcttcagcagttctcttttgtacaatccaaattcaagtccggggttggaaact

SEQ ID NO: 29009 - DNA, 30 bp, unidentified
  source 1..30: mol_type = unassigned DNA; note = methanogen bacteria
tttggtgttgaattcgacaataagttcaca

SEQ ID NO: 29010 - DNA, 42 bp, unidentified
  source 1..42: mol_type = unassigned DNA; note = methanogen bacteria
ggattaactgctactgaactttcaaataatattacttttgaa

SEQ ID NO: 29011 - DNA, 75 bp, unidentified
  source 1..75: mol_type = unassigned DNA; note = methanogen bacteria
caggcagtatatgggaccaatgttattgatgggataatgaagggaggatatgaaactttaaattcttctgatgtt

SEQ ID NO: 29012 - DNA, 33 bp, unidentified
  source 1..33: mol_type = unassigned DNA; note = methanogen bacteria
ttcaatgaatatgggggcgtcagtcaagtttct

SEQ ID NO: 29013 - DNA, 33 bp, unidentified
  source 1..33: mol_type = unassigned DNA; note = methanogen bacteria
cttaatttaagttcaatttcatcaacagtcact

SEQ ID NO: 29014 - DNA, 84 bp, unidentified
  source 1..84: mol_type = unassigned DNA; note = methanogen bacteria
atttatgatagcttaatggttattgaaagtcgtgctcctttagaaacttatcaagcacttatgggtgcgattcctccaagcaat

SEQ ID NO: 29015 - DNA, 30 bp, unidentified
  source 1..30: mol_type = unassigned DNA; note = methanogen bacteria
attaatcaggctgtcggaccttctgtaaat

SEQ ID NO: 29016 - DNA, 114 bp, unidentified
  source 1..114: mol_type = unassigned DNA; note = methanogen bacteria
atgattgaaacagttttctattttccatgggaggttaatctgatactattcatgcagagtatccttccgggtttcatatttagtttttttgaaattatagcgaatgtagtttct

SEQ ID NO: 29017 - DNA, 129 bp, unidentified
  source 1..129: mol_type = unassigned DNA; note = methanogen bacteria
gtgacggttgcacgtttaaggccatatgccgttgtggataaaatcaagtgtatttaccccaatgttccgggccagaatcctttggactttaaaatacaagggtattctcttccaagtgggcattcgatg

SEQ ID NO: 29018 - DNA, 33 bp, unidentified
  source 1..33: mol_type = unassigned DNA; note = methanogen bacteria
tcagaatatgttaccgaagagattgataatgca

SEQ ID NO: 29019 - DNA, 36 bp, unidentified
  source 1..36: mol_type = unassigned DNA; note = methanogen bacteria
acctccggcacggacatctcggtgcagtcggacgac

SEQ ID NO: 29020 - DNA, 30 bp, unidentified
  source 1..30: mol_type = unassigned DNA; note = methanogen bacteria
catttccagtatgtacgcggatgggatgca

SEQ ID NO: 29021 - DNA, 51 bp, unidentified
  source 1..51: mol_type = unassigned DNA; note = methanogen bacteria
gtgatgggctatctggaacttgcacctaaatatgctttgatgatcgttcaa

SEQ ID NO: 29022 - DNA, 114 bp, unidentified
  source 1..114: mol_type = unassigned DNA; note = methanogen bacteria
atgttagaaacagtgttttattttccgtgggaagttagtctgatactatttatacaaagcacatttcccgatttagtaatgggactctttaaagtcatagctgacgtcatcaac

SEQ ID NO: 29023 - DNA, 129 bp, unidentified
  source 1..129: mol_type = unassigned DNA; note = methanogen bacteria
gtgacagttgcacgtttaaggccatatgcagttgtggacaaaatcaagtgcattcatgccaatgttccagatcaaaaccctctaaacttaaaaatccagggatattcacttccaagtggacacagcatg

SEQ ID NO: 29024 - DNA, 45 bp, unidentified
  source 1..45: mol_type = unassigned DNA; note = methanogen bacteria
cctaaacagattcctattgcaaatggtgttgaagtttcaataatg

SEQ ID NO: 29025 - DNA, 30 bp, unidentified
  source 1..30: mol_type = unassigned DNA; note = methanogen bacteria
ggtcaatctattcatctgatttttgaaatg

SEQ ID NO: 29026 - DNA, 123 bp, unidentified
  source 1..123: mol_type = unassigned DNA; note = methanogen bacteria
tcacttattccattgcatccgtttgcttttgctatggctagtggtgttggtagtgctagtatgaatgctgcttcattgggtcctactcttgcagcatttcctgcattggaaaccagtattgaa

SEQ ID NO: 29027 - DNA, 114 bp, unidentified
  source 1..114: mol_type = unassigned DNA; note = methanogen bacteria
atgtttgaaacagttttctattttcaatgggaagtttggctgatactattcatgcaaagttcctttccagattgggtattcggattctttaaacttgtagcaaatgtcgtttct

SEQ ID NO: 29028 - DNA, 129 bp, unidentified
  source 1..129: mol_type = unassigned DNA; note = methanogen bacteria
gtgactgttgcacgtttaagaccatatgctgcagtcgataaaataaagtgtatctatcccaatgaaccaggccaggatcctttaaactttaaaatccagggatattcctttccaagcgggcattctatg

SEQ ID NO: 29029 - DNA, 36 bp, unidentified
  source 1..36: mol_type = unassigned DNA; note = methanogen bacteria
acatccggtgcaacaatttccgtgcagtcggatgat

SEQ ID NO: 29030 - DNA, 39 bp, unidentified
  source 1..39: mol_type = unassigned DNA; note = methanogen bacteria
caattatctttagcatttccatttgaatttttcccatca

SEQ ID NO: 29031 - DNA, 114 bp, unidentified
  source 1..114: mol_type = unassigned DNA; note = methanogen bacteria
atgatagaaactgttttttattttccatgggaagttaatcttatactatttatgcaaagttctcttccagattttatatttggattttttaaaattatagcaaatcttatttca

SEQ ID NO: 29032 - DNA, 126 bp, unidentified
  source 1..126: mol_type = unassigned DNA; note = methanogen bacteria
tttgtggcacgtttaagaccatatgcagtcgtgaataaaattaagtgtatttatccaaataaacctggccagaatccttttgactttaaaatccaggaatattccttcccaagcgggcattcgatg

SEQ ID NO: 29033 - DNA, 114 bp, unidentified
  source 1..114: mol_type = unassigned DNA; note = methanogen bacteria
atgtttgaaacagttttttattttccgtgggagtcttctctgattatattcctgcaaaattctcttccgggttttgtattggaattctttggaattgttgcagaggttgtctct

SEQ ID NO: 29034 - DNA, 129 bp, unidentified
  source 1..129: mol_type = unassigned DNA; note = methanogen bacteria
gtgaccgttgcacgtttaaggccatatgcagctgttgataatatcaggtgcatccatgccaatgtggctggccagaatccttttgactttaaaatccagggatattcgtttccaagcggacattcgatg

SEQ ID NO: 29035 - DNA, 39 bp, unidentified
  source 1..39: mol_type = unassigned DNA; note = methanogen bacteria
ccaacattaggattcaatattatcactgcaggaagtatc

SEQ ID NO: 29036 - DNA, 30 bp, unidentified
  source 1..30: mol_type = unassigned DNA; note = methanogen bacteria
gaagacgcatcctctctggactgcggatac

SEQ ID NO: 29037 - DNA, 168 bp, unidentified
  source 1..168: mol_type = unassigned DNA; note = methanogen bacteria
atgggcggcattagccatgcagtcgatacctatgcgcctgagcattcgggagacgaacagttccatcaggacgtctatgattacttccaaaagatgggtaatatggacgatatcaaatcacagggaagcactgttgtgacaattgtggatggcatctttcaggatgca

SEQ ID NO: 29038 - DNA, 42 bp, unidentified
  source 1..42: mol_type = unassigned DNA; note = methanogen bacteria
agcgatttcggccagatttcaaacttcgtctccatcaatcct

SEQ ID NO: 29039 - DNA, 60 bp, unidentified
  source 1..60: mol_type = unassigned DNA; note = methanogen bacteria
atgggatttttaccacatgggtttgttaatttctatatgtccattcagaatttagcagat

SEQ ID NO: 29040 - DNA, 48 bp, unidentified
  source 1..48: mol_type = unassigned DNA; note = methanogen bacteria
gattcaggactttctattactgagttatataatcctattttcagctat

SEQ ID NO: 29041 - DNA, 33 bp, unidentified
  source 1..33: mol_type = unassigned DNA; note = methanogen bacteria
gtggcaggactaggggcagaccctctggcagct

SEQ ID NO: 29042 - DNA, 48 bp, unidentified
  source 1..48: mol_type = unassigned DNA; note = methanogen bacteria
attatagccatgggtggaaaagacgtattaacccatgctgtggattat

SEQ ID NO: 29043 - DNA, 48 bp, unidentified
  source 1..48: mol_type = unassigned DNA; note = methanogen bacteria
gcttgcagcagtggctggaacaacagcggtagcagtctatactgcagg

SEQ ID NO: 29044 - DNA, 45 bp, unidentified
  source 1..45: mol_type = unassigned DNA; note = methanogen bacteria
actgacttcagccagattaacggcttcatttcaatcaacccttca

SEQ ID NO: 29045 - DNA, 102 bp, unidentified
  source 1..102: mol_type = unassigned DNA; note = methanogen bacteria
attactgatgagaatactttacttataaatggttattcaatatttcctaaaaaaatcaatttccaggcatatcgatacatatggagctctaaaagtacggta

SEQ ID NO: 29046 - DNA, 57 bp, unidentified
  source 1..57: mol_type = unassigned DNA; note = methanogen bacteria
ggtgggttagttccaacctatatgatttatacgaatgttcttcatattaagaatacg

SEQ ID NO: 29047 - DNA, 129 bp, unidentified
  source 1..129: mol_type = unassigned DNA; note = methanogen bacteria
ttgtattatattagtgatcaaagcaaatattcaatccagcagatgttgaatgttatggttaaaaatattcaatatctgactcaatatggacattcatctgggaatggagaagctttgcctagcatatcc

SEQ ID NO: 29048 - DNA, 69 bp, unidentified
  source 1..69: mol_type = unassigned DNA; note = methanogen bacteria
actctgcctggagccggcgtcggcattcaagcattgctgcaaccggactggaccaaattaaccgacatc

SEQ ID NO: 29049 - DNA, 105 bp, unidentified
  source 1..105: mol_type = unassigned DNA; note = methanogen bacteria
gggttcatgtcatctacaacaggaattccaatggttcagctggttagtgagggtaccggactgatatttattgttttcccaacaattttcaatgtaatgggttcg

SEQ ID NO: 29050 - DNA, 42 bp, unidentified
  source 1..42: mol_type = unassigned DNA; note = methanogen bacteria
acaaacttcaaccagataaacaatttcgtttcaattgacccc

SEQ ID NO: 29051 - DNA, 42 bp, unidentified
  source 1..42: mol_type = unassigned DNA; note = methanogen bacteria
agcgattttggagagatatcaaacttcatttccattaaccca

SEQ ID NO: 29052 - DNA, 30 bp, unidentified
  source 1..30: mol_type = unassigned DNA; note = methanogen bacteria
tcaactgttatgggtgatgttatatccgga

SEQ ID NO: 29053 - DNA, 33 bp, unidentified
  source 1..33: mol_type = unassigned DNA; note = methanogen bacteria
agattcttcaatcatgtcattccagaaattagt

SEQ ID NO: 29054 - DNA, 30 bp, unidentified
  source 1..30: mol_type = unassigned DNA; note = methanogen bacteria
accatggcaacaatatccaacgtatattca

SEQ ID NO: 29055 - DNA, 30 bp, unidentified
  source 1..30: mol_type = unassigned DNA; note = methanogen bacteria
gttcttgaaattaatttcgaaaacatacca

SEQ ID NO: 29056 - DNA, 42 bp, unidentified
  source 1..42: mol_type = unassigned DNA; note = methanogen bacteria
agtgatttcagcgaaatctcaaacttcatctccatcaaccct

SEQ ID NO: 29057 - DNA, 42 bp, unidentified
  source 1..42: mol_type = unassigned DNA; note = methanogen bacteria
tatgaacggatggtaaatccgggtcatgttatggtgcctgat

SEQ ID NO: 29058 - DNA, 60 bp, unidentified
  source 1..60: mol_type = unassigned DNA; note = methanogen bacteria
ttcccgcaggctttggccagcttatatgtgccgggttcaaattcaagtccaggtctggaa

SEQ ID NO: 29059 - DNA, 30 bp, unidentified
  source 1..30: mol_type = unassigned DNA; note = methanogen bacteria
tttggcgctaaaatagacatcaaattcaca

SEQ ID NO: 29060 - DNA, 36 bp, unidentified
  source 1..36: mol_type = unassigned DNA; note = methanogen bacteria
ggaatcactacaactcaaatttcaaacaatgtcggc

SEQ ID NO: 29061 - DNA, 39 bp, unidentified
  source 1..39: mol_type = unassigned DNA; note = methanogen bacteria
ccggtttatgccgcaggcggatctgccgaacagctgagg

SEQ ID NO: 29062 - DNA, 72 bp, unidentified
  source 1..72: mol_type = unassigned DNA; note = methanogen bacteria
agtggcatatatggaatggataaagttaatttaattttatctggaggatatgacgttatagatacatctgat

SEQ ID NO: 29063 - DNA, 33 bp, unidentified
  source 1..33: mol_type = unassigned DNA; note = methanogen bacteria
aataatgggaaagcacatactactaaaattaca

SEQ ID NO: 29064 - DNA, 36 bp, unidentified
  source 1..36: mol_type = unassigned DNA; note = methanogen bacteria
ttaggatatgatatattacaaaataatataacaaat

SEQ ID NO: 29065 - DNA, 33 bp, unidentified
  source 1..33: mol_type = unassigned DNA; note = methanogen bacteria
ggacaatacaaatacaatggctttgatttatcc

SEQ ID NO: 29066 - DNA, 96 bp, unidentified
  source 1..96: mol_type = unassigned DNA; note = methanogen bacteria
tttggatttgctgtaagtggtcaaactggaacaccatcactgttaaaatgtagccaagtaggtcaaaatataattagtggaggacaatttggacca

SEQ ID NO: 29067 - DNA, 75 bp, unidentified
  source 1..75: mol_type = unassigned DNA; note = methanogen bacteria
tcccagtcatctaaatatgtaattaaagaagttcaaaaggcttacattaacaacaagggcattttgccaatcaat

SEQ ID NO: 29068 - DNA, 45 bp, unidentified
  source 1..45: mol_type = unassigned DNA; note = methanogen bacteria
accgattttgcacagatttcaaatttcatttcaattaatcccagc

SEQ ID NO: 29069 - DNA, 42 bp, unidentified
  source 1..42: mol_type = unassigned DNA; note = methanogen bacteria
aattttaatcagattacaacatttatcaacaggaatactggc

SEQ ID NO: 29070 - DNA, 42 bp, unidentified
  source 1..42: mol_type = unassigned DNA; note = methanogen bacteria
accaatttcacccaaattgctaatttcgttaacttgagtcca

SEQ ID NO: 29071 - DNA, 48 bp, unidentified
  source 1..48: mol_type = unassigned DNA; note = methanogen bacteria
ttgacattattcaatattgttgacccctattacagcgaagtgatttgt

SEQ ID NO: 29072 - DNA, 42 bp, unidentified
  source 1..42: mol_type = unassigned DNA; note = methanogen bacteria
accgatttcggccaaataaataattttatttcaatcaatccc

SEQ ID NO: 29073 - DNA, 42 bp, unidentified
  source 1..42: mol_type = unassigned DNA; note = methanogen bacteria
accgattttggccagatttcaagttttgtttcaattaatcct

SEQ ID NO: 29074 - DNA, 48 bp, unidentified
  source 1..48: mol_type = unassigned DNA; note = methanogen bacteria
ttaaatattgattttttgaatatttttccccagatgtcaatctatcca

SEQ ID NO: 29075 - DNA, 39 bp, unidentified
  source 1..39: mol_type = unassigned DNA; note = methanogen bacteria
attatgatgctttttacaaagaatctcgttctggtgata

SEQ ID NO: 29076 - DNA, 75 bp, unidentified
  source 1..75: mol_type = unassigned DNA; note = methanogen bacteria
ggtgcagcatatggagacaatattattgattccgttgcgaatggaggatatgagactttaaacaccactgacgtt

SEQ ID NO: 29077 - DNA, 33 bp, unidentified
  source 1..33: mol_type = unassigned DNA; note = methanogen bacteria
ggaatggaaaccggaggcagcagccatgtttct

SEQ ID NO: 29078 - DNA, 33 bp, unidentified
  source 1..33: mol_type = unassigned DNA; note = methanogen bacteria
ctgggattcggttcaatttcatcaacactctct

SEQ ID NO: 29079 - DNA, 39 bp, unidentified
  source 1..39: mol_type = unassigned DNA; note = methanogen bacteria
tccgtcgaggacggggtgtacaccgtcaccgagtacgac

SEQ ID NO: 29080 - DNA, 30 bp, unidentified
  source 1..30: mol_type = unassigned DNA; note = methanogen bacteria
tctactgttatgggtgatattctaccatct

SEQ ID NO: 29081 - DNA, 108 bp, unidentified
  source 1..108: mol_type = unassigned DNA; note = methanogen bacteria
atggttttgtctaatttaacaatgcatgaacgagcggagtattttgttgaagtacatcattcagatacttatgaaaaagggcaagctcaaatgtattggagggacttt

SEQ ID NO: 29082 - DNA, 45 bp, unidentified
  source 1..45: mol_type = unassigned DNA; note = methanogen bacteria
aatttcaatcaaattacaacatttatcaacataaataccggcaca

SEQ ID NO: 29083 - DNA, 45 bp, unidentified
  source 1..45: mol_type = unassigned DNA; note = methanogen bacteria
acaaattttaatcagattacagcttttgtttcaatcaatcccaca

SEQ ID NO: 29084 - DNA, 30 bp, unidentified
  source 1..30: mol_type = unassigned DNA; note = methanogen bacteria
tctacagttatgggtgatataataccgtca

SEQ ID NO: 29085 - DNA, 39 bp, unidentified
  source 1..39: mol_type = unassigned DNA; note = methanogen bacteria
aatcccacccttggatacaacctgattactgcaggaagc

SEQ ID NO: 29086 - DNA, 54 bp, unidentified
  source 1..54: mol_type = unassigned DNA; note = methanogen bacteria
ttcttcagctccgatttctcagtattgttctctagattggagggagtaaccagt

SEQ ID NO: 29087 - DNA, 48 bp, unidentified
  source 1..48: mol_type = unassigned DNA; note = methanogen bacteria
gtagatttaaataatccggtatcaaatgttcttggagatgtattacaa

SEQ ID NO: 29088 - DNA, 69 bp, unidentified
  source 1..69: mol_type = unassigned DNA; note = methanogen bacteria
aacccaactttaggttttaatggtattagtataggggtcagtataattattttacaatctgcatttcct

SEQ ID NO: 29089 - DNA, 168 bp, unidentified
  source 1..168: mol_type = unassigned DNA; note = methanogen bacteria
cgtataatagtaattataaatgcaattatagatagtttcttaatttatataggggcaatgataggagaaatgtttgatgaacttatatactttttaataggtgcaaacactactaatactggaaatcttccacctatgatttatgttccagatgcattaattgcagac

SEQ ID NO: 29090 - DNA, 36 bp, unidentified
  source 1..36: mol_type = unassigned DNA; note = methanogen bacteria
ttaggattttggggtgaaccattacacgtattccca

SEQ ID NO: 29091 - DNA, 171 bp, unidentified
  source 1..171: mol_type = unassigned DNA; note = methanogen bacteria
cgtataatagtaattataaatgcaattatagatagtttcttaatttatataggagcaatgataggagaaatgtttgatgaacttatatactttttaataggtgcaaacactactagtgccgaaactcttccccctatgttttatgttcctgatgcattaattgcagactta

SEQ ID NO: 29092 - DNA, 36 bp, unidentified
  source 1..36: mol_type = unassigned DNA; note = methanogen bacteria
ggattcacaaatcacaatatattaaacaatttcaat

SEQ ID NO: 29093 - DNA, 72 bp, unidentified
  source 1..72: mol_type = unassigned DNA; note = methanogen bacteria
tcagcaatcggaagcctattccagacggaaatcactaatcccgttcaaaagctgattgactcaacagacatc

SEQ ID NO: 29094 - DNA, 51 bp, unidentified
  source 1..51: mol_type = unassigned DNA; note = methanogen bacteria
gtggttcaaagcgttcaggcatttatttcaaatacaggcacaacaatggat

SEQ ID NO: 29095 - DNA, 66 bp, unidentified
  source 1..66: mol_type = unassigned DNA; note = methanogen bacteria
gaaataggaatattgcctcatacattcctgaatgcatatatgtctcttcaaagtttaacagataat

SEQ ID NO: 29096 - DNA, 54 bp, unidentified
  source 1..54: mol_type = unassigned DNA; note = methanogen bacteria
gtggatatgggaaatgttgtaactgatatctatgatactatattcatacatttt

SEQ ID NO: 29097 - DNA, 30 bp, unidentified
  source 1..30: mol_type = unassigned DNA; note = methanogen bacteria
aattggattagcatttttgcaaatgtcttt

SEQ ID NO: 29098 - DNA, 66 bp, unidentified
  source 1..66: mol_type = unassigned DNA; note = methanogen bacteria
gaaataggaatattgcctcatacattcctgagtgcatatatgtctcttcaaggtattgcagataat

SEQ ID NO: 29099 - DNA, 51 bp, unidentified
  source 1..51: mol_type = unassigned DNA; note = methanogen bacteria
gatttgggaaatgttgtaaccgatatctatgatgacatattcatacatttt

SEQ ID NO: 29100 - DNA, 159 bp, unidentified
  source 1..159: mol_type = unassigned DNA; note = methanogen bacteria
ggattatacagtaatacatataatttaatcaacgcatatgatgcaaattattcaacattagtagctaatggaactagtaacgttgatgcatttataagtgtaatatctggaaattcaacagtaattccatctaatatagtatcatcattcatgtcaagt

SEQ ID NO: 29101 - DNA, 66 bp, unidentified
  source 1..66: mol_type = unassigned DNA; note = methanogen bacteria
agcggcttatttggtgaggcatttataaacaacttgattaatggaggatatgaagttttaaataat

SEQ ID NO: 29102 - DNA, 33 bp, unidentified
  source 1..33: mol_type = unassigned DNA; note = methanogen bacteria
attactggccctgaaggaactttcaaactttca

SEQ ID NO: 29103 - DNA, 30 bp, unidentified
  source 1..30: mol_type = unassigned DNA; note = methanogen bacteria
ggaatcataacacctacctcatcacctcaa

SEQ ID NO: 29104 - DNA, 123 bp, unidentified
  source 1..123: mol_type = unassigned DNA; note = methanogen bacteria
cctggaaacagcatacgatttgcacacgaggctgctttctggtatcctgaatttgtcaattttacaattattgaaaagtcctatttaggtcttgttacaacatttggaacattaatagaacag

SEQ ID NO: 29105 - DNA, 240 bp, unidentified
  source 1..240: mol_type = unassigned DNA; note = methanogen bacteria
ttcattgacatttccattttagacagttccgtgaaatctcttggaagcataacaattttcaatgctttcattgacatttccattttagacagttccgtgaaatctcttggaagcttttcaaatgtcattaaaagttcaccattaatcgtgattccgaaaatgtttaaacatgtcgttggtgcaactccttaccttacagagacactgaagttattcacctatgaaggtgttccagcactt

SEQ ID NO: 29106 - DNA, 33 bp, unidentified
  source 1..33: mol_type = unassigned DNA; note = methanogen bacteria
tcccctgttgtatttccttcaggtgcaagagtt

SEQ ID NO: 29107 - DNA, 42 bp, unidentified
  source 1..42: mol_type = unassigned DNA; note = methanogen bacteria
caccataaactggataatcctgctgcgattccagtgcctgat

SEQ ID NO: 29108 - DNA, 54 bp, unidentified
  source 1..54: mol_type = unassigned DNA; note = methanogen bacteria
ggtgtctattcatcattcatgatgaatcttggaagggcgagtacgacgtgccag

SEQ ID NO: 29109 - DNA, 36 bp, unidentified
  source 1..36: mol_type = unassigned DNA; note = methanogen bacteria
tatgaacatatgctcaatgctctccacaatcttgtt

SEQ ID NO: 29110 - DNA, 30 bp, unidentified
  source 1..30: mol_type = unassigned DNA; note = methanogen bacteria
gtagtttcgaatgttacttttgatattcag

SEQ ID NO: 29111 - DNA, 63 bp, unidentified
  source 1..63: mol_type = unassigned DNA; note = methanogen bacteria
gcaatatacggagaaaacattatggcccaactcctacgtggaggatatgaagtcatgaactct

SEQ ID NO: 29112 - DNA, 30 bp, unidentified
  source 1..30: mol_type = unassigned DNA; note = methanogen bacteria
ctgggtaatgtgggaaattatcattttaca

SEQ ID NO: 29113 - DNA, 30 bp, unidentified
  source 1..30: mol_type = unassigned DNA; note = methanogen bacteria
ggaattcaatccacaacctcaacaatagta

SEQ ID NO: 29114 - DNA, 72 bp, unidentified
  source 1..72: mol_type = unassigned DNA; note = methanogen bacteria
ggtttacctgctgtaaactggacattcttaacctcagatcctattgattcaggtaggtctggtggaatcttt

SEQ ID NO: 29115 - DNA, 105 bp, unidentified
  source 1..105: mol_type = unassigned DNA; note = methanogen bacteria
gtaggttctgcagtaaccacccctatatccattatggatccaggtaggccattaccattacacttgtatgttcttgcaactgaaggtgtttcattacaaaatgca

SEQ ID NO: 29116 - DNA, 66 bp, unidentified
  source 1..66: mol_type = unassigned DNA; note = methanogen bacteria
gaagcaggtattttgccacataccttccttcaagcatttttatctcttcaacactttgcggacaat

SEQ ID NO: 29117 - DNA, 54 bp, unidentified
  source 1..54: mol_type = unassigned DNA; note = methanogen bacteria
gttgatgagggaaacatgataacaagcatttatgatgcagtattcatttatttt

SEQ ID NO: 29118 - DNA, 72 bp, unidentified
  source 1..72: mol_type = unassigned DNA; note = methanogen bacteria
agtggtgtatatggcaataatactgtagaaaggattttatctggagggtatgacgttatagatacatctgat

SEQ ID NO: 29119 - DNA, 33 bp, unidentified
  source 1..33: mol_type = unassigned DNA; note = methanogen bacteria
tctaatggaaaaatacaaaatactactattaca

SEQ ID NO: 29120 - DNA, 36 bp, unidentified
  source 1..36: mol_type = unassigned DNA; note = methanogen bacteria
ttaggatttgatatattacaatctaatataacaaac

SEQ ID NO: 29121 - DNA, 276 bp, unidentified
  source 1..276: mol_type = unassigned DNA; note = methanogen bacteria
atatttggtattgaaccaggtgtagatttaaagggaggtactatggcggagattacacttaatcatgatatgaattctaatgaaattgcaagtttacttcaaaaatcattacatattgaagaagtgaaaatcatatcaaataataaccgtcatgttacagtagaattttctgatagtgttgatataggagaatttagaaaagcaacagaaagtattggaactgtttcaagttttaatactgtaggaccagtattatctgaagaagcgatgggacag

SEQ ID NO: 29122 - DNA, 30 bp, unidentified
  source 1..30: mol_type = unassigned DNA; note = methanogen bacteria
ttaactatgcctcaagctagaactttaagt

SEQ ID NO: 29123 - DNA, 30 bp, unidentified
  source 1..30: mol_type = unassigned DNA; note = methanogen bacteria
tctacagtgatgggagatattatttcatca

SEQ ID NO: 29124 - DNA, 189 bp, unidentified
  source 1..189: mol_type = unassigned DNA; note = methanogen bacteria
agccttttggatggtcaaggcaggtcttatgcaaaccagaatattaaatttaatattaatggtgttttttatgataaaaccacagatattaatggtgaagctaaattaaatattaatttgcttccgggtcaatacattataacctccagttataatggctataatgctgcaaataaggtaactattagt

SEQ ID NO: 29125 - DNA, 72 bp, unidentified
  source 1..72: mol_type = unassigned DNA; note = methanogen bacteria
agtgcaatatatggggccgatactgttaatggaatactcaatggaggatatgaaactttgaatacctctgat

SEQ ID NO: 29126 - DNA, 36 bp, unidentified
  source 1..36: mol_type = unassigned DNA; note = methanogen bacteria
ttaggtaatgaatctggtggcagcagtcaggtttct

SEQ ID NO: 29127 - DNA, 33 bp, unidentified
  source 1..33: mol_type = unassigned DNA; note = methanogen bacteria
ctaggaataagttcaatttcatcaaacgtgtct

SEQ ID NO: 29128 - DNA, 39 bp, unidentified
  source 1..39: mol_type = unassigned DNA; note = methanogen bacteria
atagggaacggcagagacaccgagctgggccattccgcg

SEQ ID NO: 29129 - DNA, 36 bp, unidentified
  source 1..36: mol_type = unassigned DNA; note = methanogen bacteria
ttcaccgccttcaccgacagcatcagcaacatggac

SEQ ID NO: 29130 - DNA, 63 bp, unidentified
  source 1..63: mol_type = unassigned DNA; note = methanogen bacteria
gcaatatgtggagaaaacattatggtccaactcctgcatggaagatatgaagtcatgaactcc

SEQ ID NO: 29131 - DNA, 30 bp, unidentified
  source 1..30: mol_type = unassigned DNA; note = methanogen bacteria
ctgggtaatgggggaaattatcattttaca

SEQ ID NO: 29132 - DNA, 30 bp, unidentified; identical to SEQ ID NO: 29113
  source 1..30: mol_type = unassigned DNA; note = methanogen bacteria

SEQ ID NO: 29133 - DNA, 66 bp, unidentified
  source 1..66: mol_type = unassigned DNA; note = methanogen bacteria
gcaatatacggagaacacattacgggtcaactcctgcgtggaggatatgaagtcatgaactccgag

SEQ ID NO: 29134 - DNA, 33 bp, unidentified
  source 1..33: mol_type = unassigned DNA; note = methanogen bacteria
atactgggcaatgcgggagattatcattttaca

SEQ ID NO: 29135 - DNA, 30 bp, unidentified
  source 1..30: mol_type = unassigned DNA; note = methanogen bacteria
ggaattcaatccacaacctcaacaatacaa

SEQ ID NO: 29136 - DNA, 114 bp, unidentified
  source 1..114: mol_type = unassigned DNA; note = methanogen bacteria
tttatcaaagatattccgacaagctttgtcaatgcaaatcagatgccctctttggaacatctcttcggaactgattggatgggaagagacatgtttcaacgtacaattgcaggg

SEQ ID NO: 29137 - DNA, 90 bp, unidentified
  source 1..90: mol_type = unassigned DNA; note = methanogen bacteria
acattcctgggattcggtttgcctcctcatgaacctgctattggtgtaattttagcagaatcaatgaattacttgtcttctggatattgg

SEQ ID NO: 29138 - DNA, 51 bp, unidentified
  source 1..51: mol_type = unassigned DNA; note = methanogen bacteria
aaaaacccgacattagggtttaatattataactatcggatcaatagctgtg

SEQ ID NO: 29139 - DNA, 63 bp, unidentified
  source 1..63: mol_type = unassigned DNA; note = methanogen bacteria
atgcctactgtagattcttttcttccagatattattcaaacaacttttttctctggatacact

SEQ ID NO: 29140 - DNA, 54 bp, unidentified
  source 1..54: mol_type = unassigned DNA; note = methanogen bacteria
actcgagctttagtggataatggaattttaccaaaaaccgtttttctaataact

SEQ ID NO: 29141 - DNA, 72 bp, unidentified
  source 1..72: mol_type = unassigned DNA; note = methanogen bacteria
gcagtagaatacttcaattatgcagaacagcacgttttaccgaatgctctaaatcaactattcaatacatat

SEQ ID NO: 29142 - DNA, 81 bp, unidentified
  source 1..81: mol_type = unassigned DNA; note = methanogen bacteria
atttacaatcctgacgaattggaattgggttatggagagggttatatggagctattggctccaatatcgtccatcctacct

SEQ ID NO: 29143 - DNA, 30 bp, unidentified
  source 1..30: mol_type = unassigned DNA; note = methanogen bacteria
cgactattcataagccaatctcctgatgct

SEQ ID NO: 29144 - DNA, 36 bp, unidentified
  source 1..36: mol_type = unassigned DNA; note = methanogen bacteria
cctattaatggaagtgctttacacatattcccatta

SEQ ID NO: 29145 - DNA, 42 bp, unidentified
  source 1..42: mol_type = unassigned DNA; note = methanogen bacteria
ttgaatagggaattctcatataccatcttcacttataactgg

SEQ ID NO: 29146 - DNA, 81 bp, unidentified
  source 1..81: mol_type = unassigned DNA; note = methanogen bacteria
acaggagcggtcttgccgaaaaactcaattctaaattatgttgcaacacagactgcaattgtaggctcatgggtggatatg

SEQ ID NO: 29147 - DNA, 30 bp, unidentified
  source 1..30: mol_type = unassigned DNA; note = methanogen bacteria
attttcacaccgataccatccaatggaatt

SEQ ID NO: 29148 - DNA, 63 bp, unidentified
  source 1..63: mol_type = unassigned DNA; note = methanogen bacteria
gcaatatgtggagaaaacattatggtccaactcctgcagggaggatatgaagtcatgaactcc

SEQ ID NO: 29149 - DNA, 30 bp, unidentified; identical to SEQ ID NO: 29131
  source 1..30: mol_type = unassigned DNA; note = methanogen bacteria

SEQ ID NO: 29150 - DNA, 30 bp, unidentified
  source 1..30: mol_type = unassigned DNA; note = methanogen bacteria
ggaattcaatcctcaacctcaacaatacaa

SEQ ID NO: 29151 - DNA, 60 bp, unidentified
  source 1..60: mol_type = unassigned DNA; note = methanogen bacteria
tggggaattttacctcaaacattccttaatgcattcctgtccctacagaatttggcaaat

SEQ ID NO: 29152 - DNA, 54 bp, unidentified
  source 1..54: mol_type = unassigned DNA; note = methanogen bacteria
gtagatgcgggaaatgtcataaccaatatctatgacggagtatttgccaggttt

SEQ ID NO: 29153 - DNA, 66 bp, unidentified
  source 1..66: mol_type = unassigned DNA; note = methanogen bacteria
ttaaacccaggatacacaattcccgagtttacaacaaaaggtttgtatttaactgacaaaagcatt

SEQ ID NO: 29154 - DNA, 42 bp, unidentified
  source 1..42: mol_type = unassigned DNA; note = methanogen bacteria
caatcaccatggcatttttccatggccagccacagcttgcag

SEQ ID NO: 29155 - DNA, 39 bp, unidentified
  source 1..39: mol_type = unassigned DNA; note = methanogen bacteria
ccaacaggtactcaaggaccattacacgtattcccatta

SEQ ID NO: 29156 - DNA, 51 bp, unidentified
  source 1..51: mol_type = unassigned DNA; note = methanogen bacteria
cctcaaattgattttacacttgctgatactcttcttgaagttattgaaatg

SEQ ID NO: 29157 - DNA, 36 bp, unidentified
  source 1..36: mol_type = unassigned DNA; note = methanogen bacteria
tatgaatacatgctgacagcacttcacgagcttcat

SEQ ID NO: 29158 - DNA, 30 bp, unidentified
  source 1..30: mol_type = unassigned DNA; note = methanogen bacteria
atcataaattcagcgggtttaaatttttca

SEQ ID NO: 29159 - DNA, 63 bp, unidentified
  source 1..63: mol_type = unassigned DNA; note = methanogen bacteria
tggggttttttacctaagatatttttaaatatttatttatctattcagggtgttgcatccaat

SEQ ID NO: 29160 - DNA, 48 bp, unidentified
  source 1..48: mol_type = unassigned DNA; note = methanogen bacteria
gatatgggaaattccgtttcacaggtattccgtttagtctattcttat

SEQ ID NO: 29161 - DNA, 63 bp, unidentified
  source 1..63: mol_type = unassigned DNA; note = methanogen bacteria
gccatttatggcgaaagtgctatggacataattaccggaggaggatatgaggtgttaaatacc

SEQ ID NO: 29162 - DNA, 33 bp, unidentified
  source 1..33: mol_type = unassigned DNA; note = methanogen bacteria
attaacggagccgatggaacctatcatttttca

SEQ ID NO: 29163 - DNA, 36 bp, unidentified
  source 1..36: mol_type = unassigned DNA; note = methanogen bacteria
tttggacttaggtcagcaacttccgcacctcaattt

SEQ ID NO: 29164 - DNA, 33 bp, unidentified
  source 1..33: mol_type = unassigned DNA; note = methanogen bacteria
ggatcaacggtaatgggggatgtgatttctgga

SEQ ID NO: 29165 - DNA, 81 bp, unidentified
  source 1..81: mol_type = unassigned DNA; note = methanogen bacteria
tggccagcttttgcagattatggattcttcaaattcttatttggtcttaaatgggatccaactaagaatgtatttggtgtt

SEQ ID NO: 29166 - DNA, 36 bp, unidentified
  source 1..36: mol_type = unassigned DNA; note = methanogen bacteria
ttcagatcatggtttggaggtactggattcagtata

SEQ ID NO: 29167 - DNA, 105 bp, unidentified
  source 1..105: mol_type = unassigned DNA; note = methanogen bacteria
gcaggtaatgtaagtcaaattccaaactcaatattttctccagtaagaaccttaacttctaacattgcattagaaatgggttatgctactggtcttcactacaat

SEQ ID NO: 29168 - DNA, 69 bp, unidentified
  source 1..69: mol_type = unassigned DNA; note = methanogen bacteria
ggcattttttctcctgaagcagcaaaaacattctttatttccccaggtacaaacataccaggatttgat

SEQ ID NO: 29169 - DNA, 33 bp, unidentified
  source 1..33: mol_type = unassigned DNA; note = methanogen bacteria
gtaagaggcatccaattggatatcaaattaact

SEQ ID NO: 29170 - DNA, 36 bp, unidentified
  source 1..36: mol_type = unassigned DNA; note = methanogen bacteria
ggcatatcaaccgtgaacatttccacaaatgcatca

SEQ ID NO: 29171 - DNA, 30 bp, unidentified
  source 1..30: mol_type = unassigned DNA; note = methanogen bacteria
ccaaataacttatatacaggaggtatatta

SEQ ID NO: 29172 - DNA, 30 bp, unidentified
  source 1..30: mol_type = unassigned DNA; note = methanogen bacteria
atagatatatttaatataaaaaataatttt

SEQ ID NO: 29173 - DNA, 60 bp, unidentified
  source 1..60: mol_type = unassigned DNA; note = methanogen bacteria
atatggggatgggactttgtagacctcattgtaaccggcggttatgaagttctaaataat

SEQ ID NO: 29174 - DNA, 33 bp, unidentified
  source 1..33: mol_type = unassigned DNA; note = methanogen bacteria
attaacggaggtgaaggcacttaccatttcaca

SEQ ID NO: 29175 - DNA, 33 bp, unidentified
  source 1..33: mol_type = unassigned DNA; note = methanogen bacteria
ttcggactccagtcaacaagttcgaccgtgcaa

SEQ ID NO: 29176 - DNA, 45 bp, unidentified; identical to SEQ ID NO: 24330
  source 1..45: mol_type = unassigned DNA; note = methanogen bacteria

SEQ ID NO: 29177 - DNA, 39 bp, unidentified; identical to SEQ ID NO: 24331
  source 1..39: mol_type = unassigned DNA; note = methanogen bacteria

SEQ ID NO: 29178 - DNA, 36 bp, unidentified; identical to SEQ ID NO: 24332
  source 1..36: mol_type = unassigned DNA; note = methanogen bacteria

SEQ ID NO: 29179 - DNA, 33 bp, unidentified
  source 1..33: mol_type = unassigned DNA; note = methanogen bacteria
gcgcatgaagcagaaattatttttccggagatt

SEQ ID NO: 29180 - DNA, 132 bp, unidentified
  source 1..132: mol_type = unassigned DNA; note = methanogen bacteria
acaggactgttttcctcattcactgaaatcgtatatatcagcattgacgctatagccaatgaaacaaccaatgcaagcatgataatagcggcaattcccaaatcaacaatgaatacattcacaaatgcgtta

SEQ ID NO: 29181 - DNA, 60 bp, unidentified
  source 1..60: mol_type = unassigned DNA; note = methanogen bacteria
atagcgggacctgattttttaatgtctgttttcaaaggaggatatgaagtattaaacact

SEQ ID NO: 29182 - DNA, 33 bp, unidentified
  source 1..33: mol_type = unassigned DNA; note = methanogen bacteria
attgaaggacctgatggaacatctcatttatca

SEQ ID NO: 29183 - DNA, 33 bp, unidentified
  source 1..33: mol_type = unassigned DNA; note = methanogen bacteria
ctgggactgaaaacatcaacttcatctccgaaa

SEQ ID NO: 29184 - DNA, 66 bp, unidentified
  source 1..66: mol_type = unassigned DNA; note = methanogen bacteria
atgattgaatataataaatttattaatgatattgttttttctaatggaggaaatattaattcatta

SEQ ID NO: 29185 - DNA, 66 bp, unidentified
  source 1..66: mol_type = unassigned DNA; note = methanogen bacteria
gttacatttggaactgaattaattacctcaattgcaaatggaggatacgaagctttaaatagtgaa

SEQ ID NO: 29186 - DNA, 36 bp, unidentified
  source 1..36: mol_type = unassigned DNA; note = methanogen bacteria
attgatgggccagaaaatggaacatttcattttaca

SEQ ID NO: 29187 - DNA, 33 bp, unidentified
  source 1..33: mol_type = unassigned DNA; note = methanogen bacteria
ggaattcaattaacatcttcatcaccagaacaa

SEQ ID NO: 29188 - DNA, 36 bp, unidentified
  source 1..36: mol_type = unassigned DNA; note = methanogen bacteria
tatgaatatatgttagatgctcttcatggattgcat

SEQ ID NO: 29189 - DNA, 114 bp, unidentified
  source 1..114: mol_type = unassigned DNA; note = methanogen bacteria
actggaattatgtctgctgacccatttaaagctggagcagtaactgtagctactactaaagcattaggtggtgcaaaattcatggctgctggaaaagcaactgcatcactcaca

SEQ ID NO: 29190 - DNA, 33 bp, unidentified
  source 1..33: mol_type = unassigned DNA; note = methanogen bacteria
attttctgtggtgctaaaattacctgggctgat

SEQ ID NO: 29191 - DNA, 30 bp, unidentified
  source 1..30: mol_type = unassigned DNA; note = methanogen bacteria
gattatattattggagttagtgtgaatatt

SEQ ID NO: 29192 - DNA, 39 bp, unidentified
  source 1..39: mol_type = unassigned DNA; note = methanogen bacteria
actattcctattaacggtactccattacacgtattccca

SEQ ID NO: 29193 - DNA, 30 bp, unidentified
  source 1..30: mol_type = unassigned DNA; note = methanogen bacteria
ttgaggaataaacctaggattcaagcttat

SEQ ID NO: 29194 - DNA, 42 bp, unidentified
  source 1..42: mol_type = unassigned DNA; note = methanogen bacteria
caaaaaattcccataactgaggatgttgcaatcactataatg

SEQ ID NO: 29195 - DNA, 30 bp, unidentified
  source 1..30: mol_type = unassigned DNA; note = methanogen bacteria
ggtcagtcaattcatttgatttttacaatg

SEQ ID NO: 29196 - DNA, 123 bp, unidentified
  source 1..123: mol_type = unassigned DNA; note = methanogen bacteria
tcattcctgccattgcatccttatgctttcgctatggccagtggtgttggaagtgccagtatgaatgcggctgctatcggtccgactcttgcagcatttcctggaatggaatctcaaattgaa

SEQ ID NO: 29197 - DNA, 42 bp, unidentified
  source 1..42: mol_type = unassigned DNA; note = methanogen bacteria
accgatttcggccagattaacgcattcgtctcaataaatcca

SEQ ID NO: 29198 - DNA, 33 bp, unidentified
  source 1..33: mol_type = unassigned DNA; note = methanogen bacteria
ggttcgactgttatgggtgatgtaatatccgga

SEQ ID NO: 29199 - DNA, 84 bp, unidentified
  source 1..84: mol_type = unassigned DNA; note = methanogen bacteria
tttcctgcaattcatgaatatggtgtagtcaaatttttatttggaaatgtctgggctccaaatgatggggaatttggagtgttt

SEQ ID NO: 29200 - DNA, 33 bp, unidentified
  source 1..33: mol_type = unassigned DNA; note = methanogen bacteria
gtaagacttcactttggcggaaccggattcagc

SEQ ID NO: 29201 - DNA, 102 bp, unidentified
  source 1..102: mol_type = unassigned DNA; note = methanogen bacteria
ggtaatgttgcaaaagtgcccgattcaatttttgctcctgcaagaacattgacatcaaacattgcattggagatgagctatgcaacaggaattcattataat

SEQ ID NO: 29202 - DNA, 33 bp, unidentified
  source 1..33: mol_type = unassigned DNA; note = methanogen bacteria
ggttcaacagttatgggagatatcatatcatca

SEQ ID NO: 29203 - DNA, 45 bp, unidentified
  source 1..45: mol_type = unassigned DNA; note = methanogen bacteria
accaatttcaatcaaatatcaggattcatttcagttaatcctaca

SEQ ID NO: 29204 - DNA, 30 bp, unidentified
  source 1..30: mol_type = unassigned DNA; note = methanogen bacteria
tttgaaaatggggagttcaacatgtctaaa

SEQ ID NO: 29205 - DNA, 33 bp, unidentified
  source 1..33: mol_type = unassigned DNA; note = methanogen bacteria
aaacttcaattaggtgagatcataagtctggaa

SEQ ID NO: 29206 - DNA, 39 bp, unidentified
  source 1..39: mol_type = unassigned DNA; note = methanogen bacteria
caggtttatttaatatctcaaattaaattgccaattact

SEQ ID NO: 29207 - DNA, 69 bp, unidentified
  source 1..69: mol_type = unassigned DNA; note = methanogen bacteria
tctgcaatatatggagaaagccttgtagcatccattgtaaatggaggatatgaagttttaaataataat

SEQ ID NO: 29208 - DNA, 33 bp, unidentified
  source 1..33: mol_type = unassigned DNA; note = methanogen bacteria
attggtggaacggatggcacctatcatttttca

SEQ ID NO: 29209 - DNA, 33 bp, unidentified
  source 1..33: mol_type = unassigned DNA; note = methanogen bacteria
tttggactccaatcaacaagctccacaatagga

SEQ ID NO: 29210 - DNA, 84 bp, unidentified
  source 1..84: mol_type = unassigned DNA; note = methanogen bacteria
ttccctgcaatacaggaatatggaatcgcccaatttttatttggaaatatctgggcgccaaatgaagggcaatttggtgtattt

SEQ ID NO: 29211 - DNA, 33 bp, unidentified
  source 1..33: mol_type = unassigned DNA; note = methanogen bacteria
ataagatctcaatttgggggaactggcttcggc

SEQ ID NO: 29212 - DNA, 102 bp, unidentified
  source 1..102: mol_type = unassigned DNA; note = methanogen bacteria
ggcaatgttgcaaaaataccagcatcgattttaagtcctgctagaactttgacctcaaatatcgcattggaaatgaattatgcaatcggcattcattataat

SEQ ID NO: 29213 - DNA, 30 bp, unidentified
  source 1..30: mol_type = unassigned DNA; note = methanogen bacteria
ttctatgatatgaatgcacaagtccaaacc

SEQ ID NO: 29214 - DNA, 33 bp, unidentified
  source 1..33: mol_type = unassigned DNA; note = methanogen bacteria
gggcaattcaaatatagcggcatggacctttca

SEQ ID NO: 29215 - DNA, 93 bp, unidentified
  source 1..93: mol_type = unassigned DNA; note = methanogen bacteria
ttcggattaaatgtcagtgggtctgctacacattcattattgaaattcactacagcaagtccaagtattctcaatggagggacttttggtcca

SEQ ID NO: 29216 - DNA, 33 bp, unidentified; identical to SEQ ID NO: 23497
  source 1..33: mol_type = unassigned DNA; note = methanogen bacteria

SEQ ID NO: 29217 - DNA, 45 bp, unidentified
  source 1..45: mol_type = unassigned DNA; note = methanogen bacteria
ttgaagataatgggagctagtgatgtattgaaatatgctatggat

SEQ ID NO: 29218 - DNA, 39 bp, unidentified
  source 1..39: mol_type = unassigned DNA; note = methanogen bacteria
ttggtttcaggttcattactttggtttcaggttcagttg

SEQ ID NO: 29219 - DNA, 60 bp, unidentified
  source 1..60: mol_type = unassigned DNA; note = methanogen bacteria
gcatttggaaaggattttttcatgtctcttgcatccggcggatatgaagtgttaaacact

SEQ ID NO: 29220 - DNA, 33 bp, unidentified
  source 1..33: mol_type = unassigned DNA; note = methanogen bacteria
atttctgggccaaaaggtactaatcatttttca

SEQ ID NO: 29221 - DNA, 33 bp, unidentified
  source 1..33: mol_type = unassigned DNA; note = methanogen bacteria
ggaattcaatccacaacttcatcaattcagtta

SEQ ID NO: 29222 - DNA, 87 bp, unidentified
  source 1..87: mol_type = unassigned DNA; note = methanogen bacteria
ggaatgcctgcaatcgaacaaataggattcttcaatttcatatttggtatgaaatgggcacctaaagatgaagtctacggtgtattc

SEQ ID NO: 29223 - DNA, 33 bp, unidentified
  source 1..33: mol_type = unassigned DNA; note = methanogen bacteria
ataagagaccattttggaggaactggtttcagt

SEQ ID NO: 29224 - DNA, 105 bp, unidentified
  source 1..105: mol_type = unassigned DNA; note = methanogen bacteria
gctggtaacgttgctcaaatacctggatcaatattcgaaccagtaagagtattaacatcaaacattgcactagaaatgggttacgcaattgacttacactacaat

SEQ ID NO: 29225 - DNA, 60 bp, unidentified
  source 1..60: mol_type = unassigned DNA; note = methanogen bacteria
gatggattattaatctttttcaaacttcatcaagtgcctaatgatggattagtggaaaat

SEQ ID NO: 29226 - DNA, 63 bp, unidentified
  source 1..63: mol_type = unassigned DNA; note = methanogen bacteria
gcaggagaatttgatagagattcgattaaaatatttgcctcatttaaaatggatgaaaaatta

SEQ ID NO: 29227 - DNA, 39 bp, unidentified
  source 1..39: mol_type = unassigned DNA; note = methanogen bacteria
actaaagtcgattatttcagtaaggatttgaattcttgc

SEQ ID NO: 29228 - DNA, 45 bp, unidentified
  source 1..45: mol_type = unassigned DNA; note = methanogen bacteria
acacacttaaaccaaattacaaatttcattgcaccaaatccccca

SEQ ID NO: 29229 - DNA, 30 bp, unidentified
  source 1..30: mol_type = unassigned DNA; note = methanogen bacteria
cacctgcagcttgtaatgggtgttgattca

SEQ ID NO: 29230 - DNA, 51 bp, unidentified
  source 1..51: mol_type = unassigned DNA; note = methanogen bacteria
tatgttggaaatatggaagtccacaataatatttccggcttggtacagtca

SEQ ID NO: 29231 - DNA, 51 bp, unidentified
  source 1..51: mol_type = unassigned DNA; note = methanogen bacteria
ggtcttaacatagactttttgaatgtttttccgttgctgtcagtatatccc

SEQ ID NO: 29232 - DNA, 39 bp, unidentified
  source 1..39: mol_type = unassigned DNA; note = methanogen bacteria
atgatttttaccaaaaacctgtttttggggatgatatta

SEQ ID NO: 29233 - DNA, 39 bp, unidentified
  source 1..39: mol_type = unassigned DNA; note = methanogen bacteria
aacaatccaacattgggatataacatcataacattcgga

SEQ ID NO: 29234 - DNA, 45 bp, unidentified
  source 1..45: mol_type = unassigned DNA; note = methanogen bacteria
aagaaccctacattaggaacgaacttgataactgccggatccatt

SEQ ID NO: 29235 - DNA, 39 bp, unidentified
  source 1..39: mol_type = unassigned DNA; note = methanogen bacteria
ggccagtaccggtttgcaggatttgattttagttgctca

SEQ ID NO: 29236 - DNA, 90 bp, unidentified
  source 1..90: mol_type = unassigned DNA; note = methanogen bacteria
ggattcaatgtaagcgggattgaaacatcatcaatcataaaattcactcagacatcttcatccctcatcgcaggaggatcctttggaccg

SEQ ID NO: 29237 - DNA, 30 bp, unidentified
  source 1..30: mol_type = unassigned DNA; note = methanogen bacteria
attttcgcaaataatgacaacggtatgatg

SEQ ID NO: 29238 - DNA, 63 bp, unidentified
  source 1..63: mol_type = unassigned DNA; note = methanogen bacteria
agtgccatttacggaggaaatgctttatcattggtttctggaggatatgaagcattaaattct

SEQ ID NO: 29239 - DNA, 33 bp, unidentified
  source 1..33: mol_type = unassigned DNA; note = methanogen bacteria
ataaaaggaccagaaggcacatatcatttttca

SEQ ID NO: 29240 - DNA, 30 bp, unidentified
  source 1..30: mol_type = unassigned DNA; note = methanogen bacteria
ggacttaaatcaacaacttcaacacctctg

SEQ ID NO: 29241 - DNA, 42 bp, unidentified
  source 1..42: mol_type = unassigned DNA; note = methanogen bacteria
atggctcatgatgtgtatatttgttatgatgaaagagatttg

SEQ ID NO: 29242 - DNA, 57 bp, unidentified
  source 1..57: mol_type = unassigned DNA; note = methanogen bacteria
aatcgtgataccggtgcaaaacgcatggttgacgaaattatggatgcaatcaaaaaa

SEQ ID NO: 29243 - DNA, 69 bp, unidentified
  source 1..69: mol_type = unassigned DNA; note = methanogen bacteria
ttactattttcaaaaaactccaaggattccaactttgttaataatgaagtggatattgcatttgctcaa

SEQ ID NO: 29244 - DNA, 84 bp, unidentified
  source 1..84: mol_type = unassigned DNA; note = methanogen bacteria
aaattagatggtggattggaattcttcttgagaaataaacctagaattgaagcttttccgaatcctgaagatgaatttgaccgt

SEQ ID NO: 29245 - DNA, 36 bp, unidentified
  source 1..36: mol_type = unassigned DNA; note = methanogen bacteria
attcaacaaatcggactggatttgacattcgttcca

SEQ ID NO: 29246 - DNA, 87 bp, unidentified
  source 1..87: mol_type = unassigned DNA; note = methanogen bacteria
ggtattgttgactttgctccactatggtccgctcatctgatagaggttccaaaattcaatttgccgattattaattacgatttgaac

SEQ ID NO: 29247 - DNA, 42 bp, unidentified
  source 1..42: mol_type = unassigned DNA; note = methanogen bacteria
tcattgtcgattgtatatggcgatttatcaatatccatttca

SEQ ID NO: 29248 - DNA, 30 bp, unidentified
  source 1..30: mol_type = unassigned DNA; note = methanogen bacteria
ttagacggattaggacacccattcccatta

SEQ ID NO: 29249 - DNA, 66 bp, unidentified
  source 1..66: mol_type = unassigned DNA; note = methanogen bacteria
gtgaccggcacaatgaatattggggaaatcattacataccagtcagtgcatggtccgctgatatat

SEQ ID NO: 29250 - DNA, 45 bp, unidentified
  source 1..45: mol_type = unassigned DNA; note = methanogen bacteria
actcaaaaaattcccataactggtgatgttgcaatcactataatg

SEQ ID NO: 29251 - DNA, 30 bp, unidentified
  source 1..30: mol_type = unassigned DNA; note = methanogen bacteria
ggccagtcaattcatctgatttttgaaatg

SEQ ID NO: 29252 - DNA, 123 bp, unidentified
  source 1..123: mol_type = unassigned DNA; note = methanogen bacteria
tcattcttgccattgcatccatatgcatttgctatggcaagtggtgtgggcagtgcaagtatgaatgcggcagctattggtcctactcttgcagcttttccaggattggaatcacaaatcgaa

SEQ ID NO: 29253 - DNA, 276 bp, unidentified
  source 1..276: mol_type = unassigned DNA; note = methanogen bacteria
acaattggtattgatgaaggtgttgatcttaaaggaggtacaatggccgaagttactctaaatcatcaaatgagtaatgatcaaatcacaagtcaattacaaagtgcacttcatgttaatgaggttaaaattataagtaattcaaataataaagccactattgaattatccgataaagtagatgtaggacaatttaaacaggcactaaatggaatgggaactgtaacaagttataatacagtaggacctgtattaagtcaggaagctatgaaccaa

SEQ ID NO: 29254 - DNA, 33 bp, unidentified
  source 1..33: mol_type = unassigned DNA; note = methanogen bacteria
gacatatttatgccacaagcaaaaactttaagt

SEQ ID NO: 29255 - DNA, 51 bp, unidentified
  source 1..51: mol_type = unassigned DNA; note = methanogen bacteria
ggtcttaatgttgattttttacatatttttccggaactgtcagtgtatccg

SEQ ID NO: 29256 - DNA, 33 bp, unidentified
  source 1..33: mol_type = unassigned DNA; note = methanogen bacteria
atgttggttacaaaaaatatttttttggtggtt

SEQ ID NO: 29257 - DNA, 63 bp, unidentified
  source 1..63: mol_type = unassigned DNA; note = methanogen bacteria
gtaaccggaaccatgaatataggtgaaatcatcacctatcagtctgtaaatggtccattgata

SEQ ID NO: 29258 - DNA, 33 bp, unidentified
  source 1..33: mol_type = unassigned DNA; note = methanogen bacteria
ccaagattatttaaaccagaaggtgttgatagt

SEQ ID NO: 29259 - DNA, 63 bp, unidentified
  source 1..63: mol_type = unassigned DNA; note = methanogen bacteria
gttaccggtacaatgaacattggagaaatcataacatatcagtcagtacatggtcctttaata

SEQ ID NO: 29260 - DNA, 33 bp, unidentified
  source 1..33: mol_type = unassigned DNA; note = methanogen bacteria
cccagaatattttcaccagagggggttgatagt

SEQ ID NO: 29261 - DNA, 66 bp, unidentified
  source 1..66: mol_type = unassigned DNA; note = methanogen bacteria
ggtggaatatatggatgggatgttatagattcaattgatactggaggatatgaagcattaaatact

SEQ ID NO: 29262 - DNA, 33 bp, unidentified
  source 1..33: mol_type = unassigned DNA; note = methanogen bacteria
atgggtgaagcagagggtaccaatcatttcaca

SEQ ID NO: 29263 - DNA, 33 bp, unidentified
  source 1..33: mol_type = unassigned DNA; note = methanogen bacteria
tttggattgggagtgacttcttctacaaccaca

SEQ ID NO: 29264 - DNA, 66 bp, unidentified
  source 1..66: mol_type = unassigned DNA; note = methanogen bacteria
gtgaccggctcaatgaatattggggagattatcgcttatcagtccgcacacggaccattggtattc

SEQ ID NO: 29265 - DNA, 33 bp, unidentified; identical to SEQ ID NO: 25848
  source 1..33: mol_type = unassigned DNA; note = methanogen bacteria

SEQ ID NO: 29266 - DNA, 30 bp, unidentified
  source 1..30: mol_type = unassigned DNA; note = methanogen bacteria
ttaagcggtctcggacacccattcccatta

SEQ ID NO: 29267 - DNA, 63 bp, unidentified
  source 1..63: mol_type = unassigned DNA; note = methanogen bacteria
atgggtttcttgccgtatactttcctgagtgtctttttgtccattcaaaattttgcggataac

SEQ ID NO: 29268 - DNA, 51 bp, unidentified
  source 1..51: mol_type = unassigned DNA; note = methanogen bacteria
gtcgatgtcgaaaacagaatcaccgacctttatgatgcggtatttgcttat

SEQ ID NO: 29269 - DNA, 66 bp, unidentified
  source 1..66: mol_type = unassigned DNA; note = methanogen bacteria
attgttggatcaatgaacattggtgaaatcattgcttatcaatcaattcatggtgctttaatattt

SEQ ID NO: 29270 - DNA, 63 bp, unidentified
  source 1..63: mol_type = unassigned DNA; note = methanogen bacteria
ataaccggtacaatgaatattggagaaatcattacatatcagtctgtacatggtccgttaata

SEQ ID NO: 29271 - DNA, 60 bp, unidentified
  source 1..60: mol_type = unassigned DNA; note = methanogen bacteria
tttggaattctgccacacggattcctcagcgcatacctgtcattgcagcaccttgcagaa

SEQ ID NO: 29272 - DNA, 51 bp, unidentified
  source 1..51: mol_type = unassigned DNA; note = methanogen bacteria
gtggatgccggaaatgtcattacaaacatgtacgatatcattttcgcatac

SEQ ID NO: 29273 - DNA, 30 bp, unidentified
  source 1..30: mol_type = unassigned DNA; note = methanogen bacteria
gctcaggcttatggtatggatttgggcatt

SEQ ID NO: 29274 - DNA, 39 bp, unidentified
  source 1..39: mol_type = unassigned DNA; note = methanogen bacteria
aatattccacttataaatttaaataattttgatttatcc

SEQ ID NO: 29275 - DNA, 66 bp, unidentified
  source 1..66: mol_type = unassigned DNA; note = methanogen bacteria
ttacctgtaattagttgggagttcttaacaactgcacctgtagattttggtgctagtggtggtata

SEQ ID NO: 29276 - DNA, 102 bp, unidentified
  source 1..102: mol_type = unassigned DNA; note = methanogen bacteria
gtcggttcatcaattgcagtacctgtaacaatatttgatcctgcaagaccattaccattacacttatacatattagctactgaaggtatttcaattgaaaat

SEQ ID NO: 29277 - DNA, 54 bp, unidentified
  source 1..54: mol_type = unassigned DNA; note = methanogen bacteria
ttcggtaacatgacttatgaggattttgttgctgttctcaaggaaaatggcatt

SEQ ID NO: 29278 - DNA, 45 bp, unidentified
  source 1..45: mol_type = unassigned DNA; note = methanogen bacteria
agtttgtttatagaaattaataacaaccaaacattgactgttggt

SEQ ID NO: 29279 - DNA, 63 bp, unidentified
  source 1..63: mol_type = unassigned DNA; note = methanogen bacteria
gaggctggaattttgccacatacattccttagtgtattcctgtcacttcagaatctggcaaac

SEQ ID NO: 29280 - DNA, 48 bp, unidentified
  source 1..48: mol_type = unassigned DNA; note = methanogen bacteria
gtagaccttgagaatagaattacaaacctctatgatgttgtttttact

SEQ ID NO: 29281 - DNA, 39 bp, unidentified
  source 1..39: mol_type = unassigned DNA; note = methanogen bacteria
atcggagaggtgggcgaggccaacgtggaacacaacgcc

SEQ ID NO: 29282 - DNA, 33 bp, unidentified
  source 1..33: mol_type = unassigned DNA; note = methanogen bacteria
tcgaccttcaccgccgccatctccgacctcgac

SEQ ID NO: 29283 - DNA, 63 bp, unidentified
  source 1..63: mol_type = unassigned DNA; note = methanogen bacteria
gtaaccgggtccatgaatattgatgcaattatcaattatcaggcagttcatggtcctttaata

SEQ ID NO: 29284 - DNA, 36 bp, unidentified
  source 1..36: mol_type = unassigned DNA; note = methanogen bacteria
ggacagacagggaatgtcaccattgagcacaacgcc

SEQ ID NO: 29285 - DNA, 33 bp, unidentified
  source 1..33: mol_type = unassigned DNA; note = methanogen bacteria
tctagcttcaccgccgccatctcagacctcgac

SEQ ID NO: 29286 - DNA, 33 bp, unidentified
  source 1..33: mol_type = unassigned DNA; note = methanogen bacteria
tcttatttacttggagattatgcaacaggactt

SEQ ID NO: 29287 - DNA, 45 bp, unidentified
  source 1..45: mol_type = unassigned DNA; note = methanogen bacteria
tctcttatatctttaatatatagcaatcaatattctttggcttca

SEQ ID NO: 29288 - DNA, 63 bp, unidentified
  source 1..63: mol_type = unassigned DNA; note = methanogen bacteria
gtgacaggcaccatgaatattggagaaataattgtctatcagtctgtacatggtcctctgata

SEQ ID NO: 29289 - DNA, 54 bp, unidentified
  source 1..54: mol_type = unassigned DNA; note = methanogen bacteria
gagaaaatgaactatgaaaaccagatactcgagataatcttaaacttttttgac

SEQ ID NO: 29290 - DNA, 69 bp, unidentified
  source 1..69: mol_type = unassigned DNA; note = methanogen bacteria
aacgttgcctacgatacgaacactattactcaattaatgacaggaggatacgaagccctaaattctgaa

SEQ ID NO: 29291 - DNA, 33 bp, unidentified
  source 1..33: mol_type = unassigned DNA; note = methanogen bacteria
tttggacaaaaaagcgcgaatacactgacacct

SEQ ID NO: 29292 - DNA, 33 bp, unidentified
  source 1..33: mol_type = unassigned DNA; note = methanogen bacteria
ttaggatttgaagtgagctcatctctaatcacc

SEQ ID NO: 29293 - DNA, 69 bp, unidentified
  source 1..69: mol_type = unassigned DNA; note = methanogen bacteria
ggcatggcatacggctggaatacaattttccagttaatgacacaaggatacgaagcgttgaattctgaa

SEQ ID NO: 29294 - DNA, 33 bp, unidentified
  source 1..33: mol_type = unassigned DNA; note = methanogen bacteria
attcatggccctgttggtccaaatactctgaca

SEQ ID NO: 29295 - DNA, 33 bp, unidentified
  source 1..33: mol_type = unassigned DNA; note = methanogen bacteria
ataggatttgaggtaacttcatccataattggt

SEQ ID NO: 29296 - DNA, 36 bp, unidentified
  source 1..36: mol_type = unassigned DNA; note = methanogen bacteria
tatgaatacatgttgacagcacttcatgagcttcat

SEQ ID NO: 29297 - DNA, 36 bp, unidentified
  source 1..36: mol_type = unassigned DNA; note = methanogen bacteria
atgattgatccgtctactaaagtgcttataaatcct

SEQ ID NO: 29298 - DNA, 87 bp, unidentified
  source 1..87: mol_type = unassigned DNA; note = methanogen bacteria
gaaggagttgacttgctggatgctttggtcatggtttcaaatgcatttaccagtaatggatatgcagtgctgggtaccagttcatta

SEQ ID NO: 29299 - DNA, 36 bp, unidentified
  source 1..36: mol_type = unassigned DNA; note = methanogen bacteria
tatgaatacatgttgacagcacttcatgagtttcat

SEQ ID NO: 29300 - DNA, 30 bp, unidentified
  source 1..30: mol_type = unassigned DNA; note = methanogen bacteria
attatagattctgccggtttaaattttgca

SEQ ID NO: 29301 - DNA, 66 bp, unidentified
  source 1..66: mol_type = unassigned DNA; note = methanogen bacteria
gtagcatatggctggaatacaattttccagttaatgacacaaggatacggagcgttaaatactgaa

SEQ ID NO: 29302 - DNA, 30 bp, unidentified
  source 1..30: mol_type = unassigned DNA; note = methanogen bacteria
catggtcagactggcccaaatactctaact

SEQ ID NO: 29303 - DNA, 33 bp, unidentified
  source 1..33: mol_type = unassigned DNA; note = methanogen bacteria
ttaggatttggggcagtttcctcttttattact

SEQ ID NO: 29304 - DNA, 69 bp, unidentified
  source 1..69: mol_type = unassigned DNA; note = methanogen bacteria
ggcatggcatacggctggaatacgattttccagttaatgacacaaggatacgaagcgttgaattctgaa

SEQ ID NO: 29305 - DNA, 33 bp, unidentified
  source 1..33: mol_type = unassigned DNA; note = methanogen bacteria
attactggccgggttggtccaaataccctaact

SEQ ID NO: 29306 - DNA, 33 bp, unidentified
  source 1..33: mol_type = unassigned DNA; note = methanogen bacteria
ttaggatttggagcaacttcatctttaattact

SEQ ID NO: 29307 - DNA, 30 bp, unidentified
  source 1..30: mol_type = unassigned DNA; note = methanogen bacteria
tctatgggatgtggtcctaaaacgtccctg

SEQ ID NO: 29308 - DNA, 42 bp, unidentified
  source 1..42: mol_type = unassigned DNA; note = methanogen bacteria
tggggtgttcaaggattgcctgatttttcattaggttatgtc

SEQ ID NO: 29309 - DNA, 45 bp, unidentified
  source 1..45: mol_type = unassigned DNA; note = methanogen bacteria
gatgtatggatgattgatccgactactaaagtgcttataaatcct

SEQ ID NO: 29310 - DNA, 87 bp, unidentified
  source 1..87: mol_type = unassigned DNA; note = methanogen bacteria
gaaggagttgacttgttggatgctctggtcatggtttcaaatgcatttacaagtaatggatatgcggtgctgggaacctctacatta

SEQ ID NO: 29311 - DNA, 48 bp, unidentified
  source 1..48: mol_type = unassigned DNA; note = methanogen bacteria
ataaatagttcattttttaatatttctcctgtgttgtcattctatcca

SEQ ID NO: 29312 - DNA, 33 bp, unidentified
  source 1..33: mol_type = unassigned DNA; note = methanogen bacteria
atgattattttaaaaaacttaatattcgtgata

SEQ ID NO: 29313 - DNA, 36 bp, unidentified
  source 1..36: mol_type = unassigned DNA; note = methanogen bacteria
tacaaatacatgttaaatgcccttcatcaacttcat

SEQ ID NO: 29314 - DNA, 30 bp, unidentified
  source 1..30: mol_type = unassigned DNA; note = methanogen bacteria
gaaatagttaaggccactgttttaaacatt

SEQ ID NO: 29315 - DNA, 63 bp, unidentified
  source 1..63: mol_type = unassigned DNA; note = methanogen bacteria
ggactatatggatgggacttcgtattatcactttcaagaaggtcctatgaggccatgaataca

SEQ ID NO: 29316 - DNA, 33 bp, unidentified
  source 1..33: mol_type = unassigned DNA; note = methanogen bacteria
atcaaaaatccaaatggaatcaaccattttaca

SEQ ID NO: 29317 - DNA, 30 bp, unidentified
  source 1..30: mol_type = unassigned DNA; note = methanogen bacteria
ggacttgaaatgaccacttcatcaccaaca

SEQ ID NO: 29318 - DNA, 69 bp, unidentified
  source 1..69: mol_type = unassigned DNA; note = methanogen bacteria
tctcagatagtgggattggacttttttgactccattgtaaatggaggatatgaggctatgaatactgaa

SEQ ID NO: 29319 - DNA, 33 bp, unidentified
  source 1..33: mol_type = unassigned DNA; note = methanogen bacteria
atgggaggttttcaaggaacttatcatttctca

SEQ ID NO: 29320 - DNA, 30 bp, unidentified
  source 1..30: mol_type = unassigned DNA; note = methanogen bacteria
ggactccaatcatcagctactaatataacc

SEQ ID NO: 29321 - DNA, 48 bp, unidentified
  source 1..48: mol_type = unassigned DNA; note = methanogen bacteria
ataaatatatcctttttgaataattctcctttactgtcattctatcca

SEQ ID NO: 29322 - DNA, 33 bp, unidentified
  source 1..33: mol_type = unassigned DNA; note = methanogen bacteria
atgttaattttaaaaaatataatttttgtgatt

SEQ ID NO: 29323 - DNA, 99 bp, unidentified; identical to SEQ ID NO: 24356
  source 1..99: mol_type = unassigned DNA; note = methanogen bacteria

SEQ ID NO: 29324 - DNA, 99 bp, unidentified; identical to SEQ ID NO: 24357
  source 1..99: mol_type = unassigned DNA; note = methanogen bacteria

SEQ ID NO: 29325 - DNA, 96 bp, unidentified
  source 1..96: mol_type = unassigned DNA; note = methanogen bacteria
tacggacatgaccccatagaaggattattctttacaatgtctcttcaaggaaacgttggtttagaaatagggcatgttacatccgcacttcaacct

SEQ ID NO: 29326 - DNA, 75 bp, unidentified
  source 1..75: mol_type = unassigned DNA; note = methanogen bacteria
atgcaaagtttttttaagtattatggtttaatatttaaatatactgtaaaatggcgtgtgaaatatatggatatt

SEQ ID NO: 29327 - DNA, 96 bp, unidentified
  source 1..96: mol_type = unassigned DNA; note = methanogen bacteria
tttgacccaagcataaacagcctgtttgacagcctttggtttgttctttcaacaatcacaaccgtaggttacggtgacatcttacctcaatccggc

SEQ ID NO: 29328 - DNA, 36 bp, unidentified
  source 1..36: mol_type = unassigned DNA; note = methanogen bacteria
tacaaatacatgttgaatgctcttcatgaacttcat

SEQ ID NO: 29329 - DNA, 60 bp, unidentified
  source 1..60: mol_type = unassigned DNA; note = methanogen bacteria
tcacataacggaactacagaaatcgtattgttctctaactttacaatcacattagagtca

SEQ ID NO: 29330 - DNA, 60 bp, unidentified
  source 1..60: mol_type = unassigned DNA; note = methanogen bacteria
aatggttatggtttaatatccatttaccctacaatttctaaagatttcatacaaatgaac

SEQ ID NO: 29331 - DNA, 105 bp, unidentified
  source 1..105: mol_type = unassigned DNA; note = methanogen bacteria
attgcctgcatatatcgtccatgggtgcttgaccctaaggttcatcctttaaaagagataatggtaggagctactggctattcatttccaagcggacatgttacc

SEQ ID NO: 29332 - DNA, 66 bp, unidentified
  source 1..66: mol_type = unassigned DNA; note = methanogen bacteria
accaaatcctatccaatggattacgatgctgcaggcaaattactagtcgaccctgcaatcttgact

SEQ ID NO: 29333 - DNA, 48 bp, unidentified
  source 1..48: mol_type = unassigned DNA; note = methanogen bacteria
cttaatatcaactttttgaatatttttccgcagctgtcaatctatccg

SEQ ID NO: 29334 - DNA, 39 bp, unidentified
  source 1..39: mol_type = unassigned DNA; note = methanogen bacteria
gtaatgatgatgtttataaaaaacttttatctggtgatt

SEQ ID NO: 29335 - DNA, 51 bp, unidentified
  source 1..51: mol_type = unassigned DNA; note = methanogen bacteria
gggctaaatattgatttcctgaacattttccctgtgctgtcaatataccca

SEQ ID NO: 29336 - DNA, 39 bp, unidentified
  source 1..39: mol_type = unassigned DNA; note = methanogen bacteria
ataatgatgcttgtaacaaaaaaccttgcattggtgata

SEQ ID NO: 29337 - DNA, 30 bp, unidentified
  source 1..30: mol_type = unassigned DNA; note = methanogen bacteria
gacaataacattgtcatgagcaacagtccg

SEQ ID NO: 29338 - DNA, 90 bp, unidentified
  source 1..90: mol_type = unassigned DNA; note = methanogen bacteria
gaaaacaaggacccgctgaatgcggtggtgctggtttccaatgcatttacaagcaacggatatgtgatcatgggcgaaagcataggggga

SEQ ID NO: 29339 - DNA, 51 bp, unidentified
  source 1..51: mol_type = unassigned DNA; note = methanogen bacteria
ggtatagataatcaatttttcaacatttcacctcttctgtcattctatcca

SEQ ID NO: 29340 - DNA, 33 bp, unidentified
  source 1..33: mol_type = unassigned DNA; note = methanogen bacteria
atgataattttaaaaaatataatttttgtgatt

SEQ ID NO: 29341 - DNA, 33 bp, unidentified
  source 1..33: mol_type = unassigned DNA; note = methanogen bacteria
gtatttttcgcaaccgatgatgatgcaggtagt

SEQ ID NO: 29342 - DNA, 48 bp, unidentified
  source 1..48: mol_type = unassigned DNA; note = methanogen bacteria
ataaacatatcatttttaaacatttctccaacattgtcattttaccca

SEQ ID NO: 29343 - DNA, 30 bp, unidentified
  source 1..30: mol_type = unassigned DNA; note = methanogen bacteria
ttgattttaaaaaatataatatttgtgatt

SEQ ID NO: 29344 - DNA, 48 bp, unidentified
  source 1..48: mol_type = unassigned DNA; note = methanogen bacteria
ttaaatattggttttttgaatatttttccagaattatcaatttatccg

SEQ ID NO: 29345 - DNA, 39 bp, unidentified
  source 1..39: mol_type = unassigned DNA; note = methanogen bacteria
attatgatgatttttgcaaaaaatttattcttggtgatt

SEQ ID NO: 29346 - DNA, 57 bp, unidentified
  source 1..57: mol_type = unassigned DNA; note = methanogen bacteria
gaaggatttttagcactatataacttcaatgaaatagatattgcagattttgtaata

SEQ ID NO: 29347 - DNA, 36 bp, unidentified
  source 1..36: mol_type = unassigned DNA; note = methanogen bacteria
tatgaatacatgttaaatgcacttcatcagcttcat

SEQ ID NO: 29348 - DNA, 30 bp, unidentified
  source 1..30: mol_type = unassigned DNA; note = methanogen bacteria
atatcaaatgctgtgagcatgaacttttca

SEQ ID NO: 29349 - DNA, 69 bp, unidentified
  source 1..69: mol_type = unassigned DNA; note = methanogen bacteria
ggacaggcctacggtttcgacaatattttcacattagcgacacagggatacgaatctctgaattctgaa

SEQ ID NO: 29350 - DNA, 30 bp, unidentified
  source 1..30: mol_type = unassigned DNA; note = methanogen bacteria
tatgggcaaaaaggaccaaatacgctgaca

SEQ ID NO: 29351 - DNA, 33 bp, unidentified
  source 1..33: mol_type = unassigned DNA; note = methanogen bacteria
ttaggatttgaagtgagttcatctgtaattacc

SEQ ID NO: 29352 - DNA, 66 bp, unidentified
  source 1..66: mol_type = unassigned DNA; note = methanogen bacteria
gaatctggatttttgccgtctactttcctcaacgcttacctttcattgcaaggtttggctaacaat

SEQ ID NO: 29353 - DNA, 48 bp, unidentified
  source 1..48: mol_type = unassigned DNA; note = methanogen bacteria
gatgtgggaaacgcaattacaagcatttataaggatgtgttcgttgtt

SEQ ID NO: 29354 - DNA, 36 bp, unidentified
  source 1..36: mol_type = unassigned DNA; note = methanogen bacteria
tacgaatacatgcttaatgcacttcaccagcttcat

SEQ ID NO: 29355 - DNA, 30 bp, unidentified
  source 1..30: mol_type = unassigned DNA; note = methanogen bacteria
attgcaaattcagtcagcgttaacttttct

SEQ ID NO: 29356 - DNA, 72 bp, unidentified
  source 1..72: mol_type = unassigned DNA; note = methanogen bacteria
ggccaggcttacggtttcgacaatattttcgcattagtgacacaaggatatgaatcattgaattctgaagtt

SEQ ID NO: 29357 - DNA, 33 bp, unidentified
  source 1..33: mol_type = unassigned DNA; note = methanogen bacteria
catgggcaaagaggtccaaatacactgacaccg

SEQ ID NO: 29358 - DNA, 36 bp, unidentified
  source 1..36: mol_type = unassigned DNA; note = methanogen bacteria
ttaggatttgaggtaagctcatccgtaattactcct

SEQ ID NO: 29359 - DNA, 48 bp, unidentified
  source 1..48: mol_type = unassigned DNA; note = methanogen bacteria
ttaaaaaatcccactttgggaatgaatctcataaccgcaggatccatc

SEQ ID NO: 29360 - DNA, 51 bp, unidentified
  source 1..51: mol_type = unassigned DNA; note = methanogen bacteria
ggtattaatgtggactttttgaatatttttccggaactgtcgatatatccg

SEQ ID NO: 29361 - DNA, 36 bp, unidentified
  source 1..36: mol_type = unassigned DNA; note = methanogen bacteria
atcatgttgtttacaaaaaatatttttctggtggta

SEQ ID NO: 29362 - DNA, 48 bp, unidentified
  source 1..48: mol_type = unassigned DNA; note = methanogen bacteria
ctcaatatagattttttgaatgtttttccccagttgtcaatatatccg

SEQ ID NO: 29363 - DNA, 36 bp, unidentified
  source 1..36: mol_type = unassigned DNA; note = methanogen bacteria
atcatgctttttgcaaaaaatctggttttggtggtg

SEQ ID NO: 29364 - DNA, 66 bp, unidentified
  source 1..66: mol_type = unassigned DNA; note = methanogen bacteria
aaaaatgatacattaggaatgaatctgataactgcaggatccattcttgtaattttacaggcagca

SEQ ID NO: 29365 - DNA, 66 bp, unidentified
  source 1..66: mol_type = unassigned DNA; note = methanogen bacteria
gaatctggaattttgccttccacattcctcaacgcttacctgtccctgcaaagtttggctaataac

SEQ ID NO: 29366 - DNA, 51 bp, unidentified
  source 1..51: mol_type = unassigned DNA; note = methanogen bacteria
gtggatatgggaaatgcgattacagccctttatgacgatttattcgttgcc

SEQ ID NO: 29367 - DNA, 93 bp, unidentified
  source 1..93: mol_type = unassigned DNA; note = methanogen bacteria
attattaatgcaacaatccaaacattaatgtttggaggccaacaattaatggcttacagtttatatcaatttttattaattttaagccagcca

SEQ ID NO: 29368 - DNA, 30 bp, unidentified
  source 1..30: mol_type = unassigned DNA; note = methanogen bacteria
agattgtttagtgttgtaacacctgatgca

SEQ ID NO: 29369 - DNA, 36 bp, unidentified
  source 1..36: mol_type = unassigned DNA; note = methanogen bacteria
ggacaattcactttcaggggctttgatttttcacaa

SEQ ID NO: 29370 - DNA, 93 bp, unidentified
  source 1..93: mol_type = unassigned DNA; note = methanogen bacteria
ttcggattcagtgtaagcggcaatccgacaccttcattgttaaaatttgaacaagtgggtcaaaatatagttaccggagggacttttggaccg

SEQ ID NO: 29371 - DNA, 33 bp, unidentified
  source 1..33: mol_type = unassigned DNA; note = methanogen bacteria
ggatccacagtaatgggagatgttatttctgga

SEQ ID NO: 29372 - DNA, 48 bp, unidentified
  source 1..48: mol_type = unassigned DNA; note = methanogen bacteria
ctaaatattgactttttgaatatttttccccaactttcactatatccg

SEQ ID NO: 29373 - DNA, 36 bp, unidentified
  source 1..36: mol_type = unassigned DNA; note = methanogen bacteria
attttcctttttacaaaaaattttgcgctggtgata

SEQ ID NO: 29374 - DNA, 111 bp, unidentified
  source 1..111: mol_type = unassigned DNA; note = methanogen bacteria
aaaaatgctgtaacaatatacagaccttttataatgaaccctaatattcatcctctagaagaggcaatggaagaagcaacaggatattcattcccaagtggacatacaaca

SEQ ID NO: 29375 - DNA, 69 bp, unidentified
  source 1..69: mol_type = unassigned DNA; note = methanogen bacteria
tttaaaggatatccaatggattatgacagtgcaggaaagttaatcgtagaccctagtaaaatggctctt

SEQ ID NO: 29376 - DNA, 96 bp, unidentified
  source 1..96: mol_type = unassigned DNA; note = methanogen bacteria
ttggttattaatgccacaattcaaacattaatgcttggaggtcagcaattaatggcttacagcttatatcaatttttattagttttaagtcaacct

SEQ ID NO: 29377 - DNA, 36 bp, unidentified
  source 1..36: mol_type = unassigned DNA; note = methanogen bacteria
tatgaatatatgctgacagcacttcatgagtttcat

SEQ ID NO: 29378 - DNA, 48 bp, unidentified
  source 1..48: mol_type = unassigned DNA; note = methanogen bacteria
ttaaatggggaatttttcaatgtttttcctctgctgtcaatttaccca

SEQ ID NO: 29379 - DNA, 30 bp, unidentified
  source 1..30: mol_type = unassigned DNA; note = methanogen bacteria
ctgattacaaaacattttgtgctggtgata

SEQ ID NO: 29380 - DNA, 48 bp, unidentified
  source 1..48: mol_type = unassigned DNA; note = methanogen bacteria
gccagtattgattttttgaatatttttccggtattgtcaatatatccg

SEQ ID NO: 29381 - DNA, 33 bp, unidentified
  source 1..33: mol_type = unassigned DNA; note = methanogen bacteria
atgctgattacaaaaaatttggttttggtgatt

SEQ ID NO: 29382 - DNA, 33 bp, unidentified
  source 1..33: mol_type = unassigned DNA; note = methanogen bacteria
ggctcctgggacgggatcggagacatctccgcg

SEQ ID NO: 29383 - DNA, 48 bp, unidentified
  source 1..48: mol_type = unassigned DNA; note = methanogen bacteria
cttaatataggttttttgaatattttccctgagttgtcaatatatccg

SEQ ID NO: 29384 - DNA, 36 bp, unidentified
  source 1..36: mol_type = unassigned DNA; note = methanogen bacteria
ataatgcttttaactaaaaatctggttctggtggtg

SEQ ID NO: 29385 - DNA, 63 bp, unidentified
  source 1..63: mol_type = unassigned DNA; note = methanogen bacteria
aagaatccgactttgggaatgaacctcataactgccggttccatcattgtcatcctgcagtcc

SEQ ID NO: 29386 - DNA, 36 bp, unidentified
  source 1..36: mol_type = unassigned DNA; note = methanogen bacteria
ggacaattcacttttgacggatatgatttatcttca

SEQ ID NO: 29387 - DNA, 93 bp, unidentified
  source 1..93: mol_type = unassigned DNA; note = methanogen bacteria
tacggatttaatgtaagcggcatatcaactccgacattattgaaatgtagtcacacgggtcaaaatttaattaatggtggtgtttttggacct

SEQ ID NO: 29388 - DNA, 66 bp, unidentified
  source 1..66: mol_type = unassigned DNA; note = methanogen bacteria
gggatgacctacggactggatgcagttatccaattaacacaaggatacgagtctttgaattctgaa

SEQ ID NO: 29389 - DNA, 33 bp, unidentified
  source 1..33: mol_type = unassigned DNA; note = methanogen bacteria
attcgtggtcctgttggcccaaatacactaaca

SEQ ID NO: 29390 - DNA, 33 bp, unidentified
  source 1..33: mol_type = unassigned DNA; note = methanogen bacteria
ataggatttgaaataagttcatccgtaatcagc

SEQ ID NO: 29391 - DNA, 48 bp, unidentified
  source 1..48: mol_type = unassigned DNA; note = methanogen bacteria
ttaaatggtgatatttttaatatttttccgttattgtcaatttatcca

SEQ ID NO: 29392 - DNA, 33 bp, unidentified
  source 1..33: mol_type = unassigned DNA; note = methanogen bacteria
atgctaattacaaaaaattttgtattggtgatg

SEQ ID NO: 29393 - DNA, 66 bp, unidentified
  source 1..66: mol_type = unassigned DNA; note = methanogen bacteria
gaattcggatatcttccatcttcattccttaacgcctatctgtccctgcaaagcattgcaaacaac

SEQ ID NO: 29394 - DNA, 45 bp, unidentified
  source 1..45: mol_type = unassigned DNA; note = methanogen bacteria
ggaaacgcaataacagatatctatgaagatgtgtttattctattt

SEQ ID NO: 29395 - DNA, 33 bp, unidentified
  source 1..33: mol_type = unassigned DNA; note = methanogen bacteria
ccaagactcttctcgcctgaaggcgtggatgcg

SEQ ID NO: 29396 - DNA, 66 bp, unidentified
  source 1..66: mol_type = unassigned DNA; note = methanogen bacteria
gaattcggataccttccgtcttcattccttaatgcttatctgtccctgcaaagcattgcaaacaac

SEQ ID NO: 29397 - DNA, 45 bp, unidentified
  source 1..45: mol_type = unassigned DNA; note = methanogen bacteria
gatttgggaaatgcaataacaaatatttatgatgatgtttttatt

SEQ ID NO: 29398 - DNA, 48 bp, unidentified
  source 1..48: mol_type = unassigned DNA; note = methanogen bacteria
ttaaatattgactttttgaatatttttccccagctgtcaatctatccc

SEQ ID NO: 29399 - DNA, 36 bp, unidentified
  source 1..36: mol_type = unassigned DNA; note = methanogen bacteria
atgatgctttttacaaaaaatctggttctggtgata

SEQ ID NO: 29400 - DNA, 57 bp, unidentified
  source 1..57: mol_type = unassigned DNA; note = methanogen bacteria
tttggagaaccatttatttattcattgactggcaattatgaaagtttgaatacaata

SEQ ID NO: 29401 - DNA, 36 bp, unidentified
  source 1..36: mol_type = unassigned DNA; note = methanogen bacteria
gttaatcctaatataaaatttaacaatcaatttact

SEQ ID NO: 29402 - DNA, 33 bp, unidentified
  source 1..33: mol_type = unassigned DNA; note = methanogen bacteria
tttggattgagccaactttcatccaatgtttct

SEQ ID NO: 29403 - DNA, 33 bp, unidentified
  source 1..33: mol_type = unassigned DNA; note = methanogen bacteria
tcttttttagatactggtacggttttaaaaata

SEQ ID NO: 29404 - DNA, 48 bp, unidentified
  source 1..48: mol_type = unassigned DNA; note = methanogen bacteria
ttaaacattgactttttgcacatttttccggtattgtcagtgtatccc

SEQ ID NO: 29405 - DNA, 36 bp, unidentified
  source 1..36: mol_type = unassigned DNA; note = methanogen bacteria
atgatgatttttgcaaaaaacataatgctggtgata

SEQ ID NO: 29406 - DNA, 33 bp, unidentified
  source 1..33: mol_type = unassigned DNA; note = methanogen bacteria
agctcaaccgtcatgggagatattgtctccgga

SEQ ID NO: 29407 - DNA, 51 bp, unidentified
  source 1..51: mol_type = unassigned DNA; note = methanogen bacteria
ggatttaatttggaatacttgaacatttttccggaattgtcaatctatcca

SEQ ID NO: 29408 - DNA, 36 bp, unidentified
  source 1..36: mol_type = unassigned DNA; note = methanogen bacteria
atgatgatttttacaaaaaatgttatcctggtgatt

SEQ ID NO: 29409 - DNA, 48 bp, unidentified
  source 1..48: mol_type = unassigned DNA; note = methanogen bacteria
ctcaatatagactttttgaatatttttccgcagttgtccatatatccg

SEQ ID NO: 29410 - DNA, 33 bp, unidentified
  source 1..33: mol_type = unassigned DNA; note = methanogen bacteria
atattgtttactaaaaatctggttttggtggtg

SEQ ID NO: 29411 - DNA, 51 bp, unidentified
  source 1..51: mol_type = unassigned DNA; note = methanogen bacteria
ggcataaacataccctttttcaatatttctcctacattgtcattctatcca

SEQ ID NO: 29412 - DNA, 33 bp, unidentified
  source 1..33: mol_type = unassigned DNA; note = methanogen bacteria
gttttaattttaaaaaatcttgtgtttgtgatg

SEQ ID NO: 29413 - DNA, 48 bp, unidentified
  source 1..48: mol_type = unassigned DNA; note = methanogen bacteria
cttaatatagattttttgaatgtttttccacagatgtcaatatatcca

SEQ ID NO: 29414 - DNA, 36 bp, unidentified
  source 1..36: mol_type = unassigned DNA; note = methanogen bacteria
ataatgctatttgcaaaaaatctggttttggtggtg

SEQ ID NO: 29415 - DNA, 66 bp, unidentified
  source 1..66: mol_type = unassigned DNA; note = methanogen bacteria
tataacatgctttccgaagctttagaacagcctgtatcatccgcaacattcagcaccaatttcgaa

SEQ ID NO: 29416 - DNA, 66 bp, unidentified
  source 1..66: mol_type = unassigned DNA; note = methanogen bacteria
gaatctggaattctgccggctacattcctcaaggcttatttgtcattgcaaaatttagctaataat

SEQ ID NO: 29417 - DNA, 51 bp, unidentified
  source 1..51: mol_type = unassigned DNA; note = methanogen bacteria
gtagatatgggaaacgcaattacagacctttatgacgatgtgttcgttgtc

SEQ ID NO: 29418 - DNA, 30 bp, unidentified
  source 1..30: mol_type = unassigned DNA; note = methanogen bacteria
gtttatgcaaatgaacttgaattggagtct

SEQ ID NO: 29419 - DNA, 36 bp, unidentified
  source 1..36: mol_type = unassigned DNA; note = methanogen bacteria
ggacaattcactttcagcggctttgatttttcacag

SEQ ID NO: 29420 - DNA, 93 bp, unidentified
  source 1..93: mol_type = unassigned DNA; note = methanogen bacteria
tttggatttagcgtaagcggcgctccaacaccttcattattgaaattcagccaagctggtcaaaatatgattgcgggaggtatttttggaccg

SEQ ID NO: 29421 - DNA, 66 bp, unidentified
  source 1..66: mol_type = unassigned DNA; note = methanogen bacteria
gtaaccggaacaatgaatattggtcaaattattgcttatcagtcagtgcatggtcctttaatattt

SEQ ID NO: 29422 - DNA, 36 bp, unidentified
  source 1..36: mol_type = unassigned DNA; note = methanogen bacteria
taccagtacatgctaaactgtttaagcaatctaaaa

SEQ ID NO: 29423 - DNA, 66 bp, unidentified
  source 1..66: mol_type = unassigned DNA; note = methanogen bacteria
gaaactcatacaatgaatattggacaaataatatcttatcaatctgcacatggaccactaatattt

SEQ ID NO: 29424 - DNA, 33 bp, unidentified
  source 1..33: mol_type = unassigned DNA; note = methanogen bacteria
gaagaatctgttttaaaagacagaaaaatagat

SEQ ID NO: 29425 - DNA, 30 bp, unidentified
  source 1..30: mol_type = unassigned DNA; note = methanogen bacteria
gtaatctctccggtaaacctcggagtttca

SEQ ID NO: 29426 - DNA, 96 bp, unidentified
  source 1..96: mol_type = unassigned DNA; note = methanogen bacteria
ttagtcattaatgctaccattcaaacattagtatttggaggccaacaagaagtagcttatactttttatcaactgctacttattttaagccaacca

SEQ ID NO: 29427 - DNA, 120 bp, unidentified
  source 1..120: mol_type = unassigned DNA; note = methanogen bacteria
tttattaattctgcagatataacaaccaattttcaagctatgaacaaacctccttcatttgagcatttattcggtactgattggatgggaagagacatgtttacccgtacattaaaagga

SEQ ID NO: 29428 - DNA, 90 bp, unidentified
  source 1..90: mol_type = unassigned DNA; note = methanogen bacteria
acatttttaggattcggcctatcacctcatgaacctgcaatcgggataatcctgtctgaatctatgaaatatcttgcaacaggtaactgg

SEQ ID NO: 29429 - DNA, 81 bp, unidentified
  source 1..81: mol_type = unassigned DNA; note = methanogen bacteria
gtctttgacaatatgagaattttagcgaatgtggctcctgttgatacagttcaagcagcaatatcagctatgcctccaagc

SEQ ID NO: 29430 - DNA, 30 bp, unidentified
  source 1..30: mol_type = unassigned DNA; note = methanogen bacteria
gtaaacgaatctgtaggcgcttctgtaaat

SEQ ID NO: 29431 - DNA, 117 bp, unidentified
  source 1..117: mol_type = unassigned DNA; note = methanogen bacteria
attaattctgcagacattacaacaaactttaatgctatgaatcaaccgccttcattcgaacatctattcggtacagactggatgggaagggatatgtttacccgtaccatgaaaggt

SEQ ID NO: 29432 - DNA, 90 bp, unidentified
  source 1..90: mol_type = unassigned DNA; note = methanogen bacteria
acattcttaggattcggtttatcaccgcacgaacctgcaattggagtaatcttatcagaatccatgaaataccttgcaacaggtaactgg

SEQ ID NO: 29433 - DNA, 51 bp, unidentified
  source 1..51: mol_type = unassigned DNA; note = methanogen bacteria
ggtacttgtcctacatcagctattgaagtaacacctaactctattattcac

SEQ ID NO: 29434 - DNA, 36 bp, unidentified
  source 1..36: mol_type = unassigned DNA; note = methanogen bacteria
gcaattactcttgaagaagttggaagtcctgttact

SEQ ID NO: 29435 - DNA, 42 bp, unidentified
  source 1..42: mol_type = unassigned DNA; note = methanogen bacteria
ggagactttatttctgcaaacagtgcaagcttaaccgttgct

SEQ ID NO: 29436 - DNA, 42 bp, unidentified
  source 1..42: mol_type = unassigned DNA; note = methanogen bacteria
atgtatacactgaatttaggtggaatacgaattgtattaatg

SEQ ID NO: 29437 - DNA, 30 bp, unidentified
  source 1..30: mol_type = unassigned DNA; note = methanogen bacteria
ggtcaaaatatagaaataatattcaatgct

SEQ ID NO: 29438 - DNA, 120 bp, unidentified
  source 1..120: mol_type = unassigned DNA; note = methanogen bacteria
ttacttccattacatccatatgcatatggaatggcgtgcggtataggaagtgcaagtatgaatgctgcagctgtagcatcattatctgctatatttccgagcatgtcaacacagctacag

SEQ ID NO: 29439 - DNA, 36 bp, unidentified
  source 1..36: mol_type = unassigned DNA; note = methanogen bacteria
tttaatttgaatattacaaatataattccaattttt

SEQ ID NO: 29440 - DNA, 63 bp, unidentified
  source 1..63: mol_type = unassigned DNA; note = methanogen bacteria
gtgaccggtacaatgaacattggtgaaatcattgcataccagtctgttcatggtcctttgata

SEQ ID NO: 29441 - DNA, 39 bp, unidentified
  source 1..39: mol_type = unassigned DNA; note = methanogen bacteria
cagtatgaattcatgcttagtgcattaaatgaattaaaa

SEQ ID NO: 29442 - DNA, 120 bp, unidentified
  source 1..120: mol_type = unassigned DNA; note = methanogen bacteria
tttattgaccatacagctgtattgaccagtaatttctataacgtaaatcagcccccatcattcgaacattggtttggaactgattggatgggcagggacatgtttatgcgtacattactc

SEQ ID NO: 29443 - DNA, 90 bp, unidentified
  source 1..90: mol_type = unassigned DNA; note = methanogen bacteria
tctttcttaggttttggtttaccggctcatgagccagctattggaattatcttatcagaatcaatgaaatacttaagtatgggatattgg

SEQ ID NO: 29444 - DNA, 42 bp, unidentified
  source 1..42: mol_type = unassigned DNA; note = methanogen bacteria
gtaatagctttggatataatgggtgttaatatagttttaatg

SEQ ID NO: 29445 - DNA, 30 bp, unidentified
  source 1..30: mol_type = unassigned DNA; note = methanogen bacteria
ggtcagaacctggctattgtctttgatgtg

SEQ ID NO: 29446 - DNA, 123 bp, unidentified
  source 1..123: mol_type = unassigned DNA; note = methanogen bacteria
tatgtggttccattacatccgtttgcatacggtatggcctgtggtataggtagtgccagtatgaatgcagcagcggttgcatcactttcggcggtatacccacaatatgcagttcaactggaa

SEQ ID NO: 29447 - DNA, 39 bp, unidentified
  source 1..39: mol_type = unassigned DNA; note = methanogen bacteria
caatatcaatacatgctcaataccttgaatgctctaaac

SEQ ID NO: 29448 - DNA, 117 bp, unidentified
  source 1..117: mol_type = unassigned DNA; note = methanogen bacteria
accattgatcctaaaagcatcactaccaattggtcaatgatgaaccagccgccttcctttgagcatatcttcggtaccgactggctgggaagagacatgttcattcgtaccctcaag

SEQ ID NO: 29449 - DNA, 90 bp, unidentified
  source 1..90: mol_type = unassigned DNA; note = methanogen bacteria
acatttttaggattcggtctttctcctcatgagcctgctattggaattatcttatctgaatccatgaaatatcttgcaacaggaaactgg

SEQ ID NO: 29450 - DNA, 120 bp, unidentified
  source 1..120: mol_type = unassigned DNA; note = methanogen bacteria
tttatcaattcaggagacataacaaccaacttccaagcgatgaacaaacccccatcctttgaacatttctttggtactgattggatgggtagggacatgttcactcgtactttaaaagga

SEQ ID NO: 29451 - DNA, 90 bp, unidentified
  source 1..90: mol_type = unassigned DNA; note = methanogen bacteria
acatttttgggttttggactttcacctcatgaaccggcaattggtattattttatcagaatccatgaagtatcttgcaacagggaactgg

SEQ ID NO: 29452 - DNA, 66 bp, unidentified
  source 1..66: mol_type = unassigned DNA; note = methanogen bacteria
ttaaaaaatccgagcttgggatttaatatcattacggccggatcaaccataattattctccaggca

SEQ ID NO: 29453 - DNA, 93 bp, unidentified
  source 1..93: mol_type = unassigned DNA; note = methanogen bacteria
ctttttacatccgtaattcagacattaatgtttacaggccaggcaactcttgcttacggcatttatcaattattagctattttaagtcaacca

SEQ ID NO: 29454 - DNA, 39 bp, unidentified
  source 1..39: mol_type = unassigned DNA; note = methanogen bacteria
caatatgaatatatgattacggttttacataaacttcaa

SEQ ID NO: 29455 - DNA, 114 bp, unidentified
  source 1..114: mol_type = unassigned DNA; note = methanogen bacteria
ttcattcgtgatattcctacaagttttgtaaatgcaaaccaaatgccttcactagagcatctttttggtactgactggatgggaagagatatgtttcagcgaacggttgcaggt

SEQ ID NO: 29456 - DNA, 96 bp, unidentified
  source 1..96: mol_type = unassigned DNA; note = methanogen bacteria
ataacatttttaggatttggtttgcctcctcatgaacctgcaatcggagtcattttagctgaatcaatgcactacttatcatcaggttattggtgg

SEQ ID NO: 29457 - DNA, 69 bp, unidentified
  source 1..69: mol_type = unassigned DNA; note = methanogen bacteria
ttaaaaacaggttcgatgaatataggaaatattattagttatcaagttaacaatggtccattagcattt

SEQ ID NO: 29458 - DNA, 63 bp, unidentified
  source 1..63: mol_type = unassigned DNA; note = methanogen bacteria
gaaatgggaattttaccacatatttttgttaatttctttttatctcttcagcatttaacggat

SEQ ID NO: 29459 - DNA, 51 bp, unidentified
  source 1..51: mol_type = unassigned DNA; note = methanogen bacteria
gcggatttgggaaatgctataacgaatatgtatgatgctgtctttgtttat

SEQ ID NO: 29460 - DNA, 39 bp, unidentified
  source 1..39: mol_type = unassigned DNA; note = methanogen bacteria
aaaacgaacaccaaacttatcaccaaagatttaagtaaa

SEQ ID NO: 29461 - DNA, 123 bp, unidentified
  source 1..123: mol_type = unassigned DNA; note = methanogen bacteria
ttagaagtatctctaacagataaacataacacaccattaactggtaaaaatgttactattgaaattaatggtgtcccatattctcgtaaaactgatgataatggaatagctgggttaaacatt

SEQ ID NO: 29462 - DNA, 210 bp, unidentified
  source 1..210: mol_type = unassigned DNA; note = methanogen bacteria
acagcacactgtatggtttatgtgaatgctaaagtagcagttgatgatttaaacatgaattatcatgatggtagtagattcacagcaacattaaccgatgcagaagacaaagcattaccaaatactaatgtaacattcaatatcaacagtgtagattatataaggaccaccaataatgatggggtggctggtttaaatattaacttgaat

SEQ ID NO: 29463 - DNA, 252 bp, unidentified
  source 1..252: mol_type = unassigned DNA; note = methanogen bacteria
ggggattataaaatctctactaaggttgctgatgttaatatagtgaaaaatattcatattaataaagcagctactaggatggaagggactgatatagttaaaacagcttcacaaagttcagtgtatcaatgtgcagtatacgattcaagtaataatcgtgtaaaaggtgatgttgatataactgttaatggtaaaacatattctcgtaatattggtgatgatggtttagctagattgaatattaatctgggt

SEQ ID NO: 29464 - DNA, 51 bp, unidentified
  source 1..51: mol_type = unassigned DNA; note = methanogen bacteria
cctagtaatgttgttaataggataactgttaatgatgaccctgcaccggtt

SEQ ID NO: 29465 - DNA, 69 bp, unidentified
  source 1..69: mol_type = unassigned DNA; note = methanogen bacteria
ttaaaaacaggttcaatgaatataggagatattattagttatcaggctactaatggtccattaatattt

SEQ ID NO: 29466 - DNA, 114 bp, unidentified
  source 1..114: mol_type = unassigned DNA; note = methanogen bacteria
atagatccttcaagcataactaccgactggagcgttatgaataagcctccttctttagagcatttatttggaactgattggatgggcagagatatgtttacccgtactctaaag

SEQ ID NO: 29467 - DNA, 90 bp, unidentified
  source 1..90: mol_type = unassigned DNA; note = methanogen bacteria
acatttttaggtttcggtttatctccacatgagccagcaattggtatcattttatctgaatccatgaaatatctggcgacaggtaattgg

SEQ ID NO: 29468 - DNA, 33 bp, unidentified
  source 1..33: mol_type = unassigned DNA; note = methanogen bacteria
ttcaatctaaatgttccaaatatctaccccttt

SEQ ID NO: 29469 - DNA, 36 bp, unidentified
  source 1..36: mol_type = unassigned DNA; note = methanogen bacteria
gtacagggctccgatgtcaccgtcagtcacgatgcc

SEQ ID NO: 29470 - DNA, 33 bp, unidentified
  source 1..33: mol_type = unassigned DNA; note = methanogen bacteria
accgccttcctcgatgcgatctccgatgtggac

SEQ ID NO: 29471 - DNA, 63 bp, unidentified
  source 1..63: mol_type = unassigned DNA; note = methanogen bacteria
ttgactggaactatggatatcagtggaatcatagcttatcaagcagcaaatggtcctttggta

SEQ ID NO: 29472 - DNA, 36 bp, unidentified
  source 1..36: mol_type = unassigned DNA; note = methanogen bacteria
tatcaatatatgttgaattccttaaatacattgaat

SEQ ID NO: 29473 - DNA, 63 bp, unidentified
  source 1..63: mol_type = unassigned DNA; note = methanogen bacteria
cttactggaactatggacattagcggaataatcgcttatcaagcagcaaatggacctttagta

SEQ ID NO: 29474 - DNA, 57 bp, unidentified
  source 1..57: mol_type = unassigned DNA; note = methanogen bacteria
aatgaaattttcgttttgatgaaaataagggaatccttagatttggtagttttatat

SEQ ID NO: 29475 - DNA, 30 bp, unidentified
  source 1..30: mol_type = unassigned DNA; note = methanogen bacteria
attgaggagttaggtacaaagggtatcgtc

SEQ ID NO: 29476 - DNA, 51 bp, unidentified
  source 1..51: mol_type = unassigned DNA; note = methanogen bacteria
atctataatgctttcagcattctggatatggaaccttcagtttttgtcatt

SEQ ID NO: 29477 - DNA, 42 bp, unidentified
  source 1..42: mol_type = unassigned DNA; note = methanogen bacteria
agagtctttttaagtgatgtcaatcttgatttgtcatttgaa

SEQ ID NO: 29478 - DNA, 51 bp, unidentified
  source 1..51: mol_type = unassigned DNA; note = methanogen bacteria
ggacagtcacttgaccagttttcattgactgaaaacttttcctttactggt

SEQ ID NO: 29479 - DNA, 33 bp, unidentified
  source 1..33: mol_type = unassigned DNA; note = methanogen bacteria
tcaggaacctatcaggcaggacttatggtgaat

SEQ ID NO: 29480 - DNA, 66 bp, unidentified
  source 1..66: mol_type = unassigned DNA; note = methanogen bacteria
atcaatttatatggtctgagctttgtagataacctagtaaatggaggatatgaagttttaaataat

SEQ ID NO: 29481 - DNA, 33 bp, unidentified
  source 1..33: mol_type = unassigned DNA; note = methanogen bacteria
attacaggtcctgaaggaacattccaactttca

SEQ ID NO: 29482 - DNA, 30 bp, unidentified
  source 1..30: mol_type = unassigned DNA; note = methanogen bacteria
ggaatcataacacctacatcatcgccccaa

SEQ ID NO: 29483 - DNA, 36 bp, unidentified
  source 1..36: mol_type = unassigned DNA; note = methanogen bacteria
taccaatacatgctaaatgctttaaattcaagaaat

SEQ ID NO: 29484 - DNA, 69 bp, unidentified
  source 1..69: mol_type = unassigned DNA; note = methanogen bacteria
ttaaaaacaggttcaatgaatataggaaatattattggttatcaatcaacgaatggtccattggtattt

SEQ ID NO: 29485 - DNA, 48 bp, unidentified
  source 1..48: mol_type = unassigned DNA; note = methanogen bacteria
actggtggaaacaatttatctggaattatcattgatttatcttttgag

SEQ ID NO: 29486 - DNA, 93 bp, unidentified
  source 1..93: mol_type = unassigned DNA; note = methanogen bacteria
cttttaagtacagcaatgcagactctgctttattccggccagcaggtgatagcctatgagatttatcagctgttagtcttcataagccagcct

SEQ ID NO: 29487 - DNA, 39 bp, unidentified
  source 1..39: mol_type = unassigned DNA; note = methanogen bacteria
caatatgaatacatgataaatgcattacataccctagca

SEQ ID NO: 29488 - DNA, 69 bp, unidentified
  source 1..69: mol_type = unassigned DNA; note = methanogen bacteria
ttaaagacaaatacgatgaatattggggggattatttcatatcaatctgttaatggttctttggcggtt

SEQ ID NO: 29489 - DNA, 36 bp, unidentified
  source 1..36: mol_type = unassigned DNA; note = methanogen bacteria
acaatattatccggaactgttgcagttgcagcatat

SEQ ID NO: 29490 - DNA, 63 bp, unidentified
  source 1..63: mol_type = unassigned DNA; note = methanogen bacteria
tctttatcttatatattttcctattcagcagatagtgtaattttaggtccaaaaatcgttgaa

SEQ ID NO: 29491 - DNA, 51 bp, unidentified
  source 1..51: mol_type = unassigned DNA; note = methanogen bacteria
caattcactagacaagaaaatattatattaaaacacaaattcggtgttgtt

SEQ ID NO: 29492 - DNA, 66 bp, unidentified
  source 1..66: mol_type = unassigned DNA; note = methanogen bacteria
gtaacaggttcaatgaatataggtgaaattattgcttatcaatcagttcatgggtctttagtatat

SEQ ID NO: 29493 - DNA, 63 bp, unidentified
  source 1..63: mol_type = unassigned DNA; note = methanogen bacteria
ctgccggagtacctgatggaaccgaacgggaatgtgccagacatcctgatgaaggtgttctcc

SEQ ID NO: 29494 - DNA, 69 bp, unidentified
  source 1..69: mol_type = unassigned DNA; note = methanogen bacteria
ttaaaaacagggtcaatgaatataggagaaattattagttatcaggcggttaatggtccattggcattt

SEQ ID NO: 29495 - DNA, 33 bp, unidentified
  source 1..33: mol_type = unassigned DNA; note = methanogen bacteria
ttcaatttgaatgtgggaaatatctatccattt

SEQ ID NO: 29496 - DNA, 60 bp, unidentified
  source 1..60: mol_type = unassigned DNA; note = methanogen bacteria
gcattcggagaacatttcaccacctcccttatggacggaggatatgaagtaatgaacggt

SEQ ID NO: 29497 - DNA, 33 bp, unidentified
  source 1..33: mol_type = unassigned DNA; note = methanogen bacteria
ttcaatggcgctgaaggaaccagccatttttca

SEQ ID NO: 29498 - DNA, 33 bp, unidentified
  source 1..33: mol_type = unassigned DNA; note = methanogen bacteria
tttggacttacagtaacttcatcaacagttgga

SEQ ID NO: 29499 - DNA, 63 bp, unidentified
  source 1..63: mol_type = unassigned DNA; note = methanogen bacteria
ttgccggagttcctcatgaacccgaatgggaatgtgccagacatcctgacgaaggtgttctct

SEQ ID NO: 29500 - DNA, 63 bp, unidentified
  source 1..63: mol_type = unassigned DNA; note = methanogen bacteria
caaacacatactatgattataagtgacataataacttatcaatccataaatgggccattaata

SEQ ID NO: 29501 - DNA, 33 bp, unidentified
  source 1..33: mol_type = unassigned DNA; note = methanogen bacteria
tttgcagtggcggtgcctggaagcgtcgggata

SEQ ID NO: 29502 - DNA, 90 bp, unidentified
  source 1..90: mol_type = unassigned DNA; note = methanogen bacteria
attttaaattctatgctaacagtacttatgtattctgcacagaatgaagctgctcttgcattatatcaaataatgatgattcttaacagt

SEQ ID NO: 29503 - DNA, 33 bp, unidentified
  source 1..33: mol_type = unassigned DNA; note = methanogen bacteria
ctgtttaatttaaatgtaggaaacatttatccc

SEQ ID NO: 29504 - DNA, 66 bp, unidentified
  source 1..66: mol_type = unassigned DNA; note = methanogen bacteria
cttaaaaccggttccatgaatatttcaagtattattgcttaccagtccgtcaacggtcctcttata

SEQ ID NO: 29505 - DNA, 39 bp, unidentified
  source 1..39: mol_type = unassigned DNA; note = methanogen bacteria
caatatgagtacatgataaatgtgcttcacacattctcg

SEQ ID NO: 29506 - DNA, 114 bp, unidentified
  source 1..114: mol_type = unassigned DNA; note = methanogen bacteria
tttatgagagatattccgacaagctttattagcgcaaatcaaatgccctctttagaacatattttcggaacagattggatgggaagagacatgtttcagcgtacaattgcaggg

SEQ ID NO: 29507 - DNA, 93 bp, unidentified
  source 1..93: mol_type = unassigned DNA; note = methanogen bacteria
acatttttaggatttggtttgcctccacatgaacctgcaattggtgtaattttggctgaatcaatgcattatctatcctctggttattggtgg

SEQ ID NO: 29508 - DNA, 114 bp, unidentified
  source 1..114: mol_type = unassigned DNA; note = methanogen bacteria
tttatcaaagatttacctacacattttataaatgcaaatcagatgccctcatttgaacatccatttggtactgattggatgggacgggacatgtttcagagaacaattgcaggt

SEQ ID NO: 29509 - DNA, 93 bp, unidentified
  source 1..93: mol_type = unassigned DNA; note = methanogen bacteria
acatttttaggatttggtctacctcctcacgaacctgctattggggttattttatctgagtcaatgaattatttagcttcagggtcatggtgg

SEQ ID NO: 29510 - DNA, 66 bp, unidentified
  source 1..66: mol_type = unassigned DNA; note = methanogen bacteria
cagctggcatttggagacatatctgcaggactgtcagacagctatgaatcacttaacacgcttggt

SEQ ID NO: 29511 - DNA, 36 bp, unidentified
  source 1..36: mol_type = unassigned DNA; note = methanogen bacteria
acagacggttcggccattaatattcagcagatatcc

SEQ ID NO: 29512 - DNA, 33 bp, unidentified
  source 1..33: mol_type = unassigned DNA; note = methanogen bacteria
tttggtcttgcaaggacttcaacaaatgttgat

SEQ ID NO: 29513 - DNA, 39 bp, unidentified
  source 1..39: mol_type = unassigned DNA; note = methanogen bacteria
atcgaaatttatcataatgaaacattgactattcaatca

SEQ ID NO: 29514 - DNA, 111 bp, unidentified
  source 1..111: mol_type = unassigned DNA; note = methanogen bacteria
attggtgaaattccaacaagttttactagtgctaatcagatgccatccctccaacatcttttcggaactgattggatgggtcgagatatgtttttaagaactatttccggt

SEQ ID NO: 29515 - DNA, 96 bp, unidentified
  source 1..96: mol_type = unassigned DNA; note = methanogen bacteria
ataacatttttaggatttggtttacctcctcatgaacctgcaattggggttatattatctgaatcaatgcactatttatcatcaggatattggtgg

SEQ ID NO: 29516 - DNA, 114 bp, unidentified
  source 1..114: mol_type = unassigned DNA; note = methanogen bacteria
ttcataagggatattccgtcaaactttgcaagtgctaatcagatgccttctcttgaacatcttttcggtactgactggatgggacgtgacatgtttcagcgaactattgcagga

SEQ ID NO: 29517 - DNA, 93 bp, unidentified
  source 1..93: mol_type = unassigned DNA; note = methanogen bacteria
acatttttaggatttggattgcctcctcatgagcctgcgattggtgtgatattgtcagaatccatgcattatctatcttcaggatattggtgg

SEQ ID NO: 29518 - DNA, 36 bp, unidentified
  source 1..36: mol_type = unassigned DNA; note = methanogen bacteria
tacaaatacatgttgaatgcacttcatgaacttcat

SEQ ID NO: 29519 - DNA, 36 bp, unidentified
  source 1..36: mol_type = unassigned DNA; note = methanogen bacteria
ttatctgcaggatttgcattctcatatcaaatgttt

SEQ ID NO: 29520 - DNA, 66 bp, unidentified
  source 1..66: mol_type = unassigned DNA; note = methanogen bacteria
gaattcggaatcttgccttccacattcctcactgcatatctgtcacttcagaatctggccaacaat

SEQ ID NO: 29521 - DNA, 51 bp, unidentified
  source 1..51: mol_type = unassigned DNA; note = methanogen bacteria
gatttgggaaatacgattacagacatttacgatgatgtgttcattgccttc

SEQ ID NO: 29522 - DNA, 42 bp, unidentified
  source 1..42: mol_type = unassigned DNA; note = methanogen bacteria
ccaaattcattcaaatgggttttgagcgaatataacggcata

SEQ ID NO: 29523 - DNA, 114 bp, unidentified
  source 1..114: mol_type = unassigned DNA; note = methanogen bacteria
ttcataagagacattccgacaagtttcaaaagcgcaaatcaaatgccttcattggaacatctcttcggaaccgattggatgggaagagacatgtttcagcgtacgattgcaggg

SEQ ID NO: 29524 - DNA, 93 bp, unidentified
  source 1..93: mol_type = unassigned DNA; note = methanogen bacteria
acatttttaggattcggtttgcctcctcatgaacctgctattggtgtcattttggctgaatcaatgcattacttatcctctggatactggtgg

SEQ ID NO: 29525 - DNA, 96 bp, unidentified
  source 1..96: mol_type = unassigned DNA; note = methanogen bacteria
ctgttaattaatgcagttatccaaactttaatgttatcaggccagcaaattcttgcatacggactttaccagttcatgctagtcctaagccagcct

SEQ ID NO: 29526 - DNA, 111 bp, unidentified
  source 1..111: mol_type = unassigned DNA; note = methanogen bacteria
attggcgatattccaacaagttttgctagtgctaatcaaatgccttcttttcaacatcttttcggaacagattggatgggaagagatatgtttttaagaactattgctggt

SEQ ID NO: 29527 - DNA, 96 bp, unidentified
  source 1..96: mol_type = unassigned DNA; note = methanogen bacteria
ataacatttttaggatttggtttacctcctcacgaacctgcaattggagtaattttatctgaatcaatgcaatatttatcatctggatattggtgg

SEQ ID NO: 29528 - DNA, 111 bp, unidentified
  source 1..111: mol_type = unassigned DNA; note = methanogen bacteria
attagggatattccgacaagttttattagtgctaatcaaatgccttcatttgaacatatcttcggtactgattggatgggaagagatatgtttcaaagaaccgttgcaggt

SEQ ID NO: 29529 - DNA, 90 bp, unidentified
  source 1..90: mol_type = unassigned DNA; note = methanogen bacteria
actttcttaggattcggtttgcctccgcatgaacctgcaattggagtaattctatccgaatcaatgcactacttatcttcaggatattgg

SEQ ID NO: 29530 - DNA, 42 bp, unidentified
  source 1..42: mol_type = unassigned DNA; note = methanogen bacteria
atgcggtgtattaaattggaaaattggttcatgtcttctact

SEQ ID NO: 29531 - DNA, 90 bp, unidentified
  source 1..90: mol_type = unassigned DNA; note = methanogen bacteria
gaagctaaaactcctttggatgcaattgtcatggtttccaatgcatttacaagtaacggttatgtggtattgggaaatactgatgtcgga

SEQ ID NO: 29532 - DNA, 111 bp, unidentified
  source 1..111: mol_type = unassigned DNA; note = methanogen bacteria
atgagagatatttcaacaagttttgctagtgcaaatcaaatgccttcccttgaacatattttcggaactgactggatgggaagagacatgtttcagcgaacaattgcgggt

SEQ ID NO: 29533 - DNA, 93 bp, unidentified
  source 1..93: mol_type = unassigned DNA; note = methanogen bacteria
ataacatttttaggatttggtttgcctcctcatgaacctgccattggggtaattttatcagaatcaatgcactatttatcatccggattctgg

SEQ ID NO: 29534 - DNA, 57 bp, unidentified
  source 1..57: mol_type = unassigned DNA; note = methanogen bacteria
atttctgagcttcagattgtcaattattccgatttcttagtcttcatttcaaccttg

SEQ ID NO: 29535 - DNA, 144 bp, unidentified
  source 1..144: mol_type = unassigned DNA; note = methanogen bacteria
ggcgacacagtgacaataggatatttgccgtcagaccatgatgcagcgcttttcgtagcagacagtcagggcaagttccaggaaaacggcatcaacgccaagctggtgatgttcaacaatggcggtgacctcatgactgcaatg

SEQ ID NO: 29536 - DNA, 126 bp, unidentified
  source 1..126: mol_type = unassigned DNA; note = methanogen bacteria
gccaagggagtgcctgtaaaggtcatatcagcggcgcagactgaaggatcaggaatagtcgttgcaagcgattccggaatagatgacattaaggatttggcgggaaagaaaatagcaacaccaggt

SEQ ID NO: 29537 - DNA, 42 bp, unidentified
  source 1..42: mol_type = unassigned DNA; note = methanogen bacteria
ccaaattcatttcaatgggttttaagtaattatggtggggta

SEQ ID NO: 29538 - DNA, 39 bp, unidentified
  source 1..39: mol_type = unassigned DNA; note = methanogen bacteria
acgcatacctatttaggagatgggtgtgaagtaattatt

SEQ ID NO: 29539 - DNA, 45 bp, unidentified
  source 1..45: mol_type = unassigned DNA; note = methanogen bacteria
aacaatcctaccctgggatacaatatcattactgtaggttcaatt

SEQ ID NO: 29540 - DNA, 42 bp, unidentified
  source 1..42: mol_type = unassigned DNA; note = methanogen bacteria
ggaggcaatttcattaatgaaattaattttaatttatccttt

SEQ ID NO: 29541 - DNA, 120 bp, unidentified
  source 1..120: mol_type = unassigned DNA; note = methanogen bacteria
ttaatcaactccacagacatcacaaccaatttccaggcaatgaaccaagccccctcccttgagcatctgttcggtactgactggatgggaagggacatgtttacccgtacattaaaagga

SEQ ID NO: 29542 - DNA, 90 bp, unidentified
  source 1..90: mol_type = unassigned DNA; note = methanogen bacteria
accttcttaggtttcggtttatcaccacacgaacctgcaatcggtattatcttatcagaatcaatgaaataccttgctacaggtaactgg

SEQ ID NO: 29543 - DNA, 93 bp, unidentified
  source 1..93: mol_type = unassigned DNA; note = methanogen bacteria
cttttaacctcagtgattcagacactaatgtttaccggtcaaagcacactggcctacggaatttaccagttgcttggaatcctaagccaacct

SEQ ID NO: 29544 - DNA, 36 bp, unidentified
  source 1..36: mol_type = unassigned DNA; note = methanogen bacteria
ggatcacaaagcggcatatcgggaatatcctccaac

SEQ ID NO: 29545 - DNA, 30 bp, unidentified
  source 1..30: mol_type = unassigned DNA; note = methanogen bacteria
gctgtttctgttccaaacagttttggagta

SEQ ID NO: 29546 - DNA, 96 bp, unidentified
  source 1..96: mol_type = unassigned DNA; note = methanogen bacteria
ttaattttaagttcattcatgacactgcttatgtattccgcacaaacaggaattgcaacagtaatgtatcagacaatgatgctaatttccaatcca

SEQ ID NO: 29547 - DNA, 114 bp, unidentified
  source 1..114: mol_type = unassigned DNA; note = methanogen bacteria
ttcattggtgaaattccaacaagttttaccagcgctaatcagatgccttcttttgctcatctattcggaactgattggatgggtagagacatgtttcagcgaactgttgcaggt

SEQ ID NO: 29548 - DNA, 96 bp, unidentified
  source 1..96: mol_type = unassigned DNA; note = methanogen bacteria
ataacatttttaggatttggtttacctccccatgaacctgcaattggagtaatattgtcagaatcaatgcactatttatcttcgggatattggtgg

SEQ ID NO: 29549 - DNA, 39 bp, unidentified
  source 1..39: mol_type = unassigned DNA; note = methanogen bacteria
gataaaataatacatcctgaattgattagagttcctgac

SEQ ID NO: 29550 - DNA, 117 bp, unidentified
  source 1..117: mol_type = unassigned DNA; note = methanogen bacteria
attgattctaaagagataacaacaaatttccttattattaatcaacctccttcatttgaacatttgtttggaactgattggttaggtagggacatgtttactcgtactattaaaggt

SEQ ID NO: 29551 - DNA, 90 bp, unidentified
  source 1..90: mol_type = unassigned DNA; note = methanogen bacteria
acctttttaggttttggtttatcacctcatgaacctgctattggtattattttggctgaatctatgaaatatcttgcaacaggtaattgg

SEQ ID NO: 29552 - DNA, 33 bp, unidentified
  source 1..33: mol_type = unassigned DNA; note = methanogen bacteria
gctcaggcatatggtattgatttaggtgcatct

SEQ ID NO: 29553 - DNA, 114 bp, unidentified
  source 1..114: mol_type = unassigned DNA; note = methanogen bacteria
ttcataaaggatattccaacaagtttcattgatgcaaaccaaatgccatcttttgaacatcttttcggtaccgattggatgggaagagatatgttccaaagaaccattgcaggt

SEQ ID NO: 29554 - DNA, 93 bp, unidentified
  source 1..93: mol_type = unassigned DNA; note = methanogen bacteria
acatttttaggatttggtttacctcctcacgaacctgctataggggtcattttagccgaatcaatgcaatatctgtcctcaggatattggtgg

SEQ ID NO: 29555 - DNA, 114 bp, unidentified
  source 1..114: mol_type = unassigned DNA; note = methanogen bacteria
atgattgatgccaatttaccaacagatttcagcatcaagatgcggcctccgtcatttgaccatatttttggtactgactggatgggaagggacatgttcatcaggactcttaaa

SEQ ID NO: 29556 - DNA, 90 bp, unidentified
  source 1..90: mol_type = unassigned DNA; note = methanogen bacteria
accttcctgggtttcggtttgtcacctcatgagcctgcaattggtataattttatccgagtcaatgacataccttgcaatgggagcttgg

SEQ ID NO: 29557 - DNA, 117 bp, unidentified
  source 1..117: mol_type = unassigned DNA; note = methanogen bacteria
attaatgcaggagacatcactacaaatttccaggcaatgaacaagccacctagctttgaacatttattcggaaccgactggatgggcagagatatgtttacccgtacattaaaagga

SEQ ID NO: 29558 - DNA, 90 bp, unidentified
  source 1..90: mol_type = unassigned DNA; note = methanogen bacteria
accttcttaggatttggtctgtcacctcacgaacctgcaataggtatcatattatccgaatcaatgaaataccttgcaacaggaaactgg

SEQ ID NO: 29559 - DNA, 114 bp, unidentified
  source 1..114: mol_type = unassigned DNA; note = methanogen bacteria
ttcataagggacatacctaccaattttgtaaatgcaaatcaaatgccgtctcttgagcatcttttcggaacagactggatgggaagagacatgttccagagaaccatttcagga

SEQ ID NO: 29560 - DNA, 96 bp, unidentified
  source 1..96: mol_type = unassigned DNA; note = methanogen bacteria
ataacattccttggattcggactgcctccacatgagcctgcaataggagtcatactggcagaatcaatgaactacctttcttccggatactggtgg

SEQ ID NO: 29561 - DNA, 30 bp, unidentified
  source 1..30: mol_type = unassigned DNA; note = methanogen bacteria
ataattggtgcagaaacacataccacatta

SEQ ID NO: 29562 - DNA, 114 bp, unidentified
  source 1..114: mol_type = unassigned DNA; note = methanogen bacteria
ttcattagagatattcccactaactttgctaatgcaatgcaaatgccttccttagaacatcttttcggaacagattggatgggaagggacatgtttcagagaacaatagccgga

SEQ ID NO: 29563 - DNA, 90 bp, unidentified
  source 1..90: mol_type = unassigned DNA; note = methanogen bacteria
acatttttaggattcggattacctcctcatgaacctgcaattggggtgatattagctgaatccatgcactacttatcatctggatgctgg

SEQ ID NO: 29564 - DNA, 114 bp, unidentified
  source 1..114: mol_type = unassigned DNA; note = methanogen bacteria
tttattcctgatattccaaccagctttgtaaatgcaaatcagatgccttctctagaacatattttcggtactgattggatgggaagagatatgtttcaaagaacaattgctgga

SEQ ID NO: 29565 - DNA, 96 bp, unidentified
  source 1..96: mol_type = unassigned DNA; note = methanogen bacteria
ataacctttttaggatttggtttaccacctcatgaacctgcgattggagtaattctatcagaatcaatgcactatttatcctcaggatattggtgg

SEQ ID NO: 29566 - DNA, 48 bp, unidentified
  source 1..48: mol_type = unassigned DNA; note = methanogen bacteria
aaaaatccaacattaggatggaatcttataacctttggatcaataata

SEQ ID NO: 29567 - DNA, 72 bp, unidentified
  source 1..72: mol_type = unassigned DNA; note = methanogen bacteria
gataataatacattaggttataatataatcactttcggttcaataataattattatccaggcagctgttcca

SEQ ID NO: 29568 - DNA, 114 bp, unidentified
  source 1..114: mol_type = unassigned DNA; note = methanogen bacteria
tttataaaggatattccatcaaattttgcaagcgccaatcagatgccttccttacaacacttgttcggtactgactggatgggaagagacatgtttcagcgtacaatcgcagga

SEQ ID NO: 29569 - DNA, 96 bp, unidentified
  source 1..96: mol_type = unassigned DNA; note = methanogen bacteria
atcacatttttaggatttggattacctcctcatgagcctgcaattggtgttatattgtcagaatctatgcattatttgtcttcaggttattggtgg

SEQ ID NO: 29570 - DNA, 111 bp, unidentified
  source 1..111: mol_type = unassigned DNA; note = methanogen bacteria
attagagatattccaactaactttgcaaatgctagtcaaatgccatcattggaacatcttttcggaactgattggatgggaagagatatgttccaaagaacaattgctgga

SEQ ID NO: 29571 - DNA, 90 bp, unidentified
  source 1..90: mol_type = unassigned DNA; note = methanogen bacteria
acatttttaggattcggtttgcctcctcatgaacctgcaattggggtaatattagctgaatcaatgcactacttatcctctggatattgg

SEQ ID NO: 29572 - DNA, 36 bp, unidentified
  source 1..36: mol_type = unassigned DNA; note = methanogen bacteria
aatttttttaatggaattaatattgatttatctatt

SEQ ID NO: 29573 - DNA, 114 bp, unidentified
  source 1..114: mol_type = unassigned DNA; note = methanogen bacteria
tttgttcgagacattccaactagcttcatcagtgccaatcaaatgccttcacttgaacatatcttcggaactgactggatgggaagggacatgtttcaaagaacaattgcaggt

SEQ ID NO: 29574 - DNA, 96 bp, unidentified
  source 1..96: mol_type = unassigned DNA; note = methanogen bacteria
attacattcttgggattcggtctgcctcctcatgaacctgctatcggagtgattttatctgaatcaatgaattatttgtcatcaggatactggtgg

SEQ ID NO: 29575 - DNA, 90 bp, unidentified
  source 1..90: mol_type = unassigned DNA; note = methanogen bacteria
atggctcatgatgtatatatttgttatgatgaaaaagatgtagaaacggcaaaggatgtctgtgaagtcttggagaatgatgggctggaa

SEQ ID NO: 29576 - DNA, 57 bp, unidentified
  source 1..57: mol_type = unassigned DNA; note = methanogen bacteria
aaccgtgatgctggcgtcaaggatattgtaaccgaaatcatggatgcaatcaaacgc

SEQ ID NO: 29577 - DNA, 201 bp, unidentified
  source 1..201: mol_type = unassigned DNA; note = methanogen bacteria
gtcatggttttgctttactccaagaattccaagaattccaattacgttaacaatgaggtcaacagggcattctcacagaaaaaaccaattttggttttccaaatcgatgattcaaaacttgaaggaagccttgaattcttcttaaggaacaaaccatggataaaggcttatccaaatcctgaagacaagtttgatgaactg

SEQ ID NO: 29578 - DNA, 96 bp, unidentified
  source 1..96: mol_type = unassigned DNA; note = methanogen bacteria
gatccaagcataaacagtttatttgacagcctatggtttgtgctttccaccattacaacagttggttatggtgatgtcctgccacaatcaggtcct

SEQ ID NO: 29579 - DNA, 33 bp, unidentified
  source 1..33: mol_type = unassigned DNA; note = methanogen bacteria
ccaagattatttgctccggaaggcgttgatgcc

SEQ ID NO: 29580 - DNA, 96 bp, unidentified
  source 1..96: mol_type = unassigned DNA; note = methanogen bacteria
tttgatccaagcataaacagcttatttgacagtttatggtttgttctttcaacaatcacaacagtcggttacggtgacatattgcctcaatccggt

SEQ ID NO: 29581 - DNA, 30 bp, unidentified
  source 1..30: mol_type = unassigned DNA; note = methanogen bacteria
actacagttatgggatcaataataaaacca

SEQ ID NO: 29582 - DNA, 66 bp, unidentified
  source 1..66: mol_type = unassigned DNA; note = methanogen bacteria
ttgactgactttttctttaatggtgcgagctattatgcaataggcatggattctggatttggaatt

SEQ ID NO: 29583 - DNA, 36 bp, unidentified
  source 1..36: mol_type = unassigned DNA; note = methanogen bacteria
gaaacaggtattccggacttattattttcattccag

SEQ ID NO: 29584 - DNA, 114 bp, unidentified
  source 1..114: mol_type = unassigned DNA; note = methanogen bacteria
tttattaaagaaattccaacaagttttgttaatgctaatcaattgccttcattagaacatcttttcggaactgattggatgggtagagatatgtttcaaaggacaattgcaggc

SEQ ID NO: 29585 - DNA, 93 bp, unidentified
  source 1..93: mol_type = unassigned DNA; note = methanogen bacteria
ataacattcttaggattcggtttaccacctcatgaacccgctattggggtaattttagcagaatctatgaattacttatcttcaggttattgg

SEQ ID NO: 29586 - DNA, 114 bp, unidentified
  source 1..114: mol_type = unassigned DNA; note = methanogen bacteria
tttgtcggcagcattgaaacaaatttcgttaatgccaatcagctgccatcctttgaacatctttttggaaccgactggatgggaagggacatgttctcaagaacagttgccggt

SEQ ID NO: 29587 - DNA, 96 bp, unidentified
  source 1..96: mol_type = unassigned DNA; note = methanogen bacteria
ataacatttttaggattcggtttacctcctcatgatcctgccattggggtaatattgtctgaatccatgaattatttatcttccggatattggtgg

SEQ ID NO: 29588 - DNA, 30 bp, unidentified
  source 1..30: mol_type = unassigned DNA; note = methanogen bacteria
acaacagtcatgggatcaattatagagccg

SEQ ID NO: 29589 - DNA, 60 bp, unidentified
  source 1..60: mol_type = unassigned DNA; note = methanogen bacteria
ccagcgcagccgttatcatttaatattttcacagtaggtggattcttattaatgttacag

SEQ ID NO: 29590 - DNA, 30 bp, unidentified
  source 1..30: mol_type = unassigned DNA; note = methanogen bacteria
ggcacaccaatgattatgggatggaacgac

SEQ ID NO: 29591 - DNA, 48 bp, unidentified
  source 1..48: mol_type = unassigned DNA; note = methanogen bacteria
ttgaaaaatccaactttaggatttaattttattaccgcaggagcaata

SEQ ID NO: 29592 - DNA, 30 bp, unidentified
  source 1..30: mol_type = unassigned DNA; note = methanogen bacteria
gcagcgtcagttcccaacagcataagtgtg

SEQ ID NO: 29593 - DNA, 96 bp, unidentified
  source 1..96: mol_type = unassigned DNA; note = methanogen bacteria
ccgctgcttatcagctcattaatgaccatattgatgtatgcttcacaaaatcaagttgcaacagttgtctatcagctcatgattataatatcaaat

SEQ ID NO: 29594 - DNA, 39 bp, unidentified
  source 1..39: mol_type = unassigned DNA; note = methanogen bacteria
gggatctcggtctcggcgatctcttcccagctctccaat

SEQ ID NO: 29595 - DNA, 78 bp, unidentified
  source 1..78: mol_type = unassigned DNA; note = methanogen bacteria
atgatgtccaccgacagcgagacgctggcaacggtatatagatggcaggtcggttccgtggccgagatcacttggccc

SEQ ID NO: 29596 - DNA, 48 bp, unidentified
  source 1..48: mol_type = unassigned DNA; note = methanogen bacteria
acaggttcatcttcagttaatttaaataatcttgatgtatcctatgaa

SEQ ID NO: 29597 - DNA, 39 bp, unidentified
  source 1..39: mol_type = unassigned DNA; note = methanogen bacteria
tatgtggtcaattttaataatatcgatttatcttttgaa

SEQ ID NO: 29598 - DNA, 111 bp, unidentified
  source 1..111: mol_type = unassigned DNA; note = methanogen bacteria
attaacgccaatctgcctacagacttttctatcaagatgcagggtccttcattcgaacacatctttggtactgactggatgggcagagacatgttcatcagaactttaaaa

SEQ ID NO: 29599 - DNA, 90 bp, unidentified
  source 1..90: mol_type = unassigned DNA; note = methanogen bacteria
acatttttgggattcggtttatcaccgcacgaacctgcaattggtatcatattgtctgaatccatgtcctatcttgcaatgggtgcctgg

SEQ ID NO: 29600 - DNA, 57 bp, unidentified
  source 1..57: mol_type = unassigned DNA; note = methanogen bacteria
gcagttcctgaagttgcattttcatcatatggcgactacatttcatttttttcagct

SEQ ID NO: 29601 - DNA, 66 bp, unidentified
  source 1..66: mol_type = unassigned DNA; note = methanogen bacteria
tggaaaaatccgacattaggattcaatgttattacagtaggttcaattggagtgatactgcaggcg

SEQ ID NO: 29602 - DNA, 69 bp, unidentified
  source 1..69: mol_type = unassigned DNA; note = methanogen bacteria
gcaggaatttacggtgacgcattcattacaaatatgagtgccacctatgaggcaatgaatatggctgat

SEQ ID NO: 29603 - DNA, 33 bp, unidentified
  source 1..33: mol_type = unassigned DNA; note = methanogen bacteria
cagggccagtcacacggcgtaaacaggctgact

SEQ ID NO: 29604 - DNA, 39 bp, unidentified
  source 1..39: mol_type = unassigned DNA; note = methanogen bacteria
ttttcaggaattcagcagattgcaacaaatgccacccct

SEQ ID NO: 29605 - DNA, 51 bp, unidentified
  source 1..51: mol_type = unassigned DNA; note = methanogen bacteria
ctaggtaaatttgattttagtctgatattctttaaaactgattttgcttta

SEQ ID NO: 29606 - DNA, 45 bp, unidentified
  source 1..45: mol_type = unassigned DNA; note = methanogen bacteria
tttgactttagaatatttacatttagaaaaggatattctggaaac

SEQ ID NO: 29607 - DNA, 33 bp, unidentified
  source 1..33: mol_type = unassigned DNA; note = methanogen bacteria
aaatatattcctcattcaattgcaatgaataaa

SEQ ID NO: 29608 - DNA, 30 bp, unidentified
  source 1..30: mol_type = unassigned DNA; note = methanogen bacteria
ggagtttcaagtcctcaggctatgggtggc

SEQ ID NO: 29609 - DNA, 96 bp, unidentified
  source 1..96: mol_type = unassigned DNA; note = methanogen bacteria
ttattgctcaattcattgattcagacattaatgtactccggccaacaattaatggcatacagcgtttatcaattcatgatgcttttaagccaacct

SEQ ID NO: 29610 - DNA, 63 bp, unidentified
  source 1..63: mol_type = unassigned DNA; note = methanogen bacteria
ttgactggaacaatggatataaatggaatcatatcttatcaggcagctcatggtcctttagtt

SEQ ID NO: 29611 - DNA, 39 bp, unidentified
  source 1..39: mol_type = unassigned DNA; note = methanogen bacteria
caatatgaatatatgttaaattccctaaattcattaaac

SEQ ID NO: 29612 - DNA, 63 bp, unidentified
  source 1..63: mol_type = unassigned DNA; note = methanogen bacteria
ggtatttccttgatacaatttgattcacatctttttggagactttagtgctctcgactttgat

SEQ ID NO: 29613 - DNA, 114 bp, unidentified
  source 1..114: mol_type = unassigned DNA; note = methanogen bacteria
attaattcaaatttaccaacagattttactataaaaatgcaacctccatcatttgcacatatttttggtactgactggatgggtagagatatgttcgaaagaaccataaaaggt

SEQ ID NO: 29614 - DNA, 90 bp, unidentified
  source 1..90: mol_type = unassigned DNA; note = methanogen bacteria
acatttttaggatttggtttatcaccacacgaacctgctattggtataattttatccgaatcaatgaaataccttgcaatgggtgcttgg

SEQ ID NO: 29615 - DNA, 54 bp, unidentified
  source 1..54: mol_type = unassigned DNA; note = methanogen bacteria
ctgtcccctccccctaccttcttccaccagtttggcgcctttaagggcggctat

SEQ ID NO: 29616 - DNA, 75 bp, unidentified
  source 1..75: mol_type = unassigned DNA; note = methanogen bacteria
atcaactaccatcgcctccagctttccataggtaatgttcaatgttcaacgttcaatgttcaatgttcaatgttc

SEQ ID NO: 29617 - DNA, 48 bp, unidentified
  source 1..48: mol_type = unassigned DNA; note = methanogen bacteria
ttaccccatgcaaaccgcctattggcaaccatccccttctggctgctc

SEQ ID NO: 29618 - DNA, 51 bp, unidentified
  source 1..51: mol_type = unassigned DNA; note = methanogen bacteria
acaggttcatctttagttaatttgaataatcttgatttatcctctgaatca

SEQ ID NO: 29619 - DNA, 114 bp, unidentified
  source 1..114: mol_type = unassigned DNA; note = methanogen bacteria
attgatgcaaacctgcctacagactttaccataaaaatgcagcctccttcattccagcatcctttcggtaccgattggatgggaagggacatgttcataagaacaataaaaggt

SEQ ID NO: 29620 - DNA, 90 bp, unidentified
  source 1..90: mol_type = unassigned DNA; note = methanogen bacteria
acatttctgggattcggtctatcgccgcacgagcctgcaatcggtatcatcctgtcagaatcaatgacgtaccttgcaatgggcgcatgg

SEQ ID NO: 29621 - DNA, 111 bp, unidentified
  source 1..111: mol_type = unassigned DNA; note = methanogen bacteria
attgatgctaatttacctacagatttcacaataaaaatacaacccccatcatttgaacatatttttggtaccgattggatgggtagagatatgtttattaggacattaaaa

SEQ ID NO: 29622 - DNA, 90 bp, unidentified
  source 1..90: mol_type = unassigned DNA; note = methanogen bacteria
acatttttaggatttggtttatctccacacgaacccgcaattggtataattttatctgaatcaatgaaataccttgcaatgggtgcatgg

SEQ ID NO: 29623 - DNA, 114 bp, unidentified
  source 1..114: mol_type = unassigned DNA; note = methanogen bacteria
atgattgacgccaatttgcctactgactttgccataaaaatgaagcctccttcatttgaacatccttttggaactgattggatgggcagagacatgttcattagaacattgaaa

SEQ ID NO: 29624 - DNA, 90 bp, unidentified
  source 1..90: mol_type = unassigned DNA; note = methanogen bacteria
acattccttgggttcggtttatctccgcatgaacctgcaattggtataattttgtctgaatcaatgacttatcttgcaatgggggcttgg

SEQ ID NO: 29625 - DNA, 36 bp, unidentified
  source 1..36: mol_type = unassigned DNA; note = methanogen bacteria
atgttgactccaaactggagtgcgctttgggatgtc

SEQ ID NO: 29626 - DNA, 102 bp, unidentified
  source 1..102: mol_type = unassigned DNA; note = methanogen bacteria
tacatgtctgtaacaagttcaatccctatcactgaattgattagtgaaggaaccagcttaatctttgttgtgcttcctgaaatttttgatgtgatgggccct

SEQ ID NO: 29627 - DNA, 111 bp, unidentified
  source 1..111: mol_type = unassigned DNA; note = methanogen bacteria
attgatgctaatctgccaactgattttgccataaagatgaaacctccatcattcgagcatcctttcggtacagattggatgggaagggacatgttcatcagaacattgaaa

SEQ ID NO: 29628 - DNA, 90 bp, unidentified
  source 1..90: mol_type = unassigned DNA; note = methanogen bacteria
accttccttggtttcggtttgtcaccgcacgaacctgctatcggtataatcttgtcagaatcaatgacctatcttgcgatgggcgcatgg

SEQ ID NO: 29629 - DNA, 114 bp, unidentified
  source 1..114: mol_type = unassigned DNA; note = methanogen bacteria
attaacgctaatttgcctactgatttttcaataaagatgcaagctccttcattggctcatccatttggtactgattggatgggtagggatatgtttatccgtacaataaaaggt

SEQ ID NO: 29630 - DNA, 90 bp, unidentified
  source 1..90: mol_type = unassigned DNA; note = methanogen bacteria
acattcttaggatttggtttatctccacatgaacctgcaatcggtatcattttatctgaatccatgtcataccttgctatgggtgcttgg

SEQ ID NO: 29631 - DNA, 33 bp, unidentified
  source 1..33: mol_type = unassigned DNA; note = methanogen bacteria
tctatgttttctaaagggggaatggacccttca

SEQ ID NO: 29632 - DNA, 54 bp, unidentified
  source 1..54: mol_type = unassigned DNA; note = methanogen bacteria
agattgattgtttctgacccattcacattggtttcaataggcaatttacttact

SEQ ID NO: 29633 - DNA, 117 bp, unidentified
  source 1..117: mol_type = unassigned DNA; note = methanogen bacteria
ggtttaggagacggccattattttatgccttctatcccttctcaagtaatctctgccaatttggattggtccatttttggaggactcttacgtggattcggtcagctgttttcaaat

SEQ ID NO: 29634 - DNA, 99 bp, unidentified
  source 1..99: mol_type = unassigned DNA; note = methanogen bacteria
ttattgctcaattcattgattcagacattaatgtattccggccagcaattaatggcattcagcatttatcaattcatgatgcttttaagccaacctgtt

SEQ ID NO: 29635 - DNA, 72 bp, unidentified
  source 1..72: mol_type = unassigned DNA; note = methanogen bacteria
gtaaaccctacattaggattaaatttaattacaatagggtcaatagcagtgattcttcaggccgcatttcca

SEQ ID NO: 29636 - DNA, 114 bp, unidentified
  source 1..114: mol_type = unassigned DNA; note = methanogen bacteria
attaatgctaatctgcctacagatttcactataaaaatgcaacccccttcatttgaacatcctttcggtactgactggatgggaagggacatgttaatcaggacaataaaaggt

SEQ ID NO: 29637 - DNA, 90 bp, unidentified
  source 1..90: mol_type = unassigned DNA; note = methanogen bacteria
acatttttaggattcggtttatcacctcacgaacctgcaatcggtataatcttatccgaatcaatgacataccttgcaatgggtgcatgg

SEQ ID NO: 29638 - DNA, 42 bp, unidentified
  source 1..42: mol_type = unassigned DNA; note = methanogen bacteria
aaaaatcccacattaggattcaacatcatcactgcaggatca

SEQ ID NO: 29639 - DNA, 114 bp, unidentified
  source 1..114: mol_type = unassigned DNA; note = methanogen bacteria
atcgacgcaaacctgccaacagatttcacagcccggatgaaacccccttcatttgaacatatattcggtacagactggatgggaagggacatgttcatcagaacaatcaaaggt

SEQ ID NO: 29640 - DNA, 90 bp, unidentified
  source 1..90: mol_type = unassigned DNA; note = methanogen bacteria
acatttctgggattcggtttatccccacacgaacctgcaattggtataatcttatccgaatcaatgtcctatcttgcaatgggtgcatgg

SEQ ID NO: 29641 - DNA, 69 bp, unidentified
  source 1..69: mol_type = unassigned DNA; note = methanogen bacteria
cttccggtaataaatttagaatttattttcggtcaagttgaaaatcagggtgcatcaggcgggatattt

SEQ ID NO: 29642 - DNA, 102 bp, unidentified
  source 1..102: mol_type = unassigned DNA; note = methanogen bacteria
gtaggctcatccattaccatgccaatttcaatactcgatccgggtaggccattgccgcttcatttgtatattttagcaactgaaggcatttctttacctaat

SEQ ID NO: 29643 - DNA, 117 bp, unidentified
  source 1..117: mol_type = unassigned DNA; note = methanogen bacteria
atgattgatgccaatttacctactgatttcactatgaagatgcaggctccttcattttcacatcctttcggtactgattggatgggtagggatatgtttatccgtactataaaaggt

SEQ ID NO: 29644 - DNA, 90 bp, unidentified
  source 1..90: mol_type = unassigned DNA; note = methanogen bacteria
acattcttaggatttggtctatcaccacacgagcccgctattggtattatcctatctgaatcaatgtcatatcttgcgatgggtgcttgg

SEQ ID NO: 29645 - DNA, 84 bp, unidentified
  source 1..84: mol_type = unassigned DNA; note = methanogen bacteria
gtctttgacaatatgaggacattagccaatgccgctcctatagacactgttcaagcggcaatatccgctcttcctccaagcagt

SEQ ID NO: 29646 - DNA, 36 bp, unidentified
  source 1..36: mol_type = unassigned DNA; note = methanogen bacteria
actgtaaatgaggcagtaagcagttccgtcaataca

SEQ ID NO: 29647 - DNA, 48 bp, unidentified
  source 1..48: mol_type = unassigned DNA; note = methanogen bacteria
ggaatagctgcactgttgaatcctgactggagcatgctatggaacgta

SEQ ID NO: 29648 - DNA, 105 bp, unidentified
  source 1..105: mol_type = unassigned DNA; note = methanogen bacteria
ggatatatgtcattcacttcaggcacaccaatggtcgagcttgtaagtgagggaacaggacttgtatttgtggttttcccaagaatattcaatataatggggccg

SEQ ID NO: 29649 - DNA, 117 bp, unidentified
  source 1..117: mol_type = unassigned DNA; note = methanogen bacteria
atgactaatgccaatttaccaacagacttttccataaaaatgcaagctccttcattggttcatccatttggtactgattggatgggaagggacatgtttacccgtacaataaaaggt

SEQ ID NO: 29650 - DNA, 90 bp, unidentified
  source 1..90: mol_type = unassigned DNA; note = methanogen bacteria
acattcttaggatttgggttatcaccacatgagccagctattggtattatcctatccgaatcaatgtcctatcttgcaatgggcgcttgg

SEQ ID NO: 29651 - DNA, 30 bp, unidentified
  source 1..30: mol_type = unassigned DNA; note = methanogen bacteria
ttctccgatcccgccgccgtgacccgcaac

SEQ ID NO: 29652 - DNA, 111 bp, unidentified
  source 1..111: mol_type = unassigned DNA; note = methanogen bacteria
ggcggaacggatctggcacatgtgatattcggtgccggaggccccctcgagtcctcccgcggcttcgacagcgcatcgatgtccgggtccctctcggacaacatcgggccc

SEQ ID NO: 29653 - DNA, 30 bp, unidentified
  source 1..30: mol_type = unassigned DNA; note = methanogen bacteria
atgcggagctatgctgggggttctaggcct

SEQ ID NO: 29654 - DNA, 30 bp, unidentified
  source 1..30: mol_type = unassigned DNA; note = methanogen bacteria
aagtatttcgcatcagctggagtcagcttg

SEQ ID NO: 29655 - DNA, 114 bp, unidentified
  source 1..114: mol_type = unassigned DNA; note = methanogen bacteria
attgatgccaacttaccgactgatttctctattaaaatgcagcccccatcatttgcgcatattttcggtactgattggatgggtagggacatgttcgtaagaacaataaaagga

SEQ ID NO: 29656 - DNA, 90 bp, unidentified
  source 1..90: mol_type = unassigned DNA; note = methanogen bacteria
acattcttaggatttggtttatcaccacacgaacctgcaatcggtatcatattgtctgaatcaatgacataccttgcaatgggtgcttgg

SEQ ID NO: 29657 - DNA, 105 bp, unidentified
  source 1..105: mol_type = unassigned DNA; note = methanogen bacteria
gcaaactcgtacaccattcccaaccccgcggacacctgggacgcccttgtggacttctacagcaacggggacaccatgtccggcgggaagtccatgtggtcgtac

SEQ ID NO: 29658 - DNA, 69 bp, unidentified
  source 1..69: mol_type = unassigned DNA; note = methanogen bacteria
tacgcctctcctctcggaggcatcgggttctacctctccgagcaggcgacggcaggcttctggccttcc

SEQ ID NO: 29659 - DNA, 273 bp, unidentified
  source 1..273: mol_type = unassigned DNA; note = methanogen bacteria
gccttcggattaaatgaaggtgtagatttaaagggaggtaccatggtcacagtagaactaaaacaaagtatgacagaatcacaaataacagacttagttcaaagtaacctgggagtaagtgatgttgaaacatccttatcaggtaacacagctacaataaccatatctggggatgtagatcaggccgaatttgaccagaaattcagtaatcaattcaatatactgagcttcagaagtgtaggtgctctgctaagtcaagctgcgatggatcag

SEQ ID NO: 29660 - DNA, 30 bp, unidentified
  source 1..30: mol_type = unassigned DNA; note = methanogen bacteria
gtattcattccatcagcacaagtattagaa

SEQ ID NO: 29661 - DNA, 96 bp, unidentified
  source 1..96: mol_type = unassigned DNA; note = methanogen bacteria
tttgattcaagtattaataatgtatttgatgctctctggtttaatatagtaactatttccactgtgggttatggtgatgttgtaccactacattta

SEQ ID NO: 29662 - DNA, 120 bp, unidentified
  source 1..120: mol_type = unassigned DNA; note = methanogen bacteria
tttattaattcaaatgatattactacgaattttagcgcaataaatcagcccccatcatttgaacatttatttggtactgattggatgggaagagatatgtttacacgtactctaaaagga

SEQ ID NO: 29663 - DNA, 90 bp, unidentified
  source 1..90: mol_type = unassigned DNA; note = methanogen bacteria
acatttttaggatttggattgtctccacacgaacctgctattggaataatcttgtctgaatcaatgaaatatctagcaactggtaattgg

SEQ ID NO: 29664 - DNA, 54 bp, unidentified
  source 1..54: mol_type = unassigned DNA; note = methanogen bacteria
tttggacagccacttagccagttttcctttaccgaaagcttttcttttactggt

SEQ ID NO: 29665 - DNA, 33 bp, unidentified
  source 1..33: mol_type = unassigned DNA; note = methanogen bacteria
tcaggaacatatcaggcaggacttatggttaat

SEQ ID NO: 29666 - DNA, 114 bp, unidentified
  source 1..114: mol_type = unassigned DNA; note = methanogen bacteria
attgatgccaatttatcaacagactttacaaaaacaatgaagcctccatcttttgaacatatttttggtactgattggatgggtagagatatgtttttaagaactgttaaggga

SEQ ID NO: 29667 - DNA, 90 bp, unidentified
  source 1..90: mol_type = unassigned DNA; note = methanogen bacteria
acctttttaggatttggtttatctcctcatgagccagctattggtataatattatctgaatctatgtcatatcttgcaatgggtgcttgg

SEQ ID NO: 29668 - DNA, 114 bp, unidentified
  source 1..114: mol_type = unassigned DNA; note = methanogen bacteria
attgatgcaaatttgcctaccgatttcaccacaagaatgaaaccgccgtcctttgaacatcttttcggtactgattggatgggaagggacatgtttttaagaacagttaagggt

SEQ ID NO: 29669 - DNA, 90 bp, unidentified
  source 1..90: mol_type = unassigned DNA; note = methanogen bacteria
acatttttaggattcggtttatctccacacgaacctgcaattggtataatcctatccgaatcaatgtcctatcttgcaatgggggcatgg

SEQ ID NO: 29670 - DNA, 48 bp, unidentified
  source 1..48: mol_type = unassigned DNA; note = methanogen bacteria
ttaaaaaatcctaccctaggattgaatttaatcactgcaggctcaatt

SEQ ID NO: 29671 - DNA, 117 bp, unidentified
  source 1..117: mol_type = unassigned DNA; note = methanogen bacteria
attaattcatcagatattacaactaatttcaagataatgaaccaacctccaagttttgaacatttatttggaacagactggatgggtagagacatgtttacccgtactttaaaaggt

SEQ ID NO: 29672 - DNA, 90 bp, unidentified
  source 1..90: mol_type = unassigned DNA; note = methanogen bacteria
acatttttaggatttggtctatcacctcacgaacctgctatcggtatcatcttatccgaatctatgaaatatcttgcaacaggcgactgg

SEQ ID NO: 29673 - DNA, 60 bp, unidentified
  source 1..60: mol_type = unassigned DNA; note = methanogen bacteria
tcaatctatggatggaacttcatattgtccatgactcatggctatgaggttatgaatacc

SEQ ID NO: 29674 - DNA, 33 bp, unidentified
  source 1..33: mol_type = unassigned DNA; note = methanogen bacteria
gttaatggtgcaaaaggaacaaatcatttttca

SEQ ID NO: 29675 - DNA, 30 bp, unidentified
  source 1..30: mol_type = unassigned DNA; note = methanogen bacteria
ggacttgaaatgacctcatcaacagcaaaa

SEQ ID NO: 29676 - DNA, 93 bp, unidentified
  source 1..93: mol_type = unassigned DNA; note = methanogen bacteria
atggacaagtttagaacaggttgggctcaagatgttccattatcctataaacgcaaggctaaagagcagggaaaagtggaacaaattgaatat

SEQ ID NO: 29677 - DNA, 48 bp, unidentified
  source 1..48: mol_type = unassigned DNA; note = methanogen bacteria
ggggacttttttgagtactcgaatatcctgaacattttggacaatatg

SEQ ID NO: 29678 - DNA, 111 bp, unidentified
  source 1..111: mol_type = unassigned DNA; note = methanogen bacteria
gatattgatccgctaattgtggttgcagcaacctttgatgcagaaaacaaggggcagggatggtcaagaagtgttgaagagcttgaaccttttcatttggattttgaaaat

SEQ ID NO: 29679 - DNA, 114 bp, unidentified
  source 1..114: mol_type = unassigned DNA; note = methanogen bacteria
acaaatgcaaatctgcctacagatttctccattaaaatgcaggctccttcattccagcatcctttcggtactgactggatgggaagagacatgtttgccagaacattaaaaggt

SEQ ID NO: 29680 - DNA, 90 bp, unidentified
  source 1..90: mol_type = unassigned DNA; note = methanogen bacteria
acatttttaggattcggtctgtcccctcacgaaccggctatcggtattatactgtctgaatccatgtcataccttgcaatgggtgcatgg

SEQ ID NO: 29681 - DNA, 273 bp, unidentified
  source 1..273: mol_type = unassigned DNA; note = methanogen bacteria
gtcttcggactaaatgaaggtgtagacttaaaaggtggaacattagtaacgctagaattaaaagaacctatgtctgagacacaagtttccaacatcattacccagggattaggagcaagtgaagtagacacatcaattagtggaaatactgcaaccgtaacaatctcgggtgatgtggatcaagccgactttgaatcaaaattcaataatcagtttgggatacttagtttcaaaagtgttggagcacttctaagtgaagctgcaatgggccaa

SEQ ID NO: 29682 - DNA, 30 bp, unidentified
  source 1..30: mol_type = unassigned DNA; note = methanogen bacteria
ttttttatcccatcagcacaggtattggca

SEQ ID NO: 29683 - DNA, 96 bp, unidentified
  source 1..96: mol_type = unassigned DNA; note = methanogen bacteria
ctggatgattccgtaactaatctgggtgaagcattatggtttattattgttaccgcttcaactgtgggatatggtgacattactccaatcagtccc

SEQ ID NO: 29684 - DNA, 114 bp, unidentified
  source 1..114: mol_type = unassigned DNA; note = methanogen bacteria
attaatgcgaatttgccaactgatttcagcattaaaatgcaacctccatcttttgaacatattttcggcactgattggatgggcagagacatgttcataagaacaatcaaggga

SEQ ID NO: 29685 - DNA, 90 bp, unidentified
  source 1..90: mol_type = unassigned DNA; note = methanogen bacteria
accttcctgggtttcggtttgtcaccgcatgaacctgcaatcggtataattttatccgagtcaatgacttaccttgcaatgggagcctgg

SEQ ID NO: 29686 - DNA, 159 bp, unidentified
  source 1..159: mol_type = unassigned DNA; note = methanogen bacteria
cagcaattaactggtgataccaaagcattaatggaaaccaatgaaggtttagatgcacgtcttggaaaagcgtttagtagtgctggtaaaaaaataggaaatgaatttttaccacagattaaagatgtaaaacaaggatttttagatttaaatgatgct

SEQ ID NO: 29687 - DNA, 75 bp, unidentified
  source 1..75: mol_type = unassigned DNA; note = methanogen bacteria
ggaggaatcatcacttctgacccagctatccaagctggtgcaattaaagtagcaacaggtaaagtcggaatgtct

SEQ ID NO: 29688 - DNA, 33 bp, unidentified
  source 1..33: mol_type = unassigned DNA; note = methanogen bacteria
ttcttaggagctaaaggtgtaacctggagtacc

SEQ ID NO: 29689 - DNA, 39 bp, unidentified
  source 1..39: mol_type = unassigned DNA; note = methanogen bacteria
caatataactatattctcaattcattaagttcattaaat

SEQ ID NO: 29690 - DNA, 45 bp, unidentified
  source 1..45: mol_type = unassigned DNA; note = methanogen bacteria
tcatatgggatcaattttaataatatttatttctcttttgaatca

SEQ ID NO: 29691 - DNA, 33 bp, unidentified
  source 1..33: mol_type = unassigned DNA; note = methanogen bacteria
ccaagactgttttcgccggagggtgttgatgct

SEQ ID NO: 29692 - DNA, 99 bp, unidentified
  source 1..99: mol_type = unassigned DNA; note = methanogen bacteria
cctggatttgcaagttctgttctacaaacattgatggcatctggacagatgaatttagcattaatcgtatataactttttagtgttaatgttaagtcca

SEQ ID NO: 29693 - DNA, 33 bp, unidentified
  source 1..33: mol_type = unassigned DNA; note = methanogen bacteria
ccaagactgttttcaccggaaggagttgatgct

SEQ ID NO: 29694 - DNA, 96 bp, unidentified
  source 1..96: mol_type = unassigned DNA; note = methanogen bacteria
ccatttatggcatctgctttgcttcaaatattaatgttaacaggacaaatgggtgtagcattattagtttataatattatttcactcctatattct

SEQ ID NO: 29695 - DNA, 33 bp, unidentified
  source 1..33: mol_type = unassigned DNA; note = methanogen bacteria
ccaagactattttcaccagaaggtgttgatgct

SEQ ID NO: 29696 - DNA, 30 bp, unidentified
  source 1..30: mol_type = unassigned DNA; note = methanogen bacteria
ggaatctcaaatccaaacggagctggggtt

SEQ ID NO: 29697 - DNA, 96 bp, unidentified
  source 1..96: mol_type = unassigned DNA; note = methanogen bacteria
ttattgattaatgcagtaatgcagacattaatctatgctggccagcaggtattagcttatagcctttatcagttcatgatactgatcagccaaccg

SEQ ID NO: 29698 - DNA, 33 bp, unidentified
  source 1..33: mol_type = unassigned DNA; note = methanogen bacteria
ccgagactatttgcacctgaaggtgttgatgct

SEQ ID NO: 29699 - DNA, 30 bp, unidentified
  source 1..30: mol_type = unassigned DNA; note = methanogen bacteria
cctagattatttttgcctgaagaagttgat

SEQ ID NO: 29700 - DNA, 108 bp, unidentified
  source 1..108: mol_type = unassigned DNA; note = methanogen bacteria
attaataatattccaacaaattttgatactaaaatgcaggctccctcatttgttcacattttcggtacagattggatgggtagagatatgttctttagaaccattaaa

SEQ ID NO: 29701 - DNA, 90 bp, unidentified
  source 1..90: mol_type = unassigned DNA; note = methanogen bacteria
acatttttaggatttggtctatcaccacatgaacctgcaattggtattattctatctgaatctatgtcatatcttgcaatgggtgcatgg

SEQ ID NO: 29702 - DNA, 30 bp, unidentified
  source 1..30: mol_type = unassigned DNA; note = methanogen bacteria
agattgttttctccggagggtgttgatgct

SEQ ID NO: 29703 - DNA, 72 bp, unidentified
  source 1..72: mol_type = unassigned DNA; note = methanogen bacteria
atgataaaaatggtttttgaatatattagtcccttacttgatggaattgttgatattttcactcaaggggga

SEQ ID NO: 29704 - DNA, 45 bp, unidentified
  source 1..45: mol_type = unassigned DNA; note = methanogen bacteria
aaatcattaggtgttcatccggattccgcagctatggctgaaggg

SEQ ID NO: 29705 - DNA, 33 bp, unidentified
  source 1..33: mol_type = unassigned DNA; note = methanogen bacteria
cctcgactgtttgctcctgaaggtgttgatgcc

SEQ ID NO: 29706 - DNA, 33 bp, unidentified
  source 1..33: mol_type = unassigned DNA; note = methanogen bacteria
ccccgattgtttcatcccgaaggcgttgatgcc

SEQ ID NO: 29707 - DNA, 33 bp, unidentified
  source 1..33: mol_type = unassigned DNA; note = methanogen bacteria
ccaagattattctcgcctgaagaggttgatgcc

SEQ ID NO: 29708 - DNA, 63 bp, unidentified
  source 1..63: mol_type = unassigned DNA; note = methanogen bacteria
gtatcccttttcagtgtaaatgtcaatacaatggaagctggaaacctattctttagccatatg

SEQ ID NO: 29709 - DNA, 33 bp, unidentified
  source 1..33: mol_type = unassigned DNA; note = methanogen bacteria
atcagaggatatcctttcctattatggtatgaa

SEQ ID NO: 29710 - DNA, 39 bp, unidentified
  source 1..39: mol_type = unassigned DNA; note = methanogen bacteria
ggcttaggatttacaaaacatttcgaattgtttggcagc

SEQ ID NO: 29711 - DNA, 96 bp, unidentified
  source 1..96: mol_type = unassigned DNA; note = methanogen bacteria
tcagctgaaatgcatcatgatccattaagaagccaatggtttgtaattgttacattaacaacagtaggatatggagatatcacaatcacaaatttc

SEQ ID NO: 29712 - DNA, 33 bp, unidentified
  source 1..33: mol_type = unassigned DNA; note = methanogen bacteria
ccaagactatttgctcctgaaagtgttgatgct

SEQ ID NO: 29713 - DNA, 33 bp, unidentified
  source 1..33: mol_type = unassigned DNA; note = methanogen bacteria
atggatagaatatttagttttttaggaccctat

SEQ ID NO: 29714 - DNA, 84 bp, unidentified
  source 1..84: mol_type = unassigned DNA; note = methanogen bacteria
gaaggaaaagatctgttagattctttggtaatggtttcaaatgcatttacaagtaatggttatgctgtattaggggatagtgtc

SEQ ID NO: 29715 - DNA, 30 bp, unidentified
  source 1..30: mol_type = unassigned DNA; note = methanogen bacteria
aacggtcttcatttaattgattatgcaggt

SEQ ID NO: 29716 - DNA, 36 bp, unidentified
  source 1..36: mol_type = unassigned DNA; note = methanogen bacteria
attgcacttttagggtcaagttccaaattcttgaat

SEQ ID NO: 29717 - DNA, 90 bp, unidentified
  source 1..90: mol_type = unassigned DNA; note = methanogen bacteria
ggtgaaaccaaaaatgtctctgatagcctttattttgttttaataactttaactaccgttggttatggaaatgatggattcaatgaccca

SEQ ID NO: 29718 - DNA, 57 bp, unidentified
  source 1..57: mol_type = unassigned DNA; note = methanogen bacteria
gctttacctgaaatggaattattgactgcaggagatttcaatgcttttatccaatct

SEQ ID NO: 29719 - DNA, 30 bp, unidentified
  source 1..30: mol_type = unassigned DNA; note = methanogen bacteria
cgtctgttttctcccgaaggtgttgatgca

SEQ ID NO: 29720 - DNA, 30 bp, unidentified
  source 1..30: mol_type = unassigned DNA; note = methanogen bacteria
tcagtcatgattccaaatagtttttccata

SEQ ID NO: 29721 - DNA, 99 bp, unidentified
  source 1..99: mol_type = unassigned DNA; note = methanogen bacteria
ccattattattgagtacgattatacaaattttaatgatgtccggtcaaatggcagttgcatctatcctctatcaaggccttattctaattaataaccct

SEQ ID NO: 29722 - DNA, 48 bp, unidentified
  source 1..48: mol_type = unassigned DNA; note = methanogen bacteria
gaaaaacctgttaatgatgtaaatatttcacatgattttgaatgggat

SEQ ID NO: 29723 - DNA, 60 bp, unidentified
  source 1..60: mol_type = unassigned DNA; note = methanogen bacteria
ggattattgccacgtatatttttaaatatttatttatctatacaaggggttgcagataat

SEQ ID NO: 29724 - DNA, 54 bp, unidentified
  source 1..54: mol_type = unassigned DNA; note = methanogen bacteria
tcagatattggaactactataacttcaacttatgggcttgtttttcattatttt

SEQ ID NO: 29725 - DNA, 117 bp, unidentified
  source 1..117: mol_type = unassigned DNA; note = methanogen bacteria
ggttttggtactggagatgttttaatgcccgccattcctggacacttcatttcatttaattttgatatgtccctagtcggtgcatttataaggggatttggccaattattctctaac

SEQ ID NO: 29726 - DNA, 39 bp, unidentified
  source 1..39: mol_type = unassigned DNA; note = methanogen bacteria
aaaaatcccacattaggatttaatattataactgccgga

SEQ ID NO: 29727 - DNA, 33 bp, unidentified
  source 1..33: mol_type = unassigned DNA; note = methanogen bacteria
ccaagattatttgcacctgagggtattgatgct

SEQ ID NO: 29728 - DNA, 33 bp, unidentified
  source 1..33: mol_type = unassigned DNA; note = methanogen bacteria
ccaaggctgtttgcacctgaaggtgtggatgca

SEQ ID NO: 29729 - DNA, 90 bp, unidentified
  source 1..90: mol_type = unassigned DNA; note = methanogen bacteria
ggacccgagaccaacggtctcaacaggttcatctccggattctattggttcatcagccgctccggtctcgagatcaccctgtactccacc

SEQ ID NO: 29730 - DNA, 30 bp, unidentified
  source 1..30: mol_type = unassigned DNA; note = methanogen bacteria
aaccccgtgttcctgcagaccatcgactac

SEQ ID NO: 29731 - DNA, 33 bp, unidentified
  source 1..33: mol_type = unassigned DNA; note = methanogen bacteria
ccgagactctttgcgcctgaaggtgtcgatgcg

SEQ ID NO: 29732 - DNA, 33 bp, unidentified
  source 1..33: mol_type = unassigned DNA; note = methanogen bacteria
ccaagactgttttcccctgaagctgttgacgcc

SEQ ID NO: 29733 - DNA, 33 bp, unidentified
  source 1..33: mol_type = unassigned DNA; note = methanogen bacteria
cctcgcctgtttgctccagaaggggttgacgca

SEQ ID NO: 29734 - DNA, 33 bp, unidentified
  source 1..33: mol_type = unassigned DNA; note = methanogen bacteria
tcaacatttggtactatggctatagctgcaaat

SEQ ID NO: 29735 - DNA, 51 bp, unidentified
  source 1..51: mol_type = unassigned DNA; note = methanogen bacteria
ttgaatatttataatttatctgcccaaactgcagctatgacaagtgaaatg

SEQ ID NO: 29736 - DNA, 123 bp, unidentified
  source 1..123: mol_type = unassigned DNA; note = methanogen bacteria
tattcaatagatacaactaatatggttactaactttgctttacgtaatcaagcaccttcgtttgaacatctgtttggtactgattggctaggtagagacatgttttcaagaaccattaaaggt

SEQ ID NO: 29737 - DNA, 90 bp, unidentified
  source 1..90: mol_type = unassigned DNA; note = methanogen bacteria
accttccttggatttggtttatcaccacatgaaccggctattggtataatattgtctgagtcaatgaaatatttaactatgggtgattgg

SEQ ID NO: 29738 - DNA, 33 bp, unidentified
  source 1..33: mol_type = unassigned DNA; note = methanogen bacteria
ggaaccgctccaatagatgagcttccagcaaca

SEQ ID NO: 29739 - DNA, 33 bp, unidentified
  source 1..33: mol_type = unassigned DNA; note = methanogen bacteria
ccccgtttgtttgctccggaaggtgttgacgcc

SEQ ID NO: 29740 - DNA, 102 bp, unidentified
  source 1..102: mol_type = unassigned DNA; note = methanogen bacteria
cctatgattatgaatgcagcaatccaaaccctgatgttcagcggccagcaaataatggcatatagcctatatcagatgatgatggtcatgacccagccgatg

SEQ ID NO: 29741 - DNA, 123 bp, unidentified
  source 1..123: mol_type = unassigned DNA; note = methanogen bacteria
aatgttttcggcaatgcaatgattgttattcaaggaatttatttgcaggttgcaaatgcgtatatggggtcttcttctgctattgcagttgatgcaatatctcaggcatttatcaatttggta

SEQ ID NO: 29742 - DNA, 30 bp, unidentified
  source 1..30: mol_type = unassigned DNA; note = methanogen bacteria
ctaaattcaaatataatcgataattttaat

SEQ ID NO: 29743 - DNA, 72 bp, unidentified
  source 1..72: mol_type = unassigned DNA; note = methanogen bacteria
gcagcaatcaactcctttacaccgtttgacgtgataaatcccgtgcaaacattaataaactcaacagacatt

SEQ ID NO: 29744 - DNA, 48 bp, unidentified
  source 1..48: mol_type = unassigned DNA; note = methanogen bacteria
gttggaaaaagtgcacaaaacctaatttccggagcaatacagccttta

SEQ ID NO: 29745 - DNA, 123 bp, unidentified
  source 1..123: mol_type = unassigned DNA; note = methanogen bacteria
gatattgttggcaattttgtgatagtttgtgaagaaatttatttacaggcctctggtgtttatatgggggcttctagtgatattgcagttaatgcagtatctcaggcattgactaatttggcg

SEQ ID NO: 29746 - DNA, 87 bp, unidentified
  source 1..87: mol_type = unassigned DNA; note = methanogen bacteria
atgcagcacccacaattcagaatgtgggttatagaggtatatattgttattttgaaggtgaatgaattggattatttgttaatatca

SEQ ID NO: 29747 - DNA, 93 bp, unidentified
  source 1..93: mol_type = unassigned DNA; note = methanogen bacteria
ttggaaagcggaaatcctctcgattcactggtaatggtttcaaacgcatttacaagtaacggttatgcggttttaggatcaacaattcccggt

SEQ ID NO: 29748 - DNA, 30 bp, unidentified
  source 1..30: mol_type = unassigned DNA; note = methanogen bacteria
aataattttgttaaaatggatataaatctt

SEQ ID NO: 29749 - DNA, 33 bp, unidentified
  source 1..33: mol_type = unassigned DNA; note = methanogen bacteria
gagggtggagatcaatttaaaaatactttcact

SEQ ID NO: 29750 - DNA, 33 bp, unidentified
  source 1..33: mol_type = unassigned DNA; note = methanogen bacteria
tttactttaactactgttccttatgaaattcca

SEQ ID NO: 29751 - DNA, 120 bp, unidentified
  source 1..120: mol_type = unassigned DNA; note = methanogen bacteria
gatatttttggtaattttatgatactttgccaagaaatttatttacagtcccagcatatttatacaggagcttcttctactattttagttgatgcaatatctcaggcatttgtcaatttg

SEQ ID NO: 29752 - DNA, 48 bp, unidentified
  source 1..48: mol_type = unassigned DNA; note = methanogen bacteria
atgaatgtggcatcattagcaaatattgacatattcagcaattacaac

SEQ ID NO: 29753 - DNA, 66 bp, unidentified
  source 1..66: mol_type = unassigned DNA; note = methanogen bacteria
ttaggaggcctaacacagacaagcatttcaaatcctgttcaggatatgataaactcaacaaacatc

SEQ ID NO: 29754 - DNA, 51 bp, unidentified
  source 1..51: mol_type = unassigned DNA; note = methanogen bacteria
tttgtcacaacaagcgttgagacaataacttcaggaacagtctatcccgca

SEQ ID NO: 29755 - DNA, 57 bp, unidentified
  source 1..57: mol_type = unassigned DNA; note = methanogen bacteria
gcacttcctaactttaatatattaactgacactgacctttcatatgctattgaatcc

SEQ ID NO: 29756 - DNA, 48 bp, unidentified
  source 1..48: mol_type = unassigned DNA; note = methanogen bacteria
aatccaacattaggatataatgtaatcacattcggttcaataataatc

SEQ ID NO: 29757 - DNA, 81 bp, unidentified
  source 1..81: mol_type = unassigned DNA; note = methanogen bacteria
atcctcggggacaagtcccagcctgccctgatggaagggaagctgctgtggttcgacatgtacatgaccgaggacagcttc

SEQ ID NO: 29758 - DNA, 57 bp, unidentified
  source 1..57: mol_type = unassigned DNA; note = methanogen bacteria
gcagtcgactggaacgggatggcggagctcttctcgccgctcttcgggtggggcctg

SEQ ID NO: 29759 - DNA, 33 bp, unidentified
  source 1..33: mol_type = unassigned DNA; note = methanogen bacteria
tatttcctccagactgtaagccatatctacacc

SEQ ID NO: 29760 - DNA, 30 bp, unidentified
  source 1..30: mol_type = unassigned DNA; note = methanogen bacteria
cgtctgttttctcctgaaggtgttgatgca

SEQ ID NO: 29761 - DNA, 54 bp, unidentified; identical to SEQ ID NO: 29664
  source 1..54: mol_type = unassigned DNA; note = methanogen bacteria

SEQ ID NO: 29762 - DNA, 36 bp, unidentified
  source 1..36: mol_type = unassigned DNA; note = methanogen bacteria
atttcaggaacatatcaggcaggacttatggttaat

SEQ ID NO: 29763 - DNA, 30 bp, unidentified
  source 1..30: mol_type = unassigned DNA; note = methanogen bacteria
gctttgactcctgaaacaaagtgtctggag

SEQ ID NO: 29764 - DNA, 132 bp, unidentified
  source 1..132: mol_type = unassigned DNA; note = methanogen bacteria
gcagcgaagcgtgtggatcagactacgcaggatgagatcgcaggtcaggcagacggagatgatgatacctttgatctgaatattacatcaaatctgggcagtactcgtctggaatcgacgttgcagatattg

SEQ ID NO: 29765 - DNA, 240 bp, unidentified
  source 1..240: mol_type = unassigned DNA; note = methanogen bacteria
atgaccccggtttttactcaggtatatgatgatggtgtaaagccatatactcagggacaggtgacggaaaaggatgctttggacgctggacttgcacctttacggaagtttatgctgggacagacgagagataaggatctgaagctttttatggagatcaacaagacttcatctgatgagattaaggattatgatgatctttccattacgaccattattccggcttttattatcagtgag

SEQ ID NO: 29766 - DNA, 36 bp, unidentified
  source 1..36: mol_type = unassigned DNA; note = methanogen bacteria
aatctgatcgtagaccagttggtccgatcattccaa

SEQ ID NO: 29767 - DNA, 33 bp, unidentified
  source 1..33: mol_type = unassigned DNA; note = methanogen bacteria
atcataaatcccgacatagtaaagaatttcaat

SEQ ID NO: 29768 - DNA, 72 bp, unidentified
  source 1..72: mol_type = unassigned DNA; note = methanogen bacteria
tccgcactcggaagcctattcggcattgatattaataaccctgttcataccctacttaactcaacggacatc

SEQ ID NO: 29769 - DNA, 54 bp, unidentified
  source 1..54: mol_type = unassigned DNA; note = methanogen bacteria
gcgattaaaagtcttcaggcactgatttcaaacagttatggggcaattgattta

SEQ ID NO: 29770 - DNA, 54 bp, unidentified
  source 1..54: mol_type = unassigned DNA; note = methanogen bacteria
aacacatcgattgaaatatcatccggattcaaatacagttatgaattgttttca

SEQ ID NO: 29771 - DNA, 129 bp, unidentified
  source 1..129: mol_type = unassigned DNA; note = methanogen bacteria
aatatttatgataatttatttatagttagcagagaaatttatttacagactcactatgcttatatgggatcttccagtgctgttgcatttaatacaatatctcaggcattggccaatttagtggtttct

SEQ ID NO: 29772 - DNA, 54 bp, unidentified
  source 1..54: mol_type = unassigned DNA; note = methanogen bacteria
ttgcctgcatctcaattagtaactgaaggagattttgtaacttttttacagtca

SEQ ID NO: 29773 - DNA, 66 bp, unidentified
  source 1..66: mol_type = unassigned DNA; note = methanogen bacteria
atggatattatcggaccaataattggaggatttgaaatgataatggaaatgctccaaagtggaggg

SEQ ID NO: 29774 - DNA, 45 bp, unidentified
  source 1..45: mol_type = unassigned DNA; note = methanogen bacteria
aagaatctgggaatagacccaagcgccactgcaatggcagaaggt

SEQ ID NO: 29775 - DNA, 129 bp, unidentified
  source 1..129: mol_type = unassigned DNA; note = methanogen bacteria
gatatttatggtaaaatttggatagtatttgaaggacttttagcacagattttaagtgttataaccaccggagacttttctgttttagtattcggtgcaatggccgatgcaatagtcggtttgattatt

SEQ ID NO: 29776 - DNA, 66 bp, unidentified
  source 1..66: mol_type = unassigned DNA; note = methanogen bacteria
gaaatgggggttttaccgcatgcttttgttagattctatttagcaatccaaggtttggcggataat

SEQ ID NO: 29777 - DNA, 57 bp, unidentified
  source 1..57: mol_type = unassigned DNA; note = methanogen bacteria
gtcgatatgggaaacattataacaaagatttatgatactatatttattcattttgat

SEQ ID NO: 29778 - DNA, 33 bp, unidentified
  source 1..33: mol_type = unassigned DNA; note = methanogen bacteria
attccagaaattcatttattggattatacaggt

SEQ ID NO: 29779 - DNA, 39 bp, unidentified
  source 1..39: mol_type = unassigned DNA; note = methanogen bacteria
tttgacctattgcctattcactctttatttaatcttact

SEQ ID NO: 29780 - DNA, 87 bp, unidentified
  source 1..87: mol_type = unassigned DNA; note = methanogen bacteria
ggcattaagaatttaacagacagcttttattttgttatcataaccttaaccactgtaggttataatgataatgctataaacactcct

SEQ ID NO: 29781 - DNA, 147 bp, unidentified
  source 1..147: mol_type = unassigned DNA; note = methanogen bacteria
ggtgcacctggtgcattaatgaaaatatttaacttttttgctgaaaatgaagctcttctgaatcaaactttaaacagcactggtgctgtaaacactcagattttccaaatgattcctcaagaatatgttgctggtcttataaatggt

SEQ ID NO: 29782 - DNA, 48 bp, unidentified
  source 1..48: mol_type = unassigned DNA; note = methanogen bacteria
tctcatgagaacatgatgatagaaggattctggtattacttgttttta

SEQ ID NO: 29783 - DNA, 30 bp, unidentified
  source 1..30: mol_type = unassigned DNA; note = methanogen bacteria
ttatttggtcgtggatggtgtggatatgca

SEQ ID NO: 29784 - DNA, 36 bp, unidentified
  source 1..36: mol_type = unassigned DNA; note = methanogen bacteria
gataatagggcattttgcaaatatatatgtcctaca

SEQ ID NO: 29785 - DNA, 33 bp, unidentified
  source 1..33: mol_type = unassigned DNA; note = methanogen bacteria
ttggtaaattttgttttatttgaattaactcca

SEQ ID NO: 29786 - DNA, 90 bp, unidentified
  source 1..90: mol_type = unassigned DNA; note = methanogen bacteria
gaaaataaaaaccctttagatgccattgtgatggtttccaatacatttgcaactaacggctatacagtgtatggaacttcagacataggc

SEQ ID NO: 29787 - DNA, 63 bp, unidentified
  source 1..63: mol_type = unassigned DNA; note = methanogen bacteria
gtctatcccgaactgggattcggtgtgttctccggtaacggggtattggaatccctcatggtg

SEQ ID NO: 29788 - DNA, 51 bp, unidentified
  source 1..51: mol_type = unassigned DNA; note = methanogen bacteria
ggacagccactcaaccagttctcctttactgaaagcttctcttttaccggt

SEQ ID NO: 29789 - DNA, 36 bp, unidentified
  source 1..36: mol_type = unassigned DNA; note = methanogen bacteria
attcatggaacctatcaggcagggcttatggttaat

SEQ ID NO: 29790 - DNA, 66 bp, unidentified
  source 1..66: mol_type = unassigned DNA; note = methanogen bacteria
gaaatggggattttaccgcatgcttttgttagattctatttagcaatccaaggtttggcggataat

SEQ ID NO: 29791 - DNA, 57 bp, unidentified
  source 1..57: mol_type = unassigned DNA; note = methanogen bacteria
gtcgatatgagaaatattataactaatgtttatgatacgatatttattcattttgat

SEQ ID NO: 29792 - DNA, 30 bp, unidentified
  source 1..30: mol_type = unassigned DNA; note = methanogen bacteria
ggtatgttaaaagcaggtgcacctgtaggt

SEQ ID NO: 29793 - DNA, 78 bp, unidentified
  source 1..78: mol_type = unassigned DNA; note = methanogen bacteria
ggaggtcttttccctgcagattcagcattcgcaactaaagcaacttctgttgcaactgctaaagtaggtctggcatgg

SEQ ID NO: 29794 - DNA, 33 bp, unidentified
  source 1..33: mol_type = unassigned DNA; note = methanogen bacteria
ttcttaggtgctaaaggcgtaacttggtctact

SEQ ID NO: 29795 - DNA, 63 bp, unidentified
  source 1..63: mol_type = unassigned DNA; note = methanogen bacteria
ttaggtcatgaaaacttgtctctgtccggattttggtattatttaagtttaggtgtttttgaa

SEQ ID NO: 29796 - DNA, 33 bp, unidentified
  source 1..33: mol_type = unassigned DNA; note = methanogen bacteria
aatcgtgcattttgcaaatatgtttgtccgatt

SEQ ID NO: 29797 - DNA, 30 bp, unidentified
  source 1..30: mol_type = unassigned DNA; note = methanogen bacteria
atggatgatataacaatttttttcagagga

SEQ ID NO: 29798 - DNA, 87 bp, unidentified
  source 1..87: mol_type = unassigned DNA; note = methanogen bacteria
gaagatgtttatcctttggattctttggtaatggtttccaatgcatttacaagtaatggatatgccgttttaggaactacaattgcc

SEQ ID NO: 29799 - DNA, 36 bp, unidentified
  source 1..36: mol_type = unassigned DNA; note = methanogen bacteria
aatatatctggtttaagttcaattaaagattcaagt

SEQ ID NO: 29800 - DNA, 30 bp, unidentified
  source 1..30: mol_type = unassigned DNA; note = methanogen bacteria
aaaggaggcaccattaacaataatttaaac

SEQ ID NO: 29801 - DNA, 33 bp, unidentified
  source 1..33: mol_type = unassigned DNA; note = methanogen bacteria
ttaggtttaggttctgcaagtggcatactcccg

SEQ ID NO: 29802 - DNA, 51 bp, unidentified
  source 1..51: mol_type = unassigned DNA; note = methanogen bacteria
atatcccatgagaacatgatgatagagggattctggtattacttgttttta

SEQ ID NO: 29803 - DNA, 30 bp, unidentified
  source 1..30: mol_type = unassigned DNA; note = methanogen bacteria
ctctttggccgtggctggtgtggatatgca

SEQ ID NO: 29804 - DNA, 39 bp, unidentified
  source 1..39: mol_type = unassigned DNA; note = methanogen bacteria
aaggataatcgggcattttgcaaatatatctgccctaca

SEQ ID NO: 29805 - DNA, 66 bp, unidentified
  source 1..66: mol_type = unassigned DNA; note = methanogen bacteria
atggacattataggcatcataggttctacattgaatgacgtcatatccatgttccaaagtggggga

SEQ ID NO: 29806 - DNA, 42 bp, unidentified
  source 1..42: mol_type = unassigned DNA; note = methanogen bacteria
aaacagttaggaataaatagtgatatcactcttatggcaaat

SEQ ID NO: 29807 - DNA, 81 bp, unidentified
  source 1..81: mol_type = unassigned DNA; note = methanogen bacteria
tttcccgcctttcaacatattggtatttcaaatattttgtttggtattaattgggctccggataatggtttttatggaatt

SEQ ID NO: 29808 - DNA, 36 bp, unidentified
  source 1..36: mol_type = unassigned DNA; note = methanogen bacteria
atttcaagagattttttcggaggtagtggatttacc

SEQ ID NO: 29809 - DNA, 105 bp, unidentified
  source 1..105: mol_type = unassigned DNA; note = methanogen bacteria
gcaggtaatgtggctgaaatcccaacctctattttaagtcccgttaggacattaacttcaaatattgctctagaaatggggtatgcaattgatatccattataat

SEQ ID NO: 29810 - DNA, 48 bp, unidentified
  source 1..48: mol_type = unassigned DNA; note = methanogen bacteria
ggtccgatttatattcctttatctgactctgttactgtttcagtaatg

SEQ ID NO: 29811 - DNA, 30 bp, unidentified
  source 1..30: mol_type = unassigned DNA; note = methanogen bacteria
ggtcagtctatgcatattttatttgaaatg

SEQ ID NO: 29812 - DNA, 123 bp, unidentified
  source 1..123: mol_type = unassigned DNA; note = methanogen bacteria
tcaatacttccattacatccttatgcttttgctatggctagtggtgtaggtagtgccagtatgaatgcagcttcattaggacctactcttgcagcatttcccgcattggaaactcaaattgaa

SEQ ID NO: 29813 - DNA, 36 bp, unidentified
  source 1..36: mol_type = unassigned DNA; note = methanogen bacteria
tacgaatatatgctgaacgctcttcaccagttgcat

SEQ ID NO: 29814 - DNA, 30 bp, unidentified
  source 1..30: mol_type = unassigned DNA; note = methanogen bacteria
gaaataatcaattccacaggtttaagcttc

SEQ ID NO: 29815 - DNA, 54 bp, unidentified
  source 1..54: mol_type = unassigned DNA; note = methanogen bacteria
tttggacagtcactcaaccagttttccttaactgaaagcttttcctttaccggt

SEQ ID NO: 29816 - DNA, 36 bp, unidentified
  source 1..36: mol_type = unassigned DNA; note = methanogen bacteria
ataccgggaacctatcaggcaggacttatggtgaat

SEQ ID NO: 29817 - DNA, 66 bp, unidentified
  source 1..66: mol_type = unassigned DNA; note = methanogen bacteria
atggacattatagcaacactcttttctacaggaaatgacttgattacaatgttccagagtggagga

SEQ ID NO: 29818 - DNA, 42 bp, unidentified
  source 1..42: mol_type = unassigned DNA; note = methanogen bacteria
aaggaattaggaacaagcagcgacataacattaatggccaac

SEQ ID NO: 29819 - DNA, 285 bp, unidentified
  source 1..285: mol_type = unassigned DNA; note = methanogen bacteria
ttgtttgttgatgatgctcaggggttgttcaaggacaagaatatgagtgttgaccttattaaacataataatggtgcagatatgatggctgcaatggcaaagggagaaattgatgtgggatatgtcggtattgctcccgtatcatcatcaatcaatgatgctgttggtgtaaaaatcatttcttctgcacagaacgaaggcagtggtattgtcgtagctaaagattccgatatcacatccgccaagaagttgaagggtaagaatgtagctacccttggtgaaggt

SEQ ID NO: 29820 - DNA, 36 bp, unidentified
  source 1..36: mol_type = unassigned DNA; note = methanogen bacteria
ggcacatttattggtaaacatgccgttgcagcaatt

SEQ ID NO: 29821 - DNA, 57 bp, unidentified
  source 1..57: mol_type = unassigned DNA; note = methanogen bacteria
gaattagctactgctttaggttcaacagcagctacaaaatctcttgtaatccaatat

SEQ ID NO: 29822 - DNA, 63 bp, unidentified
  source 1..63: mol_type = unassigned DNA; note = methanogen bacteria
atgattattgagtatattatgccatttgttgatgggatagttgacatttttacgcaaggggga

SEQ ID NO: 29823 - DNA, 45 bp, unidentified
  source 1..45: mol_type = unassigned DNA; note = methanogen bacteria
aaatcattaggtgttcatccggattctgcggcaatggcagaaggt

SEQ ID NO: 29824 - DNA, 63 bp, unidentified
  source 1..63: mol_type = unassigned DNA; note = methanogen bacteria
atgattatagaatatgtttcgccattttttgatggtatgatggatatttttactcaaggggga

SEQ ID NO: 29825 - DNA, 45 bp, unidentified
  source 1..45: mol_type = unassigned DNA; note = methanogen bacteria
aaatcattaggtgttcatcctgactctgcagctatggctgaaggt

SEQ ID NO: 29826 - DNA, 63 bp, unidentified
  source 1..63: mol_type = unassigned DNA; note = methanogen bacteria
atgataatagaagcaattactggtttaatatctggttttgttgatttcttccaacaaggaggt

SEQ ID NO: 29827 - DNA, 42 bp, unidentified
  source 1..42: mol_type = unassigned DNA; note = methanogen bacteria
ggatcattgggggtaaatcctgatccaactgctatggctaga

SEQ ID NO: 29828 - DNA, 48 bp, unidentified
  source 1..48: mol_type = unassigned DNA; note = methanogen bacteria
tatttttattataatgagttatttacaaataaatatttatttattcct

SEQ ID NO: 29829 - DNA, 69 bp, unidentified
  source 1..69: mol_type = unassigned DNA; note = methanogen bacteria
attattttaaatttttctaatttacaaaatcctgtaattacaattaatacaattttaagtttaatctct

SEQ ID NO: 29830 - DNA, 63 bp, unidentified
  source 1..63: mol_type = unassigned DNA; note = methanogen bacteria
atgattttcgaaatatttaatggttttttatcaggtatagcagatttctttagaaatggagga

SEQ ID NO: 29831 - DNA, 45 bp, unidentified
  source 1..45: mol_type = unassigned DNA; note = methanogen bacteria
aaatcattaggtgttgatcctagtccttcagctatggcagagggt

SEQ ID NO: 29832 - DNA, 63 bp, unidentified
  source 1..63: mol_type = unassigned DNA; note = methanogen bacteria
atgattattgaatttattggtccatttattgatagtattgtagatatcttctctcagggtgga

SEQ ID NO: 29833 - DNA, 45 bp, unidentified
  source 1..45: mol_type = unassigned DNA; note = methanogen bacteria
aaatcattaggtgttcatccggattctgcagctatggctgaaggt

SEQ ID NO: 29834 - DNA, 93 bp, unidentified
  source 1..93: mol_type = unassigned DNA; note = methanogen bacteria
ttatttttaagctcattaatgacaatattaatgtacggttcacaaacaaaccttgccgcagcattatatcagataatgtttttaatatccaac

SEQ ID NO: 29835 - DNA, 63 bp, unidentified
  source 1..63: mol_type = unassigned DNA; note = methanogen bacteria
atgattatagagtatatttcgccaatctttactggaataatggatattttctctcaaggggga

SEQ ID NO: 29836 - DNA, 48 bp, unidentified
  source 1..48: mol_type = unassigned DNA; note = methanogen bacteria
ttcaaatctttgggtgttaatcccaattcctctgctatggcagaaggt

SEQ ID NO: 29837 - DNA, 105 bp, unidentified
  source 1..105: mol_type = unassigned DNA; note = methanogen bacteria
accgcctgcatataccgtccatggattcttgattccagaatacatccggtaaaagaggccattgccggcgctacaggatattcatttccaagcggacatacaact

SEQ ID NO: 29838 - DNA, 66 bp, unidentified
  source 1..66: mol_type = unassigned DNA; note = methanogen bacteria
acaaagtcatatcctctggattatgatactgcaggtagactaattgttaatcctgcaataatggct

SEQ ID NO: 29839 - DNA, 33 bp, unidentified
  source 1..33: mol_type = unassigned DNA; note = methanogen bacteria
acttcccaagtaaaaattacaaataatcttcca

SEQ ID NO: 29840 - DNA, 30 bp, unidentified
  source 1..30: mol_type = unassigned DNA; note = methanogen bacteria
ggccttcagaaagaagtggcaaacagcagt

SEQ ID NO: 29841 - DNA, 96 bp, unidentified
  source 1..96: mol_type = unassigned DNA; note = methanogen bacteria
ccagtaattttaagcacaatgatttcaatattaatgtatgcttcacaagccattatcgcaacacaattatatcaaataatgcttataatatccaac

SEQ ID NO: 29842 - DNA, 90 bp, unidentified
  source 1..90: mol_type = unassigned DNA; note = methanogen bacteria
gcagaaggaaaaaatttattagactcattggtaatggtttcaaatgcattcacaagtaatggttatgctgtattaggagacacccctata

SEQ ID NO: 29843 - DNA, 135 bp, unidentified
  source 1..135: mol_type = unassigned DNA; note = methanogen bacteria
ataaatattaatgacaaacttatggcagttgctcaagagatttcttcactctatccaaatattttcttgacaagttctccggatattgcatttgaggcattgtctcaagcaataattgaattaatagttccttta

SEQ ID NO: 29844 - DNA, 57 bp, unidentified
  source 1..57: mol_type = unassigned DNA; note = methanogen bacteria
gcccttccggaacttcagatagctaactattctgatttcatattcttcattacaaca

SEQ ID NO: 29845 - DNA, 30 bp, unidentified
  source 1..30: mol_type = unassigned DNA; note = methanogen bacteria
gatgaagatgaggcttcaaggtacctggat

SEQ ID NO: 29846 - DNA, 48 bp, unidentified
  source 1..48: mol_type = unassigned DNA; note = methanogen bacteria
acaattcggaatgtctccttgaaaggaggcctttcaaaaggcaacggc

SEQ ID NO: 29847 - DNA, 63 bp, unidentified
  source 1..63: mol_type = unassigned DNA; note = methanogen bacteria
atgattattgaaagtcttattaatggatttgacatgattatggagatgctccaaagtggggga

SEQ ID NO: 29848 - DNA, 45 bp, unidentified
  source 1..45: mol_type = unassigned DNA; note = methanogen bacteria
aagaatttaggtgtaaatcctgatgctgcagctatggcagagggt

SEQ ID NO: 29849 - DNA, 99 bp, unidentified
  source 1..99: mol_type = unassigned DNA; note = methanogen bacteria
aaatcgttggatattttcagagccgctgtgcatatagctgaaaagactaacggtactgtttcacacattcccatttcacagctgcctgttggcgatatg

SEQ ID NO: 29850 - DNA, 63 bp, unidentified
  source 1..63: mol_type = unassigned DNA; note = methanogen bacteria
atgattgttgagtatattgtgcctttcattgatgggataatggatatttttactcagggagga

SEQ ID NO: 29851 - DNA, 45 bp, unidentified
  source 1..45: mol_type = unassigned DNA; note = methanogen bacteria
aagtcattgggtgtgcatccggacactgccgcaatggcggaaggg

SEQ ID NO: 29852 - DNA, 63 bp, unidentified
  source 1..63: mol_type = unassigned DNA; note = methanogen bacteria
atgattattgagtatattacgcctatttttaatgggataatggatatttttactcagggggga

SEQ ID NO: 29853 - DNA, 45 bp, unidentified
  source 1..45: mol_type = unassigned DNA; note = methanogen bacteria
aagtcattaggtgttcatccggataccgccgcaatggctgaaggt

SEQ ID NO: 29854 - DNA, 63 bp, unidentified
  source 1..63: mol_type = unassigned DNA; note = methanogen bacteria
atgattgttgagtatattatgccgttcattgatgggatagttgacatattttcccaaggtgga

SEQ ID NO: 29855 - DNA, 45 bp, unidentified
  source 1..45: mol_type = unassigned DNA; note = methanogen bacteria
aaatcattaggagttcatcctgattctgcagcaatggctgaaggt

SEQ ID NO: 29856 - DNA, 63 bp, unidentified
  source 1..63: mol_type = unassigned DNA; note = methanogen bacteria
atgtttattgaaagtattacaccattttttgaaggaataatagatatttttagccaaggtgga

SEQ ID NO: 29857 - DNA, 45 bp, unidentified
  source 1..45: mol_type = unassigned DNA; note = methanogen bacteria
aaatctttaggtgtaaacccaaacactgctgctatggctgaaggt

SEQ ID NO: 29858 - DNA, 63 bp, unidentified
  source 1..63: mol_type = unassigned DNA; note = methanogen bacteria
atgtttattgatagtataacatctattcttaatggaatagtggacatattttctcaaggggga

SEQ ID NO: 29859 - DNA, 45 bp, unidentified
  source 1..45: mol_type = unassigned DNA; note = methanogen bacteria
aaatctttaggtgttaatcctgattccgcagctatggcagaaggt

SEQ ID NO: 29860 - DNA, 63 bp, unidentified
  source 1..63: mol_type = unassigned DNA; note = methanogen bacteria
atgataatagaatttttaacaaatggttttggaactattcttgaaatgttccaaaaaggagga

SEQ ID NO: 29861 - DNA, 45 bp, unidentified
  source 1..45: mol_type = unassigned DNA; note = methanogen bacteria
aaagttatgggtattcaaggaaacattactggtatggctgaaggt

SEQ ID NO: 29862 - DNA, 63 bp, unidentified
  source 1..63: mol_type = unassigned DNA; note = methanogen bacteria
atgattgtcgaatattttacacaaattttcgagggtatgatggacatattttctcaaggagga

SEQ ID NO: 29863 - DNA, 45 bp, unidentified
  source 1..45: mol_type = unassigned DNA; note = methanogen bacteria
aaatcattaggtgttaatcctaattctgcagctatggcagaaggt

SEQ ID NO: 29864 - DNA, 105 bp, unidentified
  source 1..105: mol_type = unassigned DNA; note = methanogen bacteria
tcggagattgatccttcatttgcatctgtatttgatgctttctggtttaatatggttacgatttccagtgtgggctatggtgatttaacgccgttaacggattcc

SEQ ID NO: 29865 - DNA, 45 bp, unidentified; identical to SEQ ID NO: 24756
  source 1..45: mol_type = unassigned DNA; note = methanogen bacteria

SEQ ID NO: 29866 - DNA, 39 bp, unidentified; identical to SEQ ID NO: 23107
  source 1..39: mol_type = unassigned DNA; note = methanogen bacteria

SEQ ID NO: 29867 - DNA, 96 bp, unidentified
  source 1..96: mol_type = unassigned DNA; note = methanogen bacteria
aagaccgttgatgtaaccaaaatgattataggcactttagaaaaaaccaatgcaactggattcaatctaaacttttctcaattgcctaatggtgac

SEQ ID NO: 29868 - DNA, 87 bp, unidentified
  source 1..87: mol_type = unassigned DNA; note = methanogen bacteria
gaacaggttaatcctttaaatgcactggtcatggtttcaaacgcatttacaagtaatggatatgctgttttaggaacaaccgccatt

SEQ ID NO: 29869 - DNA, 93 bp, unidentified
  source 1..93: mol_type = unassigned DNA; note = methanogen bacteria
tctctagatttatatagagccactttaagaatacttgaaaaaaggaatggtggggtactatccctaaaattttcacaattaccttcaggagaa

SEQ ID NO: 29870 - DNA, 33 bp, unidentified
  source 1..33: mol_type = unassigned DNA; note = methanogen bacteria
ccaagattattttcaccagagggtgttgatgcg

SEQ ID NO: 29871 - DNA, 99 bp, unidentified
  source 1..99: mol_type = unassigned DNA; note = methanogen bacteria
aatacatttgacatgtacagggttgtgattcatgtgctggaaaacaccactgtccccttatcatctctgaacatgtcaataatacctagcgccaacata

SEQ ID NO: 29872 - DNA, 60 bp, unidentified
  source 1..60: mol_type = unassigned DNA; note = methanogen bacteria
attttagggcatgaaaacttgtccatgagtggattttggtattacttgtttttaggggtt

SEQ ID NO: 29873 - DNA, 90 bp, unidentified
  source 1..90: mol_type = unassigned DNA; note = methanogen bacteria
tctctagatttatatagggccactttaagaatacttgaaaaaaggaatggtggggaactatccctaaaattttcacaattaccttcggga

SEQ ID NO: 29874 - DNA, 33 bp, unidentified
  source 1..33: mol_type = unassigned DNA; note = methanogen bacteria
tccagtggagtgaatcctgatttggcaatgatg

SEQ ID NO: 29875 - DNA, 42 bp, unidentified
  source 1..42: mol_type = unassigned DNA; note = methanogen bacteria
ggttacggagtcaatccgattccttattccctgggttatgta

SEQ ID NO: 29876 - DNA, 36 bp, unidentified
  source 1..36: mol_type = unassigned DNA; note = methanogen bacteria
tttgatcctataatgtttttagttggtcttatgatt

SEQ ID NO: 29877 - DNA, 96 bp, unidentified
  source 1..96: mol_type = unassigned DNA; note = methanogen bacteria
aagactgttgatgtaaccaaaatgattataggcactttagaaaaaaccaatgcaaccgcattcaatctaaacttttctcaattgcctaatggtgac

SEQ ID NO: 29878 - DNA, 30 bp, unidentified
  source 1..30: mol_type = unassigned DNA; note = methanogen bacteria
cctttgatttcaccagatgctatacccgtt

SEQ ID NO: 29879 - DNA, 93 bp, unidentified
  source 1..93: mol_type = unassigned DNA; note = methanogen bacteria
agcccaagctataacggtttcgatgatttttattttgtcattgtcactttgaccactgtcggatacggggatgtcaccccaacaacttataac

SEQ ID NO: 29880 - DNA, 42 bp, unidentified
  source 1..42: mol_type = unassigned DNA; note = methanogen bacteria
ccaaattcattcaattgggtattggaagagtttatgggaata

SEQ ID NO: 29881 - DNA, 96 bp, unidentified
  source 1..96: mol_type = unassigned DNA; note = methanogen bacteria
aagacagttgatgtaaccaggatgatcatacacactttggaaaaaaccaacgttacctcatccactttaggctattcacatctgcctcattgggat

SEQ ID NO: 29882 - DNA, 66 bp, unidentified
  source 1..66: mol_type = unassigned DNA; note = methanogen bacteria
cccgaactattttatccttccatgagctcaacatatatattgccttcatggaaacctgcatggagc

SEQ ID NO: 29883 - DNA, 93 bp, unidentified
  source 1..93: mol_type = unassigned DNA; note = methanogen bacteria
ggatcttctaatagtctgtttgaaagtttttattttgttattgtcacattgacaacggtgggatatggtgatatagttcctaaaacattcaat

SEQ ID NO: 29884 - DNA, 99 bp, unidentified
  source 1..99: mol_type = unassigned DNA; note = methanogen bacteria
cttaagaccgttgacgtaaccaaaggaattataaacactttagaaaaaaccaatgttacagcatccactttaggatattcacatctgcctcatggagat

SEQ ID NO: 29885 - DNA, 144 bp, unidentified
  source 1..144: mol_type = unassigned DNA; note = methanogen bacteria
accaacattccaggtcaaattatggatattgtccagaaaactgctgtaagtcatgcaaatgcaactgcaatggcaggttcctcatcaactgttgtcaccggagtgtccgatgcagcaattgctagtttgacaggttcaattaca

SEQ ID NO: 29886 - DNA, 96 bp, unidentified
  source 1..96: mol_type = unassigned DNA; note = methanogen bacteria
aaatcatttgatattttcagaatgtcaatacatcttgttgaaaacaccaacagcacagtatcacagataccgttttcgcagttgccggcaggagac

SEQ ID NO: 29887 - DNA, 276 bp, unidentified
  source 1..276: mol_type = unassigned DNA; note = methanogen bacteria
gtaaatggcttggataaaagtgttgatcttaaaggaggatcaatagcagtacttgaattagataagaatattacttctaatgagataactacattgattaatgaaaaattaggtattagtgacgctaaagtaatcagttttgtggataataaagtaactgtagaatttggtgatacagtagatgttacaaatttaacaaattctcttaaaggaacggcatcattaattagttttagttctgttggtcctgttttaagtgaagccgctcttaatcaa

SEQ ID NO: 29888 - DNA, 30 bp, unidentified
  source 1..30: mol_type = unassigned DNA; note = methanogen bacteria
atttttattcctgaagctgatgttttaagt

SEQ ID NO: 29889 - DNA, 63 bp, unidentified
  source 1..63: mol_type = unassigned DNA; note = methanogen bacteria
tccaatcctactttgggatataatataatcacggtcggttcaattattataattgttcagtca

SEQ ID NO: 29890 - DNA, 99 bp, unidentified
  source 1..99: mol_type = unassigned DNA; note = methanogen bacteria
cttaaaactgttgatgtaaccagaatgattgtagacactttagaaaaaaccaatgctactgcatcaactttaagctattcacagttgcctaatggagat

SEQ ID NO: 29891 - DNA, 33 bp, unidentified
  source 1..33: mol_type = unassigned DNA; note = methanogen bacteria
ccactgttattctctcccgaagatgttgatgct

SEQ ID NO: 29892 - DNA, 99 bp, unidentified
  source 1..99: mol_type = unassigned DNA; note = methanogen bacteria
atcaagtcattcgacattttcagaatgtctgttcacactgttgaaaatgccaatactacattatcacacctgccactttcacagttgcctgctggagac

SEQ ID NO: 29893 - DNA, 36 bp, unidentified
  source 1..36: mol_type = unassigned DNA; note = methanogen bacteria
ggtatagtgactactttaggtggttttgaattaggt

SEQ ID NO: 29894 - DNA, 30 bp, unidentified
  source 1..30: mol_type = unassigned DNA; note = methanogen bacteria
agtcatgttgatgcattgtttgccggtgaa

SEQ ID NO: 29895 - DNA, 30 bp, unidentified
  source 1..30: mol_type = unassigned DNA; note = methanogen bacteria
agtcaggttgatgcattgtttgccggtgca

SEQ ID NO: 29896 - DNA, 57 bp, unidentified; identical to SEQ ID NO: 24242
  source 1..57: mol_type = unassigned DNA; note = methanogen bacteria

SEQ ID NO: 29897 - DNA, 51 bp, unidentified
  source 1..51: mol_type = unassigned DNA; note = methanogen bacteria
tcaactaaaaaattttgccccagagtttgctattgttgcatttgttataat

SEQ ID NO: 29898 - DNA, 30 bp, unidentified
  source 1..30: mol_type = unassigned DNA; note = methanogen bacteria
aatgcatttggattatttgataatgagaac

SEQ ID NO: 29899 - DNA, 147 bp, unidentified
  source 1..147: mol_type = unassigned DNA; note = methanogen bacteria
tatgacacaaaacttttcgacaacatcacaggcgttgttgtggaatttatttcacagatagtaaatgtttatattttaggcggatctacagatcttgcagtcaatgcgctgtcccatgcaatgaccgagttagtgggttctttagca

SEQ ID NO: 29900 - DNA, 96 bp, unidentified
  source 1..96: mol_type = unassigned DNA; note = methanogen bacteria
aagtcatttgatattttcagaacatctgtccatattgccgaaaaaactaacactactgcttcacatataccattttcacaattgccggcaggcgac

SEQ ID NO: 29901 - DNA, 96 bp, unidentified
  source 1..96: mol_type = unassigned DNA; note = methanogen bacteria
tttgatccaagcataaacaacttatttgacagcttatggtttgttctctcaacaattacaacagtaggatatggtgacattttgcctcaatccggt

SEQ ID NO: 29902 - DNA, 237 bp, unidentified
  source 1..237: mol_type = unassigned DNA; note = methanogen bacteria
atcaaactgagcttaactggaatggacagtccaataaaccatggaaccgtttcaatcacactcaatgacaccccttacactgcaaatgtctctggtggaattgcaacaatagaaatcccagacctagatcctggaatatatgaaggaacagtcacctatgaaggaggaaaaggatatgacagcccaagcatagatgtcaaattcaaggtaatgggccttacagacattcagataata

SEQ ID NO: 29903 - DNA, 81 bp, unidentified
  source 1..81: mol_type = unassigned DNA; note = methanogen bacteria
aatataactgtcgcagtcacttccaacggaaagccagtgaataatggtataatcatcataagaagagaaaatagaaccagt

SEQ ID NO: 29904 - DNA, 60 bp, unidentified
  source 1..60: mol_type = unassigned DNA; note = methanogen bacteria
ggaattatacagatcccagaattggacgttggactttatgaagaaaccataatctatact

SEQ ID NO: 29905 - DNA, 57 bp, unidentified
  source 1..57: mol_type = unassigned DNA; note = methanogen bacteria
ggaaaaaaatacatagccaatgtcacaaatggaattgcaacaatagaaattccagac

SEQ ID NO: 29906 - DNA, 87 bp, unidentified
  source 1..87: mol_type = unassigned DNA; note = methanogen bacteria
agtgcaggaacatatgaaggaaccatcagatatgatggaggaagcaaatacagcaatccatcaaaagacattacattctatgtgaaa

SEQ ID NO: 29907 - DNA, 33 bp, unidentified
  source 1..33: mol_type = unassigned DNA; note = methanogen bacteria
tatccatggggattttttaatgttgataattat

SEQ ID NO: 29908 - DNA, 126 bp, unidentified
  source 1..126: mol_type = unassigned DNA; note = methanogen bacteria
aatgtctttggcaatgcaatagctactgttcagcaaattcgtttacagatatccaatgtttttttcatggtaaattccgcagacatcgcagttgatgccatatcaaatgcagtatttaatttcata

SEQ ID NO: 29909 - DNA, 150 bp, unidentified
  source 1..150: mol_type = unassigned DNA; note = methanogen bacteria
tatgacacaaatcttttcagcaatgccgtggcaattgtcgaggaagtttttacacagatattcaacatgttgattatgggcagttccgcagatactgcagttaatgcattatcccatactgtatccaattttatgggttctttaactatt

SEQ ID NO: 29910 - DNA, 57 bp, unidentified
  source 1..57: mol_type = unassigned DNA; note = methanogen bacteria
aaaaatcctacacttggaataaatttaattacagcaggatcaatccttgttattctc

SEQ ID NO: 29911 - DNA, 54 bp, unidentified
  source 1..54: mol_type = unassigned DNA; note = methanogen bacteria
aaaaatcctacacttggaataaatttaattactgcgggatcaatccttgtaatt

SEQ ID NO: 29912 - DNA, 147 bp, unidentified
  source 1..147: mol_type = unassigned DNA; note = methanogen bacteria
tatgacacaaatcttttcagcaatgctatggcaattattcaggatgtttttacacaggcattcaacgtttttattatgggcggttccgaaaatactgcagttaatgcattatcccatactgtgtccaattttatgggttctttaact

SEQ ID NO: 29913 - DNA, 30 bp, unidentified
  source 1..30: mol_type = unassigned DNA; note = methanogen bacteria
agtcatgtagatgcattatttgctggtgct

SEQ ID NO: 29914 - DNA, 69 bp, unidentified
  source 1..69: mol_type = unassigned DNA; note = methanogen bacteria
ggcattccagttattagttttgagtttttattcgcaaataccttaaattctggtcgtgagggtggtatt

SEQ ID NO: 29915 - DNA, 99 bp, unidentified
  source 1..99: mol_type = unassigned DNA; note = methanogen bacteria
ggttctacattccaaattccattatctatttttgacacgggaaggcctctgcctcttcatttatacatattggctagtgaaggaatttcttttgaaaat

SEQ ID NO: 29916 - DNA, 48 bp, unidentified
  source 1..48: mol_type = unassigned DNA; note = methanogen bacteria
atgggaaggattgttggacaatcacaattcgaacaaccattgttcatg

SEQ ID NO: 29917 - DNA, 39 bp, unidentified
  source 1..39: mol_type = unassigned DNA; note = methanogen bacteria
attcctattaactttggcgagcctttacacgtattccca

SEQ ID NO: 29918 - DNA, 54 bp, unidentified
  source 1..54: mol_type = unassigned DNA; note = methanogen bacteria
ctgtctagcgaaaatatgatgcttgagggtttttggtattatctatttttagga

SEQ ID NO: 29919 - DNA, 33 bp, unidentified
  source 1..33: mol_type = unassigned DNA; note = methanogen bacteria
caatatgtaggatctattgcaagttatttagga

SEQ ID NO: 29920 - DNA, 99 bp, unidentified
  source 1..99: mol_type = unassigned DNA; note = methanogen bacteria
actaaaaatcttgatatatatcgggtgattgttaggcaagctaaacaaactaatgcttcaatgttttctcttaaatttacacaattacctacaaatgac

SEQ ID NO: 29921 - DNA, 30 bp, unidentified
  source 1..30: mol_type = unassigned DNA; note = methanogen bacteria
agtcaggttgatgctttatttgctggagca

SEQ ID NO: 29922 - DNA, 150 bp, unidentified
  source 1..150: mol_type = unassigned DNA; note = methanogen bacteria
gacacaaatcttttcagcaatgccacggctcttgtcgaagaagtcatcatgcaggcatacaatgtctatgttatgggaggttctttaaatcttgcaaccaatgcaatatcccaatctttgtcggttcttatgggttcattaactattact

SEQ ID NO: 29923 - DNA, 30 bp, unidentified
  source 1..30: mol_type = unassigned DNA; note = methanogen bacteria
agtcatattgactctttgtttgcaggggaa

SEQ ID NO: 29924 - DNA, 33 bp, unidentified
  source 1..33: mol_type = unassigned DNA; note = methanogen bacteria
tggagtgatccttccgtatttacaacaccatta

SEQ ID NO: 29925 - DNA, 96 bp, unidentified
  source 1..96: mol_type = unassigned DNA; note = methanogen bacteria
caatcatttgaagtttctacaataacaatgaattttgttgaaaatgcaaatggcactgtttcccagatggcttcttcacaattgccaaccggaaac

SEQ ID NO: 29926 - DNA, 129 bp, unidentified
  source 1..129: mol_type = unassigned DNA; note = methanogen bacteria
aacttatttggaatggcttcaataatgtttactagaatgatgtatgcatcaatggccgctcctgcaaatgcaacagtgacaattgcagatgtcgttccacagtcaatgattattagtttcggaaattca

SEQ ID NO: 29927 - DNA, 132 bp, unidentified
  source 1..132: mol_type = unassigned DNA; note = methanogen bacteria
acaaacctattcggaatatctgcagaggtctttaacaaaatgatgattgcatctatgaatgctccggccaacactactgtagttgtcggtaatgttgttcctcagtctacattgacagatcttggaactgct

SEQ ID NO: 29928 - DNA, 33 bp, unidentified
  source 1..33: mol_type = unassigned DNA; note = methanogen bacteria
catgtaggaatagacccaagtttggctatgatg

SEQ ID NO: 29929 - DNA, 42 bp, unidentified
  source 1..42: mol_type = unassigned DNA; note = methanogen bacteria
ggtttaggagtaaatccaatgccttatagcataggttacatt

SEQ ID NO: 29930 - DNA, 132 bp, unidentified
  source 1..132: mol_type = unassigned DNA; note = methanogen bacteria
acaaacctcttcggacttgcttacgacatgttctacaaaatggctatggcatcaatggctgctccggcaaatactaccgttgtaatcaatgatgttgttcctcagtctcagattatccagctcggaaccgca

SEQ ID NO: 29931 - DNA, 33 bp, unidentified
  source 1..33: mol_type = unassigned DNA; note = methanogen bacteria
tctgtaggggttgacccttcacttgctatgatg

SEQ ID NO: 29932 - DNA, 42 bp, unidentified
  source 1..42: mol_type = unassigned DNA; note = methanogen bacteria
ggttggtcagttaatccaatgccatattcattaggttatgtg

SEQ ID NO: 29933 - DNA, 33 bp, unidentified
  source 1..33: mol_type = unassigned DNA; note = methanogen bacteria
tcagaaggcattgatccttcacttgccatgatg

SEQ ID NO: 29934 - DNA, 42 bp, unidentified
  source 1..42: mol_type = unassigned DNA; note = methanogen bacteria
ggttttggagttaatccaatgccttactcattaggatatgtt

SEQ ID NO: 29935 - DNA, 135 bp, unidentified
  source 1..135: mol_type = unassigned DNA; note = methanogen bacteria
acaaacctgttcggattggctgcagaagtcatttccaaaacagtgaatgcatctgtacaagctcaggccaattctactgtagttgcaagtaatgttgttcctcaggctacaatgaccagttttttaactgctttt

SEQ ID NO: 29936 - DNA, 132 bp, unidentified
  source 1..132: mol_type = unassigned DNA; note = methanogen bacteria
acaaatttattcggcatgtcttacgacatgatgacaaaaatgatgattgcatccatgaatgcaccggccaatacaacagtactaattacagatcttttcccacagtctgcatttatccagctcggaaatgca

SEQ ID NO: 29937 - DNA, 66 bp, unidentified
  source 1..66: mol_type = unassigned DNA; note = methanogen bacteria
ttaggtcatgaaaacttgtccctgtccggattttggtattatctgggtttaggtgtttttgaaggt

SEQ ID NO: 29938 - DNA, 33 bp, unidentified
  source 1..33: mol_type = unassigned DNA; note = methanogen bacteria
aatcgtgcattttgcaaatatgtttgtccggtt

SEQ ID NO: 29939 - DNA, 132 bp, unidentified
  source 1..132: mol_type = unassigned DNA; note = methanogen bacteria
aacgttgtcggcaatttcatgaatgtcgctagagagatcttcacacaggtcatggatgtttacgtcatgggaacctccaccaatgtcgcaatgggtgcaatatcccaggcaatggctggtttaatcttgtct

SEQ ID NO: 29940 - DNA, 33 bp, unidentified
  source 1..33: mol_type = unassigned DNA; note = methanogen bacteria
tcagttggagttgacccttcacttgccatgatg

SEQ ID NO: 29941 - DNA, 42 bp, unidentified
  source 1..42: mol_type = unassigned DNA; note = methanogen bacteria
ggtcttggtgtcaatccgatgccttactcattaggttatgta

SEQ ID NO: 29942 - DNA, 63 bp, unidentified
  source 1..63: mol_type = unassigned DNA; note = methanogen bacteria
atggctactgtagacacttttcttccagatatcatacaaactacttttttctctggatacaca

SEQ ID NO: 29943 - DNA, 45 bp, unidentified
  source 1..45: mol_type = unassigned DNA; note = methanogen bacteria
gttgataatggattttatccaaagactgtttttctcattacacct

SEQ ID NO: 29944 - DNA, 72 bp, unidentified
  source 1..72: mol_type = unassigned DNA; note = methanogen bacteria
gctgtagaatacttcaattactcagaacagcatgttttaccaaatgctctaaatcaactatttgatacatat

SEQ ID NO: 29945 - DNA, 132 bp, unidentified
  source 1..132: mol_type = unassigned DNA; note = methanogen bacteria
acaaatttatttggcatgtcttatgacatgatgacaaaaatgataattgcatccatgaatgcaccggccaatacaacagtactcattacagatcttttcccacagtctgcatttatccagctcggaaatgca

SEQ ID NO: 29946 - DNA, 75 bp, unidentified
  source 1..75: mol_type = unassigned DNA; note = methanogen bacteria
gatccttgtcctgtaaatgcaattactcttgaagaagttggaagtcctattactgtcaatgatgattgtattaga

SEQ ID NO: 29947 - DNA, 72 bp, unidentified
  source 1..72: mol_type = unassigned DNA; note = methanogen bacteria
ccttggaatgctatttacatttctgaaaaagtaccaatcaaacgttctaaagaaattgaatcattcactttc

SEQ ID NO: 29948 - DNA, 84 bp, unidentified
  source 1..84: mol_type = unassigned DNA; note = methanogen bacteria
acttgtgtagaagcttgtcctggtgacttcattgctgctaatggtgcaagtttaactgttgcaattcctagtgtctgtgctgca

SEQ ID NO: 29949 - DNA, 69 bp, unidentified
  source 1..69: mol_type = unassigned DNA; note = methanogen bacteria
aaactctgtcctgttgatgcattggacatcagtgttgaatggggtgaaggtgctcctgtagatgcagaa

SEQ ID NO: 29950 - DNA, 60 bp, unidentified
  source 1..60: mol_type = unassigned DNA; note = methanogen bacteria
aataaatgtcctactgaagcaatccgtgtagttactaaaactggaatgttatgtcctgct

SEQ ID NO: 29951 - DNA, 75 bp, unidentified
  source 1..75: mol_type = unassigned DNA; note = methanogen bacteria
gtttgtggaaatgacgcattgtctgtcggtagtattgaattaactattgatggtgaagctgtaactagggatagg

SEQ ID NO: 29952 - DNA, 69 bp, unidentified
  source 1..69: mol_type = unassigned DNA; note = methanogen bacteria
gacgcttgtggtgactgtatcgcaacttgtccatatgatatgcttcataaaacagataatcctaaatta

SEQ ID NO: 29953 - DNA, 138 bp, unidentified
  source 1..138: mol_type = unassigned DNA; note = methanogen bacteria
accaacgtgcctggtaacgttgtaaacgttatgggatacgttaaccaaaccgtagcaaactccaacggaactgtcgttgcaaacaccgtattggaaatggttcctaaagatgttatgggtaatttggttggttcactt

SEQ ID NO: 29954 - DNA, 57 bp, unidentified
  source 1..57: mol_type = unassigned DNA; note = methanogen bacteria
gcattgcctgagatagtcatatcctcctcagcggactttgcatcatttctccagtca

SEQ ID NO: 29955 - DNA, 114 bp, unidentified
  source 1..114: mol_type = unassigned DNA; note = methanogen bacteria
tttatccgggatataccgacaagctttgtcaatgctaatcaaatgccttctcttcaacatattttcggaacagactggatgggaagggatatgtttcagagaaccattgcaggt

SEQ ID NO: 29956 - DNA, 90 bp, unidentified
  source 1..90: mol_type = unassigned DNA; note = methanogen bacteria
actttccttggattcggtttaccgcctcatgagcctgcaattggtgtcatattggctgaatcaatgcattatttatcatcaggatactgg

SEQ ID NO: 29957 - DNA, 126 bp, unidentified
  source 1..126: mol_type = unassigned DNA; note = methanogen bacteria
aatgtttttggcaatctgtggctagtttatcaagaaatatttttacaggcacaaaatctttatacaggggccgcttctacttttgtggtgtctgatgcattatctcatgcaatggtcaatttggcg

SEQ ID NO: 29958 - DNA, 129 bp, unidentified
  source 1..129: mol_type = unassigned DNA; note = methanogen bacteria
aacctattcggaatggcctacacaattgtcagcagaatgatgttggcgtcaatggctgctccggccaatgcaactatagtaattactgatgttgttccacagtcattaatcataaatttcggaaccgca

SEQ ID NO: 29959 - DNA, 93 bp, unidentified
  source 1..93: mol_type = unassigned DNA; note = methanogen bacteria
cttaaaactttggatataactagaatagttatgggcactttagataaaaccaatgctaccactatgggcttttcacagatgcctagtggagat

SEQ ID NO: 29960 - DNA, 135 bp, unidentified
  source 1..135: mol_type = unassigned DNA; note = methanogen bacteria
gaaattattgcaaatattaaaaatccaaataataatccagtaaattcaggctatgtaacattcaatctcggagacaaaacatatactgttaatgtaactaatggtatagctaaaattacacatttatttaccact

SEQ ID NO: 29961 - DNA, 66 bp, unidentified; identical to SEQ ID NO: 29937
  source 1..66: mol_type = unassigned DNA; note = methanogen bacteria

SEQ ID NO: 29962 - DNA, 30 bp, unidentified
  source 1..30: mol_type = unassigned DNA; note = methanogen bacteria
ctgtttggccgtggatggtgcggctatgca

SEQ ID NO: 29963 - DNA, 33 bp, unidentified
  source 1..33: mol_type = unassigned DNA; note = methanogen bacteria
tcaattggatgtgatcctaaaacgtccctaacg

SEQ ID NO: 29964 - DNA, 42 bp, unidentified
  source 1..42: mol_type = unassigned DNA; note = methanogen bacteria
tggggtgttcaaggattgccggatttttcattaggttatgtc

SEQ ID NO: 29965 - DNA, 126 bp, unidentified
  source 1..126: mol_type = unassigned DNA; note = methanogen bacteria
aatatttttggtaatgttatggtggtctatcatggtattgtctcacaggcccacaatgcgtatgttggaaattccactgttctggtatctgatgcattatctcaggctatagtcaatctggcagtt

SEQ ID NO: 29966 - DNA, 126 bp, unidentified
  source 1..126: mol_type = unassigned DNA; note = methanogen bacteria
aatgtttacggtaatgctatgattgttgctcaagaaatttatttacaggccgcctattcatatatgggatcttcttctgctattgcatttgatgcaatatatcaggcattggtcaatttgctattt

SEQ ID NO: 29967 - DNA, 33 bp, unidentified
  source 1..33: mol_type = unassigned DNA; note = methanogen bacteria
ggatcacgaggagtttctcatttagctgaagtg

SEQ ID NO: 29968 - DNA, 30 bp, unidentified
  source 1..30: mol_type = unassigned DNA; note = methanogen bacteria
ttcattcagggcgtagcctacaattctgca

SEQ ID NO: 29969 - DNA, 45 bp, unidentified
  source 1..45: mol_type = unassigned DNA; note = methanogen bacteria
gcaggaggggccatagagcacaatacagcatcagttgttgcattc

SEQ ID NO: 29970 - DNA, 105 bp, unidentified
  source 1..105: mol_type = unassigned DNA; note = methanogen bacteria
ggttacatgtcccttcattcaggagctcctgtttctgaaattgtttcacagggaaccacattgatttttgtagcatatcctcaggtattcaatatcctgggaaca

SEQ ID NO: 29971 - DNA, 63 bp, unidentified
  source 1..63: mol_type = unassigned DNA; note = methanogen bacteria
atggcaactatagatagttttcttcctgatttcatacaatcatacttcttttcaggatatact

SEQ ID NO: 29972 - DNA, 39 bp, unidentified
  source 1..39: mol_type = unassigned DNA; note = methanogen bacteria
gataatgggatatttccaaaaaccgtttttttaattacc

SEQ ID NO: 29973 - DNA, 72 bp, unidentified
  source 1..72: mol_type = unassigned DNA; note = methanogen bacteria
gcagtagaacatttcaactactatgaacagcacgttttgccaaatgttctaaatcaactgtttgatacatat

SEQ ID NO: 29974 - DNA, 93 bp, unidentified
  source 1..93: mol_type = unassigned DNA; note = methanogen bacteria
gtagaaacgaaaactcctttagatgcaatcgttatggtttccaatgcatttaccagtaacggttatgcagtgttgggacattctgaagttgga

SEQ ID NO: 29975 - DNA, 72 bp, unidentified
  source 1..72: mol_type = unassigned DNA; note = methanogen bacteria
gataatcctacattaggatataatcttataacattagcttccattataattattctccaagcagctgcacct

SEQ ID NO: 29976 - DNA, 42 bp, unidentified
  source 1..42: mol_type = unassigned DNA; note = methanogen bacteria
ccaaatgcatttctatgggttttaggtaatttcaatggcata

SEQ ID NO: 29977 - DNA, 51 bp, unidentified
  source 1..51: mol_type = unassigned DNA; note = methanogen bacteria
tggcagaatcttgcaggatcaattcttgcatatgtatttagaagatatcta

SEQ ID NO: 29978 - DNA, 33 bp, unidentified
  source 1..33: mol_type = unassigned DNA; note = methanogen bacteria
tctcaaatgaatgcagaatcattttttgcaata

SEQ ID NO: 29979 - DNA, 54 bp, unidentified
  source 1..54: mol_type = unassigned DNA; note = methanogen bacteria
gacattttaacttatatgggagcaacttcttcaatggagctgtcaatgcagtat

SEQ ID NO: 29980 - DNA, 75 bp, unidentified
  source 1..75: mol_type = unassigned DNA; note = methanogen bacteria
ccaaattggtgtactgctttattcaactgcatcaagaatcgaatccttgatcatttcccctcaaaaggcttgtgg

SEQ ID NO: 29981 - DNA, 141 bp, unidentified
  source 1..141: mol_type = unassigned DNA; note = methanogen bacteria
acaaatatcactggcaacatcatggcagttgctgcagaaatctcttcacaggctgtaaatgtctacactggagcttccgcttcaattgcaactgatgcattatctcaagcatttgctggtttggcggtttctctagctacc

SEQ ID NO: 29982 - DNA, 87 bp, unidentified
  source 1..87: mol_type = unassigned DNA; note = methanogen bacteria
gaaaatgtcaatccgttaaatgcgctggtcatggtttcaaatgcatttacaagtaacggatatgctgttttgggatcctcagtcatt

SEQ ID NO: 29983 - DNA, 39 bp, unidentified
  source 1..39: mol_type = unassigned DNA; note = methanogen bacteria
tcttatattggtatacagtcacaatatggattattaact

SEQ ID NO: 29984 - DNA, 42 bp, unidentified
  source 1..42: mol_type = unassigned DNA; note = methanogen bacteria
ggatggggaagcaatccaattccatatacaattggttttgtt

SEQ ID NO: 29985 - DNA, 204 bp, unidentified
  source 1..204: mol_type = unassigned DNA; note = methanogen bacteria
caattatctcctatcgatccagttaaagcttatcttggtcaaagaattgttagtcaagaacaattagccattatgggcgaatattggggaacgaatttgactttaggtgagagagtattaggttggcttcaaactttagcatccggaagcatgggtttttcattaatttatcgtgctcccgtaactgaagtaattgcacagaaa

SEQ ID NO: 29986 - DNA, 72 bp, unidentified
  source 1..72: mol_type = unassigned DNA; note = methanogen bacteria
gaacaggtattcgcatacccaggaattggtcaagccacagttgctgccggattaaggtctgatgtcccatta

SEQ ID NO: 29987 - DNA, 294 bp, unidentified
  source 1..294: mol_type = unassigned DNA; note = methanogen bacteria
aatgatgcgaattctataaaaacagaaacttctgacgacttagaagaaagcatagatgatatgattgaagaaaggctaaaggacacaagtggtgtagtaatggcaaatgacaattacagctgtggacctgcatctctagccactgttttaaacagatatgggcttaatctcagcttaaatgaagtatcaaagcaaactaacacaagcgttaatggaacaacaatgcaatccttaatcgatgccgcacaatactatggcttcagtgcatatggcgttgaaattgacacacaaaac

SEQ ID NO: 29988 - DNA, 81 bp, unidentified
  source 1..81: mol_type = unassigned DNA; note = methanogen bacteria
aaatacaaagtcaaagagcctatctacaaatattattatgtgtcagatgactccttgacaagcgctaaactcaaaagaaaa

SEQ ID NO: 29989 - DNA, 90 bp, unidentified
  source 1..90: mol_type = unassigned DNA; note = methanogen bacteria
ctgggattattttcttcatatatcttgccgggtcctattgatgtaatcaattctgcatgggtagttattcaaaatggaaaattactcacc

SEQ ID NO: 29990 - DNA, 60 bp, unidentified
  source 1..60: mol_type = unassigned DNA; note = methanogen bacteria
ggttcaagtagtggtttaggttatatgattttaactgcaacaaacctgtttgatactggt

SEQ ID NO: 29991 - DNA, 36 bp, unidentified
  source 1..36: mol_type = unassigned DNA; note = methanogen bacteria
gaagttgcaaacggattctccttcagctatgaaatg

SEQ ID NO: 29992 - DNA, 39 bp, unidentified
  source 1..39: mol_type = unassigned DNA; note = methanogen bacteria
atttccaccagctttaaatacagctttgaaatattttca

SEQ ID NO: 29993 - DNA, 117 bp, unidentified
  source 1..117: mol_type = unassigned DNA; note = methanogen bacteria
gtgaagaaccagctggacttcaacaactctcccctggcatcccctcaggactcattcgccgcgcttgccgacctgatcaacaacggagacccgatggagcatcggtcgctttggtcc

SEQ ID NO: 29994 - DNA, 69 bp, unidentified
  source 1..69: mol_type = unassigned DNA; note = methanogen bacteria
tacaacaccactctcagcggaatcggatactatgtcaagttcatgatagacaactcctcgtacgactat

SEQ ID NO: 29995 - DNA, 78 bp, unidentified
  source 1..78: mol_type = unassigned DNA; note = methanogen bacteria
atcatgggagacaccgacgatcccgcactctgggaaggtcagctcctgtggttcaacgtccacatgacggatgccagt

SEQ ID NO: 29996 - DNA, 45 bp, unidentified
  source 1..45: mol_type = unassigned DNA; note = methanogen bacteria
gactggatcgacatgaccgccctgttcgcacctgtcctggggtgg

SEQ ID NO: 29997 - DNA, 117 bp, unidentified
  source 1..117: mol_type = unassigned DNA; note = methanogen bacteria
gtttttggaggaatcatgactttagttgaagaaatacttctattggcccctaatgccctcatacaaaattctgggtctttttcagatgcagtatataatgcagcattaccattattt

SEQ ID NO: 29998 - DNA, 123 bp, unidentified
  source 1..123: mol_type = unassigned DNA; note = methanogen bacteria
aatatttatggcaattttatgactgtttttcaacaaattgttttaatagcttctgatacttatactggaagttctgctgttgtttatgatggattagctcaggcaatagtcaatcttgctgtt

SEQ ID NO: 29999 - DNA, 30 bp, unidentified
  source 1..30: mol_type = unassigned DNA; note = methanogen bacteria
ttgctcgatttgactaatgtgcataatgaa

SEQ ID NO: 30000 - DNA, 30 bp, unidentified
  source 1..30: mol_type = unassigned DNA; note = methanogen bacteria
actggtgctattgctggtggtgtaccagta

SEQ ID NO: 30001 - DNA, 114 bp, unidentified
  source 1..114: mol_type = unassigned DNA; note = methanogen bacteria
accggtattatggtacctgaagcattcgctggcggtgctatgaccattgcacaaaccaaagcattaggtggagctacctttatggcagctggtaaatcaactgcttctttaact

SEQ ID NO: 30002 - DNA, 30 bp, unidentified
  source 1..30: mol_type = unassigned DNA; note = methanogen bacteria
ttcttaggcgctcctgtatcttgggcacaa

SEQ ID NO: 30003 - DNA, 36 bp, unidentified
  source 1..36: mol_type = unassigned DNA; note = methanogen bacteria
ccaacaggtactactggaccgttacacgtattccca

SEQ ID NO: 30004 - DNA, 45 bp, unidentified
  source 1..45: mol_type = unassigned DNA; note = methanogen bacteria
atatttcacatacatctaataaaaggggtaagtcttgtaatattg

SEQ ID NO: 30005 - DNA, 30 bp, unidentified
  source 1..30: mol_type = unassigned DNA; note = methanogen bacteria
ggtcaaaatataaccttacttattaataca

SEQ ID NO: 30006 - DNA, 123 bp, unidentified
  source 1..123: mol_type = unassigned DNA; note = methanogen bacteria
acactgataccattgcatccatatgcatatgcactagcctgtggagtaggaagtacaagtatgaatgtagcagcagtatcatcactagcaacaatatatcctgctatttcacagcaattatat

SEQ ID NO: 30007 - DNA, 78 bp, unidentified
  source 1..78: mol_type = unassigned DNA; note = methanogen bacteria
atcatgggagacgccaaccagcccgccctctgggacggcaagttcctgtggttcacggtgcacatgaccgacgccagt

SEQ ID NO: 30008 - DNA, 48 bp, unidentified
  source 1..48: mol_type = unassigned DNA; note = methanogen bacteria
gcgggatggatcgacatgaccgccatattcgcaccgtacatggggtgg

SEQ ID NO: 30009 - DNA, 120 bp, unidentified
  source 1..120: mol_type = unassigned DNA; note = methanogen bacteria
cacattttcgaaaacctagcaataattgcacatgaaatcagttcacaagcatggttaacttatttaggatctacaattgtcataaccgatgcattatcacatgcacttgtaaatctgttg

SEQ ID NO: 30010 - DNA, 33 bp, unidentified
  source 1..33: mol_type = unassigned DNA; note = methanogen bacteria
gcaatagggttagattcatcattagctcttaga

SEQ ID NO: 30011 - DNA, 45 bp, unidentified
  source 1..45: mol_type = unassigned DNA; note = methanogen bacteria
ttatcacttcaaaatttacctgaatattctttgggatatattaat

SEQ ID NO: 30012 - DNA, 39 bp, unidentified
  source 1..39: mol_type = unassigned DNA; note = methanogen bacteria
gcttattctttttcaggactcagtgcagaactgataacc

SEQ ID NO: 30013 - DNA, 51 bp, unidentified
  source 1..51: mol_type = unassigned DNA; note = methanogen bacteria
ttgggtcgggaaaatcttttgctttccggattctggtattatctgtttttg

SEQ ID NO: 30014 - DNA, 54 bp, unidentified
  source 1..54: mol_type = unassigned DNA; note = methanogen bacteria
tttggcggggaaaatctcctgctttcaggattctggtattatctctttttggga

SEQ ID NO: 30015 - DNA, 30 bp, unidentified
  source 1..30: mol_type = unassigned DNA; note = methanogen bacteria
atattcggtcgtggatggtgcggatatgcc

SEQ ID NO: 30016 - DNA, 39 bp, unidentified
  source 1..39: mol_type = unassigned DNA; note = methanogen bacteria
catgacaaccgtgcattctgcaaatatgtctgtccgata

SEQ ID NO: 30017 - DNA, 33 bp, unidentified
  source 1..33: mol_type = unassigned DNA; note = methanogen bacteria
tctcaaatgaatgccgaatcattttttgcaata

SEQ ID NO: 30018 - DNA, 54 bp, unidentified
  source 1..54: mol_type = unassigned DNA; note = methanogen bacteria
gacattttaacttatataggagcaacttcttctatggagctgtcaatacagtat

SEQ ID NO: 30019 - DNA, 51 bp, unidentified
  source 1..51: mol_type = unassigned DNA; note = methanogen bacteria
aacagcatcaagaatcgaaaccctaatgatatctccacaaaaggcatttgg

SEQ ID NO: 30020 - DNA, 57 bp, unidentified
  source 1..57: mol_type = unassigned DNA; note = methanogen bacteria
atattgggcagggaaaatcttctgctttcaggattttggtattgtctgtttttaggt

SEQ ID NO: 30021 - DNA, 42 bp, unidentified
  source 1..42: mol_type = unassigned DNA; note = methanogen bacteria
atcgccgcgttctccgacaatacgagcgcctcgttcgtgagc

SEQ ID NO: 30022 - DNA, 33 bp, unidentified
  source 1..33: mol_type = unassigned DNA; note = methanogen bacteria
gccatctgcggaggggtcgccgggaaccactgg

SEQ ID NO: 30023 - DNA, 123 bp, unidentified
  source 1..123: mol_type = unassigned DNA; note = methanogen bacteria
ttcgagatcggagggatagaagatccgtggtaccttctggagtactgctccgacgatatcgtcttcgcgatcgacggcaccttcgacatgatggggacccaatacgtccgcgacgtggatctg

SEQ ID NO: 30024 - DNA, 102 bp, unidentified
  source 1..102: mol_type = unassigned DNA; note = methanogen bacteria
gcggataagcccgccatacccacgccctacgatacgtttgttgcgcttatcgacctgttcaaatacggcgatcccatccacgatgtggccatcagcgtttac

SEQ ID NO: 30025 - DNA, 33 bp, unidentified
  source 1..33: mol_type = unassigned DNA; note = methanogen bacteria
ctcttcaccggggccgacggtgacaccacctgg

SEQ ID NO: 30026 - DNA, 66 bp, unidentified
  source 1..66: mol_type = unassigned DNA; note = methanogen bacteria
tacgacggtttcaaccccggactcggttcctatctgagcctcatgatcagcaacagctcctatgag

SEQ ID NO: 30027 - DNA, 30 bp, unidentified
  source 1..30: mol_type = unassigned DNA; note = methanogen bacteria
attttaattacagctgttcctggcagtggt

SEQ ID NO: 30028 - DNA, 93 bp, unidentified
  source 1..93: mol_type = unassigned DNA; note = methanogen bacteria
ggtccgacttataacctatttgatgatttttatttcgtcattgttactttgaccactgttggatatggtgatgtagtcccacagacatataat

SEQ ID NO: 30029 - DNA, 66 bp, unidentified
  source 1..66: mol_type = unassigned DNA; note = methanogen bacteria
ttaggtcatgaaaacttgtccctgtccggattttggtattatttaagtttaggtgtttttgaaggt

SEQ ID NO: 30030 - DNA, 30 bp, unidentified
  source 1..30: mol_type = unassigned DNA; note = methanogen bacteria
ctgtttggccgtggttggtgtggctatgcc

SEQ ID NO: 30031 - DNA, 33 bp, unidentified; identical to SEQ ID NO: 29796
  source 1..33: mol_type = unassigned DNA; note = methanogen bacteria

SEQ ID NO: 30032 - DNA, 63 bp, unidentified
  source 1..63: mol_type = unassigned DNA; note = methanogen bacteria
ataggtcatgaaaacctgtccctgtccggattttggtattatttaagtttaggtgtttttgaa

SEQ ID NO: 30033 - DNA, 33 bp, unidentified
  source 1..33: mol_type = unassigned DNA; note = methanogen bacteria
aatcgtgcattctgcaaatacatttgtccgatt

SEQ ID NO: 30034 - DNA, 30 bp, unidentified
  source 1..30: mol_type = unassigned DNA; note = methanogen bacteria
actggtgcagtagctggtggcgtaccaata

SEQ ID NO: 30035 - DNA, 114 bp, unidentified
  source 1..114: mol_type = unassigned DNA; note = methanogen bacteria
actggtattatggtacctgaagcattcgctggcggtgcaattaccattgctaacaccaaagctttaggtggagcaacctttatggcagctggaaaatcaactgcttctttaact

SEQ ID NO: 30036 - DNA, 30 bp, unidentified
  source 1..30: mol_type = unassigned DNA; note = methanogen bacteria
ttcttaggtgctgaagtaacctgggcacaa

SEQ ID NO: 30037 - DNA, 129 bp, unidentified
  source 1..129: mol_type = unassigned DNA; note = methanogen bacteria
tcaggaaccttctcatcattgatgaaaattgtaagattagttgggcgagatgtggtgaacactacagtaaatgctactgctatggcccattcagttcctcatgaatattatgttgctttatttaacggc

SEQ ID NO: 30038 - DNA, 114 bp, unidentified
  source 1..114: mol_type = unassigned DNA; note = methanogen bacteria
atttttggaaacatcatgaaattcgctcaagaattatatttacaggctccccatatccttatgggaactgcctctgttagagacgcaatatatcatgcggcatttcctttatta

SEQ ID NO: 30039 - DNA, 87 bp, unidentified
  source 1..87: mol_type = unassigned DNA; note = methanogen bacteria
gaaaatcaaaaccctataaacgctttaggtatggtttcaaatgcatttacaagtaatggatatgcagttttaggtaaaaccgcaggg

SEQ ID NO: 30040 - DNA, 87 bp, unidentified
  source 1..87: mol_type = unassigned DNA; note = methanogen bacteria
aaaaacatcaatattgttagaatattttcttcagcaaatggaaatactttagctttaaaatcttcacaaatccctccgattgatgtt

SEQ ID NO: 30041 - DNA, 48 bp, unidentified
  source 1..48: mol_type = unassigned DNA; note = methanogen bacteria
tcaatttccctgcctttattggatgtggttactggaacaaatgatcca

SEQ ID NO: 30042 - DNA, 42 bp, unidentified
  source 1..42: mol_type = unassigned DNA; note = methanogen bacteria
tacactccattgcaatatttgattttaggtggagaattcagt

SEQ ID NO: 30043 - DNA, 39 bp, unidentified
  source 1..39: mol_type = unassigned DNA; note = methanogen bacteria
tcttttaaccagattacaacatttgtcaatgcagatata

SEQ ID NO: 30044 - DNA, 30 bp, unidentified
  source 1..30: mol_type = unassigned DNA; note = methanogen bacteria
tctactgtaatgggtgatattgttcctagc

SEQ ID NO: 30045 - DNA, 42 bp, unidentified
  source 1..42: mol_type = unassigned DNA; note = methanogen bacteria
actattcctattaatggtactccattacacgtattcccaatt

SEQ ID NO: 30046 - DNA, 57 bp, unidentified
  source 1..57: mol_type = unassigned DNA; note = methanogen bacteria
atcggtcatgaaaacatgctgatttcaggtttctggtattatttgtttttaggagta

SEQ ID NO: 30047 - DNA, 30 bp, unidentified
  source 1..30: mol_type = unassigned DNA; note = methanogen bacteria
ctttttggccgtggatggtgtggatatgca

SEQ ID NO: 30048 - DNA, 30 bp, unidentified
  source 1..30: mol_type = unassigned DNA; note = methanogen bacteria
tttaaaattccaaatctggagataataatg

SEQ ID NO: 30049 - DNA, 69 bp, unidentified
  source 1..69: mol_type = unassigned DNA; note = methanogen bacteria
attttaggtcatgaaaacttgtccctgtccggattttggtattatttaagtttaggtgtttttgaaggt

SEQ ID NO: 30050 - DNA, 45 bp, unidentified
  source 1..45: mol_type = unassigned DNA; note = methanogen bacteria
ggttctacaagcaggcaaatgcttttcgaatttaaaatacttgag

SEQ ID NO: 30051 - DNA, 51 bp, unidentified
  source 1..51: mol_type = unassigned DNA; note = methanogen bacteria
ttgggccatgaaaatcttctgatttctggattttggtattatctgtttttg

SEQ ID NO: 30052 - DNA, 30 bp, unidentified
  source 1..30: mol_type = unassigned DNA; note = methanogen bacteria
gcgatgggctccgacatcgcggacgaagcg

SEQ ID NO: 30053 - DNA, 33 bp, unidentified
  source 1..33: mol_type = unassigned DNA; note = methanogen bacteria
tacattggcgttgaacctgatttggcaatactg

SEQ ID NO: 30054 - DNA, 42 bp, unidentified
  source 1..42: mol_type = unassigned DNA; note = methanogen bacteria
ggttggggagtcagcacttttccatattcaatcggttatgtg

SEQ ID NO: 30055 - DNA, 30 bp, unidentified
  source 1..30: mol_type = unassigned DNA; note = methanogen bacteria
attggagttgagccggatttggcaatgctt

SEQ ID NO: 30056 - DNA, 42 bp, unidentified
  source 1..42: mol_type = unassigned DNA; note = methanogen bacteria
ggatggggagttaatacatttccatattcaataggttatgta

SEQ ID NO: 30057 - DNA, 36 bp, unidentified
  source 1..36: mol_type = unassigned DNA; note = methanogen bacteria
tatgaatacatgcttaatgcgcttcatcagcttcat

SEQ ID NO: 30058 - DNA, 30 bp, unidentified
  source 1..30: mol_type = unassigned DNA; note = methanogen bacteria
attgttcattcagtcagcgttaacttttca

SEQ ID NO: 30059 - DNA, 87 bp, unidentified
  source 1..87: mol_type = unassigned DNA; note = methanogen bacteria
gaacatgttgatcctttaaattcattggtaatggtttcaaatgcattcacgagtaatggatatgctgttttgggttcatctgtcatt

SEQ ID NO: 30060 - DNA, 36 bp, unidentified
  source 1..36: mol_type = unassigned DNA; note = methanogen bacteria
tacaaatacatgctcacagcacttcatgaatttcat

SEQ ID NO: 30061 - DNA, 33 bp, unidentified
  source 1..33: mol_type = unassigned DNA; note = methanogen bacteria
gaaattgtaagttctgcaagcgttgatgtattc

SEQ ID NO: 30062 - DNA, 36 bp, unidentified
  source 1..36: mol_type = unassigned DNA; note = methanogen bacteria
tatgaatacatgcttaatgcacttcaccagtttcac

SEQ ID NO: 30063 - DNA, 87 bp, unidentified
  source 1..87: mol_type = unassigned DNA; note = methanogen bacteria
gaagatgtttcaccgttggattcaattgtgatggtttccaatgcttttacaagtaacggttatgcggttttaggttcatcaggtatt

SEQ ID NO: 30064 - DNA, 39 bp, unidentified
  source 1..39: mol_type = unassigned DNA; note = methanogen bacteria
aagcctgtgaagaactacggaaagcccaaggcaaggcgt

SEQ ID NO: 30065 - DNA, 36 bp, unidentified
  source 1..36: mol_type = unassigned DNA; note = methanogen bacteria
ctaaataataatataggtgtaatggtggaagaattt

SEQ ID NO: 30066 - DNA, 93 bp, unidentified
  source 1..93: mol_type = unassigned DNA; note = methanogen bacteria
tctgagcatgttaatcctttagatgctcttgttatggtttcaaattcatttacaagtaatggttatgcagttttaggatcttctgttccgggt

SEQ ID NO: 30067 - DNA, 36 bp, unidentified
  source 1..36: mol_type = unassigned DNA; note = methanogen bacteria
tacaagtacatgctgaatgcgcttcaccagcttcac

SEQ ID NO: 30068 - DNA, 33 bp, unidentified
  source 1..33: mol_type = unassigned DNA; note = methanogen bacteria
gaaatcataagctcagtcagcgtcaacatgtca

SEQ ID NO: 30069 - DNA, 33 bp, unidentified
  source 1..33: mol_type = unassigned DNA; note = methanogen bacteria
tacattggagtcgagccggatttggccatatta

SEQ ID NO: 30070 - DNA, 42 bp, unidentified
  source 1..42: mol_type = unassigned DNA; note = methanogen bacteria
ggatggggcgtaagcacatttccatattccataggttatgtc

SEQ ID NO: 30071 - DNA, 33 bp, unidentified
  source 1..33: mol_type = unassigned DNA; note = methanogen bacteria
gcatacatgctggatgcaattcatgagcttcgt

SEQ ID NO: 30072 - DNA, 30 bp, unidentified
  source 1..30: mol_type = unassigned DNA; note = methanogen bacteria
gaaatcatgagttcagttagtttaaacttc

SEQ ID NO: 30073 - DNA, 99 bp, unidentified
  source 1..99: mol_type = unassigned DNA; note = methanogen bacteria
ctttcaaccagatttcatttgccagaatttcacttgagatttgcactatcccatttgattgaaacattgaaattatattactggcataatcctgtaagc

SEQ ID NO: 30074 - DNA, 33 bp, unidentified
  source 1..33: mol_type = unassigned DNA; note = methanogen bacteria
actgaatatgctacatctatgggttcaactgct

SEQ ID NO: 30075 - DNA, 48 bp, unidentified
  source 1..48: mol_type = unassigned DNA; note = methanogen bacteria
ctttatgcagttgaagtaaatctggtcagtgattttcattgttctttt

SEQ ID NO: 30076 - DNA, 36 bp, unidentified
  source 1..36: mol_type = unassigned DNA; note = methanogen bacteria
tacaaatacatgttgaatgcacttcaccagcttcat

SEQ ID NO: 30077 - DNA, 30 bp, unidentified
  source 1..30: mol_type = unassigned DNA; note = methanogen bacteria
attatcaattcagcaggattgagcttcgca

SEQ ID NO: 30078 - DNA, 36 bp, unidentified
  source 1..36: mol_type = unassigned DNA; note = methanogen bacteria
tacaaatacatgttggatgtacttcatgaacttcat

SEQ ID NO: 30079 - DNA, 30 bp, unidentified
  source 1..30: mol_type = unassigned DNA; note = methanogen bacteria
attgcaaattcagtcggcttgaattttgca

SEQ ID NO: 30080 - DNA, 36 bp, unidentified
  source 1..36: mol_type = unassigned DNA; note = methanogen bacteria
tacaaatacatgttgaatgcccttcataatcttcag

SEQ ID NO: 30081 - DNA, 36 bp, unidentified
  source 1..36: mol_type = unassigned DNA; note = methanogen bacteria
tatgaatacatgctgactgcccttcatgaattccat

SEQ ID NO: 30082 - DNA, 30 bp, unidentified
  source 1..30: mol_type = unassigned DNA; note = methanogen bacteria
gataatgatataatcatgcataacagtcca

SEQ ID NO: 30083 - DNA, 84 bp, unidentified
  source 1..84: mol_type = unassigned DNA; note = methanogen bacteria
gagaatgaagacccgttaaacgctttggtcatggtgtctaatgcatttacaagtaatgggtattcaattacaggtgaaagtgtc

SEQ ID NO: 30084 - DNA, 87 bp, unidentified
  source 1..87: mol_type = unassigned DNA; note = methanogen bacteria
gaaaatgttaatcctttaaatgctctggtcatggtttcaaatgcatttacaagtaatggatatgctgttttaggttcatccatcatt

SEQ ID NO: 30085 - DNA, 36 bp, unidentified
  source 1..36: mol_type = unassigned DNA; note = methanogen bacteria
tatcaatacatgttgaccgcacttcatgagcttcat

SEQ ID NO: 30086 - DNA, 90 bp, unidentified
  source 1..90: mol_type = unassigned DNA; note = methanogen bacteria
gaaaatgtagatccgttaaatgcactggtaatggtttcaaatgcatttacaagtaatggatatgctgttttgggaaaatccacaataggt

SEQ ID NO: 30087 - DNA, 45 bp, unidentified
  source 1..45: mol_type = unassigned DNA; note = methanogen bacteria
gaatttacatatggtgcatttgtagcaggattttatgaaggattc

SEQ ID NO: 30088 - DNA, 171 bp, unidentified
  source 1..171: mol_type = unassigned DNA; note = methanogen bacteria
agcagttcaaacatactcggccacaactatcgtgatgcatacctttatctgattcaagcatatcattttgcaggaacacccataggaggctacgattatgtgaattattattctcctttgatacctttcctaacctcactattattcagattgggtttcgtaagcgaggca

SEQ ID NO: 30089 - DNA, 123 bp, unidentified
  source 1..123: mol_type = unassigned DNA; note = methanogen bacteria
tcaatcaggcaagggaggtttcaactgaaactgtttcctcaaacacagccgcagctcccgctaatgatttgttcttctatatttccagtcttccaaggttcatatacagccctcaaaagatct

SEQ ID NO: 30090 - DNA, 36 bp, unidentified
  source 1..36: mol_type = unassigned DNA; note = methanogen bacteria
tatgaatacatgttaaatgcgcttcatcaattgcat

SEQ ID NO: 30091 - DNA, 30 bp, unidentified
  source 1..30: mol_type = unassigned DNA; note = methanogen bacteria
attgcaaattcagtaagcgttaacattggc

SEQ ID NO: 30092 - DNA, 33 bp, unidentified
  source 1..33: mol_type = unassigned DNA; note = methanogen bacteria
ttgattttacctgcaatattttcatcagcccgt

SEQ ID NO: 30093 - DNA, 93 bp, unidentified
  source 1..93: mol_type = unassigned DNA; note = methanogen bacteria
ggtccttcctatggtttattcgatgatttttatttcgtggtagtaacattgaccactgtcggatatggtgatattacacctgtcacattcaat

SEQ ID NO: 30094 - DNA, 36 bp, unidentified
  source 1..36: mol_type = unassigned DNA; note = methanogen bacteria
tactcatacatgctggatgcacttcaccagctaaat

SEQ ID NO: 30095 - DNA, 30 bp, unidentified
  source 1..30: mol_type = unassigned DNA; note = methanogen bacteria
ataatgaattcagtcagcatcaatatatcc

SEQ ID NO: 30096 - DNA, 54 bp, unidentified
  source 1..54: mol_type = unassigned DNA; note = methanogen bacteria
ttccatgaacattccatgataattccggtaattattggagatttttcagttaca

SEQ ID NO: 30097 - DNA, 42 bp, unidentified
  source 1..42: mol_type = unassigned DNA; note = methanogen bacteria
attgattatgctaaactcggtttgatcgaattgatttatcag

SEQ ID NO: 30098 - DNA, 51 bp, unidentified
  source 1..51: mol_type = unassigned DNA; note = methanogen bacteria
gcggcgctggacccattctcggatgaggatgacaagaagcgcctcaccgag

SEQ ID NO: 30099 - DNA, 90 bp, unidentified
  source 1..90: mol_type = unassigned DNA; note = methanogen bacteria
gagaccggcgctggcagcgggacggccttctggatgatcgaccgggcctcgaacggtatcgtcaactgcctctccgacagctacgatgac

SEQ ID NO: 30100 - DNA, 108 bp, unidentified
  source 1..108: mol_type = unassigned DNA; note = methanogen bacteria
accggaatcatgaccggtgaagcatttgctaaaggtgcaatcaccattgcaaacaccaaagcattaggtggagcagcattcggtgctgaagctaccaaatcattaacc

SEQ ID NO: 30101 - DNA, 30 bp, unidentified
  source 1..30: mol_type = unassigned DNA; note = methanogen bacteria
ttcttaggtgcagaagtaacctgggcacaa

SEQ ID NO: 30102 - DNA, 120 bp, unidentified
  source 1..120: mol_type = unassigned DNA; note = methanogen bacteria
gttttcggtaatttcatgattgttgcacaaggaattatgctgcaggcagaaggttcatatctaggatattctaccagttttatgtctggtgcgatatctcaggcacttatcaatttggcg

SEQ ID NO: 30103 - DNA, 30 bp, unidentified
  source 1..30: mol_type = unassigned DNA; note = methanogen bacteria
attgcaggtagttacgatatggcatcaatt

SEQ ID NO: 30104 - DNA, 30 bp, unidentified
  source 1..30: mol_type = unassigned DNA; note = methanogen bacteria
attgctggtacttttgatatgactgcaatt

SEQ ID NO: 30105 - DNA, 132 bp, unidentified
  source 1..132: mol_type = unassigned DNA; note = methanogen bacteria
acagggctgttttcctcattcactaaaatcatatatgccagcgtcgacgctatggccaataatgcaagcaatttgaccatgataatggcggcaattcctcaatcaacaatgaatacattcacaaatgcgctg

SEQ ID NO: 30106 - DNA, 117 bp, unidentified
  source 1..117: mol_type = unassigned DNA; note = methanogen bacteria
gtagtcggcaacattctaaatgtctttgatgcaatagccctagaggcttccactctatttatgggaacttatgaaaatgcggtatccatagcatcattccagttatttgcttcatta

SEQ ID NO: 30107 - DNA, 39 bp, unidentified
  source 1..39: mol_type = unassigned DNA; note = methanogen bacteria
tttgattttattttaattgaaactgtttcagggtttacc

SEQ ID NO: 30108 - DNA, 93 bp, unidentified
  source 1..93: mol_type = unassigned DNA; note = methanogen bacteria
ggtccttcttataatttatttgatgatttctattttgtagtagttactttaactactgttggttatggggatgttactccacaaacatataat

SEQ ID NO: 30109 - DNA, 42 bp, unidentified
  source 1..42: mol_type = unassigned DNA; note = methanogen bacteria
ttttggctgggaatttatgctgcagctgcatatgaatggtta

SEQ ID NO: 30110 - DNA, 84 bp, unidentified
  source 1..84: mol_type = unassigned DNA; note = methanogen bacteria
gagggtgttgaacctttaaattctgctgtaatggtttcaaatgcatttacaagtaatggttatgcaatacttggaaactccggc

SEQ ID NO: 30111 - DNA, 33 bp, unidentified
  source 1..33: mol_type = unassigned DNA; note = methanogen bacteria
atgcagttcaattttagttataattttaattta

SEQ ID NO: 30112 - DNA, 90 bp, unidentified
  source 1..90: mol_type = unassigned DNA; note = methanogen bacteria
gtagaaagtaaaaatttacttgattcattagtaatggtttcaaacgcttttacaagtaatggatatgcaattttaggaagcactacatta

SEQ ID NO: 30113 - DNA, 81 bp, unidentified
  source 1..81: mol_type = unassigned DNA; note = methanogen bacteria
tcttcagttaatgcctttcatatgcctttagctaatgcttttcatgtgcctttagctaatgcaagtatgggtggcggcttg

SEQ ID NO: 30114 - DNA, 36 bp, unidentified
  source 1..36: mol_type = unassigned DNA; note = methanogen bacteria
tacactccaattttctcaattttccaaatggaacca

SEQ ID NO: 30115 - DNA, 48 bp, unidentified
  source 1..48: mol_type = unassigned DNA; note = methanogen bacteria
gtcgaattcacttatggggcttttgtcgcaggattttatgaaggattt

SEQ ID NO: 30116 - DNA, 63 bp, unidentified
  source 1..63: mol_type = unassigned DNA; note = methanogen bacteria
ggattatctatcataagttttgattctcctctatttggagatttcagttccttaagtgctgaa

SEQ ID NO: 30117 - DNA, 84 bp, unidentified
  source 1..84: mol_type = unassigned DNA; note = methanogen bacteria
atactttacggttcagtatatcctgatatggagcccttgttggatttcactccaaatgctcttgacccattatctcttgaccca

SEQ ID NO: 30118 - DNA, 36 bp, unidentified
  source 1..36: mol_type = unassigned DNA; note = methanogen bacteria
gttaatgcagatgcattcctgttccaaatgccagtt

SEQ ID NO: 30119 - DNA, 75 bp, unidentified
  source 1..75: mol_type = unassigned DNA; note = methanogen bacteria
acagcttctgacagggttgtagacaatgttttatctggtgaaactatcattcatttcttcaagaaagtcttcaag

SEQ ID NO: 30120 - DNA, 30 bp, unidentified
  source 1..30: mol_type = unassigned DNA; note = methanogen bacteria
attgcaggtagttatgacatggtatcaatt

SEQ ID NO: 30121 - DNA, 33 bp, unidentified
  source 1..33: mol_type = unassigned DNA; note = methanogen bacteria
catataggtgtaaattctgatttggcaatgctg

SEQ ID NO: 30122 - DNA, 42 bp, unidentified
  source 1..42: mol_type = unassigned DNA; note = methanogen bacteria
ggctggggagtttcaacttttccatattccataggttatgtc

SEQ ID NO: 30123 - DNA, 57 bp, unidentified
  source 1..57: mol_type = unassigned DNA; note = methanogen bacteria
gcattgcctgaaatggaattattgtcctctggagatttttataattttattgtttct

SEQ ID NO: 30124 - DNA, 48 bp, unidentified
  source 1..48: mol_type = unassigned DNA; note = methanogen bacteria
aacgatgtagttagggtatcggatcacgtaatgtacggcgaacatgaa

SEQ ID NO: 30125 - DNA, 54 bp, unidentified
  source 1..54: mol_type = unassigned DNA; note = methanogen bacteria
ttcggtaccaatgttgactttttggatatttttccccaattgtccatatatccg

SEQ ID NO: 30126 - DNA, 36 bp, unidentified
  source 1..36: mol_type = unassigned DNA; note = methanogen bacteria
ataatgttgtttacaaaaaatatttttttggtggtt

SEQ ID NO: 30127 - DNA, 33 bp, unidentified
  source 1..33: mol_type = unassigned DNA; note = methanogen bacteria
gttaaatttttaggaggccttagtgcagaattt

SEQ ID NO: 30128 - DNA, 30 bp, unidentified
  source 1..30: mol_type = unassigned DNA; note = methanogen bacteria
atcgcaggttctttcgacatgctcgcaatt

SEQ ID NO: 30129 - DNA, 33 bp, unidentified
  source 1..33: mol_type = unassigned DNA; note = methanogen bacteria
tacattggtgttgaacctaacctggcgatgctc

SEQ ID NO: 30130 - DNA, 42 bp, unidentified
  source 1..42: mol_type = unassigned DNA; note = methanogen bacteria
ggctggggtgtcagcacatttccatattcaattggatatgtg

SEQ ID NO: 30131 - DNA, 30 bp, unidentified
  source 1..30: mol_type = unassigned DNA; note = methanogen bacteria
gcgatgggctccgatatcgcggacaatacg

SEQ ID NO: 30132 - DNA, 30 bp, unidentified
  source 1..30: mol_type = unassigned DNA; note = methanogen bacteria
attggagtggcaccagaccttgcaattttg

SEQ ID NO: 30133 - DNA, 42 bp, unidentified
  source 1..42: mol_type = unassigned DNA; note = methanogen bacteria
ggttggggagtcagcacattcccatattcaattggttatgta

SEQ ID NO: 30134 - DNA, 33 bp, unidentified
  source 1..33: mol_type = unassigned DNA; note = methanogen bacteria
acccttgtttcaggacctgttgcagtggctgta

SEQ ID NO: 30135 - DNA, 63 bp, unidentified
  source 1..63: mol_type = unassigned DNA; note = methanogen bacteria
cagattgcatttgtattctcatattcagaaagcagcgcacagcttgaaccgttgattgccagc

SEQ ID NO: 30136 - DNA, 75 bp, unidentified
  source 1..75: mol_type = unassigned DNA; note = methanogen bacteria
agcaaatcaacacaaattatcatatatgccaataggcaaggagaagtgttggccttaaatttgcctactggggat

SEQ ID NO: 30137 - DNA, 123 bp, unidentified
  source 1..123: mol_type = unassigned DNA; note = methanogen bacteria
ggaacctattctgctgtctttaagattgttgaatttatgggtcaggaagtgacaaacactaccgttaatgctaccactatggtaaatacagttcctcaagaatactggtctgcattattcgct

SEQ ID NO: 30138 - DNA, 30 bp, unidentified; identical to SEQ ID NO: 30131
  source 1..30: mol_type = unassigned DNA; note = methanogen bacteria

SEQ ID NO: 30139 - DNA, 75 bp, unidentified
  source 1..75: mol_type = unassigned DNA; note = methanogen bacteria
agcaaatcaacagaaattatcctatatgccaataggcaaggagaagtgctggccttaaatttgcctgcaggagat

SEQ ID NO: 30140 - DNA, 96 bp, unidentified
  source 1..96: mol_type = unassigned DNA; note = methanogen bacteria
atagacgattcattttcatccatttttgattcattctggtatggtcttgtaactataaccggcgtcggatacggtgatttcactcctgtttcggat

SEQ ID NO: 30141 - DNA, 48 bp, unidentified
  source 1..48: mol_type = unassigned DNA; note = methanogen bacteria
tattccagcttcatgcagagatatgggatggagtcggaaatcatcctg

SEQ ID NO: 30142 - DNA, 57 bp, unidentified
  source 1..57: mol_type = unassigned DNA; note = methanogen bacteria
ggcattggaattagtggttcaggccttgattttcagattagttatgcattatcatct

SEQ ID NO: 30143 - DNA, 93 bp, unidentified
  source 1..93: mol_type = unassigned DNA; note = methanogen bacteria
gacgaatcctttaagtccgtctttgattcattctggtataatctggtaacaattaccggcgtaggatatggggattttacaccccaaacaagc

SEQ ID NO: 30144 - DNA, 63 bp, unidentified
  source 1..63: mol_type = unassigned DNA; note = methanogen bacteria
ggtagaacaggaattttaaactttgattcatacttgtttggcaatttaggtgctttaaatatg

SEQ ID NO: 30145 - DNA, 39 bp, unidentified
  source 1..39: mol_type = unassigned DNA; note = methanogen bacteria
ttgttcggttctttggttgctggaatttatcaaggcttt

SEQ ID NO: 30146 - DNA, 96 bp, unidentified
  source 1..96: mol_type = unassigned DNA; note = methanogen bacteria
tcttctccttttgggtttcctccatttgatttggaagatttgttaatggacgttcccgaaaccgttcatttattgctttcacacagtttcgttgat

SEQ ID NO: 30147 - DNA, 69 bp, unidentified
  source 1..69: mol_type = unassigned DNA; note = methanogen bacteria
tttggaatgggcgacccgacatgggtaagcattatggacatcgattcagtcaatctaactccgggagca

SEQ ID NO: 30148 - DNA, 30 bp, unidentified
  source 1..30: mol_type = unassigned DNA; note = methanogen bacteria
attacaccttttgattcaattgtaaccaca

SEQ ID NO: 30149 - DNA, 39 bp, unidentified
  source 1..39: mol_type = unassigned DNA; note = methanogen bacteria
ttcatgttcatccctatagatttccctgtaggtattctg

SEQ ID NO: 30150 - DNA, 96 bp, unidentified
  source 1..96: mol_type = unassigned DNA; note = methanogen bacteria
gtgggtacaagctataacactttcgactatctctattttgtaattgttactctgactactgttggatatggtgacatcactccggtaacctataac

SEQ ID NO: 30151 - DNA, 33 bp, unidentified
  source 1..33: mol_type = unassigned DNA; note = methanogen bacteria
tacattggagtcgaacctgaccttgcaatgctg

SEQ ID NO: 30152 - DNA, 42 bp, unidentified
  source 1..42: mol_type = unassigned DNA; note = methanogen bacteria
ggttggggggtaaatacattcccgtattctattggttatgta

SEQ ID NO: 30153 - DNA, 99 bp, unidentified
  source 1..99: mol_type = unassigned DNA; note = methanogen bacteria
atcgatgactcatttacatccattttcaattccttttggtatgggctggtgacaattaccggcgtggggtacggagacattactccaatatcaaaccaa

SEQ ID NO: 30154 - DNA, 30 bp, unidentified
  source 1..30: mol_type = unassigned DNA; note = methanogen bacteria
ttaactatcgacggcactccaatcaaagag

SEQ ID NO: 30155 - DNA, 51 bp, unidentified
  source 1..51: mol_type = unassigned DNA; note = methanogen bacteria
gcatatcctcattataacgctttctcagaaattgatgatgacgaatgtatt

SEQ ID NO: 30156 - DNA, 75 bp, unidentified
  source 1..75: mol_type = unassigned DNA; note = methanogen bacteria
cctcgtgatgcaattgtcattgaaagaattttaccagctcgtgctgacttagtaactggtgaaattgacgtcgat

SEQ ID NO: 30157 - DNA, 75 bp, unidentified
  source 1..75: mol_type = unassigned DNA; note = methanogen bacteria
ttatgtcctgcagaagcaattgtcgtagataaagaaactggaaaagaatccattgttattgacaaagatgcatgt

SEQ ID NO: 30158 - DNA, 63 bp, unidentified
  source 1..63: mol_type = unassigned DNA; note = methanogen bacteria
accaacgctatcaaagcgatttgtagagcatgtaactatggtgaatacgacttagatccttca

SEQ ID NO: 30159 - DNA, 39 bp, unidentified
  source 1..39: mol_type = unassigned DNA; note = methanogen bacteria
tcagttattgactctgaactttgtgtatactgtggttgg

SEQ ID NO: 30160 - DNA, 81 bp, unidentified
  source 1..81: mol_type = unassigned DNA; note = methanogen bacteria
gaaggcgtatgtcctaccgacgcagctaaacataaaaaaccattcgaaggttctattgaagtagaccaagacaaatgtcaa

SEQ ID NO: 30161 - DNA, 93 bp, unidentified
  source 1..93: mol_type = unassigned DNA; note = methanogen bacteria
atttgtagttgtaacgcattagcgttcccagtatctagcggacctggttccagaatggaacatgtaattgctaacaatgattactgtgtaaaa

SEQ ID NO: 30162 - DNA, 66 bp, unidentified
  source 1..66: mol_type = unassigned DNA; note = methanogen bacteria
gcaaatgcatgtcctaacggcgctattaccgttaaaagaactgaagttgatcacactcctacaaac

SEQ ID NO: 30163 - DNA, 33 bp, unidentified
  source 1..33: mol_type = unassigned DNA; note = methanogen bacteria
tacataggtgtaaatccggatttggcaatgctg

SEQ ID NO: 30164 - DNA, 42 bp, unidentified
  source 1..42: mol_type = unassigned DNA; note = methanogen bacteria
ggatggggcgtgtcaacatttccatactcaataggatatgtt

SEQ ID NO: 30165 - DNA, 60 bp, unidentified
  source 1..60: mol_type = unassigned DNA; note = methanogen bacteria
acatctgtggatccatcctcttctgtaacattggatttttctactgtagatgtaggtcct

SEQ ID NO: 30166 - DNA, 33 bp, unidentified
  source 1..33: mol_type = unassigned DNA; note = methanogen bacteria
ttcggctccattgttgccggattttatcagggc

SEQ ID NO: 30167 - DNA, 69 bp, unidentified
  source 1..69: mol_type = unassigned DNA; note = methanogen bacteria
ggagttccggtcatgaaccttgagtttatttttggccaggttgaaaaccagggaagatccggaggaata

SEQ ID NO: 30168 - DNA, 102 bp, unidentified
  source 1..102: mol_type = unassigned DNA; note = methanogen bacteria
gtaggttcatcaatagccataccaatttccatgtttgatccgggcaggcccctgcctcttcatttgtatgttcttgcaactgaaggcatatccctgcctaat

SEQ ID NO: 30169 - DNA, 33 bp, unidentified
  source 1..33: mol_type = unassigned DNA; note = methanogen bacteria
tatattggtgttgagccggatcttgccctattg

SEQ ID NO: 30170 - DNA, 39 bp, unidentified
  source 1..39: mol_type = unassigned DNA; note = methanogen bacteria
tggggtgttaatacatttccattttcaattggttatgtt

SEQ ID NO: 30171 - DNA, 30 bp, unidentified
  source 1..30: mol_type = unassigned DNA; note = methanogen bacteria
tatattggagttgaacctggtcttgcaatg

SEQ ID NO: 30172 - DNA, 42 bp, unidentified
  source 1..42: mol_type = unassigned DNA; note = methanogen bacteria
ggatggggtgttaatacttttccatattctttaggttatgtc

SEQ ID NO: 30173 - DNA, 33 bp, unidentified
  source 1..33: mol_type = unassigned DNA; note = methanogen bacteria
tacatcggtgttgaacctgatttggccatactg

SEQ ID NO: 30174 - DNA, 42 bp, unidentified
  source 1..42: mol_type = unassigned DNA; note = methanogen bacteria
ggatggggagtgtctacattcccgtactcaataggttatgta

SEQ ID NO: 30175 - DNA, 33 bp, unidentified
  source 1..33: mol_type = unassigned DNA; note = methanogen bacteria
atgctcttccctgtgaatttcccaatatccatt

SEQ ID NO: 30176 - DNA, 96 bp, unidentified
  source 1..96: mol_type = unassigned DNA; note = methanogen bacteria
gtaggtacaagctataacactttcgattatttctattttgtaatcgttaccctgactactgtgggatatggtgacatcactcctgtaacatataat

SEQ ID NO: 30177 - DNA, 30 bp, unidentified
  source 1..30: mol_type = unassigned DNA; note = methanogen bacteria
atgttgccgtttgtcttaaactatacacgt

SEQ ID NO: 30178 - DNA, 93 bp, unidentified
  source 1..93: mol_type = unassigned DNA; note = methanogen bacteria
gatccaagcataaacaacctattcaatagcctatggtttgtaatagctacaatcacaactgtaggatatggagatgttgttccaaacacaaca

SEQ ID NO: 30179 - DNA, 90 bp, unidentified
  source 1..90: mol_type = unassigned DNA; note = methanogen bacteria
ggaatgtttgagttaccagactttgaattagaggaagtatttctacatataggacacattatagggtatttctatgaacatgaccctgtt

SEQ ID NO: 30180 - DNA, 66 bp, unidentified
  source 1..66: mol_type = unassigned DNA; note = methanogen bacteria
ttctctaatcctattgctgagccgataagtgaaatggtggaagctagttcaggatatatgggtaca

SEQ ID NO: 30181 - DNA, 30 bp, unidentified
  source 1..30: mol_type = unassigned DNA; note = methanogen bacteria
ttcacaactttgcctgatattttaatggaa

SEQ ID NO: 30182 - DNA, 48 bp, unidentified
  source 1..48: mol_type = unassigned DNA; note = methanogen bacteria
caattctgttggggtaaattagctgctaggttttatgaatggttcttt

SEQ ID NO: 30183 - DNA, 45 bp, unidentified
  source 1..45: mol_type = unassigned DNA; note = methanogen bacteria
ccgatagtatccaacagctcttatggctccaaagataatctgttg

SEQ ID NO: 30184 - DNA, 33 bp, unidentified
  source 1..33: mol_type = unassigned DNA; note = methanogen bacteria
tttaccgaacctggatccttcagtacaggagca

SEQ ID NO: 30185 - DNA, 135 bp, unidentified
  source 1..135: mol_type = unassigned DNA; note = methanogen bacteria
acttttgcccacatcgatacatggtggagcatcaatgatgcacctggttacctcggctacgtattcacaggaatcagacctgaagtcatagatgtgtctccatacgtggtggatgtggccataaccacagccgat

SEQ ID NO: 30186 - DNA, 33 bp, unidentified
  source 1..33: mol_type = unassigned DNA; note = methanogen bacteria
atgggggtttcaaaagtggaaactgttgaactg

SEQ ID NO: 30187 - DNA, 90 bp, unidentified
  source 1..90: mol_type = unassigned DNA; note = methanogen bacteria
gaatccgtcaatcctctggattcccttgttatggttacaaatcaatttacaagcaatggatattcaatttcaggacatacaatttccagc

SEQ ID NO: 30188 - DNA, 33 bp, unidentified
  source 1..33: mol_type = unassigned DNA; note = methanogen bacteria
tacattggtgttgaacctgacctggcaattctt

SEQ ID NO: 30189 - DNA, 42 bp, unidentified
  source 1..42: mol_type = unassigned DNA; note = methanogen bacteria
ggatggggagtgtccacatttccatattcaataggttatgtt

SEQ ID NO: 30190 - DNA, 30 bp, unidentified
  source 1..30: mol_type = unassigned DNA; note = methanogen bacteria
ttttttgatccgaatgcacaaatacaaact

SEQ ID NO: 30191 - DNA, 36 bp, unidentified
  source 1..36: mol_type = unassigned DNA; note = methanogen bacteria
ggacaattcaaatataatggcattgatttttcaagc

SEQ ID NO: 30192 - DNA, 93 bp, unidentified
  source 1..93: mol_type = unassigned DNA; note = methanogen bacteria
ttcgggttaaatgttagtggctccactacctattcattattaaaattcagtgcaattagtccaaatattttaaatggaagaacttttggacca

SEQ ID NO: 30193 - DNA, 42 bp, unidentified
  source 1..42: mol_type = unassigned DNA; note = methanogen bacteria
gaattatctgcaggatttgcattctcatatcaaatgtttttc

SEQ ID NO: 30194 - DNA, 42 bp, unidentified
  source 1..42: mol_type = unassigned DNA; note = methanogen bacteria
ttcggaaaattagttgctgtagtatatgactggttatttgga

SEQ ID NO: 30195 - DNA, 33 bp, unidentified
  source 1..33: mol_type = unassigned DNA; note = methanogen bacteria
tacattggcgttgaacctgatttggcaatatta

SEQ ID NO: 30196 - DNA, 42 bp, unidentified
  source 1..42: mol_type = unassigned DNA; note = methanogen bacteria
ggttggggagtcagcacatttccatattcaataggttatgta

SEQ ID NO: 30197 - DNA, 69 bp, unidentified
  source 1..69: mol_type = unassigned DNA; note = methanogen bacteria
agtggattgaatgatcccaactggatttccatgttggatgttgatacagtagacatggattcaagcatc

SEQ ID NO: 30198 - DNA, 33 bp, unidentified
  source 1..33: mol_type = unassigned DNA; note = methanogen bacteria
tacattggagtggactccaacctggcaatgctg

SEQ ID NO: 30199 - DNA, 42 bp, unidentified
  source 1..42: mol_type = unassigned DNA; note = methanogen bacteria
ggttggggagtgtcaacattcccatattcgataggttatgtc

SEQ ID NO: 30200 - DNA, 126 bp, unidentified
  source 1..126: mol_type = unassigned DNA; note = methanogen bacteria
tctggaacctattccgcttttgctgaaattttagcgtttataggaaataccgtatctgatacagttgatcctagcatggctattagtgcagttcctcaagatctttgggcaccattattcactggt

SEQ ID NO: 30201 - DNA, 57 bp, unidentified
  source 1..57: mol_type = unassigned DNA; note = methanogen bacteria
gtcttgccggataaggaaatactcaattacactggattcataaattttttaggctcc

SEQ ID NO: 30202 - DNA, 33 bp, unidentified
  source 1..33: mol_type = unassigned DNA; note = methanogen bacteria
tacattggtgttgaacctgatctggcaatatta

SEQ ID NO: 30203 - DNA, 42 bp, unidentified
  source 1..42: mol_type = unassigned DNA; note = methanogen bacteria
ggttggggagtcagtacatttccctattctgtaggttatgta

SEQ ID NO: 30204 - DNA, 30 bp, unidentified
  source 1..30: mol_type = unassigned DNA; note = methanogen bacteria
tatattggggtatctccggatcttgcaatg

SEQ ID NO: 30205 - DNA, 42 bp, unidentified
  source 1..42: mol_type = unassigned DNA; note = methanogen bacteria
ggttggggagttaacacatttccttattcattaggatatgtc

SEQ ID NO: 30206 - DNA, 33 bp, unidentified
  source 1..33: mol_type = unassigned DNA; note = methanogen bacteria
tatataggtgttaatccggatttagcaatgtta

SEQ ID NO: 30207 - DNA, 42 bp, unidentified
  source 1..42: mol_type = unassigned DNA; note = methanogen bacteria
ggttggggtgtttgcacattcccgtattcaattggttatgtt

SEQ ID NO: 30208 - DNA, 33 bp, unidentified
  source 1..33: mol_type = unassigned DNA; note = methanogen bacteria
tacattggtgttgaacctgaccttgcaattctg

SEQ ID NO: 30209 - DNA, 42 bp, unidentified
  source 1..42: mol_type = unassigned DNA; note = methanogen bacteria
ggatggggagttagcacatttccatactcaataggttatgtt

SEQ ID NO: 30210 - DNA, 30 bp, unidentified
  source 1..30: mol_type = unassigned DNA; note = methanogen bacteria
tatattggtgtatcgcctgatcttgcaatg

SEQ ID NO: 30211 - DNA, 39 bp, unidentified
  source 1..39: mol_type = unassigned DNA; note = methanogen bacteria
tggggagttaacacattcccattttccttaggttatgtc

SEQ ID NO: 30212 - DNA, 33 bp, unidentified
  source 1..33: mol_type = unassigned DNA; note = methanogen bacteria
tacattggtgttgaacctgatttggcaatttta

SEQ ID NO: 30213 - DNA, 42 bp, unidentified
  source 1..42: mol_type = unassigned DNA; note = methanogen bacteria
ggttggggtgtcagcacatttccatattccatagggtatgtc

SEQ ID NO: 30214 - DNA, 48 bp, unidentified
  source 1..48: mol_type = unassigned DNA; note = methanogen bacteria
cccattgtattcaacagcccctacgattcgaagggagatgtgctgagc

SEQ ID NO: 30215 - DNA, 36 bp, unidentified
  source 1..36: mol_type = unassigned DNA; note = methanogen bacteria
ctgaccgcccccggtgcattcgactccgtggcattc

SEQ ID NO: 30216 - DNA, 138 bp, unidentified
  source 1..138: mol_type = unassigned DNA; note = methanogen bacteria
aacagctttgcccacattgaaacctggtggagcattgatgatgcgtccggatacatctcctacgtcttcaaaggaacaaggccgattgtgctggatgccgcaccttacgtcgactacatcgccctgacgggggccgat

SEQ ID NO: 30217 - DNA, 123 bp, unidentified
  source 1..123: mol_type = unassigned DNA; note = methanogen bacteria
tttggccctatttccactattttttcttcgagaaacatggataaatttgctcagttgaatgctggctcaactactgctgatatgtacagtattgtcccccaggaagtttggaattcactttta

SEQ ID NO: 30218 - DNA, 36 bp, unidentified
  source 1..36: mol_type = unassigned DNA; note = methanogen bacteria
cttttcggttcgtttgtcgccggattatatcaggga

SEQ ID NO: 30219 - DNA, 33 bp, unidentified
  source 1..33: mol_type = unassigned DNA; note = methanogen bacteria
tacattggcgttgagccggatttggcaattttg

SEQ ID NO: 30220 - DNA, 42 bp, unidentified
  source 1..42: mol_type = unassigned DNA; note = methanogen bacteria
ggttggggagtaagtacctttccgtattctattggttatgtt

SEQ ID NO: 30221 - DNA, 129 bp, unidentified
  source 1..129: mol_type = unassigned DNA; note = methanogen bacteria
ggtgcaggtccacttgtaacaatcttttctaaacaaactatggatagtttaactaatgcaaatacttccagtcaagttactcaggcatttagttcagtccctcaggaagcttggacaggattaatcaca

SEQ ID NO: 30222 - DNA, 30 bp, unidentified
  source 1..30: mol_type = unassigned DNA; note = methanogen bacteria
tatattggtgtcgcacccgaccttgcaatg

SEQ ID NO: 30223 - DNA, 39 bp, unidentified
  source 1..39: mol_type = unassigned DNA; note = methanogen bacteria
tggggtgtcaatacatttccattttctctaggttatgtc

SEQ ID NO: 30224 - DNA, 30 bp, unidentified
  source 1..30: mol_type = unassigned DNA; note = methanogen bacteria
ggtatgttaaaagcaggcgctccacttggt

SEQ ID NO: 30225 - DNA, 90 bp, unidentified
  source 1..90: mol_type = unassigned DNA; note = methanogen bacteria
ggaggaatcactcctactgatgcatccgcaccagcttacgcaatttctgcgaaggcgatttctgtagcggaaggtaaagttaccatgcca

SEQ ID NO: 30226 - DNA, 33 bp, unidentified
  source 1..33: mol_type = unassigned DNA; note = methanogen bacteria
ttcttaggtgctaaaggtgtaacctggagtact

SEQ ID NO: 30227 - DNA, 72 bp, unidentified
  source 1..72: mol_type = unassigned DNA; note = methanogen bacteria
cggattgtcaatcttgacaacaactatttaggtttatttttctcttcaatgactctgaacagtgaaattttg

SEQ ID NO: 30228 - DNA, 33 bp, unidentified
  source 1..33: mol_type = unassigned DNA; note = methanogen bacteria
catcttgattcttctcaaattttatttaaaaat

SEQ ID NO: 30229 - DNA, 93 bp, unidentified
  source 1..93: mol_type = unassigned DNA; note = methanogen bacteria
ggttcttctgatgatttatttgatagcttttattttgttattgttacgttaactactgtaggttatggtgatatagtcccacagacattcaac

SEQ ID NO: 30230 - DNA, 30 bp, unidentified
  source 1..30: mol_type = unassigned DNA; note = methanogen bacteria
ggtatgcttaaagcaggtgcaccagtcggg

SEQ ID NO: 30231 - DNA, 90 bp, unidentified
  source 1..90: mol_type = unassigned DNA; note = methanogen bacteria
ggcggaattacccctactgacgcaaccgcaccagcttatgctatttctgcaaaagcaattgccgtagcagaaggtaaagtaacaatgcca

SEQ ID NO: 30232 - DNA, 33 bp, unidentified
  source 1..33: mol_type = unassigned DNA; note = methanogen bacteria
ttcttaggtgctaaaggcgtaacttggagtact

SEQ ID NO: 30233 - DNA, 132 bp, unidentified
  source 1..132: mol_type = unassigned DNA; note = methanogen bacteria
accggactgatttcctcattcactaaaatcgtatatatcagcattgacgctatagctaatgatgcaaacaatttgaccgcaataattgggacagtcccaaaaccaataatgaacacatttaccaattcgtta

SEQ ID NO: 30234 - DNA, 96 bp, unidentified
  source 1..96: mol_type = unassigned DNA; note = methanogen bacteria
tcttcaccgttggattttccggaatttgatttggaggatatgctgatgaatatgcccgagacaatacatatgttgtattcccacaatcccgtacat

SEQ ID NO: 30235 - DNA, 30 bp, unidentified
  source 1..30: mol_type = unassigned DNA; note = methanogen bacteria
ggtatgttaaaagcaggcgctcctctcggt

SEQ ID NO: 30236 - DNA, 90 bp, unidentified
  source 1..90: mol_type = unassigned DNA; note = methanogen bacteria
ggcggaattacccctactgacaccgcagcaccagcttacgcaatttcagcaaaagctatcgctgtagcagaaggaaaagtaaccatgcct

SEQ ID NO: 30237 - DNA, 33 bp, unidentified
  source 1..33: mol_type = unassigned DNA; note = methanogen bacteria
ttcttaggtgctgaaggtgttacctggagtact

SEQ ID NO: 30238 - DNA, 87 bp, unidentified
  source 1..87: mol_type = unassigned DNA; note = methanogen bacteria
gaaggtaaaactcctattgactctcttgtaatggtttctaatgcttttacaagtaacggttatgctgttttaggcaaaactggtttg

SEQ ID NO: 30239 - DNA, 132 bp, unidentified
  source 1..132: mol_type = unassigned DNA; note = methanogen bacteria
acaggactgttttcatcattcactaaaatcgtatatgcaagcattgacgctgtagccaatgatgcaaacaatctgaccatgataatggcggcaattcccaaatcaacaatgaacacattcacaaatgcattg

SEQ ID NO: 30240 - DNA, 126 bp, unidentified
  source 1..126: mol_type = unassigned DNA; note = methanogen bacteria
actggagtgttcagcaatatatttaaaatagtaactttcatgtctgaaaatcctgatgtgatgcagaatgcaacttcatttacccaggcagttcctcaagaacttttgagtggattggcaggtgga

SEQ ID NO: 30241 - DNA, 33 bp, unidentified
  source 1..33: mol_type = unassigned DNA; note = methanogen bacteria
ctcttatccggtaaaccctttaattatgataca

SEQ ID NO: 30242 - DNA, 75 bp, unidentified
  source 1..75: mol_type = unassigned DNA; note = methanogen bacteria
aagtccgatatgagcaaaatagacttggcaatttccgttttaaaaagtcttgatttcagcaatcttaatcagaac

SEQ ID NO: 30243 - DNA, 30 bp, unidentified
  source 1..30: mol_type = unassigned DNA; note = methanogen bacteria
attttgattactgctattccaggtagtggt

SEQ ID NO: 30244 - DNA, 93 bp, unidentified
  source 1..93: mol_type = unassigned DNA; note = methanogen bacteria
ggaaacagtttcggacagttcgatgatttatatttcgttattgttaccttaactactgttggctatggagatgtaactccaaaaacatataat

SEQ ID NO: 30245 - DNA, 33 bp, unidentified
  source 1..33: mol_type = unassigned DNA; note = methanogen bacteria
tctatgggtgtggatgcaagcactgctctgcca

SEQ ID NO: 30246 - DNA, 42 bp, unidentified
  source 1..42: mol_type = unassigned DNA; note = methanogen bacteria
tggaatgttccaggcttgcctgcatattcacttggatatgtt

SEQ ID NO: 30247 - DNA, 72 bp, unidentified
  source 1..72: mol_type = unassigned DNA; note = methanogen bacteria
gattcccttttaaatatggtcaattcaatttccctgcctttattggatgtggttactggaacaaatgatcca

SEQ ID NO: 30248 - DNA, 39 bp, unidentified
  source 1..39: mol_type = unassigned DNA; note = methanogen bacteria
actccattgcaatatttgattttaggtggagaattcagt

SEQ ID NO: 30249 - DNA, 57 bp, unidentified
  source 1..57: mol_type = unassigned DNA; note = methanogen bacteria
gccctgccggaaatgcagattgcaaactattcggattttatctcattcataacatct

SEQ ID NO: 30250 - DNA, 132 bp, unidentified
  source 1..132: mol_type = unassigned DNA; note = methanogen bacteria
acaggactgttttcctcattcacggaaatcgtaaatgtgggaattaattctctagctaatgaaacaaccaatgtgaccacaataatagctgcagttcccaaatcaacaatgaacacatttaccaatgcgtta

SEQ ID NO: 30251 - DNA, 39 bp, unidentified
  source 1..39: mol_type = unassigned DNA; note = methanogen bacteria
atgtctgcaggattttcattctcctatcaaatgttttcc

SEQ ID NO: 30252 - DNA, 33 bp, unidentified
  source 1..33: mol_type = unassigned DNA; note = methanogen bacteria
tatatcggggtttcacaggatgttgcaatgctt

SEQ ID NO: 30253 - DNA, 42 bp, unidentified
  source 1..42: mol_type = unassigned DNA; note = methanogen bacteria
ggatggaatgtcaatccatttccctattcaataggatatatt

SEQ ID NO: 30254 - DNA, 36 bp, unidentified
  source 1..36: mol_type = unassigned DNA; note = methanogen bacteria
gaggcttgtggagttgaacccggtgttgctttgact

SEQ ID NO: 30255 - DNA, 45 bp, unidentified
  source 1..45: mol_type = unassigned DNA; note = methanogen bacteria
ggatggaatgttgtcggtcttccggcatattctgtgggttatgtt

SEQ ID NO: 30256 - DNA, 42 bp, unidentified
  source 1..42: mol_type = unassigned DNA; note = methanogen bacteria
atcaatatccatattgtcggcagttttaatttgatattattg

SEQ ID NO: 30257 - DNA, 30 bp, unidentified
  source 1..30: mol_type = unassigned DNA; note = methanogen bacteria
ggggaaaatattgacatattgttcaatgtg

SEQ ID NO: 30258 - DNA, 120 bp, unidentified
  source 1..120: mol_type = unassigned DNA; note = methanogen bacteria
tatgtggttccattacacccatatagttatgctttggctacaggtattggcagtacaagtatgaatgtagtggccttgtcaagcttgacggcaatgtatcctgatttgtccagtaaatta

SEQ ID NO: 30259 - DNA, 33 bp, unidentified
  source 1..33: mol_type = unassigned DNA; note = methanogen bacteria
atgaatgatgttatgttttggtttgttatgctt

SEQ ID NO: 30260 - DNA, 93 bp, unidentified
  source 1..93: mol_type = unassigned DNA; note = methanogen bacteria
gtggaaaatgtttctccaatagactcatgggctatggtttccaatgcttttacaagtaatggatattctgttttgggaaagtcacttcctggg

SEQ ID NO: 30261 - DNA, 69 bp, unidentified
  source 1..69: mol_type = unassigned DNA; note = methanogen bacteria
ctgacagtatttgatccgacctggattccttcacttgatctttcacctgtttattacggcgattcaatc

SEQ ID NO: 30262 - DNA, 30 bp, unidentified
  source 1..30: mol_type = unassigned DNA; note = methanogen bacteria
ttcaatatggaaagcttcctgttcggcaca

SEQ ID NO: 30263 - DNA, 132 bp, unidentified
  source 1..132: mol_type = unassigned DNA; note = methanogen bacteria
acaggactgttttcctcattcactaaaatcgtatatatcagcattgatgccatggccaataacacaagcaatatgaccaaaataatggctgcaattccccaatcaacaatgaacacattcaccaattcattg

SEQ ID NO: 30264 - DNA, 90 bp, unidentified
  source 1..90: mol_type = unassigned DNA; note = methanogen bacteria
ggttcaacttatggtctttttgatgatttttattttgtcattgttactttgactactgtaggttatggtgatgtggttccacagacttac

SEQ ID NO: 30265 - DNA, 132 bp, unidentified
  source 1..132: mol_type = unassigned DNA; note = methanogen bacteria
accggactttttacctcattcactaaaatcgtatatatcagcattgatgcaatgtctaagaatgcaaacaatttgactacaataatggctgcagttccgaaaacaacaatgaacacattcacaaatgcgcta

SEQ ID NO: 30266 - DNA, 69 bp, unidentified
  source 1..69: mol_type = unassigned DNA; note = methanogen bacteria
attggaatgaatgatccaacatggataagtggtgttgatattgattctgtcagtttaaccccaagcgca

SEQ ID NO: 30267 - DNA, 30 bp, unidentified
  source 1..30: mol_type = unassigned DNA; note = methanogen bacteria
gttactgcatttgatgcaattataacttca

SEQ ID NO: 30268 - DNA, 90 bp, unidentified
  source 1..90: mol_type = unassigned DNA; note = methanogen bacteria
ggtacaacttatggtctttttgatgatttttattttgtaatcgttactctgactactgtgggctatggtgatgtagttccgcagacttat

SEQ ID NO: 30269 - DNA, 132 bp, unidentified
  source 1..132: mol_type = unassigned DNA; note = methanogen bacteria
accggactgttttcctcactcactaaaatcgtatatatcagcatcgatgcaatatctaaggatgcaaacaatatgaccacaataatggctgcgattccaaaatcaacaatgaacacattcaccaatgcgtta

SEQ ID NO: 30270 - DNA, 132 bp, unidentified
  source 1..132: mol_type = unassigned DNA; note = methanogen bacteria
agcggactgttttcctcatttactaaaattgctcatactagtattaatgctatagttaatggtgcaaataatttaaccgctataacagcagcaattccacaatcaacaataaacacattcaccaatgcatta

SEQ ID NO: 30271 - DNA, 69 bp, unidentified
  source 1..69: mol_type = unassigned DNA; note = methanogen bacteria
attggaatgagcgatcccacatggataaacggaattgacattgattctgtcagcctaacaccaagcgca

SEQ ID NO: 30272 - DNA, 132 bp, unidentified
  source 1..132: mol_type = unassigned DNA; note = methanogen bacteria
tcaggactgtttacatcattcactaaaatcgtatatatcagcattgatgccatatctaaagatgcaaacaatttgactactgtcatggcagcaattccaaaatcaacaatgaacacattcacaaatgcatta

SEQ ID NO: 30273 - DNA, 36 bp, unidentified
  source 1..36: mol_type = unassigned DNA; note = methanogen bacteria
gatttattcgtaccgattaattttccgggatctgtt

SEQ ID NO: 30274 - DNA, 93 bp, unidentified
  source 1..93: mol_type = unassigned DNA; note = methanogen bacteria
ggaaccacatatgagcctttcgattacttctatttcgttatagttacactcaccactgtcggatacggggacatcactccccagacatataac

SEQ ID NO: 30275 - DNA, 132 bp, unidentified
  source 1..132: mol_type = unassigned DNA; note = methanogen bacteria
acaggactgtttacatcattcaccaaaatagtttatgcaagcattgacgctatggctaatggtgcagaaaatgctacaatgataatgtcagcaattccaaaagcgacaatgagctcattcactaatgcgtta

SEQ ID NO: 30276 - DNA, 132 bp, unidentified
  source 1..132: mol_type = unassigned DNA; note = methanogen bacteria
acaaaattgttttcctcattaactgaaatcgtaaatgtcggcattaattctctagctaatgaaacaacaaatatgacaacaataatagcagcagttcccaaatcaacaatgaatacattcaccaatgcatta

SEQ ID NO: 30277 - DNA, 132 bp, unidentified
  source 1..132: mol_type = unassigned DNA; note = methanogen bacteria
agcggactgttttcctcattcactgaaatcgtatatatcagtatggacgctatagctaatgaaacaaccaatatgactatgatattagcggcagttcccaaatcaacaatgaatacatttaccaatgcattg

SEQ ID NO: 30278 - DNA, 135 bp, unidentified
  source 1..135: mol_type = unassigned DNA; note = methanogen bacteria
gcaagtggcttgtttacatcattcactaaaattgtaaatagcagcattggggctatagataatggtgcaaacaatcttactatgataatggcagcaattcctaaatcaactattagcacattctctaattcctta

SEQ ID NO: 30279 - DNA, 60 bp, unidentified
  source 1..60: mol_type = unassigned DNA; note = methanogen bacteria
gcccttccggaactgcagattgccagctattccgattacatatcattcatttcatctttg

SEQ ID NO: 30280 - DNA, 63 bp, unidentified
  source 1..63: mol_type = unassigned DNA; note = methanogen bacteria
agcaatttgtcaataattagcttcaattctcctctttttggagatttcagagcattgggcatt

SEQ ID NO: 30281 - DNA, 90 bp, unidentified
  source 1..90: mol_type = unassigned DNA; note = methanogen bacteria
gagggtgtcgcccctttagattcaattgcaatggtttccaatgcctttacaagtaacggttatgcgattttgggaaagagcggtcttggg

SEQ ID NO: 30282 - DNA, 48 bp, unidentified
  source 1..48: mol_type = unassigned DNA; note = methanogen bacteria
atctaccacattattgatcctaatgtagttacaactttatccatatcc

SEQ ID NO: 30283 - DNA, 75 bp, unidentified
  source 1..75: mol_type = unassigned DNA; note = methanogen bacteria
ttgcatcaggattttaatctcgtttcagtaatttcagaaatcttattgctaaaaccattaaatatcagtcatttt

SEQ ID NO: 30284 - DNA, 33 bp, unidentified
  source 1..33: mol_type = unassigned DNA; note = methanogen bacteria
tatggaattgatggtttgtccgagcaaatttct

SEQ ID NO: 30285 - DNA, 36 bp, unidentified
  source 1..36: mol_type = unassigned DNA; note = methanogen bacteria
ttcaatcatgattacgcttattacttatggtatgaa

SEQ ID NO: 30286 - DNA, 54 bp, unidentified
  source 1..54: mol_type = unassigned DNA; note = methanogen bacteria
gacttcctgtttaaaaccatacttggaatttcagaatatggacttataaaaaag

SEQ ID NO: 30287 - DNA, 66 bp, unidentified
  source 1..66: mol_type = unassigned DNA; note = methanogen bacteria
aatccaatgccgtcagagtggatatatgacaagataatattcttaaatggagggtcaggatggata

SEQ ID NO: 30288 - DNA, 132 bp, unidentified
  source 1..132: mol_type = unassigned DNA; note = methanogen bacteria
agcggacttttttcctcattcacccaaattgtgtatggcagcattgatgccatggcgggtggtgcaaacaacatgaccatgataatggcggcaattcccaaatcagcattgaacacattcacaaatgccctg

SEQ ID NO: 30289 - DNA, 132 bp, unidentified
  source 1..132: mol_type = unassigned DNA; note = methanogen bacteria
acaggactgttttcatcattcactgaaatcgtatatgccagcattaaggcagtaagcaataacgcaaccaattttacaatgataatggcgaaagttcccccatctgcaatgaacacattcactaatgcgtta

SEQ ID NO: 30290 - DNA, 51 bp, unidentified
  source 1..51: mol_type = unassigned DNA; note = methanogen bacteria
tcccctgttaaagagccaactgtagaattgcttgcaagaacatccccaagt

SEQ ID NO: 30291 - DNA, 60 bp, unidentified
  source 1..60: mol_type = unassigned DNA; note = methanogen bacteria
ttaacaattgcctccccaagttttcttatggcagcgggaacaggatttgaagatcctttg

SEQ ID NO: 30292 - DNA, 36 bp, unidentified
  source 1..36: mol_type = unassigned DNA; note = methanogen bacteria
gattatactcctttattgttgattttacgttatgac

SEQ ID NO: 30293 - DNA, 60 bp, unidentified
  source 1..60: mol_type = unassigned DNA; note = methanogen bacteria
tatttatcaataatcggattcaattcccctcttttcggtgattttagaacattaagcctt

SEQ ID NO: 30294 - DNA, 135 bp, unidentified
  source 1..135: mol_type = unassigned DNA; note = methanogen bacteria
gcaagcggactgttttcctcattcactcaaatcgtatacggcagcattgatgccatggctgatggtgcaaacaacctgaccatgataatggcggcaattcccaaatcagcactgaacacattcaccaattcgctg

SEQ ID NO: 30295 - DNA, 132 bp, unidentified
  source 1..132: mol_type = unassigned DNA; note = methanogen bacteria
agcggactgttttcttcatttactgaaatcgtatataaatgtattgaagcaatagctaacggtgcagagaattatactgcaataatgggagctgttccgacatcaacaatgaacacattcaccaatgcatta

SEQ ID NO: 30296 - DNA, 93 bp, unidentified
  source 1..93: mol_type = unassigned DNA; note = methanogen bacteria
actgaaaatgttaatttattggattcacttgtaatggtttctaatgcatttacaagtaatggttattcaattttaggtcattctgaattgggt

SEQ ID NO: 30297 - DNA, 84 bp, unidentified
  source 1..84: mol_type = unassigned DNA; note = methanogen bacteria
gagggcgttgaaccattagatgccatagtcatggtttcaaatgcatttacaagtaacggttatgctgtacttggtagcacaggc

SEQ ID NO: 30298 - DNA, 135 bp, unidentified
  source 1..135: mol_type = unassigned DNA; note = methanogen bacteria
gcaagcggactgttttcctcactcaccaccatggtaaatgcaggcgttaaggccatggaaaagggtgcggaaaatgccactgcgataatggccgcaattcctaaagactcaattgccacattcaacaatgccctg

SEQ ID NO: 30299 - DNA, 93 bp, unidentified
  source 1..93: mol_type = unassigned DNA; note = methanogen bacteria
gttgaagatgtatctccgttggatgcccttgtcatggcatctaatgcatttacaagtaatggttatgcggttttaggtaatagcagtgtcggt

SEQ ID NO: 30300 - DNA, 102 bp, unidentified
  source 1..102: mol_type = unassigned DNA; note = methanogen bacteria
gtatcttctccaatgaattttcccgagtttgatctggaagaaatgttattggatttccccgaaacgattcatacattaatttcacacaatcctgttgatgcg

SEQ ID NO: 30301 - DNA, 129 bp, unidentified
  source 1..129: mol_type = unassigned DNA; note = methanogen bacteria
actatgggacctgctctttctagaatatttactccagcaaatattagtcaaatggctaccaattcctccagcacttccgttattttaaattcaattccatcaagcgtatgggcaggattattctcagga

SEQ ID NO: 30302 - DNA, 33 bp, unidentified
  source 1..33: mol_type = unassigned DNA; note = methanogen bacteria
cagctaactacattcttaactgttttggaaaat

SEQ ID NO: 30303 - DNA, 39 bp, unidentified
  source 1..39: mol_type = unassigned DNA; note = methanogen bacteria
atgctcttcgaattgtatgggcattatattttggccacc

SEQ ID NO: 30304 - DNA, 135 bp, unidentified
  source 1..135: mol_type = unassigned DNA; note = methanogen bacteria
agcggactgtttacttcattcactaaaatcgtatatatcagcattgatgctatggccaataatacaagcaatttgaccacaataatggcagcagttcctcaatcaacaatgaacacattcaacaatgcactaacc

SEQ ID NO: 30305 - DNA, 84 bp, unidentified
  source 1..84: mol_type = unassigned DNA; note = methanogen bacteria
gaaaacgtttctcctatggactccatgaccatggtttccaatgcattcacaagcaacagctttgatgcttcaggaaaaaacata

SEQ ID NO: 30306 - DNA, 90 bp, unidentified
  source 1..90: mol_type = unassigned DNA; note = methanogen bacteria
gaagatgtttctcctcttgattcattgaacatggtttccaatgcatttacaagtaatggttataccgttttaggaaaaactgggctgggt

SEQ ID NO: 30307 - DNA, 87 bp, unidentified
  source 1..87: mol_type = unassigned DNA; note = methanogen bacteria
gaaaatgtttctcctatggactccctaaccatggtttccaatgcattcacaagtaacagctttgatgcttcaggaaataacataata

SEQ ID NO: 30308 - DNA, 84 bp, unidentified
  source 1..84: mol_type = unassigned DNA; note = methanogen bacteria
gaaagtgttgatcctttgagttcattggttatggtttcaaatgcatttacaagtaatggttatgcaatacttggaaacacgggt

SEQ ID NO: 30309 - DNA, 132 bp, unidentified
  source 1..132: mol_type = unassigned DNA; note = methanogen bacteria
atttcattaggatcagctataagcactcttccaaaatcttctattgctgctattagcaatgctactacaactaatgccgttttaaatgctattcctcctcaaacatggactgcattaggttccggtttttca

SEQ ID NO: 30310 - DNA, 87 bp, unidentified
  source 1..87: mol_type = unassigned DNA; note = methanogen bacteria
gttgaaaacgtttctcctatggactccctaaccatggtgtccaatgcatttacaagcaacagctttgacgcttcaggaaaaaacata

SEQ ID NO: 30311 - DNA, 87 bp, unidentified
  source 1..87: mol_type = unassigned DNA; note = methanogen bacteria
gaaaggactactcctcttaatgctcttgtaatggtttccaacgcatttacaagtaacggttattcagtattgggacattcgacattt

SEQ ID NO: 30312 - DNA, 84 bp, unidentified
  source 1..84: mol_type = unassigned DNA; note = methanogen bacteria
gaaggcgtttctcctatggactccatgaccatggtttccaatgcatttacaagcaacagctttgacgcttcaggacaaaacata

SEQ ID NO: 30313 - DNA, 69 bp, unidentified
  source 1..69: mol_type = unassigned DNA; note = methanogen bacteria
ccgtactatccggagatcgggcccttccctctgatgccgcccgatccgcgtatcgaggagttcatccct

SEQ ID NO: 30314 - DNA, 84 bp, unidentified
  source 1..84: mol_type = unassigned DNA; note = methanogen bacteria
gaagacgtttctcctatggactccctaaccatggtttccaatgcatttacaagcaacagctttgatgcttcaggacaaaacatt

SEQ ID NO: 30315 - DNA, 84 bp, unidentified
  source 1..84: mol_type = unassigned DNA; note = methanogen bacteria
gaaaacgtttctcctatggactccataaccatggtgtccaatgcattcacaagcaacagttttgacgcttcaggaaaaaacata

SEQ ID NO: 30316 - DNA, 87 bp, unidentified
  source 1..87: mol_type = unassigned DNA; note = methanogen bacteria
gaaaatactatgcctcttgattctcttgcaatggtttccaatgcatttacaagtaacggttattcggttttgggaaattcaacattt

SEQ ID NO: 30317 - DNA, 69 bp, unidentified
  source 1..69: mol_type = unassigned DNA; note = methanogen bacteria
attaattttgtttatcctgaaaatatgcctatgcctgatttgcttccagaagtaatggaaccatcctct

SEQ ID NO: 30318 - DNA, 30 bp, unidentified
  source 1..30: mol_type = unassigned DNA; note = methanogen bacteria
agcggtttggagcaacatcttttccaactg

SEQ ID NO: 30319 - DNA, 30 bp, unidentified
  source 1..30: mol_type = unassigned DNA; note = methanogen bacteria
atggattgggtatctttaaatatatttgga

SEQ ID NO: 30320 - DNA, 90 bp, unidentified
  source 1..90: mol_type = unassigned DNA; note = methanogen bacteria
gaaggtgtaaatcctctagactcccttgtaatggtgtcaaatgcatttacaagtaatgggtatgctgttttaggcacttccatgccggga

SEQ ID NO: 30321 - DNA, 84 bp, unidentified
  source 1..84: mol_type = unassigned DNA; note = methanogen bacteria
gaaaaagtttctcctatggactccataaccatggtttccaatgcatttacaagcaacagttttgatgcttcaggaaaaaacata

SEQ ID NO: 30322 - DNA, 69 bp, unidentified
  source 1..69: mol_type = unassigned DNA; note = methanogen bacteria
atactttacggttcagtatatcctgatatggagcccttgttggatttcactccaaatgctcttgaccca

SEQ ID NO: 30323 - DNA, 36 bp, unidentified; identical to SEQ ID NO: 30118
  source 1..36: mol_type = unassigned DNA; note = methanogen bacteria

SEQ ID NO: 30324 - DNA, 60 bp, unidentified
  source 1..60: mol_type = unassigned DNA; note = methanogen bacteria
ttggtttcacagagcattgaccctgcaaatgtcggaatcggtattcttggaggtttgggt

SEQ ID NO: 30325 - DNA, 63 bp, unidentified
  source 1..63: mol_type = unassigned DNA; note = methanogen bacteria
ttgggcgctccggcagtaaccgttggaggattgggtgcaacagctcctggacttggtgtaagt

SEQ ID NO: 30326 - DNA, 90 bp, unidentified
  source 1..90: mol_type = unassigned DNA; note = methanogen bacteria
gaagatgtttctcctatggattcactgactatggtttccaatgcatttacaagtaacagttttgatgcttccggaaagatcatgattgga

SEQ ID NO: 30327 - DNA, 87 bp, unidentified
  source 1..87: mol_type = unassigned DNA; note = methanogen bacteria
gagggggtttctcctttagagtccataactatggtttcaaatgcatttacaagtaacagttatgaagcgtctggaaacagtgtagtt

SEQ ID NO: 30328 - DNA, 84 bp, unidentified
  source 1..84: mol_type = unassigned DNA; note = methanogen bacteria
gaaaatgtttctcctatggactctttaaccatggtttccaatgcgtttacaagtaacagttttgatgcatcggggaaaaacgta

SEQ ID NO: 30329 - DNA, 90 bp, unidentified
  source 1..90: mol_type = unassigned DNA; note = methanogen bacteria
gagggagtttctcctattgattcattgaacatggtttccaatgcatttacaagtaacggttatgcagttttaggaacaaccggtctgggt

SEQ ID NO: 30330 - DNA, 90 bp, unidentified
  source 1..90: mol_type = unassigned DNA; note = methanogen bacteria
gaagatgtttcccctcttgattcattgaacatggtttccaatgcatttacaagtaatggttataccgttttaggaacaaccggtattggt

SEQ ID NO: 30331 - DNA, 84 bp, unidentified
  source 1..84: mol_type = unassigned DNA; note = methanogen bacteria
gaaaatgtttctcccatggactccctaactatggtttccaatgcattcacaagcaacagttttgatgcttcaggaaaaaacata

SEQ ID NO: 30332 - DNA, 84 bp, unidentified
  source 1..84: mol_type = unassigned DNA; note = methanogen bacteria
gaaaacgtttctcctatggactccataaccatggtgtccaatgcattcacaagcaacagctttgatgcttcaggaaaaaacata

SEQ ID NO: 30333 - DNA, 90 bp, unidentified
  source 1..90: mol_type = unassigned DNA; note = methanogen bacteria
gaaaatgtttctcctttaaattcacttgtcatggtttccaatgcattcaccagtaatggttattccattttgggatcttcaggatgggga

SEQ ID NO: 30334 - DNA, 63 bp, unidentified
  source 1..63: mol_type = unassigned DNA; note = methanogen bacteria
ttgagctcttcaagcagagatctgatttttaactatagaataatagagttttttctaaatctt

SEQ ID NO: 30335 - DNA, 90 bp, unidentified
  source 1..90: mol_type = unassigned DNA; note = methanogen bacteria
gaacaagtttctccgttaaattcacttgtcatggtttcaaatgcatttaccagtaatggttattcaattttaggtgcttcaggatgggga

SEQ ID NO: 30336 - DNA, 84 bp, unidentified
  source 1..84: mol_type = unassigned DNA; note = methanogen bacteria
gagggtgttgaacctttaaattctgcagttatggtttcaaatgcatttacaagtaacggttatgctgtacttggtaattcaggt

SEQ ID NO: 30337 - DNA, 126 bp, unidentified
  source 1..126: mol_type = unassigned DNA; note = methanogen bacteria
tcactttcatccttctttgccgcaattggagaaaaaggttggaagactatttccagtgcaacatcaccggatgtagctataagtgctattcctgctcatgcttggtcttccttagcaacaggtctt

SEQ ID NO: 30338 - DNA, 48 bp, unidentified
  source 1..48: mol_type = unassigned DNA; note = methanogen bacteria
ggccctgcaagcagaaatttacttaataattttaaaataattgaattt

SEQ ID NO: 30339 - DNA, 87 bp, unidentified
  source 1..87: mol_type = unassigned DNA; note = methanogen bacteria
tctgatttattaaattttccacaatttgatttaatagcattgattatgcatttttcagatactttacgcatgttatttacacataat

SEQ ID NO: 30340 - DNA, 69 bp, unidentified; identical to SEQ ID NO: 30049
  source 1..69: mol_type = unassigned DNA; note = methanogen bacteria

SEQ ID NO: 30341 - DNA, 30 bp, unidentified
  source 1..30: mol_type = unassigned DNA; note = methanogen bacteria
ctgtttggccgtggatggtgtggctatgcc

SEQ ID NO: 30342 - DNA, 90 bp, unidentified
  source 1..90: mol_type = unassigned DNA; note = methanogen bacteria
gaaggtgtttctccaatggattcaatgactatggttaccaatgcatttacaagtaacagttatgaagccagcggaaaaatcatggttgga

SEQ ID NO: 30343 - DNA, 30 bp, unidentified
  source 1..30: mol_type = unassigned DNA; note = methanogen bacteria
ggtatgcttaaagcaggcgcaccaatcggt

SEQ ID NO: 30344 - DNA, 81 bp, unidentified
  source 1..81: mol_type = unassigned DNA; note = methanogen bacteria
ggcggaattgtccctgctgacccaaccaatgctattgctgcaaaagctattgcagtatcagaaggtaaagttaaacttgac

SEQ ID NO: 30345 - DNA, 36 bp, unidentified
  source 1..36: mol_type = unassigned DNA; note = methanogen bacteria
ttgttcttaggcgctaaaggtgtaacttggagtact

SEQ ID NO: 30346 - DNA, 87 bp, unidentified
  source 1..87: mol_type = unassigned DNA; note = methanogen bacteria
gaaagtgttgctcctttagatgcattggttatggtttcaaatgcatttacaagtaacggttatgctatacttggtagtacaggtatt

SEQ ID NO: 30347 - DNA, 84 bp, unidentified
  source 1..84: mol_type = unassigned DNA; note = methanogen bacteria
aaccccaaggcgaagcccaccaccaccttcacccagctcgaagaagagaagaaggccgggaaggactccaaggctcctgccgag

SEQ ID NO: 30348 - DNA, 183 bp, unidentified
  source 1..183: mol_type = unassigned DNA; note = methanogen bacteria
gcctctaccgaaaggaggcgctacgatgcatcctccgagtccaaggaggccgcgcccgccgaggaacccaaggagaaggaggcatcttccttctctgaactggccgacgagaagaaggccaagaaatcctccggaaaggacggcgagggcaagaagctcaagtacgtctcctccagaaggaag

SEQ ID NO: 30349 - DNA, 45 bp, unidentified
  source 1..45: mol_type = unassigned DNA; note = methanogen bacteria
cctacaatcaggaatttaatttataattttagaattattgaattt

SEQ ID NO: 30350 - DNA, 168 bp, unidentified
  source 1..168: mol_type = unassigned DNA; note = methanogen bacteria
atttttcaaatcgaagatttgataaaattcactgatatcggtaaaattatggtgcatgatattaaagcattatccgtattatatgctaatttaatgcgtggtgaatacattataaattcacattataatgagggtaatgtttcaaataacttaactatggttttagat

SEQ ID NO: 30351 - DNA, 30 bp, unidentified
  source 1..30: mol_type = unassigned DNA; note = methanogen bacteria
ggaatgttaaaagcaggcgcacctatgggt

SEQ ID NO: 30352 - DNA, 81 bp, unidentified
  source 1..81: mol_type = unassigned DNA; note = methanogen bacteria
ggcggaattgtccctgctgatccttctaacgctattgccgctaaagcaattgcagtatctgaggccaaagttaaactgagc

SEQ ID NO: 30353 - DNA, 33 bp, unidentified
  source 1..33: mol_type = unassigned DNA; note = methanogen bacteria
ttcttaggcgctgaaggagtaaactggagcagt

SEQ ID NO: 30354 - DNA, 105 bp, unidentified
  source 1..105: mol_type = unassigned DNA; note = methanogen bacteria
gggctgcttcatacagtgcaatctgatatgccaaacatagtgacttcaatgaccaattctggagccgttccagcatttaattatatggttcgcaattccggagca

SEQ ID NO: 30355 - DNA, 117 bp, unidentified
  source 1..117: mol_type = unassigned DNA; note = methanogen bacteria
aactctgaaaacatcctattttccaccttaaaacacatacagggagacttgatgctgtttttttttttttttgtttttttttttttttttgattatttaaaacacatacagggagac

SEQ ID NO: 30356 - DNA, 51 bp, unidentified
  source 1..51: mol_type = unassigned DNA; note = methanogen bacteria
tttgggcaaatcccaatattcccatttacatcattgaaccttccattaaac

SEQ ID NO: 30357 - DNA, 72 bp, unidentified
  source 1..72: mol_type = unassigned DNA; note = methanogen bacteria
ttctatggctctttatacccagattatgttcctattatgggtatgactccaaattcttatgacccatatacc

SEQ ID NO: 30358 - DNA, 33 bp, unidentified
  source 1..33: mol_type = unassigned DNA; note = methanogen bacteria
agcaatttagacttatacctattccaaatgcct

SEQ ID NO: 30359 - DNA, 123 bp, unidentified
  source 1..123: mol_type = unassigned DNA; note = methanogen bacteria
gtattaggaggtattactgaagcaaacacagctttaacaaatatggcccatttatatcctccggatgctttggctgaaggtggtactggttggacaagcttccctaaattgggaacaccattc

SEQ ID NO: 30360 - DNA, 102 bp, unidentified
  source 1..102: mol_type = unassigned DNA; note = methanogen bacteria
aacgtttacttctatcaaaactttggacagatagctattgattatgttggaggaaatatgaattcaatcattccaactttcatttcaacagctcttcctgaa

SEQ ID NO: 30361 - DNA, 30 bp, unidentified
  source 1..30: mol_type = unassigned DNA; note = methanogen bacteria
ggaatgataaaagcaggtgcaccaattggt

SEQ ID NO: 30362 - DNA, 81 bp, unidentified
  source 1..81: mol_type = unassigned DNA; note = methanogen bacteria
ggcggaattgtccctgctgaccctaccaacgctattgctgcaaaagcaattgccgtatcagaaggaaaagttaaactagac

SEQ ID NO: 30363 - DNA, 33 bp, unidentified
  source 1..33: mol_type = unassigned DNA; note = methanogen bacteria
ttcttaggtgctgaaggtgtaaactgggctact

SEQ ID NO: 30364 - DNA, 60 bp, unidentified
  source 1..60: mol_type = unassigned DNA; note = methanogen bacteria
ttgagctcttcaagcagagatttgatttttaactataaaataatagagttttttttaaat

SEQ ID NO: 30365 - DNA, 87 bp, unidentified
  source 1..87: mol_type = unassigned DNA; note = methanogen bacteria
gaaagtgttgctcctttagatgcattggttatggtttcaaatgcatttacaagtaacggttatgctatacttggtaatacgggtatc

SEQ ID NO: 30366 - DNA, 84 bp, unidentified
  source 1..84: mol_type = unassigned DNA; note = methanogen bacteria
gaaggtgttgaccctttaagtgcactggttatggtttcaaatgcatttacaagtaatggttatgcaattcttgggaaatcaggt

SEQ ID NO: 30367 - DNA, 48 bp, unidentified
  source 1..48: mol_type = unassigned DNA; note = methanogen bacteria
atgagttatgtttctcatatagtaggaataatagagcatcatatagcc

SEQ ID NO: 30368 - DNA, 33 bp, unidentified
  source 1..33: mol_type = unassigned DNA; note = methanogen bacteria
atgggaggattcttagctgcatctgcaataggt

SEQ ID NO: 30369 - DNA, 51 bp, unidentified
  source 1..51: mol_type = unassigned DNA; note = methanogen bacteria
gaaatcatggggcttgtatacttcacaaattcagcttacatgaacggtgca

SEQ ID NO: 30370 - DNA, 39 bp, unidentified
  source 1..39: mol_type = unassigned DNA; note = methanogen bacteria
tcttcaagcttcaatccatctttcagcgttgattgggga

SEQ ID NO: 30371 - DNA, 42 bp, unidentified
  source 1..42: mol_type = unassigned DNA; note = methanogen bacteria
tttaatcttccagtagtcgaaatttatacccctatcgaatcc

SEQ ID NO: 30372 - DNA, 57 bp, unidentified
  source 1..57: mol_type = unassigned DNA; note = methanogen bacteria
accagctgcaatcattggagccattgcattgttcatattcatgttttatgctcctgt

SEQ ID NO: 30373 - DNA, 42 bp, unidentified
  source 1..42: mol_type = unassigned DNA; note = methanogen bacteria
gaaatgcaagtatatatgatatcatttgtccaattaccgttg

SEQ ID NO: 30374 - DNA, 87 bp, unidentified
  source 1..87: mol_type = unassigned DNA; note = methanogen bacteria
gaaagtgttgatcctttaaatgcgctggtcatggtttcaaatgcatttacaagtaacggttatgcaatacttggaaaatcaggtgtt

SEQ ID NO: 30375 - DNA, 102 bp, unidentified
  source 1..102: mol_type = unassigned DNA; note = methanogen bacteria
aataatatgatgaatgtggttggttcctccaattttgatttaaaggaaatggtcattgaatctagggggataatgcctcaaaatctgattcataatataggt

SEQ ID NO: 30376 - DNA, 60 bp, unidentified
  source 1..60: mol_type = unassigned DNA; note = methanogen bacteria
atgaatatgctaatagatttcattaaagaaaactttttttatttacatcctggttatact

SEQ ID NO: 30377 - DNA, 42 bp, unidentified
  source 1..42: mol_type = unassigned DNA; note = methanogen bacteria
gttgataatcacgtatatcctcgcattcatttactggcaaca

SEQ ID NO: 30378 - DNA, 69 bp, unidentified
  source 1..69: mol_type = unassigned DNA; note = methanogen bacteria
atggatttctttggttactatgaacagcatgttttacctacatttatgattaatttaacaggcagtgca

SEQ ID NO: 30379 - DNA, 84 bp, unidentified
  source 1..84: mol_type = unassigned DNA; note = methanogen bacteria
gaaaatgttgatcctttaaattcattggttatggtttcaaatgcatttacaagtaatggttatgcaatacttggaaacacaggt

SEQ ID NO: 30380 - DNA, 42 bp, unidentified
  source 1..42: mol_type = unassigned DNA; note = methanogen bacteria
atgttgaatataattacaatgataacaaatccccaaaatgca

SEQ ID NO: 30381 - DNA, 57 bp, unidentified
  source 1..57: mol_type = unassigned DNA; note = methanogen bacteria
ttgtcaaattccattctggattttgttccgtcagtcaatctattcaattccttttta

SEQ ID NO: 30382 - DNA, 84 bp, unidentified
  source 1..84: mol_type = unassigned DNA; note = methanogen bacteria
gaaagtgttgatcctttaagtgcacttgttatggtttcaaatgcatttacaagtaacggttatgcgatacttggaagtactggt

SEQ ID NO: 30383 - DNA, 42 bp, unidentified
  source 1..42: mol_type = unassigned DNA; note = methanogen bacteria
ggaagcttattgtccctttccataaacgatttgaatacattt

SEQ ID NO: 30384 - DNA, 90 bp, unidentified
  source 1..90: mol_type = unassigned DNA; note = methanogen bacteria
gaggatgtttctcctatggattccataactatggtttcaaatgcatttacaagtaatagttttgatcctgcaggaaagtcaatgattgga

SEQ ID NO: 30385 - DNA, 51 bp, unidentified
  source 1..51: mol_type = unassigned DNA; note = methanogen bacteria
gctccggcaagcgtcggccagcttcaggacctgcaggttcatactttcatt

SEQ ID NO: 30386 - DNA, 54 bp, unidentified
  source 1..54: mol_type = unassigned DNA; note = methanogen bacteria
ttgggtcctataagcagagatttgatttataactttagaataggggagtttata

SEQ ID NO: 30387 - DNA, 84 bp, unidentified
  source 1..84: mol_type = unassigned DNA; note = methanogen bacteria
gaaagtgttgatcctttaagtgcattggttatggtttcaaatgcattcacaagtaatggttatgcaatacttggaagtactggt

SEQ ID NO: 30388 - DNA, 54 bp, unidentified
  source 1..54: mol_type = unassigned DNA; note = methanogen bacteria
ggaatgtcaagcattgatatgctatcagatctcagggttcttagttttgcactg

SEQ ID NO: 30389 - DNA, 87 bp, unidentified
  source 1..87: mol_type = unassigned DNA; note = methanogen bacteria
gaaggcgttgagcctttaaattctgctgtaatggtttccaatgcatttacaagtaacggttatgcagtgctcggtaaatccggaatc

SEQ ID NO: 30390 - DNA, 90 bp, unidentified
  source 1..90: mol_type = unassigned DNA; note = methanogen bacteria
tcactggacttcaaacttccagaatttcaattgaaatttgcattgtcccacataatggaaacaatgaaattattctacatacataatcca

SEQ ID NO: 30391 - DNA, 84 bp, unidentified
  source 1..84: mol_type = unassigned DNA; note = methanogen bacteria
gagaacgtttctcctatggactccatgactatggtttccaatgcattcacaagcaacagctttgatgcttcaggaaaaaacatg

SEQ ID NO: 30392 - DNA, 72 bp, unidentified
  source 1..72: mol_type = unassigned DNA; note = methanogen bacteria
aaccccaaggcgaagcccaccaccactttcacccagctggaagaggagaagaaggccgggaaggactccaag

SEQ ID NO: 30393 - DNA, 183 bp, unidentified
  source 1..183: mol_type = unassigned DNA; note = methanogen bacteria
tcctcgaccgagaggaggcgctacaatgcctcttctgagaccgaggaggccgcgcctgccgaggaacccaaggagaaggaggcatcctccttctcggaactggccgacgagaagaaggccaagaaatcctccggaaaggacggagagggcaagaagctcaaatacgtctcttccaggaggaag

SEQ ID NO: 30394 - DNA, 123 bp, unidentified
  source 1..123: mol_type = unassigned DNA; note = methanogen bacteria
ggtgtatacaataatttaggtaactttttaattgcattgaataatactaatatggttaattcaacgccagctgaagtacttagtgctgttcctactgatgtaatgaattcattggttggaagt

SEQ ID NO: 30395 - DNA, 84 bp, unidentified
  source 1..84: mol_type = unassigned DNA; note = methanogen bacteria
gaaagtgttgatcctttaagttcattggtcatggtttcaaatgcatttacaagtaatggttatgcaatacttggaagcacaggt

SEQ ID NO: 30396 - DNA, 63 bp, unidentified
  source 1..63: mol_type = unassigned DNA; note = methanogen bacteria
atgccgacagttgatacttttttacctgaaataattcaaagcacatttttctcaggatatact

SEQ ID NO: 30397 - DNA, 45 bp, unidentified
  source 1..45: mol_type = unassigned DNA; note = methanogen bacteria
gtggacaacggcatctacccaaaaactgtctttttgataactcct

SEQ ID NO: 30398 - DNA, 72 bp, unidentified
  source 1..72: mol_type = unassigned DNA; note = methanogen bacteria
gctgtagattttttcaattattcagaacagcatattttatcaaatgcaatatattcactaactgatacagct

SEQ ID NO: 30399 - DNA, 90 bp, unidentified
  source 1..90: mol_type = unassigned DNA; note = methanogen bacteria
gaagaagtatctcctataaattcaatggttatggtttctaatgcatttacaagtaatggctattccattttaggatcttctggttggggg

SEQ ID NO: 30400 - DNA, 177 bp, unidentified
  source 1..177: mol_type = unassigned DNA; note = methanogen bacteria
ttgcaatgcattgaacttacagccatcttaactggttttgtaggcagcaattcatatgcggacatcagcacaaccgtctcatcactaagtgcctatttgccgttcaattttgatgtaaattcaatttcagcgtccctgaattcatctattcaagaaataggaaggtatgtcctgaac

SEQ ID NO: 30401 - DNA, 48 bp, unidentified
  source 1..48: mol_type = unassigned DNA; note = methanogen bacteria
agctctacaagcagagacctgatttataactataagataattgagttt

SEQ ID NO: 30402 - DNA, 30 bp, unidentified
  source 1..30: mol_type = unassigned DNA; note = methanogen bacteria
ggaatgttagctgcaggtgcacctgtaggt

SEQ ID NO: 30403 - DNA, 78 bp, unidentified
  source 1..78: mol_type = unassigned DNA; note = methanogen bacteria
ggcggtcttttcccagctgattcagcattcgcaaccaaagcgacttctgttgcatccgctaaagtaaaattggcgtgg

SEQ ID NO: 30404 - DNA, 33 bp, unidentified
  source 1..33: mol_type = unassigned DNA; note = methanogen bacteria
ttcttaggtgctaaaggcgtaacttggtctaca

SEQ ID NO: 30405 - DNA, 93 bp, unidentified
  source 1..93: mol_type = unassigned DNA; note = methanogen bacteria
tccgaaggtgcaaatgctctggattcacttgtaattgtttccaatgaattcacaggtaatggatattccgtttttggtgaaacaattcctggc

SEQ ID NO: 30406 - DNA, 60 bp, unidentified
  source 1..60: mol_type = unassigned DNA; note = methanogen bacteria
ggcattaaatcaaataactcaatatctcaaataccatttacacaattgcctgcaggcgac

SEQ ID NO: 30407 - DNA, 42 bp, unidentified
  source 1..42: mol_type = unassigned DNA; note = methanogen bacteria
atgctaagcattgacatgatatcaaatctcagggttcttact

SEQ ID NO: 30408 - DNA, 63 bp, unidentified
  source 1..63: mol_type = unassigned DNA; note = methanogen bacteria
atggctacagtagacagttttctgccagatattatccaaagcacattcttttcaggatacacc

SEQ ID NO: 30409 - DNA, 45 bp, unidentified
  source 1..45: mol_type = unassigned DNA; note = methanogen bacteria
gtagataatgggatttatccaaaaacagtatttttgataactccg

SEQ ID NO: 30410 - DNA, 69 bp, unidentified
  source 1..69: mol_type = unassigned DNA; note = methanogen bacteria
gtagaatatttcaattattcagaacagcatgttttagcaaatggcctatatcaattatttgatacatct

SEQ ID NO: 30411 - DNA, 48 bp, unidentified
  source 1..48: mol_type = unassigned DNA; note = methanogen bacteria
ggagtttcaagcattgatcttcttaaaaacttaaaggttatagaattt

SEQ ID NO: 30412 - DNA, 108 bp, unidentified
  source 1..108: mol_type = unassigned DNA; note = methanogen bacteria
tgctggggcggtgcaatatgtgctgatggcgatgtatacattgacaattccacctttgaaaataattctgcaggagattatggcggtgcgatacatgccgcaaatgtc

SEQ ID NO: 30413 - DNA, 33 bp, unidentified
  source 1..33: mol_type = unassigned DNA; note = methanogen bacteria
tttattcctaattttgaatataacttacctcaa

SEQ ID NO: 30414 - DNA, 153 bp, unidentified
  source 1..153: mol_type = unassigned DNA; note = methanogen bacteria
tatgcactgattcatcacggattcgatataaatagttatttttctttaaatccttcaccaatagactatttacttaactgtatggtatttgatattcttaccccaattggaaacatcttgactacaatacaagttaatggatggaatacttca

SEQ ID NO: 30415 - DNA, 33 bp, unidentified
  source 1..33: mol_type = unassigned DNA; note = methanogen bacteria
attccaaggccagaaaatccgccagcaaatttt

SEQ ID NO: 30416 - DNA, 63 bp, unidentified
  source 1..63: mol_type = unassigned DNA; note = methanogen bacteria
attaaatcagttaacccaatatctcaaataccatttacacaattgcctgcaggccacatatat

SEQ ID NO: 30417 - DNA, 30 bp, unidentified
  source 1..30: mol_type = unassigned DNA; note = methanogen bacteria
ggaatgttggctgcaggtgcacctgtagga

SEQ ID NO: 30418 - DNA, 75 bp, unidentified
  source 1..75: mol_type = unassigned DNA; note = methanogen bacteria
ggaggccttttcccagctaattctgcatttgcaaccaaagcaacggctgttgcagtggcgaaagtcaaaatgcca

SEQ ID NO: 30419 - DNA, 33 bp, unidentified
  source 1..33: mol_type = unassigned DNA; note = methanogen bacteria
ttcttaggtgctgaaggtgtaacctggtctaca

SEQ ID NO: 30420 - DNA, 87 bp, unidentified
  source 1..87: mol_type = unassigned DNA; note = methanogen bacteria
gaagatgtttctcctttggattcaatagtcatggttactaatgcatttacaagtaacagttttgaggcttcaggaaactcaattgtt

SEQ ID NO: 30421 - DNA, 63 bp, unidentified
  source 1..63: mol_type = unassigned DNA; note = methanogen bacteria
atgccgacagttgatacttttttacctgaaataattcaaagcacatttttttcaggatatacg

SEQ ID NO: 30422 - DNA, 48 bp, unidentified
  source 1..48: mol_type = unassigned DNA; note = methanogen bacteria
ttggtggacaatggcatctatccaaaaacagtttttctgataactcct

SEQ ID NO: 30423 - DNA, 72 bp, unidentified
  source 1..72: mol_type = unassigned DNA; note = methanogen bacteria
gctgtagattttttcaattattcagaacagcatgttttatcaaatgcaatatattcactaactgatacagct

SEQ ID NO: 30424 - DNA, 54 bp, unidentified
  source 1..54: mol_type = unassigned DNA; note = methanogen bacteria
agtattccggattttgtttcattttactcaaatcattttataagttcgccgata

SEQ ID NO: 30425 - DNA, 48 bp, unidentified
  source 1..48: mol_type = unassigned DNA; note = methanogen bacteria
ggaccttcaagccttaagatgtttgctgaaatgaaagtccccagtttt

SEQ ID NO: 30426 - DNA, 48 bp, unidentified
  source 1..48: mol_type = unassigned DNA; note = methanogen bacteria
ggtccgacaagcatggatttgctccgtaacttccagattcatactttt

SEQ ID NO: 30427 - DNA, 39 bp, unidentified
  source 1..39: mol_type = unassigned DNA; note = methanogen bacteria
atattcaatgtaagttaccccgcagatattccaacaata

SEQ ID NO: 30428 - DNA, 42 bp, unidentified
  source 1..42: mol_type = unassigned DNA; note = methanogen bacteria
ggagcggtcatgtccctttcagtaaatgatttaaattcattt

SEQ ID NO: 30429 - DNA, 93 bp, unidentified
  source 1..93: mol_type = unassigned DNA; note = methanogen bacteria
agtgaacatgtaaatgctttagatgcacttgtaatggtttctaattcctttacaagtaatggatatgcagttttaggtaattcaatagcaggt

SEQ ID NO: 30430 - DNA, 90 bp, unidentified
  source 1..90: mol_type = unassigned DNA; note = methanogen bacteria
ggtacatcttacggtttgtttgatgatttttattttgtaattgttaccttgactactgtaggttatggggatgtagttccacagacatac

SEQ ID NO: 30431 - DNA, 108 bp, unidentified
  source 1..108: mol_type = unassigned DNA; note = methanogen bacteria
gtatttgcaggtgcaaaaagcctgacacaggcaattacagttttatggaccattaatgttccttggatgtgggcatatcatggaaatgtaatagctccatgggtttca

SEQ ID NO: 30432 - DNA, 93 bp, unidentified
  source 1..93: mol_type = unassigned DNA; note = methanogen bacteria
gctgaaggagtaaatgctttagattcccttgtgatgatttccaatcaatttacaggtaatggatttgctgtttttggcaattctattccgggt

SEQ ID NO: 30433 - DNA, 90 bp, unidentified
  source 1..90: mol_type = unassigned DNA; note = methanogen bacteria
gaggacgtttctcctcttgattcactgaatatggtttcaaatgcctttaccagtaatggatataccgttttgggccagtccggtttgggc

SEQ ID NO: 30434 - DNA, 45 bp, unidentified
  source 1..45: mol_type = unassigned DNA; note = methanogen bacteria
atggatttcacatctcaaatattggacgttatgtttcatcttttt

SEQ ID NO: 30435 - DNA, 87 bp, unidentified
  source 1..87: mol_type = unassigned DNA; note = methanogen bacteria
tttgatttgcccctatttgatttgcatcacctgctgttgaacttagatgaaacaattgaaatgttctttgtcaacagcccggaattt

SEQ ID NO: 30436 - DNA, 54 bp, unidentified
  source 1..54: mol_type = unassigned DNA; note = methanogen bacteria
ttaggctcatcagcgggtgatcttctttttgactttaaaatccctaactttcta

SEQ ID NO: 30437 - DNA, 93 bp, unidentified
  source 1..93: mol_type = unassigned DNA; note = methanogen bacteria
tcaagaagattctttttgcctgaatttcacttgaagtttgcactatcacatataatgaatacattaaaaatgtattatctatatgaccctgtc

SEQ ID NO: 30438 - DNA, 60 bp, unidentified
  source 1..60: mol_type = unassigned DNA; note = methanogen bacteria
acatacttcgattactcgctcgccttcgggctgagcgaaggccgcaatgccctgagatcg

SEQ ID NO: 30439 - DNA, 42 bp, unidentified
  source 1..42: mol_type = unassigned DNA; note = methanogen bacteria
tatttcatcatgttcttcaacggggagctctccaccggaagg

SEQ ID NO: 30440 - DNA, 51 bp, unidentified
  source 1..51: mol_type = unassigned DNA; note = methanogen bacteria
tacggcaacttcgacggagggatctcggacttcctcaccgggaggcacgcc

SEQ ID NO: 30441 - DNA, 66 bp, unidentified
  source 1..66: mol_type = unassigned DNA; note = methanogen bacteria
tttattgttgatgaatcaaatctaccatcatctactgctgagataatgacatttgtatctcaaaac

SEQ ID NO: 30442 - DNA, 51 bp, unidentified
  source 1..51: mol_type = unassigned DNA; note = methanogen bacteria
tttatatttgctggatcaggtgcacatgtttcaactttaatggcacaatta

SEQ ID NO: 30443 - DNA, 36 bp, unidentified
  source 1..36: mol_type = unassigned DNA; note = methanogen bacteria
gccggtggtgttactagtagtaacagtgctattttc

SEQ ID NO: 30444 - DNA, 30 bp, unidentified
  source 1..30: mol_type = unassigned DNA; note = methanogen bacteria
atatttgatctttcaccaacattttatcat

SEQ ID NO: 30445 - DNA, 96 bp, unidentified
  source 1..96: mol_type = unassigned DNA; note = methanogen bacteria
attgatccgagtatgaataatatatttgataacttgtggtttgttgttgttagtttaacaactgttggttatggtgatattactccaaatacaatc

SEQ ID NO: 30446 - DNA, 60 bp, unidentified
  source 1..60: mol_type = unassigned DNA; note = methanogen bacteria
gaggacattttaacttatatgggagcaacttcttcaatggatctgtcaatgcagtatttg

SEQ ID NO: 30447 - DNA, 30 bp, unidentified
  source 1..30: mol_type = unassigned DNA; note = methanogen bacteria
atcgaacagcttggccaaattggtgtactg

SEQ ID NO: 30448 - DNA, 30 bp, unidentified
  source 1..30: mol_type = unassigned DNA; note = methanogen bacteria
atgaatgtggcggatattataaatcaaccg

SEQ ID NO: 30449 - DNA, 93 bp, unidentified
  source 1..93: mol_type = unassigned DNA; note = methanogen bacteria
gcagaacatgtcaatgcacttgattcacttgtaatggtgtcaaatgcatttacaagtaatggatatactgttttgggaaaaacaattcctggt

SEQ ID NO: 30450 - DNA, 57 bp, unidentified
  source 1..57: mol_type = unassigned DNA; note = methanogen bacteria
ttgggcgtttcaggcattgattcattgtctcattttcaggtttccggtttagcatct

SEQ ID NO: 30451 - DNA, 57 bp, unidentified
  source 1..57: mol_type = unassigned DNA; note = methanogen bacteria
atgtctttaatagaactaatacgtgataactttttttacctagaaccgggttacact

SEQ ID NO: 30452 - DNA, 42 bp, unidentified
  source 1..42: mol_type = unassigned DNA; note = methanogen bacteria
gttgataataatatatatcctttaattcatttacttgtaacg

SEQ ID NO: 30453 - DNA, 69 bp, unidentified
  source 1..69: mol_type = unassigned DNA; note = methanogen bacteria
gttgacttttttggatactgggaacaacatgttctcccatcaatattaactagtttaactggaactgca

SEQ ID NO: 30454 - DNA, 30 bp, unidentified
  source 1..30: mol_type = unassigned DNA; note = methanogen bacteria
gttactaatgttccttatgggttatatcaa

SEQ ID NO: 30455 - DNA, 96 bp, unidentified
  source 1..96: mol_type = unassigned DNA; note = methanogen bacteria
gttgatcccaccatgaataatctgtttaatgatttgtggtttgttattgttagtataacaacagtaggatatggggatgtgattccaaatacccta

SEQ ID NO: 30456 - DNA, 96 bp, unidentified
  source 1..96: mol_type = unassigned DNA; note = methanogen bacteria
tcttctcctctggggtttcctccatttgatttggaggatatgttgatggatgctcccgaaaccgttcagttattgatttcacatagtcctgttgat

SEQ ID NO: 30457 - DNA, 48 bp, unidentified
  source 1..48: mol_type = unassigned DNA; note = methanogen bacteria
gacaatgaagtaaggcatatcgttaggcaatccactccagtcctgcaa

SEQ ID NO: 30458 - DNA, 33 bp, unidentified
  source 1..33: mol_type = unassigned DNA; note = methanogen bacteria
acaatagctttcaataacattggtgtcggatac

SEQ ID NO: 30459 - DNA, 60 bp, unidentified
  source 1..60: mol_type = unassigned DNA; note = methanogen bacteria
gcagttccgacagtttccgaaataagctcaggagctgccttaaacgagtattttataaac

SEQ ID NO: 30460 - DNA, 93 bp, unidentified
  source 1..93: mol_type = unassigned DNA; note = methanogen bacteria
acatttttccaatttcctgtctttgatttacataagatattttttgacttctatgatacttttcagttattaatttatagtaatcctaaagat

SEQ ID NO: 30461 - DNA, 84 bp, unidentified
  source 1..84: mol_type = unassigned DNA; note = methanogen bacteria
gaaagtgttgatccgttaagttcattggttatggtttcaaatgcatttacaagtaacggttatgcaattcttggaagcactggt

SEQ ID NO: 30462 - DNA, 60 bp, unidentified
  source 1..60: mol_type = unassigned DNA; note = methanogen bacteria
gcagttccagcagtcacacaaataacatcccatgctaccttgaattcatatgttattagc

SEQ ID NO: 30463 - DNA, 63 bp, unidentified
  source 1..63: mol_type = unassigned DNA; note = methanogen bacteria
gcagttccggcagtctcaaacataacatcccacgctgccgttaattcatatattatgaactat

SEQ ID NO: 30464 - DNA, 90 bp, unidentified
  source 1..90: mol_type = unassigned DNA; note = methanogen bacteria
gacccgtcactgaatatggtagatagcctatggtttgtaatgagcacattaacgactgtgggatatggtgatgtcactccgaatactctg

SEQ ID NO: 30465 - DNA, 36 bp, unidentified
  source 1..36: mol_type = unassigned DNA; note = methanogen bacteria
ccacaaattgcacagtattttaatgtagacataacc

SEQ ID NO: 30466 - DNA, 36 bp, unidentified
  source 1..36: mol_type = unassigned DNA; note = methanogen bacteria
gaatttttaaacaccctaacccacataatcggaaca

SEQ ID NO: 30467 - DNA, 90 bp, unidentified
  source 1..90: mol_type = unassigned DNA; note = methanogen bacteria
gtggaagacaccggaccactgaacgcacttgtcatggtttcaaatgcatttacaagtaacggatatgcagtccttggtaaatcaagtctg

SEQ ID NO: 30468 - DNA, 30 bp, unidentified
  source 1..30: mol_type = unassigned DNA; note = methanogen bacteria
atctttgacgtttcaaatgaattctatcaa

SEQ ID NO: 30469 - DNA, 96 bp, unidentified
  source 1..96: mol_type = unassigned DNA; note = methanogen bacteria
attgatccgggaatgaacaacctttttgacaatctgtggtttgttgttgtaagccttacgacagtcggttatggagacatcactccccattctgtt

SEQ ID NO: 30470 - DNA, 90 bp, unidentified
  source 1..90: mol_type = unassigned DNA; note = methanogen bacteria
gtggaaaacaccggacctctgaatgcactggtcatggtttcaaatgcatttacaagtaacggatatgcagttctcggcaaatcaagtctg

SEQ ID NO: 30471 - DNA, 84 bp, unidentified
  source 1..84: mol_type = unassigned DNA; note = methanogen bacteria
gaaggtgtcgatcctttaagtgcactggttatggtttcaaatgcgtttacaagtaacggttatgcaatacttggaaaatccggt

SEQ ID NO: 30472 - DNA, 96 bp, unidentified
  source 1..96: mol_type = unassigned DNA; note = methanogen bacteria
attgatccgtcaatgaacaatctctttgacaacctgtggtttgtggttgtcagtataaccactgtaggatatggggatatcactccaaacaccata

SEQ ID NO: 30473 - DNA, 48 bp, unidentified
  source 1..48: mol_type = unassigned DNA; note = methanogen bacteria
ggtccgattaaaatacctcttacaaaaggtgttgaagtttcaataatg

SEQ ID NO: 30474 - DNA, 30 bp, unidentified
  source 1..30: mol_type = unassigned DNA; note = methanogen bacteria
ggacaatcaatgcatcttctctttgaaatg

SEQ ID NO: 30475 - DNA, 123 bp, unidentified
  source 1..123: mol_type = unassigned DNA; note = methanogen bacteria
tctattttgccgttgcatccatatgcatttgctatggcttctggtgtgggaagtgcaagtatgaatgcagcatcactgggtccgactctggcggcatttccgggattggaaactcaaattgag

SEQ ID NO: 30476 - DNA, 93 bp, unidentified
  source 1..93: mol_type = unassigned DNA; note = methanogen bacteria
gttgaaggcgttaatatgcttgatgcattagtaatgagttccaatgcttttaccagtaatggttatgccgttttaggaaatagtgttcctgga

SEQ ID NO: 30477 - DNA, 114 bp, unidentified
  source 1..114: mol_type = unassigned DNA; note = methanogen bacteria
ttggtatttgcaggaaccaaaagcctttcacaggcagttactgttctttggacatttaacgttccttggtcattggcatatcacggaaatataatagctccgtgggtttcacag

SEQ ID NO: 30478 - DNA, 48 bp, unidentified
  source 1..48: mol_type = unassigned DNA; note = methanogen bacteria
ggtcctacaagcattgatttgattcgcaactttcagattcatacattt

SEQ ID NO: 30479 - DNA, 105 bp, unidentified
  source 1..105: mol_type = unassigned DNA; note = methanogen bacteria
ggttacatgtcccttcaatcaggaacacccgtttccgaaattgtttcacaaggaacaaccctgatttttgtagtatacccccaagtattcaatattctaggaaca

SEQ ID NO: 30480 - DNA, 75 bp, unidentified
  source 1..75: mol_type = unassigned DNA; note = methanogen bacteria
gtatcttattttccccagttaatgtttctggtaaatttttcactgccttcaatggcaattatagacactttgcct

SEQ ID NO: 30481 - DNA, 33 bp, unidentified
  source 1..33: mol_type = unassigned DNA; note = methanogen bacteria
ttggttgatgttcatgaggtattatttaacaat

SEQ ID NO: 30482 - DNA, 90 bp, unidentified
  source 1..90: mol_type = unassigned DNA; note = methanogen bacteria
gctgagaacaaaagtgcactggattcactggtaatggtttccaatgcttttacaagtaatggttatgcagttctcggtaattccattttc

SEQ ID NO: 30483 - DNA, 60 bp, unidentified
  source 1..60: mol_type = unassigned DNA; note = methanogen bacteria
gatatgattcatatatcttcacctgtactcgtgaatgaatctactacaacaattttttca

SEQ ID NO: 30484 - DNA, 30 bp, unidentified
  source 1..30: mol_type = unassigned DNA; note = methanogen bacteria
gagaggagctgggacaacggcgtctccgag

SEQ ID NO: 30485 - DNA, 30 bp, unidentified
  source 1..30: mol_type = unassigned DNA; note = methanogen bacteria
ctggtagttctcaccaagattccagctgac

SEQ ID NO: 30486 - DNA, 216 bp, unidentified
  source 1..216: mol_type = unassigned DNA; note = methanogen bacteria
tttgactcatataaaacggcacttgtccaaactattatgaaggcggatatgcaaagtcgtattatctatatcagtgctgattcgtggaatgctagtgggtatttggatgatagaggtttgtatttggatgatgagatacatctgaatgctaaaggttatgaagtgttagattcttgtattgcgtcggagattcttaaggatataaagaagaaacaa

SEQ ID NO: 30487 - DNA, 96 bp, unidentified
  source 1..96: mol_type = unassigned DNA; note = methanogen bacteria
tcttctccttttgggtttcctccatttgatttggaagatctgttaatggacgctcctgaaaccgttcatttattgctttcacacagtttcgttgat

SEQ ID NO: 30488 - DNA, 60 bp, unidentified
  source 1..60: mol_type = unassigned DNA; note = methanogen bacteria
gcggttccaactgttgcagaaatacagtcaggtgctaatttaactgattacttaatatcc

SEQ ID NO: 30489 - DNA, 87 bp, unidentified
  source 1..87: mol_type = unassigned DNA; note = methanogen bacteria
tcattttttggatttcctttgtttaatttagaagaaatgctattaaaattcgatcaaacacttcatttgttttttatacacaatccg

SEQ ID NO: 30490 - DNA, 48 bp, unidentified
  source 1..48: mol_type = unassigned DNA; note = methanogen bacteria
tttatgcaatctgtctatgaaggtctgttttcttggacaaaaggtggt

SEQ ID NO: 30491 - DNA, 30 bp, unidentified
  source 1..30: mol_type = unassigned DNA; note = methanogen bacteria
gaaaggaccctcgtcgccggccactcgctg

SEQ ID NO: 30492 - DNA, 33 bp, unidentified
  source 1..33: mol_type = unassigned DNA; note = methanogen bacteria
aattttattaatgacttattaaattcaacatat

SEQ ID NO: 30493 - DNA, 39 bp, unidentified
  source 1..39: mol_type = unassigned DNA; note = methanogen bacteria
ctgaacgggatcgaggaggagttcggggcaggcaaactg

SEQ ID NO: 30494 - DNA, 45 bp, unidentified
  source 1..45: mol_type = unassigned DNA; note = methanogen bacteria
gcggacatagactggaaatcgccgttcctcgtctacgcgatcggc

SEQ ID NO: 30495 - DNA, 93 bp, unidentified
  source 1..93: mol_type = unassigned DNA; note = methanogen bacteria
tctgaaggtgtgaatgccttggattcccttgtaattgtttccaatcaatttacgggtaatggttattctgcttttggtaataccgtttccggt

SEQ ID NO: 30496 - DNA, 93 bp, unidentified
  source 1..93: mol_type = unassigned DNA; note = methanogen bacteria
actgaaggtaaaaatcctttggatgccctggtaatggtttccaatgcattcacaagtaatggatatgccgttttaggcaactcaattcctgga

SEQ ID NO: 30497 - DNA, 48 bp, unidentified
  source 1..48: mol_type = unassigned DNA; note = methanogen bacteria
ggtccgacaagcgttgatttgcttcgtaacttccagattcatacattt

SEQ ID NO: 30498 - DNA, 90 bp, unidentified
  source 1..90: mol_type = unassigned DNA; note = methanogen bacteria
gagaataaaaatccattagattcacttgttatggtttctaatgcattcaccagtaacggttatgctgtgttaggttcatccattgctggg

SEQ ID NO: 30499 - DNA, 84 bp, unidentified
  source 1..84: mol_type = unassigned DNA; note = methanogen bacteria
ttgggattgttttcttcatatatcttgccgggacctattgatgtaatcaattctgcatgggtagttattcaaaatggaaaattg

SEQ ID NO: 30500 - DNA, 60 bp, unidentified; identical to SEQ ID NO: 29990
  source 1..60: mol_type = unassigned DNA; note = methanogen bacteria

SEQ ID NO: 30501 - DNA, 93 bp, unidentified
  source 1..93: mol_type = unassigned DNA; note = methanogen bacteria
gctgaaggtgctaatgcattagattcccttgtaattgtttccaatcaatttacaggtaatggatattcttcttttggcaataccatttcgggc

SEQ ID NO: 30502 - DNA, 90 bp, unidentified
  source 1..90: mol_type = unassigned DNA; note = methanogen bacteria
ttgggattgttttcttcatatatcttaccgggacctattgatgtagtcaagtctgctgtggttgttattcaaaatggaaaattactcacc

SEQ ID NO: 30503 - DNA, 60 bp, unidentified
  source 1..60: mol_type = unassigned DNA; note = methanogen bacteria
ggttcaagtagtggtttaggttatatgattttaaccgcaacaaatctctttgatacaggt

SEQ ID NO: 30504 - DNA, 87 bp, unidentified
  source 1..87: mol_type = unassigned DNA; note = methanogen bacteria
gaaaataaggatcctttagattcttttgtaatggtttccaatgcttttaccagtaatggatattctgttttgggtaattctactctt

SEQ ID NO: 30505 - DNA, 90 bp, unidentified
  source 1..90: mol_type = unassigned DNA; note = methanogen bacteria
ttaggtattgttaatccatacattcttccaggcccaattaccgtttgccaatccgcttgggagttaataatgaatggaaaacttcttaca

SEQ ID NO: 30506 - DNA, 60 bp, unidentified
  source 1..60: mol_type = unassigned DNA; note = methanogen bacteria
ggttcaagtagcggtttaggttatatgattttaactgcaaccagtttatttgatccaggt

SEQ ID NO: 30507 - DNA, 30 bp, unidentified
  source 1..30: mol_type = unassigned DNA; note = methanogen bacteria
tcaaatgtaaattcatccaacgatattgct

SEQ ID NO: 30508 - DNA, 30 bp, unidentified
  source 1..30: mol_type = unassigned DNA; note = methanogen bacteria
ttagtaggtcatgaaatacagctaggaacc

SEQ ID NO: 30509 - DNA, 93 bp, unidentified
  source 1..93: mol_type = unassigned DNA; note = methanogen bacteria
gttgaaaataaaaatcctttagattcacttgtcatggtttcaaatgcatttaccagtaatggttatgcagtgttaggttcatccattccgggt

SEQ ID NO: 30510 - DNA, 48 bp, unidentified
  source 1..48: mol_type = unassigned DNA; note = methanogen bacteria
ggcatgtctgctgttgatatgataagggactttaaactgccttcttta

SEQ ID NO: 30511 - DNA, 93 bp, unidentified
  source 1..93: mol_type = unassigned DNA; note = methanogen bacteria
gctgaaggtgcaaatgcattagattcccttgtaattgtttccaatcagtttacaggtaatggatattctgcttttggcaatactatttctggc

SEQ ID NO: 30512 - DNA, 48 bp, unidentified
  source 1..48: mol_type = unassigned DNA; note = methanogen bacteria
atgacaacatcagactggttcgaagctattttagcaaatttatttgat

SEQ ID NO: 30513 - DNA, 93 bp, unidentified
  source 1..93: mol_type = unassigned DNA; note = methanogen bacteria
tctgaaggcgtaaatgccttggattctatagtaatcgtttccaatcaattcacaggcaatgggtattctgtttttggaaataccatttccggc

SEQ ID NO: 30514 - DNA, 42 bp, unidentified
  source 1..42: mol_type = unassigned DNA; note = methanogen bacteria
aggtgggggatggacagcatcttcgggttcgatttcgatccg

SEQ ID NO: 30515 - DNA, 33 bp, unidentified
  source 1..33: mol_type = unassigned DNA; note = methanogen bacteria
cttcacgaaactgtagaagctgagttcgatttc

SEQ ID NO: 30516 - DNA, 93 bp, unidentified
  source 1..93: mol_type = unassigned DNA; note = methanogen bacteria
tctgaaggtaaaaatgccttggattcccttgtaatcgtttccaatcagtttacaggtaatgggtattctgtttttggcagtactatttccggt

SEQ ID NO: 30517 - DNA, 93 bp, unidentified
  source 1..93: mol_type = unassigned DNA; note = methanogen bacteria
gcagaaggtgcgaatgccttagattctcttgtaattgtttccaatcaatttacaggtaatgggtattctgcttttggtaatactatttctggt

SEQ ID NO: 30518 - DNA, 87 bp, unidentified
  source 1..87: mol_type = unassigned DNA; note = methanogen bacteria
gagagagtcaatccgcttgacgcacttgttatggtttccaatgcatttacaagtaacggttatgccgttttgggccattcgattttg

SEQ ID NO: 30519 - DNA, 105 bp, unidentified
  source 1..105: mol_type = unassigned DNA; note = methanogen bacteria
acctccggctttgcattcaccaggctcgctggcctgaataatgtggaaaatgcaacagccgccgaagccgcaagccaaatcttcacaccggatttcatagccgca

SEQ ID NO: 30520 - DNA, 93 bp, unidentified
  source 1..93: mol_type = unassigned DNA; note = methanogen bacteria
tgctccccattcaattttccagctttcgacttggaggaaatgttgctgttgtggcctgagacaattcatatgatatacactcacaatcctgtc

SEQ ID NO: 30521 - DNA, 42 bp, unidentified
  source 1..42: mol_type = unassigned DNA; note = methanogen bacteria
cggtggggcatggacagcatcttcgggttcggcttcgacccc

SEQ ID NO: 30522 - DNA, 93 bp, unidentified
  source 1..93: mol_type = unassigned DNA; note = methanogen bacteria
tctgaacgtgtaaatgccttggattcccttgtaattgtttccaatcaatttacaggtaatgggtattctgtttttggaaattctatttccggc

SEQ ID NO: 30523 - DNA, 39 bp, unidentified
  source 1..39: mol_type = unassigned DNA; note = methanogen bacteria
atgctggatattgttaatattttaaatcaaatagataac

SEQ ID NO: 30524 - DNA, 33 bp, unidentified
  source 1..33: mol_type = unassigned DNA; note = methanogen bacteria
tcaacattcatggactactcattctacaatcct

SEQ ID NO: 30525 - DNA, 84 bp, unidentified
  source 1..84: mol_type = unassigned DNA; note = methanogen bacteria
ctatgtcatagtggctttgattgtgattctggtcaattatgcaaatattcctgcaatgtttgtccttatcttccaggatgcttt

SEQ ID NO: 30526 - DNA, 36 bp, unidentified
  source 1..36: mol_type = unassigned DNA; note = methanogen bacteria
attcttccggcggtcatacctggcgttggacttttg

SEQ ID NO: 30527 - DNA, 90 bp, unidentified
  source 1..90: mol_type = unassigned DNA; note = methanogen bacteria
ggtccaacctacggattatatgatgatttttattttgtaatggtgacccttacgaccgtagggtatggagacatcattccagtaaccctc

SEQ ID NO: 30528 - DNA, 93 bp, unidentified
  source 1..93: mol_type = unassigned DNA; note = methanogen bacteria
tctgaaggtgtaaatgctttggattcacttgtaattgtttccaatgaattcactggtaatgggtatgctgtttttggcgatactattccgggc

SEQ ID NO: 30529 - DNA, 90 bp, unidentified
  source 1..90: mol_type = unassigned DNA; note = methanogen bacteria
gctgaaagtgtaaatgctttggactctcttgtaatgatttccaatgagttcactggtaatggttatggaattttcggtgcaaccatcctt

SEQ ID NO: 30530 - DNA, 93 bp, unidentified
  source 1..93: mol_type = unassigned DNA; note = methanogen bacteria
gctgaaggcgaaaatgcattggattcacttgtaattgtttctaatcaatttacaggtaatgggtattcttcatttgggagcactatttctggc

SEQ ID NO: 30531 - DNA, 54 bp, unidentified
  source 1..54: mol_type = unassigned DNA; note = methanogen bacteria
attgcagatagcattcatcctggaaatgcgggaataggtattttaggtggtctt

SEQ ID NO: 30532 - DNA, 66 bp, unidentified
  source 1..66: mol_type = unassigned DNA; note = methanogen bacteria
cttggaagcggtgcagtaactatcggagcattaggagctaccgcaccaggattaggtgttggatac

SEQ ID NO: 30533 - DNA, 90 bp, unidentified
  source 1..90: mol_type = unassigned DNA; note = methanogen bacteria
gaaggaaaagatgcattggattctttggtaatggtttctaacgcatttacaagtaacggttatgctgttttaggtaactcaattcctggc

SEQ ID NO: 30534 - DNA, 30 bp, unidentified
  source 1..30: mol_type = unassigned DNA; note = methanogen bacteria
ttttcaaatggaataaacctagattacaat

SEQ ID NO: 30535 - DNA, 30 bp, unidentified
  source 1..30: mol_type = unassigned DNA; note = methanogen bacteria
ggagaactactatacagcaatctggaatca

SEQ ID NO: 30536 - DNA, 93 bp, unidentified
  source 1..93: mol_type = unassigned DNA; note = methanogen bacteria
gccgaaggtgctaatgccttagattcccttgtaattgtttccaatcaatttacaggcaatggttattctgcttttggcaatactatttctggc

SEQ ID NO: 30537 - DNA, 93 bp, unidentified
  source 1..93: mol_type = unassigned DNA; note = methanogen bacteria
gttgagcataaaaatcctttggatgcattggttatggtttctaatgcttttacaagtaacggttatgctgttttgggaaagtccattcccgga

SEQ ID NO: 30538 - DNA, 93 bp, unidentified
  source 1..93: mol_type = unassigned DNA; note = methanogen bacteria
gctgaaggtgctaatgcattggattcccttgtaattgtttccaatcaatttacaggtaatggatattctgcttttggtaatactgtttctggt

SEQ ID NO: 30539 - DNA, 48 bp, unidentified
  source 1..48: mol_type = unassigned DNA; note = methanogen bacteria
tctccggtcaaggagcctaccgttgaattgcttgcaagaacctctccg

SEQ ID NO: 30540 - DNA, 48 bp, unidentified
  source 1..48: mol_type = unassigned DNA; note = methanogen bacteria
attgcagcttcattttctacaaaaggttttgccggatttgcttttagc

SEQ ID NO: 30541 - DNA, 33 bp, unidentified
  source 1..33: mol_type = unassigned DNA; note = methanogen bacteria
ttaaaattaaatttcctaacttctctatcaaat

SEQ ID NO: 30542 - DNA, 102 bp, unidentified
  source 1..102: mol_type = unassigned DNA; note = methanogen bacteria
cattatcttttaatttttataaattttttaaagtattatttatttataaaattttataatctttttaataatttatcatatttcgtcacgattcatttattt

SEQ ID NO: 30543 - DNA, 75 bp, unidentified
  source 1..75: mol_type = unassigned DNA; note = methanogen bacteria
gatcatattcctggattcaggtcattaatattcgcaccaatattttcaattttggcaatcacttcgcttgcagga

SEQ ID NO: 30544 - DNA, 33 bp, unidentified
  source 1..33: mol_type = unassigned DNA; note = methanogen bacteria
catattgattctggaaatttgatttttacaaat

SEQ ID NO: 30545 - DNA, 39 bp, unidentified
  source 1..39: mol_type = unassigned DNA; note = methanogen bacteria
gtttatttaatgagagacttctcagttagctcaacacaa

SEQ ID NO: 30546 - DNA, 75 bp, unidentified
  source 1..75: mol_type = unassigned DNA; note = methanogen bacteria
caggataatattcctgggttaaattcatttttggccatgtctatacttcctttactgccaattaattcactcttt

SEQ ID NO: 30547 - DNA, 93 bp, unidentified
  source 1..93: mol_type = unassigned DNA; note = methanogen bacteria
gttgaaaatgccaatgctgtcgattcacttgtcatggtttccaatgcatttacaagtaacggatatgctattttgggccaatccattccgggc

SEQ ID NO: 30548 - DNA, 81 bp, unidentified
  source 1..81: mol_type = unassigned DNA; note = methanogen bacteria
ttcaaccccgacaacggcgacctttacgagttcatgtcgggattctactggttcatcagctacctgggagtggacataaac

SEQ ID NO: 30549 - DNA, 48 bp, unidentified
  source 1..48: mol_type = unassigned DNA; note = methanogen bacteria
tctccggttaaggagccgactgtagaacttatagcaagaacatctcca

SEQ ID NO: 30550 - DNA, 72 bp, unidentified
  source 1..72: mol_type = unassigned DNA; note = methanogen bacteria
gataatattcctgcgttaaattcatttttgggcatgtctatacttcctttactgccaattaattctctcctt

SEQ ID NO: 30551 - DNA, 30 bp, unidentified
  source 1..30: mol_type = unassigned DNA; note = methanogen bacteria
atggattccggaaatttgatttttacaaat

SEQ ID NO: 30552 - DNA, 66 bp, unidentified
  source 1..66: mol_type = unassigned DNA; note = methanogen bacteria
aatgcaatatacggatggaattttataatgcaaattgcaactggcggatatgaagtattaaatact

SEQ ID NO: 30553 - DNA, 30 bp, unidentified
  source 1..30: mol_type = unassigned DNA; note = methanogen bacteria
cgaggatcaataggtactaaccattttaca

SEQ ID NO: 30554 - DNA, 84 bp, unidentified
  source 1..84: mol_type = unassigned DNA; note = methanogen bacteria
tataatagtcttggaacaaataatctaagcatttgtttatttgtaatgtttggtcttcactcaacatcttcaacactggaatta

SEQ ID NO: 30555 - DNA, 45 bp, unidentified
  source 1..45: mol_type = unassigned DNA; note = methanogen bacteria
acaatcaaaattcctatcacccatgatgttgccattaccataatg

SEQ ID NO: 30556 - DNA, 30 bp, unidentified
  source 1..30: mol_type = unassigned DNA; note = methanogen bacteria
ggacagtctataactttaatatttgagatg

SEQ ID NO: 30557 - DNA, 123 bp, unidentified
  source 1..123: mol_type = unassigned DNA; note = methanogen bacteria
tcatttttaccgttgcacccatatgcattcgctatggccagtggtgtgggaagtgcaagtatgaatgctgcggctattgggccgactcttgcagcatttccgggaatggaaacccagattgaa

SEQ ID NO: 30558 - DNA, 93 bp, unidentified
  source 1..93: mol_type = unassigned DNA; note = methanogen bacteria
gttgaaaaggccaatgcagttgattctcttgtaatggtttccaatgcatttacaagtaacggatatgttgttttgggccaatccattcctggt

SEQ ID NO: 30559 - DNA, 69 bp, unidentified
  source 1..69: mol_type = unassigned DNA; note = methanogen bacteria
gacaacattccgggatttagggaattggtttatgctccattattttcgattgttggcatgaattatctt

SEQ ID NO: 30560 - DNA, 30 bp, unidentified
  source 1..30: mol_type = unassigned DNA; note = methanogen bacteria
cttgattccggaaacttaatttttacaaat

SEQ ID NO: 30561 - DNA, 45 bp, unidentified
  source 1..45: mol_type = unassigned DNA; note = methanogen bacteria
actatcgaaattccactcaccaaagatgttgcaatcacaataatg

SEQ ID NO: 30562 - DNA, 30 bp, unidentified
  source 1..30: mol_type = unassigned DNA; note = methanogen bacteria
ggtcagtcaattggtttaatttttgatatg

SEQ ID NO: 30563 - DNA, 123 bp, unidentified
  source 1..123: mol_type = unassigned DNA; note = methanogen bacteria
tcattcctgcctctgcacccttatgcatttgcaatggcaagcggtgttggaagtgcaagtatgaatgcagctgctattggaccgacacttgcggcatttcctggaatggaaactcaaattgaa

SEQ ID NO: 30564 - DNA, 48 bp, unidentified
  source 1..48: mol_type = unassigned DNA; note = methanogen bacteria
tctccggttaaagaacccacagcagaactgcttgcaagaacatctccg

SEQ ID NO: 30565 - DNA, 93 bp, unidentified
  source 1..93: mol_type = unassigned DNA; note = methanogen bacteria
ttcggttcatcatattcactttttgattatttctattttgttatcgtgacacttgcaaccgtagggtatggcgatattgttcctttaacattt

SEQ ID NO: 30566 - DNA, 57 bp, unidentified
  source 1..57: mol_type = unassigned DNA; note = methanogen bacteria
gcccttccggaacttcagattgctaactattctgatttcatactcttcattacaaca

SEQ ID NO: 30567 - DNA, 45 bp, unidentified
  source 1..45: mol_type = unassigned DNA; note = methanogen bacteria
actatagaaattccaatcactaaagatgttgcaattacaataatg

SEQ ID NO: 30568 - DNA, 30 bp, unidentified
  source 1..30: mol_type = unassigned DNA; note = methanogen bacteria
ggacagtcaataggtttaatttttcaaatg

SEQ ID NO: 30569 - DNA, 123 bp, unidentified
  source 1..123: mol_type = unassigned DNA; note = methanogen bacteria
tcgttccttcctttgcatccatatgcatttgcgatggcaagtggtgtgggtagcgcaagtatgaatgcagctgcaatcggtccgactctggcggcatttccaggattggaaactcaaattgag

SEQ ID NO: 30570 - DNA, 114 bp, unidentified
  source 1..114: mol_type = unassigned DNA; note = methanogen bacteria
ctcgtatttgcaggaacaaaaggtctttcacaggcagtgacactattgtggactttcaatgttccatggaactgggcatatcacggaaatgttattgccccatgggtttcacag

SEQ ID NO: 30571 - DNA, 72 bp, unidentified
  source 1..72: mol_type = unassigned DNA; note = methanogen bacteria
gcttatattccgggatttagggatttattgttcactccattattttcaatcatggcgtttggttcttttgga

SEQ ID NO: 30572 - DNA, 33 bp, unidentified
  source 1..33: mol_type = unassigned DNA; note = methanogen bacteria
catattgatacgggaaatttaatctttactaat

SEQ ID NO: 30573 - DNA, 48 bp, unidentified
  source 1..48: mol_type = unassigned DNA; note = methanogen bacteria
tctccggtcaaggagccgactgttgaattgcttgcaagaacttctcca

SEQ ID NO: 30574 - DNA, 48 bp, unidentified
  source 1..48: mol_type = unassigned DNA; note = methanogen bacteria
tctccagttaaagagccaacagtagaattgcttgcaagaacatctcca

SEQ ID NO: 30575 - DNA, 48 bp, unidentified
  source 1..48: mol_type = unassigned DNA; note = methanogen bacteria
tctcctgttaaagaacctactgtagaattgcttgcaagaacatcacct

SEQ ID NO: 30576 - DNA, 60 bp, unidentified
  source 1..60: mol_type = unassigned DNA; note = methanogen bacteria
ttaatctccgatagtttcaatccgggaaatgctgcgattggatttttaggaggtttgggt

SEQ ID NO: 30577 - DNA, 63 bp, unidentified
  source 1..63: mol_type = unassigned DNA; note = methanogen bacteria
atgggtgcttcagcagtaaccatcggaggattgggtgctactgcccctggcgttggtgtaagt

SEQ ID NO: 30578 - DNA, 48 bp, unidentified
  source 1..48: mol_type = unassigned DNA; note = methanogen bacteria
tctcctgtcaaagagccaacagtggaattgcttgcaagaacatcacca

SEQ ID NO: 30579 - DNA, 39 bp, unidentified
  source 1..39: mol_type = unassigned DNA; note = methanogen bacteria
cttgatatagtttttattctaaatgaaattgacagcgtt

SEQ ID NO: 30580 - DNA, 33 bp, unidentified
  source 1..33: mol_type = unassigned DNA; note = methanogen bacteria
attgactatccattttacaatccccacacaact

SEQ ID NO: 30581 - DNA, 63 bp, unidentified
  source 1..63: mol_type = unassigned DNA; note = methanogen bacteria
tatcagaatataccatccatgtttatgctgattttccagaacgcctttgatttccagtcaata

SEQ ID NO: 30582 - DNA, 63 bp, unidentified
  source 1..63: mol_type = unassigned DNA; note = methanogen bacteria
gtaaccggaacaatgaatatcggcgaaattatcacttatcagtcagtacacggtcctttgata

SEQ ID NO: 30583 - DNA, 60 bp, unidentified
  source 1..60: mol_type = unassigned DNA; note = methanogen bacteria
ctcatttctgaaggcgttactcctggcgctgctggaattggacttttaggcggtttaggt

SEQ ID NO: 30584 - DNA, 63 bp, unidentified
  source 1..63: mol_type = unassigned DNA; note = methanogen bacteria
ctcggcgctccggctgtcgcaatcggaggattaggcgcaacagctcctggaatgggtgtaagc

SEQ ID NO: 30585 - DNA, 96 bp, unidentified
  source 1..96: mol_type = unassigned DNA; note = methanogen bacteria
atatcttctcttatgcattttcccgaatttgatttggaagatatgttacttgaacttccaaaaaccattaatacattattttcacataaccctgta

SEQ ID NO: 30586 - DNA, 57 bp, unidentified
  source 1..57: mol_type = unassigned DNA; note = methanogen bacteria
atttcaaataccgttactccgggtgctgcagctattggaccgttaggaggattaggt

SEQ ID NO: 30587 - DNA, 63 bp, unidentified
  source 1..63: mol_type = unassigned DNA; note = methanogen bacteria
cttggtgctccggcagtaacaatcggaggattaggtgcaacagctccgggtcttggcgtaagt

SEQ ID NO: 30588 - DNA, 48 bp, unidentified
  source 1..48: mol_type = unassigned DNA; note = methanogen bacteria
tcaccggttaaggagccaacagtggaactgcttgcaaggacatctcca

SEQ ID NO: 30589 - DNA, 48 bp, unidentified
  source 1..48: mol_type = unassigned DNA; note = methanogen bacteria
atgggaaggattgttggacaatcccaatttgaacaaccattatttatg

SEQ ID NO: 30590 - DNA, 39 bp, unidentified
  source 1..39: mol_type = unassigned DNA; note = methanogen bacteria
accattcctattaatggtaccccattacacgtattccca

SEQ ID NO: 30591 - DNA, 60 bp, unidentified
  source 1..60: mol_type = unassigned DNA; note = methanogen bacteria
ctgatttctgaaagcatcactcctggcgctgccggaatcggacttttgggcggacttggt

SEQ ID NO: 30592 - DNA, 66 bp, unidentified
  source 1..66: mol_type = unassigned DNA; note = methanogen bacteria
cttggagatcctgcagttgcagtcggaggccttggtgcaacagcacctggactcggtgtaggctac

SEQ ID NO: 30593 - DNA, 93 bp, unidentified
  source 1..93: mol_type = unassigned DNA; note = methanogen bacteria
accgagcaaaagaatcctctggattcactggtaatggtttccaatgcatttaccagtaacggatatgccgttttgggcaaatcgattcctgga

SEQ ID NO: 30594 - DNA, 57 bp, unidentified
  source 1..57: mol_type = unassigned DNA; note = methanogen bacteria
atttctgagagtgttactcctggtcttgcaggaatcggacttttaggaggtttgggt

SEQ ID NO: 30595 - DNA, 63 bp, unidentified
  source 1..63: mol_type = unassigned DNA; note = methanogen bacteria
cttggtgctccggcagtagctgttggaggattaggtgcaactgctccgggacttggagtaagc

SEQ ID NO: 30596 - DNA, 48 bp, unidentified
  source 1..48: mol_type = unassigned DNA; note = methanogen bacteria
tctcccgttaaggaaccgactgtagaactgcttgcaagaacttccccg

SEQ ID NO: 30597 - DNA, 57 bp, unidentified
  source 1..57: mol_type = unassigned DNA; note = methanogen bacteria
cttattgatgatggtgttgatcctggtgcagctggtattgggctccttggtggttta

SEQ ID NO: 30598 - DNA, 60 bp, unidentified
  source 1..60: mol_type = unassigned DNA; note = methanogen bacteria
ggtgctcctgctgtaacaattggaggattaggtgctactgcgcctggtttgagtgtagga

SEQ ID NO: 30599 - DNA, 33 bp, unidentified
  source 1..33: mol_type = unassigned DNA; note = methanogen bacteria
gacaccttacttggtggagctaacctttgggga

SEQ ID NO: 30600 - DNA, 90 bp, unidentified
  source 1..90: mol_type = unassigned DNA; note = methanogen bacteria
gtggaattagtgcagtttaacagtggtggagatttaatggttgctagggcaagtggaaaagttgatattggctatgttggtatatctcct

SEQ ID NO: 30601 - DNA, 138 bp, unidentified
  source 1..138: mol_type = unassigned DNA; note = methanogen bacteria
gttgaaaaagaggttccggtaaaaatcatttctgctgcacagtctgaaggtagtggaattatactttccaaagactcaaatatttctacagtttcagatttaaggggtaaaattattgcaactcctggtgaagcatct

SEQ ID NO: 30602 - DNA, 60 bp, unidentified
  source 1..60: mol_type = unassigned DNA; note = methanogen bacteria
cttatttctgatagtgttactcctggagctgctggtattggattacttggcggtcttgga

SEQ ID NO: 30603 - DNA, 66 bp, unidentified
  source 1..66: mol_type = unassigned DNA; note = methanogen bacteria
ttaggtagtgctgctgtaaccgttggtggattaggtgcaactgctcctggaatgggagtaggttat

SEQ ID NO: 30604 - DNA, 33 bp, unidentified
  source 1..33: mol_type = unassigned DNA; note = methanogen bacteria
gatatgcttcttggaggacaaaatctttgggga

SEQ ID NO: 30605 - DNA, 45 bp, unidentified
  source 1..45: mol_type = unassigned DNA; note = methanogen bacteria
atggattacggctatgaaatattaaaaataccatttaatcatctt

SEQ ID NO: 30606 - DNA, 66 bp, unidentified
  source 1..66: mol_type = unassigned DNA; note = methanogen bacteria
gcagtatgtcctgaaataaataatttatttaatcttcaaattttttcaggtaatgcaaataattcc

SEQ ID NO: 30607 - DNA, 33 bp, unidentified
  source 1..33: mol_type = unassigned DNA; note = methanogen bacteria
gtcttcattcagggcgtggcctacaactcagcc

SEQ ID NO: 30608 - DNA, 45 bp, unidentified
  source 1..45: mol_type = unassigned DNA; note = methanogen bacteria
gccggaggaaacatcggccatgacctggcttcagtggtggcgttc

SEQ ID NO: 30609 - DNA, 36 bp, unidentified
  source 1..36: mol_type = unassigned DNA; note = methanogen bacteria
gataattcacaattatggaattttttagaacataat

SEQ ID NO: 30610 - DNA, 39 bp, unidentified
  source 1..39: mol_type = unassigned DNA; note = methanogen bacteria
gcattaatgagtggtctgtcggaactttggaaaaggata

SEQ ID NO: 30611 - DNA, 93 bp, unidentified
  source 1..93: mol_type = unassigned DNA; note = methanogen bacteria
agtgaaaatgtaaatgctttggattctcttgtaatgatttctaatgaatttacaggtaatggatatggcatatttggtaataccattccaggt

SEQ ID NO: 30612 - DNA, 60 bp, unidentified
  source 1..60: mol_type = unassigned DNA; note = methanogen bacteria
gcagttccaacgattactgatatctcatcaggtgttgctttgaacgaatatttcatcaac

SEQ ID NO: 30613 - DNA, 48 bp, unidentified
  source 1..48: mol_type = unassigned DNA; note = methanogen bacteria
tctccagttaaggagcctactgttgaattgattgcaaggacatctcca

SEQ ID NO: 30614 - DNA, 30 bp, unidentified
  source 1..30: mol_type = unassigned DNA; note = methanogen bacteria
tttaccccaataccaagcaatatccaattt

SEQ ID NO: 30615 - DNA, 33 bp, unidentified
  source 1..33: mol_type = unassigned DNA; note = methanogen bacteria
gttttactaccagtaattattcctggaattaga

SEQ ID NO: 30616 - DNA, 90 bp, unidentified
  source 1..90: mol_type = unassigned DNA; note = methanogen bacteria
ggctcatcatataatctttttgattatttctactttgtaatcgtgaccctggcaacagtaggttacggtgatgtcgttcctacaacagtt

SEQ ID NO: 30617 - DNA, 54 bp, unidentified
  source 1..54: mol_type = unassigned DNA; note = methanogen bacteria
cttatagctgacggtgttggagatgcaggaatcggtttgttaggtggtcttggt

SEQ ID NO: 30618 - DNA, 66 bp, unidentified
  source 1..66: mol_type = unassigned DNA; note = methanogen bacteria
ctcggaatgcaggctgtaaccgttggaggacttggtgctaccgctccaggacttggagtcagctac

SEQ ID NO: 30619 - DNA, 60 bp, unidentified
  source 1..60: mol_type = unassigned DNA; note = methanogen bacteria
gcggttcctacaatctctgatatctcatcaggagttgctttaaatgaatacttcatcaat

SEQ ID NO: 30620 - DNA, 30 bp, unidentified
  source 1..30: mol_type = unassigned DNA; note = methanogen bacteria
ttgctgcctgtcattattcctggtgttaat

SEQ ID NO: 30621 - DNA, 93 bp, unidentified
  source 1..93: mol_type = unassigned DNA; note = methanogen bacteria
tttggctcatcatacactcttttcgattatttttatttggttgtagtaactattacaacagtgggttatggagatattgttcctttaacattt

SEQ ID NO: 30622 - DNA, 30 bp, unidentified
  source 1..30: mol_type = unassigned DNA; note = methanogen bacteria
ttgctgcctgtcattattccgggtgttaat

SEQ ID NO: 30623 - DNA, 93 bp, unidentified
  source 1..93: mol_type = unassigned DNA; note = methanogen bacteria
tttggctcatcatacaacctttttgattatttttatttggttatagtgactattacaacagtgggttatggagatatcgttcctttaacagtt

SEQ ID NO: 30624 - DNA, 36 bp, unidentified
  source 1..36: mol_type = unassigned DNA; note = methanogen bacteria
gactatgccaaagacattttagtttcatcatatttt

SEQ ID NO: 30625 - DNA, 60 bp, unidentified
  source 1..60: mol_type = unassigned DNA; note = methanogen bacteria
gcagttccgacaatctcagatatatcttcaggtgttgccttaaacgaatattttataaca

SEQ ID NO: 30626 - DNA, 63 bp, unidentified
  source 1..63: mol_type = unassigned DNA; note = methanogen bacteria
gcggttccgacaataacggatatatcatcaggtgttgctttaaacggatattttatagattat

SEQ ID NO: 30627 - DNA, 75 bp, unidentified
  source 1..75: mol_type = unassigned DNA; note = methanogen bacteria
gttgctcattttccggctttaaattttttagttggattttacgcaccgtcaatgtcattgattgggtcattgccg

SEQ ID NO: 30628 - DNA, 60 bp, unidentified
  source 1..60: mol_type = unassigned DNA; note = methanogen bacteria
gcggttccgacaatagctgacatatcatcaggtgttgccttaaacgaatatttcataaat

SEQ ID NO: 30629 - DNA, 69 bp, unidentified
  source 1..69: mol_type = unassigned DNA; note = methanogen bacteria
atcggcggagtcgtcaatgcgttcgttatgatctttgagtacgccttcgacttcaagtcattcgtcggc

SEQ ID NO: 30630 - DNA, 87 bp, unidentified
  source 1..87: mol_type = unassigned DNA; note = methanogen bacteria
tatggaagctacgcagagattaccgcaatcggtgaaaagggtgcacccctcgtacaggcagtcgtcgcaagtaccgccattggagat

SEQ ID NO: 30631 - DNA, 60 bp, unidentified
  source 1..60: mol_type = unassigned DNA; note = methanogen bacteria
gcagttccaacagtatctgatataacatccggagctactttaaatgagtattttctaaat

SEQ ID NO: 30632 - DNA, 72 bp, unidentified
  source 1..72: mol_type = unassigned DNA; note = methanogen bacteria
aatcattttccatttttaaactttttagtgaatttttccgttccttcaatgtctatactttcttcactgccg

SEQ ID NO: 30633 - DNA, 33 bp, unidentified
  source 1..33: mol_type = unassigned DNA; note = methanogen bacteria
ttggtcgatgttaatgagcttttgttcactgat

SEQ ID NO: 30634 - DNA, 60 bp, unidentified
  source 1..60: mol_type = unassigned DNA; note = methanogen bacteria
gcagttccaacaattgcggatatatcttcgggtgttggtttaagtgattatttagtaaat

SEQ ID NO: 30635 - DNA, 39 bp, unidentified; identical to SEQ ID NO: 27471
  source 1..39: mol_type = unassigned DNA; note = methanogen bacteria

SEQ ID NO: 30636 - DNA, 33 bp, unidentified
  source 1..33: mol_type = unassigned DNA; note = methanogen bacteria
aatcaaagtaccaacagcgctacctttttcatg

SEQ ID NO: 30637 - DNA, 72 bp, unidentified
  source 1..72: mol_type = unassigned DNA; note = methanogen bacteria
tataccattccggttaaaaattcctttgccaatgtcagaaatctgattatcctgattggcggattgtttgga

SEQ ID NO: 30638 - DNA, 33 bp, unidentified
  source 1..33: mol_type = unassigned DNA; note = methanogen bacteria
tactatttccaatatgtaaaaggttttggacca

SEQ ID NO: 30639 - DNA, 51 bp, unidentified
  source 1..51: mol_type = unassigned DNA; note = methanogen bacteria
attatgggtgatttagtatttagtttaggatatgcaagcttaattgtacga

SEQ ID NO: 30640 - DNA, 63 bp, unidentified
  source 1..63: mol_type = unassigned DNA; note = methanogen bacteria
gcagttccaacaatggcggatatatcatcgggggttgttttaaaagattattttataaatttt

SEQ ID NO: 30641 - DNA, 33 bp, unidentified
  source 1..33: mol_type = unassigned DNA; note = methanogen bacteria
gtaaaagacattctagtttcatcatattttaca

SEQ ID NO: 30642 - DNA, 75 bp, unidentified
  source 1..75: mol_type = unassigned DNA; note = methanogen bacteria
gttgttcattttccggctttaaattttttggttggattttacgtaccctcaatgtcattgactgggtcattgccg

SEQ ID NO: 30643 - DNA, 33 bp, unidentified
  source 1..33: mol_type = unassigned DNA; note = methanogen bacteria
gtggcggggcttggagccgacgccctggcggca

SEQ ID NO: 30644 - DNA, 54 bp, unidentified
  source 1..54: mol_type = unassigned DNA; note = methanogen bacteria
cctattctcaagttcatgggtgccggaaacaccatacaatacgcaatggactac

SEQ ID NO: 30645 - DNA, 48 bp, unidentified
  source 1..48: mol_type = unassigned DNA; note = methanogen bacteria
tctccaattaaagagccaactgtggaattgctcgcaagaacatctcct

SEQ ID NO: 30646 - DNA, 54 bp, unidentified
  source 1..54: mol_type = unassigned DNA; note = methanogen bacteria
ctgattacagaggctgcaggtgccacaggaattgggcctttaggcggactcggc

SEQ ID NO: 30647 - DNA, 63 bp, unidentified
  source 1..63: mol_type = unassigned DNA; note = methanogen bacteria
cttggcgctccagcagtaactattggaggactgggtgcaacagcaccaggacttggcgtaagt

SEQ ID NO: 30648 - DNA, 90 bp, unidentified
  source 1..90: mol_type = unassigned DNA; note = methanogen bacteria
gaaaatgtcaatcccttggattcacttgacatggtttcaaatgcatttacaagtaatggatataccgttttaggaaattccattggaggc

SEQ ID NO: 30649 - DNA, 48 bp, unidentified
  source 1..48: mol_type = unassigned DNA; note = methanogen bacteria
tctccagttaaagaacctacagtggaactgcttgcaagaacatctcca

SEQ ID NO: 30650 - DNA, 81 bp, unidentified
  source 1..81: mol_type = unassigned DNA; note = methanogen bacteria
aaggcattcctgggtacctcgcccatctcgtgcattcccgccaccctcaccgactgctaccccgaatgggggctcaccctc

SEQ ID NO: 30651 - DNA, 36 bp, unidentified
  source 1..36: mol_type = unassigned DNA; note = methanogen bacteria
gactacctcctcttcttcatgaacgccgacagctac

SEQ ID NO: 30652 - DNA, 57 bp, unidentified
  source 1..57: mol_type = unassigned DNA; note = methanogen bacteria
aatcctatcccttcggaactgatatataataagattatatggttgaatggaggaata

SEQ ID NO: 30653 - DNA, 60 bp, unidentified
  source 1..60: mol_type = unassigned DNA; note = methanogen bacteria
gcagttcctacagcggcggatatttcatcaggggttgctttgaatgaatatttcataagt

SEQ ID NO: 30654 - DNA, 42 bp, unidentified
  source 1..42: mol_type = unassigned DNA; note = methanogen bacteria
gaaatttcatcaggattccaattcagctaccaattattttca

SEQ ID NO: 30655 - DNA, 51 bp, unidentified
  source 1..51: mol_type = unassigned DNA; note = methanogen bacteria
atgaacatattcaattttattaaaaatatcaaatggaatttgatagatgac

SEQ ID NO: 30656 - DNA, 48 bp, unidentified
  source 1..48: mol_type = unassigned DNA; note = methanogen bacteria
tctccggttaaggagccgactgcagaactttttgcaagaacagcacct

SEQ ID NO: 30657 - DNA, 57 bp, unidentified
  source 1..57: mol_type = unassigned DNA; note = methanogen bacteria
gcacttcctaactttaatatattaactgacactgacctttcatatgctattgaatct

SEQ ID NO: 30658 - DNA, 57 bp, unidentified
  source 1..57: mol_type = unassigned DNA; note = methanogen bacteria
gcagttccgacaattactgatatctcatcaggggttgctttaaacgaatatttcctc

SEQ ID NO: 30659 - DNA, 63 bp, unidentified
  source 1..63: mol_type = unassigned DNA; note = methanogen bacteria
tacagcaacataccttcaatgtttgttttgattttccaggatgcgtttaacttcagacctatt

SEQ ID NO: 30660 - DNA, 75 bp, unidentified
  source 1..75: mol_type = unassigned DNA; note = methanogen bacteria
tccacaggcgttgcacgggatgccagtgttgccggtgccccttatgtgcaaaatgcaattcagtcagtgtttgga

SEQ ID NO: 30661 - DNA, 51 bp, unidentified
  source 1..51: mol_type = unassigned DNA; note = methanogen bacteria
ggcgtttccagcatgaatttattggacataaggtctattggttatttatta

SEQ ID NO: 30662 - DNA, 33 bp, unidentified
  source 1..33: mol_type = unassigned DNA; note = methanogen bacteria
gtagttggattagggccagaaccacttgtagct

SEQ ID NO: 30663 - DNA, 48 bp, unidentified
  source 1..48: mol_type = unassigned DNA; note = methanogen bacteria
ttaatattattaggtgaaggcgtagctttggattatggaattgattat

SEQ ID NO: 30664 - DNA, 93 bp, unidentified
  source 1..93: mol_type = unassigned DNA; note = methanogen bacteria
tgttctccattggattttcccgagtttgatttggaagacatgctgctggattttccccaaaccattcataacttatattcacataatccgatt

SEQ ID NO: 30665 - DNA, 48 bp, unidentified
  source 1..48: mol_type = unassigned DNA; note = methanogen bacteria
tctccagttaaagagccaaccactgaactgatagcaagaaccggaccg

SEQ ID NO: 30666 - DNA, 54 bp, unidentified
  source 1..54: mol_type = unassigned DNA; note = methanogen bacteria
acttatttattttatggatactgcctttggtgtgcaaggtattcaagcccattc

SEQ ID NO: 30667 - DNA, 54 bp, unidentified
  source 1..54: mol_type = unassigned DNA; note = methanogen bacteria
atatatttgaagggactaggaggatacgaattggcttcaatcgactactttgac

SEQ ID NO: 30668 - DNA, 39 bp, unidentified
  source 1..39: mol_type = unassigned DNA; note = methanogen bacteria
tataggggattcctatcatccatagtgaaaacaaatgcc

SEQ ID NO: 30669 - DNA, 96 bp, unidentified
  source 1..96: mol_type = unassigned DNA; note = methanogen bacteria
tgttctccattgaattttccggagtttgatttggaagatatgttggtggattttcccgaaacaattcataccttatattcacataatcctgttgat

SEQ ID NO: 30670 - DNA, 39 bp, unidentified
  source 1..39: mol_type = unassigned DNA; note = methanogen bacteria
ttttcttctttacatcaatctttttacaataataatcca

SEQ ID NO: 30671 - DNA, 57 bp, unidentified
  source 1..57: mol_type = unassigned DNA; note = methanogen bacteria
tcctctcagatatgggcggataaattaggatggttgaatggtctgatgggagtaagt

SEQ ID NO: 30672 - DNA, 66 bp, unidentified; identical to SEQ ID NO: 29773
  source 1..66: mol_type = unassigned DNA; note = methanogen bacteria

SEQ ID NO: 30673 - DNA, 45 bp, unidentified
  source 1..45: mol_type = unassigned DNA; note = methanogen bacteria
aatctgggaatagacatactgctccctcttcacacttacatcgaa

SEQ ID NO: 30674 - DNA, 75 bp, unidentified
  source 1..75: mol_type = unassigned DNA; note = methanogen bacteria
gttgataatattccgggcttaagtagtttatttacattagttttattcccgaatgttgttaattcatttgtggga

SEQ ID NO: 30675 - DNA, 57 bp, unidentified; identical to SEQ ID NO: 30201
  source 1..57: mol_type = unassigned DNA; note = methanogen bacteria

SEQ ID NO: 30676 - DNA, 96 bp, unidentified
  source 1..96: mol_type = unassigned DNA; note = methanogen bacteria
tcaactttcctaaactttccagaatttgaacttgaaagtcttgtttttaactattatcaaactttacatttgatcagggttcatgatccggtcagt

SEQ ID NO: 30677 - DNA, 45 bp, unidentified
  source 1..45: mol_type = unassigned DNA; note = methanogen bacteria
atgcttgattttacttccctgagttatcaagggatagtgggatat

SEQ ID NO: 30678 - DNA, 54 bp, unidentified
  source 1..54: mol_type = unassigned DNA; note = methanogen bacteria
tctatggccatggagtttgatccggcgaccaatgtgcagtcaaccatcacatcc

SEQ ID NO: 30679 - DNA, 123 bp, unidentified
  source 1..123: mol_type = unassigned DNA; note = methanogen bacteria
tcagacatgcattattttgtgattgatgcaatctatgattcttataaattgatccctattggcggggcgaatctaaagggagattttttgtctgtgatggcgacgtatattacggactatttc

SEQ ID NO: 30680 - DNA, 69 bp, unidentified
  source 1..69: mol_type = unassigned DNA; note = methanogen bacteria
cctaatatcgtggattttttgtttgtagaaatgcagaagctcacgaaattgtttatggaacagatgtca

SEQ ID NO: 30681 - DNA, 72 bp, unidentified
  source 1..72: mol_type = unassigned DNA; note = methanogen bacteria
aagattgttccaggattggattcttttatagggatatcttcactgtccatgtcaattggccagatatcggga

SEQ ID NO: 30682 - DNA, 30 bp, unidentified
  source 1..30: mol_type = unassigned DNA; note = methanogen bacteria
cttgattcaggaaatctgatatttacaaat

SEQ ID NO: 30683 - DNA, 57 bp, unidentified
  source 1..57: mol_type = unassigned DNA; note = methanogen bacteria
tatattttaggttcttctgaattacctagtgatgtaatggcatttgctactcaaaat

SEQ ID NO: 30684 - DNA, 105 bp, unidentified
  source 1..105: mol_type = unassigned DNA; note = methanogen bacteria
gctaatattccagatccgaatatttattttgaagagtataggcctttgggacttagctttgtagatgcaatgataggtgggatgcatcagtattatcacgacatg

SEQ ID NO: 30685 - DNA, 123 bp, unidentified
  source 1..123: mol_type = unassigned DNA; note = methanogen bacteria
tcacttgacatattgcatccatatgcatttgcaatggcaagcggaatcggaagtgcgagtatgaacgcggctgcaatttctccattggtatacatgtttccagctatgaaaacagatctcatg

SEQ ID NO: 30686 - DNA, 111 bp, unidentified
  source 1..111: mol_type = unassigned DNA; note = methanogen bacteria
tatactaaagttccatatcctcattatgttccaaaaggggattcagtattggcaatgtggtctttaggtgaatatgctgcacagatggagtattatcaaaagatgagttct

SEQ ID NO: 30687 - DNA, 57 bp, unidentified
  source 1..57: mol_type = unassigned DNA; note = methanogen bacteria
tcttcacaaatttgggctgatcagttaggatggttaaatagcttaatgggaattaat

SEQ ID NO: 30688 - DNA, 81 bp, unidentified
  source 1..81: mol_type = unassigned DNA; note = methanogen bacteria
ttccattttccggaatttgatttggaagagatgattataaatcttcatgaaacaatatcattgttttttgagcatgatcca

SEQ ID NO: 30689 - DNA, 60 bp, unidentified
  source 1..60: mol_type = unassigned DNA; note = methanogen bacteria
gcggttccaactgtggctgtaatatcatcagatgctgctttggatgaatattttataaat

SEQ ID NO: 30690 - DNA, 72 bp, unidentified
  source 1..72: mol_type = unassigned DNA; note = methanogen bacteria
acacttcccggagcatcaattgggatcaatactttaatcaatccaaattggaatcttctcggagacattaac

SEQ ID NO: 30691 - DNA, 105 bp, unidentified
  source 1..105: mol_type = unassigned DNA; note = methanogen bacteria
ggttatatgtcagtaacatcagggactccaatgattcagctggtcagtgagggaaccggattaatatttgtcgtatttccaaaaatattcagtttaatgggagtt

SEQ ID NO: 30692 - DNA, 81 bp, unidentified
  source 1..81: mol_type = unassigned DNA; note = methanogen bacteria
gcaagtccagcaatttatactaatttgaatccggcacaattttccagtgactttactggatcactattatttgcttcatta

SEQ ID NO: 30693 - DNA, 42 bp, unidentified
  source 1..42: mol_type = unassigned DNA; note = methanogen bacteria
atctacggccctgatgcagcaattgtgaaagcattcagcaga

SEQ ID NO: 30694 - DNA, 66 bp, unidentified
  source 1..66: mol_type = unassigned DNA; note = methanogen bacteria
accacaggcctatccaactggatgggcagctgcctcagtaatatgataggacctcatccatcagag

SEQ ID NO: 30695 - DNA, 33 bp, unidentified
  source 1..33: mol_type = unassigned DNA; note = methanogen bacteria
actacagccctttcaatgggattcagtcctatt

SEQ ID NO: 30696 - DNA, 33 bp, unidentified
  source 1..33: mol_type = unassigned DNA; note = methanogen bacteria
atgtccggattcttgatagatgctaccctggga

SEQ ID NO: 30697 - DNA, 30 bp, unidentified
  source 1..30: mol_type = unassigned DNA; note = methanogen bacteria
aattgccctgttctttttggatgggaaaat

SEQ ID NO: 30698 - DNA, 51 bp, unidentified
  source 1..51: mol_type = unassigned DNA; note = methanogen bacteria
ctgaaaggaaacattgacatactgattggattcttcatgctgatactgatt

SEQ ID NO: 30699 - DNA, 30 bp, unidentified
  source 1..30: mol_type = unassigned DNA; note = methanogen bacteria
ttttcaaacggaatcagtctggattatccg

SEQ ID NO: 30700 - DNA, 30 bp, unidentified
  source 1..30: mol_type = unassigned DNA; note = methanogen bacteria
ggaaaactcctatacagcaatctggaatca

SEQ ID NO: 30701 - DNA, 36 bp, unidentified
  source 1..36: mol_type = unassigned DNA; note = methanogen bacteria
atggacataatgaattttattacaaggcctcataat

SEQ ID NO: 30702 - DNA, 63 bp, unidentified
  source 1..63: mol_type = unassigned DNA; note = methanogen bacteria
gcagttccaacaatggcggaaatatcctctggtgctgctttgagcgaatattttttaagttat

SEQ ID NO: 30703 - DNA, 60 bp, unidentified
  source 1..60: mol_type = unassigned DNA; note = methanogen bacteria
atttcttcacaggtatgggctgatcaattaggatggctaaacagtttgatgggagttaat

SEQ ID NO: 30704 - DNA, 48 bp, unidentified
  source 1..48: mol_type = unassigned DNA; note = methanogen bacteria
cttgtaagtgctgtaggtacaaaaggattatccagttttgctcttggt

SEQ ID NO: 30705 - DNA, 66 bp, unidentified
  source 1..66: mol_type = unassigned DNA; note = methanogen bacteria
ccaatggattctcaggtatgggctgacaagctgggagtattgattttttctctaaatttttatttt

SEQ ID NO: 30706 - DNA, 54 bp, unidentified
  source 1..54: mol_type = unassigned DNA; note = methanogen bacteria
tatggttggaacattaaggttacctgttatgaaaataacatctacaattcaagg

SEQ ID NO: 30707 - DNA, 30 bp, unidentified
  source 1..30: mol_type = unassigned DNA; note = methanogen bacteria
tttttggaactgcctcctgctgttgaggtg

SEQ ID NO: 30708 - DNA, 90 bp, unidentified
  source 1..90: mol_type = unassigned DNA; note = methanogen bacteria
gggccgacctacggtttgtttgaggatttctattttgtagtggtgacgctgtcaactgtaggatatggggatgttgttcccgaaacattc

SEQ ID NO: 30709 - DNA, 93 bp, unidentified
  source 1..93: mol_type = unassigned DNA; note = methanogen bacteria
tcctcccctttcaattttccacgttttgaactggaggacatgctgttggacctgcccaataccatgaatatgctaatttcacacaatcatgta

SEQ ID NO: 30710 - DNA, 63 bp, unidentified
  source 1..63: mol_type = unassigned DNA; note = methanogen bacteria
gcggttccaacagtagcggaaatatcatctggtgttgctttgaacgaatattttataaattat

SEQ ID NO: 30711 - DNA, 90 bp, unidentified
  source 1..90: mol_type = unassigned DNA; note = methanogen bacteria
aatttgaacttccctgattcttttaatatcaaagaatttttcttaaattacagtaaaacaatgtatctgtttagacatcatgatcctgtc

SEQ ID NO: 30712 - DNA, 33 bp, unidentified
  source 1..33: mol_type = unassigned DNA; note = methanogen bacteria
gttcttctacctgtggtcattccgggagttaat

SEQ ID NO: 30713 - DNA, 96 bp, unidentified
  source 1..96: mol_type = unassigned DNA; note = methanogen bacteria
ttcggcacatcatatagtccttttgattatttctactttgttataataacaattgccacagtgggttatggagatattgttcctttgacatttgaa

SEQ ID NO: 30714 - DNA, 57 bp, unidentified
  source 1..57: mol_type = unassigned DNA; note = methanogen bacteria
tcttctcaaatttgggcagatcaattaggctggctgaacagtcttatgggagttagt

SEQ ID NO: 30715 - DNA, 96 bp, unidentified
  source 1..96: mol_type = unassigned DNA; note = methanogen bacteria
tctaatccgctaaattttcctgagtttgatttggaggatttgttattgcaacttccagaaacaattaagttatttttttcacatagtcctgcagat

SEQ ID NO: 30716 - DNA, 72 bp, unidentified
  source 1..72: mol_type = unassigned DNA; note = methanogen bacteria
accttacctggtgcaatgataagtttaaaagaactttttgcacctgattggagcttattgcttgattttgac

SEQ ID NO: 30717 - DNA, 111 bp, unidentified
  source 1..111: mol_type = unassigned DNA; note = methanogen bacteria
cttggatacatgtcacttgaaagcggtactgcagttgcatacttggtaactcaaggtacaggattggtatttatagcatatccaactgtattgaatgttttaggacaatat

SEQ ID NO: 30718 - DNA, 60 bp, unidentified
  source 1..60: mol_type = unassigned DNA; note = methanogen bacteria
agttattttccaattttaaataatctcattttgactgatgattatacttcatcagtattt

SEQ ID NO: 30719 - DNA, 30 bp, unidentified
  source 1..30: mol_type = unassigned DNA; note = methanogen bacteria
attccaaatattgatgcatttttttcaaat

SEQ ID NO: 30720 - DNA, 66 bp, unidentified
  source 1..66: mol_type = unassigned DNA; note = methanogen bacteria
catcctatttcagaagggttcaatttcataaacggaaatcctcaaatgactgaaagaactgcagag

SEQ ID NO: 30721 - DNA, 39 bp, unidentified
  source 1..39: mol_type = unassigned DNA; note = methanogen bacteria
atgataaatacagatttaatattaaatgaagctaccgaa

SEQ ID NO: 30722 - DNA, 78 bp, unidentified
  source 1..78: mol_type = unassigned DNA; note = methanogen bacteria
ggtggaattatcacttccgatccggctatccaagcaggagcaatcaaagtggcaaccggtaaagttggaatgtcattt

SEQ ID NO: 30723 - DNA, 33 bp, unidentified
  source 1..33: mol_type = unassigned DNA; note = methanogen bacteria
ttcttaggtgctgaaggtgtaaactggagtact

SEQ ID NO: 30724 - DNA, 36 bp, unidentified
  source 1..36: mol_type = unassigned DNA; note = methanogen bacteria
atggatttaactcagttttatgaaatatattctagt

SEQ ID NO: 30725 - DNA, 60 bp, unidentified
  source 1..60: mol_type = unassigned DNA; note = methanogen bacteria
caatgggtcaatgcaggtgattttcatgttccgtttatgagtttgaacgggggaattatt

SEQ ID NO: 30726 - DNA, 36 bp, unidentified
  source 1..36: mol_type = unassigned DNA; note = methanogen bacteria
catctggattgtggtgaaatattgttcactaactgg

SEQ ID NO: 30727 - DNA, 60 bp, unidentified
  source 1..60: mol_type = unassigned DNA; note = methanogen bacteria
gcggttccaaccttttcggaaatatcatcaggtgttgctttgaacgaatattttataagt

SEQ ID NO: 30728 - DNA, 66 bp, unidentified
  source 1..66: mol_type = unassigned DNA; note = methanogen bacteria
cttcaagttgttgattcaaacagtattttcggttcttttatgagtttgaacattgaattgtttgga

SEQ ID NO: 30729 - DNA, 33 bp, unidentified
  source 1..33: mol_type = unassigned DNA; note = methanogen bacteria
catttggattcttctcaaatcttatttaataat

SEQ ID NO: 30730 - DNA, 66 bp, unidentified
  source 1..66: mol_type = unassigned DNA; note = methanogen bacteria
ttaaatcctacatataccattccagaatttacaacacaaggattgtatttaactgacaaaagcatt

SEQ ID NO: 30731 - DNA, 36 bp, unidentified
  source 1..36: mol_type = unassigned DNA; note = methanogen bacteria
tttttccacagccaacccccaacttgcagcaattta

SEQ ID NO: 30732 - DNA, 90 bp, unidentified
  source 1..90: mol_type = unassigned DNA; note = methanogen bacteria
tcttctagttatccaactttccttgatgcattatttggattatttactgatcctggaaagttatttggaagtttatttgcaaaaccttcc

SEQ ID NO: 30733 - DNA, 66 bp, unidentified
  source 1..66: mol_type = unassigned DNA; note = methanogen bacteria
cttcatgttgttgattcaaacagtatttttggttcctttatgagtttgaatgttggattatttggg

SEQ ID NO: 30734 - DNA, 33 bp, unidentified; identical to SEQ ID NO: 30729
  source 1..33: mol_type = unassigned DNA; note = methanogen bacteria

SEQ ID NO: 30735 - DNA, 42 bp, unidentified
  source 1..42: mol_type = unassigned DNA; note = methanogen bacteria
attgaattaaatatttcaagtggtgttactgtttctataatg

SEQ ID NO: 30736 - DNA, 30 bp, unidentified
  source 1..30: mol_type = unassigned DNA; note = methanogen bacteria
ggtcaatcaattcatcttatctttgaaatg

SEQ ID NO: 30737 - DNA, 123 bp, unidentified
  source 1..123: mol_type = unassigned DNA; note = methanogen bacteria
gaacttttaccgttgcacccttatgcttttgctatggcaagtggtgtcggcagtgcaagtatgaatgcagcatctttaggtccgactcttgcggcatttcctgctttgaaaactcaaattgaa

SEQ ID NO: 30738 - DNA, 45 bp, unidentified
  source 1..45: mol_type = unassigned DNA; note = methanogen bacteria
cagttcatcgcggacaacaccctgatggagagctacagcgcgacg

SEQ ID NO: 30739 - DNA, 90 bp, unidentified
  source 1..90: mol_type = unassigned DNA; note = methanogen bacteria
catccgataccttcggagctaatatatgataaaataatattcctaaatggaggattatgatggacgtggatgaaaaatatttttccaata

SEQ ID NO: 30740 - DNA, 84 bp, unidentified
  source 1..84: mol_type = unassigned DNA; note = methanogen bacteria
tatacggaaaccttttttcccagccccattgaaaccttcaaaggctttaaagaaatattactaaatggaaaacttggagaagat

SEQ ID NO: 30741 - DNA, 60 bp, unidentified
  source 1..60: mol_type = unassigned DNA; note = methanogen bacteria
gcagcgaatagcggattaggatatttgatttatacatcaagactatattaccgaacagat

SEQ ID NO: 30742 - DNA, 51 bp, unidentified
  source 1..51: mol_type = unassigned DNA; note = methanogen bacteria
ggttcagaaagtatcaagatgctttataactttcagtttcatggttttatt

SEQ ID NO: 30743 - DNA, 90 bp, unidentified
  source 1..90: mol_type = unassigned DNA; note = methanogen bacteria
ttaactgtattaccatcatatatgtttccaggacctgtagaagtagttaattccttcataaaattatggagtacaggtgaattattcact

SEQ ID NO: 30744 - DNA, 60 bp, unidentified
  source 1..60: mol_type = unassigned DNA; note = methanogen bacteria
attggttcaagttctggtataggttatatgattttaacatcaacaaatatatttgatact

SEQ ID NO: 30745 - DNA, 33 bp, unidentified
  source 1..33: mol_type = unassigned DNA; note = methanogen bacteria
atgttagaaagtaatataaacactcttatcact

SEQ ID NO: 30746 - DNA, 63 bp, unidentified
  source 1..63: mol_type = unassigned DNA; note = methanogen bacteria
ttaaaccttgttcccgctttaaattttttattcggttcaaacaccgcttcaaattcaatcatg

SEQ ID NO: 30747 - DNA, 30 bp, unidentified
  source 1..30: mol_type = unassigned DNA; note = methanogen bacteria
gctgatgtcaatagtctcctattcacaaat

SEQ ID NO: 30748 - DNA, 39 bp, unidentified
  source 1..39: mol_type = unassigned DNA; note = methanogen bacteria
gatttgattttacctatggtttttagttctcttagatat

SEQ ID NO: 30749 - DNA, 93 bp, unidentified
  source 1..93: mol_type = unassigned DNA; note = methanogen bacteria
gatccgaatatggatttgtttgaaagtttgtggtttgttatagttacattaacaactgtaggttatggtgatataacgccacaaacatttaac

SEQ ID NO: 30750 - DNA, 93 bp, unidentified
  source 1..93: mol_type = unassigned DNA; note = methanogen bacteria
gattccggaattaatgacatgcaaactgcagtatggtatattatcgtttctatgaccagcacaggctatggggatgttgttccggcaaccctt

SEQ ID NO: 30751 - DNA, 87 bp, unidentified
  source 1..87: mol_type = unassigned DNA; note = methanogen bacteria
tttcaactgattccaagtttcatgtttcccggaccaacagatgttgcaaattcatttgtcaagttagttgtttcaggtcagcttttt

SEQ ID NO: 30752 - DNA, 57 bp, unidentified
  source 1..57: mol_type = unassigned DNA; note = methanogen bacteria
ggatccagttcaggtataggatatatgattttaacatccaccaacctatttgataca

SEQ ID NO: 30753 - DNA, 57 bp, unidentified
  source 1..57: mol_type = unassigned DNA; note = methanogen bacteria
gccttgcctgaagttatgctggtaacagatgggcaatttttagcttttttagaatca

SEQ ID NO: 30754 - DNA, 84 bp, unidentified
  source 1..84: mol_type = unassigned DNA; note = methanogen bacteria
ttacatttaattcctccctatatcttacctagtccattaaatgtagtttctgctatttggaagttgattattgatggtaaatta

SEQ ID NO: 30755 - DNA, 57 bp, unidentified
  source 1..57: mol_type = unassigned DNA; note = methanogen bacteria
gcttctagtaacggtttaggttatatgattttaacagcaagtcaattattccagcct

SEQ ID NO: 30756 - DNA, 84 bp, unidentified
  source 1..84: mol_type = unassigned DNA; note = methanogen bacteria
tttcaactaattccagtttacatgtttcctggaccaacagacgttgcaacctcctttgtcaagttaattgtttcaggtaaactt

SEQ ID NO: 30757 - DNA, 57 bp, unidentified
  source 1..57: mol_type = unassigned DNA; note = methanogen bacteria
ggatctagttccggtataggatatatgattttaacatcaacaaacctatttgataca

SEQ ID NO: 30758 - DNA, 84 bp, unidentified
  source 1..84: mol_type = unassigned DNA; note = methanogen bacteria
tttcatctaattccaagttacatgtttcccggaccaacggacgttgtaaattcatttgtcaagttagttgtatcaggaaaactt

SEQ ID NO: 30759 - DNA, 60 bp, unidentified
  source 1..60: mol_type = unassigned DNA; note = methanogen bacteria
ggatccagttccggtataggatatatgattttaacatctacgagcctatttgatacaggt

SEQ ID NO: 30760 - DNA, 90 bp, unidentified
  source 1..90: mol_type = unassigned DNA; note = methanogen bacteria
ttgaatctaataccttactatattttacctagtccaattgacgtatttaatgcagcatatgctttaataatcaatggaaaattattggat

SEQ ID NO: 30761 - DNA, 63 bp, unidentified
  source 1..63: mol_type = unassigned DNA; note = methanogen bacteria
attgcatcaagtaaaggtttaggttatatgatcttaactgcaagtaacttgtttgacccaggt

SEQ ID NO: 30762 - DNA, 36 bp, unidentified; identical to SEQ ID NO: 30003
  source 1..36: mol_type = unassigned DNA; note = methanogen bacteria

SEQ ID NO: 30763 - DNA, 66 bp, unidentified
  source 1..66: mol_type = unassigned DNA; note = methanogen bacteria
agtcttttaggattggcgagtaaagctcccgttgatgctgaagcacaaacaacaacaataatatca

SEQ ID NO: 30764 - DNA, 90 bp, unidentified
  source 1..90: mol_type = unassigned DNA; note = methanogen bacteria
ttacatttgattccctactacattttaccaagtccattaaatgtattcactgcggcttggactttaataagcaatggaaaattgttcatg

SEQ ID NO: 30765 - DNA, 60 bp, unidentified
  source 1..60: mol_type = unassigned DNA; note = methanogen bacteria
attgcttcaagcagaggattaggatatatgatcttgactgcaagtcaattgttccagcca

SEQ ID NO: 30766 - DNA, 120 bp, unidentified
  source 1..120: mol_type = unassigned DNA; note = methanogen bacteria
gttggagaagatcagcttgctgcgcaattatcaactattatatctgttactcgacaggctccagaaacagtcggtactgcattaagaacagtatatgcaagaattactgacattcaagca

SEQ ID NO: 30767 - DNA, 93 bp, unidentified
  source 1..93: mol_type = unassigned DNA; note = methanogen bacteria
cgtaatatgggcgaagtcatggaagagattggtaataaatggtctactatgactaaagaacaaaaaacttatttagcacaaacaatggctggt

SEQ ID NO: 30768 - DNA, 153 bp, unidentified
  source 1..153: mol_type = unassigned DNA; note = methanogen bacteria
gagcaacaagatatttatatggatagattatctactcatgttcaacaattaacaactgcaactgaacatatgtggatgggattaactgacactgatggatttaaagacgtaatagatgggttaacaacaattgttgaaaaagttgataaatta

SEQ ID NO: 30769 - DNA, 90 bp, unidentified
  source 1..90: mol_type = unassigned DNA; note = methanogen bacteria
ctgcacatgattccatactatattttaccaagtcctgtaaacgtatttactgctgcatggactttgttaactaatggaaaattggctatg

SEQ ID NO: 30770 - DNA, 60 bp, unidentified
  source 1..60: mol_type = unassigned DNA; note = methanogen bacteria
attgcatccagcagaggtttaggatatatgatattgactgcaagtcaattgttccagcca

SEQ ID NO: 30771 - DNA, 33 bp, unidentified
  source 1..33: mol_type = unassigned DNA; note = methanogen bacteria
gtttccggattccttttaggcgttaatacagca

SEQ ID NO: 30772 - DNA, 78 bp, unidentified
  source 1..78: mol_type = unassigned DNA; note = methanogen bacteria
ggtattgctaaggtattttatggaaatttagatttattttccaatatggctccatgggttgctaaagatatatttgca

SEQ ID NO: 30773 - DNA, 42 bp, unidentified
  source 1..42: mol_type = unassigned DNA; note = methanogen bacteria
attgaaataacccctacaaaaggggttacagtttcagtaatg

SEQ ID NO: 30774 - DNA, 30 bp, unidentified
  source 1..30: mol_type = unassigned DNA; note = methanogen bacteria
ggtcaatcaatacatttattattggaaatg

SEQ ID NO: 30775 - DNA, 123 bp, unidentified
  source 1..123: mol_type = unassigned DNA; note = methanogen bacteria
tcaattctaccattacatccttttgcatttgcaatggcaagtggagtaggcagtgcaagtatgaatgctgcttctcttggacccacacttgcggcatttcccggtttagaaactcaaattgaa

SEQ ID NO: 30776 - DNA, 87 bp, unidentified
  source 1..87: mol_type = unassigned DNA; note = methanogen bacteria
ttccagctgattccaagcttcatgtttcctggaccgacagacgttgcaaattcctttgtcaggctggctgtttcaggcaagcttttc

SEQ ID NO: 30777 - DNA, 57 bp, unidentified
  source 1..57: mol_type = unassigned DNA; note = methanogen bacteria
gggtcaagttcaggtataggatacatgattctgacatccacaagcctctttgataca

SEQ ID NO: 30778 - DNA, 93 bp, unidentified
  source 1..93: mol_type = unassigned DNA; note = methanogen bacteria
gatccgagcatgaacagtctttttgattcgttgtggtttgttgtgtcttcccttacaacggtaggttacggggacgtattgcctgattctatg

SEQ ID NO: 30779 - DNA, 90 bp, unidentified
  source 1..90: mol_type = unassigned DNA; note = methanogen bacteria
cttggtttaataccatactacattttacctagtccggttaatgtatttaatgctgcattccaattaattgcaaatggaaaattaatagaa

SEQ ID NO: 30780 - DNA, 57 bp, unidentified
  source 1..57: mol_type = unassigned DNA; note = methanogen bacteria
gcatcaagtaaaggtttaggttatatgattctaactgcaagccaactatttgatcct

SEQ ID NO: 30781 - DNA, 87 bp, unidentified
  source 1..87: mol_type = unassigned DNA; note = methanogen bacteria
tttcaacttgttccgggttacatgtttcccggaccaagcgatgttgcaacttcatttgtcaagttaattgtttcaggcagacttttt

SEQ ID NO: 30782 - DNA, 57 bp, unidentified
  source 1..57: mol_type = unassigned DNA; note = methanogen bacteria
ggatccagttcaggtataggatatatgattttaacatctacaaatctgtttgatacg

SEQ ID NO: 30783 - DNA, 84 bp, unidentified
  source 1..84: mol_type = unassigned DNA; note = methanogen bacteria
ttaatcttagttcctagttatatgtttccaggaccagttgaagtagttaatgcttttattaaattgctggtttctggaaaactt

SEQ ID NO: 30784 - DNA, 57 bp, unidentified
  source 1..57: mol_type = unassigned DNA; note = methanogen bacteria
ggatctagctccggaatagggtatatgatattaacgtcaaccaatctctttgataca

SEQ ID NO: 30785 - DNA, 36 bp, unidentified
  source 1..36: mol_type = unassigned DNA; note = methanogen bacteria
gcaacagtagcttcaactgatgcagtggctgtttat

SEQ ID NO: 30786 - DNA, 63 bp, unidentified
  source 1..63: mol_type = unassigned DNA; note = methanogen bacteria
cagattgcaggggttttcacatatgccggaaccagcgcaaggctgactccaagcttagttgca

SEQ ID NO: 30787 - DNA, 90 bp, unidentified
  source 1..90: mol_type = unassigned DNA; note = methanogen bacteria
ttgcatttgattccatactatgtattgccaagtcctgttgatgttttaagcgctgcttataaaattataatcaacggcagtcttcttaag

SEQ ID NO: 30788 - DNA, 60 bp, unidentified
  source 1..60: mol_type = unassigned DNA; note = methanogen bacteria
attgcatcaacctcaggtttaggttatatgattcttacagcaagccagctgttcgatcca

SEQ ID NO: 30789 - DNA, 90 bp, unidentified
  source 1..90: mol_type = unassigned DNA; note = methanogen bacteria
tggggcatcgtcaatccatacatccttccgggtccgattacagtctgtcagtccgcttgggagttaatattaaatggaaagcttctaaca

SEQ ID NO: 30790 - DNA, 60 bp, unidentified
  source 1..60: mol_type = unassigned DNA; note = methanogen bacteria
ggttcaagcagcggtttaggttatatgattttgacagcaaccagtctgtttgatccaggt

SEQ ID NO: 30791 - DNA, 48 bp, unidentified
  source 1..48: mol_type = unassigned DNA; note = methanogen bacteria
attctggattttgttccgtcagtcaatctattcaattcctttttaaca

SEQ ID NO: 30792 - DNA, 33 bp, unidentified
  source 1..33: mol_type = unassigned DNA; note = methanogen bacteria
atggacccgaataagattttattcactaatact

SEQ ID NO: 30793 - DNA, 30 bp, unidentified
  source 1..30: mol_type = unassigned DNA; note = methanogen bacteria
gacatgtttgttaaaggttcatttttgaat

SEQ ID NO: 30794 - DNA, 60 bp, unidentified
  source 1..60: mol_type = unassigned DNA; note = methanogen bacteria
gctttgccaggaatcgaattgttaaatgaaatggattttataacttttttacaatcaaat

SEQ ID NO: 30795 - DNA, 48 bp, unidentified
  source 1..48: mol_type = unassigned DNA; note = methanogen bacteria
ttagtgataactcccgagtttaattttggtttcaatgcaatttcaaca

SEQ ID NO: 30796 - DNA, 33 bp, unidentified
  source 1..33: mol_type = unassigned DNA; note = methanogen bacteria
ctggacggcaatcatattttcttcacaaattct

SEQ ID NO: 30797 - DNA, 84 bp, unidentified
  source 1..84: mol_type = unassigned DNA; note = methanogen bacteria
ttgggattattttcagcatatatcttaccgggtcctttggatgttttaaattccgcatgggttgttattgagaatggaaaactt

SEQ ID NO: 30798 - DNA, 60 bp, unidentified
  source 1..60: mol_type = unassigned DNA; note = methanogen bacteria
ggttcaagcagcggattaggttatatgattttaacagcaactaatttattcgatacaggt

SEQ ID NO: 30799 - DNA, 90 bp, unidentified
  source 1..90: mol_type = unassigned DNA; note = methanogen bacteria
ttaggattattttcttcatatatcctaccgggaccgcttgatgtgctgaattccgctcgtgtagttattgaaaacggaaaacttttaaca

SEQ ID NO: 30800 - DNA, 60 bp, unidentified
  source 1..60: mol_type = unassigned DNA; note = methanogen bacteria
ggttcaagcagcggtttaggttatatgattttgactgcaacaaacttgttcgatacaggt

SEQ ID NO: 30801 - DNA, 84 bp, unidentified
  source 1..84: mol_type = unassigned DNA; note = methanogen bacteria
tttggcatcgtcaatccttatattctgcctggtccgattgaggtttgcaagtcagcctgggaactgatagtctcgggcaagctt

SEQ ID NO: 30802 - DNA, 60 bp, unidentified
  source 1..60: mol_type = unassigned DNA; note = methanogen bacteria
ggttcaagcagcggtttgggttatatgattctgacagcaacaagcttatttgatcctggt

SEQ ID NO: 30803 - DNA, 48 bp, unidentified
  source 1..48: mol_type = unassigned DNA; note = methanogen bacteria
ttagggattgttccgtcattcaatctgttcaattcatttttgacgggc

SEQ ID NO: 30804 - DNA, 33 bp, unidentified
  source 1..33: mol_type = unassigned DNA; note = methanogen bacteria
ttcgattcagataaggttttattcactgatggc

SEQ ID NO: 30805 - DNA, 63 bp, unidentified
  source 1..63: mol_type = unassigned DNA; note = methanogen bacteria
tttttaggaattcctatggcgaaaaatagtgctgaagcggcattacatagtatttttccgttc

SEQ ID NO: 30806 - DNA, 90 bp, unidentified
  source 1..90: mol_type = unassigned DNA; note = methanogen bacteria
ttaggattattttcttcatatatactgccgggtcctttggatgtagtaaattctgcatgggtagttattgaaaatggtaagcttcttaca

SEQ ID NO: 30807 - DNA, 63 bp, unidentified
  source 1..63: mol_type = unassigned DNA; note = methanogen bacteria
ataggttcaagcagcggtcttggatacatgattttaactgcaaccaatctatttgatacaggt

SEQ ID NO: 30808 - DNA, 51 bp, unidentified
  source 1..51: mol_type = unassigned DNA; note = methanogen bacteria
ggaatctatatcatatcttccgatatgataatgaattatacattattttca

SEQ ID NO: 30809 - DNA, 69 bp, unidentified
  source 1..69: mol_type = unassigned DNA; note = methanogen bacteria
tatgtagctgttttcgccccagaaattaatatggcggaagcaggaactcttttctttagccatatgtgg

SEQ ID NO: 30810 - DNA, 30 bp, unidentified
  source 1..30: mol_type = unassigned DNA; note = methanogen bacteria
atgggtgttcagaacataaatatacaatat

SEQ ID NO: 30811 - DNA, 84 bp, unidentified
  source 1..84: mol_type = unassigned DNA; note = methanogen bacteria
tttcatattgtaaatccctatattttgccaggcccgattgaggtttgcaattccgcttgggatttgatcttgtctggaaaactt

SEQ ID NO: 30812 - DNA, 60 bp, unidentified
  source 1..60: mol_type = unassigned DNA; note = methanogen bacteria
attggttcaagttccggtttgggatatatgattttacaggctacaagccgttttgatccg

SEQ ID NO: 30813 - DNA, 132 bp, unidentified; identical to SEQ ID NO: 30265
  source 1..132: mol_type = unassigned DNA; note = methanogen bacteria

SEQ ID NO: 30814 - DNA, 90 bp, unidentified
  source 1..90: mol_type = unassigned DNA; note = methanogen bacteria
ctgggaattgtcgacctatacaaattacccggtccaatcaccgtatgtcaggcagcttggatattaatattaaatggtaaacttctcaca

SEQ ID NO: 30815 - DNA, 60 bp, unidentified
  source 1..60: mol_type = unassigned DNA; note = methanogen bacteria
ggttccggcagcggtttaggttatatgattttaacagcaaccagtctgtttgaccccggt

SEQ ID NO: 30816 - DNA, 84 bp, unidentified
  source 1..84: mol_type = unassigned DNA; note = methanogen bacteria
ttaggattggtcaatccttatattctcccgggtccgattacagtatgtcaatcagcctggagtttaatattgtctggaaagctt

SEQ ID NO: 30817 - DNA, 60 bp, unidentified
  source 1..60: mol_type = unassigned DNA; note = methanogen bacteria
ggttcaagcagcggtttaggttacatgattctaacagccaccagcctgttcgatccgggt

SEQ ID NO: 30818 - DNA, 30 bp, unidentified
  source 1..30: mol_type = unassigned DNA; note = methanogen bacteria
aatcataaacacaatgctcacatctgttta

SEQ ID NO: 30819 - DNA, 84 bp, unidentified
  source 1..84: mol_type = unassigned DNA; note = methanogen bacteria
ttaggaataatttcggcatatattttgccaggtccggctgatgtgatttatgcagcttcatctgttattgttaatggaaaactt

SEQ ID NO: 30820 - DNA, 60 bp, unidentified
  source 1..60: mol_type = unassigned DNA; note = methanogen bacteria
gggtcaagtactggattaggttatatgattttaactgcttcaaatctttttgatactggt

SEQ ID NO: 30821 - DNA, 45 bp, unidentified
  source 1..45: mol_type = unassigned DNA; note = methanogen bacteria
tctgcaaattttaatctaaattcgatattacctttttcaatcacc

SEQ ID NO: 30822 - DNA, 36 bp, unidentified
  source 1..36: mol_type = unassigned DNA; note = methanogen bacteria
tttatagataaacaggaaattatttttaacaatgtt

SEQ ID NO: 30823 - DNA, 84 bp, unidentified
  source 1..84: mol_type = unassigned DNA; note = methanogen bacteria
ttaggtttagtcaatccttatatcttgccaggtccaataacagtttgtcaatctgcttgggagttaatattaaatggaaaactt

SEQ ID NO: 30824 - DNA, 60 bp, unidentified
  source 1..60: mol_type = unassigned DNA; note = methanogen bacteria
ggttcaagcagtggtttaggttatatgattttaacagcaactagtttattcgatccaggt

SEQ ID NO: 30825 - DNA, 45 bp, unidentified
  source 1..45: mol_type = unassigned DNA; note = methanogen bacteria
attttaaagggtgtaaattcatttaatgcatttaacacatttctg

SEQ ID NO: 30826 - DNA, 33 bp, unidentified
  source 1..33: mol_type = unassigned DNA; note = methanogen bacteria
ttggactcaggtgaaatattattcacaaataat

SEQ ID NO: 30827 - DNA, 90 bp, unidentified
  source 1..90: mol_type = unassigned DNA; note = methanogen bacteria
ttaggccttgtcaatccatatattctacctggtccaataactgttgttgaatcagcatggaccctaatattaaatggaaagcttctcaca

SEQ ID NO: 30828 - DNA, 60 bp, unidentified
  source 1..60: mol_type = unassigned DNA; note = methanogen bacteria
ggttcaagcagtggtttgggttatatgattttaacagctacaagtttatttgatccaggt

SEQ ID NO: 30829 - DNA, 84 bp, unidentified
  source 1..84: mol_type = unassigned DNA; note = methanogen bacteria
ttgggattgttttcttcatatatcttacctggccctcttgatgtaataaattctgcatgggtagtaattcaaaacggcaaactt

SEQ ID NO: 30830 - DNA, 63 bp, unidentified
  source 1..63: mol_type = unassigned DNA; note = methanogen bacteria
attggttcaagcagcggtttgggttacatgattttaaccgcaacaaacttgttcgatacaggt

SEQ ID NO: 30831 - DNA, 39 bp, unidentified; identical to SEQ ID NO: 24479
  source 1..39: mol_type = unassigned DNA; note = methanogen bacteria

SEQ ID NO: 30832 - DNA, 33 bp, unidentified
  source 1..33: mol_type = unassigned DNA; note = methanogen bacteria
acaacagtgctgggaaatgctggagtgaattat

SEQ ID NO: 30833 - DNA, 30 bp, unidentified
  source 1..30: mol_type = unassigned DNA; note = methanogen bacteria
ggtttgcttccaattccgttatttttgctt

SEQ ID NO: 30834 - DNA, 60 bp, unidentified
  source 1..60: mol_type = unassigned DNA; note = methanogen bacteria
ttaggaattcatatggcaaccaatactgctgatgcggcattacatagttttttcccgttt

SEQ ID NO: 30835 - DNA, 45 bp, unidentified
  source 1..45: mol_type = unassigned DNA; note = methanogen bacteria
ttagatattgttccatcatttaatctattcaattcatttttaaca

SEQ ID NO: 30836 - DNA, 33 bp, unidentified
  source 1..33: mol_type = unassigned DNA; note = methanogen bacteria
atggacccgaataagattttattcacaaacagt

SEQ ID NO: 30837 - DNA, 81 bp, unidentified
  source 1..81: mol_type = unassigned DNA; note = methanogen bacteria
aaggcattcctgggcacctcgcccatctcctgcatccctgccaccctcaccgactgcttccccgaatgggggctcaccctc

SEQ ID NO: 30838 - DNA, 57 bp, unidentified
  source 1..57: mol_type = unassigned DNA; note = methanogen bacteria
aattccattctggatattgttccgtcaggcaatgcattcaattcatttttaacaggc

SEQ ID NO: 30839 - DNA, 33 bp, unidentified
  source 1..33: mol_type = unassigned DNA; note = methanogen bacteria
ctggacccgaataagattttattcacaaataat

SEQ ID NO: 30840 - DNA, 33 bp, unidentified
  source 1..33: mol_type = unassigned DNA; note = methanogen bacteria
acaagtcaatatataagaagtggtggaacaata

SEQ ID NO: 30841 - DNA, 45 bp, unidentified
  source 1..45: mol_type = unassigned DNA; note = methanogen bacteria
attagatttgcttcagcagaatttttaataacaggtactggaatg

SEQ ID NO: 30842 - DNA, 72 bp, unidentified
  source 1..72: mol_type = unassigned DNA; note = methanogen bacteria
atttcaccagcaatcaattggatatcacaacaattatttaatttaattagtttaatagcaataggacatata

SEQ ID NO: 30843 - DNA, 57 bp, unidentified
  source 1..57: mol_type = unassigned DNA; note = methanogen bacteria
tttgcagaaaatcatgtacacaatgttattccatttattaatcaggaagttactcct

SEQ ID NO: 30844 - DNA, 201 bp, unidentified
  source 1..201: mol_type = unassigned DNA; note = methanogen bacteria
atgtcccctattgaccctgtaaaagcatatcttggccaaagaattgtaagtcaggaacagttggccatcatgggtgaatattggggaacgaatttatctttaggtgaaagagtaatgggatggcttcagactttggcatcgggaagcatgggtttttcattaatctatagggtccctgtaacagaagtcatcatacagaaa

SEQ ID NO: 30845 - DNA, 87 bp, unidentified
  source 1..87: mol_type = unassigned DNA; note = methanogen bacteria
gtgtatttaggctggttcccaatcggactttcagttcctatcggacagctatcggacacggtcacattctggcaatggttatacagg

SEQ ID NO: 30846 - DNA, 39 bp, unidentified
  source 1..39: mol_type = unassigned DNA; note = methanogen bacteria
ctattgacaattgtaggtttgaatccaattctgcaaaac

SEQ ID NO: 30847 - DNA, 57 bp, unidentified
  source 1..57: mol_type = unassigned DNA; note = methanogen bacteria
aatccgattccgtccgaattgatatatgacaaaataaactttttaaatgggggacta

SEQ ID NO: 30848 - DNA, 48 bp, unidentified
  source 1..48: mol_type = unassigned DNA; note = methanogen bacteria
aatttcattttaaaaaccacagcattgaatttcgcctcaaattcactt

SEQ ID NO: 30849 - DNA, 30 bp, unidentified
  source 1..30: mol_type = unassigned DNA; note = methanogen bacteria
gattcaaataatatcctgtttacaaatgac

SEQ ID NO: 30850 - DNA, 51 bp, unidentified
  source 1..51: mol_type = unassigned DNA; note = methanogen bacteria
gatcatgtcttgaatttcatcccatcatttggcctgtcacactcgataaca

SEQ ID NO: 30851 - DNA, 33 bp, unidentified
  source 1..33: mol_type = unassigned DNA; note = methanogen bacteria
attgattccggcaaggtgttgttcacgaatggc

SEQ ID NO: 30852 - DNA, 108 bp, unidentified
  source 1..108: mol_type = unassigned DNA; note = methanogen bacteria
attacagcttgtgtctatcgtccatgggtgcttgattcaagggtgcaacctctcaaagatgcatttcatggcgcttcaggatattcatttccaagtggacacaccact

SEQ ID NO: 30853 - DNA, 63 bp, unidentified
  source 1..63: mol_type = unassigned DNA; note = methanogen bacteria
acaaaatcatatcctatggattatgatgctgcaggtaaattgcttgttgatcctgcaaaattg

SEQ ID NO: 30854 - DNA, 51 bp, unidentified
  source 1..51: mol_type = unassigned DNA; note = methanogen bacteria
ttagatgatgttattaaagtatcagataatgtaatgtatgctgaacacgaa

SEQ ID NO: 30855 - DNA, 45 bp, unidentified
  source 1..45: mol_type = unassigned DNA; note = methanogen bacteria
ggtcttacccacagcattcaccaagcaactggaattaacgtttct

SEQ ID NO: 30856 - DNA, 114 bp, unidentified
  source 1..114: mol_type = unassigned DNA; note = methanogen bacteria
gtgaagataattgcttgtatatatcgtccatggatacttgaccccagagtacatccggttaaagaagctatacctactgcgacaggatattcatttccaagtggacatactaca

SEQ ID NO: 30857 - DNA, 66 bp, unidentified
  source 1..66: mol_type = unassigned DNA; note = methanogen bacteria
acaaaatcatacccattagattataattctgcaggaaaattgattgtagatcctgcaattatgacc

SEQ ID NO: 30858 - DNA, 30 bp, unidentified; identical to SEQ ID NO: 24467
  source 1..30: mol_type = unassigned DNA; note = methanogen bacteria

SEQ ID NO: 30859 - DNA, 39 bp, unidentified
  source 1..39: mol_type = unassigned DNA; note = methanogen bacteria
ttaacttatatgggagcaacttcttcttttgactccaat

SEQ ID NO: 30860 - DNA, 42 bp, unidentified
  source 1..42: mol_type = unassigned DNA; note = methanogen bacteria
tattttcattttcgttttaggttggggagtcagcggtgtcgc

SEQ ID NO: 30861 - DNA, 255 bp, unidentified
  source 1..255: mol_type = unassigned DNA; note = methanogen bacteria
atggccatatgtaataattgtacattcaccaataattatgcaaaaaacggcggtgcaatattcagccaaggagaattgtacttaaataactgtatttttaatgaaaacacaggatatggaacaggaaacgacatattaaatgtagacaatggaaaagtattcatgaatggtgaacaagtaaatggaacacaaggaactgtaaaatatgttaaaagcatatctgatttaagttcttcattaattacaactgttgcc

SEQ ID NO: 30862 - DNA, 96 bp, unidentified
  source 1..96: mol_type = unassigned DNA; note = methanogen bacteria
tatgcagcttatgcaattacttcagaccaatataatttagcattcaacagattaaatacagcaatatccattatcagtggaactgttgcatttggt

SEQ ID NO: 30863 - DNA, 126 bp, unidentified
  source 1..126: mol_type = unassigned DNA; note = methanogen bacteria
acaaacattaaaaatattgtaaatcaaggaacatataatggagtaattgaatttgaaggcggtacaataatagaatttgattctaaagactataagttctctggaaaatggaaatttacacaaaac

SEQ ID NO: 30864 - DNA, 87 bp, unidentified
  source 1..87: mol_type = unassigned DNA; note = methanogen bacteria
ttgaatttagttccttattatatcttgcctagtccattggatgtatgcaatgctgcattaaaattggtggcaaatggaaaattattg

SEQ ID NO: 30865 - DNA, 57 bp, unidentified
  source 1..57: mol_type = unassigned DNA; note = methanogen bacteria
gcttcaagcaaaggtttaggatacatgatcttgactgcaagtcaactattcgatcca

SEQ ID NO: 30866 - DNA, 48 bp, unidentified
  source 1..48: mol_type = unassigned DNA; note = methanogen bacteria
ggtttaatagaaactggatttggattatattcatttaattgttatttg

SEQ ID NO: 30867 - DNA, 57 bp, unidentified
  source 1..57: mol_type = unassigned DNA; note = methanogen bacteria
atagttgacaagtatgtcttggccaaaaaattcgcatttttagcaaatatggatcca

SEQ ID NO: 30868 - DNA, 45 bp, unidentified
  source 1..45: mol_type = unassigned DNA; note = methanogen bacteria
atcacccaagcacctgcaaccgataatccagcagcaaaatttgga

SEQ ID NO: 30869 - DNA, 84 bp, unidentified; identical to SEQ ID NO: 19861
  source 1..84: mol_type = unassigned DNA; note = methanogen bacteria

SEQ ID NO: 30870 - DNA, 93 bp, unidentified
  source 1..93: mol_type = unassigned DNA; note = methanogen bacteria
gcatccggttttaaatcaattggaatggacgttagtggattcggcatatttttacaaacaatggccaatgaaaaaagcagaacaagaggcacg

SEQ ID NO: 30871 - DNA, 114 bp, unidentified
  source 1..114: mol_type = unassigned DNA; note = methanogen bacteria
gcagatgaagctgcctttcagggatcaaacaatggcttgtttgcatttttctcaaatactaatggtactggctttcctatactggatagttcattgactgctattactcaggca

SEQ ID NO: 30872 - DNA, 51 bp, unidentified
  source 1..51: mol_type = unassigned DNA; note = methanogen bacteria
ccaggtcttgcagcattaggtaccggtgatgtaaccacacttgcaagtgct

SEQ ID NO: 30873 - DNA, 48 bp, unidentified
  source 1..48: mol_type = unassigned DNA; note = methanogen bacteria
aatttcattttaaaaaccacagcactgaatctggcatccaattccctt

SEQ ID NO: 30874 - DNA, 30 bp, unidentified
  source 1..30: mol_type = unassigned DNA; note = methanogen bacteria
gattcaaacaatgtactgtttacaaatgat

SEQ ID NO: 30875 - DNA, 30 bp, unidentified
  source 1..30: mol_type = unassigned DNA; note = methanogen bacteria
aatcccagtttaactggcccttcaagtatg

SEQ ID NO: 30876 - DNA, 114 bp, unidentified
  source 1..114: mol_type = unassigned DNA; note = methanogen bacteria
ttgaaggtttttgcctgtgtttatcgaccatggatactagactctagagttcaccctgtaaaagaagcaattactactgcaacaggatattcgtttccaagtggacatactaca

SEQ ID NO: 30877 - DNA, 66 bp, unidentified
  source 1..66: mol_type = unassigned DNA; note = methanogen bacteria
acaaaatcctacccattagattatgatgctgcaggaaaattaattgtagaccctgcaatattaaca

SEQ ID NO: 30878 - DNA, 33 bp, unidentified
  source 1..33: mol_type = unassigned DNA; note = methanogen bacteria
ggatttgtaactggttcaattaattttggagca

SEQ ID NO: 30879 - DNA, 33 bp, unidentified
  source 1..33: mol_type = unassigned DNA; note = methanogen bacteria
aattgtcctttagactttgaaccttatcctagt

SEQ ID NO: 30880 - DNA, 54 bp, unidentified
  source 1..54: mol_type = unassigned DNA; note = methanogen bacteria
aacctctatgcaacttcagatgcaagagcaatggcatatatcggaaatttggca

SEQ ID NO: 30881 - DNA, 39 bp, unidentified
  source 1..39: mol_type = unassigned DNA; note = methanogen bacteria
gtgggaatcagttcccttggtaatgctgctcttggtgca

SEQ ID NO: 30882 - DNA, 93 bp, unidentified
  source 1..93: mol_type = unassigned DNA; note = methanogen bacteria
cttcatttagtaaaaccttatgtattgccaagtcctgttgacgtattatattctgcaattgatattttacaatctggaaaactagttcaaaat

SEQ ID NO: 30883 - DNA, 63 bp, unidentified
  source 1..63: mol_type = unassigned DNA; note = methanogen bacteria
attggttcaagtagtggtttgggatatatgattttaacagctacaaacctctttgatacaggt

SEQ ID NO: 30884 - DNA, 60 bp, unidentified
  source 1..60: mol_type = unassigned DNA; note = methanogen bacteria
gcattgcccggagtcgaattgttaactgaaacggattttataacttttttacaagcaaat

SEQ ID NO: 30885 - DNA, 36 bp, unidentified
  source 1..36: mol_type = unassigned DNA; note = methanogen bacteria
aaattaccttctgttactggaagttgttctcaccct

SEQ ID NO: 30886 - DNA, 30 bp, unidentified
  source 1..30: mol_type = unassigned DNA; note = methanogen bacteria
gcttttccaaccccatcattcgggtccgca

SEQ ID NO: 30887 - DNA, 45 bp, unidentified
  source 1..45: mol_type = unassigned DNA; note = methanogen bacteria
gcatttagcatattttccattacagggatggaaaatgaaatattt

SEQ ID NO: 30888 - DNA, 45 bp, unidentified
  source 1..45: mol_type = unassigned DNA; note = methanogen bacteria
tataataagaagaatacctatgtaaggatatatgaaagtcagaaa

SEQ ID NO: 30889 - DNA, 51 bp, unidentified
  source 1..51: mol_type = unassigned DNA; note = methanogen bacteria
ttttttgtacaaagggatactgtaagatattatacagaaaataatgatact

SEQ ID NO: 30890 - DNA, 117 bp, unidentified
  source 1..117: mol_type = unassigned DNA; note = methanogen bacteria
tatacacagaataatgatacagtaaatctgaatattgatgtcaaagccaaagaattggaatgggtaaatgctgattttaaactgcatgatcaatttatgataatcaatagagaaaaa

SEQ ID NO: 30891 - DNA, 90 bp, unidentified
  source 1..90: mol_type = unassigned DNA; note = methanogen bacteria
cttcatttagtaaagccttttatattgccaagtcctgttggtgtgttgaattctgcaattaatattttacaatcaggaaaattatttaaa

SEQ ID NO: 30892 - DNA, 60 bp, unidentified
  source 1..60: mol_type = unassigned DNA; note = methanogen bacteria
attggttcaagtagtggtttaggatatatgattttaacagcttcaaacttgtttgataca

SEQ ID NO: 30893 - DNA, 30 bp, unidentified
  source 1..30: mol_type = unassigned DNA; note = methanogen bacteria
gttaaagaacccgttaaagaacctgttaaa

SEQ ID NO: 30894 - DNA, 30 bp, unidentified
  source 1..30: mol_type = unassigned DNA; note = methanogen bacteria
atgattatagaaaatattgacattccccca

SEQ ID NO: 30895 - DNA, 30 bp, unidentified
  source 1..30: mol_type = unassigned DNA; note = methanogen bacteria
ccgttggactttgaaccgtttccaaatttc

SEQ ID NO: 30896 - DNA, 48 bp, unidentified
  source 1..48: mol_type = unassigned DNA; note = methanogen bacteria
catttatttgcaacagatgaagctcgtgaattagcttattctggagat

SEQ ID NO: 30897 - DNA, 57 bp, unidentified
  source 1..57: mol_type = unassigned DNA; note = methanogen bacteria
gctttgccgggggttcaattgttgactgaaggggattttatagcttttttacaatca

SEQ ID NO: 30898 - DNA, 90 bp, unidentified
  source 1..90: mol_type = unassigned DNA; note = methanogen bacteria
atttctttggttaaaccttatgtattgccgagtccggttgctgtattatattctgcaatcagcattatacaatctggaaaattgcttcaa

SEQ ID NO: 30899 - DNA, 60 bp, unidentified
  source 1..60: mol_type = unassigned DNA; note = methanogen bacteria
attggttcaagcagtggtttaggatatatgattttaacagctacaaacttatttgatcca

SEQ ID NO: 30900 - DNA, 87 bp, unidentified
  source 1..87: mol_type = unassigned DNA; note = methanogen bacteria
gaaagattaaattttcccgaattcaatatggaagaaggtcttgttggctttgaaaaaatattaatgttattatttaatcatgatata

SEQ ID NO: 30901 - DNA, 33 bp, unidentified
  source 1..33: mol_type = unassigned DNA; note = methanogen bacteria
tctactgcaatggttagttccaacatagcgggg

SEQ ID NO: 30902 - DNA, 39 bp, unidentified
  source 1..39: mol_type = unassigned DNA; note = methanogen bacteria
aacactgctgttaatgaaagtacctttgtaaccgatcct

SEQ ID NO: 30903 - DNA, 36 bp, unidentified
  source 1..36: mol_type = unassigned DNA; note = methanogen bacteria
aattacaatccagtagcagtgaactggattggaaca

SEQ ID NO: 30904 - DNA, 93 bp, unidentified
  source 1..93: mol_type = unassigned DNA; note = methanogen bacteria
tccagttttaatttcgcttggggaaatgatgcaggttcatttttcactaacgttgttggcggaagccataatttgaattcaatgaccactttt

SEQ ID NO: 30905 - DNA, 129 bp, unidentified
  source 1..129: mol_type = unassigned DNA; note = methanogen bacteria
accttgcctggtgctggaatcggtatcaatactctgttgacgcctgactggtcaaaattgcttgatgttaacatctggcttgctaagtatgggtcaggcaattgcgattacttatgcaagttatttgcc

SEQ ID NO: 30906 - DNA, 81 bp, unidentified
  source 1..81: mol_type = unassigned DNA; note = methanogen bacteria
atgtgcttgcttgaagaattaattaaaaatattagtaaggattggtctactttagataaaaatgaattgaaatcttatatg

SEQ ID NO: 30907 - DNA, 33 bp, unidentified
  source 1..33: mol_type = unassigned DNA; note = methanogen bacteria
atgggagccttccttactgctgcggctgtggga

SEQ ID NO: 30908 - DNA, 69 bp, unidentified
  source 1..69: mol_type = unassigned DNA; note = methanogen bacteria
catccaatcccatccgaacaaatttacgataagattatgtttttaaatggaggtgcatggaatggaggt

SEQ ID NO: 30909 - DNA, 33 bp, unidentified
  source 1..33: mol_type = unassigned DNA; note = methanogen bacteria
tcaggatttctgttcagtgctgaggctgctggc

SEQ ID NO: 30910 - DNA, 60 bp, unidentified
  source 1..60: mol_type = unassigned DNA; note = methanogen bacteria
ttctcaggaacaccaactgcaagcaatgcagctttagaatcaagcatggacattatattt

SEQ ID NO: 30911 - DNA, 45 bp, unidentified
  source 1..45: mol_type = unassigned DNA; note = methanogen bacteria
ggaatcttcactggaactttaggatttgatatggcagcagcagga

SEQ ID NO: 30912 - DNA, 30 bp, unidentified
  source 1..30: mol_type = unassigned DNA; note = methanogen bacteria
gctaatgcagttggaggatatggtgaaagc

SEQ ID NO: 30913 - DNA, 30 bp, unidentified
  source 1..30: mol_type = unassigned DNA; note = methanogen bacteria
acaggaatcttaggatttaatatggcagca

SEQ ID NO: 30914 - DNA, 39 bp, unidentified
  source 1..39: mol_type = unassigned DNA; note = methanogen bacteria
cgttctggtggcattcatcatcagcataatcatgtacgg

SEQ ID NO: 30915 - DNA, 39 bp, unidentified
  source 1..39: mol_type = unassigned DNA; note = methanogen bacteria
atttcaggcgctcttttaggtgctgatgtgatgggcgga

SEQ ID NO: 30916 - DNA, 33 bp, unidentified
  source 1..33: mol_type = unassigned DNA; note = methanogen bacteria
tcaggattagtgttcggttccagtatggttggc

SEQ ID NO: 30917 - DNA, 30 bp, unidentified
  source 1..30: mol_type = unassigned DNA; note = methanogen bacteria
agtgcaatcggaggatatggtgaatctgta

SEQ ID NO: 30918 - DNA, 42 bp, unidentified
  source 1..42: mol_type = unassigned DNA; note = methanogen bacteria
ggaatcttcactggatctttaggatttgatatggcagcagga

SEQ ID NO: 30919 - DNA, 30 bp, unidentified
  source 1..30: mol_type = unassigned DNA; note = methanogen bacteria
agttcaatcggaggatatggtgaatctgca

SEQ ID NO: 30920 - DNA, 36 bp, unidentified
  source 1..36: mol_type = unassigned DNA; note = methanogen bacteria
atatttaccggaactttaggatttgctatggctgct

SEQ ID NO: 30921 - DNA, 39 bp, unidentified
  source 1..39: mol_type = unassigned DNA; note = methanogen bacteria
atctccggattcgctttaggtgccgatgctgcaagtggt

SEQ ID NO: 30922 - DNA, 36 bp, unidentified
  source 1..36: mol_type = unassigned DNA; note = methanogen bacteria
ttatccggattcgtgttcggttccaatgtggctggc

SEQ ID NO: 30923 - DNA, 57 bp, unidentified
  source 1..57: mol_type = unassigned DNA; note = methanogen bacteria
ttcatcaataatggacagactttccctagtatttacaacataggaataacaatgcca

SEQ ID NO: 30924 - DNA, 63 bp, unidentified
  source 1..63: mol_type = unassigned DNA; note = methanogen bacteria
tccggtactccagcatcatccattggtgcactaggtggtgtaggaccattcggagatattgga

SEQ ID NO: 30925 - DNA, 30 bp, unidentified
  source 1..30: mol_type = unassigned DNA; note = methanogen bacteria
aactactttgtaacaggtgcaaacgcattt

SEQ ID NO: 30926 - DNA, 39 bp, unidentified
  source 1..39: mol_type = unassigned DNA; note = methanogen bacteria
atctccggattcgctttaggtgccgatgctgcaagtgga

SEQ ID NO: 30927 - DNA, 30 bp, unidentified
  source 1..30: mol_type = unassigned DNA; note = methanogen bacteria
gacagcagcctctacgcacaggacagcgac

SEQ ID NO: 30928 - DNA, 66 bp, unidentified; identical to SEQ ID NO: 30287
  source 1..66: mol_type = unassigned DNA; note = methanogen bacteria

SEQ ID NO: 30929 - DNA, 30 bp, unidentified
  source 1..30: mol_type = unassigned DNA; note = methanogen bacteria
ttcaataccgaacctatctctgtcccagac

SEQ ID NO: 30930 - DNA, 75 bp, unidentified
  source 1..75: mol_type = unassigned DNA; note = methanogen bacteria
ttccccacgccacctgaatttatttcatctcaattaattaatattgatgaattaattaataattttttgagtatg

SEQ ID NO: 30931 - DNA, 96 bp, unidentified
  source 1..96: mol_type = unassigned DNA; note = methanogen bacteria
ttcgatccaaccattaatagtttatatgaaagtttatggtttgtatttcaaacaataacaactgtaggttatggtgacataattcctcagagtcag

SEQ ID NO: 30932 - DNA, 42 bp, unidentified
  source 1..42: mol_type = unassigned DNA; note = methanogen bacteria
atagtaactagccttgcagagtatgcacactacgctttacct

SEQ ID NO: 30933 - DNA, 48 bp, unidentified
  source 1..48: mol_type = unassigned DNA; note = methanogen bacteria
tttgggcatatgctttttacataccaaccggtattgaattatattata

SEQ ID NO: 30934 - DNA, 39 bp, unidentified
  source 1..39: mol_type = unassigned DNA; note = methanogen bacteria
ttttcaggtcttctgttcagtgctgaagcagcaagcgga

SEQ ID NO: 30935 - DNA, 111 bp, unidentified
  source 1..111: mol_type = unassigned DNA; note = methanogen bacteria
gcagatgaagcggcttttcaaagttccaatgggctgctcaatatgttttcaactaccaacggcacaggacttcccatactggatagttcattaactgctataacacaggca

SEQ ID NO: 30936 - DNA, 51 bp, unidentified
  source 1..51: mol_type = unassigned DNA; note = methanogen bacteria
ccgggtcttgcagcactgggtacaggagatgtcacaacccttgcaagcgcc

SEQ ID NO: 30937 - DNA, 39 bp, unidentified
  source 1..39: mol_type = unassigned DNA; note = methanogen bacteria
ctttccactgctattttaggtattaatccaagttcaata

SEQ ID NO: 30938 - DNA, 81 bp, unidentified
  source 1..81: mol_type = unassigned DNA; note = methanogen bacteria
ttcaattttccaacttttgattttgaggagttttttttgaaacttccagaaacaattcatttgatttacactcataatcct

SEQ ID NO: 30939 - DNA, 36 bp, unidentified
  source 1..36: mol_type = unassigned DNA; note = methanogen bacteria
tcatatgaatcaatactcaatctggcttctacaagc

SEQ ID NO: 30940 - DNA, 51 bp, unidentified
  source 1..51: mol_type = unassigned DNA; note = methanogen bacteria
gcgccggttatctcactgcctattgcaggaaagccaatgaatttttcaatg

SEQ ID NO: 30941 - DNA, 54 bp, unidentified
  source 1..54: mol_type = unassigned DNA; note = methanogen bacteria
ccaactcttgcaacaactttgaatgcccctgtttcagagcttgaattgatttca

SEQ ID NO: 30942 - DNA, 30 bp, unidentified
  source 1..30: mol_type = unassigned DNA; note = methanogen bacteria
caaatcgcttctgcatcgccccttaactcc

SEQ ID NO: 30943 - DNA, 51 bp, unidentified
  source 1..51: mol_type = unassigned DNA; note = methanogen bacteria
gcaatgggcggatacaatttgatgcctgttgcaaactcagagacattgact

SEQ ID NO: 30944 - DNA, 45 bp, unidentified
  source 1..45: mol_type = unassigned DNA; note = methanogen bacteria
tggcgtgcagggagtcatcattctggtcctctccacagtcacaac

SEQ ID NO: 30945 - DNA, 33 bp, unidentified
  source 1..33: mol_type = unassigned DNA; note = methanogen bacteria
ataagatcacttagtggtgccggattaaactcc

SEQ ID NO: 30946 - DNA, 33 bp, unidentified
  source 1..33: mol_type = unassigned DNA; note = methanogen bacteria
gtaaatggagcaaaaggcacgtatcaattttca

SEQ ID NO: 30947 - DNA, 30 bp, unidentified
  source 1..30: mol_type = unassigned DNA; note = methanogen bacteria
gggcttgtaacttcaacttcatctccgcaa

SEQ ID NO: 30948 - DNA, 87 bp, unidentified
  source 1..87: mol_type = unassigned DNA; note = methanogen bacteria
ttatttgattttccaagttttgaaatggaggagcttgttttgaagcttcccgaaacaattcatcagatttacactcacaatccagtc

SEQ ID NO: 30949 - DNA, 39 bp, unidentified
  source 1..39: mol_type = unassigned DNA; note = methanogen bacteria
ttttccggattcattttaggtgttgacgcaagcggaata

SEQ ID NO: 30950 - DNA, 36 bp, unidentified
  source 1..36: mol_type = unassigned DNA; note = methanogen bacteria
ggattttccggattcatgttaggtgctgatgcaggt

SEQ ID NO: 30951 - DNA, 36 bp, unidentified
  source 1..36: mol_type = unassigned DNA; note = methanogen bacteria
atttccggttcaattttaggtgttgacgcaggaggc

SEQ ID NO: 30952 - DNA, 39 bp, unidentified
  source 1..39: mol_type = unassigned DNA; note = methanogen bacteria
ggaatttcaggcgctcttttaggtgctaatacaggtgga

SEQ ID NO: 30953 - DNA, 30 bp, unidentified
  source 1..30: mol_type = unassigned DNA; note = methanogen bacteria
gagagtatattaagctcaacattctttagt

SEQ ID NO: 30954 - DNA, 51 bp, unidentified
  source 1..51: mol_type = unassigned DNA; note = methanogen bacteria
ccaagctttctctttagcgctcaaaactttagctttaatttgacaatgatt

SEQ ID NO: 30955 - DNA, 51 bp, unidentified
  source 1..51: mol_type = unassigned DNA; note = methanogen bacteria
aatatggctccagtatttgctaatccatctactgaactaagtttaatgcct

SEQ ID NO: 30956 - DNA, 48 bp, unidentified
  source 1..48: mol_type = unassigned DNA; note = methanogen bacteria
atcgcgtcggctaccgacagcctcggggacagcgtggacgtcgcaggg

SEQ ID NO: 30957 - DNA, 42 bp, unidentified
  source 1..42: mol_type = unassigned DNA; note = methanogen bacteria
ggattttccggagccatgttaggcattgacccaacaggaata

SEQ ID NO: 30958 - DNA, 66 bp, unidentified
  source 1..66: mol_type = unassigned DNA; note = methanogen bacteria
aatccagtatcctcacaggcaatctatgacaggataatctttttaaatgggggatcacattggatg

SEQ ID NO: 30959 - DNA, 90 bp, unidentified
  source 1..90: mol_type = unassigned DNA; note = methanogen bacteria
gtatttgattttccaagttttgaagttgaggaattcattttgaagtttcccgaaacaattcatttgatttacacacatagtcctgttgat

SEQ ID NO: 30960 - DNA, 39 bp, unidentified
  source 1..39: mol_type = unassigned DNA; note = methanogen bacteria
ttttccggagcgattttaggtgcaaatccgggcggtata

SEQ ID NO: 30961 - DNA, 30 bp, unidentified
  source 1..30: mol_type = unassigned DNA; note = methanogen bacteria
tatgaaagtttaataggattgacagtgaat

SEQ ID NO: 30962 - DNA, 45 bp, unidentified
  source 1..45: mol_type = unassigned DNA; note = methanogen bacteria
ccaagctttgtatttgacacagccaatttctcaatgactatctca

SEQ ID NO: 30963 - DNA, 54 bp, unidentified
  source 1..54: mol_type = unassigned DNA; note = methanogen bacteria
gtccctacaataagccaggtgcttgagtatccatctacacaattgactttaatg

SEQ ID NO: 30964 - DNA, 33 bp, unidentified
  source 1..33: mol_type = unassigned DNA; note = methanogen bacteria
tatgaattcatactcaatctggcttctacaagc

SEQ ID NO: 30965 - DNA, 33 bp, unidentified
  source 1..33: mol_type = unassigned DNA; note = methanogen bacteria
ttgcctgttgcgggaaagcctatgaatttcaca

SEQ ID NO: 30966 - DNA, 51 bp, unidentified
  source 1..51: mol_type = unassigned DNA; note = methanogen bacteria
actcttgcaaccactttgaatgccccggtttccgagcttgaattgatttca

SEQ ID NO: 30967 - DNA, 105 bp, unidentified
  source 1..105: mol_type = unassigned DNA; note = methanogen bacteria
gctaatgaagctatgtatcaatctggtggaggattgtcagtatcttcaggtatgaattggactagccaatttctggatacttcaatgtctgccattactcaaggt

SEQ ID NO: 30968 - DNA, 51 bp, unidentified
  source 1..51: mol_type = unassigned DNA; note = methanogen bacteria
cctggtcttgcagcattaggtaccggtgatgtcaccgctcttgcaagtgcg

SEQ ID NO: 30969 - DNA, 30 bp, unidentified
  source 1..30: mol_type = unassigned DNA; note = methanogen bacteria
tatgaaactgtaataagcttgacagtaaat

SEQ ID NO: 30970 - DNA, 45 bp, unidentified
  source 1..45: mol_type = unassigned DNA; note = methanogen bacteria
ccaagttttgtatttaattctgctaatgtatcattgactattaca

SEQ ID NO: 30971 - DNA, 36 bp, unidentified
  source 1..36: mol_type = unassigned DNA; note = methanogen bacteria
ggcaaagtgcttgaaaatccatctactcaacttact

SEQ ID NO: 30972 - DNA, 57 bp, unidentified
  source 1..57: mol_type = unassigned DNA; note = methanogen bacteria
aatccaatttcctctcagctgatatatgataagattatattcttaaacggaggaatg

SEQ ID NO: 30973 - DNA, 39 bp, unidentified
  source 1..39: mol_type = unassigned DNA; note = methanogen bacteria
atttcaggtgcggttttaggtgctgacccaagcggagta

SEQ ID NO: 30974 - DNA, 42 bp, unidentified
  source 1..42: mol_type = unassigned DNA; note = methanogen bacteria
actgcatttgatgaaggccacagctttgaagcattattcaca

SEQ ID NO: 30975 - DNA, 39 bp, unidentified
  source 1..39: mol_type = unassigned DNA; note = methanogen bacteria
gcaggccttgagggattaactttaaaactaattataact

SEQ ID NO: 30976 - DNA, 78 bp, unidentified
  source 1..78: mol_type = unassigned DNA; note = methanogen bacteria
ggccagaattgggctccatttgtaccctgggtatgtccatatctaatcgcatcaggcgagatagcaaaatatggtgca

SEQ ID NO: 30977 - DNA, 96 bp, unidentified
  source 1..96: mol_type = unassigned DNA; note = methanogen bacteria
ccggaacaggttgctgaatatgtaaagcctattgcagatgcatttgaagagaatgtagcaaacggaacagtggaattaactacgcaatcattgttt

SEQ ID NO: 30978 - DNA, 48 bp, unidentified
  source 1..48: mol_type = unassigned DNA; note = methanogen bacteria
ggatatacaggagcaaatttcaatctcttggcatatgccgctttagtt

SEQ ID NO: 30979 - DNA, 39 bp, unidentified
  source 1..39: mol_type = unassigned DNA; note = methanogen bacteria
gcaaaggttttcctttcatttttcggaattggcatagct

SEQ ID NO: 30980 - DNA, 30 bp, unidentified
  source 1..30: mol_type = unassigned DNA; note = methanogen bacteria
tatgaaagcttaataggattgacagtgaat

SEQ ID NO: 30981 - DNA, 45 bp, unidentified; identical to SEQ ID NO: 30962
  source 1..45: mol_type = unassigned DNA; note = methanogen bacteria

SEQ ID NO: 30982 - DNA, 51 bp, unidentified
  source 1..51: mol_type = unassigned DNA; note = methanogen bacteria
gtgcctacaataagccaggtgttagagtatccatctacacaattgacttta

SEQ ID NO: 30983 - DNA, 126 bp, unidentified
  source 1..126: mol_type = unassigned DNA; note = methanogen bacteria
acttgtccttactgcggaagcgaatcagtttatgagactggaggatactacagatgcgccgagtgcggcaattccatttatagtcctgacgagttggaattaggttactgggacggttatatggag

SEQ ID NO: 30984 - DNA, 99 bp, unidentified
  source 1..99: mol_type = unassigned DNA; note = methanogen bacteria
gcagatagtatttcagagtacatccagcctatggtggataattttcagaagcaggtggatgaaggtgtaattaccctaaccacccattcaattttcaca

SEQ ID NO: 30985 - DNA, 33 bp, unidentified
  source 1..33: mol_type = unassigned DNA; note = methanogen bacteria
tattttggtgcagatttcaatatttacgcttac

SEQ ID NO: 30986 - DNA, 111 bp, unidentified
  source 1..111: mol_type = unassigned DNA; note = methanogen bacteria
aagcatgggttaattagtttttatttttttaattctttttttactcttttattctttttattcttattactcttttcattttttttaatttttttaatttttttagatttt

SEQ ID NO: 30987 - DNA, 30 bp, unidentified
  source 1..30: mol_type = unassigned DNA; note = methanogen bacteria
ggaaatttatcaggcgctgcatcatctgca

SEQ ID NO: 30988 - DNA, 42 bp, unidentified
  source 1..42: mol_type = unassigned DNA; note = methanogen bacteria
ggaatttccggagcagttttaggtgccgacccaagcggaata

SEQ ID NO: 30989 - DNA, 36 bp, unidentified
  source 1..36: mol_type = unassigned DNA; note = methanogen bacteria
ttttcaggattaatgttgggtattaatacatcaggc

SEQ ID NO: 30990 - DNA, 39 bp, unidentified
  source 1..39: mol_type = unassigned DNA; note = methanogen bacteria
ggtttctccactgctgttttaggtattgatccaactgga

SEQ ID NO: 30991 - DNA, 57 bp, unidentified
  source 1..57: mol_type = unassigned DNA; note = methanogen bacteria
aatccaatcccatcggaaatcatatatgaaaaactgatgttcgtaagtggaggaatg

SEQ ID NO: 30992 - DNA, 33 bp, unidentified
  source 1..33: mol_type = unassigned DNA; note = methanogen bacteria
gttacaagcgcatttctaggtgctaatgccgga

SEQ ID NO: 30993 - DNA, 51 bp, unidentified
  source 1..51: mol_type = unassigned DNA; note = methanogen bacteria
gaggaattcggtgaattttcagaaacaataacatttcaaacctttcttact

SEQ ID NO: 30994 - DNA, 45 bp, unidentified
  source 1..45: mol_type = unassigned DNA; note = methanogen bacteria
gctacaggagcaacaggattaaccgcaaatatagtgcttgacagt

SEQ ID NO: 30995 - DNA, 84 bp, unidentified
  source 1..84: mol_type = unassigned DNA; note = methanogen bacteria
tcacacaaatatggaatctactttccatggtcaagtccatatctgatagctagcggagaaatagcccaatacaccaataactat

SEQ ID NO: 30996 - DNA, 33 bp, unidentified
  source 1..33: mol_type = unassigned DNA; note = methanogen bacteria
atctccactgctgttttaggtattaacccaagt

SEQ ID NO: 30997 - DNA, 81 bp, unidentified
  source 1..81: mol_type = unassigned DNA; note = methanogen bacteria
tttgattttcctaggtttgaaatagaggagtttgtttttaactttcaagaaacatttcatttaatctacaatcataatcct

SEQ ID NO: 30998 - DNA, 30 bp, unidentified
  source 1..30: mol_type = unassigned DNA; note = methanogen bacteria
atgtttgttcctcaggcgttcattagcatg

SEQ ID NO: 30999 - DNA, 51 bp, unidentified
  source 1..51: mol_type = unassigned DNA; note = methanogen bacteria
actatgaatgtaaatggaattcccgccaattcaagaggattaattgtaatg

SEQ ID NO: 31000 - DNA, 33 bp, unidentified
  source 1..33: mol_type = unassigned DNA; note = methanogen bacteria
actccaagaccagagggagtcattattgccaat

SEQ ID NO: 31001 - DNA, 159 bp, unidentified
  source 1..159: mol_type = unassigned DNA; note = methanogen bacteria
attacaaaagcgacacccgccaacattaatgatggagatgccatcttaggaaatttcaatggagtcagtgatgaaatcaccattagaatatatgactcaaccgacagtcaagtagattccattgaaaagaattatgatgtcgtgaatattagaaatttt

SEQ ID NO: 31002 - DNA, 45 bp, unidentified
  source 1..45: mol_type = unassigned DNA; note = methanogen bacteria
atgtctgctggaggaagtggagcacctgcagaaggtgctgtagat

SEQ ID NO: 31003 - DNA, 42 bp, unidentified
  source 1..42: mol_type = unassigned DNA; note = methanogen bacteria
agtgtagcagcagctttcaaattaaccggattagaaattgct

SEQ ID NO: 31004 - DNA, 30 bp, unidentified
  source 1..30: mol_type = unassigned DNA; note = methanogen bacteria
tatgaaactgtcatcagcttgacagtgaat

SEQ ID NO: 31005 - DNA, 45 bp, unidentified
  source 1..45: mol_type = unassigned DNA; note = methanogen bacteria
tctccaagctttgtattcaatactgccaatatttcattgaatgtc

SEQ ID NO: 31006 - DNA, 51 bp, unidentified
  source 1..51: mol_type = unassigned DNA; note = methanogen bacteria
ccaacaattggaaaagtgcttgaaaatccatctactgaactcactttaatg

SEQ ID NO: 31007 - DNA, 33 bp, unidentified
  source 1..33: mol_type = unassigned DNA; note = methanogen bacteria
acaagtcaaataacttattttataaattcgtac

SEQ ID NO: 31008 - DNA, 30 bp, unidentified
  source 1..30: mol_type = unassigned DNA; note = methanogen bacteria
atggcagcccctacagttggtttgggtgcc

SEQ ID NO: 31009 - DNA, 60 bp, unidentified
  source 1..60: mol_type = unassigned DNA; note = methanogen bacteria
cctaatataattcaagtattcaacaaatcaatgaaatacatgacaattccttcattgaat

SEQ ID NO: 31010 - DNA, 120 bp, unidentified
  source 1..120: mol_type = unassigned DNA; note = methanogen bacteria
atgtcaggtattttattaactaaaacttctacttttattattggacccgttgcctcacttcttggttatttgatgagtggtatctttaccattttggaaaaaattggcattcccaatata

SEQ ID NO: 31011 - DNA, 33 bp, unidentified
  source 1..33: mol_type = unassigned DNA; note = methanogen bacteria
tttaccaacatatttaagattcctcagacaagt

SEQ ID NO: 31012 - DNA, 36 bp, unidentified
  source 1..36: mol_type = unassigned DNA; note = methanogen bacteria
atcactttaatccagtcaacaattagcacactggat

SEQ ID NO: 31013 - DNA, 42 bp, unidentified
  source 1..42: mol_type = unassigned DNA; note = methanogen bacteria
gtaggttcaatatcaggaatatttgcaagtattgatactgta

SEQ ID NO: 31014 - DNA, 33 bp, unidentified
  source 1..33: mol_type = unassigned DNA; note = methanogen bacteria
tatcgctccgcatttacctcacagactgcagta

SEQ ID NO: 31015 - DNA, 45 bp, unidentified
  source 1..45: mol_type = unassigned DNA; note = methanogen bacteria
acaataggctttgagaatatcgtaagaatgattatgggaatagca

SEQ ID NO: 31016 - DNA, 60 bp, unidentified
  source 1..60: mol_type = unassigned DNA; note = methanogen bacteria
ggtgcaatcggaatcattccatacgatatcttttattcattggaaacaattaccaattgg

SEQ ID NO: 31017 - DNA, 48 bp, unidentified
  source 1..48: mol_type = unassigned DNA; note = methanogen bacteria
gcagacataaatcatggtgcaatgatgttgttttcaataattagtgca

SEQ ID NO: 31018 - DNA, 39 bp, unidentified
  source 1..39: mol_type = unassigned DNA; note = methanogen bacteria
gcatttgatgaaggccacactttcgaattgctgttcagc

SEQ ID NO: 31019 - DNA, 42 bp, unidentified
  source 1..42: mol_type = unassigned DNA; note = methanogen bacteria
gcagggcttgatggattcagtctaaaactcttcatcgatagc

SEQ ID NO: 31020 - DNA, 81 bp, unidentified
  source 1..81: mol_type = unassigned DNA; note = methanogen bacteria
ggccagacatgggcaccatatgttccatgggtgtgtccatatttgattgcatccggcgagattgcagagtatagttcaagc

SEQ ID NO: 31021 - DNA, 42 bp, unidentified
  source 1..42: mol_type = unassigned DNA; note = methanogen bacteria
acatcatttggtgaaggacagacttttgaggcattgtttact

SEQ ID NO: 31022 - DNA, 42 bp, unidentified
  source 1..42: mol_type = unassigned DNA; note = methanogen bacteria
gcaggtcttgacggatttagtttaagcctatttgccgaatgt

SEQ ID NO: 31023 - DNA, 81 bp, unidentified
  source 1..81: mol_type = unassigned DNA; note = methanogen bacteria
ggtcaaaactgggcaccgtttgttccttgggtatgcccatatttaatcgcatctggtgaaatagcacaatatggtgtaagc

SEQ ID NO: 31024 - DNA, 63 bp, unidentified
  source 1..63: mol_type = unassigned DNA; note = methanogen bacteria
atgcattatcctcttgctggtaatggaattcttccaatagccgaacaactaagccctacattt

SEQ ID NO: 31025 - DNA, 42 bp, unidentified
  source 1..42: mol_type = unassigned DNA; note = methanogen bacteria
actgcctttgatgagggcggggcttttgaagccttatttact

SEQ ID NO: 31026 - DNA, 42 bp, unidentified
  source 1..42: mol_type = unassigned DNA; note = methanogen bacteria
gcaggtcttgacggattcagcttaaagctgtttgtggatagt

SEQ ID NO: 31027 - DNA, 81 bp, unidentified
  source 1..81: mol_type = unassigned DNA; note = methanogen bacteria
ggtcaaaactgggcaccatttgttccttgggtatctccatatctgatagcatccggagaaatagcagagtatggtgcaagt

SEQ ID NO: 31028 - DNA, 36 bp, unidentified
  source 1..36: mol_type = unassigned DNA; note = methanogen bacteria
acagatcagattacggatttaatttatacgtataac

SEQ ID NO: 31029 - DNA, 30 bp, unidentified
  source 1..30: mol_type = unassigned DNA; note = methanogen bacteria
cttgtggcgcctactgtaggtttagggttg

SEQ ID NO: 31030 - DNA, 57 bp, unidentified
  source 1..57: mol_type = unassigned DNA; note = methanogen bacteria
ccgaatattactgcaatgattcaaaatccgatggaagcaatatcaatatcatctcca

SEQ ID NO: 31031 - DNA, 42 bp, unidentified
  source 1..42: mol_type = unassigned DNA; note = methanogen bacteria
acttcatttgatgaagggcaaacttttgaagcattattcact

SEQ ID NO: 31032 - DNA, 42 bp, unidentified
  source 1..42: mol_type = unassigned DNA; note = methanogen bacteria
gcaggtcttgaaggattcagtgtaaatctgtttttagacagt

SEQ ID NO: 31033 - DNA, 84 bp, unidentified
  source 1..84: mol_type = unassigned DNA; note = methanogen bacteria
ggccaaaaatgggctccattcgttccctggacatgcccatatttaatcgcatcaggggagataaccgaatatgcaacaagcatt

SEQ ID NO: 31034 - DNA, 39 bp, unidentified
  source 1..39: mol_type = unassigned DNA; note = methanogen bacteria
gcatttgatgaaggccacagctttgaagcattattcaca

SEQ ID NO: 31035 - DNA, 39 bp, unidentified
  source 1..39: mol_type = unassigned DNA; note = methanogen bacteria
gcaggccttgagggattaactttaaaactaatcataact

SEQ ID NO: 31036 - DNA, 81 bp, unidentified
  source 1..81: mol_type = unassigned DNA; note = methanogen bacteria
ggccagaattgggctccatttgtaccctgggtatgtccatatctaatcgcatcaggcgagatagtaaaatatggtgcaaac

SEQ ID NO: 31037 - DNA, 39 bp, unidentified
  source 1..39: mol_type = unassigned DNA; note = methanogen bacteria
gtatttggtgaagaaggaacatttgaagcgtttttcaca

SEQ ID NO: 31038 - DNA, 39 bp, unidentified
  source 1..39: mol_type = unassigned DNA; note = methanogen bacteria
gcaggacttgatggatttacattaaaactatttataact

SEQ ID NO: 31039 - DNA, 81 bp, unidentified
  source 1..81: mol_type = unassigned DNA; note = methanogen bacteria
ggacaaaactgggcgccattcataccctgggtaagcccatatttaattgcatctggcgaaatagtagaatatagtgtaagt

SEQ ID NO: 31040 - DNA, 39 bp, unidentified
  source 1..39: mol_type = unassigned DNA; note = methanogen bacteria
gcatttggcgagggcaatacctttgaattgctattcacc

SEQ ID NO: 31041 - DNA, 42 bp, unidentified
  source 1..42: mol_type = unassigned DNA; note = methanogen bacteria
gcagggttggagggttttagcttaatgctgttcattgatagc

SEQ ID NO: 31042 - DNA, 81 bp, unidentified
  source 1..81: mol_type = unassigned DNA; note = methanogen bacteria
ggccagaattgggcgccgtttgtaccgtgggtatgcccgtatctgattgcatccggcgaaatagcaaaatacagcacaagc

SEQ ID NO: 31043 - DNA, 48 bp, unidentified
  source 1..48: mol_type = unassigned DNA; note = methanogen bacteria
atggacctttcttcttactttaatttaagtgctataactagcattcct

SEQ ID NO: 31044 - DNA, 30 bp, unidentified
  source 1..30: mol_type = unassigned DNA; note = methanogen bacteria
tttcttccaattttaagaataaatgttcat

SEQ ID NO: 31045 - DNA, 33 bp, unidentified
  source 1..33: mol_type = unassigned DNA; note = methanogen bacteria
tataataagctaattttttattttgggttgttc

SEQ ID NO: 31046 - DNA, 33 bp, unidentified
  source 1..33: mol_type = unassigned DNA; note = methanogen bacteria
ttatttagcgcttccagtaaaaatgtgctagca

SEQ ID NO: 31047 - DNA, 54 bp, unidentified
  source 1..54: mol_type = unassigned DNA; note = methanogen bacteria
ccgatgccgtcagagtggatatacgacaagataatatttttgaatggaggaatg

SEQ ID NO: 31048 - DNA, 39 bp, unidentified
  source 1..39: mol_type = unassigned DNA; note = methanogen bacteria
gcgttcgatgagggacatactttcgatttgctgtttaaa

SEQ ID NO: 31049 - DNA, 39 bp, unidentified
  source 1..39: mol_type = unassigned DNA; note = methanogen bacteria
gcaggccttgacgggttcagcttaagattgttcatcgaa

SEQ ID NO: 31050 - DNA, 81 bp, unidentified
  source 1..81: mol_type = unassigned DNA; note = methanogen bacteria
ggccagacttgggcgccgtatgttccttgggtgtgcccatatctgatagcctccggtgagatagcgcagtacagcacaagc

SEQ ID NO: 31051 - DNA, 93 bp, unidentified
  source 1..93: mol_type = unassigned DNA; note = methanogen bacteria
gatactcaaatcaatgattttgcaacagctttgtggtatgttgttgtttctataacagctacaggttatggtgatgttgttcctactacttta

SEQ ID NO: 31052 - DNA, 57 bp, unidentified
  source 1..57: mol_type = unassigned DNA; note = methanogen bacteria
gtattttttaatctttttgagcaatatgtgtccaattcaatttcaatcattggcatt

SEQ ID NO: 31053 - DNA, 123 bp, unidentified
  source 1..123: mol_type = unassigned DNA; note = methanogen bacteria
tcagttttacctttacatccttttgcatttgctatggctagtggtgtaggtagtgcaagtatgaatgcggcatctcttggacctactcttgcagcatttcctggattggaaactcaaattgaa

SEQ ID NO: 31054 - DNA, 42 bp, unidentified
  source 1..42: mol_type = unassigned DNA; note = methanogen bacteria
actgcctttgatgagggacggacttttgaagcattattcact

SEQ ID NO: 31055 - DNA, 42 bp, unidentified
  source 1..42: mol_type = unassigned DNA; note = methanogen bacteria
gcaggtcttgaaggatttagcattaatctgtatttaaatagc

SEQ ID NO: 31056 - DNA, 81 bp, unidentified
  source 1..81: mol_type = unassigned DNA; note = methanogen bacteria
ggccaaaactgggcaccttttgttccttggatatgtccttatttacttgcatcaggtaaaatagcagaatacacatcaagt

SEQ ID NO: 31057 - DNA, 39 bp, unidentified
  source 1..39: mol_type = unassigned DNA; note = methanogen bacteria
gcttttgatgaaacacaaagctttgatgctttattctcc

SEQ ID NO: 31058 - DNA, 42 bp, unidentified
  source 1..42: mol_type = unassigned DNA; note = methanogen bacteria
gcaggacttagtggattttcattgcagctattcattaatagt

SEQ ID NO: 31059 - DNA, 81 bp, unidentified
  source 1..81: mol_type = unassigned DNA; note = methanogen bacteria
ggtcaaagttgggctccatatgtcccttgggcatgtccttatctgatttcatcaggggagatagcagactatagcgtaagt

SEQ ID NO: 31060 - DNA, 60 bp, unidentified
  source 1..60: mol_type = unassigned DNA; note = methanogen bacteria
gctttgcccggagccgaactgttaactgaaacagatcttatgacttttttacaagcaaat

SEQ ID NO: 31061 - DNA, 39 bp, unidentified
  source 1..39: mol_type = unassigned DNA; note = methanogen bacteria
gcatttgatgagggaagcactttcgacatgctgttcacc

SEQ ID NO: 31062 - DNA, 39 bp, unidentified
  source 1..39: mol_type = unassigned DNA; note = methanogen bacteria
gcaggtcttgagggtttcacgttaaagttgtttatggat

SEQ ID NO: 31063 - DNA, 84 bp, unidentified
  source 1..84: mol_type = unassigned DNA; note = methanogen bacteria
ggccaaacttgggctccgtacgtgccttgggtttgtccatatctaatagcctccggtgaaatagcggaatatgcaacaagccca

SEQ ID NO: 31064 - DNA, 84 bp, unidentified
  source 1..84: mol_type = unassigned DNA; note = methanogen bacteria
atgcatgttgtcaacggacaatatctcctcatcgcatcatttgctgaaatgggtgttgatgcaatgtttgggggcattccactc

SEQ ID NO: 31065 - DNA, 30 bp, unidentified
  source 1..30: mol_type = unassigned DNA; note = methanogen bacteria
agaatgaatacagatctattcacaacaccc

SEQ ID NO: 31066 - DNA, 57 bp, unidentified
  source 1..57: mol_type = unassigned DNA; note = methanogen bacteria
aatccgattccctcagagatgatatatgacaagataatctttttaaacggaggcatg

SEQ ID NO: 31067 - DNA, 39 bp, unidentified
  source 1..39: mol_type = unassigned DNA; note = methanogen bacteria
gcttttgatgaaactcaaagctttgatgcattgttttcc

SEQ ID NO: 31068 - DNA, 39 bp, unidentified
  source 1..39: mol_type = unassigned DNA; note = methanogen bacteria
gcagggcttagcggatttacattaggattgttcataaac

SEQ ID NO: 31069 - DNA, 84 bp, unidentified
  source 1..84: mol_type = unassigned DNA; note = methanogen bacteria
ggacaaagctgggctccgtatgtcccttgggcatgcccttacttgatatcatctggtgagatagcagactatggcgtaagtctg

SEQ ID NO: 31070 - DNA, 102 bp, unidentified
  source 1..102: mol_type = unassigned DNA; note = methanogen bacteria
ggcctgcttcataccgtgcaatctgatttgccaaacattgtagcttcaatgaccaattcaggagccgttccagcatttaattatatgattcgcaattccgga

SEQ ID NO: 31071 - DNA, 36 bp, unidentified
  source 1..36: mol_type = unassigned DNA; note = methanogen bacteria
catatgtgttcttcctatccaatagagcaatcggtt

SEQ ID NO: 31072 - DNA, 39 bp, unidentified
  source 1..39: mol_type = unassigned DNA; note = methanogen bacteria
gcatttgatgaaggaaatacttttgaattgttgttcaat

SEQ ID NO: 31073 - DNA, 39 bp, unidentified
  source 1..39: mol_type = unassigned DNA; note = methanogen bacteria
gcaggccttgagggatttagcctaaaattattcattgac

SEQ ID NO: 31074 - DNA, 81 bp, unidentified
  source 1..81: mol_type = unassigned DNA; note = methanogen bacteria
ggccagacctgggctccgtatgttccttgggtatgcccatatttaatcgcatcaggtgagattgcagagtatagcgcgagc

SEQ ID NO: 31075 - DNA, 60 bp, unidentified
  source 1..60: mol_type = unassigned DNA; note = methanogen bacteria
caattttccggatatcctgtagccaataatgcaaatattgcattgaatttaaatttgatg

SEQ ID NO: 31076 - DNA, 57 bp, unidentified
  source 1..57: mol_type = unassigned DNA; note = methanogen bacteria
aatccaattccctcagagatgatatatgataagataatctttctaaacggaggtatg

SEQ ID NO: 31077 - DNA, 42 bp, unidentified
  source 1..42: mol_type = unassigned DNA; note = methanogen bacteria
tctgcattcggagagggaaacacatttaaagtgttgttcacc

SEQ ID NO: 31078 - DNA, 39 bp, unidentified
  source 1..39: mol_type = unassigned DNA; note = methanogen bacteria
gcaggacttgacgggttcagcttaaaagtgtttatttac

SEQ ID NO: 31079 - DNA, 84 bp, unidentified
  source 1..84: mol_type = unassigned DNA; note = methanogen bacteria
ggtcaaagctgggcaccctatgtgccatgggtttgtccgtatctgattgcatccggagaaatagcgggatacggcaccagcatc

SEQ ID NO: 31080 - DNA, 42 bp, unidentified
  source 1..42: mol_type = unassigned DNA; note = methanogen bacteria
acatcctttgacgaggggcaaacctttgaggcattattcacc

SEQ ID NO: 31081 - DNA, 42 bp, unidentified
  source 1..42: mol_type = unassigned DNA; note = methanogen bacteria
gcgggtcttgacggattcagtttaaagatatttgcagatggc

SEQ ID NO: 31082 - DNA, 81 bp, unidentified
  source 1..81: mol_type = unassigned DNA; note = methanogen bacteria
ggtcaaaactgggcaccgtttgttccgtgggtatgtccgtatctgattgcatccggtgagatagcagagtacagcacaagc

SEQ ID NO: 31083 - DNA, 42 bp, unidentified
  source 1..42: mol_type = unassigned DNA; note = methanogen bacteria
acatcttttgatgaaggacatagttttgaaatgctatttgca

SEQ ID NO: 31084 - DNA, 39 bp, unidentified
  source 1..39: mol_type = unassigned DNA; note = methanogen bacteria
gcaggtcttgaaggatttagcataggaatgtttatggat

SEQ ID NO: 31085 - DNA, 81 bp, unidentified
  source 1..81: mol_type = unassigned DNA; note = methanogen bacteria
ggtcagaactgggctccgttcgtgccttgggtgtgtccatatttaatagcatccggtgaaatagctgagtatagtacaagc

SEQ ID NO: 31086 - DNA, 39 bp, unidentified
  source 1..39: mol_type = unassigned DNA; note = methanogen bacteria
gcatttggtgaaggccatacttttgaattgttgtttgat

SEQ ID NO: 31087 - DNA, 39 bp, unidentified
  source 1..39: mol_type = unassigned DNA; note = methanogen bacteria
gcgggtcttgatggatttagtctaaaactattcattgac

SEQ ID NO: 31088 - DNA, 81 bp, unidentified
  source 1..81: mol_type = unassigned DNA; note = methanogen bacteria
ggacaggcctgggcgccttatgttccttgggtatgcccatatttgatttcctctggtgaaattgctaaatatggtacagga

SEQ ID NO: 31089 - DNA, 39 bp, unidentified
  source 1..39: mol_type = unassigned DNA; note = methanogen bacteria
tcatttgatgaagcccaaagctttgataaattgtttgca

SEQ ID NO: 31090 - DNA, 42 bp, unidentified
  source 1..42: mol_type = unassigned DNA; note = methanogen bacteria
gcaggtcttgacggttttagcattaatctgttcataagcaga

SEQ ID NO: 31091 - DNA, 84 bp, unidentified
  source 1..84: mol_type = unassigned DNA; note = methanogen bacteria
ggacaaaattgggcatcatttgtgccgtggataagtccatatcttattgcatcaggagaaattgcaaagtacagtacaagtccc

SEQ ID NO: 31092 - DNA, 54 bp, unidentified
  source 1..54: mol_type = unassigned DNA; note = methanogen bacteria
ccaataccatccgagtggatatatgacaagataatattcttaaatggaggatta

SEQ ID NO: 31093 - DNA, 42 bp, unidentified
  source 1..42: mol_type = unassigned DNA; note = methanogen bacteria
actgcctttgatgagggagggacttttgaagcgttattcact

SEQ ID NO: 31094 - DNA, 42 bp, unidentified
  source 1..42: mol_type = unassigned DNA; note = methanogen bacteria
gcaaatctggacggattcagcttaaaactgtttatggatagc

SEQ ID NO: 31095 - DNA, 81 bp, unidentified
  source 1..81: mol_type = unassigned DNA; note = methanogen bacteria
ggtcaaaactgggcaccatttgttccttggatatctccatatctgattgcatcagggaaaatagcagagtatggtgcaagc

SEQ ID NO: 31096 - DNA, 33 bp, unidentified
  source 1..33: mol_type = unassigned DNA; note = methanogen bacteria
atgtcatttaatccgcaatcaaatatcaacatt

SEQ ID NO: 31097 - DNA, 66 bp, unidentified
  source 1..66: mol_type = unassigned DNA; note = methanogen bacteria
ccacaatctgtaaatatatttacctcacagattgaatttattaatcagatatttacattaggagtt

SEQ ID NO: 31098 - DNA, 57 bp, unidentified
  source 1..57: mol_type = unassigned DNA; note = methanogen bacteria
catccaattccgtccggattaatatatgataaaatcatcttcctgaacggaggaata

SEQ ID NO: 31099 - DNA, 57 bp, unidentified
  source 1..57: mol_type = unassigned DNA; note = methanogen bacteria
catccaataccttcggagttaatatatgataaaataatattccttaacggaggaata

SEQ ID NO: 31100 - DNA, 57 bp, unidentified
  source 1..57: mol_type = unassigned DNA; note = methanogen bacteria
aatccaataccatctgaattaatttatgataagataatctttttaaatgggggatta

SEQ ID NO: 31101 - DNA, 57 bp, unidentified
  source 1..57: mol_type = unassigned DNA; note = methanogen bacteria
aatccaatctcatcccagataatatatgataaaataatctttttaaatggaggaatt

SEQ ID NO: 31102 - DNA, 42 bp, unidentified
  source 1..42: mol_type = unassigned DNA; note = methanogen bacteria
aattccggatactccattggatttgaaactgacagtgtagtt

SEQ ID NO: 31103 - DNA, 54 bp, unidentified
  source 1..54: mol_type = unassigned DNA; note = methanogen bacteria
acggttgatttattgatttctaatttggattcgtccaatgatattgctatctac

SEQ ID NO: 31104 - DNA, 54 bp, unidentified
  source 1..54: mol_type = unassigned DNA; note = methanogen bacteria
ccaataccgtcggagataatatacgataagataaactttttaaatggaggaatg

SEQ ID NO: 31105 - DNA, 78 bp, unidentified
  source 1..78: mol_type = unassigned DNA; note = methanogen bacteria
gcggtgaactcgcccgcgctgcctacgcccgatgccgccgttgcggtgcttctggccaatgtcgaccagcttgtgcca

SEQ ID NO: 31106 - DNA, 63 bp, unidentified
  source 1..63: mol_type = unassigned DNA; note = methanogen bacteria
gccggctcgacaggcttgggctatttcatcatgcagtcttggtcgatggtcaattacccgcgc

SEQ ID NO: 31107 - DNA, 60 bp, unidentified
  source 1..60: mol_type = unassigned DNA; note = methanogen bacteria
aatgctgttgaaactagtagtttaattgctaatttcttccctaaaaatttagttgaccca

SEQ ID NO: 31108 - DNA, 54 bp, unidentified
  source 1..54: mol_type = unassigned DNA; note = methanogen bacteria
ccaataccgtcggagataatatatgataagataaactttttaaatggaggcatg

SEQ ID NO: 31109 - DNA, 57 bp, unidentified
  source 1..57: mol_type = unassigned DNA; note = methanogen bacteria
aatccgatatcttcgcaggtaatatatgacaagattatctttttgaacggaggaatt

SEQ ID NO: 31110 - DNA, 57 bp, unidentified
  source 1..57: mol_type = unassigned DNA; note = methanogen bacteria
aatccaatttcctcgcaggtaatctatgataaaatcatattcttaaatggagggatg

SEQ ID NO: 31111 - DNA, 30 bp, unidentified
  source 1..30: mol_type = unassigned DNA; note = methanogen bacteria
ttctatcctacttctttacaattcagtcgt

SEQ ID NO: 31112 - DNA, 99 bp, unidentified
  source 1..99: mol_type = unassigned DNA; note = methanogen bacteria
gtagattccaatataaataatatacatactgcggtctggtatattattgtttccatgaccagcacgggttatggggatattgtcccggctacaacctca

SEQ ID NO: 31113 - DNA, 57 bp, unidentified
  source 1..57: mol_type = unassigned DNA; note = methanogen bacteria
aatccgataccttccgagttaatctatgaccacattatctttttaaatggaggtctt

SEQ ID NO: 31114 - DNA, 75 bp, unidentified
  source 1..75: mol_type = unassigned DNA; note = methanogen bacteria
ttggaaaacaactatgatgatacagctattgaagtccttcctttatgcgaccttgtaatcaccattacaagtgac

SEQ ID NO: 31115 - DNA, 186 bp, unidentified
  source 1..186: mol_type = unassigned DNA; note = methanogen bacteria
actatcatcaactggaccatcacagttacaaataatggtcctgacgatgctcttgatgttgtaatgcacaatattttgcctgaagaactggaattcatttcctatttagctagccaaggaatattgagaaatggtcttaatgaaagtgttgagaatatttccaatgattccaatgagtctggcgaa

SEQ ID NO: 31116 - DNA, 57 bp, unidentified
  source 1..57: mol_type = unassigned DNA; note = methanogen bacteria
aatccgatgtcttcacagtttatttatgacaatattatcattttgaatggtggaatt

SEQ ID NO: 31117 - DNA, 51 bp, unidentified
  source 1..51: mol_type = unassigned DNA; note = methanogen bacteria
acagtttcaatgagttatctaaaacataaattagtttattatcaatatgaa

SEQ ID NO: 31118 - DNA, 42 bp, unidentified
  source 1..42: mol_type = unassigned DNA; note = methanogen bacteria
tggttcagcaaacattatattccaatattttctcgaaatcca

SEQ ID NO: 31119 - DNA, 69 bp, unidentified
  source 1..69: mol_type = unassigned DNA; note = methanogen bacteria
tcaacccttggaacaactcccataagctctatttcttattctttaacattaataacaaatattaacatt

SEQ ID NO: 31120 - DNA, 96 bp, unidentified
  source 1..96: mol_type = unassigned DNA; note = methanogen bacteria
cctttctttaaatcttcagtggaacctgtaataagcacaatgagaaaacaaattacctctggtcaaattacattaacctatctgtcaatattctca

SEQ ID NO: 31121 - DNA, 30 bp, unidentified
  source 1..30: mol_type = unassigned DNA; note = methanogen bacteria
tacttcttgacacggggatctttcatgcaa

SEQ ID NO: 31122 - DNA, 42 bp, unidentified
  source 1..42: mol_type = unassigned DNA; note = methanogen bacteria
aaggatcttgcaaattatttaatacagacttaccatattaaa

SEQ ID NO: 31123 - DNA, 57 bp, unidentified
  source 1..57: mol_type = unassigned DNA; note = methanogen bacteria
aatccgattccatctgaacttatttatgataaaataatatttctaaacggaggacta

SEQ ID NO: 31124 - DNA, 51 bp, unidentified
  source 1..51: mol_type = unassigned DNA; note = methanogen bacteria
ctattatttaacatgtttgagcaatatgtgtatatattaattgcttctatc

SEQ ID NO: 31125 - DNA, 99 bp, unidentified
  source 1..99: mol_type = unassigned DNA; note = methanogen bacteria
tttgatacaaatataacggattttgcaacagcattctggtatattattgtttccatgactggtactggttatggagatgttgttccgggtactttaaca

SEQ ID NO: 31126 - DNA, 42 bp, unidentified
  source 1..42: mol_type = unassigned DNA; note = methanogen bacteria
cttgcctctcaggggcttttcgcaggcaggacggtcgacatc

SEQ ID NO: 31127 - DNA, 60 bp, unidentified
  source 1..60: mol_type = unassigned DNA; note = methanogen bacteria
gatatgattcatatatcttcgcctgtactcgtgaatgaatctactacaacaattttttca

SEQ ID NO: 31128 - DNA, 39 bp, unidentified
  source 1..39: mol_type = unassigned DNA; note = methanogen bacteria
gttgctggtcaacaagctaacaacctattctccagtggt

SEQ ID NO: 31129 - DNA, 30 bp, unidentified
  source 1..30: mol_type = unassigned DNA; note = methanogen bacteria
ccattcctttcaagcacattatacacttat

SEQ ID NO: 31130 - DNA, 96 bp, unidentified
  source 1..96: mol_type = unassigned DNA; note = methanogen bacteria
gacccaagtattgtaagcctttttgatgctgtttggttcatattccagacaatttctacagtaggttatggagatgtaattccaacaagccctata

SEQ ID NO: 31131 - DNA, 30 bp, unidentified
  source 1..30: mol_type = unassigned DNA; note = methanogen bacteria
atgaatttttcaattgcccccgaaaatccg

SEQ ID NO: 31132 - DNA, 51 bp, unidentified
  source 1..51: mol_type = unassigned DNA; note = methanogen bacteria
ctattatttaacctttttgagcaatatgtgtatatattaatatcttccatc

SEQ ID NO: 31133 - DNA, 57 bp, unidentified
  source 1..57: mol_type = unassigned DNA; note = methanogen bacteria
aacccgattccatcagaactgatatatgacaagataatatttttaaatggaggaatg

SEQ ID NO: 31134 - DNA, 48 bp, unidentified
  source 1..48: mol_type = unassigned DNA; note = methanogen bacteria
cttgcagctacctacacctcaaaaggtttgggcggttatgcatttggc

SEQ ID NO: 31135 - DNA, 33 bp, unidentified
  source 1..33: mol_type = unassigned DNA; note = methanogen bacteria
tctgttgatttttttaatttgtctcacacgcaa

SEQ ID NO: 31136 - DNA, 75 bp, unidentified
  source 1..75: mol_type = unassigned DNA; note = methanogen bacteria
acaaatatagttgatggttatgtcaattgggtggaattatttggaatagacgatttagaagtaattgctcaaaaa

SEQ ID NO: 31137 - DNA, 60 bp, unidentified
  source 1..60: mol_type = unassigned DNA; note = methanogen bacteria
ttatctaatggtgttagtcatacacagaatcctgtaatgtataatgttacttatgttaca

SEQ ID NO: 31138 - DNA, 42 bp, unidentified
  source 1..42: mol_type = unassigned DNA; note = methanogen bacteria
ttacaggagttaaatataccaatatcattattattcttatta

SEQ ID NO: 31139 - DNA, 57 bp, unidentified
  source 1..57: mol_type = unassigned DNA; note = methanogen bacteria
aatccaatcccgtcagagataatatatgaaaagataatattcttaaatggaggatta

SEQ ID NO: 31140 - DNA, 60 bp, unidentified
  source 1..60: mol_type = unassigned DNA; note = methanogen bacteria
gttcttcaagttcctatttccgccaatgtaatccttgaaacctttaaaaatccgactttg

SEQ ID NO: 31141 - DNA, 63 bp, unidentified
  source 1..63: mol_type = unassigned DNA; note = methanogen bacteria
gaatcaattcttggaattaatatcgtaagtacaataagtaacactgccggaaaccttgattta

SEQ ID NO: 31142 - DNA, 60 bp, unidentified
  source 1..60: mol_type = unassigned DNA; note = methanogen bacteria
ctaactgcaatgggtgtgccggtaccaataaacagatcacaaagttcagacaatcctgta

SEQ ID NO: 31143 - DNA, 84 bp, unidentified
  source 1..84: mol_type = unassigned DNA; note = methanogen bacteria
ataccattatatggattaagtgctgctgctgtagatcaattcgctgctttaagggcagttatggctggaaattttggttcaatt

SEQ ID NO: 31144 - DNA, 33 bp, unidentified
  source 1..33: mol_type = unassigned DNA; note = methanogen bacteria
acaggtaacttagtaccaatcgataattcttat

SEQ ID NO: 31145 - DNA, 48 bp, unidentified
  source 1..48: mol_type = unassigned DNA; note = methanogen bacteria
ataccgtcggagattatatatgagaagataatcctgctgaatggagga

SEQ ID NO: 31146 - DNA, 54 bp, unidentified
  source 1..54: mol_type = unassigned DNA; note = methanogen bacteria
gactcattcgcatccgcttctactgttttatctggtgttgacgctactgctgct

SEQ ID NO: 31147 - DNA, 48 bp, unidentified
  source 1..48: mol_type = unassigned DNA; note = methanogen bacteria
tttttaactgctgcaggtacaacaggagcatcctcttttgctcttgac

SEQ ID NO: 31148 - DNA, 54 bp, unidentified
  source 1..54: mol_type = unassigned DNA; note = methanogen bacteria
attagtattttaggtgcattaggtacaaccggatggacagaatttgctttctct

SEQ ID NO: 31149 - DNA, 60 bp, unidentified
  source 1..60: mol_type = unassigned DNA; note = methanogen bacteria
ctactctcaagtgcagcttccttctcttcacaaggttttgcaggatttgcttttagcgga

SEQ ID NO: 31150 - DNA, 51 bp, unidentified
  source 1..51: mol_type = unassigned DNA; note = methanogen bacteria
tttgcaacttctatggctacaaaaggattttcaagttttgctcttggtggt

SEQ ID NO: 31151 - DNA, 36 bp, unidentified
  source 1..36: mol_type = unassigned DNA; note = methanogen bacteria
tatgaattggtattgggatttactattttggataat

SEQ ID NO: 31152 - DNA, 42 bp, unidentified
  source 1..42: mol_type = unassigned DNA; note = methanogen bacteria
cctattttgtttaaattatttgaacagtatatttcaatgttt

SEQ ID NO: 31153 - DNA, 39 bp, unidentified
  source 1..39: mol_type = unassigned DNA; note = methanogen bacteria
gctgttggagcatcttttgattcagttgcaactgtagga

SEQ ID NO: 31154 - DNA, 75 bp, unidentified
  source 1..75: mol_type = unassigned DNA; note = methanogen bacteria
agatacggaggagagatattcagcgagcatttcgctcaggatataatctcatacctcgaatcacacagatctgaa

SEQ ID NO: 31155 - DNA, 63 bp, unidentified
  source 1..63: mol_type = unassigned DNA; note = methanogen bacteria
gcaggtgcgtcgataggatctgttatcggaccgcagttcacaacaagatattcagcagatcag

SEQ ID NO: 31156 - DNA, 39 bp, unidentified
  source 1..39: mol_type = unassigned DNA; note = methanogen bacteria
ttagcaatgttctcaaaaggtgcattaagctttactttt

SEQ ID NO: 31157 - DNA, 60 bp, unidentified
  source 1..60: mol_type = unassigned DNA; note = methanogen bacteria
ctattcacaagtgcagcttcattctctacacaaggttttgcaggatttgctttaagtgga

SEQ ID NO: 31158 - DNA, 60 bp, unidentified
  source 1..60: mol_type = unassigned DNA; note = methanogen bacteria
attactattgcaacttctttttctacagtgggattctctagttttgctcttggaggagta

SEQ ID NO: 31159 - DNA, 33 bp, unidentified
  source 1..33: mol_type = unassigned DNA; note = methanogen bacteria
gctattggtgctggattaaatcagctggtggct

SEQ ID NO: 31160 - DNA, 54 bp, unidentified
  source 1..54: mol_type = unassigned DNA; note = methanogen bacteria
tttgcagttgctttcactacaaaaggtgttggcggagctgcattagcaggatta

SEQ ID NO: 31161 - DNA, 39 bp, unidentified
  source 1..39: mol_type = unassigned DNA; note = methanogen bacteria
gttattggagcatctatggattcagctgcagctgtagga

SEQ ID NO: 31162 - DNA, 93 bp, unidentified
  source 1..93: mol_type = unassigned DNA; note = methanogen bacteria
gatactcaaatcaatgattttgcaacagctttctggtatgttattgtttctataacagctaccggttatggtgatgttgttcctactacttta

SEQ ID NO: 31163 - DNA, 48 bp, unidentified
  source 1..48: mol_type = unassigned DNA; note = methanogen bacteria
gcaggcgcatacacttcaaaaggtatcgcaggatttgcatttggtgga

SEQ ID NO: 31164 - DNA, 57 bp, unidentified
  source 1..57: mol_type = unassigned DNA; note = methanogen bacteria
atttcaactgcagcttcattctcttcaaaaggtttggcaggatttgcttttagcgga

SEQ ID NO: 31165 - DNA, 51 bp, unidentified
  source 1..51: mol_type = unassigned DNA; note = methanogen bacteria
tttgtaactgcagcaagtacaaaaggattatccagttacgctcttggcgga

SEQ ID NO: 31166 - DNA, 93 bp, unidentified
  source 1..93: mol_type = unassigned DNA; note = methanogen bacteria
ggtagagttgctgtaggttctgataacttatgtccttattgtctagaggaaggattggatgctcgtacccttaaggggtctactgagtatatc

SEQ ID NO: 31167 - DNA, 51 bp, unidentified
  source 1..51: mol_type = unassigned DNA; note = methanogen bacteria
attgtagcagcattctcttcacggggtttagccggatatgcttttagcgga

SEQ ID NO: 31168 - DNA, 51 bp, unidentified
  source 1..51: mol_type = unassigned DNA; note = methanogen bacteria
attgcaactgcaatgacttcaaccggtgctgccggatttgctttcagcggt

SEQ ID NO: 31169 - DNA, 51 bp, unidentified
  source 1..51: mol_type = unassigned DNA; note = methanogen bacteria
tttgcaactgcaattactacaaaaggagcctccagttttgctcttggcggc

SEQ ID NO: 31170 - DNA, 60 bp, unidentified
  source 1..60: mol_type = unassigned DNA; note = methanogen bacteria
ctaatttcaagtgcagcttcattctcttcaaaaggtatggctggatttgcttttagcgga

SEQ ID NO: 31171 - DNA, 39 bp, unidentified
  source 1..39: mol_type = unassigned DNA; note = methanogen bacteria
gctgttggagcatcttttgattcagctgcaactgtagga

SEQ ID NO: 31172 - DNA, 45 bp, unidentified
  source 1..45: mol_type = unassigned DNA; note = methanogen bacteria
attggcgctggtgaagctactggattattatccggaggattaggg

SEQ ID NO: 31173 - DNA, 51 bp, unidentified
  source 1..51: mol_type = unassigned DNA; note = methanogen bacteria
gttggtatgctcgcagcagttactggacaaaatgctgttgccgctggagga

SEQ ID NO: 31174 - DNA, 42 bp, unidentified
  source 1..42: mol_type = unassigned DNA; note = methanogen bacteria
atgattcctcaagcaagtaacaatcatattattgctgcagga

SEQ ID NO: 31175 - DNA, 42 bp, unidentified
  source 1..42: mol_type = unassigned DNA; note = methanogen bacteria
aaccacaacacattcaaaggaacttatataaacaacactgtg

SEQ ID NO: 31176 - DNA, 48 bp, unidentified
  source 1..48: mol_type = unassigned DNA; note = methanogen bacteria
gttgcagctgcagtctctacaaaaggtttaggtggttttgctttcagc

SEQ ID NO: 31177 - DNA, 33 bp, unidentified
  source 1..33: mol_type = unassigned DNA; note = methanogen bacteria
ttgtattcctataaccttgatttcaacaattca

SEQ ID NO: 31178 - DNA, 30 bp, unidentified
  source 1..30: mol_type = unassigned DNA; note = methanogen bacteria
ggattaattcctccattaaagataaatttg

SEQ ID NO: 31179 - DNA, 36 bp, unidentified
  source 1..36: mol_type = unassigned DNA; note = methanogen bacteria
aacaagctattgttttaccttaattttttatctctt

SEQ ID NO: 31180 - DNA, 45 bp, unidentified
  source 1..45: mol_type = unassigned DNA; note = methanogen bacteria
ggtttagttgcaggtcaagagactaaccaattatttgcaagtgga

SEQ ID NO: 31181 - DNA, 30 bp, unidentified
  source 1..30: mol_type = unassigned DNA; note = methanogen bacteria
ttttatccggtagatttattttttaaaaac

SEQ ID NO: 31182 - DNA, 96 bp, unidentified
  source 1..96: mol_type = unassigned DNA; note = methanogen bacteria
gaaaatgatataaatgatatttcaacagcattatggtttacatttgtaagtatgacaagcacaggttatggtgatattgttccgactactttttca

SEQ ID NO: 31183 - DNA, 39 bp, unidentified
  source 1..39: mol_type = unassigned DNA; note = methanogen bacteria
acctcggcctccaacctcggcagctccctggagatcatc

SEQ ID NO: 31184 - DNA, 45 bp, unidentified
  source 1..45: mol_type = unassigned DNA; note = methanogen bacteria
gcagcttcattctcttcaaaaggttgggccggatttgcttttagc

SEQ ID NO: 31185 - DNA, 48 bp, unidentified
  source 1..48: mol_type = unassigned DNA; note = methanogen bacteria
acagcttcaatcacttcacaaggttgggctggatttgcttttagcgga

SEQ ID NO: 31186 - DNA, 135 bp, unidentified
  source 1..135: mol_type = unassigned DNA; note = methanogen bacteria
atgaatactattatacatgcttcagataccatgtttaactcaagcagcaatggcttgctgtcatttttctcaggcaatgcaacacaaggtgcgaacgatgcattgaattctgcattaactattgtatctcagagt

SEQ ID NO: 31187 - DNA, 51 bp, unidentified
  source 1..51: mol_type = unassigned DNA; note = methanogen bacteria
ccgggtcttgccgcacttggccaaggggatgtcacagcacttgccacagct

SEQ ID NO: 31188 - DNA, 60 bp, unidentified
  source 1..60: mol_type = unassigned DNA; note = methanogen bacteria
ttattaggtatgttaggcgctgtaggttcaactggttggagcagctttgctttctctggt

SEQ ID NO: 31189 - DNA, 57 bp, unidentified
  source 1..57: mol_type = unassigned DNA; note = methanogen bacteria
aatccattcccatcggagttaatatatgaaaaaatactcttcttaaacggaggaatg

SEQ ID NO: 31190 - DNA, 39 bp, unidentified
  source 1..39: mol_type = unassigned DNA; note = methanogen bacteria
ggcactataggtgcaggattaaataatctgtttgcagga

SEQ ID NO: 31191 - DNA, 48 bp, unidentified
  source 1..48: mol_type = unassigned DNA; note = methanogen bacteria
tttataggtgctgctagtacaaaaggattatctagttttgctttaggc

SEQ ID NO: 31192 - DNA, 54 bp, unidentified
  source 1..54: mol_type = unassigned DNA; note = methanogen bacteria
accggcggaacaaattccccaacagacaactcagttaatggttctgcaagcgta

SEQ ID NO: 31193 - DNA, 48 bp, unidentified
  source 1..48: mol_type = unassigned DNA; note = methanogen bacteria
gcagcttcattctctacaaaaggattagctggatttgcttttagtggg

SEQ ID NO: 31194 - DNA, 54 bp, unidentified
  source 1..54: mol_type = unassigned DNA; note = methanogen bacteria
acttttctaactgccgcaggtacaacaggaatatccacctttgcccttgacggt

SEQ ID NO: 31195 - DNA, 63 bp, unidentified
  source 1..63: mol_type = unassigned DNA; note = methanogen bacteria
atcggaaatccccgaagcggaattgccgtatacatgtcatatctaatctctgagatgacactg

SEQ ID NO: 31196 - DNA, 45 bp, unidentified
  source 1..45: mol_type = unassigned DNA; note = methanogen bacteria
gcagcttcattctctacaaaaggttttgcaggatttgcttttagc

SEQ ID NO: 31197 - DNA, 54 bp, unidentified
  source 1..54: mol_type = unassigned DNA; note = methanogen bacteria
gttaccactatcgctgctttccgtacaaaaggactagctagtattactttatca

SEQ ID NO: 31198 - DNA, 39 bp, unidentified; identical to SEQ ID NO: 31153
  source 1..39: mol_type = unassigned DNA; note = methanogen bacteria

SEQ ID NO: 31199 - DNA, 45 bp, unidentified
  source 1..45: mol_type = unassigned DNA; note = methanogen bacteria
tttggtgcaattggagcaggattggataaaatggcaggatcttta

SEQ ID NO: 31200 - DNA, 51 bp, unidentified
  source 1..51: mol_type = unassigned DNA; note = methanogen bacteria
tctgatgtagctaaacagtctttcaaaactattgttgcaaatccaagtcct

SEQ ID NO: 31201 - DNA, 39 bp, unidentified
  source 1..39: mol_type = unassigned DNA; note = methanogen bacteria
gatataggtatgtcatttttaaatccatatgttggtggt

SEQ ID NO: 31202 - DNA, 57 bp, unidentified
  source 1..57: mol_type = unassigned DNA; note = methanogen bacteria
accggaggaattggtaacactgcaacggatgctgcaatgaagggtagtccgaccgta

SEQ ID NO: 31203 - DNA, 42 bp, unidentified
  source 1..42: mol_type = unassigned DNA; note = methanogen bacteria
ggtctaattggaactggatttaggcaagtgcttggatcttta

SEQ ID NO: 31204 - DNA, 36 bp, unidentified
  source 1..36: mol_type = unassigned DNA; note = methanogen bacteria
atgaagattacaaaagcggcacaattagttaaatta

SEQ ID NO: 31205 - DNA, 30 bp, unidentified
  source 1..30: mol_type = unassigned DNA; note = methanogen bacteria
gacaaagttccaaaagaccaattttatgat

SEQ ID NO: 31206 - DNA, 42 bp, unidentified
  source 1..42: mol_type = unassigned DNA; note = methanogen bacteria
agtgttggaacaggtattggaataaacagttcctcattagga

SEQ ID NO: 31207 - DNA, 42 bp, unidentified
  source 1..42: mol_type = unassigned DNA; note = methanogen bacteria
gccaattcggcagacaggctcggcggtgccctgggggcgggg

SEQ ID NO: 31208 - DNA, 60 bp, unidentified
  source 1..60: mol_type = unassigned DNA; note = methanogen bacteria
ggtcttccggaatttctaattaccgattattctgattttatttcttatatcttctcatta

SEQ ID NO: 31209 - DNA, 33 bp, unidentified
  source 1..33: mol_type = unassigned DNA; note = methanogen bacteria
gcaatggtcggaggatatcaatcagttggagta

SEQ ID NO: 31210 - DNA, 60 bp, unidentified
  source 1..60: mol_type = unassigned DNA; note = methanogen bacteria
attgctccattatttgcttccggtgaagtgagttcaactttaattccacaactcgcaact

SEQ ID NO: 31211 - DNA, 30 bp, unidentified
  source 1..30: mol_type = unassigned DNA; note = methanogen bacteria
attttcggcgatatatttggaacagagtca

SEQ ID NO: 31212 - DNA, 45 bp, unidentified
  source 1..45: mol_type = unassigned DNA; note = methanogen bacteria
tttggagcaattggatcaggaattaatcaggttgcgggatcttta

SEQ ID NO: 31213 - DNA, 99 bp, unidentified
  source 1..99: mol_type = unassigned DNA; note = methanogen bacteria
ttagatccgaacatcaatgatattcctactgcaatatggtttattgtcgtttccatgacaagtaccggttacggggatattgttccggttacacattcc

SEQ ID NO: 31214 - DNA, 33 bp, unidentified
  source 1..33: mol_type = unassigned DNA; note = methanogen bacteria
cagctgataactgcagtgacaataatcactaat

SEQ ID NO: 31215 - DNA, 45 bp, unidentified
  source 1..45: mol_type = unassigned DNA; note = methanogen bacteria
attctatttgaaatattcggccattatattttatcgaatggagga

SEQ ID NO: 31216 - DNA, 42 bp, unidentified
  source 1..42: mol_type = unassigned DNA; note = methanogen bacteria
atggcttcacaagtatcaggcaataattatgttgctgctggt

SEQ ID NO: 31217 - DNA, 42 bp, unidentified
  source 1..42: mol_type = unassigned DNA; note = methanogen bacteria
atggctacacaagtatccggcaataatgttgttgctgctggt

SEQ ID NO: 31218 - DNA, 60 bp, unidentified; identical to SEQ ID NO: 30438
  source 1..60: mol_type = unassigned DNA; note = methanogen bacteria

SEQ ID NO: 31219 - DNA, 36 bp, unidentified
  source 1..36: mol_type = unassigned DNA; note = methanogen bacteria
atcatgttcttcaacggggagctctccaccggaagg

SEQ ID NO: 31220 - DNA, 141 bp, unidentified
  source 1..141: mol_type = unassigned DNA; note = methanogen bacteria
attgaatatttgccgtccaggtcggtggtgacaccggtgccggtgcccttgaccatcactgctgctccgggagccggaagccccgatgccttctcgaaaacggtaccgctgagagtgaaactaccctgcgcatgcgcagga

SEQ ID NO: 31221 - DNA, 33 bp, unidentified
  source 1..33: mol_type = unassigned DNA; note = methanogen bacteria
cagcttataaatgcggtgacaatcatcgataat

SEQ ID NO: 31222 - DNA, 48 bp, unidentified
  source 1..48: mol_type = unassigned DNA; note = methanogen bacteria
ccagttctattcgaaatatttggttattatgttttgttggggagggta

SEQ ID NO: 31223 - DNA, 39 bp, unidentified
  source 1..39: mol_type = unassigned DNA; note = methanogen bacteria
ctattatctggtaaagctattactaatgtatttgcaagt

SEQ ID NO: 31224 - DNA, 57 bp, unidentified
  source 1..57: mol_type = unassigned DNA; note = methanogen bacteria
attaatattataggtgctttatctacaaccggttggagcagtgttgcttttagtgga

SEQ ID NO: 31225 - DNA, 51 bp, unidentified
  source 1..51: mol_type = unassigned DNA; note = methanogen bacteria
atgcctggaatgcttgaaaaccagacactggcgaacttcctacatgtcaag

SEQ ID NO: 31226 - DNA, 36 bp, unidentified
  source 1..36: mol_type = unassigned DNA; note = methanogen bacteria
cttttagcagcacaaggaaataatgttcttatggct

SEQ ID NO: 31227 - DNA, 33 bp, unidentified
  source 1..33: mol_type = unassigned DNA; note = methanogen bacteria
cagttggtaaccagcgtaacaattcttgataat

SEQ ID NO: 31228 - DNA, 48 bp, unidentified
  source 1..48: mol_type = unassigned DNA; note = methanogen bacteria
ccatttttattcaatatttttgagaaatacgtcttgcatgttcattct

SEQ ID NO: 31229 - DNA, 36 bp, unidentified
  source 1..36: mol_type = unassigned DNA; note = methanogen bacteria
tatatttcatctattcaaggttttttcacacaatac

SEQ ID NO: 31230 - DNA, 36 bp, unidentified
  source 1..36: mol_type = unassigned DNA; note = methanogen bacteria
acagtttctccaataattggtttatctgcatcaaca

SEQ ID NO: 31231 - DNA, 57 bp, unidentified
  source 1..57: mol_type = unassigned DNA; note = methanogen bacteria
cctaatataagttctgttttacaaaatcaattagcaccaatgtctgcaccatcatta

SEQ ID NO: 31232 - DNA, 39 bp, unidentified
  source 1..39: mol_type = unassigned DNA; note = methanogen bacteria
ctagttaacggtggtcttagtatagcagctataaccatg

SEQ ID NO: 31233 - DNA, 66 bp, unidentified
  source 1..66: mol_type = unassigned DNA; note = methanogen bacteria
gcaggagtagacattgcatcaacaaccggtgctttaggatccgttggtgacgtagcaggaattgga

SEQ ID NO: 31234 - DNA, 30 bp, unidentified
  source 1..30: mol_type = unassigned DNA; note = methanogen bacteria
aacacagttgtaggtaacgcagctccttgg

SEQ ID NO: 31235 - DNA, 33 bp, unidentified
  source 1..33: mol_type = unassigned DNA; note = methanogen bacteria
gctaccattacattaatggaaactttggggggt

SEQ ID NO: 31236 - DNA, 57 bp, unidentified
  source 1..57: mol_type = unassigned DNA; note = methanogen bacteria
gaaaccctgaagatttctgctgaatctccaattgaaccgatatcaacaaccctgctt

SEQ ID NO: 31237 - DNA, 78 bp, unidentified
  source 1..78: mol_type = unassigned DNA; note = methanogen bacteria
atgaattttattccaatcgaattaacaaaaaattttgcagttactagaacagatgtttttacttcatatgttgatgtt

SEQ ID NO: 31238 - DNA, 36 bp, unidentified
  source 1..36: mol_type = unassigned DNA; note = methanogen bacteria
ttttatgttaaaccattaactttaactggaaaacaa

SEQ ID NO: 31239 - DNA, 33 bp, unidentified
  source 1..33: mol_type = unassigned DNA; note = methanogen bacteria
attttgggcggattatatgggtccgggtcatcc

SEQ ID NO: 31240 - DNA, 48 bp, unidentified
  source 1..48: mol_type = unassigned DNA; note = methanogen bacteria
atgtttggtgcaattggagcaggactggataaaatggcaggatcttta

SEQ ID NO: 31241 - DNA, 33 bp, unidentified
  source 1..33: mol_type = unassigned DNA; note = methanogen bacteria
tcagaacagttggttcaggcaatttacagctac

SEQ ID NO: 31242 - DNA, 36 bp, unidentified
  source 1..36: mol_type = unassigned DNA; note = methanogen bacteria
atcgttgcaccaacaattggagtcacttcacttgac

SEQ ID NO: 31243 - DNA, 57 bp, unidentified
  source 1..57: mol_type = unassigned DNA; note = methanogen bacteria
ccaaacattgcaggagtattgtctaaaactcaaagtcctattacattgggttctcct

SEQ ID NO: 31244 - DNA, 36 bp, unidentified
  source 1..36: mol_type = unassigned DNA; note = methanogen bacteria
atggcaagtgctatggcaaataatgtctttgcagca

SEQ ID NO: 31245 - DNA, 156 bp, unidentified
  source 1..156: mol_type = unassigned DNA; note = methanogen bacteria
acacacaccattttgcatattgatgagtactggacatattcgctggtgaacctgactttcatgcaggggatgaccgttgcagttcatgatgtgcatccgatactttattacttgatattgtatctcttcaagcctgttgcaggctcagacaatttt

SEQ ID NO: 31246 - DNA, 48 bp, unidentified
  source 1..48: mol_type = unassigned DNA; note = methanogen bacteria
tgctggttcaccagattcaggggcaaagtgatgagtttcaccaggcaa

SEQ ID NO: 31247 - DNA, 33 bp, unidentified
  source 1..33: mol_type = unassigned DNA; note = methanogen bacteria
gctgaccaattaatacaggccatctacggatat

SEQ ID NO: 31248 - DNA, 36 bp, unidentified
  source 1..36: mol_type = unassigned DNA; note = methanogen bacteria
attgttgcacctacaattggtgtcagctcacttaat

SEQ ID NO: 31249 - DNA, 57 bp, unidentified
  source 1..57: mol_type = unassigned DNA; note = methanogen bacteria
ccaaacattgcaggagctttgacaaaaaccgtaagtcctatttcaattagttctcct

SEQ ID NO: 31250 - DNA, 69 bp, unidentified
  source 1..69: mol_type = unassigned DNA; note = methanogen bacteria
ggtacaactactatagattttattttagacttcttgggtataaataatattattgctaatgaatctggt

SEQ ID NO: 31251 - DNA, 36 bp, unidentified
  source 1..36: mol_type = unassigned DNA; note = methanogen bacteria
gaattgaatcctgtttccttgacattcagaaatgag

SEQ ID NO: 31252 - DNA, 99 bp, unidentified
  source 1..99: mol_type = unassigned DNA; note = methanogen bacteria
attgatcccaacgtcaatgacatacatacagctctttggtatatcatcgttaccataaccagcacaggatatggagatatagttccatccacactttcg

SEQ ID NO: 31253 - DNA, 33 bp, unidentified
  source 1..33: mol_type = unassigned DNA; note = methanogen bacteria
gcagatcagttggttcaggcaatatacagctat

SEQ ID NO: 31254 - DNA, 36 bp, unidentified
  source 1..36: mol_type = unassigned DNA; note = methanogen bacteria
attgttgcgccaacaattggagtcagttctcttaac

SEQ ID NO: 31255 - DNA, 57 bp, unidentified
  source 1..57: mol_type = unassigned DNA; note = methanogen bacteria
ccaaatattgcaggtgcattatcaaaaactacaagtccgataacattaggttctcct

SEQ ID NO: 31256 - DNA, 54 bp, unidentified
  source 1..54: mol_type = unassigned DNA; note = methanogen bacteria
agacttacaggctctatagcagggcattctgaaatgaacacaattccaagtcta

SEQ ID NO: 31257 - DNA, 33 bp, unidentified
  source 1..33: mol_type = unassigned DNA; note = methanogen bacteria
gctttccgtccagtttctccaaccttcagaaat

SEQ ID NO: 31258 - DNA, 99 bp, unidentified
  source 1..99: mol_type = unassigned DNA; note = methanogen bacteria
atcgatccgaatataaatgatatcaatacctctttatggtataccattgttaccgtaaccagcacaggatatggggatgtagttccatcttcagtttac

SEQ ID NO: 31259 - DNA, 48 bp, unidentified
  source 1..48: mol_type = unassigned DNA; note = methanogen bacteria
ggtgctgcggctgccagcgctgcagcttcaaatcttgcggctgcaatg

SEQ ID NO: 31260 - DNA, 30 bp, unidentified
  source 1..30: mol_type = unassigned DNA; note = methanogen bacteria
cagctggttacaaacctcactgatttgcaa

SEQ ID NO: 31261 - DNA, 42 bp, unidentified
  source 1..42: mol_type = unassigned DNA; note = methanogen bacteria
gtattgtataatctttttgagcagtatctttttttaaaactg

SEQ ID NO: 31262 - DNA, 33 bp, unidentified
  source 1..33: mol_type = unassigned DNA; note = methanogen bacteria
gcagaacagttgattcaggccatttatggatat

SEQ ID NO: 31263 - DNA, 36 bp, unidentified
  source 1..36: mol_type = unassigned DNA; note = methanogen bacteria
attgtagcaccaacaatcggtgtcagttcacttaac

SEQ ID NO: 31264 - DNA, 57 bp, unidentified
  source 1..57: mol_type = unassigned DNA; note = methanogen bacteria
ccaaacattgcaggagctctatctaaaacaacaactcctataactattggttctcct

SEQ ID NO: 31265 - DNA, 33 bp, unidentified
  source 1..33: mol_type = unassigned DNA; note = methanogen bacteria
gcagaacaactcactcaggctatttatagttat

SEQ ID NO: 31266 - DNA, 30 bp, unidentified
  source 1..30: mol_type = unassigned DNA; note = methanogen bacteria
attgtcgctccaactattggtgttggtgct

SEQ ID NO: 31267 - DNA, 57 bp, unidentified
  source 1..57: mol_type = unassigned DNA; note = methanogen bacteria
ccgaacattgcaggttcattaactaaagattttaaagatctaacaatgaattcacct

SEQ ID NO: 31268 - DNA, 33 bp, unidentified
  source 1..33: mol_type = unassigned DNA; note = methanogen bacteria
gcagaacaactcactcaagctatttatagttat

SEQ ID NO: 31269 - DNA, 30 bp, unidentified
  source 1..30: mol_type = unassigned DNA; note = methanogen bacteria
attgttgctccaactattggggtcggcgct

SEQ ID NO: 31270 - DNA, 57 bp, unidentified
  source 1..57: mol_type = unassigned DNA; note = methanogen bacteria
ccgaatattgcaggttctttaagtaaggatttcggtgacttggcaatgacttcacct

SEQ ID NO: 31271 - DNA, 45 bp, unidentified
  source 1..45: mol_type = unassigned DNA; note = methanogen bacteria
ccatttttattttcgatttttgaaaatttccttagattttacatg

SEQ ID NO: 31272 - DNA, 39 bp, unidentified
  source 1..39: mol_type = unassigned DNA; note = methanogen bacteria
atggttgtttctattaatggcggtaaagttgttgaaact

SEQ ID NO: 31273 - DNA, 33 bp, unidentified
  source 1..33: mol_type = unassigned DNA; note = methanogen bacteria
gcttcaggagttgctgttaataatttatgggca

SEQ ID NO: 31274 - DNA, 42 bp, unidentified
  source 1..42: mol_type = unassigned DNA; note = methanogen bacteria
tttggtgcaatcggatcagggcttaatcaggttgtgggttct

SEQ ID NO: 31275 - DNA, 99 bp, unidentified
  source 1..99: mol_type = unassigned DNA; note = methanogen bacteria
ttggatccgggtatcaacgatattcctactgcaatatggttcattgttgtttcaatgaccagtacaggttatggtgatgttgttccggttacacattcg

SEQ ID NO: 31276 - DNA, 33 bp, unidentified
  source 1..33: mol_type = unassigned DNA; note = methanogen bacteria
gcagaccagctgattcaggccatttacggttat

SEQ ID NO: 31277 - DNA, 36 bp, unidentified
  source 1..36: mol_type = unassigned DNA; note = methanogen bacteria
attgttgcaccaacaatcggtgtcagttcacttaat

SEQ ID NO: 31278 - DNA, 57 bp, unidentified
  source 1..57: mol_type = unassigned DNA; note = methanogen bacteria
ccaaacattgcaggcgccatgagcaagaccatgagtccgatatcaataggctcacct

SEQ ID NO: 31279 - DNA, 33 bp, unidentified
  source 1..33: mol_type = unassigned DNA; note = methanogen bacteria
acaggttttcaatttagctatgaaatcttttca

SEQ ID NO: 31280 - DNA, 51 bp, unidentified
  source 1..51: mol_type = unassigned DNA; note = methanogen bacteria
agcaccgacttcgtcactgcctatttcaaattctatctgggggacctatgg

SEQ ID NO: 31281 - DNA, 36 bp, unidentified
  source 1..36: mol_type = unassigned DNA; note = methanogen bacteria
ttcggtctgctccccacgttccagtacaccctggga

SEQ ID NO: 31282 - DNA, 96 bp, unidentified
  source 1..96: mol_type = unassigned DNA; note = methanogen bacteria
gatgcgggcatcactgactttggaacggccatatggtacacattcgcttcgatgaccagcacaggctacggggatgtcgttccgacaactgtttca

SEQ ID NO: 31283 - DNA, 33 bp, unidentified
  source 1..33: mol_type = unassigned DNA; note = methanogen bacteria
gctgatcagctgattcaggctatctacagctat

SEQ ID NO: 31284 - DNA, 36 bp, unidentified
  source 1..36: mol_type = unassigned DNA; note = methanogen bacteria
attgttgcaccgacaataggtgtcagttcacttaat

SEQ ID NO: 31285 - DNA, 57 bp, unidentified
  source 1..57: mol_type = unassigned DNA; note = methanogen bacteria
ccaaacattgcaggagcattatcaaaaaccacaactcctgtaactcttggttctcct

SEQ ID NO: 31286 - DNA, 33 bp, unidentified
  source 1..33: mol_type = unassigned DNA; note = methanogen bacteria
atggcaggtgctttagctaataatgcattagca

SEQ ID NO: 31287 - DNA, 33 bp, unidentified
  source 1..33: mol_type = unassigned DNA; note = methanogen bacteria
gcattacatcccgtttcttcaacgttcagattt

SEQ ID NO: 31288 - DNA, 99 bp, unidentified
  source 1..99: mol_type = unassigned DNA; note = methanogen bacteria
ttagagcctaatatcacggatataaatactgctttttggtatatcattgtttctataactaatacaggatatggagatatcgttccatcctcactttca

SEQ ID NO: 31289 - DNA, 33 bp, unidentified
  source 1..33: mol_type = unassigned DNA; note = methanogen bacteria
gccgatcagttagttcaggcaatctacagttat

SEQ ID NO: 31290 - DNA, 36 bp, unidentified
  source 1..36: mol_type = unassigned DNA; note = methanogen bacteria
atagtggctccaacaatcggggtcagttcacttgat

SEQ ID NO: 31291 - DNA, 57 bp, unidentified
  source 1..57: mol_type = unassigned DNA; note = methanogen bacteria
ccgaatattgcaggagcattaactaaaactacaagtcctattactattggttctcct

SEQ ID NO: 31292 - DNA, 30 bp, unidentified
  source 1..30: mol_type = unassigned DNA; note = methanogen bacteria
ttgcgtcccgtttcttcaacattcagagat

SEQ ID NO: 31293 - DNA, 99 bp, unidentified
  source 1..99: mol_type = unassigned DNA; note = methanogen bacteria
gttgatccatctatccatgatatacatactgccttgtggtatgtcatcgtttccataaccagtacaggatatggggatgtcgttccatcaacactttca

SEQ ID NO: 31294 - DNA, 33 bp, unidentified
  source 1..33: mol_type = unassigned DNA; note = methanogen bacteria
gctagtggtgttgccgttaataatttatgggcg

SEQ ID NO: 31295 - DNA, 33 bp, unidentified
  source 1..33: mol_type = unassigned DNA; note = methanogen bacteria
tcagagcagttaattcaggcaatttacagttat

SEQ ID NO: 31296 - DNA, 36 bp, unidentified
  source 1..36: mol_type = unassigned DNA; note = methanogen bacteria
atcgtcgcaccgacaataggagttacttcacttgat

SEQ ID NO: 31297 - DNA, 60 bp, unidentified
  source 1..60: mol_type = unassigned DNA; note = methanogen bacteria
ccaaatattgccggagtattatccaaaactcaaagtcctattacaatgggttctccccaa

SEQ ID NO: 31298 - DNA, 30 bp, unidentified
  source 1..30: mol_type = unassigned DNA; note = methanogen bacteria
gcagccggagcggcagccaataatcttttt

SEQ ID NO: 31299 - DNA, 33 bp, unidentified
  source 1..33: mol_type = unassigned DNA; note = methanogen bacteria
gcagagcaactcactcaggctatttatagttat

SEQ ID NO: 31300 - DNA, 30 bp, unidentified
  source 1..30: mol_type = unassigned DNA; note = methanogen bacteria
attgttgctccaactattggtgtaggtgct

SEQ ID NO: 31301 - DNA, 57 bp, unidentified
  source 1..57: mol_type = unassigned DNA; note = methanogen bacteria
cctaatatcgcagggtctttaagtaaagatttcagtgatcttacaatgagttctcct

SEQ ID NO: 31302 - DNA, 33 bp, unidentified
  source 1..33: mol_type = unassigned DNA; note = methanogen bacteria
tctgagcagttggttcaggcaatttacagctat

SEQ ID NO: 31303 - DNA, 36 bp, unidentified
  source 1..36: mol_type = unassigned DNA; note = methanogen bacteria
attgtcgcaccgacaattggtgtcagttcacttgac

SEQ ID NO: 31304 - DNA, 57 bp, unidentified
  source 1..57: mol_type = unassigned DNA; note = methanogen bacteria
cctaacattgcgggggttttggcaaaaactactagtccgattaccatgggttctcct

SEQ ID NO: 31305 - DNA, 33 bp, unidentified
  source 1..33: mol_type = unassigned DNA; note = methanogen bacteria
gcggaagaactcactcaagttatttatacttat

SEQ ID NO: 31306 - DNA, 33 bp, unidentified
  source 1..33: mol_type = unassigned DNA; note = methanogen bacteria
attgtggctccgactattggtattactgcattt

SEQ ID NO: 31307 - DNA, 57 bp, unidentified
  source 1..57: mol_type = unassigned DNA; note = methanogen bacteria
ccaaatattgctggagctttatctaagcagttcggtactgttgatatgggttcttct

SEQ ID NO: 31308 - DNA, 39 bp, unidentified
  source 1..39: mol_type = unassigned DNA; note = methanogen bacteria
gtagaatttcatcctgtttctttaacattcagacaggac

SEQ ID NO: 31309 - DNA, 99 bp, unidentified
  source 1..99: mol_type = unassigned DNA; note = methanogen bacteria
gttgatccaggtattaatgacataaatactgctttttggtatattattgttagcataaccagtactggatatggtgatgttgttccatcttcaatttca

SEQ ID NO: 31310 - DNA, 33 bp, unidentified
  source 1..33: mol_type = unassigned DNA; note = methanogen bacteria
gcagaccaattaattcaagcgatttatagttat

SEQ ID NO: 31311 - DNA, 36 bp, unidentified
  source 1..36: mol_type = unassigned DNA; note = methanogen bacteria
attgttgctccaacaattggtgttacttcacttgat

SEQ ID NO: 31312 - DNA, 57 bp, unidentified
  source 1..57: mol_type = unassigned DNA; note = methanogen bacteria
ccgaatatagcaggtgttttatcaaaaactttaagtccaatcagtattagttctcct

SEQ ID NO: 31313 - DNA, 33 bp, unidentified
  source 1..33: mol_type = unassigned DNA; note = methanogen bacteria
atggtaggggctgcagctagaaatgcatttgca

SEQ ID NO: 31314 - DNA, 33 bp, unidentified
  source 1..33: mol_type = unassigned DNA; note = methanogen bacteria
tcagaacagttggttcaggcaatatacagttat

SEQ ID NO: 31315 - DNA, 36 bp, unidentified
  source 1..36: mol_type = unassigned DNA; note = methanogen bacteria
attgtggcaccgacaatcggagtcagttcactcaat

SEQ ID NO: 31316 - DNA, 60 bp, unidentified
  source 1..60: mol_type = unassigned DNA; note = methanogen bacteria
ccaaacattgcgggagcactatcaaaaactactagtccaattactataggttctcctcaa

SEQ ID NO: 31317 - DNA, 30 bp, unidentified
  source 1..30: mol_type = unassigned DNA; note = methanogen bacteria
ttctatcctgtttctcagactttcagattt

SEQ ID NO: 31318 - DNA, 99 bp, unidentified
  source 1..99: mol_type = unassigned DNA; note = methanogen bacteria
gttgatacgaatattccggatatacatactgccatctggtatattgtcgtttccatgaccggtactgggtatggtgatatcgttccggcaacaaccaca

SEQ ID NO: 31319 - DNA, 39 bp, unidentified
  source 1..39: mol_type = unassigned DNA; note = methanogen bacteria
gttgctgcaagtgctgcaatagataacgtattggcagct

SEQ ID NO: 31320 - DNA, 63 bp, unidentified
  source 1..63: mol_type = unassigned DNA; note = methanogen bacteria
ctggatggcacaggtactggcggaagcggactggccaatagctttacaatacatcttgaaagc

SEQ ID NO: 31321 - DNA, 33 bp, unidentified
  source 1..33: mol_type = unassigned DNA; note = methanogen bacteria
gcagaacaaatcactcaagctatttatagttat

SEQ ID NO: 31322 - DNA, 30 bp, unidentified
  source 1..30: mol_type = unassigned DNA; note = methanogen bacteria
attgttgctccaactattggtgttggtgct

SEQ ID NO: 31323 - DNA, 57 bp, unidentified
  source 1..57: mol_type = unassigned DNA; note = methanogen bacteria
ccaaatattgcaggttccctaagtaaggatttcagtactatttcaatgacttctcct

SEQ ID NO: 31324 - DNA, 36 bp, unidentified
  source 1..36: mol_type = unassigned DNA; note = methanogen bacteria
gttttaggaatgaattccaataatgtatttactgtt

SEQ ID NO: 31325 - DNA, 60 bp, unidentified
  source 1..60: mol_type = unassigned DNA; note = methanogen bacteria
gagtatgctggaatgacctcttcgtctcctgctagtactgagaccgcatcaacaacattg

SEQ ID NO: 31326 - DNA, 48 bp, unidentified
  source 1..48: mol_type = unassigned DNA; note = methanogen bacteria
actggtgtgtcagcatcattttcaataggcagtgttgaatcaatgggt

SEQ ID NO: 31327 - DNA, 33 bp, unidentified
  source 1..33: mol_type = unassigned DNA; note = methanogen bacteria
gcagaacaacttactcaggccatttatagttac

SEQ ID NO: 31328 - DNA, 57 bp, unidentified
  source 1..57: mol_type = unassigned DNA; note = methanogen bacteria
ccaaatatagctggttcattaagtaaggatttctcatctccaaccataacttccttt

SEQ ID NO: 31329 - DNA, 45 bp, unidentified; identical to SEQ ID NO: 23494
  source 1..45: mol_type = unassigned DNA; note = methanogen bacteria

SEQ ID NO: 31330 - DNA, 33 bp, unidentified
  source 1..33: mol_type = unassigned DNA; note = methanogen bacteria
acatttctttctggaacgattgccgtagcatca

SEQ ID NO: 31331 - DNA, 33 bp, unidentified
  source 1..33: mol_type = unassigned DNA; note = methanogen bacteria
gctgatcagttgattcaggcgatttacggatac

SEQ ID NO: 31332 - DNA, 36 bp, unidentified
  source 1..36: mol_type = unassigned DNA; note = methanogen bacteria
gttgttgcgccaactatcggtgtaagttctctgaat

SEQ ID NO: 31333 - DNA, 57 bp, unidentified
  source 1..57: mol_type = unassigned DNA; note = methanogen bacteria
cccaatattgcaggagcaatgacaaagactttaagtccgattaccataggttctcct

SEQ ID NO: 31334 - DNA, 33 bp, unidentified
  source 1..33: mol_type = unassigned DNA; note = methanogen bacteria
ttttatccgacatcattaacattcaaaaaccag

SEQ ID NO: 31335 - DNA, 99 bp, unidentified
  source 1..99: mol_type = unassigned DNA; note = methanogen bacteria
gccgatcctaatctcagtaacccacgtactgctttttggtatattattgttaccattacaagcacaggctatggagatatcgttccatccacactttca

SEQ ID NO: 31336 - DNA, 36 bp, unidentified
  source 1..36: mol_type = unassigned DNA; note = methanogen bacteria
tttgcaggtatttcagatggtaatgtgattgaggta

SEQ ID NO: 31337 - DNA, 36 bp, unidentified
  source 1..36: mol_type = unassigned DNA; note = methanogen bacteria
acacaacagattacggatctgatttacacttataac

SEQ ID NO: 31338 - DNA, 30 bp, unidentified
  source 1..30: mol_type = unassigned DNA; note = methanogen bacteria
cttgttgcaccgactgtaggtttgggatta

SEQ ID NO: 31339 - DNA, 57 bp, unidentified
  source 1..57: mol_type = unassigned DNA; note = methanogen bacteria
ccaaatatcacagcaatgattcaaaatccgatggaggcaatatcaatagcttcacca

SEQ ID NO: 31340 - DNA, 36 bp, unidentified
  source 1..36: mol_type = unassigned DNA; note = methanogen bacteria
acagagcaaatcactgatttgatatacacttacaac

SEQ ID NO: 31341 - DNA, 30 bp, unidentified
  source 1..30: mol_type = unassigned DNA; note = methanogen bacteria
ttagttgcacctaccgttggattgggatta

SEQ ID NO: 31342 - DNA, 57 bp, unidentified
  source 1..57: mol_type = unassigned DNA; note = methanogen bacteria
ccaaatattacagcaatgattgcaaatccgatggatgcaatatccatatcttctcca

SEQ ID NO: 31343 - DNA, 36 bp, unidentified
  source 1..36: mol_type = unassigned DNA; note = methanogen bacteria
acaactcagataacagatctgatttatacttataat

SEQ ID NO: 31344 - DNA, 30 bp, unidentified
  source 1..30: mol_type = unassigned DNA; note = methanogen bacteria
ctggtcgcacctactgtaggacttgggctg

SEQ ID NO: 31345 - DNA, 60 bp, unidentified
  source 1..60: mol_type = unassigned DNA; note = methanogen bacteria
ctgccgaatataacagcactgcttgcagaccctatggatgcaatatctattcagtctcct

SEQ ID NO: 31346 - DNA, 30 bp, unidentified
  source 1..30: mol_type = unassigned DNA; note = methanogen bacteria
caattaattgtcaatgtaactactctttca

SEQ ID NO: 31347 - DNA, 39 bp, unidentified
  source 1..39: mol_type = unassigned DNA; note = methanogen bacteria
ccttttttattttcactttttgagatagttataaactat

SEQ ID NO: 31348 - DNA, 39 bp, unidentified
  source 1..39: mol_type = unassigned DNA; note = methanogen bacteria
tacacaaaacagattacagatttaatttatacttataat

SEQ ID NO: 31349 - DNA, 30 bp, unidentified
  source 1..30: mol_type = unassigned DNA; note = methanogen bacteria
cttgtggcaccgactgtaggtttaggtctc

SEQ ID NO: 31350 - DNA, 60 bp, unidentified
  source 1..60: mol_type = unassigned DNA; note = methanogen bacteria
cttccgaacattaccgcacttctgcaaagtccgatggatgcaatatcaatccaatctcca

SEQ ID NO: 31351 - DNA, 93 bp, unidentified
  source 1..93: mol_type = unassigned DNA; note = methanogen bacteria
gcagaccaaatttccagctatattcagcctgtagtagaaaactttgaaaagcaagtggaaaatggaacagtgacattaacaacccattcactc

SEQ ID NO: 31352 - DNA, 48 bp, unidentified
  source 1..48: mol_type = unassigned DNA; note = methanogen bacteria
ggattttatggtaacggatatgatttgcttacttatattattttaaca

SEQ ID NO: 31353 - DNA, 45 bp, unidentified
  source 1..45: mol_type = unassigned DNA; note = methanogen bacteria
gcatattggatttcttcaatatttggaaatgctatggcatttatt

SEQ ID NO: 31354 - DNA, 42 bp, unidentified
  source 1..42: mol_type = unassigned DNA; note = methanogen bacteria
atgaccttcgagggcaacgaggtcctcgcagtctacccctac

SEQ ID NO: 31355 - DNA, 201 bp, unidentified
  source 1..201: mol_type = unassigned DNA; note = methanogen bacteria
ttatcccctatcaatccagtttctgtttatttaaaaggtgctgctgtatctgaaagtcaacgtgctattcttaatgaatactttggtgtgggagttccgcttcaaactaaaatttatcattggttactaaatttgattcaaggaaacttaggaacttcacttatatatcgtgctcctgtgttggatgtaattattgataag

SEQ ID NO: 31356 - DNA, 90 bp, unidentified
  source 1..90: mol_type = unassigned DNA; note = methanogen bacteria
gcagtttatttaaaattattcccaataggatttggtgttcctattggtgttagaagtactgatgcttcttttatagattgggcatcaaga

SEQ ID NO: 31357 - DNA, 87 bp, unidentified
  source 1..87: mol_type = unassigned DNA; note = methanogen bacteria
atgggcgcattcgaccttacctgggacgcggccactgcgtccgatgttcccggagccaactcccttaatggcgtcaacgacaccatc

SEQ ID NO: 31358 - DNA, 30 bp, unidentified
  source 1..30: mol_type = unassigned DNA; note = methanogen bacteria
tttcaaacaccgatttcatcagggataaca

SEQ ID NO: 31359 - DNA, 36 bp, unidentified
  source 1..36: mol_type = unassigned DNA; note = methanogen bacteria
tcccagctggtcaatgcggtgacaatcatcgacaat

SEQ ID NO: 31360 - DNA, 39 bp, unidentified
  source 1..39: mol_type = unassigned DNA; note = methanogen bacteria
gtattgtttaacttgttcggcaattacatattgagtggc

SEQ ID NO: 31361 - DNA, 39 bp, unidentified
  source 1..39: mol_type = unassigned DNA; note = methanogen bacteria
tacactgcacagattacagacttgatttatacctataat

SEQ ID NO: 31362 - DNA, 30 bp, unidentified
  source 1..30: mol_type = unassigned DNA; note = methanogen bacteria
ctggtagcgcctactgtcggtttaggtctt

SEQ ID NO: 31363 - DNA, 60 bp, unidentified
  source 1..60: mol_type = unassigned DNA; note = methanogen bacteria
ctgcctaacattactgctttgctgatggatcctatggatgcaattacaatccaatctcca

SEQ ID NO: 31364 - DNA, 33 bp, unidentified
  source 1..33: mol_type = unassigned DNA; note = methanogen bacteria
gtgggtattatggttgaagctgtaatgattaat

SEQ ID NO: 31365 - DNA, 36 bp, unidentified
  source 1..36: mol_type = unassigned DNA; note = methanogen bacteria
tatgcaaatgagattactgatttgatttacacttat

SEQ ID NO: 31366 - DNA, 36 bp, unidentified
  source 1..36: mol_type = unassigned DNA; note = methanogen bacteria
ttggttgctccaactgtaggtttaggggccgtggac

SEQ ID NO: 31367 - DNA, 60 bp, unidentified
  source 1..60: mol_type = unassigned DNA; note = methanogen bacteria
ccgaacattgctgcaataatgaacaagtcaatgggctcaataagcatagtttcaatggat

SEQ ID NO: 31368 - DNA, 36 bp, unidentified
  source 1..36: mol_type = unassigned DNA; note = methanogen bacteria
acagaggagataaccaatctaatctatacttataat

SEQ ID NO: 31369 - DNA, 30 bp, unidentified
  source 1..30: mol_type = unassigned DNA; note = methanogen bacteria
ttggtggcccctactgttggtttaggtttg

SEQ ID NO: 31370 - DNA, 60 bp, unidentified
  source 1..60: mol_type = unassigned DNA; note = methanogen bacteria
ccgaatattactgcaatgattcaaaatccaatggatgcaattacaatagcttcaatggat

SEQ ID NO: 31371 - DNA, 42 bp, unidentified
  source 1..42: mol_type = unassigned DNA; note = methanogen bacteria
ccatttttgtttaacctgtttgaaaattatgttaaggcatat

SEQ ID NO: 31372 - DNA, 39 bp, unidentified
  source 1..39: mol_type = unassigned DNA; note = methanogen bacteria
ttcacacagcagattacagacttgatttatacttataat

SEQ ID NO: 31373 - DNA, 30 bp, unidentified
  source 1..30: mol_type = unassigned DNA; note = methanogen bacteria
cttgttgcacctacagttggtttgggattg

SEQ ID NO: 31374 - DNA, 57 bp, unidentified
  source 1..57: mol_type = unassigned DNA; note = methanogen bacteria
ccaaacatcacagcaatgattcaaaatccgatggatgcaatatcaatatcttctcct

SEQ ID NO: 31375 - DNA, 36 bp, unidentified
  source 1..36: mol_type = unassigned DNA; note = methanogen bacteria
gttgctacattaagcttttccacacagggtgtcggt

SEQ ID NO: 31376 - DNA, 36 bp, unidentified
  source 1..36: mol_type = unassigned DNA; note = methanogen bacteria
acaaagcagattaccgatttgatttacacttacaat

SEQ ID NO: 31377 - DNA, 30 bp, unidentified
  source 1..30: mol_type = unassigned DNA; note = methanogen bacteria
cttgttgcacctaccgtaggattgggatta

SEQ ID NO: 31378 - DNA, 57 bp, unidentified
  source 1..57: mol_type = unassigned DNA; note = methanogen bacteria
ccaaacatcacagcgatgattcaaaatccgatggaagcaatatcaatagcttcacca

SEQ ID NO: 31379 - DNA, 39 bp, unidentified
  source 1..39: mol_type = unassigned DNA; note = methanogen bacteria
tatacaactcaaatcactgatttgatttatagttataat

SEQ ID NO: 31380 - DNA, 30 bp, unidentified
  source 1..30: mol_type = unassigned DNA; note = methanogen bacteria
ttggttgcacctactgttggtttaggtctt

SEQ ID NO: 31381 - DNA, 57 bp, unidentified
  source 1..57: mol_type = unassigned DNA; note = methanogen bacteria
ccaaacattacagctatgattcaaaatccgatggatgcaattactatttcatctcca

SEQ ID NO: 31382 - DNA, 39 bp, unidentified
  source 1..39: mol_type = unassigned DNA; note = methanogen bacteria
tatacaacacaaataacagatttgatttatacgtacaat

SEQ ID NO: 31383 - DNA, 30 bp, unidentified
  source 1..30: mol_type = unassigned DNA; note = methanogen bacteria
ttggttgcccccactgtgggattaggactt

SEQ ID NO: 31384 - DNA, 60 bp, unidentified
  source 1..60: mol_type = unassigned DNA; note = methanogen bacteria
ccaaacataactgcaatgattcaaaatccgatggatgctattacaatcgcttctgttgac

SEQ ID NO: 31385 - DNA, 57 bp, unidentified
  source 1..57: mol_type = unassigned DNA; note = methanogen bacteria
ggatggctggtctcccagggaatgattcccgtgtcccgcgtgccttatgtcactgcg

SEQ ID NO: 31386 - DNA, 36 bp, unidentified
  source 1..36: mol_type = unassigned DNA; note = methanogen bacteria
acacaacagattacagacttgatttatacttataat

SEQ ID NO: 31387 - DNA, 30 bp, unidentified
  source 1..30: mol_type = unassigned DNA; note = methanogen bacteria
cttgtggcaccgagtgtcggtttaggactg

SEQ ID NO: 31388 - DNA, 57 bp, unidentified
  source 1..57: mol_type = unassigned DNA; note = methanogen bacteria
cctaatataactgcaatgatagcaaatcctatggatgcaatatcaatttcatctcca

SEQ ID NO: 31389 - DNA, 36 bp, unidentified
  source 1..36: mol_type = unassigned DNA; note = methanogen bacteria
tcacagctggttgatgcggtaacaatcatagataat

SEQ ID NO: 31390 - DNA, 39 bp, unidentified
  source 1..39: mol_type = unassigned DNA; note = methanogen bacteria
atcttgtttcaaatatttggaaattatattttaagcagt

SEQ ID NO: 31391 - DNA, 33 bp, unidentified
  source 1..33: mol_type = unassigned DNA; note = methanogen bacteria
gctgatcaattggttcaggccatttacagttat

SEQ ID NO: 31392 - DNA, 36 bp, unidentified
  source 1..36: mol_type = unassigned DNA; note = methanogen bacteria
atagtggctccaaccataggcgttacttcactagat

SEQ ID NO: 31393 - DNA, 57 bp, unidentified
  source 1..57: mol_type = unassigned DNA; note = methanogen bacteria
ccaaacatcgcaggggttttatcaaaaacttcaagccctatcactattggttctcct

SEQ ID NO: 31394 - DNA, 36 bp, unidentified
  source 1..36: mol_type = unassigned DNA; note = methanogen bacteria
acaaaacagattacagatttaatttatacttataac

SEQ ID NO: 31395 - DNA, 30 bp, unidentified
  source 1..30: mol_type = unassigned DNA; note = methanogen bacteria
cttgtggcgccaaccgtaggattgggactc

SEQ ID NO: 31396 - DNA, 57 bp, unidentified
  source 1..57: mol_type = unassigned DNA; note = methanogen bacteria
ccgaacattacagccatgattcaaaatccgatggatggaataacaatatcatcccca

SEQ ID NO: 31397 - DNA, 48 bp, unidentified
  source 1..48: mol_type = unassigned DNA; note = methanogen bacteria
gatgaagctattagtactagtatcaaattccctaacttaagtcctgag

SEQ ID NO: 31398 - DNA, 60 bp, unidentified
  source 1..60: mol_type = unassigned DNA; note = methanogen bacteria
ggatggctcgtatcccagggaatgatccctgtgtcccgtgtcccctatgtgactgccgta

SEQ ID NO: 31399 - DNA, 30 bp, unidentified
  source 1..30: mol_type = unassigned DNA; note = methanogen bacteria
tcaattggaggatatggtgaatccgcattg

SEQ ID NO: 31400 - DNA, 39 bp, unidentified
  source 1..39: mol_type = unassigned DNA; note = methanogen bacteria
atatttaccggaactttaggatttgctatggcagctggc

SEQ ID NO: 31401 - DNA, 54 bp, unidentified
  source 1..54: mol_type = unassigned DNA; note = methanogen bacteria
catgctctaggtttacatatgtttagtgataaagcagtaagtggagatcgtata

SEQ ID NO: 31402 - DNA, 120 bp, unidentified
  source 1..120: mol_type = unassigned DNA; note = methanogen bacteria
atgcacatacccgatggattaataggtgaaaatcctttcacagaggctgtcgaacatggtcatgaacatgcacatgaattattagaaaacggcccattaggacatgccttaattaatccc

SEQ ID NO: 31403 - DNA, 33 bp, unidentified
  source 1..33: mol_type = unassigned DNA; note = methanogen bacteria
gaaattccattgccagtagctgcatgtgcacat

SEQ ID NO: 31404 - DNA, 63 bp, unidentified
  source 1..63: mol_type = unassigned DNA; note = methanogen bacteria
atggagataattgatttgttcagcatagctttaactggagttaaagaacagaaaataggcttg

SEQ ID NO: 31405 - DNA, 93 bp, unidentified
  source 1..93: mol_type = unassigned DNA; note = methanogen bacteria
actgaacataaaaacgctttggattcactggtaatggtttccaatgcatttacaagtaatggatatgcagttttaggccaatcaattccggga

SEQ ID NO: 31406 - DNA, 99 bp, unidentified
  source 1..99: mol_type = unassigned DNA; note = methanogen bacteria
gattcaaacatcactgactttagaacagccatctggtatacatttgcatcaatgacaagtacaggatacggggatgtcgttcccacctcaagtccgggc

SEQ ID NO: 31407 - DNA, 30 bp, unidentified
  source 1..30: mol_type = unassigned DNA; note = methanogen bacteria
acattttattcaacatcccgaacttttaag

SEQ ID NO: 31408 - DNA, 99 bp, unidentified
  source 1..99: mol_type = unassigned DNA; note = methanogen bacteria
gtagattccaatattaacaatttgcaaacagctttttggtatattgttgttacaataacaagcactggttatggagatgttgtgccagctacagcttct

SEQ ID NO: 31409 - DNA, 66 bp, unidentified
  source 1..66: mol_type = unassigned DNA; note = methanogen bacteria
atggcaatagaagaaatggtaacaaatatgtctataactgaaagtggagctgcaacaagctctccg

SEQ ID NO: 31410 - DNA, 39 bp, unidentified
  source 1..39: mol_type = unassigned DNA; note = methanogen bacteria
tattctggaacagcattgcaaatcacccctataattgca

SEQ ID NO: 31411 - DNA, 51 bp, unidentified
  source 1..51: mol_type = unassigned DNA; note = methanogen bacteria
gacggcaccgcccgcggcctcagcatcggcgacgatccccatccccctgag

SEQ ID NO: 31412 - DNA, 48 bp, unidentified
  source 1..48: mol_type = unassigned DNA; note = methanogen bacteria
gacatggtcaccgggaccaactacatgacctacggcgtcttcgacacc

SEQ ID NO: 31413 - DNA, 66 bp, unidentified
  source 1..66: mol_type = unassigned DNA; note = methanogen bacteria
atgagtgcaatggatcaaatgttaacaaatatgactacaagtggaaatgcggtggtgaatagtcag

SEQ ID NO: 31414 - DNA, 39 bp, unidentified
  source 1..39: mol_type = unassigned DNA; note = methanogen bacteria
tattcaggaaccgctttggagataactccaatcattgca

SEQ ID NO: 31415 - DNA, 36 bp, unidentified
  source 1..36: mol_type = unassigned DNA; note = methanogen bacteria
caggtttatttaatatctcaaattaaattgccaatt

SEQ ID NO: 31416 - DNA, 72 bp, unidentified
  source 1..72: mol_type = unassigned DNA; note = methanogen bacteria
atgagtggtttagatcaaatgttaacaaatatgacagtaagttcaaatggtgtagtggatagtcctatattt

SEQ ID NO: 31417 - DNA, 39 bp, unidentified
  source 1..39: mol_type = unassigned DNA; note = methanogen bacteria
tactctagaaccgcattggaaatcacaccaattattgca

SEQ ID NO: 31418 - DNA, 72 bp, unidentified
  source 1..72: mol_type = unassigned DNA; note = methanogen bacteria
atgagtgcaatggatcaaatgttatcaaatatgaccgcaagtggaaatggcattgtaaacagtcaattattt

SEQ ID NO: 31419 - DNA, 39 bp, unidentified
  source 1..39: mol_type = unassigned DNA; note = methanogen bacteria
tattctggaacagcattggagatcactccaatcattgca

SEQ ID NO: 31420 - DNA, 69 bp, unidentified
  source 1..69: mol_type = unassigned DNA; note = methanogen bacteria
aatatttttgttgatcctttattatttttacaatttttgagagaattatgtaatggtgtttttaacaat

SEQ ID NO: 31421 - DNA, 90 bp, unidentified
  source 1..90: mol_type = unassigned DNA; note = methanogen bacteria
gtgtgtatgtatcgtccatggatacttgattcaaggattcattctgttgaagctgctttacctgcagcgggaggttattcgtttccaagc

SEQ ID NO: 31422 - DNA, 186 bp, unidentified
  source 1..186: mol_type = unassigned DNA; note = methanogen bacteria
aataaaataaaaacacaaacaaaagcagaaatcactgattctgatactcacatgttcacagtacatgtaactgttacagaacagggaacaggaaaacctgtaactaaaggaagagtaactataaaatcaaaaaagggtaaaataattggtacaggtaaaataaaagaaggaacagctgatataaca

SEQ ID NO: 31423 - DNA, 111 bp, unidentified
  source 1..111: mol_type = unassigned DNA; note = methanogen bacteria
ttaataacagcatatccgcaatcccagctagcacatacactaagtagtattataccatacgtagcagtatccaacactacaatgcaacacttctatctagcaaacctacac

SEQ ID NO: 31424 - DNA, 30 bp, unidentified
  source 1..30: mol_type = unassigned DNA; note = methanogen bacteria
atgattaatatggttgaaacagttatgatt

SEQ ID NO: 31425 - DNA, 99 bp, unidentified
  source 1..99: mol_type = unassigned DNA; note = methanogen bacteria
gtggattcaaacattgtcgactttagaactgccatctggtatacatttgtgtcaatgacaagcacaggttatggggatgtcgttccaacctcaacttca

SEQ ID NO: 31426 - DNA, 75 bp, unidentified
  source 1..75: mol_type = unassigned DNA; note = methanogen bacteria
agcgattttggaagcgtgcctctgaatatactgtttggatacttcatcggaacatcctatgaatttacagcattt

SEQ ID NO: 31427 - DNA, 48 bp, unidentified
  source 1..48: mol_type = unassigned DNA; note = methanogen bacteria
tatgactcatacggtacgtttccggaaggatattacttttatatgtca

SEQ ID NO: 31428 - DNA, 33 bp, unidentified
  source 1..33: mol_type = unassigned DNA; note = methanogen bacteria
aaatatgcaaataaatccgttgtttttaatgat

SEQ ID NO: 31429 - DNA, 30 bp, unidentified
  source 1..30: mol_type = unassigned DNA; note = methanogen bacteria
ttctatcctgttgacacttctttcaagttt

SEQ ID NO: 31430 - DNA, 96 bp, unidentified
  source 1..96: mol_type = unassigned DNA; note = methanogen bacteria
gattcaaacattgcggactttaaaaccgccatctggtacacttttgcatcaatgacaagtaccggatacggtgatgtggttccaacctcaacttct

SEQ ID NO: 31431 - DNA, 66 bp, unidentified
  source 1..66: mol_type = unassigned DNA; note = methanogen bacteria
atgagtgcaatggatgaaatgttatcaaatatgactgtaagttcttcaggaactgtaaacactcca

SEQ ID NO: 31432 - DNA, 39 bp, unidentified
  source 1..39: mol_type = unassigned DNA; note = methanogen bacteria
tattcaggaacagctttggagattactccaatcattgca

SEQ ID NO: 31433 - DNA, 39 bp, unidentified
  source 1..39: mol_type = unassigned DNA; note = methanogen bacteria
caagctgttcaagacagtacttttgtcactgatccagct

SEQ ID NO: 31434 - DNA, 36 bp, unidentified
  source 1..36: mol_type = unassigned DNA; note = methanogen bacteria
caagctgttcaagacagtacttttgtaactgaccct

SEQ ID NO: 31435 - DNA, 42 bp, unidentified
  source 1..42: mol_type = unassigned DNA; note = methanogen bacteria
caagaaatggctaaaaattctaccttattcgctggtaatatg

SEQ ID NO: 31436 - DNA, 57 bp, unidentified
  source 1..57: mol_type = unassigned DNA; note = methanogen bacteria
agttatctgggtcttgttggagcagataattcttggctaaattatactatctgggat

SEQ ID NO: 31437 - DNA, 36 bp, unidentified
  source 1..36: mol_type = unassigned DNA; note = methanogen bacteria
tcccagctgattgacgcggtgactgttattggcaat

SEQ ID NO: 31438 - DNA, 36 bp, unidentified
  source 1..36: mol_type = unassigned DNA; note = methanogen bacteria
ccgattttatttaagttgtttgtgaattatgttcac

SEQ ID NO: 31439 - DNA, 66 bp, unidentified
  source 1..66: mol_type = unassigned DNA; note = methanogen bacteria
gatatggtgggtcttggcggtgtggaagcatccagtgccgaagaggttggcgtcacaattcaaagt

SEQ ID NO: 31440 - DNA, 39 bp, unidentified
  source 1..39: mol_type = unassigned DNA; note = methanogen bacteria
aacactgctgttaaagaaagtacttttgtttctgatcct

SEQ ID NO: 31441 - DNA, 45 bp, unidentified
  source 1..45: mol_type = unassigned DNA; note = methanogen bacteria
aattccggatacacaattggctttgaaaccgactgcgtatttgac

SEQ ID NO: 31442 - DNA, 57 bp, unidentified
  source 1..57: mol_type = unassigned DNA; note = methanogen bacteria
gctgatttattgctttctaattcaaatacattcaacgaccctactgtctacaccaat

SEQ ID NO: 31443 - DNA, 42 bp, unidentified
  source 1..42: mol_type = unassigned DNA; note = methanogen bacteria
aacgaattcgcaaccgctaacatgactggatttgacgctact

SEQ ID NO: 31444 - DNA, 96 bp, unidentified
  source 1..96: mol_type = unassigned DNA; note = methanogen bacteria
gcagatcaggttgctgaatatataaagcctatggtggattcatttgaacagaatgttgaaagtggaacagtgactttaacaactcactccctattt

SEQ ID NO: 31445 - DNA, 33 bp, unidentified
  source 1..33: mol_type = unassigned DNA; note = methanogen bacteria
ttctacggtacaaagttaaacattgtgcaatat

SEQ ID NO: 31446 - DNA, 48 bp, unidentified
  source 1..48: mol_type = unassigned DNA; note = methanogen bacteria
atacctattgcttataagatattgccatttttcggaataggtattcgt

SEQ ID NO: 31447 - DNA, 36 bp, unidentified
  source 1..36: mol_type = unassigned DNA; note = methanogen bacteria
tctcagctggctgatgccgtaacagtcattgataac

SEQ ID NO: 31448 - DNA, 33 bp, unidentified
  source 1..33: mol_type = unassigned DNA; note = methanogen bacteria
atgttattcaaattattcgagcggtatgtgatt

SEQ ID NO: 31449 - DNA, 39 bp, unidentified
  source 1..39: mol_type = unassigned DNA; note = methanogen bacteria
aacactgctgtaaatcaaagttcttttgtaactgatcct

SEQ ID NO: 31450 - DNA, 39 bp, unidentified
  source 1..39: mol_type = unassigned DNA; note = methanogen bacteria
ccatacaccaaagaactatataattttgtatataattat

SEQ ID NO: 31451 - DNA, 30 bp, unidentified
  source 1..30: mol_type = unassigned DNA; note = methanogen bacteria
ctagtatctccaatggctggtgtatcatca

SEQ ID NO: 31452 - DNA, 54 bp, unidentified
  source 1..54: mol_type = unassigned DNA; note = methanogen bacteria
cctaatatttcatcattaacatcaggatcagcagtacaaattcaatcattaact

SEQ ID NO: 31453 - DNA, 96 bp, unidentified
  source 1..96: mol_type = unassigned DNA; note = methanogen bacteria
gattctcaaattaatgacatgcaaactgcagtatggtatatcattgtttccatgaccagtacaggctatggggatgttgttccgataataattcca

SEQ ID NO: 31454 - DNA, 42 bp, unidentified
  source 1..42: mol_type = unassigned DNA; note = methanogen bacteria
aacactgctgtaaatgacagtacttttattgttgacccaact

SEQ ID NO: 31455 - DNA, 33 bp, unidentified
  source 1..33: mol_type = unassigned DNA; note = methanogen bacteria
cagctgattgatgccgtaaccctaatcgacaat

SEQ ID NO: 31456 - DNA, 30 bp, unidentified
  source 1..30: mol_type = unassigned DNA; note = methanogen bacteria
cttttcaaactttttgaacaatatctgctc

SEQ ID NO: 31457 - DNA, 105 bp, unidentified
  source 1..105: mol_type = unassigned DNA; note = methanogen bacteria
atagacctcgggcatatcggttacaaagaactcctccacatcatattcaataagaacgacccctccaatgacctcataaacgggattctgatctgggacctgggc

SEQ ID NO: 31458 - DNA, 57 bp, unidentified
  source 1..57: mol_type = unassigned DNA; note = methanogen bacteria
ttgggagggggcatgatctccggacagagccatgccacgatatccattgacaacccg

SEQ ID NO: 31459 - DNA, 72 bp, unidentified
  source 1..72: mol_type = unassigned DNA; note = methanogen bacteria
tacatgttcaatgagtacgcgctgtccaccatcgtattctggcagttcggctctatggggaaggccggatgg

SEQ ID NO: 31460 - DNA, 39 bp, unidentified
  source 1..39: mol_type = unassigned DNA; note = methanogen bacteria
ccacttctattcaaattatttgaaaattttattaactat

SEQ ID NO: 31461 - DNA, 36 bp, unidentified
  source 1..36: mol_type = unassigned DNA; note = methanogen bacteria
attgcaaccagtttcatttctttgaatggtgtcggg

SEQ ID NO: 31462 - DNA, 36 bp, unidentified
  source 1..36: mol_type = unassigned DNA; note = methanogen bacteria
aatggttttactttatttggattatacactatttta

SEQ ID NO: 31463 - DNA, 39 bp, unidentified
  source 1..39: mol_type = unassigned DNA; note = methanogen bacteria
ccattcacacagcaagtgtacgatatagtatatggttat

SEQ ID NO: 31464 - DNA, 30 bp, unidentified
  source 1..30: mol_type = unassigned DNA; note = methanogen bacteria
ttggttgcaccaatagcaggagtatcttca

SEQ ID NO: 31465 - DNA, 51 bp, unidentified
  source 1..51: mol_type = unassigned DNA; note = methanogen bacteria
cctaatatatctttattggttgaaggaacaacgcttgaacttcaatcatta

SEQ ID NO: 31466 - DNA, 45 bp, unidentified
  source 1..45: mol_type = unassigned DNA; note = methanogen bacteria
ttcactgctgtaactgatagtatccttattgtcgatccagatgta

SEQ ID NO: 31467 - DNA, 36 bp, unidentified; identical to SEQ ID NO: 26454
  source 1..36: mol_type = unassigned DNA; note = methanogen bacteria

SEQ ID NO: 31468 - DNA, 57 bp, unidentified
  source 1..57: mol_type = unassigned DNA; note = methanogen bacteria
aactatggtgccggcgtgccgctggagtattcattattatcctttttagccaatgac

SEQ ID NO: 31469 - DNA, 84 bp, unidentified; identical to SEQ ID NO: 26456
  source 1..84: mol_type = unassigned DNA; note = methanogen bacteria

SEQ ID NO: 31470 - DNA, 30 bp, unidentified
  source 1..30: mol_type = unassigned DNA; note = methanogen bacteria
tcaatcggttgtacaatgcctgaattcaat

SEQ ID NO: 31471 - DNA, 33 bp, unidentified
  source 1..33: mol_type = unassigned DNA; note = methanogen bacteria
acttcaataggatgtacaatgcctgaattcaat

SEQ ID NO: 31472 - DNA, 63 bp, unidentified
  source 1..63: mol_type = unassigned DNA; note = methanogen bacteria
gaaattttccagatggtgcctgccggaggcgaatcagcatttcaggatatagacatcataagc

SEQ ID NO: 31473 - DNA, 33 bp, unidentified
  source 1..33: mol_type = unassigned DNA; note = methanogen bacteria
acttcaatcggatgtgcgatgcctgaattcaac

SEQ ID NO: 31474 - DNA, 30 bp, unidentified
  source 1..30: mol_type = unassigned DNA; note = methanogen bacteria
tatatttttgtgactttagcaatcatggtc

SEQ ID NO: 31475 - DNA, 30 bp, unidentified; identical to SEQ ID NO: 31470
  source 1..30: mol_type = unassigned DNA; note = methanogen bacteria

SEQ ID NO: 31476 - DNA, 30 bp, unidentified
  source 1..30: mol_type = unassigned DNA; note = methanogen bacteria
tcaataggatgtacaatgcctgaatttaat

SEQ ID NO: 31477 - DNA, 96 bp, unidentified
  source 1..96: mol_type = unassigned DNA; note = methanogen bacteria
gcagatagtatttcagactacatccagcctatggtggataatttccagaagcaggtagaggaaggggcaattaccctaaccacctattccatattt

SEQ ID NO: 31478 - DNA, 33 bp, unidentified
  source 1..33: mol_type = unassigned DNA; note = methanogen bacteria
tattttggttcagatttcaatatttatgcttac

SEQ ID NO: 31479 - DNA, 39 bp, unidentified
  source 1..39: mol_type = unassigned DNA; note = methanogen bacteria
gcaggtaagctattgcctttcttcggtttaagcatgggc

SEQ ID NO: 31480 - DNA, 81 bp, unidentified
  source 1..81: mol_type = unassigned DNA; note = methanogen bacteria
tttgacttcccatttatttcaataaaagaaggagaaatactgcttctaaacgttggaagcctattcactgctcatggatcc

SEQ ID NO: 31481 - DNA, 30 bp, unidentified
  source 1..30: mol_type = unassigned DNA; note = methanogen bacteria
ggacaatctattcatttgatttttgaaatg

SEQ ID NO: 31482 - DNA, 123 bp, unidentified
  source 1..123: mol_type = unassigned DNA; note = methanogen bacteria
tctgttttaccattacatccgtttgcatttgcgatggctagtggtgttggcagtgcaagtatgaatgcagcttctttggcccctacacttgcagcattccctgctttagagactcaaattgaa

SEQ ID NO: 31483 - DNA, 33 bp, unidentified
  source 1..33: mol_type = unassigned DNA; note = methanogen bacteria
acttcaatcggatgtacaatgcctgaattcaat

SEQ ID NO: 31484 - DNA, 30 bp, unidentified
  source 1..30: mol_type = unassigned DNA; note = methanogen bacteria
tcaataggatgcacaatgcccgaattcaat

SEQ ID NO: 31485 - DNA, 36 bp, unidentified
  source 1..36: mol_type = unassigned DNA; note = methanogen bacteria
gtttaccagtccgctttcacatcaagtgatgcattg

SEQ ID NO: 31486 - DNA, 42 bp, unidentified
  source 1..42: mol_type = unassigned DNA; note = methanogen bacteria
accattggtgttgaaaatattgttagattaatcttaggaatg

SEQ ID NO: 31487 - DNA, 39 bp, unidentified
  source 1..39: mol_type = unassigned DNA; note = methanogen bacteria
ggagcaactcttgctgaagctggaggagcttcaattgga

SEQ ID NO: 31488 - DNA, 93 bp, unidentified
  source 1..93: mol_type = unassigned DNA; note = methanogen bacteria
gcagatagcatttccgattacatccagcctatggtggataatttccagaagcaggtggatgagggggtaattaccctaaccacccagtctatt

SEQ ID NO: 31489 - DNA, 36 bp, unidentified
  source 1..36: mol_type = unassigned DNA; note = methanogen bacteria
ggttattttggtgcagatttcaatatttacgcttac

SEQ ID NO: 31490 - DNA, 48 bp, unidentified
  source 1..48: mol_type = unassigned DNA; note = methanogen bacteria
gtgcctcttgcaggtaagctattgcctttcttcggtttaagcatgggc

SEQ ID NO: 31491 - DNA, 30 bp, unidentified
  source 1..30: mol_type = unassigned DNA; note = methanogen bacteria
atccggttcctggcctcggaccagcagccc

SEQ ID NO: 31492 - DNA, 63 bp, unidentified
  source 1..63: mol_type = unassigned DNA; note = methanogen bacteria
gattacttctctttgacaggcacttccactcttgaaggagtttccataacatgggcaagcatt

SEQ ID NO: 31493 - DNA, 30 bp, unidentified
  source 1..30: mol_type = unassigned DNA; note = methanogen bacteria
tcaatcggatgtacaatgcctgaattcaat

SEQ ID NO: 31494 - DNA, 60 bp, unidentified
  source 1..60: mol_type = unassigned DNA; note = methanogen bacteria
ttaggtcatgaaaacttgtccctgtccggattttggtattacttaagtttaggtgttttt

SEQ ID NO: 31495 - DNA, 30 bp, unidentified
  source 1..30: mol_type = unassigned DNA; note = methanogen bacteria
aaatcagatttgggaacaactcctatatct

SEQ ID NO: 31496 - DNA, 48 bp, unidentified
  source 1..48: mol_type = unassigned DNA; note = methanogen bacteria
tataatgaattaaatttaaaacaagtatattcaacaatggcatgtgga

SEQ ID NO: 31497 - DNA, 33 bp, unidentified
  source 1..33: mol_type = unassigned DNA; note = methanogen bacteria
agattatctttgtatttgggatatagtattcca

SEQ ID NO: 31498 - DNA, 30 bp, unidentified
  source 1..30: mol_type = unassigned DNA; note = methanogen bacteria
tttcctgttgattactctctaattcaatgg

SEQ ID NO: 31499 - DNA, 36 bp, unidentified
  source 1..36: mol_type = unassigned DNA; note = methanogen bacteria
ccacttttgtttagtttatttgaaacatatgtattg

SEQ ID NO: 31500 - DNA, 96 bp, unidentified
  source 1..96: mol_type = unassigned DNA; note = methanogen bacteria
gcagatagtatttcagagtacatccagcctatggtggataattttcagaagcaggtggatgaaggtgtaattaccctaaccacccattcaattttc

SEQ ID NO: 31501 - DNA, 33 bp, unidentified; identical to SEQ ID NO: 30985
  source 1..33: mol_type = unassigned DNA; note = methanogen bacteria

SEQ ID NO: 31502 - DNA, 48 bp, unidentified
  source 1..48: mol_type = unassigned DNA; note = methanogen bacteria
gtgcctcttgcaggtaagctattgccatttttcggtttaagcatgggt

SEQ ID NO: 31503 - DNA, 81 bp, unidentified
  source 1..81: mol_type = unassigned DNA; note = methanogen bacteria
atgggaatgaccgacttctccttcgaaaccgtcaggaacatggacctcggagccaacttcgtccacggaaccggcaaggca

SEQ ID NO: 31504 - DNA, 63 bp, unidentified
  source 1..63: mol_type = unassigned DNA; note = methanogen bacteria
agggtccagatcggcgaggcgctcaactacgtgttcaagtacatcgacttcggcggaaagtac

SEQ ID NO: 31505 - DNA, 87 bp, unidentified
  source 1..87: mol_type = unassigned DNA; note = methanogen bacteria
accttcacgatgcacggagacaccactcccctgatcatcgccatgccctggggaaccgcgaacctgatggacaacgtgatgggcttc

SEQ ID NO: 31506 - DNA, 33 bp, unidentified
  source 1..33: mol_type = unassigned DNA; note = methanogen bacteria
acatcaatcggatgcacaatgcctgaattcaac

SEQ ID NO: 31507 - DNA, 30 bp, unidentified
  source 1..30: mol_type = unassigned DNA; note = methanogen bacteria
tcaatcggatgtacaatgcctgaatttaat

SEQ ID NO: 31508 - DNA, 60 bp, unidentified
  source 1..60: mol_type = unassigned DNA; note = methanogen bacteria
gattactatggttggagtgctactccgacaatagctgtaaattctttaaatattgcatcc

SEQ ID NO: 31509 - DNA, 96 bp, unidentified
  source 1..96: mol_type = unassigned DNA; note = methanogen bacteria
tcatctcctcttgggtttcctacatttgatttggaagacctgttaatggacgctcccgaaaccgctcatttactgttttcacatgatcccgttgat

SEQ ID NO: 31510 - DNA, 81 bp, unidentified
  source 1..81: mol_type = unassigned DNA; note = methanogen bacteria
atgggcttcgctgacatctccttcgaggcagtcaggaacatgaacctcggagccaacttcgtccacggcgctggaaaggcc

SEQ ID NO: 31511 - DNA, 33 bp, unidentified
  source 1..33: mol_type = unassigned DNA; note = methanogen bacteria
aaggacaaaatccttgagctggcacatggggaa

SEQ ID NO: 31512 - DNA, 42 bp, unidentified
  source 1..42: mol_type = unassigned DNA; note = methanogen bacteria
caggaccagcaggacgccctcatcgcatacgctgtgctgatc

SEQ ID NO: 31513 - DNA, 33 bp, unidentified
  source 1..33: mol_type = unassigned DNA; note = methanogen bacteria
acatcaatcggttgtgcaatgcctgaattcaat

SEQ ID NO: 31514 - DNA, 30 bp, unidentified
  source 1..30: mol_type = unassigned DNA; note = methanogen bacteria
tcaatcggttgtacaatgcctgaatttaat

SEQ ID NO: 31515 - DNA, 48 bp, unidentified
  source 1..48: mol_type = unassigned DNA; note = methanogen bacteria
atggttatgatacctccgtatgttcctgaagcatttttaacaatgtat

SEQ ID NO: 31516 - DNA, 99 bp, unidentified
  source 1..99: mol_type = unassigned DNA; note = methanogen bacteria
tatccggattcctttgcttccgttctgcagcctatgattcaacagttcgagcagaacatagctgatggaaccgtgaccctggctacagattcattgttt

SEQ ID NO: 31517 - DNA, 30 bp, unidentified
  source 1..30: mol_type = unassigned DNA; note = methanogen bacteria
ttcgcagctcaaatggatctgacaagctat

SEQ ID NO: 31518 - DNA, 36 bp, unidentified
  source 1..36: mol_type = unassigned DNA; note = methanogen bacteria
gccagattcttcttaagcttttttggaatccagata

SEQ ID NO: 31519 - DNA, 81 bp, unidentified
  source 1..81: mol_type = unassigned DNA; note = methanogen bacteria
cacagctatctcaacggctggtcggcggaaaagagcgagtggacgatcacccgcgccatcggcggctacaacggacaggct

SEQ ID NO: 31520 - DNA, 48 bp, unidentified
  source 1..48: mol_type = unassigned DNA; note = methanogen bacteria
atggttttaatacctccgtatgttcctgacgtattcatttcaatgtat

SEQ ID NO: 31521 - DNA, 57 bp, unidentified
  source 1..57: mol_type = unassigned DNA; note = methanogen bacteria
tattttaccatctctagcactcctacagttgatgaaaatactatttcagtcatgtca

SEQ ID NO: 31522 - DNA, 48 bp, unidentified
  source 1..48: mol_type = unassigned DNA; note = methanogen bacteria
atgatgtttatacctcctcatgttcctgctgaattcgtttcaatgtat

SEQ ID NO: 31523 - DNA, 51 bp, unidentified
  source 1..51: mol_type = unassigned DNA; note = methanogen bacteria
atggtttttatacctttttatgttcctgctgaattcctttcaatgtatttg

SEQ ID NO: 31524 - DNA, 63 bp, unidentified
  source 1..63: mol_type = unassigned DNA; note = methanogen bacteria
gacatgttccacctggcgggcacagatattgccagttcaagggctgtcaatctggaaatgact

SEQ ID NO: 31525 - DNA, 48 bp, unidentified
  source 1..48: mol_type = unassigned DNA; note = methanogen bacteria
atggtggttttacctgttgttgttcctgatgcattcatatccatgtat

SEQ ID NO: 31526 - DNA, 51 bp, unidentified
  source 1..51: mol_type = unassigned DNA; note = methanogen bacteria
atggtattcatacctccatatgttcctgatgcattcctatcaatgtacctg

SEQ ID NO: 31527 - DNA, 36 bp, unidentified
  source 1..36: mol_type = unassigned DNA; note = methanogen bacteria
acttacttatgtactgtaactttaatgaatcctgag

SEQ ID NO: 31528 - DNA, 57 bp, unidentified
  source 1..57: mol_type = unassigned DNA; note = methanogen bacteria
atgataggccagggcagcacttcaacagtcgaatccatgggcgtagacatatatatg

SEQ ID NO: 31529 - DNA, 48 bp, unidentified
  source 1..48: mol_type = unassigned DNA; note = methanogen bacteria
atggtttttatacctccccatgttcctgctgaatttatttcaatgtat

SEQ ID NO: 31530 - DNA, 33 bp, unidentified
  source 1..33: mol_type = unassigned DNA; note = methanogen bacteria
gtatcaggattaggatctgatcccctagcagca

SEQ ID NO: 31531 - DNA, 54 bp, unidentified
  source 1..54: mol_type = unassigned DNA; note = methanogen bacteria
ccaatgcttgtagcaatgggagcatcatcagtaatgcaatatgcaaaaccatac

SEQ ID NO: 31532 - DNA, 48 bp, unidentified
  source 1..48: mol_type = unassigned DNA; note = methanogen bacteria
atgttattcttaccaaattttgtccctgatgtttttgtttcaatgtat

SEQ ID NO: 31533 - DNA, 48 bp, unidentified
  source 1..48: mol_type = unassigned DNA; note = methanogen bacteria
atgtgggaatcatcaggggattcattctatatattgccttcaatatcc

SEQ ID NO: 31534 - DNA, 48 bp, unidentified
  source 1..48: mol_type = unassigned DNA; note = methanogen bacteria
atggtatttatacctcagtatgttccccaagcattcatttcaatgtat

SEQ ID NO: 31535 - DNA, 63 bp, unidentified
  source 1..63: mol_type = unassigned DNA; note = methanogen bacteria
gcaaatattggattaatgggaaacgaagctgcagataatggatttataagctggttttcaaca

SEQ ID NO: 31536 - DNA, 48 bp, unidentified
  source 1..48: mol_type = unassigned DNA; note = methanogen bacteria
atgattttcactcctccatatgttccttctgaatttatatttatgtat

SEQ ID NO: 31537 - DNA, 69 bp, unidentified
  source 1..69: mol_type = unassigned DNA; note = methanogen bacteria
tctggtttggggtctgctccggtaagttcaataccctatgccattaatctgatatggatggttgaaata

SEQ ID NO: 31538 - DNA, 39 bp, unidentified
  source 1..39: mol_type = unassigned DNA; note = methanogen bacteria
ggtattgctacattgagtatatctacagcaggttttgga

SEQ ID NO: 31539 - DNA, 54 bp, unidentified
  source 1..54: mol_type = unassigned DNA; note = methanogen bacteria
ggtctaggattaaaggctataggcgttgaagaaatgtttataggtttcctgatg

SEQ ID NO: 31540 - DNA, 42 bp, unidentified
  source 1..42: mol_type = unassigned DNA; note = methanogen bacteria
ctcgggtactcccacatcgtcatcggcgactacatgatctcc

SEQ ID NO: 31541 - DNA, 72 bp, unidentified
  source 1..72: mol_type = unassigned DNA; note = methanogen bacteria
aaggcgggactgggtaccgcaccgatctcctgtatccccgcgaccctaacggactgtgtcggaatgaccagt

SEQ ID NO: 31542 - DNA, 33 bp, unidentified
  source 1..33: mol_type = unassigned DNA; note = methanogen bacteria
ctcgatgctctgggtatgtcccctgacggatat

SEQ ID NO: 31543 - DNA, 42 bp, unidentified
  source 1..42: mol_type = unassigned DNA; note = methanogen bacteria
tttggtattgctgcatcgggtgtatctacagcaggttttgga

SEQ ID NO: 31544 - DNA, 63 bp, unidentified
  source 1..63: mol_type = unassigned DNA; note = methanogen bacteria
gacatgttccacctagcgggcacaggcgttgccagttcattggaggtcactctggaatcgacc

SEQ ID NO: 31545 - DNA, 60 bp, unidentified
  source 1..60: mol_type = unassigned DNA; note = methanogen bacteria
gttgcattcatattctcttattcagaggcaagctcacatcttgaaccgttgattgcttca

SEQ ID NO: 31546 - DNA, 60 bp, unidentified; identical to SEQ ID NO: 30689
  source 1..60: mol_type = unassigned DNA; note = methanogen bacteria

SEQ ID NO: 31547 - DNA, 135 bp, unidentified
  source 1..135: mol_type = unassigned DNA; note = methanogen bacteria
aatattggaaatgctttgatttttgcagatgaggctgcctttcagggatctaatggcttattgtcaatgttttcaaataccaatggcactggccttccaatattggatagttctctaactgctatcacacaagca

SEQ ID NO: 31548 - DNA, 51 bp, unidentified
  source 1..51: mol_type = unassigned DNA; note = methanogen bacteria
ccaggtcttgcagcattaggtacaggtgatgtaaccacacttgcaagtgcg

SEQ ID NO: 31549 - DNA, 75 bp, unidentified
  source 1..75: mol_type = unassigned DNA; note = methanogen bacteria
gccatgggaatgaacgactgcgctctcgacgatctcgccaacgtcggatccaaccacctcgtccaggacgacgtc

SEQ ID NO: 31550 - DNA, 42 bp, unidentified
  source 1..42: mol_type = unassigned DNA; note = methanogen bacteria
gctatcgtcgacgccatcgccgacgtcggcaacgccggagac

SEQ ID NO: 31551 - DNA, 63 bp, unidentified
  source 1..63: mol_type = unassigned DNA; note = methanogen bacteria
gaaatacttatctactatttacctgatagttatatgttcgctgatggctatgttgaatcaatg

SEQ ID NO: 31552 - DNA, 57 bp, unidentified
  source 1..57: mol_type = unassigned DNA; note = methanogen bacteria
gatcaatttggaatagtcagcagcggaacagttaatcccgaatcattcaatgttatg

SEQ ID NO: 31553 - DNA, 39 bp, unidentified
  source 1..39: mol_type = unassigned DNA; note = methanogen bacteria
tctgaaataatatcctccgttattcagggcagcaacacg

SEQ ID NO: 31554 - DNA, 57 bp, unidentified
  source 1..57: mol_type = unassigned DNA; note = methanogen bacteria
cctaatatatcaataattaggagtggcgatttagcagcaataaaaataggttctata

SEQ ID NO: 31555 - DNA, 30 bp, unidentified
  source 1..30: mol_type = unassigned DNA; note = methanogen bacteria
tacgataaagtacaagcttcttttgaacct

SEQ ID NO: 31556 - DNA, 33 bp, unidentified; identical to SEQ ID NO: 25483
  source 1..33: mol_type = unassigned DNA; note = methanogen bacteria

SEQ ID NO: 31557 - DNA, 54 bp, unidentified
  source 1..54: mol_type = unassigned DNA; note = methanogen bacteria
atttttggccttaatggtgcaaatctcattccagataatattaccattatgacg

SEQ ID NO: 31558 - DNA, 33 bp, unidentified
  source 1..33: mol_type = unassigned DNA; note = methanogen bacteria
tcttctgtaggatatcatctcccaactcttaac

SEQ ID NO: 31559 - DNA, 33 bp, unidentified
  source 1..33: mol_type = unassigned DNA; note = methanogen bacteria
actgcaatgggatacacccttccagaacttaat

SEQ ID NO: 31560 - DNA, 60 bp, unidentified
  source 1..60: mol_type = unassigned DNA; note = methanogen bacteria
gagcactttgggattgttagcagcggacttgtggatggggaatctgtgacaataatggtg

SEQ ID NO: 31561 - DNA, 33 bp, unidentified
  source 1..33: mol_type = unassigned DNA; note = methanogen bacteria
actgcaatgggatacactcttccagaacttaat

SEQ ID NO: 31562 - DNA, 33 bp, unidentified
  source 1..33: mol_type = unassigned DNA; note = methanogen bacteria
agtgcaatgggatacacccttccagagcttaac

SEQ ID NO: 31563 - DNA, 39 bp, unidentified
  source 1..39: mol_type = unassigned DNA; note = methanogen bacteria
atattgtcatttggtcagcatgaatttactcacccattc

SEQ ID NO: 31564 - DNA, 114 bp, unidentified
  source 1..114: mol_type = unassigned DNA; note = methanogen bacteria
cggacaatgccctgcttgtggcattcaccaattcaggttttgaagtattcaatgcatttggagtattttccatttgttgttttcccacaggtattcaatcaaatgggagatgcg

SEQ ID NO: 31565 - DNA, 60 bp, unidentified
  source 1..60: mol_type = unassigned DNA; note = methanogen bacteria
gaaaattttggcatagttagtgaaggaattattgattcaactaccgtatcggtaatgtca

SEQ ID NO: 31566 - DNA, 33 bp, unidentified
  source 1..33: mol_type = unassigned DNA; note = methanogen bacteria
aaagtttgtagttggggatttttctcaattgaa

SEQ ID NO: 31567 - DNA, 63 bp, unidentified
  source 1..63: mol_type = unassigned DNA; note = methanogen bacteria
gcaatgccatttgatcctgctacttttacagcacaacctcacttagcgtacgtattcggattt

SEQ ID NO: 31568 - DNA, 63 bp, unidentified
  source 1..63: mol_type = unassigned DNA; note = methanogen bacteria
gaaaatgtggggataatgggtgcagatctcgttggacagtctacattatcactgtttgaggtt

SEQ ID NO: 31569 - DNA, 60 bp, unidentified
  source 1..60: mol_type = unassigned DNA; note = methanogen bacteria
tatttgtataatactgcaattgatgtgtttaactcaactaatgatttttattacacactt

SEQ ID NO: 31570 - DNA, 60 bp, unidentified
  source 1..60: mol_type = unassigned DNA; note = methanogen bacteria
atatgtggagaaaacattatggtccaactcctgcatggaggatatgaagtcatgaactcc

SEQ ID NO: 31571 - DNA, 30 bp, unidentified; identical to SEQ ID NO: 29131
  source 1..30: mol_type = unassigned DNA; note = methanogen bacteria

SEQ ID NO: 31572 - DNA, 48 bp, unidentified
  source 1..48: mol_type = unassigned DNA; note = methanogen bacteria
aataatttcaggtttagtaatgggatttttagcatggaaagccaatgg

SEQ ID NO: 31573 - DNA, 51 bp, unidentified
  source 1..51: mol_type = unassigned DNA; note = methanogen bacteria
caattcccgtttaaggtaattgccatgaattcacattatgcaaacaatttc

SEQ ID NO: 31574 - DNA, 33 bp, unidentified
  source 1..33: mol_type = unassigned DNA; note = methanogen bacteria
aactacaagatgttacacattaacgacggtaag

SEQ ID NO: 31575 - DNA, 60 bp, unidentified
  source 1..60: mol_type = unassigned DNA; note = methanogen bacteria
ggacatttcggtatagtcggaggaaaccttatgggagaccaacccacctggatggacgtt

SEQ ID NO: 31576 - DNA, 54 bp, unidentified
  source 1..54: mol_type = unassigned DNA; note = methanogen bacteria
gaaaatattgggcttaatggtgcaacacttactcctgaaactgttaccgtaatg

SEQ ID NO: 31577 - DNA, 33 bp, unidentified
  source 1..33: mol_type = unassigned DNA; note = methanogen bacteria
gaactggatttcaaatttataattgaaaattat

SEQ ID NO: 31578 - DNA, 36 bp, unidentified
  source 1..36: mol_type = unassigned DNA; note = methanogen bacteria
aagctgccctccgttaccggatcaagcgcacacccc

SEQ ID NO: 31579 - DNA, 45 bp, unidentified
  source 1..45: mol_type = unassigned DNA; note = methanogen bacteria
gtcttcaccaccaacaacgccaacttcgtcgatgcattcgtcgat

SEQ ID NO: 31580 - DNA, 63 bp, unidentified
  source 1..63: mol_type = unassigned DNA; note = methanogen bacteria
gagcattttggtataaccagtccgggtacggttgaacagagctctgtaaatatattctctata

SEQ ID NO: 31581 - DNA, 54 bp, unidentified
  source 1..54: mol_type = unassigned DNA; note = methanogen bacteria
gaaatgtttaatttattacctgtagatgaaacacctttaaatctgaatattata

SEQ ID NO: 31582 - DNA, 291 bp, unidentified
  source 1..291: mol_type = unassigned DNA; note = methanogen bacteria
gtctcaggaatgactattttctcaccattgcttaggataggtaggattgagcaatactcactgtcaagtattaagacagtattgagcaatatccaattaatagggcacaatgcgaatgcatcctattggggagcggaaggaaccgccttcgcagaaggatacattaccttgcctatgcaactcgtattattcttcggattgcctttcccaatgttcttcggtattcttgtaaaccagaaggatacaatcgactatatgcttccaggaatctttggatggggctttgacttc

SEQ ID NO: 31583 - DNA, 285 bp, unidentified
  source 1..285: mol_type = unassigned DNA; note = methanogen bacteria
gataccgcatttcctcaggttgttaaaaataaaactgtagattccaatattacttattccactactaaaacgaattactcatctgcagaaattgattctagcgattcggatgattcaagttcctcttcaagcagttcaattgatactggagactcttctggtggaggtagttcctatgatggtggctcttctggtggaggtagttcctctggcggtggttcttctggtggaggtagttcctctggcggtggttcttctggtggaggtagttcttccggtggtggt

SEQ ID NO: 31584 - DNA, 87 bp, unidentified
  source 1..87: mol_type = unassigned DNA; note = methanogen bacteria
attaattctgctccaagtcttggcggatatatgactacaggattaggtgcaaatggatatggtgcagcatctagtgttggaattaat

SEQ ID NO: 31585 - DNA, 36 bp, unidentified
  source 1..36: mol_type = unassigned DNA; note = methanogen bacteria
aaactgccgtccgtcaccggatccagtgcccacccc

SEQ ID NO: 31586 - DNA, 48 bp, unidentified
  source 1..48: mol_type = unassigned DNA; note = methanogen bacteria
aacgtcgtcaccgccaacaacgccagcttcgtcgacgcattcgtcgac

SEQ ID NO: 31587 - DNA, 294 bp, unidentified
  source 1..294: mol_type = unassigned DNA; note = methanogen bacteria
gtattcaatttcgattttgataaggtatctccaacggaatctgtagcaacaattcaagatactgcattccctgaatttaaggaagttaagacttccaatacaacaagtacgtcccataataattcttggagtacatcatccagtaacactattgaaacaaccactgacacttcaagcactcctagttctgattcatcaggttctgggggaggtcaacagtctgatcctggctctgatggtggcggttcagatagtggtggtggaacaacaccaaataatgggggaaatgcgaat

SEQ ID NO: 31588 - DNA, 39 bp, unidentified
  source 1..39: mol_type = unassigned DNA; note = methanogen bacteria
cgtccatttcatttaatttttattaataatttttttgaa

SEQ ID NO: 31589 - DNA, 228 bp, unidentified
  source 1..228: mol_type = unassigned DNA; note = methanogen bacteria
gttgccacacctgaaataagtatgggaagtcccgtaaatttttataatcttagtaataatagtaatattccattaaataattctaatataacttatgatgatgaaaatgttcaccttaatataaatgtcgatattgatgatgaagaagagaaaaatataacaattaatcgttatgataatcgtacaacatttttaataagtaattatgacagttcacagtcaaatgtt

SEQ ID NO: 31590 - DNA, 60 bp, unidentified
  source 1..60: mol_type = unassigned DNA; note = methanogen bacteria
gggaattttggtatagttggaggagatcttgttggaagtcaccctacctggatggatatt

SEQ ID NO: 31591 - DNA, 60 bp, unidentified
  source 1..60: mol_type = unassigned DNA; note = methanogen bacteria
gggaattttggcatagttggaggagaccttataggacccaaccctacatggatggacgtt

SEQ ID NO: 31592 - DNA, 57 bp, unidentified
  source 1..57: mol_type = unassigned DNA; note = methanogen bacteria
gttagagaattggattattcgattttcaaatctttcctcatactgactcctacttat

SEQ ID NO: 31593 - DNA, 54 bp, unidentified
  source 1..54: mol_type = unassigned DNA; note = methanogen bacteria
ttggatgcaagcggtcttgcaagcatcgcaagcggtgaagagaacattatttct

SEQ ID NO: 31594 - DNA, 87 bp, unidentified
  source 1..87: mol_type = unassigned DNA; note = methanogen bacteria
atcaactccgccccaatgcttggaggatatgcagcaaccggacttggtcaaaacggatttggatccgcatcaagtgtagggcttgat

SEQ ID NO: 31595 - DNA, 87 bp, unidentified
  source 1..87: mol_type = unassigned DNA; note = methanogen bacteria
attaactcatcagcataccttggaggatatgctacaacaggattaggtcaaaacggatttggaatggcatcaagtgttggtcttaat

SEQ ID NO: 31596 - DNA, 51 bp, unidentified
  source 1..51: mol_type = unassigned DNA; note = methanogen bacteria
ggtacttggggcattccagatgttggaaatagcaatgcgaatattgttaca

SEQ ID NO: 31597 - DNA, 90 bp, unidentified
  source 1..90: mol_type = unassigned DNA; note = methanogen bacteria
atcaactctgctccaagtcttggaggatacgctgtaacaggattaggtcaaaatggatttggatctgcatcactcgtcggccttaatgtc

SEQ ID NO: 31598 - DNA, 87 bp, unidentified
  source 1..87: mol_type = unassigned DNA; note = methanogen bacteria
attaactcagcaccaagtctcggaggatatgccgctacaggactcggtcaaaacggatttggatcagcatccagcgtcggtattgac

SEQ ID NO: 31599 - DNA, 87 bp, unidentified
  source 1..87: mol_type = unassigned DNA; note = methanogen bacteria
attaactccgctccagaccttggaggatacatgacaaccggattaggtcaaaacggatttggatccgcatcaagcgttggacttaat

SEQ ID NO: 31600 - DNA, 60 bp, unidentified
  source 1..60: mol_type = unassigned DNA; note = methanogen bacteria
caatttatggggcttgatggattttcagaatcatatcctactattaatttatttaatgac

SEQ ID NO: 31601 - DNA, 87 bp, unidentified
  source 1..87: mol_type = unassigned DNA; note = methanogen bacteria
atcaactcatcagcacatcttggaggatatgccctaacaggattaggtcaaaacggattcggcccggcatcaagcgttggccttaat

SEQ ID NO: 31602 - DNA, 66 bp, unidentified
  source 1..66: mol_type = unassigned DNA; note = methanogen bacteria
tttggtgttagaggacctataggtaagttctttttagaattttttgctgtgaaaatagctttttca

SEQ ID NO: 31603 - DNA, 81 bp, unidentified
  source 1..81: mol_type = unassigned DNA; note = methanogen bacteria
cttgcaggtaatattgccagacaaactagaactctccctatggcagtttattctgaggtggctgcaggtaatatgggggag

SEQ ID NO: 31604 - DNA, 51 bp, unidentified
  source 1..51: mol_type = unassigned DNA; note = methanogen bacteria
gatgcaagcggcctggccagcaccggaagcggtgatgctgacattgttcct

SEQ ID NO: 31605 - DNA, 51 bp, unidentified
  source 1..51: mol_type = unassigned DNA; note = methanogen bacteria
agcgcttatggcattcccgatgttggaaacagtgatgcgaatgtcatcact

SEQ ID NO: 31606 - DNA, 87 bp, unidentified
  source 1..87: mol_type = unassigned DNA; note = methanogen bacteria
attaactcttccgcacaccttggaggatacatgacaacaggattaggtcaaaacggatttggcactgcatcagctgttggacttaat

SEQ ID NO: 31607 - DNA, 36 bp, unidentified
  source 1..36: mol_type = unassigned DNA; note = methanogen bacteria
aaaaatcaattgtattctgcaattggagtttataat

SEQ ID NO: 31608 - DNA, 54 bp, unidentified
  source 1..54: mol_type = unassigned DNA; note = methanogen bacteria
aatatcatatcattggacatgaatgggatgaagcccataaatattgtttctgcc

SEQ ID NO: 31609 - DNA, 39 bp, unidentified
  source 1..39: mol_type = unassigned DNA; note = methanogen bacteria
gcagcatttggattttccggattcatgttaggtgctgat

SEQ ID NO: 31610 - DNA, 84 bp, unidentified
  source 1..84: mol_type = unassigned DNA; note = methanogen bacteria
aattccgccccaagtcttggaggatacatggctaccggacttggtcaaaacggatttggatctgcatccagcgtaggtttaggt

SEQ ID NO: 31611 - DNA, 33 bp, unidentified
  source 1..33: mol_type = unassigned DNA; note = methanogen bacteria
aaaactcaattgaattcagttatgggtgcatat

SEQ ID NO: 31612 - DNA, 30 bp, unidentified
  source 1..30: mol_type = unassigned DNA; note = methanogen bacteria
ggttcgaaggaatcattgtttggattggat

SEQ ID NO: 31613 - DNA, 54 bp, unidentified
  source 1..54: mol_type = unassigned DNA; note = methanogen bacteria
ccgaatatcatcggattgaatatgaatgatatgaagccgattaatgtggtttca

SEQ ID NO: 31614 - DNA, 57 bp, unidentified
  source 1..57: mol_type = unassigned DNA; note = methanogen bacteria
cagtgcattggaataacttcaactgctccctactcaactaccgttacagtggagtct

SEQ ID NO: 31615 - DNA, 87 bp, unidentified
  source 1..87: mol_type = unassigned DNA; note = methanogen bacteria
atcaactctgctccaagccttggaggatatgcagcaaccggccttggtcagaatggattcggctccgcatcaagtgtaggacttagt

SEQ ID NO: 31616 - DNA, 87 bp, unidentified
  source 1..87: mol_type = unassigned DNA; note = methanogen bacteria
attaactccgctccaattcttggaggatatgctgcaaccggccttggtcaaaacggattcggatcagcatcaagtgtcggattggat

SEQ ID NO: 31617 - DNA, 57 bp, unidentified
  source 1..57: mol_type = unassigned DNA; note = methanogen bacteria
gttagagaattagactactcaatcttcaagtcttttctaatattgacacctacttat

SEQ ID NO: 31618 - DNA, 87 bp, unidentified
  source 1..87: mol_type = unassigned DNA; note = methanogen bacteria
atcaattccgctccaagccttggaggatatgccgcaacaggattaggtcaaaacggattcggttcagcttcaagtgttggacttgac

SEQ ID NO: 31619 - DNA, 72 bp, unidentified
  source 1..72: mol_type = unassigned DNA; note = methanogen bacteria
ccattaaccggcgcatcagtcaaccctgcacgtagtttagcacctgcattgttccttggcggacaagctctc

SEQ ID NO: 31620 - DNA, 69 bp, unidentified
  source 1..69: mol_type = unassigned DNA; note = methanogen bacteria
gagcaggagtgggcaaaagcacttggaacttcaaaggatagtggaacaagtccacaacaattgatagat

SEQ ID NO: 31621 - DNA, 30 bp, unidentified
  source 1..30: mol_type = unassigned DNA; note = methanogen bacteria
gttaagaagtatcttaaaaaaggattccct

SEQ ID NO: 31622 - DNA, 84 bp, unidentified
  source 1..84: mol_type = unassigned DNA; note = methanogen bacteria
acttctgcaccaagccttggaggttatgctgcaacaggtcttggtcaaaacggatttggaagtgcatcaagtgtcggaattgga

SEQ ID NO: 31623 - DNA, 36 bp, unidentified
  source 1..36: mol_type = unassigned DNA; note = methanogen bacteria
atgttgtctgttcctattcaatttattaacatgtat

SEQ ID NO: 31624 - DNA, 36 bp, unidentified
  source 1..36: mol_type = unassigned DNA; note = methanogen bacteria
atgatttatgttcctcaagagtttattagcatgtat

SEQ ID NO: 31625 - DNA, 87 bp, unidentified
  source 1..87: mol_type = unassigned DNA; note = methanogen bacteria
atcaactccgctccaagtcttggaggatatactgcaacaggccttggtcaaaacggatttggctccgcatcaagtgttggtctcgat

SEQ ID NO: 31626 - DNA, 87 bp, unidentified
  source 1..87: mol_type = unassigned DNA; note = methanogen bacteria
gaaaatcagaatcctatcaattccctgtcaatggtttcaaatgcatttacaagtaacggatatgccgttctgggaagctcagttggg

SEQ ID NO: 31627 - DNA, 30 bp, unidentified
  source 1..30: mol_type = unassigned DNA; note = methanogen bacteria
cctagtttaaatttacaaactgaaataatt

SEQ ID NO: 31628 - DNA, 57 bp, unidentified
  source 1..57: mol_type = unassigned DNA; note = methanogen bacteria
aatgttcgaagtttagattatagtatgtttggatcttttctaatattaacacccaca

SEQ ID NO: 31629 - DNA, 30 bp, unidentified
  source 1..30: mol_type = unassigned DNA; note = methanogen bacteria
atatccgatttgggaacaacaccaatatca

SEQ ID NO: 31630 - DNA, 51 bp, unidentified
  source 1..51: mol_type = unassigned DNA; note = methanogen bacteria
gatgcaagcggcttggccagcatcggaagcggtgatgcggatattgttcct

SEQ ID NO: 31631 - DNA, 33 bp, unidentified
  source 1..33: mol_type = unassigned DNA; note = methanogen bacteria
aaagaccaattatattccgcaataggaatctat

SEQ ID NO: 31632 - DNA, 51 bp, unidentified
  source 1..51: mol_type = unassigned DNA; note = methanogen bacteria
aatatcatatctttgaatatggaggatatgaagcctataaatattgtttct

SEQ ID NO: 31633 - DNA, 51 bp, unidentified
  source 1..51: mol_type = unassigned DNA; note = methanogen bacteria
aatgctaatggtattcctgatgtaacaaaggctgatgcgaatgttgttgct

SEQ ID NO: 31634 - DNA, 60 bp, unidentified
  source 1..60: mol_type = unassigned DNA; note = methanogen bacteria
tctgttagagaattagattactcgatcttcaagtcttttctaatcctaacccctacttac

SEQ ID NO: 31635 - DNA, 90 bp, unidentified
  source 1..90: mol_type = unassigned DNA; note = methanogen bacteria
tttttccacagccaaccccaacttgcagcaatttatagcgcatctccttcagtggcagttaatgaaatggcatcagtattggtaggtcct

SEQ ID NO: 31636 - DNA, 30 bp, unidentified
  source 1..30: mol_type = unassigned DNA; note = methanogen bacteria
atgtatgttcctcaggcatttattagcatg

SEQ ID NO: 31637 - DNA, 48 bp, unidentified
  source 1..48: mol_type = unassigned DNA; note = methanogen bacteria
atggttccagttcctccatatgtccctcttgaaattgttaaaatgtac

SEQ ID NO: 31638 - DNA, 54 bp, unidentified
  source 1..54: mol_type = unassigned DNA; note = methanogen bacteria
ttatttacttcaggccttccggatgttggaactagcgatgcaaatattgttaca

SEQ ID NO: 31639 - DNA, 87 bp, unidentified
  source 1..87: mol_type = unassigned DNA; note = methanogen bacteria
attaataccgcaccaagtctcggaggatatatggctacaggattaggtcaaaatggatttggagctgcatcaagtgtaggaattaat

SEQ ID NO: 31640 - DNA, 87 bp, unidentified
  source 1..87: mol_type = unassigned DNA; note = methanogen bacteria
attaactcagcaccaagtctcggaggatacatggccacaggattaggtcaaaacggattcggagcagcatcaactgtaggtattaac

SEQ ID NO: 31641 - DNA, 33 bp, unidentified
  source 1..33: mol_type = unassigned DNA; note = methanogen bacteria
agaactcaattaaactctatcattggtgtttat

SEQ ID NO: 31642 - DNA, 30 bp, unidentified
  source 1..30: mol_type = unassigned DNA; note = methanogen bacteria
tctaaggatgctatatttggcttgaattct

SEQ ID NO: 31643 - DNA, 57 bp, unidentified
  source 1..57: mol_type = unassigned DNA; note = methanogen bacteria
ccaaatatcatctctttggatttcaatgaaatgaagccgattaatataggttctata

SEQ ID NO: 31644 - DNA, 45 bp, unidentified
  source 1..45: mol_type = unassigned DNA; note = methanogen bacteria
ttaagccaaccggcctctcctacttggagtggggttttaggcttg

SEQ ID NO: 31645 - DNA, 36 bp, unidentified
  source 1..36: mol_type = unassigned DNA; note = methanogen bacteria
attcctatggtttcaggtggatcctgggaagcattt

SEQ ID NO: 31646 - DNA, 45 bp, unidentified
  source 1..45: mol_type = unassigned DNA; note = methanogen bacteria
gcggtgtgggaggacacgttcgatgtcttcgggcacgcgatgtcc

SEQ ID NO: 31647 - DNA, 90 bp, unidentified
  source 1..90: mol_type = unassigned DNA; note = methanogen bacteria
ctgttcatcagcccggaggccctttcttcgctttatgcctggagcgtgggctctatagacattgccggaagcggagttaacggctggagt

SEQ ID NO: 31648 - DNA, 33 bp, unidentified
  source 1..33: mol_type = unassigned DNA; note = methanogen bacteria
atgttcgttcctccagaattcgttagcatgtat

SEQ ID NO: 31649 - DNA, 45 bp, unidentified
  source 1..45: mol_type = unassigned DNA; note = methanogen bacteria
tatgcaaacaaaattcccgatgtttcaaacattaatccgaatatc

SEQ ID NO: 31650 - DNA, 69 bp, unidentified
  source 1..69: mol_type = unassigned DNA; note = methanogen bacteria
tttggtgttagaggacctataggcagcttttttatagaattctttgcatataaaatagctttctcatgg

SEQ ID NO: 31651 - DNA, 81 bp, unidentified
  source 1..81: mol_type = unassigned DNA; note = methanogen bacteria
cttgcaggtaacattgcaggacaaaccagaactctcccaatggctgtttattcagaagtggcagcaggcaatatgggagag

SEQ ID NO: 31652 - DNA, 30 bp, unidentified
  source 1..30: mol_type = unassigned DNA; note = methanogen bacteria
gcaggattaggtacagaagctttagcggca

SEQ ID NO: 31653 - DNA, 51 bp, unidentified
  source 1..51: mol_type = unassigned DNA; note = methanogen bacteria
attctagaagcaataggtgctagagacacaatgcaatactccttagattat

SEQ ID NO: 31654 - DNA, 33 bp, unidentified
  source 1..33: mol_type = unassigned DNA; note = methanogen bacteria
atgtatgttcctcaggcattcattggcatgtat

SEQ ID NO: 31655 - DNA, 30 bp, unidentified
  source 1..30: mol_type = unassigned DNA; note = methanogen bacteria
gcaggacttggtgcagaaccacttgctgca

SEQ ID NO: 31656 - DNA, 45 bp, unidentified
  source 1..45: mol_type = unassigned DNA; note = methanogen bacteria
ctcgaacttatgggagcaagcagcgtaataaactatgctatggac

SEQ ID NO: 31657 - DNA, 69 bp, unidentified
  source 1..69: mol_type = unassigned DNA; note = methanogen bacteria
tttggtgtcagagggcctataggtagcttttttatagatttctttgcttataagatagcattctcatgg

SEQ ID NO: 31658 - DNA, 81 bp, unidentified
  source 1..81: mol_type = unassigned DNA; note = methanogen bacteria
cttgcaggaaacattgcaggacaaaccagaaccctccctatggcagtttactcagaagtggctgcaggtaatatgggagag

SEQ ID NO: 31659 - DNA, 165 bp, unidentified
  source 1..165: mol_type = unassigned DNA; note = methanogen bacteria
aacaatcctttagttatggattatcaagattcaagtgtaacctgtgggccaacaagtcttagtatggcggctcaaatgttgtatggtaacactagtgaatcagcatttaaaaaagcatgtaatactgattcaaatggtactagtcctgacgaacttgttgcaggt

SEQ ID NO: 31660 - DNA, 48 bp, unidentified
  source 1..48: mol_type = unassigned DNA; note = methanogen bacteria
agaaatagtagtgctgttaaaaatagtttgaaacttggaaaacctgta

SEQ ID NO: 31661 - DNA, 33 bp, unidentified
  source 1..33: mol_type = unassigned DNA; note = methanogen bacteria
actaaaggtattaaaaaatgtgcttttagtcaa

SEQ ID NO: 31662 - DNA, 42 bp, unidentified
  source 1..42: mol_type = unassigned DNA; note = methanogen bacteria
cttgtcctgtcttcaagtcaggcagaattcactcacccgttt

SEQ ID NO: 31663 - DNA, 171 bp, unidentified
  source 1..171: mol_type = unassigned DNA; note = methanogen bacteria
gcttcagtaaccggaatgacagttttctctccaatgttaaggttaggcaggattgaacaatactccttatcaagtattaaaactgtattgaccaatgttcagttaatagggcataatgcaaatgcttcttattggggtgctgaaggaacggcatttgctgagggatatatt

SEQ ID NO: 31664 - DNA, 87 bp, unidentified
  source 1..87: mol_type = unassigned DNA; note = methanogen bacteria
atcaactccgcaccatcccttggcggatacatggcaactggattaggtcaaaacggatttggagcggcttcaagtgttggaattaac

SEQ ID NO: 31665 - DNA, 72 bp, unidentified
  source 1..72: mol_type = unassigned DNA; note = methanogen bacteria
atggatttcgttacacttggaggaaatttgcttggaacaatacaacttggagatatcgtattgtatctgact

SEQ ID NO: 31666 - DNA, 54 bp, unidentified
  source 1..54: mol_type = unassigned DNA; note = methanogen bacteria
gcagcaacaggtacattgtcccttgcggtattgtctcaaatgcctgcaagtccg

SEQ ID NO: 31667 - DNA, 69 bp, unidentified
  source 1..69: mol_type = unassigned DNA; note = methanogen bacteria
ttcggtgtcaggggaccaattggagcatttttcattgacttttttgcagtcaaaattgctttttcatgg

SEQ ID NO: 31668 - DNA, 81 bp, unidentified
  source 1..81: mol_type = unassigned DNA; note = methanogen bacteria
cttgcaggtaacattgcaggacagaccagaacactcccaatggcagtttattctgaagtggctgcaggtaatatgggagat

SEQ ID NO: 31669 - DNA, 90 bp, unidentified
  source 1..90: mol_type = unassigned DNA; note = methanogen bacteria
attaacagtgccccaagtcttggaggatatgcagtaacaggattaggtcaaaacggattcggtgcagaatcaagtgttggacttaactta

SEQ ID NO: 31670 - DNA, 30 bp, unidentified
  source 1..30: mol_type = unassigned DNA; note = methanogen bacteria
ggtcagaatattggcataatcttcaatgca

SEQ ID NO: 31671 - DNA, 123 bp, unidentified
  source 1..123: mol_type = unassigned DNA; note = methanogen bacteria
tacaccatacccttacatccatacgcttatggtatggcatgcggaatcggaagtgcaagtatgaatgctgcggcagtggcgtcactgtcaacgatctttccacagtatgctgttgagatggaa

SEQ ID NO: 31672 - DNA, 57 bp, unidentified
  source 1..57: mol_type = unassigned DNA; note = methanogen bacteria
atggtagttgatatcgttccccagttcgtgcctgcctttttccagtccatgtatgtc

SEQ ID NO: 31673 - DNA, 78 bp, unidentified
  source 1..78: mol_type = unassigned DNA; note = methanogen bacteria
atggtaatggatttaggtacactcggaggaaatttgcttggaacaattccgcttggagatattgtattatatgttaca

SEQ ID NO: 31674 - DNA, 54 bp, unidentified
  source 1..54: mol_type = unassigned DNA; note = methanogen bacteria
gcatcaaccggaacattgtctcttgcagtattgtctcagatgcctgcaaacccg

SEQ ID NO: 31675 - DNA, 66 bp, unidentified
  source 1..66: mol_type = unassigned DNA; note = methanogen bacteria
tttggtgtcagaggacctatcggaaagtttttcattgaattttttgcagtaaaaatagctttttca

SEQ ID NO: 31676 - DNA, 84 bp, unidentified
  source 1..84: mol_type = unassigned DNA; note = methanogen bacteria
cttgcaggtaatattgccggacaaaccagaacacttcctatggctgtttattctgaagtggctgcaggaaatatgggcgaagct

SEQ ID NO: 31677 - DNA, 57 bp, unidentified
  source 1..57: mol_type = unassigned DNA; note = methanogen bacteria
ttgggaggagatttattcggaacaattccccttggagatattgttctctacttgaat

SEQ ID NO: 31678 - DNA, 54 bp, unidentified
  source 1..54: mol_type = unassigned DNA; note = methanogen bacteria
gctgcaaccggaacattaagccttttcgagcttcagacacttccattaaatgcg

SEQ ID NO: 31679 - DNA, 69 bp, unidentified
  source 1..69: mol_type = unassigned DNA; note = methanogen bacteria
tttggtgtcagaggacctatcggaagtttctttatagaatttttcgctgtaaaaatagctttctcatgg

SEQ ID NO: 31680 - DNA, 81 bp, unidentified
  source 1..81: mol_type = unassigned DNA; note = methanogen bacteria
cttgcaggtaacattgcaggtttaaccagaacactccctatggcagtatactctgaagtggctgccggaaatatgggggaa

SEQ ID NO: 31681 - DNA, 69 bp, unidentified
  source 1..69: mol_type = unassigned DNA; note = methanogen bacteria
tttggtgttagaggaccaatcggtaagttttttatagactttttcactgtgaaaattgctttttcatgg

SEQ ID NO: 31682 - DNA, 81 bp, unidentified
  source 1..81: mol_type = unassigned DNA; note = methanogen bacteria
cttgcaggtaatattgccggagaaaccagaacactcccaatggcagtttactctgaagtggctgcaggaaatatgggggaa

SEQ ID NO: 31683 - DNA, 60 bp, unidentified
  source 1..60: mol_type = unassigned DNA; note = methanogen bacteria
atggttgcaagtataattccacaatttgttcctgcattctatagctcaatgtattcaact

SEQ ID NO: 31684 - DNA, 66 bp, unidentified
  source 1..66: mol_type = unassigned DNA; note = methanogen bacteria
tttggtgttagaggaccaattggaagattctttttagacttttttactgtgaaaatagcattttca

SEQ ID NO: 31685 - DNA, 81 bp, unidentified
  source 1..81: mol_type = unassigned DNA; note = methanogen bacteria
cttgcaggtaacattgcaggacaaaccagaaccctccctatggctgtttattcagaagtggcagccgggaacatgggagaa

SEQ ID NO: 31686 - DNA, 57 bp, unidentified
  source 1..57: mol_type = unassigned DNA; note = methanogen bacteria
atggtcgcaagtgtaattcctcaatttgttccggctttctatagctcaatgtacaca

SEQ ID NO: 31687 - DNA, 69 bp, unidentified
  source 1..69: mol_type = unassigned DNA; note = methanogen bacteria
cagttcaggtcagcgatcggcgaggctctggacgtggtgttcagcgtcatcgatttcgacgggaagtac

SEQ ID NO: 31688 - DNA, 81 bp, unidentified
  source 1..81: mol_type = unassigned DNA; note = methanogen bacteria
gtgaacaacaccgttcccgatgacctcatcgacatagtcatgccgtgggggaccgccaaccttcttgactacatctggttc

SEQ ID NO: 31689 - DNA, 57 bp, unidentified
  source 1..57: mol_type = unassigned DNA; note = methanogen bacteria
atggtcgctagtgtaattcctcaatttgttcctgccttctacagctcaatgtattcc

SEQ ID NO: 31690 - DNA, 36 bp, unidentified
  source 1..36: mol_type = unassigned DNA; note = methanogen bacteria
ggattgtcctcttatgatttggatttcaacaatcca

SEQ ID NO: 31691 - DNA, 45 bp, unidentified
  source 1..45: mol_type = unassigned DNA; note = methanogen bacteria
ccaaacaaactcttgttttacttttattttttagctaatctcctc

SEQ ID NO: 31692 - DNA, 78 bp, unidentified
  source 1..78: mol_type = unassigned DNA; note = methanogen bacteria
atgggaatggattttgttacacttggaggaaatttacttggaacaattccgcttggcgatatcgtattatatctcaca

SEQ ID NO: 31693 - DNA, 54 bp, unidentified
  source 1..54: mol_type = unassigned DNA; note = methanogen bacteria
gcatcaacaggaacattatctcttgcggtattgtctcaaatgcctgcaagtccg

SEQ ID NO: 31694 - DNA, 33 bp, unidentified
  source 1..33: mol_type = unassigned DNA; note = methanogen bacteria
ggattgtcctcatatgatttggatttcaccaat

SEQ ID NO: 31695 - DNA, 42 bp, unidentified
  source 1..42: mol_type = unassigned DNA; note = methanogen bacteria
aacaaaatcatatttttcattgattttttaacttcttttcac

SEQ ID NO: 31696 - DNA, 69 bp, unidentified
  source 1..69: mol_type = unassigned DNA; note = methanogen bacteria
ggactgaccagtttcgacggcaccgagacgggattggacgggatgctacgcccctctcatggcatgcgt

SEQ ID NO: 31697 - DNA, 48 bp, unidentified
  source 1..48: mol_type = unassigned DNA; note = methanogen bacteria
ccccatcatcgcattccctgtcatgatgggaagctgcgcttacatcat

SEQ ID NO: 31698 - DNA, 36 bp, unidentified
  source 1..36: mol_type = unassigned DNA; note = methanogen bacteria
aacatgccaatcccattcggtacaagtggacacatg

SEQ ID NO: 31699 - DNA, 33 bp, unidentified
  source 1..33: mol_type = unassigned DNA; note = methanogen bacteria
gggtctacggtaatgggagatgttatttctgga

SEQ ID NO: 31700 - DNA, 69 bp, unidentified
  source 1..69: mol_type = unassigned DNA; note = methanogen bacteria
ttcggtgtcagaggaccgatcggaagctttttcatagacttttttgcatttaaaattgcattttcatgg

SEQ ID NO: 31701 - DNA, 81 bp, unidentified
  source 1..81: mol_type = unassigned DNA; note = methanogen bacteria
cttgcaggtaacattgcagaccagaccagaactctcccaatggcagtatactcagaggttgctgcaggaaatatgggagat

SEQ ID NO: 31702 - DNA, 69 bp, unidentified
  source 1..69: mol_type = unassigned DNA; note = methanogen bacteria
ttcggtgttagagggccaatagggcggtttttcatagacttctttgctgtaaaaatagctttttcatgg

SEQ ID NO: 31703 - DNA, 81 bp, unidentified
  source 1..81: mol_type = unassigned DNA; note = methanogen bacteria
ctggcgggaaatattgctggacaaactagaacacttcctatggcggtttattctgatgtggctgcaggaaatatgggaagt

SEQ ID NO: 31704 - DNA, 33 bp, unidentified
  source 1..33: mol_type = unassigned DNA; note = methanogen bacteria
gaattggtaatgggcgttactattttaaatgat

SEQ ID NO: 31705 - DNA, 57 bp, unidentified
  source 1..57: mol_type = unassigned DNA; note = methanogen bacteria
ccgattttgtataatctgtttgaacaatatgtttacattattgcagcatccgtattt

SEQ ID NO: 31706 - DNA, 66 bp, unidentified
  source 1..66: mol_type = unassigned DNA; note = methanogen bacteria
tttggtgtaaggggacctataggaaagttctttatagatttttttgctgtaaaaatagctttctca

SEQ ID NO: 31707 - DNA, 81 bp, unidentified
  source 1..81: mol_type = unassigned DNA; note = methanogen bacteria
cttgcaggtaatattgcaggacaaaccaggacacttcctatggccgtctattctgaagtggctgcgggaaatatgggaagt

SEQ ID NO: 31708 - DNA, 72 bp, unidentified
  source 1..72: mol_type = unassigned DNA; note = methanogen bacteria
atggatattgttacacttgggggaaatttacttggaacaattccgcttggggacatcgtattgtatttaact

SEQ ID NO: 31709 - DNA, 54 bp, unidentified
  source 1..54: mol_type = unassigned DNA; note = methanogen bacteria
gcagctactggaacattgtcactttcagttctatctcaaatgtctgcaagccct

SEQ ID NO: 31710 - DNA, 75 bp, unidentified
  source 1..75: mol_type = unassigned DNA; note = methanogen bacteria
atgatggattttgttacacttggcggagatttacttggaacaattccacttggagacatcgtattatatcttaca

SEQ ID NO: 31711 - DNA, 54 bp, unidentified
  source 1..54: mol_type = unassigned DNA; note = methanogen bacteria
gcgtctaccggaacattatcactggcagtactgtcacaaatgcctgccagtccg

SEQ ID NO: 31712 - DNA, 30 bp, unidentified
  source 1..30: mol_type = unassigned DNA; note = methanogen bacteria
acaatcgggtatccaatgcctaactttaat

SEQ ID NO: 31713 - DNA, 36 bp, unidentified
  source 1..36: mol_type = unassigned DNA; note = methanogen bacteria
aaattaccgtctgtaactggaagttgctctcaccca

SEQ ID NO: 31714 - DNA, 39 bp, unidentified
  source 1..39: mol_type = unassigned DNA; note = methanogen bacteria
gcattccctgaacctaacaccatggcagctattacaaaa

SEQ ID NO: 31715 - DNA, 48 bp, unidentified
  source 1..48: mol_type = unassigned DNA; note = methanogen bacteria
gatctgattttcgacaagaacgtcatgtcgtattcgatctacgactcc

SEQ ID NO: 31716 - DNA, 69 bp, unidentified
  source 1..69: mol_type = unassigned DNA; note = methanogen bacteria
tttggtgttaggggaccaatcggtaaatttttcattgattttttcgctgtgaaaatagccttttcatgg

SEQ ID NO: 31717 - DNA, 81 bp, unidentified
  source 1..81: mol_type = unassigned DNA; note = methanogen bacteria
attgcgggaaatattgcaaatcaaaccagaactctccctatggctgtttactcagaagtagctgcgggaaatatgggggat

SEQ ID NO: 31718 - DNA, 69 bp, unidentified
  source 1..69: mol_type = unassigned DNA; note = methanogen bacteria
ggacttggctttcatattgactattccagttttctcatggcagcaggacctgggcttggagatccaatc

SEQ ID NO: 31719 - DNA, 69 bp, unidentified
  source 1..69: mol_type = unassigned DNA; note = methanogen bacteria
tttggtgttagaggacctataggtagtttttttatagatttttttgctattaaaattgctttttcatgg

SEQ ID NO: 31720 - DNA, 81 bp, unidentified
  source 1..81: mol_type = unassigned DNA; note = methanogen bacteria
cttgcaggtaatattgcaggacaaaccagaacactccctatggcagtttattctgaagtggctgcaggtaatatgggagaa

SEQ ID NO: 31721 - DNA, 66 bp, unidentified
  source 1..66: mol_type = unassigned DNA; note = methanogen bacteria
ttcggtgtcagaggagttataggtaagttttttatagaattttttgcttataaaatagctttctca

SEQ ID NO: 31722 - DNA, 81 bp, unidentified
  source 1..81: mol_type = unassigned DNA; note = methanogen bacteria
cttgcaggtaatattgctggacaaaccagaactcttccgttggcggtttactcggaagtggctgcaggcaatatggtggag

SEQ ID NO: 31723 - DNA, 69 bp, unidentified
  source 1..69: mol_type = unassigned DNA; note = methanogen bacteria
ttcggagtaaggggtccaatcggaagcttttttgtggaattctttgcatataagattgcattctcatgg

SEQ ID NO: 31724 - DNA, 81 bp, unidentified
  source 1..81: mol_type = unassigned DNA; note = methanogen bacteria
cttgcaggtaacattgcagggcaaaccagaacactcccgatggcggtttactcggaagtggctgcaggaaacatgggggat

SEQ ID NO: 31725 - DNA, 30 bp, unidentified
  source 1..30: mol_type = unassigned DNA; note = methanogen bacteria
actataggttatcctatgcctcaatttaac

SEQ ID NO: 31726 - DNA, 69 bp, unidentified
  source 1..69: mol_type = unassigned DNA; note = methanogen bacteria
tttggtgtcagaggaccaatcggaaagtttttcatagacttttttgcatttaaaattgcattctcatgg

SEQ ID NO: 31727 - DNA, 81 bp, unidentified
  source 1..81: mol_type = unassigned DNA; note = methanogen bacteria
cttgcaggtaacattgctggacagacaagaacgcttcctatggcagtctattcggaagtggccgcaggaaatatgggaact

SEQ ID NO: 31728 - DNA, 105 bp, unidentified
  source 1..105: mol_type = unassigned DNA; note = methanogen bacteria
gaaattattgttttcaaagaaaacaataacatttcctcattaaatgcaacaattaatggaagtgaaattgtacctggcattaatggtcttactgttgatgtggaa

SEQ ID NO: 31729 - DNA, 117 bp, unidentified
  source 1..117: mol_type = unassigned DNA; note = methanogen bacteria
gtatacgaagaagtaaagccatcaatatcattggcggactatcccgaaaaaacaatcgtgtcgggaaattctcaaaaaaaggcagttacaatactaatatctaataaaaatatcaat

SEQ ID NO: 31730 - DNA, 231 bp, unidentified
  source 1..231: mol_type = unassigned DNA; note = methanogen bacteria
attgttcttgatgaagacttctgttatttttcaaaacaaaaagtaaaaccaacaattatattaaataacagtaattttataaaatatataaatgatgttaaaagtggttcaataatatatattgatgatgatttagataaaatttatatagatgttttaataaaacacattaaattttacaatctaaacattttaaaattagatactcatttaagtgaaagtaatcatatc

SEQ ID NO: 31731 - DNA, 66 bp, unidentified
  source 1..66: mol_type = unassigned DNA; note = methanogen bacteria
tttggtgttaggggacctataggtaagttttttatagactttttcactgtaaaaatagctttttca

SEQ ID NO: 31732 - DNA, 81 bp, unidentified
  source 1..81: mol_type = unassigned DNA; note = methanogen bacteria
cttgcaggtaatattgctggacaaaccagaactctccctatggctgtttactctgaggtagctgcaggtaatatgggggaa

SEQ ID NO: 31733 - DNA, 63 bp, unidentified; identical to SEQ ID NO: 31024
  source 1..63: mol_type = unassigned DNA; note = methanogen bacteria

SEQ ID NO: 31734 - DNA, 57 bp, unidentified
  source 1..57: mol_type = unassigned DNA; note = methanogen bacteria
tacacattaaatttggattattcgatgtttactccatttttaatattaactccgaca

SEQ ID NO: 31735 - DNA, 66 bp, unidentified
  source 1..66: mol_type = unassigned DNA; note = methanogen bacteria
tttggtgttagaggaccaataggaaagttttttatagactttttcactgtgaaaatagctttttca

SEQ ID NO: 31736 - DNA, 81 bp, unidentified
  source 1..81: mol_type = unassigned DNA; note = methanogen bacteria
attgcaggaaacattgcaggacaaacacgaacactcccaatggcagtttattctgaagtagctgcaggaaatatgggagat

SEQ ID NO: 31737 - DNA, 72 bp, unidentified
  source 1..72: mol_type = unassigned DNA; note = methanogen bacteria
atggattttattacacttggcggagatttacttggagtaattccacttggagatattgtattgtacctaact

SEQ ID NO: 31738 - DNA, 54 bp, unidentified
  source 1..54: mol_type = unassigned DNA; note = methanogen bacteria
gcagctactggaactttatctctagaaatattatctagtatgcctgcaaatcca

SEQ ID NO: 31739 - DNA, 69 bp, unidentified
  source 1..69: mol_type = unassigned DNA; note = methanogen bacteria
tttggggttagaggacctatcggtcattttttaattgaatatttctctgtgaaaattgctttttcatgg

SEQ ID NO: 31740 - DNA, 84 bp, unidentified
  source 1..84: mol_type = unassigned DNA; note = methanogen bacteria
cttgcaggtaatattgcaggagaaaccaggactctcccaatggctgtttactctgaggtggcagcaggaaatatgttggacgct

SEQ ID NO: 31741 - DNA, 69 bp, unidentified
  source 1..69: mol_type = unassigned DNA; note = methanogen bacteria
atttttggtgtcaggggacctattggtaaattctttatagattttttcaccgtaaagattgcattttca

SEQ ID NO: 31742 - DNA, 81 bp, unidentified
  source 1..81: mol_type = unassigned DNA; note = methanogen bacteria
cttgcaggtaatattgcaggacaaaccagaactcttccaatggcagtttattctgaagtggctgcaggaaatatgggagat

SEQ ID NO: 31743 - DNA, 72 bp, unidentified
  source 1..72: mol_type = unassigned DNA; note = methanogen bacteria
atggatttcgttacacttggaggaaatttgcttggaacaattccacttggagacattgtactatatttaaat

SEQ ID NO: 31744 - DNA, 54 bp, unidentified
  source 1..54: mol_type = unassigned DNA; note = methanogen bacteria
gcatcaacaggtacattgtcacttcaagtattgtcacagatgcctgcaaatcca

SEQ ID NO: 31745 - DNA, 69 bp, unidentified
  source 1..69: mol_type = unassigned DNA; note = methanogen bacteria
tttggtgttaggggacctgtagggcagttttttttagacttttttgctgtaaaaatagctttttcatgg

SEQ ID NO: 31746 - DNA, 81 bp, unidentified
  source 1..81: mol_type = unassigned DNA; note = methanogen bacteria
cttgcaggtaacattgcgggacaaactagaactctccctatggcagtatattccgaggtggccgccggaaacatgggggat

SEQ ID NO: 31747 - DNA, 66 bp, unidentified
  source 1..66: mol_type = unassigned DNA; note = methanogen bacteria
tttggggttagaggaccaataggaaagttttttttagacttttttactgtgaaaatagcattttca

SEQ ID NO: 31748 - DNA, 81 bp, unidentified
  source 1..81: mol_type = unassigned DNA; note = methanogen bacteria
attgcaggtaatatagcaggacagaccagaactctccctatggcagtttattcagaagtggctgcgggaaatatgggggaa

SEQ ID NO: 31749 - DNA, 72 bp, unidentified
  source 1..72: mol_type = unassigned DNA; note = methanogen bacteria
atggatattgcagcattaagtggagaaatatttggtttcatacctttaggggatataatgttatatataact

SEQ ID NO: 31750 - DNA, 54 bp, unidentified
  source 1..54: mol_type = unassigned DNA; note = methanogen bacteria
ggtgcaactggaacattaagcatactaaacttagcacaaatacaaccaaatccc

SEQ ID NO: 31751 - DNA, 36 bp, unidentified
  source 1..36: mol_type = unassigned DNA; note = methanogen bacteria
aaaatgccatctgtaagtggaagttgttcacatcca

SEQ ID NO: 31752 - DNA, 30 bp, unidentified
  source 1..30: mol_type = unassigned DNA; note = methanogen bacteria
gcattcccaggtgctgacattggagctacc

SEQ ID NO: 31753 - DNA, 39 bp, unidentified
  source 1..39: mol_type = unassigned DNA; note = methanogen bacteria
gctgcattaccatatccttacagtcttccaacatttaat

SEQ ID NO: 31754 - DNA, 69 bp, unidentified
  source 1..69: mol_type = unassigned DNA; note = methanogen bacteria
tttggtgttagggggccgatagggaagttttttatagacttctttactgtgaaaatagctttttcatgg

SEQ ID NO: 31755 - DNA, 81 bp, unidentified
  source 1..81: mol_type = unassigned DNA; note = methanogen bacteria
attgcaggtaacattgcaggacaaacaaggactctccctatggcagtttattcagaagtggctgcaggaaatatgggggac

SEQ ID NO: 31756 - DNA, 54 bp, unidentified
  source 1..54: mol_type = unassigned DNA; note = methanogen bacteria
ggtggaaatttacttgggatagtacctttaggggatattgtattctatttaaat

SEQ ID NO: 31757 - DNA, 51 bp, unidentified
  source 1..51: mol_type = unassigned DNA; note = methanogen bacteria
gcatgtggaacagtaagtttacttgcaattcaaagtatgaaacctactgca

SEQ ID NO: 31758 - DNA, 36 bp, unidentified
  source 1..36: mol_type = unassigned DNA; note = methanogen bacteria
gatgcggtctatctggatgaaagtgatggccttatt

SEQ ID NO: 31759 - DNA, 72 bp, unidentified
  source 1..72: mol_type = unassigned DNA; note = methanogen bacteria
atgaatattggaagtttaggtggagatttacttggattgattcctttaggagatatagtattatatattaat

SEQ ID NO: 31760 - DNA, 51 bp, unidentified
  source 1..51: mol_type = unassigned DNA; note = methanogen bacteria
gcttgtggaacagtaagtttacttgcaatacaatctattaagcctactgca

SEQ ID NO: 31761 - DNA, 42 bp, unidentified
  source 1..42: mol_type = unassigned DNA; note = methanogen bacteria
tggatgtcacatttcagcttcattgaacttttaacagagggt

SEQ ID NO: 31762 - DNA, 51 bp, unidentified
  source 1..51: mol_type = unassigned DNA; note = methanogen bacteria
aaagttgttgatggaccttatccgtttttaaaagtgaattcacagccgatt

SEQ ID NO: 31763 - DNA, 72 bp, unidentified
  source 1..72: mol_type = unassigned DNA; note = methanogen bacteria
atggattttgcaacgcttggaggaaatatattcggaacaatacctttaggagatattgtattatatattaca

SEQ ID NO: 31764 - DNA, 54 bp, unidentified
  source 1..54: mol_type = unassigned DNA; note = methanogen bacteria
gcatcaactggaactttaagccttgaagttttatctcaaattcaagcaactcct

SEQ ID NO: 31765 - DNA, 72 bp, unidentified
  source 1..72: mol_type = unassigned DNA; note = methanogen bacteria
atggattttgttacgcttggaggaaatttattaggtacaatacctcttggagatattgtattatatattacg

SEQ ID NO: 31766 - DNA, 54 bp, unidentified
  source 1..54: mol_type = unassigned DNA; note = methanogen bacteria
gcatcaacaggaactttaagtcttgctgttctatcacagatgcctgcaactcca

SEQ ID NO: 31767 - DNA, 30 bp, unidentified
  source 1..30: mol_type = unassigned DNA; note = methanogen bacteria
gtttcacagattccctttgacggttcagtc

SEQ ID NO: 31768 - DNA, 42 bp, unidentified
  source 1..42: mol_type = unassigned DNA; note = methanogen bacteria
tcggcttataatgccagcttaagccctaattataattttgca

SEQ ID NO: 31769 - DNA, 69 bp, unidentified
  source 1..69: mol_type = unassigned DNA; note = methanogen bacteria
gcgacctctctgggccttgatgccagtgcattccctttggatagcggatggctgctcatttgtgttgac

SEQ ID NO: 31770 - DNA, 78 bp, unidentified
  source 1..78: mol_type = unassigned DNA; note = methanogen bacteria
ggcaccgattttggcattcaggctttaaactccatattcggccatctgttcggaactgtacatggacataccgctttt

SEQ ID NO: 31771 - DNA, 168 bp, unidentified
  source 1..168: mol_type = unassigned DNA; note = methanogen bacteria
gaaacatgtccatactgtggaagcgaagctgtttattcatcaggaaacgggtatagatgcgctgaatgtggaaactatatatccaatccagatgacttgaacttgaattacgaagaggggtattatgagttaacgctcccttcgtttattaattctataaataaggtt

SEQ ID NO: 31772 - DNA, 165 bp, unidentified
  source 1..165: mol_type = unassigned DNA; note = methanogen bacteria
acttgtccatactgtggtagtgaagctatttatccatcaggaaatggatatagatgtcaggaatgtggtaactatatttccaatccagatgacttgaacttgaattatgaagaaggatattatgagttatatctggctccaatgctttattcgataaatggttct

SEQ ID NO: 31773 - DNA, 33 bp, unidentified
  source 1..33: mol_type = unassigned DNA; note = methanogen bacteria
acgcagtatactacaaacatgggtgcctccgca

SEQ ID NO: 31774 - DNA, 36 bp, unidentified
  source 1..36: mol_type = unassigned DNA; note = methanogen bacteria
aacatgccaattccatttggtacaagtggtcacatg

SEQ ID NO: 31775 - DNA, 72 bp, unidentified
  source 1..72: mol_type = unassigned DNA; note = methanogen bacteria
atggatttcattacacttggaggaaatttgcttggaacagtcccgcttggagacattgtattatatgtaact

SEQ ID NO: 31776 - DNA, 54 bp, unidentified
  source 1..54: mol_type = unassigned DNA; note = methanogen bacteria
gcatcaaccggtacattgtcacttgcagttttatcacagatgtctgcaactccg

SEQ ID NO: 31777 - DNA, 72 bp, unidentified
  source 1..72: mol_type = unassigned DNA; note = methanogen bacteria
atggattttgttacacttggaggaaatttattaggtacaatatctcttggagatattgttttatatgttaca

SEQ ID NO: 31778 - DNA, 54 bp, unidentified
  source 1..54: mol_type = unassigned DNA; note = methanogen bacteria
gcatcaaccggaactttgtgtttagctattttatcacaaatgcatgctaatcct

SEQ ID NO: 31779 - DNA, 36 bp, unidentified
  source 1..36: mol_type = unassigned DNA; note = methanogen bacteria
ggattgtcttcctatgatttggatttaaacaattca

SEQ ID NO: 31780 - DNA, 39 bp, unidentified
  source 1..39: mol_type = unassigned DNA; note = methanogen bacteria
cctaacaagctattgttttaccttaattttttatctctt

SEQ ID NO: 31781 - DNA, 30 bp, unidentified
  source 1..30: mol_type = unassigned DNA; note = methanogen bacteria
tcaattggatatcccatgcctgaatttaat

SEQ ID NO: 31782 - DNA, 69 bp, unidentified
  source 1..69: mol_type = unassigned DNA; note = methanogen bacteria
tttggtgtcagggggcctataggtagcttttttatagatttttttgcttataaaatagctttttcatgg

SEQ ID NO: 31783 - DNA, 81 bp, unidentified
  source 1..81: mol_type = unassigned DNA; note = methanogen bacteria
cttgcaggtaatattgccggtcaaaccagaactcttccattggcagtttattctgaagtggctgcaggcaacatgggagag

SEQ ID NO: 31784 - DNA, 30 bp, unidentified
  source 1..30: mol_type = unassigned DNA; note = methanogen bacteria
acatcaatcggatatccgatgcctaaattc

SEQ ID NO: 31785 - DNA, 72 bp, unidentified
  source 1..72: mol_type = unassigned DNA; note = methanogen bacteria
atggattttgttacacttggaggaaatttgtttggtacaatccctctcggggatattgtactttatgttacg

SEQ ID NO: 31786 - DNA, 54 bp, unidentified
  source 1..54: mol_type = unassigned DNA; note = methanogen bacteria
gcatcaacgggtactttaagtctttttgaattatcacagttgcctccaaatccg

SEQ ID NO: 31787 - DNA, 294 bp, unidentified
  source 1..294: mol_type = unassigned DNA; note = methanogen bacteria
ggtatatttagtcttgattccgattccctttctaatactaatgtttctgctactgttattgatacagcatttcctgacgtagcggatgtcagcagtattatcaatgaaactgctggtgaaaactttaccaatgttacaggttatgattccacttacagtgaaattgaaactgttgaggaagcgtatagtgtacctactagttatgaaactccacagtcttctgatactggcggtgaggctcctgaagctcagccacagcaaggtggagggggagaagcagctcccgcagagggt

SEQ ID NO: 31788 - DNA, 33 bp, unidentified
  source 1..33: mol_type = unassigned DNA; note = methanogen bacteria
tacacaaaggtcagtctgataagatatgaaaac

SEQ ID NO: 31789 - DNA, 36 bp, unidentified
  source 1..36: mol_type = unassigned DNA; note = methanogen bacteria
aacatgccgattccttttggtaccagtggacatatg

SEQ ID NO: 31790 - DNA, 69 bp, unidentified
  source 1..69: mol_type = unassigned DNA; note = methanogen bacteria
tcaggattgggctcagcgccggtaagctcaataccttatgcgatgaatctgattgggaatattgaaata

SEQ ID NO: 31791 - DNA, 30 bp, unidentified
  source 1..30: mol_type = unassigned DNA; note = methanogen bacteria
atgtatttcatccctccagcttacaatctg

SEQ ID NO: 31792 - DNA, 69 bp, unidentified
  source 1..69: mol_type = unassigned DNA; note = methanogen bacteria
tcaggattgggctcagctccggtcagttcaattccatatgcaatggatctggtctgggcaatagaaatc

SEQ ID NO: 31793 - DNA, 30 bp, unidentified
  source 1..30: mol_type = unassigned DNA; note = methanogen bacteria
atgggtttcatacctcctgcagataacttt

SEQ ID NO: 31794 - DNA, 69 bp, unidentified
  source 1..69: mol_type = unassigned DNA; note = methanogen bacteria
tcaggattgggctcagcccctgttagttcaattccatatgcaattgatctgatatggttgatcaatatt

SEQ ID NO: 31795 - DNA, 57 bp, unidentified
  source 1..57: mol_type = unassigned DNA; note = methanogen bacteria
ttaggcggagacgtgatgggaacaattcctttaggagatattgttctttatttaaac

SEQ ID NO: 31796 - DNA, 54 bp, unidentified
  source 1..54: mol_type = unassigned DNA; note = methanogen bacteria
gcggctacaggtacattaagcctatttgagctcgcagcaatccctgcaagtcca

SEQ ID NO: 31797 - DNA, 69 bp, unidentified
  source 1..69: mol_type = unassigned DNA; note = methanogen bacteria
tcaggactaggatctgctcctgtaagttctattccttattcaatgaatctcatttgggcaatagagata

SEQ ID NO: 31798 - DNA, 30 bp, unidentified
  source 1..30: mol_type = unassigned DNA; note = methanogen bacteria
atgtacttcattccgaattcagacaatctt

SEQ ID NO: 31799 - DNA, 72 bp, unidentified
  source 1..72: mol_type = unassigned DNA; note = methanogen bacteria
atgcttattgaagacttaggtggaaacattttaggaacaattcctttaggagacattgttctttacttaaat

SEQ ID NO: 31800 - DNA, 54 bp, unidentified
  source 1..54: mol_type = unassigned DNA; note = methanogen bacteria
gcggcaacaggtactttaagcctatttgaattggctagcattcctgcaaatcct

SEQ ID NO: 31801 - DNA, 60 bp, unidentified
  source 1..60: mol_type = unassigned DNA; note = methanogen bacteria
cccatgtccgacgccgcggcggcggtcatcgtcgatgcccgcctggacggcgacatcgat

SEQ ID NO: 31802 - DNA, 33 bp, unidentified
  source 1..33: mol_type = unassigned DNA; note = methanogen bacteria
aaaacattttcattatacgatataatattgcca

SEQ ID NO: 31803 - DNA, 54 bp, unidentified
  source 1..54: mol_type = unassigned DNA; note = methanogen bacteria
ttacctggaacagatcttgcaacttcaaatgcattcagcattattttaggaagc

SEQ ID NO: 31804 - DNA, 69 bp, unidentified
  source 1..69: mol_type = unassigned DNA; note = methanogen bacteria
tcaggattgggctcagcgccggtcagttccattccatatgcgatggatctgatatggatggttgagata

SEQ ID NO: 31805 - DNA, 159 bp, unidentified
  source 1..159: mol_type = unassigned DNA; note = methanogen bacteria
ccaaactgtggaagcgaagctatttatagttcaggaaatggttatagatgcgctgaatgcggctattccataaacaatccagatgacttgaacttgaattatgaagaggggtattatgagttaacgctcccttcgtttatttattctatgaataacgtt

SEQ ID NO: 31806 - DNA, 30 bp, unidentified
  source 1..30: mol_type = unassigned DNA; note = methanogen bacteria
acaatcggatattctatgcctgaatttaat

SEQ ID NO: 31807 - DNA, 69 bp, unidentified
  source 1..69: mol_type = unassigned DNA; note = methanogen bacteria
tcatgtttgggctctgctccagtcagttccattccgtatgcaataaatctgatatggttggttgaaata

SEQ ID NO: 31808 - DNA, 30 bp, unidentified
  source 1..30: mol_type = unassigned DNA; note = methanogen bacteria
ttaggattcattccgatggcagacagtgtt

SEQ ID NO: 31809 - DNA, 51 bp, unidentified
  source 1..51: mol_type = unassigned DNA; note = methanogen bacteria
cgcaacgcatcgttcacggcctacttcgaggagcatctcggggacctctgg

SEQ ID NO: 31810 - DNA, 30 bp, unidentified
  source 1..30: mol_type = unassigned DNA; note = methanogen bacteria
accggcatgctgcccgacttctactacgga

SEQ ID NO: 31811 - DNA, 69 bp, unidentified
  source 1..69: mol_type = unassigned DNA; note = methanogen bacteria
tcaggtttgggctcagcgccggtaagctcaataccatatgccatgaatcttatctgggcagtggagata

SEQ ID NO: 31812 - DNA, 30 bp, unidentified
  source 1..30: mol_type = unassigned DNA; note = methanogen bacteria
atgtatttcattcctcctgcagacaatctg

SEQ ID NO: 31813 - DNA, 51 bp, unidentified
  source 1..51: mol_type = unassigned DNA; note = methanogen bacteria
cgcaacgcatcgttcacggcctactttgaggagcatctcggggacctctgg

SEQ ID NO: 31814 - DNA, 30 bp, unidentified; identical to SEQ ID NO: 31810
  source 1..30: mol_type = unassigned DNA; note = methanogen bacteria

SEQ ID NO: 31815 - DNA, 69 bp, unidentified
  source 1..69: mol_type = unassigned DNA; note = methanogen bacteria
tctgatttgggctcagctcctgtaagttcgataccttatgcgatgaacctgatttgggcaattgaaatt

SEQ ID NO: 31816 - DNA, 30 bp, unidentified
  source 1..30: mol_type = unassigned DNA; note = methanogen bacteria
atgtatttcataccttctgcagattcactt

SEQ ID NO: 31817 - DNA, 48 bp, unidentified
  source 1..48: mol_type = unassigned DNA; note = methanogen bacteria
atgattgcagcaacatttgtaccagaatatacggcgtcaatatttctt

SEQ ID NO: 31818 - DNA, 36 bp, unidentified
  source 1..36: mol_type = unassigned DNA; note = methanogen bacteria
aaattaccttctgtaactggaagttgttctcaccca

SEQ ID NO: 31819 - DNA, 36 bp, unidentified
  source 1..36: mol_type = unassigned DNA; note = methanogen bacteria
gctttcccagaacctactatcatggcagccattact

SEQ ID NO: 31820 - DNA, 30 bp, unidentified
  source 1..30: mol_type = unassigned DNA; note = methanogen bacteria
tctaatctgggttcaacacctgttgcttca

SEQ ID NO: 31821 - DNA, 30 bp, unidentified
  source 1..30: mol_type = unassigned DNA; note = methanogen bacteria
gtcagtttcattcctcctgccccgaatttt

SEQ ID NO: 31822 - DNA, 36 bp, unidentified; identical to SEQ ID NO: 30885
  source 1..36: mol_type = unassigned DNA; note = methanogen bacteria

SEQ ID NO: 31823 - DNA, 30 bp, unidentified
  source 1..30: mol_type = unassigned DNA; note = methanogen bacteria
gctttccctgctccaagtttcggatcagca

SEQ ID NO: 31824 - DNA, 36 bp, unidentified; identical to SEQ ID NO: 30885
  source 1..36: mol_type = unassigned DNA; note = methanogen bacteria

SEQ ID NO: 31825 - DNA, 30 bp, unidentified
  source 1..30: mol_type = unassigned DNA; note = methanogen bacteria
gcattccctgctcctaattttggtgcagca

SEQ ID NO: 31826 - DNA, 36 bp, unidentified
  source 1..36: mol_type = unassigned DNA; note = methanogen bacteria
aaactaccttctgttactggaagctgttctcaccct

SEQ ID NO: 31827 - DNA, 30 bp, unidentified
  source 1..30: mol_type = unassigned DNA; note = methanogen bacteria
gcatttcctgcaccaacattcggtggagca

SEQ ID NO: 31828 - DNA, 36 bp, unidentified; identical to SEQ ID NO: 30885
  source 1..36: mol_type = unassigned DNA; note = methanogen bacteria

SEQ ID NO: 31829 - DNA, 33 bp, unidentified
  source 1..33: mol_type = unassigned DNA; note = methanogen bacteria
gctttcccagctccttcatttggatctgcatta

SEQ ID NO: 31830 - DNA, 36 bp, unidentified; identical to SEQ ID NO: 30885
  source 1..36: mol_type = unassigned DNA; note = methanogen bacteria

SEQ ID NO: 31831 - DNA, 39 bp, unidentified
  source 1..39: mol_type = unassigned DNA; note = methanogen bacteria
gcattcccagaacctaacactatggcagcaattaccaaa

SEQ ID NO: 31832 - DNA, 69 bp, unidentified
  source 1..69: mol_type = unassigned DNA; note = methanogen bacteria
cttgcaggcctgggcaccactcccatatcctgcatcccggcgaccctttcgtactccacgccgctgtcc

SEQ ID NO: 31833 - DNA, 30 bp, unidentified
  source 1..30: mol_type = unassigned DNA; note = methanogen bacteria
gtcttctccttcattgacccgggcagttac

SEQ ID NO: 31834 - DNA, 180 bp, unidentified
  source 1..180: mol_type = unassigned DNA; note = methanogen bacteria
aacaaaatcaatcttaattcccttttaattaaggacaattccgctaagtttgattatatttctgcaaatccggtaattgatgcaataagaataatgaatgtaaatggtggtttgttaatttcagaatttgcagctatctttaatggaaccataaagacccctaccaactttgtgtttaaa

SEQ ID NO: 31835 - DNA, 36 bp, unidentified
  source 1..36: mol_type = unassigned DNA; note = methanogen bacteria
aaactaccatctgttactggaagttgttctcaccct

SEQ ID NO: 31836 - DNA, 30 bp, unidentified
  source 1..30: mol_type = unassigned DNA; note = methanogen bacteria
gcattccctgctccaacctttggtgcagca

SEQ ID NO: 31837 - DNA, 57 bp, unidentified
  source 1..57: mol_type = unassigned DNA; note = methanogen bacteria
cttcacattactggattcgaacataccattggattaatagaagcagctatgtcttct

SEQ ID NO: 31838 - DNA, 54 bp, unidentified
  source 1..54: mol_type = unassigned DNA; note = methanogen bacteria
gcaatcgtcgttgataaagaaactggaagagaatctattgtcattgacaaagat

SEQ ID NO: 31839 - DNA, 57 bp, unidentified
  source 1..57: mol_type = unassigned DNA; note = methanogen bacteria
atcaaagcaatttgtagagcatgtaactacggtgaatatgatttagaccctgcaaaa

SEQ ID NO: 31840 - DNA, 48 bp, unidentified
  source 1..48: mol_type = unassigned DNA; note = methanogen bacteria
ggatgtaacgcattagcattcccagtatcctccggtccgggttctaga

SEQ ID NO: 31841 - DNA, 87 bp, unidentified
  source 1..87: mol_type = unassigned DNA; note = methanogen bacteria
tcaactttcctaaactttccagaatttgaacttgaaagtctggtttttaactattatcatactttacatttgattagggttcatgat

SEQ ID NO: 31842 - DNA, 66 bp, unidentified
  source 1..66: mol_type = unassigned DNA; note = methanogen bacteria
atggtaacagtaattccaggaagcgatttattgacttccgcattaaatgttattgctcagagcttg

SEQ ID NO: 31843 - DNA, 51 bp, unidentified
  source 1..51: mol_type = unassigned DNA; note = methanogen bacteria
ccaggtcttgcagcacttggaagcggagatgtaaacactcttgcaagtgca

SEQ ID NO: 31844 - DNA, 36 bp, unidentified
  source 1..36: mol_type = unassigned DNA; note = methanogen bacteria
aaattaccatctgttactggaagttgttcacaccct

SEQ ID NO: 31845 - DNA, 30 bp, unidentified
  source 1..30: mol_type = unassigned DNA; note = methanogen bacteria
gctttcccagctcctactttcagcgcagct

SEQ ID NO: 31846 - DNA, 36 bp, unidentified
  source 1..36: mol_type = unassigned DNA; note = methanogen bacteria
aaattaccgtctgttactggaagttgttctcaccct

SEQ ID NO: 31847 - DNA, 30 bp, unidentified
  source 1..30: mol_type = unassigned DNA; note = methanogen bacteria
gcattccctgctcctacttttgaaactgct

SEQ ID NO: 31848 - DNA, 36 bp, unidentified
  source 1..36: mol_type = unassigned DNA; note = methanogen bacteria
aaattaccttctgttactggaagttgttcacaccct

SEQ ID NO: 31849 - DNA, 30 bp, unidentified
  source 1..30: mol_type = unassigned DNA; note = methanogen bacteria
gcattccctgctccaacatttggtgcatca

SEQ ID NO: 31850 - DNA, 36 bp, unidentified; identical to SEQ ID NO: 30885
  source 1..36: mol_type = unassigned DNA; note = methanogen bacteria

SEQ ID NO: 31851 - DNA, 30 bp, unidentified
  source 1..30: mol_type = unassigned DNA; note = methanogen bacteria
gctttccctgctccaactttcggtgaagca

SEQ ID NO: 31852 - DNA, 90 bp, unidentified; identical to SEQ ID NO: 28176
  source 1..90: mol_type = unassigned DNA; note = methanogen bacteria

SEQ ID NO: 31853 - DNA, 36 bp, unidentified
  source 1..36: mol_type = unassigned DNA; note = methanogen bacteria
ttaactattgatgctgaatttacagtaaaggatttt

SEQ ID NO: 31854 - DNA, 36 bp, unidentified
  source 1..36: mol_type = unassigned DNA; note = methanogen bacteria
aaattaccttctgttactggaagctgttctcaccct

SEQ ID NO: 31855 - DNA, 30 bp, unidentified
  source 1..30: mol_type = unassigned DNA; note = methanogen bacteria
gctttcccatcccctaactttggtacagca

SEQ ID NO: 31856 - DNA, 36 bp, unidentified
  source 1..36: mol_type = unassigned DNA; note = methanogen bacteria
aaactaccgtccgttactggaagctgttcacaccct

SEQ ID NO: 31857 - DNA, 30 bp, unidentified
  source 1..30: mol_type = unassigned DNA; note = methanogen bacteria
gctttcccatctccttcattcggatcagct

SEQ ID NO: 31858 - DNA, 63 bp, unidentified
  source 1..63: mol_type = unassigned DNA; note = methanogen bacteria
atggcaactacaatacctggtggagaaattctatcaggaacattaaatgttatagcacaaagc

SEQ ID NO: 31859 - DNA, 51 bp, unidentified
  source 1..51: mol_type = unassigned DNA; note = methanogen bacteria
cctggtttagcagctcttggtgccggggatatgataacattaacttctaat

SEQ ID NO: 31860 - DNA, 36 bp, unidentified; identical to SEQ ID NO: 31848
  source 1..36: mol_type = unassigned DNA; note = methanogen bacteria

SEQ ID NO: 31861 - DNA, 30 bp, unidentified
  source 1..30: mol_type = unassigned DNA; note = methanogen bacteria
gcattccctgctcctgacatgtctacagca

SEQ ID NO: 31862 - DNA, 57 bp, unidentified
  source 1..57: mol_type = unassigned DNA; note = methanogen bacteria
gcccttccagaacttcagatagctaactattctgatttcatagtcttcatttcaaca

SEQ ID NO: 31863 - DNA, 36 bp, unidentified
  source 1..36: mol_type = unassigned DNA; note = methanogen bacteria
aacatgccgattccattcggtacaagtgggcacatg

SEQ ID NO: 31864 - DNA, 90 bp, unidentified; identical to SEQ ID NO: 26061
  source 1..90: mol_type = unassigned DNA; note = methanogen bacteria

SEQ ID NO: 31865 - DNA, 45 bp, unidentified
  source 1..45: mol_type = unassigned DNA; note = methanogen bacteria
ggctggaccctgagacatacagcggcttcagcagggacgttttcc

SEQ ID NO: 31866 - DNA, 33 bp, unidentified; identical to SEQ ID NO: 23776
  source 1..33: mol_type = unassigned DNA; note = methanogen bacteria

SEQ ID NO: 31867 - DNA, 45 bp, unidentified
  source 1..45: mol_type = unassigned DNA; note = methanogen bacteria
ttaaatgtaatgggtgcaggtaaaacaatcggttatgctacagat

SEQ ID NO: 31868 - DNA, 42 bp, unidentified
  source 1..42: mol_type = unassigned DNA; note = methanogen bacteria
aatttaaatttcggcgttaaaggcgtttgtcattttaatttt

SEQ ID NO: 31869 - DNA, 33 bp, unidentified
  source 1..33: mol_type = unassigned DNA; note = methanogen bacteria
cagttagtaatgggaataaccattttgaacaat

SEQ ID NO: 31870 - DNA, 45 bp, unidentified
  source 1..45: mol_type = unassigned DNA; note = methanogen bacteria
ccgtttctgtttagtttgtttgaaaagtatctggggattaaatct

SEQ ID NO: 31871 - DNA, 60 bp, unidentified
  source 1..60: mol_type = unassigned DNA; note = methanogen bacteria
atagcgattccaggcggtgcgtttttaacagctgccttaaatttgatttcacaaagtctt

SEQ ID NO: 31872 - DNA, 45 bp, unidentified
  source 1..45: mol_type = unassigned DNA; note = methanogen bacteria
ggtctggcggctctggggtccggagacatcaatacattgtccaca

SEQ ID NO: 31873 - DNA, 63 bp, unidentified
  source 1..63: mol_type = unassigned DNA; note = methanogen bacteria
tttttaggaattcctatggcaaccaatactgctgatgcggcattacatagtatttttccgttc

SEQ ID NO: 31874 - DNA, 81 bp, unidentified
  source 1..81: mol_type = unassigned DNA; note = methanogen bacteria
gtgtatgtggtgatttatgtggtgagtatacctggaagtgagtttttaactgcagctttaaatgtagtttctcaaagttta

SEQ ID NO: 31875 - DNA, 51 bp, unidentified
  source 1..51: mol_type = unassigned DNA; note = methanogen bacteria
ccaggacttgcagcccttggtagtggggatgtttccactttagcaagcgct

SEQ ID NO: 31876 - DNA, 66 bp, unidentified
  source 1..66: mol_type = unassigned DNA; note = methanogen bacteria
ttcagggaacccatcggcagtgccctgaacgtggtattctgcgtggtcgacttcggcggtgactac

SEQ ID NO: 31877 - DNA, 90 bp, unidentified
  source 1..90: mol_type = unassigned DNA; note = methanogen bacteria
gtgtccaacacggttcccaccgaactcttggacatctcgatgccctggggtacgaccaacctcaacgataccctcctgaacttcatgccc

SEQ ID NO: 31878 - DNA, 81 bp, unidentified
  source 1..81: mol_type = unassigned DNA; note = methanogen bacteria
cctgtaacatttaaaattaatggagcaacatataccagaatcagcgatgaaaaaggaattgccagtattgcaatcaactta

SEQ ID NO: 31879 - DNA, 285 bp, unidentified
  source 1..285: mol_type = unassigned DNA; note = methanogen bacteria
ggtgtattcaattttgattttgaatccctttcagatgcaaatgctgtagctattgttacagatactgcattccctgatgttgcagatattcaagtaaataatactgttactaatacatccactacggatgttgcaggtggttatgtagaaactgttcaagacacgtccggatctagttctcaaggttcttccagttatactccttcggaacctactcccgctcctagtactggtggtggcggagaaagtccagaatccggctcatctagtgagcaacctgctggt

SEQ ID NO: 31880 - DNA, 57 bp, unidentified
  source 1..57: mol_type = unassigned DNA; note = methanogen bacteria
ttcatgtctattattaaaaatgcagttaatgatattttagtttatattgttaatttt

SEQ ID NO: 31881 - DNA, 99 bp, unidentified
  source 1..99: mol_type = unassigned DNA; note = methanogen bacteria
gcgggccctattggcgccacattatctgaatttcagaacatgtcatcatcaactcctgctgcgatgcaaaacgcaagtgctgttgaccttttcataaat

SEQ ID NO: 31882 - DNA, 51 bp, unidentified
  source 1..51: mol_type = unassigned DNA; note = methanogen bacteria
ttaattggacaattgttcagtcaagtgttaccaaatggaggtatgaaattc

SEQ ID NO: 31883 - DNA, 33 bp, unidentified
  source 1..33: mol_type = unassigned DNA; note = methanogen bacteria
gttcctttctcagagttgattttaggaacctgg

SEQ ID NO: 31884 - DNA, 36 bp, unidentified
  source 1..36: mol_type = unassigned DNA; note = methanogen bacteria
aaaatgccatctgttactggaagttgttctcaccct

SEQ ID NO: 31885 - DNA, 36 bp, unidentified
  source 1..36: mol_type = unassigned DNA; note = methanogen bacteria
gcattcccattaccaagttttgcagcagcattgcca

SEQ ID NO: 31886 - DNA, 33 bp, unidentified
  source 1..33: mol_type = unassigned DNA; note = methanogen bacteria
aaaaccataaattatagttttataatattacct

SEQ ID NO: 31887 - DNA, 51 bp, unidentified
  source 1..51: mol_type = unassigned DNA; note = methanogen bacteria
ttaccatcaaacagtcctaactcagatgcattcgcagcaattctaggaact

SEQ ID NO: 31888 - DNA, 30 bp, unidentified
  source 1..30: mol_type = unassigned DNA; note = methanogen bacteria
ttcgtcgatgacgacatgaacgacgaggtt

SEQ ID NO: 31889 - DNA, 57 bp, unidentified
  source 1..57: mol_type = unassigned DNA; note = methanogen bacteria
gccaatattgtaaatataggtgttgccaattcagacatgaattatgtctatgacacc

SEQ ID NO: 31890 - DNA, 36 bp, unidentified
  source 1..36: mol_type = unassigned DNA; note = methanogen bacteria
atcggtgctgagaatatggtcatgatgtttgtcggc

SEQ ID NO: 31891 - DNA, 81 bp, unidentified
  source 1..81: mol_type = unassigned DNA; note = methanogen bacteria
gtggatggtgatatttttatggtttcttttccgggttctgatttggttgcttcagcaatgaacattatctcgcagagcttg

SEQ ID NO: 31892 - DNA, 51 bp, unidentified
  source 1..51: mol_type = unassigned DNA; note = methanogen bacteria
ccgggtcttgcggctttgggtgctggtgacattaacactttggcgtcatcc

SEQ ID NO: 31893 - DNA, 60 bp, unidentified
  source 1..60: mol_type = unassigned DNA; note = methanogen bacteria
atgataattcaaggtacagaaactttaacttcattgattcatataatttctgagagttta

SEQ ID NO: 31894 - DNA, 51 bp, unidentified
  source 1..51: mol_type = unassigned DNA; note = methanogen bacteria
ccgggacttgctgcattaggtagtggggacataactactcttgctgaatcg

SEQ ID NO: 31895 - DNA, 33 bp, unidentified
  source 1..33: mol_type = unassigned DNA; note = methanogen bacteria
aaaacattttcagtatatgatatcatattgcca

SEQ ID NO: 31896 - DNA, 57 bp, unidentified
  source 1..57: mol_type = unassigned DNA; note = methanogen bacteria
atgctgcctggaacagatttgacaatttcaaatgcattcagcatcattttaggaaac

SEQ ID NO: 31897 - DNA, 60 bp, unidentified
  source 1..60: mol_type = unassigned DNA; note = methanogen bacteria
aatacagaaaaagataaggagtttgcaagagaaataaggaatcaaaggattgtcttattc

SEQ ID NO: 31898 - DNA, 33 bp, unidentified
  source 1..33: mol_type = unassigned DNA; note = methanogen bacteria
aaaacattctcattttacgactttattttgcct

SEQ ID NO: 31899 - DNA, 57 bp, unidentified
  source 1..57: mol_type = unassigned DNA; note = methanogen bacteria
gcattgcctggaacagatgctgcaactgcaaatgcattcaacatcattttaggaagc

SEQ ID NO: 31900 - DNA, 39 bp, unidentified
  source 1..39: mol_type = unassigned DNA; note = methanogen bacteria
gctgaagtttacgatgtatattcatctcaggggttcttt

SEQ ID NO: 31901 - DNA, 30 bp, unidentified
  source 1..30: mol_type = unassigned DNA; note = methanogen bacteria
tcaacgggcaatatcgatctgtgggttcct

SEQ ID NO: 31902 - DNA, 267 bp, unidentified
  source 1..267: mol_type = unassigned DNA; note = methanogen bacteria
gtagcattaaacacagttccagctaataacacaactaatgtgacaataacagattcagcatttactactaatcaatcagttgtgaatgcatctaacatgtcagcaaatacaacaaataacactaccactgtaaaagcaacaacaaaaaaatatagttcatcatcatatagttcaggcagtagctcaaaaagtagttcaagtaggcaatctaattcaaaaagtagttctaagggtagtacccgtgatatttatagttcaaatagtact

SEQ ID NO: 31903 - DNA, 42 bp, unidentified
  source 1..42: mol_type = unassigned DNA; note = methanogen bacteria
cagatcaccggcaccggaatgcagtacagtcccttcgacacc

SEQ ID NO: 31904 - DNA, 42 bp, unidentified
  source 1..42: mol_type = unassigned DNA; note = methanogen bacteria
tgcggctacggattcttcgacatctccggatacagcctgtcc

SEQ ID NO: 31905 - DNA, 66 bp, unidentified
  source 1..66: mol_type = unassigned DNA; note = methanogen bacteria
ttaaaaaaccccacattaggatttaatatcattacaattgcatcgatatttgtaattttacaggcc

SEQ ID NO: 31906 - DNA, 42 bp, unidentified
  source 1..42: mol_type = unassigned DNA; note = methanogen bacteria
cagatcaccggcaccggtatgcagtacagtcccttcgacacc

SEQ ID NO: 31907 - DNA, 66 bp, unidentified
  source 1..66: mol_type = unassigned DNA; note = methanogen bacteria
atggtatctacaattcctggaagtgaaatattaacatccacattaaacatgatttcacaaagtttg

SEQ ID NO: 31908 - DNA, 51 bp, unidentified
  source 1..51: mol_type = unassigned DNA; note = methanogen bacteria
ccgggacttgcggctttaggagcaggtgatgtaaatactttggcaaatgca

SEQ ID NO: 31909 - DNA, 54 bp, unidentified
  source 1..54: mol_type = unassigned DNA; note = methanogen bacteria
acattcaatcttgactattcaatgttcagttcgtttctgattctgactcctact

SEQ ID NO: 31910 - DNA, 33 bp, unidentified
  source 1..33: mol_type = unassigned DNA; note = methanogen bacteria
aagacatttgactttttttcatttgtcctgccc

SEQ ID NO: 31911 - DNA, 57 bp, unidentified
  source 1..57: mol_type = unassigned DNA; note = methanogen bacteria
cttccggctccggcattttttgaaaattcggatgcttttaatgtcgttttgggctcc

SEQ ID NO: 31912 - DNA, 36 bp, unidentified
  source 1..36: mol_type = unassigned DNA; note = methanogen bacteria
aacatgccaattccatttggtacaagtggacacatg

SEQ ID NO: 31913 - DNA, 75 bp, unidentified
  source 1..75: mol_type = unassigned DNA; note = methanogen bacteria
gtggtgatttatgtggtgagtattcctggaagtgagcttttgacggcggccttgaatgtcgtttctcagagttta

SEQ ID NO: 31914 - DNA, 51 bp, unidentified
  source 1..51: mol_type = unassigned DNA; note = methanogen bacteria
ccgggtcttgctgcattgggtagtggtgatgttacaacattggctaatgca

SEQ ID NO: 31915 - DNA, 30 bp, unidentified
  source 1..30: mol_type = unassigned DNA; note = methanogen bacteria
ccttatgtactttactctaatggtggggga

SEQ ID NO: 31916 - DNA, 93 bp, unidentified
  source 1..93: mol_type = unassigned DNA; note = methanogen bacteria
agcttcaccaaaggttggggagcagatcctaatacttttttcactacgacattacttcaatcaagcggaaactatttgcatttagctcatttc

SEQ ID NO: 31917 - DNA, 69 bp, unidentified
  source 1..69: mol_type = unassigned DNA; note = methanogen bacteria
cttacacttcctggcgcatccattgggctggcatatggatggctgcttttggccaaattgtgttttccc

SEQ ID NO: 31918 - DNA, 54 bp, unidentified
  source 1..54: mol_type = unassigned DNA; note = methanogen bacteria
acattcaatcttgactattcaatgttcagttcatttctgattctgactcctact

SEQ ID NO: 31919 - DNA, 48 bp, unidentified
  source 1..48: mol_type = unassigned DNA; note = methanogen bacteria
ggtgatatgcaggtttatttaatttcccatattaaacttccacttaca

SEQ ID NO: 31920 - DNA, 63 bp, unidentified
  source 1..63: mol_type = unassigned DNA; note = methanogen bacteria
ggattagaattagcaaatacagttttaaatcattataatattacaatcttaaataatataatt

SEQ ID NO: 31921 - DNA, 39 bp, unidentified
  source 1..39: mol_type = unassigned DNA; note = methanogen bacteria
aaagtgttcaacttaggattttggggactgacaaccgac

SEQ ID NO: 31922 - DNA, 60 bp, unidentified
  source 1..60: mol_type = unassigned DNA; note = methanogen bacteria
tacatgccgtatccgagctattggacaggtcaggaagcgtatgcctacatgttcggattc

SEQ ID NO: 31923 - DNA, 36 bp, unidentified; identical to SEQ ID NO: 30903
  source 1..36: mol_type = unassigned DNA; note = methanogen bacteria

SEQ ID NO: 31924 - DNA, 36 bp, unidentified
  source 1..36: mol_type = unassigned DNA; note = methanogen bacteria
gctgttggagcatcttttgattcagttgcaactgta

SEQ ID NO: 31925 - DNA, 33 bp, unidentified
  source 1..33: mol_type = unassigned DNA; note = methanogen bacteria
aagacttttataataaataatatagtattgcca

SEQ ID NO: 31926 - DNA, 57 bp, unidentified
  source 1..57: mol_type = unassigned DNA; note = methanogen bacteria
cttttacctggaactgatccaattgtatctaatgcatttaatattgtcctaggtagc

SEQ ID NO: 31927 - DNA, 30 bp, unidentified
  source 1..30: mol_type = unassigned DNA; note = methanogen bacteria
aaaagcgatttgggaaccacttctatttct

SEQ ID NO: 31928 - DNA, 39 bp, unidentified
  source 1..39: mol_type = unassigned DNA; note = methanogen bacteria
ggctatctgaatgcacaattggcattccttttggataat

SEQ ID NO: 31929 - DNA, 63 bp, unidentified
  source 1..63: mol_type = unassigned DNA; note = methanogen bacteria
aattccactttaaatctagattacacaatgttcagctcatttttgattttgactccaacatac

SEQ ID NO: 31930 - DNA, 39 bp, unidentified
  source 1..39: mol_type = unassigned DNA; note = methanogen bacteria
aaaattatagatgttggatttttaggtatgcaagtgccg

SEQ ID NO: 31931 - DNA, 57 bp, unidentified
  source 1..57: mol_type = unassigned DNA; note = methanogen bacteria
ctaccttcaccttcttactacacaggaggacctgctttacaattcgtatttactcag

SEQ ID NO: 31932 - DNA, 36 bp, unidentified
  source 1..36: mol_type = unassigned DNA; note = methanogen bacteria
ggccatctgaatgcacagttggcattcctgttggat

SEQ ID NO: 31933 - DNA, 63 bp, unidentified
  source 1..63: mol_type = unassigned DNA; note = methanogen bacteria
aattccactataaatctagattacactatgttcagctcctttttgattttgactccgacatac

SEQ ID NO: 31934 - DNA, 57 bp, unidentified
  source 1..57: mol_type = unassigned DNA; note = methanogen bacteria
tctacactaaatctcaattatagaatgtttagtgcatttttaatattgactccaact

SEQ ID NO: 31935 - DNA, 69 bp, unidentified
  source 1..69: mol_type = unassigned DNA; note = methanogen bacteria
atgccggagagctgcttcgcggaggccgctgtgtacggtgtcgccgatgccaaactcgtcgatcccgac

SEQ ID NO: 31936 - DNA, 36 bp, unidentified
  source 1..36: mol_type = unassigned DNA; note = methanogen bacteria
gagttcatccaggacactggtgtcgagggcggagct

SEQ ID NO: 31937 - DNA, 105 bp, unidentified
  source 1..105: mol_type = unassigned DNA; note = methanogen bacteria
acccatctaatcgatggattcgatagttcaatttacaatatgattgccccatatataaatgacaatttaacaagcatattcaaatcattaacattttttggagga

SEQ ID NO: 31938 - DNA, 69 bp, unidentified
  source 1..69: mol_type = unassigned DNA; note = methanogen bacteria
gttcaaaggccaagaccagaaatactccgattggtacatgaaacttcctattcattcccaagtggccac

SEQ ID NO: 31939 - DNA, 66 bp, unidentified
  source 1..66: mol_type = unassigned DNA; note = methanogen bacteria
atggcaatggcaattcctggtggagattttttaactactggactaaatttaatcgcacaaagtctt

SEQ ID NO: 31940 - DNA, 48 bp, unidentified
  source 1..48: mol_type = unassigned DNA; note = methanogen bacteria
ggtcttgctgcacttggttccggtgatgtaaatactttatctgaatca

SEQ ID NO: 31941 - DNA, 33 bp, unidentified
  source 1..33: mol_type = unassigned DNA; note = methanogen bacteria
gttccagtatttgcattatttcttagatttgaa

SEQ ID NO: 31942 - DNA, 90 bp, unidentified
  source 1..90: mol_type = unassigned DNA; note = methanogen bacteria
ttgttcaagggatgggggtccaatccaagtgttttctttacaaggaccttgctgcacagcacatccaatccatatgggttaacttacctt

SEQ ID NO: 31943 - DNA, 72 bp, unidentified
  source 1..72: mol_type = unassigned DNA; note = methanogen bacteria
atatgctgtttccctgccaggatcccgtacaggaataatggtcttattcagcccaaactgggattatctatt

SEQ ID NO: 31944 - DNA, 96 bp, unidentified
  source 1..96: mol_type = unassigned DNA; note = methanogen bacteria
tcaggcaacaccggtgaaataatgcaaaacatacaaaacgctcaaacaaccaccccaacaaccacggatacacttggcaccaatcctctggatttg

SEQ ID NO: 31945 - DNA, 48 bp, unidentified
  source 1..48: mol_type = unassigned DNA; note = methanogen bacteria
ttggggcccgtattgggcacatacctggctcacggaggacttcaatac

SEQ ID NO: 31946 - DNA, 30 bp, unidentified
  source 1..30: mol_type = unassigned DNA; note = methanogen bacteria
ctgcctttttccgaatggatacttggcgca

SEQ ID NO: 31947 - DNA, 63 bp, unidentified
  source 1..63: mol_type = unassigned DNA; note = methanogen bacteria
atggcaatggcaattcccggtggagattttttaaccactggacttaatttaatcgcacaaagt

SEQ ID NO: 31948 - DNA, 48 bp, unidentified
  source 1..48: mol_type = unassigned DNA; note = methanogen bacteria
gggcttgccgcactcggttcaggagatgtaaatacattatcccaatcc

SEQ ID NO: 31949 - DNA, 54 bp, unidentified
  source 1..54: mol_type = unassigned DNA; note = methanogen bacteria
aggtccgggagcgtggcggactatttcgagcgccacttcggcggctcggagtac

SEQ ID NO: 31950 - DNA, 39 bp, unidentified
  source 1..39: mol_type = unassigned DNA; note = methanogen bacteria
aaaattatagatttacactttttaggattagaagtacca

SEQ ID NO: 31951 - DNA, 60 bp, unidentified
  source 1..60: mol_type = unassigned DNA; note = methanogen bacteria
gtattaccatcaccagcattctatacaggtgattcaagtttacaatttgtatttacacaa

SEQ ID NO: 31952 - DNA, 42 bp, unidentified
  source 1..42: mol_type = unassigned DNA; note = methanogen bacteria
ctggactacagtaagttcactcctttcttaatcctgacccct

SEQ ID NO: 31953 - DNA, 87 bp, unidentified
  source 1..87: mol_type = unassigned DNA; note = methanogen bacteria
attaactcttcagcatatctcggaggataccttacaacaggactgggtcaaaacggatttggagccgcatcaactgtaggtattaat

SEQ ID NO: 31954 - DNA, 33 bp, unidentified
  source 1..33: mol_type = unassigned DNA; note = methanogen bacteria
tatctgaacactcagttggcattcctgttggat

SEQ ID NO: 31955 - DNA, 63 bp, unidentified
  source 1..63: mol_type = unassigned DNA; note = methanogen bacteria
aattccactttaaatttagattacacaatgttcagttcatttttgattttgactccgacatat

SEQ ID NO: 31956 - DNA, 75 bp, unidentified
  source 1..75: mol_type = unassigned DNA; note = methanogen bacteria
caggcagacagttcgtggacttggggatacaactcgctcagtgacttcggtatctcctacggcactcccgcggcc

SEQ ID NO: 31957 - DNA, 36 bp, unidentified
  source 1..36: mol_type = unassigned DNA; note = methanogen bacteria
tatctgaatactcaatttgcatttttgttggataat

SEQ ID NO: 31958 - DNA, 60 bp, unidentified
  source 1..60: mol_type = unassigned DNA; note = methanogen bacteria
aattcaacagttaatcttgactatacaatgtttagctcatttttgattttaactccgact

SEQ ID NO: 31959 - DNA, 39 bp, unidentified
  source 1..39: mol_type = unassigned DNA; note = methanogen bacteria
tatacaggaataagactggaattgggacctatacttgct

SEQ ID NO: 31960 - DNA, 30 bp, unidentified
  source 1..30: mol_type = unassigned DNA; note = methanogen bacteria
acctcacagattccctttgatggttcagtc

SEQ ID NO: 31961 - DNA, 66 bp, unidentified
  source 1..66: mol_type = unassigned DNA; note = methanogen bacteria
atggttttaaacattccgggtggagagtttttaacaggttctcttgatgtaatttcacaaagcttg

SEQ ID NO: 31962 - DNA, 51 bp, unidentified
  source 1..51: mol_type = unassigned DNA; note = methanogen bacteria
cctggtttggctgcattgggtgccggagacatcaatacattagcatcatcc

SEQ ID NO: 31963 - DNA, 36 bp, unidentified; identical to SEQ ID NO: 31698
  source 1..36: mol_type = unassigned DNA; note = methanogen bacteria

SEQ ID NO: 31964 - DNA, 231 bp, unidentified
  source 1..231: mol_type = unassigned DNA; note = methanogen bacteria
atttttgtagtggaaaactatacgccaagcaattcaaacacccactactatgatgttggaagcggaagcagcagaggaagttattcacactcttcacattcctcacattacggtggagtcgatacatctccaaatacgattgctaaaaatgatccggactggtattatgaccactatgaatatggggacaatcccgatatcgatgactatctggaatctcaaggttatgat

SEQ ID NO: 31965 - DNA, 63 bp, unidentified
  source 1..63: mol_type = unassigned DNA; note = methanogen bacteria
atgagtgttagtatacctggtggggaatttttaacaggttctttagatgttatttcacaaagt

SEQ ID NO: 31966 - DNA, 51 bp, unidentified
  source 1..51: mol_type = unassigned DNA; note = methanogen bacteria
ccgggtcttgcagcattaggtgctggtgatgttaatactcttgcagaatca

SEQ ID NO: 31967 - DNA, 60 bp, unidentified
  source 1..60: mol_type = unassigned DNA; note = methanogen bacteria
atgataattcaaggtactgaagctttaacttcattaattcacataatttccgagagtttg

SEQ ID NO: 31968 - DNA, 51 bp, unidentified
  source 1..51: mol_type = unassigned DNA; note = methanogen bacteria
ccgggtcttgcggcacttggcagtggtgatattactacattggctgaatcg

SEQ ID NO: 31969 - DNA, 63 bp, unidentified
  source 1..63: mol_type = unassigned DNA; note = methanogen bacteria
atgagtataagtgtacctggtggagaatatttaacaggttctttagatgttatttcacaaagt

SEQ ID NO: 31970 - DNA, 51 bp, unidentified
  source 1..51: mol_type = unassigned DNA; note = methanogen bacteria
cctggtcttgcggcgttaggtgctggagatgttaatactcttgcagagtcc

SEQ ID NO: 31971 - DNA, 30 bp, unidentified
  source 1..30: mol_type = unassigned DNA; note = methanogen bacteria
tatccattaaggagttattctattgttttt

SEQ ID NO: 31972 - DNA, 45 bp, unidentified
  source 1..45: mol_type = unassigned DNA; note = methanogen bacteria
ataggtgccgaaaaaatggtcatgacgcttatacaaatgcagatt

SEQ ID NO: 31973 - DNA, 30 bp, unidentified
  source 1..30: mol_type = unassigned DNA; note = methanogen bacteria
tcaacgctcggaacaactccaataagctcc

SEQ ID NO: 31974 - DNA, 63 bp, unidentified
  source 1..63: mol_type = unassigned DNA; note = methanogen bacteria
atggctttaaatattcctggtggagaatttttaaccggctctcttgatgtcatatcacaaagc

SEQ ID NO: 31975 - DNA, 51 bp, unidentified
  source 1..51: mol_type = unassigned DNA; note = methanogen bacteria
cccggtttggcggcattgggtgctggagacatcaacaccctggcaagctcc

SEQ ID NO: 31976 - DNA, 33 bp, unidentified
  source 1..33: mol_type = unassigned DNA; note = methanogen bacteria
tatccattaaggagttattccaatgtttttaat

SEQ ID NO: 31977 - DNA, 42 bp, unidentified
  source 1..42: mol_type = unassigned DNA; note = methanogen bacteria
ggtgccgaaaaaatggttatgatgcttatacaaatgcagatt

SEQ ID NO: 31978 - DNA, 30 bp, unidentified
  source 1..30: mol_type = unassigned DNA; note = methanogen bacteria
ccttatgttctttattcaaatggaggtgga

SEQ ID NO: 31979 - DNA, 87 bp, unidentified
  source 1..87: mol_type = unassigned DNA; note = methanogen bacteria
ttttttaagggatggggtgcagacccgaacacatacctgaatgttaatgtgcttcaggctacagattcattaagtggtgtttttaac

SEQ ID NO: 31980 - DNA, 60 bp, unidentified
  source 1..60: mol_type = unassigned DNA; note = methanogen bacteria
acattgccgggtgcttcaataggtcttgcagagttattcaatcctgattggtcactttta

SEQ ID NO: 31981 - DNA, 69 bp, unidentified
  source 1..69: mol_type = unassigned DNA; note = methanogen bacteria
atggtaggaacaacaattccaggaagtgagatattaacttcaggtttgaatatgattgcacagagtctg

SEQ ID NO: 31982 - DNA, 51 bp, unidentified
  source 1..51: mol_type = unassigned DNA; note = methanogen bacteria
ccggggcttgcggcattaggtgcaggagatgtaaatactcttgctaacgct

SEQ ID NO: 31983 - DNA, 231 bp, unidentified
  source 1..231: mol_type = unassigned DNA; note = methanogen bacteria
tcttctctgactttgaacagctattccagcagtgattcaaaatcccattactattcaagcggaagcggcagcagtagcggttcatcacattccacacactcttcacattactccggtgttgacgattcgcctcatactattgccagaaatgatcctgactggtattacgaccattatgaatacggtgacaatcccgatatagatgactatctcgaatctcagggttatgac

SEQ ID NO: 31984 - DNA, 30 bp, unidentified
  source 1..30: mol_type = unassigned DNA; note = methanogen bacteria
acctcacagattccctttgacggttcagtc

SEQ ID NO: 31985 - DNA, 33 bp, unidentified
  source 1..33: mol_type = unassigned DNA; note = methanogen bacteria
gttgccggtcttggagcaggccctcttgcagct

SEQ ID NO: 31986 - DNA, 54 bp, unidentified
  source 1..54: mol_type = unassigned DNA; note = methanogen bacteria
gatatgcttttgctctttggtgcagaatctgtaattgattacgcaatggattat

SEQ ID NO: 31987 - DNA, 234 bp, unidentified
  source 1..234: mol_type = unassigned DNA; note = methanogen bacteria
agccttttgacaatggatacctattctccaatccattcaaacactcactactatgatgtgggaagcggaagcagcagcggaagtcattcacactcttcacattcctcacattatggaggagtcgatacgtctccaaataagattgctaaaaatgatcctgactggtattatgaccactatgaatatggggacaatcccaatattgatgattatcttgaaagtcaaggctatgat

SEQ ID NO: 31988 - DNA, 63 bp, unidentified
  source 1..63: mol_type = unassigned DNA; note = methanogen bacteria
atggcaatggcaattcccggtggtgacttcttaaccactggactcaatttgatttcacaaagt

SEQ ID NO: 31989 - DNA, 48 bp, unidentified
  source 1..48: mol_type = unassigned DNA; note = methanogen bacteria
ggtcttgcagcacttggttcaggggacgtaaacaccttatcacaatca

SEQ ID NO: 31990 - DNA, 30 bp, unidentified
  source 1..30: mol_type = unassigned DNA; note = methanogen bacteria
tactttgatgggggttcaactgtcttctct

SEQ ID NO: 31991 - DNA, 48 bp, unidentified
  source 1..48: mol_type = unassigned DNA; note = methanogen bacteria
gccgactgggggatatttgcagaatatctaactacaaacagctcattt

SEQ ID NO: 31992 - DNA, 63 bp, unidentified
  source 1..63: mol_type = unassigned DNA; note = methanogen bacteria
atgagcgtaagtatacctggtggagaatttttaacaggttctttggatgttatttcacaaagt

SEQ ID NO: 31993 - DNA, 51 bp, unidentified
  source 1..51: mol_type = unassigned DNA; note = methanogen bacteria
cctggtcttgcagcattgggagctggggatgtaaatactcttgcacaatct

SEQ ID NO: 31994 - DNA, 66 bp, unidentified
  source 1..66: mol_type = unassigned DNA; note = methanogen bacteria
tccaccctcggaacaactccgataagctcaatttcctattctttgacactgattacagacatcaac

SEQ ID NO: 31995 - DNA, 51 bp, unidentified; identical to SEQ ID NO: 30369
  source 1..51: mol_type = unassigned DNA; note = methanogen bacteria

SEQ ID NO: 31996 - DNA, 51 bp, unidentified
  source 1..51: mol_type = unassigned DNA; note = methanogen bacteria
acattgcctgaaatggaattattaactgcgggggattttttagcatttatc

SEQ ID NO: 31997 - DNA, 96 bp, unidentified
  source 1..96: mol_type = unassigned DNA; note = methanogen bacteria
gtttcagattcggcaagttcaacatttcaaaacattcaaaacatgtctgccgcaacaccctctccggttgttagtgatctaagcccgcttgatctt

SEQ ID NO: 31998 - DNA, 69 bp, unidentified
  source 1..69: mol_type = unassigned DNA; note = methanogen bacteria
cttggtgcagttggaccggtactcgaagcggtgcatgccggtggaggactccagtatattatatatctt

SEQ ID NO: 31999 - DNA, 30 bp, unidentified
  source 1..30: mol_type = unassigned DNA; note = methanogen bacteria
gttccgttttcagattggatatttggactt

SEQ ID NO: 32000 - DNA, 63 bp, unidentified
  source 1..63: mol_type = unassigned DNA; note = methanogen bacteria
atgagtgtaagtatacctggtggagaatttttaaccggttctttggatgttatttcccaaagt

SEQ ID NO: 32001 - DNA, 51 bp, unidentified
  source 1..51: mol_type = unassigned DNA; note = methanogen bacteria
cctgggcttgcggctttaggtgccggagatgtaaatactcttgcagaatca

SEQ ID NO: 32002 - DNA, 33 bp, unidentified
  source 1..33: mol_type = unassigned DNA; note = methanogen bacteria
aacatgccaattccatttggaacaagtggacat

SEQ ID NO: 32003 - DNA, 69 bp, unidentified
  source 1..69: mol_type = unassigned DNA; note = methanogen bacteria
tcgacccttggaacaactcctataagctccatttcttattctctgaccttaattaccaacatcaacatt

SEQ ID NO: 32004 - DNA, 63 bp, unidentified
  source 1..63: mol_type = unassigned DNA; note = methanogen bacteria
atggtgacagtaattccaggtagtgatttattaacttctgcattgaatgttgtttctcaaagt

SEQ ID NO: 32005 - DNA, 51 bp, unidentified
  source 1..51: mol_type = unassigned DNA; note = methanogen bacteria
ccagggcttgctgcattgggcagtggcgatgttacaactttatctaatgcg

SEQ ID NO: 32006 - DNA, 66 bp, unidentified
  source 1..66: mol_type = unassigned DNA; note = methanogen bacteria
atggtatcaacaattcctggaagtgaagtattaacatcaacattgaacatgatttcacagagcctg

SEQ ID NO: 32007 - DNA, 51 bp, unidentified
  source 1..51: mol_type = unassigned DNA; note = methanogen bacteria
cctggacttgcagctttgggtgcaggtgatgtcaatacattggccaatgcg

SEQ ID NO: 32008 - DNA, 66 bp, unidentified
  source 1..66: mol_type = unassigned DNA; note = methanogen bacteria
atggtaacaacaattcctggaagtgaaatattaacatcaacattaaatatgatttcacaaagtctg

SEQ ID NO: 32009 - DNA, 51 bp, unidentified
  source 1..51: mol_type = unassigned DNA; note = methanogen bacteria
ccaggtcttgctgctttaggtgctggggatgtaaatacattggctaatgct

SEQ ID NO: 32010 - DNA, 63 bp, unidentified
  source 1..63: mol_type = unassigned DNA; note = methanogen bacteria
atggctttaaatattccaggtggagaatttttaacaggttctcttgatgtaatctcacagagt

SEQ ID NO: 32011 - DNA, 51 bp, unidentified
  source 1..51: mol_type = unassigned DNA; note = methanogen bacteria
ccgggtcttgcagctttaggtgccggtgacattaacacccttgcaagttcc

SEQ ID NO: 32012 - DNA, 33 bp, unidentified
  source 1..33: mol_type = unassigned DNA; note = methanogen bacteria
aaaacattggaattcgaatttatagctctacca

SEQ ID NO: 32013 - DNA, 51 bp, unidentified
  source 1..51: mol_type = unassigned DNA; note = methanogen bacteria
tttacttcaagcagtcagaatgcctcttcatttgtaacgattctgtcaacc

SEQ ID NO: 32014 - DNA, 60 bp, unidentified
  source 1..60: mol_type = unassigned DNA; note = methanogen bacteria
aactccactttaaatctggattattcaatgtttagtccatttttaattttaactccaaca

SEQ ID NO: 32015 - DNA, 66 bp, unidentified
  source 1..66: mol_type = unassigned DNA; note = methanogen bacteria
atggttttaaatattcctggtggggaattcttaacaggctctcttgatgtaatctcacagagtttg

SEQ ID NO: 32016 - DNA, 51 bp, unidentified
  source 1..51: mol_type = unassigned DNA; note = methanogen bacteria
cctggtcttgcggcattaggtgcaggagacattaatacattagcttcatca

SEQ ID NO: 32017 - DNA, 66 bp, unidentified
  source 1..66: mol_type = unassigned DNA; note = methanogen bacteria
gcaaatttgggaacttctccaataatctgtgttccatatgtttcaagtttgatattaaaattaagt

SEQ ID NO: 32018 - DNA, 33 bp, unidentified
  source 1..33: mol_type = unassigned DNA; note = methanogen bacteria
aaaacattgagtataagttttatcgtacttcct

SEQ ID NO: 32019 - DNA, 51 bp, unidentified
  source 1..51: mol_type = unassigned DNA; note = methanogen bacteria
ctaccttctactagtcctaattctgatgcatttacaacaattctatcaact

SEQ ID NO: 32020 - DNA, 33 bp, unidentified
  source 1..33: mol_type = unassigned DNA; note = methanogen bacteria
agaacactggaatttgaattcattgcactgcca

SEQ ID NO: 32021 - DNA, 54 bp, unidentified
  source 1..54: mol_type = unassigned DNA; note = methanogen bacteria
gcatttcctacaagcagtcccaatgcacatgcctttacagcgcttctctcaacc

SEQ ID NO: 32022 - DNA, 66 bp, unidentified
  source 1..66: mol_type = unassigned DNA; note = methanogen bacteria
atggttactactgttccgggaagtgaaattctaacttccggtttgaatatgattgctcaaagcctg

SEQ ID NO: 32023 - DNA, 51 bp, unidentified
  source 1..51: mol_type = unassigned DNA; note = methanogen bacteria
cctggtcttgcggcattgggagctggtgacgtaaatacccttgcaaatgct

SEQ ID NO: 32024 - DNA, 33 bp, unidentified
  source 1..33: mol_type = unassigned DNA; note = methanogen bacteria
aacatgccaattccatttggaacaagtggacac

SEQ ID NO: 32025 - DNA, 78 bp, unidentified
  source 1..78: mol_type = unassigned DNA; note = methanogen bacteria
gattttatttatactccggccgaattatcaaattatgcatatttgtctcaagaaacctttttttcatttcatgacatg

SEQ ID NO: 32026 - DNA, 69 bp, unidentified
  source 1..69: mol_type = unassigned DNA; note = methanogen bacteria
atgtccggtattgtttcaagagcaacagaactagcatgtggagatccatttttatttttaaaattaact

SEQ ID NO: 32027 - DNA, 33 bp, unidentified
  source 1..33: mol_type = unassigned DNA; note = methanogen bacteria
aaaacactaaaatttgagtggataatgctgcca

SEQ ID NO: 32028 - DNA, 51 bp, unidentified
  source 1..51: mol_type = unassigned DNA; note = methanogen bacteria
atgccttcaaacagtcccaatgcagacgctttttcaacaattttgtcaacc

SEQ ID NO: 32029 - DNA, 36 bp, unidentified
  source 1..36: mol_type = unassigned DNA; note = methanogen bacteria
aacataccaattccatttggaacaagtggacacatg

SEQ ID NO: 32030 - DNA, 36 bp, unidentified
  source 1..36: mol_type = unassigned DNA; note = methanogen bacteria
atctatggaccggcacattacaattccacaatgcaa

SEQ ID NO: 32031 - DNA, 42 bp, unidentified
  source 1..42: mol_type = unassigned DNA; note = methanogen bacteria
acaataggcgctgaaaatataattagaatgatactgggatta

SEQ ID NO: 32032 - DNA, 78 bp, unidentified
  source 1..78: mol_type = unassigned DNA; note = methanogen bacteria
gattatatcttcactccatatgaactggccgatttggcttatctttctcaggaaacacagttttcatttatggatatg

SEQ ID NO: 32033 - DNA, 69 bp, unidentified
  source 1..69: mol_type = unassigned DNA; note = methanogen bacteria
atgtccggtattgtttcaagagcaactgaaatggcatgcggtgatccatttttatttttaaaattgacc

SEQ ID NO: 32034 - DNA, 33 bp, unidentified
  source 1..33: mol_type = unassigned DNA; note = methanogen bacteria
cgaactctggaaataagtttcatagctttacca

SEQ ID NO: 32035 - DNA, 54 bp, unidentified
  source 1..54: mol_type = unassigned DNA; note = methanogen bacteria
atattcccttcaagcagtcccaatgctcctgcatttgcagcgcttctctcaaca

SEQ ID NO: 32036 - DNA, 66 bp, unidentified
  source 1..66: mol_type = unassigned DNA; note = methanogen bacteria
atggtaacaacaattcccggaagcgaagtcttaacttccggtttgaatatgattgctcaaagtttg

SEQ ID NO: 32037 - DNA, 51 bp, unidentified
  source 1..51: mol_type = unassigned DNA; note = methanogen bacteria
cctggtcttgctgcattgggtgcaggtgatgtaaatacactggcaaatgcg

SEQ ID NO: 32038 - DNA, 33 bp, unidentified
  source 1..33: mol_type = unassigned DNA; note = methanogen bacteria
aaaacattggaatttgaatttatagctctgcca

SEQ ID NO: 32039 - DNA, 54 bp, unidentified
  source 1..54: mol_type = unassigned DNA; note = methanogen bacteria
gcatttccttcaagcagtccgaacgcacctgcatttgcaatgcttctttcaaca

SEQ ID NO: 32040 - DNA, 33 bp, unidentified
  source 1..33: mol_type = unassigned DNA; note = methanogen bacteria
cggacactggaaataggtttcatagctttgccc

SEQ ID NO: 32041 - DNA, 54 bp, unidentified
  source 1..54: mol_type = unassigned DNA; note = methanogen bacteria
ctgtttccttcaagcagtcccaatgcccctgcatttgcagcgcttctctcaaca

SEQ ID NO: 32042 - DNA, 33 bp, unidentified
  source 1..33: mol_type = unassigned DNA; note = methanogen bacteria
agaacattggaaatagaatttatagtgttgccg

SEQ ID NO: 32043 - DNA, 51 bp, unidentified
  source 1..51: mol_type = unassigned DNA; note = methanogen bacteria
ttcccttcaaacagtcctaatgcagatgcatttgcaatgcttctgtcaact

SEQ ID NO: 32044 - DNA, 36 bp, unidentified
  source 1..36: mol_type = unassigned DNA; note = methanogen bacteria
aacatgccgattccattcggtaccagcggacacatg

SEQ ID NO: 32045 - DNA, 69 bp, unidentified
  source 1..69: mol_type = unassigned DNA; note = methanogen bacteria
aaagcgaatttaggaacttcccctatcatttgtcttccatatgtttcaagtctgatattgaaaatgagt

SEQ ID NO: 32046 - DNA, 180 bp, unidentified
  source 1..180: mol_type = unassigned DNA; note = methanogen bacteria
gaaaatatcatacatcaaagaggaataggaactcattataaagatgtatattgttatttaattgaatcattaagattagcaggtatacaaattggaggatataagtttgtaaactattttcctccgttcataccctttttaacatcccttttgtttagaataggttttgtatcagaatat

SEQ ID NO: 32047 - DNA, 33 bp, unidentified
  source 1..33: mol_type = unassigned DNA; note = methanogen bacteria
aaaacattgcaaatagaatttatagtattgcct

SEQ ID NO: 32048 - DNA, 54 bp, unidentified
  source 1..54: mol_type = unassigned DNA; note = methanogen bacteria
gctttaccttcaaacagcccaaatgcagatgcctttgcaacaattttaggaacc

SEQ ID NO: 32049 - DNA, 111 bp, unidentified
  source 1..111: mol_type = unassigned DNA; note = methanogen bacteria
acttatcagaatatgggcagtaattatgggatgatttctcaaaacctatatcatttgtcccaaacaggccatccatctcctattcaaggagttgatggagttgaaatcttt

SEQ ID NO: 32050 - DNA, 48 bp, unidentified
  source 1..48: mol_type = unassigned DNA; note = methanogen bacteria
ataggtgctccatttggtactgatgtattgtttgcatctgtttcaatt

SEQ ID NO: 32051 - DNA, 30 bp, unidentified
  source 1..30: mol_type = unassigned DNA; note = methanogen bacteria
gtacctattgtaaattgggtatatggattt

SEQ ID NO: 32052 - DNA, 69 bp, unidentified
  source 1..69: mol_type = unassigned DNA; note = methanogen bacteria
aaagcaaatttaggaacttcccctattatttgtcttccatatgtttcaagtctgatattgaaaatgagt

SEQ ID NO: 32053 - DNA, 66 bp, unidentified
  source 1..66: mol_type = unassigned DNA; note = methanogen bacteria
atggtaacaacagttcccggtagtgatatattaacatctggtttgaatatgatttcacagagttta

SEQ ID NO: 32054 - DNA, 51 bp, unidentified
  source 1..51: mol_type = unassigned DNA; note = methanogen bacteria
ccgggtcttgcagctttaggtgctggagatgttaacacgttagcaagtgct

SEQ ID NO: 32055 - DNA, 66 bp, unidentified
  source 1..66: mol_type = unassigned DNA; note = methanogen bacteria
atggttttaaatattcccggcggagagtttttaacaggttcccttgatgtaatctcacaaagctta

SEQ ID NO: 32056 - DNA, 51 bp, unidentified
  source 1..51: mol_type = unassigned DNA; note = methanogen bacteria
ccgggtcttgccgcattgggcgcaggagacattaacacgcttgcatcatcc

SEQ ID NO: 32057 - DNA, 78 bp, unidentified
  source 1..78: mol_type = unassigned DNA; note = methanogen bacteria
gcatctaaagttcagatggctttcgcaaatattccttttggaaacggcactgatattagtatcagtgcacttgaactc

SEQ ID NO: 32058 - DNA, 60 bp, unidentified
  source 1..60: mol_type = unassigned DNA; note = methanogen bacteria
gtcatcggtcagttaatcagtacagtcacacataacgatggtatgttctattttgtctat

SEQ ID NO: 32059 - DNA, 30 bp, unidentified
  source 1..30: mol_type = unassigned DNA; note = methanogen bacteria
gttccagtggcggaattccttactggagtt

SEQ ID NO: 32060 - DNA, 63 bp, unidentified
  source 1..63: mol_type = unassigned DNA; note = methanogen bacteria
atggctttaaatattccaggcggagaatttttaacaggttcccttgacgtgatatcacagagc

SEQ ID NO: 32061 - DNA, 51 bp, unidentified
  source 1..51: mol_type = unassigned DNA; note = methanogen bacteria
cctggacttgcggcattgggagcaggagacatcaacaccctggcatcatcc

SEQ ID NO: 32062 - DNA, 66 bp, unidentified
  source 1..66: mol_type = unassigned DNA; note = methanogen bacteria
atggtagcaacaattcccggcagcgaaatattgacttcaacattaaacatgatttctcaaagtctg

SEQ ID NO: 32063 - DNA, 51 bp, unidentified
  source 1..51: mol_type = unassigned DNA; note = methanogen bacteria
ccaggtcttgccgcattgggtgctggtgatgtaaatactcttgccaacgcg

SEQ ID NO: 32064 - DNA, 33 bp, unidentified
  source 1..33: mol_type = unassigned DNA; note = methanogen bacteria
taccctttttcattgcactcacaaaccattcat

SEQ ID NO: 32065 - DNA, 45 bp, unidentified
  source 1..45: mol_type = unassigned DNA; note = methanogen bacteria
acaataggtgcagaaaatatggttctaatgattatgggcttaact

SEQ ID NO: 32066 - DNA, 36 bp, unidentified
  source 1..36: mol_type = unassigned DNA; note = methanogen bacteria
atttatatacctgcacataataatgcaacaatgcta

SEQ ID NO: 32067 - DNA, 45 bp, unidentified
  source 1..45: mol_type = unassigned DNA; note = methanogen bacteria
atgacaatgggtgctcaaaacataattagaatgatattaggatta

SEQ ID NO: 32068 - DNA, 63 bp, unidentified
  source 1..63: mol_type = unassigned DNA; note = methanogen bacteria
cataaatcaattatgaatttggattatggaatgttttcttcatttttaattttaactccaaca

SEQ ID NO: 32069 - DNA, 75 bp, unidentified
  source 1..75: mol_type = unassigned DNA; note = methanogen bacteria
ttaatattcacgccacaagaattaacggattatgaatatttggctcaagaaacgtttttctcttttgaggacatg

SEQ ID NO: 32070 - DNA, 66 bp, unidentified
  source 1..66: mol_type = unassigned DNA; note = methanogen bacteria
tcaggaattacttcaagggcaactgagcttgcatgtggggatccgtttttgtttttaaagttgact

SEQ ID NO: 32071 - DNA, 33 bp, unidentified
  source 1..33: mol_type = unassigned DNA; note = methanogen bacteria
cgaactatggaaataagtttcatagcgttacca

SEQ ID NO: 32072 - DNA, 54 bp, unidentified
  source 1..54: mol_type = unassigned DNA; note = methanogen bacteria
atatttccttcaagcggttccaatgctcctgcatttgcagcgcttctctcaaca

SEQ ID NO: 32073 - DNA, 63 bp, unidentified
  source 1..63: mol_type = unassigned DNA; note = methanogen bacteria
atggccagtactatacctggaggagatattctaacaggaatattgaatgttgtcgcacaaagt

SEQ ID NO: 32074 - DNA, 51 bp, unidentified
  source 1..51: mol_type = unassigned DNA; note = methanogen bacteria
ccaggactagcagctctaggtgctggagatatgatgacattaacaactaac

SEQ ID NO: 32075 - DNA, 60 bp, unidentified
  source 1..60: mol_type = unassigned DNA; note = methanogen bacteria
atgagtgctatccctggtggagaatttttaacaggttctttagatgttatttcacaaagt

SEQ ID NO: 32076 - DNA, 51 bp, unidentified
  source 1..51: mol_type = unassigned DNA; note = methanogen bacteria
ccgggtcttgcggcattgggtgctggagatatcaatactcttgcaagttca

SEQ ID NO: 32077 - DNA, 63 bp, unidentified
  source 1..63: mol_type = unassigned DNA; note = methanogen bacteria
atggttacaacgattccaggaagtgaagttttaacttctgctttaaatatgatttctcaaagt

SEQ ID NO: 32078 - DNA, 51 bp, unidentified
  source 1..51: mol_type = unassigned DNA; note = methanogen bacteria
cctggtcttgcagctttaggtgccggagatgttaatacattagctaatgca

SEQ ID NO: 32079 - DNA, 66 bp, unidentified
  source 1..66: mol_type = unassigned DNA; note = methanogen bacteria
atggctttaaatattcctggtggggaattcttaactggttctcttgacgttatctcacagagttta

SEQ ID NO: 32080 - DNA, 51 bp, unidentified
  source 1..51: mol_type = unassigned DNA; note = methanogen bacteria
cctggtcttgcagcattaggtgcaggtgatattaatactcttgcaagttct

SEQ ID NO: 32081 - DNA, 60 bp, unidentified
  source 1..60: mol_type = unassigned DNA; note = methanogen bacteria
atgatatttcaaggaacagaatcacttacaactttgattcatataatttctgaaagtttg

SEQ ID NO: 32082 - DNA, 51 bp, unidentified
  source 1..51: mol_type = unassigned DNA; note = methanogen bacteria
ccaggtctttcagcacttggaaccggtgatatcagcactttagcacaggct

SEQ ID NO: 32083 - DNA, 66 bp, unidentified
  source 1..66: mol_type = unassigned DNA; note = methanogen bacteria
atggttttaaatattccaggtggagaatttttaacaggctctcttgatgtgatttcacaaagtctg

SEQ ID NO: 32084 - DNA, 51 bp, unidentified
  source 1..51: mol_type = unassigned DNA; note = methanogen bacteria
ccaggtcttgctgcattgggtgcaggagacatcaacacattggcaacttca

SEQ ID NO: 32085 - DNA, 30 bp, unidentified
  source 1..30: mol_type = unassigned DNA; note = methanogen bacteria
tttcctttaaaaacatactctgatgttttt

SEQ ID NO: 32086 - DNA, 42 bp, unidentified
  source 1..42: mol_type = unassigned DNA; note = methanogen bacteria
attggtgcggaaaagatggttcaattaatcattacgggcatt

SEQ ID NO: 32087 - DNA, 69 bp, unidentified
  source 1..69: mol_type = unassigned DNA; note = methanogen bacteria
atgcccgccgacgccttcgccaacaacgtggtccccaacctcgtcgaccccaagctcgccatgaccgac

SEQ ID NO: 32088 - DNA, 33 bp, unidentified
  source 1..33: mol_type = unassigned DNA; note = methanogen bacteria
gtgttctcggacatgtactatgcgaacgtcccc

SEQ ID NO: 32089 - DNA, 93 bp, unidentified
  source 1..93: mol_type = unassigned DNA; note = methanogen bacteria
ttcgacctgtggtacaccggacagcccttcttcaatcagtacactggcgagtatgtggagcaccttccgccggagatcgtcctcagcaaccgc

SEQ ID NO: 32090 - DNA, 66 bp, unidentified
  source 1..66: mol_type = unassigned DNA; note = methanogen bacteria
atggttacaacaattcctggaagcgaagtattaacatcaacactgaacatgatttcacagagtctt

SEQ ID NO: 32091 - DNA, 51 bp, unidentified
  source 1..51: mol_type = unassigned DNA; note = methanogen bacteria
ccgggacttgctgccttgggtgcgggagatgttaacacgttggccaatgca

SEQ ID NO: 32092 - DNA, 66 bp, unidentified
  source 1..66: mol_type = unassigned DNA; note = methanogen bacteria
atggctttaagtattccgggtggagaatttctaacaggatcccttgatgtaatctcacagagttta

SEQ ID NO: 32093 - DNA, 51 bp, unidentified
  source 1..51: mol_type = unassigned DNA; note = methanogen bacteria
cctggtctggctgctcttggtgcaggcgacatcaatacattggcatcttcc

SEQ ID NO: 32094 - DNA, 33 bp, unidentified
  source 1..33: mol_type = unassigned DNA; note = methanogen bacteria
atgttctcggatatgtattatgcgaacgtcccc

SEQ ID NO: 32095 - DNA, 90 bp, unidentified
  source 1..90: mol_type = unassigned DNA; note = methanogen bacteria
ttcgacctatggtacaccggacagcccttcttcaatcagtacactggcgagtatgtggagcaccttccgccggagatcgtcctcagcaac

SEQ ID NO: 32096 - DNA, 39 bp, unidentified
  source 1..39: mol_type = unassigned DNA; note = methanogen bacteria
gtttatccgtctgcacttacttccaattccacttcatta

SEQ ID NO: 32097 - DNA, 42 bp, unidentified
  source 1..42: mol_type = unassigned DNA; note = methanogen bacteria
acaatgggtgttgaaaatatagtcagatcaattataggatta

SEQ ID NO: 32098 - DNA, 66 bp, unidentified
  source 1..66: mol_type = unassigned DNA; note = methanogen bacteria
atggtatcaacaattcccggaagtgaaatattaacttcaaccttgaatatgatttctcaaagcctg

SEQ ID NO: 32099 - DNA, 51 bp, unidentified
  source 1..51: mol_type = unassigned DNA; note = methanogen bacteria
ccggggcttgcggcattgggcgcaggagatgtcaataccttagccaatgca

SEQ ID NO: 32100 - DNA, 33 bp, unidentified
  source 1..33: mol_type = unassigned DNA; note = methanogen bacteria
tacggcccagcacattataatgctacaatgcaa

SEQ ID NO: 32101 - DNA, 45 bp, unidentified
  source 1..45: mol_type = unassigned DNA; note = methanogen bacteria
atgacaatgggtgctgaaaatataattagaatgattttaggatta

SEQ ID NO: 32102 - DNA, 87 bp, unidentified
  source 1..87: mol_type = unassigned DNA; note = methanogen bacteria
gattggatatacactcctgcagaattggttgattatgaatatttatcacaggaaacattttactcatttgaagacatgatgtatatt

SEQ ID NO: 32103 - DNA, 72 bp, unidentified
  source 1..72: mol_type = unassigned DNA; note = methanogen bacteria
atgtccggtatcacttctagagcgactgaacttgcatgtggagatccttttctttttttaaaattgacatgt

SEQ ID NO: 32104 - DNA, 81 bp, unidentified
  source 1..81: mol_type = unassigned DNA; note = methanogen bacteria
tccacaggactgcctctttttgaagtctacactcaaaacaccataagcgcccttggagttccaggatacatatccccaata

SEQ ID NO: 32105 - DNA, 60 bp, unidentified
  source 1..60: mol_type = unassigned DNA; note = methanogen bacteria
atgtcaacatttccaggtagtgaaattttaacaggaatattacacatagtttcagaaagt

SEQ ID NO: 32106 - DNA, 51 bp, unidentified
  source 1..51: mol_type = unassigned DNA; note = methanogen bacteria
cctgggttagcagcattaggatctggagacataacctcacttgcaagtgca

SEQ ID NO: 32107 - DNA, 36 bp, unidentified
  source 1..36: mol_type = unassigned DNA; note = methanogen bacteria
aatatgccaattccatttggaacaagtggacatatg

SEQ ID NO: 32108 - DNA, 66 bp, unidentified
  source 1..66: mol_type = unassigned DNA; note = methanogen bacteria
atgagtgttgctatacctggtggggaatatttaacaggcgctttggatgttatttcacaaagttta

SEQ ID NO: 32109 - DNA, 51 bp, unidentified
  source 1..51: mol_type = unassigned DNA; note = methanogen bacteria
ccggggcttgctgctttgggtactggagatgttaccacattagctgaatct

SEQ ID NO: 32110 - DNA, 33 bp, unidentified
  source 1..33: mol_type = unassigned DNA; note = methanogen bacteria
aaaactttgaaaattggattaataatgttgccg

SEQ ID NO: 32111 - DNA, 54 bp, unidentified
  source 1..54: mol_type = unassigned DNA; note = methanogen bacteria
atgcttccttccaatagtcctagtgcggatgcatttgccactattttaggaact

SEQ ID NO: 32112 - DNA, 36 bp, unidentified
  source 1..36: mol_type = unassigned DNA; note = methanogen bacteria
aacatgccaatcccatttggtacaagcggacacatg

SEQ ID NO: 32113 - DNA, 63 bp, unidentified
  source 1..63: mol_type = unassigned DNA; note = methanogen bacteria
atggtttcaaatattcctggcggagagtttttaacaggttctcttgatgtaatctcacaaagt

SEQ ID NO: 32114 - DNA, 51 bp, unidentified
  source 1..51: mol_type = unassigned DNA; note = methanogen bacteria
ccgggacttgcggctttgggtgccggagatatcaatactcttgcaagttct

SEQ ID NO: 32115 - DNA, 36 bp, unidentified
  source 1..36: mol_type = unassigned DNA; note = methanogen bacteria
aatataccaatcccatttggaacaagtggacatatg

SEQ ID NO: 32116 - DNA, 57 bp, unidentified
  source 1..57: mol_type = unassigned DNA; note = methanogen bacteria
atgatacttcaaggtacaggaattttaacttcatttatacatattatttcagaaagt

SEQ ID NO: 32117 - DNA, 51 bp, unidentified
  source 1..51: mol_type = unassigned DNA; note = methanogen bacteria
cctggactttctgctttaggaaccggtgatattaccactttggcccagtca

SEQ ID NO: 32118 - DNA, 60 bp, unidentified
  source 1..60: mol_type = unassigned DNA; note = methanogen bacteria
atgatacttcagggaaccgaaacgttaacctcattgattcatataatttccgaaagcctg

SEQ ID NO: 32119 - DNA, 51 bp, unidentified
  source 1..51: mol_type = unassigned DNA; note = methanogen bacteria
cctggtctggctgctcttggtaccggagacattgcaacacttgcacagtcc

SEQ ID NO: 32120 - DNA, 33 bp, unidentified
  source 1..33: mol_type = unassigned DNA; note = methanogen bacteria
tatcgatctgcatttacttcacagacttcatta

SEQ ID NO: 32121 - DNA, 45 bp, unidentified
  source 1..45: mol_type = unassigned DNA; note = methanogen bacteria
atgacaatgggctttgaaatcatggtaaggacagttttaggattt

SEQ ID NO: 32122 - DNA, 33 bp, unidentified
  source 1..33: mol_type = unassigned DNA; note = methanogen bacteria
tatcctttaaaaatccattcgaatatttttcat

SEQ ID NO: 32123 - DNA, 39 bp, unidentified
  source 1..39: mol_type = unassigned DNA; note = methanogen bacteria
attggtgctgaaaatgcggttcaattgattatgggtgta

SEQ ID NO: 32124 - DNA, 33 bp, unidentified
  source 1..33: mol_type = unassigned DNA; note = methanogen bacteria
tatcgttctgcatttacttcacaaacatctctt

SEQ ID NO: 32125 - DNA, 42 bp, unidentified
  source 1..42: mol_type = unassigned DNA; note = methanogen bacteria
acaatgggtgttgaaaacatggtgagaataataataggattt

SEQ ID NO: 32126 - DNA, 60 bp, unidentified
  source 1..60: mol_type = unassigned DNA; note = methanogen bacteria
atgataattcaaggaactgaaacgttaacttcacttattcatattctctccgaaagcctt

SEQ ID NO: 32127 - DNA, 51 bp, unidentified
  source 1..51: mol_type = unassigned DNA; note = methanogen bacteria
cctggacttgctgcacttggtagtggagatattgcaactcttgcagagtca

SEQ ID NO: 32128 - DNA, 42 bp, unidentified
  source 1..42: mol_type = unassigned DNA; note = methanogen bacteria
gttaaaattattaacataggatttttaggaatggaaactcct

SEQ ID NO: 32129 - DNA, 57 bp, unidentified
  source 1..57: mol_type = unassigned DNA; note = methanogen bacteria
ttgccttctccatcattctttactggagattcaagcttagcatttgtatttactcaa

SEQ ID NO: 32130 - DNA, 33 bp, unidentified
  source 1..33: mol_type = unassigned DNA; note = methanogen bacteria
tatcgttccgcattcaattcacagacttcatta

SEQ ID NO: 32131 - DNA, 45 bp, unidentified
  source 1..45: mol_type = unassigned DNA; note = methanogen bacteria
atgacaatgggctttgaaaccatagtgagaacaattttaggattt

SEQ ID NO: 32132 - DNA, 60 bp, unidentified
  source 1..60: mol_type = unassigned DNA; note = methanogen bacteria
atgataattcaagggactgaagcattgacttcatttattcatatactttccgaaagcctt

SEQ ID NO: 32133 - DNA, 51 bp, unidentified
  source 1..51: mol_type = unassigned DNA; note = methanogen bacteria
cctggacttgctgcattaggaacaggtgatattgcaactcttgcggaatct

SEQ ID NO: 32134 - DNA, 33 bp, unidentified
  source 1..33: mol_type = unassigned DNA; note = methanogen bacteria
tcacaaatcggcctggatttaaaggttgttccg

SEQ ID NO: 32135 - DNA, 87 bp, unidentified
  source 1..87: mol_type = unassigned DNA; note = methanogen bacteria
ggtttagtcgatttttcatctgtgcttgcagctgatgcagttgaaattcctaaattttacctgccattcattaattatgatttgaat

SEQ ID NO: 32136 - DNA, 36 bp, unidentified
  source 1..36: mol_type = unassigned DNA; note = methanogen bacteria
gtttatccatctgcattccattcagcaaattccgtg

SEQ ID NO: 32137 - DNA, 45 bp, unidentified
  source 1..45: mol_type = unassigned DNA; note = methanogen bacteria
atgacaatgggcgttgaaaacttagtgagattaataataggattt

SEQ ID NO: 32138 - DNA, 63 bp, unidentified
  source 1..63: mol_type = unassigned DNA; note = methanogen bacteria
atggctttaaatattccaggtggagaatttttaacaggctctctagatgttatctcacaaagt

SEQ ID NO: 32139 - DNA, 51 bp, unidentified
  source 1..51: mol_type = unassigned DNA; note = methanogen bacteria
ccgggtcttgcggcattaggtgcaggggacatcaatactcttgcaagttcc

SEQ ID NO: 32140 - DNA, 33 bp, unidentified
  source 1..33: mol_type = unassigned DNA; note = methanogen bacteria
tacccttccgcattcagctcacagacctcattg

SEQ ID NO: 32141 - DNA, 42 bp, unidentified
  source 1..42: mol_type = unassigned DNA; note = methanogen bacteria
acaattggtgtggaaaatattattagactaattataggaatt

SEQ ID NO: 32142 - DNA, 60 bp, unidentified
  source 1..60: mol_type = unassigned DNA; note = methanogen bacteria
atgatacttcagggaactgaaacattaacatcttttattcatattttatcggaaagcctt

SEQ ID NO: 32143 - DNA, 51 bp, unidentified
  source 1..51: mol_type = unassigned DNA; note = methanogen bacteria
ccgggtcttgcagcactcggaacaggggatattgcaacacttgcagaatca

SEQ ID NO: 32144 - DNA, 57 bp, unidentified
  source 1..57: mol_type = unassigned DNA; note = methanogen bacteria
atgacaattcctggtggtgatttcttaaccactggacttaacttaatttcacaaagt

SEQ ID NO: 32145 - DNA, 48 bp, unidentified
  source 1..48: mol_type = unassigned DNA; note = methanogen bacteria
ggtcttgcagcgcttggttctggtgatgtgaatactttatctgaatcc

SEQ ID NO: 32146 - DNA, 60 bp, unidentified
  source 1..60: mol_type = unassigned DNA; note = methanogen bacteria
atgataattcaaggaactgaaacgttaacttcattaattcacattttatccgaaagcctt

SEQ ID NO: 32147 - DNA, 51 bp, unidentified
  source 1..51: mol_type = unassigned DNA; note = methanogen bacteria
cctggacttgctgcattaggcagtggagatattgcaactcttgcagaatct

SEQ ID NO: 32148 - DNA, 60 bp, unidentified
  source 1..60: mol_type = unassigned DNA; note = methanogen bacteria
aactctactttaaatttggattattcgatgttcagtccatttttaattttaactcctaca

SEQ ID NO: 32149 - DNA, 69 bp, unidentified
  source 1..69: mol_type = unassigned DNA; note = methanogen bacteria
gccaatctggggacttctccattgatttgccttccttatgtttctagtttgatagtaaacttgagtgtt

SEQ ID NO: 32150 - DNA, 36 bp, unidentified
  source 1..36: mol_type = unassigned DNA; note = methanogen bacteria
gtctatccatcagcatttacatcagagacttcagta

SEQ ID NO: 32151 - DNA, 42 bp, unidentified
  source 1..42: mol_type = unassigned DNA; note = methanogen bacteria
acaataggctttggaaccatcgtaagaatgattttaggaata

SEQ ID NO: 32152 - DNA, 60 bp, unidentified
  source 1..60: mol_type = unassigned DNA; note = methanogen bacteria
atgataattcaaggaactgaaacgctgacttcgctgattcacatactttcggaaagcctt

SEQ ID NO: 32153 - DNA, 51 bp, unidentified
  source 1..51: mol_type = unassigned DNA; note = methanogen bacteria
ccgggcctggcggcacttggaacaggcgacattgcaacccttgcacaggcc

SEQ ID NO: 32154 - DNA, 66 bp, unidentified
  source 1..66: mol_type = unassigned DNA; note = methanogen bacteria
atggctttaaatattcctggtggagaatttttaactggttcacttgatgttatttcacagagtctg

SEQ ID NO: 32155 - DNA, 51 bp, unidentified
  source 1..51: mol_type = unassigned DNA; note = methanogen bacteria
ccgggtcttgcagcattaggtgcaggagacatcaacactcttgcaagctcc

SEQ ID NO: 32156 - DNA, 30 bp, unidentified
  source 1..30: mol_type = unassigned DNA; note = methanogen bacteria
tatccattaaacggtcattcatcctttttt

SEQ ID NO: 32157 - DNA, 39 bp, unidentified
  source 1..39: mol_type = unassigned DNA; note = methanogen bacteria
ataggcgctgaaaatatggtaaaattatttttagtattg

SEQ ID NO: 32158 - DNA, 33 bp, unidentified
  source 1..33: mol_type = unassigned DNA; note = methanogen bacteria
tacccgtccgcatttcactcacagacttcagtg

SEQ ID NO: 32159 - DNA, 45 bp, unidentified
  source 1..45: mol_type = unassigned DNA; note = methanogen bacteria
atgacaataggtgttgaaaatattattagattaattataggattc

SEQ ID NO: 32160 - DNA, 39 bp, unidentified
  source 1..39: mol_type = unassigned DNA; note = methanogen bacteria
aagattatcaatattaatttcttaggtatggaaactcct

SEQ ID NO: 32161 - DNA, 57 bp, unidentified
  source 1..57: mol_type = unassigned DNA; note = methanogen bacteria
ttgccatccccagatttctttactggtgatgcagcattatcctttgtatttacccaa

SEQ ID NO: 32162 - DNA, 270 bp, unidentified
  source 1..270: mol_type = unassigned DNA; note = methanogen bacteria
aattggacattggtgaaacatcagataatcgattgggacactaaagaagctgaacttgactctggtgctatagactgcatttggagtggatttacaataaatggaagagaagatgattacgcttggaccgatccatatttcaacaattcccaagtattcgttgttaaagctgattccaacatttcttcagttgaagacttgaaaggaaaagatatagatgtggaaatgggaagtagcgctattgcagctcttgaaaacaataaagactta

SEQ ID NO: 32163 - DNA, 174 bp, unidentified
  source 1..174: mol_type = unassigned DNA; note = methanogen bacteria
aatacaaaatataatgaggaagattatagaatcttagaaactcctttatcccttgaacagtatggtgttggatttgctaaggacaatactgaattgagagatcaagttcaagaaaccttaaatgaaatgtatgaagatggaactattgataagatagctcaaaaatacaaagat

SEQ ID NO: 32164 - DNA, 87 bp, unidentified
  source 1..87: mol_type = unassigned DNA; note = methanogen bacteria
ggtggtcatatggaaaatgttatagatgatataccagattccgctggtggcagtaaagatggaaatgtaactgcaacagaacttttt

SEQ ID NO: 32165 - DNA, 48 bp, unidentified
  source 1..48: mol_type = unassigned DNA; note = methanogen bacteria
actggggcattattaagtcatttcatgccaaaaggatggattcagtat

SEQ ID NO: 32166 - DNA, 30 bp, unidentified
  source 1..30: mol_type = unassigned DNA; note = methanogen bacteria
attccattatctaattttatattaggagtt

SEQ ID NO: 32167 - DNA, 33 bp, unidentified
  source 1..33: mol_type = unassigned DNA; note = methanogen bacteria
aaagctactttaggaacctctccaatttcatgt

SEQ ID NO: 32168 - DNA, 36 bp, unidentified
  source 1..36: mol_type = unassigned DNA; note = methanogen bacteria
gtatatccatctgcactttattcagaaggtacagca

SEQ ID NO: 32169 - DNA, 42 bp, unidentified
  source 1..42: mol_type = unassigned DNA; note = methanogen bacteria
acaataggcgttcaaaatattgttagattaattttaggattt

SEQ ID NO: 32170 - DNA, 54 bp, unidentified
  source 1..54: mol_type = unassigned DNA; note = methanogen bacteria
aactcaaccatgaatttggattacactatgttcaagtcttttttgattttaact

SEQ ID NO: 32171 - DNA, 60 bp, unidentified
  source 1..60: mol_type = unassigned DNA; note = methanogen bacteria
atgataattcaaggaactgaaacattaacctcattgattcatattatttctgaaagttta

SEQ ID NO: 32172 - DNA, 51 bp, unidentified
  source 1..51: mol_type = unassigned DNA; note = methanogen bacteria
cctggtttagcggcattgggtagtggtgatataatgactctcgcccaatca

SEQ ID NO: 32173 - DNA, 51 bp, unidentified
  source 1..51: mol_type = unassigned DNA; note = methanogen bacteria
atgatgaattataactatgctttcagccccatttatgaatttactgtcggc

SEQ ID NO: 32174 - DNA, 78 bp, unidentified
  source 1..78: mol_type = unassigned DNA; note = methanogen bacteria
aatattgtttccggaattcttttgggaaattgggatgctttcccgatatccggtgggctattactcttttgcgttgat

SEQ ID NO: 32175 - DNA, 78 bp, unidentified
  source 1..78: mol_type = unassigned DNA; note = methanogen bacteria
ggcactgattttggcattcctctcatgaatttattttttgctgattttattggatccgcaggcggattcaccgctttt

SEQ ID NO: 32176 - DNA, 33 bp, unidentified
  source 1..33: mol_type = unassigned DNA; note = methanogen bacteria
tatccttttaaaatatattctaatatttttaat

SEQ ID NO: 32177 - DNA, 39 bp, unidentified
  source 1..39: mol_type = unassigned DNA; note = methanogen bacteria
ataggtgctgaaaatatggtcagtttgcttatcggggcg

SEQ ID NO: 32178 - DNA, 63 bp, unidentified
  source 1..63: mol_type = unassigned DNA; note = methanogen bacteria
atggtggcaattcctggaagtgaatttttgactgcggctttaaatgtcgtatctcaaagttta

SEQ ID NO: 32179 - DNA, 51 bp, unidentified
  source 1..51: mol_type = unassigned DNA; note = methanogen bacteria
cctggtcttgcggcattgggaagtggtgatgttacaacattggcaaatgca

SEQ ID NO: 32180 - DNA, 33 bp, unidentified
  source 1..33: mol_type = unassigned DNA; note = methanogen bacteria
tacccatccgcattccactcacagacttcagtg

SEQ ID NO: 32181 - DNA, 45 bp, unidentified
  source 1..45: mol_type = unassigned DNA; note = methanogen bacteria
atgacaattggtgtggaaaatattattagactaattataggaatt

SEQ ID NO: 32182 - DNA, 33 bp, unidentified
  source 1..33: mol_type = unassigned DNA; note = methanogen bacteria
tatcctttaagattttactcaaatattattaat

SEQ ID NO: 32183 - DNA, 36 bp, unidentified
  source 1..36: mol_type = unassigned DNA; note = methanogen bacteria
ggcgctgaacacatgatccaaatactcatgggattg

SEQ ID NO: 32184 - DNA, 36 bp, unidentified
  source 1..36: mol_type = unassigned DNA; note = methanogen bacteria
atttacccatacgcattgtcttcagaaaccaatgtt

SEQ ID NO: 32185 - DNA, 42 bp, unidentified
  source 1..42: mol_type = unassigned DNA; note = methanogen bacteria
acagtcggtattgaaagtattatcagattatttttaggaatg

SEQ ID NO: 32186 - DNA, 42 bp, unidentified
  source 1..42: mol_type = unassigned DNA; note = methanogen bacteria
gtaaaaattatcaacattggatttctaggaatggaaactcca

SEQ ID NO: 32187 - DNA, 57 bp, unidentified
  source 1..57: mol_type = unassigned DNA; note = methanogen bacteria
ttgccttccccagcattctatactggagactcaagccttgcatttgtattcacacaa

SEQ ID NO: 32188 - DNA, 60 bp, unidentified
  source 1..60: mol_type = unassigned DNA; note = methanogen bacteria
atgattattcagggaactgagacattaacttcattaattcatataatatctgaaagtcta

SEQ ID NO: 32189 - DNA, 51 bp, unidentified
  source 1..51: mol_type = unassigned DNA; note = methanogen bacteria
cctgggctggctgcacttggaaccggtgacattgcaacacttgcgcaatcc

SEQ ID NO: 32190 - DNA, 60 bp, unidentified
  source 1..60: mol_type = unassigned DNA; note = methanogen bacteria
atgatacttcaaggtacaggaattttaacttcatttatacatattatttcagaaagtttg

SEQ ID NO: 32191 - DNA, 51 bp, unidentified
  source 1..51: mol_type = unassigned DNA; note = methanogen bacteria
ccgggactttctgctttaggtactggtgacataaccacattggctcaatca

SEQ ID NO: 32192 - DNA, 30 bp, unidentified
  source 1..30: mol_type = unassigned DNA; note = methanogen bacteria
aagtccactttaggaactccccctatatca

SEQ ID NO: 32193 - DNA, 87 bp, unidentified
  source 1..87: mol_type = unassigned DNA; note = methanogen bacteria
ggtggtcatatggaaaatgtaatagatgatacaccagattccgctggtggcagtaaagatggaaatgtaactgcaacagaacttttt

SEQ ID NO: 32194 - DNA, 48 bp, unidentified; identical to SEQ ID NO: 32165
  source 1..48: mol_type = unassigned DNA; note = methanogen bacteria

SEQ ID NO: 32195 - DNA, 30 bp, unidentified; identical to SEQ ID NO: 32166
  source 1..30: mol_type = unassigned DNA; note = methanogen bacteria

SEQ ID NO: 32196 - DNA, 39 bp, unidentified
  source 1..39: mol_type = unassigned DNA; note = methanogen bacteria
atatacccaaccgccttggcttcagaaaccaatattaca

SEQ ID NO: 32197 - DNA, 45 bp, unidentified
  source 1..45: mol_type = unassigned DNA; note = methanogen bacteria
atgacagtcggtgttgaaaatataatcagattaattttaggaatg

SEQ ID NO: 32198 - DNA, 33 bp, unidentified
  source 1..33: mol_type = unassigned DNA; note = methanogen bacteria
atttaccgacaatcatttttcaatgcgggactt

SEQ ID NO: 32199 - DNA, 42 bp, unidentified
  source 1..42: mol_type = unassigned DNA; note = methanogen bacteria
actgttggggtcgagaatataattcgaatgataataggattt

SEQ ID NO: 32200 - DNA, 60 bp, unidentified
  source 1..60: mol_type = unassigned DNA; note = methanogen bacteria
atgatacttggaggaactgaaacattaacttcattaattcatattctgtctgaatgtctt

SEQ ID NO: 32201 - DNA, 51 bp, unidentified
  source 1..51: mol_type = unassigned DNA; note = methanogen bacteria
cctggacttgcagcactgggaacaggtgatattgcaactcttgcagaatct

SEQ ID NO: 32202 - DNA, 39 bp, unidentified
  source 1..39: mol_type = unassigned DNA; note = methanogen bacteria
aaaattataaatatagaatttttaggtatggaaactcct

SEQ ID NO: 32203 - DNA, 57 bp, unidentified
  source 1..57: mol_type = unassigned DNA; note = methanogen bacteria
ttgccatctccatcattctatactggagattcaagcttagcatttgtatttactcaa

SEQ ID NO: 32204 - DNA, 33 bp, unidentified
  source 1..33: mol_type = unassigned DNA; note = methanogen bacteria
tatacatctgcattttcatcagaaacacttaga

SEQ ID NO: 32205 - DNA, 42 bp, unidentified
  source 1..42: mol_type = unassigned DNA; note = methanogen bacteria
accattggtgttgaaaacatggtcagaattattgtaggagtt

SEQ ID NO: 32206 - DNA, 63 bp, unidentified
  source 1..63: mol_type = unassigned DNA; note = methanogen bacteria
atgacagcagttccaggtagtgaaattataacctctgggttgaacatgatttcccagagctta

SEQ ID NO: 32207 - DNA, 51 bp, unidentified
  source 1..51: mol_type = unassigned DNA; note = methanogen bacteria
ccgggacttgctgcattgggtgcaggagatgttaatactcttgcaaatgcg

SEQ ID NO: 32208 - DNA, 36 bp, unidentified
  source 1..36: mol_type = unassigned DNA; note = methanogen bacteria
gtttatccttccgcattatattcagaaacctacgca

SEQ ID NO: 32209 - DNA, 42 bp, unidentified
  source 1..42: mol_type = unassigned DNA; note = methanogen bacteria
acaatgggtgttcaaaatatcgttagattaattataggaatg

SEQ ID NO: 32210 - DNA, 60 bp, unidentified
  source 1..60: mol_type = unassigned DNA; note = methanogen bacteria
atgattattcaaggaaccgaaacattgacctcattgattcacatcatctccgaaagcctt

SEQ ID NO: 32211 - DNA, 51 bp, unidentified
  source 1..51: mol_type = unassigned DNA; note = methanogen bacteria
cctggtcttgcagcacttggaacaggggacattgcaacccttgcacaatcc

SEQ ID NO: 32212 - DNA, 42 bp, unidentified
  source 1..42: mol_type = unassigned DNA; note = methanogen bacteria
gttaaaatcattaatattggatttttaggaatggaaactcct

SEQ ID NO: 32213 - DNA, 57 bp, unidentified
  source 1..57: mol_type = unassigned DNA; note = methanogen bacteria
ttgccttctccagcaacatttaccggagattcaagccttgcatttgtatttacacaa

SEQ ID NO: 32214 - DNA, 60 bp, unidentified
  source 1..60: mol_type = unassigned DNA; note = methanogen bacteria
gacatatttaatcaaattatcagaccaattacatatttatttttaatgggctcatcaaaa

SEQ ID NO: 32215 - DNA, 183 bp, unidentified
  source 1..183: mol_type = unassigned DNA; note = methanogen bacteria
ctgcaactaggaatcggactcaatactgttttctgcagcatgggtaaatccatgacttccacaagcattttacatactcacctgcttaagtccattttcggaggagttttagttaatttgctcggaccagtcattggaaacggaatcaatactggagtaggtctatatcattatgttcctact

SEQ ID NO: 32216 - DNA, 36 bp, unidentified
  source 1..36: mol_type = unassigned DNA; note = methanogen bacteria
ggaatgtttgccgagttatggaaaatacaagcctca

SEQ ID NO: 32217 - DNA, 66 bp, unidentified
  source 1..66: mol_type = unassigned DNA; note = methanogen bacteria
atggctttaaatattccaggcggagagtttttaacaggttctcttgatgtaatttcacaaagtttg

SEQ ID NO: 32218 - DNA, 51 bp, unidentified
  source 1..51: mol_type = unassigned DNA; note = methanogen bacteria
ccgggacttgccgcattgggtgctggtgatatcaatacgctggccagttcc

SEQ ID NO: 32219 - DNA, 57 bp, unidentified
  source 1..57: mol_type = unassigned DNA; note = methanogen bacteria
atgtttaaatttaatgatattatcttttcaggaactggtaatgtaaattcattaaat

SEQ ID NO: 32220 - DNA, 48 bp, unidentified
  source 1..48: mol_type = unassigned DNA; note = methanogen bacteria
atacctattaaagacccaacatcagaattaatagctagaacatctcca

SEQ ID NO: 32221 - DNA, 57 bp, unidentified
  source 1..57: mol_type = unassigned DNA; note = methanogen bacteria
atgatacttcaaggtacatcaattttaacatcatttattcatattgtttcagagagt

SEQ ID NO: 32222 - DNA, 51 bp, unidentified
  source 1..51: mol_type = unassigned DNA; note = methanogen bacteria
cctggactttctgctttaggtagtggagatattactactttagctgaatct

SEQ ID NO: 32223 - DNA, 33 bp, unidentified
  source 1..33: mol_type = unassigned DNA; note = methanogen bacteria
tatccgtttaatgtccattcagatattttccat

SEQ ID NO: 32224 - DNA, 42 bp, unidentified
  source 1..42: mol_type = unassigned DNA; note = methanogen bacteria
acaattggtcctgaaaagatggtcctgttatttatgggggga

SEQ ID NO: 32225 - DNA, 33 bp, unidentified
  source 1..33: mol_type = unassigned DNA; note = methanogen bacteria
taccggtccgcatttatctcacaaacttcagca

SEQ ID NO: 32226 - DNA, 42 bp, unidentified
  source 1..42: mol_type = unassigned DNA; note = methanogen bacteria
acaataggctttgaaagtatcgtaagaatgattataggaatt

SEQ ID NO: 32227 - DNA, 33 bp, unidentified
  source 1..33: mol_type = unassigned DNA; note = methanogen bacteria
taccctaatgcattatattcacagacttcaata

SEQ ID NO: 32228 - DNA, 45 bp, unidentified
  source 1..45: mol_type = unassigned DNA; note = methanogen bacteria
atgacaattggtgttgaaaatatcattagattaattataggatac

SEQ ID NO: 32229 - DNA, 60 bp, unidentified
  source 1..60: mol_type = unassigned DNA; note = methanogen bacteria
atgataattcaaggaactggaacattgacttctttcattcatattctttcggaaagtctt

SEQ ID NO: 32230 - DNA, 51 bp, unidentified
  source 1..51: mol_type = unassigned DNA; note = methanogen bacteria
ccaggtcttgcagcacttggaacaggagatattgctacacttgcagaatct

SEQ ID NO: 32231 - DNA, 33 bp, unidentified
  source 1..33: mol_type = unassigned DNA; note = methanogen bacteria
aaaacattcgatttcttctcatttacattgccg

SEQ ID NO: 32232 - DNA, 57 bp, unidentified
  source 1..57: mol_type = unassigned DNA; note = methanogen bacteria
ttgcctgcaccggcattttttgaaaactctgaagctttcagcattgttctgggaagt

SEQ ID NO: 32233 - DNA, 69 bp, unidentified
  source 1..69: mol_type = unassigned DNA; note = methanogen bacteria
aaagctaatttaggaacttcccctttaatttgtcttccttacgtttcaagtgaaatagtaaaattaagt

SEQ ID NO: 32234 - DNA, 33 bp, unidentified
  source 1..33: mol_type = unassigned DNA; note = methanogen bacteria
aaaacattcgatttcttttcattcacgttgccg

SEQ ID NO: 32235 - DNA, 57 bp, unidentified
  source 1..57: mol_type = unassigned DNA; note = methanogen bacteria
ttgccagcaccggtattttttgaaaactccgaggctttcagcattgttcttggaagt

SEQ ID NO: 32236 - DNA, 33 bp, unidentified
  source 1..33: mol_type = unassigned DNA; note = methanogen bacteria
cgaacactggaaataagtttcatagctttgcca

SEQ ID NO: 32237 - DNA, 54 bp, unidentified
  source 1..54: mol_type = unassigned DNA; note = methanogen bacteria
atatttccttcaaccagtcccaatgcccctgcatttgcagcgcttctctcaaca

SEQ ID NO: 32238 - DNA, 54 bp, unidentified
  source 1..54: mol_type = unassigned DNA; note = methanogen bacteria
actacagaaatgcatcacaatacgctgttaaagttttatgtgatgacggtaaag

SEQ ID NO: 32239 - DNA, 33 bp, unidentified
  source 1..33: mol_type = unassigned DNA; note = methanogen bacteria
cgaactttggaaataagtttcatagcattgcca

SEQ ID NO: 32240 - DNA, 54 bp, unidentified
  source 1..54: mol_type = unassigned DNA; note = methanogen bacteria
atgtttccttcaagcagtcccaatgctcctgcatttgcagcgcttctctcaaca

SEQ ID NO: 32241 - DNA, 33 bp, unidentified
  source 1..33: mol_type = unassigned DNA; note = methanogen bacteria
aaaacatttgattttttctcgtttaccttgcct

SEQ ID NO: 32242 - DNA, 60 bp, unidentified
  source 1..60: mol_type = unassigned DNA; note = methanogen bacteria
atgcttcctgctccagtattttttgaaaattcggatgcatacagtattgttcttggatcc

SEQ ID NO: 32243 - DNA, 63 bp, unidentified
  source 1..63: mol_type = unassigned DNA; note = methanogen bacteria
agattattctttattcagttcaattctcctctttttggagatttcagctctttaagcatagaa

SEQ ID NO: 32244 - DNA, 33 bp, unidentified
  source 1..33: mol_type = unassigned DNA; note = methanogen bacteria
aaaacatttgtccttttctcgtttactctgcct

SEQ ID NO: 32245 - DNA, 60 bp, unidentified
  source 1..60: mol_type = unassigned DNA; note = methanogen bacteria
tggcttccggcaccatcattttttgaaaatgcggccgcttttgaaatagtcttgggcagc

SEQ ID NO: 32246 - DNA, 60 bp, unidentified
  source 1..60: mol_type = unassigned DNA; note = methanogen bacteria
aattccacgttgaatcttaactatgctatgttcagttcattcttaattctaactcctaca

SEQ ID NO: 32247 - DNA, 96 bp, unidentified
  source 1..96: mol_type = unassigned DNA; note = methanogen bacteria
atatcctcccctttcaattttccgagttttgaactggaggagatgctgttggacctgcccaataccctgaatatgctaatttcacacaatcatgta

SEQ ID NO: 32248 - DNA, 33 bp, unidentified
  source 1..33: mol_type = unassigned DNA; note = methanogen bacteria
cgaacaatggaaataagtttcatagctttgccc

SEQ ID NO: 32249 - DNA, 54 bp, unidentified
  source 1..54: mol_type = unassigned DNA; note = methanogen bacteria
atttttccttcaagcagtcccaatgctccggcatttgcagcccttctctcaaca

SEQ ID NO: 32250 - DNA, 39 bp, unidentified
  source 1..39: mol_type = unassigned DNA; note = methanogen bacteria
aaggtggttaatttgaatttttatggaatggaagttact

SEQ ID NO: 32251 - DNA, 57 bp, unidentified
  source 1..57: mol_type = unassigned DNA; note = methanogen bacteria
ctgccttcaccggtgtggtatactggagattcaagcctggcattcgtattcacccag

SEQ ID NO: 32252 - DNA, 57 bp, unidentified
  source 1..57: mol_type = unassigned DNA; note = methanogen bacteria
cagttaataggagtagtttctgctgactcccaaccgatgcaggttacagtggagtca

SEQ ID NO: 32253 - DNA, 36 bp, unidentified
  source 1..36: mol_type = unassigned DNA; note = methanogen bacteria
aaattgccttctgttactggaagctgttctcaccct

SEQ ID NO: 32254 - DNA, 30 bp, unidentified
  source 1..30: mol_type = unassigned DNA; note = methanogen bacteria
gctttccctgctccaagttttggatcagca

SEQ ID NO: 32255 - DNA, 90 bp, unidentified
  source 1..90: mol_type = unassigned DNA; note = methanogen bacteria
gtgggccctgttggcgctaaattatctgcagctcagaacatgtcatcatcaactcccgctgcgatgcaagacgcaagtcctgttgacctt

SEQ ID NO: 32256 - DNA, 48 bp, unidentified
  source 1..48: mol_type = unassigned DNA; note = methanogen bacteria
attggacaattgttcagtcaggtgttaccaaatggaggtatgagattc

SEQ ID NO: 32257 - DNA, 33 bp, unidentified
  source 1..33: mol_type = unassigned DNA; note = methanogen bacteria
gtgcctttctcagagttgattttaggaacttgg

SEQ ID NO: 32258 - DNA, 36 bp, unidentified
  source 1..36: mol_type = unassigned DNA; note = methanogen bacteria
aacatgcccattccattcggtacaagtggacacatg

SEQ ID NO: 32259 - DNA, 45 bp, unidentified
  source 1..45: mol_type = unassigned DNA; note = methanogen bacteria
atggatttactcactttttattataattttcctaacatttctttt

SEQ ID NO: 32260 - DNA, 48 bp, unidentified
  source 1..48: mol_type = unassigned DNA; note = methanogen bacteria
ggggttgaaataatattcatgacattaagatatattggaattccaata

SEQ ID NO: 32261 - DNA, 33 bp, unidentified
  source 1..33: mol_type = unassigned DNA; note = methanogen bacteria
aacctaccagtaccattcggatctagtggacac

SEQ ID NO: 32262 - DNA, 36 bp, unidentified; identical to SEQ ID NO: 29297
  source 1..36: mol_type = unassigned DNA; note = methanogen bacteria

SEQ ID NO: 32263 - DNA, 33 bp, unidentified
  source 1..33: mol_type = unassigned DNA; note = methanogen bacteria
gaaagagttgacttggggtaccagttcattagg

SEQ ID NO: 32264 - DNA, 33 bp, unidentified
  source 1..33: mol_type = unassigned DNA; note = methanogen bacteria
cggacactggaaataagtttcatagctttgccc

SEQ ID NO: 32265 - DNA, 51 bp, unidentified
  source 1..51: mol_type = unassigned DNA; note = methanogen bacteria
tttccttcaagcagtcccaatgctcctgcatttgcagctcttctctcaaca

SEQ ID NO: 32266 - DNA, 129 bp, unidentified
  source 1..129: mol_type = unassigned DNA; note = methanogen bacteria
aatatttacggcaattttatgataattgctaatgaagttatgtcacaggcacaaaatgtttatatgggaaattccacctttatattgtctgaagctgcatctcaggcaattgccaatttgatgatttct

SEQ ID NO: 32267 - DNA, 96 bp, unidentified
  source 1..96: mol_type = unassigned DNA; note = methanogen bacteria
tctgctgatgccataagtgcaagtttatctggaatacagaacgcatcctcatcaactcctacattggataatactattagtgcgatggatatttta

SEQ ID NO: 32268 - DNA, 54 bp, unidentified
  source 1..54: mol_type = unassigned DNA; note = methanogen bacteria
ggaatgttcgggcaattgttctgtcaatatgtgcctaatggcggtcttaagtat

SEQ ID NO: 32269 - DNA, 30 bp, unidentified
  source 1..30: mol_type = unassigned DNA; note = methanogen bacteria
gtgccgttctctgagtttatagttggggct

SEQ ID NO: 32270 - DNA, 30 bp, unidentified
  source 1..30: mol_type = unassigned DNA; note = methanogen bacteria
tcagtaatggcaaatgttggtttggttgca

SEQ ID NO: 32271 - DNA, 36 bp, unidentified
  source 1..36: mol_type = unassigned DNA; note = methanogen bacteria
aatatgccaattcctttcggtactagtggacatatg

SEQ ID NO: 32272 - DNA, 75 bp, unidentified
  source 1..75: mol_type = unassigned DNA; note = methanogen bacteria
gccatgggaatgaacgactgtgctctcgacgatctcaccagcgtcgggtccaaccacctcgtccatgacgacgtc

SEQ ID NO: 32273 - DNA, 63 bp, unidentified
  source 1..63: mol_type = unassigned DNA; note = methanogen bacteria
tacaactccacaattaccctggactacacagcatttgatccgttcctgatattgactccgacc

SEQ ID NO: 32274 - DNA, 153 bp, unidentified
  source 1..153: mol_type = unassigned DNA; note = methanogen bacteria
gccgactgggcgtccgagaccgtcaccgtcagcagcagcctgctcgggagcacagcgaagaccggctcgggcaccggcctggatgtcgccgggaaggacttcttcaccgagatcgacagcggcgggaacatcgtcgccgtcgacaactggcac

SEQ ID NO: 32275 - DNA, 72 bp, unidentified
  source 1..72: mol_type = unassigned DNA; note = methanogen bacteria
tgggacaggttcgggacctcggagtacagcatcctcggggtgaagacagcctacgacgtctcccccgagttc

SEQ ID NO: 32276 - DNA, 30 bp, unidentified
  source 1..30: mol_type = unassigned DNA; note = methanogen bacteria
aatcctttcggtacacaggcacttgcaggt

SEQ ID NO: 32277 - DNA, 66 bp, unidentified
  source 1..66: mol_type = unassigned DNA; note = methanogen bacteria
actcagatttcctcattgtttctgggtaaagatggaactgccctggcatatcaggtatcaggtgat

SEQ ID NO: 32278 - DNA, 87 bp, unidentified
  source 1..87: mol_type = unassigned DNA; note = methanogen bacteria
ttacttgattcatatatgaatataatttacaaagagcttagtgaaaatatttctaatggcaatattgaattaacaacattatcgatt

SEQ ID NO: 32279 - DNA, 42 bp, unidentified
  source 1..42: mol_type = unassigned DNA; note = methanogen bacteria
tattttgctgcacaatctgcatcttcaggtaaattattagat

SEQ ID NO: 32280 - DNA, 36 bp, unidentified
  source 1..36: mol_type = unassigned DNA; note = methanogen bacteria
tcagtttacatggatatgatggttaatccatttctg

SEQ ID NO: 32281 - DNA, 36 bp, unidentified
  source 1..36: mol_type = unassigned DNA; note = methanogen bacteria
atgactatgggctttgaaaatattgtactaagatta

SEQ ID NO: 32282 - DNA, 30 bp, unidentified
  source 1..30: mol_type = unassigned DNA; note = methanogen bacteria
acaaggccaatgggttggtctctggattct

SEQ ID NO: 32283 - DNA, 36 bp, unidentified
  source 1..36: mol_type = unassigned DNA; note = methanogen bacteria
aggccattcataacctttgacaacggatggtatatg

SEQ ID NO: 32284 - DNA, 54 bp, unidentified
  source 1..54: mol_type = unassigned DNA; note = methanogen bacteria
atggtgggtagcaatattttaacttctactttggatttggtaagtcagagcctg

SEQ ID NO: 32285 - DNA, 51 bp, unidentified
  source 1..51: mol_type = unassigned DNA; note = methanogen bacteria
ccaggtcttgcagctttagggacaggagatattgtaacattatccaacgct

SEQ ID NO: 32286 - DNA, 33 bp, unidentified
  source 1..33: mol_type = unassigned DNA; note = methanogen bacteria
aagatgttttcctttttttcatttgtccttccc

SEQ ID NO: 32287 - DNA, 57 bp, unidentified
  source 1..57: mol_type = unassigned DNA; note = methanogen bacteria
ctgcctgcacctgaattctttacaaattcagaggcctatgccatagttttgggctca

SEQ ID NO: 32288 - DNA, 87 bp, unidentified
  source 1..87: mol_type = unassigned DNA; note = methanogen bacteria
ccttatctgtatagttatctgaatcctgttgttgaggatgtaacaaataagatccaaacgggtgttatccaattaacatttcaggat

SEQ ID NO: 32289 - DNA, 33 bp, unidentified
  source 1..33: mol_type = unassigned DNA; note = methanogen bacteria
tattatgccgccacatcccagagtctattgcat

SEQ ID NO: 32290 - DNA, 33 bp, unidentified
  source 1..33: mol_type = unassigned DNA; note = methanogen bacteria
aaaacttttgtttttttccaagttgtattgcct

SEQ ID NO: 32291 - DNA, 57 bp, unidentified
  source 1..57: mol_type = unassigned DNA; note = methanogen bacteria
cttccggcacctgcgttttttgaaaattcacaagctttcaacattgttttgggaagt

SEQ ID NO: 32292 - DNA, 33 bp, unidentified
  source 1..33: mol_type = unassigned DNA; note = methanogen bacteria
aaaacttttaaaatttctatatttatactcccg

SEQ ID NO: 32293 - DNA, 60 bp, unidentified
  source 1..60: mol_type = unassigned DNA; note = methanogen bacteria
ttaatgcctacaccaccattttttataaatgctgaagcatattctacagttttagggtct

SEQ ID NO: 32294 - DNA, 90 bp, unidentified
  source 1..90: mol_type = unassigned DNA; note = methanogen bacteria
tctgctgatgtggtgaattctgctttaaacagtactgtaccatcaaacggaacacagttgaattctgaaattaatgcattggatctgttc

SEQ ID NO: 32295 - DNA, 63 bp, unidentified
  source 1..63: mol_type = unassigned DNA; note = methanogen bacteria
ggggctgctggagcattattcaattcattaatgccacatggcggtcttagatatgtaatttat

SEQ ID NO: 32296 - DNA, 33 bp, unidentified
  source 1..33: mol_type = unassigned DNA; note = methanogen bacteria
gttcctttttcagatttcataatgaatcttctc

SEQ ID NO: 32297 - DNA, 33 bp, unidentified
  source 1..33: mol_type = unassigned DNA; note = methanogen bacteria
aaaacttttgactttttctctctgacgctgccc

SEQ ID NO: 32298 - DNA, 60 bp, unidentified
  source 1..60: mol_type = unassigned DNA; note = methanogen bacteria
atgcttcctgcacctgtattttttgaaaactccgaggctttcaatgcagttctgggaaat

SEQ ID NO: 32299 - DNA, 39 bp, unidentified
  source 1..39: mol_type = unassigned DNA; note = methanogen bacteria
cgtttcatttcaattatgggtacactgacagacaatgaa

SEQ ID NO: 32300 - DNA, 90 bp, unidentified
  source 1..90: mol_type = unassigned DNA; note = methanogen bacteria
gatgatattgcatcatatttaatgcctatacttaaacaggcaatgggtgttgaaggaggcgcatcatcaattaatgcatgggatataatg

SEQ ID NO: 32301 - DNA, 36 bp, unidentified
  source 1..36: mol_type = unassigned DNA; note = methanogen bacteria
ggatataccgttaaatcaattccaagcctagcgata

SEQ ID NO: 32302 - DNA, 42 bp, unidentified
  source 1..42: mol_type = unassigned DNA; note = methanogen bacteria
ggaaatattgtcagccagcaaatcagcggaaccaaattattt

SEQ ID NO: 32303 - DNA, 33 bp, unidentified
  source 1..33: mol_type = unassigned DNA; note = methanogen bacteria
aagacctttgcattcttctcgttttccctgccc

SEQ ID NO: 32304 - DNA, 57 bp, unidentified
  source 1..57: mol_type = unassigned DNA; note = methanogen bacteria
cttccctcccctgcattcttcaagaattccgaggcattcagcatagttctcggctcg

SEQ ID NO: 32305 - DNA, 54 bp, unidentified
  source 1..54: mol_type = unassigned DNA; note = methanogen bacteria
atggttggcactaacattttaacatctactttggatttggttagccagagtctt

SEQ ID NO: 32306 - DNA, 51 bp, unidentified
  source 1..51: mol_type = unassigned DNA; note = methanogen bacteria
ccgggtcttgctgcattgggttcaggggacatagtcacactatccaatgca

SEQ ID NO: 32307 - DNA, 96 bp, unidentified
  source 1..96: mol_type = unassigned DNA; note = methanogen bacteria
ggatcttcgaatagtctgtttgaaagtttttattttgtcattgtcacattgacaactgtgggatatggagatattgttcctaaaacattcaatgaa

SEQ ID NO: 32308 - DNA, 54 bp, unidentified
  source 1..54: mol_type = unassigned DNA; note = methanogen bacteria
atggctggtagcaacattctggcctcaacattgaatctggtgagccaaagcttg

SEQ ID NO: 32309 - DNA, 51 bp, unidentified
  source 1..51: mol_type = unassigned DNA; note = methanogen bacteria
ccgggtcttgcagaacttggaacaggagacatagtcacactgtccaaagct

SEQ ID NO: 32310 - DNA, 54 bp, unidentified; identical to SEQ ID NO: 32305
  source 1..54: mol_type = unassigned DNA; note = methanogen bacteria

SEQ ID NO: 32311 - DNA, 51 bp, unidentified
  source 1..51: mol_type = unassigned DNA; note = methanogen bacteria
cctggtcttgctgctttaggtagcggtgacattgtgactttgtccaatgct

SEQ ID NO: 32312 - DNA, 69 bp, unidentified
  source 1..69: mol_type = unassigned DNA; note = methanogen bacteria
aaggccaatctggggacttctcccttaatctgcataccttatgtaagcagcattataactaatctgagc

SEQ ID NO: 32313 - DNA, 36 bp, unidentified
  source 1..36: mol_type = unassigned DNA; note = methanogen bacteria
aacatgcctattccattcggtacaagtggacatatg

SEQ ID NO: 32314 - DNA, 48 bp, unidentified
  source 1..48: mol_type = unassigned DNA; note = methanogen bacteria
gcaacatattcaactccagattcaatatataaattggacagatattct

SEQ ID NO: 32315 - DNA, 30 bp, unidentified
  source 1..30: mol_type = unassigned DNA; note = methanogen bacteria
acaatgcttgggatatctacaaaatcatat

SEQ ID NO: 32316 - DNA, 36 bp, unidentified
  source 1..36: mol_type = unassigned DNA; note = methanogen bacteria
cacccatggctaacatctgccaacatggatataata

SEQ ID NO: 32317 - DNA, 36 bp, unidentified
  source 1..36: mol_type = unassigned DNA; note = methanogen bacteria
aacatgccaattccatttggtaccagtggacatatg

SEQ ID NO: 32318 - DNA, 33 bp, unidentified
  source 1..33: mol_type = unassigned DNA; note = methanogen bacteria
aaaacatttgactttttttcgttcacattgccc

SEQ ID NO: 32319 - DNA, 60 bp, unidentified
  source 1..60: mol_type = unassigned DNA; note = methanogen bacteria
atcatgcctgctccggcatttttcacaaactccgaagctttcagcatagttttgggatcc

SEQ ID NO: 32320 - DNA, 87 bp, unidentified
  source 1..87: mol_type = unassigned DNA; note = methanogen bacteria
gcagatgaaattgcatcagttctaatgccaatgcttaaagatgccctgcttaaaggaaacgtgacttccgtcgatgcatttaacata

SEQ ID NO: 32321 - DNA, 39 bp, unidentified
  source 1..39: mol_type = unassigned DNA; note = methanogen bacteria
ggatataccatacactcaacatatgaccttgtaatgtat

SEQ ID NO: 32322 - DNA, 45 bp, unidentified
  source 1..45: mol_type = unassigned DNA; note = methanogen bacteria
ggaaacattatctcacagcagatgggtggggctaatttgttaaaa

SEQ ID NO: 32323 - DNA, 33 bp, unidentified
  source 1..33: mol_type = unassigned DNA; note = methanogen bacteria
aagacattctcctttttctcttttgtactgccc

SEQ ID NO: 32324 - DNA, 57 bp, unidentified
  source 1..57: mol_type = unassigned DNA; note = methanogen bacteria
ctgcctgcaccggaattcttcaagaattcagaggcgttcagcacagtattgggttca

SEQ ID NO: 32325 - DNA, 36 bp, unidentified
  source 1..36: mol_type = unassigned DNA; note = methanogen bacteria
gtggtaacattgcacttaccggatggaattataagt

SEQ ID NO: 32326 - DNA, 33 bp, unidentified
  source 1..33: mol_type = unassigned DNA; note = methanogen bacteria
tcagtaccctcaccattgggcgttccgatacac

SEQ ID NO: 32327 - DNA, 42 bp, unidentified
  source 1..42: mol_type = unassigned DNA; note = methanogen bacteria
gccggagcgatatttggtccatatacagttggaacttcaatt

SEQ ID NO: 32328 - DNA, 30 bp, unidentified
  source 1..30: mol_type = unassigned DNA; note = methanogen bacteria
tataatggtggacttcttaatttattaatg

SEQ ID NO: 32329 - DNA, 36 bp, unidentified; identical to SEQ ID NO: 32317
  source 1..36: mol_type = unassigned DNA; note = methanogen bacteria

SEQ ID NO: 32330 - DNA, 87 bp, unidentified
  source 1..87: mol_type = unassigned DNA; note = methanogen bacteria
ccgtctctgcatagttatttaaatccggttgtcgatgacttaacgaataaagttgaaacaggtgtcgttcagttaacttttaaggat

SEQ ID NO: 32331 - DNA, 36 bp, unidentified
  source 1..36: mol_type = unassigned DNA; note = methanogen bacteria
tattacactgcaatatctcccaatgttctccaatca

SEQ ID NO: 32332 - DNA, 81 bp, unidentified
  source 1..81: mol_type = unassigned DNA; note = methanogen bacteria
ccttatctgtatagttatttgaatcctgttgttgaagatttaacaaataaggttcagacaggcgtaattcaattaacattt

SEQ ID NO: 32333 - DNA, 33 bp, unidentified
  source 1..33: mol_type = unassigned DNA; note = methanogen bacteria
tattatgctgccacatccccaagcctattgcat

SEQ ID NO: 32334 - DNA, 57 bp, unidentified
  source 1..57: mol_type = unassigned DNA; note = methanogen bacteria
gaaatgttccagctaatgcccaccagccctcctgtgtcttcagatatcacctttgta

SEQ ID NO: 32335 - DNA, 258 bp, unidentified
  source 1..258: mol_type = unassigned DNA; note = methanogen bacteria
ggagtatttaattttgattttggagcttttactaatactaatgcttcagctattgtcacggatactgcatttccaaatgtggctgatgttcatgtgaatactactacatctaatgtttcttcacatactactaattatacgagcaatgtacaacagacacaatcttcatataattatgttactcctactagttcggattcagaaaacactccagtcacgcctgaaggtggtggaggaggttctggtaacaatactgga

SEQ ID NO: 32336 - DNA, 33 bp, unidentified
  source 1..33: mol_type = unassigned DNA; note = methanogen bacteria
aaaacctttgaatttttttattttactcttcca

SEQ ID NO: 32337 - DNA, 57 bp, unidentified
  source 1..57: mol_type = unassigned DNA; note = methanogen bacteria
ttgcccgccccatcattttttgaatcaagcgatgcattcggcattgttttgggttcg

SEQ ID NO: 32338 - DNA, 87 bp, unidentified
  source 1..87: mol_type = unassigned DNA; note = methanogen bacteria
gacgatattgcaccagtgttaatgcccgcacttaaagaattggtaaaagatgcaaacatatcctcaattaatgcttttagtataatg

SEQ ID NO: 32339 - DNA, 36 bp, unidentified
  source 1..36: mol_type = unassigned DNA; note = methanogen bacteria
ggatatactattaaatcagcatatggtttgataatc

SEQ ID NO: 32340 - DNA, 42 bp, unidentified
  source 1..42: mol_type = unassigned DNA; note = methanogen bacteria
ggaaacataatcaatcagcaaataaatggaactagactattt

SEQ ID NO: 32341 - DNA, 33 bp, unidentified
  source 1..33: mol_type = unassigned DNA; note = methanogen bacteria
aaaacctttgaatttttttcttttactcttccc

SEQ ID NO: 32342 - DNA, 57 bp, unidentified
  source 1..57: mol_type = unassigned DNA; note = methanogen bacteria
cttcctgcaccgtcattttttgaaggcagtgaagcattcagcattgttttgggttca

SEQ ID NO: 32343 - DNA, 30 bp, unidentified
  source 1..30: mol_type = unassigned DNA; note = methanogen bacteria
atgcatttgccagatggaatccttccttta

SEQ ID NO: 32344 - DNA, 33 bp, unidentified
  source 1..33: mol_type = unassigned DNA; note = methanogen bacteria
tctgttccctccccattgggagtgccgattcat

SEQ ID NO: 32345 - DNA, 108 bp, unidentified
  source 1..108: mol_type = unassigned DNA; note = methanogen bacteria
ggaatcttcggcatgttaagttcaattttcccgggtagcggttctactcctacttatacaggtacatctcaatcaactgcttcaaattatgttccgtcatttgatttg

SEQ ID NO: 32346 - DNA, 105 bp, unidentified
  source 1..105: mol_type = unassigned DNA; note = methanogen bacteria
gctaaatgtattggatgtaacacttgtgtcgaagcatgtcctggtgatttcatcgctgctaacagtgcaagtttaactgttgcaattcctagtgtctgtgctgca

SEQ ID NO: 32347 - DNA, 84 bp, unidentified
  source 1..84: mol_type = unassigned DNA; note = methanogen bacteria
gtaaaagtttgtcctgttgacgcattggatattgatgtggaatggggtgaaggtgcacctgtagatgcagaaggtattggaaga

SEQ ID NO: 32348 - DNA, 102 bp, unidentified
  source 1..102: mol_type = unassigned DNA; note = methanogen bacteria
aacaaatgtcctactcaagctattcgtgtagttaccaaaactggtatgtcctgccctgctttagtagagaccgatgcagaaccatccttcacaagttgtatt

SEQ ID NO: 32349 - DNA, 87 bp, unidentified
  source 1..87: mol_type = unassigned DNA; note = methanogen bacteria
tcaatgtgttccaacgacgcattaaaagtagatcaatatgaagtgactattgatggagaacctgtcttaagagacagaatcttattc

SEQ ID NO: 32350 - DNA, 69 bp, unidentified
  source 1..69: mol_type = unassigned DNA; note = methanogen bacteria
gaccagtgtggtgactgtatcgaagcatgtccttatgacatgattcacaaaacagatgatcctaaatta

SEQ ID NO: 32351 - DNA, 33 bp, unidentified
  source 1..33: mol_type = unassigned DNA; note = methanogen bacteria
aagacattcgactttttttctctgacactgccc

SEQ ID NO: 32352 - DNA, 60 bp, unidentified
  source 1..60: mol_type = unassigned DNA; note = methanogen bacteria
atgcttcccgctccggtgttttttgaaaattcacaggcattcagcacagtgctgggttca

SEQ ID NO: 32353 - DNA, 93 bp, unidentified
  source 1..93: mol_type = unassigned DNA; note = methanogen bacteria
gcagatgacatatcatcaatattaatgccagttttaaaagaagcaatgcttgaaggaaatgtcacatcaatcgatgcagtaaatataatggta

SEQ ID NO: 32354 - DNA, 42 bp, unidentified
  source 1..42: mol_type = unassigned DNA; note = methanogen bacteria
gcaggccatacaatcaaatcaacatatgatttaataatgtat

SEQ ID NO: 32355 - DNA, 45 bp, unidentified
  source 1..45: mol_type = unassigned DNA; note = methanogen bacteria
ttgggcaatattgtcagccagcaaatgggcgggccagcattattt

SEQ ID NO: 32356 - DNA, 147 bp, unidentified
  source 1..147: mol_type = unassigned DNA; note = methanogen bacteria
aatttaaaaacagataacaatggaaggattatcataaacaatacacttaaacctggaacttacaaggttacaattaagaatcctgtcacattagaggagaaaaaccaaactatcaaagttctcaagagaattactgaaaataagaat

SEQ ID NO: 32357 - DNA, 90 bp, unidentified
  source 1..90: mol_type = unassigned DNA; note = methanogen bacteria
ccttacctctatcattattttaaccctgttgttgaagatttaacaaataaagtccaaaccggtgttgttaaactaacatttgaagatgta

SEQ ID NO: 32358 - DNA, 33 bp, unidentified
  source 1..33: mol_type = unassigned DNA; note = methanogen bacteria
tattatgtagcaagtgcagataatctgcttgtt

SEQ ID NO: 32359 - DNA, 87 bp, unidentified
  source 1..87: mol_type = unassigned DNA; note = methanogen bacteria
atcatggacgggaccctcagctactgcttcaccttcctcaccgcccgtgccggcggggacgggagccaatgggatgccatcgcgggc

SEQ ID NO: 32360 - DNA, 75 bp, unidentified
  source 1..75: mol_type = unassigned DNA; note = methanogen bacteria
ctgctgaccctggcctgcgattcgaatctcatcgcggtggccacggtggtctcctggtccgatgccgtcgccccc

SEQ ID NO: 32361 - DNA, 63 bp, unidentified
  source 1..63: mol_type = unassigned DNA; note = methanogen bacteria
atcgagtccggacagatcgccgacttcaacgagatcgccaagaacatcggtacctggctgaaa

SEQ ID NO: 32362 - DNA, 90 bp, unidentified
  source 1..90: mol_type = unassigned DNA; note = methanogen bacteria
tccaactcgctcaacctcctggagaccatgggcgaggtgtccgtcggatccggagtatccatcgagggactccatgtgggtctcgacggc

SEQ ID NO: 32363 - DNA, 111 bp, unidentified
  source 1..111: mol_type = unassigned DNA; note = methanogen bacteria
gcagccaaggccgccgagccccgggccgctccctccaagaccgagaagaagaaatacggcggttccgaggaagactccggcaagatcaagtacactagttccagaaggaag

SEQ ID NO: 32364 - DNA, 87 bp, unidentified
  source 1..87: mol_type = unassigned DNA; note = methanogen bacteria
ccggcattatacagctatttcaatcctcttgttgaggatttatccgacaaggttcgttcgggcgtaattaagttaacctttcaggat

SEQ ID NO: 32365 - DNA, 48 bp, unidentified
  source 1..48: mol_type = unassigned DNA; note = methanogen bacteria
tattttatatcttctgcaccaaatttaacatatgcattggttttgatt

SEQ ID NO: 32366 - DNA, 51 bp, unidentified
  source 1..51: mol_type = unassigned DNA; note = methanogen bacteria
atgttagaatcaatatatcaatctattactattttttttttaaattacggt

SEQ ID NO: 32367 - DNA, 33 bp, unidentified
  source 1..33: mol_type = unassigned DNA; note = methanogen bacteria
ttactttatggtcagaaaataaccattatttcc

SEQ ID NO: 32368 - DNA, 36 bp, unidentified
  source 1..36: mol_type = unassigned DNA; note = methanogen bacteria
ggcattatttataatgaattaaatgaaaaaatttcc

SEQ ID NO: 32369 - DNA, 108 bp, unidentified
  source 1..108: mol_type = unassigned DNA; note = methanogen bacteria
atggggattttagccaatattagttcagctttttcatctcttggaggttcgtcatcatattcaagctcccatcaacctactgcttcaaatttcgcaccatcagtcgat

SEQ ID NO: 32370 - DNA, 90 bp, unidentified
  source 1..90: mol_type = unassigned DNA; note = methanogen bacteria
tcttacctgcatccctatatgaatccgattgtggaggcactgacaaagcgcattgaagacggaacaatccagcttacttttcaaagcata

SEQ ID NO: 32371 - DNA, 33 bp, unidentified
  source 1..33: mol_type = unassigned DNA; note = methanogen bacteria
gttgtggcaacaaaaggaaatctggttcagacc

SEQ ID NO: 32372 - DNA, 42 bp, unidentified
  source 1..42: mol_type = unassigned DNA; note = methanogen bacteria
aacttcggtatttttgcttcattaaatcaggtaacacttgtt

SEQ ID NO: 32373 - DNA, 108 bp, unidentified
  source 1..108: mol_type = unassigned DNA; note = methanogen bacteria
atgggaatcttggccaatatcagttcagccttttcatctttaggaggttcatcatcatattcaagttcacatcagccatctgcttcaaatttctctccatctgttgat

SEQ ID NO: 32374 - DNA, 36 bp, unidentified
  source 1..36: mol_type = unassigned DNA; note = methanogen bacteria
aatatgccaattccatttggtaccagtggacatatg

SEQ ID NO: 32375 - DNA, 78 bp, unidentified
  source 1..78: mol_type = unassigned DNA; note = methanogen bacteria
tacggcgcggattcctcctgggaatgggggaccaacgctctctctgacttcggggtatccgataccgacgccgcgact

SEQ ID NO: 32376 - DNA, 42 bp, unidentified
  source 1..42: mol_type = unassigned DNA; note = methanogen bacteria
ggtggaatacttgctgctgcggttcctttttctatacaatat

SEQ ID NO: 32377 - DNA, 81 bp, unidentified
  source 1..81: mol_type = unassigned DNA; note = methanogen bacteria
ttccctgctgactttggtttggaaagtatttggaagaatctcattcctacattttatacacagggtcaatttagtagatat

SEQ ID NO: 32378 - DNA, 36 bp, unidentified
  source 1..36: mol_type = unassigned DNA; note = methanogen bacteria
aatcaggatatggcatttaatcttaatgaaggatac

SEQ ID NO: 32379 - DNA, 36 bp, unidentified
  source 1..36: mol_type = unassigned DNA; note = methanogen bacteria
aacatgccaattccatttggtaccagtgggcacatg

SEQ ID NO: 32380 - DNA, 276 bp, unidentified
  source 1..276: mol_type = unassigned DNA; note = methanogen bacteria
cagaatatagggtcaagctatctggataccattacaagcatttataacatgctttacactttaaaggccgcaggctataaggttgaagacttgccaaacaacgtttcagagcttgaagacatgattttaaaatgcggaatcaatgtcgctaattgggctccgggcgaacttgaaaaattggctaaccaatctggagtgacattgcttcctgtaagcgaatatacaaaatggtttaattcattggatgacattattaagctacaggttcgtgaaggt

SEQ ID NO: 32381 - DNA, 192 bp, unidentified
  source 1..192: mol_type = unassigned DNA; note = methanogen bacteria
gagctggcaagaagggcggttgagttaaactataccgtgaccattggagacacaattgatgactggcgaaatcaggtcgtctcattgcttccggatgaccagatggccgatgcgacaaccgttttaaataagattgtaggtgcattgaagaactacaccaacactcatgacgctaaatatttcgaactattc

SEQ ID NO: 32382 - DNA, 93 bp, unidentified
  source 1..93: mol_type = unassigned DNA; note = methanogen bacteria
gaaccaaatctgcatgcctatttgaatcccgtcgttgagcaggttgaaaatcaggttcgatccggggagataacaattaccttccaaagcata

SEQ ID NO: 32383 - DNA, 36 bp, unidentified
  source 1..36: mol_type = unassigned DNA; note = methanogen bacteria
tatttcactgcggttcaggacgatttgttccttaca

SEQ ID NO: 32384 - DNA, 69 bp, unidentified
  source 1..69: mol_type = unassigned DNA; note = methanogen bacteria
gctaatctaggaacttcccccctgatatgtcttccatatgtttcaagtttaatcactaaatttagtgtt

SEQ ID NO: 32385 - DNA, 66 bp, unidentified
  source 1..66: mol_type = unassigned DNA; note = methanogen bacteria
tttggtgtcagaggacctatcggaaagtttttcattgaattttttgcagtgaaaatagctttctca

SEQ ID NO: 32386 - DNA, 60 bp, unidentified
  source 1..60: mol_type = unassigned DNA; note = methanogen bacteria
accagaacacttcctatggcagtttattctgaagtggctgctggaaatatgggggaagct

SEQ ID NO: 32387 - DNA, 78 bp, unidentified
  source 1..78: mol_type = unassigned DNA; note = methanogen bacteria
ttgagagattatttcatggaagcaatgcgcgtttcaatgggaaatgattatgttaatgtcattgctccattccttaac

SEQ ID NO: 32388 - DNA, 63 bp, unidentified
  source 1..63: mol_type = unassigned DNA; note = methanogen bacteria
atcgaaagcggcaccatcgccgatttcaatgaaatcggaaagaacatggggatctggctgaaa

SEQ ID NO: 32389 - DNA, 93 bp, unidentified
  source 1..93: mol_type = unassigned DNA; note = methanogen bacteria
gcttccaactccctgaaccttatggatactgtcggagagatatcggcaggagagaccgtaaccatcgaaggtctgaatgtcggactcgaggga

SEQ ID NO: 32390 - DNA, 108 bp, unidentified
  source 1..108: mol_type = unassigned DNA; note = methanogen bacteria
gctgccaagaccgctgagcctcaggccgcccccgccaagaccgagaagaagaagtacggcggttccgaagagaccggcaaaataaagtacacaagttccagaaggaag

SEQ ID NO: 32391 - DNA, 87 bp, unidentified
  source 1..87: mol_type = unassigned DNA; note = methanogen bacteria
ccgttactctttgactttttaaatcctgcagttgatgagttaacccagaaagtcgacaacggaattattcagctgacttttcatgat

SEQ ID NO: 32392 - DNA, 36 bp, unidentified
  source 1..36: mol_type = unassigned DNA; note = methanogen bacteria
tattatgttgctatcagccaagatttctttagaaca

SEQ ID NO: 32393 - DNA, 39 bp, unidentified
  source 1..39: mol_type = unassigned DNA; note = methanogen bacteria
aatttcattttgtgctggaattttctaattgtttttcaa

SEQ ID NO: 32394 - DNA, 84 bp, unidentified
  source 1..84: mol_type = unassigned DNA; note = methanogen bacteria
gcagatgatatagcaggatttctaatgccaatactaaaagaagcattaggaggagacgatatcagtatcaatgcatttgacata

SEQ ID NO: 32395 - DNA, 36 bp, unidentified
  source 1..36: mol_type = unassigned DNA; note = methanogen bacteria
ggatacacaataaaatcaacatccacattactgctg

SEQ ID NO: 32396 - DNA, 42 bp, unidentified
  source 1..42: mol_type = unassigned DNA; note = methanogen bacteria
ggaaatatagttggtcaacagctgggaattcagcatttagta

SEQ ID NO: 32397 - DNA, 84 bp, unidentified
  source 1..84: mol_type = unassigned DNA; note = methanogen bacteria
ccttatttgtatagttatttcaatcctgttgttgaagatttgaccgagaaggtccaaacaggtgtaattcaattaacctttcag

SEQ ID NO: 32398 - DNA, 36 bp, unidentified
  source 1..36: mol_type = unassigned DNA; note = methanogen bacteria
tactatacagctacatctccaaacttattgcaggta

SEQ ID NO: 32399 - DNA, 108 bp, unidentified
  source 1..108: mol_type = unassigned DNA; note = methanogen bacteria
ggaatattgactagtatttcttctgctttttcatctttggcaaatccttcaccatatgcaagttcatatcaaccgaaaacttcaagtttcactcctaattttgattta

SEQ ID NO: 32400 - DNA, 72 bp, unidentified
  source 1..72: mol_type = unassigned DNA; note = methanogen bacteria
atgaatatttttgttgatcctttattatttttacaatttttgagagaattatgtaatggtgtttttaacaat

SEQ ID NO: 32401 - DNA, 96 bp, unidentified
  source 1..96: mol_type = unassigned DNA; note = methanogen bacteria
gtgtgtatgtatcgtccatggatacttgattcaaggattcattctgttgaagctgctttacctgcagcgggaggttattcgtttccaagcggccat

SEQ ID NO: 32402 - DNA, 30 bp, unidentified
  source 1..30: mol_type = unassigned DNA; note = methanogen bacteria
atgcatattcctgacggtttaatacctttt

SEQ ID NO: 32403 - DNA, 33 bp, unidentified
  source 1..33: mol_type = unassigned DNA; note = methanogen bacteria
acaatcccttctcctatgggtgttcagatacac

SEQ ID NO: 32404 - DNA, 30 bp, unidentified
  source 1..30: mol_type = unassigned DNA; note = methanogen bacteria
atgcatttagctgatggtttaattccattt

SEQ ID NO: 32405 - DNA, 33 bp, unidentified
  source 1..33: mol_type = unassigned DNA; note = methanogen bacteria
acggttcccacgcctttcgggatttcaatacat

SEQ ID NO: 32406 - DNA, 33 bp, unidentified
  source 1..33: mol_type = unassigned DNA; note = methanogen bacteria
actgttccttcacctattggaattcctatgcat

SEQ ID NO: 32407 - DNA, 33 bp, unidentified
  source 1..33: mol_type = unassigned DNA; note = methanogen bacteria
tcaattccttcacctttaggagttccaatacac

SEQ ID NO: 32408 - DNA, 45 bp, unidentified
  source 1..45: mol_type = unassigned DNA; note = methanogen bacteria
ggcgatgcgttgactggagttaaaagtcagaatgccgatttgctt

SEQ ID NO: 32409 - DNA, 30 bp, unidentified
  source 1..30: mol_type = unassigned DNA; note = methanogen bacteria
atgcatattcctgatggccttattcctatg

SEQ ID NO: 32410 - DNA, 33 bp, unidentified
  source 1..33: mol_type = unassigned DNA; note = methanogen bacteria
tctattccatctccttttggaatacctatgcat

SEQ ID NO: 32411 - DNA, 33 bp, unidentified
  source 1..33: mol_type = unassigned DNA; note = methanogen bacteria
tcagtgccttcaccattgggcgttccgatacac

SEQ ID NO: 32412 - DNA, 33 bp, unidentified
  source 1..33: mol_type = unassigned DNA; note = methanogen bacteria
tctattccttcacctttaggagtgccaatacac

SEQ ID NO: 32413 - DNA, 30 bp, unidentified
  source 1..30: mol_type = unassigned DNA; note = methanogen bacteria
ctttatgcagttgaagttaatttaacagca

SEQ ID NO: 32414 - DNA, 114 bp, unidentified
  source 1..114: mol_type = unassigned DNA; note = methanogen bacteria
ttttcaatgggaataatcgccacaatatcctcagcattctcatcattaagcaataattcaccttatggggcagcatatcagccaacagttccatcttacactccaagcgttaac

SEQ ID NO: 32415 - DNA, 102 bp, unidentified
  source 1..102: mol_type = unassigned DNA; note = methanogen bacteria
tcattcgcatttggagacaccagtctgcatggactgattgctgcgcctgcaaatttcctcatgatgggaataggtattgatgatgttacaggaacaattcct

SEQ ID NO: 32416 - DNA, 45 bp, unidentified
  source 1..45: mol_type = unassigned DNA; note = methanogen bacteria
gtatggggaggtggatggctcatgcagatgggcgcacttgacttt

SEQ ID NO: 32417 - DNA, 33 bp, unidentified
  source 1..33: mol_type = unassigned DNA; note = methanogen bacteria
tcaataccttcacccttaggtgttccgatacac

SEQ ID NO: 32418 - DNA, 33 bp, unidentified
  source 1..33: mol_type = unassigned DNA; note = methanogen bacteria
tctatcccatcaccattaggagttcctatacac

SEQ ID NO: 32419 - DNA, 96 bp, unidentified
  source 1..96: mol_type = unassigned DNA; note = methanogen bacteria
tattcaagttatactgaaattgcaacttctatgatgggagaggtagctagtgtagcttcatcagattatactgttactgataatatgatggtattg

SEQ ID NO: 32420 - DNA, 36 bp, unidentified
  source 1..36: mol_type = unassigned DNA; note = methanogen bacteria
tatgtcttttccactcgggattttttcaggacattc

SEQ ID NO: 32421 - DNA, 42 bp, unidentified
  source 1..42: mol_type = unassigned DNA; note = methanogen bacteria
atgctgtgggtttcacaaataggcatagaggcattttatgca

SEQ ID NO: 32422 - DNA, 45 bp, unidentified
  source 1..45: mol_type = unassigned DNA; note = methanogen bacteria
ttgtacaacttaaagcaagcagattcatatatacttacctttgag

SEQ ID NO: 32423 - DNA, 93 bp, unidentified
  source 1..93: mol_type = unassigned DNA; note = methanogen bacteria
gagcccaatttatatagttactttaatccggtagttgaggatttaactcaaaaagtccagtcaggaactgtcaaattaacatttgcagacatt

SEQ ID NO: 32424 - DNA, 36 bp, unidentified
  source 1..36: mol_type = unassigned DNA; note = methanogen bacteria
tattatgttgccatttcgggcaatttgttttacacc

SEQ ID NO: 32425 - DNA, 87 bp, unidentified
  source 1..87: mol_type = unassigned DNA; note = methanogen bacteria
ccctatcttcatagctatttcaatcctgttgtcgatgacttgacccaaaaggtccagcagggcactattactctgacatttcagagt

SEQ ID NO: 32426 - DNA, 36 bp, unidentified
  source 1..36: mol_type = unassigned DNA; note = methanogen bacteria
tactatgtggcaacggcagataatttgttcacgaca

SEQ ID NO: 32427 - DNA, 30 bp, unidentified
  source 1..30: mol_type = unassigned DNA; note = methanogen bacteria
atgaatttcgtccctaatgcagataatctt

SEQ ID NO: 32428 - DNA, 87 bp, unidentified
  source 1..87: mol_type = unassigned DNA; note = methanogen bacteria
tttacatttggatggggaagcgatccctctagcttttttgcaacaaatgttggagggacttctgattttggaagcataggttctata

SEQ ID NO: 32429 - DNA, 39 bp, unidentified
  source 1..39: mol_type = unassigned DNA; note = methanogen bacteria
ttcactttgcctggatttgaagtagggctgaaaacatgt

SEQ ID NO: 32430 - DNA, 30 bp, unidentified
  source 1..30: mol_type = unassigned DNA; note = methanogen bacteria
ttgcttgtcacttcaaatgatgctgcatat

SEQ ID NO: 32431 - DNA, 96 bp, unidentified
  source 1..96: mol_type = unassigned DNA; note = methanogen bacteria
atgcttgaaacccctcatgtcaacgacattaaatacgagacactgggcaacaccagcataggcactgttgaggtcggcatttccggcaatgaaaac

SEQ ID NO: 32432 - DNA, 108 bp, unidentified
  source 1..108: mol_type = unassigned DNA; note = methanogen bacteria
atgggaatattgtcagccatgagctcagcattctcatcaattaatggcggctcaagctatggaagcgcagttcagccaacaactcctaattatttgtcaaatatcgat

SEQ ID NO: 32433 - DNA, 33 bp, unidentified
  source 1..33: mol_type = unassigned DNA; note = methanogen bacteria
gaacttccactacctgttgcagcatgtgtccac

SEQ ID NO: 32434 - DNA, 87 bp, unidentified
  source 1..87: mol_type = unassigned DNA; note = methanogen bacteria
ccatacctgtacagcttttttaatcctgttgttgaggatctgactcataaggtacaaactggtgtcataactattacgtttcaaagc

SEQ ID NO: 32435 - DNA, 39 bp, unidentified
  source 1..39: mol_type = unassigned DNA; note = methanogen bacteria
tactatcttgcagccaatgatgattttcttaaaacattc

SEQ ID NO: 32436 - DNA, 210 bp, unidentified
  source 1..210: mol_type = unassigned DNA; note = methanogen bacteria
ggcaagaccaaaaaagtgcaaaacgcccttttcgccaagactgtcgtcaaaaacgacgcaaaaatctaccgtggcgacagcagcgtggtcaccgtctatgcctacatcgatgaggacggagacgagagcacgaccggcgaccagacctccatcggcaccacctcggtcgaagtgcatgtcgacaagggcatctgggacaaggcaacgtcc

SEQ ID NO: 32437 - DNA, 192 bp, unidentified
  source 1..192: mol_type = unassigned DNA; note = methanogen bacteria
gaccatacagaatacaacaccatcaaccttattgaaaacggaaccaccattgaaataccaaatgacatgaaaatgaaatcgaacaataatggaatttcagttcttgaaaatgacaacacaattataatatcattcaacagtgcaaataaaggcgttggggaaataactgcttttgcagacattaagatacca

SEQ ID NO: 32438 - DNA, 231 bp, unidentified
  source 1..231: mol_type = unassigned DNA; note = methanogen bacteria
ggagcttcatacagcggaaatgtcactataaaagatccgactgtggcgggctgcagcctcagcggtgaatgtaatgccgtgcttgtcagcaataatgaaactcacgacaatataatcgttatcagcaaaaacaagaatattgtaaaccatatcatcaacagcatccaatggcatgccgtatcttccaacgacgacagcagcaccgccaccacaagcatccagcaaccgtcc

SEQ ID NO: 32439 - DNA, 96 bp, unidentified
  source 1..96: mol_type = unassigned DNA; note = methanogen bacteria
ggaacaccaatgtacagtcaggctgaagtagacagatatatgctgaataaatacggtatggtggactaccatgttggagacaacggatacattgac

SEQ ID NO: 32440 - DNA, 102 bp, unidentified
  source 1..102: mol_type = unassigned DNA; note = methanogen bacteria
aatatttttgctggagaaaagtatggtatgatttctaagatgatgagtgaaaccaataaatcaatttcttattcggatattgctggtgatgctgtaggatta

SEQ ID NO: 32441 - DNA, 36 bp, unidentified
  source 1..36: mol_type = unassigned DNA; note = methanogen bacteria
ggcgcaccttttggcagtgatttatatttctctatg

SEQ ID NO: 32442 - DNA, 87 bp, unidentified
  source 1..87: mol_type = unassigned DNA; note = methanogen bacteria
cctcatctatatggatatttcaatcctgtagttgaggatttaacccacaaagtccagcagggcactatcaaattaacttttcagagc

SEQ ID NO: 32443 - DNA, 36 bp, unidentified
  source 1..36: mol_type = unassigned DNA; note = methanogen bacteria
tactatgttgccacaacagacgatatgttggtgaca

SEQ ID NO: 32444 - DNA, 39 bp, unidentified
  source 1..39: mol_type = unassigned DNA; note = methanogen bacteria
gtttctattgcagttccatggagtcctgtgctgattacc

SEQ ID NO: 32445 - DNA, 51 bp, unidentified
  source 1..51: mol_type = unassigned DNA; note = methanogen bacteria
atgccttggtttacaaatatgaaccatggactggcatttttatttgcagct

SEQ ID NO: 32446 - DNA, 42 bp, unidentified
  source 1..42: mol_type = unassigned DNA; note = methanogen bacteria
gcaatgttaacaaaaacaggtacggctttaagcattcccgaa

SEQ ID NO: 32447 - DNA, 87 bp, unidentified
  source 1..87: mol_type = unassigned DNA; note = methanogen bacteria
ccttatctatatagctatttcaatccagttgttgatgatttgacccagaaagtccagcagggcactatcaaattgactttccagagc

SEQ ID NO: 32448 - DNA, 36 bp, unidentified
  source 1..36: mol_type = unassigned DNA; note = methanogen bacteria
tactatgtggccacaaccgatgatttgctggtgact

SEQ ID NO: 32449 - DNA, 63 bp, unidentified
  source 1..63: mol_type = unassigned DNA; note = methanogen bacteria
ccgagcatactatctgcgataggaccctacatcataaccccaataataactgatgtccacagc

SEQ ID NO: 32450 - DNA, 90 bp, unidentified
  source 1..90: mol_type = unassigned DNA; note = methanogen bacteria
gagcccaatttatatggctattttaatcctgtagtggaggagttaactcaaaaagtccagtcaggtgttgttaaattaacattcaccgac

SEQ ID NO: 32451 - DNA, 36 bp, unidentified
  source 1..36: mol_type = unassigned DNA; note = methanogen bacteria
tattatctcgcctctactgataatctgttgtatact

SEQ ID NO: 32452 - DNA, 99 bp, unidentified
  source 1..99: mol_type = unassigned DNA; note = methanogen bacteria
ttcatagccataggaagtcattatggagaattatctgcgggcttaagaaatatgtctggcattgctgttagtgattttggaatggatggccttgaactg

SEQ ID NO: 32453 - DNA, 45 bp, unidentified
  source 1..45: mol_type = unassigned DNA; note = methanogen bacteria
attgccacgccttttggcagtgattttacatttgcatttgtgggt

SEQ ID NO: 32454 - DNA, 39 bp, unidentified
  source 1..39: mol_type = unassigned DNA; note = methanogen bacteria
gtaacaattgcaactccttggagtccagtattaatctca

SEQ ID NO: 32455 - DNA, 51 bp, unidentified
  source 1..51: mol_type = unassigned DNA; note = methanogen bacteria
atgccatggtttactggaatggaacacggccttgcatggattttatcagct

SEQ ID NO: 32456 - DNA, 42 bp, unidentified
  source 1..42: mol_type = unassigned DNA; note = methanogen bacteria
tttatgttaggtactggcagtgcattatcaattagtcaacta

SEQ ID NO: 32457 - DNA, 75 bp, unidentified
  source 1..75: mol_type = unassigned DNA; note = methanogen bacteria
tttaatgcaagcattccagatacatatattttccacacaatatccgagcttggaataactggaagcaactcccca

SEQ ID NO: 32458 - DNA, 36 bp, unidentified
  source 1..36: mol_type = unassigned DNA; note = methanogen bacteria
tgttgtaggtgctttgataggtattcttggattttc

SEQ ID NO: 32459 - DNA, 30 bp, unidentified
  source 1..30: mol_type = unassigned DNA; note = methanogen bacteria
tcatttatgaaaaatggttcaataggcttt

SEQ ID NO: 32460 - DNA, 102 bp, unidentified
  source 1..102: mol_type = unassigned DNA; note = methanogen bacteria
ctaatggggtttatgtcagttttaagttcaatttcgcctctgggatcaggttctagttctactggagtatcatcagcttcaaatattgcttcatctatggat

SEQ ID NO: 32461 - DNA, 87 bp, unidentified
  source 1..87: mol_type = unassigned DNA; note = methanogen bacteria
ccgtatctgtatagctatttcaatcctgtggttgaggatttgacccatcaggtccagcagggcactatcaaattaactttccagagc

SEQ ID NO: 32462 - DNA, 36 bp, unidentified
  source 1..36: mol_type = unassigned DNA; note = methanogen bacteria
tactatgtagcgacaaccgatgatttgtttcaaacc

SEQ ID NO: 32463 - DNA, 30 bp, unidentified
  source 1..30: mol_type = unassigned DNA; note = methanogen bacteria
ttatcttttattccaagttcatcaaatatc

SEQ ID NO: 32464 - DNA, 48 bp, unidentified
  source 1..48: mol_type = unassigned DNA; note = methanogen bacteria
tttagagaaacaatggtatttacaactggtgagggcttttttaatgga

SEQ ID NO: 32465 - DNA, 33 bp, unidentified
  source 1..33: mol_type = unassigned DNA; note = methanogen bacteria
gtttcaagaggtggaagctggtattggaatatt

SEQ ID NO: 32466 - DNA, 90 bp, unidentified
  source 1..90: mol_type = unassigned DNA; note = methanogen bacteria
ccatttcttcacagctttttaaatcctgttgttgaggatttaacccagaaagtccagtcaggtgttataacattaacatttcaggatatc

SEQ ID NO: 32467 - DNA, 45 bp, unidentified
  source 1..45: mol_type = unassigned DNA; note = methanogen bacteria
tattatgttgcaacttcagcggatctggtaaaaacatcccttctc

SEQ ID NO: 32468 - DNA, 87 bp, unidentified
  source 1..87: mol_type = unassigned DNA; note = methanogen bacteria
ccttacctttacagttatttcaatccagttgttgatgatttaactcagaaagtccagtcaggcgttattacattaacatttgcagat

SEQ ID NO: 32469 - DNA, 36 bp, unidentified
  source 1..36: mol_type = unassigned DNA; note = methanogen bacteria
tattatgtaggcactgccgagaatattgtcagcgta

SEQ ID NO: 32470 - DNA, 81 bp, unidentified
  source 1..81: mol_type = unassigned DNA; note = methanogen bacteria
tcttttaatgacactttgataaacacttatctgttctatacaatttcagagttagggattcctaatgctaattctccatta

SEQ ID NO: 32471 - DNA, 36 bp, unidentified
  source 1..36: mol_type = unassigned DNA; note = methanogen bacteria
tttataggaccttacacaccaagcgaaataggagat

SEQ ID NO: 32472 - DNA, 60 bp, unidentified
  source 1..60: mol_type = unassigned DNA; note = methanogen bacteria
gacggtttacttatgtttttcaaacttcaccaaatgcctaatgatggaatggtggaaaat

SEQ ID NO: 32473 - DNA, 93 bp, unidentified
  source 1..93: mol_type = unassigned DNA; note = methanogen bacteria
atgtgtactaaatggagaaaattagaaatcagtactaaaacggacaccccaatatttgtggcatttccaaaaatatttagtttaatgggggtt

SEQ ID NO: 32474 - DNA, 36 bp, unidentified
  source 1..36: mol_type = unassigned DNA; note = methanogen bacteria
gcaatacctttaacttggaccccagttccaatcaca

SEQ ID NO: 32475 - DNA, 48 bp, unidentified
  source 1..48: mol_type = unassigned DNA; note = methanogen bacteria
ccatggtatagtggtatgaccggaggaatcgctacattacttggaacc

SEQ ID NO: 32476 - DNA, 39 bp, unidentified
  source 1..39: mol_type = unassigned DNA; note = methanogen bacteria
ttctacttagctcaaggaacagcattaaccttaacccaa

SEQ ID NO: 32477 - DNA, 54 bp, unidentified
  source 1..54: mol_type = unassigned DNA; note = methanogen bacteria
gtacgaggtgaatttgattttagtctgatattctttaaaactgattttgcttta

SEQ ID NO: 32478 - DNA, 42 bp, unidentified
  source 1..42: mol_type = unassigned DNA; note = methanogen bacteria
tttccacaaccggaaaacacatctttcgaagcaatttggaat

SEQ ID NO: 32479 - DNA, 93 bp, unidentified
  source 1..93: mol_type = unassigned DNA; note = methanogen bacteria
gatttaatcagagagttcatgattgaaatattcaatcaactcataggtaatttacctccaaacagcagtgttgccgatgaggcaatattcctg

SEQ ID NO: 32480 - DNA, 36 bp, unidentified
  source 1..36: mol_type = unassigned DNA; note = methanogen bacteria
gttattcctcttccatggacccctgttccaattact

SEQ ID NO: 32481 - DNA, 51 bp, unidentified
  source 1..51: mol_type = unassigned DNA; note = methanogen bacteria
atcccatggttcggaggaatgactggtggattaaatgttgtacttggatcc

SEQ ID NO: 32482 - DNA, 39 bp, unidentified
  source 1..39: mol_type = unassigned DNA; note = methanogen bacteria
gcgtacttaacccaaggtactgtattaggtgttgtagat

SEQ ID NO: 32483 - DNA, 36 bp, unidentified
  source 1..36: mol_type = unassigned DNA; note = methanogen bacteria
attattcctctcccatggactccagtaccaattaca

SEQ ID NO: 32484 - DNA, 51 bp, unidentified
  source 1..51: mol_type = unassigned DNA; note = methanogen bacteria
gtcccatggtttggaggaatgactggtggattagacgttgtacttggatct

SEQ ID NO: 32485 - DNA, 39 bp, unidentified
  source 1..39: mol_type = unassigned DNA; note = methanogen bacteria
tcctatttaacccagggtactgttttaggaattgcagat

SEQ ID NO: 32486 - DNA, 36 bp, unidentified
  source 1..36: mol_type = unassigned DNA; note = methanogen bacteria
attattccactcccatggaccccagttcctataact

SEQ ID NO: 32487 - DNA, 51 bp, unidentified
  source 1..51: mol_type = unassigned DNA; note = methanogen bacteria
attccttggtttggaggaatgaccggaggacttgacgtactcctcggatca

SEQ ID NO: 32488 - DNA, 36 bp, unidentified
  source 1..36: mol_type = unassigned DNA; note = methanogen bacteria
tacctaacccaaggcacagcacttggtgtcgttgac

SEQ ID NO: 32489 - DNA, 51 bp, unidentified
  source 1..51: mol_type = unassigned DNA; note = methanogen bacteria
atgaacatcgggcagagcatctatgacctcttcggagggaacggcgagatc

SEQ ID NO: 32490 - DNA, 78 bp, unidentified
  source 1..78: mol_type = unassigned DNA; note = methanogen bacteria
ttttttaatgctccattaattgatacttacttgttccacaccatttctgaacttggaattccaaacggaaattctcca

SEQ ID NO: 32491 - DNA, 36 bp, unidentified
  source 1..36: mol_type = unassigned DNA; note = methanogen bacteria
atttgtcgcattcataatcgttttttattaatatct

SEQ ID NO: 32492 - DNA, 60 bp, unidentified
  source 1..60: mol_type = unassigned DNA; note = methanogen bacteria
gaaatgtttggaatagtcagccccggaaccgtggatacagaagccatgacctcactgaca

SEQ ID NO: 32493 - DNA, 36 bp, unidentified
  source 1..36: mol_type = unassigned DNA; note = methanogen bacteria
attatcccactcccatggactccagttcctataact

SEQ ID NO: 32494 - DNA, 51 bp, unidentified
  source 1..51: mol_type = unassigned DNA; note = methanogen bacteria
atcccttggtttggaggaatgaccggcggacttgacgtatttttaggttca

SEQ ID NO: 32495 - DNA, 42 bp, unidentified
  source 1..42: mol_type = unassigned DNA; note = methanogen bacteria
tatagcttaactcaaggtgcagcaattggtgttgttgacctt

SEQ ID NO: 32496 - DNA, 87 bp, unidentified
  source 1..87: mol_type = unassigned DNA; note = methanogen bacteria
tctttcctgcatgcctatttaaatccggttgttgatgatttaagccagaaagtccacactggggttataaggataacatttcaaagc

SEQ ID NO: 32497 - DNA, 36 bp, unidentified
  source 1..36: mol_type = unassigned DNA; note = methanogen bacteria
tattaccttgcaatatctgatgatctgttcaagtct

SEQ ID NO: 32498 - DNA, 36 bp, unidentified
  source 1..36: mol_type = unassigned DNA; note = methanogen bacteria
attattcctcttccatggacaccagttccaattact

SEQ ID NO: 32499 - DNA, 51 bp, unidentified
  source 1..51: mol_type = unassigned DNA; note = methanogen bacteria
gtcccatggtttggaggaatgactggcggattggatgtgctacttggatcc

SEQ ID NO: 32500 - DNA, 36 bp, unidentified
  source 1..36: mol_type = unassigned DNA; note = methanogen bacteria
tacttgacccaaggtgctgtattgggagttgtagat

SEQ ID NO: 32501 - DNA, 33 bp, unidentified
  source 1..33: mol_type = unassigned DNA; note = methanogen bacteria
tttcgaggatcaaaaggtactaaccattttaca

SEQ ID NO: 32502 - DNA, 33 bp, unidentified
  source 1..33: mol_type = unassigned DNA; note = methanogen bacteria
ggtcttcactcaacatcttcaacagtggaatta

SEQ ID NO: 32503 - DNA, 87 bp, unidentified
  source 1..87: mol_type = unassigned DNA; note = methanogen bacteria
cctttcctgcatgcctatttaaatcctgttgttgatgatttaagccagaaagttcatactggagttataaggataacatttcaaagc

SEQ ID NO: 32504 - DNA, 36 bp, unidentified
  source 1..36: mol_type = unassigned DNA; note = methanogen bacteria
tattacattgcaatatccgatgatttgttcaaatct

SEQ ID NO: 32505 - DNA, 48 bp, unidentified
  source 1..48: mol_type = unassigned DNA; note = methanogen bacteria
aaaattcctcaacctgagacattaagtctcagtggtttaatggaatca

SEQ ID NO: 32506 - DNA, 36 bp, unidentified
  source 1..36: mol_type = unassigned DNA; note = methanogen bacteria
attatccctttaccatggactcccgttccaataact

SEQ ID NO: 32507 - DNA, 51 bp, unidentified
  source 1..51: mol_type = unassigned DNA; note = methanogen bacteria
gttccatggtttggaggtatgactggaggaattgacattgtacttggatct

SEQ ID NO: 32508 - DNA, 39 bp, unidentified
  source 1..39: mol_type = unassigned DNA; note = methanogen bacteria
ttctatttaacccaaggtagtgtacttggaatagtggat

SEQ ID NO: 32509 - DNA, 36 bp, unidentified
  source 1..36: mol_type = unassigned DNA; note = methanogen bacteria
cttattcccctcccatggacccccgttcctataact

SEQ ID NO: 32510 - DNA, 51 bp, unidentified
  source 1..51: mol_type = unassigned DNA; note = methanogen bacteria
atcccatggtttggaggaatgacaggaggacttgaagcattactcggttca

SEQ ID NO: 32511 - DNA, 36 bp, unidentified
  source 1..36: mol_type = unassigned DNA; note = methanogen bacteria
aatataacccaaggtgcaagtattggaattataaat

SEQ ID NO: 32512 - DNA, 48 bp, unidentified
  source 1..48: mol_type = unassigned DNA; note = methanogen bacteria
atgaacatcgggcagagcatctacgacctcttcggagggaacggcgag

SEQ ID NO: 32513 - DNA, 33 bp, unidentified
  source 1..33: mol_type = unassigned DNA; note = methanogen bacteria
aaaactttgaaagttgaatttataatgttgccc

SEQ ID NO: 32514 - DNA, 54 bp, unidentified
  source 1..54: mol_type = unassigned DNA; note = methanogen bacteria
atgcttccctcagacagtccaaatgcagaagcattttcatccatattgtcaacc

SEQ ID NO: 32515 - DNA, 36 bp, unidentified
  source 1..36: mol_type = unassigned DNA; note = methanogen bacteria
attattccactcccgtggacaccagtacctattaca

SEQ ID NO: 32516 - DNA, 51 bp, unidentified
  source 1..51: mol_type = unassigned DNA; note = methanogen bacteria
attccttggtttggaggaatgaccggaggaattgaaacatttttaggatca

SEQ ID NO: 32517 - DNA, 39 bp, unidentified
  source 1..39: mol_type = unassigned DNA; note = methanogen bacteria
tacagcttaacccaaggagcaacaattggtattgttgat

SEQ ID NO: 32518 - DNA, 36 bp, unidentified
  source 1..36: mol_type = unassigned DNA; note = methanogen bacteria
atcattcctcttccatggactcctgtcccaattact

SEQ ID NO: 32519 - DNA, 51 bp, unidentified
  source 1..51: mol_type = unassigned DNA; note = methanogen bacteria
gtcccatggtttgggggaatgactggtggattagatgtattgctcggatct

SEQ ID NO: 32520 - DNA, 39 bp, unidentified
  source 1..39: mol_type = unassigned DNA; note = methanogen bacteria
atgtactttgctcaaggtactgttgttggaattgcaaat

SEQ ID NO: 32521 - DNA, 54 bp, unidentified
  source 1..54: mol_type = unassigned DNA; note = methanogen bacteria
ggatcgcaagtagaaactctgacgggctatccggagacgatcaccgataaaagc

SEQ ID NO: 32522 - DNA, 36 bp, unidentified
  source 1..36: mol_type = unassigned DNA; note = methanogen bacteria
gtcatcccactgccatggacaccagttccaataact

SEQ ID NO: 32523 - DNA, 51 bp, unidentified
  source 1..51: mol_type = unassigned DNA; note = methanogen bacteria
attccatggtttggaggaatgaccggaggattagaggtactgctcggatcc

SEQ ID NO: 32524 - DNA, 36 bp, unidentified
  source 1..36: mol_type = unassigned DNA; note = methanogen bacteria
tatgttgtccagggaagtgtactaagcattaccgat

SEQ ID NO: 32525 - DNA, 255 bp, unidentified
  source 1..255: mol_type = unassigned DNA; note = methanogen bacteria
tggggagcagcaatacagaatgccggatactgcatttgtaacaactgtactttcactaacaattattgctccagaggaggagcaatcttcaacacgggaagattagaattgaacaactgcacatttatcggaaacaccggatacacagagggaaacgatgtcttaaatgtaggtgacggcattgtcatattaaatggaaaaaaaattacagaagatgaaggtccagttacttgtacagatagtgtaactagtaca

SEQ ID NO: 32526 - DNA, 111 bp, unidentified
  source 1..111: mol_type = unassigned DNA; note = methanogen bacteria
atggcctatcaaggtagttttttattaggaatatcctggatgcaaccagtatttgatgcgatgaatgcgctttttaatcctttaatggctttagatcctactcctaataat

SEQ ID NO: 32527 - DNA, 120 bp, unidentified
  source 1..120: mol_type = unassigned DNA; note = methanogen bacteria
atcaaggatatgattatcgttcttcctccagcggtttattattgtactttcactcctctgttccatgcatttggacaatggatttacggaggtaatattaccaccataccttatggtatc

SEQ ID NO: 32528 - DNA, 36 bp, unidentified
  source 1..36: mol_type = unassigned DNA; note = methanogen bacteria
attattccgcttccatggactccagttcctataact

SEQ ID NO: 32529 - DNA, 51 bp, unidentified
  source 1..51: mol_type = unassigned DNA; note = methanogen bacteria
attccttggtttggaggaatgaccggaggacttgatgtattattaggttca

SEQ ID NO: 32530 - DNA, 36 bp, unidentified
  source 1..36: mol_type = unassigned DNA; note = methanogen bacteria
ttaagcatgcagggtacaccagtcggaatcgtagat

SEQ ID NO: 32531 - DNA, 36 bp, unidentified; identical to SEQ ID NO: 32493
  source 1..36: mol_type = unassigned DNA; note = methanogen bacteria

SEQ ID NO: 32532 - DNA, 51 bp, unidentified
  source 1..51: mol_type = unassigned DNA; note = methanogen bacteria
attccatggtttggtggaatgaccggaggtattgaagtactcctcggatca

SEQ ID NO: 32533 - DNA, 36 bp, unidentified
  source 1..36: mol_type = unassigned DNA; note = methanogen bacteria
tccagttatgcaggagcaccattaggaataatcgat

SEQ ID NO: 32534 - DNA, 48 bp, unidentified
  source 1..48: mol_type = unassigned DNA; note = methanogen bacteria
aaaataccacagcccgaaacattaagtttatctggaattatggattta

SEQ ID NO: 32535 - DNA, 36 bp, unidentified
  source 1..36: mol_type = unassigned DNA; note = methanogen bacteria
attatacctctcccatggactccagtacctattacc

SEQ ID NO: 32536 - DNA, 51 bp, unidentified
  source 1..51: mol_type = unassigned DNA; note = methanogen bacteria
atcccatggtttggtggaatgaccggaggaattgaagtactattaggatcc

SEQ ID NO: 32537 - DNA, 39 bp, unidentified
  source 1..39: mol_type = unassigned DNA; note = methanogen bacteria
ttaaatgctaccggaactccagtaagcattgcaaatgtt

SEQ ID NO: 32538 - DNA, 36 bp, unidentified
  source 1..36: mol_type = unassigned DNA; note = methanogen bacteria
gtaattccattaagttggactccagtaccaattact

SEQ ID NO: 32539 - DNA, 48 bp, unidentified
  source 1..48: mol_type = unassigned DNA; note = methanogen bacteria
ccttggtatagtggtatgactggaggactttcagttttaatagggtct

SEQ ID NO: 32540 - DNA, 30 bp, unidentified
  source 1..30: mol_type = unassigned DNA; note = methanogen bacteria
atgtatacacagggtataagtttatcttta

SEQ ID NO: 32541 - DNA, 33 bp, unidentified
  source 1..33: mol_type = unassigned DNA; note = methanogen bacteria
ttagaagtaggtggtcatacagctgttgcagca

SEQ ID NO: 32542 - DNA, 60 bp, unidentified
  source 1..60: mol_type = unassigned DNA; note = methanogen bacteria
atagcatatatatttagttataatagtcaaaatatggcattaaaaccctatatttcatca

SEQ ID NO: 32543 - DNA, 36 bp, unidentified
  source 1..36: mol_type = unassigned DNA; note = methanogen bacteria
attattccactcccatggactccagttcctataact

SEQ ID NO: 32544 - DNA, 51 bp, unidentified
  source 1..51: mol_type = unassigned DNA; note = methanogen bacteria
attccttggttcggaggaatgactggtggaatcgatgtatttttaggatcc

SEQ ID NO: 32545 - DNA, 36 bp, unidentified
  source 1..36: mol_type = unassigned DNA; note = methanogen bacteria
atgtcttcacaaggtatggcattcacattcattgac

SEQ ID NO: 32546 - DNA, 42 bp, unidentified
  source 1..42: mol_type = unassigned DNA; note = methanogen bacteria
tatcctttgtctaattttgattttcaatttatgtttttatcc

SEQ ID NO: 32547 - DNA, 51 bp, unidentified
  source 1..51: mol_type = unassigned DNA; note = methanogen bacteria
aaaattgttgtaggaccatatccatttttaaaagtctatgaacagtctgtt

SEQ ID NO: 32548 - DNA, 87 bp, unidentified
  source 1..87: mol_type = unassigned DNA; note = methanogen bacteria
ccttatttgtatagttattttcatcctgttgttagtgatttatcgcataaagtggaaactggagtaatacagttaacttttgcagac

SEQ ID NO: 32549 - DNA, 36 bp, unidentified
  source 1..36: mol_type = unassigned DNA; note = methanogen bacteria
tactatatagctattcaaaacaatctgtttagggtt

SEQ ID NO: 32550 - DNA, 36 bp, unidentified; identical to SEQ ID NO: 32528
  source 1..36: mol_type = unassigned DNA; note = methanogen bacteria

SEQ ID NO: 32551 - DNA, 51 bp, unidentified
  source 1..51: mol_type = unassigned DNA; note = methanogen bacteria
attccttggtttggaggaatgaccggcggacttgacatattccttggttca

SEQ ID NO: 32552 - DNA, 39 bp, unidentified
  source 1..39: mol_type = unassigned DNA; note = methanogen bacteria
atgagcatgcaaggaacccctgtcggaatcgtggaactc

SEQ ID NO: 32553 - DNA, 36 bp, unidentified
  source 1..36: mol_type = unassigned DNA; note = methanogen bacteria
attattccgcttccatggacttcagttcctataact

SEQ ID NO: 32554 - DNA, 51 bp, unidentified
  source 1..51: mol_type = unassigned DNA; note = methanogen bacteria
atcccttggtttggaggaatgaccggaggacttgaaatattattaggatcc

SEQ ID NO: 32555 - DNA, 36 bp, unidentified
  source 1..36: mol_type = unassigned DNA; note = methanogen bacteria
atgagtttacaaggtgcaacatttactgtcgttgac

SEQ ID NO: 32556 - DNA, 33 bp, unidentified
  source 1..33: mol_type = unassigned DNA; note = methanogen bacteria
cttggagattttgtttataccgataccggagca

SEQ ID NO: 32557 - DNA, 111 bp, unidentified
  source 1..111: mol_type = unassigned DNA; note = methanogen bacteria
atggcgtatcaaggtagttttcttttaggtatttcctggcttcagccagtgtttgatgcaatgaatgctgttcttaatccattagttcatatggatcctacacctaataat

SEQ ID NO: 32558 - DNA, 129 bp, unidentified
  source 1..129: mol_type = unassigned DNA; note = methanogen bacteria
tctacaataaaagatattattgttgtatttcctccagctgtttattattgtactttaactcctcttttccactcattaggtcaaatgctttatggtggaaacataaccactatcccttacggagtagga

SEQ ID NO: 32559 - DNA, 36 bp, unidentified; identical to SEQ ID NO: 32543
  source 1..36: mol_type = unassigned DNA; note = methanogen bacteria

SEQ ID NO: 32560 - DNA, 51 bp, unidentified
  source 1..51: mol_type = unassigned DNA; note = methanogen bacteria
attccatggtttggaggaatgaccggcggacttgacatattcttaggttcc

SEQ ID NO: 32561 - DNA, 39 bp, unidentified
  source 1..39: mol_type = unassigned DNA; note = methanogen bacteria
ttaagtattcaatgcactcctgttggaattgcaagcctt

SEQ ID NO: 32562 - DNA, 36 bp, unidentified
  source 1..36: mol_type = unassigned DNA; note = methanogen bacteria
attatcccacttccatggactccagtccctattact

SEQ ID NO: 32563 - DNA, 51 bp, unidentified
  source 1..51: mol_type = unassigned DNA; note = methanogen bacteria
atcccatggtttggtggaatgaccggaggacttgaaatcttattaggttcc

SEQ ID NO: 32564 - DNA, 39 bp, unidentified
  source 1..39: mol_type = unassigned DNA; note = methanogen bacteria
ctaacttcacaaggaacctcattcggagttatggatctt

SEQ ID NO: 32565 - DNA, 81 bp, unidentified
  source 1..81: mol_type = unassigned DNA; note = methanogen bacteria
tccacaggactgcctctttttgaagtctacactcaaaacacaataagcgcccttggagttccaggatacatatccccaata

SEQ ID NO: 32566 - DNA, 36 bp, unidentified
  source 1..36: mol_type = unassigned DNA; note = methanogen bacteria
attatccctctcccatggactccagttccaataacc

SEQ ID NO: 32567 - DNA, 51 bp, unidentified
  source 1..51: mol_type = unassigned DNA; note = methanogen bacteria
atcccatggttcggtggaatgaccggaggacttgaagtatttttaggttca

SEQ ID NO: 32568 - DNA, 36 bp, unidentified
  source 1..36: mol_type = unassigned DNA; note = methanogen bacteria
ctcggtttccaaggaacccccgttggaatcattgat

SEQ ID NO: 32569 - DNA, 36 bp, unidentified
  source 1..36: mol_type = unassigned DNA; note = methanogen bacteria
attattcccctcccatggaccccagttcctataact

SEQ ID NO: 32570 - DNA, 51 bp, unidentified
  source 1..51: mol_type = unassigned DNA; note = methanogen bacteria
atcccatggtttggaggaatgaccggaggacttgaagtgcttttaggttca

SEQ ID NO: 32571 - DNA, 39 bp, unidentified
  source 1..39: mol_type = unassigned DNA; note = methanogen bacteria
ctttcttcacaaggaatggcctttggagttgttgattta

SEQ ID NO: 32572 - DNA, 72 bp, unidentified
  source 1..72: mol_type = unassigned DNA; note = methanogen bacteria
tgggtggatcccgataaattggaggagatatacaggtggtcggtcggaacgatcgacggcgccaaatgggac

SEQ ID NO: 32573 - DNA, 42 bp, unidentified
  source 1..42: mol_type = unassigned DNA; note = methanogen bacteria
ccaatgtataactttaattttcagtttctgtttttggatggg

SEQ ID NO: 32574 - DNA, 51 bp, unidentified
  source 1..51: mol_type = unassigned DNA; note = methanogen bacteria
aatgtcgtatctggaccatatccctttttaaaagtaaatcagcaggcaccg

SEQ ID NO: 32575 - DNA, 39 bp, unidentified
  source 1..39: mol_type = unassigned DNA; note = methanogen bacteria
atggctttaaatattccgggtggagaatttttaacaggt

SEQ ID NO: 32576 - DNA, 51 bp, unidentified
  source 1..51: mol_type = unassigned DNA; note = methanogen bacteria
cctgggcttgcggctttaggtgccggtgacattaacacccttgcaagttcc

SEQ ID NO: 32577 - DNA, 36 bp, unidentified; identical to SEQ ID NO: 32543
  source 1..36: mol_type = unassigned DNA; note = methanogen bacteria

SEQ ID NO: 32578 - DNA, 51 bp, unidentified
  source 1..51: mol_type = unassigned DNA; note = methanogen bacteria
gttccatggtttggaggaatgaccggaggtcttgaaacattcttaggatcc

SEQ ID NO: 32579 - DNA, 39 bp, unidentified
  source 1..39: mol_type = unassigned DNA; note = methanogen bacteria
tccagttttgcaggaaccccattaggtatttatgacctt

SEQ ID NO: 32580 - DNA, 45 bp, unidentified
  source 1..45: mol_type = unassigned DNA; note = methanogen bacteria
tatccgatgcataatttcgatttccaatttttgtttttggatgga

SEQ ID NO: 32581 - DNA, 51 bp, unidentified
  source 1..51: mol_type = unassigned DNA; note = methanogen bacteria
aaagtcgtcaacggtccttatccatttttgagagtctatgaacagtcaatt

SEQ ID NO: 32582 - DNA, 33 bp, unidentified
  source 1..33: mol_type = unassigned DNA; note = methanogen bacteria
cttggttcatatgcatatacaggcactggttca

SEQ ID NO: 32583 - DNA, 63 bp, unidentified
  source 1..63: mol_type = unassigned DNA; note = methanogen bacteria
agtttcggagatttaagccaattgacttatggtgttataggaattcatgcttacggatctgtt

SEQ ID NO: 32584 - DNA, 51 bp, unidentified
  source 1..51: mol_type = unassigned DNA; note = methanogen bacteria
tcaagccaatacacattgacattcatgaatcttggaaatatgtccacaata

SEQ ID NO: 32585 - DNA, 60 bp, unidentified
  source 1..60: mol_type = unassigned DNA; note = methanogen bacteria
gttgattttttaaatcatttgcttggaaattcaggtttcggtctggctacaggcaatttg

SEQ ID NO: 32586 - DNA, 102 bp, unidentified
  source 1..102: mol_type = unassigned DNA; note = methanogen bacteria
aatattcaggctggagataattatggcctaattactaaagaaatgagtaaaagtaatgtggcaatccctttttctgaagttagtggtggtgctataggatta

SEQ ID NO: 32587 - DNA, 30 bp, unidentified
  source 1..30: mol_type = unassigned DNA; note = methanogen bacteria
ataccattcggtggtgatttttattttgct

SEQ ID NO: 32588 - DNA, 30 bp, unidentified
  source 1..30: mol_type = unassigned DNA; note = methanogen bacteria
ccaggtattgtaattgcggtattcagcaaa

SEQ ID NO: 32589 - DNA, 30 bp, unidentified
  source 1..30: mol_type = unassigned DNA; note = methanogen bacteria
cttggacctataactgataataccggctat

SEQ ID NO: 32590 - DNA, 36 bp, unidentified
  source 1..36: mol_type = unassigned DNA; note = methanogen bacteria
cttggggatttcgcatatactgaaactggatatctt

SEQ ID NO: 32591 - DNA, 276 bp, unidentified
  source 1..276: mol_type = unassigned DNA; note = methanogen bacteria
gtaggattggatacagaccaaatctacactcgtccagctcctcaaagtcaaatggatgcaggcttggctatcgctccatatgataggggtggagagattttggaaagtcctggtgttactgaagcccaatatcctgataattcacaaaatctaggttggatcaattcatatatgactccaattgctgaaatgctaaaaggcatttccccatactttggaacaagtatatgtgcatccccaggtggagttattgatgaaatcctttactatacaaga

SEQ ID NO: 32592 - DNA, 30 bp, unidentified
  source 1..30: mol_type = unassigned DNA; note = methanogen bacteria
ctattgggacctgtacaattatcagtagtt

SEQ ID NO: 32593 - DNA, 60 bp, unidentified
  source 1..60: mol_type = unassigned DNA; note = methanogen bacteria
gacaatatactgatgtttttcaatacacctcaacagatctttaatataagtaaggaatat

SEQ ID NO: 32594 - DNA, 219 bp, unidentified
  source 1..219: mol_type = unassigned DNA; note = methanogen bacteria
atgggtaatccatttgtagacagtggagtttttgttccattagacagcttacaggatataaccggtaaggaaggagtctcacgtgttcttgttaaaacaggagaagatgtaaacgatacagcaataagcgataagattgaagaggattatgaagacttttcaacattgaccagtgaagagatatcttcaatagcagatgatgttttaggcatattggat

SEQ ID NO: 32595 - DNA, 42 bp, unidentified
  source 1..42: mol_type = unassigned DNA; note = methanogen bacteria
cttagactatttgaagttacagattttgcattaggatactct

SEQ ID NO: 32596 - DNA, 30 bp, unidentified
  source 1..30: mol_type = unassigned DNA; note = methanogen bacteria
acatcaatcggatgtgtgatgcctcaattc

SEQ ID NO: 32597 - DNA, 33 bp, unidentified
  source 1..33: mol_type = unassigned DNA; note = methanogen bacteria
cttggaaattatgtatatactgaaaccggagct

SEQ ID NO: 32598 - DNA, 87 bp, unidentified
  source 1..87: mol_type = unassigned DNA; note = methanogen bacteria
ccctatctttatagttatttcaatcctgttgttgatgatttatctcaaaaagttgagaccggtgtagttaagctgacttttcaagat

SEQ ID NO: 32599 - DNA, 36 bp, unidentified
  source 1..36: mol_type = unassigned DNA; note = methanogen bacteria
tattatgtggctattcagaataatcttttcagggtt

SEQ ID NO: 32600 - DNA, 78 bp, unidentified
  source 1..78: mol_type = unassigned DNA; note = methanogen bacteria
ggtgctgatttcggcacaccggttttaaatatactcattggttatttcattggaaccaatacatcatatacagcattt

SEQ ID NO: 32601 - DNA, 54 bp, unidentified
  source 1..54: mol_type = unassigned DNA; note = methanogen bacteria
ttatggggaaaaggattattttccggcagaggaatactgtattattacatgaca

SEQ ID NO: 32602 - DNA, 132 bp, unidentified
  source 1..132: mol_type = unassigned DNA; note = methanogen bacteria
aatactgcagactggagtattgcatcagtaaatgaatatgcaatggatatttatttaaataaagtatcctattcatggactttggatgaaaaaggtaatattcaagttaataaacagaaagatgtttataag

SEQ ID NO: 32603 - DNA, 72 bp, unidentified
  source 1..72: mol_type = unassigned DNA; note = methanogen bacteria
gaaaaatcaggtaaagataagcctgatactgctttctttgatattaggaacaaaaataaatatgtttcaaga

SEQ ID NO: 32604 - DNA, 189 bp, unidentified
  source 1..189: mol_type = unassigned DNA; note = methanogen bacteria
ttaaatccacaatactatgatcctttagttaaaactcctgcaggtatgaatgcatatgcttccagattccagaatttctatgcaacaaccgttttgggcggagaaaaattaaataaagaattgggtaatcaattggctgatactgtacttaaaataaattctggtgttaacagtaatacgttagcagca

SEQ ID NO: 32605 - DNA, 114 bp, unidentified
  source 1..114: mol_type = unassigned DNA; note = methanogen bacteria
atgggatcgtacaagatctcttttgcccgcgtctatgaagtgattctcatccatctcaccaatctcggtgacggactcaccagcctcgacatgaaggtcgtctggaacgagcgc

SEQ ID NO: 32606 - DNA, 99 bp, unidentified
  source 1..99: mol_type = unassigned DNA; note = methanogen bacteria
tatccggattcctttgcttccgttctgcagcctatgattcaacagttcgagcagaacatagccgatggaaccgtgaccctggctacagattcattgttt

SEQ ID NO: 32607 - DNA, 30 bp, unidentified; identical to SEQ ID NO: 31517
  source 1..30: mol_type = unassigned DNA; note = methanogen bacteria

SEQ ID NO: 32608 - DNA, 36 bp, unidentified
  source 1..36: mol_type = unassigned DNA; note = methanogen bacteria
gccagctggtttttagggcttttaggaatccagtta

SEQ ID NO: 32609 - DNA, 102 bp, unidentified
  source 1..102: mol_type = unassigned DNA; note = methanogen bacteria
ggttactcatctgttgggggtaatacgggccaaatatctcaaaatgcttattcaattggtaatatatcactttctactgggggattaacatcttgggattta

SEQ ID NO: 32610 - DNA, 51 bp, unidentified
  source 1..51: mol_type = unassigned DNA; note = methanogen bacteria
attggtgctccttttggggttgattttacctttgcttcggtgactattata

SEQ ID NO: 32611 - DNA, 30 bp, unidentified
  source 1..30: mol_type = unassigned DNA; note = methanogen bacteria
gctccttttgcaatgtggttttacaatgct

SEQ ID NO: 32612 - DNA, 207 bp, unidentified
  source 1..207: mol_type = unassigned DNA; note = methanogen bacteria
tttaacggaatggaaatagtcaatcatataagtgaaagtaatgattataactcctatttcaataactatgaatcaagatataacaatacacctggtgctgttcagtatattaatatcaatccggcatgctgtgttaataaaaatataacaacaataaattcagaaaatacaacgacaacgttgataacagaaatagaaaaaagtaat

SEQ ID NO: 32613 - DNA, 45 bp, unidentified
  source 1..45: mol_type = unassigned DNA; note = methanogen bacteria
tcctggacaacagatctgggactgtatcatttattactccatgaa

SEQ ID NO: 32614 - DNA, 51 bp, unidentified
  source 1..51: mol_type = unassigned DNA; note = methanogen bacteria
aaaatagtagaaggcccttatccatttttattggttcataatcagccaata

SEQ ID NO: 32615 - DNA, 45 bp, unidentified
  source 1..45: mol_type = unassigned DNA; note = methanogen bacteria
tcgtggacaactgaattaggactgtatcatttattattccatgaa

SEQ ID NO: 32616 - DNA, 51 bp, unidentified
  source 1..51: mol_type = unassigned DNA; note = methanogen bacteria
aaaatagtgaaaggcccttatccattcttattggttcacaatcagccaata

SEQ ID NO: 32617 - DNA, 108 bp, unidentified
  source 1..108: mol_type = unassigned DNA; note = methanogen bacteria
tatgcttccaacagtcttccatcaaatataatatccgattcagtaggttctgtaataaacactaccacactatcctctaattcaactgcaaataacacgatagattcg

SEQ ID NO: 32618 - DNA, 42 bp, unidentified
  source 1..42: mol_type = unassigned DNA; note = methanogen bacteria
gggacaaccgattttggactatattatctattattccatgaa

SEQ ID NO: 32619 - DNA, 51 bp, unidentified
  source 1..51: mol_type = unassigned DNA; note = methanogen bacteria
aaaatagtagaaggtccttatccattcttattggttcacaatcaaccaata

SEQ ID NO: 32620 - DNA, 54 bp, unidentified
  source 1..54: mol_type = unassigned DNA; note = methanogen bacteria
tccagtcaatatacattaacattcatgaatattggaaatctaaccacaatctat

SEQ ID NO: 32621 - DNA, 60 bp, unidentified
  source 1..60: mol_type = unassigned DNA; note = methanogen bacteria
aaagttgattttttaaatcatttgctgggaaattcaggtttcagtttagtcacagggaat

SEQ ID NO: 32622 - DNA, 78 bp, unidentified
  source 1..78: mol_type = unassigned DNA; note = methanogen bacteria
tttttcaatgattccttaatcaatacttatttattccacaccatttccgaactcggaattccaaatgtcaattcccca

SEQ ID NO: 32623 - DNA, 36 bp, unidentified
  source 1..36: mol_type = unassigned DNA; note = methanogen bacteria
gagatgaccggggaccttgagggcctctcccacgga

SEQ ID NO: 32624 - DNA, 108 bp, unidentified
  source 1..108: mol_type = unassigned DNA; note = methanogen bacteria
atgtcgggttccggcaccatagtggatctctatcacaagtactacgggagcgcatcgggcgatctggcctctttggaggccctgaagtcctctgtggtaagttttaaa

SEQ ID NO: 32625 - DNA, 39 bp, unidentified
  source 1..39: mol_type = unassigned DNA; note = methanogen bacteria
ctcgagggcgacatggacgacagggtatacgcccacatg

SEQ ID NO: 32626 - DNA, 42 bp, unidentified
  source 1..42: mol_type = unassigned DNA; note = methanogen bacteria
ttcaacaagaacgacctggatgagaacttcttcttcgtcgat

SEQ ID NO: 32627 - DNA, 33 bp, unidentified
  source 1..33: mol_type = unassigned DNA; note = methanogen bacteria
agttggaattacaatattccaataatttcagtg

SEQ ID NO: 32628 - DNA, 39 bp, unidentified
  source 1..39: mol_type = unassigned DNA; note = methanogen bacteria
ttcctgcaggaaattaacttcaatgcaattattggtgtt

SEQ ID NO: 32629 - DNA, 42 bp, unidentified
  source 1..42: mol_type = unassigned DNA; note = methanogen bacteria
accataggcgctgaaaacatggtaggtctaatcattggaatg

SEQ ID NO: 32630 - DNA, 93 bp, unidentified
  source 1..93: mol_type = unassigned DNA; note = methanogen bacteria
gaggattatctgtatagttatttcaatccagttgtaaataacttaaatcataaagttagttcgggtgttattaaattaacatatatgactatt

SEQ ID NO: 32631 - DNA, 36 bp, unidentified
  source 1..36: mol_type = unassigned DNA; note = methanogen bacteria
tattatgttgctttacaaaataatttttttaaaaca

SEQ ID NO: 32632 - DNA, 129 bp, unidentified
  source 1..129: mol_type = unassigned DNA; note = methanogen bacteria
ggatggctcggacccacctctggatccggaaccacctacaccggatgggatatttggaacaatgttgacagtatcttcaaacctcacaccgaagactacggtggtctgggatacatcaaatacagcgga

SEQ ID NO: 32633 - DNA, 99 bp, unidentified
  source 1..99: mol_type = unassigned DNA; note = methanogen bacteria
atgtacactggaaccgtaactgtcgagacctacactgctggtggagaactcattagcaaagtgacctccaaggtcgcaagcgacggtgttggcttcaag

SEQ ID NO: 32634 - DNA, 135 bp, unidentified
  source 1..135: mol_type = unassigned DNA; note = methanogen bacteria
tctcttaataataatcaaaacttggaaatatttggacaaaaatattatattatttcaacaaatagtatgttccctgccattaataaatatgatgtggtagtctgcaagaatgtaaaacaaaatgaattgagagtt

SEQ ID NO: 32635 - DNA, 201 bp, unidentified
  source 1..201: mol_type = unassigned DNA; note = methanogen bacteria
gatgttataacatatcaaattaatgatgaggttataacacaccgaatttcaagaattgaagaacaagatcaaatttattactatacaaaaggcgacaataatgcagatgaggacaaaagaaaaataacatttaataatattaaaggaaaagaaatatatatcattccaaagattggaaagttaataaaaatattatcaagc

SEQ ID NO: 32636 - DNA, 39 bp, unidentified
  source 1..39: mol_type = unassigned DNA; note = methanogen bacteria
ggcgagatgaccggggacctggagggcctctcccacgga

SEQ ID NO: 32637 - DNA, 108 bp, unidentified
  source 1..108: mol_type = unassigned DNA; note = methanogen bacteria
atgtcgggctccggaaccatcgtggacctctacaacaaatactacgggagcggatcggacaatctggcctctctcgcggccctgaagtccgttgtggtaagttttaaa

SEQ ID NO: 32638 - DNA, 78 bp, unidentified
  source 1..78: mol_type = unassigned DNA; note = methanogen bacteria
tcatttaatgacactttggtaagtacataccttttccatacaatttcagaactaggtatccctaatataaactctcct

SEQ ID NO: 32639 - DNA, 66 bp, unidentified
  source 1..66: mol_type = unassigned DNA; note = methanogen bacteria
ttggaatatttccatttggttcctactgacgccgcacctccgtttgatgtcaatattggcatgacc

SEQ ID NO: 32640 - DNA, 117 bp, unidentified
  source 1..117: mol_type = unassigned DNA; note = methanogen bacteria
gcatatatgaaagcagacggcaattataatataatttcaaaagaacttagttcccaggaaataaaaaatacacagcctagcaatgataccgataccggaatgagtgctattggctat

SEQ ID NO: 32641 - DNA, 45 bp, unidentified
  source 1..45: mol_type = unassigned DNA; note = methanogen bacteria
ggagggctatttggaatggatttgccctatgcaatgaccagtatt

SEQ ID NO: 32642 - DNA, 30 bp, unidentified
  source 1..30: mol_type = unassigned DNA; note = methanogen bacteria
ccaatggtagttaaagggtacttcggaata

SEQ ID NO: 32643 - DNA, 78 bp, unidentified
  source 1..78: mol_type = unassigned DNA; note = methanogen bacteria
tttttcaattcttctttaatcgatgcatatctttttcatactatttctgaacttggaattccaaatgcaaattcacca

SEQ ID NO: 32644 - DNA, 30 bp, unidentified
  source 1..30: mol_type = unassigned DNA; note = methanogen bacteria
tttacagaaattgtctatggctatattgtc

SEQ ID NO: 32645 - DNA, 102 bp, unidentified
  source 1..102: mol_type = unassigned DNA; note = methanogen bacteria
aatattggtgctggagataattatggttcaattactaaagcatttagtcaatccaataaatcaatttcattttccgatgttaaaggagatgccataggatta

SEQ ID NO: 32646 - DNA, 33 bp, unidentified
  source 1..33: mol_type = unassigned DNA; note = methanogen bacteria
ggtgtgccttttggtgcggatatgtattttgca

SEQ ID NO: 32647 - DNA, 42 bp, unidentified
  source 1..42: mol_type = unassigned DNA; note = methanogen bacteria
ccgatgtctaactttgattttgaatttctgtttttgaaagat

SEQ ID NO: 32648 - DNA, 51 bp, unidentified
  source 1..51: mol_type = unassigned DNA; note = methanogen bacteria
aaagtagtttctggaccatatccatttttgaaagtttatgaacagccggtt

SEQ ID NO: 32649 - DNA, 30 bp, unidentified
  source 1..30: mol_type = unassigned DNA; note = methanogen bacteria
tttacagagattctctataaatatattgtt

SEQ ID NO: 32650 - DNA, 63 bp, unidentified
  source 1..63: mol_type = unassigned DNA; note = methanogen bacteria
gcaatatacggatggaattttataatgcaaattgcaactggcggatatgaagtattaaatact

SEQ ID NO: 32651 - DNA, 30 bp, unidentified
  source 1..30: mol_type = unassigned DNA; note = methanogen bacteria
cgagggtcaaatggtactaaccattttaca

SEQ ID NO: 32652 - DNA, 162 bp, unidentified
  source 1..162: mol_type = unassigned DNA; note = methanogen bacteria
gattcatcttgtattatcaattggaccattactgcagtcaataatggtccggacaaggcatcagatgtatgtgttgatctgactgatttcaagacttttggtttggttgttttaaattcatcagacaatgtggcgatttatctgccggtgaaaagatggaat

SEQ ID NO: 32653 - DNA, 42 bp, unidentified
  source 1..42: mol_type = unassigned DNA; note = methanogen bacteria
gcgccaatattcaccgacttctttggaaagcctgaagcattg

SEQ ID NO: 32654 - DNA, 45 bp, unidentified
  source 1..45: mol_type = unassigned DNA; note = methanogen bacteria
aagatacatgaacaaatatatcgctccaaagaatcccaacttcga

SEQ ID NO: 32655 - DNA, 30 bp, unidentified
  source 1..30: mol_type = unassigned DNA; note = methanogen bacteria
ttattatcaaaaaaaggatgtaaattacta

SEQ ID NO: 32656 - DNA, 201 bp, unidentified
  source 1..201: mol_type = unassigned DNA; note = methanogen bacteria
atgtatgggacagtgatattaaatacaattaatgaaaatgatttatccacatatttagatgttgatgaaaatacaagcggtagtggtggatatgtgcaatatgttaatataaatcctgcagaatgtcttaataagaatataactacaaccagaacagggaacacgacaacaacaataataactgaatataattctacaaaa

SEQ ID NO: 32657 - DNA, 42 bp, unidentified
  source 1..42: mol_type = unassigned DNA; note = methanogen bacteria
cctaattccccattaatagaaggatacttctttgaaccatta

SEQ ID NO: 32658 - DNA, 48 bp, unidentified
  source 1..48: mol_type = unassigned DNA; note = methanogen bacteria
agttatgaatttgcaggtttatactttgatagaatatataacctcttc

SEQ ID NO: 32659 - DNA, 81 bp, unidentified
  source 1..81: mol_type = unassigned DNA; note = methanogen bacteria
tttttcaacgcttcacttttcaatacttatgttttccacaccatttcagaactgggaattcccaacggcaactcaccactg

SEQ ID NO: 32660 - DNA, 78 bp, unidentified
  source 1..78: mol_type = unassigned DNA; note = methanogen bacteria
caggcagacagttcgtggacttggggatacaactcgatcagtgacttcggtatctcctacagcactgccgcggccaac

SEQ ID NO: 32661 - DNA, 30 bp, unidentified
  source 1..30: mol_type = unassigned DNA; note = methanogen bacteria
ttcgataccgaacctatctctatcccagac

SEQ ID NO: 32662 - DNA, 78 bp, unidentified
  source 1..78: mol_type = unassigned DNA; note = methanogen bacteria
tttttcaattcttctttaatggatgcatatatttttcatactatttctgaacttggaattcccaatgcaaactctcca

SEQ ID NO: 32663 - DNA, 111 bp, unidentified
  source 1..111: mol_type = unassigned DNA; note = methanogen bacteria
gtatttgcgggagctactagtcttaaacaagtggttactcttctttggacttttaatgttccatggaattgggcatatcatggggatctgtttgcgccatgggttacacag

SEQ ID NO: 32664 - DNA, 30 bp, unidentified
  source 1..30: mol_type = unassigned DNA; note = methanogen bacteria
atgaaccaatacaatttaattaatatgacc

SEQ ID NO: 32665 - DNA, 30 bp, unidentified
  source 1..30: mol_type = unassigned DNA; note = methanogen bacteria
ttctttcttaacaatttaggaattccttat

SEQ ID NO: 32666 - DNA, 270 bp, unidentified
  source 1..270: mol_type = unassigned DNA; note = methanogen bacteria
ttgaatccggaccagttgtatcctcgtccgactcctcagactcagatggatgcaggcttgtcaatagctccctatgacaggggaggagagattttaagtgctcctggtattactaaagcccagtatcctgaaaactccccttcacttggatggataaattcatacatgtctccaattgcagatgcgattcaaggaatatcaccctactttggaacaagtatatattcatctccaggtggtttgatagatgagatcctctactataccaga

SEQ ID NO: 32667 - DNA, 57 bp, unidentified
  source 1..57: mol_type = unassigned DNA; note = methanogen bacteria
gctttgcctcaagctcatttgataacagaagggcagtttataacttttttaaattca

SEQ ID NO: 32668 - DNA, 42 bp, unidentified
  source 1..42: mol_type = unassigned DNA; note = methanogen bacteria
atgtacggtttaattagctactctccaagttttcaggtaact

SEQ ID NO: 32669 - DNA, 36 bp, unidentified
  source 1..36: mol_type = unassigned DNA; note = methanogen bacteria
atgagtccgatcaatgtcagtctgacatttgaaatt

SEQ ID NO: 32670 - DNA, 42 bp, unidentified
  source 1..42: mol_type = unassigned DNA; note = methanogen bacteria
tggatgacagactggggcttatttaacctgctattccagggt

SEQ ID NO: 32671 - DNA, 51 bp, unidentified
  source 1..51: mol_type = unassigned DNA; note = methanogen bacteria
gaaaaagtaatcggtccgtatccatttttaatggtgaatacacagcctgtt

SEQ ID NO: 32672 - DNA, 87 bp, unidentified
  source 1..87: mol_type = unassigned DNA; note = methanogen bacteria
tttgatttgcccatatttgatttgcatcatctgctgctgaacttcaacgaaacaattgacatgttctttgccaacagcccggaatac

SEQ ID NO: 32673 - DNA, 42 bp, unidentified
  source 1..42: mol_type = unassigned DNA; note = methanogen bacteria
tcctggacaaccgatttaggactgtatcatctgttattcaat

SEQ ID NO: 32674 - DNA, 51 bp, unidentified
  source 1..51: mol_type = unassigned DNA; note = methanogen bacteria
aaaatagttgaaggaccatatccatttttgttggtaaataagcagccaata

SEQ ID NO: 32675 - DNA, 273 bp, unidentified
  source 1..273: mol_type = unassigned DNA; note = methanogen bacteria
ggattgaatacagatcaaatctatatccgtccggctcctcaaagtcaaatggatgcaggccttgcaattgcgccatatgatagaggtggagaagttttagtatctcctggtgttacagaagcccaatatcctgaaaattcaaagaatcttggttggattaattcttatatgactcctatagccgagctgctaaaagccttgtctccatactttggaacaagtatctgtgcatctcctggaggacttattgatgaaatcctttattacacaaga

SEQ ID NO: 32676 - DNA, 48 bp, unidentified
  source 1..48: mol_type = unassigned DNA; note = methanogen bacteria
ctaattttaaacgaagacaatacgtttatagatcatactgatgaaaat

SEQ ID NO: 32677 - DNA, 30 bp, unidentified
  source 1..30: mol_type = unassigned DNA; note = methanogen bacteria
gaagacaatacgtttatagatcatactgat

SEQ ID NO: 32678 - DNA, 42 bp, unidentified
  source 1..42: mol_type = unassigned DNA; note = methanogen bacteria
tggacaactgattggggattgcattacctgctatttgaaggg

SEQ ID NO: 32679 - DNA, 51 bp, unidentified
  source 1..51: mol_type = unassigned DNA; note = methanogen bacteria
aaaatagtggaaggtccctatcccttccttttggtctataaccagcccgtt

SEQ ID NO: 32680 - DNA, 57 bp, unidentified
  source 1..57: mol_type = unassigned DNA; note = methanogen bacteria
gcattgcctgaaataaagatattgacctatggggatttcatcggattcatacactcc

SEQ ID NO: 32681 - DNA, 117 bp, unidentified
  source 1..117: mol_type = unassigned DNA; note = methanogen bacteria
ctctatttacatactttttctattctttttcttagtttttcaacagaatttcctaaaacaagtgcagaatacattgcgcctccggctcctgcaccctctttaacaaatcctttcaaa

SEQ ID NO: 32682 - DNA, 42 bp, unidentified
  source 1..42: mol_type = unassigned DNA; note = methanogen bacteria
attgatattaaaagctaccttgagaacactggaaatctatgg

SEQ ID NO: 32683 - DNA, 36 bp, unidentified
  source 1..36: mol_type = unassigned DNA; note = methanogen bacteria
atgaataatagtaatgatttaagcattacttcattt

SEQ ID NO: 32684 - DNA, 54 bp, unidentified
  source 1..54: mol_type = unassigned DNA; note = methanogen bacteria
cattactgtttatttggatttaattattttgaatctccatttaaagctcattat

SEQ ID NO: 32685 - DNA, 36 bp, unidentified
  source 1..36: mol_type = unassigned DNA; note = methanogen bacteria
ataaataatagcaatgatttaagcattacttcattt

SEQ ID NO: 32686 - DNA, 267 bp, unidentified
  source 1..267: mol_type = unassigned DNA; note = methanogen bacteria
ttgaatccggaccaattgtatgtcaggcctgctcctcaggagcaggttgatgaaggtttggcaattgcaccttatgacaggggtggagtgcctttaaaagagccaggtaatattgaccctcaatatcctgaaaatgcagagagcttgggtatgattacgggttatatgtcaccgctggcggaatttgtctcttcgatttcaccttacttcggtacatcaatatattcatctccgggaggacttatagatgaaatactgtactataca

SEQ ID NO: 32687 - DNA, 270 bp, unidentified
  source 1..270: mol_type = unassigned DNA; note = methanogen bacteria
ttaaatccagatcaattatatgttaggccagctcctcaagttcaagtagatgaaggtttagctatcgccccatatgacaggggtggtgaagttttaaaatcgcctggaaatataaatccgcaatatcctgaaaatgcggcagaattgggtatgataacagcatatatgtctccattggctcaatggatatcttcgatatctccatactttggaacatcaatttattcatctccgggtggtcttatagatgaagttttatattatactagg

SEQ ID NO: 32688 - DNA, 273 bp, unidentified
  source 1..273: mol_type = unassigned DNA; note = methanogen bacteria
ggattaaatgtagaccaaatttatccaagacctgagcctcaggttcaagtggatcagggtatggcaatggctccttatgcccgtggaggtgaacctcttaaagagagaggtataactatatctcaatatccacagtatgagcctaatttaggttggattaactcttacgtttcaccactgtctcaatttgttatgagcatatcaccatactttggtacgagtatctactcatctcctggtggacttatagacgagattttatactataccaga

SEQ ID NO: 32689 - DNA, 270 bp, unidentified
  source 1..270: mol_type = unassigned DNA; note = methanogen bacteria
ttaaatcctgatcaattatatcctagacctgctccacaggttcaggtggatgaaggtttagccatcgctccctacgacagaggtggtgaggttttatcacaacctggaataattaaaccacagtatcctgataatgcagaggcactgggaatgattactgggtatatgtctcctccggcacaatggatatcatcaatatctccatatttcggaacatcaatttattcatctcctggaggacttatagatgaaatattatattatacaaga

SEQ ID NO: 32690 - DNA, 267 bp, unidentified
  source 1..267: mol_type = unassigned DNA; note = methanogen bacteria
ttaaacccagaccaaatttatgttagacccgctccacaagagcaagtagatgaaggtttggccctcgctccttatgataggggaggagagcccctaaaagaagcaggtgtaattgatcctcaatatcctgaaaatgctgcaagcttaggaatgattacaggatacatgtcaccgattgctcaatggatatcatcaatatccccatactttggaacatcaatatattcatctcctggtggacttatagatgaaatactgtattataca

SEQ ID NO: 32691 - DNA, 270 bp, unidentified
  source 1..270: mol_type = unassigned DNA; note = methanogen bacteria
ttaaatccagatcaaatatatcctagagtagaacctcaagttcaagttgaaaataatttatctatggctccttatgaccgtggtggagaagtacttaaaagtcctggtattacagattctcaatatcctcaatatgaacctgaattaggttggattaattcatatgtttctcctcttgcccagtttataaagagtatttcgccatattttggaacaagtatatattcctcacctggtggattaatagatgagattttatattatactaga

SEQ ID NO: 32692 - DNA, 81 bp, unidentified
  source 1..81: mol_type = unassigned DNA; note = methanogen bacteria
acatttaaagatacattaatcaacacttatctcattcacaccatttcagaattaggaattccaaattccaactccccatat

SEQ ID NO: 32693 - DNA, 267 bp, unidentified
  source 1..267: mol_type = unassigned DNA; note = methanogen bacteria
ttaaatccagatcaattatatgttagaccagctccgcaagagcaaatcgatgaaggtttagctatcgcaccttacgacaggggcggagaagttttaactcagcctggtgaaattaatcctcaatatcctgataatgccgccagtttaggtatgataacaggatatatgtcaccgctggcacagttcatctcttcaatttctccttactttggaacatcaatctattcatcccctggtggattaattgatgaaatcctctattataca

SEQ ID NO: 32694 - DNA, 267 bp, unidentified
  source 1..267: mol_type = unassigned DNA; note = methanogen bacteria
ctgaatccagatcaattatatgttagaccagctcctcaagagcaaattgatgacggtctggcaatcgctccttatgacagaggtggtgaagttttaacccaacctggcagtatccatcctcaatatccggaaaatgcagcaagcttgggtatgataacaggatacatgtcaccgctggcccagtttgtatcttctatatctccgtacttcggaacttcaatatattcatcccctggaggacttatagatgaaatattatactatacc

SEQ ID NO: 32695 - DNA, 57 bp, unidentified
  source 1..57: mol_type = unassigned DNA; note = methanogen bacteria
atatttgaaatcaatggcagaaattatactcgtgtaagtgatgagaatggaaccgct

SEQ ID NO: 32696 - DNA, 276 bp, unidentified
  source 1..276: mol_type = unassigned DNA; note = methanogen bacteria
aactacacaatcaaaactttattcaacggcacaacagttgaaaacacaattacagtacttccaacattaatagctgacaacctagtaaaatactataaaaatgcttcacaattctttatttcattaattgatggtgaaagtaatcctatcagtggtgttaacattaccatgaacatcaatggagtattttataaccgtacaactaatgaaaagggaacagccaaattaaacattaacttacctcctggcgagtacatattaacagcaattgatcca

SEQ ID NO: 32697 - DNA, 87 bp, unidentified
  source 1..87: mol_type = unassigned DNA; note = methanogen bacteria
cttgatggtcagggaaatccattagcaaatgctgcagtcaaattcaacatcaacggagtattctacacaaaacacaccgattctaaa

SEQ ID NO: 32698 - DNA, 60 bp, unidentified
  source 1..60: mol_type = unassigned DNA; note = methanogen bacteria
tacattattacctcagaatacgatggattaaaaatttcaaacacaataactattaatgat

SEQ ID NO: 32699 - DNA, 120 bp, unidentified
  source 1..120: mol_type = unassigned DNA; note = methanogen bacteria
ggatattttgaagccggagacagctatggcgagatgagtgaaatgattgcatttggccatgagcacaatatcaaaaccaatatgagcgttacccaggatggcactagtgccctggaatat

SEQ ID NO: 32700 - DNA, 54 bp, unidentified
  source 1..54: mol_type = unassigned DNA; note = methanogen bacteria
ttcattgcaggccattatataggacaggatttcgtattcggtttggtttcgaca

SEQ ID NO: 32701 - DNA, 30 bp, unidentified
  source 1..30: mol_type = unassigned DNA; note = methanogen bacteria
cagggaatagtttcatcagtttttggaatt

SEQ ID NO: 32702 - DNA, 270 bp, unidentified
  source 1..270: mol_type = unassigned DNA; note = methanogen bacteria
ttgaatcccgaacagctgtatgtcaggcccgctcctcaagtgcaggttgatgaaggggtggctatcgcaccttatgcaagagggggagtgccgttggaagaggcaggaaacatctctcctcaatatcctgaaaatgcagagagcttaggaatgattacgggatacatgtcgccgctggcagagtggatatcatcaatttcgccttacttcggcacgacaatatattcatctccaggaggacttatagatgaaatactgtactatacaagg

SEQ ID NO: 32703 - DNA, 267 bp, unidentified
  source 1..267: mol_type = unassigned DNA; note = methanogen bacteria
ttaaatccagatcaattatatgttagacccgctccccaagagcaagtagatgaaggattggccattgccccttatgacaggggtggtgaagtcttaactcagcctggaattatcaatcctcagtatcctgataatgcggcaagtctgggaatgattacaggatatatgtcaccgattgctgagtggatatctgcgatttccccttactttggaacctcaatctattcatctcctggaggactcatagatgaaatattatactataca

SEQ ID NO: 32704 - DNA, 81 bp, unidentified
  source 1..81: mol_type = unassigned DNA; note = methanogen bacteria
tcatttaatgacacattagccaacacttatctcattcataccatttcagaattgggaattccgaatttaaactctccatat

SEQ ID NO: 32705 - DNA, 267 bp, unidentified
  source 1..267: mol_type = unassigned DNA; note = methanogen bacteria
ttaaatccagatcaactgtatgttagacccgctcctcaagagcaaatagatgaaggtttggcaatcgctccttatgacaggggcggtgaagttttaaccgagccgggaaatatcaatcctcaatacccagaaaatgcagcgcagctgggtatgattacaggatatatgtctccaatatcacaatgggtatcctctatatccccatactttggaacatcaatttactcatctcctggcggacttatagatgaaatattgtattataca

SEQ ID NO: 32706 - DNA, 267 bp, unidentified
  source 1..267: mol_type = unassigned DNA; note = methanogen bacteria
ctaaatcctgatcagttatatgtcaggccggatcctcaacagcagattgatgaaggttcatctcttgcaccttatgacagaggtggtgagcctttaaaagaagcgggtgatattaatccgcagtatcttgaaaatgcagcagttttagggatgattactggatatatgtctccgctggcggaatgggtgtcatctatttccccttacttcggtacttcaatatattcatctcccggaggacttatagatgaaatactgtattataca

SEQ ID NO: 32707 - DNA, 78 bp, unidentified
  source 1..78: mol_type = unassigned DNA; note = methanogen bacteria
tctgtaaatgatacattgttcaacatgtatgtttttcacactatctctgatttgggaattccaaatggcaattgtccc

SEQ ID NO: 32708 - DNA, 99 bp, unidentified
  source 1..99: mol_type = unassigned DNA; note = methanogen bacteria
ggtgttgaggatatagtttcttattattatagagaatatcaatattactatgcctctgcttatatggattataaaggactatactactctataatggga

SEQ ID NO: 32709 - DNA, 267 bp, unidentified
  source 1..267: mol_type = unassigned DNA; note = methanogen bacteria
ttaaattctgatcaattgtatgtaaggccagctccacaagatcaaattgatgcaggacttgctttagcaccttatgataggggtggggaagttttaaaagaccctggctttattaaacctcagtttccagaaaacgctgagcaattaggtatgattacaggatatatgtctccattagctcaatggatatcttcaatttcaccttatttcggcacatcaatttattcatctcctggtggacttattgatgaaatattgtattatact

SEQ ID NO: 32710 - DNA, 66 bp, unidentified
  source 1..66: mol_type = unassigned DNA; note = methanogen bacteria
ggtccagatttaatgtttgtatttggagactacataaaaacacctattgcaattggtgttgcaaat

SEQ ID NO: 32711 - DNA, 267 bp, unidentified
  source 1..267: mol_type = unassigned DNA; note = methanogen bacteria
ttaaatcctgatcaattatatgtcaaacctttttcgcaggtacaagtggataaaggtttgcctcttgctccttatgatagggatggtgatccattggttcaaccgggaaatattcttcctcagtttccggataatgttaaaagtttgggaatggtaactggatatatgtctccattagctcaatttgtatcgtctgtatctccgtattttggtacatcaatttattcatctcctggtggacttattgatgaaatattgtattatact

SEQ ID NO: 32712 - DNA, 267 bp, unidentified
  source 1..267: mol_type = unassigned DNA; note = methanogen bacteria
ttaaatccagaccaattgtatcctagacctgctccgcaggagcaagttgatgcaggacttgcaatcgcaccttatgacaggggcggagaggtcctggtcgagcctggggaaataaaccctcaatatcctgacaatgcagctagtttaggaatgattactgcgtacatgtcaccattggcccaatggatatcatcaatttcgccgtacttcggtacatcaatctattcatctcctggtggattaattgatgaaatactgtattataca

SEQ ID NO: 32713 - DNA, 51 bp, unidentified
  source 1..51: mol_type = unassigned DNA; note = methanogen bacteria
atgaacctaggccaggcaatctacgacttattcggcgccaacggcgaatgg

SEQ ID NO: 32714 - DNA, 267 bp, unidentified
  source 1..267: mol_type = unassigned DNA; note = methanogen bacteria
ttgaatcctgaccagttgtatgtcaggcccgctccacaggagcaaatagatgaaggtttggcaatagcaccatatgataggggaggacaaccgttaacccaacctggagaaattgatcctcagtatccggaaaatgctgagagtttgggaatgattacaggttatatgtcacctctggcgcagtggatatcatcaatttcaccttacttcggaacttcaatatattcatccccaggaggacttatagatgaaattctgtattataca

SEQ ID NO: 32715 - DNA, 267 bp, unidentified
  source 1..267: mol_type = unassigned DNA; note = methanogen bacteria
ttaaatccagatcagttatatgttagaccggctcctcaggagcaaatagatgaaggtttggccatagcaccttatgacaggggcggcattgttttaaaggaacccggtgagatacatccccaatatcctgataatgcggccagtctgggaatgataacagcatatatgtcaccattggctcaatggatatcatcaatatctccatacttcggaacatcaatttattcatctcctggtggacttattgatgaaatactctactatact

SEQ ID NO: 32716 - DNA, 36 bp, unidentified
  source 1..36: mol_type = unassigned DNA; note = methanogen bacteria
aatctttttactgagcccaatcctttaattaaatat

SEQ ID NO: 32717 - DNA, 78 bp, unidentified
  source 1..78: mol_type = unassigned DNA; note = methanogen bacteria
aataattcttcaaattcagattatgggattttcattgtaacttatttagttccatttattttcgtaaatttttcatgg

SEQ ID NO: 32718 - DNA, 69 bp, unidentified
  source 1..69: mol_type = unassigned DNA; note = methanogen bacteria
atgacaacaattaatactaacttgtttaacttcataaatcacggtttggaaaatccgcttctaaatact

SEQ ID NO: 32719 - DNA, 87 bp, unidentified
  source 1..87: mol_type = unassigned DNA; note = methanogen bacteria
gtaaacgaaccaaggccagaggcaacactgtccaatgttcacctgctgatagtggaaaatgatccgagatctttcccttcgggacat

SEQ ID NO: 32720 - DNA, 120 bp, unidentified
  source 1..120: mol_type = unassigned DNA; note = methanogen bacteria
ggatattttgaagctggagatagctatggcgaaatgagtgaaatgattgcatttagccatgaacacaatatcaaaaccaatattaccagcaatgataatggcacaagcgctttggaatat

SEQ ID NO: 32721 - DNA, 51 bp, unidentified
  source 1..51: mol_type = unassigned DNA; note = methanogen bacteria
atcgcaggccattatataggacaggattttctattcggtatggtttcaaca

SEQ ID NO: 32722 - DNA, 30 bp, unidentified
  source 1..30: mol_type = unassigned DNA; note = methanogen bacteria
cccggaataatttcatcagtctttggaatt

SEQ ID NO: 32723 - DNA, 270 bp, unidentified
  source 1..270: mol_type = unassigned DNA; note = methanogen bacteria
ttgaatcctgaccagttatatacaagacctgctccacaggaacaggtggatgacggtctgtcaatcgccccttatgacaggggaggcgaagttatgaaaacacccggaacaatcaatccccaatatccagaaaatgcagcggaattgggaatgattacaggatatatgtcacctctggcgcaatggatatcatcaatatccccttacttcggaacatcaatttattcatctccgggcggattgatagatgagatattgtattatacaaga

SEQ ID NO: 32724 - DNA, 78 bp, unidentified
  source 1..78: mol_type = unassigned DNA; note = methanogen bacteria
tttttcaatgcttcattttctaatgcttatgtttttcatgccatttcagagctggggattccaaatctgaattcccct

SEQ ID NO: 32725 - DNA, 111 bp, unidentified
  source 1..111: mol_type = unassigned DNA; note = methanogen bacteria
atcaacatcggagatcattacggccagattacaaagggatttcttcaggcaaaagccaatggaactctgagtgtgaatgagtctatgcctaaactgaacacctttgatttg

SEQ ID NO: 32726 - DNA, 42 bp, unidentified
  source 1..42: mol_type = unassigned DNA; note = methanogen bacteria
ggaatgcccttcggtactgatttgacctttttttcagtcacc

SEQ ID NO: 32727 - DNA, 30 bp, unidentified
  source 1..30: mol_type = unassigned DNA; note = methanogen bacteria
catttacaatatgtttttggtttcgattca

SEQ ID NO: 32728 - DNA, 51 bp, unidentified
  source 1..51: mol_type = unassigned DNA; note = methanogen bacteria
attggaaatcaagcgattggcagtgatactgtacctggattaatttcatct

SEQ ID NO: 32729 - DNA, 111 bp, unidentified
  source 1..111: mol_type = unassigned DNA; note = methanogen bacteria
gcttatagtagtgtaggtgaaaattatggtgcgatttctaatgcattatggcacaaaaatgtaactggaaatcagacgtctaatatgtcttttaaacttaatactattgat

SEQ ID NO: 32730 - DNA, 30 bp, unidentified
  source 1..30: mol_type = unassigned DNA; note = methanogen bacteria
ataccatttggaacagaccttacatattct

SEQ ID NO: 32731 - DNA, 33 bp, unidentified
  source 1..33: mol_type = unassigned DNA; note = methanogen bacteria
gatccaatttcaacctggtattatggacttaat

SEQ ID NO: 32732 - DNA, 45 bp, unidentified
  source 1..45: mol_type = unassigned DNA; note = methanogen bacteria
attcctcaaccttctactttaaatttagaagggctttggaattta

SEQ ID NO: 32733 - DNA, 30 bp, unidentified
  source 1..30: mol_type = unassigned DNA; note = methanogen bacteria
atccagcaacttggccaaatcggtgtactg

SEQ ID NO: 32734 - DNA, 45 bp, unidentified
  source 1..45: mol_type = unassigned DNA; note = methanogen bacteria
gcttttgcctttttttcagttacaggggtgccggaatcagtattc

SEQ ID NO: 32735 - DNA, 96 bp, unidentified
  source 1..96: mol_type = unassigned DNA; note = methanogen bacteria
atggctgatattttcagtatgtttagtggtggaatattgaatgtattaaatacattatttaatccgttacttgcaatggatccaaatccacaaaat

SEQ ID NO: 32736 - DNA, 120 bp, unidentified
  source 1..120: mol_type = unassigned DNA; note = methanogen bacteria
attatcagtaatttggttttaattttaccggctcctgcttattggcttactttaactccattctggcatttcatcggtcaatttttatatggaggaaaagctactatcccttatggaatt

SEQ ID NO: 32737 - DNA, 261 bp, unidentified
  source 1..261: mol_type = unassigned DNA; note = methanogen bacteria
cgctcattaggcgagatgacaataacatcctcaacaagccccatatactccctgcagtcaagggcggactttactctgcacgtgctgaatctgcttgattttctcggcggaaacttcggactgacccatggacacatgcttgcaagctcaattcctggaagcgaccttggaccaaggatgatggtcggaaggctgattgcatggagaagcgaagtgacggttacgccaactttaatcggccaaatggtggtcgacttcgga

SEQ ID NO: 32738 - DNA, 42 bp, unidentified
  source 1..42: mol_type = unassigned DNA; note = methanogen bacteria
tatgaatttgttctggtaatgcagacacttccatataatgaa

SEQ ID NO: 32739 - DNA, 96 bp, unidentified
  source 1..96: mol_type = unassigned DNA; note = methanogen bacteria
atggctgatatttttggtatgttaagtggtggagtattaaatgctctgaatgcattattcaatccactacttgcaatggatcctaatccacaaaat

SEQ ID NO: 32740 - DNA, 123 bp, unidentified
  source 1..123: mol_type = unassigned DNA; note = methanogen bacteria
tctgtcatcagtcagttagttttaatcttacctgctcctgcatattggcttactttaactccattctggcatttcattggtcaatttttatatggaggaaaagctactattccatacggtatt

SEQ ID NO: 32741 - DNA, 42 bp, unidentified
  source 1..42: mol_type = unassigned DNA; note = methanogen bacteria
tatgaatttgttctggtaatgcaaacacttccatataatgaa

SEQ ID NO: 32742 - DNA, 96 bp, unidentified
  source 1..96: mol_type = unassigned DNA; note = methanogen bacteria
atggtagatgttattggtatgttaatgggtggggtgaataatgttttaaattcaattttcaatccaattcttgcaatggatccaaatcctcacaat

SEQ ID NO: 32743 - DNA, 126 bp, unidentified
  source 1..126: mol_type = unassigned DNA; note = methanogen bacteria
acatctgcgattcatgatttagtccttattttacctcaaccagtttattgggttactttaactcctatttggcatgctattggtggtttcatatatggtggtaaagcaactattccttatggaatt

SEQ ID NO: 32744 - DNA, 78 bp, unidentified
  source 1..78: mol_type = unassigned DNA; note = methanogen bacteria
tactttaatgcttcttttttagatacttacatttttcacacaatttctgaactaggaattccaaattcaaactctcct

SEQ ID NO: 32745 - DNA, 96 bp, unidentified
  source 1..96: mol_type = unassigned DNA; note = methanogen bacteria
atttcagaccctttaaatcttccagattttgatttaaaagatatgttgctgaatttaccaaaaacaatacatgttttatattcaaataatcctgtc

SEQ ID NO: 32746 - DNA, 51 bp, unidentified
  source 1..51: mol_type = unassigned DNA; note = methanogen bacteria
gcaggatacatcggatccgtggagggcctcatgggactcgggaagatcgcc

SEQ ID NO: 32747 - DNA, 81 bp, unidentified
  source 1..81: mol_type = unassigned DNA; note = methanogen bacteria
tttttcaatgattcattaattaatacttatatgttccatacaatttccgaattaggaattccaaatgtaaattcaccatta

SEQ ID NO: 32748 - DNA, 42 bp, unidentified
  source 1..42: mol_type = unassigned DNA; note = methanogen bacteria
atcaaggtggttaatttgaatttttatggaatggaagttact

SEQ ID NO: 32749 - DNA, 57 bp, unidentified
  source 1..57: mol_type = unassigned DNA; note = methanogen bacteria
ctgccttcacctgtctggtatacaggagattcaagcctggcattcgtattcacccag

SEQ ID NO: 32750 - DNA, 78 bp, unidentified
  source 1..78: mol_type = unassigned DNA; note = methanogen bacteria
tttttcaacgattcattttctagtacttatcttttccataccatttcagagctgggaattccgaatctgaattcccca

SEQ ID NO: 32751 - DNA, 108 bp, unidentified
  source 1..108: mol_type = unassigned DNA; note = methanogen bacteria
atatctgccggagaacattatggcatgatttcaaaagctctctttcaggcaaaagccaatgggactttagtcagtaatgatgatgtgcctaaatccacttctttggga

SEQ ID NO: 32752 - DNA, 30 bp, unidentified
  source 1..30: mol_type = unassigned DNA; note = methanogen bacteria
attccattcggtaatgactttgtttattct

SEQ ID NO: 32753 - DNA, 30 bp, unidentified
  source 1..30: mol_type = unassigned DNA; note = methanogen bacteria
gaaccgataatgctatggtattatggaata

SEQ ID NO: 32754 - DNA, 54 bp, unidentified
  source 1..54: mol_type = unassigned DNA; note = methanogen bacteria
atgggaggttacgtcgagactctgaacggcatcctgggtctgggcaaggtcgtt

SEQ ID NO: 32755 - DNA, 96 bp, unidentified
  source 1..96: mol_type = unassigned DNA; note = methanogen bacteria
atggctaatttttttggtatgattagtggggaaattttcaatgcccttaatgctattttcaatccgattttatcaatggatccaaatccccataat

SEQ ID NO: 32756 - DNA, 123 bp, unidentified
  source 1..123: mol_type = unassigned DNA; note = methanogen bacteria
tcagctattcataatttagttttaattctcccagagcctgtctattggattactcttactccattctggcacttcattggaggtttcatgtatggaggtaaagcaacaattccgtttggaatt

SEQ ID NO: 32757 - DNA, 48 bp, unidentified
  source 1..48: mol_type = unassigned DNA; note = methanogen bacteria
aaaattccacagccggaaacacttagtctatccggattatggggttta

SEQ ID NO: 32758 - DNA, 111 bp, unidentified
  source 1..111: mol_type = unassigned DNA; note = methanogen bacteria
attaacatcggagatcattacggtcagattacaaagggattttttcaggcaaaagccaatggaactctgaatgtgaatgagtctatgcctaaactgaacacctttgatttg

SEQ ID NO: 32759 - DNA, 45 bp, unidentified
  source 1..45: mol_type = unassigned DNA; note = methanogen bacteria
ggaatgcccttcggctatgattttacttttcatgccctaacgatt

SEQ ID NO: 32760 - DNA, 78 bp, unidentified
  source 1..78: mol_type = unassigned DNA; note = methanogen bacteria
tttttcaatgcttcatttttcaatacttatgtttttcatgccatttctgaattggggattccaaatttaaattcgcca

SEQ ID NO: 32761 - DNA, 78 bp, unidentified
  source 1..78: mol_type = unassigned DNA; note = methanogen bacteria
ttttttaattcttctttaatggatgcatatatttttcatactatttctgaacttggaattccaaatgcaaactctcca

SEQ ID NO: 32762 - DNA, 78 bp, unidentified
  source 1..78: mol_type = unassigned DNA; note = methanogen bacteria
tttttcaattcttctatttttaacacatatgttttccatacaatttcagaacttggaattcccaatgcaaattctccg

SEQ ID NO: 32763 - DNA, 81 bp, unidentified
  source 1..81: mol_type = unassigned DNA; note = methanogen bacteria
acatttaatgacacattagtcaacacttatctcgaatacaccatttcaactttgggaattccgaattcagactccccatat

SEQ ID NO: 32764 - DNA, 30 bp, unidentified
  source 1..30: mol_type = unassigned DNA; note = methanogen bacteria
gtacaaaatgttgcatattactctccaacg

SEQ ID NO: 32765 - DNA, 48 bp, unidentified
  source 1..48: mol_type = unassigned DNA; note = methanogen bacteria
ttggcaaatggaaaaattactcacaatcagctttccgtcacttcattt

SEQ ID NO: 32766 - DNA, 81 bp, unidentified
  source 1..81: mol_type = unassigned DNA; note = methanogen bacteria
acatttaatgacacattagtcaacacttatctcgaatacaccatttcaactttgggaattcctaattcagactccccatat

SEQ ID NO: 32767 - DNA, 90 bp, unidentified
  source 1..90: mol_type = unassigned DNA; note = methanogen bacteria
tttttccacagccagccacagcttgcagcaacctatgccgcaaccccaccagttgcagcaaatgagatggcaacaacattacttggaccg

SEQ ID NO: 32768 - DNA, 78 bp, unidentified
  source 1..78: mol_type = unassigned DNA; note = methanogen bacteria
tttttcaacgcttctttttttaacacctattttttccataccatatctcaactcggaattccaaatggaaattctccg

SEQ ID NO: 32769 - DNA, 96 bp, unidentified
  source 1..96: mol_type = unassigned DNA; note = methanogen bacteria
atatacaatggagataaattaaatttcatatcaaatgcaatatcttcaaacccggtcaataataatgtaagcaccgcttcaagctcaatcagctta

SEQ ID NO: 32770 - DNA, 39 bp, unidentified
  source 1..39: mol_type = unassigned DNA; note = methanogen bacteria
tatgttttcggttttgatttgaaattcgcatgctcaaca

SEQ ID NO: 32771 - DNA, 60 bp, unidentified
  source 1..60: mol_type = unassigned DNA; note = methanogen bacteria
ggctccggtgcgtattacgattccgtccacacgatcttcggagtgggtgccgagcctgcg

SEQ ID NO: 32772 - DNA, 81 bp, unidentified
  source 1..81: mol_type = unassigned DNA; note = methanogen bacteria
ttctttaacgcttcactttttgacgcttacgtttttcatgcaatttccgaacttggaattcccgatgcgaattctcccctg

SEQ ID NO: 32773 - DNA, 78 bp, unidentified
  source 1..78: mol_type = unassigned DNA; note = methanogen bacteria
tttttcaatgattccatttttaatacttatgtttttcatacgatttcagaacttggaattccaaatgggaactctcct

SEQ ID NO: 32774 - DNA, 78 bp, unidentified
  source 1..78: mol_type = unassigned DNA; note = methanogen bacteria
tttttcaatgcttcacttgcaaatacttatatcttccacaccatttccgaacttggaattccaaatgccaattctcct

SEQ ID NO: 32775 - DNA, 78 bp, unidentified
  source 1..78: mol_type = unassigned DNA; note = methanogen bacteria
tttttcaatgcttctttttttaacacctatattttccataccatatctgaactcggaattccaaatggaaactctccg

SEQ ID NO: 32776 - DNA, 78 bp, unidentified
  source 1..78: mol_type = unassigned DNA; note = methanogen bacteria
tttttcaatgatttcatcggcaatacatatattttacatactatttcagagcttggaattccacatccaaactcacca

SEQ ID NO: 32777 - DNA, 84 bp, unidentified
  source 1..84: mol_type = unassigned DNA; note = methanogen bacteria
actcatttcaatgcttcactttacaatacatatgccatccacaccatttccgaactcggaatcccaaatgttaactcgccgcta

SEQ ID NO: 32778 - DNA, 78 bp, unidentified
  source 1..78: mol_type = unassigned DNA; note = methanogen bacteria
tttttcaatgcttcttttgcggatacttatattttcaatactatttctgcactcggaataccaaattccgattcacca

SEQ ID NO: 32779 - DNA, 51 bp, unidentified
  source 1..51: mol_type = unassigned DNA; note = methanogen bacteria
acaaaaataatatattatatccaaataccgtatcttggattaactatccct

SEQ ID NO: 32780 - DNA, 78 bp, unidentified
  source 1..78: mol_type = unassigned DNA; note = methanogen bacteria
ttttttaatgatttcattggtgatacatatgttctacatgccatttcagaacttggaattccacattcaaattcacca

SEQ ID NO: 32781 - DNA, 78 bp, unidentified
  source 1..78: mol_type = unassigned DNA; note = methanogen bacteria
ttatttaatgcttcttttgtaaacacctatctgttccataccatttccgagttggggattccaaattccaactctcca

SEQ ID NO: 32782 - DNA, 78 bp, unidentified
  source 1..78: mol_type = unassigned DNA; note = methanogen bacteria
tttttcaattcatctatttttgatacatatgtcttccacaccatttccgagctaggaattccaaatgcaaattctcca

SEQ ID NO: 32783 - DNA, 39 bp, unidentified
  source 1..39: mol_type = unassigned DNA; note = methanogen bacteria
atagttatacctctacattggactccagttccaattaca

SEQ ID NO: 32784 - DNA, 51 bp, unidentified
  source 1..51: mol_type = unassigned DNA; note = methanogen bacteria
ataccatggtttgctggaatgactggaggaatagaaatagtattggaatct

SEQ ID NO: 32785 - DNA, 36 bp, unidentified
  source 1..36: mol_type = unassigned DNA; note = methanogen bacteria
ttatcccaaacaacaggaatacaagtaagtttagtt

SEQ ID NO: 32786 - DNA, 36 bp, unidentified
  source 1..36: mol_type = unassigned DNA; note = methanogen bacteria
ggaatatccacgggaggtaatgttaatccatggact

SEQ ID NO: 32787 - DNA, 33 bp, unidentified
  source 1..33: mol_type = unassigned DNA; note = methanogen bacteria
atggtgtttgttccaccaacttggtatatgggt

SEQ ID NO: 32788 - DNA, 78 bp, unidentified
  source 1..78: mol_type = unassigned DNA; note = methanogen bacteria
tttttcaatgcttcactattcaatacctatgtttttcataccatctccgaacttggaattccaaatggaaattcgccg

SEQ ID NO: 32789 - DNA, 66 bp, unidentified
  source 1..66: mol_type = unassigned DNA; note = methanogen bacteria
ttggaatacctattttatttattcttcgctaatttcataggtacggccggaggatttggtgctttt

SEQ ID NO: 32790 - DNA, 48 bp, unidentified
  source 1..48: mol_type = unassigned DNA; note = methanogen bacteria
ggaactggagtactttcaaataatgttcacttatactatttcatgaca

SEQ ID NO: 32791 - DNA, 48 bp, unidentified
  source 1..48: mol_type = unassigned DNA; note = methanogen bacteria
agccagaaaatactgacatttttaaatattggaagcctgactgcagtt

SEQ ID NO: 32792 - DNA, 60 bp, unidentified
  source 1..60: mol_type = unassigned DNA; note = methanogen bacteria
gatgttgacttttacaaccatctgattggaaattacggtttcagcctggttagaggaaat

SEQ ID NO: 32793 - DNA, 45 bp, unidentified
  source 1..45: mol_type = unassigned DNA; note = methanogen bacteria
ttgccacaacctgcaactgcaagttttgcatctatttgggcttta

SEQ ID NO: 32794 - DNA, 51 bp, unidentified
  source 1..51: mol_type = unassigned DNA; note = methanogen bacteria
atatacgccatgctggaatccgagatggaccagacccttaccaacaacatg

SEQ ID NO: 32795 - DNA, 33 bp, unidentified
  source 1..33: mol_type = unassigned DNA; note = methanogen bacteria
tactatctgggtaactcccttctggaggagatc

SEQ ID NO: 32796 - DNA, 60 bp, unidentified
  source 1..60: mol_type = unassigned DNA; note = methanogen bacteria
ccgatatctcatgcatttaatttcatttctggaaatcctgcaatgataactagaactgct

SEQ ID NO: 32797 - DNA, 39 bp, unidentified
  source 1..39: mol_type = unassigned DNA; note = methanogen bacteria
ggattcatcatgataatgcagacattatcctacaacgaa

SEQ ID NO: 32798 - DNA, 45 bp, unidentified
  source 1..45: mol_type = unassigned DNA; note = methanogen bacteria
ttcaggagttatgctgatttcgagatagatggaggattggatttc

SEQ ID NO: 32799 - DNA, 96 bp, unidentified
  source 1..96: mol_type = unassigned DNA; note = methanogen bacteria
gcacctgaattccttgttgatcatccagaagtcgttaaggatatattgttgttgaaatacgatggttctattgcttttgatggattgggtgcaaca

SEQ ID NO: 32800 - DNA, 42 bp, unidentified
  source 1..42: mol_type = unassigned DNA; note = methanogen bacteria
gcccgggtggataccctgcggctcaacggcatccatcccgcc

SEQ ID NO: 32801 - DNA, 45 bp, unidentified
  source 1..45: mol_type = unassigned DNA; note = methanogen bacteria
ctctatggtgttataagctattcaccggactttcagataaccgga

SEQ ID NO: 32802 - DNA, 42 bp, unidentified
  source 1..42: mol_type = unassigned DNA; note = methanogen bacteria
tccttcaatcctatgggaagcgaaagcacattttattatagt

SEQ ID NO: 32803 - DNA, 123 bp, unidentified
  source 1..123: mol_type = unassigned DNA; note = methanogen bacteria
ggtctgggtttcgcaacccccgccggacagggtttcgtgcagggagggtccccctcatccttcgtcgtctgggttaccgacggcatcttcgaaggtcattacaccgccatcgcgggcaacctc

SEQ ID NO: 32804 - DNA, 33 bp, unidentified
  source 1..33: mol_type = unassigned DNA; note = methanogen bacteria
agctcaactgttatgggcgacataatctccacg

SEQ ID NO: 32805 - DNA, 84 bp, unidentified
  source 1..84: mol_type = unassigned DNA; note = methanogen bacteria
atgactgatttttttggtatggtattagatgtattaaatgctatatttaatccaatacttgcattggatccaaatcctcagaat

SEQ ID NO: 32806 - DNA, 132 bp, unidentified
  source 1..132: mol_type = unassigned DNA; note = methanogen bacteria
gcttcatcaattagtcatttggttttaattttacctgctcctgcttattggcttactttaactccattttggcatttcattggaccaatgttatatgggggaaaagctactattccatatggtattggtatt

SEQ ID NO: 32807 - DNA, 75 bp, unidentified
  source 1..75: mol_type = unassigned DNA; note = methanogen bacteria
atggcagatattataatatcttttttaaattatatttttaatccccttttatcattggatccaactcctaataat

SEQ ID NO: 32808 - DNA, 132 bp, unidentified
  source 1..132: mol_type = unassigned DNA; note = methanogen bacteria
actattaaaaatacagtggtcattttacctcctcttgtttattattgttcattaactccaatctggcatactattggaccattaattccaggttatggtgcagctaatccacatgcacttccatggtcaatt

SEQ ID NO: 32809 - DNA, 60 bp, unidentified
  source 1..60: mol_type = unassigned DNA; note = methanogen bacteria
gcccttcctgaacttcagatagctaaatattctgatttcataggcttcatttcagcacta

SEQ ID NO: 32810 - DNA, 270 bp, unidentified
  source 1..270: mol_type = unassigned DNA; note = methanogen bacteria
ttaaatcctgatcaaatttatacaaggccggctcctcaagaacaagttgatgaaggtcttgcaatagcaccttatgataggggtggtgaggtattaaaatctccaggtatcattaatcctcagtatcctgaaaatgcacgtgaattgggtatgattacaggctacatgtctcctctggcacaatgggtatcatctatatccccatactttggaacatcaatttattcatctcctggtgggcttattgatgaggtactatactatactaga

SEQ ID NO: 32811 - DNA, 270 bp, unidentified
  source 1..270: mol_type = unassigned DNA; note = methanogen bacteria
ttaaatccagatcaattatatacaaggccggctcctcaagttcaaattgatgatggtcttccaatcgctccttatgataggggcggggtagtattaaaagaacctggaatcattaaggcacaatttcctgaaaattctaaagaattgggcatgattacaggttatatgtctccgttagccgaatgggtatcttcaatatcaccttatttcggtacttcaatttattcatctcctggtggacttatagatgaagtattgtattatacaagg

SEQ ID NO: 32812 - DNA, 81 bp, unidentified
  source 1..81: mol_type = unassigned DNA; note = methanogen bacteria
ttaagagatgcatatatgtctgctatgcgtgcttccatgggaaatgactatgttaatgttattgcaccatacttgcaaacc

SEQ ID NO: 32813 - DNA, 51 bp, unidentified
  source 1..51: mol_type = unassigned DNA; note = methanogen bacteria
tccattttcgacgattccggggattactgggggttcggggacttctggggc

SEQ ID NO: 32814 - DNA, 39 bp, unidentified
  source 1..39: mol_type = unassigned DNA; note = methanogen bacteria
ccgggatgggtatacgacacgtacatcgaaggctggcac

SEQ ID NO: 32815 - DNA, 69 bp, unidentified
  source 1..69: mol_type = unassigned DNA; note = methanogen bacteria
cagtacggaaccctcgacaacttcttcgatgagatacagcacatgggcgattggttccagcccggtgga

SEQ ID NO: 32816 - DNA, 72 bp, unidentified
  source 1..72: mol_type = unassigned DNA; note = methanogen bacteria
gcttccacctccctctcccttcccgagatcttcgagggaatgggtctcgaagaactgaagatcggaatggac

SEQ ID NO: 32817 - DNA, 81 bp, unidentified
  source 1..81: mol_type = unassigned DNA; note = methanogen bacteria
ttaagggatgtatttatgtctgctatgcgtacatcaatgggaaatgactatgttaatgttattgcaccatatttgcaaacc

SEQ ID NO: 32818 - DNA, 45 bp, unidentified
  source 1..45: mol_type = unassigned DNA; note = methanogen bacteria
ttgcctcaaccagcagccccaacccttgcatcactttgggcctta

SEQ ID NO: 32819 - DNA, 30 bp, unidentified
  source 1..30: mol_type = unassigned DNA; note = methanogen bacteria
ttatttccagcagtcattccaggagccaat

SEQ ID NO: 32820 - DNA, 93 bp, unidentified
  source 1..93: mol_type = unassigned DNA; note = methanogen bacteria
ggatcttcgaatagtctgtttgaaagtttctattttgttattgtcacattgacaacggtgggatatggtgatatagttcctaaaacattcaat

SEQ ID NO: 32821 - DNA, 45 bp, unidentified
  source 1..45: mol_type = unassigned DNA; note = methanogen bacteria
ttgccacaaactgcaactgcatcccttgcatcaatttgggctttg

SEQ ID NO: 32822 - DNA, 90 bp, unidentified
  source 1..90: mol_type = unassigned DNA; note = methanogen bacteria
cctaacctgcatgcctatttgaaccccgttgttgagaacctctcaaagcaggtggaaaccggaaacattaagctgacattccacagcata

SEQ ID NO: 32823 - DNA, 39 bp, unidentified
  source 1..39: mol_type = unassigned DNA; note = methanogen bacteria
tattttgtagcggtcaacagcaatgacatgttcaaaacc

SEQ ID NO: 32824 - DNA, 81 bp, unidentified
  source 1..81: mol_type = unassigned DNA; note = methanogen bacteria
ttaagagatgcttacatggctgctatgcagtcatctatgggaaatgactatgttaatgttattgcaccattccttcagact

SEQ ID NO: 32825 - DNA, 270 bp, unidentified
  source 1..270: mol_type = unassigned DNA; note = methanogen bacteria
ttaaatcctgaccagttatacacaagacctgcacctcaagttcaggttgatgaaggtcttgcaatagcgccttatgacagaggtggagaagtattgagtgaacctggaaatataaagccacaatatcctgacaattccaaagaattgggtatgattacaggttatatgtctcctctggctgagtggatttcttcaatatctccatatttcggtacttcaatttattcatctcctggtggacttattgatgaagtattgtattataccaga

SEQ ID NO: 32826 - DNA, 81 bp, unidentified
  source 1..81: mol_type = unassigned DNA; note = methanogen bacteria
ttacgagattactacataagtgctatgaatgcatctatgggggtagaatatgttaacttcataacaccattcttacaatac

SEQ ID NO: 32827 - DNA, 75 bp, unidentified
  source 1..75: mol_type = unassigned DNA; note = methanogen bacteria
tttcacgatgtgctgatgaatacatatactgtccataccatttcagaacttggatttccaggagtttcgccactt

SEQ ID NO: 32828 - DNA, 270 bp, unidentified
  source 1..270: mol_type = unassigned DNA; note = methanogen bacteria
ttgaatcccgatcagttgtatgtaaggccttctcctcaacttcaagctgaagacggtgtcaatctggcaccttatgaccgtggaggtgaagttttaaaggaaccggtaattgtcaaggcacagtatcctgaaaattccgaagaactgggtatgatttcagcttacatgtcgccgctggctcagtggatttcatcaatatctccttactttggaacttcaatttactcatctccgggaggacttattgatgaggttttatattacaccaga

SEQ ID NO: 32829 - DNA, 30 bp, unidentified
  source 1..30: mol_type = unassigned DNA; note = methanogen bacteria
ttcctgcctgtaataaaaagaagcagccga

SEQ ID NO: 32830 - DNA, 33 bp, unidentified
  source 1..33: mol_type = unassigned DNA; note = methanogen bacteria
aaaacattggaaatagaattcatagcattgccc

SEQ ID NO: 32831 - DNA, 51 bp, unidentified
  source 1..51: mol_type = unassigned DNA; note = methanogen bacteria
tttccttcaagcagtcctaatgcctcagcatttgcatcacttctgtcgaca

SEQ ID NO: 32832 - DNA, 267 bp, unidentified
  source 1..267: mol_type = unassigned DNA; note = methanogen bacteria
ttaaattctgatcaattatacacaaggccggctcctcaagagcaaattgatgaaggtcttgcgatagcaccttatgataggggtggcgtaatattaaaagaaccgggaattattcatgcacaatatcctgaaaattctaaggaattgggaatgattacggcttatatgtctccgttggcacaatgggtatcatcaatatcaccgtatttcggtacatcaatttattcgtctcctggtggacttattgatgaagtattgtattatacc

SEQ ID NO: 32833 - DNA, 45 bp, unidentified
  source 1..45: mol_type = unassigned DNA; note = methanogen bacteria
ctgccccagcctgcaactgcatctcttgcttctttatgggctttg

SEQ ID NO: 32834 - DNA, 84 bp, unidentified
  source 1..84: mol_type = unassigned DNA; note = methanogen bacteria
atgcctgacccatgggggattattttaggagcattaaatacagtttttaatccaattttagcaatggacccaaatccagcaaat

SEQ ID NO: 32835 - DNA, 126 bp, unidentified
  source 1..126: mol_type = unassigned DNA; note = methanogen bacteria
tcttctgccattagcggattagttattcacttgcctccttctgtttattgggttactttaactccactatggcatttcattggaagtatcatttatggtggacaggctaccatcccttatggtatt

SEQ ID NO: 32836 - DNA, 84 bp, unidentified
  source 1..84: mol_type = unassigned DNA; note = methanogen bacteria
atggttgatatatggggaatgatttatgaagcattgaattcagttttcaatccaattctcgctatggacccgaatccggctaat

SEQ ID NO: 32837 - DNA, 126 bp, unidentified
  source 1..126: mol_type = unassigned DNA; note = methanogen bacteria
acttcagcaattcatgacttagttattattttacctaaaactgtatactgggttactttaactcctgtttggcattttattggtcaatttttatatggtggtaaagcaacaattccatacggtatt

SEQ ID NO: 32838 - DNA, 102 bp, unidentified
  source 1..102: mol_type = unassigned DNA; note = methanogen bacteria
atggaggataaaaagataggagatatacaactagatttattatttttcattaataatcaattacaaaatccttttttagatatggcggtgcccatcatatat

SEQ ID NO: 32839 - DNA, 90 bp, unidentified
  source 1..90: mol_type = unassigned DNA; note = methanogen bacteria
ttttatccaagtacaagaccttttatagcatatgaagccataagattggttgttcatgataatggtttttattcttttccatcaggccat

SEQ ID NO: 32840 - DNA, 84 bp, unidentified
  source 1..84: mol_type = unassigned DNA; note = methanogen bacteria
atggttgatataatgggaccgatttatggtgttttgaatgcgatttttaatccaattttagccatagatcctaatccagctaat

SEQ ID NO: 32841 - DNA, 123 bp, unidentified
  source 1..123: mol_type = unassigned DNA; note = methanogen bacteria
tctgcaattcataatttagtgataattttaccaaaaactgtttattgggttactttaacacctctttggcatgttattggtagttttgtgtatggaggtaaagcaactattccatatggtatc

SEQ ID NO: 32842 - DNA, 30 bp, unidentified
  source 1..30: mol_type = unassigned DNA; note = methanogen bacteria
ttatttccagccgtcattcctggagccaat

SEQ ID NO: 32843 - DNA, 93 bp, unidentified
  source 1..93: mol_type = unassigned DNA; note = methanogen bacteria
ggatcttcgaatagtctgtttgaaagtttttattttgtcattgtcacattgacaactgtgggatatggagatattgttcctaaaacattcaat

SEQ ID NO: 32844 - DNA, 36 bp, unidentified
  source 1..36: mol_type = unassigned DNA; note = methanogen bacteria
ggaaccctcaccggcgactgggaagtgcttgctgac

SEQ ID NO: 32845 - DNA, 72 bp, unidentified
  source 1..72: mol_type = unassigned DNA; note = methanogen bacteria
aacggaacatctctcttcgattacatcgaggagtaccgtgcgggagaggctttgatcgcagctttcaagtgc

SEQ ID NO: 32846 - DNA, 84 bp, unidentified
  source 1..84: mol_type = unassigned DNA; note = methanogen bacteria
atggttgatataatgggaatgcttaatggtgcattgaatgctattttcaacccgattcttgcaatggatcctaatcctgcaaat

SEQ ID NO: 32847 - DNA, 126 bp, unidentified
  source 1..126: mol_type = unassigned DNA; note = methanogen bacteria
tcatcagctatccatgatttagtaataattttaccaactactgtatattgggttacattaacacctctttggcatgcaataggaagtgtcatttatggtggtaaagcaacaattccatatggtatt

SEQ ID NO: 32848 - DNA, 84 bp, unidentified
  source 1..84: mol_type = unassigned DNA; note = methanogen bacteria
atggttgattttatgggccctatctacggggcattaaatgcagttttcaatccgattttagcaatggacccaaatccagctaat

SEQ ID NO: 32849 - DNA, 126 bp, unidentified
  source 1..126: mol_type = unassigned DNA; note = methanogen bacteria
gcttctgctgtcagcaatttagttattatcatgccaccatcagtttattgggtgactttagttccgatttggcatatgattggaagtttcctgtatggtggacaagctactattccatacggtatt

SEQ ID NO: 32850 - DNA, 84 bp, unidentified
  source 1..84: mol_type = unassigned DNA; note = methanogen bacteria
atggctgatccaatgggaatggtttatggtgctttgaattcaattttcaatccgattttagctatggatcctaatcctgctaac

SEQ ID NO: 32851 - DNA, 126 bp, unidentified
  source 1..126: mol_type = unassigned DNA; note = methanogen bacteria
agttctgctatcagcagtctggttgtgacactgccgactactgtttattggattactttaacaccattctggcatgcccttggcggtattatttatggtggtaaggctactattccatttggtatc

SEQ ID NO: 32852 - DNA, 69 bp, unidentified
  source 1..69: mol_type = unassigned DNA; note = methanogen bacteria
atttttggtgttagggggccgatagggaagttttttatagacttctttactgtgaaaatagctttttca

SEQ ID NO: 32853 - DNA, 81 bp, unidentified
  source 1..81: mol_type = unassigned DNA; note = methanogen bacteria
ttgcaggacaaacaaggactctccctatggcagtttattcagaagtggctgcaggaaatatgggggacgcttttaattatg

SEQ ID NO: 32854 - DNA, 84 bp, unidentified
  source 1..84: mol_type = unassigned DNA; note = methanogen bacteria
atggtagacataatgggaatggtttatggcgcattgaatacagttttcaatccaatcttagctatggatcctaatccagctaac

SEQ ID NO: 32855 - DNA, 126 bp, unidentified
  source 1..126: mol_type = unassigned DNA; note = methanogen bacteria
acatccgctattagtggtttagttgtacacttgcctgtaactgtttactggattactttaacaccggtatggcactttataggtagtattttctatggcggtaaggctactatcccatatggtatc

SEQ ID NO: 32856 - DNA, 84 bp, unidentified
  source 1..84: mol_type = unassigned DNA; note = methanogen bacteria
atggcagatttcatggaaatgatttttcaagcattaaatgctgttttcaatcctattttggctatagacccgaacccaactaat

SEQ ID NO: 32857 - DNA, 126 bp, unidentified
  source 1..126: mol_type = unassigned DNA; note = methanogen bacteria
cattcatctattagtagtttagttgttatattgccaccttctgtttactgggctactttaactccgctatggcatgctattggtggtgtcatatatggaggtaaagctacaattccttatggtatc

SEQ ID NO: 32858 - DNA, 51 bp, unidentified
  source 1..51: mol_type = unassigned DNA; note = methanogen bacteria
tattcaaacttcatgcaaagttatggaatggattctcaaattattataact

SEQ ID NO: 32859 - DNA, 42 bp, unidentified
  source 1..42: mol_type = unassigned DNA; note = methanogen bacteria
ttcggctcccccgactactggggctacggcggattctggggc

SEQ ID NO: 32860 - DNA, 39 bp, unidentified
  source 1..39: mol_type = unassigned DNA; note = methanogen bacteria
cccggctgggtctatgcgacctacatcgagggatggcac

SEQ ID NO: 32861 - DNA, 84 bp, unidentified
  source 1..84: mol_type = unassigned DNA; note = methanogen bacteria
atggcagatccaatgggaatggtttatggagcattgaatgctatttttaatccaattttgtctattgatccgaatccaactaat

SEQ ID NO: 32862 - DNA, 123 bp, unidentified
  source 1..123: mol_type = unassigned DNA; note = methanogen bacteria
tctgtcatcagtggtttggttgttatattacctccttccgtttattgggttacattaacaccattctggcatttcataggtcatttcttatatggtggaaatgcaactatcccatatggtatt

SEQ ID NO: 32863 - DNA, 84 bp, unidentified
  source 1..84: mol_type = unassigned DNA; note = methanogen bacteria
atgcctgacccatggggaattattttaggagcattaaattcagtttttaatccgattttagcattggatccaaatccaactaat

SEQ ID NO: 32864 - DNA, 126 bp, unidentified
  source 1..126: mol_type = unassigned DNA; note = methanogen bacteria
tcttctgtcattagcggattagttattcacttgcctccatctgtttactgggttactttaactccattttggcatttcattggcggtttcctttatggtggaaaagctactattccatatggtatt

SEQ ID NO: 32865 - DNA, 42 bp, unidentified
  source 1..42: mol_type = unassigned DNA; note = methanogen bacteria
ggtattgcatcagcaagtggtagtgaattatcaaattatgct

SEQ ID NO: 32866 - DNA, 72 bp, unidentified
  source 1..72: mol_type = unassigned DNA; note = methanogen bacteria
ttgattaatgtagatttattttattttataaaccatactttacaaaatcctttatttgatgttattatgcct

SEQ ID NO: 32867 - DNA, 93 bp, unidentified
  source 1..93: mol_type = unassigned DNA; note = methanogen bacteria
actttcacacagccaaggccttatcttttggtggatggtgttcgtgttctggtcatggaaggggatcccaatgcatttccgtcaggccatacc

SEQ ID NO: 32868 - DNA, 36 bp, unidentified
  source 1..36: mol_type = unassigned DNA; note = methanogen bacteria
atgaacctattaactttattaacactaatcgatgat

SEQ ID NO: 32869 - DNA, 30 bp, unidentified
  source 1..30: mol_type = unassigned DNA; note = methanogen bacteria
atcggctatcccttctacaatccatcaata

SEQ ID NO: 32870 - DNA, 39 bp, unidentified
  source 1..39: mol_type = unassigned DNA; note = methanogen bacteria
catttcattacaataatgggaacattaacagatgatgaa

SEQ ID NO: 32871 - DNA, 99 bp, unidentified
  source 1..99: mol_type = unassigned DNA; note = methanogen bacteria
aatgtttacggtaatgctatgattgttgctcaagaaatttatttacaggccacctattcatatatgggatcttcttctgctattgcatttgatgcacaa

SEQ ID NO: 32872 - DNA, 123 bp, unidentified
  source 1..123: mol_type = unassigned DNA; note = methanogen bacteria
aacatctacggcaatgtgatggtagttgctcaggcaattgttttacaggccacacaggtttatatgggaacttccactgctttcatgtctgatgcaatagctcaggcattggctaacttggct

SEQ ID NO: 32873 - DNA, 45 bp, unidentified
  source 1..45: mol_type = unassigned DNA; note = methanogen bacteria
ttacatcaaccagctactgcatccatacaatctatactaaccctt

SEQ ID NO: 32874 - DNA, 81 bp, unidentified
  source 1..81: mol_type = unassigned DNA; note = methanogen bacteria
atggctttcacagacccaatttttcaagcattgaatgttgtttttgatccaattttatctatggatccaaatccagcaaat

SEQ ID NO: 32875 - DNA, 126 bp, unidentified
  source 1..126: mol_type = unassigned DNA; note = methanogen bacteria
tcttctgcaattcataatttggttgtaatattgccaactactgtctattgggttactttaactccattgtggcatgctatcggtagtgttatctatggtggtaaagctactattccatacggtatc

SEQ ID NO: 32876 - DNA, 57 bp, unidentified
  source 1..57: mol_type = unassigned DNA; note = methanogen bacteria
tatggtgatttaagtgcattaactggaggaatcattgatcttcatgtatacggaagt

SEQ ID NO: 32877 - DNA, 45 bp, unidentified
  source 1..45: mol_type = unassigned DNA; note = methanogen bacteria
ttaccacaacctgccacagcatcaatacaatctattttagcactt

SEQ ID NO: 32878 - DNA, 36 bp, unidentified
  source 1..36: mol_type = unassigned DNA; note = methanogen bacteria
atgaaaaataatgtaatattaatgtcatttaactta

SEQ ID NO: 32879 - DNA, 63 bp, unidentified
  source 1..63: mol_type = unassigned DNA; note = methanogen bacteria
ttttatggagatttaagtgtcttgactggtgggataatagatcttccagtttatggtagcata

SEQ ID NO: 32880 - DNA, 63 bp, unidentified
  source 1..63: mol_type = unassigned DNA; note = methanogen bacteria
tattatggagatttaagcgttttaactggaggagtgatagaccttcctgtttatggcagcata

SEQ ID NO: 32881 - DNA, 45 bp, unidentified
  source 1..45: mol_type = unassigned DNA; note = methanogen bacteria
atacctcttgcaagctccggcagttgggaggcactttatgagtta

SEQ ID NO: 32882 - DNA, 45 bp, unidentified
  source 1..45: mol_type = unassigned DNA; note = methanogen bacteria
ttgccccaaccggctgccgcatccatcccatctattttagcactt

SEQ ID NO: 32883 - DNA, 45 bp, unidentified
  source 1..45: mol_type = unassigned DNA; note = methanogen bacteria
ttgcctcaacccgctacagcatctatcccatctattttagctctt

SEQ ID NO: 32884 - DNA, 42 bp, unidentified
  source 1..42: mol_type = unassigned DNA; note = methanogen bacteria
atggtaacaccaatagacataatgagtttgcccttgaatata

SEQ ID NO: 32885 - DNA, 57 bp, unidentified
  source 1..57: mol_type = unassigned DNA; note = methanogen bacteria
tttggagatttaagcgcattaaccggtggagtaatagatcttcatgtttatggcagt

SEQ ID NO: 32886 - DNA, 78 bp, unidentified
  source 1..78: mol_type = unassigned DNA; note = methanogen bacteria
atgtccgtgtccgaactggatatcctcatatggatacgcgacaacatgtcctccgcggccatggacgccgcctccgag

SEQ ID NO: 32887 - DNA, 87 bp, unidentified
  source 1..87: mol_type = unassigned DNA; note = methanogen bacteria
gtcacggccagggaccgccccttcgaggattattctgtggatctcatcatctcacggccgagcgatttctccttcccgtcggggcat

SEQ ID NO: 32888 - DNA, 42 bp, unidentified
  source 1..42: mol_type = unassigned DNA; note = methanogen bacteria
gaagatcatatatttgtaaatagaggattcttatatggacca

SEQ ID NO: 32889 - DNA, 75 bp, unidentified
  source 1..75: mol_type = unassigned DNA; note = methanogen bacteria
gatctaactaaatgtgattggaaaactttatggtactatggtgatgaatttatgaattttcaaggtcgtatagca

SEQ ID NO: 32890 - DNA, 87 bp, unidentified
  source 1..87: mol_type = unassigned DNA; note = methanogen bacteria
ataaactccgcaccaagtcttggaggatacatggctacaggattaggtcaaaatggatttggagctgcatcaagtgtaggacttaac

SEQ ID NO: 32891 - DNA, 45 bp, unidentified
  source 1..45: mol_type = unassigned DNA; note = methanogen bacteria
ttaaaaattccgaaaattattactcttgattcattacttagtcaa

SEQ ID NO: 32892 - DNA, 45 bp, unidentified
  source 1..45: mol_type = unassigned DNA; note = methanogen bacteria
atttcccagccggcagaacctacattatctgcaatatgggatttg

SEQ ID NO: 32893 - DNA, 45 bp, unidentified
  source 1..45: mol_type = unassigned DNA; note = methanogen bacteria
attgctcaaccagtaaatccaacactatctgcaatttgggacctg

SEQ ID NO: 32894 - DNA, 114 bp, unidentified
  source 1..114: mol_type = unassigned DNA; note = methanogen bacteria
atgtcaaatatattcaatagtatgtttgaaacagttttttattttccgtgggaagtttctctgataatattcctgcaaagtactcttccaagtttcgtattaggattttttgaa

SEQ ID NO: 32895 - DNA, 123 bp, unidentified
  source 1..123: mol_type = unassigned DNA; note = methanogen bacteria
gtgaccgttgcacgtttaaggccatatgctgctgttgatacaatcaagtgcattcgtgctgatgtagctgaccaaaatcctcttgactttaaaatccaaggatattcatttccaagcggacat

SEQ ID NO: 32896 - DNA, 45 bp, unidentified
  source 1..45: mol_type = unassigned DNA; note = methanogen bacteria
atacctttacctgccagtggaagttgggatgcactttatgcactg

SEQ ID NO: 32897 - DNA, 75 bp, unidentified
  source 1..75: mol_type = unassigned DNA; note = methanogen bacteria
tacttcgaatccggaacgatcgacaatgcgttcagcctcagcgggggcatgaaggacatgctcagccccggcggg

SEQ ID NO: 32898 - DNA, 66 bp, unidentified
  source 1..66: mol_type = unassigned DNA; note = methanogen bacteria
gccgccgacagcctgaccataccctcggtcgccgagggcaccggcctggagagcatcgaggtcggc

SEQ ID NO: 32899 - DNA, 42 bp, unidentified
  source 1..42: mol_type = unassigned DNA; note = methanogen bacteria
ttcggatcggacgattactggggattcggcggcttctacggc

SEQ ID NO: 32900 - DNA, 39 bp, unidentified
  source 1..39: mol_type = unassigned DNA; note = methanogen bacteria
cccggttgggtctacgcgaacttcgtcgagggctggcac

SEQ ID NO: 32901 - DNA, 45 bp, unidentified
  source 1..45: mol_type = unassigned DNA; note = methanogen bacteria
atacctttaccagccagtggaggttgggaagcactttatgaactg

SEQ ID NO: 32902 - DNA, 66 bp, unidentified
  source 1..66: mol_type = unassigned DNA; note = methanogen bacteria
tttggtgtcagagggcctataggaagttttttcattgacttttttgcatacaaaatagctttctca

SEQ ID NO: 32903 - DNA, 81 bp, unidentified
  source 1..81: mol_type = unassigned DNA; note = methanogen bacteria
cttgcaggaaacatagcaggacaaactagaacactcccaatggctgtttattcagaagtggctgcaggtaatatgggagat

SEQ ID NO: 32904 - DNA, 39 bp, unidentified
  source 1..39: mol_type = unassigned DNA; note = methanogen bacteria
atttatgtttatttgattgaaaatgtaatttatttaatt

SEQ ID NO: 32905 - DNA, 45 bp, unidentified
  source 1..45: mol_type = unassigned DNA; note = methanogen bacteria
atacccctcgcatccaatggaagttgggaagctttatttgaatta

SEQ ID NO: 32906 - DNA, 123 bp, unidentified
  source 1..123: mol_type = unassigned DNA; note = methanogen bacteria
gcaggttcgtttaccgatatgatggtagaagccctccagcagaccgacatgggcggagggaagaccggttgggacgtattcgtcgagaacggactctccgcagccgacctccaggcttccttc

SEQ ID NO: 32907 - DNA, 45 bp, unidentified
  source 1..45: mol_type = unassigned DNA; note = methanogen bacteria
atttcacagcctgtggaacctacattagctgcaatatggaacctt

SEQ ID NO: 32908 - DNA, 45 bp, unidentified
  source 1..45: mol_type = unassigned DNA; note = methanogen bacteria
atagcacagcctgcagaaccaacgttatcggcgattctggatttg

SEQ ID NO: 32909 - DNA, 42 bp, unidentified
  source 1..42: mol_type = unassigned DNA; note = methanogen bacteria
attccaataccagcacatccggattttgccagtttatgggaa

SEQ ID NO: 32910 - DNA, 78 bp, unidentified
  source 1..78: mol_type = unassigned DNA; note = methanogen bacteria
ttttttagggattctttagcaaatacctatattttccatactatttctgaactaggaattccaaatatgaactctcca

SEQ ID NO: 32911 - DNA, 45 bp, unidentified
  source 1..45: mol_type = unassigned DNA; note = methanogen bacteria
atacctcttgcaagtcttggaagctgggaatcactttatgaacta

SEQ ID NO: 32912 - DNA, 45 bp, unidentified
  source 1..45: mol_type = unassigned DNA; note = methanogen bacteria
atacctcttgcatcatccggctcctgggaagcattgtttgcattg

SEQ ID NO: 32913 - DNA, 75 bp, unidentified
  source 1..75: mol_type = unassigned DNA; note = methanogen bacteria
tacttcgagtccgggaccttcgatgatgcgttcagcctcagcggggacatgaaggacatgctcagccccggaggg

SEQ ID NO: 32914 - DNA, 66 bp, unidentified
  source 1..66: mol_type = unassigned DNA; note = methanogen bacteria
gcggcggacagcctgaccataccctcggtcgccgagggcaccggtctggagagcatcgaggtcggc

SEQ ID NO: 32915 - DNA, 93 bp, unidentified
  source 1..93: mol_type = unassigned DNA; note = methanogen bacteria
agcagtattacattcagctggggaactgatgccgcattatacttcgtgaataatgttggaggaagttctaatttaagtaatgcaagtttcctg

SEQ ID NO: 32916 - DNA, 69 bp, unidentified
  source 1..69: mol_type = unassigned DNA; note = methanogen bacteria
acattacctggagccgatattggaataaacactttactaaatccaacatggagcaagttatatgatgta

SEQ ID NO: 32917 - DNA, 45 bp, unidentified
  source 1..45: mol_type = unassigned DNA; note = methanogen bacteria
atatgggattcaggtcatatacaaccggaactccaatggtgcaat

SEQ ID NO: 32918 - DNA, 42 bp, unidentified
  source 1..42: mol_type = unassigned DNA; note = methanogen bacteria
attccacttgcttcaaatggaagctgggaggccctatttgag

SEQ ID NO: 32919 - DNA, 54 bp, unidentified
  source 1..54: mol_type = unassigned DNA; note = methanogen bacteria
gtttattctggatttatgcagggttatggaatggaatccgagatagttataact

SEQ ID NO: 32920 - DNA, 45 bp, unidentified
  source 1..45: mol_type = unassigned DNA; note = methanogen bacteria
ataccaatggcatcaaacggaacgtggaccgcactgtggcaaata

SEQ ID NO: 32921 - DNA, 147 bp, unidentified
  source 1..147: mol_type = unassigned DNA; note = methanogen bacteria
ttagggcgtacaggaaatcaggaattgcatatcagtcttgtgccgttctggtcatattgggtgatgcttcgcggcgtttttcatgctctccgtcaatgcgattggcaaggtgtgattcgggaagtcagcgggatcggttatccagcg

SEQ ID NO: 32922 - DNA, 60 bp, unidentified
  source 1..60: mol_type = unassigned DNA; note = methanogen bacteria
acgccaacacttatccaattatcctatggaattatccctttgattacatataacggacta

SEQ ID NO: 32923 - DNA, 66 bp, unidentified
  source 1..66: mol_type = unassigned DNA; note = methanogen bacteria
gctccaggcatcatttctgaaattggaccgtacatcatcacaccaatcgtgaccggcgtgaacaac

SEQ ID NO: 32924 - DNA, 90 bp, unidentified
  source 1..90: mol_type = unassigned DNA; note = methanogen bacteria
atgtcctctaatattaatgtagatttattttattttttcaatcacaattttcaaaatccgatttttgatgctgtaatgcctattgtaaca

SEQ ID NO: 32925 - DNA, 87 bp, unidentified
  source 1..87: mol_type = unassigned DNA; note = methanogen bacteria
gttcaggaaccaaggccttttgtaacattggataatgtgcgtttgcttataactgaaggcgatcccctttcattcccgtcaggacac

SEQ ID NO: 32926 - DNA, 48 bp, unidentified
  source 1..48: mol_type = unassigned DNA; note = methanogen bacteria
gttggatactttggaggttctcttcctttaatagattatggtggagct

SEQ ID NO: 32927 - DNA, 45 bp, unidentified
  source 1..45: mol_type = unassigned DNA; note = methanogen bacteria
ataccgatggcatcaaacggcagttgggaagctctctttgaagtg

SEQ ID NO: 32928 - DNA, 63 bp, unidentified
  source 1..63: mol_type = unassigned DNA; note = methanogen bacteria
cctctaattttagcagaaataggccagtatatcataactccaataattactgatgtcaacagc

SEQ ID NO: 32929 - DNA, 69 bp, unidentified
  source 1..69: mol_type = unassigned DNA; note = methanogen bacteria
ttgattaatattgatttattttattttataaatgatactttaaaaaatccattatttgattttttaatg

SEQ ID NO: 32930 - DNA, 90 bp, unidentified
  source 1..90: mol_type = unassigned DNA; note = methanogen bacteria
attttagagccaagaccatttgttactctgagcaatgttcatttattgattagtgaaaatgatccggcttcttttccttccggacatact

SEQ ID NO: 32931 - DNA, 63 bp, unidentified
  source 1..63: mol_type = unassigned DNA; note = methanogen bacteria
ggaccggatttactcgcagcatatggggaatttataacaaccccaatagcagttggcgtttta

SEQ ID NO: 32932 - DNA, 63 bp, unidentified
  source 1..63: mol_type = unassigned DNA; note = methanogen bacteria
ccaactttacttgcaatgttcggaaatttaataataaccccaatacctgttggcgttccaaac

SEQ ID NO: 32933 - DNA, 63 bp, unidentified
  source 1..63: mol_type = unassigned DNA; note = methanogen bacteria
tctattatgcgactaaatcatgaaatgttttcttcatttttaatattaactccaacttatcag

SEQ ID NO: 32934 - DNA, 54 bp, unidentified
  source 1..54: mol_type = unassigned DNA; note = methanogen bacteria
ctttcggttgttggaagttacctgattactccaatgataaccgacatccacagt

SEQ ID NO: 32935 - DNA, 57 bp, unidentified
  source 1..57: mol_type = unassigned DNA; note = methanogen bacteria
gatccgctgatgggcatagttcactcaatcaaccattcaaccggtctgaacatctcc

SEQ ID NO: 32936 - DNA, 30 bp, unidentified
  source 1..30: mol_type = unassigned DNA; note = methanogen bacteria
actggtgctgtagctggtggcgtaccaata

SEQ ID NO: 32937 - DNA, 117 bp, unidentified
  source 1..117: mol_type = unassigned DNA; note = methanogen bacteria
tcaacaggtattatggtacctgaagcattcgcaaaaggtgcaatcactgttgctaacaccaaagcattaggtggagctacatttatggcagctggtaaatcaactgcttctttaact

SEQ ID NO: 32938 - DNA, 42 bp, unidentified
  source 1..42: mol_type = unassigned DNA; note = methanogen bacteria
atggatttagcaacaactattatgagtttgcctacaaatatc

SEQ ID NO: 32939 - DNA, 60 bp, unidentified
  source 1..60: mol_type = unassigned DNA; note = methanogen bacteria
cccagcataattaatgagtttggacaattcattacaaccccaatcataaccaacattccg

SEQ ID NO: 32940 - DNA, 63 bp, unidentified
  source 1..63: mol_type = unassigned DNA; note = methanogen bacteria
ccaatgatactgcctgaaatcggacaatacctgattaccccaattgtaaccgatgttaacaac

SEQ ID NO: 32941 - DNA, 90 bp, unidentified
  source 1..90: mol_type = unassigned DNA; note = methanogen bacteria
atgtctgatattaatcttgatttattttatttttttaatactagtattaaaaatccaatttttgattttataatgcctcgtattacagat

SEQ ID NO: 32942 - DNA, 87 bp, unidentified
  source 1..87: mol_type = unassigned DNA; note = methanogen bacteria
attaatgagccacgtccttttataacattggataatgttaatttgctcattgatattgagggtagttattcttttccttcaggtcat

SEQ ID NO: 32943 - DNA, 144 bp, unidentified
  source 1..144: mol_type = unassigned DNA; note = methanogen bacteria
gttttatctgatttaccttctgtaactccaactgcttccaatttaaataaattgtatgttttaaataaatcatcaactgattctgatttttggtatcagtcttgggttgctgttaatgatggtggttataaatgggtaagagat

SEQ ID NO: 32944 - DNA, 63 bp, unidentified
  source 1..63: mol_type = unassigned DNA; note = methanogen bacteria
gcaccagacatattatctgaagtaggacagtacattattaccccaatgattaccaatgtcaca

SEQ ID NO: 32945 - DNA, 63 bp, unidentified
  source 1..63: mol_type = unassigned DNA; note = methanogen bacteria
ccatggattcttcctgaagttaatccatttttaataacaccaatcataacagatgtaaatagc

SEQ ID NO: 32946 - DNA, 84 bp, unidentified
  source 1..84: mol_type = unassigned DNA; note = methanogen bacteria
atgaatattaatgaagctttgtttatttatataaatcagtttatgcagaatcagactttggatgtgattatgccgactgtaact

SEQ ID NO: 32947 - DNA, 93 bp, unidentified
  source 1..93: mol_type = unassigned DNA; note = methanogen bacteria
cttgttcatgagccaagaccgttcatggctttggaaaatgttcgtctgttggttccggaagatgatccgaattccttcccgtcaggccatgcc

SEQ ID NO: 32948 - DNA, 66 bp, unidentified
  source 1..66: mol_type = unassigned DNA; note = methanogen bacteria
ggtccggaattgatgcaaacattcggtcaatatatcataacaccaatagctacagatttacattca

SEQ ID NO: 32949 - DNA, 45 bp, unidentified
  source 1..45: mol_type = unassigned DNA; note = methanogen bacteria
atacctatggcggctgatggaagctggcaagcattatttgaaatt

SEQ ID NO: 32950 - DNA, 45 bp, unidentified
  source 1..45: mol_type = unassigned DNA; note = methanogen bacteria
atatcccaacctgcagaaccaacattatctgcaatatgggctttg

SEQ ID NO: 32951 - DNA, 60 bp, unidentified
  source 1..60: mol_type = unassigned DNA; note = methanogen bacteria
ctggacattatttcagcattcggcccatatatagtaactccaataccaatgggagttata

SEQ ID NO: 32952 - DNA, 63 bp, unidentified
  source 1..63: mol_type = unassigned DNA; note = methanogen bacteria
ccaatgattctcccgtatattggaaattccatcatagtccctaccgtaaccagcgttactaac

SEQ ID NO: 32953 - DNA, 66 bp, unidentified
  source 1..66: mol_type = unassigned DNA; note = methanogen bacteria
ggaccggaaattatggctcagtttggagaatacattacaacaccaatagctgtcggagttacaaat

SEQ ID NO: 32954 - DNA, 63 bp, unidentified
  source 1..63: mol_type = unassigned DNA; note = methanogen bacteria
ccaatgattctcccatatattggaaattctttaatagtacctaccgtaaccagcatccctaac

SEQ ID NO: 32955 - DNA, 66 bp, unidentified
  source 1..66: mol_type = unassigned DNA; note = methanogen bacteria
ggaccggatctcctatcattattcggagaatacatacttactccaatacctgtcggagttataaac

SEQ ID NO: 32956 - DNA, 39 bp, unidentified
  source 1..39: mol_type = unassigned DNA; note = methanogen bacteria
ctgaacgggatcgaggaggagttcggagcgggcaagctc

SEQ ID NO: 32957 - DNA, 42 bp, unidentified
  source 1..42: mol_type = unassigned DNA; note = methanogen bacteria
attccacttgcaagcaatggcacttggcaggcactcctagac

SEQ ID NO: 32958 - DNA, 51 bp, unidentified
  source 1..51: mol_type = unassigned DNA; note = methanogen bacteria
ctcccatatatcggatctacccttgcccctgtcgtgaccagcacatacaat

SEQ ID NO: 32959 - DNA, 36 bp, unidentified; identical to SEQ ID NO: 32491
  source 1..36: mol_type = unassigned DNA; note = methanogen bacteria

SEQ ID NO: 32960 - DNA, 60 bp, unidentified
  source 1..60: mol_type = unassigned DNA; note = methanogen bacteria
gaaatgtttggaatagtcagccccggaaccgtggatacagaagccatgacctcaatgaca

SEQ ID NO: 32961 - DNA, 96 bp, unidentified
  source 1..96: mol_type = unassigned DNA; note = methanogen bacteria
tatggtccaagttataatggatttgatgatttttattttgttatagttacattaacaacagtaggatatggtgatgtaacccctataacttataat

SEQ ID NO: 32962 - DNA, 45 bp, unidentified
  source 1..45: mol_type = unassigned DNA; note = methanogen bacteria
attccgcttgcggcttcaggcagctgggaagcactgtttgagata

SEQ ID NO: 32963 - DNA, 42 bp, unidentified
  source 1..42: mol_type = unassigned DNA; note = methanogen bacteria
ataccaatggcttcaaacggtagctgggaagcactctttgaa

SEQ ID NO: 32964 - DNA, 30 bp, unidentified
  source 1..30: mol_type = unassigned DNA; note = methanogen bacteria
gctggtatggtcgctgcaggactaccaatt

SEQ ID NO: 32965 - DNA, 78 bp, unidentified
  source 1..78: mol_type = unassigned DNA; note = methanogen bacteria
ggtggaatcatcacttctgatccagctatccaagcaggagcaattaaggtagctactggtaaagtgggaatgtcattt

SEQ ID NO: 32966 - DNA, 72 bp, unidentified
  source 1..72: mol_type = unassigned DNA; note = methanogen bacteria
ttgattaatgtagatttattttattttataaaccataatttgcaaaatccagtatttgatgttataatgcct

SEQ ID NO: 32967 - DNA, 93 bp, unidentified
  source 1..93: mol_type = unassigned DNA; note = methanogen bacteria
acttttacacagccaaggccttatcttttggtggatggtgttcgtgttcttgttgcagaagcagatcctaatgcatttccgtcaggccatacc

SEQ ID NO: 32968 - DNA, 36 bp, unidentified
  source 1..36: mol_type = unassigned DNA; note = methanogen bacteria
atgacttttgttcctccgtcatggtggatgttagga

SEQ ID NO: 32969 - DNA, 96 bp, unidentified
  source 1..96: mol_type = unassigned DNA; note = methanogen bacteria
ggaacatcatacagcctgtttgatgacttttatttcgtaatagttactttaacaacagtcggatatggtcaatcacagctgccatttcatcattct

SEQ ID NO: 32970 - DNA, 84 bp, unidentified
  source 1..84: mol_type = unassigned DNA; note = methanogen bacteria
accgatgttgtgagaattcctcaagatgctcttagaacgatggagatgactgcaaatgataccatgatcattggaggggaggaa

SEQ ID NO: 32971 - DNA, 111 bp, unidentified
  source 1..111: mol_type = unassigned DNA; note = methanogen bacteria
tttatgagagatattccgacaagctttattagcgcaaatcaaatgccctctttagaacatattttcggaacagattggatgggaagagacatgtttcagcgtacaattgca

SEQ ID NO: 32972 - DNA, 126 bp, unidentified
  source 1..126: mol_type = unassigned DNA; note = methanogen bacteria
gtggatatttataaccataatgctagcgtatcaattatcagtattggggattcacctaatgtgattgaccatttcccaatggctgcctggaagcagaaggcgattactgcagctatactgactgga

SEQ ID NO: 32973 - DNA, 72 bp, unidentified
  source 1..72: mol_type = unassigned DNA; note = methanogen bacteria
gatgcaatcatctattcaactgataaccaggattacagtcaattcatgaaccgggttcgagatggtgttgtc

SEQ ID NO: 32974 - DNA, 99 bp, unidentified
  source 1..99: mol_type = unassigned DNA; note = methanogen bacteria
cataatgttataaattataaacctagtgaatttaaatctaatgaatttgatcctactaacattaaacctggtgaatataaccctagtgattttttaaat

SEQ ID NO: 32975 - DNA, 45 bp, unidentified
  source 1..45: mol_type = unassigned DNA; note = methanogen bacteria
attcccctggcaagcacaggtagctggcaggcgcttctggatatt

SEQ ID NO: 32976 - DNA, 87 bp, unidentified
  source 1..87: mol_type = unassigned DNA; note = methanogen bacteria
atggacattaatgaagcattatttatttatattaatcagcacttgcaaaacccgacattggatatgataatgtctggaataacagat

SEQ ID NO: 32977 - DNA, 96 bp, unidentified
  source 1..96: mol_type = unassigned DNA; note = methanogen bacteria
aattatgttcatgagccaaggccattcatggctctgaaaaatgtgcatctcataatcgctgaaaacgatccgaattcattcccgtcaggacatgca

SEQ ID NO: 32978 - DNA, 60 bp, unidentified
  source 1..60: mol_type = unassigned DNA; note = methanogen bacteria
gcgaacccaggattctatgaggccttggccgcaatcgctgcagttaagtttgaaaagact

SEQ ID NO: 32979 - DNA, 72 bp, unidentified
  source 1..72: mol_type = unassigned DNA; note = methanogen bacteria
ttgattaatgaagatttattttattttatcaaccataatttgcaaaattctgtatttgatgttataatgcct

SEQ ID NO: 32980 - DNA, 90 bp, unidentified
  source 1..90: mol_type = unassigned DNA; note = methanogen bacteria
tttacacagccaagaccttttattttattgaacaatgttcgtgttttggttacagaattagatcccaattcatttccgtcaggccatacc

SEQ ID NO: 32981 - DNA, 30 bp, unidentified
  source 1..30: mol_type = unassigned DNA; note = methanogen bacteria
aaattatataatcaaacaggcattactttg

SEQ ID NO: 32982 - DNA, 72 bp, unidentified
  source 1..72: mol_type = unassigned DNA; note = methanogen bacteria
atgtctataaatgagatatttttctattacattaataataatttgcaaaatccaatatttgatgcgatattg

SEQ ID NO: 32983 - DNA, 90 bp, unidentified
  source 1..90: mol_type = unassigned DNA; note = methanogen bacteria
gttcaggagccaaggccgtacatggttttggacaatgttcgcctgcttatatttgaagatgacgtattcgccttcccgtcaggtcatgcc

SEQ ID NO: 32984 - DNA, 42 bp, unidentified
  source 1..42: mol_type = unassigned DNA; note = methanogen bacteria
attccgcttgcaagcaacggcagttggcaggctctgcttgac

SEQ ID NO: 32985 - DNA, 45 bp, unidentified
  source 1..45: mol_type = unassigned DNA; note = methanogen bacteria
attcccctggcaagcaccggcagctggcaggcgcttctggacatt

SEQ ID NO: 32986 - DNA, 69 bp, unidentified
  source 1..69: mol_type = unassigned DNA; note = methanogen bacteria
tatggattaggtgattacttctttaacatctcagctattcagataacaatggtttccggttatattcct

SEQ ID NO: 32987 - DNA, 42 bp, unidentified
  source 1..42: mol_type = unassigned DNA; note = methanogen bacteria
attccccttgcaagcaacggcagctggcaggctcttcttgat

SEQ ID NO: 32988 - DNA, 30 bp, unidentified
  source 1..30: mol_type = unassigned DNA; note = methanogen bacteria
cagtcattccattcgctgatttccgattac

SEQ ID NO: 32989 - DNA, 60 bp, unidentified
  source 1..60: mol_type = unassigned DNA; note = methanogen bacteria
attgctacatattattttaatctgtctgcttcccaaataactttaatttcggggaatatt

SEQ ID NO: 32990 - DNA, 63 bp, unidentified
  source 1..63: mol_type = unassigned DNA; note = methanogen bacteria
ccaagcatactatctgcaataggaccatacatcataactccaataataactgacgtccacagc

SEQ ID NO: 32991 - DNA, 57 bp, unidentified
  source 1..57: mol_type = unassigned DNA; note = methanogen bacteria
atacttccagaaattggacaatatattataaccccaatagtaaccgatatccctaac

SEQ ID NO: 32992 - DNA, 51 bp, unidentified
  source 1..51: mol_type = unassigned DNA; note = methanogen bacteria
gttaaaggattcaactattctttaaatccggtttatgattttgtatttggt

SEQ ID NO: 32993 - DNA, 69 bp, unidentified
  source 1..69: mol_type = unassigned DNA; note = methanogen bacteria
ttaggaactcttttaggcagatgggatgtttttccaattagtggtggactgtttctgttctgtgttgat

SEQ ID NO: 32994 - DNA, 63 bp, unidentified
  source 1..63: mol_type = unassigned DNA; note = methanogen bacteria
ccaagcatactatctgcaataggaccatacatcataaccccaataataaccgacgtcaacagc

SEQ ID NO: 32995 - DNA, 45 bp, unidentified
  source 1..45: mol_type = unassigned DNA; note = methanogen bacteria
attcctttagcatccaccgggagctgggaagcattattcgaatta

SEQ ID NO: 32996 - DNA, 126 bp, unidentified
  source 1..126: mol_type = unassigned DNA; note = methanogen bacteria
ctggaagcgggctccctcctcgacatggtcaaggaagagctcatgaaccaggagtacgagggacagacgatgtgggagtacatcctctcccagggagtcaccgaacaggatctgaaggattcgttc

SEQ ID NO: 32997 - DNA, 63 bp, unidentified
  source 1..63: mol_type = unassigned DNA; note = methanogen bacteria
ccatatattatttctaattttggagaatttataacaacaccaataattacaaacgttccggaa

SEQ ID NO: 32998 - DNA, 87 bp, unidentified
  source 1..87: mol_type = unassigned DNA; note = methanogen bacteria
atgagtaatatacagatagacttattatattttataaataatggattgcaaaatcccattttagacaagatagtacctatcatatat

SEQ ID NO: 32999 - DNA, 90 bp, unidentified
  source 1..90: mol_type = unassigned DNA; note = methanogen bacteria
ttctatccaagcccaaggccttttattgctttggaaggaattcgattaactgtgcatgataatggattttattctttcccttcaggccat

SEQ ID NO: 33000 - DNA, 126 bp, unidentified
  source 1..126: mol_type = unassigned DNA; note = methanogen bacteria
ggtactggaggtatttatcctattcaactgatgggaccattgctccaagccataagtccatatatgcctatgactcatggaatcacattgctgagggaatccgcattaggattgatttggtctaat

SEQ ID NO: 33001 - DNA, 225 bp, unidentified
  source 1..225: mol_type = unassigned DNA; note = methanogen bacteria
gtaggtttcggtgaatcagacttacctaatgatggagaggtgcaatatatgaatgtaacaaacaatattactgcatatgaaaacagcagttatgatttgcaggatgaaaacggaactcaaatttcatactatgattttgatgagaatgttacagaaggccagaatatcactgcattcaatgtctctagttcggccaatatatattgatttttaaggatatcactt

SEQ ID NO: 33002 - DNA, 66 bp, unidentified
  source 1..66: mol_type = unassigned DNA; note = methanogen bacteria
ggtccggcaatcatggctgaaatcggacagtacatcatgactccaatcattaccgacatacatagc

SEQ ID NO: 33003 - DNA, 90 bp, unidentified
  source 1..90: mol_type = unassigned DNA; note = methanogen bacteria
atcggcaacgatgatgaggattctaaggacagcacggacttcgcaggcaaggaactggaggtcgcggacaatctggacaacggcatcgta

SEQ ID NO: 33004 - DNA, 60 bp, unidentified
  source 1..60: mol_type = unassigned DNA; note = methanogen bacteria
gccgggcggatcgtgctcgacggcgcgcccgccgccgtgacggacgcagacctcgcgcgg

SEQ ID NO: 33005 - DNA, 30 bp, unidentified
  source 1..30: mol_type = unassigned DNA; note = methanogen bacteria
tacggcggcgcggaaagcggggctgcgcca

SEQ ID NO: 33006 - DNA, 48 bp, unidentified
  source 1..48: mol_type = unassigned DNA; note = methanogen bacteria
aatgcaggaacggataggctagtagatcatgttgtttctggtgaaaat

SEQ ID NO: 33007 - DNA, 63 bp, unidentified
  source 1..63: mol_type = unassigned DNA; note = methanogen bacteria
ccatttatcttaccggaaatcggatcttatctaatcactccaattgttacagacgttagcaac

SEQ ID NO: 33008 - DNA, 87 bp, unidentified
  source 1..87: mol_type = unassigned DNA; note = methanogen bacteria
ttagagtgttggcagaaattattagattttgaatactgttcatttttatactgtttttatcattttttattaaattttgttcaagtt

SEQ ID NO: 33009 - DNA, 48 bp, unidentified
  source 1..48: mol_type = unassigned DNA; note = methanogen bacteria
agttcacgcagtgataaaatcgtggacaatgttatttcaggagaaagc

SEQ ID NO: 33010 - DNA, 39 bp, unidentified
  source 1..39: mol_type = unassigned DNA; note = methanogen bacteria
ggaacccttaccggagacttcgcagtactcgcggagacc

SEQ ID NO: 33011 - DNA, 60 bp, unidentified
  source 1..60: mol_type = unassigned DNA; note = methanogen bacteria
ggaggaaagaccgtctacgattacatccaggagtataccaaggtcatcgcgatgctcatc

SEQ ID NO: 33012 - DNA, 42 bp, unidentified
  source 1..42: mol_type = unassigned DNA; note = methanogen bacteria
gtagacctcggacataccgtatcggtcgtcgccaccctcgac

SEQ ID NO: 33013 - DNA, 54 bp, unidentified
  source 1..54: mol_type = unassigned DNA; note = methanogen bacteria
tattattctaatacaagaaatttaacaatgaattattgcttaaaaacaacacct

SEQ ID NO: 33014 - DNA, 36 bp, unidentified
  source 1..36: mol_type = unassigned DNA; note = methanogen bacteria
accctgaccggggacttggcagtactcggagagacc

SEQ ID NO: 33015 - DNA, 60 bp, unidentified
  source 1..60: mol_type = unassigned DNA; note = methanogen bacteria
ggcggaaagaccgtctacgattatatccaggagtataccaaagtaatcgcgatgctcatc

SEQ ID NO: 33016 - DNA, 75 bp, unidentified
  source 1..75: mol_type = unassigned DNA; note = methanogen bacteria
atgatgaatagtatttatggaattttagacatgatatttgctccattcattagtttagatccaaacccaaacaat

SEQ ID NO: 33017 - DNA, 120 bp, unidentified
  source 1..120: mol_type = unassigned DNA; note = methanogen bacteria
caagagcctcatattgcgcaaactgttgtgatgttgcctaaaatagcttattattgtttattagtgccattatggcatatgttgtatcaaccattaccttcaactcctactggggctatt

SEQ ID NO: 33018 - DNA, 60 bp, unidentified
  source 1..60: mol_type = unassigned DNA; note = methanogen bacteria
ccatttatacttccctcaataggaccatacctcataaccccaatagtgaccgatgtatcc

SEQ ID NO: 33019 - DNA, 90 bp, unidentified
  source 1..90: mol_type = unassigned DNA; note = methanogen bacteria
atgttcggtaatgttaatgtagatttattttattttttcaatcacaattttcaaaatccgatttttgatgcggtaatgccgatagtgacc

SEQ ID NO: 33020 - DNA, 87 bp, unidentified
  source 1..87: mol_type = unassigned DNA; note = methanogen bacteria
attatggaaccgagaccttttgtaactttggataatgtgcgtttgctgattgtggaaaccgatcctctttcatttccatctggccat

SEQ ID NO: 33021 - DNA, 39 bp, unidentified
  source 1..39: mol_type = unassigned DNA; note = methanogen bacteria
tatggtattataagctattctccagattttcaaataact

SEQ ID NO: 33022 - DNA, 42 bp, unidentified
  source 1..42: mol_type = unassigned DNA; note = methanogen bacteria
tccttcaatccgctgggagaacaaagcacatttaattttagt

SEQ ID NO: 33023 - DNA, 66 bp, unidentified
  source 1..66: mol_type = unassigned DNA; note = methanogen bacteria
aatgcaatatacggatggaattttattatgcaaattgcaactggtggatatgaagtgttaaatact

SEQ ID NO: 33024 - DNA, 36 bp, unidentified
  source 1..36: mol_type = unassigned DNA; note = methanogen bacteria
tttcgaggatcaaaaggtactaaccattttacaata

SEQ ID NO: 33025 - DNA, 33 bp, unidentified
  source 1..33: mol_type = unassigned DNA; note = methanogen bacteria
atgactgcatttgtacctccaacatggtttgaa

SEQ ID NO: 33026 - DNA, 36 bp, unidentified
  source 1..36: mol_type = unassigned DNA; note = methanogen bacteria
ctgtcaggcatcgaggacggcctcgccggttccgcc

SEQ ID NO: 33027 - DNA, 45 bp, unidentified
  source 1..45: mol_type = unassigned DNA; note = methanogen bacteria
ttacctcaactagaacagccatcattagcagctatatggaaacta

SEQ ID NO: 33028 - DNA, 81 bp, unidentified
  source 1..81: mol_type = unassigned DNA; note = methanogen bacteria
atgttcagtgaaattaatgttgatttattttattttttcaatcacaattttcaaaatcccatttttgatgctataatgcca

SEQ ID NO: 33029 - DNA, 87 bp, unidentified
  source 1..87: mol_type = unassigned DNA; note = methanogen bacteria
atttgtgagccaagaccttttgtaactttggataatgtacgtttgctgattactgaaaccgatcctctttcattcccgtcaggccat

SEQ ID NO: 33030 - DNA, 90 bp, unidentified
  source 1..90: mol_type = unassigned DNA; note = methanogen bacteria
atgtttgctaatgttaatgtagatttattttattttttcaatcataattttcaaaatccgatttttgatgctataatgcctgtagtaact

SEQ ID NO: 33031 - DNA, 87 bp, unidentified
  source 1..87: mol_type = unassigned DNA; note = methanogen bacteria
attagggaaccaagaccttttttgaccttggataatgtacatttgctgattacggaaaatgatcctctttcattcccgtcaggccat

SEQ ID NO: 33032 - DNA, 42 bp, unidentified
  source 1..42: mol_type = unassigned DNA; note = methanogen bacteria
attccaatggcagcgaccggcagctgggaatcactatttcag

SEQ ID NO: 33033 - DNA, 30 bp, unidentified
  source 1..30: mol_type = unassigned DNA; note = methanogen bacteria
gtcagcacaatatccgattttatacagtca

SEQ ID NO: 33034 - DNA, 45 bp, unidentified
  source 1..45: mol_type = unassigned DNA; note = methanogen bacteria
ttgcctcagccagaaacagcttcgattgctgcattatggactata

SEQ ID NO: 33035 - DNA, 42 bp, unidentified
  source 1..42: mol_type = unassigned DNA; note = methanogen bacteria
tttggtattatcggttattctgccagctttcagataactggt

SEQ ID NO: 33036 - DNA, 39 bp, unidentified
  source 1..39: mol_type = unassigned DNA; note = methanogen bacteria
ttagctcctttgaattcagtttatgcttcatgggtgggt

SEQ ID NO: 33037 - DNA, 30 bp, unidentified
  source 1..30: mol_type = unassigned DNA; note = methanogen bacteria
agttttcttttgacattcctctcaccggaa

SEQ ID NO: 33038 - DNA, 33 bp, unidentified
  source 1..33: mol_type = unassigned DNA; note = methanogen bacteria
tttcaaaccccaacggacctgcacagggaaccg

SEQ ID NO: 33039 - DNA, 45 bp, unidentified
  source 1..45: mol_type = unassigned DNA; note = methanogen bacteria
ggtgctgctttgacgggagttaaagaacagaatgcagatttgctt

SEQ ID NO: 33040 - DNA, 72 bp, unidentified
  source 1..72: mol_type = unassigned DNA; note = methanogen bacteria
atggaagagatcgatatcctttacgacctccacgacgcactcggcggcgggatgatggattccttctccctt

SEQ ID NO: 33041 - DNA, 87 bp, unidentified
  source 1..87: mol_type = unassigned DNA; note = methanogen bacteria
ggggtcggaagggtgagaccggtgacagaatacgatatcgatgcactgattgtatcgtacaatacctcctcattcccttcgggccac

SEQ ID NO: 33042 - DNA, 75 bp, unidentified
  source 1..75: mol_type = unassigned DNA; note = methanogen bacteria
atgagtgttaatgttgatatgttttatttttttaatcataatttccaaaatccaatttttgatgcagtaatgcca

SEQ ID NO: 33043 - DNA, 87 bp, unidentified
  source 1..87: mol_type = unassigned DNA; note = methanogen bacteria
atttgtgaaccaaggccattcgtaaccctggataatgtgcatctgcttattgcagaggatgaccccctttcatttccgtcaggccat

SEQ ID NO: 33044 - DNA, 66 bp, unidentified
  source 1..66: mol_type = unassigned DNA; note = methanogen bacteria
tcttataattatattcctggcgatttatatactggagttgcaggaggttatgcagcaatggaatcg

SEQ ID NO: 33045 - DNA, 60 bp, unidentified
  source 1..60: mol_type = unassigned DNA; note = methanogen bacteria
cctaatgtccttggaggaggatactccatgatgcatttaatagagttcaccttgcctcca

SEQ ID NO: 33046 - DNA, 30 bp, unidentified
  source 1..30: mol_type = unassigned DNA; note = methanogen bacteria
ataagtacaatatcagacataattacatca

SEQ ID NO: 33047 - DNA, 84 bp, unidentified
  source 1..84: mol_type = unassigned DNA; note = methanogen bacteria
atgaacattaatattgatctgttttacatttttaatcataatctgcaaaatccccttttcgatagtgtcatgccggtagtgact

SEQ ID NO: 33048 - DNA, 87 bp, unidentified
  source 1..87: mol_type = unassigned DNA; note = methanogen bacteria
gttaatgaaccaaggccttttgtaagtttgggcaatgtgcgtttgttgattgaagaagcagatccgctgtcatttccgtcaggacat

SEQ ID NO: 33049 - DNA, 30 bp, unidentified
  source 1..30: mol_type = unassigned DNA; note = methanogen bacteria
gatgcgttcagcggggcgatagaggattat

SEQ ID NO: 33050 - DNA, 84 bp, unidentified
  source 1..84: mol_type = unassigned DNA; note = methanogen bacteria
atgaacattaatgtttacctgttttatattttcaatcataatctgcaaaatcctcttttcgatagtgtcatgcctgtagtgact

SEQ ID NO: 33051 - DNA, 87 bp, unidentified
  source 1..87: mol_type = unassigned DNA; note = methanogen bacteria
gttaatgaaccaaggccttttgtaagtttggacaatttgcgtttgctgattgaagaagcagatcctctgtcattcccgtcaggacat

SEQ ID NO: 33052 - DNA, 114 bp, unidentified
  source 1..114: mol_type = unassigned DNA; note = methanogen bacteria
gtcgaatctcgctttggcaatttcgaaaattatattcatatcattgacacaactttaacggtcgaatctcgctttggcaatttcgaaaattatattcatatcattgacacaact

SEQ ID NO: 33053 - DNA, 294 bp, unidentified
  source 1..294: mol_type = unassigned DNA; note = methanogen bacteria
atgttcaatacttcacacgcgaagcagggaaccgaaatcaaaatcacaagcgataaggaacaggttgaaggtgaggaattgtcattcaagttaagcgagcagaacgggacttccgtatcaaaggaaatagtcaacgtcacaatcaaagataagaagggaaaagtcgtggtcgatgaggttgtcaagacaaactcaaagggcaaggcaaagctggatttgaatttgaagaaaggcaaatacaaggttaatgttgcttatggaggaaatgaaaactacacggggacaaatgcaaca

SEQ ID NO: 33054 - DNA, 42 bp, unidentified
  source 1..42: mol_type = unassigned DNA; note = methanogen bacteria
agttctgctttgtccggagttaaaaatcagaatgtcaatttg

SEQ ID NO: 33055 - DNA, 30 bp, unidentified
  source 1..30: mol_type = unassigned DNA; note = methanogen bacteria
ttttttggtcccttaactacaccaacacaa

SEQ ID NO: 33056 - DNA, 60 bp, unidentified
  source 1..60: mol_type = unassigned DNA; note = methanogen bacteria
ttacacggatactatccgaaattcatctggaatgtctttatcggcgagccgtcaattaca

SEQ ID NO: 33057 - DNA, 57 bp, unidentified
  source 1..57: mol_type = unassigned DNA; note = methanogen bacteria
tcatacccgttatggcattactttaatttggatataagaaactctgcatttcaggat

SEQ ID NO: 33058 - DNA, 63 bp, unidentified
  source 1..63: mol_type = unassigned DNA; note = methanogen bacteria
tttcgctgttattcgtatttttctttgttgaatgtatacggacggacaatattattcttaaaa

SEQ ID NO: 33059 - DNA, 69 bp, unidentified
  source 1..69: mol_type = unassigned DNA; note = methanogen bacteria
accggacagctcgacacaaccatgcttacaaactacacccagctattcaacgggaattttaccagactc

SEQ ID NO: 33060 - DNA, 156 bp, unidentified
  source 1..156: mol_type = unassigned DNA; note = methanogen bacteria
atgtttatgactggacaaatagacattaacttgcttttaaatccttttaatatgactcaaatgaataatatgagtcaaatgaacaatatgtcccagatatacaatacccaaatgaatatgactgggtctaataacctttcaagtttatttggattt

SEQ ID NO: 33061 - DNA, 99 bp, unidentified
  source 1..99: mol_type = unassigned DNA; note = methanogen bacteria
ggaatgccagttttcgattctgtctgcaatacattcagcataatctcaacaggtggaatgagtgttaaaaatgccaatatgggattttacaatgatgat

SEQ ID NO: 33062 - DNA, 168 bp, unidentified
  source 1..168: mol_type = unassigned DNA; note = methanogen bacteria
gtatattgttccgatggatattctgtttgttgttgtttcggcaattaccacaaccggtgcaagcatccaaagctcaacagttatgggaggatggccgccgttcacaatatttattataatggtgcttatgcttatagggggttctaccgggtctactgtaggtgcaat

SEQ ID NO: 33063 - DNA, 45 bp, unidentified
  source 1..45: mol_type = unassigned DNA; note = methanogen bacteria
acggctactggacggagtccgtggcggtcatgctgttctatcaga

SEQ ID NO: 33064 - DNA, 42 bp, unidentified
  source 1..42: mol_type = unassigned DNA; note = methanogen bacteria
tccgagaccttcgcggaccgctacggggtcagcccgtcagcg

SEQ ID NO: 33065 - DNA, 42 bp, unidentified
  source 1..42: mol_type = unassigned DNA; note = methanogen bacteria
tacgagaggagaggatccccgcccgccgcgctatcgccaccg

SEQ ID NO: 33066 - DNA, 69 bp, unidentified
  source 1..69: mol_type = unassigned DNA; note = methanogen bacteria
gctgcaagaagcatctttttgcaggatattgtagcttatcagcaagcgaatggacctttcctgtttacc

SEQ ID NO: 33067 - DNA, 51 bp, unidentified
  source 1..51: mol_type = unassigned DNA; note = methanogen bacteria
ggagtgcctccaacaatcatgtcacttggatttttgtccaacaatcatgtc

SEQ ID NO: 33068 - DNA, 63 bp, unidentified
  source 1..63: mol_type = unassigned DNA; note = methanogen bacteria
ggtagcattgatattcgtattcatgatgggaattttctcagcatttgctcctgtatttacaaa

SEQ ID NO: 33069 - DNA, 39 bp, unidentified
  source 1..39: mol_type = unassigned DNA; note = methanogen bacteria
ctggttagtcaatttttaattaaagaaggagttccagta

SEQ ID NO: 33070 - DNA, 165 bp, unidentified
  source 1..165: mol_type = unassigned DNA; note = methanogen bacteria
aatactacaggaaaacctatctgtgatctgggcattgtcaaaattgtaaactctacaaattgtaatattggcgacttggtagaatggaatattaccattatgaatcacggtccaagcgccgcatctaatgtcattgtaaaagacgtgctgcgtcggcattttcac

SEQ ID NO: 33071 - DNA, 45 bp, unidentified; identical to SEQ ID NO: 30887
  source 1..45: mol_type = unassigned DNA; note = methanogen bacteria

SEQ ID NO: 33072 - DNA, 30 bp, unidentified
  source 1..30: mol_type = unassigned DNA; note = methanogen bacteria
gctggattaattgaatacactccaaatact

SEQ ID NO: 33073 - DNA, 36 bp, unidentified
  source 1..36: mol_type = unassigned DNA; note = methanogen bacteria
tatcttccagcatatattccaaattttaattggcaa

SEQ ID NO: 33074 - DNA, 36 bp, unidentified; identical to SEQ ID NO: 31848
  source 1..36: mol_type = unassigned DNA; note = methanogen bacteria

SEQ ID NO: 33075 - DNA, 63 bp, unidentified
  source 1..63: mol_type = unassigned DNA; note = methanogen bacteria
cttgctttccctgctcctgatttcgtgggacagattaaaagcttacaaaccaaaattattaga

SEQ ID NO: 33076 - DNA, 138 bp, unidentified
  source 1..138: mol_type = unassigned DNA; note = methanogen bacteria
tcaggaaattttattccaatttatttggttaaaggttctgtagttcctactactactataattccatacggaccaatatctattacatatcctttatttttaaattttatcaattccactttagttgtatgtgaaaac

SEQ ID NO: 33077 - DNA, 72 bp, unidentified
  source 1..72: mol_type = unassigned DNA; note = methanogen bacteria
catgtatcaccagataatccttttattttttcttggtctattgaatttatgcctgttcgaattggttatttt

SEQ ID NO: 33078 - DNA, 180 bp, unidentified
  source 1..180: mol_type = unassigned DNA; note = methanogen bacteria
tggacaattgttgttgtaaatcatggcccaagtgcagctaaagatgtaaaagtttatgatatattacctgatggtcttaaattggtaaaagttaatccgtctgtcggtacttatactgatggaatttggactattggtgatttaagtgtaaacaatactgtatctttaatactactgaag

SEQ ID NO: 33079 - DNA, 63 bp, unidentified
  source 1..63: mol_type = unassigned DNA; note = methanogen bacteria
ccatatatactatctaattttggacaatttattacaaccccaataattacaaatgtcagtgaa

SEQ ID NO: 33080 - DNA, 105 bp, unidentified
  source 1..105: mol_type = unassigned DNA; note = methanogen bacteria
ctgagcgattcgaacgcggacaccgtcatggatgccctggacgacgccggctacctggataacggggagtacatgggtttcggcagggacgacttcaggaacatc

SEQ ID NO: 33081 - DNA, 219 bp, unidentified
  source 1..219: mol_type = unassigned DNA; note = methanogen bacteria
tttacagatatttcagattcccgtttcattaaaaacaaatcagaatctggaggttccatcgacaattatctcggatggattaatgttaaggcaaccaggtttaagcgtaaccatgttaaaaagtacgggggagccattttcaacgggggaatgttgaactcccttgatgactgcatctttgaaaaaaacctcgcccctttgaaaggcggagcaatatat

SEQ ID NO: 33082 - DNA, 51 bp, unidentified
  source 1..51: mol_type = unassigned DNA; note = methanogen bacteria
ggtgctgaaaatgatgagtacggatcggatttgtcccaatgcgtcttttca

SEQ ID NO: 33083 - DNA, 60 bp, unidentified
  source 1..60: mol_type = unassigned DNA; note = methanogen bacteria
accgaagacggtgcggccatattcaacaacggcaaattaatcttaaatgaatgtgaattt

SEQ ID NO: 33084 - DNA, 51 bp, unidentified
  source 1..51: mol_type = unassigned DNA; note = methanogen bacteria
ctatctaattttggacaatttattacaacacctataattacaaatgtcagt

SEQ ID NO: 33085 - DNA, 33 bp, unidentified
  source 1..33: mol_type = unassigned DNA; note = methanogen bacteria
acagaatatgcaaccgcaatggggtcaactgca

SEQ ID NO: 33086 - DNA, 84 bp, unidentified
  source 1..84: mol_type = unassigned DNA; note = methanogen bacteria
tcggaggatttttatatgattcatttggatctgcaggatgttttacagcagcagcaatcttttcagcactggcatttgtattca

SEQ ID NO: 33087 - DNA, 105 bp, unidentified
  source 1..105: mol_type = unassigned DNA; note = methanogen bacteria
ctgagcgagtcgagcgccgataccatgatcgatgccctggaggatgccgggctgtgggagaacggggagtacatggggctcgacaggaacgacttcgtgaacatc

SEQ ID NO: 33088 - DNA, 201 bp, unidentified
  source 1..201: mol_type = unassigned DNA; note = methanogen bacteria
ttatctcctatcgatccagttaaagcctatcttggtcaaagaattgttagtcaagaacaattagcaattatgggtgaatattggggaacgaatttaactttaggtgaaagagtattgggttggcttcaaactttagcatccggaagtatgggtttttcattaatttatcgtgctccggtaactgaagtaattgcacagaaa

SEQ ID NO: 33089 - DNA, 54 bp, unidentified
  source 1..54: mol_type = unassigned DNA; note = methanogen bacteria
tgcaataacattaagtattgtaggaatcgcttctcttacaatgtatacgcgaga

SEQ ID NO: 33090 - DNA, 168 bp, unidentified
  source 1..168: mol_type = unassigned DNA; note = methanogen bacteria
gcaactgcaggaatagccgatgcagtagatatttatgtgcctgatgccaaccaaacccaatttgaagtcggaacaggaaattatttggaaaaactcggaaatttaaatgaaagcagcatcctgtcccaagatgtcaaagcgaaaatcaccaacataatcctgacagat

SEQ ID NO: 33091 - DNA, 81 bp, unidentified
  source 1..81: mol_type = unassigned DNA; note = methanogen bacteria
ctactaacagattacatgccaacaactaacataacagtagaaacaagtgcagggtctatgatgtttaacttagtaatgggt

SEQ ID NO: 33092 - DNA, 63 bp, unidentified
  source 1..63: mol_type = unassigned DNA; note = methanogen bacteria
atggatttattaacttttatcaataatggaatgcagaatccgattttagatttagttgttccc

SEQ ID NO: 33093 - DNA, 93 bp, unidentified
  source 1..93: mol_type = unassigned DNA; note = methanogen bacteria
tatcatgtaagtcctagaccttattcagttttaagtaatattagattagttgttccggataatggtctcaattcttttccttcaggacatatg

SEQ ID NO: 33094 - DNA, 30 bp, unidentified
  source 1..30: mol_type = unassigned DNA; note = methanogen bacteria
atggcttttggtcttgaaggtataagttta

SEQ ID NO: 33095 - DNA, 66 bp, unidentified; identical to SEQ ID NO: 32006
  source 1..66: mol_type = unassigned DNA; note = methanogen bacteria

SEQ ID NO: 33096 - DNA, 51 bp, unidentified; identical to SEQ ID NO: 32007
  source 1..51: mol_type = unassigned DNA; note = methanogen bacteria

SEQ ID NO: 33097 - DNA, 84 bp, unidentified; identical to SEQ ID NO: 32805
  source 1..84: mol_type = unassigned DNA; note = methanogen bacteria

SEQ ID NO: 33098 - DNA, 93 bp, unidentified
  source 1..93: mol_type = unassigned DNA; note = methanogen bacteria
gcttcatcaattagtcatttggttttaattttacctgctcctgcttattggcttactttaactccattttggcatttcattggaccaagtatt

SEQ ID NO: 33099 - DNA, 147 bp, unidentified
  source 1..147: mol_type = unassigned DNA; note = methanogen bacteria
gttgatacgtatttttcccttccagaacagccaggagtaaaaggggcagaaatcattggatattctattaaagataggggtggagacttgtctggcggatttttccagggaaacattttatgttcacctgatgcatctgctggaact

SEQ ID NO: 33100 - DNA, 81 bp, unidentified
  source 1..81: mol_type = unassigned DNA; note = methanogen bacteria
gcaaatggtacaataaatatggatacaataacacatattggacaaatggaatataataacttaactagcttatttaggaga

SEQ ID NO: 33101 - DNA, 57 bp, unidentified
  source 1..57: mol_type = unassigned DNA; note = methanogen bacteria
gctttacctggaactcaattgctaagtgaaggagaatttataacttttttacattca

SEQ ID NO: 33102 - DNA, 75 bp, unidentified
  source 1..75: mol_type = unassigned DNA; note = methanogen bacteria
atggacatattaacttttgtaaataacgagatgcaacaaccatttttcgatgcaatagttccaatcatatacaca

SEQ ID NO: 33103 - DNA, 90 bp, unidentified
  source 1..90: mol_type = unassigned DNA; note = methanogen bacteria
tcctatatcagccctagaccatatttaactttaagcaatataagactagttgttagagataatggtcttaattctttcccttcaggacat

SEQ ID NO: 33104 - DNA, 81 bp, unidentified
  source 1..81: mol_type = unassigned DNA; note = methanogen bacteria
tccgccgccgtgtgggacggggggaaggatatcctgtcggatatactggaattcgataccgattccgcatcctcggtgagg

SEQ ID NO: 33105 - DNA, 297 bp, unidentified
  source 1..297: mol_type = unassigned DNA; note = methanogen bacteria
cttacaggttcaaatacaaaaggaactactaataatttagttgaatttaatgataacggattatcatttaaacatcctaaaaattgggaagtaatcaatggtagtgatgcggaacacattgatgctaaatttttcagaggcggtaacaatacaacaatagaaatttataatgttactgcaggttcaacatcgctaaaagatattacacaacaaagaattacttatgctcaaggaaatggagcttatgttactgttgttgagccaattacaatagatggtagaaattcatcaaatgta

SEQ ID NO: 33106 - DNA, 69 bp, unidentified
  source 1..69: mol_type = unassigned DNA; note = methanogen bacteria
acaagctcccataaaccggattcgctgcaggcgatcagtcacggccttggcctcaacccctttgaaaat

SEQ ID NO: 33107 - DNA, 63 bp, unidentified
  source 1..63: mol_type = unassigned DNA; note = methanogen bacteria
ttacgggctgatgctttaattaaaacatttgtcaacggatacagttttacaaataattttacg

SEQ ID NO: 33108 - DNA, 39 bp, unidentified
  source 1..39: mol_type = unassigned DNA; note = methanogen bacteria
acaggtttcactaccggatcttttcttccgaattccaat

SEQ ID NO: 33109 - DNA, 63 bp, unidentified
  source 1..63: mol_type = unassigned DNA; note = methanogen bacteria
atgagttatttagatttcctattagatccattaataagtttggatccgacaccatcaaatcca

SEQ ID NO: 33110 - DNA, 111 bp, unidentified
  source 1..111: mol_type = unassigned DNA; note = methanogen bacteria
ggtaatcatgcaatcagtcatgtaatcattaatattgcttcatcacaatattatttgttgtttattcctatatggaatatattttggacacaatccaatccattaacaatc

SEQ ID NO: 33111 - DNA, 30 bp, unidentified
  source 1..30: mol_type = unassigned DNA; note = methanogen bacteria
tcagattacttatctggtaatgaatggcca

SEQ ID NO: 33112 - DNA, 69 bp, unidentified
  source 1..69: mol_type = unassigned DNA; note = methanogen bacteria
atgacaagcctaaatgaccccacctggatttccacaggcgttgacactgttgatattgattcaagtgtt

SEQ ID NO: 33113 - DNA, 30 bp, unidentified
  source 1..30: mol_type = unassigned DNA; note = methanogen bacteria
agcggtttggatgtgttgatgactcaaatg

SEQ ID NO: 33114 - DNA, 267 bp, unidentified
  source 1..267: mol_type = unassigned DNA; note = methanogen bacteria
atgaaagggtcaaatatatgagcattttatgtaactggttctggtgtaacatttaaaaatctaactattaaaaatgcaaactctaatagtaatggcggagcaatttactttagtagttcaggtactgttgaaaattgtaattttattggtaacaatgcaacctactttggtggtgctatctatttcagttcttcaggtactactcatgaagtaagaaattgtaattttactggcaataatgcaactggttatggtgatgcagtttac

SEQ ID NO: 33115 - DNA, 30 bp, unidentified
  source 1..30: mol_type = unassigned DNA; note = methanogen bacteria
actgcaactcgtaatggtggtgcagtttac

SEQ ID NO: 33116 - DNA, 60 bp, unidentified
  source 1..60: mol_type = unassigned DNA; note = methanogen bacteria
aatcaaggtaatgtgacaaattgtaattttattggtaacaatgcaacctactatgctggt

SEQ ID NO: 33117 - DNA, 39 bp, unidentified
  source 1..39: mol_type = unassigned DNA; note = methanogen bacteria
gtgacggatctctcggccacgatatcgagtaccatcaag

SEQ ID NO: 33118 - DNA, 57 bp, unidentified
  source 1..57: mol_type = unassigned DNA; note = methanogen bacteria
gctattcctgaactgcaaattacaaattattcagatttcataacctttatttcaacc

SEQ ID NO: 33119 - DNA, 156 bp, unidentified
  source 1..156: mol_type = unassigned DNA; note = methanogen bacteria
gccgactgggcgtccgagaccgtcaccgtgagcagcagcctgctggggaacgctaccagcgccgattccggcacaggcctcgatgtcgccgggaagaagttcttcactgagatcgacagcaacgggaacaccgtcgccgtcgatgactggcacgtt

SEQ ID NO: 33120 - DNA, 72 bp, unidentified
  source 1..72: mol_type = unassigned DNA; note = methanogen bacteria
tgggacaggttcggcaccaccgagtacagcatcctcggcgtgaagaccgcgtacgacgtctcccccgagctc

SEQ ID NO: 33121 - DNA, 168 bp, unidentified
  source 1..168: mol_type = unassigned DNA; note = methanogen bacteria
ctcaaccattacataatgcacatggatgagtacttcacaatgagtattacaacccttccgttaggagacatcgtgaacgtagccagctggtatgtgcatccgccactgtactacattttaggaaaggttgcagtaaccataggtgcagcaatcggaatggattcactc

SEQ ID NO: 33122 - DNA, 39 bp, unidentified
  source 1..39: mol_type = unassigned DNA; note = methanogen bacteria
acagaccttgccgccagcatcgccagcagcatcaagaac

SEQ ID NO: 33123 - DNA, 60 bp, unidentified
  source 1..60: mol_type = unassigned DNA; note = methanogen bacteria
atgcaggagatagatatcctcgactggatccacggtacgttcggatgcatccccatggac

SEQ ID NO: 33124 - DNA, 87 bp, unidentified
  source 1..87: mol_type = unassigned DNA; note = methanogen bacteria
gggttcatgcgcaaccgtcctctccaggactacgccgtggacgcgctgataacctccttccagacctcgtccttcccctcggggcac

SEQ ID NO: 33125 - DNA, 156 bp, unidentified
  source 1..156: mol_type = unassigned DNA; note = methanogen bacteria
accgactgggcgtccgagaccgtcaccgtgagcagcagcctgctggggagtgcgaccagcaccgattccggcacgggcctggaggtcgccgggaaggagttcttcaccgagatcgacagcgatgggaacaccgtcgccgtcgatgactggcacgtt

SEQ ID NO: 33126 - DNA, 72 bp, unidentified
  source 1..72: mol_type = unassigned DNA; note = methanogen bacteria
tgggacggttttggcaccgccgagtacagcatcctcggcgtgaagacggcctacgacgtctcccccgagctc

SEQ ID NO: 33127 - DNA, 60 bp, unidentified
  source 1..60: mol_type = unassigned DNA; note = methanogen bacteria
atgcaggaaatcgatatcctcaattggatctacgacacgttcaggtgcacattcctcgac

SEQ ID NO: 33128 - DNA, 87 bp, unidentified
  source 1..87: mol_type = unassigned DNA; note = methanogen bacteria
gggttcatgcgccaccgtccgttcgaggactatgcggtgcatgcgctcgtgaactcgttccacacttcatcgttcccttcgggccat

SEQ ID NO: 33129 - DNA, 102 bp, unidentified
  source 1..102: mol_type = unassigned DNA; note = methanogen bacteria
acatggataaacggtctggacgcaacaggatggaagctgttctctgactcgcccgacctgtacgtcctctccggcgggaccatggccaaggcgggcagcttc

SEQ ID NO: 33130 - DNA, 75 bp, unidentified
  source 1..75: mol_type = unassigned DNA; note = methanogen bacteria
tgggacgtcctgggcgggaccgtgtacatgctggacgggagcatgttctacgggacgtccggatgcaccgcgggc

SEQ ID NO: 33131 - DNA, 60 bp, unidentified
  source 1..60: mol_type = unassigned DNA; note = methanogen bacteria
gataaacatgatgaaaaagtagataaattaaataaaaaacctaaaactaaaaagcaacct

SEQ ID NO: 33132 - DNA, 36 bp, unidentified
  source 1..36: mol_type = unassigned DNA; note = methanogen bacteria
gataaagatccatataacttaaaagaaagatattat

SEQ ID NO: 33133 - DNA, 36 bp, unidentified
  source 1..36: mol_type = unassigned DNA; note = methanogen bacteria
gcaataacaaatccaacaatggcaggaaacataaac

SEQ ID NO: 33134 - DNA, 69 bp, unidentified
  source 1..69: mol_type = unassigned DNA; note = methanogen bacteria
aacctgctgagcggagcaatccaaaacgacatatccaaccctgttcagaacctcatttacagcacagac

SEQ ID NO: 33135 - DNA, 33 bp, unidentified
  source 1..33: mol_type = unassigned DNA; note = methanogen bacteria
gatttagctccattagctttccttacagcatac

SEQ ID NO: 33136 - DNA, 189 bp, unidentified
  source 1..189: mol_type = unassigned DNA; note = methanogen bacteria
atgcagatcacggttgatcacggttttgtgggagatgaaattataaatggtagcgaatgggatatgcatcggtacgcgcccgatgggaatcagattaattatgagctgggtatcgtatatctcacaaactggttacatgacgtagctaacagtttctttggcggaaactattcaattaaggaaattgcg

SEQ ID NO: 33137 - DNA, 39 bp, unidentified
  source 1..39: mol_type = unassigned DNA; note = methanogen bacteria
ttccattgtatatctaattgtatgttatgtcttcgacgt

SEQ ID NO: 33138 - DNA, 30 bp, unidentified
  source 1..30: mol_type = unassigned DNA; note = methanogen bacteria
gctgggctaggtgcagatgctcttgcagga

SEQ ID NO: 33139 - DNA, 48 bp, unidentified
  source 1..48: mol_type = unassigned DNA; note = methanogen bacteria
attctcattgcaatgggtgttggtggaacaattggctatgctttggag

SEQ ID NO: 33140 - DNA, 60 bp, unidentified
  source 1..60: mol_type = unassigned DNA; note = methanogen bacteria
atgagttatttagattttctattagatccattgataagcatggatccaacaccatctaat

SEQ ID NO: 33141 - DNA, 111 bp, unidentified
  source 1..111: mol_type = unassigned DNA; note = methanogen bacteria
ggaaaccatgcgattagtcatgtaataatcaatattacatcatcacaatatttcctattattaataccaatatggaatatattttggactcaatcaaatccattgacaata

SEQ ID NO: 33142 - DNA, 36 bp, unidentified
  source 1..36: mol_type = unassigned DNA; note = methanogen bacteria
tctccatatatttcattagaacctaatttaactata

SEQ ID NO: 33143 - DNA, 99 bp, unidentified
  source 1..99: mol_type = unassigned DNA; note = methanogen bacteria
attacaggcattggcatagaagacagtttgtttgaaagcatgtctgcacttaccggcagtggaattacaatataccaagatgtagaaattttacctcaa

SEQ ID NO: 33144 - DNA, 123 bp, unidentified
  source 1..123: mol_type = unassigned DNA; note = methanogen bacteria
ggaatgcctatttttgattctgtttgcaatacattcaccattatctcaacaggcggtatgagtattaaaaatgcaaatattggcttttaccaaaccaaaacgatatcatttactttattacaa

SEQ ID NO: 33145 - DNA, 36 bp, unidentified
  source 1..36: mol_type = unassigned DNA; note = methanogen bacteria
ggttatatggttagtgttaataagataaatccgtca

SEQ ID NO: 33146 - DNA, 30 bp, unidentified
  source 1..30: mol_type = unassigned DNA; note = methanogen bacteria
gttatggggttcctgccaattcaagaggat

SEQ ID NO: 33147 - DNA, 36 bp, unidentified
  source 1..36: mol_type = unassigned DNA; note = methanogen bacteria
ttcaacgtcgggtacggacccgaccgtttggtcgat

SEQ ID NO: 33148 - DNA, 39 bp, unidentified
  source 1..39: mol_type = unassigned DNA; note = methanogen bacteria
tacctgatgtcgggagcggagatcgacgtcgcgggcctc

SEQ ID NO: 33149 - DNA, 87 bp, unidentified
  source 1..87: mol_type = unassigned DNA; note = methanogen bacteria
ccttatttatatagttattttcatcctgttgttgatgagttgtcacaaaaggtacaaacaggaacaataaagttgacttttgcagac

SEQ ID NO: 33150 - DNA, 36 bp, unidentified
  source 1..36: mol_type = unassigned DNA; note = methanogen bacteria
tattatgttgctattcaggacgatttgattagggtg

SEQ ID NO: 33151 - DNA, 39 bp, unidentified
  source 1..39: mol_type = unassigned DNA; note = methanogen bacteria
gggggaatgattggaaactatgtaccatctgaaactgga

SEQ ID NO: 33152 - DNA, 36 bp, unidentified
  source 1..36: mol_type = unassigned DNA; note = methanogen bacteria
ctggaaaggaccctcgacgccggccactcgctgcac

SEQ ID NO: 33153 - DNA, 36 bp, unidentified
  source 1..36: mol_type = unassigned DNA; note = methanogen bacteria
tccgtgacaaatccggaatatctgcacgacataaac

SEQ ID NO: 33154 - DNA, 63 bp, unidentified
  source 1..63: mol_type = unassigned DNA; note = methanogen bacteria
ttgagcggcgcaattcaaaacgatattgcaaatcccgttcaggaactgatcaacagcgcaaac

SEQ ID NO: 33155 - DNA, 30 bp, unidentified
  source 1..30: mol_type = unassigned DNA; note = methanogen bacteria
ttgattattgctgcaaaacccggctcaaca

SEQ ID NO: 33156 - DNA, 72 bp, unidentified
  source 1..72: mol_type = unassigned DNA; note = methanogen bacteria
acaaaaaatattgtaattgacggtaagggacatactatttacccaggatataatcctgtttttgattttaag

SEQ ID NO: 33157 - DNA, 51 bp, unidentified
  source 1..51: mol_type = unassigned DNA; note = methanogen bacteria
atagaaataaaaaatatcatttttgtacgtggaatgggcagtgcaattcat

SEQ ID NO: 33158 - DNA, 39 bp, unidentified
  source 1..39: mol_type = unassigned DNA; note = methanogen bacteria
atttccaattgtagatttataaactgttcttcccagatt

SEQ ID NO: 33159 - DNA, 36 bp, unidentified
  source 1..36: mol_type = unassigned DNA; note = methanogen bacteria
ggttatcttggagcatataaagctactgaaacaagt

SEQ ID NO: 33160 - DNA, 39 bp, unidentified
  source 1..39: mol_type = unassigned DNA; note = methanogen bacteria
gtgcctgcaatagcacaggactttgcaatgaataacgtt

SEQ ID NO: 33161 - DNA, 33 bp, unidentified
  source 1..33: mol_type = unassigned DNA; note = methanogen bacteria
ttcttaggtgcatacactccaactgaaatggga

SEQ ID NO: 33162 - DNA, 51 bp, unidentified
  source 1..51: mol_type = unassigned DNA; note = methanogen bacteria
tgcattccatttttcaatatctttttcaagagccatatcatcggaaacgaa

SEQ ID NO: 33163 - DNA, 39 bp, unidentified
  source 1..39: mol_type = unassigned DNA; note = methanogen bacteria
tttaatagtatgtttgatggcattagtcatgttaaaata

SEQ ID NO: 33164 - DNA, 42 bp, unidentified
  source 1..42: mol_type = unassigned DNA; note = methanogen bacteria
tcgagtttggatatccagcaagtttcgacgtttgtcatgaac

SEQ ID NO: 33165 - DNA, 60 bp, unidentified; identical to SEQ ID NO: 32960
  source 1..60: mol_type = unassigned DNA; note = methanogen bacteria

SEQ ID NO: 33166 - DNA, 129 bp, unidentified
  source 1..129: mol_type = unassigned DNA; note = methanogen bacteria
gctttcacaacttataatgaccaagacatgaatgagcttggtactaatttatttcattggaatggtttaaagaactttatggctgtatttacaggagagggttctttaggtgtagaaataaaaaataga

SEQ ID NO: 33167 - DNA, 30 bp, unidentified
  source 1..30: mol_type = unassigned DNA; note = methanogen bacteria
tatagtgtagatgcattgtcctttattgtt

SEQ ID NO: 33168 - DNA, 36 bp, unidentified
  source 1..36: mol_type = unassigned DNA; note = methanogen bacteria
ggatatcttggaccatatggagcaggagagactgca

SEQ ID NO: 33169 - DNA, 102 bp, unidentified
  source 1..102: mol_type = unassigned DNA; note = methanogen bacteria
actggatctttcctttacaatattggaggaaacctttatggtgtagttccacaggctattgcaacaatcttctcataccctgatgtgacacatgcaggtata

SEQ ID NO: 33170 - DNA, 54 bp, unidentified
  source 1..54: mol_type = unassigned DNA; note = methanogen bacteria
aaagcagaagtgcaagaatttgaagaaaaaattagaagagatggtggaatggtt

SEQ ID NO: 33171 - DNA, 54 bp, unidentified
  source 1..54: mol_type = unassigned DNA; note = methanogen bacteria
cagaacctcaccgacatcatggcatacgcgtcggcgatagacacgctcttccgc

SEQ ID NO: 33172 - DNA, 69 bp, unidentified
  source 1..69: mol_type = unassigned DNA; note = methanogen bacteria
gcagaccctgaagataagctgcctgaaatcgtatactggttgatgggaagtttggcatctgttacaatg

SEQ ID NO: 33173 - DNA, 33 bp, unidentified
  source 1..33: mol_type = unassigned DNA; note = methanogen bacteria
gactacctagtcgacatgggcgagagcatggcc

SEQ ID NO: 33174 - DNA, 228 bp, unidentified
  source 1..228: mol_type = unassigned DNA; note = methanogen bacteria
ataatgggttcggataagtgggtcaatacaacaatcgacaagattcatgcagatccgatttcacagggattcataatgtctgcagataaattggaagatattgatttaaattacactccaacaagcattgtaacagaaaaacatgtcaatgaaagttatgatggcgtcaaggctgcaaattccatgagcggcatgactggaagttgggacgaactgacagagtcaatg

SEQ ID NO: 33175 - DNA, 48 bp, unidentified; identical to SEQ ID NO: 19261
  source 1..48: mol_type = unassigned DNA; note = methanogen bacteria

SEQ ID NO: 33176 - DNA, 45 bp, unidentified
  source 1..45: mol_type = unassigned DNA; note = methanogen bacteria
ggttttgctttgttttcagttacaggcgcaccagaatcagtattt

SEQ ID NO: 33177 - DNA, 60 bp, unidentified
  source 1..60: mol_type = unassigned DNA; note = methanogen bacteria
atatttggacaaaatatgataagttccattgtgtttggcggatatgaagtaatgaataca

SEQ ID NO: 33178 - DNA, 33 bp, unidentified
  source 1..33: mol_type = unassigned DNA; note = methanogen bacteria
actgttggaataaaaggaacaaatcatttttca

SEQ ID NO: 33179 - DNA, 63 bp, unidentified; identical to SEQ ID NO: 32932
  source 1..63: mol_type = unassigned DNA; note = methanogen bacteria

SEQ ID NO: 33180 - DNA, 36 bp, unidentified
  source 1..36: mol_type = unassigned DNA; note = methanogen bacteria
tatgaaatcttgaattccggatggtcgttgagctca

SEQ ID NO: 33181 - DNA, 78 bp, unidentified
  source 1..78: mol_type = unassigned DNA; note = methanogen bacteria
tgtgttgatttcggcacaccagttttaaatatattcattggttatttcattggaaccactacagaatatacagcattt

SEQ ID NO: 33182 - DNA, 33 bp, unidentified
  source 1..33: mol_type = unassigned DNA; note = methanogen bacteria
acattatggggaaaagaattattttccggcaga

SEQ ID NO: 33183 - DNA, 81 bp, unidentified
  source 1..81: mol_type = unassigned DNA; note = methanogen bacteria
agccaaccccaacttgcagcaatttatagcgcatctccttcagtggcagttaatgacatggcatcagtattggtagggcct

SEQ ID NO: 33184 - DNA, 81 bp, unidentified
  source 1..81: mol_type = unassigned DNA; note = methanogen bacteria
gcgccggaaggtttaagattgccttcaatgatagccaatatactcaattattgcaacagcaattacaacgataatattctt

SEQ ID NO: 33185 - DNA, 75 bp, unidentified
  source 1..75: mol_type = unassigned DNA; note = methanogen bacteria
acaggaaatatccctacagaagcaatagtaaactacagacagatattaatgggaaactttagttctatccacggg

SEQ ID NO: 33186 - DNA, 30 bp, unidentified
  source 1..30: mol_type = unassigned DNA; note = methanogen bacteria
tcatttaatccgcaatcaaatatcaacatt

SEQ ID NO: 33187 - DNA, 75 bp, unidentified
  source 1..75: mol_type = unassigned DNA; note = methanogen bacteria
ttactaattatagtcattgacattaaaaattataatgtgtttaaaaatttttctttcccttttttccagaaaatt

SEQ ID NO: 33188 - DNA, 72 bp, unidentified
  source 1..72: mol_type = unassigned DNA; note = methanogen bacteria
ttcttaattaattacatgccttcaatagaaataccaatatctgttagtcaaactactgtagcaacggatttg

SEQ ID NO: 33189 - DNA, 75 bp, unidentified
  source 1..75: mol_type = unassigned DNA; note = methanogen bacteria
acaggaaatatccctgcagatgccctaacacaatacagacagctactcagcggaaaccttacctctattaatagg

SEQ ID NO: 33190 - DNA, 33 bp, unidentified
  source 1..33: mol_type = unassigned DNA; note = methanogen bacteria
tatggacctgcacatcatgatgcaacaatgcag

SEQ ID NO: 33191 - DNA, 48 bp, unidentified
  source 1..48: mol_type = unassigned DNA; note = methanogen bacteria
atgacgatgggtgctgaaaacataattagaatgattataggtataaaa

SEQ ID NO: 33192 - DNA, 75 bp, unidentified
  source 1..75: mol_type = unassigned DNA; note = methanogen bacteria
actggaacaataagtactgataatttaatgcagtatagccaaatgaatcttactaatttaactaataggacttta

SEQ ID NO: 33193 - DNA, 75 bp, unidentified
  source 1..75: mol_type = unassigned DNA; note = methanogen bacteria
acaggaaacattccaggagatatcattgcgcaatatcgccagattctttccggaaacataacttcattgagactt

SEQ ID NO: 33194 - DNA, 75 bp, unidentified
  source 1..75: mol_type = unassigned DNA; note = methanogen bacteria
acaggaaacatacctgccgatgccttaacacagtacaggcaaatgatgtcaggcaaccttacctctcttcaaagg

SEQ ID NO: 33195 - DNA, 45 bp, unidentified
  source 1..45: mol_type = unassigned DNA; note = methanogen bacteria
agcgtgaacatcgacggctgccgcagccagttcatcgtggcttcc

SEQ ID NO: 33196 - DNA, 30 bp, unidentified
  source 1..30: mol_type = unassigned DNA; note = methanogen bacteria
gacatggccggggttctgcaggacctcaac

SEQ ID NO: 33197 - DNA, 72 bp, unidentified
  source 1..72: mol_type = unassigned DNA; note = methanogen bacteria
ggaaatttcccaaaagatatacttaccaattacaggcaattatttgcgggaaattttacccaattccaaagg

SEQ ID NO: 33198 - DNA, 141 bp, unidentified
  source 1..141: mol_type = unassigned DNA; note = methanogen bacteria
gatacatatttcggacttcccgagcaacctggcgttagaggggccagtattgtaggtaaagacattgagaaaagagggggagatattgctggtggattcttccaaggaaacgttttatgttctccggacgcatccgctggt

SEQ ID NO: 33199 - DNA, 81 bp, unidentified; identical to SEQ ID NO: 32763
  source 1..81: mol_type = unassigned DNA; note = methanogen bacteria

SEQ ID NO: 33200 - DNA, 75 bp, unidentified
  source 1..75: mol_type = unassigned DNA; note = methanogen bacteria
acaggtgtaataaacactgatacgttaatgaactatagtcaaatgaattttgctaatttgactaacgtgacctta

SEQ ID NO: 33201 - DNA, 30 bp, unidentified
  source 1..30: mol_type = unassigned DNA; note = methanogen bacteria
tttgatccggcatttgtatctgcaataata

SEQ ID NO: 33202 - DNA, 69 bp, unidentified
  source 1..69: mol_type = unassigned DNA; note = methanogen bacteria
accggaaacatccctgcagatgcaatatcccaatacaaacaaatactatctgggaattttacccgcatt

SEQ ID NO: 33203 - DNA, 75 bp, unidentified
  source 1..75: mol_type = unassigned DNA; note = methanogen bacteria
gatggaattttaaactctatttcaaagctttatgatgttgtttttcgaggatcaaaaggtactaaccattttaca

SEQ ID NO: 33204 - DNA, 30 bp, unidentified
  source 1..30: mol_type = unassigned DNA; note = methanogen bacteria
ggtcttcactcaacatcttcaacgctggaa

SEQ ID NO: 33205 - DNA, 45 bp, unidentified
  source 1..45: mol_type = unassigned DNA; note = methanogen bacteria
atgaatatctatagctttatttggaataatattaatgacattaat

SEQ ID NO: 33206 - DNA, 78 bp, unidentified
  source 1..78: mol_type = unassigned DNA; note = methanogen bacteria
gatattctaaatcaattcaatagtttcagtgtgctgaatgattttgctttcaattgtcaagcgctaatatatcctaaa

SEQ ID NO: 33207 - DNA, 81 bp, unidentified
  source 1..81: mol_type = unassigned DNA; note = methanogen bacteria
tcgctgttctcggagagcacgcgcgagttcctgggaggattcatcggctccgatttcaccgacggcactgataccgaggcc

SEQ ID NO: 33208 - DNA, 75 bp, unidentified
  source 1..75: mol_type = unassigned DNA; note = methanogen bacteria
acaggttcaatcccaccggaagttctaacagactacaaaagcttacttataggcaactttacccctttccatagg

SEQ ID NO: 33209 - DNA, 69 bp, unidentified
  source 1..69: mol_type = unassigned DNA; note = methanogen bacteria
accggaaacatccctccagaggccatagcccaatacaagcaggtgctagcgggaaacttcagcgccctt

SEQ ID NO: 33210 - DNA, 72 bp, unidentified
  source 1..72: mol_type = unassigned DNA; note = methanogen bacteria
acaggaaatattcctccagatgcaattgcacagtacaaacagttaattgctggaaatgggacccttagactt

SEQ ID NO: 33211 - DNA, 42 bp, unidentified
  source 1..42: mol_type = unassigned DNA; note = methanogen bacteria
atcgaaattccgctcaccaaagatgttgcaatcacaataatg

SEQ ID NO: 33212 - DNA, 30 bp, unidentified
  source 1..30: mol_type = unassigned DNA; note = methanogen bacteria
ggccagtcaataggtttgatttttgatatg

SEQ ID NO: 33213 - DNA, 69 bp, unidentified
  source 1..69: mol_type = unassigned DNA; note = methanogen bacteria
acaggacacatgcctgcagatgccatatcacagtatcagcaaatgctagggggaaactttacctccatt

SEQ ID NO: 33214 - DNA, 156 bp, unidentified
  source 1..156: mol_type = unassigned DNA; note = methanogen bacteria
gccgactgggcgtccgagaccgtcaccgtgagcagcagcctgctcgggagcgcgaccagctctgattcgggcaccggcctggatatcgccgggaaggagttcttcaccgagatcgacagtgacgggaacaccgtcgccgtggacgactggcacgtt

SEQ ID NO: 33215 - DNA, 72 bp, unidentified
  source 1..72: mol_type = unassigned DNA; note = methanogen bacteria
tgggacaggttcgggaccgccgattacaccatcctcggcgtgaagacgtcctacgacgtctcccccgagctc

SEQ ID NO: 33216 - DNA, 60 bp, unidentified
  source 1..60: mol_type = unassigned DNA; note = methanogen bacteria
gcagttccaacaataactgaaatatcatcaggtgctgctttaaatgattattttataagt

SEQ ID NO: 33217 - DNA, 69 bp, unidentified
  source 1..69: mol_type = unassigned DNA; note = methanogen bacteria
acaggaaacattccggctgatgcattaacccaataccgtcagatgctttcaggaaacattacttctcct

SEQ ID NO: 33218 - DNA, 81 bp, unidentified
  source 1..81: mol_type = unassigned DNA; note = methanogen bacteria
tcgctgttctcggacggcatgcgcgaattcctcggagggttcatcggctccgatttcactgacggaacggacgccgaggca

SEQ ID NO: 33219 - DNA, 66 bp, unidentified; identical to SEQ ID NO: 29937
  source 1..66: mol_type = unassigned DNA; note = methanogen bacteria

SEQ ID NO: 33220 - DNA, 33 bp, unidentified
  source 1..33: mol_type = unassigned DNA; note = methanogen bacteria
ctgtttggccgtggatggtgcggctatgcatgc

SEQ ID NO: 33221 - DNA, 42 bp, unidentified
  source 1..42: mol_type = unassigned DNA; note = methanogen bacteria
tatgttcactattcgtttttaaagtttctaatcttgattcaa

SEQ ID NO: 33222 - DNA, 69 bp, unidentified
  source 1..69: mol_type = unassigned DNA; note = methanogen bacteria
accggaaacatccctgcagatgccatagcacaatacaagcaaatcctatctgggaattttacccgcatt

SEQ ID NO: 33223 - DNA, 69 bp, unidentified
  source 1..69: mol_type = unassigned DNA; note = methanogen bacteria
accggaaacatccctgcagatgcaatagcccaatacaggcaaatgctatctggcaattttaccggcatt

SEQ ID NO: 33224 - DNA, 111 bp, unidentified
  source 1..111: mol_type = unassigned DNA; note = methanogen bacteria
gttttaaccggccagatggatctaaacgttttattaaatccaatgaatacaacccagctagagaatctgactcagaatgcaagtgtaaattcaaccaacctatttggattg

SEQ ID NO: 33225 - DNA, 75 bp, unidentified
  source 1..75: mol_type = unassigned DNA; note = methanogen bacteria
acaggtgcaatacctccggaagtcattactgactacaaaacattacttatgggaaactttacccctctcaacagg

SEQ ID NO: 33226 - DNA, 72 bp, unidentified
  source 1..72: mol_type = unassigned DNA; note = methanogen bacteria
ggagtaattaatcaagaaactttaatacaatacagcaaaatgaattttgccaatttaactaacccgaacgta

SEQ ID NO: 33227 - DNA, 69 bp, unidentified
  source 1..69: mol_type = unassigned DNA; note = methanogen bacteria
acaggaaacattccaccggaagtatttgcgcaatacaaacagctactcgccggaaaccttacttccatc

SEQ ID NO: 33228 - DNA, 42 bp, unidentified
  source 1..42: mol_type = unassigned DNA; note = methanogen bacteria
ttggtaaatccccatgttccaaccattcagggactgattcag

SEQ ID NO: 33229 - DNA, 39 bp, unidentified
  source 1..39: mol_type = unassigned DNA; note = methanogen bacteria
gatggcgtatttagagaaataccaccaacagaacaagga

SEQ ID NO: 33230 - DNA, 69 bp, unidentified
  source 1..69: mol_type = unassigned DNA; note = methanogen bacteria
acaggaaacattccaatagacattatgacacagtacaaacagattttatccggcaacttttcatctatt

SEQ ID NO: 33231 - DNA, 33 bp, unidentified; identical to SEQ ID NO: 31471
  source 1..33: mol_type = unassigned DNA; note = methanogen bacteria

SEQ ID NO: 33232 - DNA, 42 bp, unidentified
  source 1..42: mol_type = unassigned DNA; note = methanogen bacteria
aaagttctcaagagaatcactgagaataagaatttggtaatg

SEQ ID NO: 33233 - DNA, 111 bp, unidentified
  source 1..111: mol_type = unassigned DNA; note = methanogen bacteria
gttttaaccggccagatggatctaaacgttttgttaaatccaatgaatacaacccagctagagaatctgactcagaatgcaagtgtaaattcaaccaacctatttggattg

SEQ ID NO: 33234 - DNA, 69 bp, unidentified
  source 1..69: mol_type = unassigned DNA; note = methanogen bacteria
accggaaacattccaacagacattatggcacagtacaaacagattttagccgggaacttctcatctatt

SEQ ID NO: 33235 - DNA, 39 bp, unidentified
  source 1..39: mol_type = unassigned DNA; note = methanogen bacteria
ttgcttaatttgccagtttacaatttagtcccattagga

SEQ ID NO: 33236 - DNA, 33 bp, unidentified
  source 1..33: mol_type = unassigned DNA; note = methanogen bacteria
ggagagaatttcagttggtttagagcaatccaa

SEQ ID NO: 33237 - DNA, 36 bp, unidentified
  source 1..36: mol_type = unassigned DNA; note = methanogen bacteria
tcgatggtccgcggggctttggatcaatacgaggcg

SEQ ID NO: 33238 - DNA, 75 bp, unidentified
  source 1..75: mol_type = unassigned DNA; note = methanogen bacteria
acaggcaaaattcctccggaaatcattaccaattacaaaaccttacttttgggaaactttacccctatccagagg

SEQ ID NO: 33239 - DNA, 33 bp, unidentified
  source 1..33: mol_type = unassigned DNA; note = methanogen bacteria
taccatttccagtatgtgcgcggctggaatgca

SEQ ID NO: 33240 - DNA, 54 bp, unidentified
  source 1..54: mol_type = unassigned DNA; note = methanogen bacteria
tcctcaatatgcaggcatgattgtacaggcatctcaaataatatgtgcaatatg

SEQ ID NO: 33241 - DNA, 42 bp, unidentified
  source 1..42: mol_type = unassigned DNA; note = methanogen bacteria
ggaataagaggtattccgtttattacaacaaaccctaatacc

SEQ ID NO: 33242 - DNA, 69 bp, unidentified
  source 1..69: mol_type = unassigned DNA; note = methanogen bacteria
ttaaggccttccaatatatctcccgcacttattggtcaaagtcttttaccacttagtcataatggatat

SEQ ID NO: 33243 - DNA, 36 bp, unidentified
  source 1..36: mol_type = unassigned DNA; note = methanogen bacteria
attgaattcaatggatttatcagaagtgatgaaatg

SEQ ID NO: 33244 - DNA, 102 bp, unidentified
  source 1..102: mol_type = unassigned DNA; note = methanogen bacteria
accggttcatacctttacaatgtaggtggaaacctttatggacaagtgcctcaagctattgcaacattattctcatatccggatttgacccatgcaggaatc

SEQ ID NO: 33245 - DNA, 57 bp, unidentified
  source 1..57: mol_type = unassigned DNA; note = methanogen bacteria
gcttcagtgtttggcttggatgcaataagatcacttagtggtgccggattaaactcc

SEQ ID NO: 33246 - DNA, 33 bp, unidentified; identical to SEQ ID NO: 30946
  source 1..33: mol_type = unassigned DNA; note = methanogen bacteria

SEQ ID NO: 33247 - DNA, 204 bp, unidentified
  source 1..204: mol_type = unassigned DNA; note = methanogen bacteria
atgattatgggcattggaagcgaaccggatcctggagaagtgcagtatatgaatgtgactgacaatataactgtctatgaaaacagcagttacgacttgcatgatgaaaacggcactcaaatttcatattatgaatttgatgaaaatgtaaccgaaggccaaaatgtcactgcattcaatgcttcgacagcaacgggcatttat

SEQ ID NO: 33248 - DNA, 57 bp, unidentified
  source 1..57: mol_type = unassigned DNA; note = methanogen bacteria
ttttataaaaatccaagtcctttttggccattaaatgcaggcattgcttcacctggt

SEQ ID NO: 33249 - DNA, 93 bp, unidentified
  source 1..93: mol_type = unassigned DNA; note = methanogen bacteria
tttttcgatatacctacttttggccgtcctttacacactgattttgtaagtggttttatagcaatgtgtattggagtttttaaggatcattta

SEQ ID NO: 33250 - DNA, 72 bp, unidentified
  source 1..72: mol_type = unassigned DNA; note = methanogen bacteria
tcaatgggcgccattccgccggaaatcataacccaatacaggcagctactggccggaaactttacctccctt

SEQ ID NO: 33251 - DNA, 105 bp, unidentified
  source 1..105: mol_type = unassigned DNA; note = methanogen bacteria
gcaggttcattcctgtacaatgtaggtgctgatttctacaatattgttcctgcatatgttacagctattttccattatcctgatgtgactaatgcgggtattgtt

SEQ ID NO: 33252 - DNA, 39 bp, unidentified
  source 1..39: mol_type = unassigned DNA; note = methanogen bacteria
ggattattaggacctatggtaaatccaatattttcacca

SEQ ID NO: 33253 - DNA, 138 bp, unidentified
  source 1..138: mol_type = unassigned DNA; note = methanogen bacteria
ttaactaacactaaaaataaaaaagcagtctatggcgctaagatgaatattaaggttttcatcagtaaaaataagtattacaattatacaggaactactgatgcaaacggattagttaaatttaagatttcatataag

SEQ ID NO: 33254 - DNA, 255 bp, unidentified
  source 1..255: mol_type = unassigned DNA; note = methanogen bacteria
aaaggctattctgcaagtgcaattacccgtacaattaaggtatcaaaatcccctataaaaatggctcctacttctctaaaagttaaaaaaggaacctactttaaagttaaggtaaccagcactaagactaaaaaagtgctttcctctgtaaaggttaaagtgaaagtctatacaggcaaaaagtataagacttataccattaaaaccaatagcaaaggaatcgctagcttaaagattagtcaaagtgtaggaaaa

SEQ ID NO: 33255 - DNA, 30 bp, unidentified
  source 1..30: mol_type = unassigned DNA; note = methanogen bacteria
gctcttactaagactttaacagtaacaaaa

SEQ ID NO: 33256 - DNA, 72 bp, unidentified
  source 1..72: mol_type = unassigned DNA; note = methanogen bacteria
gcaacaggaaaccttccagcagatgcccttacaaactatcagcaattaatcctgggaaacaccactctccct

SEQ ID NO: 33257 - DNA, 105 bp, unidentified
  source 1..105: mol_type = unassigned DNA; note = methanogen bacteria
ttaaccggttcattcctctataatgtaggtggaaatctttatggacttgttcctcccgctatggcagcaatattctcatatcctgatgtaactcatgcaggaatt

SEQ ID NO: 33258 - DNA, 87 bp, unidentified
  source 1..87: mol_type = unassigned DNA; note = methanogen bacteria
ttaaatagtactgctcatctatattggagtttaccaatgaccaatattctagataacacattatacatgagttttttttatgaaaat

SEQ ID NO: 33259 - DNA, 63 bp, unidentified
  source 1..63: mol_type = unassigned DNA; note = methanogen bacteria
cctgtagttggtggatttacatggcctccttttaattttagttctttttaccactccccttat

SEQ ID NO: 33260 - DNA, 78 bp, unidentified
  source 1..78: mol_type = unassigned DNA; note = methanogen bacteria
ttaagtggtacgatacctcaagatgtacttacgcaataccagcaacttactgatgtaaatctcacttccctaaactta

SEQ ID NO: 33261 - DNA, 204 bp, unidentified
  source 1..204: mol_type = unassigned DNA; note = methanogen bacteria
atgattatgggtgttggaagtgagcctgatcctggtgaagtgcaatatatgaatgtaactgataatataactgtatatgaaaacagcagttacgacttgcatgatgaaaacggtactcaaatctcatattatgagtttgatgaaaatgtaacctcaggccaaaatgtcactgcattcaatgcttcgactgccactggcatttat

SEQ ID NO: 33262 - DNA, 30 bp, unidentified
  source 1..30: mol_type = unassigned DNA; note = methanogen bacteria
ccctatgtactttactccagtggcggaggg

SEQ ID NO: 33263 - DNA, 69 bp, unidentified
  source 1..69: mol_type = unassigned DNA; note = methanogen bacteria
ttttttaaaagttggggtgctaatccgggattttactttgaacatactctcatgcagtcttcagacagt

SEQ ID NO: 33264 - DNA, 105 bp, unidentified
  source 1..105: mol_type = unassigned DNA; note = methanogen bacteria
ttaaccggttcattcctatacaatatcggtggaaatctttatggtgcagttcctcaagctattgcagcaatattttcatatcctgatgtaactcatgcaggtatt

SEQ ID NO: 33265 - DNA, 39 bp, unidentified
  source 1..39: mol_type = unassigned DNA; note = methanogen bacteria
aaaatcattaatattaacttcctgggtatggaaactcct

SEQ ID NO: 33266 - DNA, 57 bp, unidentified
  source 1..57: mol_type = unassigned DNA; note = methanogen bacteria
ctgccatctcctgcaaactatactggagattcagcactgcaattcgtatttactcaa

SEQ ID NO: 33267 - DNA, 39 bp, unidentified
  source 1..39: mol_type = unassigned DNA; note = methanogen bacteria
ctggatggactcccatttgttgctgacaatcttaatact

SEQ ID NO: 33268 - DNA, 69 bp, unidentified
  source 1..69: mol_type = unassigned DNA; note = methanogen bacteria
ttaactccaggaactttaaaaatcccaactattggagcttctcttttacctatcagccatgatctatat

SEQ ID NO: 33269 - DNA, 72 bp, unidentified
  source 1..72: mol_type = unassigned DNA; note = methanogen bacteria
ggaatcataacaatggatacaataaaacagtacagtgatttgaaattaaacaatttcacaaatctgaccttg

SEQ ID NO: 33270 - DNA, 30 bp, unidentified
  source 1..30: mol_type = unassigned DNA; note = methanogen bacteria
aacatatttaataaagctccaattacaaac

SEQ ID NO: 33271 - DNA, 84 bp, unidentified; identical to SEQ ID NO: 32805
  source 1..84: mol_type = unassigned DNA; note = methanogen bacteria

SEQ ID NO: 33272 - DNA, 45 bp, unidentified
  source 1..45: mol_type = unassigned DNA; note = methanogen bacteria
tcatcaattagtcatttggttttaattttacctgctcctgcttat

SEQ ID NO: 33273 - DNA, 138 bp, unidentified
  source 1..138: mol_type = unassigned DNA; note = methanogen bacteria
atactttctggccaaatggatcctaatatcatattgaatccattcaatactacaaatatgaccaatatgagccaaatctacaattcaagtgcaatgaacatgactggttccagcaatttatcaagtttatttggtttt

SEQ ID NO: 33274 - DNA, 30 bp, unidentified
  source 1..30: mol_type = unassigned DNA; note = methanogen bacteria
ttcaatgacccttatctcgtgacatcgttc

SEQ ID NO: 33275 - DNA, 39 bp, unidentified
  source 1..39: mol_type = unassigned DNA; note = methanogen bacteria
gttccggcaatagcacaggactttgcaatgaataatgtt

SEQ ID NO: 33276 - DNA, 45 bp, unidentified
  source 1..45: mol_type = unassigned DNA; note = methanogen bacteria
gatttctggtgcataacctcggatggaggtcaatgttttattttg

SEQ ID NO: 33277 - DNA, 33 bp, unidentified
  source 1..33: mol_type = unassigned DNA; note = methanogen bacteria
gagtacaacgacccatatctcgtgacgtcgttc

SEQ ID NO: 33278 - DNA, 33 bp, unidentified
  source 1..33: mol_type = unassigned DNA; note = methanogen bacteria
aatctcttcaacccaattgacaaatacttttct

SEQ ID NO: 33279 - DNA, 39 bp, unidentified
  source 1..39: mol_type = unassigned DNA; note = methanogen bacteria
atttcccagcttattctcgatttaaatacttcattaagc

SEQ ID NO: 33280 - DNA, 30 bp, unidentified
  source 1..30: mol_type = unassigned DNA; note = methanogen bacteria
tgcagtaatcatcatcatattcgctttttc

SEQ ID NO: 33281 - DNA, 30 bp, unidentified
  source 1..30: mol_type = unassigned DNA; note = methanogen bacteria
aacacatttaataaaactccaattacaaac

SEQ ID NO: 33282 - DNA, 30 bp, unidentified
  source 1..30: mol_type = unassigned DNA; note = methanogen bacteria
gatgaaattattagtttaagtaattataac

SEQ ID NO: 33283 - DNA, 138 bp, unidentified
  source 1..138: mol_type = unassigned DNA; note = methanogen bacteria
gtggatacctatctcggacttcctgaaagtcctggagtgaagggtgcggaaaatgttggatattccattaaaaaaagaggaggagacctctccggcggatttttccagggaaacattctctgttctccggatgcttcg

SEQ ID NO: 33284 - DNA, 51 bp, unidentified
  source 1..51: mol_type = unassigned DNA; note = methanogen bacteria
ggcatgccgacttcagagtttattgtttactatgtttcacaaatagacctt

SEQ ID NO: 33285 - DNA, 57 bp, unidentified; identical to SEQ ID NO: 32667
  source 1..57: mol_type = unassigned DNA; note = methanogen bacteria

SEQ ID NO: 33286 - DNA, 33 bp, unidentified
  source 1..33: mol_type = unassigned DNA; note = methanogen bacteria
tgtaatatatttaattttgttaagattattcta

SEQ ID NO: 33287 - DNA, 57 bp, unidentified
  source 1..57: mol_type = unassigned DNA; note = methanogen bacteria
ataatcacatcagaatatgatggattgaaagtttcaaacaccattataattaaggat

SEQ ID NO: 33288 - DNA, 51 bp, unidentified
  source 1..51: mol_type = unassigned DNA; note = methanogen bacteria
aataaaataaaaccattattaaaatcatatatgatatataaactattactt

SEQ ID NO: 33289 - DNA, 138 bp, unidentified
  source 1..138: mol_type = unassigned DNA; note = methanogen bacteria
gctgtagatacattccttggcttgcctgaggctcctggagtgaaaggggctgaaaatgtaggctattctataaagaatagaaaaggagatttagctggaggtttcttccagggaaacatcttatgttctcctgatgct

SEQ ID NO: 33290 - DNA, 51 bp, unidentified
  source 1..51: mol_type = unassigned DNA; note = methanogen bacteria
cccggaatgccgacgtctaattttgtcctttattatgtttctaaaatcgaa

SEQ ID NO: 33291 - DNA, 66 bp, unidentified
  source 1..66: mol_type = unassigned DNA; note = methanogen bacteria
atcggaaatcctcgaagcggaatagcagtctacatgtcataccttatctttgagatggggctgaat

SEQ ID NO: 33292 - DNA, 135 bp, unidentified
  source 1..135: mol_type = unassigned DNA; note = methanogen bacteria
gtggatacattccttggacttcctgaggctccaggtgttaaaggggcggaaactgtaggatattccataaaaaataggaaaggggatttggcaggaggattcttccaaggaaacatcttatgttccccagatgca

SEQ ID NO: 33293 - DNA, 36 bp, unidentified
  source 1..36: mol_type = unassigned DNA; note = methanogen bacteria
tccgaagtcagagacattcaaaactacggatatacc

SEQ ID NO: 33294 - DNA, 54 bp, unidentified
  source 1..54: mol_type = unassigned DNA; note = methanogen bacteria
aagaagtactattctgaaagatacttccagacagaggcccatgtgactgacggc

SEQ ID NO: 33295 - DNA, 33 bp, unidentified
  source 1..33: mol_type = unassigned DNA; note = methanogen bacteria
aatttaattccggtatataaatttgattcatta

SEQ ID NO: 33296 - DNA, 231 bp, unidentified
  source 1..231: mol_type = unassigned DNA; note = methanogen bacteria
atctatgcaccttcgcaggaagaattatcacaagcaaaaactacaaaacttaatgaacttcaggatttatactctggagcacttacaacatccccaagtgcttttcaaattgaagatcaaattgaaaatgcaaaaaatgcaggagaagttgaaagtatcaatatagtaacaccagcaacaaaagactggcggtcttttcaccaaaaatcaataaatacaaaccatgacaaa

SEQ ID NO: 33297 - DNA, 69 bp, unidentified
  source 1..69: mol_type = unassigned DNA; note = methanogen bacteria
ggactgaccagcggactcagcgactcctcggtcaatctggcacagtatggattggtcatggacgccttc

SEQ ID NO: 33298 - DNA, 99 bp, unidentified
  source 1..99: mol_type = unassigned DNA; note = methanogen bacteria
tccagctgggagaacctcggtatcatcggtcaggccgtgatgttcatcatcccgttctcgcacccgatgatggccatggacaacctgatcttcgggaac

SEQ ID NO: 33299 - DNA, 243 bp, unidentified
  source 1..243: mol_type = unassigned DNA; note = methanogen bacteria
gcagtaattgaatcaatggctaattcagttaccatagaagatttgaacattacaagatacaatcattcatcacaatatgattcaaaagtatatactgatattggatacgaggtcacatacaatcaaaaaagctatggagaccatgtcacaaatctgattttctactcaaaaaaaggaaaagttctgcacaatgacagcgagtacatatataccgtgaaagagtctatgttgacaataaaaata

SEQ ID NO: 33300 - DNA, 51 bp, unidentified
  source 1..51: mol_type = unassigned DNA; note = methanogen bacteria
cccggcatgccgacttccaaatttgtcctgcattatgtttctcaagtcgag

SEQ ID NO: 33301 - DNA, 231 bp, unidentified
  source 1..231: mol_type = unassigned DNA; note = methanogen bacteria
aagggccataatcttgttgttcatgaaaaaacaattgaattggctaatctggaaagggacatcagcattgcacatctctccgacatacatttcggatcactgcgccacagaaaaattattcgagacattgccgacaggcttaacggccttgactgtgatttggccatcatttcaggtgatttggctgacggcacatcgattgttgagctggatgattttatggctttatca

SEQ ID NO: 33302 - DNA, 30 bp, unidentified
  source 1..30: mol_type = unassigned DNA; note = methanogen bacteria
gaaattgatgcattgtcctttattatagga

SEQ ID NO: 33303 - DNA, 42 bp, unidentified
  source 1..42: mol_type = unassigned DNA; note = methanogen bacteria
aaacttaaggactatcagttccatatcctgtccagaaatccg

SEQ ID NO: 33304 - DNA, 135 bp, unidentified
  source 1..135: mol_type = unassigned DNA; note = methanogen bacteria
gatacttatttcggacttcccgaacagcctggtgttaaaggggctcgaattattggtgaatcagttaaagaaagaaaaggagatattgctggcggatttttccaaggaaatattctttgttctccagatgcatct

SEQ ID NO: 33305 - DNA, 30 bp, unidentified
  source 1..30: mol_type = unassigned DNA; note = methanogen bacteria
catatagatgcattatccttcattgtagga

SEQ ID NO: 33306 - DNA, 30 bp, unidentified
  source 1..30: mol_type = unassigned DNA; note = methanogen bacteria
aattgggaaaatgcaatagttccaaatagt

SEQ ID NO: 33307 - DNA, 69 bp, unidentified
  source 1..69: mol_type = unassigned DNA; note = methanogen bacteria
cttcgtccaaatgttttggatggaaatgtattgtcatttattattaatggatacttgtctgataggtgg

SEQ ID NO: 33308 - DNA, 30 bp, unidentified
  source 1..30: mol_type = unassigned DNA; note = methanogen bacteria
aagattgatgcattatccttccttgttgca

SEQ ID NO: 33309 - DNA, 126 bp, unidentified
  source 1..126: mol_type = unassigned DNA; note = methanogen bacteria
ttcactggtcaaatggatccgaacattatcttaaatccattcaataccacaaacatgactcaaatgtacaattcaagtgcaatgaacatgagtggttccagtaatttatccagtttatttggtttt

SEQ ID NO: 33310 - DNA, 30 bp, unidentified
  source 1..30: mol_type = unassigned DNA; note = methanogen bacteria
ctcgatatgatgacgagcctcagcggttcc

SEQ ID NO: 33311 - DNA, 129 bp, unidentified
  source 1..129: mol_type = unassigned DNA; note = methanogen bacteria
atatttaccggacaaatggatccaaatatcattttgaatccattcaataccacaaatatgactcaaatgtacaattcaagtgctatgaatatgagtggatcccgcaatttattcagtttatttggtttt

SEQ ID NO: 33312 - DNA, 33 bp, unidentified
  source 1..33: mol_type = unassigned DNA; note = methanogen bacteria
gttaatgctctttctattaatcctaatcctttc

SEQ ID NO: 33313 - DNA, 33 bp, unidentified
  source 1..33: mol_type = unassigned DNA; note = methanogen bacteria
ttcactatgattaattggtcaatctgtgtctgt

SEQ ID NO: 33314 - DNA, 63 bp, unidentified
  source 1..63: mol_type = unassigned DNA; note = methanogen bacteria
acatatttcggacttcccgagcaacctggtgttagaggtgctaggattattggacaagatgtc

SEQ ID NO: 33315 - DNA, 135 bp, unidentified
  source 1..135: mol_type = unassigned DNA; note = methanogen bacteria
gatacatatttcggacttcccgagcagcctggtgtaagaggagccaggattattggaaaagatgtagaaaaaagagggggagatatcgctggtggattcttccaaggaaacattttatgttctcctgatgcgtct

SEQ ID NO: 33316 - DNA, 216 bp, unidentified
  source 1..216: mol_type = unassigned DNA; note = methanogen bacteria
atgtatgatggaatgaatgacttgaaggaatgggaatacaatcagattaatcattatgattcaaaattggtgattgaggaaaacgcaacagattcccaaatcgatgacgttgcagatgaggtcaacggagacaagttgatggaatcagcaattgaaatcgagtcggactcggctaaaaaatcaggttcgcttctcaggttcgcttctcgtattgaa

SEQ ID NO: 33317 - DNA, 33 bp, unidentified
  source 1..33: mol_type = unassigned DNA; note = methanogen bacteria
aaaatagatgcattgtctttccttgttgcatac

SEQ ID NO: 33318 - DNA, 33 bp, unidentified
  source 1..33: mol_type = unassigned DNA; note = methanogen bacteria
aatatgattcctgtctataagatagattcaatg

SEQ ID NO: 33319 - DNA, 30 bp, unidentified
  source 1..30: mol_type = unassigned DNA; note = methanogen bacteria
aatattgatgcattatcattccttgtttct

SEQ ID NO: 33320 - DNA, 51 bp, unidentified
  source 1..51: mol_type = unassigned DNA; note = methanogen bacteria
gatattgccggtggatttttccaaggaaatgttttatgttctccggatgca

SEQ ID NO: 33321 - DNA, 114 bp, unidentified
  source 1..114: mol_type = unassigned DNA; note = methanogen bacteria
atggacatcggagaaagcatcacaagggttggatgtgaatacttcactggtgttgaaaccatgctcatcctcggacaaaccgaccggattgctgcagtggattttgcaccctgg

SEQ ID NO: 33322 - DNA, 111 bp, unidentified
  source 1..111: mol_type = unassigned DNA; note = methanogen bacteria
cttgatttctacttttcggatgaggagaagaagaacatatccaacctcggcaacatgaatgccccagattatgatgccgtgaacaaactcaatctggatgttcttctcatc

SEQ ID NO: 33323 - DNA, 93 bp, unidentified
  source 1..93: mol_type = unassigned DNA; note = methanogen bacteria
attctaaaagccgggtacattttcggagccgttgaaaaagccgaagcctatacggagtggatcctgaactatagggacaaaatgctggaaatt

SEQ ID NO: 33324 - DNA, 51 bp, unidentified
  source 1..51: mol_type = unassigned DNA; note = methanogen bacteria
cctggaatgccgacttctgatttcgtattatattatgtttctaaaatagag

SEQ ID NO: 33325 - DNA, 45 bp, unidentified
  source 1..45: mol_type = unassigned DNA; note = methanogen bacteria
ggaggaataccttttataccaaacggaatttttaatatgaccagt

SEQ ID NO: 33326 - DNA, 102 bp, unidentified
  source 1..102: mol_type = unassigned DNA; note = methanogen bacteria
gctgcttgtgtatatcggccttggatacttgattctagagtacatcctgtaaaagaagcattagctggtgcaacaggatattcttttccaagtggacatatg

SEQ ID NO: 33327 - DNA, 90 bp, unidentified
  source 1..90: mol_type = unassigned DNA; note = methanogen bacteria
catccggacattactctgcaaaatatgtatttaaatcagcttttgggcaatttcatcgaaactgtcgggcagaacattgtcagttgtttt

SEQ ID NO: 33328 - DNA, 60 bp, unidentified
  source 1..60: mol_type = unassigned DNA; note = methanogen bacteria
atgtttgccattacaggaggaactgttcctgaaaaattatcctatttgcatctgtcaatg

SEQ ID NO: 33329 - DNA, 42 bp, unidentified
  source 1..42: mol_type = unassigned DNA; note = methanogen bacteria
gttaataaccattttattaaagatgttattcttatggataat

SEQ ID NO: 33330 - DNA, 132 bp, unidentified
  source 1..132: mol_type = unassigned DNA; note = methanogen bacteria
tttaaacccagtgccggcataaacctcacaacaataagtcaaacatcaaatgggactcttaatcaaacaatgactgatttggttttaaatattattccagaaaatcctctaaatgctttggccaatagtgag

SEQ ID NO: 33331 - DNA, 30 bp, unidentified
  source 1..30: mol_type = unassigned DNA; note = methanogen bacteria
aacatcataccaaaatattcaatttcagga

SEQ ID NO: 33332 - DNA, 33 bp, unidentified
  source 1..33: mol_type = unassigned DNA; note = methanogen bacteria
aaaggattgattccttttgttatagaaaataag

SEQ ID NO: 33333 - DNA, 51 bp, unidentified
  source 1..51: mol_type = unassigned DNA; note = methanogen bacteria
gcatctccagctataaacgaagctgcaggactggttttcggaaatccttcc

SEQ ID NO: 33334 - DNA, 30 bp, unidentified
  source 1..30: mol_type = unassigned DNA; note = methanogen bacteria
tcaggattaggtccgcatccacttgcagcc

SEQ ID NO: 33335 - DNA, 48 bp, unidentified
  source 1..48: mol_type = unassigned DNA; note = methanogen bacteria
ttattgataatgggtgctggagaagtcatatccgagacaatgacatat

SEQ ID NO: 33336 - DNA, 48 bp, unidentified
  source 1..48: mol_type = unassigned DNA; note = methanogen bacteria
gcgctgatcgatccttcgttcgccttggaaaatctcagccgcgaggaa

SEQ ID NO: 33337 - DNA, 33 bp, unidentified
  source 1..33: mol_type = unassigned DNA; note = methanogen bacteria
gttgccggattgggtgcagatgcccttgcaggt

SEQ ID NO: 33338 - DNA, 51 bp, unidentified
  source 1..51: mol_type = unassigned DNA; note = methanogen bacteria
ccggttttaacaataatgggcgcagctcacacgctgccatatgctcatgag

SEQ ID NO: 33339 - DNA, 123 bp, unidentified
  source 1..123: mol_type = unassigned DNA; note = methanogen bacteria
cttacaggacaaatagatccaaacattcttttaaatccgtttaacactacccaaatggctaatatgacaaatatgagtcaaaacatgagtggatccaataatttatcaagcttatttggattt

SEQ ID NO: 33340 - DNA, 45 bp, unidentified
  source 1..45: mol_type = unassigned DNA; note = methanogen bacteria
gttagttgcagattaaatattaatgattttttccctttattttca

SEQ ID NO: 33341 - DNA, 204 bp, unidentified
  source 1..204: mol_type = unassigned DNA; note = methanogen bacteria
ggctcttctattaacgagcttaatcttttcgggataaaacacaatttaatagctggtatttcaagatcaatgagatcagatgaatatctggttaacacaatgtttgcattttcccaataccataacggattcggttatttttccgatattgttagagccacacccggtgtctgttcaccgtctcttaatgttgtatcaaaaaaa

SEQ ID NO: 33342 - DNA, 51 bp, unidentified
  source 1..51: mol_type = unassigned DNA; note = methanogen bacteria
ccgggcatgccaacttccgaatttgttctgcattatgtttctcaaattgaa

SEQ ID NO: 33343 - DNA, 42 bp, unidentified
  source 1..42: mol_type = unassigned DNA; note = methanogen bacteria
cactttatccagataatgaacacattaactgatgacgaatgg

SEQ ID NO: 33344 - DNA, 51 bp, unidentified
  source 1..51: mol_type = unassigned DNA; note = methanogen bacteria
ccaggaatgcctacatctgaatttgtgctttattatgtttcaaaggttgaa

SEQ ID NO: 33345 - DNA, 51 bp, unidentified
  source 1..51: mol_type = unassigned DNA; note = methanogen bacteria
ccaggtatgcctacatcagatttcgttttatattatgtttccaaaatcgaa

SEQ ID NO: 33346 - DNA, 108 bp, unidentified
  source 1..108: mol_type = unassigned DNA; note = methanogen bacteria
tatggaggatcctttttatataatgtagggaccgatttctattcaattatacctaagtttatagttaatattttccattatcctgatgtaacaaatgctggtgcggtt

SEQ ID NO: 33347 - DNA, 51 bp, unidentified
  source 1..51: mol_type = unassigned DNA; note = methanogen bacteria
ccggtaatgcctacttctgaatttgtactttattatgtttcaaaagtcgag

SEQ ID NO: 33348 - DNA, 51 bp, unidentified
  source 1..51: mol_type = unassigned DNA; note = methanogen bacteria
ccaggaatgccgacatcgaaattcgtactttattatgtttcaaaaatagaa

SEQ ID NO: 33349 - DNA, 51 bp, unidentified
  source 1..51: mol_type = unassigned DNA; note = methanogen bacteria
ccgggcatgcctacatccgattttgttttatactatgtttcaaaagttgaa

SEQ ID NO: 33350 - DNA, 51 bp, unidentified
  source 1..51: mol_type = unassigned DNA; note = methanogen bacteria
ccgggaatgcctacttcagagactttactttattacgtttcccatgtggaa

SEQ ID NO: 33351 - DNA, 51 bp, unidentified
  source 1..51: mol_type = unassigned DNA; note = methanogen bacteria
ccgggcatgccgacatctgaagtggttctgtattatgtttcaaaagttgaa

SEQ ID NO: 33352 - DNA, 120 bp, unidentified
  source 1..120: mol_type = unassigned DNA; note = methanogen bacteria
ggactcggatacaagactccctctggagcgggaatgatagacggtacctcaccctcttcgttcgtcgattatgtgagcggcgggatattcggcgatctcttcaacgacataggcgggaac

SEQ ID NO: 33353 - DNA, 51 bp, unidentified
  source 1..51: mol_type = unassigned DNA; note = methanogen bacteria
ccaggtatgccgacctctaagtttgtcctgcattatgtatcccaggtcgag

SEQ ID NO: 33354 - DNA, 48 bp, unidentified
  source 1..48: mol_type = unassigned DNA; note = methanogen bacteria
ccgcttattgtattatttataaaaaagggaatttttaatattccttct

SEQ ID NO: 33355 - DNA, 51 bp, unidentified
  source 1..51: mol_type = unassigned DNA; note = methanogen bacteria
cctggaatgcctacatctgaattcgtactttatcacgtttctcaagttgag

SEQ ID NO: 33356 - DNA, 51 bp, unidentified
  source 1..51: mol_type = unassigned DNA; note = methanogen bacteria
ccgggaatgcctacttcagctactttgattcattatgtttctcaagttgaa

SEQ ID NO: 33357 - DNA, 39 bp, unidentified
  source 1..39: mol_type = unassigned DNA; note = methanogen bacteria
tttcagctaagtacattcttaactgttttggaaaatcat

SEQ ID NO: 33358 - DNA, 36 bp, unidentified
  source 1..36: mol_type = unassigned DNA; note = methanogen bacteria
ctctttgaattgtatggccattatattttatccacc

SEQ ID NO: 33359 - DNA, 51 bp, unidentified
  source 1..51: mol_type = unassigned DNA; note = methanogen bacteria
ccaggcatgcctacttcagaatttgttttatattacgtatctcacgttgaa

SEQ ID NO: 33360 - DNA, 30 bp, unidentified
  source 1..30: mol_type = unassigned DNA; note = methanogen bacteria
acatatttcggacttcccgagcaacctggc

SEQ ID NO: 33361 - DNA, 51 bp, unidentified
  source 1..51: mol_type = unassigned DNA; note = methanogen bacteria
cctggaatgccgacttccaagtttgtcctgcattatgtttcccaaattgaa

SEQ ID NO: 33362 - DNA, 51 bp, unidentified
  source 1..51: mol_type = unassigned DNA; note = methanogen bacteria
cctggtatgcctacctctgaatttgtgcttaagtacgtttctcaggttgaa

SEQ ID NO: 33363 - DNA, 51 bp, unidentified
  source 1..51: mol_type = unassigned DNA; note = methanogen bacteria
cctggcatgcctacttccaaatttgtattgcattacgtatcccaaatcgag

SEQ ID NO: 33364 - DNA, 36 bp, unidentified
  source 1..36: mol_type = unassigned DNA; note = methanogen bacteria
aacttgacccatatcatgttcttttttgcatatcaa

SEQ ID NO: 33365 - DNA, 48 bp, unidentified
  source 1..48: mol_type = unassigned DNA; note = methanogen bacteria
ggaatgcctacatccgattttgttttatattatgtgtctaaaattgag

SEQ ID NO: 33366 - DNA, 51 bp, unidentified
  source 1..51: mol_type = unassigned DNA; note = methanogen bacteria
ccgggcatgcccacttcaaaattcgttcttcattatgtctcacagattgag

SEQ ID NO: 33367 - DNA, 51 bp, unidentified
  source 1..51: mol_type = unassigned DNA; note = methanogen bacteria
ccgggaatgccgacctctaaatttgttctccattatgtttccaaggttgaa

SEQ ID NO: 33368 - DNA, 51 bp, unidentified
  source 1..51: mol_type = unassigned DNA; note = methanogen bacteria
cctggaatgccaacttcaaagatagttctttattatgtttcaaaaatagaa

SEQ ID NO: 33369 - DNA, 51 bp, unidentified
  source 1..51: mol_type = unassigned DNA; note = methanogen bacteria
ccaacaatgcccacatccgaatttgtctcctattatgtttcaaaagtggaa

SEQ ID NO: 33370 - DNA, 51 bp, unidentified
  source 1..51: mol_type = unassigned DNA; note = methanogen bacteria
ccaggagttccaacttccgaagcagttttgtattatgtttcaaaggttgaa

SEQ ID NO: 33371 - DNA, 51 bp, unidentified
  source 1..51: mol_type = unassigned DNA; note = methanogen bacteria
cctggagttccaacatctgaaacagttctttattatgtttcaaaggttgaa

SEQ ID NO: 33372 - DNA, 51 bp, unidentified
  source 1..51: mol_type = unassigned DNA; note = methanogen bacteria
cctggaatgccgacatccgaagttgtctcatattatgtgtctcaggtggaa

SEQ ID NO: 33373 - DNA, 51 bp, unidentified
  source 1..51: mol_type = unassigned DNA; note = methanogen bacteria
ccgggagttccaacttccgaaacagtattgcattatgtttcaaaggttgaa

SEQ ID NO: 33374 - DNA, 30 bp, unidentified
  source 1..30: mol_type = unassigned DNA; note = methanogen bacteria
attaatgctttatctttccttgtcggtttt

SEQ ID NO: 33375 - DNA, 51 bp, unidentified
  source 1..51: mol_type = unassigned DNA; note = methanogen bacteria
cctagcatgcccacctccggcgtgttgctgcattatgtttctcaagttgaa

SEQ ID NO: 33376 - DNA, 93 bp, unidentified
  source 1..93: mol_type = unassigned DNA; note = methanogen bacteria
aactggattgcagtcgacgatgcatacctcggatacagcgggctccagatcggagacctcgttgacggcggggactatgacgattggcagcag

SEQ ID NO: 33377 - DNA, 69 bp, unidentified
  source 1..69: mol_type = unassigned DNA; note = methanogen bacteria
gcatgctgggacctgttcgacgagcacaccgttctgctcgtgacgaccgacccctgcgatgcaggcgcc

SEQ ID NO: 33378 - DNA, 168 bp, unidentified
  source 1..168: mol_type = unassigned DNA; note = methanogen bacteria
gttattggaggtatcgtcgatgcaatcgatatctatgcaccacaatattcagaaaatgaccacatacatcaagatatctacaactacttccaaaaaatgggaaacctatatgagcttaaatcacaggaaagcattgttattgctgctgcagacatcattgttcaaaat

SEQ ID NO: 33379 - DNA, 297 bp, unidentified
  source 1..297: mol_type = unassigned DNA; note = methanogen bacteria
gcatacgttcacgagccggacaacgagaccatcaccttcagttccgatccgtcggatgatgcggtgacgagttcggcgaagacctacttcttccagtacaccggcgaggatgcggactccgtccactgggatttcggtgacggtaccggggctgatgccttcgaggtctacaagacctacgcggatgctggcacatataatgtcctctgcaccgcgaccaacttcggaggtacccgtgtatcgggtatgcccctgaccatcgaggagaaggatttcggattcttcacgggttattcc

SEQ ID NO: 33380 - DNA, 45 bp, unidentified
  source 1..45: mol_type = unassigned DNA; note = methanogen bacteria
ggccctgcaagcagaaatttaattaataattttaaaataattgaa

SEQ ID NO: 33381 - DNA, 54 bp, unidentified
  source 1..54: mol_type = unassigned DNA; note = methanogen bacteria
gcccttccggaacttcagatagctaactattctgatttctacaacactaacccc

SEQ ID NO: 33382 - DNA, 141 bp, unidentified
  source 1..141: mol_type = unassigned DNA; note = methanogen bacteria
ttaatttacagtggacaaatggatataaatatgattttagatccattcaattcaactcaactttacaatatgaccaatatgtataattccagccaaaatataaccgcttcaaataatttttcaagtttatttggtctcaga

SEQ ID NO: 33383 - DNA, 51 bp, unidentified
  source 1..51: mol_type = unassigned DNA; note = methanogen bacteria
ccgggaatgcctacatctgatattttactttattatgtctccaaagtggaa

SEQ ID NO: 33384 - DNA, 39 bp, unidentified
  source 1..39: mol_type = unassigned DNA; note = methanogen bacteria
ggaatagataagataatcatcacattgaaaaacgccaat

SEQ ID NO: 33385 - DNA, 30 bp, unidentified
  source 1..30: mol_type = unassigned DNA; note = methanogen bacteria
tcaggaagccctaacctggccgaaattgga

SEQ ID NO: 33386 - DNA, 48 bp, unidentified
  source 1..48: mol_type = unassigned DNA; note = methanogen bacteria
ggtccaattgaaataacccctacaaaaggggttacagtttcagtaatg

SEQ ID NO: 33387 - DNA, 30 bp, unidentified; identical to SEQ ID NO: 30774
  source 1..30: mol_type = unassigned DNA; note = methanogen bacteria

SEQ ID NO: 33388 - DNA, 51 bp, unidentified
  source 1..51: mol_type = unassigned DNA; note = methanogen bacteria
ccaggaatgccgacatccgaattcgtttcatattatgtttcaaagattgaa

SEQ ID NO: 33389 - DNA, 51 bp, unidentified
  source 1..51: mol_type = unassigned DNA; note = methanogen bacteria
ccgggcatgccgacttctgaattcgtttcatattatgtttctaaagtggag

SEQ ID NO: 33390 - DNA, 39 bp, unidentified
  source 1..39: mol_type = unassigned DNA; note = methanogen bacteria
gaaaagattttctttggcggtgcaattaccactccaaca

SEQ ID NO: 33391 - DNA, 72 bp, unidentified
  source 1..72: mol_type = unassigned DNA; note = methanogen bacteria
ggctatcctaagttgaagttgcaaaggataatctggacaatatcatgggaaagattccttctgaagagcttg

SEQ ID NO: 33392 - DNA, 51 bp, unidentified
  source 1..51: mol_type = unassigned DNA; note = methanogen bacteria
cctggaatgcctacagcagaacttgtttcatattatgtttcaaaaattgaa

SEQ ID NO: 33393 - DNA, 165 bp, unidentified
  source 1..165: mol_type = unassigned DNA; note = methanogen bacteria
ttaaatccagatcaattatatgttaggccagctcctcaagttcaagtagatgaaggtttagctatcgccccatatgactggatatcttcgatatctccatactttggaacatcaatttattcatctccgggtggtcttatagatgaagttttatattatactagg

SEQ ID NO: 33394 - DNA, 111 bp, unidentified
  source 1..111: mol_type = unassigned DNA; note = methanogen bacteria
tcttgggtagcattcgattctggagccggattttccagcaatgggacccagctcagcaagctcgccgatcagttctcccttgtcggagactacgatgactggcacaccaac

SEQ ID NO: 33395 - DNA, 57 bp, unidentified
  source 1..57: mol_type = unassigned DNA; note = methanogen bacteria
tgcggatgggacttcattgacgacatgagcgacagccttaagacccaggtaggtgca

SEQ ID NO: 33396 - DNA, 51 bp, unidentified
  source 1..51: mol_type = unassigned DNA; note = methanogen bacteria
ccaacaatgcccacatctgaatttgtctcatattatgtttcaaaagtggag

SEQ ID NO: 33397 - DNA, 30 bp, unidentified
  source 1..30: mol_type = unassigned DNA; note = methanogen bacteria
attgcattatctaatgcttattctattttc

SEQ ID NO: 33398 - DNA, 51 bp, unidentified
  source 1..51: mol_type = unassigned DNA; note = methanogen bacteria
ccgaccatgcctacctctgaatttgtctcatattatgtttcaaaggttgag

SEQ ID NO: 33399 - DNA, 51 bp, unidentified
  source 1..51: mol_type = unassigned DNA; note = methanogen bacteria
ccgggagttccaacttctgaaactgtgctttattatgtttcaaaaattgaa

SEQ ID NO: 33400 - DNA, 30 bp, unidentified
  source 1..30: mol_type = unassigned DNA; note = methanogen bacteria
tatccattaaggagttattccaacgttttt

SEQ ID NO: 33401 - DNA, 60 bp, unidentified
  source 1..60: mol_type = unassigned DNA; note = methanogen bacteria
ggtgccgaaaaaatggtcatgacgcttatacaatgcagatttgattattctctgcattgg

SEQ ID NO: 33402 - DNA, 30 bp, unidentified
  source 1..30: mol_type = unassigned DNA; note = methanogen bacteria
aatccaaatttaataagttcctttaatgga

SEQ ID NO: 33403 - DNA, 36 bp, unidentified
  source 1..36: mol_type = unassigned DNA; note = methanogen bacteria
tttaaccaaaatattatgggatctttaacaggttta

SEQ ID NO: 33404 - DNA, 57 bp, unidentified
  source 1..57: mol_type = unassigned DNA; note = methanogen bacteria
aagatgtccaacgcactgtcgtggctgtatggatcgttcgcctccatgacctgggag

SEQ ID NO: 33405 - DNA, 39 bp, unidentified
  source 1..39: mol_type = unassigned DNA; note = methanogen bacteria
aaaatcataaatataaacttcctgggaatggaaactcct

SEQ ID NO: 33406 - DNA, 57 bp, unidentified; identical to SEQ ID NO: 33266
  source 1..57: mol_type = unassigned DNA; note = methanogen bacteria

SEQ ID NO: 33407 - DNA, 30 bp, unidentified
  source 1..30: mol_type = unassigned DNA; note = methanogen bacteria
gtaagctgggctgaaaaaggagctcctgct

SEQ ID NO: 33408 - DNA, 60 bp, unidentified
  source 1..60: mol_type = unassigned DNA; note = methanogen bacteria
ttcctgccatctcctgcaaactatactggagattcagcactgcaattcgtatttactcaa

SEQ ID NO: 33409 - DNA, 105 bp, unidentified
  source 1..105: mol_type = unassigned DNA; note = methanogen bacteria
agtggttcattcctttacaacttaggaacaaacatatatgatcttgtacctgcaagcacagctaacatatttaatttccctgatgcattacacgcaggaataata

SEQ ID NO: 33410 - DNA, 129 bp, unidentified
  source 1..129: mol_type = unassigned DNA; note = methanogen bacteria
gtgtccacttacgacggattgagcttgggcgaggtatattcgctgatatggaaccacctgaccgggaacaatgcctatgaaccccgttcaaggctatggtgggctgatcgtttcgtctggaacaccacc

SEQ ID NO: 33411 - DNA, 30 bp, unidentified
  source 1..30: mol_type = unassigned DNA; note = methanogen bacteria
agcgcttccctgaacgcattatctggaacc

SEQ ID NO: 33412 - DNA, 48 bp, unidentified
  source 1..48: mol_type = unassigned DNA; note = methanogen bacteria
atgagctatgaaaaccagatactcaagataattttaaacttttttgac

SEQ ID NO: 33413 - DNA, 48 bp, unidentified
  source 1..48: mol_type = unassigned DNA; note = methanogen bacteria
ttatacagtgtagaccaggcagactcatatattttaatttgggattat

SEQ ID NO: 33414 - DNA, 165 bp, unidentified
  source 1..165: mol_type = unassigned DNA; note = methanogen bacteria
tttaatgaccatttagggatatattgctcagatgtttatgtttacctgttaaacgcactatattatgcgggaaccaatatctattcaacaaaatcaatttatctctcaccagtagtctgttttttaacgtccctcatatttgatttgggttatgttgataaaact

SEQ ID NO: 33415 - DNA, 84 bp, unidentified; identical to SEQ ID NO: 32805
  source 1..84: mol_type = unassigned DNA; note = methanogen bacteria

SEQ ID NO: 33416 - DNA, 69 bp, unidentified
  source 1..69: mol_type = unassigned DNA; note = methanogen bacteria
gcttcatcaattagtcatttggttttaattttacctgctcctgcttattggcttactgtattggttggt

SEQ ID NO: 33417 - DNA, 225 bp, unidentified
  source 1..225: mol_type = unassigned DNA; note = methanogen bacteria
attttcatgagttttgaagcagaaaacaatgcaacaaacattactaataatactactgatgctccacatgttgaaaatgttacagtagagatgacatctaatttaaataaatcaaaagatgtgacctttgatgaatcagatgctgttgattttaatgaaaataagtcagctgaaattttaggtgttgaagataatccttattacaacaaagttgaacatttatat

SEQ ID NO: 33418 - DNA, 84 bp, unidentified
  source 1..84: mol_type = unassigned DNA; note = methanogen bacteria
tcatcatatttggatgatgattctttagtggttgattataataatgcattaaatgcagttgattctgttgttgactctgataat

SEQ ID NO: 33419 - DNA, 30 bp, unidentified
  source 1..30: mol_type = unassigned DNA; note = methanogen bacteria
tatattgatgcattatccttccttgtaggt

SEQ ID NO: 33420 - DNA, 108 bp, unidentified
  source 1..108: mol_type = unassigned DNA; note = methanogen bacteria
atgggattcaggtcatatacaaccggaactccaatggtgcaattaattactgaaggaacaggactgatatttatcgtatttccaatgattttcaatatcatgggcaca

SEQ ID NO: 33421 - DNA, 99 bp, unidentified
  source 1..99: mol_type = unassigned DNA; note = methanogen bacteria
tcattagatattcattttgttgatgctctttttgaaaatatgtctgcatggacaggaagcggaatgacattttttgtaaatgtggaaatattgcctaga

SEQ ID NO: 33422 - DNA, 33 bp, unidentified
  source 1..33: mol_type = unassigned DNA; note = methanogen bacteria
gcaataaatgcagtctcattccttgtagcattg

SEQ ID NO: 33423 - DNA, 33 bp, unidentified
  source 1..33: mol_type = unassigned DNA; note = methanogen bacteria
aatcagattaagttaattccccaaattaataac

SEQ ID NO: 33424 - DNA, 30 bp, unidentified
  source 1..30: mol_type = unassigned DNA; note = methanogen bacteria
gcaggactcggtccggatgcccttgctgct

SEQ ID NO: 33425 - DNA, 63 bp, unidentified
  source 1..63: mol_type = unassigned DNA; note = methanogen bacteria
ttgcagtttatgggtgcaggaaatatgcaatggattacagttatatcatattcggattcttgt

SEQ ID NO: 33426 - DNA, 66 bp, unidentified
  source 1..66: mol_type = unassigned DNA; note = methanogen bacteria
gcaaaaaccgcaaaaggactcgggatatgtatggcattattcggtgttgaaacaatattgcctgta

SEQ ID NO: 33427 - DNA, 36 bp, unidentified
  source 1..36: mol_type = unassigned DNA; note = methanogen bacteria
catataattacagtttataaaataaacgaattaaat

SEQ ID NO: 33428 - DNA, 30 bp, unidentified
  source 1..30: mol_type = unassigned DNA; note = methanogen bacteria
aacatcataccaaaatattcagttccagga

SEQ ID NO: 33429 - DNA, 105 bp, unidentified
  source 1..105: mol_type = unassigned DNA; note = methanogen bacteria
ggaggtttttatctctacaatgtaggtactgatattcttaatgtcgttcctcagactatccagtctgtattgcattatcctgatgtaacaaatgccggaattatt

SEQ ID NO: 33430 - DNA, 279 bp, unidentified
  source 1..279: mol_type = unassigned DNA; note = methanogen bacteria
cctatgaatttaaatgataatcaattatatgtgcgtcctgaaattcaagaacaaattaatgaaaataattcattagctccttatgatcgtgggggtattccattaattgaagatgcttatgttaaagctcaatatccaaataattcccaaaatttaggtaaaataacatcatatttaacacctttagcattattagttaaagataacacaatatattttggaacatctatttgtgcatcacctggaggtattcttgatgaaatattatattatactcgt

SEQ ID NO: 33431 - DNA, 102 bp, unidentified
  source 1..102: mol_type = unassigned DNA; note = methanogen bacteria
tcatatatggcttataccagtagcatgaatcgttataataactattataccggatacagtaactacggctacaatgattactataacagttattatgactat

SEQ ID NO: 33432 - DNA, 36 bp, unidentified
  source 1..36: mol_type = unassigned DNA; note = methanogen bacteria
tatcatttaattccaatttacaaaattaacgaattg

SEQ ID NO: 33433 - DNA, 36 bp, unidentified
  source 1..36: mol_type = unassigned DNA; note = methanogen bacteria
ggtccgaaaagccgagcgctactttttaacttaaga

SEQ ID NO: 33434 - DNA, 30 bp, unidentified; identical to SEQ ID NO: 33428
  source 1..30: mol_type = unassigned DNA; note = methanogen bacteria

SEQ ID NO: 33435 - DNA, 105 bp, unidentified
  source 1..105: mol_type = unassigned DNA; note = methanogen bacteria
ggtggattctacctttataatgtaggtactgatgtgttaaatatcgttcctgcagctattcaaaatgttttccactatcctgatgttactaatgcaggtataatt

SEQ ID NO: 33436 - DNA, 36 bp, unidentified
  source 1..36: mol_type = unassigned DNA; note = methanogen bacteria
aatcaaacaagtttatttcctaaatttaattatttt

SEQ ID NO: 33437 - DNA, 36 bp, unidentified
  source 1..36: mol_type = unassigned DNA; note = methanogen bacteria
acgtccattaatttaattagtaagtttaattgctgt

SEQ ID NO: 33438 - DNA, 102 bp, unidentified
  source 1..102: mol_type = unassigned DNA; note = methanogen bacteria
ggaggatttttcctctataacatgggaacagacttgttgaatgttgttccggccacaatccaaaatgtattccactatcctgatatcaccaatgcaggaatc

SEQ ID NO: 33439 - DNA, 54 bp, unidentified
  source 1..54: mol_type = unassigned DNA; note = methanogen bacteria
agatttaaaaccactatatttggtcctttagggggatcattgccattttcaagc

SEQ ID NO: 33440 - DNA, 36 bp, unidentified
  source 1..36: mol_type = unassigned DNA; note = methanogen bacteria
tatttcctgcaggctgttagtcaaatttacacatac

SEQ ID NO: 33441 - DNA, 93 bp, unidentified
  source 1..93: mol_type = unassigned DNA; note = methanogen bacteria
gcttggcttgacccgaatattccggtagatgacttcagcggttgggacgtttttaacaacaaagaccacgagttcgacgaggttgactatacc

SEQ ID NO: 33442 - DNA, 57 bp, unidentified
  source 1..57: mol_type = unassigned DNA; note = methanogen bacteria
tggagtcagaatctgccgtacggtacgcacttcagcgatgttgcggatatgggaatc

SEQ ID NO: 33443 - DNA, 105 bp, unidentified
  source 1..105: mol_type = unassigned DNA; note = methanogen bacteria
ggaggatttttcctatacaatgtgggaacagatttatttaatgttgtccctgcagctattcagaatgttctgcattatcctgatgtcaccaatgcaggcataatt

SEQ ID NO: 33444 - DNA, 36 bp, unidentified
  source 1..36: mol_type = unassigned DNA; note = methanogen bacteria
tttaatctcttcaacccaattgacaaatacttttct

SEQ ID NO: 33445 - DNA, 102 bp, unidentified
  source 1..102: mol_type = unassigned DNA; note = methanogen bacteria
ggaggattttacctgtacaatttcggaaccgacctgttgaatgtcgttccggcagcaatccaaagcgttttccactatccggatgtaaccaatgcaggtatt

SEQ ID NO: 33446 - DNA, 39 bp, unidentified
  source 1..39: mol_type = unassigned DNA; note = methanogen bacteria
tattcagttccaactaaattctatacctttgacaggtat

SEQ ID NO: 33447 - DNA, 30 bp, unidentified
  source 1..30: mol_type = unassigned DNA; note = methanogen bacteria
caattccatgtctatgccatgatgcctatt

SEQ ID NO: 33448 - DNA, 105 bp, unidentified
  source 1..105: mol_type = unassigned DNA; note = methanogen bacteria
ggaggattcttcctctataatgcaggtacagacctcttgaatgttgttccgtctgcaattcaaaacgtgcttcattatcctgacgttaccaatgcgggcataatc

SEQ ID NO: 33449 - DNA, 36 bp, unidentified
  source 1..36: mol_type = unassigned DNA; note = methanogen bacteria
cattacaatccagtagcagtgaactggattggaaca

SEQ ID NO: 33450 - DNA, 75 bp, unidentified
  source 1..75: mol_type = unassigned DNA; note = methanogen bacteria
aggaattgtgggagccggaataataggtattgcagcattcctgcttggaatcatatccgatcctctcgtatcact

SEQ ID NO: 33451 - DNA, 105 bp, unidentified
  source 1..105: mol_type = unassigned DNA; note = methanogen bacteria
ggaggattttacctatacaacttcggtaccgatttgctgaacgttgttcctcaggcaatccaaacagcattccattatccggatgtaaccaatgctggaattatc

SEQ ID NO: 33452 - DNA, 102 bp, unidentified
  source 1..102: mol_type = unassigned DNA; note = methanogen bacteria
ggaggatttttcctctacaatgtgggaaccgatatcttgggtattgttcctcaaaccattcagaccattctgcattatcccgatgttacaaatgcaggtatc

SEQ ID NO: 33453 - DNA, 36 bp, unidentified
  source 1..36: mol_type = unassigned DNA; note = methanogen bacteria
gtagtgctggaagttctcaccaagattccagctgat

SEQ ID NO: 33454 - DNA, 108 bp, unidentified
  source 1..108: mol_type = unassigned DNA; note = methanogen bacteria
cttggcggatttttcctatataatttcgggactgatttgttgaatgttgttcctcaaaatattcaaacaatattccattatcctgatgttactaatgcaggaattatt

SEQ ID NO: 33455 - DNA, 105 bp, unidentified
  source 1..105: mol_type = unassigned DNA; note = methanogen bacteria
ggaggatttttcctctacaatgtaggtacagatttattcaatatcgttccttcatccattcagactatcctacactatccggatgttacaaatgcaggtattatt

SEQ ID NO: 33456 - DNA, 105 bp, unidentified
  source 1..105: mol_type = unassigned DNA; note = methanogen bacteria
ggcggattttacctttataatgtaggtacagatttgctcaatgttgttcccgccgctttacagaatgttttgcattatccggatgttaccaatgcaggtattatc

SEQ ID NO: 33457 - DNA, 93 bp, unidentified
  source 1..93: mol_type = unassigned DNA; note = methanogen bacteria
acctggctgtctgtcgacaccggattcggaaccgagactgcaagcggttggaaagtatacactgacgcaaaggactctgacatgaagtacacc

SEQ ID NO: 33458 - DNA, 66 bp, unidentified
  source 1..66: mol_type = unassigned DNA; note = methanogen bacteria
ttctacacccagtcctggaccgtcttcggaaccaccgtcaaactcaccgatatctacaagatcggt

SEQ ID NO: 33459 - DNA, 108 bp, unidentified
  source 1..108: mol_type = unassigned DNA; note = methanogen bacteria
gcaggaggatttttcttgtataatgttggaacagatttattaaacgttattcctgcatctattcaaacaatattccattatcctgatgtaactaatgcaggtattatt

SEQ ID NO: 33460 - DNA, 108 bp, unidentified
  source 1..108: mol_type = unassigned DNA; note = methanogen bacteria
gcaggaggattcttcctgtataatgttggagcagatatattcaatattattccggcatcaattcaaactgtattccattatcctgatacaactaatgcaggtattatt

SEQ ID NO: 33461 - DNA, 30 bp, unidentified
  source 1..30: mol_type = unassigned DNA; note = methanogen bacteria
cccgtgttactgaagaccatagatttcggc

SEQ ID NO: 33462 - DNA, 114 bp, unidentified
  source 1..114: mol_type = unassigned DNA; note = methanogen bacteria
gaaagcgatagtgtttcagatgaaacattatccgtggaaaatgaggaaattggcaattcgttggaaagcaatgatgtttcagatgaaacatcatccgtagaaaatgaggaaaat

SEQ ID NO: 33463 - DNA, 270 bp, unidentified
  source 1..270: mol_type = unassigned DNA; note = methanogen bacteria
ttcataggaaactccaacagtaatggttctcaaaacataaccttgattaaggagaatgcctatggattcacttttgtaaatgatggagttccatattataattattacttggatggtgtattcaccaaccttgaaggagatttccagggttatgacatgaaagccagatttattgatgagaacggttctcttgttaaggagtatcgtgatgattatatgaagtatgctttttccgattccaagaaatctcagacaagcactttggcatct

SEQ ID NO: 33464 - DNA, 30 bp, unidentified
  source 1..30: mol_type = unassigned DNA; note = methanogen bacteria
gctggtcttggagctgatccacttgcagct

SEQ ID NO: 33465 - DNA, 54 bp, unidentified
  source 1..54: mol_type = unassigned DNA; note = methanogen bacteria
gatatgctccttctctttggtgcaggctccgtacttgattatgcaatggattat

SEQ ID NO: 33466 - DNA, 297 bp, unidentified
  source 1..297: mol_type = unassigned DNA; note = methanogen bacteria
tatgcaataactactcattataatccttttgcaagtcatgataattatcaagaggatgttaaatctgattctaatagtgttgactcatcagatgatagtaatgctcaaacatccgaatctaaagctcaagcaactgaatctaaatcatgggaatcaattggccattattcaggttctggttcgggttctaaatctatcaaagttcctgcaggtaaaattaaagtaaaactttctgcatatccaataaaaaattatgctactaatcatttatatgtatccgggtcaaatggtcaatct

SEQ ID NO: 33467 - DNA, 33 bp, unidentified
  source 1..33: mol_type = unassigned DNA; note = methanogen bacteria
tacaatatgattcccgcatttaagtccaacgga

SEQ ID NO: 33468 - DNA, 222 bp, unidentified
  source 1..222: mol_type = unassigned DNA; note = methanogen bacteria
caaaccgatgccaacaacaatttccctgcaaatgatgcatttgaagatggagtcaatcttgaaaatgctaaaagtcagtttttcaagggaatcaatgacgttccaaaggaaggctttgaaaatgcaactcaggtaaatgtcaaaacagacaagttcaagtcactgaattcaatcgttgacatgacacgtgaaaacatcatccttgacgggcttttaaacagt

SEQ ID NO: 33469 - DNA, 51 bp, unidentified
  source 1..51: mol_type = unassigned DNA; note = methanogen bacteria
ccagggcttgctgcattgggcagcggtgatgttacaacattatctaatgcg

SEQ ID NO: 33470 - DNA, 99 bp, unidentified; identical to SEQ ID NO: 22394
  source 1..99: mol_type = unassigned DNA; note = methanogen bacteria

SEQ ID NO: 33471 - DNA, 33 bp, unidentified
  source 1..33: mol_type = unassigned DNA; note = methanogen bacteria
ttcatgagagatggtgatttctattctcaactg

SEQ ID NO: 33472 - DNA, 33 bp, unidentified
  source 1..33: mol_type = unassigned DNA; note = methanogen bacteria
gctaaaggtcctttgaatgtgtcattcaatggg

SEQ ID NO: 33473 - DNA, 30 bp, unidentified
  source 1..30: mol_type = unassigned DNA; note = methanogen bacteria
caatggatgcctattaatttaggcattggt

SEQ ID NO: 33474 - DNA, 36 bp, unidentified
  source 1..36: mol_type = unassigned DNA; note = methanogen bacteria
agtctttttatgtcttcctttaatcagaattttcat

SEQ ID NO: 33475 - DNA, 36 bp, unidentified
  source 1..36: mol_type = unassigned DNA; note = methanogen bacteria
gctggagctcttttaggtaaagctgatcttttccca

SEQ ID NO: 33476 - DNA, 99 bp, unidentified
  source 1..99: mol_type = unassigned DNA; note = methanogen bacteria
gtagattccaatataaataatatacatactgcagtctggtttattattgtttctatgactagtacaggttatggggatattattccggccacaacttca

SEQ ID NO: 33477 - DNA, 102 bp, unidentified
  source 1..102: mol_type = unassigned DNA; note = methanogen bacteria
ggaaaattttcccgcagatatgccttccagtcaaagacttcctccaccgcccggatggccacctcaatcatggaatcatccggctcggcggtagtcagcttc

SEQ ID NO: 33478 - DNA, 75 bp, unidentified; identical to SEQ ID NO: 33130
  source 1..75: mol_type = unassigned DNA; note = methanogen bacteria

SEQ ID NO: 33479 - DNA, 108 bp, unidentified
  source 1..108: mol_type = unassigned DNA; note = methanogen bacteria
gcaggaggtttcttcttgtataatgtgggaactgacatattgaatgttgttccggcatcaattcaagccatattccattatcctgatgttactaatgctggtattatt

SEQ ID NO: 33480 - DNA, 69 bp, unidentified
  source 1..69: mol_type = unassigned DNA; note = methanogen bacteria
tggcattaccagccaacaataacttattttattgatactgcatttggtgtacaggactattcaagacca

SEQ ID NO: 33481 - DNA, 108 bp, unidentified
  source 1..108: mol_type = unassigned DNA; note = methanogen bacteria
gcaggaggatttttcttatataatgttggtacagatttaaataatgttgttccggcatttattcaaactattttccattatccggatgtttctaatgcaggtattatc

SEQ ID NO: 33482 - DNA, 33 bp, unidentified
  source 1..33: mol_type = unassigned DNA; note = methanogen bacteria
gtttcgggtctgggtgctgatgcccttgcagga

SEQ ID NO: 33483 - DNA, 51 bp, unidentified
  source 1..51: mol_type = unassigned DNA; note = methanogen bacteria
atattaaattcaatgggtgcaggttcaacaattggctatgcagcagattat

SEQ ID NO: 33484 - DNA, 33 bp, unidentified
  source 1..33: mol_type = unassigned DNA; note = methanogen bacteria
atgaacaattcatatgaaaataaatcaacaaat

SEQ ID NO: 33485 - DNA, 33 bp, unidentified
  source 1..33: mol_type = unassigned DNA; note = methanogen bacteria
aaagttaattatatactgaataatatggacaat

SEQ ID NO: 33486 - DNA, 81 bp, unidentified
  source 1..81: mol_type = unassigned DNA; note = methanogen bacteria
acctggctctctatcggtgacgccaccgcaagcggttggaaagtttacactgacgcaaaggactctgacatgaagtacacc

SEQ ID NO: 33487 - DNA, 66 bp, unidentified
  source 1..66: mol_type = unassigned DNA; note = methanogen bacteria
ttctacacccagtcctggactgcatatggagtcaccatcaaactcaccgacatctacaagatcggt

SEQ ID NO: 33488 - DNA, 105 bp, unidentified
  source 1..105: mol_type = unassigned DNA; note = methanogen bacteria
gctggttcattcctttataatattggggttgatttaagcaatatcgtacctgcaaatattcaatgcatattcaattatccggacataacctatgcaggaataata

SEQ ID NO: 33489 - DNA, 51 bp, unidentified
  source 1..51: mol_type = unassigned DNA; note = methanogen bacteria
ccttggtgtcctttagcagagcctattatatattatacatcaaaagttgat

SEQ ID NO: 33490 - DNA, 90 bp, unidentified
  source 1..90: mol_type = unassigned DNA; note = methanogen bacteria
tatatagcttatcaaagtagttatcaatattacaataactattatgatagctacagtagttataatgactataataattattatgactac

SEQ ID NO: 33491 - DNA, 48 bp, unidentified
  source 1..48: mol_type = unassigned DNA; note = methanogen bacteria
gaggtatatgcttcattttccgttattgatttggaaactccgattttc

SEQ ID NO: 33492 - DNA, 45 bp, unidentified
  source 1..45: mol_type = unassigned DNA; note = methanogen bacteria
ggatactttggccaacctaccggattttttgtaagtgaaaccgga

SEQ ID NO: 33493 - DNA, 33 bp, unidentified; identical to SEQ ID NO: 29907
  source 1..33: mol_type = unassigned DNA; note = methanogen bacteria

SEQ ID NO: 33494 - DNA, 93 bp, unidentified
  source 1..93: mol_type = unassigned DNA; note = methanogen bacteria
aatgtctttggcaatgcaatagctactgttcaggaaattcgtttacagatattcaatgttttttttcatggtaaattccgcagatatcgcagt

SEQ ID NO: 33495 - DNA, 30 bp, unidentified
  source 1..30: mol_type = unassigned DNA; note = methanogen bacteria
gcagggcttggtgcggagccactagctgca

SEQ ID NO: 33496 - DNA, 45 bp, unidentified
  source 1..45: mol_type = unassigned DNA; note = methanogen bacteria
ttaaacattatgggcgcatcaagcgtcttgaattatgccatgcaa

SEQ ID NO: 33497 - DNA, 45 bp, unidentified
  source 1..45: mol_type = unassigned DNA; note = methanogen bacteria
ggatactttggccaacctaccggattttttgtgagtgaaaacgga

SEQ ID NO: 33498 - DNA, 72 bp, unidentified
  source 1..72: mol_type = unassigned DNA; note = methanogen bacteria
actttgcctggtgcatcaatagggcttgcagagttattccacccagatttgacattgttgttgcattatgac

SEQ ID NO: 33499 - DNA, 87 bp, unidentified
  source 1..87: mol_type = unassigned DNA; note = methanogen bacteria
ggatatatgtccttgagtctggaattcccgtttccaatcttgtatctaaggcacaaccttgatttttgttgcatatcctcaagtgtt

SEQ ID NO: 33500 - DNA, 66 bp, unidentified
  source 1..66: mol_type = unassigned DNA; note = methanogen bacteria
tcggggcttggctcaacgcccgttgcatcaataccctatgcattgaatcttatatggaaaattgat

SEQ ID NO: 33501 - DNA, 30 bp, unidentified
  source 1..30: mol_type = unassigned DNA; note = methanogen bacteria
atagctttcattcctatggccgataattta

SEQ ID NO: 33502 - DNA, 66 bp, unidentified
  source 1..66: mol_type = unassigned DNA; note = methanogen bacteria
cctggaatgcttgaaaaccaaacactggcgaacttcctgcacatcaaggaaatgttctatcatatt

SEQ ID NO: 33503 - DNA, 54 bp, unidentified
  source 1..54: mol_type = unassigned DNA; note = methanogen bacteria
ccatggtgtcctatatctggacctatcatatattatacatccaaagtagattta

SEQ ID NO: 33504 - DNA, 60 bp, unidentified
  source 1..60: mol_type = unassigned DNA; note = methanogen bacteria
gcatttccagaaacaattaatgagcagacaatgcttttgaatttcattcctattaatggt

SEQ ID NO: 33505 - DNA, 138 bp, unidentified
  source 1..138: mol_type = unassigned DNA; note = methanogen bacteria
gaggttattgcattggggagattggatgttgagcctggagaggaagttcgtgttgcaactccaaaagcaaaagccgaagttgatgacttgcttaaagaggttcgctcttactggtatagtaacaactttaggtggttt

SEQ ID NO: 33506 - DNA, 84 bp, unidentified
  source 1..84: mol_type = unassigned DNA; note = methanogen bacteria
atggcagatccaatgggagtaatttatcagggattaaatgcaatttttaaccctattttagctttggatccaaatccaacaaat

SEQ ID NO: 33507 - DNA, 72 bp, unidentified
  source 1..72: mol_type = unassigned DNA; note = methanogen bacteria
tctgctatcagtagtttggttattatcttgccgccatctgtttattggctcactttaacaccattatggcat

SEQ ID NO: 33508 - DNA, 36 bp, unidentified
  source 1..36: mol_type = unassigned DNA; note = methanogen bacteria
gctcttggacaaatagtagatattaacttaaatccc

SEQ ID NO: 33509 - DNA, 90 bp, unidentified
  source 1..90: mol_type = unassigned DNA; note = methanogen bacteria
ttttcatatatggcctatagaagtagaatgagctattacaataactattacagatcaccaagctatggacgcagcagctattatggatat

SEQ ID NO: 33510 - DNA, 33 bp, unidentified
  source 1..33: mol_type = unassigned DNA; note = methanogen bacteria
ctcgcaccctacgacgatgcgtggagcggggag

SEQ ID NO: 33511 - DNA, 111 bp, unidentified; identical to SEQ ID NO: 33394
  source 1..111: mol_type = unassigned DNA; note = methanogen bacteria

SEQ ID NO: 33512 - DNA, 57 bp, unidentified; identical to SEQ ID NO: 33395
  source 1..57: mol_type = unassigned DNA; note = methanogen bacteria

SEQ ID NO: 33513 - DNA, 108 bp, unidentified
  source 1..108: mol_type = unassigned DNA; note = methanogen bacteria
gtcggcggataccacatagagttcgtcgagacctatcggatcctggcggatcacatacgcggggacgtctcggaccctacgaaggacctgatagtctgggacaccagg

SEQ ID NO: 33514 - DNA, 87 bp, unidentified
  source 1..87: mol_type = unassigned DNA; note = methanogen bacteria
tcatatatggcttataccagcagaatgagttattatagcagctaccctagctatggacgctctagctattataacagatatggatat

SEQ ID NO: 33515 - DNA, 45 bp, unidentified
  source 1..45: mol_type = unassigned DNA; note = methanogen bacteria
ccacttatggcgaatgtctttttaaaaaagcctgaaacattagtt

SEQ ID NO: 33516 - DNA, 39 bp, unidentified
  source 1..39: mol_type = unassigned DNA; note = methanogen bacteria
aattttgggcggtttaagaggtgcattccagggtgtata

SEQ ID NO: 33517 - DNA, 39 bp, unidentified
  source 1..39: mol_type = unassigned DNA; note = methanogen bacteria
tattttggaatcaattactacaacatgttttcaatttac

SEQ ID NO: 33518 - DNA, 33 bp, unidentified
  source 1..33: mol_type = unassigned DNA; note = methanogen bacteria
atgttggaaataataaatccttccatggtctct

SEQ ID NO: 33519 - DNA, 297 bp, unidentified
  source 1..297: mol_type = unassigned DNA; note = methanogen bacteria
agcagtttcggcgccacatcagttgacgatgccactgattccggaggcactggaaagccaaacatgactgattcatcaggagaccaggagtactatctgattcctgtagcaggactgcagaaagtaactgtaaacggagtggacatgtcctctgaaattagtggaaatgcgataggagtccattcgaaggttatggatcagggagacattcaaattaaaacccagtcacatgagataatcataaagacgcctcctggaatgagtcctcaggaagctgttcgaagtcctgaaaaccag

SEQ ID NO: 33520 - DNA, 36 bp, unidentified
  source 1..36: mol_type = unassigned DNA; note = methanogen bacteria
gcaatcggtgcaggactggataatgttgttgcggca

SEQ ID NO: 33521 - DNA, 42 bp, unidentified
  source 1..42: mol_type = unassigned DNA; note = methanogen bacteria
attctagaaggaaatgtttttaatatatcaccaattgaattc

SEQ ID NO: 33522 - DNA, 87 bp, unidentified
  source 1..87: mol_type = unassigned DNA; note = methanogen bacteria
acctggctcgatgtcaatactaaccctgacatttccgcaaccggcatagacctgttcagcaacgatgatctcgacgactggcagtct

SEQ ID NO: 33523 - DNA, 39 bp, unidentified
  source 1..39: mol_type = unassigned DNA; note = methanogen bacteria
acctgggacgagatcgacgaccctgtacaggtcggcggc

SEQ ID NO: 33524 - DNA, 30 bp, unidentified
  source 1..30: mol_type = unassigned DNA; note = methanogen bacteria
gcccggaattcggcgggcggaacactggcg

SEQ ID NO: 33525 - DNA, 30 bp, unidentified
  source 1..30: mol_type = unassigned DNA; note = methanogen bacteria
gcaggtcctgaaaatgtatcatttagtggt

SEQ ID NO: 33526 - DNA, 30 bp, unidentified
  source 1..30: mol_type = unassigned DNA; note = methanogen bacteria
caatggatgccaatcagcttaggaatcggt

SEQ ID NO: 33527 - DNA, 33 bp, unidentified; identical to SEQ ID NO: 33518
  source 1..33: mol_type = unassigned DNA; note = methanogen bacteria

SEQ ID NO: 33528 - DNA, 288 bp, unidentified
  source 1..288: mol_type = unassigned DNA; note = methanogen bacteria
gttttgaacacatctccaaagactgctacatcactgactatgctttccagttccaatctgaattcattcggcgagtatgctgttcagcttaaggatgtaaacggcaatcctatgtccggccagttcattaaaatagaggtaaaaaacaatacatatactctaaagacggacagcaacggcactgcacggatgaatctgactttgggtgacggatcatatgaaattaaaagttactttaagggtgataacaagtacggtgagtcacattcatcagatattgtcattaag

SEQ ID NO: 33529 - DNA, 99 bp, unidentified
  source 1..99: mol_type = unassigned DNA; note = methanogen bacteria
gcagaccgtattgttgcaggaatcatgagcttaaattcagatattggtaatattaatattctttctacttcaaaaggtacttggaatgatttaattggt

SEQ ID NO: 33530 - DNA, 39 bp, unidentified
  source 1..39: mol_type = unassigned DNA; note = methanogen bacteria
gatatgggcctcgatctcgaactcttcggggtcaacggg

SEQ ID NO: 33531 - DNA, 288 bp, unidentified
  source 1..288: mol_type = unassigned DNA; note = methanogen bacteria
tttataaatcacagttccaaaaccgatactacattgtctatgatatccaattcaaatctggatgcatccaatgagtataccgttcagcttaaggatgtaaataacagggttttggcggataaattcattactgttaaatttaataatgaatcttatactttagtcactgacaaaaacggtactgcatcaatcaatttgactgttattaaaggttcttttgaagttaaaagttattttaaaggtgacagcaagtataatgatgctcattcatctgatatagtaattaaa

SEQ ID NO: 33532 - DNA, 60 bp, unidentified
  source 1..60: mol_type = unassigned DNA; note = methanogen bacteria
atcacagtcccacataacctttacggcgatggattgaatccgcatatgggattgatattt

SEQ ID NO: 33533 - DNA, 45 bp, unidentified
  source 1..45: mol_type = unassigned DNA; note = methanogen bacteria
tattacttgattcagtttcaggaacatatattgattacaaatact

SEQ ID NO: 33534 - DNA, 33 bp, unidentified
  source 1..33: mol_type = unassigned DNA; note = methanogen bacteria
ctgattgaaagtggtggtgctcaaggaaattca

SEQ ID NO: 33535 - DNA, 30 bp, unidentified
  source 1..30: mol_type = unassigned DNA; note = methanogen bacteria
atgggtttgtccggtcttgaaccggattta

SEQ ID NO: 33536 - DNA, 33 bp, unidentified
  source 1..33: mol_type = unassigned DNA; note = methanogen bacteria
gttatgggccttcagggacttgaaccggacctg

SEQ ID NO: 33537 - DNA, 48 bp, unidentified
  source 1..48: mol_type = unassigned DNA; note = methanogen bacteria
actgcaatatttgatggaataaactctggaaatatggatttgaatcat

SEQ ID NO: 33538 - DNA, 39 bp, unidentified
  source 1..39: mol_type = unassigned DNA; note = methanogen bacteria
gacatgggcctcgacctcgagctcttcggggtcgacggg

SEQ ID NO: 33539 - DNA, 288 bp, unidentified
  source 1..288: mol_type = unassigned DNA; note = methanogen bacteria
ttttttgagcatacttcaaagactgacacttccctgactttaatgtcaaattccaaactggattcatccaacgaatacagcgttcagctcagggattcatcaaaaaatcctttggcattcaagttcatttcagtcaagttcggcaatgacacatatatgcttcaaaccgacagaaacggtattgcaagcatcaacctgacagttaaggatggatctcatgaagtcaagtcatattataagggtgacagcaagtataatgaggcccactcttcagacatactagtcaaa

SEQ ID NO: 33540 - DNA, 237 bp, unidentified
  source 1..237: mol_type = unassigned DNA; note = methanogen bacteria
cgggtagtgtatcagagggacaccacctacatcaacaaggtgcaggtggactcggtctataagcgcgacagcgtcctcgtccgggagaagggcgataccgtctacatctacaaggagcgcatccgggagaagtacaaactcatccgggacaccgtccgcctcgtgaaagtggatagcgtggccgtggagcgcatcaaagaggtgaaggtagagaaacccttatccgcgtggaaaagc

SEQ ID NO: 33541 - DNA, 66 bp, unidentified
  source 1..66: mol_type = unassigned DNA; note = methanogen bacteria
gaatcaggattgttcccaaccacatttcttaatgtttatttatctcttcagagtattgcaaacaac

SEQ ID NO: 33542 - DNA, 72 bp, unidentified
  source 1..72: mol_type = unassigned DNA; note = methanogen bacteria
tggtattatcctggcttttgtcggtttggtgtttttggcaagaggttttgtcgatttgggaaatgttgtgac

SEQ ID NO: 33543 - DNA, 33 bp, unidentified
  source 1..33: mol_type = unassigned DNA; note = methanogen bacteria
gatgggaaattaggatacatccccgatgaatca

SEQ ID NO: 33544 - DNA, 30 bp, unidentified
  source 1..30: mol_type = unassigned DNA; note = methanogen bacteria
atgggtcttcaaggacttgaatgggatttg

SEQ ID NO: 33545 - DNA, 144 bp, unidentified
  source 1..144: mol_type = unassigned DNA; note = methanogen bacteria
atgggattcaatggagacgacatcaaatatgcaaaagtcctgtctaatcaaactttagttgattatctccattatagatattataactggtctagcagactaattatcgacggcattctagtaattttagctcgtctcgacatg

SEQ ID NO: 33546 - DNA, 93 bp, unidentified
  source 1..93: mol_type = unassigned DNA; note = methanogen bacteria
ttcggatttagcgtaagcggcactccaacaccttcattattgaaattcagccaagctggtcaaaatatgattgagggaggtatttttggaccg

SEQ ID NO: 33547 - DNA, 33 bp, unidentified
  source 1..33: mol_type = unassigned DNA; note = methanogen bacteria
tatcctttaaaaatccattctaatgttttcatt

SEQ ID NO: 33548 - DNA, 33 bp, unidentified
  source 1..33: mol_type = unassigned DNA; note = methanogen bacteria
atgaattcttgccttgaaaggttcttattttac

SEQ ID NO: 33549 - DNA, 42 bp, unidentified
  source 1..42: mol_type = unassigned DNA; note = methanogen bacteria
gttggaccatccaatgtaggtgttgaaatttctaaaatcaat

SEQ ID NO: 33550 - DNA, 33 bp, unidentified
  source 1..33: mol_type = unassigned DNA; note = methanogen bacteria
ctctggtttgatgattacacattattcccaaat

SEQ ID NO: 33551 - DNA, 30 bp, unidentified
  source 1..30: mol_type = unassigned DNA; note = methanogen bacteria
aacattgatgcattgtccttccttttagga

SEQ ID NO: 33552 - DNA, 30 bp, unidentified
  source 1..30: mol_type = unassigned DNA; note = methanogen bacteria
gcaggtcctggaaatgtttcatttagtggg

SEQ ID NO: 33553 - DNA, 30 bp, unidentified
  source 1..30: mol_type = unassigned DNA; note = methanogen bacteria
caatggatgccaatcaacttaggaatcggt

SEQ ID NO: 33554 - DNA, 39 bp, unidentified
  source 1..39: mol_type = unassigned DNA; note = methanogen bacteria
gacatgggcctcgacctcgagctcctgggggtcgacggg

SEQ ID NO: 33555 - DNA, 48 bp, unidentified
  source 1..48: mol_type = unassigned DNA; note = methanogen bacteria
ataggttccaatcagatattgcctaacaagtatcctgcattgataaca

SEQ ID NO: 33556 - DNA, 39 bp, unidentified
  source 1..39: mol_type = unassigned DNA; note = methanogen bacteria
gtatttatcacaataatgcattcattaactatacgggag

SEQ ID NO: 33557 - DNA, 285 bp, unidentified
  source 1..285: mol_type = unassigned DNA; note = methanogen bacteria
ttcactggatctagtaaggttgaaaccagtctttcaatggtttctcagtccaattttgattcttccacagaatatgttgttcttttaagtgatgcggacaataagcctctggctgacaagtttgttaatgttgagtttaataatgatacgtatacacttcgaacagactctgaaggcttggctaaaattaatctaacgctaagtgaaggtaatcacgaggttaattcatattttgaaggtgatgaacaatataaggaatcccacacttccaacattattgtcatt

SEQ ID NO: 33558 - DNA, 36 bp, unidentified
  source 1..36: mol_type = unassigned DNA; note = methanogen bacteria
tacaacatatttaggggaatacctctaaccgagaca

SEQ ID NO: 33559 - DNA, 30 bp, unidentified
  source 1..30: mol_type = unassigned DNA; note = methanogen bacteria
aatattacagcactgtcagtcctttttgca

SEQ ID NO: 33560 - DNA, 30 bp, unidentified
  source 1..30: mol_type = unassigned DNA; note = methanogen bacteria
tacattaatgcactatcatttattacaggc

SEQ ID NO: 33561 - DNA, 30 bp, unidentified
  source 1..30: mol_type = unassigned DNA; note = methanogen bacteria
aacttttctgcagtgtcattccttttagga

SEQ ID NO: 33562 - DNA, 36 bp, unidentified
  source 1..36: mol_type = unassigned DNA; note = methanogen bacteria
ggaggaataacaaatggtttaacaaattcttttcca

SEQ ID NO: 33563 - DNA, 30 bp, unidentified
  source 1..30: mol_type = unassigned DNA; note = methanogen bacteria
aacattgcggcattatcattcgttttcgca

SEQ ID NO: 33564 - DNA, 45 bp, unidentified
  source 1..45: mol_type = unassigned DNA; note = methanogen bacteria
ggcactgctttaactggagttaaagaacagaaaatagacttgctt

SEQ ID NO: 33565 - DNA, 93 bp, unidentified
  source 1..93: mol_type = unassigned DNA; note = methanogen bacteria
gttcatgagccaagaccatttataagtttggataatgttcgtttattaataactgaggacgatttgaattcatttccatcaggccatactact

SEQ ID NO: 33566 - DNA, 30 bp, unidentified
  source 1..30: mol_type = unassigned DNA; note = methanogen bacteria
ggcctgaaccagaagctattcggggtcgac

SEQ ID NO: 33567 - DNA, 30 bp, unidentified
  source 1..30: mol_type = unassigned DNA; note = methanogen bacteria
ggcctcaaccagcatctcttgggtgttgac

SEQ ID NO: 33568 - DNA, 42 bp, unidentified
  source 1..42: mol_type = unassigned DNA; note = methanogen bacteria
gttggaccatcaaatatgagtgcaggactgtctaaaatcaac

SEQ ID NO: 33569 - DNA, 297 bp, unidentified
  source 1..297: mol_type = unassigned DNA; note = methanogen bacteria
gtaggaggggttttcaataatggtgaaaatactaatacagcagaccattctgcttctcaagtttcaactcctgtaaataattcaacaaattctattaataattcttcccaatctagttctgataataatggaagttcagcaactgaaactgtattttgggctagttctcaatcagatatattccataaaccttcttgtgaatgggctcaaaaaattagcgataatcataaaattgtttatcactcccgtgaagaagctatttcagatggtaaacgaccatgtaatgtttgtaatccc

SEQ ID NO: 33570 - DNA, 105 bp, unidentified
  source 1..105: mol_type = unassigned DNA; note = methanogen bacteria
aacaaatgtcctactgaagctattcgcgtgattaccaaaaccggtatgtcctgccctgctttagtagaaactgatgatgaaccatcattcgtcagctgtattaga

SEQ ID NO: 33571 - DNA, 90 bp, unidentified
  source 1..90: mol_type = unassigned DNA; note = methanogen bacteria
tcaatgtgtgctaacgacgcattgaaagtagaaaaatacgttgtaactatcgacggcgaagaagtcgaaagggacaggattgcattcaac

SEQ ID NO: 33572 - DNA, 69 bp, unidentified
  source 1..69: mol_type = unassigned DNA; note = methanogen bacteria
gaccaatgtggtgactgtatcgaagcatgtccttacgacatgatccacaaaacagacaatcctaaatta

SEQ ID NO: 33573 - DNA, 33 bp, unidentified
  source 1..33: mol_type = unassigned DNA; note = methanogen bacteria
ttctttataaactacttcaatatgttccaaatt

SEQ ID NO: 33574 - DNA, 192 bp, unidentified
  source 1..192: mol_type = unassigned DNA; note = methanogen bacteria
gcagtaattgaatcaatggctaattcagttaccatagaagatttgaacattacaagatacaatcattcatcacaatatgattcaaaagtatatactgatattggatacgaggtcacatacaatcaaaaaagctatggagaccatgtcacaaatctgattttctactcaaaaaaaggaaaagttctgcacaat

SEQ ID NO: 33575 - DNA, 57 bp, unidentified
  source 1..57: mol_type = unassigned DNA; note = methanogen bacteria
ccagatatcctatcattattcggagaatacatacttactccaatacctgtcggagtt

SEQ ID NO: 33576 - DNA, 72 bp, unidentified
  source 1..72: mol_type = unassigned DNA; note = methanogen bacteria
tcatatatggcttatcgaagtagaatgaggttttacaatagcttttataattggcctaatagttattattac

SEQ ID NO: 33577 - DNA, 54 bp, unidentified
  source 1..54: mol_type = unassigned DNA; note = methanogen bacteria
aagcccgtagtcgtggacctcatcggcgacaccgcgatcgcatcgctgtcgtcc

SEQ ID NO: 33578 - DNA, 36 bp, unidentified
  source 1..36: mol_type = unassigned DNA; note = methanogen bacteria
gcactgactttggaaaccctggagatagcaccttca

SEQ ID NO: 33579 - DNA, 75 bp, unidentified
  source 1..75: mol_type = unassigned DNA; note = methanogen bacteria
ggccctgcaagcagaaatttacttaataattttaaaataattgaatttttagattctttgcaaaagcaagattgg

SEQ ID NO: 33580 - DNA, 300 bp, unidentified
  source 1..300: mol_type = unassigned DNA; note = methanogen bacteria
aaaatttcatcagaaaccgtctccgttgaacatactgacagcccttggaaagtattgattaaggttaaaatcaatgcccaaaaggacaatatcaaatattcaaacattatagagaaaaatgtatcgattgaaggtttaagggaccctctgccccttgcaaagcttacaatagcatcaggaatcctaacttatgatgatcaaatccattacaaaaatgcaatagccggatacatggtaatccatgatttcaaatcaccggaatcatatatagaagctactgcaccgttatacataaaaaaa

SEQ ID NO: 33581 - DNA, 69 bp, unidentified
  source 1..69: mol_type = unassigned DNA; note = methanogen bacteria
atagacgactgcttagataagggatattttcatgaaagtgcagatggaagctgttatctgtgtaggctt

SEQ ID NO: 33582 - DNA, 30 bp, unidentified
  source 1..30: mol_type = unassigned DNA; note = methanogen bacteria
ttcattaactacctcaatatattccaaatt

SEQ ID NO: 33583 - DNA, 36 bp, unidentified; identical to SEQ ID NO: 21260
  source 1..36: mol_type = unassigned DNA; note = methanogen bacteria

SEQ ID NO: 33584 - DNA, 36 bp, unidentified
  source 1..36: mol_type = unassigned DNA; note = methanogen bacteria
caggctggtcctcaaaatattagtttttcaggaaca

SEQ ID NO: 33585 - DNA, 30 bp, unidentified
  source 1..30: mol_type = unassigned DNA; note = methanogen bacteria
aaatggatgccaattgatttaggaatcggt

SEQ ID NO: 33586 - DNA, 69 bp, unidentified
  source 1..69: mol_type = unassigned DNA; note = methanogen bacteria
ttcaaatatgacttattctcatcaaatgatgtgattacattgacttttaatggtgtaaactataattta

SEQ ID NO: 33587 - DNA, 69 bp, unidentified
  source 1..69: mol_type = unassigned DNA; note = methanogen bacteria
accacaacaatattcattggaataaacaacattatccaccatacaggttcaattgattttgatactttg

SEQ ID NO: 33588 - DNA, 252 bp, unidentified
  source 1..252: mol_type = unassigned DNA; note = methanogen bacteria
agcggaatgctttcaggtgatacttcaacagcaaacgatacaaaacataatgatactgttaatcctattgttgaaaagggtgattcatcaggttccaatgccactgagtattgggccagcgctaaagcggagaagtttcatttgccgacctgcgaatgggctgaaaagataagtgatgataataaaatcatttatcaaacacgtgatgatgccatagaggatggaaaagtgccttgcggcgcatgcaatcca

SEQ ID NO: 33589 - DNA, 108 bp, unidentified
  source 1..108: mol_type = unassigned DNA; note = methanogen bacteria
gttagtaatattggtgctggagataattatggttcaattactaaagcatttagtcaatccaataaatcaatttcattttccgatgttaaaggagatgccataggatta

SEQ ID NO: 33590 - DNA, 45 bp, unidentified
  source 1..45: mol_type = unassigned DNA; note = methanogen bacteria
attggtgtgccttttggtgcggatatgtattttgcactcgtatca

SEQ ID NO: 33591 - DNA, 48 bp, unidentified; identical to SEQ ID NO: 29836
  source 1..48: mol_type = unassigned DNA; note = methanogen bacteria

SEQ ID NO: 33592 - DNA, 153 bp, unidentified
  source 1..153: mol_type = unassigned DNA; note = methanogen bacteria
atgtgcgcatcaatccatagtgccagcagaataaagataatagaatatgattcttccttttattccattgtatgccaacactgtgaaagtgcaccatgcataaagatatgtccgacagatgcgataaccgacgaaggagtcgataaggaaaaa

SEQ ID NO: 33593 - DNA, 63 bp, unidentified
  source 1..63: mol_type = unassigned DNA; note = methanogen bacteria
gacagagaagaaggtcctgcatgtatcaaggcatgtaccaaaagggctattaccgttgctgat

SEQ ID NO: 33594 - DNA, 42 bp, unidentified
  source 1..42: mol_type = unassigned DNA; note = methanogen bacteria
gttggaccgtcaaatattgcttttgaattatcaaaaattaat

SEQ ID NO: 33595 - DNA, 213 bp, unidentified
  source 1..213: mol_type = unassigned DNA; note = methanogen bacteria
tccatgataatgggtcctggggattccaacgaacctgctcctggagaagtgcagtatatgaatgtaactaacaatatatcagagtatgaaaacagcagctatgatttaaccgatgagaacggtacacagatttcatactatgatttcaaggaaaatgttacagaaggccaaaatgtcactgcattcaatgcctcaagttcggccaatatttac

SEQ ID NO: 33596 - DNA, 36 bp, unidentified; identical to SEQ ID NO: 31848
  source 1..36: mol_type = unassigned DNA; note = methanogen bacteria

SEQ ID NO: 33597 - DNA, 66 bp, unidentified
  source 1..66: mol_type = unassigned DNA; note = methanogen bacteria
cttcattcaattcctcaggaaagctatttgtcttttttaatcccttccaaaagcattggcaacggt

SEQ ID NO: 33598 - DNA, 54 bp, unidentified
  source 1..54: mol_type = unassigned DNA; note = methanogen bacteria
acccataatcaggcaagtttacattcaatcggaacggcttatttatccgatctg

SEQ ID NO: 33599 - DNA, 42 bp, unidentified
  source 1..42: mol_type = unassigned DNA; note = methanogen bacteria
acatattcaaccccggattcaatatacaaactggacagatat

SEQ ID NO: 33600 - DNA, 42 bp, unidentified
  source 1..42: mol_type = unassigned DNA; note = methanogen bacteria
gcccgattcggcaatccaaatttggatttttacagtccaagc

SEQ ID NO: 33601 - DNA, 90 bp, unidentified
  source 1..90: mol_type = unassigned DNA; note = methanogen bacteria
gttcttaatccatatgatgtggttacaaatttatatttaagtggtcaatttagcactactcccggagcaagtgaagttagcgcatgtttc

SEQ ID NO: 33602 - DNA, 84 bp, unidentified
  source 1..84: mol_type = unassigned DNA; note = methanogen bacteria
ccgttgatattcggacctgatgcatttcctgcaaatgaattattgaatatcaactataatggtgttcaatttgctttaaaatta

SEQ ID NO: 33603 - DNA, 33 bp, unidentified
  source 1..33: mol_type = unassigned DNA; note = methanogen bacteria
ttctttataaattatcttaatatgttccaaatc

SEQ ID NO: 33604 - DNA, 36 bp, unidentified
  source 1..36: mol_type = unassigned DNA; note = methanogen bacteria
caatattgcggaattgatttagtacttcagccatta

SEQ ID NO: 33605 - DNA, 39 bp, unidentified
  source 1..39: mol_type = unassigned DNA; note = methanogen bacteria
atattcggaggtcctcaaccgggcatatcccatccttca

SEQ ID NO: 33606 - DNA, 33 bp, unidentified
  source 1..33: mol_type = unassigned DNA; note = methanogen bacteria
ggcaggctgtttgtggctcaatcacctgatgca

SEQ ID NO: 33607 - DNA, 42 bp, unidentified
  source 1..42: mol_type = unassigned DNA; note = methanogen bacteria
gccagattcggcgatcccaatttgaatttttacagtccaagc

SEQ ID NO: 33608 - DNA, 39 bp, unidentified
  source 1..39: mol_type = unassigned DNA; note = methanogen bacteria
cactatgcaaatgagattactgatttgatttacacttat

SEQ ID NO: 33609 - DNA, 33 bp, unidentified
  source 1..33: mol_type = unassigned DNA; note = methanogen bacteria
gtgtccggtcttggtgctgatgcacttgcgggt

SEQ ID NO: 33610 - DNA, 72 bp, unidentified
  source 1..72: mol_type = unassigned DNA; note = methanogen bacteria
attatgaatgctagtaataattcttttaggatccgttttcattattctttcaaatgcattatatggtatttt

SEQ ID NO: 33611 - DNA, 33 bp, unidentified
  source 1..33: mol_type = unassigned DNA; note = methanogen bacteria
ttatttggagatttaaaaggtattattactcct

SEQ ID NO: 33612 - DNA, 42 bp, unidentified
  source 1..42: mol_type = unassigned DNA; note = methanogen bacteria
gagggcattttaagaggttatctcagcattatacatggtaat

SEQ ID NO: 33613 - DNA, 39 bp, unidentified
  source 1..39: mol_type = unassigned DNA; note = methanogen bacteria
tttaagccagctgaatttgccttcagcttatctgatatt

SEQ ID NO: 33614 - DNA, 195 bp, unidentified
  source 1..195: mol_type = unassigned DNA; note = methanogen bacteria
tccttggctattgatggtccttcgaacaataacgttactgatgataatggagttacctatgtaaatgtaactgaacaaatgacatctaatttgaattcaactccaacagattattatgatggtgttgaacatgtggattataatagtcctgaaataaaggccaagtataatttaacaaattcatctgtatcttat

SEQ ID NO: 33615 - DNA, 195 bp, unidentified
  source 1..195: mol_type = unassigned DNA; note = methanogen bacteria
tccatggctattggcggttctgataataatactgttgttgatgatggtgtgacatttgtgaatgtaactgatgaaatgacttcgaatttaaatgggtctggcaaggtttttgttgatgatggtgtttataatatagattataataatgcagaagatgtaattgaatataatctaactaataattctaaatcttat

SEQ ID NO: 33616 - DNA, 36 bp, unidentified
  source 1..36: mol_type = unassigned DNA; note = methanogen bacteria
atgtatggggggccaagatacggcatactgaatcct

SEQ ID NO: 33617 - DNA, 42 bp, unidentified
  source 1..42: mol_type = unassigned DNA; note = methanogen bacteria
gcaagaccggaaaatgctatttttgaattatcaaaaattaac

SEQ ID NO: 33618 - DNA, 78 bp, unidentified
  source 1..78: mol_type = unassigned DNA; note = methanogen bacteria
ttctttggggatgttctttcagttaccgattcatttgtcctggcattcagtggcataaggattaaccttaactttaat

SEQ ID NO: 33619 - DNA, 42 bp, unidentified
  source 1..42: mol_type = unassigned DNA; note = methanogen bacteria
acaagaccagaaaatgctgtttttgaattatcaaaaattaac

SEQ ID NO: 33620 - DNA, 81 bp, unidentified
  source 1..81: mol_type = unassigned DNA; note = methanogen bacteria
atattcggacctaatgcatttccgccaacagaatctttggccttgaacttaggtggtgtgaattatgagatactgctgtcc

SEQ ID NO: 33621 - DNA, 30 bp, unidentified
  source 1..30: mol_type = unassigned DNA; note = methanogen bacteria
acacaaataaacattcatgcttcttttgca

SEQ ID NO: 33622 - DNA, 51 bp, unidentified
  source 1..51: mol_type = unassigned DNA; note = methanogen bacteria
ttatatagtgtaaaccctgctgattcatatcttttagctatggattatttg

SEQ ID NO: 33623 - DNA, 36 bp, unidentified
  source 1..36: mol_type = unassigned DNA; note = methanogen bacteria
gccaatccattccattttgcttttaccatggacttc

SEQ ID NO: 33624 - DNA, 63 bp, unidentified
  source 1..63: mol_type = unassigned DNA; note = methanogen bacteria
ggacatgcaggattcaatgctgcagacgcgctgacttttgtcttcaacggcgcacagttcgat

SEQ ID NO: 33625 - DNA, 42 bp, unidentified
  source 1..42: mol_type = unassigned DNA; note = methanogen bacteria
tcaaggccggaaaatgtggcttttgaaatatcaaagattaat

SEQ ID NO: 33626 - DNA, 75 bp, unidentified
  source 1..75: mol_type = unassigned DNA; note = methanogen bacteria
tttggggatgttctttcagttaccgattcatttgtcctggcattcagtggcataaggattaaccttaactttaat

SEQ ID NO: 33627 - DNA, 54 bp, unidentified
  source 1..54: mol_type = unassigned DNA; note = methanogen bacteria
ccctggtcaccaatatcgcaacaggtaatatactatacttcccagatagatatc

SEQ ID NO: 33628 - DNA, 294 bp, unidentified
  source 1..294: mol_type = unassigned DNA; note = methanogen bacteria
gcccatcctggtcatggaacagaatatgttgaagaagtttcatcatctggttctagctctcctcaatcagtttcgccttctacttctgggggagattccagtcagtcttcaggttctagttctggcggtagttcgggcggcggttccagtcagtcttcaggttataatgtagctggcagttctgatgcatcgactaatgataatttaaaccataattcaactaatcaatctgcagttaataattctagtagcaatctagtagtaaatgaagattctcaattatttagcataaca

SEQ ID NO: 33629 - DNA, 33 bp, unidentified
  source 1..33: mol_type = unassigned DNA; note = methanogen bacteria
gcagggccggagaacattagcttttcaggtact

SEQ ID NO: 33630 - DNA, 30 bp, unidentified
  source 1..30: mol_type = unassigned DNA; note = methanogen bacteria
ggatggatgactataaccatgggaatcggc

SEQ ID NO: 33631 - DNA, 81 bp, unidentified
  source 1..81: mol_type = unassigned DNA; note = methanogen bacteria
ttcggcccaaatgtatttcctgcagctgaaaatgtaaccttaaacttaagcggatcagtttttaatgttcctttaggcagg

SEQ ID NO: 33632 - DNA, 33 bp, unidentified
  source 1..33: mol_type = unassigned DNA; note = methanogen bacteria
aaaactttgaaaattgaatttataatgttgccg

SEQ ID NO: 33633 - DNA, 54 bp, unidentified
  source 1..54: mol_type = unassigned DNA; note = methanogen bacteria
atacttccttccaatagtcctagtgcggatgcatttgccactattttaggaact

SEQ ID NO: 33634 - DNA, 63 bp, unidentified
  source 1..63: mol_type = unassigned DNA; note = methanogen bacteria
ctagagcaagttggaataagccctagcggtgtggcagatatggccgtaaacttcatgatatat

SEQ ID NO: 33635 - DNA, 33 bp, unidentified; identical to SEQ ID NO: 32110
  source 1..33: mol_type = unassigned DNA; note = methanogen bacteria

SEQ ID NO: 33636 - DNA, 54 bp, unidentified; identical to SEQ ID NO: 32111
  source 1..54: mol_type = unassigned DNA; note = methanogen bacteria

SEQ ID NO: 33637 - DNA, 42 bp, unidentified
  source 1..42: mol_type = unassigned DNA; note = methanogen bacteria
ccacattcttttgattgggttttagaagagtttatgggaata

SEQ ID NO: 33638 - DNA, 288 bp, unidentified
  source 1..288: mol_type = unassigned DNA; note = methanogen bacteria
ctgaacactgcaatcgagcatagcaatgaaaataatgaaataatgtcttctaatcagtaccattatataatgaatgattatatcagaaacattccgactttggagcgtgaagccttggaagagcttagtgatgatgttattaaaaataaaagaccttctttggactccaaaggcgatttgaaggaaatcgtagatgaaaaattgactgattataatcgcaaatactatgaggattatgatatcataataaattcatcgctgatagctattgaaattcatttgagaatg

SEQ ID NO: 33639 - DNA, 108 bp, unidentified
  source 1..108: mol_type = unassigned DNA; note = methanogen bacteria
gacttctactggctgcatgatcaaatagcaggatttttaagccctgttggatttttaaaaaccctttacctattctatatggcaaaggctatctgttcagctccttac

SEQ ID NO: 33640 - DNA, 36 bp, unidentified
  source 1..36: mol_type = unassigned DNA; note = methanogen bacteria
caggcgggacctcaaaatatcagtttttcaggaaca

SEQ ID NO: 33641 - DNA, 30 bp, unidentified
  source 1..30: mol_type = unassigned DNA; note = methanogen bacteria
aaatggatgcctcttgatttcggaatcggt

SEQ ID NO: 33642 - DNA, 93 bp, unidentified
  source 1..93: mol_type = unassigned DNA; note = methanogen bacteria
ggtcataatccattggattcattgtttttcactttttccatgcagggtaatgttggccttgaaatcgggcaaatgtcgcaaaaccttgaattt

SEQ ID NO: 33643 - DNA, 39 bp, unidentified
  source 1..39: mol_type = unassigned DNA; note = methanogen bacteria
atgaaatctagaccagtaatgggattgattggagtcggc

SEQ ID NO: 33644 - DNA, 45 bp, unidentified
  source 1..45: mol_type = unassigned DNA; note = methanogen bacteria
gccacctccgccaccaatctgggcagttccctggagatcgtggat

SEQ ID NO: 33645 - DNA, 42 bp, unidentified
  source 1..42: mol_type = unassigned DNA; note = methanogen bacteria
gtggctagtgcctttcatgcatcatataatcctacttttagt

SEQ ID NO: 33646 - DNA, 66 bp, unidentified
  source 1..66: mol_type = unassigned DNA; note = methanogen bacteria
atcgcagttccggcagtctcaaacataacatcccacgctgccgttaattcatatattatgaactat

SEQ ID NO: 33647 - DNA, 243 bp, unidentified
  source 1..243: mol_type = unassigned DNA; note = methanogen bacteria
aggggatttctgtattccaacacctccaatgactacaccaatgaaagcgtcttcgaccagatttctccagatcagtttttctcaatcagcaacggcggcggtgatgattcatatgtcgaaactgccggtgcgtcttcagccgaagcaaatcctaaaaattcatcggttgcagtgacaaacgacagcgggtcatatggtgtcaacttttcaagagatggcttttcggtttctacacgcggggat

SEQ ID NO: 33648 - DNA, 33 bp, unidentified
  source 1..33: mol_type = unassigned DNA; note = methanogen bacteria
gaggcaggccctcaaaatatcagtttttcagga

SEQ ID NO: 33649 - DNA, 57 bp, unidentified
  source 1..57: mol_type = unassigned DNA; note = methanogen bacteria
ttgaaacatattttaataattattggtgcaaaagaagctttagattatgcattagat

SEQ ID NO: 33650 - DNA, 273 bp, unidentified
  source 1..273: mol_type = unassigned DNA; note = methanogen bacteria
actggtatgttcaatggtcatacatcaagtccaactgccactaatgattcatcatcccatgacaatacttcaacacaaactgtaaaaccttccatagataatgattcaagttcctctgcaaaaactgagtattgggcaagtgctaaagcagaaaaattccatactcctgattgtgaatgggctcaaaaaattagtgaagccaataaaatagtttatcattctcgtgatgatgctgttgcagacggtaaagtgccttgcactgcttgtaatcct

SEQ ID NO: 33651 - DNA, 51 bp, unidentified
  source 1..51: mol_type = unassigned DNA; note = methanogen bacteria
tcatacatgtcatatgtcaattcaatgagttattacaatagttactactat

SEQ ID NO: 33652 - DNA, 30 bp, unidentified
  source 1..30: mol_type = unassigned DNA; note = methanogen bacteria
gcaggtcctggaaatgtatcatttagtggg

SEQ ID NO: 33653 - DNA, 30 bp, unidentified
  source 1..30: mol_type = unassigned DNA; note = methanogen bacteria
caatggatgccaatcagcttaggaatcggc

SEQ ID NO: 33654 - DNA, 30 bp, unidentified
  source 1..30: mol_type = unassigned DNA; note = methanogen bacteria
gcaggtcctgaaaaagtatcatttagtggt

SEQ ID NO: 33655 - DNA, 30 bp, unidentified
  source 1..30: mol_type = unassigned DNA; note = methanogen bacteria
caatggatgccaattagcttaggaattggt

SEQ ID NO: 33656 - DNA, 33 bp, unidentified
  source 1..33: mol_type = unassigned DNA; note = methanogen bacteria
ttatctctgctaaatgtttctatagctttagca

SEQ ID NO: 33657 - DNA, 39 bp, unidentified
  source 1..39: mol_type = unassigned DNA; note = methanogen bacteria
tatcagacaggtcctcaaaacatcagcttttcaggaaca

SEQ ID NO: 33658 - DNA, 30 bp, unidentified
  source 1..30: mol_type = unassigned DNA; note = methanogen bacteria
aaatggatgccgattgacttgggaatcgga

SEQ ID NO: 33659 - DNA, 276 bp, unidentified
  source 1..276: mol_type = unassigned DNA; note = methanogen bacteria
gcaactggtatgttcaatgatcatacatcaagtccagctgtcactaatgattcatcatcaagtgataatgcttcaacacagactgtaaaaccttccatagataatgattcaagttcctctgcaaaaactgagtattgggcaagtgctaaagcagaaaaattccatactcctgattgtgaatgggctcaaaaaattagtgatgccaataaaattgtttatcattctcgtgatgatgctgttgcagatggtaaagtaccatgcactgcttgtaatcct

SEQ ID NO: 33660 - DNA, 51 bp, unidentified
  source 1..51: mol_type = unassigned DNA; note = methanogen bacteria
acctatgtggcatatgttggtagcatgagcaggtattcctactattattat

SEQ ID NO: 33661 - DNA, 273 bp, unidentified
  source 1..273: mol_type = unassigned DNA; note = methanogen bacteria
actggtatgttcaatggtcatgcatcaggttcaactgcaagtcatgattcatcagttaatgataattctccaaaagaaactgtaaaaccagtttcagacaataattcaagtgcttctgcaaatactgagtattgggcaagtgctaaagcggaaaaattccatactcctgattgtgaatgggctcaaaaaattagtgaatccaataaaattgtttatcattctcgtagtgatgctattgcagatggtaaggtaccttgtactgcttgtaatcct

SEQ ID NO: 33662 - DNA, 75 bp, unidentified
  source 1..75: mol_type = unassigned DNA; note = methanogen bacteria
ttcggtaatgttcttggcgtaaccgattcgatgatttttgttttcaatggcgcaagattcgatttttcattcaat

SEQ ID NO: 33663 - DNA, 51 bp, unidentified
  source 1..51: mol_type = unassigned DNA; note = methanogen bacteria
agccaaaaatcattgagaaatttgacaattggtaaatataaaatttcacat

SEQ ID NO: 33664 - DNA, 39 bp, unidentified
  source 1..39: mol_type = unassigned DNA; note = methanogen bacteria
ctacaggatggtcctcaaaatgtaagctttaatgggaca

SEQ ID NO: 33665 - DNA, 30 bp, unidentified
  source 1..30: mol_type = unassigned DNA; note = methanogen bacteria
caatggatgcctgttaaccttggaattggc

SEQ ID NO: 33666 - DNA, 36 bp, unidentified
  source 1..36: mol_type = unassigned DNA; note = methanogen bacteria
tctcagattgttgctgatttgaatactgatgtgagc

SEQ ID NO: 33667 - DNA, 39 bp, unidentified
  source 1..39: mol_type = unassigned DNA; note = methanogen bacteria
ttacaagacggtcctcaaaatgtaagctttagcggtaca

SEQ ID NO: 33668 - DNA, 30 bp, unidentified
  source 1..30: mol_type = unassigned DNA; note = methanogen bacteria
caatggatgcctgttaacttgggaatcagc

SEQ ID NO: 33669 - DNA, 42 bp, unidentified
  source 1..42: mol_type = unassigned DNA; note = methanogen bacteria
gtaaagcctgaaaatgcagttgctgaactttcaaaaataaat

SEQ ID NO: 33670 - DNA, 39 bp, unidentified
  source 1..39: mol_type = unassigned DNA; note = methanogen bacteria
tttcaaaggggtcctcaaaatatcagctttgacggtacc

SEQ ID NO: 33671 - DNA, 30 bp, unidentified
  source 1..30: mol_type = unassigned DNA; note = methanogen bacteria
caatggatgccgattaaccttggaataggc

SEQ ID NO: 33672 - DNA, 42 bp, unidentified
  source 1..42: mol_type = unassigned DNA; note = methanogen bacteria
gtcaaacctgaaaatgtcttaactgaattgtcccgtgtaaac

SEQ ID NO: 33673 - DNA, 60 bp, unidentified
  source 1..60: mol_type = unassigned DNA; note = methanogen bacteria
gaaacaggtggtattgatgaacttgttaaatctattattccttatatgcaggatagtaag

SEQ ID NO: 33674 - DNA, 36 bp, unidentified
  source 1..36: mol_type = unassigned DNA; note = methanogen bacteria
caggtggggcctcaaaatattagcttttcaggcact

SEQ ID NO: 33675 - DNA, 30 bp, unidentified
  source 1..30: mol_type = unassigned DNA; note = methanogen bacteria
aagtggatgcctattgaccttggaataggg

SEQ ID NO: 33676 - DNA, 87 bp, unidentified
  source 1..87: mol_type = unassigned DNA; note = methanogen bacteria
atgaaattaaatattgttgattccttatattatacagttataactattgctactgtaggatatggggatatctaccctttaacacca

SEQ ID NO: 33677 - DNA, 54 bp, unidentified
  source 1..54: mol_type = unassigned DNA; note = methanogen bacteria
attccaaagttaggaaaccttttctctactgcagacatatccctatcggtagca

SEQ ID NO: 33678 - DNA, 60 bp, unidentified
  source 1..60: mol_type = unassigned DNA; note = methanogen bacteria
gaaaattttgataaattatcagatattggtagttttagtgctattaatcatgctttaaac

SEQ ID NO: 33679 - DNA, 102 bp, unidentified
  source 1..102: mol_type = unassigned DNA; note = methanogen bacteria
tcatttggtatgtgggacgaaatattaggtggaaaacctcatcaaacattattaggcatggttagacctattcgcagtgatcaccgattccaagagccagct

SEQ ID NO: 33680 - DNA, 42 bp, unidentified
  source 1..42: mol_type = unassigned DNA; note = methanogen bacteria
aatacggatattgcaaacaccacattggaattgtccaagctg

SEQ ID NO: 33681 - DNA, 33 bp, unidentified
  source 1..33: mol_type = unassigned DNA; note = methanogen bacteria
gaaagaggccctcaaaatattcaatttgatggt

SEQ ID NO: 33682 - DNA, 30 bp, unidentified
  source 1..30: mol_type = unassigned DNA; note = methanogen bacteria
cagtggatgccggttaacttgggaatcgga

SEQ ID NO: 33683 - DNA, 36 bp, unidentified
  source 1..36: mol_type = unassigned DNA; note = methanogen bacteria
caagcagggcctcaaaatattaacttttcaggcact

SEQ ID NO: 33684 - DNA, 30 bp, unidentified
  source 1..30: mol_type = unassigned DNA; note = methanogen bacteria
cactggatgccgataacattgggaattggt

SEQ ID NO: 33685 - DNA, 300 bp, unidentified
  source 1..300: mol_type = unassigned DNA; note = methanogen bacteria
agtaatttttcagctacagatgttcaaacggatgctgcagatgatgttaaagatactggcggaaaacctaatgtaactgatgtttctggtgaccaggaatattatgttgtgccggtggcccatctgaataaggttactgttaacggtcaggacaggtcggatgcgatatcgggcagcgccgttggtgttcaagctaatgttattgatcaaggacaggttaccattaaaccgggtgaaatcgttatagaaactcctcctggtgtgcctccagaagtggctgtacaacgtcctgaagttaat

SEQ ID NO: 33686 - DNA, 42 bp, unidentified
  source 1..42: mol_type = unassigned DNA; note = methanogen bacteria
gtaaaaccgtcaaatgttgtttttgaattatcaaagattaat

SEQ ID NO: 33687 - DNA, 39 bp, unidentified
  source 1..39: mol_type = unassigned DNA; note = methanogen bacteria
atggatagttctgcaataaatcagttgctggcaaatgat

SEQ ID NO: 33688 - DNA, 66 bp, unidentified
  source 1..66: mol_type = unassigned DNA; note = methanogen bacteria
tttaattataacctctttttgcctggagattacataaattttgcatttaatggctttgaatttaaa

SEQ ID NO: 33689 - DNA, 42 bp, unidentified
  source 1..42: mol_type = unassigned DNA; note = methanogen bacteria
gcaggaccatcaaatatcggcgttgaaatttcaaaaatcaac

SEQ ID NO: 33690 - DNA, 42 bp, unidentified
  source 1..42: mol_type = unassigned DNA; note = methanogen bacteria
gtcggaccatcgaatgtcggtgttgaaatgtccaaaatcaac

SEQ ID NO: 33691 - DNA, 36 bp, unidentified
  source 1..36: mol_type = unassigned DNA; note = methanogen bacteria
ctagaaaggggtcctcagaatatccaattcactggg

SEQ ID NO: 33692 - DNA, 30 bp, unidentified
  source 1..30: mol_type = unassigned DNA; note = methanogen bacteria
caatggatgccgactgacatgggaattgga

SEQ ID NO: 33693 - DNA, 51 bp, unidentified
  source 1..51: mol_type = unassigned DNA; note = methanogen bacteria
ccagggctttctgctttaagaactggtgacattaccactttagctcaatcc

SEQ ID NO: 33694 - DNA, 78 bp, unidentified
  source 1..78: mol_type = unassigned DNA; note = methanogen bacteria
ttctttaaaggatggggcgcagatccaaatacatctttacaacaaccttgctccaatctacagaatctgtcactggaa

SEQ ID NO: 33695 - DNA, 42 bp, unidentified
  source 1..42: mol_type = unassigned DNA; note = methanogen bacteria
gtcaagccgtcaaatgtaatgtttgagttatctaaagttaat

SEQ ID NO: 33696 - DNA, 36 bp, unidentified
  source 1..36: mol_type = unassigned DNA; note = methanogen bacteria
caagcaggaccccaaaacatcagtttttcaggaact

SEQ ID NO: 33697 - DNA, 30 bp, unidentified
  source 1..30: mol_type = unassigned DNA; note = methanogen bacteria
aaatggatgcctgttgacttgggaattggg

SEQ ID NO: 33698 - DNA, 225 bp, unidentified
  source 1..225: mol_type = unassigned DNA; note = methanogen bacteria
gctgcatttaattcaactaatcactcatcaacttccggcagaggctattcttcagttgatgactttataaataataatcttagaccttccggtgatgaagaggtcgaatattcatattatccttccagagaatatgatgtttcatataatgaagataatgcttcggatttttggggcacgatttttggtgaaagtcaaaggctttccggtgaaaatcattctttg

SEQ ID NO: 33699 - DNA, 42 bp, unidentified
  source 1..42: mol_type = unassigned DNA; note = methanogen bacteria
gtgggaccgtcaaacataagtgtgggattgtccaaaatcaat

SEQ ID NO: 33700 - DNA, 30 bp, unidentified
  source 1..30: mol_type = unassigned DNA; note = methanogen bacteria
gatgttggtcctacattatttgatattcca

SEQ ID NO: 33701 - DNA, 42 bp, unidentified
  source 1..42: mol_type = unassigned DNA; note = methanogen bacteria
gtaaaaccatcaaatgttgtttttgaattgtctaaagtcaat

SEQ ID NO: 33702 - DNA, 42 bp, unidentified
  source 1..42: mol_type = unassigned DNA; note = methanogen bacteria
gttaaaccggaaaatgtggcctctgaaatatccaaggttaat

SEQ ID NO: 33703 - DNA, 36 bp, unidentified
  source 1..36: mol_type = unassigned DNA; note = methanogen bacteria
caggcaggtcctcaaaacatcacttttaaaggcaca

SEQ ID NO: 33704 - DNA, 30 bp, unidentified
  source 1..30: mol_type = unassigned DNA; note = methanogen bacteria
aaatggatgcctcttgactttggaatagga

SEQ ID NO: 33705 - DNA, 30 bp, unidentified
  source 1..30: mol_type = unassigned DNA; note = methanogen bacteria
gcaagggatttgaataataaactaaagaat

SEQ ID NO: 33706 - DNA, 237 bp, unidentified
  source 1..237: mol_type = unassigned DNA; note = methanogen bacteria
tcgatgatctacgataccaactactgggccctggtcatcaggaacatcgacagcggcaacgggctctacgggctggacggctacttctacacacctgtctggggctacctcctggcactggaggagtggttcaacgattcgttcctgaacctgggcgaatcggccgtccgcgtctcggagatagtgtacttcgagaacgggaaccaccaaacgaccgccatgataacgtccgtggcc

SEQ ID NO: 33707 - DNA, 36 bp, unidentified
  source 1..36: mol_type = unassigned DNA; note = methanogen bacteria
cagaggggtcctcaaaatgttcattttgatggtgtg

SEQ ID NO: 33708 - DNA, 30 bp, unidentified
  source 1..30: mol_type = unassigned DNA; note = methanogen bacteria
cagtggatgccagtcaatttgggaatcgga

SEQ ID NO: 33709 - DNA, 270 bp, unidentified
  source 1..270: mol_type = unassigned DNA; note = methanogen bacteria
ttgtccaaagaaaaagtcaacatcacaatcaaaaacagcaagggcaaaattgttgttaataaaactgtaaaaacaaatgctaaaggtcaggcaaaagtagatttgaatttgaaaaagggaaaatataatgtccgggctacttatgatggaaatgaaaattacacgggcaatagcactgcacggaatttgacaattaaagaaaaggttgttcaggcagcacttcaatcaagcaattccgcttcttcttcacaaaatagcgaaagggaagaa

SEQ ID NO: 33710 - DNA, 132 bp, unidentified
  source 1..132: mol_type = unassigned DNA; note = methanogen bacteria
tggaatcctggagaacatgaagtgggacgcaggtccataggtaatggtcttgaaagagttggctatgatgacggttatttcagagtcgttgaccaggacggaaatattgttacacatggatggggtaactta

SEQ ID NO: 33711 - DNA, 36 bp, unidentified
  source 1..36: mol_type = unassigned DNA; note = methanogen bacteria
cagggaggacctcataatgttcatttttcaggtgaa

SEQ ID NO: 33712 - DNA, 30 bp, unidentified
  source 1..30: mol_type = unassigned DNA; note = methanogen bacteria
caatggatgccgattaacatgggacttggt

SEQ ID NO: 33713 - DNA, 39 bp, unidentified
  source 1..39: mol_type = unassigned DNA; note = methanogen bacteria
ttagagaggggaccacaaaaccttcaattttcaggtaca

SEQ ID NO: 33714 - DNA, 30 bp, unidentified
  source 1..30: mol_type = unassigned DNA; note = methanogen bacteria
caatggatgcctgttaatttgggaattgga

SEQ ID NO: 33715 - DNA, 45 bp, unidentified
  source 1..45: mol_type = unassigned DNA; note = methanogen bacteria
ccatggttggcatataattatcttggaaaacctgccgcgatggtt

SEQ ID NO: 33716 - DNA, 39 bp, unidentified
  source 1..39: mol_type = unassigned DNA; note = methanogen bacteria
tttcagtcaggaccgcaaaatgttgttttttcaggttat

SEQ ID NO: 33717 - DNA, 30 bp, unidentified
  source 1..30: mol_type = unassigned DNA; note = methanogen bacteria
ggttggctaccgctgacttttggtattggt

SEQ ID NO: 33718 - DNA, 39 bp, unidentified
  source 1..39: mol_type = unassigned DNA; note = methanogen bacteria
tttcagtccggaccgcaaaatgttgctttttcaggttat

SEQ ID NO: 33719 - DNA, 30 bp, unidentified
  source 1..30: mol_type = unassigned DNA; note = methanogen bacteria
ggatggttaccattaactttcggcattggt

SEQ ID NO: 33720 - DNA, 30 bp, unidentified
  source 1..30: mol_type = unassigned DNA; note = methanogen bacteria
gaagctcgcgaaataaatcaaaaattagaa

SEQ ID NO: 33721 - DNA, 33 bp, unidentified
  source 1..33: mol_type = unassigned DNA; note = methanogen bacteria
gctgcaggtcctgaaaatgtatcatttagtggt

SEQ ID NO: 33722 - DNA, 30 bp, unidentified
  source 1..30: mol_type = unassigned DNA; note = methanogen bacteria
cagtggatgccaattagcttaggcattgga

SEQ ID NO: 33723 - DNA, 297 bp, unidentified
  source 1..297: mol_type = unassigned DNA; note = methanogen bacteria
agtaatttttcagctactgatgttcaggcagacaccgcagatgatattgaggatgtaagtggaaaacccaacgttactgatgtttctggtgatcaggaatattatgtaatgcctgtggccaatttacataaagttactgtcaacggccaggatcgctcggatgcgattgtaggcagtgctgtaggggtacaggcaaaggtcattgaccagggacaggttactattaaaccgggcgaaattgtcatacagactcctcctggagtacctgcagaggtggcggtacaacgtcctgaactt

SEQ ID NO: 33724 - DNA, 102 bp, unidentified
  source 1..102: mol_type = unassigned DNA; note = methanogen bacteria
ggccagatggatctaaacgttttgttaaatccaatgaatacaacacaactagagaatctgactcagaatgcaagtgcaaattcaaccaacatatttggattg

SEQ ID NO: 33725 - DNA, 117 bp, unidentified
  source 1..117: mol_type = unassigned DNA; note = methanogen bacteria
ttcttccctttggattcccttttaaatatggtcaattcaatttccctgcctttattggatgtggttactggaacaaatgatccattgattttcattggggagttttattcaacagat

SEQ ID NO: 33726 - DNA, 42 bp, unidentified
  source 1..42: mol_type = unassigned DNA; note = methanogen bacteria
tacatgattgtcggtgcaggcaatgttcatacaatatatgat

SEQ ID NO: 33727 - DNA, 54 bp, unidentified
  source 1..54: mol_type = unassigned DNA; note = methanogen bacteria
gttccacggtttagtagtgttcttggtactgctgacttatcaataagtttatct

SEQ ID NO: 33728 - DNA, 30 bp, unidentified
  source 1..30: mol_type = unassigned DNA; note = methanogen bacteria
tcaaatccaaataatgttaatttttcagga

SEQ ID NO: 33729 - DNA, 33 bp, unidentified
  source 1..33: mol_type = unassigned DNA; note = methanogen bacteria
cattggatgccaattaatttaggtataaatcct

SEQ ID NO: 33730 - DNA, 63 bp, unidentified
  source 1..63: mol_type = unassigned DNA; note = methanogen bacteria
gttatgtttcaatggtatgattatttatcaatgcaatataaaaacttaattgtaggaatagac

SEQ ID NO: 33731 - DNA, 42 bp, unidentified
  source 1..42: mol_type = unassigned DNA; note = methanogen bacteria
atctcaaatacaatttctgaggatgtatcattactgacaggt

SEQ ID NO: 33732 - DNA, 30 bp, unidentified
  source 1..30: mol_type = unassigned DNA; note = methanogen bacteria
ttggaatatgggcttggtgaggtaacctat

SEQ ID NO: 33733 - DNA, 78 bp, unidentified
  source 1..78: mol_type = unassigned DNA; note = methanogen bacteria
tttggaagtcacgtcttggattactttgacttcattccactgtctttaggtggattccagttcgatttgatattgggc

SEQ ID NO: 33734 - DNA, 36 bp, unidentified
  source 1..36: mol_type = unassigned DNA; note = methanogen bacteria
gtaaacactactgcaggtgcaaatatattatcaatc

SEQ ID NO: 33735 - DNA, 66 bp, unidentified
  source 1..66: mol_type = unassigned DNA; note = methanogen bacteria
ttcggaagcggtgttttaagttcattcgatcatcttgtgatgatttttaacggtgttcactttagc

SEQ ID NO: 33736 - DNA, 87 bp, unidentified
  source 1..87: mol_type = unassigned DNA; note = methanogen bacteria
ttaaaaaatgatacattaggaatgaatctgataactgcaggatccatgtcagatgggagactaaagaaacagaaatccccattgagt

SEQ ID NO: 33737 - DNA, 39 bp, unidentified
  source 1..39: mol_type = unassigned DNA; note = methanogen bacteria
gatggagtatttaaagaaatacctccaacagaacaggga

SEQ ID NO: 33738 - DNA, 195 bp, unidentified
  source 1..195: mol_type = unassigned DNA; note = methanogen bacteria
tcattaagttttaatgaaggacacactgaaaagcccgaatttgaaaatgtcacagaagagatgacatctgatttaaaccaaactgatcaggtatactatgatagaagtgttgatgagatagattataatgaaaatgacacttccattttgaatgtcaatcagcaatatgaatttaatcaatcccaatatcagcaa

SEQ ID NO: 33739 - DNA, 36 bp, unidentified
  source 1..36: mol_type = unassigned DNA; note = methanogen bacteria
ttctttgtaaatcctgtttccaaatatcaggtttat

SEQ ID NO: 33740 - DNA, 42 bp, unidentified
  source 1..42: mol_type = unassigned DNA; note = methanogen bacteria
atcataaatcttataaattataatggtgataaattgttagaa

SEQ ID NO: 33741 - DNA, 231 bp, unidentified
  source 1..231: mol_type = unassigned DNA; note = methanogen bacteria
aaagtagttggttataagactgttagaaaatacggtttcataccccattacggatggaagctaatgccagtggtttcaaaaggagaagtgcatttttcacaatggaaatatgtcaagggagtttactatacccttggatggtataaagtaaaagaacctatttataaagtttattacatatcagatgaagcattgaccagcgctcctttaaaaaatgtgaagaaaactgca

SEQ ID NO: 33742 - DNA, 39 bp, unidentified
  source 1..39: mol_type = unassigned DNA; note = methanogen bacteria
cttcaaagtgggccccaagttgttagtttttcaggatat

SEQ ID NO: 33743 - DNA, 30 bp, unidentified
  source 1..30: mol_type = unassigned DNA; note = methanogen bacteria
acttggatgccgttaaatttgggtattagt

SEQ ID NO: 33744 - DNA, 30 bp, unidentified
  source 1..30: mol_type = unassigned DNA; note = methanogen bacteria
gaggcaaaagatataaatcaaaaattagaa

SEQ ID NO: 33745 - DNA, 297 bp, unidentified
  source 1..297: mol_type = unassigned DNA; note = methanogen bacteria
agtaatttttcagctactgatgttcaggcagacactgcagaagatattgaagatgcaggcggaaaaccaaatgtcactgatgtttccggtgaccaggaatattatgtaatgccggtagctaatttacataaagtcactgtcaatggtcaggatcgctcggatgcgattgcaggcagtgccgtaggggtacaggcaaatgttattgaccagggacaggttactattaagcctggtgaaatcgtcattgagactcctcctggagtatctgcagatgtggcggtacagcgtcctgaactt

SEQ ID NO: 33746 - DNA, 300 bp, unidentified
  source 1..300: mol_type = unassigned DNA; note = methanogen bacteria
agccagaatcctatggatcaaccacaaaattatacgccggaccagatatccgcaaagccaaatagtcaaagcggtaattcagattattatctactaccattaaatggattacataaagtaacagtaaatggtgtagattattcagatgatatacgtaatggagcagtagcggtacacacccgggtaatggatgaaggtcagattaccatggattcgtctactggtaccataactattcaggcgcctgaagacctacaggacatagctgtaaaagcaccgtcaagtagcagttcgtcgacg

SEQ ID NO: 33747 - DNA, 30 bp, unidentified
  source 1..30: mol_type = unassigned DNA; note = methanogen bacteria
tcaatagtaaataataagattactctagca

SEQ ID NO: 33748 - DNA, 42 bp, unidentified
  source 1..42: mol_type = unassigned DNA; note = methanogen bacteria
acaaaacctgacaacgtatctttcgaaatggctaaaattaac

SEQ ID NO: 33749 - DNA, 42 bp, unidentified
  source 1..42: mol_type = unassigned DNA; note = methanogen bacteria
gttgaaaacaattttattgaagatgttattcttatggataat

SEQ ID NO: 33750 - DNA, 72 bp, unidentified
  source 1..72: mol_type = unassigned DNA; note = methanogen bacteria
attaaaccgggtgttggcataaacatcgcagcaatcagtcaaacatcaaattcctttaaatgctttagccag

SEQ ID NO: 33751 - DNA, 300 bp, unidentified
  source 1..300: mol_type = unassigned DNA; note = methanogen bacteria
gtgatagttgtaaataactcagactctgatgatgctgtggaggagtcttccgattcaggtagttcttcttctaattcaggcagctcttcttccagttcagatgccgtaacttattctcaagcccagtccatgtatccggacacttccagcaatgttatttccaatgcattcgatgaagcggatgcaaataaagatggattattaaccggttctgagattaatgaatttaaaaggcttgccaagctggcaatcaatacagcatccgaatctgattcaactacttacaatgagcatggatcc

SEQ ID NO: 33752 - DNA, 57 bp, unidentified
  source 1..57: mol_type = unassigned DNA; note = methanogen bacteria
tattgtaaagctgaaggattggattccagaactgtaaaaggttcaacagagtacaac

SEQ ID NO: 33753 - DNA, 300 bp, unidentified
  source 1..300: mol_type = unassigned DNA; note = methanogen bacteria
agtagttttgcaggtacagctactgatgcaaattctcatcagacttctgatgctactggaaaacctaatgtaacagatacatcagggaattctgaatattatattattcctgtagatggtctacaacatgttattgtcaatggaaaggatatgtcttatttaattcaggatgatgctatcgctattcacgccagagtaattgatcagggacaaattactgttaataataaggataagtctattgagattacaactccaagtggaatgtcgccaaatcaagcagtaagaaagcctaatcaa

SEQ ID NO: 33754 - DNA, 36 bp, unidentified
  source 1..36: mol_type = unassigned DNA; note = methanogen bacteria
caagaaacattatatatggacttttatttggaaaat

SEQ ID NO: 33755 - DNA, 54 bp, unidentified
  source 1..54: mol_type = unassigned DNA; note = methanogen bacteria
acagcatcaatatggagcatatttaaagttaaatcttattataactctccttat

SEQ ID NO: 33756 - DNA, 30 bp, unidentified
  source 1..30: mol_type = unassigned DNA; note = methanogen bacteria
aacaatgacaataatcgagacatacaatat

SEQ ID NO: 33757 - DNA, 300 bp, unidentified
  source 1..300: mol_type = unassigned DNA; note = methanogen bacteria
agtaatttttcggctaccgatgttcaaacggatgctgcagacgatgtcaaggataccggcggaaagcctaatgtgacagacgtttccggagatcaggaatattatgtcatgccggttgccaatctgcataaggtcactgtcaatggccaggacaggtcggatgcgatagcgggcagcgccgtgggagttcaagctaatgttattgatgaaggacaagttaccatcaagcctggtgaaattgttatcgaaacccctccaggtgtgcctccagaggtggctgtacaacgtcctgaacttaat

SEQ ID NO: 33758 - DNA, 30 bp, unidentified
  source 1..30: mol_type = unassigned DNA; note = methanogen bacteria
tcacaaataagcgttcatgcttcttttgca

SEQ ID NO: 33759 - DNA, 63 bp, unidentified
  source 1..63: mol_type = unassigned DNA; note = methanogen bacteria
ttatacagtgtagaccagacagactcatatattttaatttgggattatatcgcccccaaattt

SEQ ID NO: 33760 - DNA, 39 bp, unidentified
  source 1..39: mol_type = unassigned DNA; note = methanogen bacteria
tcatacatgtcttatgtaagcagaatgagctattactat

SEQ ID NO: 33761 - DNA, 45 bp, unidentified
  source 1..45: mol_type = unassigned DNA; note = methanogen bacteria
ataaataaccatcaaatttatggaaacggattgaatcctcatatt

SEQ ID NO: 33762 - DNA, 36 bp, unidentified
  source 1..36: mol_type = unassigned DNA; note = methanogen bacteria
gttctctgggattttggagtatttgctccccaaata

SEQ ID NO: 33763 - DNA, 48 bp, unidentified
  source 1..48: mol_type = unassigned DNA; note = methanogen bacteria
caaggaacattgggaacattcagcggatttttctcaacagaaactgga

SEQ ID NO: 33764 - DNA, 54 bp, unidentified
  source 1..54: mol_type = unassigned DNA; note = methanogen bacteria
atgccgggaattcatgctgaaatttcaaatggattcagtgttgtctttcaaaca

SEQ ID NO: 33765 - DNA, 48 bp, unidentified
  source 1..48: mol_type = unassigned DNA; note = methanogen bacteria
caaggatatatgggacagttcagcggatttttcctgactgaaaacgga

SEQ ID NO: 33766 - DNA, 294 bp, unidentified
  source 1..294: mol_type = unassigned DNA; note = methanogen bacteria
aatttttcagctactgatgttcaaactgatgactctaatcctgcttctgaggcaactggaaaacctaatgtgactgatgtttctggtgaccaagagtattatgttgtgcctgtggcaggattacacaaagttgtagttaatggtaaagatcgctcggatgccattgcgggtagtgccgtaggggtccaggcgaaggttatggaccaaggtgaagtcaatattaaacctggattaattgaaatcactacacctccaggagtacctcctgaagtggcggttcaacgtccagcgtta

SEQ ID NO: 33767 - DNA, 297 bp, unidentified
  source 1..297: mol_type = unassigned DNA; note = methanogen bacteria
agtaacttctcagctactgatgttcaaactgatgattctgatgttgcctctgaggctaccggaaaaccaaacgtaactgatgtttccggtgatcaggagtattatattgtgcctgtcgctaatttgcataaggttacagtaaacggtcaggatagatctgatgcaatctcgggaggggctgttggtgttcaggctaaggtaattgaccagggtcaagtttcaattaagcctggtgaaattgtgattacaacaccgcctgacatatctgtagaaaaggcagttcaacgtccggaagta

SEQ ID NO: 33768 - DNA, 48 bp, unidentified
  source 1..48: mol_type = unassigned DNA; note = methanogen bacteria
attggcacatttggagaatttaatggttttttcacaactgaaacaggt

SEQ ID NO: 33769 - DNA, 30 bp, unidentified
  source 1..30: mol_type = unassigned DNA; note = methanogen bacteria
atggatatgaatattcccgcaattcctgat

SEQ ID NO: 33770 - DNA, 297 bp, unidentified
  source 1..297: mol_type = unassigned DNA; note = methanogen bacteria
acaagtaatttcgcagctgttgattcaccgagtaacactgctactgatagcggaggtaccggtaaacctaatgtaactgatacttcaggaaatgctgaatattatattgtgcctgttgctaacctgcacaaggttaccgttaatggggtcgatagatcagatgccatttcaggtagtgctgttggagttcaggcgaaagttatggatgaaggacaaatatcgattaagccgggagaaattattattgtcacccctaatggaatttctcctcaagatgctgttcaacgtccaaaaaca

SEQ ID NO: 33771 - DNA, 297 bp, unidentified
  source 1..297: mol_type = unassigned DNA; note = methanogen bacteria
agtaatttttcagctactgatgttcaaacagatgattctaatgttgcagatagtgcaactggaaaacctaatgtaactgatgtttctggggaccaggaatattatgtagttccggtggctaatttgcataaagttactgtgaacggacaagaccggtcggatgcgatagccggaggcgccgtgggtgttcaagcaaaagttattgacgaaggtcaagttacaattaagcctggtgaggttgtaattacaactcctccgggagtacctccagaggtggctgtgcatcgtcctgaactt

SEQ ID NO: 33772 - DNA, 297 bp, unidentified
  source 1..297: mol_type = unassigned DNA; note = methanogen bacteria
agtaatttttcagctactgaagttcaaactgatgattctgatgttgcatctgatgctacaggaaaaccaaatgttactgatgtttccggtgaccaggaatattatgtagtgccagtggcaaatctgcataaagttactgtaaatggtcaagatagatccgatgcaatctcgggaggagctgtcggtgttcaggctaaggtaatcgaccagggtgaagtttcaattaaacctggtgaagttgtcattacaacacctcctgatgtgcctgtagataaggcggttcatcgtccagagtta

SEQ ID NO: 33773 - DNA, 297 bp, unidentified
  source 1..297: mol_type = unassigned DNA; note = methanogen bacteria
agtaatttttcagctactgatgttcaaacggatgatgctgatgttgtagaagatgcgagtggaaaacctaatgtcactgatgtttctggtgatgccgaatattatgttatgcctgtagctaatttgcataaagttacagttaatggtcaggaccgctcggatgcaatagcgggaagcgcagttggagttcaggcaagagtaattgatgaaggtcaagttacaatcaagcctggtgaaatcgttattacaactcctcctggaatttctgttgatatggctgttcaacgtccggaactt

SEQ ID NO: 33774 - DNA, 297 bp, unidentified
  source 1..297: mol_type = unassigned DNA; note = methanogen bacteria
agtaacttttcagctactgatgtccaagcggacactgcggaagatgttgaccagggcagcggaaaaccgaatgtcactgatgtttccggggaccaggaatattatgtcatgcctgttgccaacctgcataaggttaccgtcaacggtcaggacaggtcagactcgatagccggcagtgccgtgggcgttcaagcaagagttattgatgaaggacaagttactatcaagcctggtgaaattgtaattcaaacacctccaggaatttctgtagatcaagctgtccaacgtccagaagtt

SEQ ID NO: 33775 - DNA, 48 bp, unidentified
  source 1..48: mol_type = unassigned DNA; note = methanogen bacteria
cagggatacatgggaaccttttcagggtttttcgtgagcaatactgga

SEQ ID NO: 33776 - DNA, 297 bp, unidentified
  source 1..297: mol_type = unassigned DNA; note = methanogen bacteria
agtaatttttcagctactgatgttcaagctgacactgccgatgatttagatcagggcactggaaagcctaatgtcactgatgtttccggtgaccaggaatattatgttgtgcctgttgctaacttgcataaagttacagttaacggccaagaccggtcggatgcgatagcgggcagtgcagttggtgttcaagcaagagtgattgatgaaggacaagtcattattaaacctggtgaaatcgtgattgaaacacctccaggaatttccgttgaccaagctgtccaacgtccagaagtt

SEQ ID NO: 33777 - DNA, 57 bp, unidentified; identical to SEQ ID NO: 32251
  source 1..57: mol_type = unassigned DNA; note = methanogen bacteria

SEQ ID NO: 33778 - DNA, 45 bp, unidentified
  source 1..45: mol_type = unassigned DNA; note = methanogen bacteria
ggtgcttttgatagtataacaaacaatgggcttggtgcaaacaat

SEQ ID NO: 33779 - DNA, 297 bp, unidentified
  source 1..297: mol_type = unassigned DNA; note = methanogen bacteria
agtaatttttcagctactgatgttcaagctgacactactagtgatgttaaagacactggcggtaaaccaaatgtaactgatgtttctggaactgaagaatattatattgtacctgtggctaatttgcataaagtcactgttaatggtcaagacagatctgatgcaatatcgggtggtgccgtgggagtgcatgcaaaagttattgataatggtcaagtttctattaaacctggtgaaataattattaacacacctcctgatgtgtctgttaatgatgcggttcgccgtcctgaaatt

SEQ ID NO: 33780 - DNA, 78 bp, unidentified
  source 1..78: mol_type = unassigned DNA; note = methanogen bacteria
tcgttcttctccgacgggatggcgtcgttcctgcaggactgcatcggcatccgcttcgagggccacacctccgtgcag

SEQ ID NO: 33781 - DNA, 33 bp, unidentified
  source 1..33: mol_type = unassigned DNA; note = methanogen bacteria
atgaaagaaaatgaacttccatactatggggtc

SEQ ID NO: 33782 - DNA, 297 bp, unidentified
  source 1..297: mol_type = unassigned DNA; note = methanogen bacteria
agtaatttttcagcaacagatgtgcagacagatactgcagaccaagttgaagacgcaagtggaaaacctaatgtaactgatgtttctggggaccaggaatattatgttatgccagtagctaatttgcataaggttactgtcaacggtcaggatcgctcggattcgatagccggcagtgctgtaggtgtacaggcaaatgttatagatcagggacaagttgtcattaaacctggtgagattgtaattaccactcctcctggagttccaccagaaaaagctgttcaacgtccagaactt

SEQ ID NO: 33783 - DNA, 297 bp, unidentified
  source 1..297: mol_type = unassigned DNA; note = methanogen bacteria
agtaatttttcagctactgatgttcaaactgatgatgctgccgttacggatggtgcaactggaaaaccgaatgtcactgatgtttccggtgattcacagtattatgtagtgccggttgcaaatctgcataaagtcactgttaatggtcaagaccgctcggatgcgatttcgggtggtgccgtaggtgtggcggcaagagttattgatggtggacaaattcaaatcaagcctggtgaaataataatcactactcctccgggagtttcagtccaagatgctgtccaacgtccgaatatt

SEQ ID NO: 33784 - DNA, 36 bp, unidentified
  source 1..36: mol_type = unassigned DNA; note = methanogen bacteria
agttatattgcatctacctttggtttaagtgatgca

SEQ ID NO: 33785 - DNA, 297 bp, unidentified
  source 1..297: mol_type = unassigned DNA; note = methanogen bacteria
agtaatttttcagctgacgttcagactgatgcaacagatgatgttacacagaatgcatcaggaaaaccgaatgtaacagatgtttctggtgaccaggaatattatgtcgtgcctgtagcagggttacataaagttacagtcaacggccaagatcgctcggatgccattgcgggtagtgccgtgggagtgcaggcaaaagtcgtagatcaaggtgaaataaaaatcaaaccaggtcttgttgaaatcactactccaccaggagtgcctccagaagtggcagttcaacgtccggagatt

SEQ ID NO: 33786 - DNA, 294 bp, unidentified
  source 1..294: mol_type = unassigned DNA; note = methanogen bacteria
agtaatttttcagctgatgttcaaactgatgctactgatgctgctgaagaggcatcaggaaaaccaaatgtaactgatgtttccggtgatcaggaatattatgttgtgcctgtggcaggattaaataaagttacagttaatggtcaagacagatcggatgccattgcaggcggagccgtgggagtgcaagcaaaagttattgatcaaggtgaaataaaaatcaaacctggtctaattgagattactacacctccaggtgtgcctccagaagtggctgttaaacgtccagaactt

SEQ ID NO: 33787 - DNA, 48 bp, unidentified
  source 1..48: mol_type = unassigned DNA; note = methanogen bacteria
attggaacattaggagaatttagcggatatttttcaacacaagtcggt

SEQ ID NO: 33788 - DNA, 57 bp, unidentified
  source 1..57: mol_type = unassigned DNA; note = methanogen bacteria
tccagtcaaaaatccttaaaagatttaaaaatcggaaattataaaatttctcatctt

SEQ ID NO: 33789 - DNA, 30 bp, unidentified
  source 1..30: mol_type = unassigned DNA; note = methanogen bacteria
atgagtatgaacattccaacaattccggat

SEQ ID NO: 33790 - DNA, 291 bp, unidentified
  source 1..291: mol_type = unassigned DNA; note = methanogen bacteria
agtaatttctcagctgttgatacaccaacacaggctactgacagtggtgctactggtaaaccaaatgtgacggatgtttctggtgatgctgagtattatgttgtgcctgttgctaacttgcataaagtcaccgttaatggtgtcgataggtctgatgccattgccggaggtgccgttggagttcaggcgaaagttatagatgaaggacaaatatcgatcaagcccggagagattataattacaactcctaatggaatttctcctgataaggctgttcaacgtccaagaatg

SEQ ID NO: 33791 - DNA, 57 bp, unidentified
  source 1..57: mol_type = unassigned DNA; note = methanogen bacteria
gatgcttggggtgaaggaataattgatttattaactggatttgaaaatacaagtaaa

SEQ ID NO: 33792 - DNA, 54 bp, unidentified
  source 1..54: mol_type = unassigned DNA; note = methanogen bacteria
tttgaaggttacttaggaacattcaaagaaggatttttcacaaccgaaactgga

SEQ ID NO: 33793 - DNA, 45 bp, unidentified
  source 1..45: mol_type = unassigned DNA; note = methanogen bacteria
aaggcaaacaataagaaaaccttcaagggaaaactggctgttaaa

SEQ ID NO: 33794 - DNA, 291 bp, unidentified
  source 1..291: mol_type = unassigned DNA; note = methanogen bacteria
agtaatttttcagctgtcgattcaccgacacaggctactgatggtggtgctacaggtaaaccgaatgtaactgacacgtctggtaatgctgagtattatattgtgcctgttgctaatctgcacaaggtaactgttaatggtgttgacaaatccaatgccatttcaggcagtgctgttggagttcaggcgcgagttatggatgagggacaggtcacaatcaagccaggggagattgttatcgttactcctgatggtatttctccagataaggctgttcaacgtccaaaaaca

SEQ ID NO: 33795 - DNA, 45 bp, unidentified
  source 1..45: mol_type = unassigned DNA; note = methanogen bacteria
ggatacttaggtgcttttgatggatatttcttaacagaaaacgga

SEQ ID NO: 33796 - DNA, 54 bp, unidentified
  source 1..54: mol_type = unassigned DNA; note = methanogen bacteria
atgaacgtcgttgactttgttatgataatgtcaacgctggactatgacgagtgg

SEQ ID NO: 33797 - DNA, 69 bp, unidentified
  source 1..69: mol_type = unassigned DNA; note = methanogen bacteria
tttgcaagaacaccccgacctcttaggtcggggatgaattgcactgtgggggaagggtatactacatta

SEQ ID NO: 33798 - DNA, 33 bp, unidentified
  source 1..33: mol_type = unassigned DNA; note = methanogen bacteria
atggatgtttcttcatttttaactaatatgcct

SEQ ID NO: 33799 - DNA, 39 bp, unidentified
  source 1..39: mol_type = unassigned DNA; note = methanogen bacteria
ggttatttaggcgaatttactggattttttgaaagtatt

SEQ ID NO: 33800 - DNA, 108 bp, unidentified
  source 1..108: mol_type = unassigned DNA; note = methanogen bacteria
tttatcaaagatattccgacaagctttgtcaatgcaaatcagatgccctctttggaacatctcttcggaactgattggatgggaagagacatgtttcaacgtacaatt

SEQ ID NO: 33801 - DNA, 60 bp, unidentified
  source 1..60: mol_type = unassigned DNA; note = methanogen bacteria
aggtgttgtcatgggtgtcggtttaactcattggactcctcttgcaagggttttaagatc

SEQ ID NO: 33802 - DNA, 48 bp, unidentified
  source 1..48: mol_type = unassigned DNA; note = methanogen bacteria
cagggaacatttggagaatttagcggattcttttcaacaccaacagga

SEQ ID NO: 33803 - DNA, 291 bp, unidentified
  source 1..291: mol_type = unassigned DNA; note = methanogen bacteria
agtaatttttcagctgtggatgcaccaatggatgctacagacagtggtgcaaccggtaaacctaatgtaactgatacatcaggtaatgctgagtattatattgtgcctgttgctaatttgcataaggttactgttaatggtgttgaccgttcagatgccattagcggcggtgctgttggagttcaggcgaaggttatggatgagggacagatatcgattaaacctggtgaaattatcatcaatactcctaatggaatttctccggatcaagcagttcaacgtccaaaagtc

SEQ ID NO: 33804 - DNA, 291 bp, unidentified
  source 1..291: mol_type = unassigned DNA; note = methanogen bacteria
agtcaacaccctgtagaaaaaatgcctgatgaatatacccaggaccaaatatctgcaaaacctacaagtcagcagggagattcggaatattatttactgccattgaacggtcttaaaaaagttactgtcaatggacaggacagatcttctgacatacgacaaggttcgatagcagtccatacgagggtaatggatgaaggacaaatccttatggattcctcaacaggaactattacaataaccgcaccagatgatctggtggatgtagcagtaaaagcacctgtgattggt

SEQ ID NO: 33805 - DNA, 30 bp, unidentified
  source 1..30: mol_type = unassigned DNA; note = methanogen bacteria
atggaaatgacaattccaacgattccggac

SEQ ID NO: 33806 - DNA, 42 bp, unidentified
  source 1..42: mol_type = unassigned DNA; note = methanogen bacteria
ggatacatgggccaattcgacggatttttcctaactcaaaat

SEQ ID NO: 33807 - DNA, 177 bp, unidentified
  source 1..177: mol_type = unassigned DNA; note = methanogen bacteria
tccttaagttttgacaatgatgacagcagtcagcctcattatgaaaatgtaacgaaagaaatgacagaaaacgtaagtgcaaatgaagtcacttatgataaggcagttgatggaaaggactataacgaaaatggaacttcccaacttgacatgcaatatatacaaagcaaggaaaag

SEQ ID NO: 33808 - DNA, 33 bp, unidentified
  source 1..33: mol_type = unassigned DNA; note = methanogen bacteria
ggacctcaaatgggaatcgaaccgcttttcaca

SEQ ID NO: 33809 - DNA, 51 bp, unidentified
  source 1..51: mol_type = unassigned DNA; note = methanogen bacteria
ttttcatacatggcatacgtcaattcaatgagatattacaattattattat

SEQ ID NO: 33810 - DNA, 159 bp, unidentified
  source 1..159: mol_type = unassigned DNA; note = methanogen bacteria
gttatgggaggtattagtactgcagtcgatacctatgcgcctgattattcaggggacgaacatttccatcaggaggtctatgattacttccaaaaattagagactatagagggacaagacagtattgttgtggatactgcagatataattattcagaat

SEQ ID NO: 33811 - DNA, 36 bp, unidentified
  source 1..36: mol_type = unassigned DNA; note = methanogen bacteria
tttatcaatccgtatggaacttttcaaccctataat

SEQ ID NO: 33812 - DNA, 198 bp, unidentified
  source 1..198: mol_type = unassigned DNA; note = methanogen bacteria
ctgagttttgatgatggcactgaggatgtaaaaaatgaaacacattatgaaaatgtaactgtggaaatgactacaaatctaaataaatctaagggtgttgtttttgacgaatcagatcgtgtagatttcaatcaaaacaagacctctcagatattggatgtcgaaaaaaatccgtattataacaatactaatcccgat

SEQ ID NO: 33813 - DNA, 291 bp, unidentified
  source 1..291: mol_type = unassigned DNA; note = methanogen bacteria
agtagttttggtgcagcggcagttaatggtaacgatactggaactggtactggaaagccaaatatgactgacagcactggagatgcagagtattatatgattccagttgcaggattgcagaaggttactgtaaatggtgtagacatgtcttctgaaataagaggaaatgctattggtgttcatgcaaatgttctagaccaaggtgatgtgcagataaaaacgaaagagcatgccatcattattcaagcacctcctggaatgactcctcaacaggcagttcatagtccagag

SEQ ID NO: 33814 - DNA, 249 bp, unidentified
  source 1..249: mol_type = unassigned DNA; note = methanogen bacteria
agtggaatgttttcaagcgataattcaacaactgatgttgaagcacaatctgaaactgttgatccaataagtgaagatgatgacacaaccactgaaccaactgaatattgggctagtgcaaaagcagaaaaattccatttaccaacctgtgaatgggccgaaaaaatcagtgaagataataaaatcatttatcaatctcgtgaagatgcaattgcagatggtaaagtgccttgtggtgcatgtaatcca

SEQ ID NO: 33815 - DNA, 288 bp, unidentified
  source 1..288: mol_type = unassigned DNA; note = methanogen bacteria
actttcggtgctgcagctgtcactggtgatgacactggtacaggcactggaaagccaaacatgactgacactactggagatgcagagtattatcttctgccggttgcaggacttcagaaagttgttgtaaatggtgtagatatgtcttctgagataagaggaaatgctatcggtgttcatgcaagagtgcttgaccaaggtgatgttcagatcaaaacgagcgagcatgcgatatatattcaagcgccttctggaatgagccctcaagaggcagttcatagtccagaa

SEQ ID NO: 33816 - DNA, 87 bp, unidentified
  source 1..87: mol_type = unassigned DNA; note = methanogen bacteria
cttgtcgccggggcggactcgataaccgacgccatactggaccaggcggacatatcccgcgatgatgcggaaggcgccctggaaatc

SEQ ID NO: 33817 - DNA, 90 bp, unidentified
  source 1..90: mol_type = unassigned DNA; note = methanogen bacteria
cttcttgtcgccggggcggactcgataaccgacgccatactggaccaggcggacatatcccgcgatgatgcggaaggcgccctggaaatc

SEQ ID NO: 33818 - DNA, 36 bp, unidentified
  source 1..36: mol_type = unassigned DNA; note = methanogen bacteria
aaaatgccatcagttactggaagttgttcacaccca

SEQ ID NO: 33819 - DNA, 33 bp, unidentified
  source 1..33: mol_type = unassigned DNA; note = methanogen bacteria
ttcatgaatccatatagtgtttatacagtttat

SEQ ID NO: 33820 - DNA, 30 bp, unidentified
  source 1..30: mol_type = unassigned DNA; note = methanogen bacteria
ttaggctacagccttcctaaatctctgcaa

SEQ ID NO: 33821 - DNA, 60 bp, unidentified
  source 1..60: mol_type = unassigned DNA; note = methanogen bacteria
tgggcgcctgcacctgaattctttacaaattcggaggcctatgccatagttttgggctca

SEQ ID NO: 33822 - DNA, 180 bp, unidentified
  source 1..180: mol_type = unassigned DNA; note = methanogen bacteria
gtatctctcagttttgatgacggtaatgacggtcagcctcattttgagaatgtaacagaggaaatgactaagaatataactgcaaatgaagtcatttatgataaggaagttgacggaatagactataacgagaatggctcatcactgattgatacgcaatatataaaagaaaatgaaaca

SEQ ID NO: 33823 - DNA, 39 bp, unidentified
  source 1..39: mol_type = unassigned DNA; note = methanogen bacteria
ctcattatgaatccatatgactcttctgcagtatatcag

SEQ ID NO: 33824 - DNA, 279 bp, unidentified
  source 1..279: mol_type = unassigned DNA; note = methanogen bacteria
ggcatttctatgggatttaatggagataatcaaacaaatattacccaaaataatactactcacttgccagttgatgtgacccataatattagtctttatgaaaatagatcaattgataattttgacgaaagtggattaaatcaggatactgtagtagaatatactgcttcaaataatactgatgatacttattatagtgattatgatgatagttcttatcaggaatatcaaacagatgattactcctatcaagatagtggaagtgactattatcaatat

SEQ ID NO: 33825 - DNA, 42 bp, unidentified
  source 1..42: mol_type = unassigned DNA; note = methanogen bacteria
ggatacatgggacaatttgatggctttttcttaaccgaaaca

SEQ ID NO: 33826 - DNA, 33 bp, unidentified
  source 1..33: mol_type = unassigned DNA; note = methanogen bacteria
ctgtttgtcaatccatacaacatgtatacgatt

SEQ ID NO: 33827 - DNA, 42 bp, unidentified
  source 1..42: mol_type = unassigned DNA; note = methanogen bacteria
ggatatatggggaaatttgatggatttttcgcaactgaaacc

SEQ ID NO: 33828 - DNA, 39 bp, unidentified
  source 1..39: mol_type = unassigned DNA; note = methanogen bacteria
gttcctaagatattcaatcctgtccttgcagattatacc

SEQ ID NO: 33829 - DNA, 69 bp, unidentified
  source 1..69: mol_type = unassigned DNA; note = methanogen bacteria
aatgcaatatacggatggaattttataatgcaaattgcaaatggtggatatgaagtgttaaatactgaa

SEQ ID NO: 33830 - DNA, 72 bp, unidentified
  source 1..72: mol_type = unassigned DNA; note = methanogen bacteria
ggcattccatttttcaatacctttttcaagagccatatcatgggaaacgaagtgtgcatcacaattcatatc

SEQ ID NO: 33831 - DNA, 33 bp, unidentified
  source 1..33: mol_type = unassigned DNA; note = methanogen bacteria
gtcgcctcacttggagaatcggcaatatccggc

SEQ ID NO: 33832 - DNA, 60 bp, unidentified
  source 1..60: mol_type = unassigned DNA; note = methanogen bacteria
acattaataaatgttgtttttggccagattgaagccgacgtttggcacaatgctgaatta

SEQ ID NO: 33833 - DNA, 33 bp, unidentified; identical to SEQ ID NO: 33629
  source 1..33: mol_type = unassigned DNA; note = methanogen bacteria

SEQ ID NO: 33834 - DNA, 36 bp, unidentified
  source 1..36: mol_type = unassigned DNA; note = methanogen bacteria
atcattaatccatatggttcatttcaaatctacacg

SEQ ID NO: 33835 - DNA, 180 bp, unidentified
  source 1..180: mol_type = unassigned DNA; note = methanogen bacteria
gtttcattgagttttgaagataaccatgtcgatgaaggccctcattttgtaaatgtcactaaggagatgacttctgatttaaatgatacagaagatgtttattatgacaaatcagctgatgctatagattataaccaaaatcagactcagtttgatattccgcatggaaatactactcaa

SEQ ID NO: 33836 - DNA, 90 bp, unidentified
  source 1..90: mol_type = unassigned DNA; note = methanogen bacteria
aacatctgcctaaagtatggtctggaaaaccctacagtcaatatcgattcatcaatcggacctgatcaaatcccagtcatcgtttatgtt

SEQ ID NO: 33837 - DNA, 84 bp, unidentified
  source 1..84: mol_type = unassigned DNA; note = methanogen bacteria
aataaggaagtcacatacgagtacattgacggctacatatatgaaaccaaaggcatcactacatgggttgacatttcagacatt

SEQ ID NO: 33838 - DNA, 36 bp, unidentified
  source 1..36: mol_type = unassigned DNA; note = methanogen bacteria
ttcattaatccgtatggtcagttccaggtctatatg

SEQ ID NO: 33839 - DNA, 33 bp, unidentified
  source 1..33: mol_type = unassigned DNA; note = methanogen bacteria
cgaacactggaaataagtttcatagcattgcca

SEQ ID NO: 33840 - DNA, 48 bp, unidentified
  source 1..48: mol_type = unassigned DNA; note = methanogen bacteria
ttcaagcagtcccaatgcccctgcatttgcagctcttctctcaacaac

SEQ ID NO: 33841 - DNA, 222 bp, unidentified
  source 1..222: mol_type = unassigned DNA; note = methanogen bacteria
tggaatatgcaaagcgttttatttaatgaccaattgacccaagaacaaaaggaaaaggtcatggaagccatgaatcaggaagtgactgaggttcaagagggacagatattaaatgaaactccagatacaagcaatcaaactggacaaggctatactgagatgggtaaggtctataaggatccatctacgggtaagctgattatggttcagaataagactaat

SEQ ID NO: 33842 - DNA, 36 bp, unidentified
  source 1..36: mol_type = unassigned DNA; note = methanogen bacteria
tgtttcggctataaaagtgtttctggaatttatcca

SEQ ID NO: 33843 - DNA, 48 bp, unidentified
  source 1..48: mol_type = unassigned DNA; note = methanogen bacteria
ttaaatttttgtaacatagatgcaccagtttataaagaagctgttgat

SEQ ID NO: 33844 - DNA, 39 bp, unidentified
  source 1..39: mol_type = unassigned DNA; note = methanogen bacteria
ctgacaataaatcctacagaaatttcttcagtatatgca

SEQ ID NO: 33845 - DNA, 51 bp, unidentified
  source 1..51: mol_type = unassigned DNA; note = methanogen bacteria
agcagagaatcatggaaaagtataaaaattggaaatttcagtatgtcccac

SEQ ID NO: 33846 - DNA, 33 bp, unidentified; identical to SEQ ID NO: 33534
  source 1..33: mol_type = unassigned DNA; note = methanogen bacteria

SEQ ID NO: 33847 - DNA, 51 bp, unidentified
  source 1..51: mol_type = unassigned DNA; note = methanogen bacteria
agcagagaatcatggaaaagtataaaagttggaaatttcagcatgtcacat

SEQ ID NO: 33848 - DNA, 36 bp, unidentified
  source 1..36: mol_type = unassigned DNA; note = methanogen bacteria
ataattaatcctgcagatgttggttcagtttacaga

SEQ ID NO: 33849 - DNA, 51 bp, unidentified
  source 1..51: mol_type = unassigned DNA; note = methanogen bacteria
agcataaattcattgaaaaatttaacaattggtaagtataaaatttcgcat

SEQ ID NO: 33850 - DNA, 201 bp, unidentified
  source 1..201: mol_type = unassigned DNA; note = methanogen bacteria
gtgcacaactacaaatccaaaaacaacaaaatcaactacaactacattgtcaatgaaaagcacaatcttgttggaactggaaacatcgatgcagattacaactggtggggaaagaacaaactattcaaggtttccaaatcattcaaaatcaaaaagtttgtagttatgtatttaaacgcaccacataaattgtccattcct

SEQ ID NO: 33851 - DNA, 153 bp, unidentified
  source 1..153: mol_type = unassigned DNA; note = methanogen bacteria
accaggcactatttcaatgattatataaaaaccaataaaagcaatataaaacataataatcttaaaactaagataaaagcgattaagaaaagaaacagttatgagttgaagatcgtctgtgacgggcagacacttgtaaaaaattactattac

SEQ ID NO: 33852 - DNA, 180 bp, unidentified
  source 1..180: mol_type = unassigned DNA; note = methanogen bacteria
ttctggaatttggatagcggttctcaagatgatgggcctcattggataaatgtcacagaagagatgacaaccaatttaaatgaaacagaacctgtatattatgatgcatcagtagatgatgtggattataatagcaatcagacattaacagaacttaatgttacaacagaaccctcatat

SEQ ID NO: 33853 - DNA, 51 bp, unidentified
  source 1..51: mol_type = unassigned DNA; note = methanogen bacteria
agcctaaagtcatttaaaagtttaaggattggaaatcatgaaatatcacat

SEQ ID NO: 33854 - DNA, 63 bp, unidentified
  source 1..63: mol_type = unassigned DNA; note = methanogen bacteria
gaactggaggacatgctgttggacctgcccaataccatgaatatgctaatttcacacaatcat

SEQ ID NO: 33855 - DNA, 30 bp, unidentified
  source 1..30: mol_type = unassigned DNA; note = methanogen bacteria
attggttcaaaaaacatctatagtgtatat

SEQ ID NO: 33856 - DNA, 30 bp, unidentified
  source 1..30: mol_type = unassigned DNA; note = methanogen bacteria
gtcccaacaatagcatttacaccatttaat

SEQ ID NO: 33857 - DNA, 54 bp, unidentified
  source 1..54: mol_type = unassigned DNA; note = methanogen bacteria
tccagccaaaaatcattgagaaatttaacaattggcaagtataaaatgtcacat

SEQ ID NO: 33858 - DNA, 33 bp, unidentified
  source 1..33: mol_type = unassigned DNA; note = methanogen bacteria
atattagggccaaaaaatgtttattctgtttat

SEQ ID NO: 33859 - DNA, 285 bp, unidentified
  source 1..285: mol_type = unassigned DNA; note = methanogen bacteria
agtaatttttcagcaactgacatgccttcagatgctaccgatgtcggaactggaaaacctaatgtaactgatgtttcaggtgattctgaatattatattgtccctgttgctaatttgcataaggttactgttaacggtgttgataggtctgatgctatttcaaatagtgccataggtgttcaggcgcgagtaattgatgaagggcaggtctccattaaaccgggtgaaattattattactacgcctaatggtgtttctgtccaagatgctgttcggagtccagct

SEQ ID NO: 33860 - DNA, 51 bp, unidentified
  source 1..51: mol_type = unassigned DNA; note = methanogen bacteria
agtcaaaaatcattaaaacacatgacgattggaggctataaaatgtctcat

SEQ ID NO: 33861 - DNA, 36 bp, unidentified
  source 1..36: mol_type = unassigned DNA; note = methanogen bacteria
gggttattaggtccgaaaaatgtttatcaagcatat

SEQ ID NO: 33862 - DNA, 30 bp, unidentified
  source 1..30: mol_type = unassigned DNA; note = methanogen bacteria
aatctgattaatccgaaggatgctaatcaa

SEQ ID NO: 33863 - DNA, 42 bp, unidentified
  source 1..42: mol_type = unassigned DNA; note = methanogen bacteria
tctctaattgttggtcctgtagatattatgggagtatacggt

SEQ ID NO: 33864 - DNA, 48 bp, unidentified
  source 1..48: mol_type = unassigned DNA; note = methanogen bacteria
ataaaaactttaagagacataaaaataggaaattatgacatgtcacat

SEQ ID NO: 33865 - DNA, 30 bp, unidentified
  source 1..30: mol_type = unassigned DNA; note = methanogen bacteria
accagaggcccaatgctatttgacatgcct

SEQ ID NO: 33866 - DNA, 42 bp, unidentified
  source 1..42: mol_type = unassigned DNA; note = methanogen bacteria
tacagtataatgggccctaaaaacgtttatcaggtatatcag

SEQ ID NO: 33867 - DNA, 54 bp, unidentified
  source 1..54: mol_type = unassigned DNA; note = methanogen bacteria
gcaagccaaaaatcattaaaagatctaaaaattggaaaccgtaaaatttccagt

SEQ ID NO: 33868 - DNA, 36 bp, unidentified
  source 1..36: mol_type = unassigned DNA; note = methanogen bacteria
aggctggtaggtccaaagaatgtttactcagtttac

SEQ ID NO: 33869 - DNA, 39 bp, unidentified
  source 1..39: mol_type = unassigned DNA; note = methanogen bacteria
ttcaatatggtaggagcaaagaatgtctactcagtttac

SEQ ID NO: 33870 - DNA, 30 bp, unidentified
  source 1..30: mol_type = unassigned DNA; note = methanogen bacteria
ttttattctacaacgtataatatttcttca

SEQ ID NO: 33871 - DNA, 39 bp, unidentified
  source 1..39: mol_type = unassigned DNA; note = methanogen bacteria
tacggattagttggtgctaaaaacgtatacggtgtttat

SEQ ID NO: 33872 - DNA, 87 bp, unidentified
  source 1..87: mol_type = unassigned DNA; note = methanogen bacteria
atgaaattaaatattcttgattccttatattatacagttataactattgctactgtaggatatggggatatccaccctttaacacca

SEQ ID NO: 33873 - DNA, 39 bp, unidentified
  source 1..39: mol_type = unassigned DNA; note = methanogen bacteria
tacggtattttaggtccaaaaaacgtttatcagatatat

SEQ ID NO: 33874 - DNA, 39 bp, unidentified
  source 1..39: mol_type = unassigned DNA; note = methanogen bacteria
tttggtaatatttatggactcggaaatataactctgggt

SEQ ID NO: 33875 - DNA, 57 bp, unidentified
  source 1..57: mol_type = unassigned DNA; note = methanogen bacteria
gcatttccagacaataaccctaccaaattacttaatatgattcctattggaaatctt

SEQ ID NO: 33876 - DNA, 66 bp, unidentified
  source 1..66: mol_type = unassigned DNA; note = methanogen bacteria
aaattaccttctgttactggaagttgttctcacccttgtggtaacggtttaggcgcagcattattt

SEQ ID NO: 33877 - DNA, 96 bp, unidentified
  source 1..96: mol_type = unassigned DNA; note = methanogen bacteria
tttgacacatcattcaactcaatattagatactgtatggtttattgttgtaactgcatccactgtaggttatggtgacatgacgccaaatactcca

SEQ ID NO: 33878 - DNA, 51 bp, unidentified
  source 1..51: mol_type = unassigned DNA; note = methanogen bacteria
tcatattctcattcattggaatcactccagagatgttcatttgtggaatgg

SEQ ID NO: 33879 - DNA, 36 bp, unidentified
  source 1..36: mol_type = unassigned DNA; note = methanogen bacteria
attgtcggtgcaggcaatgttcatacaatatatgat

SEQ ID NO: 33880 - DNA, 69 bp, unidentified
  source 1..69: mol_type = unassigned DNA; note = methanogen bacteria
atggcatacggctggaatacaattttccagttaatgacacaaggatacgaagcgttgaattctgaagct

SEQ ID NO: 33881 - DNA, 210 bp, unidentified
  source 1..210: mol_type = unassigned DNA; note = methanogen bacteria
ttgggtttaagcgacaacagtctttacgtgtctaaagagaaacttcaggaaataacaggcaaggaccacttgactcaaatcctgattaaaaccaatgagaatgtgaacgataccaaaatagctgatgaaatcgaagacaagtacggagaggatcttttaacattcacaacagaagagcaggttcaaatgatgagccagatcacttccatc

SEQ ID NO: 33882 - DNA, 276 bp, unidentified
  source 1..276: mol_type = unassigned DNA; note = methanogen bacteria
agcatgcaatctgcagatataaatgatagtgattctggaaaaccagtgcaaagtgaaagtagtggtccttcagaatattatttaataccagtggcaggtttaacacatgttactgttaatggcgttgatagatcccatttaatcaaaaatagttcaataacagtgcataccaccgtaattgacgcaggagaaattattattcaacctaaaaaaggtacaattattataacaacaccaaaagggatagatatcgaaaaagctgttaaaatgcctgct

SEQ ID NO: 33883 - DNA, 48 bp, unidentified
  source 1..48: mol_type = unassigned DNA; note = methanogen bacteria
tttaacggaaccctaggaacattgacgggattttttgcaacagaactg

SEQ ID NO: 33884 - DNA, 42 bp, unidentified
  source 1..42: mol_type = unassigned DNA; note = methanogen bacteria
atacttcatgttatgaagattacaaaagcggcacaatttagt

SEQ ID NO: 33885 - DNA, 33 bp, unidentified; identical to SEQ ID NO: 32502
  source 1..33: mol_type = unassigned DNA; note = methanogen bacteria

SEQ ID NO: 33886 - DNA, 159 bp, unidentified
  source 1..159: mol_type = unassigned DNA; note = methanogen bacteria
gttatgggcggtattagtactgcagtcgatacctatgcgccggattattccggagatgagcaattccatcaggctgtctatgattacttccaaaaattagacactatagagggacaagacagtattgttgtgaatactgcagatataattattcagaat

SEQ ID NO: 33887 - DNA, 225 bp, unidentified
  source 1..225: mol_type = unassigned DNA; note = methanogen bacteria
tttttgctgaaccagacccaaacggtcaaggttgacaatgtcgaatttgaaatccctgccgattatgtttcagaaccgttaaggacagatgtcaattatgacggaaacatcaagtcaagcgcaatgggctggagcaataaggacaactacattgaaataggtggctgcggatttgggcggaacacctaccaagatgtacggatatacaggttactatttggaata

SEQ ID NO: 33888 - DNA, 87 bp, unidentified
  source 1..87: mol_type = unassigned DNA; note = methanogen bacteria
ggttataaagctaacggaataacatacatattcttacagaatatggaagttaacagtttccttggtcaatcatcatatccactacct

SEQ ID NO: 33889 - DNA, 87 bp, unidentified
  source 1..87: mol_type = unassigned DNA; note = methanogen bacteria
aatcaattgtcacaggttcacgcaatctcagggattgcacaaatcaacctcaacacattcatcaattctctgggatacattgcatat

SEQ ID NO: 33890 - DNA, 33 bp, unidentified
  source 1..33: mol_type = unassigned DNA; note = methanogen bacteria
tttatgttaaaatacctgcttcctgcaaagcag

SEQ ID NO: 33891 - DNA, 39 bp, unidentified
  source 1..39: mol_type = unassigned DNA; note = methanogen bacteria
tttatattaagtaatggatttgcatatggtattttttca

SEQ ID NO: 33892 - DNA, 48 bp, unidentified
  source 1..48: mol_type = unassigned DNA; note = methanogen bacteria
gtatactatgctgaaggaggattatatgccattgccgtaatacaatat

SEQ ID NO: 33893 - DNA, 60 bp, unidentified
  source 1..60: mol_type = unassigned DNA; note = methanogen bacteria
accatatattttgcttcgtttagtaacttttatgggctaagcaatttaagtttatcttca

SEQ ID NO: 33894 - DNA, 90 bp, unidentified
  source 1..90: mol_type = unassigned DNA; note = methanogen bacteria
ggttacaaggaaggaggagttgttcctattttcctgcctggtatggattcaaattggtttgctttaaattccgcatatccattacctcag

SEQ ID NO: 33895 - DNA, 54 bp, unidentified
  source 1..54: mol_type = unassigned DNA; note = methanogen bacteria
tcttttgctgcttatggtaattcatatgggcttggaaatattaatatcagccca

SEQ ID NO: 33896 - DNA, 90 bp, unidentified
  source 1..90: mol_type = unassigned DNA; note = methanogen bacteria
ggttataagtcaggaggagttattcctattttacttccgggaatgaatattaaatggtttgcaaataattctgcttatccactacctcaa

SEQ ID NO: 33897 - DNA, 90 bp, unidentified
  source 1..90: mol_type = unassigned DNA; note = methanogen bacteria
ggttataaagctggtggaatcgttccaattttaactccagatatggatccaacatggtttgcatcacatgcatcttatccgttaccttat

SEQ ID NO: 33898 - DNA, 54 bp, unidentified
  source 1..54: mol_type = unassigned DNA; note = methanogen bacteria
ttgggcagggaaaatcttttgctttccggattctggtattatctgtttttggga

SEQ ID NO: 33899 - DNA, 81 bp, unidentified
  source 1..81: mol_type = unassigned DNA; note = methanogen bacteria
acaactataggaggtagtttcctcggaatatttggaggtttaacaggatttacaatttctggaatttcaagcatcttccta

SEQ ID NO: 33900 - DNA, 180 bp, unidentified
  source 1..180: mol_type = unassigned DNA; note = methanogen bacteria
atgggcacattcaatcatcaaaatccttcaaacactaattcttcctttgatgattttataaataataatttggcttcttcatcagaagatagtgaagaagttgaatattactatccctctacagattatgatgtgcctaaaaacaataatgattctaaattacaggatatttccaaatta

SEQ ID NO: 33901 - DNA, 54 bp, unidentified
  source 1..54: mol_type = unassigned DNA; note = methanogen bacteria
gaaaaggcttgggagtcatcaagtgagaagttctttgcagttccgagtatatcc

SEQ ID NO: 33902 - DNA, 57 bp, unidentified
  source 1..57: mol_type = unassigned DNA; note = methanogen bacteria
ttttttgcttcttatgggaatgcgttaggattggctaatgtaagcattggtccgttt

SEQ ID NO: 33903 - DNA, 81 bp, unidentified
  source 1..81: mol_type = unassigned DNA; note = methanogen bacteria
atgtttgatttgatgttaaatgccatatcgtttgcttcatacggtaacttttatgggcttagcaatatagcaatcagttca

SEQ ID NO: 33904 - DNA, 57 bp, unidentified
  source 1..57: mol_type = unassigned DNA; note = methanogen bacteria
cagttcgggatagtcggcggtgacctggttggggaaagcacagtcaccgtaatgaca

SEQ ID NO: 33905 - DNA, 90 bp, unidentified
  source 1..90: mol_type = unassigned DNA; note = methanogen bacteria
ggttataaagctggtggaattgttccgattttgatgccaaatatgaatacgacttggtttgcatccaatgcatcatatccgcttccttat

SEQ ID NO: 33906 - DNA, 186 bp, unidentified
  source 1..186: mol_type = unassigned DNA; note = methanogen bacteria
gtttcattaagttttgatgatggaaattctactaaagaaaatgtgtctcatgttcaaaatgtaacaaaagagatgactactgatttaaatcaaactaatacagttagttttgataaaaaatatgatggtgttgattataataacaaatcttcagtagcaactactaaacataataaatcggttaat

SEQ ID NO: 33907 - DNA, 81 bp, unidentified
  source 1..81: mol_type = unassigned DNA; note = methanogen bacteria
atgtttaatttgatggatagtaccatattctttgcttcttatggtaactttttgggacttggcaatataagtataggtgca

SEQ ID NO: 33908 - DNA, 60 bp, unidentified
  source 1..60: mol_type = unassigned DNA; note = methanogen bacteria
gataccatatattttgcttcgtatagtaatttttatgggctaggcagtgtaagcatatct

SEQ ID NO: 33909 - DNA, 300 bp, unidentified
  source 1..300: mol_type = unassigned DNA; note = methanogen bacteria
gctttcgtcgcagccgatgcagccctcgagcacgagaagggaaagggattcgattggacttatatcggaggaatcgggcaggattatgagattgaactcacctcggatccgaacgtattcatggaatccgaaggttacaagggattatctttcactgttatagacaccttccgcgattcatctgtatgtgaactcatctacggtgtttccgaaggaaaccatatctccgaaaggaggatgtatcaagtcaccgacggcgatgtgatgacaccggtcatcgtggaggtgagactgttccgc

SEQ ID NO: 33910 - DNA, 57 bp, unidentified
  source 1..57: mol_type = unassigned DNA; note = methanogen bacteria
cagcccatagtcgtggacctcatcggtgacaccgctatcgcgtcgctgtcctccgga

SEQ ID NO: 33911 - DNA, 150 bp, unidentified
  source 1..150: mol_type = unassigned DNA; note = methanogen bacteria
ataaaagtaggaatagtttattgggatgtttatctttatttaaataatgctttaatgtacgctggattaagtgaaggttataaacaacaattatctcctatgttaccttttatgacatcaatactttatcgatatgttcatattggtgat

SEQ ID NO: 33912 - DNA, 45 bp, unidentified
  source 1..45: mol_type = unassigned DNA; note = methanogen bacteria
ctggccggcggaaacattacccataatcagatttctgtaaattca

SEQ ID NO: 33913 - DNA, 57 bp, unidentified
  source 1..57: mol_type = unassigned DNA; note = methanogen bacteria
gaattgataccaggattttattatcaaatttataacagtgcagaaccatacagttta

SEQ ID NO: 33914 - DNA, 36 bp, unidentified
  source 1..36: mol_type = unassigned DNA; note = methanogen bacteria
acaaattataatatgcatgaaataaatccatcaaca

SEQ ID NO: 33915 - DNA, 90 bp, unidentified
  source 1..90: mol_type = unassigned DNA; note = methanogen bacteria
ggttataaagcaggcggtgtcgtaccgattttaatgcctggaatggatacttcctggttcgcttcaaacgcagcatatcctttgccattc

SEQ ID NO: 33916 - DNA, 90 bp, unidentified
  source 1..90: mol_type = unassigned DNA; note = methanogen bacteria
ggttataaagcaggtggtgttgtacctattttaatgcctggaatggatacttcatggtttgcatctaatgctgcttatccattgcctttc

SEQ ID NO: 33917 - DNA, 279 bp, unidentified
  source 1..279: mol_type = unassigned DNA; note = methanogen bacteria
gttacaggtggaataattaataccgataacacagataataatactacattagaaaacaattcaactaatgctacaattaatttaactgataatacaagtggtttaaataatggcaatggaactgctgatgttaatgtagaaggtggcgacttgaataacaatgatacatactatgaaatggtaaatggtgaaaaaaggtatatgagtgaagaggaatatgccgaaaaatatcccgacatttaccaacaaagaaaaaacggtaattttgaaaacgtggca

SEQ ID NO: 33918 - DNA, 42 bp, unidentified
  source 1..42: mol_type = unassigned DNA; note = methanogen bacteria
tttggcaatatttacggactgagtaacataactcttagtcta

SEQ ID NO: 33919 - DNA, 51 bp, unidentified
  source 1..51: mol_type = unassigned DNA; note = methanogen bacteria
atcccatggtttggtggaatgaccggcggacttgatgtattgttaggttca

SEQ ID NO: 33920 - DNA, 39 bp, unidentified
  source 1..39: mol_type = unassigned DNA; note = methanogen bacteria
ctttcatatcaaggaatttcttttggaatcgttgatctt

SEQ ID NO: 33921 - DNA, 90 bp, unidentified
  source 1..90: mol_type = unassigned DNA; note = methanogen bacteria
ggttataaagcaggtggaattgtaccaattctaatgcctggaatggacactacatggtttgcttcaaacgcagcctatccgttacctttc

SEQ ID NO: 33922 - DNA, 90 bp, unidentified
  source 1..90: mol_type = unassigned DNA; note = methanogen bacteria
ggttataaacctggcggtgtcgtacctattttaatgccgggaatggatacttcatggtttgcatcaaatgcggcttatcctttacctttc

SEQ ID NO: 33923 - DNA, 90 bp, unidentified
  source 1..90: mol_type = unassigned DNA; note = methanogen bacteria
cttcatttagtaaaaccgtatatattgcctagtcctattgatgtatgtcattctgcaattcatagtttaagttctggttcattaattgaa

SEQ ID NO: 33924 - DNA, 90 bp, unidentified
  source 1..90: mol_type = unassigned DNA; note = methanogen bacteria
ggttataagcctggtggtgtcgttccgattttaatgcctggaatggatacatcatggtttgctacaaacgcagcatatcctttgcctttc

SEQ ID NO: 33925 - DNA, 45 bp, unidentified
  source 1..45: mol_type = unassigned DNA; note = methanogen bacteria
tatcctttgtctaattttgattttcaatttatgtttttatccgga

SEQ ID NO: 33926 - DNA, 69 bp, unidentified
  source 1..69: mol_type = unassigned DNA; note = methanogen bacteria
cagcacaatgtataccgaattatgcaaaatcaagaagttgtaatttcagaagaaataatacaagaagat

SEQ ID NO: 33927 - DNA, 90 bp, unidentified
  source 1..90: mol_type = unassigned DNA; note = methanogen bacteria
ggttataaggcaggcggtgttgtacctattctaatgcctggaatggacacatcatggtttgcttcaaacgctgcttatccattgcctttt

SEQ ID NO: 33928 - DNA, 66 bp, unidentified
  source 1..66: mol_type = unassigned DNA; note = methanogen bacteria
gataccatatattttgcttcgtatagtaatttcttcgggttaagtaatataagtttatcatcaatg

SEQ ID NO: 33929 - DNA, 90 bp, unidentified
  source 1..90: mol_type = unassigned DNA; note = methanogen bacteria
ggttataaggcagatggtattgtaccgattttaatgcctggaatggatccggcatggtttgcagcaaatgctgccgccccattgcctttc

SEQ ID NO: 33930 - DNA, 75 bp, unidentified
  source 1..75: mol_type = unassigned DNA; note = methanogen bacteria
tcacaaaaggaaattatcatattcatttttgactattttaagaagctttttattattggatggaattggattgtt

SEQ ID NO: 33931 - DNA, 66 bp, unidentified
  source 1..66: mol_type = unassigned DNA; note = methanogen bacteria
gataccatatattttgcttcgtatagtaatttttacgggttaggtaatataagtttatcatcaatg

SEQ ID NO: 33932 - DNA, 45 bp, unidentified
  source 1..45: mol_type = unassigned DNA; note = methanogen bacteria
acttcttatggtagttatgggcttagtaatttaaatatatcttca

SEQ ID NO: 33933 - DNA, 90 bp, unidentified
  source 1..90: mol_type = unassigned DNA; note = methanogen bacteria
ggttacaaatctggcggtattgtacctattttaatgcctggaatggatgcttcctggtttagtagcaattctgcatacccactacctttc

SEQ ID NO: 33934 - DNA, 90 bp, unidentified
  source 1..90: mol_type = unassigned DNA; note = methanogen bacteria
ggttataaggccggtggagttgtacctattttaatgcctggaatggatacttcatggtttgcggcaaacgcagcatatccattgcctttc

SEQ ID NO: 33935 - DNA, 90 bp, unidentified
  source 1..90: mol_type = unassigned DNA; note = methanogen bacteria
ggttataaggcaggtggggttgtaccaatcttaatgcctggaatggatacttcatggtttgcatcaaatgcggcttatcctcttcctttc

SEQ ID NO: 33936 - DNA, 84 bp, unidentified
  source 1..84: mol_type = unassigned DNA; note = methanogen bacteria
atgtttgatttggtgtatagtaccgtatcttttgcttcatatggcaatgcttttggacttagtaatgtagcgcttagttcattt

SEQ ID NO: 33937 - DNA, 90 bp, unidentified
  source 1..90: mol_type = unassigned DNA; note = methanogen bacteria
ggttataggcctggcggagttgtacctattttaatgcctggaatggacacttcatggtttgcagcaaatgcggcatatccattacctttt

SEQ ID NO: 33938 - DNA, 300 bp, unidentified
  source 1..300: mol_type = unassigned DNA; note = methanogen bacteria
cttcttggattacctatggatactttttcagaagttccattagccaattcatctgtagtttcagatttaatgaatcctgaaccatcatcacttaatgaagtaggaatagatgatagttcatattcaactgaaaccacatattacacgggttctgcttctaaatcaaaatcatcatcttcaaataatgaagaaaaatatgaatctgaatctactaattctggtagttctagtgattctggttctggtagttctagtggatctggttctggtagttctagtggatctggttctggtagttct

SEQ ID NO: 33939 - DNA, 294 bp, unidentified
  source 1..294: mol_type = unassigned DNA; note = methanogen bacteria
caagatgataccgaaggaaacatccctggagtagacatggctgccttatggagtcttaatggtggtttccattggatatatcctggaagttcatttgatgagcaggtcttgattattattaatgatcaagccgccgaacatatttttggtgcagatttattggaaaatattcgccagcatgactgggttgaaggcaattctcgtgctgatgctgtgacaatgagtatcacaacagttaatccattgccgattattccagatattttaatgggcaatattagatttcatattatt

SEQ ID NO: 33940 - DNA, 90 bp, unidentified
  source 1..90: mol_type = unassigned DNA; note = methanogen bacteria
ggttataaggcaggaggtattgtgcctattttgatgccggatatgaacactacctggttcgcatcaaatgctgcttatccattgcctttt

SEQ ID NO: 33941 - DNA, 66 bp, unidentified
  source 1..66: mol_type = unassigned DNA; note = methanogen bacteria
aataccatattctttgcttcatacagcaatatttatgggcttagcaatattgcgctcgccccgttt

SEQ ID NO: 33942 - DNA, 42 bp, unidentified
  source 1..42: mol_type = unassigned DNA; note = methanogen bacteria
ttgccaaaagccggaaaattgattataggaaagtattccaca

SEQ ID NO: 33943 - DNA, 39 bp, unidentified
  source 1..39: mol_type = unassigned DNA; note = methanogen bacteria
ttacctaacaatatgccaccatttgtacaggactatcct

SEQ ID NO: 33944 - DNA, 72 bp, unidentified
  source 1..72: mol_type = unassigned DNA; note = methanogen bacteria
tacaataccttattctttgcttcatacagtaatgtttttggactgggcaatgtaacactcggttcatttgat

SEQ ID NO: 33945 - DNA, 30 bp, unidentified
  source 1..30: mol_type = unassigned DNA; note = methanogen bacteria
cctttttttacaaaaagccttcctgaagta

SEQ ID NO: 33946 - DNA, 39 bp, unidentified
  source 1..39: mol_type = unassigned DNA; note = methanogen bacteria
ggaacttcctatagaaatctgatttttatgaattattcc

SEQ ID NO: 33947 - DNA, 36 bp, unidentified
  source 1..36: mol_type = unassigned DNA; note = methanogen bacteria
cataataaaaacatattattttcaaattttctagat

SEQ ID NO: 33948 - DNA, 36 bp, unidentified
  source 1..36: mol_type = unassigned DNA; note = methanogen bacteria
cctcacaggcacaacatgattttcatagattatcaa

SEQ ID NO: 33949 - DNA, 42 bp, unidentified
  source 1..42: mol_type = unassigned DNA; note = methanogen bacteria
tcctatggtaattattttggactgagcaatataacaattggt

SEQ ID NO: 33950 - DNA, 39 bp, unidentified
  source 1..39: mol_type = unassigned DNA; note = methanogen bacteria
cccgtcgagtacatcgagggccacgagcctccgacggag

SEQ ID NO: 33951 - DNA, 54 bp, unidentified
  source 1..54: mol_type = unassigned DNA; note = methanogen bacteria
atattttttgcttcatacagcaatttttatgggctcggtaatataacactcggt

SEQ ID NO: 33952 - DNA, 39 bp, unidentified
  source 1..39: mol_type = unassigned DNA; note = methanogen bacteria
gatagctttcatgccaaaaatttaattttcacagattat

SEQ ID NO: 33953 - DNA, 222 bp, unidentified
  source 1..222: mol_type = unassigned DNA; note = methanogen bacteria
tcatggaatatgcaaagcatagttttcaatgatgatttaactcaagagcaaaggcaggaaatgatgcaggatatgcaacaggtcactgaattggatcaaggtcaggaattaaatgaaacccccgatgtaagcaatagttctggtaagggatataccgagatgggaaaggtttatgaggacccatccaccggcaagatgatcatgattagaaatcaatcttca

SEQ ID NO: 33954 - DNA, 39 bp, unidentified
  source 1..39: mol_type = unassigned DNA; note = methanogen bacteria
gttcctacaattgctcaagaatttggaatgaataacctt

SEQ ID NO: 33955 - DNA, 63 bp, unidentified
  source 1..63: mol_type = unassigned DNA; note = methanogen bacteria
atggctttaaatattcctggtggagaatttttaactggctctcttgatgtaatttcacaaagt

SEQ ID NO: 33956 - DNA, 30 bp, unidentified
  source 1..30: mol_type = unassigned DNA; note = methanogen bacteria
ccgatttttacggataacctcccgcatatc

SEQ ID NO: 33957 - DNA, 36 bp, unidentified
  source 1..36: mol_type = unassigned DNA; note = methanogen bacteria
ataccgcattccacagcattgattattgaggattat

SEQ ID NO: 33958 - DNA, 36 bp, unidentified
  source 1..36: mol_type = unassigned DNA; note = methanogen bacteria
cctcacaggccaaacatgattttcatagattacgag

SEQ ID NO: 33959 - DNA, 39 bp, unidentified
  source 1..39: mol_type = unassigned DNA; note = methanogen bacteria
ctgccaaactcacaaagtctgattataggaaattaccct

SEQ ID NO: 33960 - DNA, 36 bp, unidentified
  source 1..36: mol_type = unassigned DNA; note = methanogen bacteria
atgccaaacacaccgaacatactcttcgacaatttc

SEQ ID NO: 33961 - DNA, 33 bp, unidentified
  source 1..33: mol_type = unassigned DNA; note = methanogen bacteria
gttgcgccgacaataggagtcagctcacttaac

SEQ ID NO: 33962 - DNA, 57 bp, unidentified
  source 1..57: mol_type = unassigned DNA; note = methanogen bacteria
ccgaacattgcaggagcattgtcaaaaaccactagtccaattacaatgggttctcct

SEQ ID NO: 33963 - DNA, 39 bp, unidentified
  source 1..39: mol_type = unassigned DNA; note = methanogen bacteria
cctaagcatgaaagcgttctaataacaaatgttccgaca

SEQ ID NO: 33964 - DNA, 39 bp, unidentified
  source 1..39: mol_type = unassigned DNA; note = methanogen bacteria
cctcaaattgcgcaatattttaatgtagatatcacacag

SEQ ID NO: 33965 - DNA, 33 bp, unidentified
  source 1..33: mol_type = unassigned DNA; note = methanogen bacteria
ccgaatgttccaaatccaatgtttgaaaattac

SEQ ID NO: 33966 - DNA, 33 bp, unidentified
  source 1..33: mol_type = unassigned DNA; note = methanogen bacteria
cctagaaattcaaatatcctaattaacgactat

SEQ ID NO: 33967 - DNA, 36 bp, unidentified
  source 1..36: mol_type = unassigned DNA; note = methanogen bacteria
cctcataacaagaatatacttgttaatgactatcca

SEQ ID NO: 33968 - DNA, 33 bp, unidentified; identical to SEQ ID NO: 33965
  source 1..33: mol_type = unassigned DNA; note = methanogen bacteria

SEQ ID NO: 33969 - DNA, 39 bp, unidentified
  source 1..39: mol_type = unassigned DNA; note = methanogen bacteria
cccgtggagtacatcgacgggcacgaacccccgagcgaa

SEQ ID NO: 33970 - DNA, 36 bp, unidentified
  source 1..36: mol_type = unassigned DNA; note = methanogen bacteria
ttaccgaatgtacacactccaacaataggaaattat

SEQ ID NO: 33971 - DNA, 33 bp, unidentified
  source 1..33: mol_type = unassigned DNA; note = methanogen bacteria
ctaggtttcccgagcgtgatttttgaaaattac

SEQ ID NO: 33972 - DNA, 60 bp, unidentified
  source 1..60: mol_type = unassigned DNA; note = methanogen bacteria
tcctcgagcagcgccgatccgctcgcctacaggatcctggagaagttccgcgatgtcagg

SEQ ID NO: 33973 - DNA, 36 bp, unidentified
  source 1..36: mol_type = unassigned DNA; note = methanogen bacteria
ctaaactttagaaatgattttatgtcagattaccct

SEQ ID NO: 33974 - DNA, 114 bp, unidentified
  source 1..114: mol_type = unassigned DNA; note = methanogen bacteria
ttagaaccaccatgtccttggaaatctaattttaatattgaatgtgcaggatgtggtggaacaagaatgataaaatcgttgataaacctagatttttatcaggcatttcgtttt

SEQ ID NO: 33975 - DNA, 33 bp, unidentified
  source 1..33: mol_type = unassigned DNA; note = methanogen bacteria
ccaggttttgattttttaaaatcaactaagtta

SEQ ID NO: 33976 - DNA, 90 bp, unidentified
  source 1..90: mol_type = unassigned DNA; note = methanogen bacteria
ggatataaatcggatggtgttgtaccaatatttttacctggaatggttaaagatgtctttgtacaaaattcagcatatccattacctgca

SEQ ID NO: 33977 - DNA, 33 bp, unidentified
  source 1..33: mol_type = unassigned DNA; note = methanogen bacteria
cctcaaaacaaagacatattagtcgaaaattat

SEQ ID NO: 33978 - DNA, 30 bp, unidentified; identical to SEQ ID NO: 33758
  source 1..30: mol_type = unassigned DNA; note = methanogen bacteria

SEQ ID NO: 33979 - DNA, 81 bp, unidentified
  source 1..81: mol_type = unassigned DNA; note = methanogen bacteria
attatacagtgtagaccaggcagactcatatattttaatttgggattatgtgaatccttggtaaaagatgttttacttaga

SEQ ID NO: 33980 - DNA, 33 bp, unidentified
  source 1..33: mol_type = unassigned DNA; note = methanogen bacteria
ccaaatgccggaaaattaataataggagattat

SEQ ID NO: 33981 - DNA, 39 bp, unidentified
  source 1..39: mol_type = unassigned DNA; note = methanogen bacteria
ctgccaaatgcacataattcacttgttgccaattatccg

SEQ ID NO: 33982 - DNA, 69 bp, unidentified
  source 1..69: mol_type = unassigned DNA; note = methanogen bacteria
tcgacttttggaacgactccaatcagttcaatatcatattctcttgctttgtgcaccaatatggacatt

SEQ ID NO: 33983 - DNA, 30 bp, unidentified
  source 1..30: mol_type = unassigned DNA; note = methanogen bacteria
gtctattcactgaacattcccgataattta

SEQ ID NO: 33984 - DNA, 36 bp, unidentified
  source 1..36: mol_type = unassigned DNA; note = methanogen bacteria
atacccaatgcaagattaattttcccttattatcac

SEQ ID NO: 33985 - DNA, 93 bp, unidentified
  source 1..93: mol_type = unassigned DNA; note = methanogen bacteria
ttcggcacatcatataatctttttgattatttctactttgttgtagtgacattggcaaccgtgggttacggtgatatcattcctttaacattt

SEQ ID NO: 33986 - DNA, 33 bp, unidentified
  source 1..33: mol_type = unassigned DNA; note = methanogen bacteria
tccccttcgagatttttcattcccaattttccg

SEQ ID NO: 33987 - DNA, 294 bp, unidentified
  source 1..294: mol_type = unassigned DNA; note = methanogen bacteria
gcggcgttctgcgcggccgagatggacgccgaggaggggacgggagaacgcccctcgttcgattggcccggggacgggctcagccccgagatgacggcgtcggcgctccgcggatgcgccgagacccagatggagcgcggcggatggaacggcgtcaggatcgacggcccggacgggacctgcttcgagctcgggagggagagcggggacgtgagcgtgagcagggaggtgctcagggtctgcccgtccgagaaggagatagtcccggcggtctacgaggcattcatatggttc

SEQ ID NO: 33988 - DNA, 33 bp, unidentified
  source 1..33: mol_type = unassigned DNA; note = methanogen bacteria
tttcccgaaagatttttaattcctaactatcct

SEQ ID NO: 33989 - DNA, 51 bp, unidentified
  source 1..51: mol_type = unassigned DNA; note = methanogen bacteria
cagcccagggtggaggaattggtcggtgacacgaccttcatgtggttctcc

SEQ ID NO: 33990 - DNA, 36 bp, unidentified
  source 1..36: mol_type = unassigned DNA; note = methanogen bacteria
ttgggaagtgttattattataggtccttttcgtaca

SEQ ID NO: 33991 - DNA, 54 bp, unidentified
  source 1..54: mol_type = unassigned DNA; note = methanogen bacteria
gctcctagattaagtgaccctcttgcaggattctttggttttggtagaggttta

SEQ ID NO: 33992 - DNA, 57 bp, unidentified
  source 1..57: mol_type = unassigned DNA; note = methanogen bacteria
aattgtccaaacaatgcaattcgtgtacatgacaatgttccattgttctgcatgcac

SEQ ID NO: 33993 - DNA, 297 bp, unidentified
  source 1..297: mol_type = unassigned DNA; note = methanogen bacteria
ggatgcattggagactcttccgatgattccagttctgaagctacagtatctgaggatactagttctgaagctgcagtatctgaagacactgatgattccgagagtgatgatgaatcatatcaaagttccagttcttcagacaggagcaatccctactgggcaagcactattagagacaagttccacagatccagctgcgaatgggctcaggaaatagatgatgtcaatcttgtaacctatccgaatagagatgcagctattgctgatggaaaagttccttgtaaagtttgcgagcct

SEQ ID NO: 33994 - DNA, 90 bp, unidentified
  source 1..90: mol_type = unassigned DNA; note = methanogen bacteria
ggttataaatccggtggtattgttccaattttggctcctaatatggatgtaagttggtttacagcaaatgcatcatatccactcccatat

SEQ ID NO: 33995 - DNA, 186 bp, unidentified
  source 1..186: mol_type = unassigned DNA; note = methanogen bacteria
gacaacgcatgcgtgaacgtacttagacgcgggatggggttcgacatcctcggcacgtcatcaattgccggaattaccgaggcggaagccgaagtgcgaaaaaactgtaactggagtgtgagttcatttccacacacttcgttacagaaccaaacatccttttacccgctccgacatcatctcccg

SEQ ID NO: 33996 - DNA, 30 bp, unidentified
  source 1..30: mol_type = unassigned DNA; note = methanogen bacteria
ttaagacatcagccgataacaaatgatgtt

SEQ ID NO: 33997 - DNA, 33 bp, unidentified
  source 1..33: mol_type = unassigned DNA; note = methanogen bacteria
tttcttgaaagttggggaatgcaaggaaactca

SEQ ID NO: 33998 - DNA, 294 bp, unidentified
  source 1..294: mol_type = unassigned DNA; note = methanogen bacteria
actttcggtgctgcatctgttactggtgatgacactggcacaggcactggaaagccaaatatgactgacactactggagatgcagagtattatttgctgcctgttgcaggacttcagaaagttgttgtaaatggtgtagatatgtcttctgagataagaggaaatgctgtcggtgttcatgcaagagtgctggatgagggtgatgttcagattaaaacgagtgaacatgcaatatatattcaagcaccttctggaatgactcctcaagaggcagttcatatgccagagtgattt

SEQ ID NO: 33999 - DNA, 36 bp, unidentified
  source 1..36: mol_type = unassigned DNA; note = methanogen bacteria
cattatattgatatatccacttatttaacacgcata

SEQ ID NO: 34000 - DNA, 45 bp, unidentified
  source 1..45: mol_type = unassigned DNA; note = methanogen bacteria
attccgaacaatacaattacgataataacaaaccacgcttcacat

SEQ ID NO: 34001 - DNA, 81 bp, unidentified
  source 1..81: mol_type = unassigned DNA; note = methanogen bacteria
gttacagtaggaagcagtttaaccggagttttaggaggacttacaggatttacaatttctggaatagctagtttatttgaa

SEQ ID NO: 34002 - DNA, 99 bp, unidentified
  source 1..99: mol_type = unassigned DNA; note = methanogen bacteria
tatggatttaaggaattagtcaatccaggaatcagcttaatttataatgctatcggaactaaattggctccaaacatggttacattggttgtattcgat

SEQ ID NO: 34003 - DNA, 33 bp, unidentified
  source 1..33: mol_type = unassigned DNA; note = methanogen bacteria
gacctcgaaggcgacggcgccatggactccctc

SEQ ID NO: 34004 - DNA, 33 bp, unidentified
  source 1..33: mol_type = unassigned DNA; note = methanogen bacteria
gttaaaccgagcggtaattatttaaaatatatt

SEQ ID NO: 34005 - DNA, 291 bp, unidentified
  source 1..291: mol_type = unassigned DNA; note = methanogen bacteria
tatttaaaaacaacagctgcaaaaccgactgaaataagaataaccagcaatgaaactttaaataaaggagacagtctgacgattcaattaactgatttgaataaaacagcaatttctgaaaatgtcagtattgtaataaaaaatactgatggtgcggttgttgttactgggactgtcagtaccaattctaaaggtctagccaatttcgatttggatttggaaaaaggagaatatacagttaatgttacttttaatggaaacaataatttcacaggaagtaatgcaacacaa

SEQ ID NO: 34006 - DNA, 75 bp, unidentified
  source 1..75: mol_type = unassigned DNA; note = methanogen bacteria
gccacagttggcggaagctttatgggagttttaggtggacttagcggatttacaatttccggagtggccagctta

SEQ ID NO: 34007 - DNA, 51 bp, unidentified
  source 1..51: mol_type = unassigned DNA; note = methanogen bacteria
gactatgcgtttagctttttttccattactggaatggaaaacgaaatattt

SEQ ID NO: 34008 - DNA, 78 bp, unidentified
  source 1..78: mol_type = unassigned DNA; note = methanogen bacteria
attacaataggcggaacctcacttatgggcctacttggaggtcttgtaggatttacttttaccggagtcggcagcctt

SEQ ID NO: 34009 - DNA, 75 bp, unidentified
  source 1..75: mol_type = unassigned DNA; note = methanogen bacteria
actgcaactgtaggaggcagtcttgcaggaatctttggaggcctgaccggatttacattatccggattcagcagt

SEQ ID NO: 34010 - DNA, 87 bp, unidentified
  source 1..87: mol_type = unassigned DNA; note = methanogen bacteria
atgtttgatttagttcatcttaccgtgaactcactggctactgctaatgtttacggtcttgctaatataacaattagttattttgat

SEQ ID NO: 34011 - DNA, 81 bp, unidentified
  source 1..81: mol_type = unassigned DNA; note = methanogen bacteria
tctgcaacattaggcggaagcttattcggactgtttggaggcattaccggatttacaacctcaggaatttccagtttaggc

SEQ ID NO: 34012 - DNA, 54 bp, unidentified
  source 1..54: mol_type = unassigned DNA; note = methanogen bacteria
atccagcccatcgtggaggacgaggtcggcgatacgaccttcatgacgctgtcg

SEQ ID NO: 34013 - DNA, 33 bp, unidentified
  source 1..33: mol_type = unassigned DNA; note = methanogen bacteria
ggattaggagcagaagttagtcaatttgatgac

SEQ ID NO: 34014 - DNA, 45 bp, unidentified
  source 1..45: mol_type = unassigned DNA; note = methanogen bacteria
ttattttatataaatcagaatcaaacataccttttagcctttgat

SEQ ID NO: 34015 - DNA, 75 bp, unidentified
  source 1..75: mol_type = unassigned DNA; note = methanogen bacteria
gttactgtaggtggaaccgcattgatgggacctcttggaggacttagcggattcactgtatctggagtttcaagc

SEQ ID NO: 34016 - DNA, 297 bp, unidentified
  source 1..297: mol_type = unassigned DNA; note = methanogen bacteria
tttatgggctccaacaataatcaagaagatactgttgttgccaatgatacctcttctgatgtctctgatgtaagtcagggcaaagtttctgaagtaaagaatgcaactgtaagttcaaattccaatgagcctaagaaatatgaggattggcaaaaggattatgatactggcatggttgatgaggatggaaaccctatttaccgttctgtagtgtctacatctggaggccaaaatgatcctgaagtatatgaatcatattggtcagaaaatggtccaattaatgaaacgaaaataggt

SEQ ID NO: 34017 - DNA, 78 bp, unidentified
  source 1..78: mol_type = unassigned DNA; note = methanogen bacteria
gtaactgttggaggaagtgcattaatgggtcctctcggaggtcttgctggatttacagtctctggaatcacaggtttt

SEQ ID NO: 34018 - DNA, 84 bp, unidentified
  source 1..84: mol_type = unassigned DNA; note = methanogen bacteria
tctgcaacattaggcggaagcttattcggactcttcggaggcattaccggatttacaatcgcaggaatttccagtttatttgca

SEQ ID NO: 34019 - DNA, 81 bp, unidentified
  source 1..81: mol_type = unassigned DNA; note = methanogen bacteria
gtaaccgttggaggaacagcattgatgggtcctcttggagggcttaccggatttaccatatctggaatttcaagcctattt

SEQ ID NO: 34020 - DNA, 36 bp, unidentified
  source 1..36: mol_type = unassigned DNA; note = methanogen bacteria
atgatagaaatttattggttacagcgtttgggtaac

SEQ ID NO: 34021 - DNA, 165 bp, unidentified
  source 1..165: mol_type = unassigned DNA; note = methanogen bacteria
ccgacgcagcatgacattatggcgatatatggtcttggtggtactattgattatataaagagcaatgacaaggcaaaggagttgccagacaaggtagtagatgctttgacacgttacgttgatagtattgagaaggaaaagggtgagaataatgacaccaatcac

SEQ ID NO: 34022 - DNA, 33 bp, unidentified
  source 1..33: mol_type = unassigned DNA; note = methanogen bacteria
tatggtcttgctaatataacacttggttatttc

SEQ ID NO: 34023 - DNA, 45 bp, unidentified
  source 1..45: mol_type = unassigned DNA; note = methanogen bacteria
gtatattatacgtatggtggtttatatgctatagcagttgtacag

SEQ ID NO: 34024 - DNA, 267 bp, unidentified
  source 1..267: mol_type = unassigned DNA; note = methanogen bacteria
gccgggacctctcccgagaaactcgacggccagaagacattctatctgaacggcaccgagatgaccgccgacgcgtattccttccgcgggatggtctacgtggtcaccgacgacacccagtccgccgagaccctgggcctgtacggtgtgatccccggtcagaccgagtacgtctgcaacgtgtggatcgacaccggtgatgtgttctacgaggtcacttccgttgtcaccgccaaggacgtcaccgacaacttcaacacccggcgg

SEQ ID NO: 34025 - DNA, 300 bp, unidentified
  source 1..300: mol_type = unassigned DNA; note = methanogen bacteria
gttttgaattcaggttcaaataatgctcctgcggtcaacaattcaacgacaaatgcttcacaaaacatttcagttgagcaggttaatactgaagaggttgcaagcagtgattcatcaggcagtagcagaagcagcactcatgtaatcattggagaagatggatgttattatcgtgttgatgacagcggcaatatcctggagagtttgggacccagtaaaaagtattatcctaatggttatggtggtaaagaccctgttagctatcctaatgcggagcctgcaaacagatatataaagaaa

SEQ ID NO: 34026 - DNA, 213 bp, unidentified
  source 1..213: mol_type = unassigned DNA; note = methanogen bacteria
tcatggaatatgcaaagcatagttttcaatgatgatttaactcaagagcaaaggcaggaaatgatgcaggatatgcaacaggtcactgaattggaccaaggtcaggaattaaatgaaactcccgatgtaagcaatagctctggtaagggatataccgagatgggaaaggtgtatcgggattctgacacgggcaagctcatcatggttgaggga

SEQ ID NO: 34027 - DNA, 300 bp, unidentified
  source 1..300: mol_type = unassigned DNA; note = methanogen bacteria
gttttcaacaataatcactcctctaataattctccggctaatgccaacaattcagttaacagcaatatttcatctgaaagtcatgttgaacaggtaaatacggaagatgcagaaagtcagagcaacactaatagtaatacccatctggttatgggtgaagacggatactattatacatgcgatgatgacggaaatattctggagagcgtagggcctagtaaaaagtattatcctgatgacccttcagctgttgaccatcctgaagccgaatcatactatccgtatatgcagcatcagctt

SEQ ID NO: 34028 - DNA, 90 bp, unidentified
  source 1..90: mol_type = unassigned DNA; note = methanogen bacteria
ggttataaggccgggggagtagttcctattttcatgcctggaatgaatgcgtcctggtttgctgcaaactctgcttatccgcttccacaa

SEQ ID NO: 34029 - DNA, 75 bp, unidentified
  source 1..75: mol_type = unassigned DNA; note = methanogen bacteria
gttgcaacatttggaggaagttttgcaggcctctttggaggattgaccggatttaccatttccggaattaccagc

SEQ ID NO: 34030 - DNA, 294 bp, unidentified
  source 1..294: mol_type = unassigned DNA; note = methanogen bacteria
ttaattctagacaataacagctccctaccagaccctaattccaaccaaagtgtcaatataacaaacaacactcctgtaaatcaggcacctactttaaaggtagttgaaaaaaatacaaacaataatacaaatatttcaaacaacactacaaatcctgatgcaggtactgtacttgagattaaagatctaggtaatggtgaaatcagatataaaatagctgatggaaacggcggatatacctataagactgtaaaggaaagcaataacaacaatcaaaacaatagtaaaaataaa

SEQ ID NO: 34031 - DNA, 42 bp, unidentified
  source 1..42: mol_type = unassigned DNA; note = methanogen bacteria
aatgcagtaggtttgccaatgaattttatcgaatacatgtta

SEQ ID NO: 34032 - DNA, 300 bp, unidentified
  source 1..300: mol_type = unassigned DNA; note = methanogen bacteria
ttccagttcaacaataatgtttcaacattcattattataaacgaaactcaggtggctgaaaacggcacttttgccggtatgctgatggatgcttacagttatggcgtttcaaatcagacagtttgtattcaaacacctgatcataatatcattaatgccactactgatgaaaagggtgaatttaaggtagtaaatgccgaatatggttctggtgatgtgcactgttacagtaatttcacatttgccggaaatggaaaatatcagccgtgcatttatgaagggaatgtttcagtaaccaga

SEQ ID NO: 34033 - DNA, 84 bp, unidentified
  source 1..84: mol_type = unassigned DNA; note = methanogen bacteria
actgctacagtaggggggagtatggccggaattgcaggaggacttaccggatttacagtatctggagctgtaagtctaattgac

SEQ ID NO: 34034 - DNA, 72 bp, unidentified
  source 1..72: mol_type = unassigned DNA; note = methanogen bacteria
gcaacatttggcggcagctttgccggcctcttcggaggtttgaccggatttacaatctccggagttacaagt

SEQ ID NO: 34035 - DNA, 300 bp, unidentified
  source 1..300: mol_type = unassigned DNA; note = methanogen bacteria
tatcagtttaataataatgtgcctacctttatggttattaatgaaaccgaagtccatgaaaactcttcttttgcaggtgttttaatggatgcctacagttatggtgttgcaaatcaaacagttacctatcaaactccaaatcatgaaattaaaaacgttactactaatgaaaatggggaatttaaggtggataatgtccaatcaggttcgggtgatgcaaattattacagcagtttcacatttgctggcaatggtaaatatcaggcttgttcttatgaagggaatgtttcagtaatcaaa

SEQ ID NO: 34036 - DNA, 285 bp, unidentified
  source 1..285: mol_type = unassigned DNA; note = methanogen bacteria
actttcggagctgcagctactggtgacgatacaggaaccggtactggaaaaccgaatatgactgacactactggagatgcagagtattacctgatacctgttgcaggattgcagaaggttactgtaaatggtattgacatgtcctctgagataagaggaaatgctattggggtccatgcaagagtgcttgaccaaggtgatgttcagattaaaacgagtgaacatgccataatcattaagacacctgttggaatgaacccttatgaagcagttcataaaccagag

SEQ ID NO: 34037 - DNA, 81 bp, unidentified
  source 1..81: mol_type = unassigned DNA; note = methanogen bacteria
gttactataggtggcagtacaaccggaattctgggaggccttacaggatttactttttccggagtcgttagtttaatcgaa

SEQ ID NO: 34038 - DNA, 264 bp, unidentified
  source 1..264: mol_type = unassigned DNA; note = methanogen bacteria
ggagaatccatgggacttgaagttaatgttaatgaattttatgacgatacaaatctggctgacgggtggatttattccagttatatcaatgacctgtttctatatcaggttgactgtttaggtgcaaccaaccagatggaaagacagctggtcgtggattcgattgcagatttttcaaatgaccccgaaataacactgcattttgtagaaaacaatacaatatccaaattttatttggttgaaggaaaaacctttggacatcaa

SEQ ID NO: 34039 - DNA, 69 bp, unidentified
  source 1..69: mol_type = unassigned DNA; note = methanogen bacteria
acatttggtggaagttacatgggactgtttggaggtcttaacggattcacagtgtccggaacaataagt

SEQ ID NO: 34040 - DNA, 297 bp, unidentified
  source 1..297: mol_type = unassigned DNA; note = methanogen bacteria
atctttttacaagacagaaataacttagaaaatcaaagcggaacattaaccataaaaaataaaaccgtcagttatgacaactgtggaaaatgtgtaaaagtaatagacggcaatacaatacaagtctatggaataggagcagtacaattatcacaaatagatttaaaagacagcgacagtgctaaaaaatttgttgaagaaaaatgtcttggaaaaacagtatatttaaacattgataacgaaacacctaaaggctattgtatataccgattcagaagatatcaatcaggaattact

SEQ ID NO: 34041 - DNA, 69 bp, unidentified
  source 1..69: mol_type = unassigned DNA; note = methanogen bacteria
acaaccacaatatatgatggaataaacaggatgatcagccatacgggtacaatcgatttcaacagcctt

SEQ ID NO: 34042 - DNA, 39 bp, unidentified
  source 1..39: mol_type = unassigned DNA; note = methanogen bacteria
aggtacagctgcgtcggcgccgtcggtatccccggatgg

SEQ ID NO: 34043 - DNA, 72 bp, unidentified
  source 1..72: mol_type = unassigned DNA; note = methanogen bacteria
tacttcattcaggcttataaaactagcgtgtcaatgggcctggatatgatggacttgtcagttgtctcacca

SEQ ID NO: 34044 - DNA, 72 bp, unidentified
  source 1..72: mol_type = unassigned DNA; note = methanogen bacteria
gcaacatttggaggaagtcttgcaggaccgtttggaggattgaccggatttaccatttccggaattaccggc

SEQ ID NO: 34045 - DNA, 72 bp, unidentified
  source 1..72: mol_type = unassigned DNA; note = methanogen bacteria
acaacaattggtggaagctttatgggagtatttggaggccttactggatttacaacatccggcataataagt

SEQ ID NO: 34046 - DNA, 75 bp, unidentified
  source 1..75: mol_type = unassigned DNA; note = methanogen bacteria
acaacaattggtggaagcttcatgggagcatttggaggccttactggatttacaacatccggaatagtaagtatt

SEQ ID NO: 34047 - DNA, 84 bp, unidentified
  source 1..84: mol_type = unassigned DNA; note = methanogen bacteria
aatattaaatttttaggattaagcttacagcctattttaggaggatttaatggttttacagtgtctggaaataaaagttactta

SEQ ID NO: 34048 - DNA, 72 bp, unidentified
  source 1..72: mol_type = unassigned DNA; note = methanogen bacteria
acaacaattggcggaagctttatgggggcatttggaggccttactggatttacaacatcaggcatagtaagt

SEQ ID NO: 34049 - DNA, 282 bp, unidentified
  source 1..282: mol_type = unassigned DNA; note = methanogen bacteria
atttttaataataatgcatctacaaataacgttaataattcaatcagcaataatacttcttccaatattaatgttgaaaagataaatactgaagaggttagcagccaaagtaatagtaatactcatttggttatagcggaagatggtcattattatacatgtgatgataatggaaagattttagaaaaattaggtcctagtaaaaagtattatcctaatgacccgtcagctgtggaatatcctgatgcagagtcttattacccatataagcaacgtcaactt

SEQ ID NO: 34050 - DNA, 39 bp, unidentified
  source 1..39: mol_type = unassigned DNA; note = methanogen bacteria
tcgaaggaggaaatatattctgaaacatatcttgatttg

SEQ ID NO: 34051 - DNA, 90 bp, unidentified
  source 1..90: mol_type = unassigned DNA; note = methanogen bacteria
ggatataaggcaggcggtgttgtacctatttacttgcctggcatgactgcagattggtttgcagcaaattccgcttatccgttgccacag

SEQ ID NO: 34052 - DNA, 48 bp, unidentified
  source 1..48: mol_type = unassigned DNA; note = methanogen bacteria
acacctattaaagacccaacatcagaattaatagctagaacatctcca

SEQ ID NO: 34053 - DNA, 72 bp, unidentified
  source 1..72: mol_type = unassigned DNA; note = methanogen bacteria
gcaactttcggtggaagcctatttggtattttcggcggtttgactggatttaccgtctcaggggtggctagc

SEQ ID NO: 34054 - DNA, 72 bp, unidentified
  source 1..72: mol_type = unassigned DNA; note = methanogen bacteria
gtaaccattggaggaagtattacaggcatattcggtggtttgaccggttttaccgtctcaggagttgcaagt

SEQ ID NO: 34055 - DNA, 60 bp, unidentified; identical to SEQ ID NO: 26055
  source 1..60: mol_type = unassigned DNA; note = methanogen bacteria

SEQ ID NO: 34056 - DNA, 72 bp, unidentified
  source 1..72: mol_type = unassigned DNA; note = methanogen bacteria
gcaaccttcggaggaagcattgccggaatctttggaggattggccggatttacaatatctggagttgcaagt

SEQ ID NO: 34057 - DNA, 72 bp, unidentified
  source 1..72: mol_type = unassigned DNA; note = methanogen bacteria
gcaacaattggaggaagctttgccggcatattcggcggtttgacaggttttaccgtctccggagctacaagt

SEQ ID NO: 34058 - DNA, 48 bp, unidentified
  source 1..48: mol_type = unassigned DNA; note = methanogen bacteria
atgtacatgtcatacggaccaatatacttcacatacatgttatactca

SEQ ID NO: 34059 - DNA, 60 bp, unidentified
  source 1..60: mol_type = unassigned DNA; note = methanogen bacteria
aatccagcatacaccattcctgagtttacaacacaaggattatatttaactggcaaaagc

SEQ ID NO: 34060 - DNA, 93 bp, unidentified
  source 1..93: mol_type = unassigned DNA; note = methanogen bacteria
ttccacggccaacctcagcttgcagtaatttacggtgcgacaccagcagtggcagttaatgaaaggcaacaaaattactgggttctattggtt

SEQ ID NO: 34061 - DNA, 297 bp, unidentified
  source 1..297: mol_type = unassigned DNA; note = methanogen bacteria
tatcaattcaacaatgatgtgtctacattcataattattaatgaaactgaagttcaaaataacacttctttttcaggacttttgatggattcttatagttatggtgttgcaaaccaaacaatttcttatcaaactcctaatcatgaaattataaatgttactacagataataatggtgaatttaatgtatctgcagttaaatccggttctgatgagggtaattgttacagtaattttacttttgctggtaatggtaaatatcaggcttgttcttatgagggaaatgtttcagtgaaa

SEQ ID NO: 34062 - DNA, 72 bp, unidentified
  source 1..72: mol_type = unassigned DNA; note = methanogen bacteria
gcaacattcggaggaggcttctttggactaactggaggtctaaccggatttacattatctggatttacaagt

SEQ ID NO: 34063 - DNA, 81 bp, unidentified
  source 1..81: mol_type = unassigned DNA; note = methanogen bacteria
gcaacttttggaggaagcttcctcggcgcctttggaggattgacaggatttacaatttcaggaattgcaagcctattcaca

SEQ ID NO: 34064 - DNA, 60 bp, unidentified
  source 1..60: mol_type = unassigned DNA; note = methanogen bacteria
gccacatttggaggtgcatttgctggaatctttggaggattgacaggatttgcaagcata

SEQ ID NO: 34065 - DNA, 81 bp, unidentified
  source 1..81: mol_type = unassigned DNA; note = methanogen bacteria
ataacatttggtggaagcctatatggaatatttggaggactgaccggatttacagtatccggcatttcaagcgtattcatc

SEQ ID NO: 34066 - DNA, 51 bp, unidentified
  source 1..51: mol_type = unassigned DNA; note = methanogen bacteria
aatgctgtaaaccctggtgtttatggttttgccaatataaccataggttat

SEQ ID NO: 34067 - DNA, 78 bp, unidentified
  source 1..78: mol_type = unassigned DNA; note = methanogen bacteria
gtaacatttggtggaagttttaccggactgttcggaggccttaccggatttacggtatctggtgtttcaagcttattt

SEQ ID NO: 34068 - DNA, 279 bp, unidentified
  source 1..279: mol_type = unassigned DNA; note = methanogen bacteria
tatttaatatccccgcccagttttgcaggttctgatgataaggtaacaattgatattggccaggatggatatatggtggctacaataaatgaatcattacagtataaaagtgaaaaaattccggatggtgaagttaataattcaaaaactataattaaatggaaagatgctcgaaatatcagttttgtagatgtaatgggtaaaaagtcttatgcaatcgtttcatgtttgccatatattgtcttcaatataatcctcaaaacaagatggtatatggaa

SEQ ID NO: 34069 - DNA, 51 bp, unidentified
  source 1..51: mol_type = unassigned DNA; note = methanogen bacteria
ccggatattactgttccccttgcaggattgttcggttttggtagaggtatc

SEQ ID NO: 34070 - DNA, 84 bp, unidentified
  source 1..84: mol_type = unassigned DNA; note = methanogen bacteria
tctgcaacagtcggaggaagtttcctcggattattcggaggacttaccggttttacagtatccggaatttcaagcctgtttgca

SEQ ID NO: 34071 - DNA, 54 bp, unidentified
  source 1..54: mol_type = unassigned DNA; note = methanogen bacteria
ttacaatactttttaaattcaggcaatttaataccatttttgggggattattat

SEQ ID NO: 34072 - DNA, 66 bp, unidentified
  source 1..66: mol_type = unassigned DNA; note = methanogen bacteria
tcaggattgggctcagcgccggtaagctcaataccttatgcgatgaatctgattgggaatattgaa

SEQ ID NO: 34073 - DNA, 57 bp, unidentified
  source 1..57: mol_type = unassigned DNA; note = methanogen bacteria
atgtatttcattttgtgggggtcctattcggagcattcacaagcttttccgtttcgc

SEQ ID NO: 34074 - DNA, 36 bp, unidentified
  source 1..36: mol_type = unassigned DNA; note = methanogen bacteria
ggaatcaatcttgcaggaacgctattgagtttaggt

SEQ ID NO: 34075 - DNA, 33 bp, unidentified
  source 1..33: mol_type = unassigned DNA; note = methanogen bacteria
ccgagacttttctcccctgagggggttgatgcc

SEQ ID NO: 34076 - DNA, 279 bp, unidentified
  source 1..279: mol_type = unassigned DNA; note = methanogen bacteria
acattaacaacaattgaatcaaataaaaatattgaaaatagtgtaagcagtaggttaacattggatcatgtggcaaatttgataagtcaggtaaatgcaaatggtgaaggatattcatattataagataacggttgaaaaaaacaaactcacaattcaatcttggaatagaaaaggcgaaaaattagtaatgcctttaaaaatcgattcgaaatatgaactgtatagtggaaatgattatttgataagtaaaaacgatgaaggaaaaattgtgatacga

SEQ ID NO: 34077 - DNA, 48 bp, unidentified
  source 1..48: mol_type = unassigned DNA; note = methanogen bacteria
gtcgttttgtctgacgggggaatgcccgccaccggcgtgttttttgcc

SEQ ID NO: 34078 - DNA, 90 bp, unidentified
  source 1..90: mol_type = unassigned DNA; note = methanogen bacteria
ggatttaaagcaggtggagtcgtgcctatcttcttgccaggcatgactgcagactggtttgcagcaaatgcagcttatcctttgcctcaa

SEQ ID NO: 34079 - DNA, 105 bp, unidentified
  source 1..105: mol_type = unassigned DNA; note = methanogen bacteria
ggagaatcagtaggccttgaagtaaatgttaatgatttttatcttaaaaatgcaagaataccacaacttctgcaagttgtggatgaattgcactattgggtgtac

SEQ ID NO: 34080 - DNA, 48 bp, unidentified
  source 1..48: mol_type = unassigned DNA; note = methanogen bacteria
attattgcttggggtatgaaaaattgttttggttttgaaaaattgctc

SEQ ID NO: 34081 - DNA, 90 bp, unidentified
  source 1..90: mol_type = unassigned DNA; note = methanogen bacteria
tccacaattttagatttatttagtttttcactgaattttccggaatttgacttggaggaactgctcttaaacattcccgaaacttatacc

SEQ ID NO: 34082 - DNA, 189 bp, unidentified
  source 1..189: mol_type = unassigned DNA; note = methanogen bacteria
gccgtatcggacgcggatgtggagataacctggagcgattcgcagttcagttactattcgacggacggttcgaccgtgactgtttcggcaaacggaacctggctctcgtctgaaataaccgtcccgtccaaggtatcgcatagctcggaatatactgtgaccgccataggcaatgctaaaaacagcagc

SEQ ID NO: 34083 - DNA, 285 bp, unidentified
  source 1..285: mol_type = unassigned DNA; note = methanogen bacteria
tttgtaacacccgaacaactaacaataaataaaatagacaatagtaaaatagataattatgtagaaatttccggaaccataagttcatatacaataacaaaatcaaatactaaaattataaaaataacagataacactggttctattaatgtggtaatatttccctctacagaaataaatatggaattaaatgaaggtgaatcaatacaattaacaggtaaagtgacctcttataatggtcaacttgaattaatattggatgatcctactaagattcatagaaat

SEQ ID NO: 34084 - DNA, 33 bp, unidentified
  source 1..33: mol_type = unassigned DNA; note = methanogen bacteria
tcccagcttattctcgatttaaatacttcatta

SEQ ID NO: 34085 - DNA, 39 bp, unidentified
  source 1..39: mol_type = unassigned DNA; note = methanogen bacteria
gaattgcagcagcaatcggaccaatgtttggagggtttg

SEQ ID NO: 34086 - DNA, 291 bp, unidentified
  source 1..291: mol_type = unassigned DNA; note = methanogen bacteria
tatttcggattgtcaaataataatactaatataaggaataattctgttaatgattccatggtgaataacactacaaacattacgaacaatactgttgattcattagctgataatagtgataaagggcttgtttattctcctcaaaaaggggaatatgttgatccgtcgggtcagtacgaaaaggatagccgtggaaatacagttcacacttatcagggcagtgatggagtaatatatgaagagtattatgatggtgatggtaatcctataagttctgaagaatattatata

SEQ ID NO: 34087 - DNA, 42 bp, unidentified
  source 1..42: mol_type = unassigned DNA; note = methanogen bacteria
ttaatgtatgtttcatatggaatgacatacgtaaactacgta

SEQ ID NO: 34088 - DNA, 288 bp, unidentified
  source 1..288: mol_type = unassigned DNA; note = methanogen bacteria
ggatatgtcaatcccgaaagattagacattaatcaaattgataagtcaaagattgataatcagatagaagtggatgctacaattgcttctgtcactcaaaccaaaaccaatacgaaaattgttaaattgtctgatgatacgggaaacatcactttggtaatctttccatcagttggatatgaggataatttaactaaaaaccagaaagttaaagtgattgcaaaagtatcacagtacaacaatgacatggaattgattttggaagaatctaaaaatttaatcatttcc

SEQ ID NO: 34089 - DNA, 66 bp, unidentified
  source 1..66: mol_type = unassigned DNA; note = methanogen bacteria
gcttctgctagagctgttgaaattcatacctttgatgttttttatgagggtatttttcaaatatac

SEQ ID NO: 34090 - DNA, 63 bp, unidentified
  source 1..63: mol_type = unassigned DNA; note = methanogen bacteria
atggtatcaacaattcctggaagtgaagtattaacatcaacattgaacatgatttcacagagc

SEQ ID NO: 34091 - DNA, 42 bp, unidentified
  source 1..42: mol_type = unassigned DNA; note = methanogen bacteria
gtgggcatagacaaagttattgaagctttaaagattgccaag

SEQ ID NO: 34092 - DNA, 183 bp, unidentified
  source 1..183: mol_type = unassigned DNA; note = methanogen bacteria
atggctcttagcggagagcctattgttggaaattcaactgaatcttatgaaaatgtcacagttgaaatgacatctaatatatccaatggttcaacagatcattatgtgaaggagcctcatgttgattttaacagtgcagaggatattaacaaatataatttaactaagaatgatttatcgtat

SEQ ID NO: 34093 - DNA, 291 bp, unidentified
  source 1..291: mol_type = unassigned DNA; note = methanogen bacteria
ttaattgtcgatgaaactcatcatcaaacagaaaacaataaaatcaataatacaactaccggtactataagtaataatagtacaaatataagtacaaatattactaataacacaactataagtgatataaacaatacaaatgatagtaatgttaatccaggagatattattcaaaaaaaagtattcacggttaaagaaaatgaaaaaggccaaaatgaaggtatggaacctggaacatatataatatattatacagcaaatgatggaccattaaaaatagaaaaaataaaa

SEQ ID NO: 34094 - DNA, 294 bp, unidentified
  source 1..294: mol_type = unassigned DNA; note = methanogen bacteria
gcatacagtgggatgaacatgcaaaagaatgtatccgacaatgcacaatccaattccacaaatacaggagaacttaaaaataacactactggaaataataataacactactgttggagacaattccgtattgaataaatctgatttgaacaaaacaaacaaaacatataaaatatatgacccgcagtctgatggatacgttactgtcgttggcgaaaaattcgataatggtgttaacagatggtacacttatgataaagacggtgtaagatactacaatacaagaattagccat

SEQ ID NO: 34095 - DNA, 93 bp, unidentified
  source 1..93: mol_type = unassigned DNA; note = methanogen bacteria
ttcggatttagcgtaagcggcactccaacaccttcattattgaaattcagccaagctggtcaaaatatgattgcgggaggtatttttggacca

SEQ ID NO: 34096 - DNA, 66 bp, unidentified
  source 1..66: mol_type = unassigned DNA; note = methanogen bacteria
gatacatggaacagtaccgtgggtgcggtttccaagattctcggagtcgattccgacacctcggcc

SEQ ID NO: 34097 - DNA, 66 bp, unidentified
  source 1..66: mol_type = unassigned DNA; note = methanogen bacteria
tctctcagaagatcgatgagggaacgcaaggtggacagggaatacgaacgctactggaggagatac

SEQ ID NO: 34098 - DNA, 30 bp, unidentified
  source 1..30: mol_type = unassigned DNA; note = methanogen bacteria
ttaaggcatcagccaatcaccaatgatgtc

SEQ ID NO: 34099 - DNA, 222 bp, unidentified
  source 1..222: mol_type = unassigned DNA; note = methanogen bacteria
gcaaccgacaccatttctgaagatatcatctcagatgcagatgatactcctttagaaattactgacaatgatgtttatacagcaaaagaaagttcattcagtaacttgtctgatgaaatagaaaacacaggtacatctttggatttaaatcaggactatgccttcaacaatgaaactgataacaaaaatggaattgttatcggcaaggataattttgtactt

SEQ ID NO: 34100 - DNA, 90 bp, unidentified
  source 1..90: mol_type = unassigned DNA; note = methanogen bacteria
ggctataaagcaggtggagtagtgccaatcttcttgccaggcatgtctgcagattggtttgctgctaattcagcatatcctttgcctcaa

SEQ ID NO: 34101 - DNA, 66 bp, unidentified
  source 1..66: mol_type = unassigned DNA; note = methanogen bacteria
cttattggaggatatgattcaagcagcagtggaagatatgaatccagcagcagtgcaagctctgga

SEQ ID NO: 34102 - DNA, 105 bp, unidentified
  source 1..105: mol_type = unassigned DNA; note = methanogen bacteria
gttactgaatccatggctaattcagttaccatagaggatttgaacattacaagatacatgaggtcacatacaatcaaaaaagctatggagaccatgtcacaaatc

SEQ ID NO: 34103 - DNA, 39 bp, unidentified
  source 1..39: mol_type = unassigned DNA; note = methanogen bacteria
ggattgtgggaattgggactattaagcccacatgttggt

SEQ ID NO: 34104 - DNA, 51 bp, unidentified
  source 1..51: mol_type = unassigned DNA; note = methanogen bacteria
ccggatgtttcaacattgattgcaatgaaatttggaatgggtaggggtctg

SEQ ID NO: 34105 - DNA, 51 bp, unidentified
  source 1..51: mol_type = unassigned DNA; note = methanogen bacteria
cttaattcagatactggtgcatatgcattagctcaaaggggcgccagcatt

SEQ ID NO: 34106 - DNA, 30 bp, unidentified
  source 1..30: mol_type = unassigned DNA; note = methanogen bacteria
ccttatgttctttattccaatggtggaggt

SEQ ID NO: 34107 - DNA, 51 bp, unidentified
  source 1..51: mol_type = unassigned DNA; note = methanogen bacteria
ctgaattcagatatgggtgctttggcattagccgaaagagggacaaaccta

SEQ ID NO: 34108 - DNA, 243 bp, unidentified
  source 1..243: mol_type = unassigned DNA; note = methanogen bacteria
atgaaagaaacatacaacacacatactgcctcacaagtattgtatttaacaagtccgtatttaaacggcaattggattaaaaatcccgaaaaatacgatgctcctacaaatccggaacagtatccaacatttgcaaagaattcatattcatcatatgactattttaaaatagacagtatcataaagccgtacacgaatgaaaatggaaagcactggactacatcaaatatgacagtgcaaaaa

SEQ ID NO: 34109 - DNA, 30 bp, unidentified
  source 1..30: mol_type = unassigned DNA; note = methanogen bacteria
tcacggtgcatgcctccggcatactgggac

SEQ ID NO: 34110 - DNA, 48 bp, unidentified
  source 1..48: mol_type = unassigned DNA; note = methanogen bacteria
cttaacaataatgaaggagctcttgcgttagcccaaagaggaactagc

SEQ ID NO: 34111 - DNA, 48 bp, unidentified
  source 1..48: mol_type = unassigned DNA; note = methanogen bacteria
cttgcaaattcagttacaaatatccaaataaacccaaatcctattgat

SEQ ID NO: 34112 - DNA, 291 bp, unidentified
  source 1..291: mol_type = unassigned DNA; note = methanogen bacteria
actatcgaactgcagcaagctaaaaacgaaaaacctgctgtaaacaatactactgtaactgttgaatccataaataatgagacagttcaggatttgaataatcagcaatcagacagcaataataaagcatcagaaaaatcatctcagtcagccaataaagaatccgaatcaggtatgcctgaagaaacacgtaaaatatatgctgcaagagaaagagcagcacaggacggaatcccaatgtatgaatatacccaaagtccagaactggttgaaaaatatcagagcatggtg

SEQ ID NO: 34113 - DNA, 276 bp, unidentified
  source 1..276: mol_type = unassigned DNA; note = methanogen bacteria
atggtcattcaaaatgatgatggcggttctgctgaattaactcaaaaagtttcagacaaggtttcccaaagcgttgatgaaagttcatcatccggatctaaaatagtagacggccttgaaaaggtatccaacggccaggctggcgatggaagctatatttatgaggaagcttcaagtgatggaaacttccgtcaatatgatgaaaacggcaagttgattggttcaacttatgaagaggaccaggcacaacttggaaatccaaatggagaattagaa

SEQ ID NO: 34114 - DNA, 54 bp, unidentified
  source 1..54: mol_type = unassigned DNA; note = methanogen bacteria
cctcaacaaactactatcattgctcatttctttggacttaaaagaggtttagat

SEQ ID NO: 34115 - DNA, 48 bp, unidentified
  source 1..48: mol_type = unassigned DNA; note = methanogen bacteria
catcctgataggactttttcatataatggccattattttcctgtttgt

SEQ ID NO: 34116 - DNA, 30 bp, unidentified
  source 1..30: mol_type = unassigned DNA; note = methanogen bacteria
acaccatccatggatggtcgaatatcctta

SEQ ID NO: 34117 - DNA, 213 bp, unidentified
  source 1..213: mol_type = unassigned DNA; note = methanogen bacteria
tcctggaatatgcaaagtgttgtttttaatgagaatatggatgaggaacaaaaacagaaagtgatgagggccattaatgaagtttcacagatagaccaaggtcaagaattagaggatactccagaccttagtaagtcttctggaaacggatatacggagatgggtaaagtttatcaggataaggatacgggtaagttaattatggtggaaggt

SEQ ID NO: 34118 - DNA, 42 bp, unidentified
  source 1..42: mol_type = unassigned DNA; note = methanogen bacteria
gtggggatggaggattcttcgggagatgcgtacatcggcccc

SEQ ID NO: 34119 - DNA, 282 bp, unidentified
  source 1..282: mol_type = unassigned DNA; note = methanogen bacteria
gtttatttgaatgttgatgaaggtaataaagtaaccactaatcaaactaacaatgcgagtaaaaatataacagttgaccgtgttaatactgaagaggtaaaacaacaaccacaaaaggaagtttatgcttatagaagtgatggtagtccattatatagttatgaagaaacacgagactatatagctcagaaatatgggccagatatgatttggcatgtgcaagataataaatacatatctcttgatacaccaggttatacaagtgatggaaaaagattgtat

SEQ ID NO: 34120 - DNA, 30 bp, unidentified
  source 1..30: mol_type = unassigned DNA; note = methanogen bacteria
cttttagcaggtaatgaaatacagctggga

SEQ ID NO: 34121 - DNA, 30 bp, unidentified
  source 1..30: mol_type = unassigned DNA; note = methanogen bacteria
atgatgacttataacatgaattccacattt

SEQ ID NO: 34122 - DNA, 48 bp, unidentified
  source 1..48: mol_type = unassigned DNA; note = methanogen bacteria
ttggcaaatggaaatatcactcataatcagctttccgttaattcattt

SEQ ID NO: 34123 - DNA, 66 bp, unidentified
  source 1..66: mol_type = unassigned DNA; note = methanogen bacteria
gcattgacaaaatcatatcctatggattatgattctgcaggaaagttaattgttgacccggcaatc

SEQ ID NO: 34124 - DNA, 30 bp, unidentified
  source 1..30: mol_type = unassigned DNA; note = methanogen bacteria
aaccgaatgacaagcaaaggcatcagcaac

SEQ ID NO: 34125 - DNA, 84 bp, unidentified
  source 1..84: mol_type = unassigned DNA; note = methanogen bacteria
gcgcagtccacggcgggtgactacaccgccggcacgaacgcccttaccaccgtcgccgaggagatcgcgaagtacgtcccgatc

SEQ ID NO: 34126 - DNA, 30 bp, unidentified
  source 1..30: mol_type = unassigned DNA; note = methanogen bacteria
atatacacatttccagcacatgtcgagaat

SEQ ID NO: 34127 - DNA, 33 bp, unidentified
  source 1..33: mol_type = unassigned DNA; note = methanogen bacteria
tccgatggcgaattgcatgatgatctgggatcg

SEQ ID NO: 34128 - DNA, 51 bp, unidentified
  source 1..51: mol_type = unassigned DNA; note = methanogen bacteria
cctaggatgtctgatccattagcaggatatttcggatttagcagaggattg

SEQ ID NO: 34129 - DNA, 99 bp, unidentified
  source 1..99: mol_type = unassigned DNA; note = methanogen bacteria
tatggttttaaaaacttaatccagccgggaataagcatggtgtataatgcagtagggactcaaatagagcctaacatggtaactcttgtagtattcgac

SEQ ID NO: 34130 - DNA, 48 bp, unidentified
  source 1..48: mol_type = unassigned DNA; note = methanogen bacteria
ggacatgaaaagggtgttttggaagaagtgactaaagcaagaaccgga

SEQ ID NO: 34131 - DNA, 51 bp, unidentified
  source 1..51: mol_type = unassigned DNA; note = methanogen bacteria
ggaaatgtaattatcgacaatggtaaattgtcaaatcttctacattttgga

SEQ ID NO: 34132 - DNA, 285 bp, unidentified
  source 1..285: mol_type = unassigned DNA; note = methanogen bacteria
gccttttcactcggcggaaaccatcaggaaagcgcaaagaatgcaacagacaatctgacaaaaaatacagtaaacaaaactgacaatgccacaaacgacaccaaagtggttggagacaactcaacattcaaaggtgcaaacaatacaacaaataaaacatataaagtatacaatcctcaatccgactcatatgtgactgttatcggtgaaaaattcgacaacgacgttcacagatggtacacctatgacaaggacggagtaagatattacaacacaagaattagc

SEQ ID NO: 34133 - DNA, 51 bp, unidentified
  source 1..51: mol_type = unassigned DNA; note = methanogen bacteria
ggaaatgtaattgtggacaatggtaaattacctaatctgttaaattttcat

SEQ ID NO: 34134 - DNA, 42 bp, unidentified
  source 1..42: mol_type = unassigned DNA; note = methanogen bacteria
gtcggaccttctaatgtgacagttgaactgtccagaattaac

SEQ ID NO: 34135 - DNA, 282 bp, unidentified
  source 1..282: mol_type = unassigned DNA; note = methanogen bacteria
attcaattacagagtgctaaaaacgtaactcctgcagtggttaataatactacaaataacactactgtaaatactaccgttgaacatatcaataacgatacagcactacagtcaaacagtaataatcaggcatcacactcagatagtcaagcatcacaatctggtatgcctgaagataggcaaaaaatatatgcggccagacaaaaagcggcagatgatggaattccaatgtatgagtatattcacagtcctgaattggttgaaaaatatcaaaatatggtg

SEQ ID NO: 34136 - DNA, 93 bp, unidentified
  source 1..93: mol_type = unassigned DNA; note = methanogen bacteria
atgattgtagaaggagtaagtcctatagactctatagatatggtatccaatgcatttacaagtaacggttatgcgattttaggaagcactacc

SEQ ID NO: 34137 - DNA, 45 bp, unidentified
  source 1..45: mol_type = unassigned DNA; note = methanogen bacteria
gttgtaggtattatggctgattttcatgtttcttcaaccttagct

SEQ ID NO: 34138 - DNA, 270 bp, unidentified
  source 1..270: mol_type = unassigned DNA; note = methanogen bacteria
ggaaaaggaatgaaaaagaaagtcattggttataagattgtatggaaatatggttggaaacaaaaatatggatgggttctaagacctgtagtaagaggagggcatgttcacttttcccaatggcaatatgttaaagcttatcatccagtttggggaaaatggaaaacaaaggtgcctatttacaaatattactatgtaaatgacgctgcattgacaagcgcgaaaatcaaaaagacaaaaaaatgagttaaaacatataattatatgact

SEQ ID NO: 34139 - DNA, 42 bp, unidentified
  source 1..42: mol_type = unassigned DNA; note = methanogen bacteria
gttggaccatctaatgttggtgttgaaatatcaaagatcaat

SEQ ID NO: 34140 - DNA, 48 bp, unidentified
  source 1..48: mol_type = unassigned DNA; note = methanogen bacteria
cttgctatttacaacctatcccctgaaactgccgcccttgcaagtcaa

SEQ ID NO: 34141 - DNA, 30 bp, unidentified
  source 1..30: mol_type = unassigned DNA; note = methanogen bacteria
gattttaaaaatccgtgggcatgcttacag

SEQ ID NO: 34142 - DNA, 51 bp, unidentified
  source 1..51: mol_type = unassigned DNA; note = methanogen bacteria
ccgtcaactactagcatttttgcgaagatattcggaattacaagaggtttg

SEQ ID NO: 34143 - DNA, 270 bp, unidentified
  source 1..270: mol_type = unassigned DNA; note = methanogen bacteria
accgacctcccgggacccgtcaagtccaccgccggtgcctacgatgtcttcctcttccaacccaccgtcggcggggaagtggaggccggaacctaccagattgccctggaatccagcaacaagtactacacgccctacctgataagcgcctccggcgagaggacagttctcgattacacctacgacggccagtactacagtttcaccctggaaggggagagctacgtctccctgatggccgagaactcctcgctgattcccaacgcgcag

SEQ ID NO: 34144 - DNA, 282 bp, unidentified
  source 1..282: mol_type = unassigned DNA; note = methanogen bacteria
ttgatgaatatgggtaatttttctatttcacaccaggataatggaactaatacaactaatacacatccaaatgtgtctacaaatactgataattcccatcctactcaaagtacagattctggaagttcttcttctagttctcaaagttcaggcagttcttcttctagttctggaagttcttcttctggttcaggtagttcatcttccggatcaggtagttcatcacaagatagtttcacaccaggtcaagcaccgggaactgcaaataagggagatttcgat

SEQ ID NO: 34145 - DNA, 33 bp, unidentified; identical to SEQ ID NO: 33534
  source 1..33: mol_type = unassigned DNA; note = methanogen bacteria

SEQ ID NO: 34146 - DNA, 216 bp, unidentified
  source 1..216: mol_type = unassigned DNA; note = methanogen bacteria
agttggaatatgcaagatgtagtattcaaccaagatatgacccaggaacaaaaagaagaaaccatgcaggctatgcaacaagttgcacaagtaacacaaggtaaagaattaaatgaaacccctgactcttcaaatagttccggtgaaggatatgtggaacaaggaaaagtttatagggatcctaaatcaggaaaactggttatggtgacagaaggt

SEQ ID NO: 34147 - DNA, 99 bp, unidentified
  source 1..99: mol_type = unassigned DNA; note = methanogen bacteria
tatggttttaaaaacttaatccagccaggaataagcctggtatataatgcagtgggaactcaattagagcctaacatggtaacccttgtagtattcgac

SEQ ID NO: 34148 - DNA, 54 bp, unidentified
  source 1..54: mol_type = unassigned DNA; note = methanogen bacteria
acaggtaatgtaattttagataatggaaagttgccttctttgattaatgtggaa

SEQ ID NO: 34149 - DNA, 222 bp, unidentified
  source 1..222: mol_type = unassigned DNA; note = methanogen bacteria
tggaacatgcaaagcgttctattcaatgagaacctgactcccgaacagaaggagcaggtcatggaagcgatgaaccaggaagttactgaagttcaggaaggccaggtattgaatgagactccggataccagcaatcaaacaggacaaggttataccgagatgggaaaggtatataaggatccatctacgggtaagatgattatggttcagaataagactaat

SEQ ID NO: 34150 - DNA, 39 bp, unidentified
  source 1..39: mol_type = unassigned DNA; note = methanogen bacteria
ccatactttggagtaattgctgccttatttgcatttatt

SEQ ID NO: 34151 - DNA, 222 bp, unidentified
  source 1..222: mol_type = unassigned DNA; note = methanogen bacteria
tggaacatgcaaagcgttctattcaatgagaacctgactccggaacagaaggagcaggtcatggaagccatgaaccaggaagttactgaagttcaggaaggccaggtattgaatgagactcctgataccagcaatcaaaccggacaaggttataccgagatgggaaaggtttatgaggacccatccaccggcaagatgattatggttcgaaatcaatcttca

SEQ ID NO: 34152 - DNA, 30 bp, unidentified
  source 1..30: mol_type = unassigned DNA; note = methanogen bacteria
ttaagacaccaaccgttaaccaatgatgtt

SEQ ID NO: 34153 - DNA, 51 bp, unidentified
  source 1..51: mol_type = unassigned DNA; note = methanogen bacteria
ccagactcaagtatggtatttgcaagggtttttggaattacaagagggctt

SEQ ID NO: 34154 - DNA, 51 bp, unidentified
  source 1..51: mol_type = unassigned DNA; note = methanogen bacteria
ccaactgcaagtgaacgcttcgcaagattatttggaataacccgtggattg

SEQ ID NO: 34155 - DNA, 51 bp, unidentified
  source 1..51: mol_type = unassigned DNA; note = methanogen bacteria
cctacattcagtgagaaattcgcatccctttttggtataacaaggggattg

SEQ ID NO: 34156 - DNA, 30 bp, unidentified
  source 1..30: mol_type = unassigned DNA; note = methanogen bacteria
tttttaagacaccagccaataaccaatgat

SEQ ID NO: 34157 - DNA, 222 bp, unidentified
  source 1..222: mol_type = unassigned DNA; note = methanogen bacteria
tggaatatgcaaagcgttttatttaatgaaaacttaactcctgaacagaaggaacaggttatggatgctatgaatcaggaagtgactgaagttcaggaaggacaaatattaaatgaaactcctgatacaagtaatcaaaccggtcaaggctataccgagatgggaaaggtctataaggatccatctacgggtaagctgattatggttcagaataagactaat

SEQ ID NO: 34158 - DNA, 279 bp, unidentified
  source 1..279: mol_type = unassigned DNA; note = methanogen bacteria
agtgacgttaatgatacagcaatagccagtgatgaaagtgatattgacactttagaagtaattagtaacgacgaaaatccagtattaacagaagaaacccaagattcaagtgatgatggaacttatactgccttgcaaaaaaagataactcttgccggtgacggaagcactattaatctgacaagagactatcagtataatgatgatttcaaactcactacaggcgttttcattaataaagacataaccattaacggtaacggccatactattgatgga

SEQ ID NO: 34159 - DNA, 210 bp, unidentified
  source 1..210: mol_type = unassigned DNA; note = methanogen bacteria
ggttggaacctgcaaagtgtcgtattcagtgacatgactcaagaagagaaacaggatgtcatggagtcaatcagcaatatcaccaaggttacacagggtgagaaattaaacagcactccagatacttccgaccagtctggcgaaggttatgtggaacaaggaaaggtttataaggattctaaaaccggtgaattgatcatggttgaaagc

SEQ ID NO: 34160 - DNA, 90 bp, unidentified
  source 1..90: mol_type = unassigned DNA; note = methanogen bacteria
gtgcatgtaataaataaagataattttatatatcattatttgattatattaattagtgatgatttttggggaaatggtgatttaatgtta

SEQ ID NO: 34161 - DNA, 51 bp, unidentified
  source 1..51: mol_type = unassigned DNA; note = methanogen bacteria
ccaacatacagtgaacgttttgcaagtctgtttggtataactcgtggactg

SEQ ID NO: 34162 - DNA, 30 bp, unidentified
  source 1..30: mol_type = unassigned DNA; note = methanogen bacteria
ctaaggcaccagccaataaccaatgatgtc

SEQ ID NO: 34163 - DNA, 51 bp, unidentified
  source 1..51: mol_type = unassigned DNA; note = methanogen bacteria
ccatcatacagtgaacgcttcgcaaaactcttcggaataaccaggggattg

SEQ ID NO: 34164 - DNA, 66 bp, unidentified
  source 1..66: mol_type = unassigned DNA; note = methanogen bacteria
atggatattttcggaccaatagttggaggatttgaaatgataattgaaatgctccaaagtggaggg

SEQ ID NO: 34165 - DNA, 45 bp, unidentified; identical to SEQ ID NO: 24637
  source 1..45: mol_type = unassigned DNA; note = methanogen bacteria

SEQ ID NO: 34166 - DNA, 51 bp, unidentified
  source 1..51: mol_type = unassigned DNA; note = methanogen bacteria
ccaagggccagtgagcaatttgcgagactcttcggtataacccgtggtttg

SEQ ID NO: 34167 - DNA, 30 bp, unidentified
  source 1..30: mol_type = unassigned DNA; note = methanogen bacteria
ttgagacaccagccaattacaaatgatgtc

SEQ ID NO: 34168 - DNA, 90 bp, unidentified
  source 1..90: mol_type = unassigned DNA; note = methanogen bacteria
aatgataggatcatgaatagtggattttttgatggtattgagcagttacttggaacggatgcagaaggtatttcacatgtttttatacac

SEQ ID NO: 34169 - DNA, 30 bp, unidentified
  source 1..30: mol_type = unassigned DNA; note = methanogen bacteria
tttaggggaaatgtcttaactaacgatgat

SEQ ID NO: 34170 - DNA, 51 bp, unidentified
  source 1..51: mol_type = unassigned DNA; note = methanogen bacteria
ccaaatgctagtgaacactttgcggaattgttcggtataacccgtggattg

SEQ ID NO: 34171 - DNA, 63 bp, unidentified
  source 1..63: mol_type = unassigned DNA; note = methanogen bacteria
gcagtacctacaataactgaaatatcatccggtgttgctttaggagaatattttataaattac

SEQ ID NO: 34172 - DNA, 36 bp, unidentified
  source 1..36: mol_type = unassigned DNA; note = methanogen bacteria
cctgatatagccgctgaattaaatttttctgctgaa

SEQ ID NO: 34173 - DNA, 51 bp, unidentified
  source 1..51: mol_type = unassigned DNA; note = methanogen bacteria
ccattagcaagtgaacgtttcgccagattatttggtataacccgtggtttg

SEQ ID NO: 34174 - DNA, 273 bp, unidentified
  source 1..273: mol_type = unassigned DNA; note = methanogen bacteria
tcacaggtggcgaaagaggattctaatctctcaattgcagataagaaaatcaatgtgggtgattcattggttgttaagttaactgacagcagcggcaaagccatcgccaaccagactgtaaatgtaaagctgaccgacaaggatggaactgtgatggatgaggacataacaaccgattccaagggaaaagcgaaattcaagatggaggaaaatggcaaatattcagttgaatgtaaatttgatggaaacggacagtatgcatcaagttcaact

SEQ ID NO: 34175 - DNA, 51 bp, unidentified
  source 1..51: mol_type = unassigned DNA; note = methanogen bacteria
ccaaatttaagtaatcaattcgctaaattagtgggtataactcgtggttta

SEQ ID NO: 34176 - DNA, 51 bp, unidentified
  source 1..51: mol_type = unassigned DNA; note = methanogen bacteria
ccagaattcagtaattcattcgctagaatatttggtattacacgtggtttg

SEQ ID NO: 34177 - DNA, 51 bp, unidentified
  source 1..51: mol_type = unassigned DNA; note = methanogen bacteria
cctgaattaagtaataattttgctagattagtcggtataactcgtggttta

SEQ ID NO: 34178 - DNA, 51 bp, unidentified
  source 1..51: mol_type = unassigned DNA; note = methanogen bacteria
cccgaagtaagtatgacctttgcacggatattcggtattacccgtggtctg

SEQ ID NO: 34179 - DNA, 51 bp, unidentified
  source 1..51: mol_type = unassigned DNA; note = methanogen bacteria
ccggattccagtcttgtctttgcgagggcatttggaattacaagagggctt

SEQ ID NO: 34180 - DNA, 51 bp, unidentified
  source 1..51: mol_type = unassigned DNA; note = methanogen bacteria
ccaaattcaagtaatcagtttgctaaattggtgggcataacccgtggttta

SEQ ID NO: 34181 - DNA, 33 bp, unidentified
  source 1..33: mol_type = unassigned DNA; note = methanogen bacteria
aaattagccaaaaaattattcgtcgataaaaca

SEQ ID NO: 34182 - DNA, 72 bp, unidentified
  source 1..72: mol_type = unassigned DNA; note = methanogen bacteria
gaacaggtattcgcataccctggtatcggccaggcaacagtggctgccgggctgaggtcagatgttccatta

SEQ ID NO: 34183 - DNA, 51 bp, unidentified
  source 1..51: mol_type = unassigned DNA; note = methanogen bacteria
ccaaatttaagtaatgaatttgcccggttagtgggcataactcgtggttta

SEQ ID NO: 34184 - DNA, 48 bp, unidentified
  source 1..48: mol_type = unassigned DNA; note = methanogen bacteria
gcaaagggatatgtatggcattattcggtgttgaaacaatattgcctg

SEQ ID NO: 34185 - DNA, 276 bp, unidentified
  source 1..276: mol_type = unassigned DNA; note = methanogen bacteria
tgtgcaactgataatattaatggaacagttgaagatggatcaaatattaattttgagcctaataatacaagtacttttgatgaattaaactcagatatccaaaatcttcatcctggagatgtatacaaactgaacaatgactattcatttagtggaaagaacactgatacttcttttgaccatgttataaacattgataaggataatgtgaccattaacggtaatggccatgccaagatgcaggaggcccatcacaatacttttcaatatttaatg

SEQ ID NO: 34186 - DNA, 42 bp, unidentified
  source 1..42: mol_type = unassigned DNA; note = methanogen bacteria
ttgcaaccactcttcttcaatcatcagaatcaatgtccggtt

SEQ ID NO: 34187 - DNA, 51 bp, unidentified
  source 1..51: mol_type = unassigned DNA; note = methanogen bacteria
ccacagtccagtatgatttttgcaagaatatttggtattacccgaggtttg

SEQ ID NO: 34188 - DNA, 51 bp, unidentified
  source 1..51: mol_type = unassigned DNA; note = methanogen bacteria
ccagatgcaagtagtatttttgcaaggttttttggtatttcaagaggtttg

SEQ ID NO: 34189 - DNA, 222 bp, unidentified
  source 1..222: mol_type = unassigned DNA; note = methanogen bacteria
tcctggaacatgcagaatgttatctttaatgatagcctcacccaggaacagagagaagaggtcatgcagaatattcagaatgttactgagataactgaaggacaggagcttaatgaaacccctgataccagcaatgtctcaggaaaaggctatactgagatgggcaaggtttatcaggatccatcgacaggcaagatgattatggttcagaatcaatcaagc

SEQ ID NO: 34190 - DNA, 51 bp, unidentified
  source 1..51: mol_type = unassigned DNA; note = methanogen bacteria
ccaaatattagtattacctttgcacgattattcggtataactagaggtttg

SEQ ID NO: 34191 - DNA, 57 bp, unidentified
  source 1..57: mol_type = unassigned DNA; note = methanogen bacteria
gtttatgtatttttaatatctgtaaatgatattcaattatttgaaggaatttccaca

SEQ ID NO: 34192 - DNA, 36 bp, unidentified
  source 1..36: mol_type = unassigned DNA; note = methanogen bacteria
tttaacttattggcaaaatctacagtaatttacggt

SEQ ID NO: 34193 - DNA, 42 bp, unidentified
  source 1..42: mol_type = unassigned DNA; note = methanogen bacteria
ggtaatgttatcatggacaacggtaagttacctttctttaat

SEQ ID NO: 34194 - DNA, 30 bp, unidentified
  source 1..30: mol_type = unassigned DNA; note = methanogen bacteria
acaagaatgaaaaatcgaggatggtcttca

SEQ ID NO: 34195 - DNA, 276 bp, unidentified
  source 1..276: mol_type = unassigned DNA; note = methanogen bacteria
gaaaattttacagatttacagcatcaaattactgaaaaagattttgttagtttaaatgatgatattatcttaaatcagcaaactttcaatgaagaaaatacttttatggatggtatctcaattaaaaataaacaaatttctattgaaggcaataatcacacaatatttgcaaaagattcaaattttaatcaagcaaaactttttaacattattaatagtaatgtaactttgtctaatatgcttatttctcactttaattttaaaaaatgttacttt

SEQ ID NO: 34196 - DNA, 66 bp, unidentified
  source 1..66: mol_type = unassigned DNA; note = methanogen bacteria
agtgtttatgagggattcatggagagctttgctcatgtcactgaattggtttctgttgctcctgtt

SEQ ID NO: 34197 - DNA, 51 bp, unidentified
  source 1..51: mol_type = unassigned DNA; note = methanogen bacteria
ccaaatttcagtaatgcttttgctaaactgttcggaataacccgtggtttg

SEQ ID NO: 34198 - DNA, 213 bp, unidentified
  source 1..213: mol_type = unassigned DNA; note = methanogen bacteria
tcatggaacatgcagaatatcgtattcaacgagaatatggatgagcagcaaaagcaaagggtaaaaaatgcaattcaggaagtctctcagcttgatcaaggacagcaattaaatgagactccagacatcagtaaatcctccggtgagggctttactgaaatgggtaaggtttacagggattcgcaatcgggcaaactaattatggttgaaggt

SEQ ID NO: 34199 - DNA, 54 bp, unidentified
  source 1..54: mol_type = unassigned DNA; note = methanogen bacteria
ccagagataagtatacatctagctagtatctttggattaggaagaggtcttgat

SEQ ID NO: 34200 - DNA, 291 bp, unidentified
  source 1..291: mol_type = unassigned DNA; note = methanogen bacteria
agtaatttttcagctacggatgtacaaactgatgcggctgatgttaattctggtactggaaaacctaatgtaactgatgttagtggaaatgcagagtattatgtgatgcctgttgcaaatttacatagggttactgtaaatggggttgatagatcagatgcaatatcgaatagcgcagtaggtgttctagcaaaagttattgatgagggacagatttcaattaagcctggagagattataattaccactccatcaggcatttcacctgaagatgctgtccgtcgtccaggt

SEQ ID NO: 34201 - DNA, 30 bp, unidentified
  source 1..30: mol_type = unassigned DNA; note = methanogen bacteria
aaccatttaaaatggaaaggatacaaccac

SEQ ID NO: 34202 - DNA, 72 bp, unidentified
  source 1..72: mol_type = unassigned DNA; note = methanogen bacteria
gtgtttttggcaagaggttttgtcgatttgggaaatgttgtgactaatatttatgacggcatatttagggtg

SEQ ID NO: 34203 - DNA, 279 bp, unidentified
  source 1..279: mol_type = unassigned DNA; note = methanogen bacteria
gcagcggaaaacctcaccgacgatgcaatgggtgatgacagtaaagaaatattagaaacggttcaggaggatatcacagctgatggtagttcggatgtccttgaaaccgctcagaatgacatctacactgcaagtgatgattcattcaccaatctgactgatgaaatagctgtaaaggatgtcgtggatttaactcacgactacaaattcaacaacgaaactgatgacgtaacggctgtacaattgacggaaacaaccaatcaagactattcaacatta

SEQ ID NO: 34204 - DNA, 63 bp, unidentified
  source 1..63: mol_type = unassigned DNA; note = methanogen bacteria
atgattcaaattttagattgtcaaggtgcaatggggactgttactaatgctgtagatactgtt

SEQ ID NO: 34205 - DNA, 111 bp, unidentified
  source 1..111: mol_type = unassigned DNA; note = methanogen bacteria
agtttagcatttgacgttgttggtggaattgtaactggtaatgaagatatagacagagttaatagtaacaatggtaatttctttgaatgctgggataatatgagaaatagt

SEQ ID NO: 34206 - DNA, 51 bp, unidentified
  source 1..51: mol_type = unassigned DNA; note = methanogen bacteria
ccagatataacaacaaatattgccaatatatttggaattcgcagaggttta

SEQ ID NO: 34207 - DNA, 39 bp, unidentified
  source 1..39: mol_type = unassigned DNA; note = methanogen bacteria
ttttttaaaagtgcaccacacggaacatattatatgcac

SEQ ID NO: 34208 - DNA, 195 bp, unidentified
  source 1..195: mol_type = unassigned DNA; note = methanogen bacteria
gctcttcaagtcaatcccgatatgatggctaagacacatgaatcacaggcaaagcaagctacctctcaagtgagcactggggaagacttcacaagcaatgcaagtgcaggatcttctcttgagcaatcaggttatgccgaagtcggaaaggtctatagggatcctgataccggtaagctggtaatggttcaggag

SEQ ID NO: 34209 - DNA, 213 bp, unidentified
  source 1..213: mol_type = unassigned DNA; note = methanogen bacteria
agctggaacatgcaagcaatcgtcttcaatgaagatgtcactcccgagcagaggcaggatgcaatcaatgccatgaagcaggttaccgaagtagaccagggacagcagctgaacgagactcctgacgtttcaaattcttccggagaaggatatgccgagatgggtaaggtctacaaggatccgaaaacaggcaagatgataatgattgaaagc

SEQ ID NO: 34210 - DNA, 264 bp, unidentified
  source 1..264: mol_type = unassigned DNA; note = methanogen bacteria
gccgatttaaactgtactggtgatattggtgatgttttaaaagatggcggtgatattaaatcattttatgatttaaatggtgatattaccgctgaaaattcaagttttaatatgcaatcagattatacatttgataatcaaactgatatgaattataccaatggaattagaatagttaaggctgattttacaatcaacggaatagaaagagaaaaagatgaaactatcgtagctgtttatcattttctcattaagaaaatattc

SEQ ID NO: 34211 - DNA, 30 bp, unidentified
  source 1..30: mol_type = unassigned DNA; note = methanogen bacteria
acacgaatgaaaaatcgaggatggtcttca

SEQ ID NO: 34212 - DNA, 246 bp, unidentified
  source 1..246: mol_type = unassigned DNA; note = methanogen bacteria
gtgttctcgatcgccttcggcgataacaagaatttcgccggcacggtgagcgtcactctgccgtatgcgctgagagatggagaggatgccggcaggatctatgtcgctttcgtgaaccccgaaacgaacaagctggagagcatgagcggaacgtggagcgacgggtacgtcaccttcgccaccgaccacttctccgactacgccgtcatgcattccgaaccgtcggatgacagcgggagcagcacc

SEQ ID NO: 34213 - DNA, 30 bp, unidentified
  source 1..30: mol_type = unassigned DNA; note = methanogen bacteria
accgaacatccattattcaacgaatggaac

SEQ ID NO: 34214 - DNA, 42 bp, unidentified
  source 1..42: mol_type = unassigned DNA; note = methanogen bacteria
accatgagtccagaagccttggcaagttaccttccaggatat

SEQ ID NO: 34215 - DNA, 66 bp, unidentified
  source 1..66: mol_type = unassigned DNA; note = methanogen bacteria
atggagatattgccggtggatttttccaaggaaatgttttatgttctccggatgcatctgccggta

SEQ ID NO: 34216 - DNA, 267 bp, unidentified
  source 1..267: mol_type = unassigned DNA; note = methanogen bacteria
gtaataggtcagcagggaactgctcataaggccaatgttacaaatgccagtaatactgtaaataacacatcatcagttaatgtggagaaaattaatactgaaaatactgcaaattctaatcaggaatcatccaaatcttcagattggattgattcagatggagcccatcatttttatgaaaatggcaaagaatatgttggttcaagagaaggccaacacatggatattgatactcataattatgttaaggaacatggaatgggagat

SEQ ID NO: 34217 - DNA, 126 bp, unidentified
  source 1..126: mol_type = unassigned DNA; note = methanogen bacteria
ggaaccgggggcatatacctggttgaaattatgtcgcagctgttcaatgttgcaaatccattcattccaatgacatatgcaatcacgctggtgcgtgaagcccagtggggtttaatctggtccaat

SEQ ID NO: 34218 - DNA, 30 bp, unidentified
  source 1..30: mol_type = unassigned DNA; note = methanogen bacteria
acagaacaccctttgtttgagggatttaat

SEQ ID NO: 34219 - DNA, 39 bp, unidentified
  source 1..39: mol_type = unassigned DNA; note = methanogen bacteria
ccaatatttttaaaaggaacaagcatccacatattagat

SEQ ID NO: 34220 - DNA, 213 bp, unidentified
  source 1..213: mol_type = unassigned DNA; note = methanogen bacteria
tcatggaatatgcaaagtgttgttttttcagatatgtctcaacaagaaaaacaacaaacaatggaagctatgaaaaaagcagtagaattaaatcaaggaaaagaattaaacaatactccaaattcaacatcaggttcaggtgaaggatatgttgaactgggtcaagtatataaagatcctgaaactggaaaactgataatgatacaagatggt

SEQ ID NO: 34221 - DNA, 30 bp, unidentified
  source 1..30: mol_type = unassigned DNA; note = methanogen bacteria
tttcttgaaagcgggggacatgccggaaat

SEQ ID NO: 34222 - DNA, 33 bp, unidentified
  source 1..33: mol_type = unassigned DNA; note = methanogen bacteria
aaaacatttgaattttttatatttatatttcct

SEQ ID NO: 34223 - DNA, 66 bp, unidentified
  source 1..66: mol_type = unassigned DNA; note = methanogen bacteria
aatatgccatctccacaattttttgaacatcataaagcatatgctatagttttaggaagttcaaca

SEQ ID NO: 34224 - DNA, 213 bp, unidentified
  source 1..213: mol_type = unassigned DNA; note = methanogen bacteria
agttggaatatgcagtccatagttttcaatgaagatatgacacaacaggaaaaacagcaagtgatgcaaactattaaaagtgtttctgaagtaaatcaaggtcaacaattaaatgaaactccagattcctctaatagttcaggtcaaggatatactgaaatgggtaaagtatataaagatccgtcgaccggtaagctgataatggtagagggt

SEQ ID NO: 34225 - DNA, 213 bp, unidentified
  source 1..213: mol_type = unassigned DNA; note = methanogen bacteria
agttggaatatgcaatctattgttttcaatgaggacatgacacaacaggaaaaacagcaagtgatgcaaactattaaaagtgtttcagaggttaatcagggtcatgaattaaatgatacgcctgatacttctaacagctcaggtcagggttatactgaaatgggtaaagtatataaagatcctaagacaggtaagctgattatggtggagggt

SEQ ID NO: 34226 - DNA, 213 bp, unidentified
  source 1..213: mol_type = unassigned DNA; note = methanogen bacteria
tcctggaacatgcaggcaattgtattcaatgatagtgttactccggagcagaggcaggatgcaatcaatgcgatgaagcaggttactgagatagatcaaggacagcagttgaatgagactccggatgtaagctcaagttccggagaaggttacagtgagcttggaaaagtctacaaggattccaatacaggcaagctgataatgatagaaaat

SEQ ID NO: 34227 - DNA, 213 bp, unidentified
  source 1..213: mol_type = unassigned DNA; note = methanogen bacteria
tcttggaacatgcaggcaatcgtattcaacgatgacgtaactccagatcaaaaacaagatgcaatcaatgcgatgaagcaggtgactgaaatagatcagggtcagcagttgaatgagactcctgatgtgagttcatcctctggagaagggtacagtgagcttggtaaggtctacaaggaccctaagacgggcaagctcatcatgattgaaaac

SEQ ID NO: 34228 - DNA, 213 bp, unidentified
  source 1..213: mol_type = unassigned DNA; note = methanogen bacteria
tcatggaatatgcagaatatagtattcaatgagaatatggatgaacagcaaaagcagaaggtaaaaaacgccatcacggaagtttctcagattgaccagggtgaagagttgaaggattctccagacatcagcaactcttccggaaacggatttactgagatggggaaggtttatcgggattcggacacgggtaaattaataatggtcgagggc

SEQ ID NO: 34229 - DNA, 210 bp, unidentified
  source 1..210: mol_type = unassigned DNA; note = methanogen bacteria
tggaacatgcaggctattgtgttcaacgatgatatcagtcctgatcaaaggcaggatgctatcaatgccatgaagcaggtaacagagatagatcaaggaaagcagttgaatgagactcctgatgtgagttcatcctctggagagggatacagtgagcttggtaaggtctacaaggaccctaagacgggcaagctcatcatgattgaaaac

SEQ ID NO: 34230 - DNA, 213 bp, unidentified
  source 1..213: mol_type = unassigned DNA; note = methanogen bacteria
tcatggaacatgcaggcaatagtcttcaacgacagcgtaactccacaagagaggcaggatgcaatcaatgccatgaagcaggtaaccgagatagaccagggacagcacctgaaccagacacctgatgtaagcaattcatctggtgaaggctatgcagaactgggaaaggtctataaggattccaatacaggcaagctgataatgatagagaat

SEQ ID NO: 34231 - DNA, 213 bp, unidentified
  source 1..213: mol_type = unassigned DNA; note = methanogen bacteria
agctggaatatgcaggctattgtttttaatgaaagtatgactccacaagaaaaacaacaagttatgcagactattaaaagtgtttcagaggttaatcaaggtcaagaactaaaccaaactccagatacttccaatagttccggtcagggttatactgaaatgggtaaagtctataaagatccgtcgacaggtaagctgattatggtagagggt

SEQ ID NO: 34232 - DNA, 36 bp, unidentified
  source 1..36: mol_type = unassigned DNA; note = methanogen bacteria
ggcagtattattccaagcaatagtgtcatatttaga

SEQ ID NO: 34233 - DNA, 213 bp, unidentified
  source 1..213: mol_type = unassigned DNA; note = methanogen bacteria
agttggaatatgcaggccatagttttcaatgaggatatgactcctgaacaaaaacaacaagtaatgcaatctattaagagtgtttctgaagttaatcaaggccaacagttaaatgagactcctgatacttctaatagttctggtcaaggttatactgaaatgggtaaagtatacaaggatccatcgacaggtaagctgataatggtagagggt

SEQ ID NO: 34234 - DNA, 213 bp, unidentified
  source 1..213: mol_type = unassigned DNA; note = methanogen bacteria
agctggaatatgcagagtgttgttttcaatgatgatatgacacaggatcaaaaacaggaagtaatgaatgctatgaagcaggtttctgaagttacccagggtcaggaactaaacgagactccagatacttccaatagctcaggtcagggttatactgaaatgggtaaagtttataaagatcccgcgacagggcggctgattatggtagaaggt

SEQ ID NO: 34235 - DNA, 210 bp, unidentified
  source 1..210: mol_type = unassigned DNA; note = methanogen bacteria
tggaatatgcagagtatcgtattcaatgaaaacatggatgagcagcaaaagcagaaggtaaaagatgccatcaccgaagtttcccaaattgaccagggtgaagaattgaaggattctccagacatcagtaaatcttctggagatggatttactgaaatgggtaaggtctatcgggattcggatacgggcaaattaatcatggttgaaggt

SEQ ID NO: 34236 - DNA, 213 bp, unidentified
  source 1..213: mol_type = unassigned DNA; note = methanogen bacteria
tcctggaacatgcaggcaattgtattcaatgaggatattaatccagaacagaggcaggatgctatcaatgccatgaagcaggtaacagagatagatcaaggcaagcagttgaatgagactcctgatgtaagttcaagttcaggagaagggtatgctgaattgggaaaggtctacaaggattccaatacgggcaagctgataatgatagagaat

SEQ ID NO: 34237 - DNA, 210 bp, unidentified
  source 1..210: mol_type = unassigned DNA; note = methanogen bacteria
agctggaatatgcagagtgtcatatttcaggatacctctcaagacccttctcaagctgttcagcagtctccaaccaatattactgaagtgactgaaggtcaggagctaaacgagactccggagtcttcagaaagttccggtcagggatatatggaaatgggtaaagtatataaggacccttccacgggtaagctgataatggttgaaggt

SEQ ID NO: 34238 - DNA, 78 bp, unidentified
  source 1..78: mol_type = unassigned DNA; note = methanogen bacteria
cacggcgagatcgtaccgtggttccccttcctgaccgccatgtcggatccggaagataccgccgcgatgctcaccgag

SEQ ID NO: 34239 - DNA, 72 bp, unidentified
  source 1..72: mol_type = unassigned DNA; note = methanogen bacteria
atggctctaatggaatttattgacagcatttggtgcggattatgcgatttcgcaagctacgtttggggtaac

SEQ ID NO: 34240 - DNA, 210 bp, unidentified
  source 1..210: mol_type = unassigned DNA; note = methanogen bacteria
agctggaatatgcaaagcgttatatttcaggatacctctcaggaccagagtcaggctgttcaaagctcacaccctaatgtaactgaggtaagtgaaggtcaggaactgaatgatactcctgagtcatcccaaagttcaggccagggttacatggaaatgggtaaggtctataaggaccccgcaacgggaaaactgataatggttgaaggt

SEQ ID NO: 34241 - DNA, 210 bp, unidentified
  source 1..210: mol_type = unassigned DNA; note = methanogen bacteria
agttggaatatgcagagtgttgtgttccaggaaagtaatcagaatccccagaatgtaattaatgaaaattctcctgatgtgactgaggtcagcgaagggcaggttttaaatgaaactccggatacttctgacagttcgggtcagggttatatggagatgggtaaggtttacaaggatccttcaacgggtaagttggttatggttgaaggt

SEQ ID NO: 34242 - DNA, 42 bp, unidentified
  source 1..42: mol_type = unassigned DNA; note = methanogen bacteria
accataggtgctgaaaatatggttggattgattattggaatg

SEQ ID NO: 34243 - DNA, 264 bp, unidentified
  source 1..264: mol_type = unassigned DNA; note = methanogen bacteria
gcagacttaaataattccacatcagatttgactcaggataattctgattttcaaaatttaacaaatactatggaacctgatcgtgaaaaatcagagtcagggatttcaactgattattttcaaaataataatatttcaaataaggatgattctaccgtatatattatattggataatgacgccgataaagaaaatgtttatcttggagattatgttacatggattgtcagtgtttataatctcaatggcaatacggcaaaatgt

SEQ ID NO: 34244 - DNA, 267 bp, unidentified
  source 1..267: mol_type = unassigned DNA; note = methanogen bacteria
gcatatttcacgcttcagtcacaatataagactatttcaatgagtggtataacaatggaagtaccgactagtaatgctactgtgaataatgtcagtgctaactataatacatatgatgatcaggaaaataatttatcagttaagacgtgggcataccgtgatatgaacgatgtgaatggtacagcacaggcagtactggaaataggaacacagtacggaagcaatttagcaaataatgtcacatatgataacgtgtcagtagcaaac

SEQ ID NO: 34245 - DNA, 210 bp, unidentified
  source 1..210: mol_type = unassigned DNA; note = methanogen bacteria
agttggaatatgcaaagtatcgtgttttcagatatgtctcctgaggaaagacaaaatgttatggaaactataaatcaggtttcggaagttactcaaggtcaacagttaaatgaaactccggacacgtcaaatagctcaggtcaaggatatactgaaatgggtagggtatataaagatcctgctacgggtcggctgataatggtagagggt

SEQ ID NO: 34246 - DNA, 210 bp, unidentified
  source 1..210: mol_type = unassigned DNA; note = methanogen bacteria
agttggaatatgcagagtgttgtattttcagatacttcaaatcaacaatctcaggctgtccaaagtcctaatgttaatgttactgaagttagtgaaggtcaggaacttaatgaaactccagattcatctcaaaattccggacagggttatatggaaatgggtagagtttacaaagatccttcgacgggtaagttaattatggttgaagaa

SEQ ID NO: 34247 - DNA, 75 bp, unidentified
  source 1..75: mol_type = unassigned DNA; note = methanogen bacteria
catggcgagattgtgccctggttcccattccttaccgcaatgtcggatccagcagatacctcagcaatgctcacc

SEQ ID NO: 34248 - DNA, 210 bp, unidentified
  source 1..210: mol_type = unassigned DNA; note = methanogen bacteria
agctggaatatgcagagcatcatcttttcggacatgtcccaagatgaaaaagactccattatggaagcaatgaaggatgcaaaaccaatagataaaggtcaggagatagatactcctcctgaaatatctcaaagttctggacaagggtatactgagatgggaaaagtttataaagatcccacaacgggaaaactgataatggtagaacaa

SEQ ID NO: 34249 - DNA, 30 bp, unidentified
  source 1..30: mol_type = unassigned DNA; note = methanogen bacteria
agaaaatataattatacatcaaataatgca

SEQ ID NO: 34250 - DNA, 207 bp, unidentified
  source 1..207: mol_type = unassigned DNA; note = methanogen bacteria
agttggaatatgcagagtgttgtatttcaggataatcaaaatcaggaaaaagccattcaggagtcttcgcctgatgtaacggaagtcagcgaaggacaaacattgaatgaaactccggaatcctctaacagttcaggtcagggttatatggaaatgggtaaagtttacaaggatccttcaacgggtaagctaataatggttgaaggt

SEQ ID NO: 34251 - DNA, 228 bp, unidentified
  source 1..228: mol_type = unassigned DNA; note = methanogen bacteria
atggtagatgtcctaattgttgaatcttctgttgctaaaaatggttatgatgcatctgcaattgcagcgtccattaataaagctattaataatggtcttttaatgggtgttgatcatgtcgaacctaaggatttaaatgtaaaacaaggttctaaagcagttggtgtttatttcaatgcgcttcctggagacagatcatctccttcatgggatttacctattgatggc

SEQ ID NO: 34252 - DNA, 207 bp, unidentified
  source 1..207: mol_type = unassigned DNA; note = methanogen bacteria
agttggaatatgcagagtgttgtatttcaggataatcaggaatcccagaaggctcttgatgagtcatctcccgatgttactgaagttagtgaagggcaggtcttaaatgaaactccggacacttcagacagttcaggctcaggttacatggaaatgggtaaagtgtataaagacccttcgacgggcaagttaataatggttgaagaa

SEQ ID NO: 34253 - DNA, 51 bp, unidentified
  source 1..51: mol_type = unassigned DNA; note = methanogen bacteria
tggtgcattattcataggcagtactgtgaaattgattcacaaaatctatta

SEQ ID NO: 34254 - DNA, 210 bp, unidentified
  source 1..210: mol_type = unassigned DNA; note = methanogen bacteria
ggctggaacttacaaagtgtcatattcagtgacatgactcctgaagagagacaatcaactatggagtcaataagtgaaatcactgatgtgaaacaaggagaacagttaaacagcactccagacacttcagacaagtctggagaaggttatgtagaacaaggaaaagtttatagagattcgaaaacgggtaatctgattatggtagaatct

SEQ ID NO: 34255 - DNA, 207 bp, unidentified
  source 1..207: mol_type = unassigned DNA; note = methanogen bacteria
agctggaatatgcagagtgttgtgtttcaggaaaatcagaatccccaacagcaaatcagtgaaaattctcctgatgtaaccgaagtggccgaaggacaggctctgaatgaaactccggacacttcaaacagttcaggtcagggctatatggagatgggtaaggtctataaggatccttcaacgggcaagctgattatggttgaaggt

SEQ ID NO: 34256 - DNA, 135 bp, unidentified
  source 1..135: mol_type = unassigned DNA; note = methanogen bacteria
gctgacggcggattcggcggatcggacgatgccggaggagagtcggcagacaagtacggatatgaagcctggaccggggacatcctcacgatcatcaccggcgaccccgattacgagcttcccggcgagaccgaa

SEQ ID NO: 34257 - DNA, 42 bp, unidentified
  source 1..42: mol_type = unassigned DNA; note = methanogen bacteria
agaagcttcttcatcaaaggccaccagtttccagtctgtgca

SEQ ID NO: 34258 - DNA, 45 bp, unidentified
  source 1..45: mol_type = unassigned DNA; note = methanogen bacteria
cagggatatatgggccaattcgatggatttttcttaactcaaaat

SEQ ID NO: 34259 - DNA, 39 bp, unidentified
  source 1..39: mol_type = unassigned DNA; note = methanogen bacteria
gttaaagatccatttattaaaaacactatcttaatggat

SEQ ID NO: 34260 - DNA, 36 bp, unidentified
  source 1..36: mol_type = unassigned DNA; note = methanogen bacteria
aaaaactttgttgatttgaaattttttgatgaaaat

SEQ ID NO: 34261 - DNA, 207 bp, unidentified
  source 1..207: mol_type = unassigned DNA; note = methanogen bacteria
tggaacttgcaaagtgttattttcagtgacatgtctcctgaagacaggcaggctgccatggagtcaatcaaggacatcactaatgtaacacaaggtgaaaagttaaatgaaactccagacacttcaaacagttctggagaaggttatgtagaacagggtaaagtttacaaggattcgaaaacgggtaacctgattatggtagaggga

SEQ ID NO: 34262 - DNA, 207 bp, unidentified
  source 1..207: mol_type = unassigned DNA; note = methanogen bacteria
tggaacttgcaaagtgttatctttagtgacatgtctcctgaagacagacaacaggctatgcagtcaatcagtgaaatcactaatgtaacacagggtgaacaattaaatgaaactccagacacttcaaacagttctggagaaggttatgtagaacaaggaaaagtttataaagattcgaaaacgggtaatctgattatgattgaggag

SEQ ID NO: 34263 - DNA, 102 bp, unidentified
  source 1..102: mol_type = unassigned DNA; note = methanogen bacteria
atttacggattcaagaatctgatacaacctggaataagtttagtttataatgctattggaactcagctagctccaaacatggttacattagtggtttttgat

SEQ ID NO: 34264 - DNA, 30 bp, unidentified
  source 1..30: mol_type = unassigned DNA; note = methanogen bacteria
atgaatgaaataatagcatttctctcagaa

SEQ ID NO: 34265 - DNA, 183 bp, unidentified
  source 1..183: mol_type = unassigned DNA; note = methanogen bacteria
gtttcattaagctttgaagaaaacacagtggatgaaggtcctcattacgagaatgttaccaaggaaatgacatctaacttgaatagtactgaagatgtttattttgataagacaactgatggtgtggattataatcagaatgaaacttcacagttggatgtaaagtatcagtatagtgataat

SEQ ID NO: 34266 - DNA, 207 bp, unidentified
  source 1..207: mol_type = unassigned DNA; note = methanogen bacteria
agttggaatatgcagagtgttgtatttcaggattcgcaagaccaacaaaaggccattgaggaatcatcacctgatgtgactgaagtggctgaaggacaggttttaaatgagactccagatacctccgacagctccggtcagggatacatggaaatgggtaaggtctataaggatccttcaacgggaaaattgataatggttgaaggt

SEQ ID NO: 34267 - DNA, 207 bp, unidentified
  source 1..207: mol_type = unassigned DNA; note = methanogen bacteria
tggaacttacaaagtgttatattcagtgatatgtctcctgaccaaaggcaacaggctatggagtcaatcagtgaaatcactaatgtaacacaaggtgaacaattaaatgaaactcctgacacttcagaaatgtctggagaaggttatgtagaacaaggaaaagtttataaagattcgaaaacgggtaatctgattatggtggaagag

SEQ ID NO: 34268 - DNA, 207 bp, unidentified
  source 1..207: mol_type = unassigned DNA; note = methanogen bacteria
tcctggaatatgcagggtgttgttttctctgacatgacccaagaggaaaagcagaatgtaatggagcagatgagccaggtcagtgaagttgatcaaggtcagcagctcaatgagacaccggatgtgagtaataagtcaggtaaaggatatactgaaatgggtaaggtgtatcaggactccaatggtaagctgattatggtagaagaa

SEQ ID NO: 34269 - DNA, 207 bp, unidentified
  source 1..207: mol_type = unassigned DNA; note = methanogen bacteria
agttggaatatgcagagtgttgtctttcaggattcccaagaccagcaaaaagctattgaggaatcgtcacctgatgtgactgaggtggctgaaggtcaggttttgaatgaaactcccgatacctctgacagttcaggtcaaggatatatggaaatgggtactgtctataaggatcctacaacgggaaaattgattatggttgaagat

SEQ ID NO: 34270 - DNA, 228 bp, unidentified
  source 1..228: mol_type = unassigned DNA; note = methanogen bacteria
ttcaacgcccagatcaccctcaccaacggcgccagcacctacaagggaatcaccaactacgaaggagtctgcaccatcagcaaggtcctcgtcggagactaccagatccgtgtgatctgcgacggatacgagatgtacacgggcaacgtcagcatctcgaagaccaccggacagatccccataaccctggtccagaaggagatgcccacctatctgggcatgaccctc

SEQ ID NO: 34271 - DNA, 255 bp, unidentified
  source 1..255: mol_type = unassigned DNA; note = methanogen bacteria
cacctcacggccatctacacatgggagggcatcaccgcatgcagcgtgagggtattctgcgaggactgcgactatcttgcaggcatagagcatccggaaatcgagtccaaagtcaagatcccgcccacggagacggagatggggaccacggagtactatgtgtccgggaccgtcgagggctacgactattactccgggaaggatgtacaggatatacccgtggtcgtacctggaaacggcagcgacaacctgatt

SEQ ID NO: 34272 - DNA, 30 bp, unidentified
  source 1..30: mol_type = unassigned DNA; note = methanogen bacteria
agcaccggcctgtccgacgggcctgtcccg

SEQ ID NO: 34273 - DNA, 204 bp, unidentified
  source 1..204: mol_type = unassigned DNA; note = methanogen bacteria
agctggaacatgcagagcgttgtgtttcaggactcccaacagcagcaacaaatcgagcagacatcgccggatgtcaccgaggtcagcgaagggcaagtattgaatgaaaccccagacacttcaaactcctcaggttcaggttacatggagatgggtaaggtatacaaggatcccgcaacgggcaagctgataatggtcgagggt

SEQ ID NO: 34274 - DNA, 243 bp, unidentified
  source 1..243: mol_type = unassigned DNA; note = methanogen bacteria
gcacaggatacaaataatataacagatttaaataataatggtgctatagggaacaatcccataattgatgatggaaatggatctttagaaattcaaaatgcaaataatttaactgctgtaggtacttttgataatcttcaggtagagatagataaagcacctgaaggttctgttttaaatttaacaagagattataatggtgcttatggttctagaatacaattcaataaaaatttaactata

SEQ ID NO: 34275 - DNA, 195 bp, unidentified
  source 1..195: mol_type = unassigned DNA; note = methanogen bacteria
agctggaacatgcaggcgatgattgaccctagtgagaatgttcatgaacagatgcagcagaaaatgacggaagtggatcaaggccaacagttgaacgacactcctgacacttctaattcatcaggtcagggatataccgagatgggtaaggtttacaaggatccttctacgggcaagctgataatggtggaaggt

SEQ ID NO: 34276 - DNA, 204 bp, unidentified
  source 1..204: mol_type = unassigned DNA; note = methanogen bacteria
agttggaatatgcaaagcgtagttttccaggataatcctcagcaaagtgctattcaagactcttctccggatgtgactgaagtggaggaaggccaagtattaaacgatactcctgacacttctaatagttcaggtcagggatatatggaaatgggtaaagtttataaggacccttcatcgggcaaactgattatggttgaaaat

SEQ ID NO: 34277 - DNA, 39 bp, unidentified
  source 1..39: mol_type = unassigned DNA; note = methanogen bacteria
aatttcgcattagatcctgcaaccgggattatcggatca

SEQ ID NO: 34278 - DNA, 66 bp, unidentified
  source 1..66: mol_type = unassigned DNA; note = methanogen bacteria
cctatgattcaggttatacctgaaatgaatttcgcattagaccctgtaacaggggttatcggatca

SEQ ID NO: 34279 - DNA, 42 bp, unidentified
  source 1..42: mol_type = unassigned DNA; note = methanogen bacteria
actatgactcctgaaggtttagctgcatatcttccacaagaa

SEQ ID NO: 34280 - DNA, 300 bp, unidentified
  source 1..300: mol_type = unassigned DNA; note = methanogen bacteria
gcacttaacagatctgttcttgtaggtgaacaggtgacatttgaaatcgttgtacaaaacttgggtcaaatagatttaaacaatgttgttgttcgtgaagactcattcaatggccttgtatatgattcattcatagactacactggattatggaccaaaaacaatgatttatcctggaccttaaatgttcctttggtcgccggtgaatatgcaggattctttgtaacattcaacactaccgctgaaggtaaatttgtaaatgtcgttgttgcagattccaaagaactaagaaattccaaa

SEQ ID NO: 34281 - DNA, 33 bp, unidentified
  source 1..33: mol_type = unassigned DNA; note = methanogen bacteria
gttgcgggccttggggccgatcagcttgctgca

SEQ ID NO: 34282 - DNA, 195 bp, unidentified
  source 1..195: mol_type = unassigned DNA; note = methanogen bacteria
agctggaacatgcaggctatgcttgatccggaccataacattcaggaacagatgcagcaaaagatgactgaagtggatcaaggtcaggaattgaacgaaactccggacacttcaaacagttccggtcaaggctataccgaaatgggtacggtttacaaggaccccgctacgggtaagctgataatggtggaaggc

SEQ ID NO: 34283 - DNA, 135 bp, unidentified
  source 1..135: mol_type = unassigned DNA; note = methanogen bacteria
gtcaacggcgacttcggaggttccgacgacgccggaggaggagtcgcggacgactacggatacgaggcatggaccggagatatcctcaccatcatcaccggcgaccccaactacgagctccccggagagaccgag

SEQ ID NO: 34284 - DNA, 54 bp, unidentified
  source 1..54: mol_type = unassigned DNA; note = methanogen bacteria
cctaatattacaacagtatttgcactacgattcggtcttggaagaggtttggat

SEQ ID NO: 34285 - DNA, 201 bp, unidentified
  source 1..201: mol_type = unassigned DNA; note = methanogen bacteria
agctggaatatgcagagtgttgtgtttcaggatagccagcagcagccaatagagcagtcatctccagatgtgactgaagtgagtgaaggacaggctctgaatgaaactccggacacttcaaacagttcaggtcagggctatatggagatgggtaaggtctataaggatccttcaacgggcaagctgattatggttgaaggt

SEQ ID NO: 34286 - DNA, 36 bp, unidentified
  source 1..36: mol_type = unassigned DNA; note = methanogen bacteria
atgaatgttaacttagatcctatatctggtgtctta

SEQ ID NO: 34287 - DNA, 69 bp, unidentified
  source 1..69: mol_type = unassigned DNA; note = methanogen bacteria
ttatcaatggacgatattaacgcagaaatagacaaagtttgcgctgctgctgatgaattatctaactct

SEQ ID NO: 34288 - DNA, 252 bp, unidentified
  source 1..252: mol_type = unassigned DNA; note = methanogen bacteria
gcaagcgacataaaccacacaccgtccgaccccaccacgtttaatgacaccacgcccataaacgaataccaacccctcaccgacaactttgatgactccaataatactaatgaaaatctccaaccaggaacttttgaagagttaaagtatgatattgaaaatctcaaatcaggagacacatacgatatcaataaagattattatttcaatgacaatggagaaaatatacattcaaacaatcgggtaattgag

SEQ ID NO: 34289 - DNA, 45 bp, unidentified
  source 1..45: mol_type = unassigned DNA; note = methanogen bacteria
accatgcaaccggaatcattggcagcatacttgccacatggttat

SEQ ID NO: 34290 - DNA, 156 bp, unidentified
  source 1..156: mol_type = unassigned DNA; note = methanogen bacteria
tacatgactgattggaacggcctcggtcacattaatgatgagatgagtagtatcgactacggaagccacgacagttccaccacggactccatctacgatgattccaccggtgaactcagggatgatactctcaactacaagatcttcgaagaatac

SEQ ID NO: 34291 - DNA, 33 bp, unidentified
  source 1..33: mol_type = unassigned DNA; note = methanogen bacteria
tttagattagatggttcaagcttccaactttgg

SEQ ID NO: 34292 - DNA, 210 bp, unidentified
  source 1..210: mol_type = unassigned DNA; note = methanogen bacteria
ttattgactacaatagattattccaatgatattattgattctattgattcaaaaaatgagatgtcaaagattactgaagccattgatttctgttatgcttctggaaaagggtcaaaaaagatagttttggtggattttaatcaaaatgcaaatatgaaattatataatgatggaaaaaaagggatttgcatcaatcaatctaaatttgtc

SEQ ID NO: 34293 - DNA, 102 bp, unidentified
  source 1..102: mol_type = unassigned DNA; note = methanogen bacteria
ttatatggtttcaaacatttgatacagccaggaataagcttgatttacaatgctgttggaactcaattggctcctaacatggtaaccttagtcgtattcgat

SEQ ID NO: 34294 - DNA, 69 bp, unidentified
  source 1..69: mol_type = unassigned DNA; note = methanogen bacteria
aagacattgatggatacacctactgttagcttaatcgttcctggtgttgaagagtggaaaaaatcaata

SEQ ID NO: 34295 - DNA, 42 bp, unidentified
  source 1..42: mol_type = unassigned DNA; note = methanogen bacteria
actatgactccagaggctttagctgcttacttgccacaggaa

SEQ ID NO: 34296 - DNA, 201 bp, unidentified
  source 1..201: mol_type = unassigned DNA; note = methanogen bacteria
agttggaatatgcaggcaatggttgatccgactgaatcgattcaggaaaaaatgcaacagcaacagcaaaccactgaagtaagtcagggtcatgaacttaatgatactcctgatacttcaaatagctctggtcagggttatactgaaatgggtagagtttataaggacccttcaacgggtaaactgattatggtggaaggt

SEQ ID NO: 34297 - DNA, 60 bp, unidentified
  source 1..60: mol_type = unassigned DNA; note = methanogen bacteria
atggcaattcttgaagacatttggaatggattctgcgacttcgtgaactacctttggtgc

SEQ ID NO: 34298 - DNA, 201 bp, unidentified
  source 1..201: mol_type = unassigned DNA; note = methanogen bacteria
agctggaatatgcagagtgtcgtatttcaaaatcaggaacagcagacatttgatgaatcctcacctgacgtgaccgaagtgtcagaaggtcaagtcctgaatgagactcccgactcttccaacagttcaggtcaaggttatatggaaatgggtaaagtctataaagacccatcgacgggcaagctaataatggttgaagga

SEQ ID NO: 34299 - DNA, 39 bp, unidentified
  source 1..39: mol_type = unassigned DNA; note = methanogen bacteria
gcaacatttggaggaagttttgcaggcctctttggagga

SEQ ID NO: 34300 - DNA, 63 bp, unidentified
  source 1..63: mol_type = unassigned DNA; note = methanogen bacteria
ttgtctaattttgattttcaatttatgtttttatcatatttttgcaagaacaccccgacctct

SEQ ID NO: 34301 - DNA, 45 bp, unidentified
  source 1..45: mol_type = unassigned DNA; note = methanogen bacteria
atgggaatatttataaaaaatgttaatggtgattatttgttagaa

SEQ ID NO: 34302 - DNA, 198 bp, unidentified
  source 1..198: mol_type = unassigned DNA; note = methanogen bacteria
agctggaacatgcaggcaatgattgatccaagtcagaatattcaagaacagatgcagcagcaaaagactactcaagtagaccaaggacagcagttaaatgatactccagacacttcaaacagttctggtcaaggttatactgaaatgggtaaagtttataaagaccctgctacgggtaagctgataatggtggaaggt

SEQ ID NO: 34303 - DNA, 198 bp, unidentified
  source 1..198: mol_type = unassigned DNA; note = methanogen bacteria
agctggaacatgcaggcgatgatagacccgaatcagaatattcaggaacagatgcagcagcagactatgactgaagtggatcagggccagcagctgaacgagacaccggacacctcaaacagttcaggtcagggttataccgagatgggtaaagtttacaaagatccttcaacgggtaagctgattatggtcgaggga

SEQ ID NO: 34304 - DNA, 39 bp, unidentified
  source 1..39: mol_type = unassigned DNA; note = methanogen bacteria
gtaaagcctgaaaatgtggctaatgaattgtctcatgta

SEQ ID NO: 34305 - DNA, 63 bp, unidentified
  source 1..63: mol_type = unassigned DNA; note = methanogen bacteria
atgggaatattaactgagatttgggactggctcgtcgatttcggcgtgttcatctgggggaac

SEQ ID NO: 34306 - DNA, 198 bp, unidentified
  source 1..198: mol_type = unassigned DNA; note = methanogen bacteria
agctggaacatgcaggcaatgatagatccggaacataatgttcaggagcagatgcagcagaagacaatgactgaagtcgatcagggtcatcagttaaacgaaactcctgatacttcaaacagctcaggtcaaggttataccgagatgggtaaggtctataaagaccctgcgacgggtaagctgattatggtggaaggt

SEQ ID NO: 34307 - DNA, 198 bp, unidentified
  source 1..198: mol_type = unassigned DNA; note = methanogen bacteria
agctggaatatgcaggcaatgattgaccctacgcagaacattcaggaacagatgcagcagcagaaaacaacagaagtagatcagggtcagcagttaaacgaaacacctgatacttcaaattcatcaggtcagggctataccgagatgggtaaagtctataaagaccctgctacgggcaagctgataatggtggaagga

SEQ ID NO: 34308 - DNA, 42 bp, unidentified
  source 1..42: mol_type = unassigned DNA; note = methanogen bacteria
tttgaagttattttcacacataccattacaacaagtttagaa

SEQ ID NO: 34309 - DNA, 30 bp, unidentified
  source 1..30: mol_type = unassigned DNA; note = methanogen bacteria
atgatatatctaattagtgaaacctcatta

SEQ ID NO: 34310 - DNA, 198 bp, unidentified
  source 1..198: mol_type = unassigned DNA; note = methanogen bacteria
agctggaacatgcaggccatgatagatccaaccacttcaattcatgaccagatgcagcagaaggaaactgttgaagttgaccagggccagcagttaaatgaaactccagacacatcaaactcttcaggtcagggttatactgaaatgggtaaagtttacaaggaccccgcaacgggtaagctgattatggtggaaggt

SEQ ID NO: 34311 - DNA, 63 bp, unidentified
  source 1..63: mol_type = unassigned DNA; note = methanogen bacteria
ataaatacacttgaaatccaaccccatattagttttcaaatgctctctttctctttttttata

SEQ ID NO: 34312 - DNA, 72 bp, unidentified
  source 1..72: mol_type = unassigned DNA; note = methanogen bacteria
gttcttacagtattacttttatctattttagctgttagcgcagctccaagcccagaaatgatgagctgggta

SEQ ID NO: 34313 - DNA, 51 bp, unidentified
  source 1..51: mol_type = unassigned DNA; note = methanogen bacteria
aatccagcattgcacaagatatggtttttacattggaatagctggagtagt

SEQ ID NO: 34314 - DNA, 33 bp, unidentified
  source 1..33: mol_type = unassigned DNA; note = methanogen bacteria
ttcttggaaaattatggacaagtacacatttcc

SEQ ID NO: 34315 - DNA, 36 bp, unidentified
  source 1..36: mol_type = unassigned DNA; note = methanogen bacteria
attttcattaaaagcgttggacaggcccagatgtca

SEQ ID NO: 34316 - DNA, 30 bp, unidentified
  source 1..30: mol_type = unassigned DNA; note = methanogen bacteria
ccgtatgtactgtattcaaatggtggggga

SEQ ID NO: 34317 - DNA, 33 bp, unidentified
  source 1..33: mol_type = unassigned DNA; note = methanogen bacteria
tttatcgaaagctttggaaaagcacatacacca

SEQ ID NO: 34318 - DNA, 33 bp, unidentified
  source 1..33: mol_type = unassigned DNA; note = methanogen bacteria
cttattgaaagtggaggttctgaaggatattca

SEQ ID NO: 34319 - DNA, 33 bp, unidentified
  source 1..33: mol_type = unassigned DNA; note = methanogen bacteria
tttttaaaagaggcaggcagtgtacatactccc

SEQ ID NO: 34320 - DNA, 36 bp, unidentified
  source 1..36: mol_type = unassigned DNA; note = methanogen bacteria
gaaggcggcgagggtgagttcctcgagatcggtctg

SEQ ID NO: 34321 - DNA, 111 bp, unidentified
  source 1..111: mol_type = unassigned DNA; note = methanogen bacteria
attttttcatcaggaactagcaataacgttcagccaaatattacaataacatttgatcaagtatatgccagcgattttgaatctgacggaaaacccactattcatataatg

SEQ ID NO: 34322 - DNA, 36 bp, unidentified
  source 1..36: mol_type = unassigned DNA; note = methanogen bacteria
tttatatttctattgaatttttcacatgctcacgct

SEQ ID NO: 34323 - DNA, 36 bp, unidentified
  source 1..36: mol_type = unassigned DNA; note = methanogen bacteria
atatttttggaaagctttggacatgcacacactcca

SEQ ID NO: 34324 - DNA, 252 bp, unidentified
  source 1..252: mol_type = unassigned DNA; note = methanogen bacteria
tcagagttaagcgatgataacctgactgaaattgatgaagatatggaaagtacatttcacaatactacatttgaggatttgtcacaaaaaattaacgatacgcctgaaaatcagacattgacattgactgatgattatcaatatgacggtggggacattcatggaattgtcatttcaaaatcaataaccatcgatggagcgggccatacaattgatgcaaaccactcatccaggatattcaatgtcactgca

SEQ ID NO: 34325 - DNA, 123 bp, unidentified
  source 1..123: mol_type = unassigned DNA; note = methanogen bacteria
gcatctggagatcctgatggattggaaaaatctgcagaagatgctggagttggtgaagatgtagaatctgcagttatcgaatcaccattccctgactatacttatgaacctttagacaaaata

SEQ ID NO: 34326 - DNA, 30 bp, unidentified
  source 1..30: mol_type = unassigned DNA; note = methanogen bacteria
tattcaaaggcaggaatatcactatccctt

SEQ ID NO: 34327 - DNA, 42 bp, unidentified
  source 1..42: mol_type = unassigned DNA; note = methanogen bacteria
ttcttgatattcattgaaagccttggacatgcacacactcct

SEQ ID NO: 34328 - DNA, 33 bp, unidentified
  source 1..33: mol_type = unassigned DNA; note = methanogen bacteria
ttcttaaaagaggcaggcagtgcacatactcct

SEQ ID NO: 34329 - DNA, 30 bp, unidentified
  source 1..30: mol_type = unassigned DNA; note = methanogen bacteria
atcctaaaagacattggcaatgcaaatgct

SEQ ID NO: 34330 - DNA, 30 bp, unidentified
  source 1..30: mol_type = unassigned DNA; note = methanogen bacteria
cttgagcagttcccaaaagcccacacacca

SEQ ID NO: 34331 - DNA, 33 bp, unidentified
  source 1..33: mol_type = unassigned DNA; note = methanogen bacteria
tttctggaaagcttgggaagttttcatacacca

SEQ ID NO: 34332 - DNA, 33 bp, unidentified
  source 1..33: mol_type = unassigned DNA; note = methanogen bacteria
gttattactcattttaaccagggtcacattcat

SEQ ID NO: 34333 - DNA, 36 bp, unidentified
  source 1..36: mol_type = unassigned DNA; note = methanogen bacteria
gaaggcggtgagggagagttcctcgaaatcggacta

SEQ ID NO: 34334 - DNA, 30 bp, unidentified
  source 1..30: mol_type = unassigned DNA; note = methanogen bacteria
tttttagaaaaccttaaaattgcacacgct

SEQ ID NO: 34335 - DNA, 228 bp, unidentified
  source 1..228: mol_type = unassigned DNA; note = methanogen bacteria
gcaaaatactcatttgatattcaggatgttgaagcttttgaaaggtcagcgtgggaatctggcacccctgtaacaaatggaaagaattggagagtaaaaaaatatgacaaaacaattgctgcagtaaatggaaaggaaacgatttatgtaaggatagaaaaaagctctaatacaatacatggtcatcctatatctgagtcagaatataataaattgttgaaagaacat

SEQ ID NO: 34336 - DNA, 36 bp, unidentified
  source 1..36: mol_type = unassigned DNA; note = methanogen bacteria
ctaatttttattgaaagctttggacaggcccatata

SEQ ID NO: 34337 - DNA, 30 bp, unidentified
  source 1..30: mol_type = unassigned DNA; note = methanogen bacteria
tatcctttttcaatccactcacaaatagtt

SEQ ID NO: 34338 - DNA, 195 bp, unidentified
  source 1..195: mol_type = unassigned DNA; note = methanogen bacteria
gcattacagattaacccagatatgatggctaaaactcaagaatctcaagcacaaaaagcagcatcacaagtaagtactggagaagattttaataataataacagtgcaagttcatcattagaagaatcgggttactccgaagtaggaaaagtttatagagaccctgatacaggtaaattagtaatggttcaggac

SEQ ID NO: 34339 - DNA, 195 bp, unidentified
  source 1..195: mol_type = unassigned DNA; note = methanogen bacteria
agctggaacatgcaggcaatgattgaccctgaaaacagtattcaggagcaaatgcagcaaaagactacagaagttgaccagggccaacaattgaatgaaactccagacagttcaaatagttccggtcagggctatactgaaatgggtaaggtttacaaggatcctgcaacgggtaagctgataatggtggaggga

SEQ ID NO: 34340 - DNA, 33 bp, unidentified
  source 1..33: mol_type = unassigned DNA; note = methanogen bacteria
tttatcgaaagttttgggcaggtacacacttca

SEQ ID NO: 34341 - DNA, 195 bp, unidentified
  source 1..195: mol_type = unassigned DNA; note = methanogen bacteria
gctcttcaagttaatcctgacatgatggctaaaacacaggaatcccaagctcagcaggctgcttctgatgtaagcactggagaaacctttacaagcaattctactgcgggctcttctcttgaacaatccggttactcagaagtaggtaaggtttatagggatccagatacgggcaagctggtgatggttcagggg

SEQ ID NO: 34342 - DNA, 78 bp, unidentified
  source 1..78: mol_type = unassigned DNA; note = methanogen bacteria
ttcccttggggaggaacagatcctcaaatgagtgttttaggtattagctgccgttgcaattattgcaggtctggccgc

SEQ ID NO: 34343 - DNA, 105 bp, unidentified
  source 1..105: mol_type = unassigned DNA; note = methanogen bacteria
ttccatttgcatgacatgattaatccgggagtaagcaatatctacaatgcacttggaacacagatagctccaaacatggttactgtggtcattttcgatttcagg

SEQ ID NO: 34344 - DNA, 51 bp, unidentified
  source 1..51: mol_type = unassigned DNA; note = methanogen bacteria
cctaaaataagtgatccacttgcaggattctttggatttaaaagaggactg

SEQ ID NO: 34345 - DNA, 90 bp, unidentified
  source 1..90: mol_type = unassigned DNA; note = methanogen bacteria
tacaggtcttacttcagcaataatgcaagtggattgaatgcaacacaggacatcagttcaattagggctaacatgaccaacattccttga

SEQ ID NO: 34346 - DNA, 33 bp, unidentified
  source 1..33: mol_type = unassigned DNA; note = methanogen bacteria
tttttggcaagcgtcggaaaggcacacactccc

SEQ ID NO: 34347 - DNA, 195 bp, unidentified
  source 1..195: mol_type = unassigned DNA; note = methanogen bacteria
tcctggaatatgcaggcgatgattgatccaagcgagaatattcaggagcagatgcaacagaaaaccactgaaattgatcagggcactcagttggatgatgcgccggataccagtaacagttcaggtcagggttataccgagatgggtaaggtttataaggatccgtcgacgggcaagctcatcatggtcgaagga

SEQ ID NO: 34348 - DNA, 30 bp, unidentified
  source 1..30: mol_type = unassigned DNA; note = methanogen bacteria
acaataggctcaagtatgcatttatccagt

SEQ ID NO: 34349 - DNA, 102 bp, unidentified
  source 1..102: mol_type = unassigned DNA; note = methanogen bacteria
atctatggattcaagaacttgattcaacctggaatcagcttggtttacaatgctatcggaacacagcttgctccaaacatggttacacttgttgtattcgat

SEQ ID NO: 34350 - DNA, 54 bp, unidentified
  source 1..54: mol_type = unassigned DNA; note = methanogen bacteria
gcacctagattcagtgatccacttgcagggttctttggttttggtagaggtttg

SEQ ID NO: 34351 - DNA, 39 bp, unidentified
  source 1..39: mol_type = unassigned DNA; note = methanogen bacteria
ttagcatatgacccggtaaatggggttctcggatcatct

SEQ ID NO: 34352 - DNA, 66 bp, unidentified
  source 1..66: mol_type = unassigned DNA; note = methanogen bacteria
ctcctatctatggatgatgttggtgaaggagttgcaaaagtagaagcagctgcagatgaattaatg

SEQ ID NO: 34353 - DNA, 30 bp, unidentified
  source 1..30: mol_type = unassigned DNA; note = methanogen bacteria
ttcttagctgcttgcttatgggaggattct

SEQ ID NO: 34354 - DNA, 51 bp, unidentified
  source 1..51: mol_type = unassigned DNA; note = methanogen bacteria
cccgcaatgcctacttcacattttgttttatattatgtgtctcaaattgaa

SEQ ID NO: 34355 - DNA, 243 bp, unidentified
  source 1..243: mol_type = unassigned DNA; note = methanogen bacteria
ttatttaatccgtttaatgctaaagagccaacaaaacttaaaattacaagtgataatgagcagtatgaaggcgggaaattgtcagtcaagttgactgatttgaataatactccgatttcaaaggaaattgttaatgtcactattaccaacaaaaagggtaaggtggttgtagatgatattgttaaaactgattccaagggtatggaaatgaaaattacactggtaataatacaacacagaaat

SEQ ID NO: 34356 - DNA, 54 bp, unidentified
  source 1..54: mol_type = unassigned DNA; note = methanogen bacteria
gaaaattcaaatctggttcttgaattttctagcaaggatttcataaatctattt

SEQ ID NO: 34357 - DNA, 54 bp, unidentified
  source 1..54: mol_type = unassigned DNA; note = methanogen bacteria
atgtgtaatgctgatatgaaaatgatattaaaaatagttatagaagttttaaat

SEQ ID NO: 34358 - DNA, 99 bp, unidentified
  source 1..99: mol_type = unassigned DNA; note = methanogen bacteria
ccatttatactaggagcagttgataaaatattgccgatggattatgatgatagttggtatgaatgttataattatgtcaaaaatagtcaagaagacgaa

SEQ ID NO: 34359 - DNA, 30 bp, unidentified
  source 1..30: mol_type = unassigned DNA; note = methanogen bacteria
gaatatgccagttctatgggatcttctgca

SEQ ID NO: 34360 - DNA, 195 bp, unidentified
  source 1..195: mol_type = unassigned DNA; note = methanogen bacteria
atgggttatgataagtggattaaggttaaggtcgatatgattcatgccgatccaatttctcagggttttgtaatgtctgctgacaaactgaaagatttgaatttgaaaaatactgtggcaagcatcgtaacggcagagtatgtcgataaaaattatactagaattaaaactagtggagattccttttatattctg

SEQ ID NO: 34361 - DNA, 60 bp, unidentified
  source 1..60: mol_type = unassigned DNA; note = methanogen bacteria
ggatcaattgcaaaattcctatgtgcttcacagtctgctctaattcctgatgtaaccagt

SEQ ID NO: 34362 - DNA, 66 bp, unidentified
  source 1..66: mol_type = unassigned DNA; note = methanogen bacteria
atggttttagaaagtacagtaccatttttagcatcagcagctcctaacttatttggagttttatat

SEQ ID NO: 34363 - DNA, 57 bp, unidentified
  source 1..57: mol_type = unassigned DNA; note = methanogen bacteria
atgttatggcatgttatgatgacatgcattttaggaaatggtgattggatgtttgaa

SEQ ID NO: 34364 - DNA, 102 bp, unidentified
  source 1..102: mol_type = unassigned DNA; note = methanogen bacteria
atgctggtcgagcccggcatcagcggctacggggatgcggtctggtactgcttcgtcgcctgcacgtcgataggcttcggagacctcgttgaggcgacattc

SEQ ID NO: 34365 - DNA, 33 bp, unidentified
  source 1..33: mol_type = unassigned DNA; note = methanogen bacteria
atgttgattttaaaaaatataatatttgtgatt

SEQ ID NO: 34366 - DNA, 63 bp, unidentified
  source 1..63: mol_type = unassigned DNA; note = methanogen bacteria
actcccgccgatcaggaaaaggtcctgaatctggtgggaaagaagaagaccatcatcgtggag

SEQ ID NO: 34367 - DNA, 144 bp, unidentified
  source 1..144: mol_type = unassigned DNA; note = methanogen bacteria
tatgcaacttcctgggataacatgaacgacgagcctacttccatcccctacaacggaaccgatggaatgaacgccgagtccaacaccaacgacgacggaaccctgaaaactaactcgctcaactatggcgtatttgaggcatac

SEQ ID NO: 34368 - DNA, 228 bp, unidentified
  source 1..228: mol_type = unassigned DNA; note = methanogen bacteria
gaggatacctcgtggaccgacgtcaattccgagagcgaactgattgaggccctgaacggcggaacaaagaacatccgcatcgtctccgacatcacgatgaccggagacctgaacatcccggctggggtcagggtcctcatcccctatgcagctggcgacacctccggactgaaggtagggggagagacgttcaggatcgccgggagcagctacgtccacctcaccgtg

SEQ ID NO: 34369 - DNA, 57 bp, unidentified
  source 1..57: mol_type = unassigned DNA; note = methanogen bacteria
taccggtcatatatggagaccagtgacagaagtttaaaagcaaaagacgacatcata

SEQ ID NO: 34370 - DNA, 84 bp, unidentified
  source 1..84: mol_type = unassigned DNA; note = methanogen bacteria
tatatgtccaacataacccaaaaaacgcaaacaacattaactaatttgttaaaagaagaaagagattatttaataaataaaatt

SEQ ID NO: 34371 - DNA, 174 bp, unidentified
  source 1..174: mol_type = unassigned DNA; note = methanogen bacteria
ttggctgtcaatccggatatgattactcaaactcaatcaactaaagatgtttcaacagcagacacattttcccaaaattacactaatgctagtgggatggaagacagtggatacagtgaagttggaaaagtatatcaagatccgactaccggcgaactggtaatggtatcgagt

SEQ ID NO: 34372 - DNA, 45 bp, unidentified
  source 1..45: mol_type = unassigned DNA; note = methanogen bacteria
ctaccccagcctgcaactgcatctcttgcttctatattagctttg

SEQ ID NO: 34373 - DNA, 30 bp, unidentified
  source 1..30: mol_type = unassigned DNA; note = methanogen bacteria
gattccatatctaactacttttgtagccaa

SEQ ID NO: 34374 - DNA, 60 bp, unidentified
  source 1..60: mol_type = unassigned DNA; note = methanogen bacteria
atggcaatggcaattcccggtggtgacttcttaaccactggacttaacttgatttcacaa

SEQ ID NO: 34375 - DNA, 141 bp, unidentified
  source 1..141: mol_type = unassigned DNA; note = methanogen bacteria
tatgcaacttcctgggacggaatggacgagcccacccccatcccctacaacggagaggcgggaatgaacgcaccgtcgaacaccaacgacgacggaaccctgaaagagaactcgctcaactatggcgtattcgaggcctac

SEQ ID NO: 34376 - DNA, 57 bp, unidentified
  source 1..57: mol_type = unassigned DNA; note = methanogen bacteria
ttgcctggagctcagttgttaacagaaggagattttataacttttatcaaattagtg

SEQ ID NO: 34377 - DNA, 60 bp, unidentified
  source 1..60: mol_type = unassigned DNA; note = methanogen bacteria
atgattcaaattttaagttgttcaccaagtatggacacattaattggggcagttaaatta

SEQ ID NO: 34378 - DNA, 75 bp, unidentified
  source 1..75: mol_type = unassigned DNA; note = methanogen bacteria
ttagcatttgatcttgttgctagtattgttactaatgatggtacagatcttcataacgataatttaaaaaatggt

SEQ ID NO: 34379 - DNA, 186 bp, unidentified
  source 1..186: mol_type = unassigned DNA; note = methanogen bacteria
tcaacgggtcttcaggatattgtatttgaaaatcatcaaaatcagtctcagcaaacagtagaaattgaacagggtcaagaagtaacggatactatggaacagattaatgagtccagttccggttatacaaaaacaggaacggtatatactgatcctaaaacaggaaaaaaatatatgacgtccaca

SEQ ID NO: 34380 - DNA, 54 bp, unidentified
  source 1..54: mol_type = unassigned DNA; note = methanogen bacteria
tatgaccttatttttaaatctgatgatagttctaatattatatttcggggcata

SEQ ID NO: 34381 - DNA, 138 bp, unidentified
  source 1..138: mol_type = unassigned DNA; note = methanogen bacteria
gcatccggtgaccctgacggattagaaaaatcagctgaagactcaggtcttgatgaagatttctcagttgaagacataaaaggcatacctgaagcggtactgccggattatgcatttgcaaacgatccggataaccaa

SEQ ID NO: 34382 - DNA, 105 bp, unidentified
  source 1..105: mol_type = unassigned DNA; note = methanogen bacteria
ttccacataagcaatataattaatccgggcgtaagcaatatctataatgcgttgggaactcagattgctccaaacatggtaaccgttgtaatatttgatttcaga

SEQ ID NO: 34383 - DNA, 294 bp, unidentified
  source 1..294: mol_type = unassigned DNA; note = methanogen bacteria
gattctttaaaaatcaagtcagacatgtccaaaattgctttagctatcaaaacggtttatggcgaaggtcaggggtcaagacaaaccgtaaacatatattccacatatccattcaaagtcaatgtgggaagcgattatttgtcgtgcaatgttcatcttaaggatagcacaaataagcatattgaagttccatcaaaatcaaatttaaaatcaacgtcaattagccttaaaaaaggtacaaatatagttactgttgaatggcctgtaggtggtgaaaatatgttaatatcaact

SEQ ID NO: 34384 - DNA, 60 bp, unidentified
  source 1..60: mol_type = unassigned DNA; note = methanogen bacteria
gcttggagcgatgtcgagcccttctgcgatgtggcggcttgggatgtcttctacgatgcc

SEQ ID NO: 34385 - DNA, 138 bp, unidentified
  source 1..138: mol_type = unassigned DNA; note = methanogen bacteria
gtcaacgagtgggacgacagccccctcgggttcgatgatgagcctcagtccatcccgtacgacgacgtcgtcatcgacaatggcggaaccgacactgtcgacgacagctcgctcaactacggtgtgctcgagacctac

SEQ ID NO: 34386 - DNA, 60 bp, unidentified
  source 1..60: mol_type = unassigned DNA; note = methanogen bacteria
ttcgacggacctgtcgaggcaatcaagaacgttgagggttgggacattctctacaacacc

SEQ ID NO: 34387 - DNA, 123 bp, unidentified
  source 1..123: mol_type = unassigned DNA; note = methanogen bacteria
aatggtttaggtgaagatcaaggatacttcggaggagcagatgacgcaggttcagatgcggtatccgaaactggttacaaaccatggttcgaaagtttctgggaacctccatctggtgagatt

SEQ ID NO: 34388 - DNA, 126 bp, unidentified
  source 1..126: mol_type = unassigned DNA; note = methanogen bacteria
ttcagcggtcacggagaagatgacggatactttggtggatcagacgatgcagctagtgaacaaattgaagcatcaaattatgaaccatggttttcatcaatatgggaaccacctagtggtgaaata

SEQ ID NO: 34389 - DNA, 105 bp, unidentified
  source 1..105: mol_type = unassigned DNA; note = methanogen bacteria
tgttacatgtccatgcagtccggaacagcagtatctgattttgtaacacagggaacaggacttgtattcattgtgtatcctacagtattcaatgtgtttggtcag

SEQ ID NO: 34390 - DNA, 45 bp, unidentified
  source 1..45: mol_type = unassigned DNA; note = methanogen bacteria
ggcatgccgacatcagaattcgttttgaagtatgtgtctcaagtt

SEQ ID NO: 34391 - DNA, 126 bp, unidentified
  source 1..126: mol_type = unassigned DNA; note = methanogen bacteria
tacaatggtcatggggaagatgatggatactttggtggttctgacgatgcagcaagtgaacaaattgaagcaactcactttgaaccatggttttcatcaatttgggaaccacctagtggtgaaata

SEQ ID NO: 34392 - DNA, 150 bp, unidentified
  source 1..150: mol_type = unassigned DNA; note = methanogen bacteria
ttccctgcaggtgtcgattatggatcacaggaaagtttcatcggaatgataggaaccgcaatcgctccagtatttgctccactgtttccatactattcggtctggttgcaaaggaggttgtcgtatccacattcagttcattattcggag

SEQ ID NO: 34393 - DNA, 126 bp, unidentified
  source 1..126: mol_type = unassigned DNA; note = methanogen bacteria
ttcagcggtcatggagaagatgacggatactttggtggagcagatgatgcagcaggtgaagctattgaagaatcaggtttcactccttggttttcatcaatatgggaaccacctagtggtgaaata

SEQ ID NO: 34394 - DNA, 132 bp, unidentified
  source 1..132: mol_type = unassigned DNA; note = methanogen bacteria
agtggtcacggtgaagatgacggttacttcggtggatcagatgacgctggaggagaagctatagaacaaaataacccaggctaccatgtatgggcacaacctctttgggaaccacctagtggggaaattgaa

SEQ ID NO: 34395 - DNA, 126 bp, unidentified
  source 1..126: mol_type = unassigned DNA; note = methanogen bacteria
tatcatggtcatggagaagatgacggatactttggtggtgctgatgatgctgctggtgaacaaattgaaaaaacaggattcgaaccatggttttcatctatatgggaaccacctagtggtgaaata

SEQ ID NO: 34396 - DNA, 138 bp, unidentified
  source 1..138: mol_type = unassigned DNA; note = methanogen bacteria
gcatctggtgaccctgatggactcgaaaaatctgctgaagacgctggtcttccagaaggcttctcaattgaaaaaattggtggaattcctgaagccattttcccagactatgccgttgcaagtgcccctgataatcaa

SEQ ID NO: 34397 - DNA, 189 bp, unidentified
  source 1..189: mol_type = unassigned DNA; note = methanogen bacteria
atggctgtacagacaaatccggaaataattcactccagtcaagaacaatcacaatcacagggtgaacaagtatcctcaggtcaggaggttaacaattcatcaagtggcggttcatcacagaatggttatagtgaagtaggtaaggtatataaggatcctgaaaccggaaagctagtaatggtatcatcg

SEQ ID NO: 34398 - DNA, 63 bp, unidentified
  source 1..63: mol_type = unassigned DNA; note = methanogen bacteria
atcaactggagcggaatctctcccttcaacggtatcgacggatggaacatcgtctacaacgcc

SEQ ID NO: 34399 - DNA, 63 bp, unidentified
  source 1..63: mol_type = unassigned DNA; note = methanogen bacteria
atgaatatagataccacactgtttggcggatttataaaaggttttggacaattattctcgaat

SEQ ID NO: 34400 - DNA, 237 bp, unidentified
  source 1..237: mol_type = unassigned DNA; note = methanogen bacteria
aatgattctaatgtaacaaatgataatgactggtcatatgacaaaaacgagtatcctaagaatgaatatagattggatgaactacccgtttcacacaagtccgcttatgaagtaagacagttttttgaagattcagactccgacaatgatggagtacttaaggaccgggagatcaatacctttgactataaaattaaacatagccaatataccttcaacggaccctacggatacagt

SEQ ID NO: 34401 - DNA, 141 bp, unidentified
  source 1..141: mol_type = unassigned DNA; note = methanogen bacteria
gcatccggcgatcctgatggattagaaaaatctgcagaagattcaggacttgctgaagatttctcagttgaagaaattaagggaatccctgatgcaatcttcccagattatgcatttgcaagcaaccctgataaccaagga

SEQ ID NO: 34402 - DNA, 138 bp, unidentified
  source 1..138: mol_type = unassigned DNA; note = methanogen bacteria
gcatctggcgacccggacggattggaaaaatcagcggaagacgccggacttgacgaaaacttcacagtagaagaagtcaacggtgttccagaagcagccctcccagattatgcatttgcaaacgatcctgaaaaccaa

SEQ ID NO: 34403 - DNA, 141 bp, unidentified
  source 1..141: mol_type = unassigned DNA; note = methanogen bacteria
gcgtctggtgaccctgacggattagaaaaatcagcagaagattcaggacttgcagaagacttttcaattgaagaaatcaacggaattcctgatgcaatcttcccggattatgcatttgcagataatccagatagccaaccg

SEQ ID NO: 34404 - DNA, 180 bp, unidentified
  source 1..180: mol_type = unassigned DNA; note = methanogen bacteria
agctggaatatgcaggcaatgatagatccggaccagaatattcatgaacagatgcagcagaaaatgaccgaggttgaccaaggccagcagctaaacgaaacccctgacacttcaaactacaccgaaatgggtaaggtgtataaggaccctgctacgggtaagctgataatggtggaagag

SEQ ID NO: 34405 - DNA, 141 bp, unidentified
  source 1..141: mol_type = unassigned DNA; note = methanogen bacteria
gcatctggtgatcccgacggacttgaaaaatcagctgaagattcaggacttgcagaagacttttcagttgaagaaattaaaggaattccagaagcggctttcccagattatgcatttgcagataatcctgataaccaagga

SEQ ID NO: 34406 - DNA, 105 bp, unidentified
  source 1..105: mol_type = unassigned DNA; note = methanogen bacteria
ttccacgttagtaaaataattactcctggtgtaagtaatatttataattcattgggaactaaaatagcaccaaatatggtaacagcggttattttcgatttcaga

SEQ ID NO: 34407 - DNA, 138 bp, unidentified
  source 1..138: mol_type = unassigned DNA; note = methanogen bacteria
gcatctggtgaccctgacggattagaaaaatcagcagaggattcaggccttcctgaagacttctcaattgaagaaattaaaggcatccctgatgccatattcccagattatgcatttgcaaatgctcctgacaaccaa

SEQ ID NO: 34408 - DNA, 231 bp, unidentified
  source 1..231: mol_type = unassigned DNA; note = methanogen bacteria
ttctgggacagcggagaaggagagggcggggtcgcaggaatagccagggatgtgaaggagacggagaacgggttcgtcttctccctcgaggatgcttccggggaggagacgagatgctttttcaaagaccgcccggaaccgggcgcggcctacagggtcgaaggaagcatgtctgacgacgggacgatgctcttcgtcagttcgctggagctcctgcttccggcgcgggaa

SEQ ID NO: 34409 - DNA, 141 bp, unidentified
  source 1..141: mol_type = unassigned DNA; note = methanogen bacteria
gcatctggcgaccctgacggattagaaaaatctgcagaagattctggacttgctgaagatttctcagttgaagaaataaaaggaattcctgaagcgccattacctgattacgcgtttgcaagcaaccctgataaccaagga

SEQ ID NO: 34410 - DNA, 69 bp, unidentified
  source 1..69: mol_type = unassigned DNA; note = methanogen bacteria
gctgacagttcgtggacttggggaagcaacactctcggcgatttcggaatctccgccaccgccgctgcc

SEQ ID NO: 34411 - DNA, 105 bp, unidentified
  source 1..105: mol_type = unassigned DNA; note = methanogen bacteria
ttccatgttagcaaaatgattactccgggtgtaagcaatatttataatgcgttaggaactaaaattgcgccaaacatggtaactgcggtcatttttgatttcaga

SEQ ID NO: 34412 - DNA, 138 bp, unidentified
  source 1..138: mol_type = unassigned DNA; note = methanogen bacteria
gcatctggtgaccccgacggattagaaaaatcagctgaagactccggtcttgaagaagatttcgcagttgaagaaatcaatggtattcctgaggcggcgctccctgattatgcatttgcaagtgatcctgaaaaccaa

SEQ ID NO: 34413 - DNA, 141 bp, unidentified
  source 1..141: mol_type = unassigned DNA; note = methanogen bacteria
gcatctggtgaccctgacggattagaaaagtcagctgaagattcaggcattccagaagatttctcaattgaagaaatcaacggaatccccgatgcaatcttccctgattatgcatttgcaagcgctccagataaccaaccg

SEQ ID NO: 34414 - DNA, 33 bp, unidentified
  source 1..33: mol_type = unassigned DNA; note = methanogen bacteria
aacgctactgcgggtgcagacatcctgtcaatc

SEQ ID NO: 34415 - DNA, 33 bp, unidentified
  source 1..33: mol_type = unassigned DNA; note = methanogen bacteria
aatgttggattggatctttttggtatcgcttca

SEQ ID NO: 34416 - DNA, 45 bp, unidentified
  source 1..45: mol_type = unassigned DNA; note = methanogen bacteria
ggatttgtttttgcagcacctggtgcagtaaacacctatgcagat

SEQ ID NO: 34417 - DNA, 138 bp, unidentified
  source 1..138: mol_type = unassigned DNA; note = methanogen bacteria
gcatccggtgatcctgacggattagaaaaatccgctgaagattccggagttgctgaagacttttcagtagaagaaatcaatggaatccctgatgcaatattcccagattatgcatttgcaaatgaccctgataaccaa

SEQ ID NO: 34418 - DNA, 105 bp, unidentified
  source 1..105: mol_type = unassigned DNA; note = methanogen bacteria
tttcacttaagtcatgttataaatcctggagtaagttatatttataacaatattggaactcaaatagcgccgaatatggtaactgcggttatttttgattttagg

SEQ ID NO: 34419 - DNA, 138 bp, unidentified
  source 1..138: mol_type = unassigned DNA; note = methanogen bacteria
gcatctggtgaccctgatggattagaaaaatccgcagaagattcaggtcttcctgaagatttttcagttgaagaaattaatggaattccagaagcaattttcccagattatgcatttgcaaatgatcctgacaatcaa

SEQ ID NO: 34420 - DNA, 201 bp, unidentified
  source 1..201: mol_type = unassigned DNA; note = methanogen bacteria
gcagactccatcgaggtccctgcggacgacagcctcggccccgtttatctcgatcgggccgattccatcattgtcacgctgccggccatcggcggcatgaccggtaccgccttccccgaaccgctggttgcagccggcagtgtcccagacacagtcaaaaatgacgccgtaaatcctgcaaccggcggtggtatccgtgga

SEQ ID NO: 34421 - DNA, 138 bp, unidentified
  source 1..138: mol_type = unassigned DNA; note = methanogen bacteria
gcatctggtgacccagacggattagaaaaatctgcagaggactccggacttccggaagatttctcagtagaagaaatcaaaggaatacctggagcaatattccccgattatgcatttgcaagtaatcctgataaccaa

SEQ ID NO: 34422 - DNA, 138 bp, unidentified
  source 1..138: mol_type = unassigned DNA; note = methanogen bacteria
gcatccggtgacccggacggtcttgaaaaatcagcggaagacgcaggacttaaagaagactactctgttgaagaaattaagggaattccagaatcgactttcccggactatgcatttgcaaatgatcctgaaaaccag

SEQ ID NO: 34423 - DNA, 198 bp, unidentified
  source 1..198: mol_type = unassigned DNA; note = methanogen bacteria
gcgtctatcgaagtaccttcaggagataacaaccccatccgtacggatatatctgataagatactgatttcgctaccgcagatcagtattcagactgaaacatcgcatcccgaaccgctggttgcagccggcagtgtctctgatgaaatagtcaaaaatggcactctgaaagctgcacccggcggtgatatcgatgga

SEQ ID NO: 34424 - DNA, 138 bp, unidentified
  source 1..138: mol_type = unassigned DNA; note = methanogen bacteria
gcatctggcgatcctgacggattagaaaaatctgctgaagatgcaggagtgccggaagacttctctattgaagaaattaagggaatccctgatgcaatcttcccagattatgcgtttgcaagcaatcctgataaccaa

SEQ ID NO: 34425 - DNA, 138 bp, unidentified
  source 1..138: mol_type = unassigned DNA; note = methanogen bacteria
gcttccggcgatccagatggactcgaaaaatcagctgaagatgccaaacttcctgaagacttttcagttgaagaaattaaaggcattcctgatgcaatattcccagattatgcttttgcaaacgctcccgataaccaa

SEQ ID NO: 34426 - DNA, 165 bp, unidentified
  source 1..165: mol_type = unassigned DNA; note = methanogen bacteria
acaaatggtttaacaaattcttttgaaaattcactccatgcagggggtgctgatttttcaatttccagtaaagaaactggagattctgtatttagccaaataaattatctggtggtgaacgtcaaagagttgcaattgctcgagcacttgcaaacaatccatcaa

SEQ ID NO: 34427 - DNA, 225 bp, unidentified
  source 1..225: mol_type = unassigned DNA; note = methanogen bacteria
gctcatcctgggcacggcagtgagtatgcagaagaagtaacatcaagtgatgccggttcaagttctcatgtttctggttctggtggtggttctccttcttctggtggttcttcttctggtagttctgggtctcatgtttctggttctggtggtggttctccttcttctggtggttcttcttctggtagttctgggtcttatgtttctggttctggtggttcttct

SEQ ID NO: 34428 - DNA, 42 bp, unidentified
  source 1..42: mol_type = unassigned DNA; note = methanogen bacteria
cagtccgcggtcagcgcggtcttcgatgatgatgacagcctt

SEQ ID NO: 34429 - DNA, 282 bp, unidentified
  source 1..282: mol_type = unassigned DNA; note = methanogen bacteria
atattaatggtgtatagaacttctgatgccaatggttatgttaaaatgaatattaatttgcctccgggaacatatattattactgctgagtataaaggattaaaagcatctaatactattaaagtattatctgttttagaaactaaggatttggtcatgaaatatagagacggatctaaattcgaagctaagattttggatggtcagggcaagccttatgcgggtcaaactgtaaaattcaatattaatgtaaaactacaggtaatgatggtattgctcgct

SEQ ID NO: 34430 - DNA, 180 bp, unidentified
  source 1..180: mol_type = unassigned DNA; note = methanogen bacteria
gctttatcagtaaatcctgatatgatctcggagcaaaccagcacgcaggatgtttcaactgcagatacttttacccaaaactacactgatgctggagggcttgaggatagtggttacagtgaagtcggtaaagtctatgaggatccaaataccggcgagctagtgatggtatcgggtgaa

SEQ ID NO: 34431 - DNA, 33 bp, unidentified
  source 1..33: mol_type = unassigned DNA; note = methanogen bacteria
atgtcaggagagatattcggttacacatacgga

SEQ ID NO: 34432 - DNA, 138 bp, unidentified
  source 1..138: mol_type = unassigned DNA; note = methanogen bacteria
tataatggtcatggtgaagaagatggttattttggaggtagtgacgacgctggtggagacgctattgtagaaaataacccagattatgattatgaatggttcacatctatttgggaaccacctagtggggaaatagaa

SEQ ID NO: 34433 - DNA, 177 bp, unidentified
  source 1..177: mol_type = unassigned DNA; note = methanogen bacteria
gcactgtctgcaaatccagaaatgattacacaatcacaaaccacgcaggatgtttcaacagcagatacatttacccagaactattctgatgccggagggcttgaagacagcggatacagcgaagttggaaaggtatatcaggacccgactaccggtgagcttgtgatggtatcgggt

SEQ ID NO: 34434 - DNA, 30 bp, unidentified
  source 1..30: mol_type = unassigned DNA; note = methanogen bacteria
acaatattatctaaaaccggaatgcctaaa

SEQ ID NO: 34435 - DNA, 177 bp, unidentified
  source 1..177: mol_type = unassigned DNA; note = methanogen bacteria
gcattatcagttaatccggatatgattacacagtcacagtctacagaagatgtttctactgcagatactttttctcaaaactataccagtgccggaggtcttgaggacagtggatacaatgaagttggaaaagtctatgaagatccgactaccggtgagctggtaatggtttctggt

SEQ ID NO: 34436 - DNA, 135 bp, unidentified
  source 1..135: mol_type = unassigned DNA; note = methanogen bacteria
ttcaatggtcatggtgaagatgacggttactttggcggtgcagacgatgcagcaggtgaagctattaatgaatcacaaggtggtaaatatgaaccttgggcttcagcaatttgggaacctcctagtggagaaata

SEQ ID NO: 34437 - DNA, 177 bp, unidentified
  source 1..177: mol_type = unassigned DNA; note = methanogen bacteria
gctctatccgcaaatccggatttaatttcagattcacctaatactaaagatgtttctacagcagatacttttaatgaaacatattctgatgctggtggaattgaagatagtgggtataacgaagttggaaaagtttatgaagaccctactacaggcaagctcgtaatggtgtcgggt

SEQ ID NO: 34438 - DNA, 213 bp, unidentified
  source 1..213: mol_type = unassigned DNA; note = methanogen bacteria
gtttcagttatattgggaggcagctccgatacatctgaagagggtgatgttcaatatgtgaatgtaacaaagaatattactaaatatgaggattccggcgatgttattcaaactgaagacggttcttatgttgcatcttctgattatgttgataatgtaactgaaggggaaaatgttacagctttcaattcctcaaattcaggaaatctgtat

SEQ ID NO: 34439 - DNA, 45 bp, unidentified
  source 1..45: mol_type = unassigned DNA; note = methanogen bacteria
ttagatgtcaataatcagtatagtgatgtttacaatagatatgca

SEQ ID NO: 34440 - DNA, 180 bp, unidentified
  source 1..180: mol_type = unassigned DNA; note = methanogen bacteria
ccggacagatttaccgttcatattaatgttaatgatttagaaaaattgaatattacctatgtctcaacagaccaaaatttagagaaatttacaaataataatgttacttttaaagaaatctgccatattgatgattataaaatttataaaatttcttataactcaattgaatcttctcct

SEQ ID NO: 34441 - DNA, 138 bp, unidentified
  source 1..138: mol_type = unassigned DNA; note = methanogen bacteria
gcatccggagacccagacggtcttgaaaaatctgcagaagatgcaggagttccggaagacttctctattgaagaaatcaacggaatccctgaggcgatcttcccggactatgcgttcgcaagcgcacctgacaaccaa

SEQ ID NO: 34442 - DNA, 177 bp, unidentified
  source 1..177: mol_type = unassigned DNA; note = methanogen bacteria
gcattgtctgcaaatccggacatgattacgcaatcccaatcgactcaggacgtttcaacggcagatacgttcactcagaactacactgatgctggcgggcttgaggacagtggctacagtgaagtcggaaaggtatatcaggatccgaccaccggcgagcttgtgatggtgtcgggc

SEQ ID NO: 34443 - DNA, 177 bp, unidentified
  source 1..177: mol_type = unassigned DNA; note = methanogen bacteria
gctttgtctgcaaatccagaattaatttcaaattctccgaatactaaagatgtatctactgcagatacttttaatcagactttttctaatgctagcggaatggaagacagcggattcaatgaagttggaaaggtatatgaggatcctaatactggtgagcttgtcatggtatcgggc

SEQ ID NO: 34444 - DNA, 141 bp, unidentified
  source 1..141: mol_type = unassigned DNA; note = methanogen bacteria
gcatctggcgaccctgatggactcgaaaaatcagctgaagactccggtcttgcagaagattttgcaattgaagaaataaacggcatccctgatgctatattcccagattatgcgtttgccgataatcctgacagccagcca

SEQ ID NO: 34445 - DNA, 138 bp, unidentified
  source 1..138: mol_type = unassigned DNA; note = methanogen bacteria
gcatctggtgacccggacggattagaaaaatcagcagaagactctggacttgctgaagatttttcaattgaacaaatcaatggaatcccagacgctattttcccagattatgcattcgcaagcagtcctgacaaccag

SEQ ID NO: 34446 - DNA, 177 bp, unidentified
  source 1..177: mol_type = unassigned DNA; note = methanogen bacteria
gcattatctgcaaatccagagttaatttctaattctccaaatactaaggatgtttcaacggcagatacatttaatcaaacttattctgatgctggtggaattgaagatagtggtttcaacgaggttggaaaggtctatgaggaccctaatactggtgaacttgtaatggtgtcgggc

SEQ ID NO: 34447 - DNA, 177 bp, unidentified
  source 1..177: mol_type = unassigned DNA; note = methanogen bacteria
gctttatcagccaatccggacatgattacccaatctcaatccacgcaggatgtttcaacagctgaaacattttcccaaaactacactgatgccggaggacttgaagacagtggatacagtgaagtcggaaaggtgtatgaagatcctgccactggcgagcttgttatggtgtcgggt

SEQ ID NO: 34448 - DNA, 177 bp, unidentified
  source 1..177: mol_type = unassigned DNA; note = methanogen bacteria
gctttatctgcaaatccggagttaatttcaaattctcataataccaaagatgtttcaaccgcagatacttttaatcaaacatattccgatgcgggaggaattgaagatggtggttacaatgaggttggaaaggtctatgaagaccctgctactggcaagcttgtgatggtatcgggt

SEQ ID NO: 34449 - DNA, 177 bp, unidentified
  source 1..177: mol_type = unassigned DNA; note = methanogen bacteria
gctttatctgcaaatcctgatatgattacacaaacccaatcaactaaggatgtttcaactgcagatacattttctcaaaattatactaatgctggtggacttgaggacagcggatataatgaagttggaaaagtatatgaggacccaacaaccggggaacttgtaatggtatcgggt

SEQ ID NO: 34450 - DNA, 222 bp, unidentified
  source 1..222: mol_type = unassigned DNA; note = methanogen bacteria
ggatacaaattctataaagaaacaacagatagaacaccaatttctacgaaaatcaatgaaataagagaaaaaagcaattatgtaaagattgatgatttaccagattattatacaaatgcagtgatttctgttgaagatagaagattttacaaacatggagctgttgattatattggaattctccgtgcaatattttttaatataaaaaacaaaactttacaa

SEQ ID NO: 34451 - DNA, 141 bp, unidentified
  source 1..141: mol_type = unassigned DNA; note = methanogen bacteria
gcatctggtgaccctgacggattagaaaaatctgcagaagattccggacttgctgaagatttctcaattgaagaaatcaagggaatccccgatgcaatcttcccagattatgcgtttgcaagcagtcctgacgaccaagga

SEQ ID NO: 34452 - DNA, 177 bp, unidentified
  source 1..177: mol_type = unassigned DNA; note = methanogen bacteria
gctctatcggcaaatccggacatgattacaaaaacacaatcaacacaggatgtttcaacagcagatacattcagtcaaaactacactaatgcaggcggtcttgaggatagtggctatagtgaagtcggaaaggtttaccaggatccgaccactggtgaattggtaatggtatcgggt

SEQ ID NO: 34453 - DNA, 129 bp, unidentified
  source 1..129: mol_type = unassigned DNA; note = methanogen bacteria
tacggtacgctcgacctctccgtgagggatgtgttcaatctcttctgggatcacctttcgggcaggacatacgaccgtatacaggagaatgatgaatggttctcggacaggatcctctgggagtaccgt

SEQ ID NO: 34454 - DNA, 126 bp, unidentified
  source 1..126: mol_type = unassigned DNA; note = methanogen bacteria
agcgtgttcgattccggagaatccgacgctgaggccgcggacgatgcggacgcctaccaggcggattccgtgtacgcctcctccgactgcgatgacgatgacgacgacaacaagtgcatcgaggcg

SEQ ID NO: 34455 - DNA, 219 bp, unidentified
  source 1..219: mol_type = unassigned DNA; note = methanogen bacteria
gaaaactctacagagaacaccgtaagctctaatgcaagccagagctcttcaaatacaactagtaccggcaatgcatccaccaacggcaaaaccaagatctggagcgaacaaagtaattcttacatttatcaggaatcctcttcagacggtaatatacgccaatatgatgcaaatggtaaattaattggttcaacttacgatgaagaccaggcaaaactt

SEQ ID NO: 34456 - DNA, 126 bp, unidentified
  source 1..126: mol_type = unassigned DNA; note = methanogen bacteria
tataatggtcatggtgaagatgacggatactttggtggagcagatgatgccgctggtaaagctgtagaaaaaacaggctttgaaccttggatgtcatctatatgggaaccaccaagtggagaaatt

SEQ ID NO: 34457 - DNA, 135 bp, unidentified
  source 1..135: mol_type = unassigned DNA; note = methanogen bacteria
tatcatggtcatggagaagatgatggatactttggcggtgcagatgatgcagcaggtgatgctattaacgaatcacaaggcggaaaatatgaaccttgggcttcatcaatttgggaaccgcctagtggtgaaata

SEQ ID NO: 34458 - DNA, 42 bp, unidentified
  source 1..42: mol_type = unassigned DNA; note = methanogen bacteria
aaattaattgaacatttcattggagctggagacgcacttcca

SEQ ID NO: 34459 - DNA, 225 bp, unidentified
  source 1..225: mol_type = unassigned DNA; note = methanogen bacteria
atgtcaatgggggatggtcaattagtttttgacggattgcttacaagcggagttgaaggaaatctcggatcaacccatgacaacgcatttaatcctgatcttggatattacctaacaaatatgggaaattttatttcctcatccaatacgacatttgtcaccaacacaccatcattaaatcaaccaactttactttcaggattagtgtttttaaaatcgttggaa

SEQ ID NO: 34460 - DNA, 126 bp, unidentified
  source 1..126: mol_type = unassigned DNA; note = methanogen bacteria
gcatctggtgatcctgatggattagagaaatctgctgaagattctgcagtttcagaagatgttgaaactactgttgttgaatcacctttcccagattatacctatgaacctttagacaaattaggt

SEQ ID NO: 34461 - DNA, 126 bp, unidentified
  source 1..126: mol_type = unassigned DNA; note = methanogen bacteria
gcatctggcgatccggatggattagaaaaatctgctgaagatgcagcagttggtgaagatgttgaagctccagttatggagtcaccattcccagactatacctatgagcctttagacaaattaggc

SEQ ID NO: 34462 - DNA, 39 bp, unidentified
  source 1..39: mol_type = unassigned DNA; note = methanogen bacteria
ggattagtcttcaaatgcaataaagaaggtctcacctta

SEQ ID NO: 34463 - DNA, 216 bp, unidentified
  source 1..216: mol_type = unassigned DNA; note = methanogen bacteria
gaagcttactccaccaccatttacgacaactggtgcgactacgagatcatcggccccggagcggttgaactgaagaaggtgggcggggccctcacggaactcagcatccccgagaaggttagtgacggaacagaagaatacacggtcacccgcatcgccgcggaggcctgtcaggacaacggcctgattcacaaggtcacggtcccctccaccgtc

SEQ ID NO: 34464 - DNA, 123 bp, unidentified
  source 1..123: mol_type = unassigned DNA; note = methanogen bacteria
gcgtctggaaatccagatggtcttgaaaaaacagcagaagatgcagatgttggagaagatgttgaatctccaattttagaatctcctttcccagattacacatatgaacccttagataaaata

SEQ ID NO: 34465 - DNA, 225 bp, unidentified
  source 1..225: mol_type = unassigned DNA; note = methanogen bacteria
gcagacgatatttccgatgagattataagtgatggcggtcaagatactttgaaaattatgcaagacgatatttatacaactggggaaagttcattcagtaatttaactgatgaaatagaaaatgcaggcacgactttggatttaaccaaggattatacgttcaacaatgaaactgacaacaataccggaattttaatcagcaaagataattttgtacttaacggt

SEQ ID NO: 34466 - DNA, 51 bp, unidentified
  source 1..51: mol_type = unassigned DNA; note = methanogen bacteria
catgtacagatgttcgcggaggacttcatcctcaatctgctaggagtgttc

SEQ ID NO: 34467 - DNA, 147 bp, unidentified
  source 1..147: mol_type = unassigned DNA; note = methanogen bacteria
ggatacggtcttaccagcagttccaccaacactaacaatgtggtcagcggggatgccttggttgcagaccttcgcggtactggtgacggaaccgcctcgctcggaggaggagaattcgcccacaacgtcacacttaagtatcagact

SEQ ID NO: 34468 - DNA, 129 bp, unidentified
  source 1..129: mol_type = unassigned DNA; note = methanogen bacteria
attgcatctggagatcctgacggattggaaaaatctgcagaagactccagcgtagctgaagatgtagaatctccagtactggaagcacctttccctgactatacatacgaacctcttgacaaactcggc

SEQ ID NO: 34469 - DNA, 108 bp, unidentified
  source 1..108: mol_type = unassigned DNA; note = methanogen bacteria
ggaaggtatccaatagcccctattgatgttattaaaacaatattaagtcctataataccttcacttgctgtttctccatcagtttcaaccatagtatttcagataaga

SEQ ID NO: 34470 - DNA, 135 bp, unidentified
  source 1..135: mol_type = unassigned DNA; note = methanogen bacteria
tatcatggtctaggtgaagatgatggtaaatttggtggtgcagatgatcaaggagcagatgctattggagaattagaccataattataaaccatggtttagttcaatatgggaaccaccttctggtgaaatagaa

SEQ ID NO: 34471 - DNA, 126 bp, unidentified
  source 1..126: mol_type = unassigned DNA; note = methanogen bacteria
tctggattaggtgaagatcaaggttacttcggtggatctgatgataaaggttctgacggtgtatccgaaaccggttatgaaccatggtttaattcattttgggaaccgccaagtggtgaaatagaa

SEQ ID NO: 34472 - DNA, 126 bp, unidentified
  source 1..126: mol_type = unassigned DNA; note = methanogen bacteria
ttcaatggtcacggtgaaaaggacggatactttggcggtgcagatgatgcagcaggtgaggctattgaagcaactggttttgaaccatgggcttcagctatatgggaaccgcctagtggtgaaata

SEQ ID NO: 34473 - DNA, 288 bp, unidentified
  source 1..288: mol_type = unassigned DNA; note = methanogen bacteria
atgtcattcaacggattggtctatgacagttggtatgataacacaggattatggactaaaaacagggatttaacctggactatgaattccccattattcttgggtgaaatatcttcattctatgtagtattcaacactacaaaaactggcgtattcaccaacattgtatctgttgattctaaagaaaccggtaaaaaatctgcaaaggacaatattgaagttattaagcctgatttcgcagttgaaaaaatcgcactcaacagatcttttaaacaatgttgttgttcg

SEQ ID NO: 34474 - DNA, 108 bp, unidentified
  source 1..108: mol_type = unassigned DNA; note = methanogen bacteria
gtattccatttaagtaacatgattaaccctggtgtaagcaatatttacaatgctttaggaactcaaatagctccaaaccttgtaaccgttgttatttttgatttcaga

SEQ ID NO: 34475 - DNA, 288 bp, unidentified
  source 1..288: mol_type = unassigned DNA; note = methanogen bacteria
ttggctccacaagaatatactagttttactgtagtatttaatgctgctattgcaggaaatgttactaatgtggttattgcaggatccaatatgactggaaatgtaacaaatagttgtgatgctgagatagttaataaaacagaacctactccaggttctactccggaacctactcctaaacatgatgaacctgtaacacaatatgcagataaacatgcaactggtaacccaataatcttgttgttattggttatcatgggtactatacctataagaatacgcaaaaaa

SEQ ID NO: 34476 - DNA, 162 bp, unidentified
  source 1..162: mol_type = unassigned DNA; note = methanogen bacteria
agctggaacatgcaagcaatcgtcttcaatgaagatgtcactcccgagcagaggcaggatgcaatcaatgccatgaagcaggttaccgaagtagaccagggacagcagctgaacgagactcctgatctacaaggatccgaaaacaggcaagatgataatgat

SEQ ID NO: 34477 - DNA, 42 bp, unidentified
  source 1..42: mol_type = unassigned DNA; note = methanogen bacteria
ttgccaaaaaattcaataggcatgctagagagtgattatatg

SEQ ID NO: 34478 - DNA, 216 bp, unidentified
  source 1..216: mol_type = unassigned DNA; note = methanogen bacteria
gctgatattcaggatgacaatatgactatcctttctagtggaggtaatcatttcatcacttccgatttgtcaaatgatgatatacaatcacaatttgataatgcaaatgatggagacacttttgaatttacagaccctgagtatcaggacatatctttggttgtagataagaaattgaatatcatttctaaaaaggatagtgtagtttatgtatct

SEQ ID NO: 34479 - DNA, 126 bp, unidentified
  source 1..126: mol_type = unassigned DNA; note = methanogen bacteria
ttcaatggtcatggtgaggatgacggatactttggaggtgctgatgacgcggctggtgaagctattgaggaatcgggatttgaaccttggttttcttcaatatgggaaccaccaagtggtgaaata

SEQ ID NO: 34480 - DNA, 120 bp, unidentified
  source 1..120: mol_type = unassigned DNA; note = methanogen bacteria
tttataaatcacagttccaaaaccgatactacattgtctatgatatccaattcaaatctggatgcatccaatgagtatactgttcagcttaaggatgttttaataatgaatcttatactt

SEQ ID NO: 34481 - DNA, 126 bp, unidentified
  source 1..126: mol_type = unassigned DNA; note = methanogen bacteria
tttaatggtcatggagaagatgacggatactttggtggtgcagacgatgcagcaggtgaagctatcgaagaaacaggtttcaaaccttggttttcatctatatgggaaccacctagtggtgaaata

SEQ ID NO: 34482 - DNA, 126 bp, unidentified
  source 1..126: mol_type = unassigned DNA; note = methanogen bacteria
ttcaatggtcatggggaagatgacggatactttggtggtgcagacgatgctgctggtgaagctatcgaagaaactggtttcgaaccttggttttcatctatatgggagccacctagtggtgaaata

SEQ ID NO: 34483 - DNA, 105 bp, unidentified
  source 1..105: mol_type = unassigned DNA; note = methanogen bacteria
tatcatattgctgacatgattaatcccggtgtaagctatatctacaatgccgtaggaactcagattgctccgaacatggtaacagcggttattttcgatttcaga

SEQ ID NO: 34484 - DNA, 126 bp, unidentified
  source 1..126: mol_type = unassigned DNA; note = methanogen bacteria
gcatctggtgatccagatggacttgaaaaatctgcagaagattcaaaagttcctgaaacattagaaggttcaactttccactttgaatccccaatgccagattatacaattggagaaacatctgtt

SEQ ID NO: 34485 - DNA, 54 bp, unidentified
  source 1..54: mol_type = unassigned DNA; note = methanogen bacteria
atgacctctaatgcatttacaagtaatggttatgctgttttgggacagagtatt

SEQ ID NO: 34486 - DNA, 126 bp, unidentified
  source 1..126: mol_type = unassigned DNA; note = methanogen bacteria
tttaatggtcatggggaagatgacggatacttcggcggttcagacgatgcagctagtgaagctattgaagcaactcattttgaaccatggttctcctctatatgggaacctccaagtggagaaatt

SEQ ID NO: 34487 - DNA, 285 bp, unidentified
  source 1..285: mol_type = unassigned DNA; note = methanogen bacteria
gtgttaaacattgatttaattgaagctggtgagtcttatgtatttactattactcttaaaccaatgaccaatggtactttaactaatgttgttaatgtaacatctaatgagaataaaactgttaaaaatagtacaatttcagttaatgttcttcctgtggttaatttaactgttgttaaaacagttgatgtgactgtaatttatgttaacgatgaagttactttcactgttaatgtgactaataatggtccttctaatgctactggtgtgaaagttactgatttt

SEQ ID NO: 34488 - DNA, 102 bp, unidentified
  source 1..102: mol_type = unassigned DNA; note = methanogen bacteria
catttaagcagcatgattcaacctggtgtaagtaacatctacaacgctttaggaactcaaatagctccaaacttggtaactgtagttatttttgatttcaga

SEQ ID NO: 34489 - DNA, 126 bp, unidentified
  source 1..126: mol_type = unassigned DNA; note = methanogen bacteria
gcatcaggagatcctgatggattagaaaaatctgcagaagatgctaatgttagtgaagataaagcaacagtagttatcaccccaccattcccagactacacctttgaaccttttgagtctattggt

SEQ ID NO: 34490 - DNA, 96 bp, unidentified
  source 1..96: mol_type = unassigned DNA; note = methanogen bacteria
atggttgtagaagacaaaaatccgctagatgcctttgtaatgacctctaatgcatttacaagtaatggttatgttgttttgggacagagtattgct

SEQ ID NO: 34491 - DNA, 198 bp, unidentified
  source 1..198: mol_type = unassigned DNA; note = methanogen bacteria
atgactgaaggggttttaattgataggaatgtgacaatcaacggtaacggctttacgattgatgcaaaagggaaatcaaggatatttgaggtaactgcaggattcattaatattactgatgttacattgaaaaacggaaatgcagacaatggtggtgccctttactttagtaatgctatttccaattccaatataaat

SEQ ID NO: 34492 - DNA, 54 bp, unidentified
  source 1..54: mol_type = unassigned DNA; note = methanogen bacteria
ataacatcaagttataacgattcaagcattgcaaacaaaataactattaaatgt

SEQ ID NO: 34493 - DNA, 285 bp, unidentified
  source 1..285: mol_type = unassigned DNA; note = methanogen bacteria
atgtcatataatatcacagtacttccggttttaacagccgatgacattaacatgacctataaagatggaacgcaatttatggcaaaactggttgacggtaaaggccatcctctggaaaatgcgggaataacattcaacattaacggagtattctataccagatacaccaattcatcaggaatagcctgtttaaacattaatctgatggctggtgagtacataatcacatcacagtatgaaaatgctgtaatttcaaacaaaataacaatttctgccaaagaggat

SEQ ID NO: 34494 - DNA, 126 bp, unidentified
  source 1..126: mol_type = unassigned DNA; note = methanogen bacteria
gcatcaggaaatcctgatggattagaaaaatctgcagaagatgctaatgtatctgaagagaaagcaactgtagcagttgaacccccatttccagattacacatttgaacccctcgaatcccttggt

SEQ ID NO: 34495 - DNA, 126 bp, unidentified
  source 1..126: mol_type = unassigned DNA; note = methanogen bacteria
tttaatggtcatggagaagatgacggatactttggaggatctgatgatgcagcaagtgaagttatcgaaggaacaggtttccaaccttggttttcatctatatgggaaccacctagtggtgaaata

SEQ ID NO: 34496 - DNA, 126 bp, unidentified
  source 1..126: mol_type = unassigned DNA; note = methanogen bacteria
gctggtcatggagaagatgacgggtactttggaggatctgacgatcaggggtctgatggtgtttcagaaactggatacaaaccttggtttgaatcattttgggaaccaccaagtggtgaaatagaa

SEQ ID NO: 34497 - DNA, 285 bp, unidentified
  source 1..285: mol_type = unassigned DNA; note = methanogen bacteria
atgataaatgaaacagaagtggctcaaaatggaagcttttcagggatgttggtggatgcttatggtcagggtgtagcaaacaagaccattacttaccataagccaggttatcaaatgggaactttggttgatgtaacaacaactgaggatggcagttttacaattaataatgcacaatatttggacaatgcaagtgatggaaactattatggtgatttcacatttgctggtgatggtaaatacaaggaatgcagatatgaaggtaatgttactgtcgttgccaag

SEQ ID NO: 34498 - DNA, 102 bp, unidentified
  source 1..102: mol_type = unassigned DNA; note = methanogen bacteria
catttaagcagcatgattcagcctggtgtaagttatatctataatgctttgggaactcaaatagcaccgaacatggtgaccgtagttatttttgatttcaga

SEQ ID NO: 34499 - DNA, 126 bp, unidentified
  source 1..126: mol_type = unassigned DNA; note = methanogen bacteria
tttaatggccatggggaagacgacggatatttcggtggatctgatgacgcagctagtgaagctatagaatccactaattttaaaccttggttctcatcaatttgggagccaccaagtggagaaatt

SEQ ID NO: 34500 - DNA, 285 bp, unidentified
  source 1..285: mol_type = unassigned DNA; note = methanogen bacteria
atgtcatataatatcacagtactgccggttttaacggccgatgagattgacatggcatataaagacggaacgcaattcagggcaaaactggttgacggtaaaggcaattccttggaaaatgccggaataacatttaatattaatggcgtattctacactagatacactaattcatcaggaatagccagtctaaacattaatctgatgcctggtgagtatataatcacttcacagtatggaagtgctgtaatttcaaataaaataactatttctctaaaaaaagat

SEQ ID NO: 34501 - DNA, 99 bp, unidentified
  source 1..99: mol_type = unassigned DNA; note = methanogen bacteria
tatcaattcagttacatgattttccctggtataaactacatctatcaaggagtaggagtatcaatagcacctaacttagtaacaaacattgtattcgat

SEQ ID NO: 34502 - DNA, 285 bp, unidentified
  source 1..285: mol_type = unassigned DNA; note = methanogen bacteria
atgattaatgaaacagaagtggctcaaaatggaagcttttcagggatgttggtggatgcttatggtcagggtgtagcaaacaagacaattacttatcataaaccaggtaatcaaatgggaactttggttgatgtcaaaacaaatgatggtggtagtttcacgattgaaaaagcacaatatctggccaatgcaagtggtgaaaattattatggtaatttcacatttgctggagatggcaaatatgctggatgcagttatgaaggcaatgttactgtcgttgccaat

SEQ ID NO: 34503 - DNA, 126 bp, unidentified
  source 1..126: mol_type = unassigned DNA; note = methanogen bacteria
tataatggtcatggagaagatgacggatacttcggtggagcagatgatgctgcaggtgaagctattgaagaatccggtttcgaaccttggttctcttcaatttgggaaccacctagtggagaaata

SEQ ID NO: 34504 - DNA, 102 bp, unidentified
  source 1..102: mol_type = unassigned DNA; note = methanogen bacteria
tttcatttaagtaaagttatcagtcctggggtaagtaatatttataatgttttaggaactaaaattgctccaaatcttgtaactgttgttatatttgatttt

SEQ ID NO: 34505 - DNA, 126 bp, unidentified
  source 1..126: mol_type = unassigned DNA; note = methanogen bacteria
ttcagtggtcatggagaagatgacggatactttggaggttcagatgatgcagctagtgaagctatcgaagcaaccaatttcaaaccatggtttgcatcaatatgggaaccaccaagcggtgaaatc

SEQ ID NO: 34506 - DNA, 126 bp, unidentified
  source 1..126: mol_type = unassigned DNA; note = methanogen bacteria
tttaatggtcatggagaagacgacggatacttcggcggtgctgatgatgcagctggtgaagctattgaagaatcaggttttaaaccttgggcttcatctatatgggaaccgcctagtggtgaaata

SEQ ID NO: 34507 - DNA, 105 bp, unidentified
  source 1..105: mol_type = unassigned DNA; note = methanogen bacteria
tttgatattagcgctttgattaatcctggtgtaagtaatatttacaatgcattgggaactcaaatagctccgaacatggttactgttgttatatttgatttcaga

SEQ ID NO: 34508 - DNA, 126 bp, unidentified
  source 1..126: mol_type = unassigned DNA; note = methanogen bacteria
gcatcaggtgatcctgatggattagaaaaatctgctgaagatgcaagcgtacctgaaaacaagacaacagaagtagtagcttcaccattccccgactacacatacgaacctcttgaagtcattggt

SEQ ID NO: 34509 - DNA, 36 bp, unidentified
  source 1..36: mol_type = unassigned DNA; note = methanogen bacteria
tctaatggatctatatcggttataggacaaaatcaa

SEQ ID NO: 34510 - DNA, 126 bp, unidentified
  source 1..126: mol_type = unassigned DNA; note = methanogen bacteria
gcatctggtgatccggatggtttggagaaatctgctgaagatgctaatgttgcagaagatgtagctacagaagtattcgcctcacctttcccagattacacatacgaacctcttgcatcaattggt

SEQ ID NO: 34511 - DNA, 126 bp, unidentified
  source 1..126: mol_type = unassigned DNA; note = methanogen bacteria
gcatccggagatcctgatggtcttgaagcatcagccgaacatatcaacccagaatctttagaagcagaacaagtaattaatccaataatgcctgattatactattgaaggatttgatgaaaatcca

SEQ ID NO: 34512 - DNA, 198 bp, unidentified
  source 1..198: mol_type = unassigned DNA; note = methanogen bacteria
atgactgaagatgttttaattgataggaatgtgacaatcaacggtaacggctttacgattgatgcaaatggcaaatcaaggatatttggggtaactgcaggattcattaatgttactgatgttacattgaaaaacggaaatgcagacaatggtggtgccctttactttagtaatgctatttccaattccaatataaat

SEQ ID NO: 34513 - DNA, 57 bp, unidentified
  source 1..57: mol_type = unassigned DNA; note = methanogen bacteria
attataacattaagttataacgattcaagcattgcaaacaaaataactattaaatgt

SEQ ID NO: 34514 - DNA, 105 bp, unidentified
  source 1..105: mol_type = unassigned DNA; note = methanogen bacteria
tatcatataagtgatatgatttatcctggtgtaagcttaatctataatactttaggaactaaaattgctccgaatatggtaacagttgttatctttgatttcaga

SEQ ID NO: 34515 - DNA, 126 bp, unidentified
  source 1..126: mol_type = unassigned DNA; note = methanogen bacteria
gcatcagaaaaccctgatggattagaaaaatctgcagaagatgctaatgttagtgaagaaaaagcaatagtagttatcgttcccccattcccagactacaccttcgaacctcttgaatctattggt

SEQ ID NO: 34516 - DNA, 57 bp, unidentified
  source 1..57: mol_type = unassigned DNA; note = methanogen bacteria
cgtatcgataataagttaagattagctattgtccattatgctgataatcctcaattc

SEQ ID NO: 34517 - DNA, 93 bp, unidentified
  source 1..93: mol_type = unassigned DNA; note = methanogen bacteria
tcagtaggtgcattctcccgtacccagcaattaatctggtatttatctaattatgattcatcaccatattcctttgattatttggaaaaagat

SEQ ID NO: 34518 - DNA, 33 bp, unidentified
  source 1..33: mol_type = unassigned DNA; note = methanogen bacteria
tttttgaaaagtgtcggaccggcacatactccc

SEQ ID NO: 34519 - DNA, 102 bp, unidentified
  source 1..102: mol_type = unassigned DNA; note = methanogen bacteria
tataacattaaagctgttatacaacctggaattagtcaggtttataatttccttggaacccaaatagaacctaatatggttactttaattgtttttgattgg

SEQ ID NO: 34520 - DNA, 102 bp, unidentified
  source 1..102: mol_type = unassigned DNA; note = methanogen bacteria
tttgatataaagcaaataatcgacccgggtattagtaaagtttattcagctttagggcctcaaatagaaccaaatatggtaactttagttgtttttgattgg

SEQ ID NO: 34521 - DNA, 45 bp, unidentified
  source 1..45: mol_type = unassigned DNA; note = methanogen bacteria
gcaggaggcgccataggccataatttcgcttcagtcacaggattc

SEQ ID NO: 34522 - DNA, 33 bp, unidentified
  source 1..33: mol_type = unassigned DNA; note = methanogen bacteria
tctcacattgttgttgatttgaatactgatgtc

SEQ ID NO: 34523 - DNA, 219 bp, unidentified
  source 1..219: mol_type = unassigned DNA; note = methanogen bacteria
gctgcggaaaacatcaccaacgatgcaataggcgatgacagcaaagaaatattggaaacggttcagaaggatatcacaaccgatgacagcacggatatccttaagaccactcagaatgatatctacacggcaagtgatgattcattcacaaacttgactgatgaaatagcgagaaatgatgtcgtggagttaacccacaactacacattcaacagtgaa

SEQ ID NO: 34524 - DNA, 48 bp, unidentified
  source 1..48: mol_type = unassigned DNA; note = methanogen bacteria
ctgatgctttataagctgaatctatctcctaatgttgaaacattcagg

SEQ ID NO: 34525 - DNA, 39 bp, unidentified
  source 1..39: mol_type = unassigned DNA; note = methanogen bacteria
caatcgaaaggagtgcaattgcaacagctttatctgcaa

SEQ ID NO: 34526 - DNA, 42 bp, unidentified
  source 1..42: mol_type = unassigned DNA; note = methanogen bacteria
accgtccagtttagattattgtcaaatggaataatgatgaat

SEQ ID NO: 34527 - DNA, 102 bp, unidentified
  source 1..102: mol_type = unassigned DNA; note = methanogen bacteria
ttccatctaagtaaaatgattactccgggtgtaagtaatatttataatgcgttaggaactcaaattgcaccaaacatggtaaccgttgtaattttcgatttc

SEQ ID NO: 34528 - DNA, 51 bp, unidentified
  source 1..51: mol_type = unassigned DNA; note = methanogen bacteria
ttaacatggtcaaatgttggagaaagtattttagggttatctattaggtat

SEQ ID NO: 34529 - DNA, 123 bp, unidentified
  source 1..123: mol_type = unassigned DNA; note = methanogen bacteria
tctggtcttggagaagatgaaggatattttggaggagctgatggggcaggagctgatgcaattacagaaaccggttatgagccttggtttgagtcattttgggaacctccaagtggtgaaata

SEQ ID NO: 34530 - DNA, 216 bp, unidentified
  source 1..216: mol_type = unassigned DNA; note = methanogen bacteria
gctgaaggaaacttcacggcactccagaatgaaatcaattcaagcggggacagtatagatattaaaaatgattatgtatacgataatgcaacggattattcgtataatgaaggaatatcggtaaaagcaattttaccattaacggtaacgtccacacaattaacggagccaatcaagccagaatttttgaaatcgatggagaaaacattacgattt

SEQ ID NO: 34531 - DNA, 54 bp, unidentified
  source 1..54: mol_type = unassigned DNA; note = methanogen bacteria
gtgaccgctattttcggtcctcaacccgacggtacccttgcaggcgatggggta

SEQ ID NO: 34532 - DNA, 195 bp, unidentified
  source 1..195: mol_type = unassigned DNA; note = methanogen bacteria
tttggttttggttttatagatcagaacactatggaacaaagtcaatatgaggataatcaaaatcaggcttcaagcgttaataattctcatttgagtaatattgataatgtttctgttgacagtgataatagttcttataatatttcaggggtagatgaaaacggtactcccgttagaataaacatagtacatggt

SEQ ID NO: 34533 - DNA, 57 bp, unidentified
  source 1..57: mol_type = unassigned DNA; note = methanogen bacteria
aatgatccaacatggataagtggtgttgatattgattctgtcagtttaaccccaagc

SEQ ID NO: 34534 - DNA, 30 bp, unidentified
  source 1..30: mol_type = unassigned DNA; note = methanogen bacteria
ttaccaggaattttccgctctttaaaatta

SEQ ID NO: 34535 - DNA, 33 bp, unidentified
  source 1..33: mol_type = unassigned DNA; note = methanogen bacteria
aatgtgttctcttcattcatcggaggattgata

SEQ ID NO: 34536 - DNA, 36 bp, unidentified; identical to SEQ ID NO: 24047
  source 1..36: mol_type = unassigned DNA; note = methanogen bacteria

SEQ ID NO: 34537 - DNA, 216 bp, unidentified
  source 1..216: mol_type = unassigned DNA; note = methanogen bacteria
caacatttaaatgtggttgtttcaggaagtatggaacctgcattttataggggggatattgtaatggttcaaaaggcaagtttcctcggtatacaggagttcaatgttaatgacatccagaaaggtgatgttgtcgtttatgatgcaaaatggtataatcaaccggtaattcatagatctttccctttggttaaggggtttatgattattataagg

SEQ ID NO: 34538 - DNA, 192 bp, unidentified
  source 1..192: mol_type = unassigned DNA; note = methanogen bacteria
ggttttggttttatagatcagaacactatggaacaaagccaatatacagataatcagaatcaagcttcaagcgttaataatactcatatgaataatattaataatgtttctgttgacagtgataatagttcttataatatttcaggggtagatgagaacggtactcccgttagaataaacatagtacatggt

SEQ ID NO: 34539 - DNA, 120 bp, unidentified
  source 1..120: mol_type = unassigned DNA; note = methanogen bacteria
gtgttcgattccggcgaatccgatgccgagactgcggccgatgcggatgcctaccctgcagattccgtatacgcctccgactgcgatgacgatgacgacgacaacaagtgcatcgaggcg

SEQ ID NO: 34540 - DNA, 30 bp, unidentified
  source 1..30: mol_type = unassigned DNA; note = methanogen bacteria
gagaagatcctcagcaacaccgacctgaag

SEQ ID NO: 34541 - DNA, 279 bp, unidentified
  source 1..279: mol_type = unassigned DNA; note = methanogen bacteria
gttgttgttttggatgatgttcctgatgttcagtattctgataggattgttgttactggtaggttgattaaggttactggtgagggtattgttaatgctactgtttatttaagtattaatggtgttaattatcatgttaagactgatgtaaatggatactattcttatttgtatacggcaaataaagtgggtttaaataatataacggcaaggtttaatggtaattctgtgtacaattatgatgatatcagtaattctttcatagtagtaaaacaagat

SEQ ID NO: 34542 - DNA, 105 bp, unidentified
  source 1..105: mol_type = unassigned DNA; note = methanogen bacteria
tttcatataagcgatatgatttatcctggtgtaagctttatttataatactttaggaactcaaattgctccgaatatggtaacagttgttatctttgatttcagg

SEQ ID NO: 34543 - DNA, 216 bp, unidentified
  source 1..216: mol_type = unassigned DNA; note = methanogen bacteria
gctattcatatatttatgtcacaaaatcctcttgtaaaagagggtgaaaaaactgttaacgatatgttaaataggtcagttcgagtagttactccagttgatagtgttattgcaaccagtccaactatgactactgtaatttatatgattgctcctgataaattaaaggcagtaaattttgaatggacccaagatgagcttaaatatgttcctaaa

SEQ ID NO: 34544 - DNA, 261 bp, unidentified
  source 1..261: mol_type = unassigned DNA; note = methanogen bacteria
gcaattcatctaattggcccaaatcataatcctagcggagattattctacattcaatgttttaaaagtcaattccacaatcaatatggatgatgaaacagaatatgtttatgacaatgttacaatcaactatactgttgataatttaaccgatatcctagttactgtcgttgatttggaaagtggcgacatatataatttcacaaccacaaactcaagcattaatcttgatttggatgcaggatcataccaaatcacatta

SEQ ID NO: 34545 - DNA, 198 bp, unidentified
  source 1..198: mol_type = unassigned DNA; note = methanogen bacteria
gcagaagaggatttggaaaatctaactacaaaaaatactcccgaaccaattatcataactgaaaataattttcaagagtattttgatgataaaaacagtctaaattcatcatttgaaaataaaactgttgttttagaaggagaatttgatgatttgggagtagttaatattgatgcatatatatctttgctgatgatg

SEQ ID NO: 34546 - DNA, 105 bp, unidentified
  source 1..105: mol_type = unassigned DNA; note = methanogen bacteria
tatcacataagcgacatgattaatcctggagtgagccatatctataatcttttaggaactcagattgctccgaacatggtgacagttgtcattttcgatttcagg

SEQ ID NO: 34547 - DNA, 69 bp, unidentified
  source 1..69: mol_type = unassigned DNA; note = methanogen bacteria
tccggtcttggctcgacacctgtcgcatcaataccatatgcattaaatctaatattgaacattgatttg

SEQ ID NO: 34548 - DNA, 87 bp, unidentified
  source 1..87: mol_type = unassigned DNA; note = methanogen bacteria
tacagatcctacttcagcaatactgcaagcggattgaatgcaactgaagacatcaattccataagaaacaatatgaccagtctttat

SEQ ID NO: 34549 - DNA, 105 bp, unidentified
  source 1..105: mol_type = unassigned DNA; note = methanogen bacteria
tttcatttaagttcaatgataaatcctggtgtaagttatatttataatgctttaggaactcaaatagctccaaaccttgtgacagtggttattttcgatttcaga

SEQ ID NO: 34550 - DNA, 102 bp, unidentified
  source 1..102: mol_type = unassigned DNA; note = methanogen bacteria
gacgacgcacaggccgagacccagcaggcggacgctgacagcggcgattccatattcctcgccgaaagcgacgacagcgattcccagaccgacgacgtgtac

SEQ ID NO: 34551 - DNA, 99 bp, unidentified
  source 1..99: mol_type = unassigned DNA; note = methanogen bacteria
catatcagcaacatgattaatcctggtgtaagcaacatttacaatgctttgggaacacaaatcgctccaaacatggtaaccgttgtgatattcgatttc

SEQ ID NO: 34552 - DNA, 105 bp, unidentified
  source 1..105: mol_type = unassigned DNA; note = methanogen bacteria
ttccatctaagcagcagtattgttctcggcgtgagcaatatttataatactatgggaactcagatagctccgaatatggtgactgtggtcatctttgacttcaga

SEQ ID NO: 34553 - DNA, 192 bp, unidentified
  source 1..192: mol_type = unassigned DNA; note = methanogen bacteria
gccagtggaaatgcaacgcaaaaaattgcctctgtggaaaccgattcatcatctgatgtgattttatccaagtccataggtgatgaaattttaacagatacggataatggaacttttagagaattgcaggataagattgatgccgccgatgagggaggtacagtctatctggagaatgattatgttaatata

SEQ ID NO: 34554 - DNA, 102 bp, unidentified
  source 1..102: mol_type = unassigned DNA; note = methanogen bacteria
tttgtaggattaagtaaatccataaatgagggtataaatctaatatacatttgggttggaactgaaatagcaccaaacttagttactaatgttgtatttgat

SEQ ID NO: 34555 - DNA, 237 bp, unidentified
  source 1..237: mol_type = unassigned DNA; note = methanogen bacteria
attggcgtaacaataggattgccgagcggcacatatgatgcaaatgtaactgttgacaatactacagttaatgccgttgtaacggttttatcaactgttaaaggtagtgatgttgcgaaaatgtataaaaacgacacccaatattatgcaacattccttgacactgagggtaaattcttggctgacagaactactgttatttcaacatcaatggaatgttctacgagcgcaaagtat

SEQ ID NO: 34556 - DNA, 39 bp, unidentified
  source 1..39: mol_type = unassigned DNA; note = methanogen bacteria
ttcggtgaaggggacagttttgaaatgctatttgccaat

SEQ ID NO: 34557 - DNA, 273 bp, unidentified
  source 1..273: mol_type = unassigned DNA; note = methanogen bacteria
ttggacagaaacctaaaacatttggcaattgcctgtattaaagcatataccttgaaagatgatgaggtcatgagcggaaacaaaaacattgctacagaatatgcgggcgggtcttacttctcagttaaagtcacaacagctgatgggcatgtggtcgtaggtgatagtgtcaagtttaaaattgatgataaatcatccactgtcaaaacagacagcaacggaatagcaaaaatcaaaatatctcaaattcctaaaaaatacataataacaact

SEQ ID NO: 34558 - DNA, 45 bp, unidentified
  source 1..45: mol_type = unassigned DNA; note = methanogen bacteria
ccagttatggggaatgtgcagttgcagcaatatttctttcaagta

SEQ ID NO: 34559 - DNA, 33 bp, unidentified
  source 1..33: mol_type = unassigned DNA; note = methanogen bacteria
atatcatctagtcaagcggagtttactcaccca

SEQ ID NO: 34560 - DNA, 33 bp, unidentified
  source 1..33: mol_type = unassigned DNA; note = methanogen bacteria
ttaggccaattccctgtttataatgatgtgcca

SEQ ID NO: 34561 - DNA, 33 bp, unidentified
  source 1..33: mol_type = unassigned DNA; note = methanogen bacteria
gatataggccaatttgccacttatccagacttg

SEQ ID NO: 34562 - DNA, 114 bp, unidentified
  source 1..114: mol_type = unassigned DNA; note = methanogen bacteria
atgcaaggtgattgggtaggctatgccgatgttgaaatggatcaggatatgatttcaatttccgtatcagatgatgagatatctgttgatttggtaaaagaaggggagattttg

SEQ ID NO: 34563 - DNA, 30 bp, unidentified
  source 1..30: mol_type = unassigned DNA; note = methanogen bacteria
tcttatctatttgatcaatcggtgaaagca

SEQ ID NO: 34564 - DNA, 195 bp, unidentified
  source 1..195: mol_type = unassigned DNA; note = methanogen bacteria
acgcctttcggcatccagttgcaggacatgcaggtcgagatcgatgaagacctgctcaaacagattgccgacgcgacgggcggccggtatttccgtgccacggacaataccaagctcgccgagatctacgcggaaatcaacaagatggagaaagcccgcacgaccgtggacagtttcccggtctacaaggaactc

SEQ ID NO: 34565 - DNA, 225 bp, unidentified
  source 1..225: mol_type = unassigned DNA; note = methanogen bacteria
gccgaaacagattattatacagtggatgtcgtaaatccgacaggagacattgatttgggaaacattagtgtcaaagtaattgataatgaaaccagcttagataaaatcacatatcacattgatccaagctataatgaaatggagttaatcaatgacttaaaagttcctttgaataattcatgtgaatattataccgtttcatggaatgtccactcctacttcgaa

SEQ ID NO: 34566 - DNA, 90 bp, unidentified
  source 1..90: mol_type = unassigned DNA; note = methanogen bacteria
gtggttgcaaccttcggtactttagcaggtatggaagaggacgatgaagaaggaattaccaatctggttcacgataccttcactccattg

SEQ ID NO: 34567 - DNA, 270 bp, unidentified
  source 1..270: mol_type = unassigned DNA; note = methanogen bacteria
ttgaaaacagaaccatatgcagtaacattaaccaatatcatagacaggaattataatcctagtggtgattatgcttcattcaatgttttaaaagttaattcatccataattttagataataaaacagaatatgtttatggtaatgttgcaatcagttatgatgttgataatttaaccaatgttactgtgactgttgttgatttggaaagtggtgaagtagataatttcactattacaaactcgactattagtctaattcatctgttgaaa

SEQ ID NO: 34568 - DNA, 270 bp, unidentified
  source 1..270: mol_type = unassigned DNA; note = methanogen bacteria
atgtcatataacatcacggttttaccagtattattcgccaacgatttggaaatgcgcttccaagacggttcaacatttaacgcattggttctaaacggtcagggaaccccgttagctaatgctgcagtaacattcaacatcaacggagtattctatacaagatacaccaattcttcaggaatagcaatactgaacattaacctgatggctggaaaatacatcatcacctcagaattcgatggaatgaaaattcctttaaaaaatataata

SEQ ID NO: 34569 - DNA, 45 bp, unidentified
  source 1..45: mol_type = unassigned DNA; note = methanogen bacteria
ttgccgcaacccgccactgcatcaattcaatcaattttagcactt

SEQ ID NO: 34570 - DNA, 270 bp, unidentified
  source 1..270: mol_type = unassigned DNA; note = methanogen bacteria
atgggtggagcaataggcgctggacgtactcaactttcaggttatgtggatattgataattgtatatttgaaagcaataaagcaaatggggctacattcattaattgtaacggtggagcaatttattgtttaggttatgtggttattaagaattgtaccttaaaaaataattatgcatatgattatggtggtgcagtatatgcggagtacattcttgtgaattataatacatcctctaagtctattgatattctttattggcaatgtggc

SEQ ID NO: 34571 - DNA, 270 bp, unidentified
  source 1..270: mol_type = unassigned DNA; note = methanogen bacteria
atgtacttgactgcaagtaaggtcacagtcaaaaagactgctaggaagtttgtccttcaggccaaacttaaaatcaatggaaaattggttaaaggtaagaaaataacattcaaattcaaaggcaaaacctacagggctaaaaccaactccaaaggtattgccaaagttataattaaaaagaatgttgtcaaaaagcttaaaaaaggcaaaacttatgcagttaaagttagttatcttaaagatagtgtcaaatcaagtgttaaagttaag

SEQ ID NO: 34572 - DNA, 96 bp, unidentified
  source 1..96: mol_type = unassigned DNA; note = methanogen bacteria
tataaggtatatgtaatggatttgggtggtgaaataaagtcaaaagaagtcaatgaatttaatgctaaactggaagaaatatctgagatttttact

SEQ ID NO: 34573 - DNA, 270 bp, unidentified
  source 1..270: mol_type = unassigned DNA; note = methanogen bacteria
gtaaatgctactatggctggcaacttaaccaatgtcatatttgccaatagcgccgaaaataaaacaattgtcaataaaaccagcaataatattactgtcattcctaacgttatattaagtttaaccgaagttaccaatgtcactgaagcagttgttggcgattcaatcaaatacacaattaccatacacaatagcggattatctgatgcaacagacattaaagtatgggatattttaccagctaatgtaaaatacgacctggaccataaa

SEQ ID NO: 34574 - DNA, 204 bp, unidentified
  source 1..204: mol_type = unassigned DNA; note = methanogen bacteria
agtagttacaatactactttaaaagaggagtctgaaatagatcacaatacatattatgtaagtaataatgttagtgaggttaacaactccagtcaaagtacagttgatgcaaaaaccattataagcaagataaattatgaaggatatggattaactggaaatttacctattaaccttatcaataacatttcctatacattaaac

SEQ ID NO: 34575 - DNA, 36 bp, unidentified
  source 1..36: mol_type = unassigned DNA; note = methanogen bacteria
atggatataaattggacggtcagaataaataatccg

SEQ ID NO: 34576 - DNA, 66 bp, unidentified
  source 1..66: mol_type = unassigned DNA; note = methanogen bacteria
ataaatgatccaacaacacaaggaataaatgatagtgcaagagcaatgaaatatgtttttccaaat

SEQ ID NO: 34577 - DNA, 33 bp, unidentified
  source 1..33: mol_type = unassigned DNA; note = methanogen bacteria
ttaatgtctaattatttgaatttaactattgaa

SEQ ID NO: 34578 - DNA, 36 bp, unidentified
  source 1..36: mol_type = unassigned DNA; note = methanogen bacteria
gcacttatctctaagtacctcggtgccgacgagatg

SEQ ID NO: 34579 - DNA, 267 bp, unidentified
  source 1..267: mol_type = unassigned DNA; note = methanogen bacteria
ttgtctgttactaacaagtcttatgctgcaagtgcaaagacaaaagcattaactgctacatttaaaacagctaaaggaaatccgattgcaggcaaaaaagtaactttctcactagatggcaaaaagtatactgcaaccacaaatgccaatggtgttgcaactgtcaatgtaagcctaaacaaaaaaggaacatataatttcacagtaaaatacggtggagacagcacatatgctgcaatcaacaagactgcaaaattaacaataaaa

SEQ ID NO: 34580 - DNA, 36 bp, unidentified
  source 1..36: mol_type = unassigned DNA; note = methanogen bacteria
gatgtcacatcaacacttcaaacaatggattataga

SEQ ID NO: 34581 - DNA, 204 bp, unidentified
  source 1..204: mol_type = unassigned DNA; note = methanogen bacteria
ttggacaaaaattttgcaaatgcaagaaaattaactgttggagatgaaatctcatttgaaaggaactgtattgaaattacaaaagtaattcgaagattagattattcactagaatacgtttataattcccctgttgctacaaccgtaccaaaccacaaaactgtcagttttgcttacatgtcacataatacattaccatcagac

SEQ ID NO: 34582 - DNA, 36 bp, unidentified
  source 1..36: mol_type = unassigned DNA; note = methanogen bacteria
aaatttgatggaactcctgaaacatattcaaacttt

SEQ ID NO: 34583 - DNA, 51 bp, unidentified; identical to SEQ ID NO: 28257
  source 1..51: mol_type = unassigned DNA; note = methanogen bacteria

SEQ ID NO: 34584 - DNA, 183 bp, unidentified
  source 1..183: mol_type = unassigned DNA; note = methanogen bacteria
acatttagttttggtgagcatgataaaaatgcaactgctgaaaacaacaatacaacacactttgaaaatgtaactgttcagatgacttcaaatcttaataataaaaataattcagtggaatatgattatgtagcagatactgttgattataatgcaaattattcaatgaatgtaggatatgat

SEQ ID NO: 34585 - DNA, 201 bp, unidentified
  source 1..201: mol_type = unassigned DNA; note = methanogen bacteria
gccagcgacaatcaaacatcggcagataatctgcaaatcaatgatataaatgctaatgtaattgatgaagaaattaatcagcatactaatgacatgaatgtaataaaagaaaatacttcagaaaaagagagtattatctccgataatctcctctcaagcagcaatactaatgataaattatccgcaccaaaagaaggaaca

SEQ ID NO: 34586 - DNA, 198 bp, unidentified
  source 1..198: mol_type = unassigned DNA; note = methanogen bacteria
agctggaatatgcaggcgatgattgaccctacacagaacgttcaggaacagatgcagcagcagaaaatgactgaggtggaccagggtcagcagttaaacgaaactccggatacttcaaattcatcaggtcaaggctatactgaaatgggtaaagtttataaagaccctgctacgggtaagatgataatggtggaagga

SEQ ID NO: 34587 - DNA, 42 bp, unidentified
  source 1..42: mol_type = unassigned DNA; note = methanogen bacteria
tgtccgaacaatgtgttgatgcttgctgatgatgtgatgtcc

SEQ ID NO: 34588 - DNA, 42 bp, unidentified
  source 1..42: mol_type = unassigned DNA; note = methanogen bacteria
atgacagctgatgtggtaatagatattgcgagagaggtagtg

SEQ ID NO: 34589 - DNA, 63 bp, unidentified
  source 1..63: mol_type = unassigned DNA; note = methanogen bacteria
atgctaaatagcatgtcctctctttttgttgatcttgtgaagagcataccgcaatatataaaa

SEQ ID NO: 34590 - DNA, 69 bp, unidentified
  source 1..69: mol_type = unassigned DNA; note = methanogen bacteria
ataccatttattgaaatacctataaattggataactatgttagttgcgggttttggtggtattatagga

SEQ ID NO: 34591 - DNA, 33 bp, unidentified
  source 1..33: mol_type = unassigned DNA; note = methanogen bacteria
gtttcaaatgtaaattcatccaacgatattgct

SEQ ID NO: 34592 - DNA, 66 bp, unidentified
  source 1..66: mol_type = unassigned DNA; note = methanogen bacteria
ggaggaagagctcttatgggaactctcggaggacttaacggatttacagtatatggaatatccacc

SEQ ID NO: 34593 - DNA, 30 bp, unidentified
  source 1..30: mol_type = unassigned DNA; note = methanogen bacteria
ggcatgcctttagatgctgaaacaaacaat

SEQ ID NO: 34594 - DNA, 87 bp, unidentified
  source 1..87: mol_type = unassigned DNA; note = methanogen bacteria
tatagatcctacttcagcaataatgcaagcggattgaatgcaactgaagacatcagttcaatcagaaagaatgtgactagcatctat

SEQ ID NO: 34595 - DNA, 30 bp, unidentified
  source 1..30: mol_type = unassigned DNA; note = methanogen bacteria
ggaatgcctttggatgcagaagtcaataat

SEQ ID NO: 34596 - DNA, 33 bp, unidentified
  source 1..33: mol_type = unassigned DNA; note = methanogen bacteria
ttcggaatgcctttggatgcagaagttgacaat

SEQ ID NO: 34597 - DNA, 54 bp, unidentified
  source 1..54: mol_type = unassigned DNA; note = methanogen bacteria
atgtatgacggaatgaatgatttgaaagaatgggaattcattatgactccaaac

SEQ ID NO: 34598 - DNA, 30 bp, unidentified
  source 1..30: mol_type = unassigned DNA; note = methanogen bacteria
ggtttaagttcaatttcatcaacagtaact

SEQ ID NO: 34599 - DNA, 138 bp, unidentified
  source 1..138: mol_type = unassigned DNA; note = methanogen bacteria
gcattagataatgatactattgtccaatcagacgattctaataattttaatcaaggatataacaaatctatgttgcttatcagtgataatggtggaacaaatattcttgactctgcgggcagaattgtacaatttagt

SEQ ID NO: 34600 - DNA, 261 bp, unidentified
  source 1..261: mol_type = unassigned DNA; note = methanogen bacteria
gtgacaaaactaaacgtcacaaaaatctggaatgatgcaaacaaccaagacggcataagaccttcaagcatcacagtagttttatcaaatgacacaagcaaagttgcagagtatgtattaaatgattccaacaattggaaacataccttcacagatttaccagtctacaataatggccaacaaatcaattacacaattgaagaagtaaccatcgtagacaactacaaatcagaagtaacaaaaaatactgcttacaactgg

SEQ ID NO: 34601 - DNA, 57 bp, unidentified
  source 1..57: mol_type = unassigned DNA; note = methanogen bacteria
atggtttccaatgcatttacaagtaacggttatgcggtattgggaaatactgatgtc

SEQ ID NO: 34602 - DNA, 123 bp, unidentified
  source 1..123: mol_type = unassigned DNA; note = methanogen bacteria
tctaatgactcaaaagaatcaagtaatgcaggacaatctgcacaatcatcaaaacaatcaagtagtgaaccggattataattctgatgagtatgttaaaaaatgggatcaatcccaacaaggt

SEQ ID NO: 34603 - DNA, 51 bp, unidentified
  source 1..51: mol_type = unassigned DNA; note = methanogen bacteria
ggcgaggatggacatcaatataaaagaatgtataatccagacaccggtgag

SEQ ID NO: 34604 - DNA, 117 bp, unidentified
  source 1..117: mol_type = unassigned DNA; note = methanogen bacteria
gattgtaaaggttcagattgtgaaaaatgtgttattgcctgtccgaataatgttttgattaaggagggagatgatacagtagtcagaaatcctttaacttgtaagcactgtaaggtt

SEQ ID NO: 34605 - DNA, 30 bp, unidentified
  source 1..30: mol_type = unassigned DNA; note = methanogen bacteria
atctgtcctaacgattgcattactgttaac

SEQ ID NO: 34606 - DNA, 63 bp, unidentified
  source 1..63: mol_type = unassigned DNA; note = methanogen bacteria
ataaataattatgccaataatggtgcttcagtctattcactgctcagtataattgacattaac

SEQ ID NO: 34607 - DNA, 30 bp, unidentified
  source 1..30: mol_type = unassigned DNA; note = methanogen bacteria
accctcggggatttgtaccccaggagtttt

SEQ ID NO: 34608 - DNA, 39 bp, unidentified
  source 1..39: mol_type = unassigned DNA; note = methanogen bacteria
agtgatataaaagctgtaatagacactgcaactgacggt

SEQ ID NO: 34609 - DNA, 84 bp, unidentified
  source 1..84: mol_type = unassigned DNA; note = methanogen bacteria
tatactaacgtttatccgttaagtatgaaaaaatcactctatattattaatggtactttggatgctcaaaattttaattttaca

SEQ ID NO: 34610 - DNA, 90 bp, unidentified
  source 1..90: mol_type = unassigned DNA; note = methanogen bacteria
tacagatcttattttgcaagctcagcaagtggattgaatgctacaaaggatatcaattccattagagacaatatgactagccttcaaatc

SEQ ID NO: 34611 - DNA, 174 bp, unidentified
  source 1..174: mol_type = unassigned DNA; note = methanogen bacteria
agtgatgctactagtcgtactattattaatagggatttggctttagctttggatggtgagttagatgttagttgtgatttaggttttgtttttgctagccgtgattcatttgattgtcaatttgatagtagttatgttgaggctcatgaattctttaaaaataatttatctgtg

SEQ ID NO: 34612 - DNA, 147 bp, unidentified
  source 1..147: mol_type = unassigned DNA; note = methanogen bacteria
tcagaggataacaaattaactctgggaatgttaaaccaaagattcaacaaggactttagaaacggacatcttcttgtatacattgacggcaagttggttttcaatggcacaaccactgataatcttttacagattatatttgatttg

SEQ ID NO: 34613 - DNA, 78 bp, unidentified
  source 1..78: mol_type = unassigned DNA; note = methanogen bacteria
gctggaaatcatgaaattactgttgaatttagtgataacgacggaaatacaaacacatacactgagaatataactatt

SEQ ID NO: 34614 - DNA, 90 bp, unidentified
  source 1..90: mol_type = unassigned DNA; note = methanogen bacteria
tacaggtcttattttgcaagttcaacaagtggattgaatgctacaaaggatatcaattccattagagacaatatgacaagccttcaaatc

SEQ ID NO: 34615 - DNA, 42 bp, unidentified
  source 1..42: mol_type = unassigned DNA; note = methanogen bacteria
gaaagtgttttaagagattatttaagcattatacatggaaat

SEQ ID NO: 34616 - DNA, 57 bp, unidentified
  source 1..57: mol_type = unassigned DNA; note = methanogen bacteria
cttggtggagccttaggtatggctgcaatgagtagttctgcatcaggtttcttatta

SEQ ID NO: 34617 - DNA, 39 bp, unidentified
  source 1..39: mol_type = unassigned DNA; note = methanogen bacteria
gcagtcatcgcagcagtcttcggaactgcagacgacctt

SEQ ID NO: 34618 - DNA, 30 bp, unidentified
  source 1..30: mol_type = unassigned DNA; note = methanogen bacteria
ctggatgtttcaaaacctacactggccaac

SEQ ID NO: 34619 - DNA, 78 bp, unidentified
  source 1..78: mol_type = unassigned DNA; note = methanogen bacteria
ggccagccacagcttgcagtaatctatggtgcagcaccttcacttgcagttaatgaaatggcaaatgcattagtaggc

SEQ ID NO: 34620 - DNA, 219 bp, unidentified
  source 1..219: mol_type = unassigned DNA; note = methanogen bacteria
gtttgttctgttagagatttaaataggtctttcaaagatggatttaaatttgaagctaaattaatggatggtcaggtaaaagcatttgctaaccaaataattaccttcaacattaatggagtattttatgatagaactactgataatgaggatattgctagattaaacatcaatttaatggctggtaaatacaattattacttcaatgtattccaacgg

SEQ ID NO: 34621 - DNA, 174 bp, unidentified
  source 1..174: mol_type = unassigned DNA; note = methanogen bacteria
gctaatgataatgttactagtgatgattcgccggtagatattgagaatgaagaaatattaatacaaaatgctgtttattttaattcatctgttgaaaatgatgggattggtactcaagaaaatccatataaatatctatcatggcactgtctaattttttatgggttgttgttt

SEQ ID NO: 34622 - DNA, 255 bp, unidentified
  source 1..255: mol_type = unassigned DNA; note = methanogen bacteria
acaaagacagttaaaatatggtggaagaaattcacccttacagcaagcttgaaaaatggtaaaaaagcattaaaaggcaaaaagataagctttaagtttaagggaaaaacttacagtgctaaaaccaatagcaagggtcttgcaaaggttaccatcaagagaaaagtcattagacagcttaaaagaggcaaatcttataaagtaagtattgtctaccttagaaacaccattacaagaattgtaaaagttaaacgt

SEQ ID NO: 34623 - DNA, 180 bp, unidentified
  source 1..180: mol_type = unassigned DNA; note = methanogen bacteria
tatttgaattcaaacagtcctaatgatactaatatacctcctgaggacactattactgtaaacgattccattacagatattgctaacccagatgagaatggaacagtttggcttgaagaaaatggaacattgacagaagcaaaagttacagaatcaacaggcaatggctctgcttcaagt

SEQ ID NO: 34624 - DNA, 105 bp, unidentified
  source 1..105: mol_type = unassigned DNA; note = methanogen bacteria
gttcaatacttcggaggacacaatccaagccttatcggctcaatgttgcctgcttccttgaatggaactcttcgttgcattccttgcagtgctgacttatttcac

SEQ ID NO: 34625 - DNA, 42 bp, unidentified
  source 1..42: mol_type = unassigned DNA; note = methanogen bacteria
aatgtaatgtcagtggtatccacaatgtttgcaggattaatt

SEQ ID NO: 34626 - DNA, 105 bp, unidentified
  source 1..105: mol_type = unassigned DNA; note = methanogen bacteria
ggtgaatcagtcggtcttgaagtcaatagcgataacttctataatgaaacaaatctcgcagacggttggatttattcaatgaatataaatgacctgttcttatat

SEQ ID NO: 34627 - DNA, 39 bp, unidentified
  source 1..39: mol_type = unassigned DNA; note = methanogen bacteria
atggttgcaatgtttcaaacattgttatctagtctttta

SEQ ID NO: 34628 - DNA, 45 bp, unidentified
  source 1..45: mol_type = unassigned DNA; note = methanogen bacteria
ttgccacagcctgaaaccgctaccattgcgggaattttagctttg

SEQ ID NO: 34629 - DNA, 252 bp, unidentified
  source 1..252: mol_type = unassigned DNA; note = methanogen bacteria
atgataaaaacaatttattacgattcaaacggaagtcagataacctcaaccgttagaaaattatccgatttcaaaggtgacgagaaatacagctttgcatcaacattaggcagttactttactgataattatgtcgacatagaccatatttcagtgcagataattaaagacaatgaggtattgaatgagttcaattcaacaatgaacaaaaataaattaacttctattccaaattcaaataattcttcaaaa

SEQ ID NO: 34630 - DNA, 87 bp, unidentified
  source 1..87: mol_type = unassigned DNA; note = methanogen bacteria
tacagatcttactttagcaataatgcaagtggattgaatgcaacccaagacataagctccattagaagcaatgtcactagcatttac

SEQ ID NO: 34631 - DNA, 252 bp, unidentified
  source 1..252: mol_type = unassigned DNA; note = methanogen bacteria
gtgattgttaaagtgacagttcctgaagatgcaaaaggtaatgtgaccgtcaaaataggaaatacaactaaagttgtagatgtgactggtggagaaaacaccattgcaattcctggcgtaggcgaaggcacacacgatgtagaggtagtctacagcggagacgacaagtacgattcaaaaacaataaccaagacaattactgtattcaagtcaatcaacaatgatgaacaaatgagcagaggttgggaacac

SEQ ID NO: 34632 - DNA, 84 bp, unidentified
  source 1..84: mol_type = unassigned DNA; note = methanogen bacteria
aaattgagtgcaacatatccaacatttattgatgcactgttcggtttaaaaaatccaggtatgctattaaacgctttacttcac

SEQ ID NO: 34633 - DNA, 252 bp, unidentified
  source 1..252: mol_type = unassigned DNA; note = methanogen bacteria
cctacattgtatgcaagtgatttggagatgagctataaagacggttcaacattcaatgcaactgttcttgacggtcagggaaatccattaaaagatgcaattgtcaaatttaacatcaatggaatattctataaccacaaaacagattcaaatggaatagctatgctaaacattaccttaatgtccagtaaatacataatcacatcagagtatgatggattgaaagtttcaaacactattacaatcaaggat

SEQ ID NO: 34634 - DNA, 39 bp, unidentified
  source 1..39: mol_type = unassigned DNA; note = methanogen bacteria
ttgatttcaatgttccagacattgttagctagtctttta

SEQ ID NO: 34635 - DNA, 30 bp, unidentified
  source 1..30: mol_type = unassigned DNA; note = methanogen bacteria
gctttcccaacaccaagtttcggacaagca

SEQ ID NO: 34636 - DNA, 30 bp, unidentified
  source 1..30: mol_type = unassigned DNA; note = methanogen bacteria
cagtcgttccactcgatgatagccgattac

SEQ ID NO: 34637 - DNA, 45 bp, unidentified; identical to SEQ ID NO: 32833
  source 1..45: mol_type = unassigned DNA; note = methanogen bacteria

SEQ ID NO: 34638 - DNA, 30 bp, unidentified
  source 1..30: mol_type = unassigned DNA; note = methanogen bacteria
gctgacattgctcatgctgtaacgcccata

SEQ ID NO: 34639 - DNA, 84 bp, unidentified
  source 1..84: mol_type = unassigned DNA; note = methanogen bacteria
attgcatgtcccaataatgttttagctaaagatggtgatgatactgttgtcggaaatgcttttgcatgtaaacattgcagggtt

SEQ ID NO: 34640 - DNA, 30 bp, unidentified
  source 1..30: mol_type = unassigned DNA; note = methanogen bacteria
atttgtcctaatgattgtattactgtcaac

SEQ ID NO: 34641 - DNA, 30 bp, unidentified
  source 1..30: mol_type = unassigned DNA; note = methanogen bacteria
tctggtaattatccattttacacagattta

SEQ ID NO: 34642 - DNA, 39 bp, unidentified
  source 1..39: mol_type = unassigned DNA; note = methanogen bacteria
cttgcatctttaatgacctcattaatatcaggtttaatt

SEQ ID NO: 34643 - DNA, 30 bp, unidentified
  source 1..30: mol_type = unassigned DNA; note = methanogen bacteria
tctggtaattatccattttacacagatttg

SEQ ID NO: 34644 - DNA, 39 bp, unidentified
  source 1..39: mol_type = unassigned DNA; note = methanogen bacteria
gcaattgcattggttcaaacattgttagctggtatttta

SEQ ID NO: 34645 - DNA, 102 bp, unidentified
  source 1..102: mol_type = unassigned DNA; note = methanogen bacteria
cacatgtacaacacatacatgaaggatttgtcgggtgaaatctcatcaaaggaagtcagggaattcaacggcgagttgaacgcattggaaaaatattttaaa

SEQ ID NO: 34646 - DNA, 156 bp, unidentified
  source 1..156: mol_type = unassigned DNA; note = methanogen bacteria
atgcattcccaaaacggaaccagtgagtttgcgggattcaagacaatcgttttggacaaatatgttccgattaaaaccggcgataattttaaggttgtatttaagaataatgcagttccgtaccaggctttttcaagacagcactatgttccggga

SEQ ID NO: 34647 - DNA, 54 bp, unidentified
  source 1..54: mol_type = unassigned DNA; note = methanogen bacteria
caatcatggaatgatataagtctcaaaaataaaactgtctgtcttaaggtatac

SEQ ID NO: 34648 - DNA, 69 bp, unidentified
  source 1..69: mol_type = unassigned DNA; note = methanogen bacteria
caacttcaaacaagccttaatttatcggcggagatactttctctatgtcacaatctgctggaattagat

SEQ ID NO: 34649 - DNA, 30 bp, unidentified
  source 1..30: mol_type = unassigned DNA; note = methanogen bacteria
tcaggcaattatccgttctacactgacttg

SEQ ID NO: 34650 - DNA, 186 bp, unidentified
  source 1..186: mol_type = unassigned DNA; note = methanogen bacteria
gctgaaggaaacttcacagcacttcaggatgaaataaatttaagtacaggcagcatagatataaatcaagattatgtatatgataatggaacggattatgagcttaaaaaaggaattgttttaaataaaaatgattttacaattaatggcaataaacaacctggttttaatcaatgccaatggaac

SEQ ID NO: 34651 - DNA, 30 bp, unidentified
  source 1..30: mol_type = unassigned DNA; note = methanogen bacteria
tctggtaatttcccattttacagtgactta

SEQ ID NO: 34652 - DNA, 147 bp, unidentified
  source 1..147: mol_type = unassigned DNA; note = methanogen bacteria
aatttaagtgatgggctgaatgaaagaatgataagtgaagaagaattttcatctcttgaaactattgctatcgaatcatcggattatcttttgaataatcctggaaatcctgaaaattgggaagatgataggacttgcaataaagaa

SEQ ID NO: 34653 - DNA, 30 bp, unidentified
  source 1..30: mol_type = unassigned DNA; note = methanogen bacteria
ggtaattttccatattatgatgatgtaaca

SEQ ID NO: 34654 - DNA, 69 bp, unidentified
  source 1..69: mol_type = unassigned DNA; note = methanogen bacteria
tacgctacccccctcggaggtatcggattctatgttgcgaacatgattaccttcggtgcatatgattat

SEQ ID NO: 34655 - DNA, 90 bp, unidentified
  source 1..90: mol_type = unassigned DNA; note = methanogen bacteria
tttcgttcacttggagagttgacaataacctcatcaaccagcccgatatatatgccagttcaattcctggaagtgatttggggccaagga

SEQ ID NO: 34656 - DNA, 30 bp, unidentified
  source 1..30: mol_type = unassigned DNA; note = methanogen bacteria
ggcaatttcccattttatacagacttgccg

SEQ ID NO: 34657 - DNA, 30 bp, unidentified
  source 1..30: mol_type = unassigned DNA; note = methanogen bacteria
tctggcaattatccgttttacacagacttg

SEQ ID NO: 34658 - DNA, 42 bp, unidentified
  source 1..42: mol_type = unassigned DNA; note = methanogen bacteria
aaattaatcgaacaatttataggtactggagatgctcttcca

SEQ ID NO: 34659 - DNA, 30 bp, unidentified
  source 1..30: mol_type = unassigned DNA; note = methanogen bacteria
tcaggtaattatccgttttacacagatttg

SEQ ID NO: 34660 - DNA, 30 bp, unidentified
  source 1..30: mol_type = unassigned DNA; note = methanogen bacteria
tcaggcaattatccattttacacagacttg

SEQ ID NO: 34661 - DNA, 159 bp, unidentified
  source 1..159: mol_type = unassigned DNA; note = methanogen bacteria
gccaaaacagatacaaaaattaccgtaacaagcaatagtactttatatgacggcgattatttttccatttcattaaatgatgctaatggtacacctattaccaatcagacagttaaaatgggtattatagatgctaaggtggtgaaaatcctcaaaaag

SEQ ID NO: 34662 - DNA, 90 bp, unidentified
  source 1..90: mol_type = unassigned DNA; note = methanogen bacteria
atttacagatcttactttagcaataatacaagcggattaaatgctacacaagacatctcatcaattagagaaaatgtaagcagcatttat

SEQ ID NO: 34663 - DNA, 30 bp, unidentified
  source 1..30: mol_type = unassigned DNA; note = methanogen bacteria
tctgagtctttgggcattacagaaaataca

SEQ ID NO: 34664 - DNA, 36 bp, unidentified
  source 1..36: mol_type = unassigned DNA; note = methanogen bacteria
gtaagtgcaatgagtactattatggcaggattaatc

SEQ ID NO: 34665 - DNA, 30 bp, unidentified
  source 1..30: mol_type = unassigned DNA; note = methanogen bacteria
tccggtaatttcccgttttacactgggccg

SEQ ID NO: 34666 - DNA, 42 bp, unidentified
  source 1..42: mol_type = unassigned DNA; note = methanogen bacteria
aaattaattgagaaatttataggtactggagatgctcttcca

SEQ ID NO: 34667 - DNA, 30 bp, unidentified
  source 1..30: mol_type = unassigned DNA; note = methanogen bacteria
tcaggcaattatccgttttacacagattta

SEQ ID NO: 34668 - DNA, 75 bp, unidentified
  source 1..75: mol_type = unassigned DNA; note = methanogen bacteria
atatcaaaatatttctctatttacaatgatgaaatgagctcaaatgtagaccagatgctgaactttttgtattat

SEQ ID NO: 34669 - DNA, 39 bp, unidentified
  source 1..39: mol_type = unassigned DNA; note = methanogen bacteria
atcgtagaagttatgggaaaaggaaatgcacttccaagt

SEQ ID NO: 34670 - DNA, 66 bp, unidentified
  source 1..66: mol_type = unassigned DNA; note = methanogen bacteria
ctgcctggaatcaacgtaccgataaacctactaacattgataatttcagggtttggaggagtagtg

SEQ ID NO: 34671 - DNA, 48 bp, unidentified
  source 1..48: mol_type = unassigned DNA; note = methanogen bacteria
caaacattaattcaagatttcgtaggagaatctggttcagcagtttca

SEQ ID NO: 34672 - DNA, 96 bp, unidentified
  source 1..96: mol_type = unassigned DNA; note = methanogen bacteria
tataaggtatatgtaatggatttgggtggtgaaatacagtcaaaagaagtcaatgaatttaatgctaaactggaagaaatatctgagattttcatg

SEQ ID NO: 34673 - DNA, 39 bp, unidentified
  source 1..39: mol_type = unassigned DNA; note = methanogen bacteria
atcgaacaattcgttggtaaaggaaatgcattaaccagc

SEQ ID NO: 34674 - DNA, 45 bp, unidentified
  source 1..45: mol_type = unassigned DNA; note = methanogen bacteria
aaattaattgaaacatatgtcggtactggaagtgcattatccagc

SEQ ID NO: 34675 - DNA, 33 bp, unidentified
  source 1..33: mol_type = unassigned DNA; note = methanogen bacteria
gatgctgattattctgataattactgcaatatg

SEQ ID NO: 34676 - DNA, 42 bp, unidentified
  source 1..42: mol_type = unassigned DNA; note = methanogen bacteria
aaattgattgaacagtttatcggcagcggagatgcgcttcct

SEQ ID NO: 34677 - DNA, 189 bp, unidentified
  source 1..189: mol_type = unassigned DNA; note = methanogen bacteria
gtttctttaagttttgatgatggcagcggtggcggccaggatcattttgaaaacgtgactgaagaaatgaccaaaaacgtaaacaactccagtgtcgtttttgacattgaaaccgatggaattgactataatgaaaatgggtcttcacaactcaattcgcagtatttgaagtctaatgaagaagaaacg

SEQ ID NO: 34678 - DNA, 36 bp, unidentified
  source 1..36: mol_type = unassigned DNA; note = methanogen bacteria
aatgataatggttattttattgattacagcagtatg

SEQ ID NO: 34679 - DNA, 138 bp, unidentified
  source 1..138: mol_type = unassigned DNA; note = methanogen bacteria
ggagaatccgtaggcctggaagtcaacgtcaatgactattacgatgaaaccaacttggctgacggatggatatactcaaactatatcaatgacttgttcgtgtatcaggttgatgttttaggcgcaacgaccgatatg

SEQ ID NO: 34680 - DNA, 69 bp, unidentified
  source 1..69: mol_type = unassigned DNA; note = methanogen bacteria
ttagggattggaacaactggacaagtattaaaagtatctagtagtggtattccagcctgggaaaatgat

SEQ ID NO: 34681 - DNA, 48 bp, unidentified
  source 1..48: mol_type = unassigned DNA; note = methanogen bacteria
caaaaattaattgaagaagttgtcggtaaaggaagcgcattatccagt

SEQ ID NO: 34682 - DNA, 60 bp, unidentified
  source 1..60: mol_type = unassigned DNA; note = methanogen bacteria
atacctggaattagtatcccaataactttactaacaatactagtatcgggattcggaggt

SEQ ID NO: 34683 - DNA, 39 bp, unidentified
  source 1..39: mol_type = unassigned DNA; note = methanogen bacteria
gctctaattgaacatttcatcggagccggtgatgcatta

SEQ ID NO: 34684 - DNA, 30 bp, unidentified
  source 1..30: mol_type = unassigned DNA; note = methanogen bacteria
ttgggagtgattccagcattgattgcagcg

SEQ ID NO: 34685 - DNA, 174 bp, unidentified
  source 1..174: mol_type = unassigned DNA; note = methanogen bacteria
gcagcagatgacaatgcaaatgggattattagtgttgatgacaatgacgaacttattttagacgaagcaatcgatgatgatgtttcaagcgctaataataattatgatgaagaacttattttagaaacccctgctgatgatcttgttaagcagcaattacaagtactcagacgg

SEQ ID NO: 34686 - DNA, 39 bp, unidentified
  source 1..39: mol_type = unassigned DNA; note = methanogen bacteria
attcaacaatttgtcggaactggaagtgctttaaccagc

SEQ ID NO: 34687 - DNA, 138 bp, unidentified
  source 1..138: mol_type = unassigned DNA; note = methanogen bacteria
gtgttcacatatccgttcgatatcgagcactggggagtgatcctccagaacaccgagagcggcaacggattattcggtctcacaggatatttctacactcccgcatggggctacatcctcggtttcgaggatctcatc

SEQ ID NO: 34688 - DNA, 48 bp, unidentified
  source 1..48: mol_type = unassigned DNA; note = methanogen bacteria
caagcattaatagccgaaatagtcggtcagggagaagcattaagtagc

SEQ ID NO: 34689 - DNA, 75 bp, unidentified
  source 1..75: mol_type = unassigned DNA; note = methanogen bacteria
tctcaaataaatgtggaggcttttttttgcaattggtgtttcaataccgataaccactttgattttttcacttgg

SEQ ID NO: 34690 - DNA, 30 bp, unidentified
  source 1..30: mol_type = unassigned DNA; note = methanogen bacteria
aattttccgttttacacagacttgcccttg

SEQ ID NO: 34691 - DNA, 213 bp, unidentified
  source 1..213: mol_type = unassigned DNA; note = methanogen bacteria
gctggttctaatatgactagtaatgctacttcaaaagcatattccaataacactactgttgtttcaactccaagtttaactgttcgtgaaatatccaatactcctaatgtggttgtcggtgatcctgttagctttactgtaatcgttacaaacgatggtgattgtgtcctcggtgatgtgatgtttatgtttcaaacattttccctgaaggat

SEQ ID NO: 34692 - DNA, 48 bp, unidentified
  source 1..48: mol_type = unassigned DNA; note = methanogen bacteria
caagctttaatcagtcaattcttcgaagcaggaagcgcacttaccggt

SEQ ID NO: 34693 - DNA, 45 bp, unidentified
  source 1..45: mol_type = unassigned DNA; note = methanogen bacteria
gaattgattaacacattccttgataaaggtagtgcccttacagga

SEQ ID NO: 34694 - DNA, 48 bp, unidentified
  source 1..48: mol_type = unassigned DNA; note = methanogen bacteria
caagctttaatcagccaattcttcgaagcaggaagcgcacttaccgga

SEQ ID NO: 34695 - DNA, 240 bp, unidentified
  source 1..240: mol_type = unassigned DNA; note = methanogen bacteria
gctaaggtaatctattctggtgataaaaaatacgattcaaattccacctggacagaaattgtagttgaaggcgatgaaaatcataatggcagtgatgatcacgtttctaatagtcagtattctgataagcattcaagtggtggaatttcattggccgattatccaaccgctaatccgatttggatattactactgatactagtgacagtatgtacaacacaaattagaagatttaaaaaa

SEQ ID NO: 34696 - DNA, 30 bp, unidentified
  source 1..30: mol_type = unassigned DNA; note = methanogen bacteria
gaatacgcaacaacaatgggctcaactgca

SEQ ID NO: 34697 - DNA, 45 bp, unidentified
  source 1..45: mol_type = unassigned DNA; note = methanogen bacteria
aaattaattgaatcatttatcggtaccggagacgcactcccaagt

SEQ ID NO: 34698 - DNA, 48 bp, unidentified
  source 1..48: mol_type = unassigned DNA; note = methanogen bacteria
caaaaattaattgaatccgtaatgggtgctggagacgcactttcagga

SEQ ID NO: 34699 - DNA, 45 bp, unidentified
  source 1..45: mol_type = unassigned DNA; note = methanogen bacteria
caaaaactaattgaaaccttcataggtactggagatgcacttcct

SEQ ID NO: 34700 - DNA, 45 bp, unidentified
  source 1..45: mol_type = unassigned DNA; note = methanogen bacteria
aaattaattgaatcctttgtaggtactggagatgctattcctagt

SEQ ID NO: 34701 - DNA, 45 bp, unidentified
  source 1..45: mol_type = unassigned DNA; note = methanogen bacteria
aaattaattgaatcatttatcggtagcggagacgcacttccaagt

SEQ ID NO: 34702 - DNA, 42 bp, unidentified
  source 1..42: mol_type = unassigned DNA; note = methanogen bacteria
gcattcaagatacttggaggggcgattaccctcgattattca

SEQ ID NO: 34703 - DNA, 45 bp, unidentified
  source 1..45: mol_type = unassigned DNA; note = methanogen bacteria
aaattaattgaaaccttcattggcaacggagatgcacttccaagt

SEQ ID NO: 34704 - DNA, 48 bp, unidentified
  source 1..48: mol_type = unassigned DNA; note = methanogen bacteria
caagcattaattgaagaaaccatcggaactggaagtgcattatccagt

SEQ ID NO: 34705 - DNA, 201 bp, unidentified
  source 1..201: mol_type = unassigned DNA; note = methanogen bacteria
caggcaattgtattcaatgaggatatcagtcctgatcaaaggcaggatgctatcaatgcgatgaagcaggttactgagatagatcagggcaagcagttgaatgatactcctgatgtaagttcaagttccggtgaaggttacagtgagcttggtaaggtctacaaggattccaatacgggcaagctgataatgatagaaaat

SEQ ID NO: 34706 - DNA, 147 bp, unidentified
  source 1..147: mol_type = unassigned DNA; note = methanogen bacteria
gattattcagagagttccagcgagactgaaatacaaacgtgggacgactatggaagcttcaaatatactgtgaagggcagttccacttatgcatatgtctcagcaagtgtcaacattggactgtattcggaaaataactattccttc

SEQ ID NO: 34707 - DNA, 72 bp, unidentified
  source 1..72: mol_type = unassigned DNA; note = methanogen bacteria
aaacccatgcttgagataatgcaagcgggagatgctatggaatatgctatgacctacggcactcatcagtat

SEQ ID NO: 34708 - DNA, 57 bp, unidentified
  source 1..57: mol_type = unassigned DNA; note = methanogen bacteria
atgcttccttccaatagtcctagtgcggatgcatttgccactattttaggaactact

SEQ ID NO: 34709 - DNA, 66 bp, unidentified
  source 1..66: mol_type = unassigned DNA; note = methanogen bacteria
tctaaaaccggaatgcctatatattcaaatggaaaaattgctaccggaaaattcaaggaaactaat

SEQ ID NO: 34710 - DNA, 42 bp, unidentified
  source 1..42: mol_type = unassigned DNA; note = methanogen bacteria
gcattcattgaatcattcatcggtgctggagatgctattcct

SEQ ID NO: 34711 - DNA, 240 bp, unidentified
  source 1..240: mol_type = unassigned DNA; note = methanogen bacteria
atgtctaaaaatactcaagtgcatgatgaactgcctgacggtttgcaatacctttatcatactctgactaaaggtgtttttaatcctgatactggaatctggtcaataggcgatttaaatgttgaagatggaaaagtctttttatatataacgtgcaaggcattgacttctggtgaaaaaattaataaagctaatttaacttccgatacttctaatttaaacaatgaaagttatgaggaa

SEQ ID NO: 34712 - DNA, 72 bp, unidentified
  source 1..72: mol_type = unassigned DNA; note = methanogen bacteria
gcctgtccaaataatgtcttgattaaagaaggtgatgatacagttgcaagaagtccgatgacctgcaagcat

SEQ ID NO: 34713 - DNA, 30 bp, unidentified
  source 1..30: mol_type = unassigned DNA; note = methanogen bacteria
ctgggaataattccagcaatcattgctgca

SEQ ID NO: 34714 - DNA, 48 bp, unidentified
  source 1..48: mol_type = unassigned DNA; note = methanogen bacteria
caaaaattaattgaaactattgttggtactggagatgcactttctgga

SEQ ID NO: 34715 - DNA, 54 bp, unidentified
  source 1..54: mol_type = unassigned DNA; note = methanogen bacteria
aacgaattattaatggttgctccaaactttgcaaatgcaaaaaacttagaaaca

SEQ ID NO: 34716 - DNA, 48 bp, unidentified
  source 1..48: mol_type = unassigned DNA; note = methanogen bacteria
caagggttaattgaaaactttatcggaactggagacgcacttccaagt

SEQ ID NO: 34717 - DNA, 33 bp, unidentified
  source 1..33: mol_type = unassigned DNA; note = methanogen bacteria
atcaacgatgccggagggatctcggacaatcag

SEQ ID NO: 34718 - DNA, 45 bp, unidentified; identical to SEQ ID NO: 32995
  source 1..45: mol_type = unassigned DNA; note = methanogen bacteria

SEQ ID NO: 34719 - DNA, 75 bp, unidentified
  source 1..75: mol_type = unassigned DNA; note = methanogen bacteria
ccgaataatgttttaatcaaggaaggagaagatacaatagtcagaagtcctttaacatgcaaacattgtaaagtt

SEQ ID NO: 34720 - DNA, 30 bp, unidentified
  source 1..30: mol_type = unassigned DNA; note = methanogen bacteria
tttcaactgtttcagcaatattcggtattg

SEQ ID NO: 34721 - DNA, 30 bp, unidentified
  source 1..30: mol_type = unassigned DNA; note = methanogen bacteria
tggaaccaaagattaatatttaatatagac

SEQ ID NO: 34722 - DNA, 165 bp, unidentified
  source 1..165: mol_type = unassigned DNA; note = methanogen bacteria
gccagtgatgtgaacgatacagtgattgccagtgaagatggcctggcaattgaattgtcacaggcagattctgatgaaggaatatctgctgtggaaaatgaggaaataataagtgaagggaatgctggaacattttctgaactgcaaagcaatattactgaaaaa

SEQ ID NO: 34723 - DNA, 60 bp, unidentified
  source 1..60: mol_type = unassigned DNA; note = methanogen bacteria
tatgataccatattttttgcttcatatggtaatatttatgggcttggaaacataactctt

SEQ ID NO: 34724 - DNA, 39 bp, unidentified
  source 1..39: mol_type = unassigned DNA; note = methanogen bacteria
ttattacctagcaaaccatataggtattcttttgatgtg

SEQ ID NO: 34725 - DNA, 144 bp, unidentified
  source 1..144: mol_type = unassigned DNA; note = methanogen bacteria
ggatttaaaaatgatatatttgctggctttgtagtcaattcagtcaaaaaatggctggagatgaaatttctggattttctcaatggttatgggatggaattgcaccatttttctttacatgggttatttcatacacaatctttg

SEQ ID NO: 34726 - DNA, 48 bp, unidentified
  source 1..48: mol_type = unassigned DNA; note = methanogen bacteria
caaaagttaattgaatctgtaatgggcgctggagacgcactttcagga

SEQ ID NO: 34727 - DNA, 69 bp, unidentified
  source 1..69: mol_type = unassigned DNA; note = methanogen bacteria
atggaaggagttcagtatattatgaataatgatgaaatgttggctcgtcttggaatttcttcaagattg

SEQ ID NO: 34728 - DNA, 30 bp, unidentified
  source 1..30: mol_type = unassigned DNA; note = methanogen bacteria
tcagttgtagcagctcaagctccaattatc

SEQ ID NO: 34729 - DNA, 51 bp, unidentified
  source 1..51: mol_type = unassigned DNA; note = methanogen bacteria
gctcctaaattaagtgatcctcttgcaggattctttggttttggtagagga

SEQ ID NO: 34730 - DNA, 99 bp, unidentified
  source 1..99: mol_type = unassigned DNA; note = methanogen bacteria
atgtataaatcatatttgcttgatttgggaaatgaaattgattccaatgaaatgaatagtttaaacagttcctttaatgatatctcttctaaatttcaa

SEQ ID NO: 34731 - DNA, 186 bp, unidentified
  source 1..186: mol_type = unassigned DNA; note = methanogen bacteria
tctgactctaaatttattgtaacctgtaattcaacattacatgatggagatagcttttctattaaattaactgatatgaataatacgcctatatcaaatcaggtagttaatattatgattattgatgctactggcggagaaaattatcaacaggtaactactgatgaatcaggtaatgggatgttg

SEQ ID NO: 34732 - DNA, 42 bp, unidentified
  source 1..42: mol_type = unassigned DNA; note = methanogen bacteria
gcattatccttagtctatggagacttatccatatccatttca

SEQ ID NO: 34733 - DNA, 39 bp, unidentified
  source 1..39: mol_type = unassigned DNA; note = methanogen bacteria
tggttaggatttaaaaatgaagctttagcattcgttgca

SEQ ID NO: 34734 - DNA, 141 bp, unidentified
  source 1..141: mol_type = unassigned DNA; note = methanogen bacteria
atgctctcactctttgcttatatatgtactttttacaactttaatatagtgattaaaatgataggtaataatgacaccacaattcaagttgatttaagaaaaaaaagttcaatgaaagacgaaataatgtacagtaattta

SEQ ID NO: 34735 - DNA, 39 bp, unidentified
  source 1..39: mol_type = unassigned DNA; note = methanogen bacteria
tctgttatttctgttgtagcagctcaagctccagtaatc

SEQ ID NO: 34736 - DNA, 30 bp, unidentified
  source 1..30: mol_type = unassigned DNA; note = methanogen bacteria
ttaggattaataccagaaatatatttaaaa

SEQ ID NO: 34737 - DNA, 30 bp, unidentified
  source 1..30: mol_type = unassigned DNA; note = methanogen bacteria
tatcatgcaaccatcggaataaatattgat

SEQ ID NO: 34738 - DNA, 33 bp, unidentified; identical to SEQ ID NO: 32236
  source 1..33: mol_type = unassigned DNA; note = methanogen bacteria

SEQ ID NO: 34739 - DNA, 48 bp, unidentified
  source 1..48: mol_type = unassigned DNA; note = methanogen bacteria
ggtgattttacaacattcatgagtaattacataggttttagacgtggt

SEQ ID NO: 34740 - DNA, 84 bp, unidentified
  source 1..84: mol_type = unassigned DNA; note = methanogen bacteria
tatatctatagaattaattcaagcataaataatcaattcaacgagacaataacaaaatctcgtgactttatgcttggcaaaata

SEQ ID NO: 34741 - DNA, 105 bp, unidentified
  source 1..105: mol_type = unassigned DNA; note = methanogen bacteria
tcatggaacatgcaggcaatcgtcttcaactatgatatcaccccagaacagaaacaggatgctatcaatgcaaggaaacatgtgacagagatagaccgaggacag

SEQ ID NO: 34742 - DNA, 84 bp, unidentified
  source 1..84: mol_type = unassigned DNA; note = methanogen bacteria
tatgtctatagaattaattcaagtataaatatccaattcaacgagacaatgacaaaatctcgtgactttatgctgggcaatata

SEQ ID NO: 34743 - DNA, 90 bp, unidentified
  source 1..90: mol_type = unassigned DNA; note = methanogen bacteria
tcaagtctgtatgcctatttggatcccgtcgttgaccaggttgaaaatcaggttcggtccggggagattacaataaccttccaaagcata

SEQ ID NO: 34744 - DNA, 33 bp, unidentified
  source 1..33: mol_type = unassigned DNA; note = methanogen bacteria
ggacttgaaatgaccacatcaacaatatccact

SEQ ID NO: 34745 - DNA, 135 bp, unidentified
  source 1..135: mol_type = unassigned DNA; note = methanogen bacteria
atgcaaaaattaaaaaatccaaaatggaggggtaatatgataaaacattcaaatcaacatccttgtgacttaagaaaaaaaaatagctttactgatccaatgaacttcataaactataatatcaacttttatgat

SEQ ID NO: 34746 - DNA, 42 bp, unidentified
  source 1..42: mol_type = unassigned DNA; note = methanogen bacteria
gctgttagcgcagctccaaatccaaacataatgtttggaatt

SEQ ID NO: 34747 - DNA, 33 bp, unidentified
  source 1..33: mol_type = unassigned DNA; note = methanogen bacteria
ggactcacatttttcttcttcggaacaacagca

SEQ ID NO: 34748 - DNA, 57 bp, unidentified
  source 1..57: mol_type = unassigned DNA; note = methanogen bacteria
ccatcacaccacattcctgaatttacaacacagggactatacttaactgacaaggca

SEQ ID NO: 34749 - DNA, 84 bp, unidentified
  source 1..84: mol_type = unassigned DNA; note = methanogen bacteria
tatatgtcccatataactgaagaaactcaaacaaacgttaaaaacttattacaaaaagaaagagattttttaataaataaaatt

SEQ ID NO: 34750 - DNA, 225 bp, unidentified
  source 1..225: mol_type = unassigned DNA; note = methanogen bacteria
atgacattaacggcagccagcatatttaatatttcagctgacaatgttgttttggaaaatgtctccctaatcaacggtaatgacattaacggcagcgcaatatatgctgaaggaaacaatatcataataaagaattccattttattgaataacactgatgtggttatctatgccacaaaatcattaactgcaaactacaactggtggggaaatactgcagacact

SEQ ID NO: 34751 - DNA, 87 bp, unidentified
  source 1..87: mol_type = unassigned DNA; note = methanogen bacteria
agttatatgtcaaatataaccaataaaacacaaaacaatctaaaaggattgttaaaagaagaaagagattatataataaataaaatc

SEQ ID NO: 34752 - DNA, 39 bp, unidentified
  source 1..39: mol_type = unassigned DNA; note = methanogen bacteria
acaggttttaatgcgaatcttagtccaaattatagtttt

SEQ ID NO: 34753 - DNA, 33 bp, unidentified
  source 1..33: mol_type = unassigned DNA; note = methanogen bacteria
ggtgtatcaatgcttggaatggctgcaatgagt

SEQ ID NO: 34754 - DNA, 87 bp, unidentified
  source 1..87: mol_type = unassigned DNA; note = methanogen bacteria
agttatatgtcccatataactgaacaaagccaaacaaacattaaaaatttgcttcaaaaagaaagagattttataataaataaaata

SEQ ID NO: 34755 - DNA, 30 bp, unidentified
  source 1..30: mol_type = unassigned DNA; note = methanogen bacteria
ctgcttatcggaggttcacaactgtcctca

SEQ ID NO: 34756 - DNA, 30 bp, unidentified
  source 1..30: mol_type = unassigned DNA; note = methanogen bacteria
atggctcattactcagcatattctggaaga

SEQ ID NO: 34757 - DNA, 36 bp, unidentified
  source 1..36: mol_type = unassigned DNA; note = methanogen bacteria
tttgcaattaacttatttgaaattgttaaattttca

SEQ ID NO: 34758 - DNA, 114 bp, unidentified
  source 1..114: mol_type = unassigned DNA; note = methanogen bacteria
agtaatattggtgctggagataattatggttcaattactaaagcatttagtcaatccaataaatcaatttcattttccgatgttaaggaattttattttcagtattttccgtgc

SEQ ID NO: 34759 - DNA, 87 bp, unidentified
  source 1..87: mol_type = unassigned DNA; note = methanogen bacteria
agttatatgtctcatataacagaacaaacacaaacaaacgttaaaaatttgttgcaaaaagaaagagattttttaataaataaaata

SEQ ID NO: 34760 - DNA, 33 bp, unidentified
  source 1..33: mol_type = unassigned DNA; note = methanogen bacteria
ggtatatcactgcttgcaataggtgcatcacaa

SEQ ID NO: 34761 - DNA, 66 bp, unidentified
  source 1..66: mol_type = unassigned DNA; note = methanogen bacteria
cacattctggtttatattgatggaatacttgtgttgaatgccacaaccaccgatgatttgacacag

SEQ ID NO: 34762 - DNA, 75 bp, unidentified
  source 1..75: mol_type = unassigned DNA; note = methanogen bacteria
ggagaacacgaaatcaaagtagtgttcactgatggaaacggaaatacaaacacttataccgagaatataacaatt

SEQ ID NO: 34763 - DNA, 30 bp, unidentified
  source 1..30: mol_type = unassigned DNA; note = methanogen bacteria
ttgcatataattccaggaataatatttgca

SEQ ID NO: 34764 - DNA, 81 bp, unidentified
  source 1..81: mol_type = unassigned DNA; note = methanogen bacteria
ggtcaaaactgggcaccgtttgttccttgggtatgcccatatttaattgcatctggtgaaatagcgcaatatggtgtaggt

SEQ ID NO: 34765 - DNA, 222 bp, unidentified
  source 1..222: mol_type = unassigned DNA; note = methanogen bacteria
gacgggtccaaattcagtgcaactcttgttgacagtaaaggaaatcctagatctggcgttaacataacattcaatattaatggagtgttctataatcgtacaacggatgaaaacggaacagccagactaaacattaatttaatgccaggagaatatattataacaagccaatatggttcatccatgacttcaaataaaataactatcgctgccaaagaggaa

SEQ ID NO: 34766 - DNA, 33 bp, unidentified
  source 1..33: mol_type = unassigned DNA; note = methanogen bacteria
gaattgaagattattcctatgataatctttgca

SEQ ID NO: 34767 - DNA, 87 bp, unidentified
  source 1..87: mol_type = unassigned DNA; note = methanogen bacteria
acttatatccatagcattaattcaagcataaataatcaattcaacgagacaatgacaaaatcccgtgactttatgcttggcaatata

SEQ ID NO: 34768 - DNA, 30 bp, unidentified
  source 1..30: mol_type = unassigned DNA; note = methanogen bacteria
ttgggtgttattccgactatagtctttgca

SEQ ID NO: 34769 - DNA, 39 bp, unidentified
  source 1..39: mol_type = unassigned DNA; note = methanogen bacteria
caagctttaatcagccaattcttcgaagcaggaagcgca

SEQ ID NO: 34770 - DNA, 87 bp, unidentified
  source 1..87: mol_type = unassigned DNA; note = methanogen bacteria
agttatatgtcaaatatagcaaacacgacacaagacaccattcaaaacttgttaaaaacagaaaaagactttttaattaataaaata

SEQ ID NO: 34771 - DNA, 30 bp, unidentified
  source 1..30: mol_type = unassigned DNA; note = methanogen bacteria
aaggtattgtcatttggagatattgttctg

SEQ ID NO: 34772 - DNA, 153 bp, unidentified
  source 1..153: mol_type = unassigned DNA; note = methanogen bacteria
gcacatccaggtcatggaagtgaatatcacattgaagaagtatcttcatctaattctgctcctagttcttctggttcaggttcgtctggttctggttcttctggttcatctagttctggttcaggttcgtctggttctggttcttctggttca

SEQ ID NO: 34773 - DNA, 222 bp, unidentified
  source 1..222: mol_type = unassigned DNA; note = methanogen bacteria
atgacatcaaattgggcaccatacgttcttttagaggatactagggttcattatgttcaaaacatttcatttatatcatttgatggaaaaacatggaaagatgcttatgatttaggttatatcacttgtttaaaagtttatacagttgctgatgatactaaaatcatcaacaatgaaaacatcactgttgactatggctgctgtcggtgcaggtgctgcagt

SEQ ID NO: 34774 - DNA, 222 bp, unidentified
  source 1..222: mol_type = unassigned DNA; note = methanogen bacteria
ttggaaggaggaaatattgctaggattattgttcctggtttgaatgaatctactgttgctgctgttaattatcttggtgatgataagtataatcctgctaatactactgttgagattgttgttagtaaaaagaatttaacgatttctgctagtgctgaaccgatttttgttggtgataatgctactgttgttgttactggttttccagttacgagttatggt

SEQ ID NO: 34775 - DNA, 222 bp, unidentified
  source 1..222: mol_type = unassigned DNA; note = methanogen bacteria
gtgaaaaatggtggtgcggtttatttagataatattaaacaaggtgaatgtgataatactacatttagtaattctcactttgaaaacaatactgctggtgttaatggtggtgctattgattggcatgatggtgctactaatggtaggattgttgattcttcatttgtgaataattctgctaaggctaaggttccaacggtttggttgatgattgtaacttta

SEQ ID NO: 34776 - DNA, 30 bp, unidentified
  source 1..30: mol_type = unassigned DNA; note = methanogen bacteria
cttaaactgattccagtcatcatattcgcg

SEQ ID NO: 34777 - DNA, 60 bp, unidentified
  source 1..60: mol_type = unassigned DNA; note = methanogen bacteria
tttaagatattccgcttaaaattattgttttttaaaaaaacaataccacttttttttatt

SEQ ID NO: 34778 - DNA, 30 bp, unidentified
  source 1..30: mol_type = unassigned DNA; note = methanogen bacteria
cttaaactgattcccgtcatcatattcgcg

SEQ ID NO: 34779 - DNA, 99 bp, unidentified
  source 1..99: mol_type = unassigned DNA; note = methanogen bacteria
atgtataaatcatatttggttgatttgggcaatgaaattgattcaaacgagattaatactttaaacacttcctttagtgatattgcttctaaatttgaa

SEQ ID NO: 34780 - DNA, 90 bp, unidentified
  source 1..90: mol_type = unassigned DNA; note = methanogen bacteria
aatactactgttggcgaaccagtgttctgttccagttgcattgattgcttctggtgtaggtacactcctttatgtaatttgtacaagaaa

SEQ ID NO: 34781 - DNA, 30 bp, unidentified
  source 1..30: mol_type = unassigned DNA; note = methanogen bacteria
tctgttgcagccgccaatgcgccgattatc

SEQ ID NO: 34782 - DNA, 99 bp, unidentified
  source 1..99: mol_type = unassigned DNA; note = methanogen bacteria
atgtataaatcatatttgtctgatttaggaactgaaataggttctaatgaaatgaaatcattaaacagttcattcagtgatattgcttcaagatttgaa

SEQ ID NO: 34783 - DNA, 102 bp, unidentified
  source 1..102: mol_type = unassigned DNA; note = methanogen bacteria
gggtgcgaccccgcggtgttctgggcgcggcgggcgcacctgcgcgacattgccgcgcagctcttcccgccggactggagctatctgtccgcgatcgtggcg

SEQ ID NO: 34784 - DNA, 159 bp, unidentified
  source 1..159: mol_type = unassigned DNA; note = methanogen bacteria
gcgtattcctctggattattggatacttttacagctacaggacaaacctatgagagtaatggaataactttccagtatcctgacagttggactgaggcaaattgcgtgtcagatggagctataggtgccgtggttgactctaataattctaatatatct

SEQ ID NO: 34785 - DNA, 195 bp, unidentified
  source 1..195: mol_type = unassigned DNA; note = methanogen bacteria
tttgccggtgtcggcggggaatctgttggccttgaagtcaacagtaacgattattacaatgataccaatctggcggacggttggatttattcggttaatctggatgataaatttcttgatgatgttaattctttgaatccagtaactcaaacggagaggcagctggttgttgattcggttgcggacttttcaaat

SEQ ID NO: 34786 - DNA, 45 bp, unidentified
  source 1..45: mol_type = unassigned DNA; note = methanogen bacteria
atacctcttgccccaacaggcacatggggagcattatttgagtta

SEQ ID NO: 34787 - DNA, 135 bp, unidentified
  source 1..135: mol_type = unassigned DNA; note = methanogen bacteria
atgtataaaaattatatgtcagatttaagcggtcaaattgattcaaaggaagttaaagagtttaataatgagttaagacatctcgagaggtattttaaaaaaattaatcgtttctgtttaattaatataaatcat

SEQ ID NO: 34788 - DNA, 99 bp, unidentified
  source 1..99: mol_type = unassigned DNA; note = methanogen bacteria
atataccgatcatatatggaaacaagtgatagaagtttaaaagctaaagacgatataattgatgtcagaaacacgatattggacaacaggacacatgtt

SEQ ID NO: 34789 - DNA, 30 bp, unidentified
  source 1..30: mol_type = unassigned DNA; note = methanogen bacteria
ttaaaagtcattccgacaatattttttgca

SEQ ID NO: 34790 - DNA, 51 bp, unidentified
  source 1..51: mol_type = unassigned DNA; note = methanogen bacteria
gtttgtcgtgagttttatcataaggcgatttatctaaacggagggaatgaa

SEQ ID NO: 34791 - DNA, 216 bp, unidentified
  source 1..216: mol_type = unassigned DNA; note = methanogen bacteria
gtggatggattacagttcaaagcacgattgattgataatctgggaaaacctttcccaaaatgggatgttagattcaatatcaatggtgtactttataataggccaactgacagttatgatttagcaaaattaaaaattaacttgccttctggtgaatacattataacctcaagttataatggagcaaacatcgcaaacaaaattactatctctcca

SEQ ID NO: 34792 - DNA, 96 bp, unidentified
  source 1..96: mol_type = unassigned DNA; note = methanogen bacteria
tcctacattacaaatattataaacactacacaaaattcttattctctccttattaatttaaaattttgtttaaacattcgttccaagattcagaat

SEQ ID NO: 34793 - DNA, 216 bp, unidentified
  source 1..216: mol_type = unassigned DNA; note = methanogen bacteria
atgaaaacaacggaatatgaaagtgcttattttggattaactgattctgaaaatgagggtgtttggaaaaatgtggacggttcggaacctaagtttattaattggagcgatggagaaccgaacaatgaaagaggaattgagaattatgcaatgttttattataagtcaccagaatataagtggaatgatggtgactttagcctggactatagtcaa

SEQ ID NO: 34794 - DNA, 30 bp, unidentified
  source 1..30: mol_type = unassigned DNA; note = methanogen bacteria
ttaaaggtcattccggcaatattttttgca

SEQ ID NO: 34795 - DNA, 147 bp, unidentified
  source 1..147: mol_type = unassigned DNA; note = methanogen bacteria
gcaagtgatgtcaatgatacggtgattgcttttgaggatacgagtcaaaatgagttatatgactgcaatgaaagtgttacggataatctcaaggcaagtgaagagaacaatattgattgtagtgcacagcactacaatacttttttt

SEQ ID NO: 34796 - DNA, 30 bp, unidentified
  source 1..30: mol_type = unassigned DNA; note = methanogen bacteria
gggtccggccttctggccgatgcatccgca

SEQ ID NO: 34797 - DNA, 147 bp, unidentified
  source 1..147: mol_type = unassigned DNA; note = methanogen bacteria
gcagcagatgacaatgcaaatgggattattagcgttgatgacaatgaagaacttattttagacgaagcaatcgatgatgatgtttcaagcgctaataataattatgatgaagaacttattttagaaacccctgctgatgatcttgtt

SEQ ID NO: 34798 - DNA, 33 bp, unidentified
  source 1..33: mol_type = unassigned DNA; note = methanogen bacteria
gaattatcaattattcccgtaatttttcttgca

SEQ ID NO: 34799 - DNA, 33 bp, unidentified
  source 1..33: mol_type = unassigned DNA; note = methanogen bacteria
tcaatagttgatgaaatcgcatattcaaatatc

SEQ ID NO: 34800 - DNA, 30 bp, unidentified
  source 1..30: mol_type = unassigned DNA; note = methanogen bacteria
gttgtaacagcacaaaacccatatctttta

SEQ ID NO: 34801 - DNA, 30 bp, unidentified
  source 1..30: mol_type = unassigned DNA; note = methanogen bacteria
ttacagataattcctatgattttctttgca

SEQ ID NO: 34802 - DNA, 99 bp, unidentified
  source 1..99: mol_type = unassigned DNA; note = methanogen bacteria
atatatagatcatatatggaaaccagcgataaaagtttaaaagcaaaagacgatattatagacgtcagaaatacaatattggacaatagaacacatgta

SEQ ID NO: 34803 - DNA, 33 bp, unidentified
  source 1..33: mol_type = unassigned DNA; note = methanogen bacteria
gagctgaagctgattcctgttattctctttgcc

SEQ ID NO: 34804 - DNA, 33 bp, unidentified
  source 1..33: mol_type = unassigned DNA; note = methanogen bacteria
gttacagattcgtttttaaaagatacaatttta

SEQ ID NO: 34805 - DNA, 126 bp, unidentified
  source 1..126: mol_type = unassigned DNA; note = methanogen bacteria
atagatttagtagcaagagttttagctaaatactatttaaaccctaaaggtacactaatttatgggggcgaagaagctgaagcaacttactaccatggctcaacaatatcggcagtaaatacatcg

SEQ ID NO: 34806 - DNA, 63 bp, unidentified
  source 1..63: mol_type = unassigned DNA; note = methanogen bacteria
gcaaccgataaaaactggggcaacgcaatatataaatatataatttctttatacaatagatta

SEQ ID NO: 34807 - DNA, 96 bp, unidentified
  source 1..96: mol_type = unassigned DNA; note = methanogen bacteria
tataagtcttacatctttggtttgggggatgagatcaattcaggagaagttgaagctttgaatgaatcatttagtgaaatctcctccaagtttgat

SEQ ID NO: 34808 - DNA, 84 bp, unidentified
  source 1..84: mol_type = unassigned DNA; note = methanogen bacteria
tatatgtccaacataacccaaaaaacgcaaacaacattaaataatttgttaaaagaagaaagagattatttaataaataaaatt

SEQ ID NO: 34809 - DNA, 96 bp, unidentified
  source 1..96: mol_type = unassigned DNA; note = methanogen bacteria
tataagtcatatatcattgaattgggggatgaaatcaattctggagaagttgaggctttgaatggttcatttagtgaaatctcctccaagtttgat

SEQ ID NO: 34810 - DNA, 84 bp, unidentified
  source 1..84: mol_type = unassigned DNA; note = methanogen bacteria
tacatgtcaaatattacagaaaaaacacaaagaacaatgaataatttgttaaaagaagaaagagactatttaataaataaaatt

SEQ ID NO: 34811 - DNA, 84 bp, unidentified
  source 1..84: mol_type = unassigned DNA; note = methanogen bacteria
tatctatcaaatataactcaaaaaactcaaacaagtattaatggtttgttaaaaaaagaaagagaccatatattaaataaaatt

SEQ ID NO: 34812 - DNA, 87 bp, unidentified
  source 1..87: mol_type = unassigned DNA; note = methanogen bacteria
agttatatgtcccatataaccgaacaaactcaaacaaatattagaaatttgttacaaaaagaaagagattttttaattaataaaata

SEQ ID NO: 34813 - DNA, 96 bp, unidentified
  source 1..96: mol_type = unassigned DNA; note = methanogen bacteria
tacaagtcatatgtcattgaattgggggatgaaatcaattctggagaagtcgaggctttgaatggttcatttagtgaaatctcctccaagtttgat

SEQ ID NO: 34814 - DNA, 141 bp, unidentified
  source 1..141: mol_type = unassigned DNA; note = methanogen bacteria
gctagcgccaatacgaccgaatctacacttttaagtgttgatgaaagttatgttggaaatgatgtagcattaggctcatcgaacgaagaaagtattgaaaatgatgatgaaaactctaagcttatcaaacgaagaggggat

SEQ ID NO: 34815 - DNA, 135 bp, unidentified
  source 1..135: mol_type = unassigned DNA; note = methanogen bacteria
tctgaggatatgtctgaatccaggttaaatgaaacagatgacgtttcatatatctggatagcggatgatgacgggaatgtgaaattaatccagacaaccgataaccatttcgagggtagtgcaagcgcaccgggt

SEQ ID NO: 34816 - DNA, 42 bp, unidentified
  source 1..42: mol_type = unassigned DNA; note = methanogen bacteria
aacctaattttagcttcacaaggtgttgttaaaggtgcaaat

SEQ ID NO: 34817 - DNA, 33 bp, unidentified
  source 1..33: mol_type = unassigned DNA; note = methanogen bacteria
tatggaatgtacatcgctgctttaaaaggagaa

SEQ ID NO: 34818 - DNA, 30 bp, unidentified
  source 1..30: mol_type = unassigned DNA; note = methanogen bacteria
cttaaagtcattccaatgattatatttgca

SEQ ID NO: 34819 - DNA, 156 bp, unidentified
  source 1..156: mol_type = unassigned DNA; note = methanogen bacteria
gttttgaataatccggttgtatttgagattgttgttagaaatactggagacattaagttaagtgatgttaaagtatctgaaaatcctcatgatggattgaaatacataagttggtatgataattctgctttgtggaggtataatggtgatttgact

SEQ ID NO: 34820 - DNA, 150 bp, unidentified
  source 1..150: mol_type = unassigned DNA; note = methanogen bacteria
agctacatcacactatccgacgatacacccgaatctgagttaaatgaaacagatgacattacatatatttggatggaagatgataacgggaatgtaaaattaatccaaacaactgaaaaccatttcgagggcagtgcaagcgcaccgggt

SEQ ID NO: 34821 - DNA, 87 bp, unidentified
  source 1..87: mol_type = unassigned DNA; note = methanogen bacteria
agttatatgtcaaatataactaaaaaaacagaaacaaatatagaaaatatcttaaaaaaagaaagagattatataataaataaaata

SEQ ID NO: 34822 - DNA, 87 bp, unidentified
  source 1..87: mol_type = unassigned DNA; note = methanogen bacteria
agttatatttcaaatataaccgataaaacacagcaaaatctgaattcattgttaaaagaagaacgagattttttgttaaataaaatt

SEQ ID NO: 34823 - DNA, 30 bp, unidentified
  source 1..30: mol_type = unassigned DNA; note = methanogen bacteria
tcattcggaccaagagtatttgatatgcct

SEQ ID NO: 34824 - DNA, 51 bp, unidentified
  source 1..51: mol_type = unassigned DNA; note = methanogen bacteria
gattgttggccttattgtgccgatggctttaaatccagatcaattatatgt

SEQ ID NO: 34825 - DNA, 36 bp, unidentified
  source 1..36: mol_type = unassigned DNA; note = methanogen bacteria
aggtggtcttccgccagctattgcaaaatacgttgc

SEQ ID NO: 34826 - DNA, 36 bp, unidentified
  source 1..36: mol_type = unassigned DNA; note = methanogen bacteria
atgattgtaggatttagtatggctggaaaatctggc

SEQ ID NO: 34827 - DNA, 210 bp, unidentified
  source 1..210: mol_type = unassigned DNA; note = methanogen bacteria
gtggcttttgatgattttattaaaaatcatgaaaatgaaaccaagacaattttagagattcatatgaatgccacggttttcattaacaataacactgatgaagctgcagggttattgtctgcagatattgtgaaagatgttgaagttgaaaataatgctcttaaaggtttcccattaatatcagatttaaatgatacatttaaaaagatg

SEQ ID NO: 34828 - DNA, 87 bp, unidentified
  source 1..87: mol_type = unassigned DNA; note = methanogen bacteria
tacatctatagaatcaattcgcaaataaatgattcatttaatcaaacacttgataagggaagattatacctgctaaataaactaaat

SEQ ID NO: 34829 - DNA, 63 bp, unidentified
  source 1..63: mol_type = unassigned DNA; note = methanogen bacteria
gcaatatacggatggaattttatcatatttttgcaagaacaccccgacctcttaggtcgggga

SEQ ID NO: 34830 - DNA, 210 bp, unidentified
  source 1..210: mol_type = unassigned DNA; note = methanogen bacteria
tcatcaagttctagtgattcctcaagttctaactcaaataatggaccatcagtagttagtacacatgatgaagaaaattatcaagctggtgatggtagtcattacaaacaggttgaatattctgacggtaacttcagacagtatgattacaacggtaaactaattggtagttcatatgatagtgatcagaaatacttaccaagtatggag

SEQ ID NO: 34831 - DNA, 87 bp, unidentified
  source 1..87: mol_type = unassigned DNA; note = methanogen bacteria
aactacatttctaacatatcgagtactgcacaagaaaattttaaagaacttttaaaacaagaaagagattttttaataaataaaatt

SEQ ID NO: 34832 - DNA, 30 bp, unidentified
  source 1..30: mol_type = unassigned DNA; note = methanogen bacteria
ttgggattgattccagctattattgcagcg

SEQ ID NO: 34833 - DNA, 129 bp, unidentified
  source 1..129: mol_type = unassigned DNA; note = methanogen bacteria
gcagctaataacggagttaatacaaatgatataattaatgatgaaacaaaaagtcaattagttgacctaagagatagtgaattacaatctatggaagactataaacaagcctacggaagcgacgtaaca

SEQ ID NO: 34834 - DNA, 72 bp, unidentified
  source 1..72: mol_type = unassigned DNA; note = methanogen bacteria
ggtcttataaatgttgatagaaagaccaagaagattactctgaattttacgcagcggaatgaattggaattt

SEQ ID NO: 34835 - DNA, 54 bp, unidentified
  source 1..54: mol_type = unassigned DNA; note = methanogen bacteria
tcagaatataatgttgtcagtaaatcagttaaaacaaaaagtgtagttggaaaa

SEQ ID NO: 34836 - DNA, 207 bp, unidentified
  source 1..207: mol_type = unassigned DNA; note = methanogen bacteria
ttgaatgaaatccttaatggtggaaatactgtaattgacctaactgacaattataagtatcgtgatggtgatgaagcatttgtaaatggaatagtaattaataagagtattaccataaatggtaacggcataaccatagatggttcaaataccgcacgtattttccaaatttcagcagataatgtaatcatcaacaacataacattt

SEQ ID NO: 34837 - DNA, 87 bp, unidentified
  source 1..87: mol_type = unassigned DNA; note = methanogen bacteria
tcatacattacaaatattataaacactacacaaaattcttttgatggattaataaaacaagaaagagattttttaataaataaaata

SEQ ID NO: 34838 - DNA, 30 bp, unidentified
  source 1..30: mol_type = unassigned DNA; note = methanogen bacteria
ttgggcataatcccagcgattattacggcc

SEQ ID NO: 34839 - DNA, 99 bp, unidentified
  source 1..99: mol_type = unassigned DNA; note = methanogen bacteria
atatacagatcatatatggaaacaagtgatgtcagcttaaaagcaaaagatgacataatagacgttagaaacaccatattggacaatagaacacatgtc

SEQ ID NO: 34840 - DNA, 126 bp, unidentified
  source 1..126: mol_type = unassigned DNA; note = methanogen bacteria
tcttatattgaaccaaaagagatagtcgttaatgaaatcaccagaaacacaatatcggcgagacagtggctgttacaggagttattgattcaattaaaatgtcttcaagtggcaaaagctgctttt

SEQ ID NO: 34841 - DNA, 30 bp, unidentified
  source 1..30: mol_type = unassigned DNA; note = methanogen bacteria
attgctggaatcggagcgaatgcaatagct

SEQ ID NO: 34842 - DNA, 66 bp, unidentified
  source 1..66: mol_type = unassigned DNA; note = methanogen bacteria
accacagtccaagtggacttaagaaaaaaaagttcaataaaagacgaattagcatatagtaattta

SEQ ID NO: 34843 - DNA, 33 bp, unidentified
  source 1..33: mol_type = unassigned DNA; note = methanogen bacteria
atttctgttgcggccgcacaagcgccagttatt

SEQ ID NO: 34844 - DNA, 207 bp, unidentified
  source 1..207: mol_type = unassigned DNA; note = methanogen bacteria
gtgaatgtcacttacaatggtgacaataacttcaatccatcaagtgctgtagctaatttcactgttggtgctattgattcagctgtgactgttaatcttaccaatatcacttatggtgataatgagaccattaagtttaatgtgactgatggtgctactggtactgtgaatattactgtgactggtttggtgttaatgttgctgatt

SEQ ID NO: 34845 - DNA, 207 bp, unidentified
  source 1..207: mol_type = unassigned DNA; note = methanogen bacteria
gtgaataatactgctgctaagaatggtggtgcggtttatttagataatatccaaggaagtaaatgtgataatactacattcactaattctcgctttgagaataactccgctgctgttaatggtggtgctattgattggcatgatggtgctacaaatggtaaaatcgaagattcttcatttgtgaataattctgctaaggctaatggt

SEQ ID NO: 34846 - DNA, 30 bp, unidentified
  source 1..30: mol_type = unassigned DNA; note = methanogen bacteria
ttggattatcagaatctgctgtttacaaat

SEQ ID NO: 34847 - DNA, 117 bp, unidentified
  source 1..117: mol_type = unassigned DNA; note = methanogen bacteria
ggcgaatacatcgatcttgaagataacataaacgactattatgaagaaaccaatttggctgatggctggatttattcaccatacctgaatgattgtttttggaacaagttaatcatt

SEQ ID NO: 34848 - DNA, 168 bp, unidentified
  source 1..168: mol_type = unassigned DNA; note = methanogen bacteria
gtggagttaaagaggattgttttggattcagatactgaattggatccgaccaatgaaagaagggaatatttgaatggaattaaactggatgtagatgatttaactattgacggaaacggatatgcaattgatgcactgaaatcagcacgaatattttactgcacagga

SEQ ID NO: 34849 - DNA, 90 bp, unidentified
  source 1..90: mol_type = unassigned DNA; note = methanogen bacteria
atggcctccgtcgactctgcgttcgtgaccgagggtctgagccgcgaagagatgtacttcctgctgttgatttcgattctcaatcagatt

SEQ ID NO: 34850 - DNA, 165 bp, unidentified
  source 1..165: mol_type = unassigned DNA; note = methanogen bacteria
gatgacatattcaatgtcacattgaatacaaacgacttgaaggatctgaatgtgagttatattgtaagtgatgaagatattagtgagttttcaacagaaaatgttgaatttgatgagatttataaaaatgacaagttgagaatccataaagttgattatgcatca

SEQ ID NO: 34851 - DNA, 99 bp, unidentified
  source 1..99: mol_type = unassigned DNA; note = methanogen bacteria
atttaccggtcatatatggagaccagtgacagaagtttaaaagcaaaagacgacatcatagatgtcagaaacacaatattggacaacagaacccatgta

SEQ ID NO: 34852 - DNA, 84 bp, unidentified
  source 1..84: mol_type = unassigned DNA; note = methanogen bacteria
tataggtcatatataagctcatcatcaaatcttacagcagaatccgataccaattcaataagacagactttgaatagctcaata

SEQ ID NO: 34853 - DNA, 99 bp, unidentified
  source 1..99: mol_type = unassigned DNA; note = methanogen bacteria
atttatagatcatatatggaaacaagtgacaccagtttaaaagcaaaggatgatattatggacgtgagaaatacaatattagacaacaggacacatgta

SEQ ID NO: 34854 - DNA, 81 bp, unidentified
  source 1..81: mol_type = unassigned DNA; note = methanogen bacteria
atccaattaatttatggtcatggatatgatgcgcttcatccgtttatccattttgatctagacagtttgtttattattcat

SEQ ID NO: 34855 - DNA, 99 bp, unidentified
  source 1..99: mol_type = unassigned DNA; note = methanogen bacteria
atatacagaacttatatggaaacaagtgacaccagtttaaaagcaaaagacgacatcatggacgtcaggaacacaattcttgacaatagaacccatgtg

SEQ ID NO: 34856 - DNA, 99 bp, unidentified
  source 1..99: mol_type = unassigned DNA; note = methanogen bacteria
atatacagatcctatatggacaccagtgacagaagtttaaaagcaaaagacgacatcatcgatgtcaggaacacaattcttgacaacagaacccatgta

SEQ ID NO: 34857 - DNA, 84 bp, unidentified
  source 1..84: mol_type = unassigned DNA; note = methanogen bacteria
atatataaaattaatctagagataaatgatttatttaatcaaacacttgttaaaggaagactgtttttatttaacaaactaaaa

SEQ ID NO: 34858 - DNA, 99 bp, unidentified
  source 1..99: mol_type = unassigned DNA; note = methanogen bacteria
atatacagatcatacatgaacacaagcgatgtcagcctaaaggctaaagacgacatcatagatgtcagaaacacaattttggacaacagaacccatgta

SEQ ID NO: 34859 - DNA, 204 bp, unidentified
  source 1..204: mol_type = unassigned DNA; note = methanogen bacteria
atggaataccagggaatggagttcgaggagctggaggaaggctacaagctgaagaggggtaaggacgagaagaccgtcaccgtgcccgaatccatcgacgggaagcccgtcgttagcatcggagccaaggccttcaaggacttctcggccgtcaccgccgtgggcgacctcacggtctactactgcggcgtcgtcctcgtgacc

SEQ ID NO: 34860 - DNA, 204 bp, unidentified
  source 1..204: mol_type = unassigned DNA; note = methanogen bacteria
gtgcctaaagaaaacttaacaattagtgcatctgctgatcctattactgttggtgaggatgctgttattgttgtaactggctttaaggatgctactggtaatgttgctgttagtgttaatggtaaaacttatactgcagtgttaatggtaaaacttatactgcttcaattaatggtgataaagtttctgttgttgttccgggtt

SEQ ID NO: 34861 - DNA, 204 bp, unidentified
  source 1..204: mol_type = unassigned DNA; note = methanogen bacteria
gtgtttgatggtgagagcctcgatgcgaactttgacaacgggacgttggttgacaggatcgctggtctcgagccgggagactccctcgagtatactgtgacgtacagcaacgactctgacgtgacggtagattactacatgcttgcaaagacacttaagacgctggaggaaagcaaggatgtggcggaaaatggcggaaaacat

SEQ ID NO: 34862 - DNA, 138 bp, unidentified
  source 1..138: mol_type = unassigned DNA; note = methanogen bacteria
tacaatggtttaggtgaagatcaaggatacttcggaggagcagatgacgcaggttcagatggttcgaaagtttctgggaacctccatctggtgaaattgaaagtctgctctttgcagttcaagctgctatcggtgcta

SEQ ID NO: 34863 - DNA, 99 bp, unidentified
  source 1..99: mol_type = unassigned DNA; note = methanogen bacteria
atatatagaacatatatggacacaagtaacacaagtttaagtgcgaaagatgatataatggatgttagaaacacaatattagacaatagaacccatgta

SEQ ID NO: 34864 - DNA, 99 bp, unidentified
  source 1..99: mol_type = unassigned DNA; note = methanogen bacteria
atatacagatcatatatgaacaccagtgatgtaagtctaaaagcaaaagacgatattattgatgtacgaaacaccatattggataataggacacatgta

SEQ ID NO: 34865 - DNA, 99 bp, unidentified
  source 1..99: mol_type = unassigned DNA; note = methanogen bacteria
atttacagatcatacatggaaacaagtgacacaagtttaaaagcaaaagatgacatcatagatgtcagaaacacaatactcgataacaggacccatgtt

SEQ ID NO: 34866 - DNA, 51 bp, unidentified
  source 1..51: mol_type = unassigned DNA; note = methanogen bacteria
actgaatttgctttctcgatattggaagacaaatctccaacactattaaat

SEQ ID NO: 34867 - DNA, 99 bp, unidentified
  source 1..99: mol_type = unassigned DNA; note = methanogen bacteria
atctatagatcgtatatggatactagtgacagaagtttaaaagcaaaagatgacattatagatgttagaaacacaattttggataataggacacatgta

SEQ ID NO: 34868 - DNA, 33 bp, unidentified; identical to SEQ ID NO: 34577
  source 1..33: mol_type = unassigned DNA; note = methanogen bacteria

SEQ ID NO: 34869 - DNA, 81 bp, unidentified
  source 1..81: mol_type = unassigned DNA; note = methanogen bacteria
tatagaaactatttccaaacatcaacattatcttctacagctgatgtagaccaacttagatctaacttaactagtcgtggt

SEQ ID NO: 34870 - DNA, 30 bp, unidentified
  source 1..30: mol_type = unassigned DNA; note = methanogen bacteria
tcaaagctatctgctcaaggattttatgct

SEQ ID NO: 34871 - DNA, 93 bp, unidentified
  source 1..93: mol_type = unassigned DNA; note = methanogen bacteria
ttctatagcgattatactgacagtgttggttctagtgtaactagcgatagtgaagacttagcgcaaaacataactaacttaaaagataaattt

SEQ ID NO: 34872 - DNA, 198 bp, unidentified
  source 1..198: mol_type = unassigned DNA; note = methanogen bacteria
atggcaaattggttggtcaaaggcaaaataataacattcaaattcaacggcaagacatataaagtaaaaaccaatgcaaaaggcatagcacaaaaagcattgaataaaaatgttattaaaaagcttaaaaagggtaaaacatacatagttaaggtgagttactttaaagacaatattaaaacaacagttaaagttcga

SEQ ID NO: 34873 - DNA, 87 bp, unidentified
  source 1..87: mol_type = unassigned DNA; note = methanogen bacteria
tatatctataaaatcaatttagaaatcaatgacatgttcaatcaaacgcttgctaaaggaagactttttttatttaataaattagat

SEQ ID NO: 34874 - DNA, 108 bp, unidentified
  source 1..108: mol_type = unassigned DNA; note = methanogen bacteria
aaagtatgtattggtcttcaaacctataaatcagatagtaatcctgttccagtatctgttacaaaattagctaaacaagttaatgctgcatatgataatggtggtgat

SEQ ID NO: 34875 - DNA, 120 bp, unidentified
  source 1..120: mol_type = unassigned DNA; note = methanogen bacteria
gctaagattgaaactccggatacttatgatgaggatggttatcctattgatggaggattaatggaccgtcatttaggcgttatcgacccttgcaagaccggttattcatgtcggttacgg

SEQ ID NO: 34876 - DNA, 33 bp, unidentified
  source 1..33: mol_type = unassigned DNA; note = methanogen bacteria
gcagataagggtccgaaaatttgggatatttct

SEQ ID NO: 34877 - DNA, 30 bp, unidentified
  source 1..30: mol_type = unassigned DNA; note = methanogen bacteria
ttaggtttaatcccattaattgtatttgca

SEQ ID NO: 34878 - DNA, 33 bp, unidentified; identical to SEQ ID NO: 34004
  source 1..33: mol_type = unassigned DNA; note = methanogen bacteria

SEQ ID NO: 34879 - DNA, 195 bp, unidentified
  source 1..195: mol_type = unassigned DNA; note = methanogen bacteria
gctcctggaaaatgcatgggaggagacacatttacaaaccgccaggaagttcttccaagcggagagcattatatagagtgcgatatcaacactcttgatgcggattcaagaggcgccgaaagaatcgtatactccagcgacgactttgatgtctattatacaagcgaccactacgagacttttgagaagttgaat

SEQ ID NO: 34880 - DNA, 126 bp, unidentified
  source 1..126: mol_type = unassigned DNA; note = methanogen bacteria
gccgaaaacagtactgacattagaagtgtggattgtcagaaaatcttacaaacttctcaaaatgggatgtatgcaaccgatgaagcttcattcaatgatttggctgatgaaatagaaaatactgga

SEQ ID NO: 34881 - DNA, 111 bp, unidentified
  source 1..111: mol_type = unassigned DNA; note = methanogen bacteria
tattcacaaaatacaatgagttcaagtttaaatattgaatctgagttcaatcatagattgattttagataatgtggcaaatacaatcagttctaaagttgcccattacaga

SEQ ID NO: 34882 - DNA, 30 bp, unidentified
  source 1..30: mol_type = unassigned DNA; note = methanogen bacteria
gccggacttggtgcggacgctcttgcggcc

SEQ ID NO: 34883 - DNA, 39 bp, unidentified
  source 1..39: mol_type = unassigned DNA; note = methanogen bacteria
gaactgaagcaaaaggacccggtgaggttcaatcagctc

SEQ ID NO: 34884 - DNA, 102 bp, unidentified
  source 1..102: mol_type = unassigned DNA; note = methanogen bacteria
atctatcaaaactatttagtttcattatccgatgaattaaacaataatgaagttaatgatttaattaataaaattgataaaataaatgattatgtaaaaaag

SEQ ID NO: 34885 - DNA, 192 bp, unidentified
  source 1..192: mol_type = unassigned DNA; note = methanogen bacteria
ttggaaataatttgtaaagttgaaaatactggtcgttttgtcaatattgctaatgttactggaaatgaatttgattatgatttgtccaataatcgtgctaatgcgtctgtattgattaatcctgcttgtgatatggaggttgtaaaaacggtaaatgaaagtaatccgaactatagcttggagtattgttgt

SEQ ID NO: 34886 - DNA, 192 bp, unidentified
  source 1..192: mol_type = unassigned DNA; note = methanogen bacteria
atgggaccaatgcgattggatgtggtggatgtgggaacctgtgaatgtaaggacctcagcgagaacggtgagacccttaacgacaagagagaaacccagacggacacgcagaatactgtgaacatccgtgcgtggagcctggtactgctggtctccagcgtagttcttttctcaatatttcttggatcgctt

SEQ ID NO: 34887 - DNA, 33 bp, unidentified
  source 1..33: mol_type = unassigned DNA; note = methanogen bacteria
aagacatttgattttttctcatttgtcctgccg

SEQ ID NO: 34888 - DNA, 99 bp, unidentified
  source 1..99: mol_type = unassigned DNA; note = methanogen bacteria
atgtataaaagatatatttctgatttaagcggtgaaatccagtcacgggaagtggctgaatttaaaaataaactgggtgaaatttctgagattttcact

SEQ ID NO: 34889 - DNA, 36 bp, unidentified
  source 1..36: mol_type = unassigned DNA; note = methanogen bacteria
atggtatttgcaaaggcttttggagttacaagaggt

SEQ ID NO: 34890 - DNA, 51 bp, unidentified
  source 1..51: mol_type = unassigned DNA; note = methanogen bacteria
gaaactattctaagagattatttgagtatgatacatgggaatgtattgtac

SEQ ID NO: 34891 - DNA, 30 bp, unidentified
  source 1..30: mol_type = unassigned DNA; note = methanogen bacteria
atggttcaagaaacagtcacgggtactttg

SEQ ID NO: 34892 - DNA, 93 bp, unidentified
  source 1..93: mol_type = unassigned DNA; note = methanogen bacteria
atgataaaacatacaaacaacacttgtgatttaagaagaaaaacagatttaagggatcctttaactttcaataacttaagaataaacattaaa

SEQ ID NO: 34893 - DNA, 42 bp, unidentified
  source 1..42: mol_type = unassigned DNA; note = methanogen bacteria
gctgttagtgcagctccaaacccagaattaatgctctgggta

SEQ ID NO: 34894 - DNA, 33 bp, unidentified
  source 1..33: mol_type = unassigned DNA; note = methanogen bacteria
tgcagtttcggcaatgtcgattatggaaaaaca

SEQ ID NO: 34895 - DNA, 33 bp, unidentified
  source 1..33: mol_type = unassigned DNA; note = methanogen bacteria
gcagatccaagcccagacatgatggcctgggta

SEQ ID NO: 34896 - DNA, 87 bp, unidentified
  source 1..87: mol_type = unassigned DNA; note = methanogen bacteria
tatgtctataaaatcaatacagagattaatgacttatataatcaaacattgaataaaggacgcttgtgtttatttaataagctaaaa

SEQ ID NO: 34897 - DNA, 96 bp, unidentified
  source 1..96: mol_type = unassigned DNA; note = methanogen bacteria
atgataaaacataataatcctacttgtgacttaagaagaaaaaccagtattgtagatcctatgactttccataaccttagaatcgattttaaagat

SEQ ID NO: 34898 - DNA, 51 bp, unidentified
  source 1..51: mol_type = unassigned DNA; note = methanogen bacteria
tctattttagctgttagcgcagctccaggcccagaaatgatgagctgggta

SEQ ID NO: 34899 - DNA, 81 bp, unidentified
  source 1..81: mol_type = unassigned DNA; note = methanogen bacteria
cctgtaggattggatacagaccaaatctacactcgtccagctcctcaaagtcaaatggatgcaggccaattgctgaaatgc

SEQ ID NO: 34900 - DNA, 99 bp, unidentified
  source 1..99: mol_type = unassigned DNA; note = methanogen bacteria
atgtataaagactatctgtccgattttacaagtgaaataaacaatactgaagtggaaaatttgaaaaataagatagataatataaaaacatatttaaaa

SEQ ID NO: 34901 - DNA, 186 bp, unidentified
  source 1..186: mol_type = unassigned DNA; note = methanogen bacteria
ttggatgataaaggatgggcaacaaaatacaatgcaactacagatgaaaacggccgtgctacagttcaattgtttgcattggaaaacggtaattacactgttcattcagtatataatggtacaatatttttatctaagtcaaaatcaatatctgatttgaatattgatgatggatatgataaatat

SEQ ID NO: 34902 - DNA, 84 bp, unidentified
  source 1..84: mol_type = unassigned DNA; note = methanogen bacteria
aatcagacatggtcacccttcgtaccctggatatgtccatatctaattgcttccggagaaatagccaaatacacgacagacatc

SEQ ID NO: 34903 - DNA, 30 bp, unidentified
  source 1..30: mol_type = unassigned DNA; note = methanogen bacteria
tcattcggaccaatggtatttgacatgcct

SEQ ID NO: 34904 - DNA, 69 bp, unidentified
  source 1..69: mol_type = unassigned DNA; note = methanogen bacteria
ccaatattcgaaacaaatgatgatgcattcatgcttttactgttaaagaaatattatacgtattcgcaa

SEQ ID NO: 34905 - DNA, 183 bp, unidentified
  source 1..183: mol_type = unassigned DNA; note = methanogen bacteria
gtgaagggcaaagttataacattcaaattcaagggtaaaacctatatggtcaaaaccaattccaaaggcattgcacaaaagaccctgaagaaaaaggttatcaaaaagtttaagaaaggtaaaaaatacacggttaaagttgcatacggtaaggactccataaggacaaccgttaaggtcaga

SEQ ID NO: 34906 - DNA, 99 bp, unidentified
  source 1..99: mol_type = unassigned DNA; note = methanogen bacteria
atgtataatgactatctgagtgatttgtcaggtgagattgcatcaaaggaagtaaaggaatttaacggtgagttaaatacccttaaaaatcacttcaaa

SEQ ID NO: 34907 - DNA, 57 bp, unidentified
  source 1..57: mol_type = unassigned DNA; note = methanogen bacteria
gcagatagtatttcagactacatccagataatttccagaagcaggtggatgaagggg

SEQ ID NO: 34908 - DNA, 48 bp, unidentified
  source 1..48: mol_type = unassigned DNA; note = methanogen bacteria
tttgcaaaagaatggccggtacactcattgaaatttatagcatctgca

SEQ ID NO: 34909 - DNA, 99 bp, unidentified
  source 1..99: mol_type = unassigned DNA; note = methanogen bacteria
atgtacaataattatgtaagtgatttgagtggtgaaatttcatcaaaagaagtaaaagaatttaactcgcagttaaattctttggaaagatattttgaa

SEQ ID NO: 34910 - DNA, 99 bp, unidentified
  source 1..99: mol_type = unassigned DNA; note = methanogen bacteria
atgtacaatacttatgtatctgatttgagtggtgaaattgaatcaagagagtttaggcaattcaattcacaattgcatagtttgggcaattattttagg

SEQ ID NO: 34911 - DNA, 84 bp, unidentified
  source 1..84: mol_type = unassigned DNA; note = methanogen bacteria
tatatgtcaaatataactgaaaaaacacaaacaaccataacggatttgttaaaaaaagaaagagactttttaataaataaaata

SEQ ID NO: 34912 - DNA, 87 bp, unidentified
  source 1..87: mol_type = unassigned DNA; note = methanogen bacteria
agttacatgtccaacataactgaaaaaactcaaaaccaaataaaaactttgttaaaaatagaaagagattttttaataaataaaata

SEQ ID NO: 34913 - DNA, 30 bp, unidentified
  source 1..30: mol_type = unassigned DNA; note = methanogen bacteria
accactttaggagcagaggtactgtcaatt

SEQ ID NO: 34914 - DNA, 99 bp, unidentified
  source 1..99: mol_type = unassigned DNA; note = methanogen bacteria
atgtacaaaacatatattgctgatttaagtggtgaaatacagtcaaatgaagtaaatgaatttaaaagtaagttaagcgaaatatctgagatttttact

SEQ ID NO: 34915 - DNA, 99 bp, unidentified
  source 1..99: mol_type = unassigned DNA; note = methanogen bacteria
atgtacaataattatataagtgacttaagtggtgaagttcaatcaaaagaggttaaggaatttaatgaggagttaaaaatattgggaaaatatttcaaa

SEQ ID NO: 34916 - DNA, 99 bp, unidentified
  source 1..99: mol_type = unassigned DNA; note = methanogen bacteria
atgtataatcgatatattggtgatttaagtggacaaattaattcaaaagaagttaatgagtttaaaaatcagttaaatgtactgggaacatattttaaa

SEQ ID NO: 34917 - DNA, 99 bp, unidentified
  source 1..99: mol_type = unassigned DNA; note = methanogen bacteria
atgtataataattatatggatgatttaagtagtgaaatttcatcaaaggaagtcaatgaattcaataatcagttaaataatcttgggaaatattttaaa

SEQ ID NO: 34918 - DNA, 87 bp, unidentified
  source 1..87: mol_type = unassigned DNA; note = methanogen bacteria
agctatatatccaatataacccaaaaaacacaaaaaaacatgcaaaatttactaaaaacagaaagagattttataataaataaaata

SEQ ID NO: 34919 - DNA, 99 bp, unidentified
  source 1..99: mol_type = unassigned DNA; note = methanogen bacteria
atgtacaataattatataagtgatttaagtggcgaagttcaatcaaaagaatttaaggaatttaatgatgagttaaaaacattgggaaaatatttcaaa

SEQ ID NO: 34920 - DNA, 99 bp, unidentified
  source 1..99: mol_type = unassigned DNA; note = methanogen bacteria
ttgtacaataattacatgagtgatttgagtggggagatatcctccagggaggtgagtgaattcaacaatgagttgaaagcattgggtaagctttttaaa

SEQ ID NO: 34921 - DNA, 51 bp, unidentified
  source 1..51: mol_type = unassigned DNA; note = methanogen bacteria
tataatccattgcctaatggtagaacttctcctgcatggaatttgcctatc

SEQ ID NO: 34922 - DNA, 99 bp, unidentified
  source 1..99: mol_type = unassigned DNA; note = methanogen bacteria
atgtacaacaattacatgagcgacttgtcaggtgaaatctcatcaagggaagtcagccagttcaataatcagttgaatggtcttggaaaatatttcaaa

SEQ ID NO: 34923 - DNA, 87 bp, unidentified
  source 1..87: mol_type = unassigned DNA; note = methanogen bacteria
atatactcaaactacttctcaaacggtaacacattcagtgcacatgatgatgcacagcaaataagacaaaatctgacaacaagcaaa

SEQ ID NO: 34924 - DNA, 36 bp, unidentified
  source 1..36: mol_type = unassigned DNA; note = methanogen bacteria
gtcaatgcacttttgactgttgctccaaacttcagt

SEQ ID NO: 34925 - DNA, 87 bp, unidentified
  source 1..87: mol_type = unassigned DNA; note = methanogen bacteria
agttatatttctaacataacaaacactacacaagaaaattttaaaaaaatattagaaaaagaaagagattttttaataaatatgatt

SEQ ID NO: 34926 - DNA, 102 bp, unidentified
  source 1..102: mol_type = unassigned DNA; note = methanogen bacteria
catatgtataattcgtatatggctgatttaacagaagaagttaattcaaaagaagttaaagaatttaataatggcttaatgaatattgaaaaatattttaaa

SEQ ID NO: 34927 - DNA, 75 bp, unidentified
  source 1..75: mol_type = unassigned DNA; note = methanogen bacteria
ttgaataaaactgtttatcttgatgtagacaatgcaaaaaataaagatgctgataattatacccttgcaatagta

SEQ ID NO: 34928 - DNA, 54 bp, unidentified
  source 1..54: mol_type = unassigned DNA; note = methanogen bacteria
gcagaggtaatgtatatacctccatccgaattcgagaagggtttaggcatagtt

SEQ ID NO: 34929 - DNA, 99 bp, unidentified
  source 1..99: mol_type = unassigned DNA; note = methanogen bacteria
atgtataaaaactatatgaatgacttgacaggggaaatttcatcaaaggagttaaatgaattcaacagtcaattaaataccttgggaagatattttaaa

SEQ ID NO: 34930 - DNA, 87 bp, unidentified
  source 1..87: mol_type = unassigned DNA; note = methanogen bacteria
ggttatatgtcccatataactgaccaaatgcaaacaaatatcaaaaatttgttaaatgaagaaagagattttttaataaataaaata

SEQ ID NO: 34931 - DNA, 99 bp, unidentified
  source 1..99: mol_type = unassigned DNA; note = methanogen bacteria
atgtacaagaattacattaatgatttgggtggtgaaatccaatccagggaaactgctgagttaaataataaattagaagaaatttctgaactttttacc

SEQ ID NO: 34932 - DNA, 99 bp, unidentified
  source 1..99: mol_type = unassigned DNA; note = methanogen bacteria
atgtataacaaatacatgaaggatttgtcaggtgaaattgcatcgaaggaagtcagggaattcaatggtgagttaaacgcattgggaaaatattttaaa

SEQ ID NO: 34933 - DNA, 99 bp, unidentified
  source 1..99: mol_type = unassigned DNA; note = methanogen bacteria
atgtatcgaaattatattgctgatttaagcggtgaaatcgaatccggtgaagtcagagaatttaattataaactgcaaaacatttccagattatttagt

SEQ ID NO: 34934 - DNA, 120 bp, unidentified
  source 1..120: mol_type = unassigned DNA; note = methanogen bacteria
gtacacttcattcctgtaggtggtgctcctgcagctatggctaccgctaccggtgtaggaactggtaccgcaatgttagcagctggtcatgttaatgatgggtatcaccatgcttattgg

SEQ ID NO: 34935 - DNA, 84 bp, unidentified
  source 1..84: mol_type = unassigned DNA; note = methanogen bacteria
tatatgtcaaatataacaggaaaaatccaaacaaacatggataatctgttaaaaaaagaaagagattttttaataaataagatt

SEQ ID NO: 34936 - DNA, 99 bp, unidentified
  source 1..99: mol_type = unassigned DNA; note = methanogen bacteria
atgtataaaagttatatggctgatttaggtggtcaaattaattcaaaagaagtaaaagaattcaacggtgaattgaatgatttgggaaaatatttcaaa

SEQ ID NO: 34937 - DNA, 42 bp, unidentified
  source 1..42: mol_type = unassigned DNA; note = methanogen bacteria
acagattcatttttagtgaatccgacaagcgcagtgacccaa

SEQ ID NO: 34938 - DNA, 87 bp, unidentified
  source 1..87: mol_type = unassigned DNA; note = methanogen bacteria
agttatatatcaaaaataagtcaagaaatacaaaccaacactcatagctttttaaaaacagaaagagattatattataaataaaatt

SEQ ID NO: 34939 - DNA, 96 bp, unidentified
  source 1..96: mol_type = unassigned DNA; note = methanogen bacteria
atgtacaataattatgtaagtgatttaagtgatgagattgcatctaaagaggttaatgaattcaatagggaacttaaaattttagaaaagtatttt

SEQ ID NO: 34940 - DNA, 84 bp, unidentified
  source 1..84: mol_type = unassigned DNA; note = methanogen bacteria
tacattacaaatataataaacactacacaaaattcttttaaaacattaattacacaagaaagagattttttaataaataaaata

SEQ ID NO: 34941 - DNA, 87 bp, unidentified
  source 1..87: mol_type = unassigned DNA; note = methanogen bacteria
agctacatgtccaacatgactcaaaaaatgcaaacaaacatacataatttcttaaaagtagaaagagattatttaataaataaaatt

SEQ ID NO: 34942 - DNA, 30 bp, unidentified
  source 1..30: mol_type = unassigned DNA; note = methanogen bacteria
gttgttgcagctcaaaatccgtttattatc

SEQ ID NO: 34943 - DNA, 87 bp, unidentified
  source 1..87: mol_type = unassigned DNA; note = methanogen bacteria
atgttcggaaataatgacaccacaattcaagtagatttaaggaaaaaaagtagtataaaagacgaaatcatgtacagcaacattgac

SEQ ID NO: 34944 - DNA, 60 bp, unidentified
  source 1..60: mol_type = unassigned DNA; note = methanogen bacteria
atagcagcattacttttatctgttatttctgttgtagcagctcaaaatccttacatcatt

SEQ ID NO: 34945 - DNA, 54 bp, unidentified
  source 1..54: mol_type = unassigned DNA; note = methanogen bacteria
atcagctcaatgaagatgtcactcccgagcagaggcaggatgcaatcaatgcca

SEQ ID NO: 34946 - DNA, 36 bp, unidentified
  source 1..36: mol_type = unassigned DNA; note = methanogen bacteria
ccatcaattgcaaatgagttcggaatgaacaatgtt

SEQ ID NO: 34947 - DNA, 177 bp, unidentified
  source 1..177: mol_type = unassigned DNA; note = methanogen bacteria
ggtaaaatcattaaattcaaatttaatggcaaaacatacaaagctaaaaccaacaaaaaaggtattgcgcagaaaattttaaccaaaaaagtcatcaaaaaactcaaaaaaggtaaaaaatacactgtccaagtgacctacaaaaaagacacaataaaaacaaccgttaaaatcaag

SEQ ID NO: 34948 - DNA, 42 bp, unidentified
  source 1..42: mol_type = unassigned DNA; note = methanogen bacteria
acaaatggtttaacaaattcttttgaaaattcaatctggtgg

SEQ ID NO: 34949 - DNA, 87 bp, unidentified
  source 1..87: mol_type = unassigned DNA; note = methanogen bacteria
tcctacattacaaaaataacaaacactactcaaaattcttttaaaggattaataaaacaagaaagagattatttaataaataaaata

SEQ ID NO: 34950 - DNA, 84 bp, unidentified
  source 1..84: mol_type = unassigned DNA; note = methanogen bacteria
tacactacaaacattattaatgacattactaatcatacccaagaagttataaaaaccggacgagataacatattaagcaaacta

SEQ ID NO: 34951 - DNA, 30 bp, unidentified
  source 1..30: mol_type = unassigned DNA; note = methanogen bacteria
ccttatgtactttactcaaatgggggagga

SEQ ID NO: 34952 - DNA, 66 bp, unidentified
  source 1..66: mol_type = unassigned DNA; note = methanogen bacteria
atgacagaaaatgaaaataaatttcccgattatgttacttttccaagaacatttgagaattataaa

SEQ ID NO: 34953 - DNA, 87 bp, unidentified
  source 1..87: mol_type = unassigned DNA; note = methanogen bacteria
atgttaggcaataaagacaccacaattcaagttgatttaaggaaaaaaagttcaataagagatgagatcatttacagcggtttagac

SEQ ID NO: 34954 - DNA, 48 bp, unidentified
  source 1..48: mol_type = unassigned DNA; note = methanogen bacteria
ttacttttatctgttatttctgttgtggcagctcaaagtcctatagtt

SEQ ID NO: 34955 - DNA, 66 bp, unidentified
  source 1..66: mol_type = unassigned DNA; note = methanogen bacteria
aaagtcggagatgaacaaataactatagcaaatcaaacggtttggtataatggagatattggttat

SEQ ID NO: 34956 - DNA, 87 bp, unidentified
  source 1..87: mol_type = unassigned DNA; note = methanogen bacteria
tcctacattacaaatataacaaacactacacaggagtcttttaaaacattgattacacaagaaagagattttttaataaataaaata

SEQ ID NO: 34957 - DNA, 48 bp, unidentified
  source 1..48: mol_type = unassigned DNA; note = methanogen bacteria
tatgatacacaaatatgtactgatgcaattaacaacaaccatagagta

SEQ ID NO: 34958 - DNA, 90 bp, unidentified
  source 1..90: mol_type = unassigned DNA; note = methanogen bacteria
ttgtctgattttaatatagatttattttatttcattaatcataatttatcaaatccattttctgatattctaatgccaaatttaacacat

SEQ ID NO: 34959 - DNA, 111 bp, unidentified
  source 1..111: mol_type = unassigned DNA; note = methanogen bacteria
actcacttgtttttatctccttcgactgtagaaagtaaaggatccaaaaatgtcactgatatgattaacagatcggtggaaatacctgcatctgtaagactgatgatgagt

SEQ ID NO: 34960 - DNA, 36 bp, unidentified
  source 1..36: mol_type = unassigned DNA; note = methanogen bacteria
agttctataaaagatgaactattatttagtgactac

SEQ ID NO: 34961 - DNA, 30 bp, unidentified
  source 1..30: mol_type = unassigned DNA; note = methanogen bacteria
tctgttgtagcagctcaagctccaatcgta

SEQ ID NO: 34962 - DNA, 78 bp, unidentified
  source 1..78: mol_type = unassigned DNA; note = methanogen bacteria
taccaaagttacttccaaccacaagagtttaacacaacatcagatatctcaactgtaagatcctcagcattcgaaaaa

SEQ ID NO: 34963 - DNA, 60 bp, unidentified
  source 1..60: mol_type = unassigned DNA; note = methanogen bacteria
caaggcggaatacttgctgctgcagttcctttttctatacatatgaatctgcatggatgt

SEQ ID NO: 34964 - DNA, 54 bp, unidentified
  source 1..54: mol_type = unassigned DNA; note = methanogen bacteria
atggcccttcaagccaatcctgatatgatggctaagacacaggaatcacaggct

SEQ ID NO: 34965 - DNA, 84 bp, unidentified
  source 1..84: mol_type = unassigned DNA; note = methanogen bacteria
tacacgactaactacttaaacactataacaaatcatacaaaaacagtgataataaatagtagaaataattttctatcacagata

SEQ ID NO: 34966 - DNA, 90 bp, unidentified
  source 1..90: mol_type = unassigned DNA; note = methanogen bacteria
ggttatcagtactcttccgtcaaggacatccaggacatccccgcgaccggccatcacgatgatccctccactcaccgctacgataggttc

SEQ ID NO: 34967 - DNA, 72 bp, unidentified
  source 1..72: mol_type = unassigned DNA; note = methanogen bacteria
gacagaagtttaaaagcaaaagacgacatcatagatgtcagaaacacaatattggacaacagaacccatgta

SEQ ID NO: 34968 - DNA, 171 bp, unidentified
  source 1..171: mol_type = unassigned DNA; note = methanogen bacteria
atgtcagagttagataatgatgcttctaaagaaaatattaaattaggagaatatgtaacttggatttttgaggcaaaaaataaagggccaaatatagctaaaaatgtaaaagtatatataaaattagtagatggtttaaaatttattaaatataatgtgaataaaggtatt

SEQ ID NO: 34969 - DNA, 93 bp, unidentified
  source 1..93: mol_type = unassigned DNA; note = methanogen bacteria
gtattccacgccgcgaacgatccgggtatggacccttacgacgtcaccttcacggcaacggcggaaggaccgccgaaggagatgaaactacag

SEQ ID NO: 34970 - DNA, 84 bp, unidentified
  source 1..84: mol_type = unassigned DNA; note = methanogen bacteria
atctatatcatatcatctgatgcaatcatgaactatacattgttttcaagatatttcaatttgcatctctctttattggacgta

SEQ ID NO: 34971 - DNA, 168 bp, unidentified
  source 1..168: mol_type = unassigned DNA; note = methanogen bacteria
ataactttcaaattcaggggtaaaacctataaagtcaaaaccaataaaaatggaattgcacaaaaaactctgaaaaagaatgttatcaaaaagcttaaaaaaggtaaaacctatactgttaaactgatttaccttaaagacaccattaaaacaacagttaaagttaaa

SEQ ID NO: 34972 - DNA, 39 bp, unidentified
  source 1..39: mol_type = unassigned DNA; note = methanogen bacteria
atgcctgatttgattgatggatctgaaaatgtttctgtt

SEQ ID NO: 34973 - DNA, 93 bp, unidentified
  source 1..93: mol_type = unassigned DNA; note = methanogen bacteria
tattttggtttaacaaatcagaataatactaatacaacaaatgtgaataatactaccaatacgactaacagtacaatgttactgttgagaaac

SEQ ID NO: 34974 - DNA, 63 bp, unidentified
  source 1..63: mol_type = unassigned DNA; note = methanogen bacteria
ctggacgactaccgggagatcggcttggacagccgggcctttggccaggtgcgtgagagcgag

SEQ ID NO: 34975 - DNA, 81 bp, unidentified
  source 1..81: mol_type = unassigned DNA; note = methanogen bacteria
gatgcatatgctactgcaagagctttaaacgagggtatggaagtagaagataaacttgactttcataatctagattggtgg

SEQ ID NO: 34976 - DNA, 162 bp, unidentified
  source 1..162: mol_type = unassigned DNA; note = methanogen bacteria
ttgaatgaaatccttaatggtagaaatactgtaatttacctaactgacaattacaagtatagctatggtgatgaagcatttgtacatggaatattaattaaaaagagtattaccataaatggtaacggcataaccatagatggttcaaataccgcacggatc

SEQ ID NO: 34977 - DNA, 66 bp, unidentified
  source 1..66: mol_type = unassigned DNA; note = methanogen bacteria
atgaaagtgtctaaagacgataattgtcaaattgatgaaaattgttccgatggtacttgtgcacca

SEQ ID NO: 34978 - DNA, 69 bp, unidentified
  source 1..69: mol_type = unassigned DNA; note = methanogen bacteria
atgaaagtgtctaaagatgataattgtcaaattgatggaaattgttctaatggtacttgcgcaccagta

SEQ ID NO: 34979 - DNA, 162 bp, unidentified
  source 1..162: mol_type = unassigned DNA; note = methanogen bacteria
gctttgatgcagattggtgatgtggaaagtgtggaattcaatgaagtttggggtcaaggccacacccaagctgaaagatcaggttccgctaatggaaacttcataaattgggtcaataaatgcatgagcaacgaatctgatttcttcttaatagattttttt

SEQ ID NO: 34980 - DNA, 72 bp, unidentified
  source 1..72: mol_type = unassigned DNA; note = methanogen bacteria
gctgattattcagagagttccagcgagactgaaatacaaacgtgggacgactatgaagcttcaaatatactg

SEQ ID NO: 34981 - DNA, 48 bp, unidentified
  source 1..48: mol_type = unassigned DNA; note = methanogen bacteria
atgagcgaacataatactccggaatatataacattcccaagaactttt

SEQ ID NO: 34982 - DNA, 48 bp, unidentified
  source 1..48: mol_type = unassigned DNA; note = methanogen bacteria
atattttatattggaggaaatggattcattgaacctctccggcttgta

SEQ ID NO: 34983 - DNA, 159 bp, unidentified
  source 1..159: mol_type = unassigned DNA; note = methanogen bacteria
atgaaaatagaagaaatcgatgcaataaaattcaaaaacgatcaggccacagaagttaaggaaaatgttgtgaaggatgaaacaataacattgacaatcaacggaaacatctcacgcaaaaggaatttgcagtgggatacctgttcaacgagaacatgg

SEQ ID NO: 34984 - DNA, 39 bp, unidentified
  source 1..39: mol_type = unassigned DNA; note = methanogen bacteria
acaagtaatttttcagctacggatgtacaaactgatgcg

SEQ ID NO: 34985 - DNA, 90 bp, unidentified
  source 1..90: mol_type = unassigned DNA; note = methanogen bacteria
gcaagtgaaataggggatactatagcaagtgaaaatgcaaatacaatcgagttatccgctgataatgaggccattctggagacattacat

SEQ ID NO: 34986 - DNA, 39 bp, unidentified
  source 1..39: mol_type = unassigned DNA; note = methanogen bacteria
ttatcacttgttcacggtgacatatccatatccatttca

SEQ ID NO: 34987 - DNA, 42 bp, unidentified
  source 1..42: mol_type = unassigned DNA; note = methanogen bacteria
ggttcttcagttgtttcattcggaccaatggtatttgacatg

SEQ ID NO: 34988 - DNA, 30 bp, unidentified
  source 1..30: mol_type = unassigned DNA; note = methanogen bacteria
gtgtctaaaataaatgttgatgcattttat

SEQ ID NO: 34989 - DNA, 135 bp, unidentified
  source 1..135: mol_type = unassigned DNA; note = methanogen bacteria
gaaaatgtaaccatggacaatacaatgtccatacaagatactgtgaataatgttaatgacagcgatacaatatacctaacaccaggaacatatattgaatccggcattaaaattgataaaaatattactttacaa

SEQ ID NO: 34990 - DNA, 48 bp, unidentified
  source 1..48: mol_type = unassigned DNA; note = methanogen bacteria
ggtctcggagtggagcatgagttctactacgatcagggcagcatgagc

SEQ ID NO: 34991 - DNA, 57 bp, unidentified
  source 1..57: mol_type = unassigned DNA; note = methanogen bacteria
atgattactttcaaaaagtttaaagagaatgctaccattgaggatattgtaaatatc

SEQ ID NO: 34992 - DNA, 153 bp, unidentified
  source 1..153: mol_type = unassigned DNA; note = methanogen bacteria
tctgtaacattcaacattaacggtgtgttctacaacaagccaactgacagttcaggtacagcaaaattaaacattaacttaatgcctggcgaatacatcattacctcaatgtataatggaatggcaatcgcaaatacaattacaatcaaggat

SEQ ID NO: 34993 - DNA, 48 bp, unidentified
  source 1..48: mol_type = unassigned DNA; note = methanogen bacteria
tcccagcttgttgatgatttgcatactatatattattatattaaattt

SEQ ID NO: 34994 - DNA, 33 bp, unidentified
  source 1..33: mol_type = unassigned DNA; note = methanogen bacteria
gcaacagcatcatcttttgattcccaacagcat

SEQ ID NO: 34995 - DNA, 36 bp, unidentified
  source 1..36: mol_type = unassigned DNA; note = methanogen bacteria
gaatgcctaaaacaggagtatttttttcaacagcca

SEQ ID NO: 34996 - DNA, 72 bp, unidentified
  source 1..72: mol_type = unassigned DNA; note = methanogen bacteria
ttcactccgacaatagaagtcaaggaagttgacatcaaggacataaaccgtggaatgattgatgctactttt

SEQ ID NO: 34997 - DNA, 42 bp, unidentified
  source 1..42: mol_type = unassigned DNA; note = methanogen bacteria
tcacaacttgttattgatttgaaaacttcaggacatagttgg

SEQ ID NO: 34998 - DNA, 36 bp, unidentified
  source 1..36: mol_type = unassigned DNA; note = methanogen bacteria
cgaaagatatatctaacttattatatgctatggttt

SEQ ID NO: 34999 - DNA, 75 bp, unidentified
  source 1..75: mol_type = unassigned DNA; note = methanogen bacteria
agacatgaaattagtgtggaatttagtggcagtgatggaaaaacccacacattcagtgaaacagttgtaattgaa

SEQ ID NO: 35000 - DNA, 108 bp, unidentified
  source 1..108: mol_type = unassigned DNA; note = methanogen bacteria
agcagtgataaatatacgcctacagttagtttacctgtttcaggcaaaacaatcgtagttgatgcaggtcatggaattccagatgaagggattcatttgttaacattg

SEQ ID NO: 35001 - DNA, 63 bp, unidentified
  source 1..63: mol_type = unassigned DNA; note = methanogen bacteria
atggcagatattaactgggatgcatacgcaaaacccttcgcagatggaatcattcctggttcc

SEQ ID NO: 35002 - DNA, 42 bp, unidentified
  source 1..42: mol_type = unassigned DNA; note = methanogen bacteria
ccttattatatggatgattttgcagtatcttcagaaaagatt

SEQ ID NO: 35003 - DNA, 60 bp, unidentified
  source 1..60: mol_type = unassigned DNA; note = methanogen bacteria
atgagtgttaactgggacgcttactccgccttcttcaacgacggtatcattccggcatcc

SEQ ID NO: 35004 - DNA, 36 bp, unidentified
  source 1..36: mol_type = unassigned DNA; note = methanogen bacteria
tccattgtttatgctgatttatccatttccatttca

SEQ ID NO: 35005 - DNA, 36 bp, unidentified
  source 1..36: mol_type = unassigned DNA; note = methanogen bacteria
atgtctgatttaatcgatgaaataactgaaatgaca

SEQ ID NO: 35006 - DNA, 33 bp, unidentified
  source 1..33: mol_type = unassigned DNA; note = methanogen bacteria
tctcgaattgttgttgatttgaatgctgatgtt

SEQ ID NO: 35007 - DNA, 84 bp, unidentified
  source 1..84: mol_type = unassigned DNA; note = methanogen bacteria
tcagaagaagaaactcctttaaattcaatagttatagtttcaaatgcatttacaagtaacggttataaaatgtacaagttttgg

SEQ ID NO: 35008 - DNA, 48 bp, unidentified
  source 1..48: mol_type = unassigned DNA; note = methanogen bacteria
atgagtaactgggatgcatacgcgggccatttcgccgacggcatacct

SEQ ID NO: 35009 - DNA, 48 bp, unidentified
  source 1..48: mol_type = unassigned DNA; note = methanogen bacteria
atgaatgactggagcggatatactgactactttgccgatggaattccc

SEQ ID NO: 35010 - DNA, 33 bp, unidentified
  source 1..33: mol_type = unassigned DNA; note = methanogen bacteria
atgagaaaaatacacaaatatacaccaaaatct

SEQ ID NO: 35011 - DNA, 63 bp, unidentified
  source 1..63: mol_type = unassigned DNA; note = methanogen bacteria
ggagccttaatcatatcgcaaggattctactcaaaaacagccatacaacaattatctgagaac

SEQ ID NO: 35012 - DNA, 120 bp, unidentified
  source 1..120: mol_type = unassigned DNA; note = methanogen bacteria
atgaatggtcaatggaaatggacgcaatgggataacggtgaagaaggagcaacatatcataagtatcctgtaagcaatgatgttgaaatccaaaaagtagaggttcaattaaatataaaa

SEQ ID NO: 35013 - DNA, 30 bp, unidentified
  source 1..30: mol_type = unassigned DNA; note = methanogen bacteria
ttgccgcagcctgaaactgcaactatcgca

SEQ ID NO: 35014 - DNA, 48 bp, unidentified
  source 1..48: mol_type = unassigned DNA; note = methanogen bacteria
ctaacacaaccggcatcccctacatttggagcttttttagcattgaat

SEQ ID NO: 35015 - DNA, 30 bp, unidentified
  source 1..30: mol_type = unassigned DNA; note = methanogen bacteria
atgatgatggttttaggaattgaagaccct

SEQ ID NO: 35016 - DNA, 78 bp, unidentified
  source 1..78: mol_type = unassigned DNA; note = methanogen bacteria
tttagtgatttgcaaaaaaagattgatggtgccgatgaaggttcaacaatcttattggaaaataattatgcatatgat

SEQ ID NO: 35017 - DNA, 45 bp, unidentified
  source 1..45: mol_type = unassigned DNA; note = methanogen bacteria
atttcttcagcacccactaacgttgataattcagtgagatttggc

SEQ ID NO: 35018 - DNA, 30 bp, unidentified
  source 1..30: mol_type = unassigned DNA; note = methanogen bacteria
atgatggtgattcttggaattgaagatcca

SEQ ID NO: 35019 - DNA, 30 bp, unidentified
  source 1..30: mol_type = unassigned DNA; note = methanogen bacteria
atgattgaaatattaggacttagtgatcct

SEQ ID NO: 35020 - DNA, 42 bp, unidentified
  source 1..42: mol_type = unassigned DNA; note = methanogen bacteria
tgggaagatttaagaaaagaatatagtgatattgtcggagag

SEQ ID NO: 35021 - DNA, 48 bp, unidentified
  source 1..48: mol_type = unassigned DNA; note = methanogen bacteria
gcgggatggatcgatatgaccgcgatattcgcaccttacgcggggtgg

SEQ ID NO: 35022 - DNA, 102 bp, synthetic construct
  source 1..102: mol_type = other DNA
gatgaaaagggatacgagtatatctactcgacgggcgacatggtcaggtttctgcccgacgggaccctcgcaatcgtggatcgcagggatagccaagtgaag

SEQ ID NO: 35023 - DNA, 33 bp, synthetic construct
  source 1..33: mol_type = other DNA
aacagagtggaacttccggaggtagagtcagca

SEQ ID NO: 35024 - DNA, 186 bp, synthetic construct
  source 1..186: mol_type = other DNA
aagatccgatatgttgacgacgtgacagtacaagttgcgaataacaacggcagtaacgagctcgtggcctacgtggtcgcttccaaggagttcgcacccgattccctgagcgagcacatcagggaatatgtatctaaacacaagcccgattacatgatcccttccttcattattcccctgaacaag

SEQ ID NO: 35025 - DNA, 54 bp, synthetic construct
  source 1..54: mol_type = other DNA
gggaaagtggacaaaaaggctctgcccaaagtaaaccttgaacacctgcatgct

SEQ ID NO: 35026 - DNA, 111 bp, synthetic construct
  source 1..111: mol_type = other DNA
aactatgtcgaggacgtcacggtccagacaataaaacgcggcagcaattatgagctcgttgcctacgtcatcgagtctaagaagaccgacaatctggatgaaatcattaca

SEQ ID NO: 35027 - DNA, 39 bp, synthetic construct
  source 1..39: mol_type = other DNA
attggcaagtccaagcccgagtacatgatccctagcttc

SEQ ID NO: 35028 - DNA, 60 bp, synthetic construct
  source 1..60: mol_type = other DNA
ggcaaagtggataagaaggccctccctgaaatcgatcctgattctctccacgagaagtac

SEQ ID NO: 35029 - DNA, 231 bp, synthetic construct
  source 1..231: mol_type = other DNA
atactggatgactccaacgccaaagtgcttatagtcagtgatgagacatacgagcgatcaaatgatctgatcaacgatgatgtcaccattctgaacatatccaacatcctgaaggaggacatcggagtgctgtcaaccctgccggttgtatacaacgacctcgcgtgcatcttgtacaccagcggcaccaccggcatcccaaaaggcgtcaaggtaaccagaaagagtata

SEQ ID NO: 35030 - DNA, 126 bp, synthetic construct
  source 1..126: mol_type = other DNA
atcaagcagggcagtaattacgagctggtggcctatgtcgtgcctagcaccgagacagacaacctcgaggagattatcaccaagcacattgaaaattccaagccagagtacatgatcccctctttc

SEQ ID NO: 35031 - DNA, 51 bp, synthetic construct
  source 1..51: mol_type = other DNA
gtggataaaaaggccctgcctgaggtcgacctggacacattgcacgaaaag

SEQ ID NO: 35032 - DNA, 72 bp, synthetic construct
  source 1..72: mol_type = other DNA
gggaccaccggcattcccaagggggtcaagattacacggaagagtatcgtgaactacatcgaatattacgct

SEQ ID NO: 35033 - DNA, 42 bp, synthetic construct
  source 1..42: mol_type = other DNA
agcaacatgacccaggaagatacattcgctctttacgcctat

SEQ ID NO: 35034 - DNA, 132 bp, synthetic construct
  source 1..132: mol_type = other DNA
atctttgtctctcttttcgtcggcgcatgcctcaacataatacccgaggagatcaagctcaacatgaagaagctcaatgagcacttcatcaataacaacatcacccacgcccatctccctacacaagtggct

SEQ ID NO: 35035 - DNA, 180 bp, synthetic construct
  source 1..180: mol_type = other DNA
aacgagttcgagtcctctagtctcaagattctggtgacaggcggcgagaagctgggcgaaatcgattactccaccgagtacatcctcgtcgactcttatggccccactgaggcttgtgtatccgtcaccgccatcaaggagcaggacaaaattggctactctagcattggacatctgctg

SEQ ID NO: 35036 - DNA, 102 bp, synthetic construct
  source 1..102: mol_type = other DNA
atcaagaacgccaacaataacgagctggccgcctatgtggtggccaactgtgaagtcgagaatatcaatgacttggtctgcgattacgtcaacgagcacaag

SEQ ID NO: 35037 - DNA, 72 bp, synthetic construct
  source 1..72: mol_type = other DNA
aaagccctgcctgacatcgacctcgatgcgctgagggtggaatacgtggcgcccacaaacgaaaccgagaaa

SEQ ID NO: 35038 - DNA, 126 bp, synthetic construct
  source 1..126: mol_type = other DNA
gagaagaacaacatctcgtgcactgcgcgggacattctgaatcacaagactccctacctgatagcgcagaacgtagactccgccgaaatcatttcttacgataccgtcgagggcgaggtcgatctg

SEQ ID NO: 35039 - DNA, 63 bp, synthetic construct
  source 1..63: mol_type = other DNA
cctattcaatccttttactttgaccaaatcaaatctgacgaatacatgcaacccttcttcctg

SEQ ID NO: 35040 - DNA, 42 bp, synthetic construct
  source 1..42: mol_type = other DNA
cagtctgccttgaacgagctgaccaaccttcacgacatgctg

SEQ ID NO: 35041 - DNA, 33 bp, synthetic construct
  source 1..33: mol_type = other DNA
gagaacggcaaagcagtccaggaaataaagcac

SEQ ID NO: 35042 - DNA, 63 bp, synthetic construct
  source 1..63: mol_type = other DNA
atcgagatcaacctgatccactataatgacgaatcctacattatcttcgtgatccatcatctc

SEQ ID NO: 35043 - DNA, 45 bp, synthetic construct
  source 1..45: mol_type = other DNA
aacgccctgcccgaagtggatcgggacaccctccttacggaatat

SEQ ID NO: 35044 - DNA, 60 bp, synthetic construct
  source 1..60: mol_type = other DNA
taccgatatgatacagacaagacctacaccttcaaggacatcagcacactgaaccaagag

SEQ ID NO: 35045 - DNA, 57 bp, synthetic construct
  source 1..57: mol_type = other DNA
gagatcaacaactttttcaattattccttcaacgagattacggacagcacactgtac

SEQ ID NO: 35046 - DNA, 42 bp, synthetic construct
  source 1..42: mol_type = other DNA
ttcgattatacatctattaaaaagatctataacctgttcaac

SEQ ID NO: 35047 - DNA, 45 bp, synthetic construct
  source 1..45: mol_type = other DNA
cccatcgacgtgaccaataaggagctgtattacaacaaggaacgc

SEQ ID NO: 35048 - DNA, 60 bp, synthetic construct
  source 1..60: mol_type = other DNA
tacaacatcaaaagcaacaactataacaagatcaatattcccctgaataatgagaccatc

SEQ ID NO: 35049 - DNA, 81 bp, synthetic construct
  source 1..81: mol_type = other DNA
ttcctggacgagaataatatcagcaagtttgaatacgtgacagcaatttttagtctatacttatcgagaatagacaggact

SEQ ID NO: 35050 - DNA, 177 bp, synthetic construct
  source 1..177: mol_type = other DNA
ctcaacaactactttgacataaacagcttttactccatctatgatttcacgggtttcaacgacatctctattatcaatggcgagggcagcgccctgaccatcaatatttacgacaactccattgaactgatttacaacactgacctgttcaacaagacctacatcgagcacatgatc

SEQ ID NO: 35051 - DNA, 144 bp, synthetic construct
  source 1..144: mol_type = other DNA
aatattgagtcccttattaacaacatcggcgagtcacctaaccaaatatgttgcgatatcgacattctgtctaacgaggagaagaatctcatctcaagattctcaaaagccaaaactatcgagtttaacgaaaacaagaccctg

SEQ ID NO: 35052 - DNA, 78 bp, synthetic construct
  source 1..78: mol_type = other DNA
cccagcctggggctgtccatcgccaatgaggatattaacctgaagtacatgctcctcgccggcgctaagttcgacaac

SEQ ID NO: 35053 - DNA, 162 bp, synthetic construct
  source 1..162: mol_type = other DNA
aacttcgactctatctcaaatatctacctggacgtggacaacgacaacctcatcgcatactacactacaaaccaggatctcaacatcgataaggtcaagaatgccctgaagaatgagctcccaccgtacatgattccttcaatatttatcaaactggatgaa

SEQ ID NO: 35054 - DNA, 39 bp, synthetic construct
  source 1..39: mol_type = other DNA
atcgacaagttcgccctgaaaaagaccacacacaaccgg

SEQ ID NO: 35055 - DNA, 93 bp, synthetic construct
  source 1..93: mol_type = other DNA
acctttatggaggtccttaatctggattacatcctcatggatgacgacttcgtctcgctaggccggaacagcctgagcgccatgaagcttcag

SEQ ID NO: 35056 - DNA, 264 bp, synthetic construct
  source 1..264: mol_type = other DNA
aaggagaagctcgactataatatctcctccaacgaaattatggagctctctacacctctgaacatcaccaaccacattaagttcaacctgaacaaccagtccatcgataagcttaaatatgcctttgacaagtcctgcccactgtctgaatctcagctgaatgtctacctggacgagaaagttaataagctgggcacccggtacaacaacccctttaagatcgagctcaacaatgagtacagcatcgaggacatcaagatcgcc

SEQ ID NO: 35057 - DNA, 84 bp, synthetic construct
  source 1..84: mol_type = other DNA
gagctgtaccctgtgctgtcttcccggatcaacaacaatgatacgccttcctttacctttgacgcaaagctggagatcatcgag

SEQ ID NO: 35058 - DNA, 90 bp, synthetic construct
  source 1..90: mol_type = other DNA
ctcattgtcaagaacaacgagtctacatccttatacgtagacttccaccacctcatcatggatggcaccagcgccgacattctgctgaac

SEQ ID NO: 35059 - DNA, 264 bp, synthetic construct
  source 1..264: mol_type = other DNA
tttgaaaagaacattgattctcactacatggacgatgctgaaagattctttgataatatgttgacggacaccgaagaagtctcccccctgttgactcccatccaaacggacaagtcacttgatgacgagttcaccaacgaacttaatctggacgtggacatcgagagttttcttaagaagcacggcctgacacataatcagttcttttgtagcgtgtttgcatatactctgagccgcttcactggatctagccttgtattgaaa

SEQ ID NO: 35060 - DNA, 81 bp, synthetic construct
  source 1..81: mol_type = other DNA
aatcttattgaggacggacgaggacacatcgatcttgccgactcggttggcatgtacgtgcggaccctgccactcctgatg

SEQ ID NO: 35061 - DNA, 126 bp, synthetic construct
  source 1..126: mol_type = other DNA
aagaaccagaacatttcttccttcctcgattattcatccaacctgatcaacttgaccatgaaatatgacctgtaccccttccggctgctggccaacaaatatgaccttaattcaaacatcctgttc

SEQ ID NO: 35062 - DNA, 99 bp, synthetic construct
  source 1..99: mol_type = other DNA
ctgaagcacgactacaccaacgatatcagtttctacatcttcaactcccaagaaaataagttcggcattcgggtggagttctccgacaagtacagcaaa

SEQ ID NO: 35063 - DNA, 147 bp, synthetic construct
  source 1..147: mol_type = other DNA
gacgagatcagcgacgtgacagtccagaccgtcgacaacaatggcaacaacgagctcgtggcctacgtggtcctgtccaacaatctggatgtgaacctgaacgactacatttctagttatgtggatgaacgcaaacccgactacatg

SEQ ID NO: 35064 - DNA, 69 bp, synthetic construct
  source 1..69: mol_type = other DNA
aaggccctgcccgagatcgacatcaactcgttgcgggcagaatacgccgctcctacaaacaccatcgaa

SEQ ID NO: 35065 - DNA, 33 bp, synthetic construct
  source 1..33: mol_type = other DNA
aacgtggacgaagactacatcaaggagttcctg

SEQ ID NO: 35066 - DNA, 30 bp, synthetic construct
  source 1..30: mol_type = other DNA
gaaaatgaggagaactaccagatcttcgcc

SEQ ID NO: 35067 - DNA, 72 bp, synthetic construct
  source 1..72: mol_type = other DNA
aaaagtatatcttcctttatggaccacacctctaatcttgtgtacaacgtgatgaaatacaactactacgcc

SEQ ID NO: 35068 - DNA, 30 bp, synthetic construct
  source 1..30: mol_type = other DNA
cacgaatatgacttaacttctaacatcctg

SEQ ID NO: 35069 - DNA, 168 bp, synthetic construct
  source 1..168: mol_type = other DNA
attcccgagtggatcatggacggcgatggcaacagctacctgaatgattatgctactactgagcgagaggatttgataagtgatctgtctattgatattatacaaaagggcaaggaatatgacttgatcgtggagtactccgacaagtactccaacaacttcatcaaa

SEQ ID NO: 35070 - DNA, 216 bp, synthetic construct
  source 1..216: mol_type = other DNA
atgctgaacgtcaacgagctgaaggaaattaactatatctccaaggaagacatcaacctgctggactcttacaaccagacagagcacgagctgatctacgacgacattctcgacgccttcaacgataacctttccaagaatcccaacaacaagctggtatcttttaaggacatcagctacacctacgctgagggcgcatacatcgccaaacagatt

SEQ ID NO: 35071 - DNA, 78 bp, synthetic construct
  source 1..78: mol_type = other DNA
aaggacactagtagtaaagctatcatcgccgacgataacacatacgagcgggccaaaactctgggcaaggatgtgatc

SEQ ID NO: 35072 - DNA, 45 bp, synthetic construct
  source 1..45: mol_type = other DNA
aaatatgggaagctgtcctgcatcctgtacacatctggaaccact

SEQ ID NO: 35073 - DNA, 231 bp, synthetic construct
  source 1..231: mol_type = other DNA
tacgtcagctattatacgaatcgaaccaacatgacaagcaatgatgtgctggctcttttttcatccatctccttcgacgtcggtgccataaagagcattttcgcacccatctattccggaagctgtctggatattatacctaagtcattccgcctgaatatgaaggagctcaataagtacttcaacgataacaacatcacccatgccgatttcccaacacaaatcgcaaag

SEQ ID NO: 35074 - DNA, 189 bp, synthetic construct
  source 1..189: mol_type = other DNA
ttctttaaggagaacgacagcgtcgagctgaagatcctggtgactgggggagagaagctcggcgaaatcaacaccaagaatttcgaacaacttatcgacgcctacggacccactgagacctgcgtatcgatatgttccattaaaaagctggataagatcgactctagctccatcgggcacctgttgtac

SEQ ID NO: 35075 - DNA, 108 bp, synthetic construct
  source 1..108: mol_type = other DNA
gttgaggatactacggtccagattaacaagaacagtagcaattacgagctgatcgcctacgtcgtggtgtctgaagagatctataacctcaaggagtccatctgttcc

SEQ ID NO: 35076 - DNA, 39 bp, synthetic construct
  source 1..39: mol_type = other DNA
cccgagatcgatattaatagccttcgggccgaatacgtc

SEQ ID NO: 35077 - DNA, 150 bp, synthetic construct
  source 1..150: mol_type = other DNA
gattccttgactgcgatcaagctcctgagttacctcgattctcccgggatcactgccgctgatatcctgaccctgcacaccccttacgccattgccgaaaacatcaaggaagatactctcgacctggacatgtacaccctggaatctggc

SEQ ID NO: 35078 - DNA, 153 bp, synthetic construct
  source 1..153: mol_type = other DNA
ctgaacgagccacagctgaacgtctatctggacatcatcgcaaacaacatggtcaattcttaccttatcccactgaacattgttatctccaaggaatatgatgtcgacgaaatccataacgccctcaacgtcatgctggacgtgcatcctatt

SEQ ID NO: 35079 - DNA, 153 bp, synthetic construct
  source 1..153: mol_type = other DNA
tacctggtcaagggactcaaacctcctatcacattcaaatccaacgctgacgacgagttcgtgaacacctttctcactaagggttttgatctgaatgaatgtctctccaaattccttgtggttgagaaggaagataaatacgaactatttgcc

SEQ ID NO: 35080 - DNA, 54 bp, synthetic construct
  source 1..54: mol_type = other DNA
aatcagtctgtctccgatttcatgaaccagatgagcgacttagtatacgatgtg

SEQ ID NO: 35081 - DNA, 84 bp, synthetic construct
  source 1..84: mol_type = other DNA
aaggatactagttctaaggtggtcctggtctctgacgagacctacactcgggccaaggacatggtggatgactccatcgttctg

SEQ ID NO: 35082 - DNA, 57 bp, synthetic construct
  source 1..57: mol_type = other DNA
gtggtggtcgacaacgacctggatggcgaggccctgtccgatagcatctgcgactac

SEQ ID NO: 35083 - DNA, 33 bp, synthetic construct
  source 1..33: mol_type = other DNA
gaggtcgacgtggagggtctgcgggtggaatac

SEQ ID NO: 35084 - DNA, 264 bp, synthetic construct
  source 1..264: mol_type = other DNA
ggcggcgactctatctccgctatccgggtcatcagttttatacaaaagaatggcataagttgtagcgctaaggacgtgctgacatacaagaccccttatatgattgcccaaaacataggagagatcgacagggtgtcttacgatgccgttgagggcgaagtcgccctgctgccgattcaaagttatttcttcgaccaaattaacactaacgagttttcccaagagtttatcctcaaggctaagaatgacctcgacctggaaata

SEQ ID NO: 35085 - DNA, 99 bp, synthetic construct
  source 1..99: mol_type = other DNA
ttcgacgagctgaccaagatccacgacatgctgcgagtcaactatcgttatgagggggataacgtagtgcaggaaattcttccggtcgacacaaggatt

SEQ ID NO: 35086 - DNA, 99 bp, synthetic construct
  source 1..99: mol_type = other DNA
gaaatcaatgagatccggctgaccggcgacttcaacactgccatctctgatttcgtgaacgagtctattagttcgatagacatgaacaacaatctcatt

SEQ ID NO: 35087 - DNA, 72 bp, synthetic construct
  source 1..72: mol_type = other DNA
ccatatccctataagaactgggtcgaggatgtgaatagcctcgtggagaacatcagtgacaacgaaaagcag

SEQ ID NO: 35088 - DNA, 93 bp, synthetic construct
  source 1..93: mol_type = other DNA
aataccgaaagcaaggtagtgatagtcgatgacgatacatacgagcgggccgagctcctgaacgacgacgtgatcctcctgaatattagtgat

SEQ ID NO: 35089 - DNA, 120 bp, synthetic construct
  source 1..120: mol_type = other DNA
tttggcaacgacgacgtctatgggatgttcgccaacatctctttcgacgccggctcctgggccatatgtcagacaatctacgctggcgcttgcctgagcatcgtgcccgatgacatcaag

SEQ ID NO: 35090 - DNA, 255 bp, synthetic construct
  source 1..255: mol_type = other DNA
gtcgaccatggcgttacgcacaccatgatcacaactcaggttggcaagctgttcatggagtctgtcgaggacaccagcctcgatgtgctgatggttggcggcgagaaactgggcgacttcgagtctcccgaggattatctccttattgacgggtttggccctaccgagacttttgccttcatctcctccatcaacaataacgacaagattgatagtagcagcatcggcgacattaactacaacaccaagttctat

SEQ ID NO: 35091 - DNA, 33 bp, synthetic construct
  source 1..33: mol_type = other DNA
gaggtggaccgtagcggattgcacgttgaatac

SEQ ID NO: 35092 - DNA, 153 bp, synthetic construct
  source 1..153: mol_type = other DNA
ggaggagactccctgaccgccatcaaggtgctcagctacctcgaagactacaacgtgaccgctgccgacattttgtcccttagaacacccttcgctatagctgagagcatcaaggaagacaccctggacctggacgtgtatacactggaggat

SEQ ID NO: 35093 - DNA, 48 bp, synthetic construct
  source 1..48: mol_type = other DNA
aacaattataacgccatcggcatgtacgtgaataccctgccaatgctc

SEQ ID NO: 35094 - DNA, 75 bp, synthetic construct
  source 1..75: mol_type = other DNA
aaccagaacgtcagcgatttcatggagtacatgtccggcttggtctacgacgtgatgaagtacaactactatcca

SEQ ID NO: 35095 - DNA, 36 bp, synthetic construct
  source 1..36: mol_type = other DNA
gccaaggaatatggcatcgatagctcaatcctgttc

SEQ ID NO: 35096 - DNA, 72 bp, synthetic construct
  source 1..72: mol_type = other DNA
gatacccaggcctccgttctgatcgtcgacaactccacatacgaacacgcagagttactagctgacgatgct

SEQ ID NO: 35097 - DNA, 30 bp, synthetic construct
  source 1..30: mol_type = other DNA
atccggaaatatgggctttcggaagacgac

SEQ ID NO: 35098 - DNA, 282 bp, synthetic construct
  source 1..282: mol_type = other DNA
gacgctatcaagctcgacatggcctctatgaacgactacttcattgagcacggcgtgacccacaccgaaatttcgacgcaagtagcgaagctattcataagtcaagtcgacgagactagcctgaaggtactgacgacagggggagagaagctcggcggcagcgagattgatgttgactaccgctttgtcgactcttacgggccgaccgaagcctgcgttgacgtgacgtccattgattccgacgaacggatagatcctagttcaattggcttcctgctggat

SEQ ID NO: 35099 - DNA, 33 bp, synthetic construct
  source 1..33: mol_type = other DNA
gaggtggacaccgacaacctgagagcaggttac

SEQ ID NO: 35100 - DNA, 36 bp, synthetic construct
  source 1..36: mol_type = other DNA
agcgtgttctacaacctggtcaacaatatcgacttc

SEQ ID NO: 35101 - DNA, 108 bp, synthetic construct
  source 1..108: mol_type = other DNA
gacgattataaatacgacctctccctcgatgagatccggtccatctcgaaccaggacagtaccctgaaccactacttcgacgccatttcgaacttcaatcaaaacatc

SEQ ID NO: 35102 - DNA, 60 bp, synthetic construct
  source 1..60: mol_type = other DNA
agcctgggctgcatctacgccaccctcattgctgagaagctcgagaaagacagagtggtc

SEQ ID NO: 35103 - DNA, 93 bp, synthetic construct
  source 1..93: mol_type = other DNA
gaactgatctataatgccgacctcttttccaactcctacatggaacacatggctgcaaacattaagtctctgatctcgagcacatctgaactg

SEQ ID NO: 35104 - DNA, 45 bp, synthetic construct
  source 1..45: mol_type = other DNA
ctggacagtagctccaactctatcgccaacgatctgaaggagaac

SEQ ID NO: 35105 - DNA, 39 bp, synthetic construct
  source 1..39: mol_type = other DNA
gagttcgaccttgtccaagggtcggattttgccatcctc

SEQ ID NO: 35106 - DNA, 111 bp, synthetic construct
  source 1..111: mol_type = other DNA
gaatccaacgatttcactaagatcgtaaacgcatacggcatgaccgagattatggccaccgccaacatatgtaacactgcaaaaaaggataacagcattggcaaatccatg

SEQ ID NO: 35107 - DNA, 42 bp, synthetic construct
  source 1..42: mol_type = other DNA
aattcttatagctcactggacgtgaactacaccttcaatgat

SEQ ID NO: 35108 - DNA, 144 bp, synthetic construct
  source 1..144: mol_type = other DNA
gacgaggtcaacgatcttctggattccgtcaatggcgacggcgagaatgcttacaccgactatttcaagatggacctgtcctccttcctgaaggataactctatcacttacaaccagttctttgctagtgtcttcgcctatacc

SEQ ID NO: 35109 - DNA, 48 bp, synthetic construct
  source 1..48: mol_type = other DNA
attaagtattcaagcgggctgatcaactctgtgatgaaatacgacctg

SEQ ID NO: 35110 - DNA, 30 bp, synthetic construct
  source 1..30: mol_type = other DNA
aactacatcggatctagtgacctgaccatc

SEQ ID NO: 35111 - DNA, 135 bp, synthetic construct
  source 1..135: mol_type = other DNA
gtgaaatacccagacaatgctcttgtatcctataataatatctcctatagctatgctgaaggtgccttcatcgccgataagattagaaaactgctgatcgatttcggagttgagcccggggattccgttagttgc

SEQ ID NO: 35112 - DNA, 108 bp, synthetic construct
  source 1..108: mol_type = other DNA
gaagacagcgattctcacgtagtgatcgcatccgacgagacctacgacaaggtcaacagcctctgcgaggacatcattctgaacatctccgacctgttcaacgacgac

SEQ ID NO: 35113 - DNA, 96 bp, synthetic construct
  source 1..96: mol_type = other DNA
agcaatatgaacagctctgacgtctacgccctgtttgcttccatcggattcgatgttggagcaatcaagtccattttcgtgccactctactgcggc

SEQ ID NO: 35114 - DNA, 132 bp, synthetic construct
  source 1..132: mol_type = other DNA
gtcaccggcggcgagaagcttggagaagttgactactccggtaactacctcttcatcgactcctatgggcctaccgaggcttgcgtgtcggttactgcgatagaggagaaggataaaatcgattcctcctca

SEQ ID NO: 35115 - DNA, 63 bp, synthetic construct
  source 1..63: mol_type = other DNA
acctatatagacagctttaacatctccgctggcgacatcctctctctccgcacaccctatgct

SEQ ID NO: 35116 - DNA, 57 bp, synthetic construct
  source 1..57: mol_type = other DNA
tccggagagtacagcgtggacgacatcgggacagcactgggcgtgatgttcgacgtc

SEQ ID NO: 35117 - DNA, 84 bp, synthetic construct
  source 1..84: mol_type = other DNA
agttctgacgtgttcaaacgagatctgtacaccatcctgggaggcagagttgttggagtggacgacagcttcctcaaggcatca

SEQ ID NO: 35118 - DNA, 48 bp, synthetic construct
  source 1..48: mol_type = other DNA
atcgacgagaacgacctgctggacaacatgggcgacctcattgctgat

SEQ ID NO: 35119 - DNA, 84 bp, synthetic construct
  source 1..84: mol_type = other DNA
agctacaacgccatcctgaatgatatgctctgcgttaaggctctgtctgacattagctacgtctcctccaacgacctcgttctg

SEQ ID NO: 35120 - DNA, 108 bp, synthetic construct
  source 1..108: mol_type = other DNA
cccgataaggacctggtgacctatatgaaccggagctactcctacggcgagtcagctttcattgccgacaagatcgccaagagccttaccgacctgggagtcgaaagt

SEQ ID NO: 35121 - DNA, 45 bp, synthetic construct
  source 1..45: mol_type = other DNA
gtgagcgacaagacctacaaccgggccgacgaaatctccgattgc

SEQ ID NO: 35122 - DNA, 123 bp, synthetic construct
  source 1..123: mol_type = other DNA
tctctggacgagaacgacgtctacggcctgtactccgccatcgggttcgacatgagcacattcgtcatcgatgttgtcataactgccggagcatgcctcgctgtgattcccgacgagatcaaa

SEQ ID NO: 35123 - DNA, 72 bp, synthetic construct
  source 1..72: mol_type = other DNA
gatatgctgaaactcaatgattacttcatcgaccacaacgtctcccacgccgctataccgacccctgtggcg

SEQ ID NO: 35124 - DNA, 174 bp, synthetic construct
  source 1..174: mol_type = other DNA
ttcatgaagtccgtggacgatacatcacttgacgtcctgcatatcggcggcgagaagctgggagattttgtttgttcggaagcttatcgagtgattgactcttacgggcccaccgagtccttcgcatatgtttgtagcatcgataattccgacaaagtctcgccatcctccgat

SEQ ID NO: 35125 - DNA, 93 bp, synthetic construct
  source 1..93: mol_type = other DNA
ctcacatacctggacggtttcaatatttccgcgggagacgtcctgggcttgaggaccccttacgcaatagcaggatcggttcgaaacatttct

SEQ ID NO: 35126 - DNA, 75 bp, synthetic construct
  source 1..75: mol_type = other DNA
tccaacgacgtgttcaagcgggacctgttcaccgtcctcgacggcggcgtggtagatctggacgatagcttcctg

SEQ ID NO: 35127 - DNA, 123 bp, synthetic construct
  source 1..123: mol_type = other DNA
gtgatggataacgacaactccgacgtgaacatcatcaagtctgtccgcgagaacattgattccgacgacggcgacctcctggatgatatgtccgacctgatcgccgatctctctgctggtatt

SEQ ID NO: 35128 - DNA, 99 bp, synthetic construct
  source 1..99: mol_type = other DNA
ttcgaagagctgtccgacatcagctatgtgtcttgcgatgatctggcacttctcgacgcttacaacgacaccgcccacgtgctggactacgtggatgtg

SEQ ID NO: 35129 - DNA, 36 bp, synthetic construct
  source 1..36: mol_type = other DNA
gaggacaagagctatacctacggcgaatccgcattc

SEQ ID NO: 35130 - DNA, 30 bp, synthetic construct
  source 1..30: mol_type = other DNA
attaatgagatcgccagcatgctgaacggg

SEQ ID NO: 35131 - DNA, 105 bp, synthetic construct
  source 1..105: mol_type = other DNA
cccaaggaatacgtgctgtccgatgtatatggacccactgagacagtgctgagcatcacctccaccgacgtcgtggacaagattgacgactctagtgttggtttt

SEQ ID NO: 35132 - DNA, 57 bp, synthetic construct
  source 1..57: mol_type = other DNA
tccggccggtacaagatcgacgctattatctctgccctggagagcatgctcaacgtg

SEQ ID NO: 35133 - DNA, 87 bp, synthetic construct
  source 1..87: mol_type = other DNA
tccgatgacgtttacggaatgcactgctcctacgtcttcgacatgcacgtgcacgcgctttatagtccgatcgtttctggaggttca

SEQ ID NO: 35134 - DNA, 87 bp, synthetic construct
  source 1..87: mol_type = other DNA
gccgagtccgggatggagaccacaattaagctgctctgcttcggcggaatgaagctaggcgaactgaacgctcccgactctatcggc

SEQ ID NO: 35135 - DNA, 48 bp, synthetic construct
  source 1..48: mol_type = other DNA
tccgagaacctggctatatccacaagcattttcgccaatcggagaatc

SEQ ID NO: 35136 - DNA, 30 bp, synthetic construct
  source 1..30: mol_type = other DNA
gacgacagcgtggccaacgatgatttgtct

SEQ ID NO: 35137 - DNA, 72 bp, synthetic construct
  source 1..72: mol_type = other DNA
gtcctggactccgagtcatatggcatcaccttcaatgtgtctcgcgtcggggactattacgtcattaatggc

SEQ ID NO: 35138 - DNA, 54 bp, synthetic construct
  source 1..54: mol_type = other DNA
gagctggacggcaaggtcgacctcggctttgtttatgcctctcgggattccttc

SEQ ID NO: 35139 - DNA, 57 bp, synthetic construct
  source 1..57: mol_type = other DNA
atcgacgaagtatcctcgctgctcaacgacgtcgatggatacgcaggctctgtttcc

SEQ ID NO: 35140 - DNA, 90 bp, synthetic construct
  source 1..90: mol_type = other DNA
acagtttctagcttcctgaacgcagtgttcgcctacgcttactcccggttcatcggcggagacaaagtatattacacttttaccgtcaat

SEQ ID NO: 35141 - DNA, 75 bp, synthetic construct
  source 1..75: mol_type = other DNA
accaacgccagtgtcggggacttcctgagcggggtctctaatctcatcctggaatctatgggtaactccgtgtac

SEQ ID NO: 35142 - DNA, 102 bp, synthetic construct
  source 1..102: mol_type = other DNA
tctgagttcggcttgagcaactctattactttcgaatataactacgatctcaacgatacaaccggagtcggcgacgagatcgtgttctcggatcgcgcggat

SEQ ID NO: 35143 - DNA, 36 bp, synthetic construct
  source 1..36: mol_type = other DNA
aacgacctggacgatggcttcttagtatcacttaat

SEQ ID NO: 35144 - DNA, 102 bp, synthetic construct
  source 1..102: mol_type = other DNA
atggattccatagatgagacaagcctcgacgtgctggtcaccggcggcgagaagctgggagagttttcatctcccgaatcttactctctgatcgactcatat

SEQ ID NO: 35145 - DNA, 51 bp, synthetic construct
  source 1..51: mol_type = other DNA
gacagcatggataacctcgataaactggactactctagcgacggcttcgtg

SEQ ID NO: 35146 - DNA, 66 bp, synthetic construct
  source 1..66: mol_type = other DNA
atcagcttcaacgacttcctgaaccaggttaacgatgtctacgattccgcgattcagcattcgatg

SEQ ID NO: 35147 - DNA, 51 bp, synthetic construct
  source 1..51: mol_type = other DNA
aatatcgagaactacaccgactacgcctgcttctatagcgtatacgatgac

SEQ ID NO: 35148 - DNA, 126 bp, synthetic construct
  source 1..126: mol_type = other DNA
aatatttacgaggactacctggagctcatctacaacgcagatctattttccaactcctatatggagcacatggccgccaacatcaagtctttgataaactctgcttccgaactgcccaacatcatg

SEQ ID NO: 35149 - DNA, 54 bp, synthetic construct
  source 1..54: mol_type = other DNA
aaggacatcgatattctgtccgacaacgagaagaagaccatcagcgagttctct

SEQ ID NO: 35150 - DNA, 60 bp, synthetic construct
  source 1..60: mol_type = other DNA
gagctggactctagttccaatagcattgccaacgatctcaaggaaaactacggcattggc

SEQ ID NO: 35151 - DNA, 48 bp, synthetic construct
  source 1..48: mol_type = other DNA
gatgactgcgagttcgacctagtccaaggttctgactttgcaatcctg

SEQ ID NO: 35152 - DNA, 138 bp, synthetic construct
  source 1..138: mol_type = other DNA
ggctccaagctgaacgctttgccggaaagcaacgacttcaccaagattgtgaatgcttacggcatgaccgagatcatggcaactgccaacatctgcaataccgccaaaaaggataacagcatcggcaaatccatggcc

SEQ ID NO: 35153 - DNA, 60 bp, synthetic construct
  source 1..60: mol_type = other DNA
gagtccgtgctcatcgacgacaacttcgtcgggcttggcggcaactctctgagcgctatg

SEQ ID NO: 35154 - DNA, 42 bp, synthetic construct
  source 1..42: mol_type = other DNA
aactcatactcttcactggacgtgaactacaacttcaataat

SEQ ID NO: 35155 - DNA, 156 bp, synthetic construct
  source 1..156: mol_type = other DNA
gaacgggacgaggtcaacgatctgctggattccgtcaatggcgacggcgaaaacgcctacaccgactacttcaagatggatcttagctccttcctgaaggacaacagtatcacttacaaccagttttttgcaagcgtattcgcttatacactgagt

SEQ ID NO: 35156 - DNA, 33 bp, synthetic construct
  source 1..33: mol_type = other DNA
ctgatcgaggatggccgcggtcacgtaaacctg

SEQ ID NO: 35157 - DNA, 57 bp, synthetic construct
  source 1..57: mol_type = other DNA
ttcatcaagtatagctccggcctgattaattctgttatgaaatatgatttatactcc

SEQ ID NO: 35158 - DNA, 243 bp, synthetic construct
  source 1..243: mol_type = other DNA
aacgagatcaattatattgggtcttctgacctcacaatcctcgataactacaaccagaccgagcacgacctgttttacaatgacatcatggacgcctttaacgacaacctggtcaagtaccctgataacgcccttgtgtcctacaacaacatttcttatagctatgccgagggcgccttcatcgccgacaagatccgcaagttgctcattgactgcggagttgaacccggagactgtgtttcc

SEQ ID NO: 35159 - DNA, 120 bp, synthetic construct
  source 1..120: mol_type = other DNA
atcctggaggattccgatagccacgtggtcattgcctccgacgaaacctacgaccgggttaattctttatgtgaagggattatcctgaacatcagcgacctcttcaacgacgacatcgga

SEQ ID NO: 35160 - DNA, 129 bp, synthetic construct
  source 1..129: mol_type = other DNA
gctgaatacgatttggacgacggcgacgtctatgggatgttcagcaacattggcttcgacgttggcaactttgcaatcaatgtcgtgatgtgcgccggagcctgtctgaacgtcatccccgaagagatt

SEQ ID NO: 35161 - DNA, 54 bp, synthetic construct
  source 1..54: mol_type = other DNA
ctgaagctgaacgactatttcatctcccacaatgtgtctcatacctacgttact

SEQ ID NO: 35162 - DNA, 165 bp, synthetic construct
  source 1..165: mol_type = other DNA
atggaaaacgtggataaaacctccctggacatcctcctggtcggcggcgagaagctcggcaatctgatcatgcccaaggattaccacatcattgacgcctacggccccaccgagtcattcactttcattagccttatggacaacaacgacaagctggattcatcc

SEQ ID NO: 35163 - DNA, 60 bp, synthetic construct
  source 1..60: mol_type = other DNA
tacatcgatggcttcaacattagcgccggcgacatcctctccctgagaaccccttacgcc

SEQ ID NO: 35164 - DNA, 60 bp, synthetic construct
  source 1..60: mol_type = other DNA
atctccggagagtacagcgtggacgacattggaaccgccctgggcgtcatgttcgatgtg

SEQ ID NO: 35165 - DNA, 90 bp, synthetic construct
  source 1..90: mol_type = other DNA
attagctctgacgtgttcaagcgggatctgtacaccatcctgggcggtcgggtggtcggtgtcgacgactcctttctcaaagctagtgcc

SEQ ID NO: 35166 - DNA, 48 bp, synthetic construct
  source 1..48: mol_type = other DNA
gacattgacgagaatgatctcctggacaacatgggcgatctgatcgcc

SEQ ID NO: 35167 - DNA, 96 bp, synthetic construct
  source 1..96: mol_type = other DNA
atcctgaacgacatgctctgtgttaaggctctcggcgacatttcctacgtgtctagtgacgacctggtgctgctggatgagttcaacaataccgag

SEQ ID NO: 35168 - DNA, 108 bp, synthetic construct
  source 1..108: mol_type = other DNA
cccgacaaggacctggtgacatacatgaaccggtcttactcctatggcgaaggggccttcatcgccgacaaaatcgctaagagcctgaccgatctcggtgtcgaatct

SEQ ID NO: 35169 - DNA, 48 bp, synthetic construct
  source 1..48: mol_type = other DNA
gtgagcgacgagacctacaaccgggccgatgaaatctccgactgtgtt

SEQ ID NO: 35170 - DNA, 120 bp, synthetic construct
  source 1..120: mol_type = other DNA
tccctggacgagaacgatgtatacggattatactctgctattgggtttgacatgagcacattcgtcattgacgtagtgatcacggccggcgcatgtctggccgtcatccccgacgaaatt

SEQ ID NO: 35171 - DNA, 219 bp, synthetic construct
  source 1..219: mol_type = other DNA
attgaccataacgtgtctcacgccgccatccctactcctgtggctaaactgttcatgaagtccgtcgacgacacatccctcgacgtcctgcacatcggtggcgagaaactgggcgactttgtctgttctgaggcctatcgcgttattgatagctacggaccaaccgagtcattcgcttacgtctgctcaatcgacaactctgataaggttgatcctagt

SEQ ID NO: 35172 - DNA, 84 bp, synthetic construct
  source 1..84: mol_type = other DNA
acctacctggacgggtttaacatttccgccggagatgtcctgggtctcaggaccccatacgctattgctggtagttcggtccgt

SEQ ID NO: 35173 - DNA, 33 bp, synthetic construct
  source 1..33: mol_type = other DNA
agcatcgaggatattaagtccgccctgaacgtc

SEQ ID NO: 35174 - DNA, 84 bp, synthetic construct
  source 1..84: mol_type = other DNA
agcaacgacgtgttcaagcgggacctctttaccgtgctggatggcggagtcgttgaccttgatgactccttcctgagagcaagt

SEQ ID NO: 35175 - DNA, 114 bp, synthetic construct
  source 1..114: mol_type = other DNA
gtgatggacaatgacaacagtgatgtgaacatcatcaagagcgtccgcgagaacatcgactccgacgacggcgacctgctcgatgacatgagcgatctgatcgccgatctttcc

SEQ ID NO: 35176 - DNA, 96 bp, synthetic construct
  source 1..96: mol_type = other DNA
ttcgaggagctgagcgacatctcttacgtgtcctgcgacgacctggcccttctcgacgcttataacgataccgcccacgtcctggactacgttgac

SEQ ID NO: 35177 - DNA, 30 bp, synthetic construct
  source 1..30: mol_type = other DNA
attaacgagatcgccagcatgctgaatggc

SEQ ID NO: 35178 - DNA, 51 bp, synthetic construct
  source 1..51: mol_type = other DNA
aacgtccgggatacaagcattaaacacatccaagcgattggggagaaacta

SEQ ID NO: 35179 - DNA, 108 bp, synthetic construct
  source 1..108: mol_type = other DNA
gtccctcctaaggaatacgtgctctctgacgtttacgggcctaccgagaccgtgctgtccattacaagcactgatgtggtggacaagatcgacgacagctcagttggc

SEQ ID NO: 35180 - DNA, 60 bp, synthetic construct
  source 1..60: mol_type = other DNA
atctctggccggtacaagatcgacgctattattagcgccctcgagtccatgctggatgtc

SEQ ID NO: 35181 - DNA, 48 bp, synthetic construct
  source 1..48: mol_type = other DNA
agcgtctccgacaaggaagatgtgccctacttggtcaagggttctaaa

SEQ ID NO: 35182 - DNA, 30 bp, synthetic construct
  source 1..30: mol_type = other DNA
atcgtggagaacaacgaggactacaatctg

SEQ ID NO: 35183 - DNA, 87 bp, synthetic construct
  source 1..87: mol_type = other DNA
gacgtttacggcatgcactgctcttacgtcttcgacatgcatgtgcacgccctgtatagccccatcgtgtccggcggaagtctctat

SEQ ID NO: 35184 - DNA, 174 bp, synthetic construct
  source 1..174: mol_type = other DNA
gccgagagcggcatggagacaaccatcaagctgctgtgtttcggtggaatgaagctgggcgagctcaacgccccggactctattggccccttcgagagctacggaccatccgagaatctggctatcagtactagcatctttgccaatcggaggattgataacagttcaattgga

SEQ ID NO: 35185 - DNA, 51 bp, synthetic construct
  source 1..51: mol_type = other DNA
gacgactccgtcgcggacgaccttagcctgatctctgacgtgtactctctc

SEQ ID NO: 35186 - DNA, 39 bp, synthetic construct
  source 1..39: mol_type = other DNA
agttccgatgtgctggacagcgagtcttacggaatcacc

SEQ ID NO: 35187 - DNA, 60 bp, synthetic construct
  source 1..60: mol_type = other DNA
ggagagctcgacggcaaggtggacctggggttcgtctatgcctcgcgcgattcctttgat

SEQ ID NO: 35188 - DNA, 63 bp, synthetic construct
  source 1..63: mol_type = other DNA
gacatcgacgaggtttcgagtctgctgaacgatgtcgatggttacgctggctccgtttcatta

SEQ ID NO: 35189 - DNA, 117 bp, synthetic construct
  source 1..117: mol_type = other DNA
atcaccgtgtctagctttctgaacgccgtcttcgcctacgcttatagtcggttcattggcggtgacaaagtgtactatacattcaccgtgaacggcaggcacgaggactactcacag

SEQ ID NO: 35190 - DNA, 81 bp, synthetic construct
  source 1..81: mol_type = other DNA
tgcacaaatgcgtctgtcggagacttcttgtcgggggtctccaacctgatacttgagtcaatggggaactcagtgtacccc

SEQ ID NO: 35191 - DNA, 120 bp, synthetic construct
  source 1..120: mol_type = other DNA
tccgagttcggcctgtctaactccattacctttgagtacaactacgatctgaatgacacaaccggcgttggagacgaaatagtatttagtgatagggcagattgcgttagcgacctcctg

SEQ ID NO: 35192 - DNA, 51 bp, synthetic construct
  source 1..51: mol_type = other DNA
ttcgtgaacgatctcgacgacggcttcctcgtgtccctcaatcacgtggat

SEQ ID NO: 35193 - DNA, 108 bp, synthetic construct
  source 1..108: mol_type = other DNA
tccattgacgagacctccctggatgtcctggtgactggcggcgagaagctcggcgagttcagtagccctgagagctattctcttatcgactcttacggtcctactgag

SEQ ID NO: 35194 - DNA, 36 bp, synthetic construct
  source 1..36: mol_type = other DNA
gtggacagcatggataacctggacaagctggattac

SEQ ID NO: 35195 - DNA, 126 bp, synthetic construct
  source 1..126: mol_type = other DNA
accatcatcaacacccagtcttggggcggcgctctgaagacatccgacgacaggcgtgtcaattatgccggctgggacagcagtcactgggatacaaacactactggcggagatgctggagcaatc

SEQ ID NO: 35196 - DNA, 57 bp, synthetic construct
  source 1..57: mol_type = other DNA
ctgtacaacgtcaccttcatcaactgcaatgggtccgggcgggggggagcagtgttc

SEQ ID NO: 35197 - DNA, 279 bp, synthetic construct
  source 1..279: mol_type = other DNA
tgcaatttcacaaacaacgctgccctcggcactgacatcagcacactgttcctgaaccttaccgatttaaaccaaattaaatatggtacttccctgcctgataaggattcctttgggctgaacaaggtcttcgtgttgatccaatacaacggcgaccagaaggttagctacacgctatattcaataaaccctgataatgacgaatggaccatcctggagttcacaaccgagacaggcccttctcccactgactgggtgaccgacgagtactttggcggc

SEQ ID NO: 35198 - DNA, 147 bp, synthetic construct
  source 1..147: mol_type = other DNA
ggcacagtggataactgccggtttatagatagtaatagtgccaggcgcggcggcggtgcttacatgactggctctgacaacattgtcttcaagaatagctacttcgagaattgtacatccggaaccaacggcggtggtcttgattgg

SEQ ID NO: 35199 - DNA, 78 bp, synthetic construct
  source 1..78: mol_type = other DNA
gccaactacggccgtgtcatcaactgcaccttcaacaacaccagagctgcgcgctctgccggagccatctactacgat

SEQ ID NO: 35200 - DNA, 132 bp, synthetic construct
  source 1..132: mol_type = other DNA
accgtcatcaacacaaagtcctacggaggaacgttaaaacacagcacctacggccggaacaacgtgatctatgctggctgggatgcatctcattgggatactaatacaacaggcggtgacgcaggtgctatc

SEQ ID NO: 35201 - DNA, 60 bp, synthetic construct
  source 1..60: mol_type = other DNA
tatgtgtacaacgctacttttatcaataccacaagccaagggagaggaggagcagtcttt

SEQ ID NO: 35202 - DNA, 138 bp, synthetic construct
  source 1..138: mol_type = other DNA
agctgcaagttcattggcgatgaggccctgggcatcgcaactaacacctggaaggattatacaaagaaccgggacgacaataaccccgacacaaagctcgactacaaactgaccggacacggcggtgcaatcgctttt

SEQ ID NO: 35203 - DNA, 87 bp, synthetic construct
  source 1..87: mol_type = other DNA
cacgatgtcgtgatcaaaaagtccgaatttatctacaactatgctaggcgggacggcggagccattaacatcgccgagaatagcttt

SEQ ID NO: 35204 - DNA, 81 bp, synthetic construct
  source 1..81: mol_type = other DNA
gccaccatcgaagattgcattttcaccaataattcctgtggtgacgacggaggcgcaattaactgggaggggaaccttggc

SEQ ID NO: 35205 - DNA, 252 bp, synthetic construct
  source 1..252: mol_type = other DNA
atttataattctactttcaccatcaccaatgctgttggactaaatggccatcatagcaagggcggggccgtgaacgtgatcggcgactattccgttattaccaaatccaagttccagatgacctccgccgctgtggatggaggcgcaatttacgccaccggcaattatatcaatatcactgactcgtcattcaacaagtgcaatgtcagccacacctacgaggccaaatacgaccatggtggtggcgctatt

SEQ ID NO: 35206 - DNA, 39 bp, synthetic construct
  source 1..39: mol_type = other DNA
accttcgatcaaaccaacgccagaatcggtggaactctg

SEQ ID NO: 35207 - DNA, 30 bp, synthetic construct
  source 1..30: mol_type = other DNA
ttcgtgtcgacaagtggaggctctgtgtac

SEQ ID NO: 35208 - DNA, 231 bp, synthetic construct
  source 1..231: mol_type = other DNA
aacaattcggaaatctctatgtctaatgccacactgtctggcggggctgtgtacattgaggggcaatacgctacaatcgaaaacagtaatctgtccaatgcggtggccaaaggcagttcctataccgcttccaacctcggtggcatcgtgtacattcacggcaatgatgccagcatcataggaagtcgctttgcaaatgggcaagcgtaccacgggggtatcgtctatctc

SEQ ID NO: 35209 - DNA, 108 bp, synthetic construct
  source 1..108: mol_type = other DNA
tgtgtcatcaagaacagtgtttgttcaaaagaggccggcggcatctatttctccaataacaacctgaagaccgattacgtgtacctgcctaaggacatccggatgatc

SEQ ID NO: 35210 - DNA, 72 bp, synthetic construct
  source 1..72: mol_type = other DNA
gactccaccttcgttaagtcatacgccggggacggtggcgcagtctactattacgcttccctctctaacccc

SEQ ID NO: 35211 - DNA, 78 bp, synthetic construct
  source 1..78: mol_type = other DNA
ctgaaaatcgagaattgcaccttcattaagaacattgcttattacaacggcggagccgtgctctacctgatcaacagc

SEQ ID NO: 35212 - DNA, 162 bp, synthetic construct
  source 1..162: mol_type = other DNA
gtcatcctgccaagcaagcgcaccgatgtgaccatgcaaggaacaacgaacaagttcatttctgagagtctgtttgaactcaacgaggactacgagttcgccattacacattactccgacattgaaacacccgtgatcactgtatatttagaccggcctcga

SEQ ID NO: 35213 - DNA, 33 bp, synthetic construct
  source 1..33: mol_type = other DNA
gtcatcgtgaccgaagaggcgttcttcaccaac

SEQ ID NO: 35214 - DNA, 69 bp, synthetic construct
  source 1..69: mol_type = other DNA
aagggctttaacaatacattcatcgacaacgtggccgagacttctggagcagctctcgcctggttgaat

SEQ ID NO: 35215 - DNA, 132 bp, synthetic construct
  source 1..132: mol_type = other DNA
ttgaaaattatcgacaccgaatcccactccaacggcgccctgtccctcgtcaactgtaacgacagcaaaatctacaacgttaccttcaagggcgctatcaccatacggaatggtggcagtatcagctgggtg

SEQ ID NO: 35216 - DNA, 162 bp, synthetic construct
  source 1..162: mol_type = other DNA
agcacaaacggcattatagatttatgtgacttttttgatagcgcggcctcttacaatggcggcgctatcttcctctacaacatcgacaacttcaacgtcagcaactccaacttttccaacacccacgccctctacggcaatggcggaggcatattcgtgaat

SEQ ID NO: 35217 - DNA, 51 bp, synthetic construct
  source 1..51: mol_type = other DNA
ctctcctttgaaagctatatggctgccgaagattacgccggaggcatcttc

SEQ ID NO: 35218 - DNA, 186 bp, synthetic construct
  source 1..186: mol_type = other DNA
tccaccattgcaaacagtaaatttaacggacccgacgctatctgggttaatgagtccgctatcgcctatctgattaacaactacatcaccgggagcaaccctaacaagaatatcacatacctcgagaagccatatgatgcccggtacaacaaatacgattacgccgtctggaatgacggcgatctg

SEQ ID NO: 35219 - DNA, 30 bp, synthetic construct
  source 1..30: mol_type = other DNA
tggactaacacaaccacctggatcctgaac

SEQ ID NO: 35220 - DNA, 90 bp, synthetic construct
  source 1..90: mol_type = other DNA
agcgttaatggagacggcgagaacgcctacaccgactatttcaagatggatctgtcttcctttctcaaggacaacagtatcacatacaac

SEQ ID NO: 35221 - DNA, 87 bp, synthetic construct
  source 1..87: mol_type = other DNA
aaatactcatcggggctgattaactctgtcatgaaatacgacctgtattcatttcggatactcgttaacgactacgacctcaatagc

SEQ ID NO: 35222 - DNA, 51 bp, synthetic construct
  source 1..51: mol_type = other DNA
atcggatttgacgttggcgcgattaaatctatcttcgtccctctctactgc

SEQ ID NO: 35223 - DNA, 39 bp, synthetic construct
  source 1..39: mol_type = other DNA
gtggactatagcggcaactacctgttcatcgattcctac

SEQ ID NO: 35224 - DNA, 54 bp, synthetic construct
  source 1..54: mol_type = other DNA
ttcgacgtgactctggctatgtattcgtcaatcgtcgttggaggagctacaaca

SEQ ID NO: 35225 - DNA, 57 bp, synthetic construct
  source 1..57: mol_type = other DNA
gacgaagtatcgtcactcctgaacgacgtcgatggatacgccggttccgtttctctg

SEQ ID NO: 35226 - DNA, 66 bp, synthetic construct
  source 1..66: mol_type = other DNA
aacgcctctgttggcgacttcctgagcggagtctccaacctgatcctcgagagcatgggaaatagt

SEQ ID NO: 35227 - DNA, 75 bp, synthetic construct
  source 1..75: mol_type = other DNA
ggccagctgatcatccacggcaatggggccattctggaatgtggcgatgaatacggcaataacaaggggaagctg

SEQ ID NO: 35228 - DNA, 138 bp, synthetic construct
  source 1..138: mol_type = other DNA
tttgacgtctacgaacccggcggtgtcattcacaattacaacaccgcttacttccggggctgcgccttcctcgcgaactcggcaaagacagccatcggcctgtatactgctggcggagtgctttatgccgagccttat

SEQ ID NO: 35229 - DNA, 48 bp, synthetic construct
  source 1..48: mol_type = other DNA
gagctgatgaatgccctctgctgtatcaacaccctgacacctggaatg

SEQ ID NO: 35230 - DNA, 75 bp, synthetic construct
  source 1..75: mol_type = other DNA
gtgcccatcacaatcaatggaaacggcgccaccattaagcggaccggtgacaagaacgatgacgaccacttcgct

SEQ ID NO: 35231 - DNA, 36 bp, synthetic construct
  source 1..36: mol_type = other DNA
accgtgttcgcatacctggctagcatctgccaagcc

SEQ ID NO: 35232 - DNA, 66 bp, synthetic construct
  source 1..66: mol_type = other DNA
agcgtcttcaacgacttgattcaatacaccgataacgtgcactacaacaatatgacccacctgatc

SEQ ID NO: 35233 - DNA, 69 bp, synthetic construct
  source 1..69: mol_type = other DNA
agcttcaacaacatgctggtgacccggaacatgattatcaataacgactgggcctccacctactactct

SEQ ID NO: 35234 - DNA, 48 bp, synthetic construct
  source 1..48: mol_type = other DNA
ctctccgccctgatcgcttacaataccctgattcacaacttgaactcc

SEQ ID NO: 35235 - DNA, 51 bp, synthetic construct
  source 1..51: mol_type = other DNA
atcatcaccgcttataacctgatgtggtcatactctatcacctccaatccc

SEQ ID NO: 35236 - DNA, 30 bp, synthetic construct
  source 1..30: mol_type = other DNA
aacgtggacatcctctacctgaacaacctg

SEQ ID NO: 35237 - DNA, 30 bp, synthetic construct
  source 1..30: mol_type = other DNA
ggttcttttagccccgacctgaaaaccaag

SEQ ID NO: 35238 - DNA, 33 bp, synthetic construct
  source 1..33: mol_type = other DNA
cccctgggcatggacagtgcctacgctctcatc

SEQ ID NO: 35239 - DNA, 75 bp, synthetic construct
  source 1..75: mol_type = other DNA
gtgtataccgataatggcggcctcgtgaagtactctgacctgtactcctgggtcagcaacgagatcctgaactat

SEQ ID NO: 35240 - DNA, 96 bp, synthetic construct
  source 1..96: mol_type = other DNA
cccatacccgatattcccgagatcatccccaacatccccgaagtaaaccctaacattcccaacattccggaagtcaatccaaacatccctaacatt

SEQ ID NO: 35241 - DNA, 60 bp, synthetic construct
  source 1..60: mol_type = other DNA
aacctgcccgacggcgacatgatctatctctccattctgaagatgctttactctgagtat

SEQ ID NO: 35242 - DNA, 105 bp, synthetic construct
  source 1..105: mol_type = other DNA
tacatccccaaagttaaccctaacgccccaaaagtgaacccgaacgctcctaaagtcaaccctaatgcacccaaggtcaatcctaacgcccctaaagtaaatccc

SEQ ID NO: 35243 - DNA, 45 bp, synthetic construct
  source 1..45: mol_type = other DNA
taccacgacctgatgctcctgaagctttatgattacaacctctac

SEQ ID NO: 35244 - DNA, 30 bp, synthetic construct
  source 1..30: mol_type = other DNA
atcaaccacatctacacgcaaaactcgatc

SEQ ID NO: 35245 - DNA, 51 bp, synthetic construct
  source 1..51: mol_type = other DNA
gcctatgataagaacggcaacatgatttgctctaacgactactacatcaac

SEQ ID NO: 35246 - DNA, 138 bp, synthetic construct
  source 1..138: mol_type = other DNA
cactcctacgagcctaatgacgtcgtgtataccgccgatggaaaggctatcctcgccaaggacatggagtacatgaacttccacggcggcttctctgtggacatgtacggcagaccctactacgcaagcctgaacgat

SEQ ID NO: 35247 - DNA, 63 bp, synthetic construct
  source 1..63: mol_type = other DNA
gacgatggctttgtgcacgactgccatgggaacctgctcttcaagcaaccactaaagggaaac

SEQ ID NO: 35248 - DNA, 210 bp, synthetic construct
  source 1..210: mol_type = other DNA
gataaagtatctttcttcgagaagtacatcggcaactcctttttccaccctctggctactctgtcctttgtggacgacatcaacgtcaaggataccattgccggagtctctcatcccgtgatcttcaactgccggaccaacctcgagctcgctcacgccctgaggacaatcaataattacggcgccaaggggagcgagatcataattaac

SEQ ID NO: 35249 - DNA, 45 bp, synthetic construct
  source 1..45: mol_type = other DNA
gagtgctacatcggcctgaagaaagagttcagcctcatcaacaag

SEQ ID NO: 35250 - DNA, 264 bp, synthetic construct
  source 1..264: mol_type = other DNA
gactttgacaagatcattgacctgtactacgacctctggtctaacccttccgtcgtgaatcccctggacggggtcaacccaaacgacctgagcaacgatgagctcggaaaactgattatcgacaacatggctaggattctcctgatcgggttcgtggatacacgtctccaacaccgtttcccaacgctgtggactaacgccgaggaactccaccttagctacatacaagttaaagtctccatcctgatgaagcagaacacattg

SEQ ID NO: 35251 - DNA, 99 bp, synthetic construct
  source 1..99: mol_type = other DNA
tacgtgaaggagggctacgattacctcgtggtttggggccacatttcaccaatcaaggtcgccagcatccagaaccacttcctgaaatatgatgtagac

SEQ ID NO: 35252 - DNA, 201 bp, synthetic construct
  source 1..201: mol_type = other DNA
ttgttgaagtaccctaatatgtataaattcatgatacctaacattgtttccggagtgcagtccatcatctccgggatgatgagagacaacctcattaacgaatccgtctataactactggtgtgatgagatactatcgcgttacgtgaacgtctataccaaagacgtgcttctgttttacaccgatatccataattacctc

SEQ ID NO: 35253 - DNA, 54 bp, synthetic construct
  source 1..54: mol_type = other DNA
atggacaaccgcgtcatgctcttcgaggataagatcaacagctaccccaatgct

SEQ ID NO: 35254 - DNA, 45 bp, synthetic construct
  source 1..45: mol_type = other DNA
caatatggggacattatcgatgccctggacgtctacgattctgtg

SEQ ID NO: 35255 - DNA, 72 bp, synthetic construct
  source 1..72: mol_type = other DNA
gaaagccttaaggacgcatataatcagatctttgacaaactgtccgagtttcgggataacgatggactgttg

SEQ ID NO: 35256 - DNA, 78 bp, synthetic construct
  source 1..78: mol_type = other DNA
gagcacaacacctacgtggcctacaagaacggcaacttcattgtcaccaaggagtactatatcaatgaccagaaaccc

SEQ ID NO: 35257 - DNA, 234 bp, synthetic construct
  source 1..234: mol_type = other DNA
aacagcaatttcactgattctttcaccgagaataacaatggcgaaaattttggaggcacaatcttcattactggacatgatgtcgacttagttggctgtaatttcaacaacagcgaagcacgttcgtcggatggtggaaccatctacatcatcggccacgacgtccgtgtcataaacagtacaatcgacaacagttccgcccggaagggaggcgctatctatatcgatggagtc

SEQ ID NO: 35258 - DNA, 150 bp, synthetic construct
  source 1..150: mol_type = other DNA
aacaccttcgcaaagacaggcaattcctacactgctaataacctgggcggcgccgtgtacattaagggcaataacgctaacatcatcgggagcgaaatcgagaacgcctctgcgtaccaagggggaggcctctatctggagggcgattat

SEQ ID NO: 35259 - DNA, 186 bp, synthetic construct
  source 1..186: mol_type = other DNA
aattgcaacttcaccaacaacagcgccggcgatgacggcggcgctattaactgggaaggcaatctgggattcgtgaagtactccaagttctacaacaacacagccgtggcttttgccgaccccgtaactggcgcaagctcctctcggggcggcacagtcttcatcaagggcgataatgtcaccatc

SEQ ID NO: 35260 - DNA, 63 bp, synthetic construct
  source 1..63: mol_type = other DNA
ggcttcaacaacacctttcggagcaacattgcactgaccaacgggtccgccttggcttggatc

SEQ ID NO: 35261 - DNA, 135 bp, synthetic construct
  source 1..135: mol_type = other DNA
tccacttttcggttcaacaccgccattaagaacggcggagcaatcgacagcaacgcagccaatatcgggatctacaatatcacatttgaagctaactatgctggcgaatacggtgctgccctgtgtagagaaagc

SEQ ID NO: 35262 - DNA, 258 bp, synthetic construct
  source 1..258: mol_type = other DNA
gcaaacggcttcggagaaaataacaccttcatcgataataaggctgggattagcggcgccgccctggcttggctcggggtcaacggaatcgacattcataactatacattcatcaacaacaccgcctccaagagcggaggcggaatatacgtccgatcggactctgctaactgcaaggtatcaaactgcaaatttgataacaattacgtgaccgatatccgggattcccatggcggagccattgattggcatggaacc

SEQ ID NO: 35263 - DNA, 39 bp, synthetic construct
  source 1..39: mol_type = other DNA
caatatgaggccttcgatgactacgctggaggcatcttc

SEQ ID NO: 35264 - DNA, 276 bp, synthetic construct
  source 1..276: mol_type = other DNA
ggcggcaactctacaataattaatagcacattcatcgggcccgacgctgtctgggttggggagcacggcgaagcccacctcgctgagaactacatcaccggcgcctaccctaacaaggacgtgaagtacctggaggagccctacaattcccgatacaacaaatatgactatgccatttggaatgacgggaagctgtacctcaacaagaacacttttgactacatcgtcttcaacaacggaactattacgtcgcctaccacgctgtggattctcgac

SEQ ID NO: 35265 - DNA, 243 bp, synthetic construct
  source 1..243: mol_type = other DNA
accaacgtgacaattgatctttgtaacattacatcatctagtgccacttaccgcggcggagccatctacgtagagaacattaacgacgcatcaataataaacagtaactttgatgatattagcaccccatggggcaacggcggtacactgtacatcgacggcaacgtgacgctctacaacgacaccttcaccaactttaaagcgagcacaggttacgccggagcaatctacttttgcaatggc

SEQ ID NO: 35266 - DNA, 249 bp, synthetic construct
  source 1..249: mol_type = other DNA
aaatggggttctgctatctggggctacataaacaacatgagcatcaacaactgccggttcatcaattgctccgccaaattcgagggtggcgcaattaacctcgtcggcaaggtgctgaccatcacaaatagcacctttatcaataacaccgccgacgagaacggcggcagcctgattgtgatggggattaagacagtgatcaaggactgtattttcatcaactctcactccggcatggaaggttgcttt

SEQ ID NO: 35267 - DNA, 63 bp, synthetic construct
  source 1..63: mol_type = other DNA
ttcatcaacaattgggctggagtggatggaggcgccatctacgagcacgacatcgccaactac

SEQ ID NO: 35268 - DNA, 39 bp, synthetic construct
  source 1..39: mol_type = other DNA
actgccggccgcaacggtggagctgtttgctctgatagc

SEQ ID NO: 35269 - DNA, 57 bp, synthetic construct
  source 1..57: mol_type = other DNA
tctatcgatggcattttcgattcaaatgctgccgcctttggaggtgcagtgtactcc

SEQ ID NO: 35270 - DNA, 297 bp, synthetic construct
  source 1..297: mol_type = other DNA
aattacactgtaattgtcacaaacctcgataccgagaatgtgatcggcaacagcagttctcaggacttccaggtcttcaaaatcaactccacaatcaagcttaacgacatctctgacatttattacgaggataacgtgtccattagctttgaggtggaaaacaagactatcgtcaatattcggattcagaaccaggacggagaggtggtttacgacaataacgtgaccagcgacatgatccaggtccccaacctgaacgccggcaactacactgtgaccgttaccaacctggaaaca

SEQ ID NO: 35271 - DNA, 51 bp, synthetic construct
  source 1..51: mol_type = other DNA
atcaaaattacgcaaaaactgccttccgacgccactggcacaatcacctac

SEQ ID NO: 35272 - DNA, 63 bp, synthetic construct
  source 1..63: mol_type = other DNA
ttcgccaatggcaccctgatcaacgtgattaacgtgaatgagagttttgtcctaagtaatctt

SEQ ID NO: 35273 - DNA, 144 bp, synthetic construct
  source 1..144: mol_type = other DNA
gccggctcttacgtgatttacggatactattctggagattccaatcacaagtccagccgggacagcatcacaattaccgtgaacaaggctattaataacgtgattgtgtctggagagaatactgcctacccccaaaataccacg

SEQ ID NO: 35274 - DNA, 219 bp, synthetic construct
  source 1..219: mol_type = other DNA
acagctgacatcgacggcgaatacgccgtggtcatcggcgacaagaagattattgtcaatgtgatcaacggcatcgggaccggcactttcgtgctcgacgccggaaagtacaccgccaccatcgagtatacaaataagaactacgagaataacatcaagagcattcccttcaacgtggctaaggaagatgtgaccctgtccatcgaggtcctggataag

SEQ ID NO: 35275 - DNA, 90 bp, synthetic construct
  source 1..90: mol_type = other DNA
agcaatatcgacgggaacatcttcgcctccgtggacggagagtacaacgtcattatcaacggccggaccattccggtcacggtcaaaaac

SEQ ID NO: 35276 - DNA, 189 bp, synthetic construct
  source 1..189: mol_type = other DNA
aagataacccagaagctgccctctgacgccaagggcaccattacctacacatacgccaacgagactctcatcaaagtgatcaaggtggacgagtccttcgtgctgtccaatctggacgctggaagctatgtcatttacgggtactactctggcgacaccaaccacaagtcaagccgggatagtcttact

SEQ ID NO: 35277 - DNA, 30 bp, synthetic construct
  source 1..30: mol_type = other DNA
accattgccgacaaaaagatcatcgtgaag

SEQ ID NO: 35278 - DNA, 36 bp, synthetic construct
  source 1..36: mol_type = other DNA
attaacggcaatacaatccccgtgaccgtcaagaac

SEQ ID NO: 35279 - DNA, 39 bp, synthetic construct
  source 1..39: mol_type = other DNA
aacatcaaaattacacaaaaactccctagcgatgcaacc

SEQ ID NO: 35280 - DNA, 240 bp, synthetic construct
  source 1..240: mol_type = other DNA
tccgtcggaagcgtggagcagatcaacgtgacactgcctgacaacgccaccgggcaggtgctgctggacatcaatgggcagcagtactacgcaaatattaccgagggcttggcccaattcaacataaccggtctcaaagccggcgaatacaagttcaacgtgacctatatcggcgactataagtacctggataacaatactaactctgctcttaaagtatccaagctgcaacctgctttc

SEQ ID NO: 35281 - DNA, 99 bp, synthetic construct
  source 1..99: mol_type = other DNA
gacgagctgatcaagtttgagactagcgataatatcaccgggctcgtcaaggtggaaatcgacaataagaactatactgcctttattaacgagggaaaa

SEQ ID NO: 35282 - DNA, 42 bp, synthetic construct
  source 1..42: mol_type = other DNA
atcaccctgtacttcgagggcaatgagaagtatctcaatagc

SEQ ID NO: 35283 - DNA, 126 bp, synthetic construct
  source 1..126: mol_type = other DNA
gagaccgtggtcgtttatgtagacgcggtcggtgacgtcgctctccggattggaagctacatcaacacgacggcattggtggacgggaaggccgtcttcgtggttaaggatctggcaactggtgac

SEQ ID NO: 35284 - DNA, 42 bp, synthetic construct
  source 1..42: mol_type = other DNA
accgaggctgatttcacggttgccaagagtgctcctgatgtg

SEQ ID NO: 35285 - DNA, 78 bp, synthetic construct
  source 1..78: mol_type = other DNA
aacgggaccgtcaaaggcgaggagctcggcattgataatggcaaggtggaactgatcgtgaacgatttggctgctggg

SEQ ID NO: 35286 - DNA, 30 bp, synthetic construct
  source 1..30: mol_type = other DNA
atcgccgagggcaaggctaacttgacactg

SEQ ID NO: 35287 - DNA, 69 bp, synthetic construct
  source 1..69: mol_type = other DNA
ctcacagggaattggatcagcgccaccttcgaagtcaataagtttggctccgagctgactatcaacgtg

SEQ ID NO: 35288 - DNA, 129 bp, synthetic construct
  source 1..129: mol_type = other DNA
attgttcggcaaaaggaaatcatcaaagtcaatgtaaccgaatgcgcgacaggcgacgtcatcattaccgtggccggaaaagattacatcgtggagatcaagaacgggttcgctacactcgaactggac

SEQ ID NO: 35289 - DNA, 102 bp, synthetic construct
  source 1..102: mol_type = other DNA
gaagcccccatcgatgcgacagggaaagtcaacgtaaccatcttcgacggcgtgcagaacaaaacatacatcgtatacgtcaatgacggaattggcatactg

SEQ ID NO: 35290 - DNA, 48 bp, synthetic construct
  source 1..48: mol_type = other DNA
tttgaaggcaatgagaaatacctgaacgccagcgctaagaacaacttc

SEQ ID NO: 35291 - DNA, 69 bp, synthetic construct
  source 1..69: mol_type = other DNA
gggagctacatcaacacaaccgatctggttgggggcaaagccgtgttcgttgtcaaggacttggcggct

SEQ ID NO: 35292 - DNA, 99 bp, synthetic construct
  source 1..99: mol_type = other DNA
gttaacggcaccgtcaagggcgaagagctgatcattgacaatgggaaggtggagctcaaagtcaacgacctggctgccggcgtctacgatgtcgaagtg

SEQ ID NO: 35293 - DNA, 69 bp, synthetic construct
  source 1..69: mol_type = other DNA
gtgaagcaggctccggtgaccgtcgatgtggaggtcggcgacatcaacgtcattgggaaggagatcatc

SEQ ID NO: 35294 - DNA, 45 bp, synthetic construct
  source 1..45: mol_type = other DNA
aactacacccggcccatcgccgagggcaaggctaatctcacactg

SEQ ID NO: 35295 - DNA, 72 bp, synthetic construct
  source 1..72: mol_type = other DNA
ctcaccggcaactggacatctgctactttcaacgtggacaggctttcttccgaactcaccatcaacgtaact

SEQ ID NO: 35296 - DNA, 108 bp, synthetic construct
  source 1..108: mol_type = other DNA
aagacagttaacgtgacttacaatggcgatggccggtttctgacctctacaaatagcactaatttcaccgtcgggaaggccactaaggacatcattctgatcgtggag

SEQ ID NO: 35297 - DNA, 57 bp, synthetic construct
  source 1..57: mol_type = other DNA
ggcaaacacaacgtgacactgacctatgccggggacgataaatacgagagtgctagt

SEQ ID NO: 35298 - DNA, 69 bp, synthetic construct
  source 1..69: mol_type = other DNA
gtccgggtcgatggaaaggactacaccgtgcccgttagcggcggcaagggtatcctggtggtactttct

SEQ ID NO: 35299 - DNA, 240 bp, synthetic construct
  source 1..240: mol_type = other DNA
ccacatagcgtggaagttgtgtttaatggcagcgacaaatacgagccagacagtgactccgcctccttcaacgtcgccaaggctgagttctctcccgacgatatcaaagtcatcgataagggaaacaacaccattgtggtcgtggtcccaaacaacgctaccggcaatgtgactgtgaaaattggcaacaacacatacaatgcaaccgtcaaggatggaatcgccaccatcacattggac

SEQ ID NO: 35300 - DNA, 249 bp, synthetic construct
  source 1..249: mol_type = other DNA
aagaccgcgaccattcgctattctggcgacgacaactacgaggccaccgagacagccgtgaactttaccgtgaacaaatgtggcgcgcctatcaacgctgagagcgaggacatcaaggtcggggatgacgccaccataactgttacgttccctaaggatgctaccggacgagccattctgggcctcgccggcgaggagtactacgctgacattatcgacgtgaaatctaagaatttcctgtacctgatt

SEQ ID NO: 35301 - DNA, 36 bp, synthetic construct
  source 1..36: mol_type = other DNA
atgaacgagcgggacattatcatcaacttcgagaac

SEQ ID NO: 35302 - DNA, 168 bp, synthetic construct
  source 1..168: mol_type = other DNA
ctatatgatcttggcgagacatacaacgtgaagattaccgacaagaacgggaatcctatcaagaagggatatgcctgcttcctgatctacaatcggattttttattctaatatcaccgaggccggcattgctacctgtaccctgcctctggatctcaacttcactggg

SEQ ID NO: 35303 - DNA, 126 bp, synthetic construct
  source 1..126: mol_type = other DNA
ctcgctgcctctgaggccatctccatcgggactaaaaccctcgttagcttagaccagaccacaattgggtcccggatggtcaacaacctgaacaagtacaatttcaccttcaaggagggaaagcat

SEQ ID NO: 35304 - DNA, 54 bp, synthetic construct
  source 1..54: mol_type = other DNA
cggagcctcggcggcaccgtgatttgccacaactgcaagttcatcgacaatgat

SEQ ID NO: 35305 - DNA, 96 bp, synthetic construct
  source 1..96: mol_type = other DNA
cggaacgagggctctctgacactcattaactgctctatctattcgaatgactgtaacaacgagatcatctataatctgggcatcctggccacatat

SEQ ID NO: 35306 - DNA, 87 bp, synthetic construct
  source 1..87: mol_type = other DNA
gactgcgccatcatcggctacgacaacaaccccactaaagttaagttcgataagccttggagcaatgctaagaccgggttcatcaag

SEQ ID NO: 35307 - DNA, 54 bp, synthetic construct
  source 1..54: mol_type = other DNA
ctggagggccgggcctatcacgactactccaacctctggaacaacgctcttagc

SEQ ID NO: 35308 - DNA, 39 bp, synthetic construct
  source 1..39: mol_type = other DNA
ggcctgatcaactactatagcaagaccttcacatctctc

SEQ ID NO: 35309 - DNA, 132 bp, synthetic construct
  source 1..132: mol_type = other DNA
cccttcatctcgatatcaagcgggctgatcagcgactttctcacacaatccaatcaccttatgatgagcattgactcaaacgagaacctgcgctacctgagggaccgcatctatagctccacatattcccac

SEQ ID NO: 35310 - DNA, 60 bp, synthetic construct
  source 1..60: mol_type = other DNA
ttttgggacctgtacaatggggcccataactatggcttccacaacctgaacaacagtctg

SEQ ID NO: 35311 - DNA, 213 bp, synthetic construct
  source 1..213: mol_type = other DNA
acaaaggctttccggaactccgggctgaagaagaccgacgtgaacaacaaggacaaggacacacagaccattatcaaggagaagatcgagcagctctacaaagacatcggaagcaagatcgccaagaacaaccccgactacgacaaatacaccagcatgaacctggaatacgagaataacattgggacagacaatattgactacctgtggtat

SEQ ID NO: 35312 - DNA, 138 bp, synthetic construct
  source 1..138: mol_type = other DNA
aacatcctgatcgacattaacaacaccatcgacatcaattacgacacctacaacaatatggtgtccttcaactacacggactcaatcaagaagaacatttacaacggcatcttcaaacgggagagctacatctctcac

SEQ ID NO: 35313 - DNA, 42 bp, synthetic construct
  source 1..42: mol_type = other DNA
gagttctatgagaagatccttgaagacaacctggagaataag

SEQ ID NO: 35314 - DNA, 39 bp, synthetic construct
  source 1..39: mol_type = other DNA
aatgaggagtactatctcctgggccagagctacaacgag

SEQ ID NO: 35315 - DNA, 66 bp, synthetic construct
  source 1..66: mol_type = other DNA
ctttacgagtcaatctctgaagacctgtccgaataccggaagagcgacatcaacgaggattacatt

SEQ ID NO: 35316 - DNA, 174 bp, synthetic construct
  source 1..174: mol_type = other DNA
ttttaccaaattcgctacctcctggacaactataggctagcttattgcgcactcaacgacaaggacaagctcattgtgaacaagtacttatatgagcaatgtaacgagctgatcaaggccttcgatggcgtggagctgaacggggtcgccatcgagtcctacgtggagaaactg

SEQ ID NO: 35317 - DNA, 60 bp, synthetic construct
  source 1..60: mol_type = other DNA
atgaccacaaagaacaaccagaacatcttctccaatgacatttctgagatggatagcaac

SEQ ID NO: 35318 - DNA, 60 bp, synthetic construct
  source 1..60: mol_type = other DNA
aagattctccactacggcaacaccaacgagctgaagaaactgacagagatctacaaccag

SEQ ID NO: 35319 - DNA, 39 bp, synthetic construct
  source 1..39: mol_type = other DNA
cggaccctcaacctggacaacgaactgatgcccaatgag

SEQ ID NO: 35320 - DNA, 45 bp, synthetic construct
  source 1..45: mol_type = other DNA
aacaagtacattaataccgatataaccgagcccaacgtgaacttc

SEQ ID NO: 35321 - DNA, 174 bp, synthetic construct
  source 1..174: mol_type = other DNA
ggctacattactgtcaaggtgtcctacgctgccaaagattattacgataagattgtagctgagctccccaacaaggaggaagtgctggaccggctggggcagctcaatcctatcaagaccctcacctttagcgagatcgacgctaccggcttgatcgaccggatcaacctgttc

SEQ ID NO: 35322 - DNA, 48 bp, synthetic construct
  source 1..48: mol_type = other DNA
gcctgccccgtcggtcatcacatcctgaccacacaattctttaaatgg

SEQ ID NO: 35323 - DNA, 48 bp, synthetic construct
  source 1..48: mol_type = other DNA
agccagtggaagttcgacaaggattacaatggctacgtgaacatcgag

SEQ ID NO: 35324 - DNA, 69 bp, synthetic construct
  source 1..69: mol_type = other DNA
attaatgagtattactacgagttctgcaacgagaccatgaacacaatgaagatcatcatggagaagctg

SEQ ID NO: 35325 - DNA, 120 bp, synthetic construct
  source 1..120: mol_type = other DNA
atcctcgataaggacaataatattatcttcgagagcgtcaattacaccatcggccggctgattgacaacgagaacttcctgaacaacatcttcaacaaaaagcagtacttcatgaatatc

SEQ ID NO: 35326 - DNA, 156 bp, synthetic construct
  source 1..156: mol_type = other DNA
tatctcaagaatatcaaagccgagctttacgacgacattatgaacggcatcctggacaagaccaagaactttaacgaatgggtcaaaaagcaggagaagctggagtacagcacactgctcaagaaatactccgatatctttgaccaattaggcaag

SEQ ID NO: 35327 - DNA, 63 bp, synthetic construct
  source 1..63: mol_type = other DNA
atcgtgctggacaacgagatcaacgtgatcatcaaccagctggacgaaaacaccatcgataat

SEQ ID NO: 35328 - DNA, 120 bp, synthetic construct
  source 1..120: mol_type = other DNA
gatacacaggccgacctcgctgagatgaagtccaagatttatagccagctggcctacttcatcaacttctgggacacctacaacaataacaagcggaaccccaatatcctgaacatgaag

SEQ ID NO: 35329 - DNA, 66 bp, synthetic construct
  source 1..66: mol_type = other DNA
ttcgacgataagatcgacctgaacgccctcaacattaaccagatgaaggacctgttcctgaataat

SEQ ID NO: 35330 - DNA, 57 bp, synthetic construct
  source 1..57: mol_type = other DNA
accatcatcaagctgtacaacgacatccacaataagattctcgagtacaagaaggaa

SEQ ID NO: 35331 - DNA, 201 bp, synthetic construct
  source 1..201: mol_type = other DNA
ggtgccctgaacaaattgaacgaagaatatcatgaggcctacaagaatatcctggataatgtaatcaagaatatggatgaatacattgaaagccattacaacaattttgaggagatgcggaaagagatcatcgactatctggagaaaatatataacaacgaagaagtaaaaccgtccatcaataatgatgatatgaaggcc

SEQ ID NO: 35332 - DNA, 42 bp, synthetic construct
  source 1..42: mol_type = other DNA
gaccagtacaacgagattaagaagatcatgaagaacaagacc

SEQ ID NO: 35333 - DNA, 144 bp, synthetic construct
  source 1..144: mol_type = other DNA
ggaagctgggacctgatcgaggagaaataccccaacatcgctaaggagatcaagtcctacctcttcggcaagcacgagaatctgcttaaatacgctatcatcgaaggcgaccctgagaatggctacgaaaccattagacagaac

SEQ ID NO: 35334 - DNA, 42 bp, synthetic construct
  source 1..42: mol_type = other DNA
tataagaaggaggacaaagatattggcatcagcgaaaagatc

SEQ ID NO: 35335 - DNA, 30 bp, synthetic construct
  source 1..30: mol_type = other DNA
aagagcatcctcgagcctaacctggaggaa

SEQ ID NO: 35336 - DNA, 45 bp, synthetic construct
  source 1..45: mol_type = other DNA
gacaccttttgcgcctacaaggagttcagcaaactgatggaaaac

SEQ ID NO: 35337 - DNA, 51 bp, synthetic construct
  source 1..51: mol_type = other DNA
gaaacctatccactcatcgccaaggacgtcattaataagctctacgaaaat

SEQ ID NO: 35338 - DNA, 30 bp, synthetic construct
  source 1..30: mol_type = other DNA
atcgagattagcaaaaagggagacgaggag

SEQ ID NO: 35339 - DNA, 51 bp, synthetic construct
  source 1..51: mol_type = other DNA
ataaaaaaccatttttcctcaaatgaagacaataacgcaccgaatcaacag

SEQ ID NO: 35340 - DNA, 69 bp, synthetic construct
  source 1..69: mol_type = other DNA
aaggaaatcaatcccaacgactacatcgattacatcgagctcgacaactggctgattgagaaggaagcc

SEQ ID NO: 35341 - DNA, 81 bp, synthetic construct
  source 1..81: mol_type = other DNA
gaaaagaacaaaatgtatgcatacgagctcaatagcaagtactcctccaactctaaccttaaggggagcaattatgacgtg

SEQ ID NO: 35342 - DNA, 33 bp, synthetic construct
  source 1..33: mol_type = other DNA
ctgaaccagttgataatcgactcatacaagctg

SEQ ID NO: 35343 - DNA, 51 bp, synthetic construct
  source 1..51: mol_type = other DNA
ttcaccaacaacacagccggtagaaatggcggagccgtttgctcggactcg

SEQ ID NO: 35344 - DNA, 69 bp, synthetic construct
  source 1..69: mol_type = other DNA
accatctccatcgacggcatcttcgatagcaacgctgccgcattcggaggcgccgtgtactctttcaat

SEQ ID NO: 35345 - DNA, 30 bp, synthetic construct
  source 1..30: mol_type = other DNA
aaggtcatcaccgtggacgagagcttcatt

SEQ ID NO: 35346 - DNA, 216 bp, synthetic construct
  source 1..216: mol_type = other DNA
tccgtgctgaaaatcacaggccgcagccctctggtcaaagtcggctcgtctgaaaaaacattgtcaatttacgggatcggaaccatgaccctccggcgggacagcatagtatcaatcgaggaccccatcgacgccgtggcacagtacaggtccctgtctaaggataacctgccctctaccgtcgctgccccaagtaacgagatcagattcttgacc

SEQ ID NO: 35347 - DNA, 123 bp, synthetic construct
  source 1..123: mol_type = other DNA
aacggaacgatcattaaggtcatcaccgtggacgaatctttcattctggctgggctcaacgccggcacttacaccatctacgccaataactgttgcaagtccatccaacggaacaactctctg

SEQ ID NO: 35348 - DNA, 45 bp, synthetic construct
  source 1..45: mol_type = other DNA
aacgtgaccgccacctccaacctgacaaatgagactaactctagc

SEQ ID NO: 35349 - DNA, 243 bp, synthetic construct
  source 1..243: mol_type = other DNA
gacgagatcgtctacgtcggaaacaccacatcctttaggattgtggtgactaacaccggcgactgtaacctgtctgatgtggtggtaaccgatgtggattacagcgccggactcgaatacgccgataaatatgacaacggcagtcgactctggaactacttgggagaggggaaatgggccctggttggagatctggaggttggtcaatccgccgatttcctcgtgtactttaacgtgctggcc

SEQ ID NO: 35350 - DNA, 30 bp, synthetic construct
  source 1..30: mol_type = other DNA
agcaatctgaccaacgagacaaacagctcc

SEQ ID NO: 35351 - DNA, 246 bp, synthetic construct
  source 1..246: mol_type = other DNA
accgtccaaaagatagccgtggagaaagtagtatatgtcgggaacaccacaagcttcgtcatcgtggtcaccaacaccggcgactgcaacctgtctgacgtggtggttactgacgtggattactccgccggactcgtttacgccgagaaatatgataatagtagccgggagtggacctacgacaacggcaagtggacattagtcggagatctgaacgttggacaatccgctgagttcaccgtttat

SEQ ID NO: 35352 - DNA, 132 bp, synthetic construct
  source 1..132: mol_type = other DNA
gactgcaacctctccgacgtcgtcgtcactgacgtggactttagtcaagggttggagtttaatggagtctggaccaacggctcccgcgaatggacatacgacggcaacaaccactggaccctcgtcggtgat

SEQ ID NO: 35353 - DNA, 159 bp, synthetic construct
  source 1..159: mol_type = other DNA
ctgtctgacgtcgtggtgacagacgtggatttcagcgccggcctcgaatacgcgaatcgctatgagaatggcacccggtactggaactatctcggcaatggcaagtggatcctggatggggacctggaagtcggagcttccgcggatttcttggtttat

SEQ ID NO: 35354 - DNA, 150 bp, synthetic construct
  source 1..150: mol_type = other DNA
agcgaggtggtcgttactgatgtcgactactccgccggcctggaatatgcagacaaatacgacaattcttcccgcgaatggacctatgacaatggcaagtggaccttagtcggtgacctcgaggtcggacagagcgctgagttcactgtc

SEQ ID NO: 35355 - DNA, 144 bp, synthetic construct
  source 1..144: mol_type = other DNA
gttgtcactgatgtggacttcagtcaaggtctggagttcaacggcgtttggactaacgggaaccgggagtggacttacgacggaaacaaccattggaccctggttggtgacttgaacgtcggacaaagcgctgacttcactgtg

SEQ ID NO: 35356 - DNA, 150 bp, synthetic construct
  source 1..150: mol_type = other DNA
gtggtcacaaacaccggggactgttcattatctgacgtggtggtcaccgacgtggacttttcccaaggactagagttcaatggagtctggacggatggtaaccgcgagtggacttacgatggcaataaccactggaccctggttggagac

SEQ ID NO: 35357 - DNA, 33 bp, synthetic construct
  source 1..33: mol_type = other DNA
ggggtcggcgagtcagccgacttcactgtttac

SEQ ID NO: 35358 - DNA, 177 bp, synthetic construct
  source 1..177: mol_type = other DNA
gactgcaacctgagtgacgtggttgttactgatgttgattatagccagggactggaatacgcgaacaaatatgaaaactccacccggctctggaactacctgggcgagggcaaatgggccttggttggggatctcgagcccggcatgtctgccgagttcaccgtctacttcaacgtg

SEQ ID NO: 35359 - DNA, 33 bp, synthetic construct
  source 1..33: mol_type = other DNA
acaagcaatctgaccaatgagaccaacaacacc

SEQ ID NO: 35360 - DNA, 186 bp, synthetic construct
  source 1..186: mol_type = other DNA
gactgcaacctgagcgacgtcgtggtgaccgacgtggactactccgaaggcctggtttatgcgaatcgctatgacaactcttcccgcgagtggacatatgagaacggcaagtggaccctcgtcggggatctggaagtcggacagagcgccgagttcaccgtatacttcctcgtgaacgctactggg

SEQ ID NO: 35361 - DNA, 36 bp, synthetic construct
  source 1..36: mol_type = other DNA
aacgtgactgccacaagcaacctgaccaatgagaca

SEQ ID NO: 35362 - DNA, 237 bp, synthetic construct
  source 1..237: mol_type = other DNA
aagatcaccatcgaccaggtggtttacgttgggaataccacaagcttccggatcgtggtgactaacaccggcgattgcaacctgagcgacgtcgtagtgaccgatgttgactactccgagggcctggtctacattaacaaatacgataacggatcccgcgagtggacctacgacaacggcaagtggacactcgttggagaactcggggttggggagtctgccgattttaccgtatac

SEQ ID NO: 35363 - DNA, 36 bp, synthetic construct
  source 1..36: mol_type = other DNA
gccaccagcaatctgaccaatgagacaaacaacacc

SEQ ID NO: 35364 - DNA, 252 bp, synthetic construct
  source 1..252: mol_type = other DNA
attacaatcgaggatgtcgtctatgttggaaatatcacctccttcaaaatagtcgtcacaaacacaggggactgcaaccttagcgaagtagtggtgaccgacgtagattactccgaaggattggaatatgcgaacaaatatgacaactcctcaaggctctggacttacgatggcaatggccactggacactcgtcggagatctgggtgtcggagagagtgccgagtttacggtttattttaaggtactggcc

SEQ ID NO: 35365 - DNA, 183 bp, synthetic construct
  source 1..183: mol_type = other DNA
gtggtgacaaacacaggagactgcagtctctccgacgtcgtcgtgactgacgtggactactctgaaggactggtctatgccaaccgatatgacaacgggagccgggagtggacctacgagaacggcaagtggacccttgttggagatctgggagtcggagaaagcgccttcttcgtcgatacc

SEQ ID NO: 35366 - DNA, 87 bp, synthetic construct
  source 1..87: mol_type = other DNA
tccgacgacgtggataataacgacctgattagcctgcccctgtactctaccctcgagatcgacgacaacgtcgatatgcagaatgat

SEQ ID NO: 35367 - DNA, 126 bp, synthetic construct
  source 1..126: mol_type = other DNA
tcttccaacgtgtccaagctcattacgatcaaccccgtgaacacagtacttagcctgagcctgagcaatgacacccttctggtcggagacagtctgactgtcaccgccgtagtaaacgcgtctcag

SEQ ID NO: 35368 - DNA, 72 bp, synthetic construct
  source 1..72: mol_type = other DNA
aaggtcctgttctacatcaacgacattctcaacgatacagttgatgtgaatattgatggcctggctagactg

SEQ ID NO: 35369 - DNA, 96 bp, synthetic construct
  source 1..96: mol_type = other DNA
cagtttggcgactatgtggactacggtaacgtcaccttcctgatcgacgataagccgtacactgttaagctggttgatagcgtggccaacaagacc

SEQ ID NO: 35370 - DNA, 102 bp, synthetic construct
  source 1..102: mol_type = other DNA
tccgtcaataccgtgctttctctgtctctctccaacgacacgttgctggttggcgagcctttgaccgtgactgctgtcgtgaacgcgacccagggcaaggtg

SEQ ID NO: 35371 - DNA, 63 bp, synthetic construct
  source 1..63: mol_type = other DNA
ttctacattaataacgtcctgaatgataccgtggacgttggccggaatggcgtggctatcctg

SEQ ID NO: 35372 - DNA, 165 bp, synthetic construct
  source 1..165: mol_type = other DNA
gaggtcagcggctgggactgcgactggaaggtcaatggtaacgtcactttacaagttagagttaaggaccagttcggcgactatatcgactacggcgacgtcgtgttcctgattgatggaaaggcgtataccgtaaagctggtggattccgtggctaacaagacc

SEQ ID NO: 35373 - DNA, 123 bp, synthetic construct
  source 1..123: mol_type = other DNA
tcctccaacattaccaagctcgttgatgtatccccgctacaaaccgctctgagcctcagtctggacgaggacatcatcttcgtggatgacagcctcactgcgactgccgtagtcaacgctacc

SEQ ID NO: 35374 - DNA, 51 bp, synthetic construct
  source 1..51: mol_type = other DNA
ggcaccgtcgacgtcgatagcgatggcgtggctgtgttgactctgtcaaat

SEQ ID NO: 35375 - DNA, 99 bp, synthetic construct
  source 1..99: mol_type = other DNA
ctgacagcagtcttctcggatgacgaaggaatttacttaaactcgtccgataagaccgagttcaccgtgttttcgatgaccttcatcgaggtgtctggc

SEQ ID NO: 35376 - DNA, 129 bp, synthetic construct
  source 1..129: mol_type = other DNA
tacacccttcaagttcgcgtcaaagatcagttcggagactatatcaaggacggcgaggtcttcttttacatcgagggcgacgcctacactgtggagctggtcgacagcgtggctaacaagaccatctcc

SEQ ID NO: 35377 - DNA, 30 bp, synthetic construct
  source 1..30: mol_type = other DNA
caatatgatatcctggttatttttaacacc

SEQ ID NO: 35378 - DNA, 123 bp, synthetic construct
  source 1..123: mol_type = other DNA
tcttacgtgatcaagctcatcgacattaagcccgtcaataccgtgttgtcccttagtcttagcaacgggacacttctagtcggagagcctctaacggcaacagccgtcgtaaacgctacccag

SEQ ID NO: 35379 - DNA, 72 bp, synthetic construct
  source 1..72: mol_type = other DNA
atcaatggagtcttgaacgataccgttggcgtggactctgacggggtcgctgtcctgacccttaacaatctc

SEQ ID NO: 35380 - DNA, 33 bp, synthetic construct
  source 1..33: mol_type = other DNA
gactacaacatcaccgccgtcttcgacttcacg

SEQ ID NO: 35381 - DNA, 42 bp, synthetic construct
  source 1..42: mol_type = other DNA
aacaacattagcgagtggatcctgctccttaagcatatgttc

SEQ ID NO: 35382 - DNA, 210 bp, synthetic construct
  source 1..210: mol_type = other DNA
actggcaggacacctgcactgatcttcttcggcgacgggcagggccccatggctggtaacggtttcgtccgagaaggctacagattccgcggctggtcaaggacccgggatggcaacgccgagtatatggactgcagtgacatttctgctttggggaaaatccatatggtcaaactctatgccgtctgggaggaagtccggtccgatgct

SEQ ID NO: 35383 - DNA, 135 bp, synthetic construct
  source 1..135: mol_type = other DNA
ggcgtcatcgtggaagagctgatcgaccctcatctcgaggtgctgtccaataccaccacatctggaaaatacgaggcgggcacttggaacattgggaacctcgctaacggttcaagtgcaaccctgaccattgtg

SEQ ID NO: 35384 - DNA, 39 bp, synthetic construct
  source 1..39: mol_type = other DNA
atgttcacgatcacggttacgaacaacggaccttgcaac

SEQ ID NO: 35385 - DNA, 135 bp, synthetic construct
  source 1..135: mol_type = other DNA
acaggcgtttatgttggagaatctctgagccctcatctgaagatgatttccaacaagaccacaatcggcgaatatgatgggagtacttggattatcggaaaccttaattccggcgaggtgcacaacctcaccatc

SEQ ID NO: 35386 - DNA, 42 bp, synthetic construct
  source 1..42: mol_type = other DNA
gagatcaccaagcgtgtctggggagccacaaggttcgtgaac

SEQ ID NO: 35387 - DNA, 45 bp, synthetic construct
  source 1..45: mol_type = other DNA
atcgtgttcgagatcattgtccggaacaaggggccttgtgatgcc

SEQ ID NO: 35388 - DNA, 144 bp, synthetic construct
  source 1..144: mol_type = other DNA
aatgtcaacgtgaccgaagttctgtcaagtcaccttaagatgatcgagaacgacgcctacgtcggcaactacgacgtggacaagggagtctggtacattggcgacctggccaagaatgactggtgctatttattaattagagct

SEQ ID NO: 35389 - DNA, 96 bp, synthetic construct
  source 1..96: mol_type = other DNA
gtcgaagtttcggaagccctgccggatcaattgaaactcatcaacgtcaccggcgacggctattacgacgctacaaacgggatttggtacatcggc

SEQ ID NO: 35390 - DNA, 96 bp, synthetic construct
  source 1..96: mol_type = other DNA
tacgttgtggacttgcaaatcacgaaggaggtcaataccgataaaaccgagattgacattactgagagcatcgtgttcacaatcaaagtatataat

SEQ ID NO: 35391 - DNA, 147 bp, synthetic construct
  source 1..147: mol_type = other DNA
ggcgtctacgtggccgagcctctgagcaacatcctgattagccagggtgacattaagaccccaggaaccacatacgacggctacacttggtacattggcaatctgacaagcgggtccgaggccatcctcatgatcattgctaagcct

SEQ ID NO: 35392 - DNA, 90 bp, synthetic construct
  source 1..90: mol_type = other DNA
tacgtgctggaagagctggactcccacctcgagctgtatagctacgtggccacggatggtactacctacgtcggcaacacctggaacatc

SEQ ID NO: 35393 - DNA, 63 bp, synthetic construct
  source 1..63: mol_type = other DNA
aaactcactaagaacgagaccggtaacgggtactatagcctggccgacggcatttggtacatt

SEQ ID NO: 35394 - DNA, 51 bp, synthetic construct
  source 1..51: mol_type = other DNA
aagaacgaaacgaatgcgggatattacaacgtgaccgaggggatctggcac

SEQ ID NO: 35395 - DNA, 99 bp, synthetic construct
  source 1..99: mol_type = other DNA
accgatgtctacgtttacgaaaccctctccgacaagctggcgttgaaccgtttcgtggccagcgttggacgatgggacggcaacatttggtacatcgga

SEQ ID NO: 35396 - DNA, 96 bp, synthetic construct
  source 1..96: mol_type = other DNA
gtctatgtgctggaggagctcgattcccacctgggcgactacacatacgtggccaccagcggcacttacgacgggcacaaatgggacattggattc

SEQ ID NO: 35397 - DNA, 93 bp, synthetic construct
  source 1..93: mol_type = other DNA
aacctgatcaagaatgagactaccgttggaaaatatgacggcagcgtctgggatattggcaatctggccaaggggcaggtggcatatctcacc

SEQ ID NO: 35398 - DNA, 144 bp, synthetic construct
  source 1..144: mol_type = other DNA
aatgtgttcgttcgagagatcctcgaccccgcattgcggctggttaagtggaatgccaccaaatatgcatctttcggctacgataactatacctgggttatcggggatatggccgtcggcgagaacgctaccctcacgattgtg

SEQ ID NO: 35399 - DNA, 30 bp, synthetic construct
  source 1..30: mol_type = other DNA
gagaccaacaattacgacaacatcgctccc

SEQ ID NO: 35400 - DNA, 138 bp, synthetic construct
  source 1..138: mol_type = other DNA
aatgttactgaggtgctttctagccacctgaagatgatcgagtacattacctgggattcctactatgacgtgaccgaaggcgtctggcacatcgggacactgaacaaatacgattggcggcagctcatcattatcaca

SEQ ID NO: 35401 - DNA, 138 bp, synthetic construct
  source 1..138: mol_type = other DNA
actaacgtggaagttagtgaagttctttctccgtatctggactacatgggccacaatacaaagttcggaaactactccaacaccaaaggcatttggtccatcggcaaccttgccgccggtgctagagctaaccttacc

SEQ ID NO: 35402 - DNA, 57 bp, synthetic construct
  source 1..57: mol_type = other DNA
aaggacacaaatccctacaacaaccgggatgaggtgaccatcgctgctttgcctgtg

SEQ ID NO: 35403 - DNA, 135 bp, synthetic construct
  source 1..135: mol_type = other DNA
gtcaccgtgtacaatgacgggccctgcgacgccaccggaatctacgtgacagagtccctgagcgacaagctgcggctcgtcaagaatattacaagcgtcggcgaatgggacggctatacctggaacatccctaag

SEQ ID NO: 35404 - DNA, 42 bp, synthetic construct
  source 1..42: mol_type = other DNA
ctggagatcagcaagatggtcaacgtttctagtgctgtggtc

SEQ ID NO: 35405 - DNA, 174 bp, synthetic construct
  source 1..174: mol_type = other DNA
gtagtcaggaataatggcccctgcgatgccactggcgtatacgtgtcagaagttctagatagtcacctgaagctggtatcgaactcaaccgacgtcggctcttacgacgggtcctcatgggtcattgggaacctcaccaatcaatcatctgccgtcctggtcattgaagctctg

SEQ ID NO: 35406 - DNA, 111 bp, synthetic construct
  source 1..111: mol_type = other DNA
ccctgtgatgcttccggagtctatgtcggcgagacattgaacagcaacctggagctggttagctgcaatgccaccgtcggcgactacaatggattcatctggaacatcggg

SEQ ID NO: 35407 - DNA, 48 bp, synthetic construct
  source 1..48: mol_type = other DNA
ccttgcgacgccaccggtgtcgttgtagctgagtcgcttaatttggca

SEQ ID NO: 35408 - DNA, 36 bp, synthetic construct
  source 1..36: mol_type = other DNA
accgtcggcggatacgacgggtacacatggaacgtg

SEQ ID NO: 35409 - DNA, 132 bp, synthetic construct
  source 1..132: mol_type = other DNA
gacagcgccaaggccatcgtggtcgattgcaacttcactggcaactcggcaaaatatggcgggggtatcttcattttcgccgatgacggcaaactcgagaattgcatcttcaccaacaacttcgcaacgaca

SEQ ID NO: 35410 - DNA, 60 bp, synthetic construct
  source 1..60: mol_type = other DNA
tccggggttgggagtctggtcaactgcatcttcaccaataacagtgcctctcgatacggc

SEQ ID NO: 35411 - DNA, 81 bp, synthetic construct
  source 1..81: mol_type = other DNA
atttcagccgggagcgaccaaactgagattctgactgcaaacgcaacagtaaatgtgctgaagccggagttcaaagtggaa

SEQ ID NO: 35412 - DNA, 216 bp, synthetic construct
  source 1..216: mol_type = other DNA
ggcgagcaagtaatatatgaaatcgtcatccacaataccggagaagccgatctcactaacattgtggttgaagagatgcccgacgcctctctgattttcgaccacgtggacagcggccggttcaagtactccgtggtccctggcaaatacatctggacactggacaagctggctaaaggaacctacgagggcttcaagctttacttcaacaccacc

SEQ ID NO: 35413 - DNA, 66 bp, synthetic construct
  source 1..66: mol_type = other DNA
cggatttctgtgaagtccgacgagatccccgaagagataatcagcagcaacaatactaccgttaat

SEQ ID NO: 35414 - DNA, 36 bp, synthetic construct
  source 1..36: mol_type = other DNA
ttcaccgtcgagaagatctgcctgtaccctaacgtg

SEQ ID NO: 35415 - DNA, 288 bp, synthetic construct
  source 1..288: mol_type = other DNA
ggccagatcacatttgagatcgtcatccacaacaccggaaacaccaacctcgagaatgtgaaaattagcgagatcctccctgaaggccttgtttacgatcacttcgtggactatctgaacctgtggacatacaacaacgacctgacttggtccgccactcgggccattgtgcccgggcaatatgtcgggttctttgtcaccttcaataccacaaaggctggcaagtccgtcaacaatgtggtagtgtctgccgacaaggcaaactctacctccgctaacactagcttt

SEQ ID NO: 35416 - DNA, 255 bp, synthetic construct
  source 1..255: mol_type = other DNA
ttcaccatcgagaagatcctggtcgaggataacattgtcaacggtggtcaggccacttttgagattgtcatccacaatacaggcaatgctcccctgacaaacgtgaccgtgaaggaatacgactttaagggactcatctacaataattttgcggactacctgggcctgtggacctacaacggcgacctgagctggaccatgaattccaagctgcaccctggcgaatatgccgagctcctcatcatcttcaacact

SEQ ID NO: 35417 - DNA, 123 bp, synthetic construct
  source 1..123: mol_type = other DNA
gcatctgctgaaagcggcgagaccggaatcctcattgccaatgccacactgcacgtgatcgatgacaaaaagcccgaccctgagcacaactctagcaacgactacaagatggacgtgttcaag

SEQ ID NO: 35418 - DNA, 288 bp, synthetic construct
  source 1..288: mol_type = other DNA
ggccagatcacgttcgagatcgtcgtgcacaacaccggcaacaagaacctggagaacgtcaaaatttccgagatcctgcctgaagggctgatttacgaccacttcgtggacaacatcgatctgtggacctacaacggcgacctcacctggtctgccactcgggccattgtccctggcgaatacgccggattctttatcaccttcaacacaaccaaagctggcaagtctgtgaacaatgtcaacgtctcggcggacaacacaaactccaccggagctaacacaagtttc

SEQ ID NO: 35419 - DNA, 234 bp, synthetic construct
  source 1..234: mol_type = other DNA
ttcaccatcgagaagattctgattaaggacaacattgccaacggcgctcaggccacattcgaaatcgtgatccacaacaccggcaacgctcctctgactaatatgatcgttcgggagtacttctccgaaggcctgagcaagctcgtgcctggagaatacgttgggttcttcgtgacattcaacacaacaaaggacggcgtctttactaacatcgtggtcgcaaactctactgaa

SEQ ID NO: 35420 - DNA, 60 bp, synthetic construct
  source 1..60: mol_type = other DNA
gacaacaggttctccaataacgtcagcgtgtctgtgcacaacgagaccgtggacatccgg

SEQ ID NO: 35421 - DNA, 120 bp, synthetic construct
  source 1..120: mol_type = other DNA
gtgattgtcggcgagcaggccatcttcgagattacagtccagaacaccggcaagatcaatattgacaagctcaagctgagcgagtttgatttcgagggtctgatctatgaccactacatg

SEQ ID NO: 35422 - DNA, 87 bp, synthetic construct
  source 1..87: mol_type = other DNA
ctggggcactggattaacgacggaatcacctggaccctgaacacaacactggtgcccggcgaggtgaccagcctcttcatcgtcttc

SEQ ID NO: 35423 - DNA, 132 bp, synthetic construct
  source 1..132: mol_type = other DNA
aacttcaccaatgtcgtcctcgccaataacgacgtgcttgacacaaatgaactgctgtccgctaattcactggaagatggcatctacgtgtcggcggacgtggaggtagtcaaacctgagtacaccatcgag

SEQ ID NO: 35424 - DNA, 243 bp, synthetic construct
  source 1..243: mol_type = other DNA
gcctacggcattagcgccggcgacaattacgcgctgagcggcggctcctccgcctctagtaacctgcgcatagtgatggagatcatggccggcacttacgacccttcttccgtcgcttctctgaactacccatttggatccgtatccgcctacggacctgcttacgactacatcatggctggcattgcgcaaatagtaaccgctttcggcatcagtgaccggacagccgctgctggcaccata

SEQ ID NO: 35425 - DNA, 33 bp, synthetic construct
  source 1..33: mol_type = other DNA
atgaccacaccgttctctagcgggtctggattt

SEQ ID NO: 35426 - DNA, 108 bp, synthetic construct
  source 1..108: mol_type = other DNA
ctggacggggacctgagccacgccattttccacggaaacagcgtttactcgggaaccctcatggaggatctggccgacaacgctacacggacctctatctccgacatg

SEQ ID NO: 35427 - DNA, 39 bp, synthetic construct
  source 1..39: mol_type = other DNA
cacgagggcgacgatattccccatatcgtgtccgttagt

SEQ ID NO: 35428 - DNA, 180 bp, synthetic construct
  source 1..180: mol_type = other DNA
accgacgtcctcacggttatagacagtctgcctgctggcctcgagttcgtcaaaactgtgaacgtgatcggagccgtgaaagtttccgaggataagaacgggcaggtcatcatctggaagctgacaaacatttccaccaacaacgccaccattgtggtccgggttaaagtcaattcactg

SEQ ID NO: 35429 - DNA, 30 bp, synthetic construct
  source 1..30: mol_type = other DNA
cctaagggaagctcgcgtaccgtaaattgc

SEQ ID NO: 35430 - DNA, 36 bp, synthetic construct
  source 1..36: mol_type = other DNA
aagctgaacgagctgatccccgacgagttcgaatac

SEQ ID NO: 35431 - DNA, 66 bp, synthetic construct
  source 1..66: mol_type = other DNA
tactgcgacctgcccgacgggaccgtctacaacgagaccacaggcgtttggtcaatccctgaactt

SEQ ID NO: 35432 - DNA, 102 bp, synthetic construct
  source 1..102: mol_type = other DNA
gtcaccctcaaggatttgttcccaagcgactacttcgagttcatcaattgcacactccctgatggaaccgtgtataatgagactacaggagtttggaccatt

SEQ ID NO: 35433 - DNA, 81 bp, synthetic construct
  source 1..81: mol_type = other DNA
aaagcgggtatcacggtcgacgtatacgatttgccctaccccgtgaaatcagttaacaacaacacaccatactataatgac

SEQ ID NO: 35434 - DNA, 240 bp, synthetic construct
  source 1..240: mol_type = other DNA
aatgtgactgacaccctccctgacggcctgaagttcgtcggttatgttgtaaaggacgcaaacgaggccgctaaatatgttaacgtgaacaaccagacagtgacttggttcatcaccaatatcgccggaaaatccaaggctacaataacggtttgggtcaaagtggtcgggctgggcgataacatcattagcgactctaccttcatcacaaacaacgtgacccgcgatccggcggtcaag

SEQ ID NO: 35435 - DNA, 81 bp, synthetic construct
  source 1..81: mol_type = other DNA
atccctgatgagttcgaatttatgtatagctctgacgatgttgcatataataacgagacaggcgtctggacaattcccgaa

SEQ ID NO: 35436 - DNA, 39 bp, synthetic construct
  source 1..39: mol_type = other DNA
gacggcaccgtgtacaacgagacaactggagtttggtcc

SEQ ID NO: 35437 - DNA, 84 bp, synthetic construct
  source 1..84: mol_type = other DNA
cccgacgggctggagttcattaaaaccctgagtatttcaaatgccaagaacatctccgaagtcagggagggccaagtgattaca

SEQ ID NO: 35438 - DNA, 114 bp, synthetic construct
  source 1..114: mol_type = other DNA
aacatcaacctgaaggatcttttctcaccggagaatttcaagctcatcaactgcaccgatagtaacggcaaatcctacgacgtgaccgacgacgtctggatcatccctgtcatc

SEQ ID NO: 35439 - DNA, 33 bp, synthetic construct
  source 1..33: mol_type = other DNA
gggaacaacatcatcggcaccgctgaagtcaat

SEQ ID NO: 35440 - DNA, 66 bp, synthetic construct
  source 1..66: mol_type = other DNA
gaagacgagtggaactacgataacaacaaggccatcaagcccgtcaatattgtgcctctgccaaag

SEQ ID NO: 35441 - DNA, 69 bp, synthetic construct
  source 1..69: mol_type = other DNA
acagtggtcaacgttggctccgacaattacatggacaacctgaccctgatcgatagcctccctgatggg

SEQ ID NO: 35442 - DNA, 69 bp, synthetic construct
  source 1..69: mol_type = other DNA
accgtgaacgtgatcggggccgtgaaggtcagcgagaatcagaacggccaggttattacatggatgctg

SEQ ID NO: 35443 - DNA, 57 bp, synthetic construct
  source 1..57: mol_type = other DNA
tactgcgacctgcccgatgggaccagctacaacgagacaaccggagtctggacaatc

SEQ ID NO: 35444 - DNA, 33 bp, synthetic construct
  source 1..33: mol_type = other DNA
tacaccaataacgacgacaagaagatcgttgat

SEQ ID NO: 35445 - DNA, 132 bp, synthetic construct
  source 1..132: mol_type = other DNA
atctccgagttcgatgtcatcgactcactgccggttggcttagagttcaatgggacactttccattgtcggggcagatctcattaaggagtccgtggatggccaggtggttaaatgggccatcaccaacatc

SEQ ID NO: 35446 - DNA, 42 bp, synthetic construct
  source 1..42: mol_type = other DNA
tacaaccagtaccttagcctctgggacaagaacgatcctgac

SEQ ID NO: 35447 - DNA, 90 bp, synthetic construct
  source 1..90: mol_type = other DNA
aagtatttcgatgacctgattcattctggcgtcaaggagatcgtgctcgattttgacatcgtgctgaccgacggcgaagagtcccagtat

SEQ ID NO: 35448 - DNA, 162 bp, synthetic construct
  source 1..162: mol_type = other DNA
ctggacgctgatgacctgatcatagagggcaatgggcacacaatagacgcacaaggcaagacacggatttttgactgcatagggaagaacattaccatcaagaatatcattctcaagaacgggttcaccgaagatgacggcggagcaatccacaacaatggt

SEQ ID NO: 35449 - DNA, 45 bp, synthetic construct
  source 1..45: mol_type = other DNA
atcatcgactgcgagttcattggcaacaatgtcgagaaggatgtg

SEQ ID NO: 35450 - DNA, 72 bp, synthetic construct
  source 1..72: mol_type = other DNA
tacctggacaagaagatacacgagagcaagagcaaggaaattatcttaaaccaggacatcaccttcgagaat

SEQ ID NO: 35451 - DNA, 135 bp, synthetic construct
  source 1..135: mol_type = other DNA
gacgatctcgtgatagacggcaacggacatacaattgacggtgccaacaagagccggatcttcattatcaccggcaagaacatcaccctcaagaacattacgtttaagaacggcgtcactcacgacaactaccac

SEQ ID NO: 35452 - DNA, 39 bp, synthetic construct
  source 1..39: mol_type = other DNA
tggaacgacgacgtgataagttccgatgacgtgaccatc

SEQ ID NO: 35453 - DNA, 45 bp, synthetic construct
  source 1..45: mol_type = other DNA
tccatcctggggaataacacagcgtccaaaggaggcgctatctac

SEQ ID NO: 35454 - DNA, 42 bp, synthetic construct
  source 1..42: mol_type = other DNA
aacacgattattagtggcttctctccttatatgcaactaata

SEQ ID NO: 35455 - DNA, 45 bp, synthetic construct
  source 1..45: mol_type = other DNA
ggcgtccggcactccgtgatcagcaactgcattgctgggcatgac

SEQ ID NO: 35456 - DNA, 210 bp, synthetic construct
  source 1..210: mol_type = other DNA
attgacaacatcctggtcgtggacaacaaggctaccaacaacggcggcggcattgcgctagatgcagcctcatcgcaaggcactacatccatctctaattctctgttcaaggcgaacacggcggattacggtggagctatctattgctccaatatgtttaccaacatactcgattcaaacttcgccaatgatcacgcaaactatggtggt

SEQ ID NO: 35457 - DNA, 81 bp, synthetic construct
  source 1..81: mol_type = other DNA
atcattctgcaacaactccttcttgataataaggtcggcgtcatagactccaagatcgttggttgcatcgctggccgcgat

SEQ ID NO: 35458 - DNA, 90 bp, synthetic construct
  source 1..90: mol_type = other DNA
atcacatgccgggttaataaagccgaggataagggaggcagcatctacatttctgggtccgacctgagctttaccgactccatgttcatt

SEQ ID NO: 35459 - DNA, 39 bp, synthetic construct
  source 1..39: mol_type = other DNA
atcagcggcgacaacgtgctcattaacaattccctgttc

SEQ ID NO: 35460 - DNA, 42 bp, synthetic construct
  source 1..42: mol_type = other DNA
aaaataatagggagtgacttcgataagtgcaccgcatacgaa

SEQ ID NO: 35461 - DNA, 54 bp, synthetic construct
  source 1..54: mol_type = other DNA
agcggaaatggcgccattgtaaacggctctaccttcgcctactgtatgtgtgct

SEQ ID NO: 35462 - DNA, 36 bp, synthetic construct
  source 1..36: mol_type = other DNA
gacgacgcaacgatctccggatccgatttcgagatg

SEQ ID NO: 35463 - DNA, 39 bp, synthetic construct
  source 1..39: mol_type = other DNA
gtggacgggattaacgccaagatcgatggcgctagtttc

SEQ ID NO: 35464 - DNA, 36 bp, synthetic construct
  source 1..36: mol_type = other DNA
cagatttacctgagcaacgccgagctgtacatcgaa

SEQ ID NO: 35465 - DNA, 132 bp, synthetic construct
  source 1..132: mol_type = other DNA
aaaacttttaaagccctgattagaaattccaagtttctcgaccttaaagctaatatcactgccggggccattggcacaaaggagggtggcgagctctacattgaaaattgcgagttcgagaacatcacttca

SEQ ID NO: 35466 - DNA, 48 bp, synthetic construct
  source 1..48: mol_type = other DNA
aacgtgaccattatcgatagcaagttccgggacacatactccgagttc

SEQ ID NO: 35467 - DNA, 51 bp, synthetic construct
  source 1..51: mol_type = other DNA
tttgttctgaaaaatacagagtttatcaactcccatgcgaagtacaatggg

SEQ ID NO: 35468 - DNA, 30 bp, synthetic construct
  source 1..30: mol_type = other DNA
tttttcaataacgtggccattgctggtagc

SEQ ID NO: 35469 - DNA, 39 bp, synthetic construct
  source 1..39: mol_type = other DNA
accggcagccagtttaacctggagaatatcacattcgct

SEQ ID NO: 35470 - DNA, 177 bp, synthetic construct
  source 1..177: mol_type = other DNA
actaccgctacatactctcccgctatctacttagttggaagtaaaatcaggatcattgactcaaagttcatcaatctcaaggccaacctgaccgccggagccatgagcctgcgcgagggcggcgaactgtatatctctaactgcgagtttatcaacaccacatcctcccggaatgcc

SEQ ID NO: 35471 - DNA, 33 bp, synthetic construct
  source 1..33: mol_type = other DNA
accgagtttatcaacaatcgggtgactttcaac

SEQ ID NO: 35472 - DNA, 48 bp, synthetic construct
  source 1..48: mol_type = other DNA
aagtttttcaacaatgtggccagcgagggcaacgcaatctacgcttac

SEQ ID NO: 35473 - DNA, 75 bp, synthetic construct
  source 1..75: mol_type = other DNA
accttcaagaacaacactaacgccgtctttagcgtgttcacaaagaagtacaccatcgacacaacaacagagttg

SEQ ID NO: 35474 - DNA, 225 bp, synthetic construct
  source 1..225: mol_type = other DNA
gagctggctctcgtgaacaacacaattaacgtcgacaccctgcctgccaagttcgacctgcgggactggggctgggtatcgtctgtcaaggatcaaggttggatgggcgcttgctggacctttggcatgagcggcagccttgaatcagccctgcttaaggccacaggcatccctttcaacgtgtctatgaacaacatgaagaccgtgatgaaatactccccatat

SEQ ID NO: 35475 - DNA, 105 bp, synthetic construct
  source 1..105: mol_type = other DNA
ctcagctggctgggcgccattccctacggagtggacacctacgacgagcttggcaagatcacgatgcccatcaccaccggcaaggacatccacgtagaccaccag

SEQ ID NO: 35476 - DNA, 63 bp, synthetic construct
  source 1..63: mol_type = other DNA
aacggcacgcagatcaaattggcgatcctcaaatatggcagcctggacgtgtcatttttcggg

SEQ ID NO: 35477 - DNA, 48 bp, synthetic construct
  source 1..48: mol_type = other DNA
gtgagcttcgacggcaagacgtggcaagatgcctatgatcttggatac

SEQ ID NO: 35478 - DNA, 30 bp, synthetic construct
  source 1..30: mol_type = other DNA
tacaccgtggccgatgacagcaagatcatt

SEQ ID NO: 35479 - DNA, 249 bp, synthetic construct
  source 1..249: mol_type = other DNA
tttgtatacgggattagcgccggcgacaattacgctctgtctggcggtagtagcgcggcaagtcaccggaggattatcgccgaaatcctatgggggacctataacccaggcaacgaggccgcactgaactacccctacggagccgagtccatctacgggcctctgttcgattactgctgtgccgcctgggctaagctcttctccgctttcggcatgtcttacgacgcttctgcgggcgctgctctggct

SEQ ID NO: 35480 - DNA, 30 bp, synthetic construct
  source 1..30: mol_type = other DNA
atgaccagccccttctcctacggaacagag

SEQ ID NO: 35481 - DNA, 33 bp, synthetic construct
  source 1..33: mol_type = other DNA
tacatcccctatggcatgtgggacagcgtgttc

SEQ ID NO: 35482 - DNA, 105 bp, synthetic construct
  source 1..105: mol_type = other DNA
gctcccgagctttctgatgctgcactgagtggtaacgacgtatatgtcggttcgttgatgtcttccctcgccgctgaaacctcccggacaagcatctccgctatg

SEQ ID NO: 35483 - DNA, 63 bp, synthetic construct
  source 1..63: mol_type = other DNA
cacgactccgggaacgcatcgaaatcgtccaccgtgatctacgcacaaaatatggataaggga

SEQ ID NO: 35484 - DNA, 114 bp, synthetic construct
  source 1..114: mol_type = other DNA
aacactttttccaagatcaagtgtaaccactcgcttaattcaaacgtgaacaagtacctggagttccggtggagtaataatgacacaaagatgaccagcgtcctcatccttgat

SEQ ID NO: 35485 - DNA, 60 bp, synthetic construct
  source 1..60: mol_type = other DNA
cggaactacaatccatcgggagactatgcctccttcaatgtcctgaaagttaactcatca

SEQ ID NO: 35486 - DNA, 294 bp, synthetic construct
  source 1..294: mol_type = other DNA
aacgacaccaagaccttctacgttctgaaagtcggcagcagcatcgagttcgactacctcaacgtgacctcttacgggatgccctttcggctggattacgatgtggacaatgagactctgctgaacatttgcatctacgactctgagggaaatgtcgtgttcgacaagaacttcaatgagatctccgagctccctgaggacatgtccaacctcactgaggaggcctacctgggctattacttcttcatataccgaaacctgaccgtcggaaactacagcttcgagttcaccaac

SEQ ID NO: 35487 - DNA, 225 bp, synthetic construct
  source 1..225: mol_type = other DNA
gtcacctccatccccttcactgtggccaaggccgatgtggccctgagcgtcgaggtgctggacaaggtttacaccgctgacattaaaggcaacgtgtttgcttctgtggacggagagtatacagtagttatcggcaacaatattatccctgtgaccgtcctcaacggcgttggcgcattcgacgtcggcgtcctgaacgtcgggaattacactgtccgtgttatg

SEQ ID NO: 35488 - DNA, 54 bp, synthetic construct
  source 1..54: mol_type = other DNA
gtcaacgagagcaccttcaaggtgactcagtttggcaccaatttcaacatcgct

SEQ ID NO: 35489 - DNA, 162 bp, synthetic construct
  source 1..162: mol_type = other DNA
aacagcattatcattgccccatccctgcctgacggcgcttctgggaatgtcacatacttcttcgccaacggcaccgtgatcggggtcctcaacgtcggcgagtccttcgtgatccccgctctggatgttgggtctcacgttgtctatgcttcgaacgcctat

SEQ ID NO: 35490 - DNA, 111 bp, synthetic construct
  source 1..111: mol_type = other DNA
gtgaatgcgtcagccaacctctcctatttcggcaagcgcatgaagatgaactccaaggagctgcagaactttaataactacctcggagatacgcaaaagcagtttagaaaa

SEQ ID NO: 35491 - DNA, 93 bp, synthetic construct
  source 1..93: mol_type = other DNA
ggagcttcagccctggaaatgggcaccaagatgaagttgtctaagaacgacatgaaggatttaacacaaatgactgctgtgatgtccagcgcc

SEQ ID NO: 35492 - DNA, 33 bp, synthetic construct
  source 1..33: mol_type = other DNA
aaggagggccgttcacaaactgacgccatcttg

SEQ ID NO: 35493 - DNA, 165 bp, synthetic construct
  source 1..165: mol_type = other DNA
aagaaaaagtctaaggactggctgaaactccttgactaccccggaaagattccaaagtatatcgcctaccacatggccctggacgaaggatgcaaagatcctcaaaagtgctttttcggcgtggctgacacacacatcaacaagatcatgaacaccgcatatcct

SEQ ID NO: 35494 - DNA, 51 bp, synthetic construct
  source 1..51: mol_type = other DNA
cccatgaataacaaggtggaggatttcagagacgggaaaaccaagtctatc

SEQ ID NO: 35495 - DNA, 114 bp, synthetic construct
  source 1..114: mol_type = other DNA
gagtccatccttcggaacattttgaccgcccggggcttcgctaaccccgggacctacgaatactacgccaatagtaaacgcagtaatcagcaagtctgggatcaggtcagatgc

SEQ ID NO: 35496 - DNA, 81 bp, synthetic construct
  source 1..81: mol_type = other DNA
gagatgatcgtagaaattggacagatgctcggcctgggaggcagccttgtgcatgggtcctggaagggggaaggtcacatg

SEQ ID NO: 35497 - DNA, 48 bp, synthetic construct
  source 1..48: mol_type = other DNA
gccatggtggctggcaaactatatgacatgacccagttccaaaaaagg

SEQ ID NO: 35498 - DNA, 192 bp, synthetic construct
  source 1..192: mol_type = other DNA
ttccgcgggactccgggggtagtctttgggagcaacgaaaagagccattcctccaaaagagtatccggacccaacggcagtaactcaaaaaagggggacgtgacaatctttaacgtaaataacgatttttctaacgcccggatctatggtatcgacgacctggataaccatatcaaagagaccaccaaggag

SEQ ID NO: 35499 - DNA, 120 bp, synthetic construct
  source 1..120: mol_type = other DNA
gagaccatcaacgccaaatccgagatgaatggctattttcaaatgttggggtacagcacacgccaagtcgacgaatttaacaaggctctggacgtgacagtcaagaagttccctagactg

SEQ ID NO: 35500 - DNA, 120 bp, synthetic construct
  source 1..120: mol_type = other DNA
gaaatgaaaaaggcaatgcccgtcgtgtctatgattaccagcgagtacctgcgggctggcaggaatgtgaacgaggcctccctggccgttaaggacatcctacaaggcgagttccaacgc

SEQ ID NO: 35501 - DNA, 102 bp, synthetic construct
  source 1..102: mol_type = other DNA
gaaatcatttctgaggctaaggacacagtagacgatctaacttcaaagaaggagcggctggctgagaagctcgacacccttgagaaaggcacttacgcttac

SEQ ID NO: 35502 - DNA, 84 bp, synthetic construct
  source 1..84: mol_type = other DNA
gctacaagcgtgcagaacgccctcaacgagcttgagaacaccaagctgaccgacaaggaggtgactgtgcttatccggcgcaaa

SEQ ID NO: 35503 - DNA, 132 bp, synthetic construct
  source 1..132: mol_type = other DNA
ggcaacgagattgccgacgctaaggaggagcttggcaacgccacaagcctgaccgaatatcttgacaaatggctgtggttacaagttaaacagatcaagaacgcattcgtggattgggacatacacaacgac

SEQ ID NO: 35504 - DNA, 81 bp, synthetic construct
  source 1..81: mol_type = other DNA
acccaggccctggccaaggattggggcctcgaaggggttggtactcggttcgtggataagattaaggaggagggcctgggt

SEQ ID NO: 35505 - DNA, 102 bp, synthetic construct
  source 1..102: mol_type = other DNA
acagacgccctctacgacttctttcacatggatacctttgctagcgacctggagcagttcaagcaaggattccaagacatgttcaaagacctggacttcgac

SEQ ID NO: 35506 - DNA, 123 bp, synthetic construct
  source 1..123: mol_type = other DNA
cctgcccctgcgtccgcctctgacgggaccagcgatcacccatcattcatggaggacgttagcgctatacttggatttgacgtgcagtcttgggtggacagtttctcaagcgatccgctggga

SEQ ID NO: 35507 - DNA, 30 bp, synthetic construct
  source 1..30: mol_type = other DNA
tctcaatgggtctatagttcattcgtcaag

SEQ ID NO: 35508 - DNA, 51 bp, synthetic construct
  source 1..51: mol_type = other DNA
acggacgagaatgtctctgcaagtaacaaagggaagagcatcgcccactgg

SEQ ID NO: 35509 - DNA, 126 bp, synthetic construct
  source 1..126: mol_type = other DNA
ctggcactgatcgctctcgccaacaccttcgggttcagcggttccatggcgcacggtagttggacagaccctagtggcaagaaaaccgcccacgtctgggctgtcattaacggcgtcaagatggac

SEQ ID NO: 35510 - DNA, 54 bp, synthetic construct
  source 1..54: mol_type = other DNA
acagggatgcagcagcggggaagttggcgccctagtgcctctgctggaggtaac

SEQ ID NO: 35511 - DNA, 120 bp, synthetic construct
  source 1..120: mol_type = other DNA
gatgtggacggcgactacattgtgaacatcaacggaaaggagaccgtggtcaacgttagggatggggtcggcaacagcccagttgacctgaacgccggcgagtacacaacatctacacgg

SEQ ID NO: 35512 - DNA, 201 bp, synthetic construct
  source 1..201: mol_type = other DNA
atctctgagagcgtcttcaaggtctataacgcaatcaacaacgtaatagtaaatgtggaagacgtgatatacggggaacaatccctgatcatcatcatcgctgatgccgatgggaattatattgtcaacataaatgggaagagagtgacagtgaatgtggccggtggcaaaggaaatgcctctgtggcccttgatgccaac

SEQ ID NO: 35513 - DNA, 93 bp, synthetic construct
  source 1..93: mol_type = other DNA
gtgtcttacggcacctccgccgtgatcaagatcagcgctgacgtcgatgggaactacaccgtcaatatcaacggcactacaatcaacgtgaac

SEQ ID NO: 35514 - DNA, 156 bp, synthetic construct
  source 1..156: mol_type = other DNA
ttcaccctgccccggctcgactctggcgagtacctgatcatcgctaactacactggcgatcacaactaccttagcgcggtgtcgatgctgaaaatcaagattaacacacctaccggaaatgtcgtggtgtccgtcgaggatgtcagctatggaact

SEQ ID NO: 35515 - DNA, 114 bp, synthetic construct
  source 1..114: mol_type = other DNA
tctgtgattaatatcgtggccgaggtggacgggacatacaccgtcaagattaacggcaagactgtgaccgtgaacgtgttcaacggcgtcggaagtaactccatctcccttgac

SEQ ID NO: 35516 - DNA, 117 bp, synthetic construct
  source 1..117: mol_type = other DNA
ggcagctactctaccgaaacatccttcctcggcaattacgacctcaatgtgaccgaggctgacttcgaggtcaaaaaggccgagatgagcctgaacatctccgtcgccaacgttact

SEQ ID NO: 35517 - DNA, 234 bp, synthetic construct
  source 1..234: mol_type = other DNA
aacgtggaatatgtcgtatacgcgtctgtcgacgggatgtacaatgtgacagtcggcagtgctagcatgacagtcaatgtcatcaacggcatctgcaagtttgacgttggggtgctggacgccggtgactacaacgccacggtccggttttccggatctaagaactataataacaacaccaacgccaccaacttcaccgtggagaaagcagacatcttcctcctgatctctgtg

SEQ ID NO: 35518 - DNA, 201 bp, synthetic construct
  source 1..201: mol_type = other DNA
tatgagacaatagtgaacgaagttggcttcatcgtgaacaagatcgataacgactttagaatccttgtgaatgacatcgtgctcggatcttcctctataattaacttaataagtacaattgatgggatttacgaaatttctatcaatgacacagttgggaacatcaccgtcaagaacggggtcggaagttacgacgctggc

SEQ ID NO: 35519 - DNA, 87 bp, synthetic construct
  source 1..87: mol_type = other DNA
gatagtggcgtctatgacctgacactcaaagtttcagttaccattatgagcatccacggggttgagcagcccttaagtcagtactcg

SEQ ID NO: 35520 - DNA, 75 bp, synthetic construct
  source 1..75: mol_type = other DNA
gcagttggttattttcggaataaggatgacgatgagaaaatcaccgacctggacaagctgttcaacgagatgcgg

SEQ ID NO: 35521 - DNA, 36 bp, synthetic construct
  source 1..36: mol_type = other DNA
ggctacttccgggatagcgatgacaaggacaagaag

SEQ ID NO: 35522 - DNA, 30 bp, synthetic construct
  source 1..30: mol_type = other DNA
gacctcgataagctgttccgggagaagttt

SEQ ID NO: 35523 - DNA, 195 bp, synthetic construct
  source 1..195: mol_type = other DNA
tgcgagaataccacctccttctgggtcttcgccgcctacccaatcgaagctgaggacacctacattatctacaacacaaacaactacttcaaggctaagttttacgatgagaaccacaacgttttatccaacaaatatgtcgtcttcaatgttggagggaaggactacgcccggctgacagacgactatggatgg

SEQ ID NO: 35524 - DNA, 42 bp, synthetic construct
  source 1..42: mol_type = other DNA
atatacaatgagaaaaccaccaacaagattgtgatcttctcc

SEQ ID NO: 35525 - DNA, 123 bp, synthetic construct
  source 1..123: mol_type = other DNA
gcccacaatagctctgccgacttttacgctactttcctggacaacaaggcaaagcctctctccaacacacccgtgatcttcaaagtgaacggcagtgactacaccgtgaacaccaacatggac

SEQ ID NO: 35526 - DNA, 45 bp, synthetic construct
  source 1..45: mol_type = other DNA
aaaaccaacatcgtcacaatcgtgcctagcatacaggccaagaat

SEQ ID NO: 35527 - DNA, 45 bp, synthetic construct
  source 1..45: mol_type = other DNA
aaggccaccttcatcggcgctaataacgactacctgaacaacacc

SEQ ID NO: 35528 - DNA, 75 bp, synthetic construct
  source 1..75: mol_type = other DNA
gtgaccttcgaaatcggcagccgcaaataccctgcgatgaccgacgaaaagggcattgccatcctgaacgttccc

SEQ ID NO: 35529 - DNA, 174 bp, synthetic construct
  source 1..174: mol_type = other DNA
tccaccgagcatattccaaagaacggagtgatcgtcaaaactatttctaagctggactctggcaagtaccctatcaacgttaagttcgaaggcaacaataactacaatccactgaatgctaccgccgtgctcaaggtcaataagctgtctacaacgctcaagctcagctacgtc

SEQ ID NO: 35530 - DNA, 177 bp, synthetic construct
  source 1..177: mol_type = other DNA
gtgaccctgaccgccctcgtgaacccctcttctgctgggggaaacgtagtattcactgtgaacggcaagaactatacctccaagatcagccggggcaaggccacatacaagctgtccgacctgagcgccgggtcctacactgtaaatgctgtctacaagggcgacgtcaatcacaag

SEQ ID NO: 35531 - DNA, 123 bp, synthetic construct
  source 1..123: mol_type = other DNA
agcgaaaagctagtaataactctcacaaacccagactctaaggccgtgtccaacgtcaacatcaaggtgtcgctcgccgggaaggactacactctgaccaccgacaagaatggaaaggcgtct

SEQ ID NO: 35532 - DNA, 75 bp, synthetic construct
  source 1..75: mol_type = other DNA
gcctcctctagcattaacttcaacgtcgtggagcgatatgtcgtcataactgcgccggacgttaccaagaactac

SEQ ID NO: 35533 - DNA, 87 bp, synthetic construct
  source 1..87: mol_type = other DNA
actaatcaggacttcaaggcggttgggaatgccgggatcaaggtcagcctagctggaaaagactacacactgaccaccgacaagaac

SEQ ID NO: 35534 - DNA, 60 bp, synthetic construct
  source 1..60: mol_type = other DNA
gccgacatcgtgtttgtcgggaatagcgaatacctgcccgagtccacactcgtcaaggtg

SEQ ID NO: 35535 - DNA, 63 bp, synthetic construct
  source 1..63: mol_type = other DNA
gtgaacggaaaggactatacggtcaaaatcagcgggggaaaggctactctgaagctctctgat

SEQ ID NO: 35536 - DNA, 210 bp, synthetic construct
  source 1..210: mol_type = other DNA
gtcagcaacgccgaaattagggtctccctcgacggcaccgtgtacacactgaccactgacaagaacggcaaagctagccttgacctggggctggacagtggcatctacgatgcctatatcgtgtttgtcggaaacgaggactacaaatccgagacaaagattgtgaagattaccatcaaccggctgatcaccaatatcggcctctcttac

SEQ ID NO: 35537 - DNA, 138 bp, synthetic construct
  source 1..138: mol_type = other DNA
aatcccagctctactgagggcattgtggtcttcaccgtgaacgacaaggattacgaggtcaagctttccggcggcaaggctatcctgaagctcagcgacctggcccctgcctcctatgacgtggaagcaacatacgtg

SEQ ID NO: 35538 - DNA, 222 bp, synthetic construct
  source 1..222: mol_type = other DNA
atatcaaacaccatcatattcaccgtagaggagcccaagtataagatttctgcaccggacgtaaccaagtattaccacgggcctgaaagatttgtcgttaccgtcaaagacaagaagaacaaccctatcgtgaacggcaaagtgactattacactgaacggggtaccctacaaccgaaccactgacgccaacggacaggcttccatggctattaacctcgac

SEQ ID NO: 35539 - DNA, 162 bp, synthetic construct
  source 1..162: mol_type = other DNA
gggagcaactgcacggcagtgctgaccgccgttggcaagtattatgccatagctgtctttaacgacgacaactacgacatcaccatcaataatgacacgttcgacgtgctgaaggctataaataacatcaaagtagaagtaaactctgtgaactaccccaat

SEQ ID NO: 35540 - DNA, 45 bp, synthetic construct
  source 1..45: mol_type = other DNA
atcaataacatcaagattgaggtcaacgataccatctaccctaac

SEQ ID NO: 35541 - DNA, 156 bp, synthetic construct
  source 1..156: mol_type = other DNA
accgtgaagctcaccgccgacatagctggcgtgtatactgtgaagctgaacggcacagagctgcacatcaatgtggacgagaacaaggggaccgggttcaaaagcctgaacctcacaccgggaaagtacaacgcctccgtgatatatactgattac

SEQ ID NO: 35542 - DNA, 72 bp, synthetic construct
  source 1..72: mol_type = other DNA
ggctacttccgggataaggacgaaagcaagaaaagcaataacaacctggacgagctgttcaatcaagaacta

SEQ ID NO: 35543 - DNA, 66 bp, synthetic construct
  source 1..66: mol_type = other DNA
ggctactttaggaacgaggacgacaaggataaggtgcaggacctggacaaactcttcaatgagaga

SEQ ID NO: 35544 - DNA, 72 bp, synthetic construct
  source 1..72: mol_type = other DNA
gtgggctactttcggaatgaggacgacaaggataaggtgcaagacctggacaaacttttcaatgagagagga

SEQ ID NO: 35545 - DNA, 69 bp, synthetic construct
  source 1..69: mol_type = other DNA
gtgggctattttcggaataacgacaacaaggataaggtccaggacctggataagctcttcaatgagcgg

SEQ ID NO: 35546 - DNA, 33 bp, synthetic construct
  source 1..33: mol_type = other DNA
ggctactttcgcaacaagcgcaatgacgagttc

SEQ ID NO: 35547 - DNA, 66 bp, synthetic construct
  source 1..66: mol_type = other DNA
tacttccgggacgaggatgacaaggataaggtgcaggacctggacaagctcttcgacgagaaagtg

SEQ ID NO: 35548 - DNA, 72 bp, synthetic construct
  source 1..72: mol_type = other DNA
gagatcttcgctaaaggatcccagataagtattaccggcgacgcggtggcatacatcgagaacactaccttt

SEQ ID NO: 35549 - DNA, 273 bp, synthetic construct
  source 1..273: mol_type = other DNA
atcacctcttcctacgcgccggccgtctatgtgaagagcgccaaagcaagcatagtgaacagtaaattcttggatctgaaggcaaacattaccgcgggcgcaatcgccacaaaggaaggcggcgagttgtacatcgagaactgcgagttcgagaacgtgacaagctccaagaatggtggtgcaatttacgcggatgtagcaggcgagaacgacgtcactgggaacgttacaataatcgacacgcagttcaaggatacttatagcgaatttggg

SEQ ID NO: 35550 - DNA, 90 bp, synthetic construct
  source 1..90: mol_type = other DNA
ttcgtgctcaacaacaccgagtttatcaactcccacgccaagtataacggcggagctatctacctgagcaacaccaataccgagattaat

SEQ ID NO: 35551 - DNA, 57 bp, synthetic construct
  source 1..57: mol_type = other DNA
aagttcttcaataacctggcctccgctggaagtgcagtttacgcctacgacaactct

SEQ ID NO: 35552 - DNA, 90 bp, synthetic construct
  source 1..90: mol_type = other DNA
agcatcaagaactctacattcgagaataacgccaatcccatctacaccgtctttgataaggaatccgtgctggagaacaacgactatatc

SEQ ID NO: 35553 - DNA, 63 bp, synthetic construct
  source 1..63: mol_type = other DNA
gataagggcggacaggtcatggggagcaccgacgcccggttttacctggagaacgtgacattc

SEQ ID NO: 35554 - DNA, 213 bp, synthetic construct
  source 1..213: mol_type = other DNA
acaaccgcaacttatgcaccagcaatttatctggttggtagcaaggccaaaatcatagactcgaaattcataaaccttaaagccaacatgaccgccggggccatgagcctgcgggaaggcggcgaattgtatataaagaattgcgagttcattaacactacctctagtcggaacgccggcgccatatacgtggacatcaccggatatcaggga

SEQ ID NO: 35555 - DNA, 33 bp, synthetic construct
  source 1..33: mol_type = other DNA
gatggcaacgtgaccattatcgactctaaattc

SEQ ID NO: 35556 - DNA, 48 bp, synthetic construct
  source 1..48: mol_type = other DNA
tggctgagcaattgcgagttcatcaacaatcacgccacctttaacggt

SEQ ID NO: 35557 - DNA, 105 bp, synthetic construct
  source 1..105: mol_type = other DNA
aagtttttcaacaatgtggccagtgaaggcaatgcaatctacgcttatgactcctccctgaacattaaaggctccaccttcaagaacaacacaaacgctatttac

SEQ ID NO: 35558 - DNA, 189 bp, synthetic construct
  source 1..189: mol_type = other DNA
aacaataccatcaacgtggatatcctgcccgctaagttcgacctgcgggactgggaatgggtgtcaagtgtcaagaatcagggctggatgggcgcttgctggacttttggcatgtccggcgccctcgaatccgcccttctgaaggccacagggatttccttcaacatcagcatgaacaacatgaagacc

SEQ ID NO: 35559 - DNA, 87 bp, synthetic construct
  source 1..87: mol_type = other DNA
ctccttagctggctgggcgccatcccttacgacacagacacctatgacgagctcggcaagattaccatgcccatcatcaccgatcag

SEQ ID NO: 35560 - DNA, 33 bp, synthetic construct
  source 1..33: mol_type = other DNA
gatgacgacctgatcgccgccgtcggcacctac

SEQ ID NO: 35561 - DNA, 69 bp, synthetic construct
  source 1..69: mol_type = other DNA
agctataccgtggagatctacgtgaacgacgagctgaagttgacacaagagggcgtcagcccttatgtg

SEQ ID NO: 35562 - DNA, 78 bp, synthetic construct
  source 1..78: mol_type = other DNA
gacagctacatccctatcaagaagggggatgtgttcaaagccgctattacctccaactgggtcccatacctcctgctg

SEQ ID NO: 35563 - DNA, 42 bp, synthetic construct
  source 1..42: mol_type = other DNA
tctttcgacgggaaaacatggaaggacgcatatgatttgggc

SEQ ID NO: 35564 - DNA, 108 bp, synthetic construct
  source 1..108: mol_type = other DNA
ctgaaggtttataccgtggccgacgactctaagattatcaacaataaggatataacagtggactatggatcaggcagctatttctccgtcaaggttgtcaccgcggat

SEQ ID NO: 35565 - DNA, 36 bp, synthetic construct
  source 1..36: mol_type = other DNA
gtgggctacttccggaacaaggacgacatcgataag

SEQ ID NO: 35566 - DNA, 69 bp, synthetic construct
  source 1..69: mol_type = other DNA
ggctacttccggaatgaagacgacaaggacaaggtgcaggatctcgataagctgttcaacgagaaactg

SEQ ID NO: 35567 - DNA, 72 bp, synthetic construct
  source 1..72: mol_type = other DNA
gtcggatactttagaaatgaggacgataaggataaagtgcaggacctggacaagctgtttaacgaaagacag

SEQ ID NO: 35568 - DNA, 69 bp, synthetic construct
  source 1..69: mol_type = other DNA
ggctacttccggaatgaggatgacaaggacaaggtgcaggacctggacaagctctttaacgagaaactg

SEQ ID NO: 35569 - DNA, 72 bp, synthetic construct
  source 1..72: mol_type = other DNA
gtgggatacttccggaatgaggacgataaggacaaggtgcaggacctggataaactgttcgagaacaagtgg

SEQ ID NO: 35570 - DNA, 69 bp, synthetic construct
  source 1..69: mol_type = other DNA
ggctactttcggaacgaagatgacaaggacaaagtgcaggatctcgacaagctgttcgagaacaagagg

SEQ ID NO: 35571 - DNA, 39 bp, synthetic construct
  source 1..39: mol_type = other DNA
acgttcgactctaatggcgtcgatgtgatcgagggatac

SEQ ID NO: 35572 - DNA, 48 bp, synthetic construct
  source 1..48: mol_type = other DNA
cggttcttcaataactttgccggagaaggcaacgccatctacgcttac

SEQ ID NO: 35573 - DNA, 96 bp, synthetic construct
  source 1..96: mol_type = other DNA
tctttcaacatcaagggctccaccttcaagaacaacaagaatgctgtattttcggtctttacaaaaaagtacaccattgacaagaacactgaactg

SEQ ID NO: 35574 - DNA, 198 bp, synthetic construct
  source 1..198: mol_type = other DNA
accttagttaacaacactatcaatgtggacgtcattcctgcaaagttcgatctgcgggactggggttgggttagctctgtcaagaaccagggctggatgggcgcttgctggacctttggcatgacagggtccctcgagtccgtgctgctcaaagccaccggcatccctttcaacgtctcgatgaacaacatgaagaca

SEQ ID NO: 35575 - DNA, 96 bp, synthetic construct
  source 1..96: mol_type = other DNA
ctgctcagctggctggggaccgtgccttacgacgtcgagacatatgatgagcttggcaagatcaccatgcccatcgtgactgacaactccatccat

SEQ ID NO: 35576 - DNA, 57 bp, synthetic construct
  source 1..57: mol_type = other DNA
gtgagcttcgacggcaagacttggcaagatgcctacgacctgggttatatagcatgc

SEQ ID NO: 35577 - DNA, 141 bp, synthetic construct
  source 1..141: mol_type = other DNA
tgtgggttcaactgtcagtacaacgtcccaatttttcacgagagctatcaatacggactttaccgggacaaatatatgtccctcgatgaatataagaagcaatattttgattcctcacgcaaatacacagttgggttgctt

SEQ ID NO: 35578 - DNA, 111 bp, synthetic construct
  source 1..111: mol_type = other DNA
ctcaaccaaacctattacgaaaaaaaattctcccattttaatgacaagtacaaactgatccacgccgaagaccccgatctgaaggtgtctaccggagaacgcatttccttc

SEQ ID NO: 35579 - DNA, 30 bp, synthetic construct
  source 1..30: mol_type = other DNA
ggcgcctatggcggtggattcgtggactac

SEQ ID NO: 35580 - DNA, 288 bp, synthetic construct
  source 1..288: mol_type = other DNA
attgacgaagtcgagagctcacaatcggatgaaggcattctggaggccggcaacaacgtcatcaacgtcgttaacgttaaggacagctacaatgagacttccaaaacctgggacgaggatggcttcaacctggccggagcaacaattaaagtatatgatagctctaacaagctgatctccacccacaagaccgacagcaacgggaacgctatcatcaagaacctcggctcttccgtgtactacctcgaagttagctttagtacatatgagcccatcgtgaccgagaaa

SEQ ID NO: 35581 - DNA, 285 bp, synthetic construct
  source 1..285: mol_type = other DNA
gatatcctgctcctggtggattataactctcataacgagaaagtggacgtgctgatgaatatgagtcggagagtcgcgtacatcagtactaccgacttcgacaagtcccgggcttggctcgtggaatacgccaagtatatgcacatcgacatgttctcggaatctgcctactctgtcttaaccgcgaaatacctcaaggagcttcttgcaagaagccccgctaataaggactataatgtcgcctacacattctcggtttttagtaaacagattctgaacaacacc

SEQ ID NO: 35582 - DNA, 222 bp, synthetic construct
  source 1..222: mol_type = other DNA
atacacatagttggggccagcgccgcaaataatacatttgatactatcgagaacacatatattgggagctatttccaagcgcgggacatagcagagagtaatattctacaaagtaatatgaagaattaccttagctacgttaaatatctgatcgatccggagaagtatagtaacccaaccgacgacgagaataacgcacctctgatgtcccctgaatgtggt

SEQ ID NO: 35583 - DNA, 75 bp, synthetic construct
  source 1..75: mol_type = other DNA
gccgggagcgatccttcccaatcgggtaacgccaagagtgcctcggactcctcaagtagccaggatgcgtcctcc

SEQ ID NO: 35584 - DNA, 78 bp, synthetic construct
  source 1..78: mol_type = other DNA
agtaccggcggcgctaagagctacgaaatctccgagaagtctgccgccaaaagttcctctagcacggaatccagcatg

SEQ ID NO: 35585 - DNA, 60 bp, synthetic construct
  source 1..60: mol_type = other DNA
aagagctacaacaataccgccacattctatggcggcgctttttaccaaatgtatgatgag

SEQ ID NO: 35586 - DNA, 243 bp, synthetic construct
  source 1..243: mol_type = other DNA
ttctttaacatcaccgtgacctacaacgaaaacagccactattcgcaatcctctataactcagctcttcaataagcccgacgagatactgtccgtctccatcgacgacatatactacggccagaaccttatttcaaatatcaccttgaagtactctaccggctccctgataaatggcacagtggagctgctgattggaaaccatagctactccgcccaatctaatagcctcttcattattgac

SEQ ID NO: 35587 - DNA, 231 bp, synthetic construct
  source 1..231: mol_type = other DNA
gattttattatcaccgcccaatacggggagagtcaggtctctaataacatcaaagttcttcccatcctcattactaacaatctcgtgatgaagtataaggacgggtctaagttccaagcaactgccctggacggacaaggtaacccctaccccctgaccaacgtccaattcaacattaacggagtgctgtacactcgcctcaccaacgagaatggcgtcgcctctctcaac

SEQ ID NO: 35588 - DNA, 54 bp, synthetic construct
  source 1..54: mol_type = other DNA
attacctccttctacaacgggtacagcgccggcaacacagtcgtgatctcttgg

SEQ ID NO: 35589 - DNA, 129 bp, synthetic construct
  source 1..129: mol_type = other DNA
atgctgcctagcgggttcgtgtttgtctcggcgagttccggcaacgtcaccgccggacagaaggtgtcttggataatcgaccgactaaacgtcggagatgtccgtgaattctggatagtcgctagaagt

SEQ ID NO: 35590 - DNA, 90 bp, synthetic construct
  source 1..90: mol_type = other DNA
tggacgaacgtggtcgaagtcaactccactgagaatgtgaccgtggtggacagcaacgtcaccatcgacgttcggcctttaacggtggtg

SEQ ID NO: 35591 - DNA, 174 bp, synthetic construct
  source 1..174: mol_type = other DNA
aacgccaccaacatcaccgtcaaggatgtgctgcccggcgagtttgcttttgtgaacgcgactgcgggttacacacggagcggccaattggtcagctggaccattgacaagctcgatgtgaacggagtcgagacattctggattatcgctaagactatcgccaccaatgcaacc

SEQ ID NO: 35592 - DNA, 45 bp, synthetic construct
  source 1..45: mol_type = other DNA
acaggcaagttcgacgtgaacgtcgttgaagttaatgcgacactg

SEQ ID NO: 35593 - DNA, 135 bp, synthetic construct
  source 1..135: mol_type = other DNA
acggtctgcgatagcctccctgacggatttgctttcgtgaacgccaccggcgtgtacacccggaacggccaggagatcaagtggtacttcgataccctgaagcccggacaaattgttgagctgtggatcactgcc

SEQ ID NO: 35594 - DNA, 138 bp, synthetic construct
  source 1..138: mol_type = other DNA
acaatcaaggacgtgctgcctgacggcttcacttttgttggagcctctgataactacaagcagagcggacaggtggtcgagtggtacttcgacaagctgaccaagggagaatacaagctgtggattgtcgctaagagc

SEQ ID NO: 35595 - DNA, 96 bp, synthetic construct
  source 1..96: mol_type = other DNA
gcttttgtgaacgccaccggcaaccccacacggaatgggcaggaaatcaagtggcacttcgacaagctgactaagggctacttcgagctggagatt

SEQ ID NO: 35596 - DNA, 84 bp, synthetic construct
  source 1..84: mol_type = other DNA
accgtagtaaaagaggtcagcgccaagacaattgacgtgctggggctcgtcaatttcacaatcaccatcaccaacaacggaaag

SEQ ID NO: 35597 - DNA, 186 bp, synthetic construct
  source 1..186: mol_type = other DNA
gccacgaacgtctccattgccgatatcatggacctgagcgtcttcaacatcaccaatcacaacgggacatatgtacaaaaagggaatgaactagtctggaatatcgggtctctgaatgtcggagaaacttacaaggtctggattgaggcaaaagctctgacacacggaaccttcaccaacgtagtc

SEQ ID NO: 35598 - DNA, 114 bp, synthetic construct
  source 1..114: mol_type = other DNA
tccgataatgtctccgtgaaggttatcccggtggtcaatctaaccgttgtgaagaccgtggacgtcaagaagatcgccctcaacggcctgattactttcaccatcaacgttaca

SEQ ID NO: 35599 - DNA, 183 bp, synthetic construct
  source 1..183: mol_type = other DNA
gctaccaacgtggatatcgatgacgtgcttcccaacgagctggagttcatagacgcaaccgaaggctacatatacggccaccagctcactgtgtctctgatcgagcctggcaaatcctttgtgttcaacatcacggcccggggactgacagccggcaattggacgaacatagtgaacgttgat

SEQ ID NO: 35600 - DNA, 36 bp, synthetic construct
  source 1..36: mol_type = other DNA
acagttgtgaagaccgccgacgagatcattgtagcc

SEQ ID NO: 35601 - DNA, 246 bp, synthetic construct
  source 1..246: mol_type = other DNA
aattacactattagcatcacaaacccatctgactttaatgccacaaacatctgggtcttcgattacctgatggacggcttcgagttcgtcaacgctactgagggctactatttgacacaaggaatagtgtcttggaacatccacaacattacaaagggcgaaaccctcgagctttggatcgttgtgaaaacgaccaaagtcgggaatctgaccaacaatgttaacgtcatttgcgatgagtcagac

SEQ ID NO: 35602 - DNA, 57 bp, synthetic construct
  source 1..57: mol_type = other DNA
gccaacgtcaacgtgaccgagatcaacggcgaggtcgtgtttaccgtcaatgtaact

SEQ ID NO: 35603 - DNA, 177 bp, synthetic construct
  source 1..177: mol_type = other DNA
ctcgtgaacgtcaccgacattatccccgtcggcttcgagttcgtggaatctagcgacaaggggtacaactccactaccggacggctgaccattccttttatcaaagccggcgaaagttacgtgttcacaatcaccctgaaggctgtgatcaacggcacactgacaaacgtcgtaaac

SEQ ID NO: 35604 - DNA, 213 bp, synthetic construct
  source 1..213: mol_type = other DNA
gtggatctgaacgacacaactatcggagatgtcgtgactttcaccatcaccgtgatcaacaatgggccctccaaggcaacgaatatcaaggtcgtggactctctggacctgaacggctttcggcatcttactggagacctcaacaccaccatagacagcctcgcttccggcgagaactgcaccatcgttatacaagctgcaactactgctaat

SEQ ID NO: 35605 - DNA, 75 bp, synthetic construct
  source 1..75: mol_type = other DNA
aacagggtgacggttaaatgcgatcaaaacgacaccatcaagtccgccaatgccagcgtgtattattctagcgtt

SEQ ID NO: 35606 - DNA, 207 bp, synthetic construct
  source 1..207: mol_type = other DNA
gacgtgattaacttcacaattaccgtcaagaatcacggaatgtccaacgccaccaacgtgcacatcatcgatgaactcaactctgcttttgagttcgtcaatgctagcgccggctacaagctgtcaggcaaaacagtcacctggaatatcagccggatcgccaacgagactacatattccgtttggattgtggtcagggttttgacc

SEQ ID NO: 35607 - DNA, 240 bp, synthetic construct
  source 1..240: mol_type = other DNA
cttaccgtcgtgaaggtggtcgagggcgacgatgacgccacaatcggcgatgtcatcacatacactatcatcgtgaccaacaacggcccctctaatgctactaacatcaaagtgatcgacattcctgacaagggactgaagattctgggggacaaatatgagacggtcattggcttcctcgaatccgggaacagcaccaatattacaatccaggttcgcacgacagccaagggaacctat

SEQ ID NO: 35608 - DNA, 147 bp, synthetic construct
  source 1..147: mol_type = other DNA
accaatgtgcacatcatcgacgaactgaacagcgcgttcgagtttgtggatgccagtgccggctatacccggaacggccagacagtgacatggaacatccccaagctggcaaacgagacttcttactcggtttggatcgtcgttaga

SEQ ID NO: 35609 - DNA, 123 bp, synthetic construct
  source 1..123: mol_type = other DNA
accgttaagaatacaacctctaccgtgaacgtggcgcccgtcgttaacctgactgtagttaaaagtgctgacgtttccgtcgtggacgtcaacggcgaggtagtgtttaccgtcaatgtgact

SEQ ID NO: 35610 - DNA, 195 bp, synthetic construct
  source 1..195: mol_type = other DNA
cagtacaccgtggtcatcggcaactattccgtcttagtaaccgttttaaacggggtcggtgccttcgatgtcggagtgctggatgttggttcgtatacggtcagagtcattttcgctgggaacgacaactacaacgggaatgtgaacgagagtaccttcgaggtgacccagagcggcactaagttcaacatcgtg

SEQ ID NO: 35611 - DNA, 51 bp, synthetic construct
  source 1..51: mol_type = other DNA
gacgtcgagtacataaatgttaattatgtgaacaatgtgacatccatcccc

SEQ ID NO: 35612 - DNA, 141 bp, synthetic construct
  source 1..141: mol_type = other DNA
accgtggctaaggctaatgtagcgctgtccgttgaagtcctcgatgttgtgtattcggcggacgtggacgggcagtattccgtcgtcattggggacaacatcatccctgtgacggtcttgaatggcgtcggagcattcaat

SEQ ID NO: 35613 - DNA, 159 bp, synthetic construct
  source 1..159: mol_type = other DNA
tccgtgattaaggtgctgaacgttggcgaatctttcacaatgcccgtgctcgatgctgggtcctacgtcgtctacgctaactatagtggcgacagcaactacgcccctgcccgggactctctgactatcaccgtcaatagggccgtgaacaatgttctg

SEQ ID NO: 35614 - DNA, 39 bp, synthetic construct
  source 1..39: mol_type = other DNA
acgattaccgttgttgccgacgtggatggcgagtattac

SEQ ID NO: 35615 - DNA, 204 bp, synthetic construct
  source 1..204: mol_type = other DNA
gttgtgaacgtgtccaatggaatgggcgtgtccgtggtcgccctggatgctgggtcctacttcgccgacgttggttatgtcaacgtgaattacgtgaacaacgtcatctctattccctttagcgtcgtcaaggccggcgtggctctgagcgtcgaggtgctcgacgtggtttattctgcggatgttgagggcaatgtctttgct

SEQ ID NO: 35616 - DNA, 57 bp, synthetic construct
  source 1..57: mol_type = other DNA
ctggacgtcgtgtactccgccgatgttgggggcaacgtgttcgctagcgtggatggg

SEQ ID NO: 35617 - DNA, 30 bp, synthetic construct
  source 1..30: mol_type = other DNA
ctgaacgtcgacgagagcttcgtgcttagc

SEQ ID NO: 35618 - DNA, 90 bp, synthetic construct
  source 1..90: mol_type = other DNA
tctggcgatagcaactatgcgcctgctcgagactccctgacaatcactgtgaataaggctatcaacaacgtgctcgtgttcggacaagac

SEQ ID NO: 35619 - DNA, 114 bp, synthetic construct
  source 1..114: mol_type = other DNA
ctaataacggtggtcgctgatgtggacggcgaatactacgtcgatgtcggaggcaaaataatcgtagtcaacgtgtccaacgggatgggagtcaataccatcgctctcgatgct

SEQ ID NO: 35620 - DNA, 210 bp, synthetic construct
  source 1..210: mol_type = other DNA
gggagctacgaggaggctattcccgtggaaaacgcctctatcaccctcattaaggaaaatgatgtgacaaagatctacaccacgacaacagacaagaagggcacttactccctgaaagacatcagttcgggaaactacgagctgtctattaactacaagacctattccacctataagaagaacatcaccatcaatagcgccttgactgtg

SEQ ID NO: 35621 - DNA, 63 bp, synthetic construct
  source 1..63: mol_type = other DNA
cagaccgtgcccatcgtggacggcaaggccgtcgtggacataagcgatctggaacctggtaac

SEQ ID NO: 35622 - DNA, 105 bp, synthetic construct
  source 1..105: mol_type = other DNA
accgtgtccgttagctgcaacgagaacgacactatcatcaccacaaacgccaccgtcgatgtgctgcccgtgaccgccaatattactaaggaggccaatgtcacc

SEQ ID NO: 35623 - DNA, 201 bp, synthetic construct
  source 1..201: mol_type = other DNA
gtgaactttactattagcgttaactatacctctgacgtcaatgcaactaatgtgacgattaaagacgttcttcctgacggtttcacctttgttggtgcatcaggcaactacaaacagacagggcaagtggtggagtggtactttgataaactgaccaacggcgagtacaagctctggatcgtggcgaagtcaaacgccgta

SEQ ID NO: 35624 - DNA, 42 bp, synthetic construct
  source 1..42: mol_type = other DNA
tccacaattctcggcgacaacgccaccgtcgatgtgattcca

SEQ ID NO: 35625 - DNA, 78 bp, synthetic construct
  source 1..78: mol_type = other DNA
gccagcattacaaaaaaggctaatatcaccctgatcgggaacaacactctcgtgaagttcaccatcggcgtcaactac

SEQ ID NO: 35626 - DNA, 150 bp, synthetic construct
  source 1..150: mol_type = other DNA
gcaacaaacgtgaccatctgcgacgtgctgcctgacggattcgccttcgtcaacgctaccggcaaccctacacggaatggccaggagatcaagtggcactttgatactctgaccaagggctacttcgagctcgaaattgttgctcgaagc

SEQ ID NO: 35627 - DNA, 111 bp, synthetic construct
  source 1..111: mol_type = other DNA
atcaacgcacaggccaagatcgatgcctttggtaaccgcctccaaatgtcggggtccaaacttgactcctttaagagcgacctatcctccttacaatctgaattcaggaaa

SEQ ID NO: 35628 - DNA, 129 bp, synthetic construct
  source 1..129: mol_type = other DNA
agtgatgacatgactgaactatcacggactgtggccattgcttcttccgcctttgtgtctgagggccggacacaggaggatgctatcctcgcggtatctgacgccctggatggccagatgaagagaatg

SEQ ID NO: 35629 - DNA, 69 bp, synthetic construct
  source 1..69: mol_type = other DNA
accgatggcgtcatgcggctctggaatgctttcatcaatcaccccgacgttcagggtgcactgtctgcc

SEQ ID NO: 35630 - DNA, 81 bp, synthetic construct
  source 1..81: mol_type = other DNA
gggtgctctcccgggatagtacctgcactcgaaaaggtgctcgaggtcttcggggttgtctggaacgccatcgtatcctta

SEQ ID NO: 35631 - DNA, 42 bp, synthetic construct
  source 1..42: mol_type = other DNA
ttcaaaaagatggccgaggatgtgttctcccaatgccactac

SEQ ID NO: 35632 - DNA, 54 bp, synthetic construct
  source 1..54: mol_type = other DNA
tatgacagcaacaaatatgggaactggatgaccgcgttccaacacggcgatatg

SEQ ID NO: 35633 - DNA, 51 bp, synthetic construct
  source 1..51: mol_type = other DNA
cacgcctgcggcttaccggcctacaaggtgcatggccactggaacaaattc

SEQ ID NO: 35634 - DNA, 222 bp, synthetic construct
  source 1..222: mol_type = other DNA
accgtgatcaactcaaccttcatcaataacaacgtgaacggaaacggcggagctatagcattcgtaaataccaaggatggaataattatcaattccaccttcatagacaacacagcagttggctcggggggtgccgtttatatcaaccgcggtggttacataatcgattccgagttttacaataatcaagctagtaacggcggggcggttcggctaaactca

SEQ ID NO: 35635 - DNA, 231 bp, synthetic construct
  source 1..231: mol_type = other DNA
accatcaacaactctatcttcatcaacaatactgctactaatgaaggaggcgccatttactcataccgaactgccaatatcactgatagcacgtttacctccaacaacgcttcctctcaagggggcgccattacatgctcaatcgaaacatcatccaatcctacacacattaataactccacattcaacggcaatactgcgagcgcgtatcccgctataagtggccggtat

SEQ ID NO: 35636 - DNA, 45 bp, synthetic construct
  source 1..45: mol_type = other DNA
tacatcagcaacaccgccacaatgtatggcggcgctaacttcttt

SEQ ID NO: 35637 - DNA, 45 bp, synthetic construct
  source 1..45: mol_type = other DNA
acctacacaaataacactgcccggaacggcggtgctaactacttc

SEQ ID NO: 35638 - DNA, 60 bp, synthetic construct
  source 1..60: mol_type = other DNA
gggacctacaactcgaacaacgctaaatacggcggagccaactacttctacaacaaggta

SEQ ID NO: 35639 - DNA, 33 bp, synthetic construct
  source 1..33: mol_type = other DNA
aatgctgccatcaacggcggagccaactacttc

SEQ ID NO: 35640 - DNA, 108 bp, synthetic construct
  source 1..108: mol_type = other DNA
ttcatcaacaataccgctacaaagggaggcgccatctacgtggagaccgagtccactaataataactttagtagcctgttctacgacaacaaggcgatacagtccggt

SEQ ID NO: 35641 - DNA, 108 bp, synthetic construct
  source 1..108: mol_type = other DNA
aacttcatcggaaacaccgccggctacggcggaggcatcttcttctctcggaagactaatagcaaccggtttaatggggacttcatcgataacacagctctgtcctgc

SEQ ID NO: 35642 - DNA, 48 bp, synthetic construct
  source 1..48: mol_type = other DNA
gccctgggccagctcaacgagactgttggcaatggtggcgctatcacc

SEQ ID NO: 35643 - DNA, 39 bp, synthetic construct
  source 1..39: mol_type = other DNA
accgacaacaacgctagcctctatggtggcgcagttaat

SEQ ID NO: 35644 - DNA, 141 bp, synthetic construct
  source 1..141: mol_type = other DNA
ttcgagactttcgataatgttgttttcaatggggagttcatagccaactcggcggtcaaaggcggcgccatcgctacggttgacggcattattcgggatgtgtcatttaaggacaaccacgctgaagatggaggggcagtg

SEQ ID NO: 35645 - DNA, 90 bp, synthetic construct
  source 1..90: mol_type = other DNA
aattgtaactttaccgccaaccacgccaacaatgagggaggcgccgtctacttcgccgacaatggcgaagtagcaaactgcaacttcacc

SEQ ID NO: 35646 - DNA, 66 bp, synthetic construct
  source 1..66: mol_type = other DNA
tactccgggaacgtgaccgacagtatcttcacggccaacactgccggctttggaggagctgtgtat

SEQ ID NO: 35647 - DNA, 144 bp, synthetic construct
  source 1..144: mol_type = other DNA
gattatgacggaaccgtcgagaactgcaacttcaccgctaacaccgcggaatacggtggtgctgtgtactttgataacgattccgctaacatcatgaattgtaatttcatcaacaacaatgcatctagctacggaggagcagtg

SEQ ID NO: 35648 - DNA, 129 bp, synthetic construct
  source 1..129: mol_type = other DNA
ttcaccggcaacacggcagattcctcgtccggcggcgccgtggtcatggattccggaaacgtgattaattctatctttactgcaaataaggccgccagaaccggcggagcaatctacgttggagctaaa

SEQ ID NO: 35649 - DNA, 39 bp, synthetic construct
  source 1..39: mol_type = other DNA
tcaggtcaattctacaataaccaggcaggacaatctggc

SEQ ID NO: 35650 - DNA, 123 bp, synthetic construct
  source 1..123: mol_type = other DNA
aacaatacttttgatggaatcttcaaggacaacaccgccggatatggggccggcatgttcttctacaaggatgccaacggcaacaatatcaagggggacttcattaacaataccgcccaaagt

SEQ ID NO: 35651 - DNA, 30 bp, synthetic construct
  source 1..30: mol_type = other DNA
ttcatcaacaatacagcgagtctgaatggc

SEQ ID NO: 35652 - DNA, 45 bp, synthetic construct
  source 1..45: mol_type = other DNA
tcccggttcaacaagaatgatgcagtcagtggtggagctatccac

SEQ ID NO: 35653 - DNA, 261 bp, synthetic construct
  source 1..261: mol_type = other DNA
ggcgaggccttcggctggtggcatgacgtcggctccatgatcgatgctatcacgtcgaacatcggtcggctgtggaatgccttcattaatcaccctgatgtccaagccgccattagcattataagcaaggcgcttggcgatctgataaactgggtcgggaatgcgggtcgcgaggttctcaaatttttcgggatctcaaccggttccaactgggatgtagttaggtccattattgacgggatcggtgctgcatggaatgga

SEQ ID NO: 35654 - DNA, 39 bp, synthetic construct
  source 1..39: mol_type = other DNA
gggcagggcatctacaacgccctgaagcccatcgtttgc

SEQ ID NO: 35655 - DNA, 84 bp, synthetic construct
  source 1..84: mol_type = other DNA
ggatgcagccccgggatcgtgcctgctttgcaaaaagtgcaggaggtcttctctaccgtttggaacgccatcgctggcttcatt

SEQ ID NO: 35656 - DNA, 33 bp, synthetic construct
  source 1..33: mol_type = other DNA
aacgaggacgcgctcaagacctccatcggtgtg

SEQ ID NO: 35657 - DNA, 132 bp, synthetic construct
  source 1..132: mol_type = other DNA
gcctatgatgacatccctttccccaatattaaactgattaaggatacatctaacgaatgggacatgaaggggccacttgttgggcgctatcaaactaacaagggattcaaagtaaaggacttcctcaacgga

SEQ ID NO: 35658 - DNA, 30 bp, synthetic construct
  source 1..30: mol_type = other DNA
gccgaggacgtgttcggccaaacccaatac

SEQ ID NO: 35659 - DNA, 144 bp, synthetic construct
  source 1..144: mol_type = other DNA
gacgatgaccaccacggcaactggctgaacgccttcaatgccggctctatgaattgcaagcatggcgccgaggctctgatcgcactggcctctgtcttcggcttctccggggagatggtgcacggacattggaaccagtttggg

SEQ ID NO: 35660 - DNA, 81 bp, synthetic construct
  source 1..81: mol_type = other DNA
cctaagtccctgggttttaaggatctgatcgaggttctcaaagatcttctgtctgacgacccaaagcctaacgacaacagc

SEQ ID NO: 35661 - DNA, 234 bp, synthetic construct
  source 1..234: mol_type = other DNA
atggtgctcatgggcatcttcgtgaataacacagcagctaagaacggtggagccgtttacctcgataacattaagcagggcgaatgcgacaacaccacatttagcaacagccggttcgagaataacagtgcaggagtcaatggaggagccattgattggcacgaaggcgctaccaacggggccattgtagatagcgagttcgtcaacaatgtggccggagcaaatggcggaggc

SEQ ID NO: 35662 - DNA, 66 bp, synthetic construct
  source 1..66: mol_type = other DNA
ggcctcgtggatgactgcaacttcatcaacaatagcgccgtcaagaacggtggagctgtgtacctg

SEQ ID NO: 35663 - DNA, 114 bp, synthetic construct
  source 1..114: mol_type = other DNA
atcaacgcccaggccaacatcgatgcttttggcaagcgaattggcatgagcaagtctgaggtcgagagcttcaagaattccatgggggacctccaatcggaattccggaaagtg

SEQ ID NO: 35664 - DNA, 180 bp, synthetic construct
  source 1..180: mol_type = other DNA
gacgccgtcggcgccagcgcactcgagatgggggttaaactaggcatctccaaggacaaaatggtggacctctctaggaccactgccatcatgagctccgctttcgtgaaggagggccgaacgcaagaggatgctatccttgctgtgtctgatgccatggacggacagctgaagagactg

SEQ ID NO: 35665 - DNA, 159 bp, synthetic construct
  source 1..159: mol_type = other DNA
caggcaggcgtgatgcggctctggtccgctttcatccatcaccctgacgtagagaacaccattaagacaatcggggccgtctggcaatggctagtcgaggtgaccaagcccgttgtggactggctgcacggaatctgggatgaaatgttccctgcttct

SEQ ID NO: 35666 - DNA, 72 bp, synthetic construct
  source 1..72: mol_type = other DNA
gtgtttatgaccgtctggaacgccattgtctctctcctgagcggaattatccccacagttttgtcagcaatc

SEQ ID NO: 35667 - DNA, 48 bp, synthetic construct
  source 1..48: mol_type = other DNA
aagatcattgggaaatatgcgacttctatcggattcgttggggggaag

SEQ ID NO: 35668 - DNA, 45 bp, synthetic construct
  source 1..45: mol_type = other DNA
tttaaacaaattgccgaggacgtcttctcacaatgccactacgcc

SEQ ID NO: 35669 - DNA, 54 bp, synthetic construct
  source 1..54: mol_type = other DNA
ttcgacagcaacaaatggggcagctggatgaacgcctttcaacacggggatatg

SEQ ID NO: 35670 - DNA, 63 bp, synthetic construct
  source 1..63: mol_type = other DNA
gacgcgattatcgccatggctcattccatgggcctgcctgcctccaaggttcatgggcattgg

SEQ ID NO: 35671 - DNA, 255 bp, synthetic construct
  source 1..255: mol_type = other DNA
tttggaaactacagcgttagcaacttcaccgtgtacaaatacgagtccgagattaccatccacgatatgaaggacgttgtttacggagagaacgtcctgatcggcttcgaagtcaagaaccccacaattgtccacgtgaagatcaccgatagcgaaggcaacatcatttatgacgaagacgagactaactactctatcctgttcaccaacctcgatgttggtgactacgtgatcaatatcacgaacatggagacc

SEQ ID NO: 35672 - DNA, 51 bp, synthetic construct
  source 1..51: mol_type = other DNA
gacgagaaccataccgccgtcactgaaacagcgaccatcaccgttaacaag

SEQ ID NO: 35673 - DNA, 45 bp, synthetic construct
  source 1..45: mol_type = other DNA
agcactctcaccctggacgatgtcgtgctggactacggcgaaacc

SEQ ID NO: 35674 - DNA, 69 bp, synthetic construct
  source 1..69: mol_type = other DNA
accgggattacagccaagatcgacggcgtcaatgtgactgtgaacggctacaccatccctatctctggc

SEQ ID NO: 35675 - DNA, 246 bp, synthetic construct
  source 1..246: mol_type = other DNA
gatgataaccacaaccccgtgaatgtgacctctaagatcactgtgaacaaggtcgaatctaccctgaccgtcggcgacatcgtgttcgactacgacggcgagggaagcggagacgtgtctttcaccggcgcctccaaggtcacagccaacgtcattaaccagcctaaggccgtggtctccgtgaacgacaacaagatcactgttagcggtttagccgctgggacatataccctgaacgtgacgacc

SEQ ID NO: 35676 - DNA, 51 bp, synthetic construct
  source 1..51: mol_type = other DNA
gatgaaaaccacactgcggtgaccgaaaccgccgggatcacggttaataaa

SEQ ID NO: 35677 - DNA, 81 bp, synthetic construct
  source 1..81: mol_type = other DNA
tctacactcaccttggacgacgtcgaactcgattacggcgattcaaagaatgtaacggttgccactgagggagcgaccggg

SEQ ID NO: 35678 - DNA, 168 bp, synthetic construct
  source 1..168: mol_type = other DNA
gacattgtgttcgattatgacggcgaaggctccggggatgtctcttttaccggagccagcgaggtgctggccaatgtcgtgaaccagccgtccgccgtcatctccgtcaacgacaacaagatcacggtttccgggctgggcgctggcacctacacactcaacgtcacc

SEQ ID NO: 35679 - DNA, 51 bp, synthetic construct
  source 1..51: mol_type = other DNA
gatgaaaatcataccgcggtaaccgagacggcaacaatcaccgtgaacaag

SEQ ID NO: 35680 - DNA, 123 bp, synthetic construct
  source 1..123: mol_type = other DNA
agcacccttacactggatgacgtggagctggactacggcgattccaaaaacgtcacggtggcaaccgaaggagcgacgggcatcactgccaagatcgatggcgtcaatgtgacagtgaacggg

SEQ ID NO: 35681 - DNA, 117 bp, synthetic construct
  source 1..117: mol_type = other DNA
gtggttaccgccgaagacactagcgacatcaccaactacatctatgggctgattaaggtgacaggcgagtctggagagagtggagagtccggcggcgtggactatagcgctcttgcc

SEQ ID NO: 35682 - DNA, 42 bp, synthetic construct
  source 1..42: mol_type = other DNA
atcggaggcgacgagtctggcggttccgactggattacggat

SEQ ID NO: 35683 - DNA, 36 bp, synthetic construct
  source 1..36: mol_type = other DNA
agctctggtggctcgggagatgacgacctgactggg

SEQ ID NO: 35684 - DNA, 225 bp, synthetic construct
  source 1..225: mol_type = other DNA
gacaattataactctaagtccacttccgtttccttcgaaatcctggagcacgtcaagaatgacactgagatcgaggccaacccatctgtgaacggaactaccgtgacaatcgtaacaacggtggatgaggccgcaaccggcaacgtcactattgacgtggttggtcaaacattcctcgtccccgtatccaagggcaaggctgtcttcacctatgatttcttcccc

SEQ ID NO: 35685 - DNA, 63 bp, synthetic construct
  source 1..63: mol_type = other DNA
gacaacttcaatgaggccagcaccactacctccttcacggtactggagacaagccccgaaatg

SEQ ID NO: 35686 - DNA, 30 bp, synthetic construct
  source 1..30: mol_type = other DNA
aacgtcacaatcacggcaaccgtgaataag

SEQ ID NO: 35687 - DNA, 51 bp, synthetic construct
  source 1..51: mol_type = other DNA
gggcaggcggtctacctgcctgtgaacaatgggcaagccgtctatgacgtg

SEQ ID NO: 35688 - DNA, 51 bp, synthetic construct
  source 1..51: mol_type = other DNA
aacactgtggtggccgtcaaggtcgtggacggagtggccgtctgggagacc

SEQ ID NO: 35689 - DNA, 39 bp, synthetic construct
  source 1..39: mol_type = other DNA
gagatgctcctggaaaacactccaatcgacgccattgtg

SEQ ID NO: 35690 - DNA, 42 bp, synthetic construct
  source 1..42: mol_type = other DNA
gttaccatcaccgtgaatgtcaacgagcgggctacaggtttc

SEQ ID NO: 35691 - DNA, 63 bp, synthetic construct
  source 1..63: mol_type = other DNA
gagaactatgtgctgtacatggtcctgtccgacggcaaggtggtgctcgaagacgtgttgtcc

SEQ ID NO: 35692 - DNA, 36 bp, synthetic construct
  source 1..36: mol_type = other DNA
atccctgtcgaggacggcaaggccgtgttcacctac

SEQ ID NO: 35693 - DNA, 33 bp, synthetic construct
  source 1..33: mol_type = other DNA
ggccaggctgtgtacctggccgtcaacaacgga

SEQ ID NO: 35694 - DNA, 48 bp, synthetic construct
  source 1..48: mol_type = other DNA
aacaaggtggtggccgttaaagtcgtcgacggagttgcagtttgggaa

SEQ ID NO: 35695 - DNA, 36 bp, synthetic construct
  source 1..36: mol_type = other DNA
gacgagggcaaggtcgtgctggaagatgtacttacc

SEQ ID NO: 35696 - DNA, 39 bp, synthetic construct
  source 1..39: mol_type = other DNA
aaagacacccctatctctgcggtgaccaacgtcaataag

SEQ ID NO: 35697 - DNA, 33 bp, synthetic construct
  source 1..33: mol_type = other DNA
tctacaaccgcctcctttagcgtgttcgagaca

SEQ ID NO: 35698 - DNA, 33 bp, synthetic construct
  source 1..33: mol_type = other DNA
gatgagctgaagaacaccaatatcgacgtgaac

SEQ ID NO: 35699 - DNA, 45 bp, synthetic construct
  source 1..45: mol_type = other DNA
gccggccaggtggtttatctagctgtcaacaacggacaagtggtt

SEQ ID NO: 35700 - DNA, 48 bp, synthetic construct
  source 1..48: mol_type = other DNA
gtggccggctacgacgttactataagcgcgaagattaatgagaacgcc

SEQ ID NO: 35701 - DNA, 60 bp, synthetic construct
  source 1..60: mol_type = other DNA
gcactggacggcaaggtcgtggttatccgggccgtggatggggtagcggtctgggagact

SEQ ID NO: 35702 - DNA, 207 bp, synthetic construct
  source 1..207: mol_type = other DNA
gtcaccaagaaggacacaccaatcgacatcagcgtggactccattgagaacaacgtgactattaccgttaacgtggatagcgacgccactggcctggtcgagatttctatcggtgacgaggctatctacctgcctgtcaacaatggcaaggtgaccggcgagttcatgatctccggcggtgactatgaggtcaccgccacctatctg

SEQ ID NO: 35703 - DNA, 132 bp, synthetic construct
  source 1..132: mol_type = other DNA
gctaacacgactagcgctgagttcaccgtcaaggaccacgagaagattaataccaccatttccgccgaggccgccgtggacgagagcgccgttactattaccatcaacgtgaatgacggggctactggtttt

SEQ ID NO: 35704 - DNA, 57 bp, synthetic construct
  source 1..57: mol_type = other DNA
gccggcaagaagtactatgtgcccgtggacgggggaaaagcgaccttcgtcgacgat

SEQ ID NO: 35705 - DNA, 78 bp, synthetic construct
  source 1..78: mol_type = other DNA
cccgctaaggcctccgcctctttcaccgtgattgagcacaacgaaacaaagatgaacacccctatttctgtggaggtc

SEQ ID NO: 35706 - DNA, 30 bp, synthetic construct
  source 1..30: mol_type = other DNA
accgtcaatgtgaacgagaacgcaacaggc

SEQ ID NO: 35707 - DNA, 93 bp, synthetic construct
  source 1..93: mol_type = other DNA
atcgacggcgaggccatttacctgcccgtgaacaatgggatggcaagctgcggcttcgtgctgcctggcggagattatatggtgacagccact

SEQ ID NO: 35708 - DNA, 102 bp, synthetic construct
  source 1..102: mol_type = other DNA
aatgtcgacggcgaatcagtatatcttccgctgagcaacggggtagccgcttgcggcatagtactgcctgccgggatgcacgaggtatcagctacatacctc

SEQ ID NO: 35709 - DNA, 129 bp, synthetic construct
  source 1..129: mol_type = other DNA
accatctccacaaagttcaccgtgaagggccacgagaaagccaacaccacaattgccgctgctgtgtccgttgacaataacactgtcacactgactgtgaccgtgaacaacgaggccactggattcgtt

SEQ ID NO: 35710 - DNA, 42 bp, synthetic construct
  source 1..42: mol_type = other DNA
ggcaaaaagtattacgtgcctgtggagaaggggaaagctacg

SEQ ID NO: 35711 - DNA, 99 bp, synthetic construct
  source 1..99: mol_type = other DNA
gtggagttcactgtcaaggatcacgagaaggtagatccaagtattaagtcccaggccgctgtggatggcaacaccgtgaccattactgtcaacgtgaac

SEQ ID NO: 35712 - DNA, 90 bp, synthetic construct
  source 1..90: mol_type = other DNA
gggaagaaatactacgtgcccgtcgacgttgggaaggctgtcttttcaaacgactataacgctggaacatactccgccgacatcacctat

SEQ ID NO: 35713 - DNA, 39 bp, synthetic construct
  source 1..39: mol_type = other DNA
aacacagccgaggactccactagcttcaccgtgatcgag

SEQ ID NO: 35714 - DNA, 45 bp, synthetic construct
  source 1..45: mol_type = other DNA
accaaaaaggatacacccattgacatcgctgtggatagtgttgag

SEQ ID NO: 35715 - DNA, 60 bp, synthetic construct
  source 1..60: mol_type = other DNA
ggcgacgagtctatctacctgcccgtgaacaatggggtcgctattggcgagttcctgctc

SEQ ID NO: 35716 - DNA, 60 bp, synthetic construct
  source 1..60: mol_type = other DNA
acctctgccgaattcactgtaaaagatcacgagaaggtggacagcagtatcaaaagccag

SEQ ID NO: 35717 - DNA, 42 bp, synthetic construct
  source 1..42: mol_type = other DNA
gtggacggcaataccgtgacaatcgccgtgaacgtcaacgag

SEQ ID NO: 35718 - DNA, 57 bp, synthetic construct
  source 1..57: mol_type = other DNA
gggaaaaagtactacgtgcccgtcgacgccggcaacgctaagctagtaattgactac

SEQ ID NO: 35719 - DNA, 39 bp, synthetic construct
  source 1..39: mol_type = other DNA
gatgacaactacaatactgccaagacaagcacctccttc

SEQ ID NO: 35720 - DNA, 48 bp, synthetic construct
  source 1..48: mol_type = other DNA
acaaaaaaggacaccctgattgacatcgccgtggatagcgtcgagaac

SEQ ID NO: 35721 - DNA, 42 bp, synthetic construct
  source 1..42: mol_type = other DNA
gtgaccatcaccgtcactgtggacgccgcgggaaccggaaac

SEQ ID NO: 35722 - DNA, 117 bp, synthetic construct
  source 1..117: mol_type = other DNA
attagcatcggcgacgaggccgtgtacatccccgtcaacaacggggctgcaatcggcgagttcctgctgcctggcggcgactatgaggtgaccgccacatacctcggagacaataag

SEQ ID NO: 35723 - DNA, 66 bp, synthetic construct
  source 1..66: mol_type = other DNA
attagcattgagggcaacgctgatttcaccggcatcttcgactccgagttcatcaataactctgca

SEQ ID NO: 35724 - DNA, 141 bp, synthetic construct
  source 1..141: mol_type = other DNA
gggaacacctccactctcgtgataaataacaccgttttcgatggcaactacgctccctatgccggcgccctttgcctgaaaggagccaagaaccttataatatcggatagcaactttaccaataacaaggggacagacgaa

SEQ ID NO: 35725 - DNA, 63 bp, synthetic construct
  source 1..63: mol_type = other DNA
aacctgaccgaatccacaatcatgaatagcaagttcgaaaacaatagtgccagaaccggagga

SEQ ID NO: 35726 - DNA, 42 bp, synthetic construct
  source 1..42: mol_type = other DNA
ggcaatcttaataccaccacattcaaccacaaccagtttacc

SEQ ID NO: 35727 - DNA, 66 bp, synthetic construct
  source 1..66: mol_type = other DNA
cagggcaacgctaccaacaacaagtttgagaaatccatcttcatgaagaacacagccacaactcac

SEQ ID NO: 35728 - DNA, 60 bp, synthetic construct
  source 1..60: mol_type = other DNA
gacgagaacaatacctttaacaagtgcatcttcatggataactacgctccctatggaggc

SEQ ID NO: 35729 - DNA, 72 bp, synthetic construct
  source 1..72: mol_type = other DNA
gccgtgtccaatagcagccagaccctgaacatcaccgactgtatttttacaaacaccaaggaacccgagaag

SEQ ID NO: 35730 - DNA, 75 bp, synthetic construct
  source 1..75: mol_type = other DNA
atctatttcatttccgacgcaaatgagctgtacataacgaatagcgaatttaaggccctgactgccagggcaggc

SEQ ID NO: 35731 - DNA, 51 bp, synthetic construct
  source 1..51: mol_type = other DNA
gaccttaacggtactgtcattgccgagaccaatttcatcgacaacaaggcc

SEQ ID NO: 35732 - DNA, 48 bp, synthetic construct
  source 1..48: mol_type = other DNA
gtcgagggcaatgccaaggacgttgtcatcattgatagcaacttcacc

SEQ ID NO: 35733 - DNA, 54 bp, synthetic construct
  source 1..54: mol_type = other DNA
aacaataccaacattgtgatcagctcctctttcgacggcaactatgctccttac

SEQ ID NO: 35734 - DNA, 75 bp, synthetic construct
  source 1..75: mol_type = other DNA
gccatctccctggggactaccgagagtctctacatctttgattctaattttaccaacaacaagggcacatctgca

SEQ ID NO: 35735 - DNA, 63 bp, synthetic construct
  source 1..63: mol_type = other DNA
gggaacctgaccaatgcacgcatcctcgaaacagagttcattaataacagtgctagagcaggg

SEQ ID NO: 35736 - DNA, 48 bp, synthetic construct
  source 1..48: mol_type = other DNA
gtggagggcatcatggacaactccaccttcctgaagagctttttccag

SEQ ID NO: 35737 - DNA, 75 bp, synthetic construct
  source 1..75: mol_type = other DNA
gcagttcaaggaaacgctactaacaataagtttaacgtgctcctgttcaccgccaacaccggaacaacacatggg

SEQ ID NO: 35738 - DNA, 117 bp, synthetic construct
  source 1..117: mol_type = other DNA
atgggtggcgccgtcatcttcaacaacgacgtgtccgggattgctatcgacaattgcaagtttatcaacaacagcgctgccaagaatggcggagccctctatgtcaacggagcattc

SEQ ID NO: 35739 - DNA, 45 bp, synthetic construct
  source 1..45: mol_type = other DNA
attggcaactccgagttcataagcaacgtggccaccaataacggc

SEQ ID NO: 35740 - DNA, 60 bp, synthetic construct
  source 1..60: mol_type = other DNA
ctctttgagaaccttaccttttccgacaaccgggccgagaataatgatggtggtgctatc

SEQ ID NO: 35741 - DNA, 42 bp, synthetic construct
  source 1..42: mol_type = other DNA
ttctttaagaacaccgccaagaactacggcggagctatcaat

SEQ ID NO: 35742 - DNA, 75 bp, synthetic construct
  source 1..75: mol_type = other DNA
aaggaaaacgaatacgtagacgtggatttcatcaacaataaggccagcaatggcggtgctatgggaggatacggc

SEQ ID NO: 35743 - DNA, 63 bp, synthetic construct
  source 1..63: mol_type = other DNA
tccttcgagggctgcctgtttgccaacaacagcgctaccaacaatggcggtgctgtctgttac

SEQ ID NO: 35744 - DNA, 45 bp, synthetic construct
  source 1..45: mol_type = other DNA
gagaacaccagcttcgcccgcaatacagcaggatcaggaggagct

SEQ ID NO: 35745 - DNA, 36 bp, synthetic construct
  source 1..36: mol_type = other DNA
aactgcttctttgccgacaatgccgctagaactggc

SEQ ID NO: 35746 - DNA, 84 bp, synthetic construct
  source 1..84: mol_type = other DNA
atctccaataagttcaataaggacctgttcattaacaacagcgccgcaaacaatgctagcgtaatttactaccaaggatcaagc

SEQ ID NO: 35747 - DNA, 201 bp, synthetic construct
  source 1..201: mol_type = other DNA
aacgctacatacacccttaggaaagtgaatacaacagggaataataataagaccaaaggaggggcagtctacattgctgacgaagacaatgtgatcgagaactcaaagttctacaataacaccgctagcactaatcggccatataacaacaagggcaatgatccttcatcttccgatgacggttttgggggcgctatcttc

SEQ ID NO: 35748 - DNA, 30 bp, synthetic construct
  source 1..30: mol_type = other DNA
accatcgacgcacgggagaaggtgccaatt

SEQ ID NO: 35749 - DNA, 30 bp, synthetic construct
  source 1..30: mol_type = other DNA
accattgacgctggcggcaagagcagaatc

SEQ ID NO: 35750 - DNA, 45 bp, synthetic construct
  source 1..45: mol_type = other DNA
atcgtgctcgagtctgacatcattctgagctccagcgatgaatcc

SEQ ID NO: 35751 - DNA, 39 bp, synthetic construct
  source 1..39: mol_type = other DNA
aacggccacaccatcgacgccatggagaatacaaggatt

SEQ ID NO: 35752 - DNA, 219 bp, synthetic construct
  source 1..219: mol_type = other DNA
atctatttctccggagacgacctcgtgattgctgattcgaaattcataagcaacgaggctgaggactgcggcgcggtggccgttaatagcgccaccaccaagatcaggaatacagagttcgtggaaaacggggcctacgattacggggccatcgagatttcttccggcgatgtcctgattgacaactgtcgctttgactccaattacgctaaccgaagc

SEQ ID NO: 35753 - DNA, 63 bp, synthetic construct
  source 1..63: mol_type = other DNA
tgccagttcatcgataacgactgttgcgccgtgtatctgagtcattacaatgctcgcattctc

SEQ ID NO: 35754 - DNA, 42 bp, synthetic construct
  source 1..42: mol_type = other DNA
aagttcgagaactccgttagcgacgacggcattgccatctac

SEQ ID NO: 35755 - DNA, 114 bp, synthetic construct
  source 1..114: mol_type = other DNA
gtgtacctgtactttcaagatgataactacaacctcatcaaggtcatggacttcgatctgctggtcaataataccaagattgactatgtgtttagcaatcggtaccaggatttt

SEQ ID NO: 35756 - DNA, 36 bp, synthetic construct
  source 1..36: mol_type = other DNA
ggcgccatctatgctaacaccgatgtatatgtagac

SEQ ID NO: 35757 - DNA, 279 bp, synthetic construct
  source 1..279: mol_type = other DNA
ttcttcgagagcaattatgccgacgactgtggcgacgcagtgtttgccaagggcagcgtctacattaataacatctctgacgattacccctgccggttcatctcgaactcagtagacgacggcgacggcggcgccatctgctgcgccgggtccctgtacctgaacaacgggctcttcatctccaactccgctttcaagaagggcggtgctatctgttgcgacggagtgttcacaagcaagggtagtctgttcgagaagaacaccgctcatggttctcat

SEQ ID NO: 35758 - DNA, 297 bp, synthetic construct
  source 1..297: mol_type = other DNA
gcctacggtggtgccgtctactcgggttccaacgcatttgtgtataactctagcttcgaagacaacgagtgtattctccacctgccttctggaggcgctgtatacgcggtcaagaacatctacgtgaacatcgaccaggatgtgaccaagcccttctattcctacttccggggaaacgtcgccgccaacggtggcgctctgtactcgggatccgggagtgttagatgcgtcaactccttcttcgagctgaatcacggcgaatttagttcggtagtatatggaagcgacgtcgacttc

SEQ ID NO: 35759 - DNA, 129 bp, synthetic construct
  source 1..129: mol_type = other DNA
ggggccggcgacgtgtcggttgctaacttcgagaccgacgattgtggcctgttcaattgctccggatgcagtctggtcaacgactacgagaagtactctgaactggagaaggtactcattagaacggct

SEQ ID NO: 35760 - DNA, 75 bp, synthetic construct
  source 1..75: mol_type = other DNA
atcgatgacgcagtgattggcggcagcgccagggaccactctaaccggttcgacatagtagcaagttatgctgcc

SEQ ID NO: 35761 - DNA, 153 bp, synthetic construct
  source 1..153: mol_type = other DNA
agtaaggaggatctgaacgagattaaggattaccttctggaccccaacaataaggaagtcgttaagctagccaaggggcagagcttcaacctcgaagtttcttacatctccttcaagggcatctttggaaaaatgtatttcgatgataggacc

SEQ ID NO: 35762 - DNA, 36 bp, synthetic construct
  source 1..36: mol_type = other DNA
gattgcgccatcgaccggattatcagcaccaagctg

SEQ ID NO: 35763 - DNA, 234 bp, synthetic construct
  source 1..234: mol_type = other DNA
agctccagctacatgatctctaataactacaaccccgagcttaacaccaggactgtgtataagacagtgatcggcgtgtccgccgtggccggagtcatcggcggcgctttcggaggctatgtggccatcgaaggcttcttcgaacaaatatcatatatgctgctcgacatggagacctatggcgaaatcccgggattttccctttactctgagtacactatggttgctattcct

SEQ ID NO: 35764 - DNA, 147 bp, synthetic construct
  source 1..147: mol_type = other DNA
acagcagctctcaatgataccgttaaggtctccgtgctgaaggccacccccactatcaacgtgtctgccgagaacgcaacgtactcatccgacgtgattatcaccgttatcaccgacgccggcggcaaatatgttatcatcacaaac

SEQ ID NO: 35765 - DNA, 36 bp, synthetic construct
  source 1..36: mol_type = other DNA
ggctccatcgtcggagtactggccccaactgttgcc

SEQ ID NO: 35766 - DNA, 63 bp, synthetic construct
  source 1..63: mol_type = other DNA
gggctgatggagggcaacgcctaccacgactactccaacctctggagcaatgtgctgagcttt

SEQ ID NO: 35767 - DNA, 30 bp, synthetic construct
  source 1..30: mol_type = other DNA
actggatttagtgtctactccgcctttacc

SEQ ID NO: 35768 - DNA, 141 bp, synthetic construct
  source 1..141: mol_type = other DNA
tttggggttgccggcaaccctcaaggctatcctgggtcccaaggagcgggcaatcctcaagggtaccctggtagccaaggcgccgccgggagccatggttcaggggagatcagccttaacgacggctatcagaactctgct

SEQ ID NO: 35769 - DNA, 234 bp, synthetic construct
  source 1..234: mol_type = other DNA
tcttcctcttacatgatcagtaacaattataaccccgagctgaacacccggaccgtctataagacagtgattggcgttagcgccgtggctggagtcattggcggcgccttcggtggatacgtggccatcgaaggcttctttgagcaaatctcatacatgctgcttgacatggagacctatggagagattccaggatttagcctctactccgagtacactatggtggcaatccca

SEQ ID NO: 35770 - DNA, 93 bp, synthetic construct
  source 1..93: mol_type = other DNA
gagaacaccgtgtacaaggacgtgatcaatgtcaacaacgacaaggacaataaccttgagattaacaaccaggataacgaagtatcgaggagc

SEQ ID NO: 35771 - DNA, 153 bp, synthetic construct
  source 1..153: mol_type = other DNA
tttaagaacaacaccggagcatacggcgtcggcgtgtacttctactacgagggcatcgccgagaactgcgccttcatcaacaataagatggaggagaacatcctgcccgggacagctatctacttcgatgacggcttcggcaaggttaataat

SEQ ID NO: 35772 - DNA, 132 bp, synthetic construct
  source 1..132: mol_type = other DNA
atggagacgaatacgggtctcgatgccttgattggcaaagccttctctcgagccgggaagaaaatcggcaacgagttcctgcctattatcaaagacgtcaaacggggctttatcgacctggataacgagctc

SEQ ID NO: 35773 - DNA, 93 bp, synthetic construct
  source 1..93: mol_type = other DNA
ttcaacctcgacaagaacaccacacttgttaatcagctgatcgagctgaccaacaatgccaccttcatgaagaagctcctggagctgactaaa

SEQ ID NO: 35774 - DNA, 30 bp, synthetic construct
  source 1..30: mol_type = other DNA
ggcgccaccttcaacaagctcatcgagctg

SEQ ID NO: 35775 - DNA, 87 bp, synthetic construct
  source 1..87: mol_type = other DNA
aatttaacggtaacggggcccaacggcacaatcgtgatggacaagtgcagcgtgtacccaaatcctatcgtgtcggattcagtcata

SEQ ID NO: 35776 - DNA, 60 bp, synthetic construct
  source 1..60: mol_type = other DNA
aaggatgagtactacattgacgacatcgctgtctggaccgtggtggtcagcaacgctaat

SEQ ID NO: 35777 - DNA, 195 bp, synthetic construct
  source 1..195: mol_type = other DNA
acaaatgtgaccctccgggacttcttccccggaagcaacttcgagttcattaactgtaccctggccaatgggacttcctataccggcgatacatggtacataggggatctggccaacgggaccaacgtcacttttaccgtctactcacgtgcaattgcggttggcactgctaagcacaacgtgactgtgtcttgc

SEQ ID NO: 35778 - DNA, 84 bp, synthetic construct
  source 1..84: mol_type = other DNA
gagacagagtggaacctgaccaacaacaagaacaataagaccgtcgtggtcgtgtcccttcctgaccccgtgaagaacgtctcc

SEQ ID NO: 35779 - DNA, 39 bp, synthetic construct
  source 1..39: mol_type = other DNA
cccaacggcaccaaaaaatatgctaatctgaccgtgtat

SEQ ID NO: 35780 - DNA, 57 bp, synthetic construct
  source 1..57: mol_type = other DNA
aaggatgagtacttcgtggacgacatcgccgtttggaccgtcgtagtatcgaatgcc

SEQ ID NO: 35781 - DNA, 150 bp, synthetic construct
  source 1..150: mol_type = other DNA
cggatcacaaatatcaccgccaaaagcaatgccactattaccatccgcgttaaagtggtcgggattggcgacaatataatccgcaactccaccttcatcgctaacaacgtgacaaacgatcccgccgtcaaatacgtcggaaacttgacc

SEQ ID NO: 35782 - DNA, 96 bp, synthetic construct
  source 1..96: mol_type = other DNA
ctgacagttgttggccctaacgggaccgtgaacagcaccgacctgactgtttatcctgttcctattgtggatatctctgtcaatatcacctcactg

SEQ ID NO: 35783 - DNA, 33 bp, synthetic construct
  source 1..33: mol_type = other DNA
atgatcctgctcttcggcctgctgctttgtctg

SEQ ID NO: 35784 - DNA, 225 bp, synthetic construct
  source 1..225: mol_type = other DNA
tacgtcgacgacaactacgagaacaacgtgaccagtatccctttcaccgtgtctaaggctgacgtcgccttgacggtagaggtcctggataaggtttatacggccgacgtgaacgggattgttttcgcctcggccgacggcgaatacaaagtggttatcggcaattatgaaacacccgtgatcgtcaaggacggcgttggctccttcgacgtggctttcgaagtt

SEQ ID NO: 35785 - DNA, 84 bp, synthetic construct
  source 1..84: mol_type = other DNA
tccgagatcgcctatggcggagcagtcgaaatagcgcaagggttgcccggtgacgccaccggatccgtgacgtactcattcgcc

SEQ ID NO: 35786 - DNA, 159 bp, synthetic construct
  source 1..159: mol_type = other DNA
acagtcagcaaagccgacgtggccctgaccgttgaagtgctggacaaggtctatagtgctgacgtttgcggcattgtcttcgcatcggtggacggcgaatataaggttgtgatcgggaactacgagaccctcgtgatcgttaaggatggagttggctcc

SEQ ID NO: 35787 - DNA, 36 bp, synthetic construct
  source 1..36: mol_type = other DNA
gacgataactacaaccccaattataacgagacagcc

SEQ ID NO: 35788 - DNA, 39 bp, synthetic construct
  source 1..39: mol_type = other DNA
atcacctacggcggagccgtcgagattgctcaaggtctt

SEQ ID NO: 35789 - DNA, 87 bp, synthetic construct
  source 1..87: mol_type = other DNA
accatcatcaaggtggtcggagttaacgagtcctttgttttatcgggcctgaatgctgggtcttatgtgatttacgcgaactattct

SEQ ID NO: 35790 - DNA, 48 bp, synthetic construct
  source 1..48: mol_type = other DNA
gagatcgagtcctggatggaggacctggtgaccgaaggcgaacaccag

SEQ ID NO: 35791 - DNA, 69 bp, synthetic construct
  source 1..69: mol_type = other DNA
cacgtggtctacgccggcgaggagggcaatggcgacggtgacgacgaaaacgattacggcacctatgtg

SEQ ID NO: 35792 - DNA, 120 bp, synthetic construct
  source 1..120: mol_type = other DNA
agcaagatccagttctccttcgaggacgatgacaccggcgatggcggcgatgagaatgacaagggaaacggcgagaaggacacaagtaacggacgggatgtgtacatagcaagtggcacg

SEQ ID NO: 35793 - DNA, 267 bp, synthetic construct
  source 1..267: mol_type = other DNA
atcagcaattcttatatgtcctcctacgactgggacgacaaatacgttgtatatgtggaagatggcgtcgaggacggcaatgtggtgctggacgacaactactggagcggggatgtttacaagcgggaatatgatgaagaagccaacgaggaaatcgaggtgctggccgtttcgaatattgagctgcacaattacctcgagcttatcctcaaggtgtctcctgaggacgaccctctgatccccggcaaagaatatgaattttacgcg

SEQ ID NO: 35794 - DNA, 156 bp, synthetic construct
  source 1..156: mol_type = other DNA
aagttcgagggcctgcctaagtccaacttcattttctacgtggagaacatgaacgggcacaccgaggagttcgagaactgcgaagtgcccgtcgagaatggacagaccagcttcaccatcgaggacgaccaatatgctatgcactgtgaaatcagt

SEQ ID NO: 35795 - DNA, 168 bp, synthetic construct
  source 1..168: mol_type = other DNA
tccgctcctaacttcggcggcggaatctataacgagggcgatatgaccattacttattccatactgtgtcacaactgcgccaagattgggaacgacatctaccacaatggaacatccctctacgtatcgaatagtttcctgactagcggagagtcagacttcgcaccc

SEQ ID NO: 35796 - DNA, 198 bp, synthetic construct
  source 1..198: mol_type = other DNA
atcagtaattatggggaatatgtcttatacgcggaaaacactgaggattgcgtcctgaacgacatctggtgggggacgaattctccggacgaaaataccaccaacatcgagctgaataactatgtgatcttctcgctgacggctcaaaacgagattgtggagaacgagtccaacgtgttcaacgtggccttcatcaaa

SEQ ID NO: 35797 - DNA, 78 bp, synthetic construct
  source 1..78: mol_type = other DNA
ggcgcctccgcctctatcgtggtcgtgttcaacgctacgtctccgtacattaacgcctacaacacagcttatgtccac

SEQ ID NO: 35798 - DNA, 225 bp, synthetic construct
  source 1..225: mol_type = other DNA
gtgaccgtggcgcctggagagaacgtggagtttaccatccgggtcatgaacagcgggaacactaccctcaactacgtcttcgtggtcgagaagccttccgagggcttggtctatattgactacgccaataagacaggcaattggacctatgacggcattgacaaatggacactggctggcggcctggatgccaacgagacagctgagttcatcgtgatctacaac

SEQ ID NO: 35799 - DNA, 207 bp, synthetic construct
  source 1..207: mol_type = other DNA
tacggcgaaaccgtggagttcacaatcgtggtccggaatactggcgagaccaatttaacggacgtattcgtggaggagcgacccagcgagggcctagtatacctggactatgtcaataagacaggcaattggaacaaggatggcggcatctggaccctcgctggcaacctcgagcttggcggaactgccgagtttaccgtgatctac

SEQ ID NO: 35800 - DNA, 204 bp, synthetic construct
  source 1..204: mol_type = other DNA
gtgggcgagacagttggttttacaatcgtggtgaccaacatcggtgaccaggacctcactggggtcttcgtcgaagagcagattcccgagggcctcgtatatttagactatgtcaacaagaccggcagctgggacaaggaaggaaacaagtggaccctggctggaaacctcgaatatgggggaacagccgagttggttatcatc

SEQ ID NO: 35801 - DNA, 225 bp, synthetic construct
  source 1..225: mol_type = other DNA
aagaagggggaaaaggtggagttcgtgattatcgtcaccaacaacggggacgaggaccttacgggggtcttcgtcaaggaggagatccccgacggacttgcttatagctctttcatttccgaatccggcaaatggttcttcaacggcgctgacatgtggatctacgacggcacccttgccgccggcgagtctagtaatctgacaatcatctttgacaccgagaaa

SEQ ID NO: 35802 - DNA, 195 bp, synthetic construct
  source 1..195: mol_type = other DNA
tacactatcgttgtaaataatacaggcgaatgcgacctcaccggcgtgttcgtcgaggaacaggcccctgacgggcttgtctacgttgacttcgtggatgaaagcaacaagtggacatacgacgaggagacccacgtgttcacctataacggagtcctggtgcccggcgaagtggttcagtttgtggttatcttc

SEQ ID NO: 35803 - DNA, 150 bp, synthetic construct
  source 1..150: mol_type = other DNA
tacacaatccaggtgaccaataccggcgactgcgacctgactaacgtcttcgtcgaggagcaggcccctgagggtctcgtgtatattgactacgtcaaccggacaggaacctgggataagcacgggaacaagtggacttactatggtgtg

SEQ ID NO: 35804 - DNA, 198 bp, synthetic construct
  source 1..198: mol_type = other DNA
gggaacatcacctcttacactattgaggtgaccaacactggcgactgcgatctgacccgagtattcgtcgaggaacaggctcctgagggcctggtttatgtggactacgtcgagattgttggctcctgggacaagcaggggaataagtggacatacgaaggcacactcgcccctggcgatagcgttgctttcgttgtc

SEQ ID NO: 35805 - DNA, 96 bp, synthetic construct
  source 1..96: mol_type = other DNA
cccaagttcgatattgtcaaggtggctagcgacgaggtcgtatatgcggggaatacaacctcctacaccatcgaggtcactaactatatcatggga

SEQ ID NO: 35806 - DNA, 63 bp, synthetic construct
  source 1..63: mol_type = other DNA
atcgccgtggagggcaacgcttcttccattctgatcttcaatagcgacttcatcaacaacaca

SEQ ID NO: 35807 - DNA, 57 bp, synthetic construct
  source 1..57: mol_type = other DNA
gacgagctgaacacctttgatggatgtatattttacaacaattacgccccttatggg

SEQ ID NO: 35808 - DNA, 54 bp, synthetic construct
  source 1..54: mol_type = other DNA
ctgggcaataccgactacttagtaatctctgagtccaacttcacaaaccacatc

SEQ ID NO: 35809 - DNA, 63 bp, synthetic construct
  source 1..63: mol_type = other DNA
accaacgccaacatcgtggacagcctgttcgagaacaactccgctagagctggtggtgccatt

SEQ ID NO: 35810 - DNA, 48 bp, synthetic construct
  source 1..48: mol_type = other DNA
gtggagaacaacatgaatcaggtccagatctacgacacctacttcatc

SEQ ID NO: 35811 - DNA, 66 bp, synthetic construct
  source 1..66: mol_type = other DNA
gaggaggacgccaccaacaatttcttcgattccgtgacttttgtatctaacattgcacaaacccac

SEQ ID NO: 35812 - DNA, 30 bp, synthetic construct
  source 1..30: mol_type = other DNA
atcttctacaataactacgccccttatggc

SEQ ID NO: 35813 - DNA, 48 bp, synthetic construct
  source 1..48: mol_type = other DNA
ctgaatctcaccgactgcctgttcggcatcaacgatgacgagtacccc

SEQ ID NO: 35814 - DNA, 132 bp, synthetic construct
  source 1..132: mol_type = other DNA
gatacctactcactggtcatagacggttcctccttctacggcttgagcgcccgggctggcggtgctatatacgtcgaaggggacctaaacacggctgatattaacggcagcaatttcatcggcaataaggcc

SEQ ID NO: 35815 - DNA, 57 bp, synthetic construct
  source 1..57: mol_type = other DNA
gagggcaatagcaacgtgctcattctgaccgaatgcaacttcatcaacaattctgct

SEQ ID NO: 35816 - DNA, 51 bp, synthetic construct
  source 1..51: mol_type = other DNA
acctataccgtcatcgataatagccgcttcgattcgaactatgcaccttac

SEQ ID NO: 35817 - DNA, 36 bp, synthetic construct
  source 1..36: mol_type = other DNA
acaatgttcatccttaattcgggttctacccatggc

SEQ ID NO: 35818 - DNA, 150 bp, synthetic construct
  source 1..150: mol_type = other DNA
gacattaacaacaccatctacgaatgtgaatttatcaacaattacggccgatatggaacggccctcgccgtgaacaagaacagcgaaaacctgaacatcaccaagtccgtcttcgcttccttcaacgagtctagcaaggaggtcatcgct

SEQ ID NO: 35819 - DNA, 156 bp, synthetic construct
  source 1..156: mol_type = other DNA
atcaccaacctgtatattgccgactgcaactttagcggtaacgtggtccgagccggcggcgccatttacgtggagaagaagatcgaaaagtcactgatcgagaactgcttgttcaaggaaaacacaattaccactgcaaatgaagaatacgggggt

SEQ ID NO: 35820 - DNA, 249 bp, synthetic construct
  source 1..249: mol_type = other DNA
tacaccgccttcgtgtcattcgagggcgacgacaactataatagcgctaacaacgagaccgctttcgaggtggcgcaaacagggacaaacttcaacatcattgccaacacaactgagattgtctacggggacgtgatcaacataacgcagagtattccatctgatgcgactggtagcgtcatttacaagttcgcaaatggctctatcatcaaggtgctgaatgtcaacgaaagctttgttttaagcgga

SEQ ID NO: 35821 - DNA, 66 bp, synthetic construct
  source 1..66: mol_type = other DNA
ttcaattccacggtatccgggacctacactaacaacaaggccggcgatgatggcggagctaactac

SEQ ID NO: 35822 - DNA, 66 bp, synthetic construct
  source 1..66: mol_type = other DNA
agcaactcgaccgtctcgggcacctatactaataacaacgccgtggacggaggaggtgctaactac

SEQ ID NO: 35823 - DNA, 144 bp, synthetic construct
  source 1..144: mol_type = other DNA
accgtgtccggcacttacacaaacaacaaggccggatacggcggtgctaattacttcttcgacgaggtcagcaacaccaacatcaccggcacttacaccgataataatgccactgagcacggaggagcaaactacttctacgac

SEQ ID NO: 35824 - DNA, 30 bp, synthetic construct
  source 1..30: mol_type = other DNA
gccaccgccagccgggaccggctggacgtg

SEQ ID NO: 35825 - DNA, 141 bp, synthetic construct
  source 1..141: mol_type = other DNA
tccggagccatcagtgccgcgacggggaccgagtccggggagtactctgccctcactaatgtgatcagcggcttcattggagattatttgggtggcggaaacagcggcgggtccggggattccgactcgctcactgcactt

SEQ ID NO: 35826 - DNA, 39 bp, synthetic construct
  source 1..39: mol_type = other DNA
ggcggaggcaacagcgggtcttccggcaattccgattca

SEQ ID NO: 35827 - DNA, 99 bp, synthetic construct
  source 1..99: mol_type = other DNA
ggggccatcagcgctgccaccggatctgagtccggcgagtactctggattgacgaacgggtcatcgggaagctcgggctcctctggaaactccgactcc

SEQ ID NO: 35828 - DNA, 30 bp, synthetic construct
  source 1..30: mol_type = other DNA
gagggcggcagtaacgacgctctgaatgcc

SEQ ID NO: 35829 - DNA, 42 bp, synthetic construct
  source 1..42: mol_type = other DNA
agcgctgctactggttcggaatctggcgagtactccggactg

SEQ ID NO: 35830 - DNA, 219 bp, synthetic construct
  source 1..219: mol_type = other DNA
accaacactacatctaaggatgtggagatcctcggacacgtgctcaaagacacaccgatcaccgcaaatgtcgccatgaatggtaaccgggtcaccctgactgtgaaggtcgacgagaacgccaccggcttcgtggaactgaagttcggcgacaacgtgtttaacattgcactgaaggacggcatcggaaccctgaccacatcccttccctatggttcc

SEQ ID NO: 35831 - DNA, 270 bp, synthetic construct
  source 1..270: mol_type = other DNA
gacgagaattacaacaagaactctacaaagctggagtttactattgtggaacctgccaaggagaacaccccaatttccatggacatcgtcaccgatgagaactacgtcgggatgacagtggcagtcgacgacgccgccaccgggttggttaaattccaagtgattggcagcaccggcgagtacacaatctacgctgacctgattaacggcaaagccatcctcgaggacacactgccgatcggagattataccgtgttcgctacctacatg

SEQ ID NO: 35832 - DNA, 105 bp, synthetic construct
  source 1..105: mol_type = other DNA
gggaccgtcgtcaatatcgaggtggttgacggagtggccaccctgactacaacactgagccccaattcctattacgtggacgtcacctacctcggcgacgacgac

SEQ ID NO: 35833 - DNA, 117 bp, synthetic construct
  source 1..117: mol_type = other DNA
gacgtcgctttcattatggtcgacctcgacaaggccgccaccggccttgtcaaattctacgtgatttggaaggagacaggcgagaattacactgtgtacatggacgtggttgatggg

SEQ ID NO: 35834 - DNA, 30 bp, synthetic construct
  source 1..30: mol_type = other DNA
aatgtgttcaacatcgctctgaaggatggg

SEQ ID NO: 35835 - DNA, 51 bp, synthetic construct
  source 1..51: mol_type = other DNA
accgatgagaactatgtcgggatgacggtcgccgtggacgacgcagctact

SEQ ID NO: 35836 - DNA, 60 bp, synthetic construct
  source 1..60: mol_type = other DNA
actggagagtataccctttatgccgacgtcatcggcggcaaagctgtgctcgaagataca

SEQ ID NO: 35837 - DNA, 33 bp, synthetic construct
  source 1..33: mol_type = other DNA
gtcatcggcaaccgggtgacactgaccgtgaat

SEQ ID NO: 35838 - DNA, 33 bp, synthetic construct
  source 1..33: mol_type = other DNA
gccacctacatgggcgacagcgtcttcaacact

SEQ ID NO: 35839 - DNA, 54 bp, synthetic construct
  source 1..54: mol_type = other DNA
gtgaacggcaaccgggtgaccctcactgtaaacgtcgacgagaatgcaactgga

SEQ ID NO: 35840 - DNA, 33 bp, synthetic construct
  source 1..33: mol_type = other DNA
agcaagaacaacaagatcaattacaactacatc

SEQ ID NO: 35841 - DNA, 54 bp, synthetic construct
  source 1..54: mol_type = other DNA
ctggacatctccctgggcatcgatgagaatgggaatctgtccattggagatctg

SEQ ID NO: 35842 - DNA, 189 bp, synthetic construct
  source 1..189: mol_type = other DNA
gtgaagaaatccaagatcatcaagaaggttataccgaaggctaagcgcgtcgtgcactacgtgaagaagagcgtcgagaagatcaagggcacagtctccaaatttaagaaaaccgtgaagaacgtgaatcgggccgtcaagagagccagcaactcagtaaaacggttcgtgtctaagttcaagttctgg

SEQ ID NO: 35843 - DNA, 45 bp, synthetic construct
  source 1..45: mol_type = other DNA
accctgaacgacgctaatgtgacagccaagaacatcgaacttacc

SEQ ID NO: 35844 - DNA, 36 bp, synthetic construct
  source 1..36: mol_type = other DNA
accgacctgaacgtatcatttgtccctgacgattct

SEQ ID NO: 35845 - DNA, 42 bp, synthetic construct
  source 1..42: mol_type = other DNA
acgctgaacgacgcctccatcaccgccaaggatattgagctg

SEQ ID NO: 35846 - DNA, 87 bp, synthetic construct
  source 1..87: mol_type = other DNA
gacgacagcggaatcgtcaaggtttccgataatgggaccgtgaccgctctgaaaaccggcatcgccaacatcacaataacggtggtt

SEQ ID NO: 35847 - DNA, 87 bp, synthetic construct
  source 1..87: mol_type = other DNA
gacgactccggcattgtgaaggtcagcgataacggcactgtcactgcattgaaggctggaaccgcgcaagtaactataacggttggt

SEQ ID NO: 35848 - DNA, 246 bp, synthetic construct
  source 1..246: mol_type = other DNA
atgggcggcgccatctttttcgaaggcaatgacctgctgatcgctgactccaagttcatgagcaacgaagcctacgaatacggagctgtgtttgctgattcccttaccgccgaggttcgtaatacagagttctccaagaatgctgccgaggactacggcgcattggccgtgctaggtggagacgtcctcatctacaagtgcaacttcaccgacaattctgctaggtactacggcggagctatactc

SEQ ID NO: 35849 - DNA, 207 bp, synthetic construct
  source 1..207: mol_type = other DNA
gcctgcaatttcacaaacaacgtggctgagggcgagtattccaacgaggctcacgattgcggcgcagtgtctgtcgaaagcgtcacaaccgagatcatcaacaccgagttcattggcaatggcgcctacgactgcggggctgttggcatcttcgaaggcaacgccctgatcgagaattgcactttcgatagtaattacgccaatagg

SEQ ID NO: 35850 - DNA, 174 bp, synthetic construct
  source 1..174: mol_type = other DNA
acaagcgtgcacctcgatgtgctcaacatcggagaagataacgccgacatcgtggccactgtgttcgacgaatacgggaatctggtcaaccgaggagatgtgacctttactatcaacgggctggactataccgtgaagattgctaacggaatcgctaaattcaatgctctgctc

SEQ ID NO: 35851 - DNA, 207 bp, synthetic construct
  source 1..207: mol_type = other DNA
agcagcaatttcattatggttagcaacaagcctatctctacatctatgaacgtctccgtgtcctcttcaaattctaaccccctgaaaatttccgccgtgatcctcgacaagaacgggaacaaggtggagtccggcatggttacctttaacgtggacggagaggactacaagatcaacgtcaatgatggcgaagctaacttcactcac

SEQ ID NO: 35852 - DNA, 186 bp, synthetic construct
  source 1..186: mol_type = other DNA
aagaatatcgtcgtgtcctacgacgacctctactgctatgctagctccaagcggaccctgtccaaggagatcggaatcaaggatgtctctatttatctgagcgtggataacaactacaaccccgtcgtgattactgctgacatcgtggataaggacgggttctctgtgaactgcggcaaggttacc

SEQ ID NO: 35853 - DNA, 60 bp, synthetic construct
  source 1..60: mol_type = other DNA
aacgtggagggcagcgacttcaccgtggacgttaagaatggggtcgccgatctgaagtac

SEQ ID NO: 35854 - DNA, 219 bp, synthetic construct
  source 1..219: mol_type = other DNA
aaatctaactctacctacgacttcttcgatatttccgccatcaagacctatctcgagttcaattttgattccgtgaacgtgtttaaccccgtgaatatctcctgcaccgtccgagacctgaatagtaaccttgtcaatagaggttacgtcactttcattatcaataacgacgagagcaaggtcaaggtggagaacggagtcgctagcctggaatacctg

SEQ ID NO: 35855 - DNA, 192 bp, synthetic construct
  source 1..192: mol_type = other DNA
tccagcaatacaataagccttaacgtgtccaagacctctgttgacctgagcgtcggagtggacgtggaaaagaacgtccacactatccgcgtcaagatcagcaagccggtatcagattacgtgaccatccggctcaacgacaatccgtactccgtaaagtccgataatgggcaggccatcctgatactggag

SEQ ID NO: 35856 - DNA, 75 bp, synthetic construct
  source 1..75: mol_type = other DNA
aaatccgacgaggctacattcgacttcaccgtcaacaagaaggccactcggatcagctgcgatgacgtgttctac

SEQ ID NO: 35857 - DNA, 138 bp, synthetic construct
  source 1..138: mol_type = other DNA
tcccagatcagttgccccattacatttgtggatgagttcggccacgaggtgtctggttgtaaactaagcgtcaacatcgacggaaagttatatgacgtgaccaccaacgacagcgggatcggcctgctcaagttctct

SEQ ID NO: 35858 - DNA, 141 bp, synthetic construct
  source 1..141: mol_type = other DNA
attcaaatgtatcacaaaaacgagctcctggaggcatttattgaaaagcacttccataatggcacctacgacaagactgagtcagagaagatcaaaaaccagacctactatctgctcgataattattcaatctggagtgga

SEQ ID NO: 35859 - DNA, 72 bp, synthetic construct
  source 1..72: mol_type = other DNA
agcaacttcatcgtggaggacaaccccgagcggctgaacatgattagacaactagaaaactgctttggggat

SEQ ID NO: 35860 - DNA, 138 bp, synthetic construct
  source 1..138: mol_type = other DNA
cccatgaagcatctgcggagaaacctcgaccctaaagtctgtttcttcttcgaccgcactaggttcgaggaggaccagatcaataacctttatgaagcgtacaagtggtacaccagcacatatggcaatacagtccac

SEQ ID NO: 35861 - DNA, 33 bp, synthetic construct
  source 1..33: mol_type = other DNA
ctagtattcaaatgcaacaaggaaggactcacg

SEQ ID NO: 35862 - DNA, 42 bp, synthetic construct
  source 1..42: mol_type = other DNA
aacgagaccagcgacgaggccggctccgctgaactgtctaat

SEQ ID NO: 35863 - DNA, 36 bp, synthetic construct
  source 1..36: mol_type = other DNA
ttcgaaggcaatgtcagcgagtccgtgatcttcaac

SEQ ID NO: 35864 - DNA, 135 bp, synthetic construct
  source 1..135: mol_type = other DNA
agcgcctcaaatcaaataacaggcagcggctccgtggagtctgtcgagctgagtgacagctttcaatatctcgattccttaatccattcgggggtcaaagtgataacactcgactccgacattatggctcaacat

SEQ ID NO: 35865 - DNA, 180 bp, synthetic construct
  source 1..180: mol_type = other DNA
aatctggacgtcgagggcctgacaatcgatggaggcggacacgagattaacgccaatgccttttcccgcattttcaacgtaacagctgatggagtgacactcaagaacatccggtttattcgcccgaaggggactgctatacataattcagggtccctgcggatcgagaattgcactctc

SEQ ID NO: 35866 - DNA, 57 bp, synthetic construct
  source 1..57: mol_type = other DNA
accttctccaataaccgttgcgaagtcatacacaacaaggctacactgagcgtagcc

SEQ ID NO: 35867 - DNA, 33 bp, synthetic construct
  source 1..33: mol_type = other DNA
tccgtgttctccaattcggagttcattagagca

SEQ ID NO: 35868 - DNA, 81 bp, synthetic construct
  source 1..81: mol_type = other DNA
tttaacgattctgatgccaccctggatgtggttatgtgtagattttcggacaatttcaccgtcgagggaaattcctttctt

SEQ ID NO: 35869 - DNA, 66 bp, synthetic construct
  source 1..66: mol_type = other DNA
cggggagtgctgagtgtcgaatcatcctcctttatatcgaatgccgtgaacgagaactcaggtggc

SEQ ID NO: 35870 - DNA, 30 bp, synthetic construct
  source 1..30: mol_type = other DNA
atcagcaacgagggcgacctgactgttaga

SEQ ID NO: 35871 - DNA, 63 bp, synthetic construct
  source 1..63: mol_type = other DNA
agcgtgtttgagtccaatgagatggccgtcggcggtgctatttacctgcacctcaaccgattc

SEQ ID NO: 35872 - DNA, 87 bp, synthetic construct
  source 1..87: mol_type = other DNA
tgccggttcgtctccaacaagtctatgggctacgccgctgctatcaacggctccacctacgccgattactacgacttcaacatctat

SEQ ID NO: 35873 - DNA, 120 bp, synthetic construct
  source 1..120: mol_type = other DNA
agcaaggatacaggagtcatcgccgtgcactccggggctctcaagatcatcaactgcaaatttaccaagaaccggggcaggaagtacattatcaagaacaatgacttcctgcaaatctac

SEQ ID NO: 35874 - DNA, 126 bp, synthetic construct
  source 1..126: mol_type = other DNA
aacaaggctcccaacatcattacaaacctgtctaagtccatgtactcgaatggcctccttaccaatttttccatcttcaatgccaagttcctgaataataaggtcaaggatgccgtcatctacaat

SEQ ID NO: 35875 - DNA, 60 bp, synthetic construct
  source 1..60: mol_type = other DNA
atcgagggctccgatgccgacattgaaggcaaggtttacggttccggagtcgttgaggaa

SEQ ID NO: 35876 - DNA, 36 bp, synthetic construct
  source 1..36: mol_type = other DNA
gataacgccagcgagggcatctacaatatcggagac

SEQ ID NO: 35877 - DNA, 54 bp, synthetic construct
  source 1..54: mol_type = other DNA
cggctcagtggcaacagcgtcgggatcgtgaatatggccaacctgtccatctct

SEQ ID NO: 35878 - DNA, 57 bp, synthetic construct
  source 1..57: mol_type = other DNA
gccatcagcggccacgagaagaactccgtgattaacaagggacgtatacgaatggaa

SEQ ID NO: 35879 - DNA, 42 bp, synthetic construct
  source 1..42: mol_type = other DNA
gacaattccggccccatcttcaacaagggagctttgaacatc

SEQ ID NO: 35880 - DNA, 51 bp, synthetic construct
  source 1..51: mol_type = other DNA
agcgacaataaaaacggggccatcaaaaaccggggcgagttgacggtcgga

SEQ ID NO: 35881 - DNA, 51 bp, synthetic construct
  source 1..51: mol_type = other DNA
tcttccaaagatgggggagctatcaaaaatagtggacgtctgacggtggat

SEQ ID NO: 35882 - DNA, 105 bp, synthetic construct
  source 1..105: mol_type = other DNA
atcttcaataaggacatcctcgttatagataagtccagcttcgagctcaacacctctgggaagaagggatcagccatttacaattctggagatgtgaagattgca

SEQ ID NO: 35883 - DNA, 60 bp, synthetic construct
  source 1..60: mol_type = other DNA
agcctggacggctacgagtgctgcggcgaggactgccactgccaagatgagaacttcacc

SEQ ID NO: 35884 - DNA, 228 bp, synthetic construct
  source 1..228: mol_type = other DNA
aacgagaccgtgtttgagattgtccccaagtccgtgtctgtggtcgttagcgtcgaggatattgtatacggagaagatgccatcgtctgggtctacggagagatcgacggcgaatatattgtcggtatctacaaccagaattataccgtcaacgtgttcgatggaaagggaaacactactgtgtccgatctcttcgtggacgaggatatcctggtatccgtgtcaata

SEQ ID NO: 35885 - DNA, 246 bp, synthetic construct
  source 1..246: mol_type = other DNA
tactccgcttacaacaccactatctttaatatcgcccctaagggcattagcgtggttatttcggtcggcaacattacctacggagaggacacagccgtgattgttcaatcggacgtggcaggcgactacatcgtcaccattagggacgagaactataccgtcttcgtgaacggaggcaccggcgtcacattcatccccaacctgggcgttgggaatcagatcgtggtgacagtcaagagagatgat

SEQ ID NO: 35886 - DNA, 231 bp, synthetic construct
  source 1..231: mol_type = other DNA
actgctttcaatgaaactacctttaacatcaatcccaagctgaccaatgttctggtctctgtcgacgatatcacatacggagagaacgcttctgcgaacattgtcgccgaaattgatggaatgtatactctgtctgtgaatggcacggagtatcccattgaagtcattgacggcaaagctagtcaggttatcagcgggctgaccgttggcaattacgtggtgcaaatcgcg

SEQ ID NO: 35887 - DNA, 183 bp, synthetic construct
  source 1..183: mol_type = other DNA
cagacaactttctatgtggtccctaaacccataagtctggtggtcagcgtggaagatatcacctacgaggagaaggccatggtcatcgttgtttccgacgtggacggcgagtacctcgtctacgtcgacgacgccccatacgtggtcgatgtcttgggcggcactgggaatgtctccgtttca

SEQ ID NO: 35888 - DNA, 225 bp, synthetic construct
  source 1..225: mol_type = other DNA
gccgtcaatttcacttcatttgacgtcgccgtcaaggagattgacgtctctgtttcggtcggagacattatcttcggcgaatctgccctcgtggtggttgtgtccgatgtcgacggcgaatacctggtctacgtggacggcgctccctatgtggtggacgtgcttggtggcactggcaacgtctctgtgtctgaccttactgtcgggagttacgctgtcaatgtg

SEQ ID NO: 35889 - DNA, 246 bp, synthetic construct
  source 1..246: mol_type = other DNA
gcttacggcgtcagcgctggggacaattatgctcttagtggaggaagttccgcctcttcccacctgcggatcgtcaccgagatccttgccgggacatacgacccagctaaccaggccactatcaacttcccatacggttccggttcgatttctggacctctgttcgattatctgatggcagcaattgcctacgttgtgaccctctgcggcgtttctcaagccacggcggctgcgggcacattggcc

SEQ ID NO: 35890 - DNA, 33 bp, synthetic construct
  source 1..33: mol_type = other DNA
atgacaacagccttttccaacggcactgagaat

SEQ ID NO: 35891 - DNA, 36 bp, synthetic construct
  source 1..36: mol_type = other DNA
tactatatccccctgggactctggagcacagtgttc

SEQ ID NO: 35892 - DNA, 108 bp, synthetic construct
  source 1..108: mol_type = other DNA
tttgcccctagcgtcagctctgctctcctgcacggctcctccccccaagtcggcgcccttgccaacgacctggcgcatcagtttagtcggacctccatctctagtatg

SEQ ID NO: 35893 - DNA, 213 bp, synthetic construct
  source 1..213: mol_type = other DNA
cagtcttccaacttcatcatggtgtctgacaagcctgtgaacaccagcatcaacctgaacgtatcatcatccaagaacaaccccttcgaaatcaacgccctggtgctggacaagaacgggaatcgggtcgagtctggaatggtcacttttaacgtggatggcgaggactataaagtaaaagtgaacgacggagaggccaacctcacccatatc

SEQ ID NO: 35894 - DNA, 246 bp, synthetic construct
  source 1..246: mol_type = other DNA
aacatcgtggtgtcctacgacgacctgtattgctacgcgtcctctaagatgaccctgagcaaggagatcgagatcaaggacatttctatataccttagtgttgataacaattacaaccccgttgtcattacggctgaagtcgtggacaaggacggattttccgtcaattgtggcaaggtgactttcaacgtcgagggctctgatttcaccgtcgacgtcaagaacgggctcgcttccctgaagtac

SEQ ID NO: 35895 - DNA, 222 bp, synthetic construct
  source 1..222: mol_type = other DNA
tacaagtctaactccgtttatgactatttcgatatatccgctattaaaacctacctggagttcaactttgatactgttaatgtctttaatcctgttaacatcagttgtactgtccgagatttggattccaacctggtcaaccgcggctacgtcactttcattatcaataatgtcgaatccaaagtgaaggtggagaacggggtcgctagtctggaatacttg

SEQ ID NO: 35896 - DNA, 195 bp, synthetic construct
  source 1..195: mol_type = other DNA
tcctctaatagcatctccctcaatgtgtctaagacatctgtggacctgagcgtggatgtctccgtcgtcaagaacgtccacaccattatggtgaccatttctaagcctgtctccgactacgtcgtgatcaaactgaacaataatccctactctgttaagagtgacaacggccaggccatcctgatcctcgagaat

SEQ ID NO: 35897 - DNA, 102 bp, synthetic construct
  source 1..102: mol_type = other DNA
tacgagattaatgcctacatggactcctacatatacaagtctgacgaggccacaagcgacttcactgtggacaagaaggccaccaagatctattgcgatgat

SEQ ID NO: 35898 - DNA, 48 bp, synthetic construct
  source 1..48: mol_type = other DNA
tacaacaacaaggccgagagcggcggtgccatcaattggtatgctgac

SEQ ID NO: 35899 - DNA, 78 bp, synthetic construct
  source 1..78: mol_type = other DNA
tttgaaggctctaacaccgactacaattggttcggaaacaacggctccaactacaaccagaagccctacaacaactcc

SEQ ID NO: 35900 - DNA, 138 bp, synthetic construct
  source 1..138: mol_type = other DNA
tctaccttcaacaataacacagctaactacggaggcgcaattcagagctacaacgagaacgggaacataattaactccacattcaattccaacaaggccaactccaacggcggagccatctactggtacaactcacac

SEQ ID NO: 35901 - DNA, 39 bp, synthetic construct
  source 1..39: mol_type = other DNA
accttcaacaataacgaggctagggaaggaggagctatc

SEQ ID NO: 35902 - DNA, 30 bp, synthetic construct
  source 1..30: mol_type = other DNA
aacagcgggaccaatggcggagcaatcctt

SEQ ID NO: 35903 - DNA, 48 bp, synthetic construct
  source 1..48: mol_type = other DNA
aacgccgactacaactggttcggcaacaatgagatcaactacaaccag

SEQ ID NO: 35904 - DNA, 102 bp, synthetic construct
  source 1..102: mol_type = other DNA
aaccccaacatgatcgggctcagcgacatctccgaaatcaccttcaagctgtactcatatgacggctctgagattagagaatatgacaacagcattctctac

SEQ ID NO: 35905 - DNA, 60 bp, synthetic construct
  source 1..60: mol_type = other DNA
ctgtccctgagtacaactcgggggacgttatctaaggatacagccaggctttctgaaatc

SEQ ID NO: 35906 - DNA, 282 bp, synthetic construct
  source 1..282: mol_type = other DNA
tgggatcttaaccgaacaattaacggaaacaacaatacagaaattacactcaacaagaactatacttacaaccccgagattgatagcgacttcatcaacgggataatcattaaccggacgctcacaataaacgggaacaagaacacaatcaacgggtctgacctcgcacggatattcaacatcatcgccgatgatgtgattattgacaacattatctttaccaacgggaatgctgacaccggcggagctatttattgggagggggattatggaaccctgtcc

SEQ ID NO: 35907 - DNA, 33 bp, synthetic construct
  source 1..33: mol_type = other DNA
agcaccttcaacaataacaatgccagtgaatac

SEQ ID NO: 35908 - DNA, 30 bp, synthetic construct
  source 1..30: mol_type = other DNA
aataaggctaacagaggcggtgcaatcaca

SEQ ID NO: 35909 - DNA, 84 bp, synthetic construct
  source 1..84: mol_type = other DNA
cccaatgagatctactaccaaaactttgaaggtagcaacgccgacaacaactggttcggcaacaacgcttccaactacgatcag

SEQ ID NO: 35910 - DNA, 36 bp, synthetic construct
  source 1..36: mol_type = other DNA
ctgaacaccgctttcggagcaaggcctttgagagcc

SEQ ID NO: 35911 - DNA, 147 bp, synthetic construct
  source 1..147: mol_type = other DNA
gtgaaccgggacatcgccctgcaagttaaagtgaaggatcagttcggcgactacatcgaggatggcaacgtgaccttcctcattgacggagaggcgtttactgttagcctggtcgactgcgtggccaataagactgtgtcctttgct

SEQ ID NO: 35912 - DNA, 39 bp, synthetic construct
  source 1..39: mol_type = other DNA
gtgtccaagctgattgacatcgagcccgtcaacactagc

SEQ ID NO: 35913 - DNA, 201 bp, synthetic construct
  source 1..201: mol_type = other DNA
tctctgtccgacgacacactgctcgttggcgagagcctcaccgtcaccgccgtcgtgaacgccactcaaggcaaggtgctgttctacatcaatggcgttctgaacgataccgtcgatgttgtctccgatggagtggcatgcctggtgctcgacaacctgtactatggcggctacaacgtgaccgctttcttcactgacgtc

SEQ ID NO: 35914 - DNA, 48 bp, synthetic construct
  source 1..48: mol_type = other DNA
agctccaaccggagcgcatttagtgtctattcaaacacagtcttagag

SEQ ID NO: 35915 - DNA, 54 bp, synthetic construct
  source 1..54: mol_type = other DNA
gaggctttcactgtttcactcgtcgactgcgtggccaacaagacagtgtccttc

SEQ ID NO: 35916 - DNA, 45 bp, synthetic construct
  source 1..45: mol_type = other DNA
ctggtcggcgagcctctgacggtaactgctgtagtgaacgctact

SEQ ID NO: 35917 - DNA, 81 bp, synthetic construct
  source 1..81: mol_type = other DNA
gtgctcttctacattaacaatgtcctgaacaacacagtcgtcctggattcaatgggagccgccgtgctgacccttaataac

SEQ ID NO: 35918 - DNA, 60 bp, synthetic construct
  source 1..60: mol_type = other DNA
aaggccaacttcactgtgatttatcctacggaaattatcactcaagatctaaccaagtac

SEQ ID NO: 35919 - DNA, 126 bp, synthetic construct
  source 1..126: mol_type = other DNA
tttaccttccgcctgctcgacaatcaggggaaccccgtcggcgccgggatcagcgccacaatcaatattaacggcgtgttctacacccggacaaccgatgctaacggatacatcaccctgaacatc

SEQ ID NO: 35920 - DNA, 39 bp, synthetic construct
  source 1..39: mol_type = other DNA
gtcctggacgtggacgtttacgatgtctgctaccctgat

SEQ ID NO: 35921 - DNA, 81 bp, synthetic construct
  source 1..81: mol_type = other DNA
gccttcgcgatcgtttctgcctctgtggatggagagtacattgtctcattcaacaataaaaattatacggtcattgttagc

SEQ ID NO: 35922 - DNA, 201 bp, synthetic construct
  source 1..201: mol_type = other DNA
gaatctctcgtggtcagcgtggcgaatgtttcatatggtgacatcccactggtctttgttaacgcctcggtcggcggaaaataccgagtggtggtggagggaaccgacatcaacaaagtggttctgataaacagttctttctccctaagctttgtcgagctgcccatcctgggggttaagtccaattataatgttaatgta

SEQ ID NO: 35923 - DNA, 111 bp, synthetic construct
  source 1..111: mol_type = other DNA
attaatgtgctcttctctgtgaacccgattccgtcatccctgaatatcagcgactgcgaatttgtgtttggtggagttgggaacataaactttacctactatggtgccctt

SEQ ID NO: 35924 - DNA, 60 bp, synthetic construct
  source 1..60: mol_type = other DNA
gccaatatcttcatcgacgataaccacatcatcctttcaaatctggacgctggcaactac

SEQ ID NO: 35925 - DNA, 54 bp, synthetic construct
  source 1..54: mol_type = other DNA
aagaccgtcaacgtggaggttgataaagccgaccctcatttatcccttaatgtg

SEQ ID NO: 35926 - DNA, 150 bp, synthetic construct
  source 1..150: mol_type = other DNA
aatgtctccattatcctcaagagcgaggtggacggagtgtattccgtggacattaacggcagcgctgtgatcgtcgtggtggagaacggaatcggcttcctgtccatcaagaaatctgtgaacgtctacaacgcctctgtctccctgatt

SEQ ID NO: 35927 - DNA, 144 bp, synthetic construct
  source 1..144: mol_type = other DNA
gattactgcattttctccgtatacatgaacatgacctacgagttcatcgtcgagcccaaggtggcctccatcaattatggcgaatctatttctttctacgccggaatcaacgacgacaacgcgactggaaacgtcatcttcttc

SEQ ID NO: 35928 - DNA, 237 bp, synthetic construct
  source 1..237: mol_type = other DNA
cccaagttctacgacatctgtgtactgcctgctaattctaccattaactccaacgacctcaccgtatcttacgacgctaaccctattaacatcaactatgtctgcgaaaacgccacgggcatcatgtaccacgtatacgatatggataagaatctggtggagtatagcaccgtcggactgaacgagaagattaccctgtataaccttgtggtcggcaagtactccatcatcctgacc

SEQ ID NO: 35929 - DNA, 189 bp, synthetic construct
  source 1..189: mol_type = other DNA
aagcagtacatgatcaacatcgagctcggcgaaattaaactgaatacaaccatcaagtctgccaagtaccccaacgacgtgatcgtgacaatcaccaccgacattagcgggaagtaccaggtcttcatcaacaactcctacctgaaggagattaacctcgtgaagaacaatccttacaacctgataatc

SEQ ID NO: 35930 - DNA, 75 bp, synthetic construct
  source 1..75: mol_type = other DNA
gaggacattaaaatcttcaaagtctataacggcaccatcaacctcaacctggatgtctcggatatttcctatccc

SEQ ID NO: 35931 - DNA, 87 bp, synthetic construct
  source 1..87: mol_type = other DNA
ctgacaatcaacctcaagaccaatgtctcgggaaagtacaggattcagatcctggaacggaacttcattaaggagatcaaccttatc

SEQ ID NO: 35932 - DNA, 63 bp, synthetic construct
  source 1..63: mol_type = other DNA
attatggagtctatcaacctcggcatcctgcctccaaactcgtataccatcaacatctctagt

SEQ ID NO: 35933 - DNA, 210 bp, synthetic construct
  source 1..210: mol_type = other DNA
gaggccaagagtatccagaagatcgtcaagattaacgagagcattgactaccattctaccgtgattatctccaagaacacctctctctactatcacaatggcaccaaactcgaagccaagctggtggacgcaaacgggaacgctatcatcaacgagaacatcgagttcgagatcaacggaaagaattacacccggattacagattccaat

SEQ ID NO: 35934 - DNA, 294 bp, synthetic construct
  source 1..294: mol_type = other DNA
atcgcccgcatcgctattaatctcgacgtcggggaatacactgtcaacatatattacgccgggaataagaaccagaagagtgctaagaacaccgtgatcgtgtccgtcctgagcaccatcaacggcactaacatcgtgaagatctttcacaacgacacccagtactacgcaacattcaaggattctaagggaaattatctggccaacggcatggaggttacattcaatatcaacggggtcatgtaccaccgcaaagtcaacgggaacatggggctggttcgattgaacataaac

SEQ ID NO: 35935 - DNA, 231 bp, synthetic construct
  source 1..231: mol_type = other DNA
gagtatatcctcactgctatcaacccggtcaataacgagatgatctcaaacataataaaagtcataccacgaattatcgaaaataatgacttagtaaagtatttcaagaacaactcccaatatcgcatcaaagtgctcgacgacaagggaaacgccgtcggggccaacgagaaggttatcttcaatattaatggggtcatgtacgagaggtttactgacgacgacggttat

SEQ ID NO: 35936 - DNA, 231 bp, synthetic construct
  source 1..231: mol_type = other DNA
atcacggctcaatacaaaggttcgatggtatcgaacaaaattaaagtgctgcccattattaccgccggcgacctcattaaaaagcagggaaccccagatgccttcaaggcaaagattgtcgacggcaagggcaagccgatagctgcacaatacgtcacctttaacattaacggcgtgatgtatcagcggcttaccgataacaacggaatcgcaaagctgaacataaacctc

SEQ ID NO: 35937 - DNA, 36 bp, synthetic construct
  source 1..36: mol_type = other DNA
agcaactacgtcaccgtgacaaacaatgtggtttgg

SEQ ID NO: 35938 - DNA, 201 bp, synthetic construct
  source 1..201: mol_type = other DNA
attaaaaaagatacacctatcaccgcttctgccgtcgtcaatgggaatcgcgtgacactgactgtcaatgtggatgagaatgctaccggatttgtgaaagtcacagtcgggtcaacagtgactaatattgaggttgtggacggcactgcgactcttaccaccgtcttggtccccaactcttacttcgtcgatgttacgtac

SEQ ID NO: 35939 - DNA, 63 bp, synthetic construct
  source 1..63: mol_type = other DNA
aagacaagcgtgaccttcaccatcactgatatcgccaagaagaacaccaacatcgacctgaat

SEQ ID NO: 35940 - DNA, 123 bp, synthetic construct
  source 1..123: mol_type = other DNA
gtatacgaggatgctgccctggttaaggtggatatcaacgagagcgccaccggcctcgtgaaattttacatggtcggaaaggaaagcggcgaggagtacacaatgtacatggacgtgatcgat

SEQ ID NO: 35941 - DNA, 66 bp, synthetic construct
  source 1..66: mol_type = other DNA
gtggccacctacatgggcgacagcgtgttcaacactaataccacatccaaggacgtggagatcctg

SEQ ID NO: 35942 - DNA, 204 bp, synthetic construct
  source 1..204: mol_type = other DNA
cacctcatgaaagacacacctatcgacgtggaagtggagactaacgccaatcgggtcactttaactgtaaaggtggacgagaacgctaccggcttcgtcgaagttaagtccggggtgtctgtctccaatatcgccctcgagaacggcgaggcaactctgaccattaccctgccctacggttcctatacactggatgtcacatac

SEQ ID NO: 35943 - DNA, 105 bp, synthetic construct
  source 1..105: mol_type = other DNA
gaagagtacacattatacgcggacgtgatcaacggcaaggctgtcctggaatacgtccttctcaccggcgactacactgtggtcgccacctacatgggtgacgac

SEQ ID NO: 35944 - DNA, 189 bp, synthetic construct
  source 1..189: mol_type = other DNA
cccatttctgctagggccgacgtgtccggtaaccgcgtgaccctcaccgtgaacgtcgatgagaacgccactgggttcgttcgactggcagttggaggaacagtcgctaatatcgaggtggtggacggagtcgccaagctgaccactaacctgctgcctaatagctacttcgtcgaggtgacttacctg

SEQ ID NO: 35945 - DNA, 192 bp, synthetic construct
  source 1..192: mol_type = other DNA
accaaagtaacctttactgttaccgaggtggccaaggagaacaccaccatcgatctggacgtcctggtttacgaggacacagcgctgattatggtcgatctggacaaggctgcaactggacttgtgaagctgtatatggtgcttaaggagacgggcgaggattacactatgtacatggacgtggtggacggt

SEQ ID NO: 35946 - DNA, 144 bp, synthetic construct
  source 1..144: mol_type = other DNA
gttgtcaacggcaatcgggtaactctgaccgtgaacgtcgacgagaatgctaccggctttgtcgagctgaagttcggggacaatgtgttcaatattgctttaacggatggggttggcaccctgacaacttccctgccttatggc

SEQ ID NO: 35947 - DNA, 33 bp, synthetic construct
  source 1..33: mol_type = other DNA
agcctggacatcacctacctcggcgatgagaac

SEQ ID NO: 35948 - DNA, 117 bp, synthetic construct
  source 1..117: mol_type = other DNA
gagggcctggacgcacagatcggcaagacctttagccgggctggcaagaagcttggcaatgagttcctgccatctatcaaggacctcaagaaggccttcattgagctggataacgag

SEQ ID NO: 35949 - DNA, 177 bp, synthetic construct
  source 1..177: mol_type = other DNA
atgttcggccccatcctgtcgggacaggggaccccaatgctgctgtacatggccaagtttagccccttctttctccaacacaacatgttctataaatggctcagcaacgatgtgaagaacatcgagtccgtgctcaatctgccttctgttatggacacagtcggaattgactgctac

SEQ ID NO: 35950 - DNA, 57 bp, synthetic construct
  source 1..57: mol_type = other DNA
accgtctttggcgcctacgatggcaatgtggctgaatatgggcccgacaactacttc

SEQ ID NO: 35951 - DNA, 240 bp, synthetic construct
  source 1..240: mol_type = other DNA
ggcgacggtggcatgttagatgacgaatgcgaagaagagttcgatgtggtcgacgtcttcgtggacgccgtttatgccgatttaaaggacgtcggcggagttaacgtattcggttcggcggtgcaaaaaacggtggtgtcctctgagagtgatgtgctcgtgaaccccagcgcctctaagtccatcgtctccgtggccaacgctgacaagaatattggattcatcccttccatgttttct

SEQ ID NO: 35952 - DNA, 105 bp, synthetic construct
  source 1..105: mol_type = other DNA
gacgctctgatcggcaagagcttctcccgggccggcaaaaagattggcaatgagttcctcccacaactaaaggagatcaaaaaggccttcattgagatcgatgag

SEQ ID NO: 35953 - DNA, 261 bp, synthetic construct
  source 1..261: mol_type = other DNA
aacaccaagttgaccttcaccgtgaccgaggtttcgaaggagaacaccgccatcgatttgaacattatccccgtggacgaggacagcgtggttttcgtcgtatccttaaacaaatccgccactggactagttaagttctacataatctcaaaggagtctggcaagaacgcaaccagttacatggatgtgaaaaatggctacgctagaatcatcgtacacgactttgattccggaaactataccgtcgtagccacttatatg

SEQ ID NO: 35954 - DNA, 30 bp, synthetic construct
  source 1..30: mol_type = other DNA
gctgtgatcggcgccttcgtacctactgtc

SEQ ID NO: 35955 - DNA, 87 bp, synthetic construct
  source 1..87: mol_type = other DNA
ctcgagggttcggtctatcatgactactccaacttatggggcaatgccctgagctttaccatgctgggattctctatgggcaatctg

SEQ ID NO: 35956 - DNA, 243 bp, synthetic construct
  source 1..243: mol_type = other DNA
ggcaaaggcaacgatcctttctctgaaatatataaagaccccatctttaaggaagccctggacaattgcctcaaagatgggatgaacagcatggagacactgcggaatgcctaccctgatcttgtcaattactggtacaagagcgtggacgccttgttctccaatccccaagcctccgctcaagatgttgtcaacctctttgatacactcaatctgatcacaagtaccaccgctgtgaacggc

SEQ ID NO: 35957 - DNA, 33 bp, synthetic construct
  source 1..33: mol_type = other DNA
aacaccgagaacaataacattatcgaggaccac

SEQ ID NO: 35958 - DNA, 54 bp, synthetic construct
  source 1..54: mol_type = other DNA
gccaacaatgcaatcatctcgaattatctgggccctctcaactacctggattcc

SEQ ID NO: 35959 - DNA, 48 bp, synthetic construct
  source 1..48: mol_type = other DNA
ctcggcatcatgtacatgtcgaactcgatggtgtcttatctgagtctg

SEQ ID NO: 35960 - DNA, 48 bp, synthetic construct
  source 1..48: mol_type = other DNA
gatgacatgcaggtctcgtctgtcgccgctgccgatttctacgacgat

SEQ ID NO: 35961 - DNA, 69 bp, synthetic construct
  source 1..69: mol_type = other DNA
aacgactttaatggcgaccacatggatatcttcggctacaagttccccctgttcgccttcgatagcgat

SEQ ID NO: 35962 - DNA, 243 bp, synthetic construct
  source 1..243: mol_type = other DNA
attcgcgtggtccgatacgatgcaaatggcggacagggatcgacgccagccactgtgttcttctgcgacggcgagggttccctgcccgaaaacggcttcacaagagaaggctataccttcggtggatggagccgcaaggccgatgggagtgatccaatctctgctgacgcggagttgtctgccctcggcaaaatccacttcctcaaactctacgcggtctggaataaggaggaagtccagcaa

SEQ ID NO: 35963 - DNA, 240 bp, synthetic construct
  source 1..240: mol_type = other DNA
tacacaattactagcaccaaccccgctaccggcgaaaacgccgctaacaatatcaccgtcctgtccaccatcactggggatgacattgtgaagtactacaagaatggcacacagtacaccgccacattcctggatggcgaaggcaaccctctgaacaatgggaccgcatccttcaacatcaatggggttatgtatggacgcaaaatcgtgaacggcactgccaagcttaacatcaacttg

SEQ ID NO: 35964 - DNA, 249 bp, synthetic construct
  source 1..249: mol_type = other DNA
ggcaatctcaccgatatagttaactccatcaacaacggcaccctcatctccctgatcaatgaggccgcttctaaactgaacgcaaccctcgtcaatctgaccgaggccttcaagaaggtgaccgtgattaatgggaccgaggtggatattaacgctacactggccaagctgacaaactacgtggatttcatatcaaagttcaaggtcgaaaacattgccggattcaacgctactaagagcctggagttc

SEQ ID NO: 35965 - DNA, 72 bp, synthetic construct
  source 1..72: mol_type = other DNA
aatacaacctccaacatcgctgccatgctgccttccttcgacgttaattcaagcaccctcatttctccaatc

SEQ ID NO: 35966 - DNA, 51 bp, synthetic construct
  source 1..51: mol_type = other DNA
ctcagcgagagcatcaaagcaattgacaatggtaccctcatatccttgatc

SEQ ID NO: 35967 - DNA, 249 bp, synthetic construct
  source 1..249: mol_type = other DNA
gagaacctcaccaagggcatcggcctctatggtgaccctgaggcacccgctgtgaacgtgaccgtgaaattcaatattaatggggtcctgtacaccaggaccaccaacgccactggcgacgccaagctgaatatcaaccttcccgttaaggactacgtgattaccactacttacaacggcctctccgtcgctaacaacatcaaggtggccgaacagttccggatcttcacaagccttagttcttacttc

SEQ ID NO: 35968 - DNA, 36 bp, synthetic construct
  source 1..36: mol_type = other DNA
aattatctggacatttacttcatcttcaacgatgcc

SEQ ID NO: 35969 - DNA, 39 bp, synthetic construct
  source 1..39: mol_type = other DNA
cacgtgatcaacggtggtcgtattttggaggcctacacc

SEQ ID NO: 35970 - DNA, 69 bp, synthetic construct
  source 1..69: mol_type = other DNA
gactacctgttcggcgtcccctcggaccgcgaactggaacactttatgtggaacaacaccaatggatat

SEQ ID NO: 35971 - DNA, 39 bp, synthetic construct
  source 1..39: mol_type = other DNA
aacctggtttacggaataagcatcttcacctcccatgag

SEQ ID NO: 35972 - DNA, 69 bp, synthetic construct
  source 1..69: mol_type = other DNA
gactggatctttggggttccgagcgatcggcagctggagcacttcatgtggaacgaaattaacggatac

SEQ ID NO: 35973 - DNA, 105 bp, synthetic construct
  source 1..105: mol_type = other DNA
gagatcggcttcaacaagttcaagaacaacaagaacggactgatcctcaagaacaataacaagatctattcaaacaccttttccggcaatgacatgggcatcaac

SEQ ID NO: 35974 - DNA, 144 bp, synthetic construct
  source 1..144: mol_type = other DNA
aacacgttcaagaataataagatttgcgtggtctccaacgagtccaacacattcctgggcaatgtgttctacaacaacagcatggccctgaagtgtctgaaatctaacaagatcagtaacaacaccttttcctacaacgagaag

SEQ ID NO: 35975 - DNA, 39 bp, synthetic construct
  source 1..39: mol_type = other DNA
gagctgttttccaattctttttcatacaataccatcggc

SEQ ID NO: 35976 - DNA, 51 bp, synthetic construct
  source 1..51: mol_type = other DNA
tccaacaacaatatcatcaaatcaaactctttctctaacaattaccagaat

SEQ ID NO: 35977 - DNA, 60 bp, synthetic construct
  source 1..60: mol_type = other DNA
cgcggaaacgagaataaggccagcggcaacatcttcaagaataacaagtaccatgctctg

SEQ ID NO: 35978 - DNA, 93 bp, synthetic construct
  source 1..93: mol_type = other DNA
aacatctttaaagacactggcaacatcagcctgagagtcaatggtaactccatcaagattaagaacaataagttcaccgggaacaagaacaca

SEQ ID NO: 35979 - DNA, 39 bp, synthetic construct
  source 1..39: mol_type = other DNA
accaacagcaagaagggcattctgatccacggcgataaa

SEQ ID NO: 35980 - DNA, 150 bp, synthetic construct
  source 1..150: mol_type = other DNA
atctccaagaataatatcaccaagtctaataagggcctcctgatccacggcaatcataacaacatcttgcaaaacgtgattaagtctaaccggattggcgtgcacaactacaagagcaagaacaacaagatcaactacaactacatcgtg

SEQ ID NO: 35981 - DNA, 33 bp, synthetic construct
  source 1..33: mol_type = other DNA
aaggatataatgcaaatgttttacatcaaagac

SEQ ID NO: 35982 - DNA, 39 bp, synthetic construct
  source 1..39: mol_type = other DNA
aacctgacctccggcatcagcattttcacttctcacact

SEQ ID NO: 35983 - DNA, 69 bp, synthetic construct
  source 1..69: mol_type = other DNA
gacttcatctttggcgtgccatcggaccggaacctggagcacttcatgtggaataacgtgaacggatac

SEQ ID NO: 35984 - DNA, 30 bp, synthetic construct
  source 1..30: mol_type = other DNA
cgggccgtgcggacccaccccctgagcctg

SEQ ID NO: 35985 - DNA, 39 bp, synthetic construct
  source 1..39: mol_type = other DNA
ctgaacctctacgccggcatcccaatattttcctcgagg

SEQ ID NO: 35986 - DNA, 69 bp, synthetic construct
  source 1..69: mol_type = other DNA
gactacctgttcggagttccctctgaccgggacctcgagcacttcatgtggaacaacgtcaatggatac

SEQ ID NO: 35987 - DNA, 48 bp, synthetic construct
  source 1..48: mol_type = other DNA
gacgacatgcaggtgtccagcgtcgccgccgctgatttctacgatgac

SEQ ID NO: 35988 - DNA, 69 bp, synthetic construct
  source 1..69: mol_type = other DNA
aacgacttcaatggcgatcacatggacatcttcgggtacaagttccccctgtttgcctttgatagcgac

SEQ ID NO: 35989 - DNA, 33 bp, synthetic construct
  source 1..33: mol_type = other DNA
gacgagctgatccactcgggcgctggggaagtg

SEQ ID NO: 35990 - DNA, 63 bp, synthetic construct
  source 1..63: mol_type = other DNA
attgatgggaacaataagaccatcgacggaggcgacctgtcacgaatcttcatagtcagcgct

SEQ ID NO: 35991 - DNA, 138 bp, synthetic construct
  source 1..138: mol_type = other DNA
gggatgagcaatgaggagctgatgatgttcagttctaccgtcaacgatgtcggacaacgggccatccttatgggcaagagcggcgaggaggcaatttccctgatgcaagctgccggtcgcggtctcaatggagagttt

SEQ ID NO: 35992 - DNA, 249 bp, synthetic construct
  source 1..249: mol_type = other DNA
gagaccctcaccgacctgggatggagcggggccgccgatgacgttgaaggttatcagatggcactggacaaggctcttgagaagggcggagacatggatgggatgctggacacaactaccggacacctcgagacactgaagaagaactttagggtggctggccggcacgtcggcgagatgttcactccctacatcgacatggcagttcagaagctcaacgatctgaacgaccgcttccctggactgttc

SEQ ID NO: 35993 - DNA, 171 bp, synthetic construct
  source 1..171: mol_type = other DNA
accgctgggttgcatcgattgtggtcagctttcattaacaacccaaacgtccaggggtttctcaaggatttgagcaatgcctggaacgatatctgcgaggcgctcgctcccgttatcgactgggcccgcaaggcctggaatgaactgttcccaccttccgctactggttcc

SEQ ID NO: 35994 - DNA, 45 bp, synthetic construct
  source 1..45: mol_type = other DNA
ggcaaggtggtcaactccgccaaatccgcttgggaggctatcggt

SEQ ID NO: 35995 - DNA, 123 bp, synthetic construct
  source 1..123: mol_type = other DNA
gccttcggacccagccactccatgtctctgagcgaggctgccggaaatctgattagtgccatcgataagggcggaaagggactcaccaacgacgaactctacgtctacgagagtagacttcca

SEQ ID NO: 35996 - DNA, 48 bp, synthetic construct
  source 1..48: mol_type = other DNA
atcgccagcgggtttaccctctggggcttactgggaaactccgacttc

SEQ ID NO: 35997 - DNA, 90 bp, synthetic construct
  source 1..90: mol_type = other DNA
actgtgatcttgacaacttcggactccgaggatttacaaaatgcagtttcctggctatatgggtccttcacatctgtcgactgggacaac

SEQ ID NO: 35998 - DNA, 33 bp, synthetic construct
  source 1..33: mol_type = other DNA
agaatgataatgataccacaagaattgcctgtg

SEQ ID NO: 35999 - DNA, 90 bp, synthetic construct
  source 1..90: mol_type = other DNA
gacctaatccatagcggcgtcaacgagattgtgctggatgccgacatcgtgctggacaaatgggaaaggcccaaatacgctgaaggaatc

SEQ ID NO: 36000 - DNA, 147 bp, synthetic construct
  source 1..147: mol_type = other DNA
gacgtggaccggctcgttatcgacggcaacggtcatagcatcgatgcttgtggaaaggtcggcatcttccggtgctccggcaagaacatcaccatcaagaatacaactttcaagaacggcctgagtgttggaggtggagccatctac

SEQ ID NO: 36001 - DNA, 39 bp, synthetic construct
  source 1..39: mol_type = other DNA
ttcgagggcaacgtgtcaccatacggttctgggatttcc

SEQ ID NO: 36002 - DNA, 39 bp, synthetic construct
  source 1..39: mol_type = other DNA
agcaatgtgatcaacaacaaaaaggacctgaccttcatg

SEQ ID NO: 36003 - DNA, 69 bp, synthetic construct
  source 1..69: mol_type = other DNA
gatttcagttacctcaatagcttaattcaagaatcaaccgacggcatcgtgtccctggaaaacgacatc

SEQ ID NO: 36004 - DNA, 30 bp, synthetic construct
  source 1..30: mol_type = other DNA
ctggagaactacgagctggacttcttcgaa

SEQ ID NO: 36005 - DNA, 171 bp, synthetic construct
  source 1..171: mol_type = other DNA
attaccgaggacaacattaccattgagggtaacaatcacataatcgatgccaaaaaccggacacgaatttttcaaatcttggggaaaaacataaccataaagaaaatcattttcaagaatggatatgcgtctaacaaatatggcgaacacatcaacggaggcggagccatc

SEQ ID NO: 36006 - DNA, 66 bp, synthetic construct
  source 1..66: mol_type = other DNA
accctggaggattgccagttcatcgagaacacaagcgacaatgacggaggcgctattcaaaataat

SEQ ID NO: 36007 - DNA, 39 bp, synthetic construct
  source 1..39: mol_type = other DNA
aacgagaacaataagttctttaactacgacaccaagtct

SEQ ID NO: 36008 - DNA, 117 bp, synthetic construct
  source 1..117: mol_type = other DNA
gaaatcgtggactctggattctacaacaactcctctaagaataagagcctgatcaataacaacggcgagctgattatcattaacaccaattttaccaacaataattcgcaatctgaa

SEQ ID NO: 36009 - DNA, 75 bp, synthetic construct
  source 1..75: mol_type = other DNA
caggtccttgtcaagaattccaacttcacaaacaacagctctaccaagaatggcggagccatcatctgtcgggaa

SEQ ID NO: 36010 - DNA, 222 bp, synthetic construct
  source 1..222: mol_type = other DNA
accatctttgaaatcaaagactcccgatttgtcaataataactccaatctcaaaggcggggcaatttactctgacggagacgagttcaagcttcacgattgtatattcaatggaaaccatgcttttagcgtcggcggcgccatttacaaccacggcaaactgtcatgtaaaaacacagactttaccaataacagcgcacaaaaccatggcggggccatagcc

SEQ ID NO: 36011 - DNA, 69 bp, synthetic construct
  source 1..69: mol_type = other DNA
gactccggcaacgtggcagactgctacttcgccgggaacacagctagctctagtggaggagctgttagt

SEQ ID NO: 36012 - DNA, 69 bp, synthetic construct
  source 1..69: mol_type = other DNA
tgcaattttacgtctaatgaggctaacggcgagaagtcctctggaggcgccatctacttcaatggagcc

SEQ ID NO: 36013 - DNA, 144 bp, synthetic construct
  source 1..144: mol_type = other DNA
aacgtgaccaacagtatttttactgcgaataaggctactcggaccggaggcgctattttcttcaaggataatagcgtcgacaacaagttcgtagccgatttctacggcaactccgccggccagtctggtggagccatcttcttc

SEQ ID NO: 36014 - DNA, 132 bp, synthetic construct
  source 1..132: mol_type = other DNA
aacacattcgactgtatcttcaaggataattacgccgcctatgggggtgccatgttcttttataagaaggccaacggaaacaagatcggcggagacttcatcaacaataccgctaaatcttgtggaggagca

SEQ ID NO: 36015 - DNA, 63 bp, synthetic construct
  source 1..63: mol_type = other DNA
agcttcattaacaactctgccctgggacaggtggactccgagaacggcaatggaggagcaatc

SEQ ID NO: 36016 - DNA, 150 bp, synthetic construct
  source 1..150: mol_type = other DNA
aaggagacctccatgagcatcaaagtggacgacgatgaaatcgttattgagctgcccgaggatgccaccggcaatgtcactgtctctattgacggcaaaccacagacagtgcctgtgtccggcggtagagctgtggtggatatctctggc

SEQ ID NO: 36017 - DNA, 30 bp, synthetic construct
  source 1..30: mol_type = other DNA
gtgacctatcccggcgatgacaactacgac

SEQ ID NO: 36018 - DNA, 201 bp, synthetic construct
  source 1..201: mol_type = other DNA
gtttctaactccacctcattcgaggtgcctaaggtgtcagactaccctatagacattaccgaggaagatgggaaactcgtgatcactgttcctgacgacgcaacgggtagcgtcaccgtctcaattgacgggaaacctcaaaccgttcccgtggaggatgggaaagcagtagtggacatatccggcctggagccaggtaaa

SEQ ID NO: 36019 - DNA, 297 bp, synthetic construct
  source 1..297: mol_type = other DNA
ggcgtcgaggtcacttaccccggcgacaagaaatatgcgccggtgtccaacgctaccattgtcgacattcccaaagttgtggactaccctttcgaagtcatagccgaggatatcaacgtcgggcaaaagacaaatatcactgtgaacctccctaaggacatcaatggccaggtgctggtggacatcggcggagtcggctactacgtgaccgtcaccaacggggtcgcccacattgagctgcctctggatctcaagcccgggagctacgacgccgtggtgacgtttcccggcaacgaa

SEQ ID NO: 36020 - DNA, 75 bp, synthetic construct
  source 1..75: mol_type = other DNA
aattggaccaacgtggtcgtggccaaatccaacctgaccgagaataagtccgctgacaacgtcaccttcgttgaa

SEQ ID NO: 36021 - DNA, 213 bp, synthetic construct
  source 1..213: mol_type = other DNA
ctgggcaacgagacctactttatggtcatcgttaagaataccggcaactgcgacctgcacgatatcagggtggttgagatcttcaatagcaccgaaatggcctatgttaatcacaacaagcagaacttatgggtcaaaacaggcgatgtgtttgcttatcaaggagtgttggccaagggcgaaagtgtcaacttcaccatctggtttaagacg

SEQ ID NO: 36022 - DNA, 30 bp, synthetic construct
  source 1..30: mol_type = other DNA
gagagcgagaatctgaccgtgatgaacaac

SEQ ID NO: 36023 - DNA, 39 bp, synthetic construct
  source 1..39: mol_type = other DNA
gacgtgtacttcatgattgtcgtgaccaacatcggaaac

SEQ ID NO: 36024 - DNA, 111 bp, synthetic construct
  source 1..111: mol_type = other DNA
gataatgtgacggtctacgagatctacgactctaacgaattggacagtatcactctcattaatggcaaaaagtggacccaatttgggaatacattcatctacgatggacgg

SEQ ID NO: 36025 - DNA, 210 bp, synthetic construct
  source 1..210: mol_type = other DNA
tttgtgaacgataccgtcctgtggactatcacaatcgtgaatgttggaccctctgtggccaagggggtcattgtgaacgacaccctgcctgacggagtggagatcatcggcaccatctccaacggcggtcagcagagcggccggaatattgtttggaatatcggggatctcaaggtcaaggaccttattgttctgactttcgctaccaag

SEQ ID NO: 36026 - DNA, 30 bp, synthetic construct
  source 1..30: mol_type = other DNA
cggagcaacaataaggccatcaacaccacc

SEQ ID NO: 36027 - DNA, 189 bp, synthetic construct
  source 1..189: mol_type = other DNA
gtgctgtggaccatcagcgtcgtgaacgtcggcccatctaccgctaaggatgtgattgtcaacgacacactgcccgacggcgttatcgtgatcggagagatcccctaccacggcgtcatttccgggaatactatagtctggaaactcggcgacctgcaagtgaacgcccctgtgatcattaccttcaca

SEQ ID NO: 36028 - DNA, 189 bp, synthetic construct
  source 1..189: mol_type = other DNA
aagtggaccatcaccgtggtcaacaacggaccttcggctgccaaggacgtggtcgtgaacgacacaattccatccgggctcgagttcgtggtgcctgagaactgcactttcgatggcaaatacctgatctggaacattgcaactctcgaagtgaatgcgcctgtgaccctcgagctgatcacaaaggtc

SEQ ID NO: 36029 - DNA, 210 bp, synthetic construct
  source 1..210: mol_type = other DNA
tacgtgaacgacatggtcgagtggaccatcattgtgctgaaccgcgggccttcctctgccgtcggagttgtggtcaatgacacactgcccgatggcctggagatcatcagcgctacaccttccgttggggagttcaacaacaagaccagagtctgggaaattgagaaactggacatcaacgagccggtctccctaatcctcgtcaccaag

SEQ ID NO: 36030 - DNA, 42 bp, synthetic construct
  source 1..42: mol_type = other DNA
gactccaatgagagcaacaaccacgcacaaaacactaccgtt

SEQ ID NO: 36031 - DNA, 186 bp, synthetic construct
  source 1..186: mol_type = other DNA
aagtggaatatcaccgtggttaacaacgggccatcgaccgcccgcgacgtcgtcgtgaacgacaaactgcccgacggcgttcggctgcttaaagtgcctgagggatgtacacaaaaagggaataccgtcatctggaacattggcaacctgaagaccaacgtgcctgtgtctattacactccttact

SEQ ID NO: 36032 - DNA, 180 bp, synthetic construct
  source 1..180: mol_type = other DNA
gtgaacgccattactgttaacctgactgaccttgtcaagtggaccattgtagttaagaacaacgggccttccaccgcccgggacgtgatggtggccgacgtgctgcccgacgggctcaagctgatcggagctgatgctagtgtcggctcttatagcaatggcgtttgggttggcggcaac

SEQ ID NO: 36033 - DNA, 36 bp, synthetic construct
  source 1..36: mol_type = other DNA
accgactctagctccgagactctggtgctcatcacc

SEQ ID NO: 36034 - DNA, 228 bp, synthetic construct
  source 1..228: mol_type = other DNA
atgtccaataaccgggctaacaacaccaccgatgtcaaacctgtttgcgatgtcgaagtcacaaagctcgtgaacgctagcgagatctacttcaacgacctcgtggagtggaccgtggtggttaagaataatggcccaagcacagccagggacgtcaaagtggtggacgtcctgcctgatggcctgaagctagtcggggccgacgcctccgtcgggagttactctaat

SEQ ID NO: 36035 - DNA, 36 bp, synthetic construct
  source 1..36: mol_type = other DNA
catagcggcgccaaggagatcgctctgcactctgac

SEQ ID NO: 36036 - DNA, 42 bp, synthetic construct
  source 1..42: mol_type = other DNA
ggcaacggccacaccattgacgctaagggcaaggcacggatc

SEQ ID NO: 36037 - DNA, 33 bp, synthetic construct
  source 1..33: mol_type = other DNA
ttagttaagttcaccatcgtcgtgaataacacg

SEQ ID NO: 36038 - DNA, 258 bp, synthetic construct
  source 1..258: mol_type = other DNA
gtcatgaatgccacaaacgtggttgttagcgacatcctgcccgacgagttcgtgttttacaaggtgtccgagggaaacgtcaccgacggccagaaagtctcctggaccatcgataaattcaacaccggcgacgttaagacattctggatcatcgctcggactatcgccactaacgccaccaccaatgtggtgaccgtgacatctaaagagaacaagacaaacgttactggcaaggctgtggtcaatgtggtcgagatt

SEQ ID NO: 36039 - DNA, 144 bp, synthetic construct
  source 1..144: mol_type = other DNA
accaacgtgaccatctgcgacgtcctgccaaatggattcgtcttcgatcgggccattgacggttacactaggacgggacaagaaatcaagtggcactttgacactgtcaagtctggcgaagtaattgagctgtggatcacagcc

SEQ ID NO: 36040 - DNA, 135 bp, synthetic construct
  source 1..135: mol_type = other DNA
acaatttgcgatgtcctgcccgacggattcaccttcgtggacgccagcgaagggtacaaccagaccggccagaaggtggagtggtacttcgacactctcaccaagggagtgtaccagctatggatcgtcgctaag

SEQ ID NO: 36041 - DNA, 147 bp, synthetic construct
  source 1..147: mol_type = other DNA
gccaccaacgtgactattcgggacgtcctgccaaacggcctggccttcatcaacgcaaccggcgacaagatcgtgaatggccaggaaattacctggcactttgacacactgacaaagggatactacgagttcgagatcgtggctaag

SEQ ID NO: 36042 - DNA, 282 bp, synthetic construct
  source 1..282: mol_type = other DNA
accgttattaaggaagtggacgttaagtcagtcgatgttctgggcctcgttaatttcacaatcactgtcaccaacattggaaaaattaatgtgacagacgtctcgttcacggacatcatggatctgagcgccttcgaaattaaaggttacaacggaacatttaaacctgacgggaacgaacttctgttcgaaatcgggtccctgaaggtcggcgagacctacaaagtctggattcaggccaaagccctcacgaacggtacattcactaacgtggttaacgtg

SEQ ID NO: 36043 - DNA, 201 bp, synthetic construct
  source 1..201: mol_type = other DNA
aacttcacaatcgaggtgactaacgaggatgtgctcaacgcgacttatctgttcatttacgatatgattccggggggattcgagtttgttaacgccaccgaaggttactacaaagaagggaacatggtcttttggcaatttgagagactctccaatggcagcagcattaagctctggattgttctgaagaccaaggaagtg

SEQ ID NO: 36044 - DNA, 75 bp, synthetic construct
  source 1..75: mol_type = other DNA
aatctcactaatgaggtcgaagtgtactatgccgagaactcttaccgggtttacacgaacagcacagtggaggtg

SEQ ID NO: 36045 - DNA, 60 bp, synthetic construct
  source 1..60: mol_type = other DNA
accgctggcgccgacgaaatctacctgaacgaggagattacattcaccatcaatgtgact

SEQ ID NO: 36046 - DNA, 177 bp, synthetic construct
  source 1..177: mol_type = other DNA
aatgtgacagtcatcgacgtcgtcccttacgggttcgagttcgtgaagtccaatgccacgggctacgacaataagaccggacgcctgaccgtgcccgtgatcgaggccggcaagagctatatcttcacaattaccctcaaggctatcactaacggcaccctgaccaactacgtgaat

SEQ ID NO: 36047 - DNA, 255 bp, synthetic construct
  source 1..255: mol_type = other DNA
gaaaacgtgaccgtagtgaacacgacttccgatgtaaacgtcctgcccgtcgtaaacttgaccgtcaacaagactgtcgacgtgaccgtcatttatgtgaatgacgaggtgacttttaccgtgaacgtcaccaataacgggcctagcaacgctaccggagttaagggttacgacaacgtgacaggcgttctcaacatcgacctgatcgaggccggcgagtcttacgtgttcacaatcaccctgaagccaatgacc

SEQ ID NO: 36048 - DNA, 33 bp, synthetic construct
  source 1..33: mol_type = other DNA
aagaacagctctatctccgtgaatgtcacacca

SEQ ID NO: 36049 - DNA, 63 bp, synthetic construct
  source 1..63: mol_type = other DNA
actgtcgatgtcaccgtgatctacgtgaacgacgaggtgacattcactgtgaacgtgaccaac

SEQ ID NO: 36050 - DNA, 141 bp, synthetic construct
  source 1..141: mol_type = other DNA
acgcagatgtaccacaagaacgagctgctcgaggatttcatcgaaaagcacttccacaacggaacatacgataagacggcggccgaaaagattaaaaaccagacgtactacctcatagacaactatagcatttggagcggc

SEQ ID NO: 36051 - DNA, 39 bp, synthetic construct
  source 1..39: mol_type = other DNA
agcaatttcatcgaggaggacaaccccgaacggcttaac

SEQ ID NO: 36052 - DNA, 48 bp, synthetic construct
  source 1..48: mol_type = other DNA
gacgatatgcaggtcagctccgtggccgccgctgacttttacgatgac

SEQ ID NO: 36053 - DNA, 69 bp, synthetic construct
  source 1..69: mol_type = other DNA
aatgatttcaacggcgaccacatggacatcttcgggtacaagttccccctgtttgcctttgatagcgac

SEQ ID NO: 36054 - DNA, 48 bp, synthetic construct
  source 1..48: mol_type = other DNA
gacgacatgcaggtatctagcgtggccgctgccgatttctacgatgac

SEQ ID NO: 36055 - DNA, 69 bp, synthetic construct
  source 1..69: mol_type = other DNA
aacgatttcaatggcgaccacatggacatcttcgggtacaagttccccctgtttgccttcgactctgat

SEQ ID NO: 36056 - DNA, 36 bp, synthetic construct
  source 1..36: mol_type = other DNA
tacgctaaaacgtattctgccaagctgaaagtgtat

SEQ ID NO: 36057 - DNA, 123 bp, synthetic construct
  source 1..123: mol_type = other DNA
cagggactggacgcactgatcggaaaggctttttcccgggcgggcaaaaagatcggcaacgacttcctcccatttctcaaagacattaagaaggggttcctggaactggacgactcccttggc

SEQ ID NO: 36058 - DNA, 81 bp, synthetic construct
  source 1..81: mol_type = other DNA
atctctaacacttacgatgtttctcaatcccgggccaaggtgctggtcacactgatgacaggatgtggcctcgctggcgcg

SEQ ID NO: 36059 - DNA, 147 bp, synthetic construct
  source 1..147: mol_type = other DNA
ggaatgttcggaatcgacttcttcgtggatttcctgcccttcgactatgctatgtactacggctggggcgagtttgctgcctggatgagcctgaacggcgtgctcggcatggggatggtcgcggccctctacaactgcgtcctgatg

SEQ ID NO: 36060 - DNA, 39 bp, synthetic construct
  source 1..39: mol_type = other DNA
aagaagggcgccgaggatctgtacaaaaccgtggacaaa

SEQ ID NO: 36061 - DNA, 30 bp, synthetic construct
  source 1..30: mol_type = other DNA
attggcatcaccgatgacatggccaacttc

SEQ ID NO: 36062 - DNA, 144 bp, synthetic construct
  source 1..144: mol_type = other DNA
aaggagctgatggagaccaatcaaggcctggatgcactgattggcaaggcattttcacgggctggcaaaaagctaggaaatgaattccttcctcaaattaaagatatcaagcgggctttcctggacatggacaacaacatggga

SEQ ID NO: 36063 - DNA, 111 bp, synthetic construct
  source 1..111: mol_type = other DNA
gcaatgaaccgcgaacggatgaccgctctgacttccgcgaccatggggtcagccgctgccggcgagtcctttgtgaatacgatggataaactcactgatacgagtctcgtg

SEQ ID NO: 36064 - DNA, 126 bp, synthetic construct
  source 1..126: mol_type = other DNA
caggagctgcagaattttacgacaaccgtgaatgacgtcgggcaacgcgccatcctgatgggcaagtccggcgaggaagcagtgtcattgatgcaagctgcaggcagaggacttaacggagagttt

SEQ ID NO: 36065 - DNA, 249 bp, synthetic construct
  source 1..249: mol_type = other DNA
gagcagctgatggaccttggatggagcggggctgccgacgacgttgaaggataccagaaggccctcgataaagcccttgaagctggcggctccatggagggcatgatgaacaccaccactggcaagctggagacactcaagaagaatttcagggtcgcaggacggcacgttggggaaatgttcaccccttatatcgagcaggccgttgggtggctgaacaacttacaaaaaacgtgccctggactcttc

SEQ ID NO: 36066 - DNA, 120 bp, synthetic construct
  source 1..120: mol_type = other DNA
gggaaggccttcggctggtgggacagcgtgcaaggcatgctcggggccatctgggctggcattaaccggctgtggtccgcctttatcaatcaccctgacgtccaggccgcaatccaagcc

SEQ ID NO: 36067 - DNA, 30 bp, synthetic construct
  source 1..30: mol_type = other DNA
agcggggccgttaaggctatcctggagttc

SEQ ID NO: 36068 - DNA, 57 bp, synthetic construct
  source 1..57: mol_type = other DNA
atcactggccagatggatctgcaaaccgcgctgatcaccatctggaacctgatcaag

SEQ ID NO: 36069 - DNA, 42 bp, synthetic construct
  source 1..42: mol_type = other DNA
tacaacgagttcgccaagatcccaggcaaaattcgagacgca

SEQ ID NO: 36070 - DNA, 201 bp, synthetic construct
  source 1..201: mol_type = other DNA
gtcagcaactctacgagctttgaggtgcccaaggtgtccgactatcccattgatattaccgaaaaagacgggaagcttgttattaccgtacctgacgatgcaacgggctctgtcactgtctctatagatggcaagcctcagacggtgcctgtatctggcggaaaggctgtcgtggacatctctggactggaaccgggaaag

SEQ ID NO: 36071 - DNA, 123 bp, synthetic construct
  source 1..123: mol_type = other DNA
tgtgtcggctcacctacaagcctcggccctggcgaggcaatctccgcactgttctccgcaatcggcaagggcggcaaacacctgacctacgaggagatgcttgtctataactctcgtctacca

SEQ ID NO: 36072 - DNA, 51 bp, synthetic construct
  source 1..51: mol_type = other DNA
attctgaccgatttcaccttctttggactctttgcggctgatagtatctac

SEQ ID NO: 36073 - DNA, 87 bp, synthetic construct
  source 1..87: mol_type = other DNA
tctctgatgatgatagatgccgggaccaaggcgagttctgcgctctcctggctctatggctcattcgctagcattacatgggacaag

SEQ ID NO: 36074 - DNA, 33 bp, synthetic construct
  source 1..33: mol_type = other DNA
ttctccgacatcctggatacacctgtaatctgg

SEQ ID NO: 36075 - DNA, 186 bp, synthetic construct
  source 1..186: mol_type = other DNA
cagaagctggacgctctgaaggccgagattaagcctttgcgggacgacgcccggataggaaggctggacgaggagggtcaggccctcttgtcccaaaaagaaaaggagcttagcgaggcaaaacgcgagttcaaggcttactggaaaggcaggcgcgaggagcggtacaaaatgctgggaatccag

SEQ ID NO: 36076 - DNA, 168 bp, synthetic construct
  source 1..168: mol_type = other DNA
gacgcctctgggaatgtgaacggcaccttcatcaacaacgtggccaatcagggcggagccatcgcggtcggtgacgagggcaaaatctctgggaatgtcaacggcattttcattaacaacaccgggtaccactccggcggcgctattagcatcgacgatacagttcgg

SEQ ID NO: 36077 - DNA, 102 bp, synthetic construct
  source 1..102: mol_type = other DNA
gtcgccgacaatagcggcgtggtgtccgtggacgaagacggaacagtgaaggccctgaaggagggcaaggcaaacatcaccgtcaaggttggtgacgctaaa

SEQ ID NO: 36078 - DNA, 33 bp, synthetic construct
  source 1..33: mol_type = other DNA
gctgtgctcctggacacccctgtcatctggctg

SEQ ID NO: 36079 - DNA, 189 bp, synthetic construct
  source 1..189: mol_type = other DNA
gagcagaagctggacgccctcaaggccgaaatcaagcccctgcgggacgataacaggatcggccgcctggacgaggccggccaggcccttctcgcccaaaaggaaaaagagctcagcgaggcaaaacgcgagttcaaggcttactggaaaggacggcgcgaggagaggtacaagatgctgggaatccag

SEQ ID NO: 36080 - DNA, 42 bp, synthetic construct
  source 1..42: mol_type = other DNA
atcaacgccagctcccaactgcaatacggacagcagtttaga

SEQ ID NO: 36081 - DNA, 51 bp, synthetic construct
  source 1..51: mol_type = other DNA
atagcgcaattttctaagtctctcgagaccctccaaacccaattcaaaaag

SEQ ID NO: 36082 - DNA, 111 bp, synthetic construct
  source 1..111: mol_type = other DNA
gggaaggccttcggctggtgggataacgttggagaaatgttgggcgccatctgggccggcataaatagactgtggtctgcctttattaatcaccccgacgtgcaggcagcg

SEQ ID NO: 36083 - DNA, 30 bp, synthetic construct
  source 1..30: mol_type = other DNA
tctggcgccgttaaggctatcctggagttc

SEQ ID NO: 36084 - DNA, 54 bp, synthetic construct
  source 1..54: mol_type = other DNA
actggccagatggatcttcaaacggcgctgatcaccatctggagcctcatcaag

SEQ ID NO: 36085 - DNA, 33 bp, synthetic construct
  source 1..33: mol_type = other DNA
ttcgatggcatcctggacacacctgtgatttgg

SEQ ID NO: 36086 - DNA, 195 bp, synthetic construct
  source 1..195: mol_type = other DNA
gagagggagcagaagttggacgctctgaaagctgagatcaagcctctgaaggacgacgcccggatcggcaggctcgatgaggaaggcaaggccctgttggcgcaaaaagaacaggagcttcgcgaggcacagaaggagttcaaggcctactggaagggcaggcgcgaggaacgctataagatgttgggcatccaa

SEQ ID NO: 36087 - DNA, 72 bp, synthetic construct
  source 1..72: mol_type = other DNA
gctgtatacatgtatcattcgattacggtttcaaattctaaattcaagaagaacagcgtcgagcgaagtggt

SEQ ID NO: 36088 - DNA, 51 bp, synthetic construct
  source 1..51: mol_type = other DNA
gacgaggcccacatccatggctgcctgttcgaaagcaacaaggccgacgga

SEQ ID NO: 36089 - DNA, 33 bp, synthetic construct
  source 1..33: mol_type = other DNA
aaggccgacgactattccggaggcgctatccga

SEQ ID NO: 36090 - DNA, 57 bp, synthetic construct
  source 1..57: mol_type = other DNA
atctacgccgacgataacgtttatgtgacccactgcctgttcgaggacaacaaggct

SEQ ID NO: 36091 - DNA, 66 bp, synthetic construct
  source 1..66: mol_type = other DNA
tgcacattccggaataactacgccgagaacgagggaggcgctatttatagcgacaccctcatcctg

SEQ ID NO: 36092 - DNA, 117 bp, synthetic construct
  source 1..117: mol_type = other DNA
ggcaattacgacattgagatcaacgtttacggaatcaacaccacattcatggagattgttccgtccataatctcccacctgcggatcaaaactgtgaagatttataaggtcgtcttt

SEQ ID NO: 36093 - DNA, 156 bp, synthetic construct
  source 1..156: mol_type = other DNA
gacaactacaccttctttcggtacaatttcgagactggcgaagtcaccgaaactcttcctagttactacaacctggtggattacgggttcgtgtcaaccgtgaagagccagtccaacggcggcaactgttgggccttcgctacggtcggcagtctt

SEQ ID NO: 36094 - DNA, 33 bp, synthetic construct
  source 1..33: mol_type = other DNA
atctacggatgcaacatgatgacggaaggaggc

SEQ ID NO: 36095 - DNA, 240 bp, synthetic construct
  source 1..240: mol_type = other DNA
atggagaacccttacgaggagagtacagtctggctcttcatcaatgggaccgctgaccctgaacaaatcagtatcctgagcacatccaaaatccggttcaagctctatgcgtataacgaagacaccggcgagattaccgagttcgacgaccagatgcatcctgtaaacctgcgccttatctccatcaacgagattctgagtaataacacagttggattaggagacaacatcacttattcc

SEQ ID NO: 36096 - DNA, 63 bp, synthetic construct
  source 1..63: mol_type = other DNA
ctcaccaacttctttaacacaatttcccaaaacaagaatgccatggacaacctgcggaatctg

SEQ ID NO: 36097 - DNA, 60 bp, synthetic construct
  source 1..60: mol_type = other DNA
actaccatcgaggatgtctgcaaaacgtgcaaggagaaactgggcgatctgggaaaggag

SEQ ID NO: 36098 - DNA, 78 bp, synthetic construct
  source 1..78: mol_type = other DNA
ggggatgccctgaaatgggtttcggaccagggcgagaaaatcatgaagtggctcaatgacaaccctgacgtcctgtat

SEQ ID NO: 36099 - DNA, 81 bp, synthetic construct
  source 1..81: mol_type = other DNA
tccgactctctcaaaggcgagtccgtgtccaagtccttcgaaatcaaggaaattgaggacctcatttccgatgatcagagt

SEQ ID NO: 36100 - DNA, 249 bp, synthetic construct
  source 1..249: mol_type = other DNA
ttcgcttatggcgtgtcagccggcgacaattacgccctgagcggaggatctagcgcctcctcccacctgcggattgtaaccgaaatactggccggaacctacgaccccgctaaccaggcaaccattaactttccatacgggagcggctccatctctgggccacttttcgactatctgatggccgccatcgcatacgtggtcaccctttgcggcgtcagccaggcaactgccgctgctggtacattggct

SEQ ID NO: 36101 - DNA, 33 bp, synthetic construct
  source 1..33: mol_type = other DNA
atgacaactgcgtttagtaacggcactgagaac

SEQ ID NO: 36102 - DNA, 36 bp, synthetic construct
  source 1..36: mol_type = other DNA
tattacatcccactcggcctgtggagcacagtgttc

SEQ ID NO: 36103 - DNA, 108 bp, synthetic construct
  source 1..108: mol_type = other DNA
ttcgctcctagcgtgtcctcggctctgctccacgggtcctccccccaagtcggtgctcttgccaacgacctggcccatcaattttcgcggaccagcatcagctccatg

SEQ ID NO: 36104 - DNA, 96 bp, synthetic construct
  source 1..96: mol_type = other DNA
agcgtcgagaccatgaagaatgtcgtttccgacctgtctgagaccactggccgggccgggtcccagattagggaaagtttcatcaaggctacagct

SEQ ID NO: 36105 - DNA, 135 bp, synthetic construct
  source 1..135: mol_type = other DNA
gacagttttcaaaagatgatggaaggggcaggcgcccaggcaacactgttcgggaccgacatccagagcatgggcgacaagttctccggactggccatgaaggataccctcatgcaaaaaacactggcggaactt

SEQ ID NO: 36106 - DNA, 297 bp, synthetic construct
  source 1..297: mol_type = other DNA
acagccgacgaagtaaaagctaagtggaaggagctggacacaaaccagcgggccgccatcctcggaactgccgctagcatgaatgagggcaagaacgcaaacgataattacaagaccagctgggccggactgcaggaacagatgaacgtggctaaggggcgcctggagaggatcgcgggagaagtacttctacccgtgctcgtccctgccatgcaaattgcgaccgacatcctacaaggattaggcgacgtgatttctggcgtcatgtccggaccactgggtggtttcgtctcaatc

SEQ ID NO: 36107 - DNA, 150 bp, synthetic construct
  source 1..150: mol_type = other DNA
ggcaaggcattcggatggtggacagacgtcgggtccatgatcgacgccatcggggctggcttacaaaggatgtgggacgccttcattaaccatcctgatgtgcaggctgccatttccatggtgtctaatgccctctctactttgtggtcc

SEQ ID NO: 36108 - DNA, 66 bp, synthetic construct
  source 1..66: mol_type = other DNA
ggcgttctcacgggacagatggacattcagaccgccatcctctccatctggactagcctgtctgcc

SEQ ID NO: 36109 - DNA, 147 bp, synthetic construct
  source 1..147: mol_type = other DNA
gaggagaaccacattctctttatgaatgtgactgacggacagagcattattactgatgttctgacacccggggactacaccgtggatattacctacctgggcgacgttaactataacaagaacgccaccactgaaacattcaccatc

SEQ ID NO: 36110 - DNA, 75 bp, synthetic construct
  source 1..75: mol_type = other DNA
attaagaaggatacggcgatcagcagcacggcgacggttaagaacggcaccgtgacaatcaccactaatgtggac

SEQ ID NO: 36111 - DNA, 57 bp, synthetic construct
  source 1..57: mol_type = other DNA
cagaccttcatcgtgcccgtcgacaacggccgggccgtgtttacctacgatttcaat

SEQ ID NO: 36112 - DNA, 222 bp, synthetic construct
  source 1..222: mol_type = other DNA
atcatcatgatctcttcatccgattgtactgctatttctgccgactatctgtctgattctaaacttaaatctaacaacattaacatcatctccaacggcaccagtctgggctttgaccttagtaattccttggatggcgtcgaactctccggtaacgaaattatcatacatgctgataaaaacgcctatttgatcaaactcagcaacgtgaacaatagcacg

SEQ ID NO: 36113 - DNA, 231 bp, synthetic construct
  source 1..231: mol_type = other DNA
ggcgacgtcgatagcgccagttttacaatcttgaaaaccactccaacgatcaatgtgaataccgtgaacgtgaattacccaaacgacatcactgtgaatatcatatcaaatattgacgggacctacatcgttaagatcgctaacaagacgcagaacgtgaacctgaaaacaaacacacccaagcaagttcgtttcacggaccttaacgccggaaactataatgttagcgtg

SEQ ID NO: 36114 - DNA, 252 bp, synthetic construct
  source 1..252: mol_type = other DNA
aacgccgtcctcaagaatactcctgtgaacatcctgaaggccagtagtaaagtctctattaatactattggaaaccacgaatacgggaaggggttcgacgtaaattttcacgtcgtgaaccatacaagtgtatcctacataattaaatccaagaacggcaatgtggttgttaatgccacggccgacagtctcaataagatttccatccccgttctggacgcaggcgaatacatcgtaactgtgtttaactgc

SEQ ID NO: 36115 - DNA, 240 bp, synthetic construct
  source 1..240: mol_type = other DNA
accggcgacgaggccagcgtcaacttcacaatcctgaaggtgacccctaatatcaccgtgtccgtgtccgatgttggatatccgggcaacgtgattatcaacgtgaagagcgacgtgaccggctcttatacggtcagagtcgggaaggtctccaagacagtcgacctggtcgagaacaagcagtctaaggtggtcttcaacggcctcaaccccggctcctacgacgtctttgtcgggtat

SEQ ID NO: 36116 - DNA, 261 bp, synthetic construct
  source 1..261: mol_type = other DNA
atcaattacaatagtgtcctcaagaatactatcgtaaaagtttttaaagctgattcctctgttgtaataaaccccataagtaatgtcacatataataacccaacctcaatcgagttcaacattattaatcgcactaaggtcacttacattgtgaaatctatctcgggcgagattgtggttaaaaacaccactgtgtccggcaactcagccgatatttcaaatctggccgttggcaattacatcattacgattgctaatgct

SEQ ID NO: 36117 - DNA, 243 bp, synthetic construct
  source 1..243: mol_type = other DNA
aacggatacgagcagagcaaagagtttaccatttctaaggctacaaacaatgttgaggtcaacgtagtgaatacactgttgcccgattcggtggcagttaatataaaggccgacgtggacggcgtgtacaatgttagcttcggggagttctccgtctgcgtcaatgttgagagtggcgagggcttcgccaagatcgacctgcctatggggatagactatatcacaaccaccagctttgctgac

SEQ ID NO: 36118 - DNA, 30 bp, synthetic construct
  source 1..30: mol_type = other DNA
gagctcattcactccggggccaaggaaatc

SEQ ID NO: 36119 - DNA, 42 bp, synthetic construct
  source 1..42: mol_type = other DNA
gggattaacccgctcttcgctaccatcggctctttccaactt

SEQ ID NO: 36120 - DNA, 291 bp, synthetic construct
  source 1..291: mol_type = other DNA
cctgccgctaacatcaacggcataccatctgaattgaaaggcgactacgtcgactcctccggccttccctacttctctgagatggacagttactacaatctgaggatgacacaggactatttcgatcatggttactacggggacgcccttgtgaataatacacagattgacaatcatcgctattcacccttcggggccaataccaccaacgacctggggatcgccgtcacgaccacatggctgcattcacttgcccaatttttcggcgactttgacattaaaacagtcgct

SEQ ID NO: 36121 - DNA, 171 bp, synthetic construct
  source 1..171: mol_type = other DNA
gactcctttggaatagttggcatcatcggcaacgtgctgtctggatttgcactacaagctaagactacactctctggtttccccaatgtatccatttctattggggaactgcaaatccccaacctgatctccggaggggtgacaggcgccttcctcgcggattcaggctct

SEQ ID NO: 36122 - DNA, 300 bp, synthetic construct
  source 1..300: mol_type = other DNA
ccagccgctgacctgaatctgctgcctaacgagatcaagggaagctacgtcgattcgacgggactaccatactttagtgaaatggattcctattataacctccgcctgaccgagaactacgtggaccacggctttgttggtgacatcaaatacgacaacaacggcactcagatggacatgcatagatatgctcctgatggtaacgtgatcaattacgagctcgggatcgtctacgtgacctccttccttcacgatatggtcaacaagttcattgggagtcacggcattagggaagtagct

SEQ ID NO: 36123 - DNA, 171 bp, synthetic construct
  source 1..171: mol_type = other DNA
ggatttgacacaacagtcggcattttcgggtctctccttaacctgctgtccttgcaatcggcagcccgggtggtcgggggttttcccaatgtcctcatatccgtggctgagatgcagatgccctccatgctgggcagcggaatggcttcccccttcctagcctccacaaac

SEQ ID NO: 36124 - DNA, 297 bp, synthetic construct
  source 1..297: mol_type = other DNA
ccagccgccgacctgaatatcctgcccaacgagatcaagggagactacgtggacagttccggcctcccttacttctctgagatggacagctactataacctgcggctcaccgaggactacgtcgatcatggatttgttggtgacatcgacaacggggacgggacataccgcgacatgcaccgttacgctcccgatggcaacattatcaattacgagctggggatcgtctaccttacctccttcctgcacgacatggccaacaagttcttcgggagttacaacattagggaggttgcg

SEQ ID NO: 36125 - DNA, 174 bp, synthetic construct
  source 1..174: mol_type = other DNA
ggcgtggacagcgtcctgggcattttcaactcactcctctccctcctgtcgttgcaatcagcagcccgggtggcaggtggatttcctaacgttttaatttctgttgccgaaatgcagatgcccaatctcctgggcgcgggcatgggcagcgcattcctggccaatactaacgga

SEQ ID NO: 36126 - DNA, 45 bp, synthetic construct
  source 1..45: mol_type = other DNA
acaccatacgagggcagcctgtccatcggcatttatggagacgat

SEQ ID NO: 36127 - DNA, 81 bp, synthetic construct
  source 1..81: mol_type = other DNA
tcttctgacgttggagttgtcaaggtggttgatgggaagctcgtggccgttggggttgggtcggcagttgtcaacgtgtct

SEQ ID NO: 36128 - DNA, 135 bp, synthetic construct
  source 1..135: mol_type = other DNA
tctgccgacgacctgaagatctacgtggacggcgttgccgcaattaaccctgtgacgtcaccgggcggcctcgatctactgtattccattgctgataagaatatcgccgacgtggacgcttccggcaaagtcatc

SEQ ID NO: 36129 - DNA, 33 bp, synthetic construct
  source 1..33: mol_type = other DNA
atcaaggagggaaccacatctataaccatcaca

SEQ ID NO: 36130 - DNA, 300 bp, synthetic construct
  source 1..300: mol_type = other DNA
gcccctgcccacgatctgaacgcttttaacgacgccgaatctaaggccctgtataccgacccaagcggcctgccctacttctccgagatggacagttattaccatttaagacttaccgagagctacgtggatacaggaatcctgggagacgaggtcatcaacgggacccagatggacatgcaccgcaacgctcccgatggccggccttgggactacactcccggaatcatttacctgacatcttacctttatgacctcgcaaatcagtacctgggccactactccgtcaaggaggttgct

SEQ ID NO: 36131 - DNA, 174 bp, synthetic construct
  source 1..174: mol_type = other DNA
aagggcgtggacagcgtcatcggtatcttttctcaagtgttcaacctgctctccctccaatctgcaagccaggtggtcggcggcttccctaacgtgctgatttctgtggccgagatgcagatgccagctatgctgggcgctggcatgacatctatgttccttgcttccactgat

SEQ ID NO: 36132 - DNA, 33 bp, synthetic construct
  source 1..33: mol_type = other DNA
aacaccgccaaggaggacggcggtgctatcttt

SEQ ID NO: 36133 - DNA, 54 bp, synthetic construct
  source 1..54: mol_type = other DNA
agttccaataagaccacctttaacatcttcattaaatccatcctggaggtttcc

SEQ ID NO: 36134 - DNA, 282 bp, synthetic construct
  source 1..282: mol_type = other DNA
cccgcagctgatttacccggaatcagcgatgagctgaaaggggactacatagatagctccggactgccctacttttctgagatggatagctactacaattaccggctcaccaacgactacgtcgaacacggatacgtcggcgatcaaattatcaatggctcagaatgggacatgcatcgctatgcgcccaccgggaaccagattaattacgaactcggaatcgtatatgtcacgtcattcttccacgacatgttctcggatcattccgtcaaagaagtggct

SEQ ID NO: 36135 - DNA, 30 bp, synthetic construct
  source 1..30: mol_type = other DNA
agccacacctaccccggctttttcgacacc

SEQ ID NO: 36136 - DNA, 171 bp, synthetic construct
  source 1..171: mol_type = other DNA
ggcatcgagggagtgaccggaatttttgggtctctgacgggacttctctccttgcaatcggctagccgggtggttggcggctttcctaacgtcctcgtctccgtcgcggaaatgcaactgccctctctcctcggtgctggcatgccctctgctttcctcgccaatactaat

SEQ ID NO: 36137 - DNA, 282 bp, synthetic construct
  source 1..282: mol_type = other DNA
ccggccgccgacctgaacatattgtccgacgatatgaaaggagaatatatcgactcctccgggctcccttacttctccgagatggattcatactacaactaccgactcacaaacgactacgtcgagcacggtttcgtcggtgacgaaatggttaatgggtccgaatgggatatgcatcgctacgcccctaccggcaacaagattaattacgaacttggcattgtctatataacctcatttttccactccttattccccgatcataccgtcaaggaggtggcc

SEQ ID NO: 36138 - DNA, 30 bp, synthetic construct
  source 1..30: mol_type = other DNA
gcccacaccttccccggcttctttgacaca

SEQ ID NO: 36139 - DNA, 177 bp, synthetic construct
  source 1..177: mol_type = other DNA
aggggcatcgatggagtcaccggcctgttcggcaacctgctgggccttctgagcctacaaagcgcttcccgggctattaacggcttccctaacgtgctggttagcgtggccgagatgcagcttccgtccttgttaggttctgggatgactagtgcctttctcgctgctacggattct

SEQ ID NO: 36140 - DNA, 297 bp, synthetic construct
  source 1..297: mol_type = other DNA
ccagccgctgatctgaatatcctgcccaacgagatcaagggcgactacgtcgatagctccggcctgccgtatttttctgaaatggactcctactacaatctgaggctcactgaaaactacgtgaacaacgggcacgtcggggacattgactacggcaatggaacccagatggacatgcaccgctatgctcctgacggcaacgtcatcgactacgagttcgggattgtgtacataaccagttttctccacgacattgccaaccagtactttggctctcatggaatccgcgaagttgca

SEQ ID NO: 36141 - DNA, 177 bp, synthetic construct
  source 1..177: mol_type = other DNA
cgaggcattgacggcgtgcttggaatctttggcacactcttcggcctcctgtctctgcaaagtgcaggcaccgtggtcggtggcttccctaacgtgctgatctccgtcgccgagatgcagatgcccaacctgctcggagctggcatggggtccgccttcctggccaattctaacgga

SEQ ID NO: 36142 - DNA, 291 bp, synthetic construct
  source 1..291: mol_type = other DNA
cccgctgcggacctcacaatcctgccatccgacgtgaaaggagattacgtggatagtaccggactcccatacttttctgaaatggactcctattacaacctacgactgaccgagaattacattgaccacggctacgcgggtgacaccatcatcaacaacaccgaagtcgacatgcatagactcgcgccggagggcgttaatgtctcctacgaactgggcataagctatgtgactgctcttttgcattccctggccgggaacttcggcgattattccgtgaaggaggtggcc

SEQ ID NO: 36143 - DNA, 174 bp, synthetic construct
  source 1..174: mol_type = other DNA
gggttcgacttccttaccggaattttctccaccctcatctccatgttctccctacaaagcgcgtcttccgcggttggaggattccctaatgtgatgatctctgtggccgagatgcaggctccttctctgctggggtccgggatgggcagcgcctttctcgcaaacagcaatggt

SEQ ID NO: 36144 - DNA, 297 bp, synthetic construct
  source 1..297: mol_type = other DNA
ccggcagctgacttgaacattctgccaaacgaaatcaagggggactacgtggatagctccggactgccttacttctcggagatggactcctactacaatctacggttaaccgagaactacgtggaccacggctacgttggcgatatcaaatacgacaacggaacacagatggacatgcaccgctacgctcccgatggcaatgtgatcaactatgagctggggattgtctacgtcactagcttcatccacgacatcgtgaatcagttcttcggccatcacgggattagggaagttgca

SEQ ID NO: 36145 - DNA, 174 bp, synthetic construct
  source 1..174: mol_type = other DNA
ggagtggacaccgtgatcggaatcttcggctccctgctcaaccttctcagcctccagagcacagccagggtagttggaggtttccccaatgtcctcatttccgtggccgagatgcagatgcctaacctgcttggtgccggcatgggcagtgccttcctggcgaactctaacggc

SEQ ID NO: 36146 - DNA, 282 bp, synthetic construct
  source 1..282: mol_type = other DNA
cccgcagcggatcttaacgcaattcctgactcggcgaggggcgactacgtggactcttccgggctgccctactttagtgaaatggattcctattataacttacgactgaccgaggactacgtggaccacgggttcgtcggcgacgagaaaattaacggttcagaatgggacatgcaccgctacgccccgactggtaacgagattaactacgagttgggtatcgtctacgtgacctcattcctccactccatttttggcgaccatagtgttcgcgaaatagct

SEQ ID NO: 36147 - DNA, 30 bp, synthetic construct
  source 1..30: mol_type = other DNA
gcccacacattccccggcttctttgacacc

SEQ ID NO: 36148 - DNA, 174 bp, synthetic construct
  source 1..174: mol_type = other DNA
gggattggaggagtgactgggatcttcggatctctcaccgggctgttgtctttacaatctgcgagtcgcaccatcggcggcttccctaacgtcctcattagcgtggctgagatgcagatgcccaacctgctgggtggaggaatggccgcccctttccttgcaaatactaacggg

SEQ ID NO: 36149 - DNA, 33 bp, synthetic construct
  source 1..33: mol_type = other DNA
tacttcaacaccgagaccgaactggctgacgat

SEQ ID NO: 36150 - DNA, 108 bp, synthetic construct
  source 1..108: mol_type = other DNA
cctgcagttggtatcagtcccgacggatacgacttcaccaacgccagcgaggccgtgctctccggcaaacccctggatagtatcgattctctccttcctgttgctgtc

SEQ ID NO: 36151 - DNA, 54 bp, synthetic construct
  source 1..54: mol_type = other DNA
atcacccctctctgggaagctattagcggttgtactgaccttctgtccatcccc

SEQ ID NO: 36152 - DNA, 294 bp, synthetic construct
  source 1..294: mol_type = other DNA
caggctgccgacatcggtggtgtcccgaatcaacttaaggccaattacatcgacgccgatggcctcccttacttttccgaaatggacagctacttcaactatcggatgacccaggattatatggaccatggttatcttggcgacaccctggtcaacggctccgaatgggacatgcattcatactacccaactggtcgagacgtgtcaagctaccaaccgatgattgcttacgtcacatctttcctgcatgggatcgtgaacatgttccaaaacatgccacttaaggaagttgcc

SEQ ID NO: 36153 - DNA, 33 bp, synthetic construct
  source 1..33: mol_type = other DNA
agccacacctttgccggcttctttgacaccgac

SEQ ID NO: 36154 - DNA, 168 bp, synthetic construct
  source 1..168: mol_type = other DNA
ggcttcgatggcatcctgaacgctatcggcgggcttactgggggcttttcactgcaaagtgccgctaacgatgtttggcccaacgtcttcatttccgtggccgagatgcagatccccaagctcctatatggtggactgcctggtgcattccttgccaataccaacgga

SEQ ID NO: 36155 - DNA, 282 bp, synthetic construct
  source 1..282: mol_type = other DNA
cctgcagccgatctgaacgcaatccctgactcggcacgcggcgactacgtcgattctagcggtctgccgtacttctccgaaatggactcctactataacctgcgcctgaccgaggactatgtggaccacgggttcgtcggcgacgaaaagataaacggatctgaatgggatatgcaccgttacgcgccgactgggaatgaaattaattacgaacttggcatcgtatatgttacctctttcctgcactccatcttcggagatcattccgtccgagaaatagct

SEQ ID NO: 36156 - DNA, 30 bp, synthetic construct
  source 1..30: mol_type = other DNA
gcccacaccttccccggcttctttgacact

SEQ ID NO: 36157 - DNA, 174 bp, synthetic construct
  source 1..174: mol_type = other DNA
gggattgagggcgtgaccggcatcttcggctcactgaccggactgctctctttacaatcagcttcccgaaccatcggcggcttccctaatgtgctcatttctgtcgcggagatgcagatgcccagcctcctcggtagtggcatgacctccgcatttctcgccaacacaaacggc

SEQ ID NO: 36158 - DNA, 297 bp, synthetic construct
  source 1..297: mol_type = other DNA
acacctgccgctgatcttaatttcctggacggggacatgaagggtgacttcgtcgactcctctggcctgccgtacttctcggagatggactcatactacaatctgaggctcaccgaggattacctcgaccacgggttcgttggagatatccaggagaacggccataacgtggatatgcaccgttatgcaccagacggcaataacatctcctatgaactgggaattgtttatgtcacttctttcttccacgacatggccaacaagtacataggggaattctccgttcgcgaagtagcc

SEQ ID NO: 36159 - DNA, 171 bp, synthetic construct
  source 1..171: mol_type = other DNA
ggcatcgatgggatactcgggatattcaatagcctgctgtcccttctctccctgcaatccgcctctcgctccataggcgggtttcctaacgtgctgatctccgttggcgagatgcagatgcccaatctcctaggatctggcatgggttctgccttcctcgcctcaacggac

SEQ ID NO: 36160 - DNA, 30 bp, synthetic construct
  source 1..30: mol_type = other DNA
agccacaccttcgccggctttttcgacacc

SEQ ID NO: 36161 - DNA, 174 bp, synthetic construct
  source 1..174: mol_type = other DNA
aagggagtcgacggggtcctgggaatcttcggcaatctcaccggcctgctgtccctgcaatcggcaagccgggttgtcggtggatttcccaacgtgctggtgtccgtggctgagatgcagcagccttccatgctgggcgccgggatgaactctatgttcctcgcctctacaaat

SEQ ID NO: 36162 - DNA, 297 bp, synthetic construct
  source 1..297: mol_type = other DNA
cctgctgctgacctgccaatgctgggcgacgacattaaggccaactacgtggacagctccggcatgccttacttctccgagatggatagctattacaatctgcggctcactgaaaattacatcgatcacggacacgtcggagacgaaatcgtgaacaactctgcctgggacatgcatcgttacgcgccggatgggaataagatcaactacgagctcggcattgtctacctcaccgactggatgcacaatatggccaacagttttttcggcggcgatcactcggttagggaagtagca

SEQ ID NO: 36163 - DNA, 30 bp, synthetic construct
  source 1..30: mol_type = other DNA
gcccacaccttccccggcttctttgacacg

SEQ ID NO: 36164 - DNA, 171 bp, synthetic construct
  source 1..171: mol_type = other DNA
ggagtcgacggagtggtcggaatctttggctccctgaccggactgttgtccctccaatccgcctcaaccgtagtcgggggctttcccaatgttcttatctctgtagctgaaatgcaaatccctaatatggttggcgccggcatgaatgcaatgttcctcgcaaacacaaac

SEQ ID NO: 36165 - DNA, 51 bp, synthetic construct
  source 1..51: mol_type = other DNA
gaggtgtcttttgatgaagccggcaactactctgtggtcgttctcttcgac

SEQ ID NO: 36166 - DNA, 162 bp, synthetic construct
  source 1..162: mol_type = other DNA
tactattcctcatccaagaccgttaatgttgaggttgtggacaaagtgctcaataccactgttgtggtcgacgatgtcgtctgtgttgtggacgaatttgtggtactgaatgcctccgtgttcgacgaaaatggcgacctggttagcaatgggaatgttact

SEQ ID NO: 36167 - DNA, 30 bp, synthetic construct
  source 1..30: mol_type = other DNA
gccggcaattacaacgtcgtggctagcttc

SEQ ID NO: 36168 - DNA, 51 bp, synthetic construct
  source 1..51: mol_type = other DNA
cgcaccgcctacatcgtgatcaataagctgaaacttagctccaacattaca

SEQ ID NO: 36169 - DNA, 174 bp, synthetic construct
  source 1..174: mol_type = other DNA
gatgagatcaacatcatttctaatgtgatcagcgataacctcaccgtcaacgacggggtcgccgtgttcctgatcaataagaccaagcgctacgtagtcaatatatccgacaaccaggctattctggacgtgatctttaatcaatcaggcaactacatcgtggacgtctccttc

SEQ ID NO: 36170 - DNA, 69 bp, synthetic construct
  source 1..69: mol_type = other DNA
tgttctgttatcgtcaacgtgttcgacaagttctcccggatatccatttctgatctgaaggcttacgtg

SEQ ID NO: 36171 - DNA, 111 bp, synthetic construct
  source 1..111: mol_type = other DNA
ataagcgtactcgtttttgacgcaaaggggaatatgattgacacgggaatcctgaacatcattattaacgacaagatctactctattgacctctctaaggactatcctctc

SEQ ID NO: 36172 - DNA, 123 bp, synthetic construct
  source 1..123: mol_type = other DNA
tcttccgtgatcgaggtttgcaagaaagacctcgaggttaattttaagatcgacgacatttattacggcgaggacctgaccatcaacgtgcagagcaacgacgacgccgacgtcgagatcatt

SEQ ID NO: 36173 - DNA, 36 bp, synthetic construct
  source 1..36: mol_type = other DNA
aatgccggcaaatacgagtcaatcctgtacttcaac

SEQ ID NO: 36174 - DNA, 213 bp, synthetic construct
  source 1..213: mol_type = other DNA
aagaccgccaacttcaacgtcaacaagcggcagctttccgctgagttcaaggtggagaacaagacattctttatctatctgagccagtctatcaatgacacactgttagtaaagatcaacaaccaggattacgtgatctacctcaccaacggcgaggccaagctcaccctggacaacttcgatgttggatcctatcttgctgttgtaaactat

SEQ ID NO: 36175 - DNA, 69 bp, synthetic construct
  source 1..69: mol_type = other DNA
gagaactacagcttcgaaattcccaaaatcaagaccaagatcctagtaaataatctggtcaagtattac

SEQ ID NO: 36176 - DNA, 180 bp, synthetic construct
  source 1..180: mol_type = other DNA
gagctgacactgattgatgagaacggcaactatctggctaataagtccgtgattatatcaatatccggtgtcaactacacccggatcactgacgagaaggggaaggcctctatcggaatcaaccttaatagcgggacctacgctcctgtagtctacttcgagggcgatggcgagtttggt

SEQ ID NO: 36177 - DNA, 219 bp, synthetic construct
  source 1..219: mol_type = other DNA
agctctaagaactcctccatggtcatcgtcaaatccaccattgaggccaacaatctggtcaagtgctataggaacgctagccagttttacgccacaattctggactacaacgggaacatcgtgaagaatcaagtcattagtttcaacatcaacggagtgttctacaaccggactaccaacgagaatggcgttgtcaagctgaatatcaatataagtttg

SEQ ID NO: 36178 - DNA, 114 bp, synthetic construct
  source 1..114: mol_type = other DNA
ggcgagtacatcatcactaccctcaacctggtgaccggggagtcggcatcaaacaacataacggtactgtccctgatcgtcgagaataagaatctggttaaatactataggaac

SEQ ID NO: 36179 - DNA, 117 bp, synthetic construct
  source 1..117: mol_type = other DNA
cagtactgcgtcaagattctggatgaccagggcaacccggttggcgccggcgtgacggttcgatttaatatcaacggagtgttctatgagaggcagaccaacgaaagcggaatcgtt

SEQ ID NO: 36180 - DNA, 174 bp, synthetic construct
  source 1..174: mol_type = other DNA
gagtacataatcactgccgagtacaaaggctgctgcgtttccaatgagatcactattaagcccatcctgaccgccaacgacctgaccaagcgatacggtgacagcgaccagtttgtcgccacactcgtggatgggcagggcaaggcttatgccggccaatacgtcgagttcaac

SEQ ID NO: 36181 - DNA, 60 bp, synthetic construct
  source 1..60: mol_type = other DNA
aacggcgtgttctacaaacggctcaccgatgacaatgggcaggccaagctgaacatccgc

SEQ ID NO: 36182 - DNA, 48 bp, synthetic construct
  source 1..48: mol_type = other DNA
acatcttcctttgggggtttctcgacgagtaacgccgtgaagatcgtg

SEQ ID NO: 36183 - DNA, 93 bp, synthetic construct
  source 1..93: mol_type = other DNA
gacctgttctctgacatcggcaacacaagcgaatccgtgaccgaggacgatatacaacaaatgcaaagcgtggtcaagtctgccatgaataag

SEQ ID NO: 36184 - DNA, 54 bp, synthetic construct
  source 1..54: mol_type = other DNA
accctgatccgcaaagatttaaattcaaatacaggcaaggacttcactggcgca

SEQ ID NO: 36185 - DNA, 48 bp, synthetic construct
  source 1..48: mol_type = other DNA
atgaatgcgttgaactccaaatacgaaactatccgatacgatgatggg

SEQ ID NO: 36186 - DNA, 294 bp, synthetic construct
  source 1..294: mol_type = other DNA
caggccgctgatattggtggcgtccccaacgaaatcaaggccaactacatggatgcagacggcctcccttacttctccgagatggactcctactttaacctgagaatgacacaggactacatggaccacggctactttggcgacaccctggtcaacggctctggctgggacatgcactcttattacccttcgggacgggacgtcggctcatatcaaccaatgatcgcctatgtgacctctttcctctatgggatcgtgaatatgtttcatgatatgtcccttaaggaagttgcc

SEQ ID NO: 36187 - DNA, 30 bp, synthetic construct
  source 1..30: mol_type = other DNA
agccacacattcgccggcttctttgacacc

SEQ ID NO: 36188 - DNA, 168 bp, synthetic construct
  source 1..168: mol_type = other DNA
ggcatcggaggcattctggacgcaatcaacggactcacgggcgggttttccctgcttagtgcctctcgggacgtttggccgaatgtctttgttagtgttgctgagatgcagaagcccaacatcctggccggcggtctgcctggcgccttcctggctaataccaatgga

SEQ ID NO: 36189 - DNA, 36 bp, synthetic construct
  source 1..36: mol_type = other DNA
ctgaagaatggaggcgccaacgtgaaaaccaaggcc

SEQ ID NO: 36190 - DNA, 33 bp, synthetic construct
  source 1..33: mol_type = other DNA
ctgcagacaatattcaagacttgctcgatagga

SEQ ID NO: 36191 - DNA, 297 bp, synthetic construct
  source 1..297: mol_type = other DNA
cccgcagctgatctgcctagcatgggggacgatatcaaggcctcctacgtggactcttccgggctgccttacttctccgagatggactcttattataacctgcggctcaccgagaatttcgccaaccatggacacgttggagacaagatcatcaacggcagcgcttgggatatgcatcgttacgcaccagacggggacgagattaattacgagctgggcatcgtctacattacaaactggctgcacgacgtcggcaacagctttttcggcgctaaccactctttaagagaagttgca

SEQ ID NO: 36192 - DNA, 36 bp, synthetic construct
  source 1..36: mol_type = other DNA
agccacaccttccccggcttctttgatactttcgat

SEQ ID NO: 36193 - DNA, 171 bp, synthetic construct
  source 1..171: mol_type = other DNA
ggctttaacggggtctttggcattttcggttccctcacgggcctcctgagtctacaatcagcgtcccgggttgttggggggttccccaatgtgttaatttctgtagcggagatgcagattccctctatgctgggcggtggcatgaactccatgtttctcgccaatacgaat

SEQ ID NO: 36194 - DNA, 294 bp, synthetic construct
  source 1..294: mol_type = other DNA
caggccgccgatattcatggaatcccaaacgagattaaagcagattatgtggacgctaatgggctgccgtacttttctgagatggattcctacttcaacctccggatgacccaggactacatggaccacgggtacttcggcgacacacttgtaaacgggtctggctgggacatgcactcctactaccctaccggccgcgaggtcgggaattaccagcccatgatcgcctacgtcacatctgctctctacggatttatcaatatgtttaaggagatgagtctcacggaagtggcc

SEQ ID NO: 36195 - DNA, 30 bp, synthetic construct
  source 1..30: mol_type = other DNA
agccacacctacgccggctttttcgacacc

SEQ ID NO: 36196 - DNA, 171 bp, synthetic construct
  source 1..171: mol_type = other DNA
ggcgtcggtggcataatgaacgccatcgggggtctgaccggcggactttccctgcaaagtgcttccaccgtcaacgtctggcccaatgtgcttgtctcggtagcagagatgcaaattccaaccgttctgagtggcggactcgccggggcattcctcgcctccaccaatgga

SEQ ID NO: 36197 - DNA, 117 bp, synthetic construct
  source 1..117: mol_type = other DNA
gtgggcagtcctacctctctcgggcccggcgaagccatcagcgctctattctcggcaattggcaagggaggcaagcacctgacatatgaggagatgctggtctacaactctcggctg

SEQ ID NO: 36198 - DNA, 45 bp, synthetic construct
  source 1..45: mol_type = other DNA
ggtattaaccctctgtttgcaacgatcgggtcgctacaactgttc

SEQ ID NO: 36199 - DNA, 183 bp, synthetic construct
  source 1..183: mol_type = other DNA
attatcgataacaaccttgtagttgacgccaaagtttttaatcaatacggctaccttgttcctggaggaaacgtgctgttccacgtggatggcgtggattataacgtggtcgttaagaatggaattgccaagctgagcctgcctatcaacaagaacaatttcgaaatctccgctgaatacacc

SEQ ID NO: 36200 - DNA, 42 bp, synthetic construct
  source 1..42: mol_type = other DNA
aacctaagcacagtgcagactactttcgacctcccttttagc

SEQ ID NO: 36201 - DNA, 162 bp, synthetic construct
  source 1..162: mol_type = other DNA
ctcaccctcatctatgacaccaacctcaaccccgtgaacttcactgctctcgtgataaatcaatacggatacggggtctcggtcggaaacgtcaccttcacaattcaaaataagaactacaccgtgaacatcaaagacggcaaggcctctatactgcaccaa

SEQ ID NO: 36202 - DNA, 177 bp, synthetic construct
  source 1..177: mol_type = other DNA
ggccagctgcttaaaaagtccatggttaaattcaagttcatgaagaaaacctacaaagtaaaaacaaacaagaagggcaaagccgtgctcaaaattaagaacaagttcaagtctgggaagtaccccatctataccaagtccggaagcctgaaggtcaagaacatcatcaagataaag

SEQ ID NO: 36203 - DNA, 294 bp, synthetic construct
  source 1..294: mol_type = other DNA
gccgagacctacaacatttccgccgtgccaaacgacatgcaggacttctaccgggatgcttctggcctgccttattttagcgaaatggactcctactacaactaccgcctgactaacaactacgtcgagaaagggattctcggcgacagcgtggtcaacggaaccaactgggacgaacacagctattaccctaatggcagagttgtggactacccaccgctcatcacctacgtgacaacaatcttctatcaaatcgccaatatgtttaaggatatcccccttaagaatgttgcc

SEQ ID NO: 36204 - DNA, 174 bp, synthetic construct
  source 1..174: mol_type = other DNA
ggcgtcggtagcatctctgagactattattaactttatcggtgtcaacgacgtgcagagccttgcacaaactgcgggctctttccccaacgtgtacatctccgtctccgaaatgcagatccctgatttcattacgagcggcgtgtcggccctgattgctaaccaaggttcactg

SEQ ID NO: 36205 - DNA, 300 bp, synthetic construct
  source 1..300: mol_type = other DNA
acccctgccgccgacctgaactccctagacgccgatggcaaggctctttacactgacgcttccgggctgccctacttctctgagatggacagctactacaactaccgacttaccaacgactacgtggaccacggctatgtcggcgacgagatggttaatggttctgaatgggatatgcaccgttacgctccggacggcaacaagattaactacgagttgggcatcgtgtacctgacttcctggatgcacgacatggccaacaatttcctgggatggcatatgagcgtcaaggaggtagca

SEQ ID NO: 36206 - DNA, 171 bp, synthetic construct
  source 1..171: mol_type = other DNA
ggggttgatggtgtcttaggtatcttctcacaagtctttgggttgctgaacctgcaatccgcctctgtggtggtcggcggcttccccaatgttcttatttccgtcgccgagatgcaaatgccctctatgcttggcgccggcatgacgtctatgtttctcgcttccaccgat

SEQ ID NO: 36207 - DNA, 297 bp, synthetic construct
  source 1..297: mol_type = other DNA
ccagctgccgacctgaacatgctcgacgattctatcaagtctgaatatgtcgatagcagcgggctgccatatttctccgagatggactcctattacaattataggctgaccaacgactacgtggagcacggctttgtcggcgacgagatggtcaacggcagcgaatgggacatgcatcggctggcacctacgggtaaccagatcaactacgagctcggcattgtctggcttacttcgtggctgcacgatgtggccaactccttcctgggcggaaattactccgtcaaggaggttgca

SEQ ID NO: 36208 - DNA, 180 bp, synthetic construct
  source 1..180: mol_type = other DNA
caaggggttgatggggtcctcggcatcttcggccgggtgctcaacctcctgaacttacaatcggcgtctgtcgtggtcggaggattccccaacgtgctgatcagcgtggccgagatgcagacacctagcatgttgggcgccggaatgacttccctgttcctggctaacaccaacggagcc

SEQ ID NO: 36209 - DNA, 297 bp, synthetic construct
  source 1..297: mol_type = other DNA
cctgccgccgacctgaacggactggatgctgacggcaaagctctgtacactgacgcaagcgggctgccatacttctccgagatggactcctactacaattaccgacttaccaacgactatatcgaccatggctttgtcggcgacgagatggtcaatgggtcagaatgggacatgcaccgctacgcccctgatggcaacaagatcaactatgagctcggcattgtctacctgacaagctggatgcacgacatggccaacaacttccttggatggcacatgtctgtgaaggaggtagct

SEQ ID NO: 36210 - DNA, 174 bp, synthetic construct
  source 1..174: mol_type = other DNA
cggggcgtcgacggcgttatcggcatcttctcacaagtttttggactgctcaatttacaaagcgcctctgtggtggtcggaggattccccaacgtcctaatatcggtagccgagatgcagatgccttccatgctgggcgccgggatgacaagcatgttcctggctaacaccaac

SEQ ID NO: 36211 - DNA, 297 bp, synthetic construct
  source 1..297: mol_type = other DNA
ccagccgccgacctgaactacttcgacgaggaaggcaaggctctgtacaccgattcctctgggctgccatatttctcggaaatggactcctactacaattatcggctcacaaacgactacgtggaccacggatacgccggcgatgagatgcgcgatggcgtggcttgggacatgcaccgctattctcctgacggcgagacagtgaactatgagctggggatcacctacgttacgtcatggctgcatgacatggcaaacaagtacttcggcggaaacttcagcgtcaaggaagtagcg

SEQ ID NO: 36212 - DNA, 174 bp, synthetic construct
  source 1..174: mol_type = other DNA
ggtgttaatggagttgttggtatcttctccaacgtgtttaacctcctcaatctgcaatcagctagcgtagtcgtcggcggctttcccaacgtactgatcagcgtggccgaaatgcagatgccttcaatgcttggctccggcatgacctccatgtttacggcttccaccgatgac

SEQ ID NO: 36213 - DNA, 297 bp, synthetic construct
  source 1..297: mol_type = other DNA
cctgccgctgacctcaactacttcgacgaccagggcaaggccctgtacaccgactccctgggactgccatacttctccgagatggacagctactacaactaccgcttgacggacgattacgtggaccatggctacgctggcgatgagatgcgggacggagtagtctgggacatgcaccgcaactctcccgatggctttgaacttaattacgagctggggatcgcctacgtgaccgcctggctgcacgatgtggcaaacaactatttcggcggctcgtttagtgttaaggagattgcg

SEQ ID NO: 36214 - DNA, 177 bp, synthetic construct
  source 1..177: mol_type = other DNA
aggggcgtggacggcgtcactgggatcttcggccgagtttttggtctgctgaacttgcaaagtgctagtgttgtagttgggggattccccaacgttctgatttctgtagccgagatgcagatgccttctatgctcggctccggcatgacctccatgttcacggccacgacatctgat

SEQ ID NO: 36215 - DNA, 36 bp, synthetic construct
  source 1..36: mol_type = other DNA
ctgaataacggcgtcggggacgtgaagaccaaagcc
